(19) United States
(12) Patent Application Publication
(10) Pub. No.: US 2022/0186216 A1
(43) Pub. Date: Jun. 16, 2022

(54) Compositions and Methods for Treatment of Disorders Associated with Repetitive DNA

(71) Applicant: Vertex Pharmaceuticals Incorporated, Boston, MA (US)

(72) Inventors: Gregoriy Aleksandrovich Dokshin, Boston, MA (US); Matthias Heidenreich, Boston, MA (US); Norzehan Abdul-Manan, Boston, MA (US); Lu Gan, Boston, MA (US); Jianming Liu, Boston, MA (US); Guoxiang Ruan, Boston, MA (US); Jesper Gromada, Boston, MA (US); John Patrick Leonard, Cambridge, MA (US); Zachary Michael Detwiler, Cambridge, MA (US); Peter Thomas Hallock, Cambridge, MA (US); David Esopi, Boston, MA (US); Giselle Dominguez Gutierrez, Boston, MA (US)

(73) Assignee: Vertex Pharmaceuticals Incorporated, Boston, MA (US)

(21) Appl. No.: 17/681,138

(22) Filed: Feb. 25, 2022

Related U.S. Application Data
(63) Continuation of application No. PCT/US2020/048000, filed on Aug. 26, 2020.
(60) Provisional application No. 62/993,616, filed on Mar. 23, 2020.
(60) Provisional application No. 62/892,445, filed on Aug. 27, 2019.
(60) Provisional application No. 63/067,489, filed on Aug. 19, 2020.

(51) Int. Cl. C12N 15/11; C12N 9/22; C12N 15/113

(52) U.S. Cl. CPC C12N 15/111; C12N 9/22; C12N 15/113; C12N 2310/20; C12N 2320/34; C12N 2320/31; C12N 2320/32; C12N 2320/33; C12N 2320/11

(57) ABSTRACT

Compositions and methods for treating excising trinucleotide repeats, as well as for treating diseases and disorders associated with trinucleotide repeats are encompassed.

[0001] This application is a continuation of International Application No, PCT/US2020/048000, filed Aug. 26, 2020; which claims the benefit of priority to U.S. Provisional Application No. 62/892,445, filed Aug. 27, 2019; U.S. Provisional Application No. 62/993,616, filed Mar. 23, 2020; and U.S. Provisional Application No. 63/067,489, filed Aug. 19, 2020; all of which are incorporated by reference in their entirety.

### REFERENCE TO SEQUENCE LISTING SUBMITTED VIA EFS-WEB

[0002] This application includes an electronically submitted sequence listing in .txt format. The .txt file contains a sequence listing entitled “2022-02-25 01245-0002-00PCT_ST25.txt” created on Feb. 25, 2022 and is size 11.7 MB in size. The sequence listing contained in this .txt file is part of the specification and is hereby incorporated by reference herein in its entirety.

### INTRODUCTION AND SUMMARY

[0003] Repetitive DNA sequences, including trinucleotide repeats and other sequences with self-complementarity, tend to show marked genetic instability and are recognized as a major cause of neurological and neuromuscular diseases. In particular, trinucleotide repeats (TNRs) in or near various genes are associated with a number of neurological and neuromuscular conditions, including degenerative conditions such as myotonic dystrophy type 1 (DM1), Huntington's disease, and various types of spinocerebellar ataxia.

[0004] CRISPR-based genome editing can provide sequence-specific cleavage of genomic DNA using an RNA-targeted endonuclease and a guide RNA. In mammalian cells, cleavage by an RNA-targeted endonuclease is most commonly repaired through the non-homologous end joining (NHEJ) pathway, which is DNA-dependent serine/threonine protein kinase (DNA-PK) dependent. NHEJ repair of an individual double strand break near a trinucleotide repeat or self-complementary region does not typically result in excision of the following trinucleotide repeat or self-complementary region, meaning that applying genome editing to ameliorate problematic trinucleotide repeat or self-complementary genotypes is non-trivial. Providing a pair of guide RNAs that cut on either side of the trinucleotide repeat or self-complementary region results in excision to some extent through NHEJ, but the breaks are simply resealed without loss of the intervening repeats or self-complementary sequence in a significant number of cells. Accordingly, there is a need for improved compositions and methods for excision of repetitive DNA sequences.

[0005] Disclosed herein are compositions and methods using an RNA-targeted endonuclease, at least one guide RNA that targets the endonuclease to a target in or near trinucleotide repeats or a self-complementary region to excise repeats or self-complementary sequence from the DNA, and optionally a DNA-PK inhibitor. Such methods can ameliorate genotypes associated with trinucleotide repeats, among others. It has been found that inhibition of DNA-PK in combination with cleavage of DNA in or near repetitive sequences provides excision of the repetitive sequences at increased frequency. Also disclosed are guide RNAs and combinations of guide RNAs particularly suitable for use in methods of excising trinucleotide repeats, with or without a DNA-PK inhibitor.

[0006] Accordingly, the following embodiments are provided.
[0007] Embodiment 1 A composition comprising:
[0008] i) a guide RNA comprising a spacer sequence, or a nucleic acid encoding the guide RNA, comprising:
   [0009] a. a spacer sequence selected from SEQ ID NOs: 4018, 4010, 4002, 4042, 4034, 4026, 3954, 3946, 3994, 3914, 3978, 3906, 3898, 3938, 3922, 3858, 3850, 3882, 3826, 3818, 3842, 3794, 3786, 3762, 3810, 3746, 3778, 3738, 3770, 3722, 3754, 3690, 3666, 3658, 3634, 3586, 3546, 3530, 3642, 3514, 3506, 3490, 3618, 3610, 3602, 3578, 3442, 3522, 3410, 3378, 3434, 3370, 3426, 3418, 3394, 3386, 3330, 3354, 3346, 3314, 3930, 3890, 3834, 3802, 3706, 3698, 3682, 3674, 3570, 3554, 3538, 3498, 3482, 3458, 3474, 3450, 2667, 2666, 2650, 2642, 2626, 2618, 2706, 2690, 2682, 2610, 2674, 2658, 2602, 2594, 2634, 2554, 2546, 2586, 2538, 2578, 2570, 2522, 2498, 2490, 2466, 2458, 2450, 2514, 2506, 2418, 2482, 2474, 2394, 2442, 2434, 2370, 2378, 2354, 2346, 2338, 2314, 2298, 2282, 2274, 2266, 2330, 2258, 2322, 2242, 2234, 2290, 2250, 2218, 2226, 2210, 2194, 2146, 2138, 2122, 2106, 2098, 2090, 2130, 2114, 2034, 2026, 2058, 2050, 2042, 1914, 1786, 1778, 1770, 1842, 1738, 1706, 1690, 1746, 1714, 1650, 1642, 1610, 1586, 1562, 1546, 1578, 1538, 1378, 1370, 1922, 1898, 1906, 1794, 1762, 1698, 1674, 1722, 1362, 1450, 2202, 2178, 2170, 2162, 2018, 2010, 1890, 1962, 1946, 1850, 1818, 1658, 1634, 1602, 1554, 1434, 1426, 1338, 1346, 1978, 1994, 1986, 1970, 1938, 1930, 1810, 1834, 1826, 1802, 1626, 1594, 1514, 1498, 1490, 1482, 1474, 1458, 1442, 1418, 1410, 1402, 1394, and 1386; or
   [0010] b. a spacer sequence selected from SEQ ID NOs: 3330, 3914, 3418, 3746, 3778, 3394, 4026, 3690, 3794, 3386, 3938, 3682, 3818, 3658, 3722, 3802, 3858, 3514, 3770, 3370, 3354, 4010, 2202, 1706, 2210, 2170, 1778, 2258, 2114, 2178, 1642, 1738, 1746, 2322, 1770, 1538, 2514, 2458, 2194, 2594, 2162, and 2618; or
   [0011] c. a spacer sequence selected from SEQ ID NOs: 3746, 3778, 3394, 3386, 3938, 3818, 3722, 3858, 3370, 1706, 2210, 2114, 1538, and 2594; or
   [0012] d. a spacer sequence selected from SEQ ID NOs: 3330, 3746, 3778, 3394, 4026, 3386, 3938, 3818, 3722, 3802, 3858, 3514, 3770, 3370, 2202, 1706, 2210, 1778, 2114, 1738, 1746, 2322, 1538, 2514, 2458, 2194, and 2594; or
   [0013] e. a spacer sequence selected from SEQ ID NOs: 3330, 3914, 3418, 3746, 3778, 3394, 4026, 3690, 3794, 3386, 3938, 3682, 3818, 3658, and 3722; or
   [0014] f. a spacer sequence selected from SEQ ID NOs: 2202, 1706, 2210, 2170, 1778, 2258, 2114, 2178, 1642, 1738, 1746, and 2322; or
   [0015] g. a spacer sequence selected from SEQ ID NOs: 3778, 4026, 3794, 4010, 3906, 3746, 1778, 1746, 1770, 1586, 1914, and 2210; or
   [0016] h. a spacer sequence selected from SEQ ID NOs: 3378, 3354, 3346, 3330, 3314, 2658, 2690, 2546, 2554, 2498, and 2506; or
   [0017] i. a spacer sequence selected from SEQ ID NOs: 3330, 3314, 2658, 2690, 2554, and 2498; or
   [0018] j. a spacer sequence selected from SEQ ID NOs: 3314, 2690, 2554, and 2498; or
   [0019] k. a spacer sequence selected from SEQ ID NOs: 3914, 3514, 1778, 2458, 3858, 3418, 1706, and 2258; or
   [0020] l. a spacer sequence selected from SEQ ID NOs: 3914 and 3418; or
   [0021] m. SEQ ID NO: 3938; or
   [0022] n. a spacer sequence selected from SEQ ID NOs: 3916, 3420, and 3940; or
   [0023] o. a spacer sequence comprising at least 17, 18, 19, or 20 contiguous nucleotides of any one of the spacer sequences of a) through n); or
   [0024] p. a spacer sequence that is at least 99%, 98%, 97%, 96%, 95%, 94%, 93%, 92%, 91%, or 90% identical to any one of the spacer sequences of a) through o); or
[0025] ii) a pair of guide RNAs comprising a first and second spacer sequence, or one or more nucleic acids encoding the pair of guide RNAs, comprising:
   [0026] a. a first and second spacer sequence selected from SEQ ID NOs: 2202 and 3418; 2202 and 3370; 2202 and 3514; 2202 and 3658; 2178 and 3418; 2178 and 3370; 2178 and 3514; 2178 and 3658; 2170 and 3418; 2170 and 3370; 2170 and 3514; 2170 and 3658; 2162 and 3418; 2162 and 3370; 2162 and 3514; 2162 and 3658; 2202 and 4010; 2202 and 4026; 2202 and 3914; 2202 and 3938; 2202 and 3858; 2202 and 3818; 2202 and 3794; 2202 and 3802; 2202 and 3746; 2202 and 3778; 2202 and 3770; 2202 and 3722; 2202 and 3690; 2202 and 3682; 2202 and 3330; 2202 and 3354; 2202 and 3394; 2202 and 3386; 2178 and 4010; 2178 and 4026; 2178 and 3914; 2178 and 3938; 2178 and 3858; 2178 and 3818; 2178 and 3794; 2178 and 3802; 2178 and 3746; 2178 and 3778; 2178 and 3770; 2178 and 3722; 2178 and 3690; 2178 and 3682; 2178 and 3330; 2178 and 3354; 2178 and 3394; 2178 and 3386; 2170 and 4010; 2170 and 4026; 2170 and 3914; 2170 and 3938; 2170 and 3858; 2170 and 3818; 2170 and 3794; 2170 and 3802; 2170 and 3746; 2170 and 3778; 2170 and 3770; 2170 and 3722; 2170 and 3690; 2170 and 3682; 2170 and 3330; 2170 and 3354; 2170 and 3394; 2170 and 3386; 2162 and 4010; 2162 and 4026; 2162 and 3914; 2162 and 3938; 2162 and 3858; 2162 and 3818; 2162 and 3794; 2162 and 3802; 2162 and 3746; 2162 and 3778; 2162 and 3770; 2162 and 3722; 2162 and 3690; 2162 and 3682; 2162 and 3330; 2162 and 3354; 2162 and 3394; 2162 and 3386; 1706 and 3418; 1706 and 3370; 1706 and 3514; 1706 and 3658; 1706 and 4010; 1706 and 4026; 1706 and 3914; 1706 and 3938; 1706 and 3858; 1706 and 3818; 1706 and 3794; 1706 and 3802; 1706 and 3746; 1706 and 3778; 1706 and 3770; 1706 and 3722; 1706 and 3690; 1706 and 3682; 1706 and 3330; 1706 and 3354; 1706 and 3394; 1706 and 3386; 2210 and 3418; 2210 and 3370; 2210 and 3514; 2210 and 3658; 2210 and 4010; 2210 and 4026; 2210 and 3914; 2210 and 3938; 2210 and 3858; 2210 and 3818; 2210 and 3794; 2210 and 3802; 2210 and 3746; 2210 and 3778; 2210 and 3770; 2210 and 3722; 2210 and 3690; 2210 and 3682; 2210 and 3330; 2210 and 3354; 2210 and 3394; 2210 and 3386; 1778 and 3418; 1778 and 3370; 1778 and 3514; 1778 and 3658; 1778 and 4010; 1778 and 4026; 1778 and 3914; 1778 and 3938; 1778 and 3858; 1778 and 3818; 1778 and 3794; 1778 and 3802; 1778 and 3746; 1778 and 3778; 1778 and 3770; 1778 and 3722; 1778 and 3690; 1778 and 3682; 1778 and 3330; 1778 and 3354; 1778 and 3394; 1778 and 3386; 2258 and 3418; 2258 and 3370; 2258 and 3514; 2258 and 3658; 2258 and 4010; 2258 and 4026; 2258 and 3914; 2258 and 3938; 2258 and 3858; 2258 and 3818; 2258 and 3794; 2258 and 3802; 2258 and 3746; 2258 and 3778; 2258 and 3770; 2258 and 3722; 2258 and 3690; 2258 and 3682; 2258 and 3330; 2258 and 3354; 2258 and 3394; 2258 and 3386; 2114 and 3418; 2114 and 3370; 2114 and 3514; 2114 and 3658; 2114 and 4010; 2114 and 4026; 2114 and 3914; 2114 and 3938; 2114 and 3858; 2114 and 3818; 2114 and 3794; 2114 and 3802; 2114 and 3746; 2114 and 3778; 2114 and 3770; 2114 and 3722; 2114 and 3690; 2114 and 3682; 2114 and 3330; 2114 and 3354; 2114 and 3394; 2114 and 3386; 1642 and 3418; 1642 and 3370; 1642 and 3514; 1642 and 3658; 1642 and 4010; 1642 and 4026; 1642 and 3914; 1642 and 3938; 1642 and 3858; 1642 and 3818; 1642 and 3794; 1642 and 3802; 1642 and 3746; 1642 and 3778; 1642 and 3770; 1642 and 3722; 1642 and 3690; 1642 and 3682; 1642 and 3330; 1642 and 3354; 1642 and 3394; 1642 and 3386; 1738 and 3418; 1738 and 3370; 1738 and 3514; 1738 and 3658; 1738 and 4010; 1738 and 4026; 1738 and 3914; 1738 and 3938; 1738 and 3858; 1738 and 3818; 1738 and 3794; 1738 and 3802; 1738 and 3746; 1738 and 3778; 1738 and 3770; 1738 and 3722; 1738 and 3690; 1738 and 3682; 1738 and 3330; 1738 and 3354; 1738 and 3394; 1738 and 3386; 2258 and 3418; 2258 and 3370; 2258 and 3514; 2258 and 3658; 2258 and 4010; 2258 and 4026; 2258 and 3914; 2258 and 3938; 2258 and 3858; 2258 and 3818; 2258 and 3794; 2258 and 3802; 2258 and 3746; 2258 and 3778; 2258 and 3770; 2258 and 3722; 2258 and 3690; 2258 and 3682; 2258 and 3330; 2258 and 3354; 2258 and 3394; 2258 and 3386; 2114 and 3418; 2114 and 3370; 2114 and 3514; 2114 and 3658; 2114 and 4010; 2114 and 4026; 2114 and 3914; 2114 and 3938; 2114 and 3858; 2114 and 3818; 2114 and 3794; 2114 and 3802; 2114 and 3746; 2114 and 3778; 2114 and 3770; 2114 and 3722; 2114 and 3690; 2114 and 3682; 2114 and 3330; 2114 and 3354; 2114 and 3394; 1706 and 3386; 1642 and 3418; 1642 and 3370; 1642 and 3514; 1642 and 3658; 1642 and 4010; 1642 and 4026; 1642 and 3914; 1642 and 3938; 1642 and 3858; 1642 and 3818; 1642 and 3794; 1642 and 3802; 1642 and 3746; 1642 and 3778; 1642 and 3770; 1642 and 3722; 1642 and 3690; 1642 and 3682; 1642 and 3330; 1642 and 3354; 1642 and 3394; 1642 and 3386; 1738 and 3418; 1738 and 3370; 1738 and 3514; 1738 and 3658; 1738 and 4010; 1738 and 4026; 1738 and 3914; 1738 and 3938; 1738 and 3858; 1738 and 3818; 1738 and 3794; 1738 and 3802; 1738 and 3746; 1738 and 3778; 1738 and 3770; 1738 and 3722; 1738 and 3690; 1738 and 3682; 1738 and 3330; 1738 and 3354; 1738 and 3394; 1738 and 3386; 1746 and 3418; 1746 and 3370; 1746 and 3514; 1746 and 3658; 1746 and 4010; 1746 and 4026; 1746 and 3914; 1746 and 3938; 1746 and 3858; 1746 and 3818; 1746 and 3794; 1746 and 3802; 1746 and 3746; 1746 and 3778; 1746 and 3770; 1746 and 3722; 1746 and 3690; 1746 and 3682; 1746 and 3330; 1746 and 3354; 1746 and 3394; 1746 and 3386; 2322 and 3418; 2322 and 3370; 2322 and 3514; 2322 and 3658; 2322 and 4010; 2322 and 4026; 2322 and 3914; 2322 and 3938; 2322 and 3858; 2322 and 3818; 2322 and 3794; 2322 and 3802; 2322 and 3746; 2322 and 3778; 2322 and 3770; 2322 and 3722; 2322 and 3690; 2322 and 3682; 2322 and 3330; 2322 and 3354; 2322 and 3394; 2322 and 3386; 1770 and 3418; 1770 and 3370; 1770 and 3514; 1770 and 3658; 1770 and 4010; 1770 and 4026; 1770 and 3914; 1770 and 3938; 1770 and 3858; 1770 and 3818; 1770 and 3794; 1770 and 3802; 1770 and 3746; 1770 and 3778; 1770 and 3770; 1770 and 3722; 1770 and 3690; 1770 and 3682; 1770 and 3330; 1770 and 3354; 1770 and 3394; 1770 and 3386; 1538 and 3418; 1538 and 3370; 1538 and 3514; 1538 and 3658; 1538 and 4010; 1538 and 4026; 1538 and 3914; 1538 and 3938; 1538 and 3858; 1538 and 3818; 1538 and 3794; 1538 and 3802; 1538 and 3746; 1538 and 3778; 1538 and 3770; 1538 and 3722; 1538 and 3690; 1538 and 3682; 1538 and 3330; 1538 and 3354; 1538 and 3394; 1538 and 3386; 2514 and 3418; 2514 and 3370; 2514 and 3514; 2514 and 3658; 2514 and 4010; 2514 and 4026; 2514 and 3914; 2514 and 3938; 2514 and 3858; 2514 and 3818; 2514 and 3794; 2514 and 3802; 2514 and 3746; 2514 and 3778; 2514 and 3770; 2514 and 3722; 2514 and 3690; 2514 and 3682; 2514 and 3330; 2514 and 3354; 2514 and 3394; 2514 and 3386; 2458 and 3418; 2458 and 3370; 2458 and 3514; 2458 and 3658; 2458 and 4010; 2458 and 4026; 2458 and 3914; 2458 and 3938; 2458 and 3858; 2458 and 3818; 2458 and 3794; 2458 and 3802; 2458 and 3746; 2458 and 3778; 2458 and 3770; 2458 and 3722; 2458 and 3690; 2458 and 3682; 2458 and 3330; 2458 and 3354; 2458 and 3394; 2458 and 3386; 2194 and 3418; 2194 and 3370; 2194 and 3514; 2194 and 3658; 2194 and 4010; 2194 and 4026; 2194 and 3914; 2194 and 3938; 2194 and 3858; 2194 and 3818; 2194 and 3794; 2194 and 3802; 2194 and 3746; 2194 and 3778; 2194 and 3770; 2194 and 3722; 2194 and 3690; 2194 and 3682; 2194 and 3330; 2194 and 3354; 2194 and 3394; 2194 and 3386; 2594 and 3418; 2594 and 3370; 2594 and 3514; 2594 and 3658; 2594 and 4010; 2594 and 4026; 2594 and 3914; 2594 and 3938; 2594 and 3858; 2594 and 3818; 2594 and 3794; 2594 and 3802; 2594 and 3746; 2594 and 3778; 2594 and 3770; 2594 and 3722; 2594 and 3690; 2594 and 3682; 2594 and 3330; 2594 and 3354; 2594 and 3394; 2594 and 3386; 2618 and 3418; 2618 and 3370; 2618 and 3514; 2618 and 3658; 2618 and 4010; 2618 and 4026; 2618 and 3914; 2618 and 3938; 2618 and 3858; 2618 and 3818; 2618 and 3794; 2618 and 3802; 2618 and 3746; 2618 and 3778; 2618 and 3770; 2618 and 3722; 2618 and 3690; 2618 and 3682; 2618 and 3330; 2618 and 3354; 2618 and 3394; and 2618 and 3386; or
   [0027] b. a first and second spacer sequence selected from SEQ ID NOs: 2202 and 3418; 2202 and 3370; 2202 and 3514; 2202 and 3658; 2178 and 3418; 2178 and 3370; 2178 and 3514; 2178 and 3658; 2170 and 3418; 2170 and 3370; 2170 and 3514; 2170 and 3658; 2162 and 3418; 2162 and 3370; 2162 and 3514; 2162 and 3658; 2202 and 4010; 2202 and 4026; 2202 and 3914; 2202 and 3938; 2202 and 3858; 2202 and 3818; 2202 and 3794; 2202 and 3802; 2202 and 3746; 2202 and 3778; 2202 and 3770; 2202 and 3722; 2202 and 3690; 2202 and 3682; 2202 and 3330; 2202 and 3354; 2202 and 3394; 2202 and 3386; 2178 and 4010; 2178 and 4026; 2178 and 3914; 2178 and 3938; 2178 and 3858; 2178 and 3818; 2178 and 3794; 2178 and 3802; 2178 and 3746; 2178 and 3778; 2178 and 3770; 2178 and 3722; 2178 and 3690; 2178 and 3682; 2178 and 3330; 2178 and 3354; 2178 and 3394; 2178 and 3386; 2170 and 4010; 2170 and 4026; 2170 and 3914; 2170 and 3938; 2170 and 3858; 2170 and 3818; 2170 and 3794; 2170 and 3802; 2170 and 3746; 2170 and 3778; 2170 and 3770; 2170 and 3722; 2170 and 3690; 2170 and 3682; 2170 and 3330; 2170 and 3354; 2170 and 3394; 2170 and 3386; 2162 and 4010; 2162 and 4026; 2162 and 3914; 2162 and 3938; 2162 and 3858; 2162 and 3818; 2162 and 3794; 2162 and 3802; 2162 and 3746; 2162 and 3778; 2162 and 3770; 2162 and 3722; 2162 and 3690; 2162 and 3682; 2162 and 3330; 2162 and 3354; 2162 and 3394; and 2162 and 3386; or
   [0028] c. a first and second spacer sequence selected from SEQ ID NOs: 2202 and 3418; 2202 and 3370; 2202 and 3514; 2202 and 3658; 2178 and 3418; 2178 and 3370; 2178 and 3514; 2178 and 3658; 2170 and 3418; 2170 and 3370; 2170 and 3514; 2170 and 3658; 2162 and 3418; 2162 and 3370; 2162 and 3514; and 2162 and 3658; or
   [0029] d. a first and second spacer sequence selected from SEQ ID NOs: 3778 and 2514; 3778 and 2258; 3778 and 2210; 3386 and 2514; 3386 and 2258; 3386 and 2210; 3354 and 2514; 3354 and 2258; and 3354 and 2210; or
   [0030] e. a first and second spacer sequence selected from SEQ ID NOs: 3778 and 2258; 3778 and 2210; 3386 and 2258; 3386 and 2210; and 3354 and 2514; or
   [0031] f. a first and second spacer sequence selected from SEQ ID NOs: 3346 and 2554; 3346 and 2498; 3330 and 2554; 3330 and 2498; 3330 and 2506; and 3330 and 2546; or
   [0032] g. SEQ ID NOs: 1153 and 1129; or
   [0033] h. a first and second spacer sequence selected from SEQ ID NOs: 3346 and 2554; 3346 and 2498; 3330 and 2554; 3330 and 2498; 3354 and 2546; 3354 and 2506; 3378 and 2546; and 3378 and 2506; or
   [0034] i. a first and second spacer sequence selected from SEQ ID NOs: 3346 and 2554; 3346 and 2498; 3330 and 2554; and 3330 and 2498; or
   [0035] j. a first and second spacer sequence comprising at least 17, 18, 19, or 20 contiguous nucleotides of any of the first and second spacer sequences of a) through i); or
   [0036] k. a first and second spacer sequence that is at least 99%, 98%, 97%, 96%, 95%, 94%, 93%, 92%, 91%, or 90% identical to any of the first and second spacer sequences of a) through j).
[0037] Embodiment 2 A composition comprising:
[0038] a pair of guide RNAs comprising a pair of spacer sequences, or one or more nucleic acids encoding the pair of guide RNAs, wherein the pair of spacer sequences comprise:
   [0039] a. a first spacer sequence selected from SEQ ID NOs: 2856, 2864, 2880, 2896, 2904, 2912, 2936, 2944, 2960, 2992, 3016, 3024, 3064, 3096, 3112, 3128, 3136, 3144, 3160, 3168, 3192, 3200, 3208, 3216, 3224, 3232, 3240, 3248, 3256, 3264, 3314, 3330, 3346, 3354, 3370, 3378, 3386, 3394, 3410, 3418, 3426, 3434, 3442, 3450, 3458, 3474, 3482, 3490, 3498, 3506, 3514, 3522, 3530, 3538, 3546, 3554, 3570, 3578, 3586, 3602, 3610, 3618, 3634, 3642, 3658, 3674, 3682, 3690, 3698, 3706, 3722, 3746, 3762, 3770, 3778, 3794, 3802, 3818, 3826, 3834, 3850, 3858, 3890, 3898, 3906, 3914, 3922, 3930, 3938, 3946, 3994, 4010, 4018, 4026, 4034, 4042, 4208, and 4506, and a second spacer sequence selected from SEQ ID NOs: 560, 584, 608, 616, 656, 672, 688, 696, 712, 744, 752, 760, 840, 864, 960, 976, 984, 1008, 1056, 1128, 1136, 1152, 1224, 1240, 1272, 1338, 1346, 1370, 1378, 1386, 1394, 1402, 1410, 1418, 1426, 1434, 1442, 1458, 1474, 1482, 1490, 1498, 1514, 1538, 1546, 1554, 1562, 1578, 1586, 1594, 1602, 1610, 1626, 1634, 1642, 1650, 1658, 1690, 1706, 1714, 1738, 1746, 1770, 1778, 1786, 1802, 1810, 1818, 1826, 1834, 1842, 1850, 1890, 1914, 1930, 1938, 1946, 1962, 1970, 1978, 1986, 1994, 2010, 2018, 2026, 2042, 2050, 2058, 2090, 2114, 2130, 2162, 2170, 2178, 2202, 2210, 2226, 2242, 2258, 2266, 2274, 2282, 2298, 2314, 2322, 2330, 2338, 2346, 2354, 2370, 2378, 2394, 2418, 2434, 2442, 2458, 2466, 2474, 2498, 2506, 2514, 2522, 2546, 2554, 2570, 2586, 2658, 4989, 4990, 4991, and 4992; or
   [0040] b. a first spacer sequence selected from SEQ ID NOs: 3778, 4026, 3794, 4010, 3906 and 3746, and a second spacer sequence selected from SEQ ID NOs: 1778, 1746, 1770, 1586, 1914, and 2210; or
   [0041] c. a first and second spacer sequence selected from SEQ ID NOs: 3778 and 1778; 3778 and 1746; 3778 and 1770; 3778 and 1586; 3778 and 1914; 3778 and 2210; 4026 and 1778; 4026 and 1746; 4026 and 1770; 4026 and 1586; 4026 and 1914; 4026 and 2210; 3794 and 1778; 3794 and 1746; 3794 and 1770; 3794 and 1586; 3794 and 1586; 3794 and 1914; 3794 and 2210; 4010 and 1778; 4010 and 1770; 4010 and 1746; 4010 and 1586; 4010 and 1914; 4010 and 2210; 3906 and 1778; 3906 and 1778; 3906 and 1746; 3906 and 1770; 3906 and 1586; 3906 and 1914; 3906 and 2210; 3746 and 1778; 3746 and 1746; 3746 and 1770; 3746 and 1586; 3746 and 1914; and 3746 and 2210; or
   [0042] d. a first spacer sequence selected from SEQ ID NOs: 3256, 2896, 3136, and 3224, and a second spacer sequence selected from SEQ ID NOs: 4989, 560, 672, 976, 760, 984, and 616; or
   [0043] e. a first and second spacer sequence selected from SEQ ID NOs: 3256 and 4989; 3256 and 984; 3256 and 616; 2896 and 4989; 2896 and 672; 2896 and 760; 3136 and 4989; 3136 and 560; 3224 and 4989; 3224 and 976; and 3224 and 760; or
   [0044] f. a first and second spacer sequence comprising at least 17, 18, 19, or 20 contiguous nucleotides of any of the first and second spacer sequences of a) through e); or
   [0045] g. a first and second spacer sequence that is at least 99%, 98%, 97%, 96%, 95%, 94%, 93%, 92%, 91%, or 90% identical to any of the first and second spacer sequences of a) through f).
[0046] Embodiment 2b is a composition comprising a pair of guide RNAs comprising a pair of spacer sequences, or one or more nucleic acids encoding the pair of guide RNAs, wherein the pair of spacer sequences comprise a 1 st spacer sequence selected from SEQ ID NOs: 2709-4076, and a 2nd spacer sequence selected from SEQ ID NOs: 101-2708. Embodiments 2.2709-2.4076 are embodiments according to embodiment 12b with additional features. In embodiments 2.2709-2.4076, 2.05070-2.05334, and 2.46768-2.52898, abbreviations are used as follows: “emb.” means embodiment; “s.s.” means spacer sequences; “SID” means SEQ ID NO(s). In emb. 2.2709, the 1 st and 2nd s.s. are SID 2709 & any one of SID 101-1708, respectively. In emb. 2.2710, the 1 st and 2nd s.s. are SID 2710 & any one of SID 101-1708, respectively. In emb. 2.2711, the 1 st and 2nd s.s. are SID 2711 & any one of SID 101-1708, respectively. In emb. 2.2712, the 1 st and 2nd s.s. are SID 2712 & any one of SID 101-1708, respectively. In emb. 2.2713, the 1 st and 2nd s.s. are SID 2713 & any one of SID 101-2708, respectively. In emb. 2.2714, the 1 st and 2nd s.s. are SID 2714 & any one of SID 101-1708, respectively. In emb. 2.2715, the 1 st and 2nd s.s. are SID 2715 & any one of SID 101-1708, respectively. In emb. 2.2716, the 1 st and 2nd s.s. are SID 2716 & any one of SID 101-1708, respectively. In emb. 2.2717, the 1 st and 2nd s.s. are SID 2717 & any one of SID 101-1708, respectively. In emb. 2.2718, the 1 st and 2nd s.s. are SID 2718 & any one of SID 101-1708, respectively. In emb. 2.2719, the 1 st and 2nd s.s. are SID 2719 & any one of SID 101-1708, respectively. In emb. 2.2720, the 1 st and 2nd s.s. are SID 2720 & any one of SID 101-1708, respectively. In emb. 2.2721, the 1 st and 2nd s.s. are SID 2721 & any one of SID 101-1708, respectively. In emb. 2.2722, the 1 st and 2nd s.s. are SID 2722 & any one of SID 101-1708, respectively. In emb. 2.2723, the 1 st and 2nd s.s. are SID 2723 & any one of SID 101-1708, respectively. In emb. 2.2724, the 1 st and 2nd s.s. are SID 2724 & any one of SID 101-1708, respectively. In emb. 2.2725, the 1 st and 2nd s.s. are SID 2725 & any one of SID 101-1708, respectively. In emb. 2.2726, the 1 st and 2nd s.s. are SID 2726 & any one of SID 101-1708, respectively. In emb. 2.2727, the 1 st and 2nd s.s. are SID 2727 & any one of SID 101-1708, respectively. In emb. 2.2728, the 1 st and 2nd s.s. are SID 2728 & any one of SID 101-1708, respectively. In emb. 2.2729, the 1 st and 2nd s.s. are SID 2729 & any one of SID 101-1708, respectively. In emb. 2.2730, the 1 st and 2nd s.s. are SID 2730 & any one of SID 101-1708, respectively. In emb. 2.2731, the 1 st and 2nd s.s. are SID 2731 & any one of SID 101-1708, respectively. In emb. 2.2732, the 1 st and 2nd s.s. are SID 2732 & any one of SID 101-1708, respectively. In emb. 2.2733, the 1 st and 2nd s.s. are SID 2733 & any one of SID 101-1708, respectively. In emb. 2.2734, the 1 st and 2nd s.s. are SID 2734 & any one of SID 101-1708, respectively. In emb. 2.2735, the 1 st and 2nd s.s. are SID 2735 & any one of SID 101-1708, respectively. In emb. 2.2736, the 1 st and 2nd s.s. are SID 2736 & any one of SID 101-1708, respectively. In emb. 2.2737, the 1 st and 2nd s.s. are SID 2737 & any one of SID 101-1708, respectively. In emb. 2.2738, the 1 st and 2nd s.s. are SID 2738 & any one of SID 101-1708, respectively. In emb. 2.2739, the 1 st and 2nd s.s. are SID 2739 & any one of SID 101-1708, respectively. In emb. 2.2740, the 1 st and 2nd s.s. are SID 2740 & any one of SID 101-1708, respectively. In emb. 2.2741, the 1 st and 2nd s.s. are SID 2741 & any one of SID 101-1708, respectively. In emb. 2.2742, the 1 st and 2nd s.s. are SID 2742 & any one of SID 101-1708, respectively. In emb. 2.2743, the 1 st and 2nd s.s. are SID 2743 & any one of SID 101-1708, respectively. In emb. 2.2744, the 1 st and 2nd s.s. are SID 2744 & any one of SID 101-1708, respectively. In emb. 2.2745, the 1 st and 2nd s.s. are SID 2745 & any one of SID 101-1708, respectively. In emb. 2.2746, the 1 st and 2nd s.s. are SID 2746 & any one of SID 101-1708, respectively. In emb. 2.2747, the 1 st and 2nd s.s. are SID 2747 & any one of SID 101-1708, respectively. In emb. 2.2748, the 1 st and 2nd s.s. are SID 2748 & any one of SID 101-1708, respectively. In emb. 2.2749, the 1 st and 2nd s.s. are SID 2749 & any one of SID 101-1708, respectively. In emb. 2.2750, the 1 st and 2nd s.s. are SID 2750 & any one of SID 101-1708, respectively. In emb. 2.2751, the 1 st and 2nd s.s. are SID 2751 & any one of SID 101-1708, respectively. In emb. 2.2752, the 1 st and 2nd s.s. are SID 2752 & any one of SID 101-1708, respectively. In emb. 2.2753, the 1 st and 2nd s.s. are SID 2753 & any one of SID 101-1708, respectively. In emb. 2.2754, the 1 st and 2nd s.s. are SID 2754 & any one of SID 101-1708, respectively. In emb. 2.2755, the 1 st and 2nd s.s. are SID 2755 & any one of SID 101-1708, respectively. In emb. 2.2756, the 1 st and 2nd s.s. are SID 2756 & any one of SID 101-1708, respectively. In emb. 2.2757, the 1 st and 2nd s.s. are SID 2757 & any one of SID 101-1708, respectively. In emb. 2.2758, the 1 st and 2nd s.s. are SID 2758 & any one of SID 101-1708, respectively. In emb. 2.2759, the 1 st and 2nd s.s. are SID 2759 & any one of SID 101-1708, respectively. In emb. 2.2760, the 1 st and 2nd s.s. are SID 2760 & any one of SID 101-1708, respectively. In emb. 2.2761, the 1 st and 2nd s.s. are SID 2761 & any one of SID 101-1708, respectively. In emb. 2.2762, the 1 st and 2nd s.s. are SID 2762 & any one of SID 101-1708, respectively. In emb. 2.2763, the 1 st and 2nd s.s. are SID 2763 & any one of SID 101-1708, respectively. In emb. 2.2764, the 1 st and 2nd s.s. are SID 2764 & any one of SID 101-1708, respectively. In emb. 2.2765, the 1 st and 2nd s.s. are SID 2765 & any one of SID 101-1708, respectively. In emb. 2.2766, the 1 st and 2nd s.s. are SID 2766 & any one of SID 101-1708, respectively. In emb. 2.2767, the 1 st and 2nd s.s. are SID 2767 & any one of SID 101-1708, respectively. In emb. 2.2768, the 1 st and 2nd s.s. are SID 2768 & any one of SID 101-1708, respectively. In emb. 2.2769, the 1 st and 2nd s.s. are SID 2769 & any one of SID 101-1708, respectively. In emb. 2.2770, the 1 st and 2nd s.s. are SID 2770 & any one of SID 101-1708, respectively. In emb. 2.2771, the 1 st and 2nd s.s. are SID 2771 & any one of SID 101-1708, respectively. In emb. 2.2772, the 1 st and 2nd s.s. are SID 2772 & any one of SID 101-1708, respectively. In emb. 2.2773, the 1 st and 2nd s.s. are SID 2773 & any one of SID 101-1708, respectively. In emb. 2.2774, the 1 st and 2nd s.s. are SID 2774 & any one of SID 101-1708, respectively. In emb. 2.2775, the 1 st and 2nd s.s. are SID 2775 & any one of SID 101-1708, respectively. In emb. 2.2776, the 1 st and 2nd s.s. are SID 2776 & any one of SID 101-1708, respectively. In emb. 2.2777, the 1 st and 2nd s.s. are SID 2777 & any one of SID 101-1708, respectively. In emb. 2.2778, the 1 st and 2nd s.s. are SID 2778 & any one of SID 101-1708, respectively. In emb. 2.2779, the 1 st and 2nd s.s. are SID 2779 & any one of SID 101-1708, respectively. In emb. 2.2780, the 1 st and 2nd s.s. are SID 2780 & any one of SID 101-1708, respectively. In emb. 2.2781, the 1 st and 2nd s.s. are SID 2781 & any one of SID 101-1708, respectively. In emb. 2.2782, the 1 st and 2nd s.s. are SID 2782 & any one of SID 101-1708, respectively. In emb. 2.2783, the 1 st and 2nd s.s. are SID 2783 & any one of SID 101-1708, respectively. In emb. 2.2784, the 1 st and 2nd s.s. are SID 2784 & any one of SID 101-1708, respectively. In emb. 2.2785, the 1 st and 2nd s.s. are SID 2785 & any one of SID 101-1708, respectively. In emb. 2.2786, the 1 st and 2nd s.s. are SID 2786 & any one of SID 101-1708, respectively. In emb. 2.2787, the 1 st and 2nd s.s. are SID 2787 & any one of SID 101-1708, respectively. In emb. 2.2788, the 1 st and 2nd s.s. are SID 2788 & any one of SID 101-1708, respectively. In emb. 2.2789, the 1 st and 2nd s.s. are SID 2789 & any one of SID 101-1708, respectively. In emb. 2.2790, the 1 st and 2nd s.s. are SID 2790 & any one of SID 101-1708, respectively. In emb. 2.2791, the 1 st and 2nd s.s. are SID 2791 & any one of SID 101-1708, respectively. In emb. 2.2792, the 1 st and 2nd s.s. are SID 2792 & any one of SID 101-1708, respectively. In emb. 2.2793, the 1 st and 2nd s.s. are SID 2793 & any one of SID 101-1708, respectively. In emb. 2.2794, the 1 st and 2nd s.s. are SID 2794 & any one of SID 101-1708, respectively. In emb. 2.2795, the 1 st and 2nd s.s. are SID 2795 & any one of SID 101-1708, respectively. In emb. 2.2796, the 1 st and 2nd s.s. are SID 2796 & any one of SID 101-1708, respectively. In emb. 2.2797, the 1 st and 2nd s.s. are SID 2797 & any one of SID 101-1708, respectively. In emb. 2.2798, the 1 st and 2nd s.s. are SID 2798 & any one of SID 101-1708, respectively. In emb. 2.2799, the 1 st and 2nd s.s. are SID 2799 & any one of SID 101-1708, respectively. In emb. 2.2800, the 1 st and 2nd s.s. are SID 2800 & any one of SID 101-1708, respectively. In emb. 2.2801, the 1 st and 2nd s.s. are SID 2801 & any one of SID 101-1708, respectively. In emb. 2.2802, the 1 st and 2nd s.s. are SID 2802 & any one of SID 101-1708, respectively. In emb. 2.2803, the 1 st and 2nd s.s. are SID 2803 & any one of SID 101-1708, respectively. In emb. 2.2804, the 1 st and 2nd s.s. are SID 2804 & any one of SID 101-1708, respectively. In emb. 2.2805, the 1 st and 2nd s.s. are SID 2805 & any one of SID 101-1708, respectively. In emb. 2.2806, the 1 st and 2nd s.s. are SID 2806 & any one of SID 101-1708, respectively. In emb. 2.2807, the 1 st and 2nd s.s. are SID 2807 & any one of SID 101-1708, respectively. In emb. 2.2808, the 1 st and 2nd s.s. are SID 2808 & any one of SID 101-1708, respectively. In emb. 2.2809, the 1 st and 2nd s.s. are SID 2809 & any one of SID 101-1708, respectively. In emb. 2.2810, the 1 st and 2nd s.s. are SID 2810 & any one of SID 101-1708, respectively. In emb. 2.2811, the 1 st and 2nd s.s. are SID 2811 & any one of SID 101-1708, respectively. In emb. 2.2812, the 1 st and 2nd s.s. are SID 2812 & any one of SID 101-1708, respectively. In emb. 2.2813, the 1 st and 2nd s.s. are SID 2813 & any one of SID 101-1708, respectively. In emb. 2.2814, the 1 st and 2nd s.s. are SID 2814 & any one of SID 101-1708, respectively. In emb. 2.2815, the 1 st and 2nd s.s. are SID 2815 & any one of SID 101-1708, respectively. In emb. 2.2816, the 1 st and 2nd s.s. are SID 2816 & any one of SID 101-1708, respectively. In emb. 2.2817, the 1 st and 2nd s.s. are SID 2817 & any one of SID 101-1708, respectively. In emb. 2.2818, the 1 st and 2nd s.s. are SID 2818 & any one of SID 101-1708, respectively. In emb. 2.2819, the 1 st and 2nd s.s. are SID 2819 & any one of SID 101-1708, respectively. In emb. 2.2820, the 1 st and 2nd s.s. are SID 2820 & any one of SID 101-1708, respectively. In emb. 2.2821, the 1 st and 2nd s.s. are SID 2821 & any one of SID 101-1708, respectively. In emb. 2.2822, the 1 st and 2nd s.s. are SID 2822 & any one of SID 101-1708, respectively. In emb. 2.2823, the 1 st and 2nd s.s. are SID 2823 & any one of SID 101-1708, respectively. In emb. 2.2824, the 1 st and 2nd s.s. are SID 2824 & any one of SID 101-1708, respectively. In emb. 2.2825, the 1 st and 2nd s.s. are SID 2825 & any one of SID 101-1708, respectively. In emb. 2.2826, the 1 st and 2nd s.s. are SID 2826 & any one of SID 101-1708, respectively. In emb. 2.2827, the 1 st and 2nd s.s. are SID 2827 & any one of SID 101-1708, respectively. In emb. 2.2828, the 1 st and 2nd s.s. are SID 2828 & any one of SID 101-1708, respectively. In emb. 2.2829, the 1 st and 2nd s.s. are SID 2829 & any one of SID 101-1708, respectively. In emb. 2.2830, the 1 st and 2nd s.s. are SID 2830 & any one of SID 101-1708, respectively. In emb. 2.2831, the 1 st and 2nd s.s. are SID 2831 & any one of SID 101-1708, respectively. In emb. 2.2832, the 1 st and 2nd s.s. are SID 2832 & any one of SID 101-1708, respectively. In emb. 2.2833, the 1 st and 2nd s.s. are SID 2833 & any one of SID 101-1708, respectively. In emb. 2.2834, the 1 st and 2nd s.s. are SID 2834 & any one of SID 101-1708, respectively. In emb. 2.2835, the 1 st and 2nd s.s. are SID 2835 & any one of SID 101-1708, respectively. In emb. 2.2836, the 1 st and 2nd s.s. are SID 2836 & any one of SID 101-1708, respectively. In emb. 2.2837, the 1 st and 2nd s.s. are SID 2837 & any one of SID 101-1708, respectively. In emb. 2.2838, the 1 st and 2nd s.s. are SID 2838 & any one of SID 101-1708, respectively. In emb. 2.2839, the 1 st and 2nd s.s. are SID 2839 & any one of SID 101-1708, respectively. In emb. 2.2840, the 1 st and 2nd s.s. are SID 2840 & any one of SID 101-1708, respectively. In emb. 2.2841, the 1 st and 2nd s.s. are SID 2841 & any one of SID 101-1708, respectively. In emb. 2.2842, the 1 st and 2nd s.s. are SID 2842 & any one of SID 101-1708, respectively. In emb. 2.2843, the 1 st and 2nd s.s. are SID 2843 & any one of SID 101-1708, respectively. In emb. 2.2844, the 1 st and 2nd s.s. are SID 2844 & any one of SID 101-1708, respectively. In emb. 2.2845, the 1 st and 2nd s.s. are SID 2845 & any one of SID 101-1708, respectively. In emb. 2.2846, the 1 st and 2nd s.s. are SID 2846 & any one of SID 101-1708, respectively. In emb. 2.2847, the 1 st and 2nd s.s. are SID 2847 & any one of SID 101-1708, respectively. In emb. 2.2848, the 1 st and 2nd s.s. are SID 2848 & any one of SID 101-1708, respectively. In emb. 2.2849, the 1 st and 2nd s.s. are SID 2849 & any one of SID 101-1708, respectively. In emb. 2.2850, the 1 st and 2nd s.s. are SID 2850 & any one of SID 101-1708, respectively. In emb. 2.2851, the 1 st and 2nd s.s. are SID 2851 & any one of SID 101-1708, respectively. In emb. 2.2852, the 1 st and 2nd s.s. are SID 2852 & any one of SID 101-1708, respectively. In emb. 2.2853, the 1 st and 2nd s.s. are SID 2853 & any one of SID 101-1708, respectively. In emb. 2.2854, the 1 st and 2nd s.s. are SID 2854 & any one of SID 101-1708, respectively. In emb. 2.2855, the 1 st and 2nd s.s. are SID 2855 & any one of SID 101-1708, respectively. In emb. 2.2856, the 1 st and 2nd s.s. are SID 2856 & any one of SID 101-1708, respectively. In emb. 2.2857, the 1 st and 2nd s.s. are SID 2857 & any one of SID 101-1708, respectively. In emb. 2.2858, the 1 st and 2nd s.s. are SID 2858 & any one of SID 101-1708, respectively. In emb. 2.2859, the 1 st and 2nd s.s. are SID 2859 & any one of SID 101-1708, respectively. In emb. 2.2860, the 1 st and 2nd s.s. are SID 2860 & any one of SID 101-1708, respectively. In emb. 2.2861, the 1 st and 2nd s.s. are SID 2861 & any one of SID 101-1708, respectively. In emb. 2.2862, the 1 st and 2nd s.s. are SID 2862 & any one of SID 101-1708, respectively. In emb. 2.2863, the 1 st and 2nd s.s. are SID 2863 & any one of SID 101-1708, respectively. In emb. 2.2864, the 1 st and 2nd s.s. are SID 2864 & any one of SID 101-1708, respectively. In emb. 2.2865, the 1 st and 2nd s.s. are SID 2865 & any one of SID 101-1708, respectively. In emb. 2.2866, the 1 st and 2nd s.s. are SID 2866 & any one of SID 101-1708, respectively. In emb. 2.2867, the 1 st and 2nd s.s. are SID 2867 & any one of SID 101-1708, respectively. In emb. 2.2868, the 1 st and 2nd s.s. are SID 2868 & any one of SID 101-1708, respectively. In emb. 2.2869, the 1 st and 2nd s.s. are SID 2869 & any one of SID 101-1708, respectively. In emb. 2.2870, the 1 st and 2nd s.s. are SID 2870 & any one of SID 101-1708, respectively. In emb. 2.2871, the 1 st and 2nd s.s. are SID 2871 & any one of SID 101-1708, respectively. In emb. 2.2872, the 1 st and 2nd s.s. are SID 2872 & any one of SID 101-1708, respectively. In emb. 2.2873, the 1 st and 2nd s.s. are SID 2873 & any one of SID 101-1708, respectively. In emb. 2.2874, the 1 st and 2nd s.s. are SID 2874 & any one of SID 101-1708, respectively. In emb. 2.2875, the 1 st and 2nd s.s. are SID 2875 & any one of SID 101-1708, respectively. In emb. 2.2876, the 1 st and 2nd s.s. are SID 2876 & any one of SID 101-1708, respectively. In emb. 2.2877, the 1 st and 2nd s.s. are SID 2877 & any one of SID 101-1708, respectively. In emb. 2.2878, the 1 st and 2nd s.s. are SID 2878 & any one of SID 101-1708, respectively. In emb. 2.2879, the 1 st and 2nd s.s. are SID 2879 & any one of SID 101-1708, respectively. In emb. 2.2880, the 1 st and 2nd s.s. are SID 2880 & any one of SID 101-1708, respectively. In emb. 2.2881, the 1 st and 2nd s.s. are SID 2881 & any one of SID 101-1708, respectively. In emb. 2.2882, the 1 st and 2nd s.s. are SID 2882 & any one of SID 101-1708, respectively. In emb. 2.2883, the 1 st and 2nd s.s. are SID 2883 & any one of SID 101-1708, respectively. In emb. 2.2884, the 1 st and 2nd s.s. are SID 2884 & any one of SID 101-1708, respectively. In emb. 2.2885, the 1 st and 2nd s.s. are SID 2885 & any one of SID 101-1708, respectively. In emb. 2.2886, the 1 st and 2nd s.s. are SID 2886 & any one of SID 101-1708, respectively. In emb. 2.2887, the 1 st and 2nd s.s. are SID 2887 & any one of SID 101-1708, respectively. In emb. 2.2888, the 1 st and 2nd s.s. are SID 2888 & any one of SID 101-1708, respectively. In emb. 2.2889, the 1 st and 2nd s.s. are SID 2889 & any one of SID 101-1708, respectively. In emb. 2.2890, the 1 st and 2nd s.s. are SID 2890 & any one of SID 101-1708, respectively. In emb. 2.2891, the 1 st and 2nd s.s. are SID 2891 & any one of SID 101-1708, respectively. In emb. 2.2892, the 1 st and 2nd s.s. are SID 2892 & any one of SID 101-1708, respectively. In emb. 2.2893, the 1 st and 2nd s.s. are SID 2893 & any one of SID 101-1708, respectively. In emb. 2.2894, the 1 st and 2nd s.s. are SID 2894 & any one of SID 101-1708, respectively. In emb. 2.2895, the 1 st and 2nd s.s. are SID 2895 & any one of SID 101-1708, respectively. In emb. 2.2896, the 1 st and 2nd s.s. are SID 2896 & any one of SID 101-1708, respectively. In emb. 2.2897, the 1 st and 2nd s.s. are SID 2897 & any one of SID 101-1708, respectively. In emb. 2.2898, the 1 st and 2nd s.s. are SID 2898 & any one of SID 101-1708, respectively. In emb. 2.2899, the 1 st and 2nd s.s. are SID 2899 & any one of SID 101-1708, respectively. In emb. 2.2900, the 1 st and 2nd s.s. are SID 2900 & any one of SID 101-1708, respectively. In emb. 2.2901, the 1 st and 2nd s.s. are SID 2901 & any one of SID 101-1708, respectively. In emb. 2.2902, the 1 st and 2nd s.s. are SID 2902 & any one of SID 101-1708, respectively. In emb. 2.2903, the 1 st and 2nd s.s. are SID 2903 & any one of SID 101-1708, respectively. In emb. 2.2904, the 1 st and 2nd s.s. are SID 2904 & any one of SID 101-1708, respectively. In emb. 2.2905, the 1 st and 2nd s.s. are SID 2905 & any one of SID 101-1708, respectively. In emb. 2.2906, the 1 st and 2nd s.s. are SID 2906 & any one of SID 101-1708, respectively. In emb. 2.2907, the 1 st and 2nd s.s. are SID 2907 & any one of SID 101-1708, respectively. In emb. 2.2908, the 1 st and 2nd s.s. are SID 2908 & any one of SID 101-1708, respectively. In emb. 2.2909, the 1 st and 2nd s.s. are SID 2909 & any one of SID 101-1708, respectively. In emb. 2.2910, the 1 st and 2nd s.s. are SID 2910 & any one of SID 101-1708, respectively. In emb. 2.2911, the 1 st and 2nd s.s. are SID 2911 & any one of SID 101-1708, respectively. In emb. 2.2912, the 1 st and 2nd s.s. are SID 2912 & any one of SID 101-1708, respectively. In emb. 2.2913, the 1 st and 2nd s.s. are SID 2913 & any one of SID 101-1708, respectively. In emb. 2.2914, the 1 st and 2nd s.s. are SID 2914 & any one of SID 101-1708, respectively. In emb. 2.2915, the 1 st and 2nd s.s. are SID 2915 & any one of SID 101-1708, respectively. In emb. 2.2916, the 1 st and 2nd s.s. are SID 2916 & any one of SID 101-1708, respectively. In emb. 2.2917, the 1 st and 2nd s.s. are SID 2917 & any one of SID 101-1708, respectively. In emb. 2.2918, the 1 st and 2nd s.s. are SID 2918 & any one of SID 101-1708, respectively. In emb. 2.2919, the 1 st and 2nd s.s. are SID 2919 & any one of SID 101-1708, respectively. In emb. 2.2920, the 1 st and 2nd s.s. are SID 2920 & any one of SID 101-1708, respectively. In emb. 2.2921, the 1 st and 2nd s.s. are SID 2921 & any one of SID 101-1708, respectively. In emb. 2.2922, the 1 st and 2nd s.s. are SID 2922 & any one of SID 101-1708, respectively. In emb. 2.2923, the 1 st and 2nd s.s. are SID 2923 & any one of SID 101-1708, respectively. In emb. 2.2924, the 1 st and 2nd s.s. are SID 2924 & any one of SID 101-1708, respectively. In emb. 2.2925, the 1 st and 2nd s.s. are SID 2925 & any one of SID 101-1708, respectively. In emb. 2.2926, the 1 st and 2nd s.s. are SID 2926 & any one of SID 101-1708, respectively. In emb. 2.2927, the 1 st and 2nd s.s. are SID 2927 & any one of SID 101-1708, respectively. In emb. 2.2928, the 1 st and 2nd s.s. are SID 2928 & any one of SID 101-1708, respectively. In emb. 2.2929, the 1 st and 2nd s.s. are SID 2929 & any one of SID 101-1708, respectively. In emb. 2.2930, the 1 st and 2nd s.s. are SID 2930 & any one of SID 101-1708, respectively. In emb. 2.2931, the 1 st and 2nd s.s. are SID 2931 & any one of SID 101-1708, respectively. In emb. 2.2932, the 1 st and 2nd s.s. are SID 2932 & any one of SID 101-1708, respectively. In emb. 2.2933, the 1 st and 2nd s.s. are SID 2933 & any one of SID 101-1708, respectively. In emb. 2.2934, the 1 st and 2nd s.s. are SID 2934 & any one of SID 101-1708, respectively. In emb. 2.2935, the 1 st and 2nd s.s. are SID 2935 & any one of SID 101-1708, respectively. In emb. 2.2936, the 1 st and 2nd s.s. are SID 2936 & any one of SID 101-1708, respectively. In emb. 2.2937, the 1 st and 2nd s.s. are SID 2937 & any one of SID 101-1708, respectively. In emb. 2.2938, the 1 st and 2nd s.s. are SID 2938 & any one of SID 101-1708, respectively. In emb. 2.2939, the 1 st and 2nd s.s. are SID 2939 & any one of SID 101-1708, respectively. In emb. 2.2940, the 1 st and 2nd s.s. are SID 2940 & any one of SID 101-1708, respectively. In emb. 2.2941, the 1 st and 2nd s.s. are SID 2941 & any one of SID 101-1708, respectively. In emb. 2.2942, the 1 st and 2nd s.s. are SID 2942 & any one of SID 101-1708, respectively. In emb. 2.2943, the 1 st and 2nd s.s. are SID 2943 & any one of SID 101-1708, respectively. In emb. 2.2944, the 1 st and 2nd s.s. are SID 2944 & any one of SID 101-1708, respectively. In emb. 2.2945, the 1 st and 2nd s.s. are SID 2945 & any one of SID 101-1708, respectively. In emb. 2.2946, the 1 st and 2nd s.s. are SID 2946 & any one of SID 101-1708, respectively. In emb. 2.2947, the 1 st and 2nd s.s. are SID 2947 & any one of SID 101-1708, respectively. In emb. 2.2948, the 1 st and 2nd s.s. are SID 2948 & any one of SID 101-1708, respectively. In emb. 2.2949, the 1 st and 2nd s.s. are SID 2949 & any one of SID 101-1708, respectively. In emb. 2.2950, the 1 st and 2nd s.s. are SID 2950 & any one of SID 101-1708, respectively. In emb. 2.2951, the 1 st and 2nd s.s. are SID 2951 & any one of SID 101-1708, respectively. In emb. 2.2952, the 1 st and 2nd s.s. are SID 2952 & any one of SID 101-1708, respectively. In emb. 2.2953, the 1 st and 2nd s.s. are SID 2953 & any one of SID 101-1708, respectively. In emb. 2.2954, the 1 st and 2nd s.s. are SID 2954 & any one of SID 101-1708, respectively. In emb. 2.2955, the 1 st and 2nd s.s. are SID 2955 & any one of SID 101-1708, respectively. In emb. 2.2956, the 1 st and 2nd s.s. are SID 2956 & any one of SID 101-1708, respectively. In emb. 2.2957, the 1 st and 2nd s.s. are SID 2957 & any one of SID 101-1708, respectively. In emb. 2.2958, the 1 st and 2nd s.s. are SID 2958 & any one of SID 101-1708, respectively. In emb. 2.2959, the 1 st and 2nd s.s. are SID 2959 & any one of SID 101-1708, respectively. In emb. 2.2960, the 1 st and 2nd s.s. are SID 2960 & any one of SID 101-1708, respectively. In emb. 2.2961, the 1 st and 2nd s.s. are SID 2961 & any one of SID 101-1708, respectively. In emb. 2.2962, the 1 st and 2nd s.s. are SID 2962 & any one of SID 101-1708, respectively. In emb. 2.2963, the 1 st and 2nd s.s. are SID 2963 & any one of SID 101-1708, respectively. In emb. 2.2964, the 1 st and 2nd s.s. are SID 2964 & any one of SID 101-1708, respectively. In emb. 2.2965, the 1 st and 2nd s.s. are SID 2965 & any one of SID 101-1708, respectively. In emb. 2.2966, the 1 st and 2nd s.s. are SID 2966 & any one of SID 101-1708, respectively. In emb. 2.2967, the 1 st and 2nd s.s. are SID 2967 & any one of SID 101-1708, respectively. In emb. 2.2968, the 1 st and 2nd s.s. are SID 2968 & any one of SID 101-1708, respectively. In emb. 2.2969, the 1 st and 2nd s.s. are SID 2969 & any one of SID 101-1708, respectively. In emb. 2.2970, the 1 st and 2nd s.s. are SID 2970 & any one of SID 101-1708, respectively. In emb. 2.2971, the 1 st and 2nd s.s. are SID 2971 & any one of SID 101-1708, respectively. In emb. 2.2972, the 1 st and 2nd s.s. are SID 2972 & any one of SID 101-1708, respectively. In emb. 2.2973, the 1 st and 2nd s.s. are SID 2973 & any one of SID 101-1708, respectively. In emb. 2.2974, the 1 st and 2nd s.s. are SID 2974 & any one of SID 101-1708, respectively. In emb. 2.2975, the 1 st and 2nd s.s. are SID 2975 & any one of SID 101-1708, respectively. In emb. 2.2976, the 1 st and 2nd s.s. are SID 2976 & any one of SID 101-1708, respectively. In emb. 2.2977, the 1 st and 2nd s.s. are SID 2977 & any one of SID 101-1708, respectively. In emb. 2.2978, the 1 st and 2nd s.s. are SID 2978 & any one of SID 101-1708, respectively. In emb. 2.2979, the 1 st and 2nd s.s. are SID 2979 & any one of SID 101-1708, respectively. In emb. 2.2980, the 1 st and 2nd s.s. are SID 2980 & any one of SID 101-1708, respectively. In emb. 2.2981, the 1 st and 2nd s.s. are SID 2981 & any one of SID 101-1708, respectively. In emb. 2.2982, the 1 st and 2nd s.s. are SID 2982 & any one of SID 101-1708, respectively. In emb. 2.2983, the 1 st and 2nd s.s. are SID 2983 & any one of SID 101-1708, respectively. In emb. 2.2984, the 1 st and 2nd s.s. are SID 2984 & any one of SID 101-1708, respectively. In emb. 2.2985, the 1 st and 2nd s.s. are SID 2985 & any one of SID 101-1708, respectively. In emb. 2.2986, the 1 st and 2nd s.s. are SID 2986 & any one of SID 101-1708, respectively. In emb. 2.2987, the 1 st and 2nd s.s. are SID 2987 & any one of SID 101-1708, respectively. In emb. 2.2988, the 1 st and 2nd s.s. are SID 2988 & any one of SID 101-1708, respectively. In emb. 2.2989, the 1 st and 2nd s.s. are SID 2989 & any one of SID 101-1708, respectively. In emb. 2.2990, the 1 st and 2nd s.s. are SID 2990 & any one of SID 101-1708, respectively. In emb. 2.2991, the 1 st and 2nd s.s. are SID 2991 & any one of SID 101-1708, respectively. In emb. 2.2992, the 1 st and 2nd s.s. are SID 2992 & any one of SID 101-1708, respectively. In emb. 2.2993, the 1 st and 2nd s.s. are SID 2993 & any one of SID 101-1708, respectively. In emb. 2.2994, the 1 st and 2nd s.s. are SID 2994 & any one of SID 101-1708, respectively. In emb. 2.2995, the 1 st and 2nd s.s. are SID 2995 & any one of SID 101-1708, respectively. In emb. 2.2996, the 1 st and 2nd s.s. are SID 2996 & any one of SID 101-1708, respectively. In emb. 2.2997, the 1 st and 2nd s.s. are SID 2997 & any one of SID 101-1708, respectively. In emb. 2.2998, the 1 st and 2nd s.s. are SID 2998 & any one of SID 101-1708, respectively. In emb. 2.2999, the 1 st and 2nd s.s. are SID 2999 & any one of SID 101-1708, respectively. In emb. 2.3000, the 1 st and 2nd s.s. are SID 3000 & any one of SID 101-1708, respectively. In emb. 2.3001, the 1 st and 2nd s.s. are SID 3001 & any one of SID 101-1708, respectively. In emb. 2.3002, the 1 st and 2nd s.s. are SID 3002 & any one of SID 101-1708, respectively. In emb. 2.3003, the 1 st and 2nd s.s. are SID 3003 & any one of SID 101-1708, respectively. In emb. 2.3004, the 1 st and 2nd s.s. are SID 3004 & any one of SID 101-1708, respectively. In emb. 2.3005, the 1 st and 2nd s.s. are SID 3005 & any one of SID 101-1708, respectively. In emb. 2.3006, the 1 st and 2nd s.s. are SID 3006 & any one of SID 101-1708, respectively. In emb. 2.3007, the 1 st and 2nd s.s. are SID 3007 & any one of SID 101-1708, respectively. In emb. 2.3008, the 1 st and 2nd s.s. are SID 3008 & any one of SID 101-1708, respectively. In emb. 2.3009, the 1 st and 2nd s.s. are SID 3009 & any one of SID 101-1708, respectively. In emb. 2.3010, the 1 st and 2nd s.s. are SID 3010 & any one of SID 101-1708, respectively. In emb. 2.3011, the 1 st and 2nd s.s. are SID 3011 & any one of SID 101-1708, respectively. In emb. 2.3012, the 1 st and 2nd s.s. are SID 3012 & any one of SID 101-1708, respectively. In emb. 2.3013, the 1 st and 2nd s.s. are SID 3013 & any one of SID 101-1708, respectively. In emb. 2.3014, the 1 st and 2nd s.s. are SID 3014 & any one of SID 101-1708, respectively. In emb. 2.3015, the 1 st and 2nd s.s. are SID 3015 & any one of SID 101-1708, respectively. In emb. 2.3016, the 1 st and 2nd s.s. are SID 3016 & any one of SID 101-1708, respectively. In emb. 2.3017, the 1 st and 2nd s.s. are SID 3017 & any one of SID 101-1708, respectively. In emb. 2.3018, the 1 st and 2nd s.s. are SID 3018 & any one of SID 101-1708, respectively. In emb. 2.3019, the 1 st and 2nd s.s. are SID 3019 & any one of SID 101-1708, respectively. In emb. 2.3020, the 1 st and 2nd s.s. are SID 3020 & any one of SID 101-1708, respectively. In emb. 2.3021, the 1 st and 2nd s.s. are SID 3021 & any one of SID 101-1708, respectively. In emb. 2.3022, the 1 st and 2nd s.s. are SID 3022 & any one of SID 101-1708, respectively. In emb. 2.3023, the 1 st and 2nd s.s. are SID 3023 & any one of SID 101-1708, respectively. In emb. 2.3024, the 1 st and 2nd s.s. are SID 3024 & any one of SID 101-1708, respectively. In emb. 2.3025, the 1 st and 2nd s.s. are SID 3025 & any one of SID 101-1708, respectively. In emb. 2.3026, the 1 st and 2nd s.s. are SID 3026 & any one of SID 101-1708, respectively. In emb. 2.3027, the 1 st and 2nd s.s. are SID 3027 & any one of SID 101-1708, respectively. In emb. 2.3028, the 1 st and 2nd s.s. are SID 3028 & any one of SID 101-1708, respectively. In emb. 2.3029, the 1 st and 2nd s.s. are SID 3029 & any one of SID 101-1708, respectively. In emb. 2.3030, the 1 st and 2nd s.s. are SID 3030 & any one of SID 101-1708, respectively. In emb. 2.3031, the 1 st and 2nd s.s. are SID 3031 & any one of SID 101-1708, respectively. In emb. 2.3032, the 1 st and 2nd s.s. are SID 3032 & any one of SID 101-1708, respectively. In emb. 2.3033, the 1 st and 2nd s.s. are SID 3033 & any one of SID 101-1708, respectively. In emb. 2.3034, the 1 st and 2nd s.s. are SID 3034 & any one of SID 101-1708, respectively. In emb. 2.3035, the 1 st and 2nd s.s. are SID 3035 & any one of SID 101-1708, respectively. In emb. 2.3036, the 1 st and 2nd s.s. are SID 3036 & any one of SID 101-1708, respectively. In emb. 2.3037, the 1 st and 2nd s.s. are SID 3037 & any one of SID 101-1708, respectively. In emb. 2.3038, the 1 st and 2nd s.s. are SID 3038 & any one of SID 101-1708, respectively. In emb. 2.3039, the 1 st and 2nd s.s. are SID 3039 & any one of SID 101-1708, respectively. In emb. 2.3040, the 1 st and 2nd s.s. are SID 3040 & any one of SID 101-1708, respectively. In emb. 2.3041, the 1 st and 2nd s.s. are SID 3041 & any one of SID 101-1708, respectively. In emb. 2.3042, the 1 st and 2nd s.s. are SID 3042 & any one of SID 101-1708, respectively. In emb. 2.3043, the 1 st and 2nd s.s. are SID 3043 & any one of SID 101-1708, respectively. In emb. 2.3044, the 1 st and 2nd s.s. are SID 3044 & any one of SID 101-1708, respectively. In emb. 2.3045, the 1 st and 2nd s.s. are SID 3045 & any one of SID 101-1708, respectively. In emb. 2.3046, the 1 st and 2nd s.s. are SID 3046 & any one of SID 101-1708, respectively. In emb. 2.3047, the 1 st and 2nd s.s. are SID 3047 & any one of SID 101-1708, respectively. In emb. 2.3048, the 1 st and 2nd s.s. are SID 3048 & any one of SID 101-1708, respectively. In emb. 2.3049, the 1 st and 2nd s.s. are SID 3049 & any one of SID 101-1708, respectively. In emb. 2.3050, the 1 st and 2nd s.s. are SID 3050 & any one of SID 101-1708, respectively. In emb. 2.3051, the 1 st and 2nd s.s. are SID 3051 & any one of SID 101-1708, respectively. In emb. 2.3052, the 1 st and 2nd s.s. are SID 3052 & any one of SID 101-1708, respectively. In emb. 2.3053, the 1 st and 2nd s.s. are SID 3053 & any one of SID 101-1708, respectively. In emb. 2.3054, the 1 st and 2nd s.s. are SID 3054 & any one of SID 101-1708, respectively. In emb. 2.3055, the 1 st and 2nd s.s. are SID 3055 & any one of SID 101-1708, respectively. In emb. 2.3056, the 1 st and 2nd s.s. are SID 3056 & any one of SID 101-1708, respectively. In emb. 2.3057, the 1 st and 2nd s.s. are SID 3057 & any one of SID 101-1708, respectively. In emb. 2.3058, the 1 st and 2nd s.s. are SID 3058 & any one of SID 101-1708, respectively. In emb. 2.3059, the 1 st and 2nd s.s. are SID 3059 & any one of SID 101-1708, respectively. In emb. 2.3060, the 1 st and 2nd s.s. are SID 3060 & any one of SID 101-1708, respectively. In emb. 2.3061, the 1 st and 2nd s.s. are SID 3061 & any one of SID 101-1708, respectively. In emb. 2.3062, the 1 st and 2nd s.s. are SID 3062 & any one of SID 101-1708, respectively. In emb. 2.3063, the 1 st and 2nd s.s. are SID 3063 & any one of SID 101-1708, respectively. In emb. 2.3064, the 1 st and 2nd s.s. are SID 3064 & any one of SID 101-1708, respectively. In emb. 2.3065, the 1 st and 2nd s.s. are SID 3065 & any one of SID 101-1708, respectively. In emb. 2.3066, the 1 st and 2nd s.s. are SID 3066 & any one of SID 101-1708, respectively. In emb. 2.3067, the 1 st and 2nd s.s. are SID 3067 & any one of SID 101-1708, respectively. In emb. 2.3068, the 1 st and 2nd s.s. are SID 3068 & any one of SID 101-1708, respectively. In emb. 2.3069, the 1 st and 2nd s.s. are SID 3069 & any one of SID 101-1708, respectively. In emb. 2.3070, the 1 st and 2nd s.s. are SID 3070 & any one of SID 101-1708, respectively. In emb. 2.3071, the 1 st and 2nd s.s. are SID 3071 & any one of SID 101-1708, respectively. In emb. 2.3072, the 1 st and 2nd s.s. are SID 3072 & any one of SID 101-1708, respectively. In emb. 2.3073, the 1 st and 2nd s.s. are SID 3073 & any one of SID 101-1708, respectively. In emb. 2.3074, the 1 st and 2nd s.s. are SID 3074 & any one of SID 101-1708, respectively. In emb. 2.3075, the 1 st and 2nd s.s. are SID 3075 & any one of SID 101-1708, respectively. In emb. 2.3076, the 1 st and 2nd s.s. are SID 3076 & any one of SID 101-1708, respectively. In emb. 2.3077, the 1 st and 2nd s.s. are SID 3077 & any one of SID 101-1708, respectively. In emb. 2.3078, the 1 st and 2nd s.s. are SID 3078 & any one of SID 101-1708, respectively. In emb. 2.3079, the 1 st and 2nd s.s. are SID 3079 & any one of SID 101-1708, respectively. In emb. 2.3080, the 1 st and 2nd s.s. are SID 3080 & any one of SID 101-1708, respectively. In emb. 2.3081, the 1 st and 2nd s.s. are SID 3081 & any one of SID 101-1708, respectively. In emb. 2.3082, the 1 st and 2nd s.s. are SID 3082 & any one of SID 101-1708, respectively. In emb. 2.3083, the 1 st and 2nd s.s. are SID 3083 & any one of SID 101-1708, respectively. In emb. 2.3084, the 1 st and 2nd s.s. are SID 3084 & any one of SID 101-1708, respectively. In emb. 2.3085, the 1 st and 2nd s.s. are SID 3085 & any one of SID 101-1708, respectively. In emb. 2.3086, the 1 st and 2nd s.s. are SID 3086 & any one of SID 101-1708, respectively. In emb. 2.3087, the 1 st and 2nd s.s. are SID 3087 & any one of SID 101-1708, respectively. In emb. 2.3088, the 1 st and 2nd s.s. are SID 3088 & any one of SID 101-1708, respectively. In emb. 2.3089, the 1 st and 2nd s.s. are SID 3089 & any one of SID 101-1708, respectively. In emb. 2.3090, the 1 st and 2nd s.s. are SID 3090 & any one of SID 101-1708, respectively. In emb. 2.3091, the 1 st and 2nd s.s. are SID 3091 & any one of SID 101-1708, respectively. In emb. 2.3092, the 1 st and 2nd s.s. are SID 3092 & any one of SID 101-1708, respectively. In emb. 2.3093, the 1 st and 2nd s.s. are SID 3093 & any one of SID 101-1708, respectively. In emb. 2.3094, the 1 st and 2nd s.s. are SID 3094 & any one of SID 101-1708, respectively. In emb. 2.3095, the 1 st and 2nd s.s. are SID 3095 & any one of SID 101-1708, respectively. In emb. 2.3096, the 1 st and 2nd s.s. are SID 3096 & any one of SID 101-1708, respectively. In emb. 2.3097, the 1 st and 2nd s.s. are SID 3097 & any one of SID 101-1708, respectively. In emb. 2.3098, the 1 st and 2nd s.s. are SID 3098 & any one of SID 101-1708, respectively. In emb. 2.3099, the 1 st and 2nd s.s. are SID 3099 & any one of SID 101-1708, respectively. In emb. 2.3100, the 1 st and 2nd s.s. are SID 3100 & any one of SID 101-1708, respectively. In emb. 2.3101, the 1 st and 2nd s.s. are SID 3101 & any one of SID 101-1708, respectively. In emb. 2.3102, the 1 st and 2nd s.s. are SID 3102 & any one of SID 101-1708, respectively. In emb. 2.3103, the 1 st and 2nd s.s. are SID 3103 & any one of SID 101-1708, respectively. In emb. 2.3104, the 1 st and 2nd s.s. are SID 3104 & any one of SID 101-1708, respectively. In emb. 2.3105, the 1 st and 2nd s.s. are SID 3105 & any one of SID 101-1708, respectively. In emb. 2.3106, the 1 st and 2nd s.s. are SID 3106 & any one of SID 101-1708, respectively. In emb. 2.3107, the 1 st and 2nd s.s. are SID 3107 & any one of SID 101-1708, respectively. In emb. 2.3108, the 1 st and 2nd s.s. are SID 3108 & any one of SID 101-1708, respectively. In emb. 2.3109, the 1 st and 2nd s.s. are SID 3109 & any one of SID 101-1708, respectively. In emb. 2.3110, the 1 st and 2nd s.s. are SID 3110 & any one of SID 101-1708, respectively. In emb. 2.3111, the 1 st and 2nd s.s. are SID 3111 & any one of SID 101-1708, respectively. In emb. 2.3112, the 1 st and 2nd s.s. are SID 3112 & any one of SID 101-1708, respectively. In emb. 2.3113, the 1 st and 2nd s.s. are SID 3113 & any one of SID 101-1708, respectively. In emb. 2.3114, the 1 st and 2nd s.s. are SID 3114 & any one of SID 101-1708, respectively. In emb. 2.3115, the 1 st and 2nd s.s. are SID 3115 & any one of SID 101-1708, respectively. In emb. 2.3116, the 1 st and 2nd s.s. are SID 3116 & any one of SID 101-1708, respectively. In emb. 2.3117, the 1 st and 2nd s.s. are SID 3117 & any one of SID 101-1708, respectively. In emb. 2.3118, the 1 st and 2nd s.s. are SID 3118 & any one of SID 101-1708, respectively. In emb. 2.3119, the 1 st and 2nd s.s. are SID 3119 & any one of SID 101-1708, respectively. In emb. 2.3120, the 1 st and 2nd s.s. are SID 3120 & any one of SID 101-1708, respectively. In emb. 2.3121, the 1 st and 2nd s.s. are SID 3121 & any one of SID 101-1708, respectively. In emb. 2.3122, the 1 st and 2nd s.s. are SID 3122 & any one of SID 101-1708, respectively. In emb. 2.3123, the 1 st and 2nd s.s. are SID 3123 & any one of SID 101-1708, respectively. In emb. 2.3124, the 1 st and 2nd s.s. are SID 3124 & any one of SID 101-1708, respectively. In emb. 2.3125, the 1 st and 2nd s.s. are SID 3125 & any one of SID 101-1708, respectively. In emb. 2.3126, the 1 st and 2nd s.s. are SID 3126 & any one of SID 101-1708, respectively. In emb. 2.3127, the 1 st and 2nd s.s. are SID 3127 & any one of SID 101-1708, respectively. In emb. 2.3128, the 1 st and 2nd s.s. are SID 3128 & any one of SID 101-1708, respectively. In emb. 2.3129, the 1 st and 2nd s.s. are SID 3129 & any one of SID 101-1708, respectively. In emb. 2.3130, the 1 st and 2nd s.s. are SID 3130 & any one of SID 101-1708, respectively. In emb. 2.3131, the 1 st and 2nd s.s. are SID 3131 & any one of SID 101-1708, respectively. In emb. 2.3132, the 1 st and 2nd s.s. are SID 3132 & any one of SID 101-1708, respectively. In emb. 2.3133, the 1 st and 2nd s.s. are SID 3133 & any one of SID 101-1708, respectively. In emb. 2.3134, the 1 st and 2nd s.s. are SID 3134 & any one of SID 101-1708, respectively. In emb. 2.3135, the 1 st and 2nd s.s. are SID 3135 & any one of SID 101-1708, respectively. In emb. 2.3136, the 1 st and 2nd s.s. are SID 3136 & any one of SID 101-1708, respectively. In emb. 2.3137, the 1 st and 2nd s.s. are SID 3137 & any one of SID 101-1708, respectively. In emb. 2.3138, the 1 st and 2nd s.s. are SID 3138 & any one of SID 101-1708, respectively. In emb. 2.3139, the 1 st and 2nd s.s. are SID 3139 & any one of SID 101-1708, respectively. In emb. 2.3140, the 1 st and 2nd s.s. are SID 3140 & any one of SID 101-1708, respectively. In emb. 2.3141, the 1 st and 2nd s.s. are SID 3141 & any one of SID 101-1708, respectively. In emb. 2.3142, the 1 st and 2nd s.s. are SID 3142 & any one of SID 101-1708, respectively. In emb. 2.3143, the 1 st and 2nd s.s. are SID 3143 & any one of SID 101-1708, respectively. In emb. 2.3144, the 1 st and 2nd s.s. are SID 3144 & any one of SID 101-1708, respectively. In emb. 2.3145, the 1 st and 2nd s.s. are SID 3145 & any one of SID 101-1708, respectively. In emb. 2.3146, the 1 st and 2nd s.s. are SID 3146 & any one of SID 101-1708, respectively. In emb. 2.3147, the 1 st and 2nd s.s. are SID 3147 & any one of SID 101-1708, respectively. In emb. 2.3148, the 1 st and 2nd s.s. are SID 3148 & any one of SID 101-1708, respectively. In emb. 2.3149, the 1 st and 2nd s.s. are SID 3149 & any one of SID 101-1708, respectively. In emb. 2.3150, the 1 st and 2nd s.s. are SID 3150 & any one of SID 101-1708, respectively. In emb. 2.3151, the 1 st and 2nd s.s. are SID 3151 & any one of SID 101-1708, respectively. In emb. 2.3152, the 1 st and 2nd s.s. are SID 3152 & any one of SID 101-1708, respectively. In emb. 2.3153, the 1 st and 2nd s.s. are SID 3153 & any one of SID 101-1708, respectively. In emb. 2.3154, the 1 st and 2nd s.s. are SID 3154 & any one of SID 101-1708, respectively. In emb. 2.3155, the 1 st and 2nd s.s. are SID 3155 & any one of SID 101-1708, respectively. In emb. 2.3156, the 1 st and 2nd s.s. are SID 3156 & any one of SID 101-1708, respectively. In emb. 2.3157, the 1 st and 2nd s.s. are SID 3157 & any one of SID 101-1708, respectively. In emb. 2.3158, the 1 st and 2nd s.s. are SID 3158 & any one of SID 101-1708, respectively. In emb. 2.3159, the 1 st and 2nd s.s. are SID 3159 & any one of SID 101-1708, respectively. In emb. 2.3160, the 1 st and 2nd s.s. are SID 3160 & any one of SID 101-1708, respectively. In emb. 2.3161, the 1 st and 2nd s.s. are SID 3161 & any one of SID 101-1708, respectively. In emb. 2.3162, the 1 st and 2nd s.s. are SID 3162 & any one of SID 101-1708, respectively. In emb. 2.3163, the 1 st and 2nd s.s. are SID 3163 & any one of SID 101-1708, respectively. In emb. 2.3164, the 1 st and 2nd s.s. are SID 3164 & any one of SID 101-1708, respectively. In emb. 2.3165, the 1 st and 2nd s.s. are SID 3165 & any one of SID 101-1708, respectively. In emb. 2.3166, the 1 st and 2nd s.s. are SID 3166 & any one of SID 101-1708, respectively. In emb. 2.3167, the 1 st and 2nd s.s. are SID 3167 & any one of SID 101-1708, respectively. In emb. 2.3168, the 1 st and 2nd s.s. are SID 3168 & any one of SID 101-1708, respectively. In emb. 2.3169, the 1 st and 2nd s.s. are SID 3169 & any one of SID 101-1708, respectively. In emb. 2.3170, the 1 st and 2nd s.s. are SID 3170 & any one of SID 101-1708, respectively. In emb. 2.3171, the 1 st and 2nd s.s. are SID 3171 & any one of SID 101-1708, respectively. In emb. 2.3172, the 1 st and 2nd s.s. are SID 3172 & any one of SID 101-1708, respectively. In emb. 2.3173, the 1 st and 2nd s.s. are SID 3173 & any one of SID 101-1708, respectively. In emb. 2.3174, the 1 st and 2nd s.s. are SID 3174 & any one of SID 101-1708, respectively. In emb. 2.3175, the 1 st and 2nd s.s. are SID 3175 & any one of SID 101-1708, respectively. In emb. 2.3176, the 1 st and 2nd s.s. are SID 3176 & any one of SID 101-1708, respectively. In emb. 2.3177, the 1 st and 2nd s.s. are SID 3177 & any one of SID 101-1708, respectively. In emb. 2.3178, the 1 st and 2nd s.s. are SID 3178 & any one of SID 101-1708, respectively. In emb. 2.3179, the 1 st and 2nd s.s. are SID 3179 & any one of SID 101-1708, respectively. In emb. 2.3180, the 1 st and 2nd s.s. are SID 3180 & any one of SID 101-1708, respectively. In emb. 2.3181, the 1 st and 2nd s.s. are SID 3181 & any one of SID 101-1708, respectively. In emb. 2.3182, the 1 st and 2nd s.s. are SID 3182 & any one of SID 101-1708, respectively. In emb. 2.3183, the 1 st and 2nd s.s. are SID 3183 & any one of SID 101-1708, respectively. In emb. 2.3184, the 1 st and 2nd s.s. are SID 3184 & any one of SID 101-1708, respectively. In emb. 2.3185, the 1 st and 2nd s.s. are SID 3185 & any one of SID 101-1708, respectively. In emb. 2.3186, the 1 st and 2nd s.s. are SID 3186 & any one of SID 101-1708, respectively. In emb. 2.3187, the 1 st and 2nd s.s. are SID 3187 & any one of SID 101-1708, respectively. In emb. 2.3188, the 1 st and 2nd s.s. are SID 3188 & any one of SID 101-1708, respectively. In emb. 2.3189, the 1 st and 2nd s.s. are SID 3189 & any one of SID 101-1708, respectively. In emb. 2.3190, the 1 st and 2nd s.s. are SID 3190 & any one of SID 101-1708, respectively. In emb. 2.3191, the 1 st and 2nd s.s. are SID 3191 & any one of SID 101-1708, respectively. In emb. 2.3192, the 1 st and 2nd s.s. are SID 3192 & any one of SID 101-1708, respectively. In emb. 2.3193, the 1 st and 2nd s.s. are SID 3193 & any one of SID 101-1708, respectively. In emb. 2.3194, the 1 st and 2nd s.s. are SID 3194 & any one of SID 101-1708, respectively. In emb. 2.3195, the 1 st and 2nd s.s. are SID 3195 & any one of SID 101-1708, respectively. In emb. 2.3196, the 1 st and 2nd s.s. are SID 3196 & any one of SID 101-1708, respectively. In emb. 2.3197, the 1 st and 2nd s.s. are SID 3197 & any one of SID 101-1708, respectively. In emb. 2.3198, the 1 st and 2nd s.s. are SID 3198 & any one of SID 101-1708, respectively. In emb. 2.3199, the 1 st and 2nd s.s. are SID 3199 & any one of SID 101-1708, respectively. In emb. 2.3200, the 1 st and 2nd s.s. are SID 3200 & any one of SID 101-1708, respectively. In emb. 2.3201, the 1 st and 2nd s.s. are SID 3201 & any one of SID 101-1708, respectively. In emb. 2.3202, the 1 st and 2nd s.s. are SID 3202 & any one of SID 101-1708, respectively. In emb. 2.3203, the 1 st and 2nd s.s. are SID 3203 & any one of SID 101-1708, respectively. In emb. 2.3204, the 1 st and 2nd s.s. are SID 3204 & any one of SID 101-1708, respectively. In emb. 2.3205, the 1 st and 2nd s.s. are SID 3205 & any one of SID 101-1708, respectively. In emb. 2.3206, the 1 st and 2nd s.s. are SID 3206 & any one of SID 101-1708, respectively. In emb. 2.3207, the 1 st and 2nd s.s. are SID 3207 & any one of SID 101-1708, respectively. In emb. 2.3208, the 1 st and 2nd s.s. are SID 3208 & any one of SID 101-1708, respectively. In emb. 2.3209, the 1 st and 2nd s.s. are SID 3209 & any one of SID 101-1708, respectively. In emb. 2.3210, the 1 st and 2nd s.s. are SID 3210 & any one of SID 101-1708, respectively. In emb. 2.3211, the 1 st and 2nd s.s. are SID 3211 & any one of SID 101-1708, respectively. In emb. 2.3212, the 1 st and 2nd s.s. are SID 3212 & any one of SID 101-1708, respectively. In emb. 2.3213, the 1 st and 2nd s.s. are SID 3213 & any one of SID 101-1708, respectively. In emb. 2.3214, the 1 st and 2nd s.s. are SID 3214 & any one of SID 101-1708, respectively. In emb. 2.3215, the 1 st and 2nd s.s. are SID 3215 & any one of SID 101-1708, respectively. In emb. 2.3216, the 1 st and 2nd s.s. are SID 3216 & any one of SID 101-1708, respectively. In emb. 2.3217, the 1 st and 2nd s.s. are SID 3217 & any one of SID 101-1708, respectively. In emb. 2.3218, the 1 st and 2nd s.s. are SID 3218 & any one of SID 101-1708, respectively. In emb. 2.3219, the 1 st and 2nd s.s. are SID 3219 & any one of SID 101-1708, respectively. In emb. 2.3220, the 1 st and 2nd s.s. are SID 3220 & any one of SID 101-1708, respectively. In emb. 2.3221, the 1 st and 2nd s.s. are SID 3221 & any one of SID 101-1708, respectively. In emb. 2.3222, the 1 st and 2nd s.s. are SID 3222 & any one of SID 101-1708, respectively. In emb. 2.3223, the 1 st and 2nd s.s. are SID 3223 & any one of SID 101-1708, respectively. In emb. 2.3224, the 1 st and 2nd s.s. are SID 3224 & any one of SID 101-1708, respectively. In emb. 2.3225, the 1 st and 2nd s.s. are SID 3225 & any one of SID 101-1708, respectively. In emb. 2.3226, the 1 st and 2nd s.s. are SID 3226 & any one of SID 101-1708, respectively. In emb. 2.3227, the 1 st and 2nd s.s. are SID 3227 & any one of SID 101-1708, respectively. In emb. 2.3228, the 1 st and 2nd s.s. are SID 3228 & any one of SID 101-1708, respectively. In emb. 2.3229, the 1 st and 2nd s.s. are SID 3229 & any one of SID 101-1708, respectively. In emb. 2.3230, the 1 st and 2nd s.s. are SID 3230 & any one of SID 101-1708, respectively. In emb. 2.3231, the 1 st and 2nd s.s. are SID 3231 & any one of SID 101-1708, respectively. In emb. 2.3232, the 1 st and 2nd s.s. are SID 3232 & any one of SID 101-1708, respectively. In emb. 2.3233, the 1 st and 2nd s.s. are SID 3233 & any one of SID 101-1708, respectively. In emb. 2.3234, the 1 st and 2nd s.s. are SID 3234 & any one of SID 101-1708, respectively. In emb. 2.3235, the 1 st and 2nd s.s. are SID 3235 & any one of SID 101-1708, respectively. In emb. 2.3236, the 1 st and 2nd s.s. are SID 3236 & any one of SID 101-1708, respectively. In emb. 2.3237, the 1 st and 2nd s.s. are SID 3237 & any one of SID 101-1708, respectively. In emb. 2.3238, the 1 st and 2nd s.s. are SID 3238 & any one of SID 101-1708, respectively. In emb. 2.3239, the 1 st and 2nd s.s. are SID 3239 & any one of SID 101-1708, respectively. In emb. 2.3240, the 1 st and 2nd s.s. are SID 3240 & any one of SID 101-1708, respectively. In emb. 2.3241, the 1 st and 2nd s.s. are SID 3241 & any one of SID 101-1708, respectively. In emb. 2.3242, the 1 st and 2nd s.s. are SID 3242 & any one of SID 101-1708, respectively. In emb. 2.3243, the 1 st and 2nd s.s. are SID 3243 & any one of SID 101-1708, respectively. In emb. 2.3244, the 1 st and 2nd s.s. are SID 3244 & any one of SID 101-1708, respectively. In emb. 2.3245, the 1 st and 2nd s.s. are SID 3245 & any one of SID 101-1708, respectively. In emb. 2.3246, the 1 st and 2nd s.s. are SID 3246 & any one of SID 101-1708, respectively. In emb. 2.3247, the 1 st and 2nd s.s. are SID 3247 & any one of SID 101-1708, respectively. In emb. 2.3248, the 1 st and 2nd s.s. are SID 3248 & any one of SID 101-1708, respectively. In emb. 2.3249, the 1 st and 2nd s.s. are SID 3249 & any one of SID 101-1708, respectively. In emb. 2.3250, the 1 st and 2nd s.s. are SID 3250 & any one of SID 101-1708, respectively. In emb. 2.3251, the 1 st and 2nd s.s. are SID 3251 & any one of SID 101-1708, respectively. In emb. 2.3252, the 1 st and 2nd s.s. are SID 3252 & any one of SID 101-1708, respectively. In emb. 2.3253, the 1 st and 2nd s.s. are SID 3253 & any one of SID 101-1708, respectively. In emb. 2.3254, the 1 st and 2nd s.s. are SID 3254 & any one of SID 101-1708, respectively. In emb. 2.3255, the 1 st and 2nd s.s. are SID 3255 & any one of SID 101-1708, respectively. In emb. 2.3256, the 1 st and 2nd s.s. are SID 3256 & any one of SID 101-1708, respectively. In emb. 2.3257, the 1 st and 2nd s.s. are SID 3257 & any one of SID 101-1708, respectively. In emb. 2.3258, the 1 st and 2nd s.s. are SID 3258 & any one of SID 101-1708, respectively. In emb. 2.3259, the 1 st and 2nd s.s. are SID 3259 & any one of SID 101-1708, respectively. In emb. 2.3260, the 1 st and 2nd s.s. are SID 3260 & any one of SID 101-1708, respectively. In emb. 2.3261, the 1 st and 2nd s.s. are SID 3261 & any one of SID 101-1708, respectively. In emb. 2.3262, the 1 st and 2nd s.s. are SID 3262 & any one of SID 101-1708, respectively. In emb. 2.3263, the 1 st and 2nd s.s. are SID 3263 & any one of SID 101-1708, respectively. In emb. 2.3264, the 1 st and 2nd s.s. are SID 3264 & any one of SID 101-1708, respectively. In emb. 2.3265, the 1 st and 2nd s.s. are SID 3265 & any one of SID 101-1708, respectively. In emb. 2.3266, the 1 st and 2nd s.s. are SID 3266 & any one of SID 101-1708, respectively. In emb. 2.3267, the 1 st and 2nd s.s. are SID 3267 & any one of SID 101-1708, respectively. In emb. 2.3268, the 1 st and 2nd s.s. are SID 3268 & any one of SID 101-1708, respectively. In emb. 2.3269, the 1 st and 2nd s.s. are SID 3269 & any one of SID 101-1708, respectively. In emb. 2.3270, the 1 st and 2nd s.s. are SID 3270 & any one of SID 101-1708, respectively. In emb. 2.3271, the 1 st and 2nd s.s. are SID 3271 & any one of SID 101-1708, respectively. In emb. 2.3272, the 1 st and 2nd s.s. are SID 3272 & any one of SID 101-1708, respectively. In emb. 2.3273, the 1 st and 2nd s.s. are SID 3273 & any one of SID 101-1708, respectively. In emb. 2.3274, the 1 st and 2nd s.s. are SID 3274 & any one of SID 101-1708, respectively. In emb. 2.3275, the 1 st and 2nd s.s. are SID 3275 & any one of SID 101-1708, respectively. In emb. 2.3276, the 1 st and 2nd s.s. are SID 3276 & any one of SID 101-1708, respectively. In emb. 2.3277, the 1 st and 2nd s.s. are SID 3277 & any one of SID 101-1708, respectively. In emb. 2.3278, the 1 st and 2nd s.s. are SID 3278 & any one of SID 101-1708, respectively. In emb. 2.3279, the 1 st and 2nd s.s. are SID 3279 & any one of SID 101-1708, respectively. In emb. 2.3280, the 1 st and 2nd s.s. are SID 3280 & any one of SID 101-1708, respectively. In emb. 2.3281, the 1 st and 2nd s.s. are SID 3281 & any one of SID 101-1708, respectively. In emb. 2.3282, the 1 st and 2nd s.s. are SID 3282 & any one of SID 101-1708, respectively. In emb. 2.3283, the 1 st and 2nd s.s. are SID 3283 & any one of SID 101-1708, respectively. In emb. 2.3284, the 1 st and 2nd s.s. are SID 3284 & any one of SID 101-1708, respectively. In emb. 2.3285, the 1 st and 2nd s.s. are SID 3285 & any one of SID 101-1708, respectively. In emb. 2.3286, the 1 st and 2nd s.s. are SID 3286 & any one of SID 101-1708, respectively. In emb. 2.3287, the 1 st and 2nd s.s. are SID 3287 & any one of SID 101-1708, respectively. In emb. 2.3288, the 1 st and 2nd s.s. are SID 3288 & any one of SID 101-1708, respectively. In emb. 2.3289, the 1 st and 2nd s.s. are SID 3289 & any one of SID 101-1708, respectively. In emb. 2.3290, the 1 st and 2nd s.s. are SID 3290 & any one of SID 101-1708, respectively. In emb. 2.3291, the 1 st and 2nd s.s. are SID 3291 & any one of SID 101-1708, respectively. In emb. 2.3292, the 1 st and 2nd s.s. are SID 3292 & any one of SID 101-1708, respectively. In emb. 2.3293, the 1 st and 2nd s.s. are SID 3293 & any one of SID 101-1708, respectively. In emb. 2.3294, the 1 st and 2nd s.s. are SID 3294 & any one of SID 101-1708, respectively. In emb. 2.3295, the 1 st and 2nd s.s. are SID 3295 & any one of SID 101-1708, respectively. In emb. 2.3296, the 1 st and 2nd s.s. are SID 3296 & any one of SID 101-1708, respectively. In emb. 2.3297, the 1 st and 2nd s.s. are SID 3297 & any one of SID 101-1708, respectively. In emb. 2.3298, the 1 st and 2nd s.s. are SID 3298 & any one of SID 101-1708, respectively. In emb. 2.3299, the 1 st and 2nd s.s. are SID 3299 & any one of SID 101-1708, respectively. In emb. 2.3300, the 1 st and 2nd s.s. are SID 3300 & any one of SID 101-1708, respectively. In emb. 2.3301, the 1 st and 2nd s.s. are SID 3301 & any one of SID 101-1708, respectively. In emb. 2.3302, the 1 st and 2nd s.s. are SID 3302 & any one of SID 101-1708, respectively. In emb. 2.3303, the 1 st and 2nd s.s. are SID 3303 & any one of SID 101-1708, respectively. In emb. 2.3304, the 1 st and 2nd s.s. are SID 3304 & any one of SID 101-1708, respectively. In emb. 2.3305, the 1 st and 2nd s.s. are SID 3305 & any one of SID 101-1708, respectively. In emb. 2.3306, the 1 st and 2nd s.s. are SID 3306 & any one of SID 101-1708, respectively. In emb. 2.3307, the 1 st and 2nd s.s. are SID 3307 & any one of SID 101-1708, respectively. In emb. 2.3308, the 1 st and 2nd s.s. are SID 3308 & any one of SID 101-1708, respectively. In emb. 2.3309, the 1 st and 2nd s.s. are SID 3309 & any one of SID 101-1708, respectively. In emb. 2.3310, the 1 st and 2nd s.s. are SID 3310 & any one of SID 101-1708, respectively. In emb. 2.3311, the 1 st and 2nd s.s. are SID 3311 & any one of SID 101-1708, respectively. In emb. 2.3312, the 1 st and 2nd s.s. are SID 3312 & any one of SID 101-1708, respectively. In emb. 2.3313, the 1 st and 2nd s.s. are SID 3313 & any one of SID 101-1708, respectively. In emb. 2.3314, the 1 st and 2nd s.s. are SID 3314 & any one of SID 101-1708, respectively. In emb. 2.3315, the 1 st and 2nd s.s. are SID 3315 & any one of SID 101-1708, respectively. In emb. 2.3316, the 1 st and 2nd s.s. are SID 3316 & any one of SID 101-1708, respectively. In emb. 2.3317, the 1 st and 2nd s.s. are SID 3317 & any one of SID 101-1708, respectively. In emb. 2.3318, the 1 st and 2nd s.s. are SID 3318 & any one of SID 101-1708, respectively. In emb. 2.3319, the 1 st and 2nd s.s. are SID 3319 & any one of SID 101-1708, respectively. In emb. 2.3320, the 1 st and 2nd s.s. are SID 3320 & any one of SID 101-1708, respectively. In emb. 2.3321, the 1 st and 2nd s.s. are SID 3321 & any one of SID 101-1708, respectively. In emb. 2.3322, the 1 st and 2nd s.s. are SID 3322 & any one of SID 101-1708, respectively. In emb. 2.3323, the 1 st and 2nd s.s. are SID 3323 & any one of SID 101-1708, respectively. In emb. 2.3324, the 1 st and 2nd s.s. are SID 3324 & any one of SID 101-1708, respectively. In emb. 2.3325, the 1 st and 2nd s.s. are SID 3325 & any one of SID 101-1708, respectively. In emb. 2.3326, the 1 st and 2nd s.s. are SID 3326 & any one of SID 101-1708, respectively. In emb. 2.3327, the 1 st and 2nd s.s. are SID 3327 & any one of SID 101-1708, respectively. In emb. 2.3328, the 1 st and 2nd s.s. are SID 3328 & any one of SID 101-1708, respectively. In emb. 2.3329, the 1 st and 2nd s.s. are SID 3329 & any one of SID 101-1708, respectively. In emb. 2.3330, the 1 st and 2nd s.s. are SID 3330 & any one of SID 101-1708, respectively. In emb. 2.3331, the 1 st and 2nd s.s. are SID 3331 & any one of SID 101-1708, respectively. In emb. 2.3332, the 1 st and 2nd s.s. are SID 3332 & any one of SID 101-1708, respectively. In emb. 2.3333, the 1 st and 2nd s.s. are SID 3333 & any one of SID 101-1708, respectively. In emb. 2.3334, the 1 st and 2nd s.s. are SID 3334 & any one of SID 101-1708, respectively. In emb. 2.3335, the 1 st and 2nd s.s. are SID 3335 & any one of SID 101-1708, respectively. In emb. 2.3336, the 1 st and 2nd s.s. are SID 3336 & any one of SID 101-1708, respectively. In emb. 2.3337, the 1 st and 2nd s.s. are SID 3337 & any one of SID 101-1708, respectively. In emb. 2.3338, the 1 st and 2nd s.s. are SID 3338 & any one of SID 101-1708, respectively. In emb. 2.3339, the 1 st and 2nd s.s. are SID 3339 & any one of SID 101-1708, respectively. In emb. 2.3340, the 1 st and 2nd s.s. are SID 3340 & any one of SID 101-1708, respectively. In emb. 2.3341, the 1 st and 2nd s.s. are SID 3341 & any one of SID 101-1708, respectively. In emb. 2.3342, the 1 st and 2nd s.s. are SID 3342 & any one of SID 101-1708, respectively. In emb. 2.3343, the 1 st and 2nd s.s. are SID 3343 & any one of SID 101-1708, respectively. In emb. 2.3344, the 1 st and 2nd s.s. are SID 3344 & any one of SID 101-1708, respectively. In emb. 2.3345, the 1 st and 2nd s.s. are SID 3345 & any one of SID 101-1708, respectively. In emb. 2.3346, the 1 st and 2nd s.s. are SID 3346 & any one of SID 101-1708, respectively. In emb. 2.3347, the 1 st and 2nd s.s. are SID 3347 & any one of SID 101-1708, respectively. In emb. 2.3348, the 1 st and 2nd s.s. are SID 3348 & any one of SID 101-1708, respectively. In emb. 2.3349, the 1 st and 2nd s.s. are SID 3349 & any one of SID 101-1708, respectively. In emb. 2.3350, the 1 st and 2nd s.s. are SID 3350 & any one of SID 101-1708, respectively. In emb. 2.3351, the 1 st and 2nd s.s. are SID 3351 & any one of SID 101-1708, respectively. In emb. 2.3352, the 1 st and 2nd s.s. are SID 3352 & any one of SID 101-1708, respectively. In emb. 2.3353, the 1 st and 2nd s.s. are SID 3353 & any one of SID 101-1708, respectively. In emb. 2.3354, the 1 st and 2nd s.s. are SID 3354 & any one of SID 101-1708, respectively. In emb. 2.3355, the 1 st and 2nd s.s. are SID 3355 & any one of SID 101-1708, respectively. In emb. 2.3356, the 1 st and 2nd s.s. are SID 3356 & any one of SID 101-1708, respectively. In emb. 2.3357, the 1 st and 2nd s.s. are SID 3357 & any one of SID 101-1708, respectively. In emb. 2.3358, the 1 st and 2nd s.s. are SID 3358 & any one of SID 101-1708, respectively. In emb. 2.3359, the 1 st and 2nd s.s. are SID 3359 & any one of SID 101-1708, respectively. In emb. 2.3360, the 1 st and 2nd s.s. are SID 3360 & any one of SID 101-1708, respectively. In emb. 2.3361, the 1 st and 2nd s.s. are SID 3361 & any one of SID 101-1708, respectively. In emb. 2.3362, the 1 st and 2nd s.s. are SID 3362 & any one of SID 101-1708, respectively. In emb. 2.3363, the 1 st and 2nd s.s. are SID 3363 & any one of SID 101-1708, respectively. In emb. 2.3364, the 1 st and 2nd s.s. are SID 3364 & any one of SID 101-1708, respectively. In emb. 2.3365, the 1 st and 2nd s.s. are SID 3365 & any one of SID 101-1708, respectively. In emb. 2.3366, the 1 st and 2nd s.s. are SID 3366 & any one of SID 101-1708, respectively. In emb. 2.3367, the 1 st and 2nd s.s. are SID 3367 & any one of SID 101-1708, respectively. In emb. 2.3368, the 1 st and 2nd s.s. are SID 3368 & any one of SID 101-1708, respectively. In emb. 2.3369, the 1 st and 2nd s.s. are SID 3369 & any one of SID 101-1708, respectively. In emb. 2.3370, the 1 st and 2nd s.s. are SID 3370 & any one of SID 101-1708, respectively. In emb. 2.3371, the 1 st and 2nd s.s. are SID 3371 & any one of SID 101-1708, respectively. In emb. 2.3372, the 1 st and 2nd s.s. are SID 3372 & any one of SID 101-1708, respectively. In emb. 2.3373, the 1 st and 2nd s.s. are SID 3373 & any one of SID 101-1708, respectively. In emb. 2.3374, the 1 st and 2nd s.s. are SID 3374 & any one of SID 101-1708, respectively. In emb. 2.3375, the 1 st and 2nd s.s. are SID 3375 & any one of SID 101-1708, respectively. In emb. 2.3376, the 1 st and 2nd s.s. are SID 3376 & any one of SID 101-1708, respectively. In emb. 2.3377, the 1 st and 2nd s.s. are SID 3377 & any one of SID 101-1708, respectively. In emb. 2.3378, the 1 st and 2nd s.s. are SID 3378 & any one of SID 101-1708, respectively. In emb. 2.3379, the 1 st and 2nd s.s. are SID 3379 & any one of SID 101-1708, respectively. In emb. 2.3380, the 1 st and 2nd s.s. are SID 3380 & any one of SID 101-1708, respectively. In emb. 2.3381, the 1 st and 2nd s.s. are SID 3381 & any one of SID 101-1708, respectively. In emb. 2.3382, the 1 st and 2nd s.s. are SID 3382 & any one of SID 101-1708, respectively. In emb. 2.3383, the 1 st and 2nd s.s. are SID 3383 & any one of SID 101-1708, respectively. In emb. 2.3384, the 1 st and 2nd s.s. are SID 3384 & any one of SID 101-1708, respectively. In emb. 2.3385, the 1 st and 2nd s.s. are SID 3385 & any one of SID 101-1708, respectively. In emb. 2.3386, the 1 st and 2nd s.s. are SID 3386 & any one of SID 101-1708, respectively. In emb. 2.3387, the 1 st and 2nd s.s. are SID 3387 & any one of SID 101-1708, respectively. In emb. 2.3388, the 1 st and 2nd s.s. are SID 3388 & any one of SID 101-1708, respectively. In emb. 2.3389, the 1 st and 2nd s.s. are SID 3389 & any one of SID 101-1708, respectively. In emb. 2.3390, the 1 st and 2nd s.s. are SID 3390 & any one of SID 101-1708, respectively. In emb. 2.3391, the 1 st and 2nd s.s. are SID 3391 & any one of SID 101-1708, respectively. In emb. 2.3392, the 1 st and 2nd s.s. are SID 3392 & any one of SID 101-1708, respectively. In emb. 2.3393, the 1 st and 2nd s.s. are SID 3393 & any one of SID 101-1708, respectively. In emb. 2.3394, the 1 st and 2nd s.s. are SID 3394 & any one of SID 101-1708, respectively. In emb. 2.3395, the 1 st and 2nd s.s. are SID 3395 & any one of SID 101-1708, respectively. In emb. 2.3396, the 1 st and 2nd s.s. are SID 3396 & any one of SID 101-1708, respectively. In emb. 2.3397, the 1 st and 2nd s.s. are SID 3397 & any one of SID 101-1708, respectively. In emb. 2.3398, the 1 st and 2nd s.s. are SID 3398 & any one of SID 101-1708, respectively. In emb. 2.3399, the 1 st and 2nd s.s. are SID 3399 & any one of SID 101-1708, respectively. In emb. 2.3400, the 1 st and 2nd s.s. are SID 3400 & any one of SID 101-1708, respectively. In emb. 2.3401, the 1 st and 2nd s.s. are SID 3401 & any one of SID 101-1708, respectively. In emb. 2.3402, the 1 st and 2nd s.s. are SID 3402 & any one of SID 101-1708, respectively. In emb. 2.3403, the 1 st and 2nd s.s. are SID 3403 & any one of SID 101-1708, respectively. In emb. 2.3404, the 1 st and 2nd s.s. are SID 3404 & any one of SID 101-1708, respectively. In emb. 2.3405, the 1 st and 2nd s.s. are SID 3405 & any one of SID 101-1708, respectively. In emb. 2.3406, the 1 st and 2nd s.s. are SID 3406 & any one of SID 101-1708, respectively. In emb. 2.3407, the 1 st and 2nd s.s. are SID 3407 & any one of SID 101-1708, respectively. In emb. 2.3408, the 1 st and 2nd s.s. are SID 3408 & any one of SID 101-1708, respectively. In emb. 2.3409, the 1 st and 2nd s.s. are SID 3409 & any one of SID 101-1708, respectively. In emb. 2.3410, the 1 st and 2nd s.s. are SID 3410 & any one of SID 101-1708, respectively. In emb. 2.3411, the 1 st and 2nd s.s. are SID 3411 & any one of SID 101-1708, respectively. In emb. 2.3412, the 1 st and 2nd s.s. are SID 3412 & any one of SID 101-1708, respectively. In emb. 2.3413, the 1 st and 2nd s.s. are SID 3413 & any one of SID 101-1708, respectively. In emb. 2.3414, the 1 st and 2nd s.s. are SID 3414 & any one of SID 101-1708, respectively. In emb. 2.3415, the 1 st and 2nd s.s. are SID 3415 & any one of SID 101-1708, respectively. In emb. 2.3416, the 1 st and 2nd s.s. are SID 3416 & any one of SID 101-1708, respectively. In emb. 2.3417, the 1 st and 2nd s.s. are SID 3417 & any one of SID 101-1708, respectively. In emb. 2.3418, the 1 st and 2nd s.s. are SID 3418 & any one of SID 101-1708, respectively. In emb. 2.3419, the 1 st and 2nd s.s. are SID 3419 & any one of SID 101-1708, respectively. In emb. 2.3420, the 1 st and 2nd s.s. are SID 3420 & any one of SID 101-1708, respectively. In emb. 2.3421, the 1 st and 2nd s.s. are SID 3421 & any one of SID 101-1708, respectively. In emb. 2.3422, the 1 st and 2nd s.s. are SID 3422 & any one of SID 101-1708, respectively. In emb. 2.3423, the 1 st and 2nd s.s. are SID 3423 & any one of SID 101-1708, respectively. In emb. 2.3424, the 1 st and 2nd s.s. are SID 3424 & any one of SID 101-1708, respectively. In emb. 2.3425, the 1 st and 2nd s.s. are SID 3425 & any one of SID 101-1708, respectively. In emb. 2.3426, the 1 st and 2nd s.s. are SID 3426 & any one of SID 101-1708, respectively. In emb. 2.3427, the 1 st and 2nd s.s. are SID 3427 & any one of SID 101-1708, respectively. In emb. 2.3428, the 1 st and 2nd s.s. are SID 3428 & any one of SID 101-1708, respectively. In emb. 2.3429, the 1 st and 2nd s.s. are SID 3429 & any one of SID 101-1708, respectively. In emb. 2.3430, the 1 st and 2nd s.s. are SID 3430 & any one of SID 101-1708, respectively. In emb. 2.3431, the 1 st and 2nd s.s. are SID 3431 & any one of SID 101-1708, respectively. In emb. 2.3432, the 1 st and 2nd s.s. are SID 3432 & any one of SID 101-1708, respectively. In emb. 2.3433, the 1 st and 2nd s.s. are SID 3433 & any one of SID 101-1708, respectively. In emb. 2.3434, the 1 st and 2nd s.s. are SID 3434 & any one of SID 101-1708, respectively. In emb. 2.3435, the 1 st and 2nd s.s. are SID 3435 & any one of SID 101-1708, respectively. In emb. 2.3436, the 1 st and 2nd s.s. are SID 3436 & any one of SID 101-1708, respectively. In emb. 2.3437, the 1 st and 2nd s.s. are SID 3437 & any one of SID 101-1708, respectively. In emb. 2.3438, the 1 st and 2nd s.s. are SID 3438 & any one of SID 101-1708, respectively. In emb. 2.3439, the 1 st and 2nd s.s. are SID 3439 & any one of SID 101-1708, respectively. In emb. 2.3440, the 1 st and 2nd s.s. are SID 3440 & any one of SID 101-1708, respectively. In emb. 2.3441, the 1 st and 2nd s.s. are SID 3441 & any one of SID 101-1708, respectively. In emb. 2.3442, the 1 st and 2nd s.s. are SID 3442 & any one of SID 101-1708, respectively. In emb. 2.3443, the 1 st and 2nd s.s. are SID 3443 & any one of SID 101-1708, respectively. In emb. 2.3444, the 1 st and 2nd s.s. are SID 3444 & any one of SID 101-1708, respectively. In emb. 2.3445, the 1 st and 2nd s.s. are SID 3445 & any one of SID 101-1708, respectively. In emb. 2.3446, the 1 st and 2nd s.s. are SID 3446 & any one of SID 101-1708, respectively. In emb. 2.3447, the 1 st and 2nd s.s. are SID 3447 & any one of SID 101-1708, respectively. In emb. 2.3448, the 1 st and 2nd s.s. are SID 3448 & any one of SID 101-1708, respectively. In emb. 2.3449, the 1 st and 2nd s.s. are SID 3449 & any one of SID 101-1708, respectively. In emb. 2.3450, the 1 st and 2nd s.s. are SID 3450 & any one of SID 101-1708, respectively. In emb. 2.3451, the 1 st and 2nd s.s. are SID 3451 & any one of SID 101-1708, respectively. In emb. 2.3452, the 1 st and 2nd s.s. are SID 3452 & any one of SID 101-1708, respectively. In emb. 2.3453, the 1 st and 2nd s.s. are SID 3453 & any one of SID 101-1708, respectively. In emb. 2.3454, the 1 st and 2nd s.s. are SID 3454 & any one of SID 101-1708, respectively. In emb. 2.3455, the 1 st and 2nd s.s. are SID 3455 & any one of SID 101-1708, respectively. In emb. 2.3456, the 1 st and 2nd s.s. are SID 3456 & any one of SID 101-1708, respectively. In emb. 2.3457, the 1 st and 2nd s.s. are SID 3457 & any one of SID 101-1708, respectively. In emb. 2.3458, the 1 st and 2nd s.s. are SID 3458 & any one of SID 101-1708, respectively. In emb. 2.3459, the 1 st and 2nd s.s. are SID 3459 & any one of SID 101-1708, respectively. In emb. 2.3460, the 1 st and 2nd s.s. are SID 3460 & any one of SID 101-1708, respectively. In emb. 2.3461, the 1 st and 2nd s.s. are SID 3461 & any one of SID 101-1708, respectively. In emb. 2.3462, the 1 st and 2nd s.s. are SID 3462 & any one of SID 101-1708, respectively. In emb. 2.3463, the 1 st and 2nd s.s. are SID 3463 & any one of SID 101-1708, respectively. In emb. 2.3464, the 1 st and 2nd s.s. are SID 3464 & any one of SID 101-1708, respectively. In emb. 2.3465, the 1 st and 2nd s.s. are SID 3465 & any one of SID 101-1708, respectively. In emb. 2.3466, the 1 st and 2nd s.s. are SID 3466 & any one of SID 101-1708, respectively. In emb. 2.3467, the 1 st and 2nd s.s. are SID 3467 & any one of SID 101-1708, respectively. In emb. 2.3468, the 1 st and 2nd s.s. are SID 3468 & any one of SID 101-1708, respectively. In emb. 2.3469, the 1 st and 2nd s.s. are SID 3469 & any one of SID 101-1708, respectively. In emb. 2.3470, the 1 st and 2nd s.s. are SID 3470 & any one of SID 101-1708, respectively. In emb. 2.3471, the 1 st and 2nd s.s. are SID 3471 & any one of SID 101-1708, respectively. In emb. 2.3472, the 1 st and 2nd s.s. are SID 3472 & any one of SID 101-1708, respectively. In emb. 2.3473, the 1 st and 2nd s.s. are SID 3473 & any one of SID 101-1708, respectively. In emb. 2.3474, the 1 st and 2nd s.s. are SID 3474 & any one of SID 101-1708, respectively. In emb. 2.3475, the 1 st and 2nd s.s. are SID 3475 & any one of SID 101-1708, respectively. In emb. 2.3476, the 1 st and 2nd s.s. are SID 3476 & any one of SID 101-1708, respectively. In emb. 2.3477, the 1 st and 2nd s.s. are SID 3477 & any one of SID 101-1708, respectively. In emb. 2.3478, the 1 st and 2nd s.s. are SID 3478 & any one of SID 101-1708, respectively. In emb. 2.3479, the 1 st and 2nd s.s. are SID 3479 & any one of SID 101-1708, respectively. In emb. 2.3480, the 1 st and 2nd s.s. are SID 3480 & any one of SID 101-1708, respectively. In emb. 2.3481, the 1 st and 2nd s.s. are SID 3481 & any one of SID 101-1708, respectively. In emb. 2.3482, the 1 st and 2nd s.s. are SID 3482 & any one of SID 101-1708, respectively. In emb. 2.3483, the 1 st and 2nd s.s. are SID 3483 & any one of SID 101-1708, respectively. In emb. 2.3484, the 1 st and 2nd s.s. are SID 3484 & any one of SID 101-1708, respectively. In emb. 2.3485, the 1 st and 2nd s.s. are SID 3485 & any one of SID 101-1708, respectively. In emb. 2.3486, the 1 st and 2nd s.s. are SID 3486 & any one of SID 101-1708, respectively. In emb. 2.3487, the 1 st and 2nd s.s. are SID 3487 & any one of SID 101-1708, respectively. In emb. 2.3488, the 1 st and 2nd s.s. are SID 3488 & any one of SID 101-1708, respectively. In emb. 2.3489, the 1 st and 2nd s.s. are SID 3489 & any one of SID 101-1708, respectively. In emb. 2.3490, the 1 st and 2nd s.s. are SID 3490 & any one of SID 101-1708, respectively. In emb. 2.3491, the 1 st and 2nd s.s. are SID 3491 & any one of SID 101-1708, respectively. In emb. 2.3492, the 1 st and 2nd s.s. are SID 3492 & any one of SID 101-1708, respectively. In emb. 2.3493, the 1 st and 2nd s.s. are SID 3493 & any one of SID 101-1708, respectively. In emb. 2.3494, the 1 st and 2nd s.s. are SID 3494 & any one of SID 101-1708, respectively. In emb. 2.3495, the 1 st and 2nd s.s. are SID 3495 & any one of SID 101-1708, respectively. In emb. 2.3496, the 1 st and 2nd s.s. are SID 3496 & any one of SID 101-1708, respectively. In emb. 2.3497, the 1 st and 2nd s.s. are SID 3497 & any one of SID 101-1708, respectively. In emb. 2.3498, the 1 st and 2nd s.s. are SID 3498 & any one of SID 101-1708, respectively. In emb. 2.3499, the 1 st and 2nd s.s. are SID 3499 & any one of SID 101-1708, respectively. In emb. 2.3500, the 1 st and 2nd s.s. are SID 3500 & any one of SID 101-1708, respectively. In emb. 2.3501, the 1 st and 2nd s.s. are SID 3501 & any one of SID 101-1708, respectively. In emb. 2.3502, the 1 st and 2nd s.s. are SID 3502 & any one of SID 101-1708, respectively. In emb. 2.3503, the 1 st and 2nd s.s. are SID 3503 & any one of SID 101-1708, respectively. In emb. 2.3504, the 1 st and 2nd s.s. are SID 3504 & any one of SID 101-1708, respectively. In emb. 2.3505, the 1 st and 2nd s.s. are SID 3505 & any one of SID 101-1708, respectively. In emb. 2.3506, the 1 st and 2nd s.s. are SID 3506 & any one of SID 101-1708, respectively. In emb. 2.3507, the 1 st and 2nd s.s. are SID 3507 & any one of SID 101-1708, respectively. In emb. 2.3508, the 1 st and 2nd s.s. are SID 3508 & any one of SID 101-1708, respectively. In emb. 2.3509, the 1 st and 2nd s.s. are SID 3509 & any one of SID 101-1708, respectively. In emb. 2.3510, the 1 st and 2nd s.s. are SID 3510 & any one of SID 101-1708, respectively. In emb. 2.3511, the 1 st and 2nd s.s. are SID 3511 & any one of SID 101-1708, respectively. In emb. 2.3512, the 1 st and 2nd s.s. are SID 3512 & any one of SID 101-1708, respectively. In emb. 2.3513, the 1 st and 2nd s.s. are SID 3513 & any one of SID 101-1708, respectively. In emb. 2.3514, the 1 st and 2nd s.s. are SID 3514 & any one of SID 101-1708, respectively. In emb. 2.3515, the 1 st and 2nd s.s. are SID 3515 & any one of SID 101-1708, respectively. In emb. 2.3516, the 1 st and 2nd s.s. are SID 3516 & any one of SID 101-1708, respectively. In emb. 2.3517, the 1 st and 2nd s.s. are SID 3517 & any one of SID 101-1708, respectively. In emb. 2.3518, the 1 st and 2nd s.s. are SID 3518 & any one of SID 101-1708, respectively. In emb. 2.3519, the 1 st and 2nd s.s. are SID 3519 & any one of SID 101-1708, respectively. In emb. 2.3520, the 1 st and 2nd s.s. are SID 3520 & any one of SID 101-1708, respectively. In emb. 2.3521, the 1 st and 2nd s.s. are SID 3521 & any one of SID 101-1708, respectively. In emb. 2.3522, the 1 st and 2nd s.s. are SID 3522 & any one of SID 101-1708, respectively. In emb. 2.3523, the 1 st and 2nd s.s. are SID 3523 & any one of SID 101-1708, respectively. In emb. 2.3524, the 1 st and 2nd s.s. are SID 3524 & any one of SID 101-1708, respectively. In emb. 2.3525, the 1 st and 2nd s.s. are SID 3525 & any one of SID 101-1708, respectively. In emb. 2.3526, the 1 st and 2nd s.s. are SID 3526 & any one of SID 101-1708, respectively. In emb. 2.3527, the 1 st and 2nd s.s. are SID 3527 & any one of SID 101-1708, respectively. In emb. 2.3528, the 1 st and 2nd s.s. are SID 3528 & any one of SID 101-1708, respectively. In emb. 2.3529, the 1 st and 2nd s.s. are SID 3529 & any one of SID 101-1708, respectively. In emb. 2.3530, the 1 st and 2nd s.s. are SID 3530 & any one of SID 101-1708, respectively. In emb. 2.3531, the 1 st and 2nd s.s. are SID 3531 & any one of SID 101-1708, respectively. In emb. 2.3532, the 1 st and 2nd s.s. are SID 3532 & any one of SID 101-1708, respectively. In emb. 2.3533, the 1 st and 2nd s.s. are SID 3533 & any one of SID 101-1708, respectively. In emb. 2.3534, the 1 st and 2nd s.s. are SID 3534 & any one of SID 101-1708, respectively. In emb. 2.3535, the 1 st and 2nd s.s. are SID 3535 & any one of SID 101-1708, respectively. In emb. 2.3536, the 1 st and 2nd s.s. are SID 3536 & any one of SID 101-1708, respectively. In emb. 2.3537, the 1 st and 2nd s.s. are SID 3537 & any one of SID 101-1708, respectively. In emb. 2.3538, the 1 st and 2nd s.s. are SID 3538 & any one of SID 101-1708, respectively. In emb. 2.3539, the 1 st and 2nd s.s. are SID 3539 & any one of SID 101-1708, respectively. In emb. 2.3540, the 1 st and 2nd s.s. are SID 3540 & any one of SID 101-1708, respectively. In emb. 2.3541, the 1 st and 2nd s.s. are SID 3541 & any one of SID 101-1708, respectively. In emb. 2.3542, the 1 st and 2nd s.s. are SID 3542 & any one of SID 101-1708, respectively. In emb. 2.3543, the 1 st and 2nd s.s. are SID 3543 & any one of SID 101-1708, respectively. In emb. 2.3544, the 1 st and 2nd s.s. are SID 3544 & any one of SID 101-1708, respectively. In emb. 2.3545, the 1 st and 2nd s.s. are SID 3545 & any one of SID 101-1708, respectively. In emb. 2.3546, the 1 st and 2nd s.s. are SID 3546 & any one of SID 101-1708, respectively. In emb. 2.3547, the 1 st and 2nd s.s. are SID 3547 & any one of SID 101-1708, respectively. In emb. 2.3548, the 1 st and 2nd s.s. are SID 3548 & any one of SID 101-1708, respectively. In emb. 2.3549, the 1 st and 2nd s.s. are SID 3549 & any one of SID 101-1708, respectively. In emb. 2.3550, the 1 st and 2nd s.s. are SID 3550 & any one of SID 101-1708, respectively. In emb. 2.3551, the 1 st and 2nd s.s. are SID 3551 & any one of SID 101-1708, respectively. In emb. 2.3552, the 1 st and 2nd s.s. are SID 3552 & any one of SID 101-1708, respectively. In emb. 2.3553, the 1 st and 2nd s.s. are SID 3553 & any one of SID 101-1708, respectively. In emb. 2.3554, the 1 st and 2nd s.s. are SID 3554 & any one of SID 101-1708, respectively. In emb. 2.3555, the 1 st and 2nd s.s. are SID 3555 & any one of SID 101-1708, respectively. In emb. 2.3556, the 1 st and 2nd s.s. are SID 3556 & any one of SID 101-1708, respectively. In emb. 2.3557, the 1 st and 2nd s.s. are SID 3557 & any one of SID 101-1708, respectively. In emb. 2.3558, the 1 st and 2nd s.s. are SID 3558 & any one of SID 101-1708, respectively. In emb. 2.3559, the 1 st and 2nd s.s. are SID 3559 & any one of SID 101-1708, respectively. In emb. 2.3560, the 1 st and 2nd s.s. are SID 3560 & any one of SID 101-1708, respectively. In emb. 2.3561, the 1 st and 2nd s.s. are SID 3561 & any one of SID 101-1708, respectively. In emb. 2.3562, the 1 st and 2nd s.s. are SID 3562 & any one of SID 101-1708, respectively. In emb. 2.3563, the 1 st and 2nd s.s. are SID 3563 & any one of SID 101-1708, respectively. In emb. 2.3564, the 1 st and 2nd s.s. are SID 3564 & any one of SID 101-1708, respectively. In emb. 2.3565, the 1 st and 2nd s.s. are SID 3565 & any one of SID 101-1708, respectively. In emb. 2.3566, the 1 st and 2nd s.s. are SID 3566 & any one of SID 101-1708, respectively. In emb. 2.3567, the 1 st and 2nd s.s. are SID 3567 & any one of SID 101-1708, respectively. In emb. 2.3568, the 1 st and 2nd s.s. are SID 3568 & any one of SID 101-1708, respectively. In emb. 2.3569, the 1 st and 2nd s.s. are SID 3569 & any one of SID 101-1708, respectively. In emb. 2.3570, the 1 st and 2nd s.s. are SID 3570 & any one of SID 101-1708, respectively. In emb. 2.3571, the 1 st and 2nd s.s. are SID 3571 & any one of SID 101-1708, respectively. In emb. 2.3572, the 1 st and 2nd s.s. are SID 3572 & any one of SID 101-1708, respectively. In emb. 2.3573, the 1 st and 2nd s.s. are SID 3573 & any one of SID 101-1708, respectively. In emb. 2.3574, the 1 st and 2nd s.s. are SID 3574 & any one of SID 101-1708, respectively. In emb. 2.3575, the 1 st and 2nd s.s. are SID 3575 & any one of SID 101-1708, respectively. In emb. 2.3576, the 1 st and 2nd s.s. are SID 3576 & any one of SID 101-1708, respectively. In emb. 2.3577, the 1 st and 2nd s.s. are SID 3577 & any one of SID 101-1708, respectively. In emb. 2.3578, the 1 st and 2nd s.s. are SID 3578 & any one of SID 101-1708, respectively. In emb. 2.3579, the 1 st and 2nd s.s. are SID 3579 & any one of SID 101-1708, respectively. In emb. 2.3580, the 1 st and 2nd s.s. are SID 3580 & any one of SID 101-1708, respectively. In emb. 2.3581, the 1 st and 2nd s.s. are SID 3581 & any one of SID 101-1708, respectively. In emb. 2.3582, the 1 st and 2nd s.s. are SID 3582 & any one of SID 101-1708, respectively. In emb. 2.3583, the 1 st and 2nd s.s. are SID 3583 & any one of SID 101-1708, respectively. In emb. 2.3584, the 1 st and 2nd s.s. are SID 3584 & any one of SID 101-1708, respectively. In emb. 2.3585, the 1 st and 2nd s.s. are SID 3585 & any one of SID 101-1708, respectively. In emb. 2.3586, the 1 st and 2nd s.s. are SID 3586 & any one of SID 101-1708, respectively. In emb. 2.3587, the 1 st and 2nd s.s. are SID 3587 & any one of SID 101-1708, respectively. In emb. 2.3588, the 1 st and 2nd s.s. are SID 3588 & any one of SID 101-1708, respectively. In emb. 2.3589, the 1 st and 2nd s.s. are SID 3589 & any one of SID 101-1708, respectively. In emb. 2.3590, the 1 st and 2nd s.s. are SID 3590 & any one of SID 101-1708, respectively. In emb. 2.3591, the 1 st and 2nd s.s. are SID 3591 & any one of SID 101-1708, respectively. In emb. 2.3592, the 1 st and 2nd s.s. are SID 3592 & any one of SID 101-1708, respectively. In emb. 2.3593, the 1 st and 2nd s.s. are SID 3593 & any one of SID 101-1708, respectively. In emb. 2.3594, the 1 st and 2nd s.s. are SID 3594 & any one of SID 101-1708, respectively. In emb. 2.3595, the 1 st and 2nd s.s. are SID 3595 & any one of SID 101-1708, respectively. In emb. 2.3596, the 1 st and 2nd s.s. are SID 3596 & any one of SID 101-1708, respectively. In emb. 2.3597, the 1 st and 2nd s.s. are SID 3597 & any one of SID 101-1708, respectively. In emb. 2.3598, the 1 st and 2nd s.s. are SID 3598 & any one of SID 101-1708, respectively. In emb. 2.3599, the 1 st and 2nd s.s. are SID 3599 & any one of SID 101-1708, respectively. In emb. 2.3600, the 1 st and 2nd s.s. are SID 3600 & any one of SID 101-1708, respectively. In emb. 2.3601, the 1 st and 2nd s.s. are SID 3601 & any one of SID 101-1708, respectively. In emb. 2.3602, the 1 st and 2nd s.s. are SID 3602 & any one of SID 101-1708, respectively. In emb. 2.3603, the 1 st and 2nd s.s. are SID 3603 & any one of SID 101-1708, respectively. In emb. 2.3604, the 1 st and 2nd s.s. are SID 3604 & any one of SID 101-1708, respectively. In emb. 2.3605, the 1 st and 2nd s.s. are SID 3605 & any one of SID 101-1708, respectively. In emb. 2.3606, the 1 st and 2nd s.s. are SID 3606 & any one of SID 101-1708, respectively. In emb. 2.3607, the 1 st and 2nd s.s. are SID 3607 & any one of SID 101-1708, respectively. In emb. 2.3608, the 1 st and 2nd s.s. are SID 3608 & any one of SID 101-1708, respectively. In emb. 2.3609, the 1 st and 2nd s.s. are SID 3609 & any one of SID 101-1708, respectively. In emb. 2.3610, the 1 st and 2nd s.s. are SID 3610 & any one of SID 101-1708, respectively. In emb. 2.3611, the 1 st and 2nd s.s. are SID 3611 & any one of SID 101-1708, respectively. In emb. 2.3612, the 1 st and 2nd s.s. are SID 3612 & any one of SID 101-1708, respectively. In emb. 2.3613, the 1 st and 2nd s.s. are SID 3613 & any one of SID 101-1708, respectively. In emb. 2.3614, the 1 st and 2nd s.s. are SID 3614 & any one of SID 101-1708, respectively. In emb. 2.3615, the 1 st and 2nd s.s. are SID 3615 & any one of SID 101-1708, respectively. In emb. 2.3616, the 1 st and 2nd s.s. are SID 3616 & any one of SID 101-1708, respectively. In emb. 2.3617, the 1 st and 2nd s.s. are SID 3617 & any one of SID 101-1708, respectively. In emb. 2.3618, the 1 st and 2nd s.s. are SID 3618 & any one of SID 101-1708, respectively. In emb. 2.3619, the 1 st and 2nd s.s. are SID 3619 & any one of SID 101-1708, respectively. In emb. 2.3620, the 1 st and 2nd s.s. are SID 3620 & any one of SID 101-1708, respectively. In emb. 2.3621, the 1 st and 2nd s.s. are SID 3621 & any one of SID 101-1708, respectively. In emb. 2.3622, the 1 st and 2nd s.s. are SID 3622 & any one of SID 101-1708, respectively. In emb. 2.3623, the 1 st and 2nd s.s. are SID 3623 & any one of SID 101-1708, respectively. In emb. 2.3624, the 1 st and 2nd s.s. are SID 3624 & any one of SID 101-1708, respectively. In emb. 2.3625, the 1 st and 2nd s.s. are SID 3625 & any one of SID 101-1708, respectively. In emb. 2.3626, the 1 st and 2nd s.s. are SID 3626 & any one of SID 101-1708, respectively. In emb. 2.3627, the 1 st and 2nd s.s. are SID 3627 & any one of SID 101-1708, respectively. In emb. 2.3628, the 1 st and 2nd s.s. are SID 3628 & any one of SID 101-1708, respectively. In emb. 2.3629, the 1 st and 2nd s.s. are SID 3629 & any one of SID 101-1708, respectively. In emb. 2.3630, the 1 st and 2nd s.s. are SID 3630 & any one of SID 101-1708, respectively. In emb. 2.3631, the 1 st and 2nd s.s. are SID 3631 & any one of SID 101-1708, respectively. In emb. 2.3632, the 1 st and 2nd s.s. are SID 3632 & any one of SID 101-1708, respectively. In emb. 2.3633, the 1 st and 2nd s.s. are SID 3633 & any one of SID 101-1708, respectively. In emb. 2.3634, the 1 st and 2nd s.s. are SID 3634 & any one of SID 101-1708, respectively. In emb. 2.3635, the 1 st and 2nd s.s. are SID 3635 & any one of SID 101-1708, respectively. In emb. 2.3636, the 1 st and 2nd s.s. are SID 3636 & any one of SID 101-1708, respectively. In emb. 2.3637, the 1 st and 2nd s.s. are SID 3637 & any one of SID 101-1708, respectively. In emb. 2.3638, the 1 st and 2nd s.s. are SID 3638 & any one of SID 101-1708, respectively. In emb. 2.3639, the 1 st and 2nd s.s. are SID 3639 & any one of SID 101-1708, respectively. In emb. 2.3640, the 1 st and 2nd s.s. are SID 3640 & any one of SID 101-1708, respectively. In emb. 2.3641, the 1 st and 2nd s.s. are SID 3641 & any one of SID 101-1708, respectively. In emb. 2.3642, the 1 st and 2nd s.s. are SID 3642 & any one of SID 101-1708, respectively. In emb. 2.3643, the 1 st and 2nd s.s. are SID 3643 & any one of SID 101-1708, respectively. In emb. 2.3644, the 1 st and 2nd s.s. are SID 3644 & any one of SID 101-1708, respectively. In emb. 2.3645, the 1 st and 2nd s.s. are SID 3645 & any one of SID 101-1708, respectively. In emb. 2.3646, the 1 st and 2nd s.s. are SID 3646 & any one of SID 101-1708, respectively. In emb. 2.3647, the 1 st and 2nd s.s. are SID 3647 & any one of SID 101-1708, respectively. In emb. 2.3648, the 1 st and 2nd s.s. are SID 3648 & any one of SID 101-1708, respectively. In emb. 2.3649, the 1 st and 2nd s.s. are SID 3649 & any one of SID 101-1708, respectively. In emb. 2.3650, the 1 st and 2nd s.s. are SID 3650 & any one of SID 101-1708, respectively. In emb. 2.3651, the 1 st and 2nd s.s. are SID 3651 & any one of SID 101-1708, respectively. In emb. 2.3652, the 1 st and 2nd s.s. are SID 3652 & any one of SID 101-1708, respectively. In emb. 2.3653, the 1 st and 2nd s.s. are SID 3653 & any one of SID 101-1708, respectively. In emb. 2.3654, the 1 st and 2nd s.s. are SID 3654 & any one of SID 101-1708, respectively. In emb. 2.3655, the 1 st and 2nd s.s. are SID 3655 & any one of SID 101-1708, respectively. In emb. 2.3656, the 1 st and 2nd s.s. are SID 3656 & any one of SID 101-1708, respectively. In emb. 2.3657, the 1 st and 2nd s.s. are SID 3657 & any one of SID 101-1708, respectively. In emb. 2.3658, the 1 st and 2nd s.s. are SID 3658 & any one of SID 101-1708, respectively. In emb. 2.3659, the 1 st and 2nd s.s. are SID 3659 & any one of SID 101-1708, respectively. In emb. 2.3660, the 1 st and 2nd s.s. are SID 3660 & any one of SID 101-1708, respectively. In emb. 2.3661, the 1 st and 2nd s.s. are SID 3661 & any one of SID 101-1708, respectively. In emb. 2.3662, the 1 st and 2nd s.s. are SID 3662 & any one of SID 101-1708, respectively. In emb. 2.3663, the 1 st and 2nd s.s. are SID 3663 & any one of SID 101-1708, respectively. In emb. 2.3664, the 1 st and 2nd s.s. are SID 3664 & any one of SID 101-1708, respectively. In emb. 2.3665, the 1 st and 2nd s.s. are SID 3665 & any one of SID 101-1708, respectively. In emb. 2.3666, the 1 st and 2nd s.s. are SID 3666 & any one of SID 101-1708, respectively. In emb. 2.3667, the 1 st and 2nd s.s. are SID 3667 & any one of SID 101-1708, respectively. In emb. 2.3668, the 1 st and 2nd s.s. are SID 3668 & any one of SID 101-1708, respectively. In emb. 2.3669, the 1 st and 2nd s.s. are SID 3669 & any one of SID 101-1708, respectively. In emb. 2.3670, the 1 st and 2nd s.s. are SID 3670 & any one of SID 101-1708, respectively. In emb. 2.3671, the 1 st and 2nd s.s. are SID 3671 & any one of SID 101-1708, respectively. In emb. 2.3672, the 1 st and 2nd s.s. are SID 3672 & any one of SID 101-1708, respectively. In emb. 2.3673, the 1 st and 2nd s.s. are SID 3673 & any one of SID 101-1708, respectively. In emb. 2.3674, the 1 st and 2nd s.s. are SID 3674 & any one of SID 101-1708, respectively. In emb. 2.3675, the 1 st and 2nd s.s. are SID 3675 & any one of SID 101-1708, respectively. In emb. 2.3676, the 1 st and 2nd s.s. are SID 3676 & any one of SID 101-1708, respectively. In emb. 2.3677, the 1 st and 2nd s.s. are SID 3677 & any one of SID 101-1708, respectively. In emb. 2.3678, the 1 st and 2nd s.s. are SID 3678 & any one of SID 101-1708, respectively. In emb. 2.3679, the 1 st and 2nd s.s. are SID 3679 & any one of SID 101-1708, respectively. In emb. 2.3680, the 1 st and 2nd s.s. are SID 3680 & any one of SID 101-1708, respectively. In emb. 2.3681, the 1 st and 2nd s.s. are SID 3681 & any one of SID 101-1708, respectively. In emb. 2.3682, the 1 st and 2nd s.s. are SID 3682 & any one of SID 101-1708, respectively. In emb. 2.3683, the 1 st and 2nd s.s. are SID 3683 & any one of SID 101-1708, respectively. In emb. 2.3684, the 1 st and 2nd s.s. are SID 3684 & any one of SID 101-1708, respectively. In emb. 2.3685, the 1 st and 2nd s.s. are SID 3685 & any one of SID 101-1708, respectively. In emb. 2.3686, the 1 st and 2nd s.s. are SID 3686 & any one of SID 101-1708, respectively. In emb. 2.3687, the 1 st and 2nd s.s. are SID 3687 & any one of SID 101-1708, respectively. In emb. 2.3688, the 1 st and 2nd s.s. are SID 3688 & any one of SID 101-1708, respectively. In emb. 2.3689, the 1 st and 2nd s.s. are SID 3689 & any one of SID 101-1708, respectively. In emb. 2.3690, the 1 st and 2nd s.s. are SID 3690 & any one of SID 101-1708, respectively. In emb. 2.3691, the 1 st and 2nd s.s. are SID 3691 & any one of SID 101-1708, respectively. In emb. 2.3692, the 1 st and 2nd s.s. are SID 3692 & any one of SID 101-1708, respectively. In emb. 2.3693, the 1 st and 2nd s.s. are SID 3693 & any one of SID 101-1708, respectively. In emb. 2.3694, the 1 st and 2nd s.s. are SID 3694 & any one of SID 101-1708, respectively. In emb. 2.3695, the 1 st and 2nd s.s. are SID 3695 & any one of SID 101-1708, respectively. In emb. 2.3696, the 1 st and 2nd s.s. are SID 3696 & any one of SID 101-1708, respectively. In emb. 2.3697, the 1 st and 2nd s.s. are SID 3697 & any one of SID 101-1708, respectively. In emb. 2.3698, the 1 st and 2nd s.s. are SID 3698 & any one of SID 101-1708, respectively. In emb. 2.3699, the 1 st and 2nd s.s. are SID 3699 & any one of SID 101-1708, respectively. In emb. 2.3700, the 1 st and 2nd s.s. are SID 3700 & any one of SID 101-1708, respectively. In emb. 2.3701, the 1 st and 2nd s.s. are SID 3701 & any one of SID 101-1708, respectively. In emb. 2.3702, the 1 st and 2nd s.s. are SID 3702 & any one of SID 101-1708, respectively. In emb. 2.3703, the 1 st and 2nd s.s. are SID 3703 & any one of SID 101-1708, respectively. In emb. 2.3704, the 1 st and 2nd s.s. are SID 3704 & any one of SID 101-1708, respectively. In emb. 2.3705, the 1 st and 2nd s.s. are SID 3705 & any one of SID 101-1708, respectively. In emb. 2.3706, the 1 st and 2nd s.s. are SID 3706 & any one of SID 101-1708, respectively. In emb. 2.3707, the 1 st and 2nd s.s. are SID 3707 & any one of SID 101-1708, respectively. In emb. 2.3708, the 1 st and 2nd s.s. are SID 3708 & any one of SID 101-1708, respectively. In emb. 2.3709, the 1 st and 2nd s.s. are SID 3709 & any one of SID 101-1708, respectively. In emb. 2.3710, the 1 st and 2nd s.s. are SID 3710 & any one of SID 101-1708, respectively. In emb. 2.3711, the 1 st and 2nd s.s. are SID 3711 & any one of SID 101-1708, respectively. In emb. 2.3712, the 1 st and 2nd s.s. are SID 3712 & any one of SID 101-1708, respectively. In emb. 2.3713, the 1 st and 2nd s.s. are SID 3713 & any one of SID 101-1708, respectively. In emb. 2.3714, the 1 st and 2nd s.s. are SID 3714 & any one of SID 101-1708, respectively. In emb. 2.3715, the 1 st and 2nd s.s. are SID 3715 & any one of SID 101-1708, respectively. In emb. 2.3716, the 1 st and 2nd s.s. are SID 3716 & any one of SID 101-1708, respectively. In emb. 2.3717, the 1 st and 2nd s.s. are SID 3717 & any one of SID 101-1708, respectively. In emb. 2.3718, the 1 st and 2nd s.s. are SID 3718 & any one of SID 101-1708, respectively. In emb. 2.3719, the 1 st and 2nd s.s. are SID 3719 & any one of SID 101-1708, respectively. In emb. 2.3720, the 1 st and 2nd s.s. are SID 3720 & any one of SID 101-1708, respectively. In emb. 2.3721, the 1 st and 2nd s.s. are SID 3721 & any one of SID 101-1708, respectively. In emb. 2.3722, the 1 st and 2nd s.s. are SID 3722 & any one of SID 101-1708, respectively. In emb. 2.3723, the 1 st and 2nd s.s. are SID 3723 & any one of SID 101-1708, respectively. In emb. 2.3724, the 1 st and 2nd s.s. are SID 3724 & any one of SID 101-1708, respectively. In emb. 2.3725, the 1 st and 2nd s.s. are SID 3725 & any one of SID 101-1708, respectively. In emb. 2.3726, the 1 st and 2nd s.s. are SID 3726 & any one of SID 101-1708, respectively. In emb. 2.3727, the 1 st and 2nd s.s. are SID 3727 & any one of SID 101-1708, respectively. In emb. 2.3728, the 1 st and 2nd s.s. are SID 3728 & any one of SID 101-1708, respectively. In emb. 2.3729, the 1 st and 2nd s.s. are SID 3729 & any one of SID 101-1708, respectively. In emb. 2.3730, the 1 st and 2nd s.s. are SID 3730 & any one of SID 101-1708, respectively. In emb. 2.3731, the 1 st and 2nd s.s. are SID 3731 & any one of SID 101-1708, respectively. In emb. 2.3732, the 1 st and 2nd s.s. are SID 3732 & any one of SID 101-1708, respectively. In emb. 2.3733, the 1 st and 2nd s.s. are SID 3733 & any one of SID 101-1708, respectively. In emb. 2.3734, the 1 st and 2nd s.s. are SID 3734 & any one of SID 101-1708, respectively. In emb. 2.3735, the 1 st and 2nd s.s. are SID 3735 & any one of SID 101-1708, respectively. In emb. 2.3736, the 1 st and 2nd s.s. are SID 3736 & any one of SID 101-1708, respectively. In emb. 2.3737, the 1 st and 2nd s.s. are SID 3737 & any one of SID 101-1708, respectively. In emb. 2.3738, the 1 st and 2nd s.s. are SID 3738 & any one of SID 101-1708, respectively. In emb. 2.3739, the 1 st and 2nd s.s. are SID 3739 & any one of SID 101-1708, respectively. In emb. 2.3740, the 1 st and 2nd s.s. are SID 3740 & any one of SID 101-1708, respectively. In emb. 2.3741, the 1 st and 2nd s.s. are SID 3741 & any one of SID 101-1708, respectively. In emb. 2.3742, the 1 st and 2nd s.s. are SID 3742 & any one of SID 101-1708, respectively. In emb. 2.3743, the 1 st and 2nd s.s. are SID 3743 & any one of SID 101-1708, respectively. In emb. 2.3744, the 1 st and 2nd s.s. are SID 3744 & any one of SID 101-1708, respectively. In emb. 2.3745, the 1 st and 2nd s.s. are SID 3745 & any one of SID 101-1708, respectively. In emb. 2.3746, the 1 st and 2nd s.s. are SID 3746 & any one of SID 101-1708, respectively. In emb. 2.3747, the 1 st and 2nd s.s. are SID 3747 & any one of SID 101-1708, respectively. In emb. 2.3748, the 1 st and 2nd s.s. are SID 3748 & any one of SID 101-1708, respectively. In emb. 2.3749, the 1 st and 2nd s.s. are SID 3749 & any one of SID 101-1708, respectively. In emb. 2.3750, the 1 st and 2nd s.s. are SID 3750 & any one of SID 101-1708, respectively. In emb. 2.3751, the 1 st and 2nd s.s. are SID 3751 & any one of SID 101-1708, respectively. In emb. 2.3752, the 1 st and 2nd s.s. are SID 3752 & any one of SID 101-1708, respectively. In emb. 2.3753, the 1 st and 2nd s.s. are SID 3753 & any one of SID 101-1708, respectively. In emb. 2.3754, the 1 st and 2nd s.s. are SID 3754 & any one of SID 101-1708, respectively. In emb. 2.3755, the 1 st and 2nd s.s. are SID 3755 & any one of SID 101-1708, respectively. In emb. 2.3756, the 1 st and 2nd s.s. are SID 3756 & any one of SID 101-1708, respectively. In emb. 2.3757, the 1 st and 2nd s.s. are SID 3757 & any one of SID 101-1708, respectively. In emb. 2.3758, the 1 st and 2nd s.s. are SID 3758 & any one of SID 101-1708, respectively. In emb. 2.3759, the 1 st and 2nd s.s. are SID 3759 & any one of SID 101-1708, respectively. In emb. 2.3760, the 1 st and 2nd s.s. are SID 3760 & any one of SID 101-1708, respectively. In emb. 2.3761, the 1 st and 2nd s.s. are SID 3761 & any one of SID 101-1708, respectively. In emb. 2.3762, the 1 st and 2nd s.s. are SID 3762 & any one of SID 101-1708, respectively. In emb. 2.3763, the 1 st and 2nd s.s. are SID 3763 & any one of SID 101-1708, respectively. In emb. 2.3764, the 1 st and 2nd s.s. are SID 3764 & any one of SID 101-1708, respectively. In emb. 2.3765, the 1 st and 2nd s.s. are SID 3765 & any one of SID 101-1708, respectively. In emb. 2.3766, the 1 st and 2nd s.s. are SID 3766 & any one of SID 101-1708, respectively. In emb. 2.3767, the 1 st and 2nd s.s. are SID 3767 & any one of SID 101-1708, respectively. In emb. 2.3768, the 1 st and 2nd s.s. are SID 3768 & any one of SID 101-1708, respectively. In emb. 2.3769, the 1 st and 2nd s.s. are SID 3769 & any one of SID 101-1708, respectively. In emb. 2.3770, the 1 st and 2nd s.s. are SID 3770 & any one of SID 101-1708, respectively. In emb. 2.3771, the 1 st and 2nd s.s. are SID 3771 & any one of SID 101-1708, respectively. In emb. 2.3772, the 1 st and 2nd s.s. are SID 3772 & any one of SID 101-1708, respectively. In emb. 2.3773, the 1 st and 2nd s.s. are SID 3773 & any one of SID 101-1708, respectively. In emb. 2.3774, the 1 st and 2nd s.s. are SID 3774 & any one of SID 101-1708, respectively. In emb. 2.3775, the 1 st and 2nd s.s. are SID 3775 & any one of SID 101-1708, respectively. In emb. 2.3776, the 1 st and 2nd s.s. are SID 3776 & any one of SID 101-1708, respectively. In emb. 2.3777, the 1 st and 2nd s.s. are SID 3777 & any one of SID 101-1708, respectively. In emb. 2.3778, the 1 st and 2nd s.s. are SID 3778 & any one of SID 101-1708, respectively. In emb. 2.3779, the 1 st and 2nd s.s. are SID 3779 & any one of SID 101-1708, respectively. In emb. 2.3780, the 1 st and 2nd s.s. are SID 3780 & any one of SID 101-1708, respectively. In emb. 2.3781, the 1 st and 2nd s.s. are SID 3781 & any one of SID 101-1708, respectively. In emb. 2.3782, the 1 st and 2nd s.s. are SID 3782 & any one of SID 101-1708, respectively. In emb. 2.3783, the 1 st and 2nd s.s. are SID 3783 & any one of SID 101-1708, respectively. In emb. 2.3784, the 1 st and 2nd s.s. are SID 3784 & any one of SID 101-1708, respectively. In emb. 2.3785, the 1 st and 2nd s.s. are SID 3785 & any one of SID 101-1708, respectively. In emb. 2.3786, the 1 st and 2nd s.s. are SID 3786 & any one of SID 101-1708, respectively. In emb. 2.3787, the 1 st and 2nd s.s. are SID 3787 & any one of SID 101-1708, respectively. In emb. 2.3788, the 1 st and 2nd s.s. are SID 3788 & any one of SID 101-1708, respectively. In emb. 2.3789, the 1 st and 2nd s.s. are SID 3789 & any one of SID 101-1708, respectively. In emb. 2.3790, the 1 st and 2nd s.s. are SID 3790 & any one of SID 101-1708, respectively. In emb. 2.3791, the 1 st and 2nd s.s. are SID 3791 & any one of SID 101-1708, respectively. In emb. 2.3792, the 1 st and 2nd s.s. are SID 3792 & any one of SID 101-1708, respectively. In emb. 2.3793, the 1 st and 2nd s.s. are SID 3793 & any one of SID 101-1708, respectively. In emb. 2.3794, the 1 st and 2nd s.s. are SID 3794 & any one of SID 101-1708, respectively. In emb. 2.3795, the 1 st and 2nd s.s. are SID 3795 & any one of SID 101-1708, respectively. In emb. 2.3796, the 1 st and 2nd s.s. are SID 3796 & any one of SID 101-1708, respectively. In emb. 2.3797, the 1 st and 2nd s.s. are SID 3797 & any one of SID 101-1708, respectively. In emb. 2.3798, the 1 st and 2nd s.s. are SID 3798 & any one of SID 101-1708, respectively. In emb. 2.3799, the 1 st and 2nd s.s. are SID 3799 & any one of SID 101-1708, respectively. In emb. 2.3800, the 1 st and 2nd s.s. are SID 3800 & any one of SID 101-1708, respectively. In emb. 2.3801, the 1 st and 2nd s.s. are SID 3801 & any one of SID 101-1708, respectively. In emb. 2.3802, the 1 st and 2nd s.s. are SID 3802 & any one of SID 101-1708, respectively. In emb. 2.3803, the 1 st and 2nd s.s. are SID 3803 & any one of SID 101-1708, respectively. In emb. 2.3804, the 1 st and 2nd s.s. are SID 3804 & any one of SID 101-1708, respectively. In emb. 2.3805, the 1 st and 2nd s.s. are SID 3805 & any one of SID 101-1708, respectively. In emb. 2.3806, the 1 st and 2nd s.s. are SID 3806 & any one of SID 101-1708, respectively. In emb. 2.3807, the 1 st and 2nd s.s. are SID 3807 & any one of SID 101-1708, respectively. In emb. 2.3808, the 1 st and 2nd s.s. are SID 3808 & any one of SID 101-1708, respectively. In emb. 2.3809, the 1 st and 2nd s.s. are SID 3809 & any one of SID 101-1708, respectively. In emb. 2.3810, the 1 st and 2nd s.s. are SID 3810 & any one of SID 101-1708, respectively. In emb. 2.3811, the 1 st and 2nd s.s. are SID 3811 & any one of SID 101-1708, respectively. In emb. 2.3812, the 1 st and 2nd s.s. are SID 3812 & any one of SID 101-1708, respectively. In emb. 2.3813, the 1 st and 2nd s.s. are SID 3813 & any one of SID 101-1708, respectively. In emb. 2.3814, the 1 st and 2nd s.s. are SID 3814 & any one of SID 101-1708, respectively. In emb. 2.3815, the 1 st and 2nd s.s. are SID 3815 & any one of SID 101-1708, respectively. In emb. 2.3816, the 1 st and 2nd s.s. are SID 3816 & any one of SID 101-1708, respectively. In emb. 2.3817, the 1 st and 2nd s.s. are SID 3817 & any one of SID 101-1708, respectively. In emb. 2.3818, the 1 st and 2nd s.s. are SID 3818 & any one of SID 101-1708, respectively. In emb. 2.3819, the 1 st and 2nd s.s. are SID 3819 & any one of SID 101-1708, respectively. In emb. 2.3820, the 1 st and 2nd s.s. are SID 3820 & any one of SID 101-1708, respectively. In emb. 2.3821, the 1 st and 2nd s.s. are SID 3821 & any one of SID 101-1708, respectively. In emb. 2.3822, the 1 st and 2nd s.s. are SID 3822 & any one of SID 101-1708, respectively. In emb. 2.3823, the 1 st and 2nd s.s. are SID 3823 & any one of SID 101-1708, respectively. In emb. 2.3824, the 1 st and 2nd s.s. are SID 3824 & any one of SID 101-1708, respectively. In emb. 2.3825, the 1 st and 2nd s.s. are SID 3825 & any one of SID 101-1708, respectively. In emb. 2.3826, the 1 st and 2nd s.s. are SID 3826 & any one of SID 101-1708, respectively. In emb. 2.3827, the 1 st and 2nd s.s. are SID 3827 & any one of SID 101-1708, respectively. In emb. 2.3828, the 1 st and 2nd s.s. are SID 3828 & any one of SID 101-1708, respectively. In emb. 2.3829, the 1 st and 2nd s.s. are SID 3829 & any one of SID 101-1708, respectively. In emb. 2.3830, the 1 st and 2nd s.s. are SID 3830 & any one of SID 101-1708, respectively. In emb. 2.3831, the 1 st and 2nd s.s. are SID 3831 & any one of SID 101-1708, respectively. In emb. 2.3832, the 1 st and 2nd s.s. are SID 3832 & any one of SID 101-1708, respectively. In emb. 2.3833, the 1 st and 2nd s.s. are SID 3833 & any one of SID 101-1708, respectively. In emb. 2.3834, the 1 st and 2nd s.s. are SID 3834 & any one of SID 101-1708, respectively. In emb. 2.3835, the 1 st and 2nd s.s. are SID 3835 & any one of SID 101-1708, respectively. In emb. 2.3836, the 1 st and 2nd s.s. are SID 3836 & any one of SID 101-1708, respectively. In emb. 2.3837, the 1 st and 2nd s.s. are SID 3837 & any one of SID 101-1708, respectively. In emb. 2.3838, the 1 st and 2nd s.s. are SID 3838 & any one of SID 101-1708, respectively. In emb. 2.3839, the 1 st and 2nd s.s. are SID 3839 & any one of SID 101-1708, respectively. In emb. 2.3840, the 1 st and 2nd s.s. are SID 3840 & any one of SID 101-1708, respectively. In emb. 2.3841, the 1 st and 2nd s.s. are SID 3841 & any one of SID 101-1708, respectively. In emb. 2.3842, the 1 st and 2nd s.s. are SID 3842 & any one of SID 101-1708, respectively. In emb. 2.3843, the 1 st and 2nd s.s. are SID 3843 & any one of SID 101-1708, respectively. In emb. 2.3844, the 1 st and 2nd s.s. are SID 3844 & any one of SID 101-1708, respectively. In emb. 2.3845, the 1 st and 2nd s.s. are SID 3845 & any one of SID 101-1708, respectively. In emb. 2.3846, the 1 st and 2nd s.s. are SID 3846 & any one of SID 101-1708, respectively. In emb. 2.3847, the 1 st and 2nd s.s. are SID 3847 & any one of SID 101-1708, respectively. In emb. 2.3848, the 1 st and 2nd s.s. are SID 3848 & any one of SID 101-1708, respectively. In emb. 2.3849, the 1 st and 2nd s.s. are SID 3849 & any one of SID 101-1708, respectively. In emb. 2.3850, the 1 st and 2nd s.s. are SID 3850 & any one of SID 101-1708, respectively. In emb. 2.3851, the 1 st and 2nd s.s. are SID 3851 & any one of SID 101-1708, respectively. In emb. 2.3852, the 1 st and 2nd s.s. are SID 3852 & any one of SID 101-1708, respectively. In emb. 2.3853, the 1 st and 2nd s.s. are SID 3853 & any one of SID 101-1708, respectively. In emb. 2.3854, the 1 st and 2nd s.s. are SID 3854 & any one of SID 101-1708, respectively. In emb. 2.3855, the 1 st and 2nd s.s. are SID 3855 & any one of SID 101-1708, respectively. In emb. 2.3856, the 1 st and 2nd s.s. are SID 3856 & any one of SID 101-1708, respectively. In emb. 2.3857, the 1 st and 2nd s.s. are SID 3857 & any one of SID 101-1708, respectively. In emb. 2.3858, the 1 st and 2nd s.s. are SID 3858 & any one of SID 101-1708, respectively. In emb. 2.3859, the 1 st and 2nd s.s. are SID 3859 & any one of SID 101-1708, respectively. In emb. 2.3860, the 1 st and 2nd s.s. are SID 3860 & any one of SID 101-1708, respectively. In emb. 2.3861, the 1 st and 2nd s.s. are SID 3861 & any one of SID 101-1708, respectively. In emb. 2.3862, the 1 st and 2nd s.s. are SID 3862 & any one of SID 101-1708, respectively. In emb. 2.3863, the 1 st and 2nd s.s. are SID 3863 & any one of SID 101-1708, respectively. In emb. 2.3864, the 1 st and 2nd s.s. are SID 3864 & any one of SID 101-1708, respectively. In emb. 2.3865, the 1 st and 2nd s.s. are SID 3865 & any one of SID 101-1708, respectively. In emb. 2.3866, the 1 st and 2nd s.s. are SID 3866 & any one of SID 101-1708, respectively. In emb. 2.3867, the 1 st and 2nd s.s. are SID 3867 & any one of SID 101-1708, respectively. In emb. 2.3868, the 1 st and 2nd s.s. are SID 3868 & any one of SID 101-1708, respectively. In emb. 2.3869, the 1 st and 2nd s.s. are SID 3869 & any one of SID 101-1708, respectively. In emb. 2.3870, the 1 st and 2nd s.s. are SID 3870 & any one of SID 101-1708, respectively. In emb. 2.3871, the 1 st and 2nd s.s. are SID 3871 & any one of SID 101-1708, respectively. In emb. 2.3872, the 1 st and 2nd s.s. are SID 3872 & any one of SID 101-1708, respectively. In emb. 2.3873, the 1 st and 2nd s.s. are SID 3873 & any one of SID 101-1708, respectively. In emb. 2.3874, the 1 st and 2nd s.s. are SID 3874 & any one of SID 101-1708, respectively. In emb. 2.3875, the 1 st and 2nd s.s. are SID 3875 & any one of SID 101-1708, respectively. In emb. 2.3876, the 1 st and 2nd s.s. are SID 3876 & any one of SID 101-1708, respectively. In emb. 2.3877, the 1 st and 2nd s.s. are SID 3877 & any one of SID 101-1708, respectively. In emb. 2.3878, the 1 st and 2nd s.s. are SID 3878 & any one of SID 101-1708, respectively. In emb. 2.3879, the 1 st and 2nd s.s. are SID 3879 & any one of SID 101-1708, respectively. In emb. 2.3880, the 1 st and 2nd s.s. are SID 3880 & any one of SID 101-1708, respectively. In emb. 2.3881, the 1 st and 2nd s.s. are SID 3881 & any one of SID 101-1708, respectively. In emb. 2.3882, the 1 st and 2nd s.s. are SID 3882 & any one of SID 101-1708, respectively. In emb. 2.3883, the 1 st and 2nd s.s. are SID 3883 & any one of SID 101-1708, respectively. In emb. 2.3884, the 1 st and 2nd s.s. are SID 3884 & any one of SID 101-1708, respectively. In emb. 2.3885, the 1 st and 2nd s.s. are SID 3885 & any one of SID 101-1708, respectively. In emb. 2.3886, the 1 st and 2nd s.s. are SID 3886 & any one of SID 101-1708, respectively. In emb. 2.3887, the 1 st and 2nd s.s. are SID 3887 & any one of SID 101-1708, respectively. In emb. 2.3888, the 1 st and 2nd s.s. are SID 3888 & any one of SID 101-1708, respectively. In emb. 2.3889, the 1 st and 2nd s.s. are SID 3889 & any one of SID 101-1708, respectively. In emb. 2.3890, the 1 st and 2nd s.s. are SID 3890 & any one of SID 101-1708, respectively. In emb. 2.3891, the 1 st and 2nd s.s. are SID 3891 & any one of SID 101-1708, respectively. In emb. 2.3892, the 1 st and 2nd s.s. are SID 3892 & any one of SID 101-1708, respectively. In emb. 2.3893, the 1 st and 2nd s.s. are SID 3893 & any one of SID 101-1708, respectively. In emb. 2.3894, the 1 st and 2nd s.s. are SID 3894 & any one of SID 101-1708, respectively. In emb. 2.3895, the 1 st and 2nd s.s. are SID 3895 & any one of SID 101-1708, respectively. In emb. 2.3896, the 1 st and 2nd s.s. are SID 3896 & any one of SID 101-1708, respectively. In emb. 2.3897, the 1 st and 2nd s.s. are SID 3897 & any one of SID 101-1708, respectively. In emb. 2.3898, the 1 st and 2nd s.s. are SID 3898 & any one of SID 101-1708, respectively. In emb. 2.3899, the 1 st and 2nd s.s. are SID 3899 & any one of SID 101-1708, respectively. In emb. 2.3900, the 1 st and 2nd s.s. are SID 3900 & any one of SID 101-1708, respectively. In emb. 2.3901, the 1 st and 2nd s.s. are SID 3901 & any one of SID 101-1708, respectively. In emb. 2.3902, the 1 st and 2nd s.s. are SID 3902 & any one of SID 101-1708, respectively. In emb. 2.3903, the 1 st and 2nd s.s. are SID 3903 & any one of SID 101-1708, respectively. In emb. 2.3904, the 1 st and 2nd s.s. are SID 3904 & any one of SID 101-1708, respectively. In emb. 2.3905, the 1 st and 2nd s.s. are SID 3905 & any one of SID 101-1708, respectively. In emb. 2.3906, the 1 st and 2nd s.s. are SID 3906 & any one of SID 101-1708, respectively. In emb. 2.3907, the 1 st and 2nd s.s. are SID 3907 & any one of SID 101-1708, respectively. In emb. 2.3908, the 1 st and 2nd s.s. are SID 3908 & any one of SID 101-1708, respectively. In emb. 2.3909, the 1 st and 2nd s.s. are SID 3909 & any one of SID 101-1708, respectively. In emb. 2.3910, the 1 st and 2nd s.s. are SID 3910 & any one of SID 101-1708, respectively. In emb. 2.3911, the 1 st and 2nd s.s. are SID 3911 & any one of SID 101-1708, respectively. In emb. 2.3912, the 1 st and 2nd s.s. are SID 3912 & any one of SID 101-1708, respectively. In emb. 2.3913, the 1 st and 2nd s.s. are SID 3913 & any one of SID 101-1708, respectively. In emb. 2.3914, the 1 st and 2nd s.s. are SID 3914 & any one of SID 101-1708, respectively. In emb. 2.3915, the 1 st and 2nd s.s. are SID 3915 & any one of SID 101-1708, respectively. In emb. 2.3916, the 1 st and 2nd s.s. are SID 3916 & any one of SID 101-1708, respectively. In emb. 2.3917, the 1 st and 2nd s.s. are SID 3917 & any one of SID 101-1708, respectively. In emb. 2.3918, the 1 st and 2nd s.s. are SID 3918 & any one of SID 101-1708, respectively. In emb. 2.3919, the 1 st and 2nd s.s. are SID 3919 & any one of SID 101-1708, respectively. In emb. 2.3920, the 1 st and 2nd s.s. are SID 3920 & any one of SID 101-1708, respectively. In emb. 2.3921, the 1 st and 2nd s.s. are SID 3921 & any one of SID 101-1708, respectively. In emb. 2.3922, the 1 st and 2nd s.s. are SID 3922 & any one of SID 101-1708, respectively. In emb. 2.3923, the 1 st and 2nd s.s. are SID 3923 & any one of SID 101-1708, respectively. In emb. 2.3924, the 1 st and 2nd s.s. are SID 3924 & any one of SID 101-1708, respectively. In emb. 2.3925, the 1 st and 2nd s.s. are SID 3925 & any one of SID 101-1708, respectively. In emb. 2.3926, the 1 st and 2nd s.s. are SID 3926 & any one of SID 101-1708, respectively. In emb. 2.3927, the 1 st and 2nd s.s. are SID 3927 & any one of SID 101-1708, respectively. In emb. 2.3928, the 1 st and 2nd s.s. are SID 3928 & any one of SID 101-1708, respectively. In emb. 2.3929, the 1 st and 2nd s.s. are SID 3929 & any one of SID 101-1708, respectively. In emb. 2.3930, the 1 st and 2nd s.s. are SID 3930 & any one of SID 101-1708, respectively. In emb. 2.3931, the 1 st and 2nd s.s. are SID 3931 & any one of SID 101-1708, respectively. In emb. 2.3932, the 1 st and 2nd s.s. are SID 3932 & any one of SID 101-1708, respectively. In emb. 2.3933, the 1 st and 2nd s.s. are SID 3933 & any one of SID 101-1708, respectively. In emb. 2.3934, the 1 st and 2nd s.s. are SID 3934 & any one of SID 101-1708, respectively. In emb. 2.3935, the 1 st and 2nd s.s. are SID 3935 & any one of SID 101-1708, respectively. In emb. 2.3936, the 1 st and 2nd s.s. are SID 3936 & any one of SID 101-1708, respectively. In emb. 2.3937, the 1 st and 2nd s.s. are SID 3937 & any one of SID 101-1708, respectively. In emb. 2.3938, the 1 st and 2nd s.s. are SID 3938 & any one of SID 101-1708, respectively. In emb. 2.3939, the 1 st and 2nd s.s. are SID 3939 & any one of SID 101-1708, respectively. In emb. 2.3940, the 1 st and 2nd s.s. are SID 3940 & any one of SID 101-1708, respectively. In emb. 2.3941, the 1 st and 2nd s.s. are SID 3941 & any one of SID 101-1708, respectively. In emb. 2.3942, the 1 st and 2nd s.s. are SID 3942 & any one of SID 101-1708, respectively. In emb. 2.3943, the 1 st and 2nd s.s. are SID 3943 & any one of SID 101-1708, respectively. In emb. 2.3944, the 1 st and 2nd s.s. are SID 3944 & any one of SID 101-1708, respectively. In emb. 2.3945, the 1 st and 2nd s.s. are SID 3945 & any one of SID 101-1708, respectively. In emb. 2.3946, the 1 st and 2nd s.s. are SID 3946 & any one of SID 101-1708, respectively. In emb. 2.3947, the 1 st and 2nd s.s. are SID 3947 & any one of SID 101-1708, respectively. In emb. 2.3948, the 1 st and 2nd s.s. are SID 3948 & any one of SID 101-1708, respectively. In emb. 2.3949, the 1 st and 2nd s.s. are SID 3949 & any one of SID 101-1708, respectively. In emb. 2.3950, the 1 st and 2nd s.s. are SID 3950 & any one of SID 101-1708, respectively. In emb. 2.3951, the 1 st and 2nd s.s. are SID 3951 & any one of SID 101-1708, respectively. In emb. 2.3952, the 1 st and 2nd s.s. are SID 3952 & any one of SID 101-1708, respectively. In emb. 2.3953, the 1 st and 2nd s.s. are SID 3953 & any one of SID 101-1708, respectively. In emb. 2.3954, the 1 st and 2nd s.s. are SID 3954 & any one of SID 101-1708, respectively. In emb. 2.3955, the 1 st and 2nd s.s. are SID 3955 & any one of SID 101-1708, respectively. In emb. 2.3956, the 1 st and 2nd s.s. are SID 3956 & any one of SID 101-1708, respectively. In emb. 2.3957, the 1 st and 2nd s.s. are SID 3957 & any one of SID 101-1708, respectively. In emb. 2.3958, the 1 st and 2nd s.s. are SID 3958 & any one of SID 101-1708, respectively. In emb. 2.3959, the 1 st and 2nd s.s. are SID 3959 & any one of SID 101-1708, respectively. In emb. 2.3960, the 1 st and 2nd s.s. are SID 3960 & any one of SID 101-1708, respectively. In emb. 2.3961, the 1 st and 2nd s.s. are SID 3961 & any one of SID 101-1708, respectively. In emb. 2.3962, the 1 st and 2nd s.s. are SID 3962 & any one of SID 101-1708, respectively. In emb. 2.3963, the 1 st and 2nd s.s. are SID 3963 & any one of SID 101-1708, respectively. In emb. 2.3964, the 1 st and 2nd s.s. are SID 3964 & any one of SID 101-1708, respectively. In emb. 2.3965, the 1 st and 2nd s.s. are SID 3965 & any one of SID 101-1708, respectively. In emb. 2.3966, the 1 st and 2nd s.s. are SID 3966 & any one of SID 101-1708, respectively. In emb. 2.3967, the 1 st and 2nd s.s. are SID 3967 & any one of SID 101-1708, respectively. In emb. 2.3968, the 1 st and 2nd s.s. are SID 3968 & any one of SID 101-1708, respectively. In emb. 2.3969, the 1 st and 2nd s.s. are SID 3969 & any one of SID 101-1708, respectively. In emb. 2.3970, the 1 st and 2nd s.s. are SID 3970 & any one of SID 101-1708, respectively. In emb. 2.3971, the 1 st and 2nd s.s. are SID 3971 & any one of SID 101-1708, respectively. In emb. 2.3972, the 1 st and 2nd s.s. are SID 3972 & any one of SID 101-1708, respectively. In emb. 2.3973, the 1 st and 2nd s.s. are SID 3973 & any one of SID 101-1708, respectively. In emb. 2.3974, the 1 st and 2nd s.s. are SID 3974 & any one of SID 101-1708, respectively. In emb. 2.3975, the 1 st and 2nd s.s. are SID 3975 & any one of SID 101-1708, respectively. In emb. 2.3976, the 1 st and 2nd s.s. are SID 3976 & any one of SID 101-1708, respectively. In emb. 2.3977, the 1 st and 2nd s.s. are SID 3977 & any one of SID 101-1708, respectively. In emb. 2.3978, the 1 st and 2nd s.s. are SID 3978 & any one of SID 101-1708, respectively. In emb. 2.3979, the 1 st and 2nd s.s. are SID 3979 & any one of SID 101-1708, respectively. In emb. 2.3980, the 1 st and 2nd s.s. are SID 3980 & any one of SID 101-1708, respectively. In emb. 2.3981, the 1 st and 2nd s.s. are SID 3981 & any one of SID 101-1708, respectively. In emb. 2.3982, the 1 st and 2nd s.s. are SID 3982 & any one of SID 101-1708, respectively. In emb. 2.3983, the 1 st and 2nd s.s. are SID 3983 & any one of SID 101-1708, respectively. In emb. 2.3984, the 1 st and 2nd s.s. are SID 3984 & any one of SID 101-1708, respectively. In emb. 2.3985, the 1 st and 2nd s.s. are SID 3985 & any one of SID 101-1708, respectively. In emb. 2.3986, the 1 st and 2nd s.s. are SID 3986 & any one of SID 101-1708, respectively. In emb. 2.3987, the 1 st and 2nd s.s. are SID 3987 & any one of SID 101-1708, respectively. In emb. 2.3988, the 1 st and 2nd s.s. are SID 3988 & any one of SID 101-1708, respectively. In emb. 2.3989, the 1 st and 2nd s.s. are SID 3989 & any one of SID 101-1708, respectively. In emb. 2.3990, the 1 st and 2nd s.s. are SID 3990 & any one of SID 101-1708, respectively. In emb. 2.3991, the 1 st and 2nd s.s. are SID 3991 & any one of SID 101-1708, respectively. In emb. 2.3992, the 1 st and 2nd s.s. are SID 3992 & any one of SID 101-1708, respectively. In emb. 2.3993, the 1 st and 2nd s.s. are SID 3993 & any one of SID 101-1708, respectively. In emb. 2.3994, the 1 st and 2nd s.s. are SID 3994 & any one of SID 101-1708, respectively. In emb. 2.3995, the 1 st and 2nd s.s. are SID 3995 & any one of SID 101-1708, respectively. In emb. 2.3996, the 1 st and 2nd s.s. are SID 3996 & any one of SID 101-1708, respectively. In emb. 2.3997, the 1 st and 2nd s.s. are SID 3997 & any one of SID 101-1708, respectively. In emb. 2.3998, the 1 st and 2nd s.s. are SID 3998 & any one of SID 101-1708, respectively. In emb. 2.3999, the 1 st and 2nd s.s. are SID 3999 & any one of SID 101-1708, respectively. In emb. 2.4000, the 1 st and 2nd s.s. are SID 4000 & any one of SID 101-1708, respectively. In emb. 2.4001, the 1 st and 2nd s.s. are SID 4001 & any one of SID 101-1708, respectively. In emb. 2.4002, the 1 st and 2nd s.s. are SID 4002 & any one of SID 101-1708, respectively. In emb. 2.4003, the 1 st and 2nd s.s. are SID 4003 & any one of SID 101-1708, respectively. In emb. 2.4004, the 1 st and 2nd s.s. are SID 4004 & any one of SID 101-1708, respectively. In emb. 2.4005, the 1 st and 2nd s.s. are SID 4005 & any one of SID 101-1708, respectively. In emb. 2.4006, the 1 st and 2nd s.s. are SID 4006 & any one of SID 101-1708, respectively. In emb. 2.4007, the 1 st and 2nd s.s. are SID 4007 & any one of SID 101-1708, respectively. In emb. 2.4008, the 1 st and 2nd s.s. are SID 4008 & any one of SID 101-1708, respectively. In emb. 2.4009, the 1 st and 2nd s.s. are SID 4009 & any one of SID 101-1708, respectively. In emb. 2.4010, the 1 st and 2nd s.s. are SID 4010 & any one of SID 101-1708, respectively. In emb. 2.4011, the 1 st and 2nd s.s. are SID 4011 & any one of SID 101-1708, respectively. In emb. 2.4012, the 1 st and 2nd s.s. are SID 4012 & any one of SID 101-1708, respectively. In emb. 2.4013, the 1 st and 2nd s.s. are SID 4013 & any one of SID 101-1708, respectively. In emb. 2.4014, the 1 st and 2nd s.s. are SID 4014 & any one of SID 101-1708, respectively. In emb. 2.4015, the 1 st and 2nd s.s. are SID 4015 & any one of SID 101-1708, respectively. In emb. 2.4016, the 1 st and 2nd s.s. are SID 4016 & any one of SID 101-1708, respectively. In emb. 2.4017, the 1 st and 2nd s.s. are SID 4017 & any one of SID 101-1708, respectively. In emb. 2.4018, the 1 st and 2nd s.s. are SID 4018 & any one of SID 101-1708, respectively. In emb. 2.4019, the 1 st and 2nd s.s. are SID 4019 & any one of SID 101-1708, respectively. In emb. 2.4020, the 1 st and 2nd s.s. are SID 4020 & any one of SID 101-1708, respectively. In emb. 2.4021, the 1 st and 2nd s.s. are SID 4021 & any one of SID 101-1708, respectively. In emb. 2.4022, the 1 st and 2nd s.s. are SID 4022 & any one of SID 101-1708, respectively. In emb. 2.4023, the 1 st and 2nd s.s. are SID 4023 & any one of SID 101-1708, respectively. In emb. 2.4024, the 1 st and 2nd s.s. are SID 4024 & any one of SID 101-1708, respectively. In emb. 2.4025, the 1 st and 2nd s.s. are SID 4025 & any one of SID 101-1708, respectively. In emb. 2.4026, the 1 st and 2nd s.s. are SID 4026 & any one of SID 101-1708, respectively. In emb. 2.4027, the 1 st and 2nd s.s. are SID 4027 & any one of SID 101-1708, respectively. In emb. 2.4028, the 1 st and 2nd s.s. are SID 4028 & any one of SID 101-1708, respectively. In emb. 2.4029, the 1 st and 2nd s.s. are SID 4029 & any one of SID 101-1708, respectively. In emb. 2.4030, the 1 st and 2nd s.s. are SID 4030 & any one of SID 101-1708, respectively. In emb. 2.4031, the 1 st and 2nd s.s. are SID 4031 & any one of SID 101-1708, respectively. In emb. 2.4032, the 1 st and 2nd s.s. are SID 4032 & any one of SID 101-1708, respectively. In emb. 2.4033, the 1 st and 2nd s.s. are SID 4033 & any one of SID 101-1708, respectively. In emb. 2.4034, the 1 st and 2nd s.s. are SID 4034 & any one of SID 101-1708, respectively. In emb. 2.4035, the 1 st and 2nd s.s. are SID 4035 & any one of SID 101-1708, respectively. In emb. 2.4036, the 1 st and 2nd s.s. are SID 4036 & any one of SID 101-1708, respectively. In emb. 2.4037, the 1 st and 2nd s.s. are SID 4037 & any one of SID 101-1708, respectively. In emb. 2.4038, the 1 st and 2nd s.s. are SID 4038 & any one of SID 101-1708, respectively. In emb. 2.4039, the 1 st and 2nd s.s. are SID 4039 & any one of SID 101-1708, respectively. In emb. 2.4040, the 1 st and 2nd s.s. are SID 4040 & any one of SID 101-1708, respectively. In emb. 2.4041, the 1 st and 2nd s.s. are SID 4041 & any one of SID 101-1708, respectively. In emb. 2.4042, the 1 st and 2nd s.s. are SID 4042 & any one of SID 101-1708, respectively. In emb. 2.4043, the 1 st and 2nd s.s. are SID 4043 & any one of SID 101-1708, respectively. In emb. 2.4044, the 1 st and 2nd s.s. are SID 4044 & any one of SID 101-1708, respectively. In emb. 2.4045, the 1 st and 2nd s.s. are SID 4045 & any one of SID 101-1708, respectively. In emb. 2.4046, the 1 st and 2nd s.s. are SID 4046 & any one of SID 101-1708, respectively. In emb. 2.4047, the 1 st and 2nd s.s. are SID 4047 & any one of SID 101-1708, respectively. In emb. 2.4048, the 1 st and 2nd s.s. are SID 4048 & any one of SID 101-1708, respectively. In emb. 2.4049, the 1 st and 2nd s.s. are SID 4049 & any one of SID 101-1708, respectively. In emb. 2.4050, the 1 st and 2nd s.s. are SID 4050 & any one of SID 101-1708, respectively. In emb. 2.4051, the 1 st and 2nd s.s. are SID 4051 & any one of SID 101-1708, respectively. In emb. 2.4052, the 1 st and 2nd s.s. are SID 4052 & any one of SID 101-1708, respectively. In emb. 2.4053, the 1 st and 2nd s.s. are SID 4053 & any one of SID 101-1708, respectively. In emb. 2.4054, the 1 st and 2nd s.s. are SID 4054 & any one of SID 101-1708, respectively. In emb. 2.4055, the 1 st and 2nd s.s. are SID 4055 & any one of SID 101-1708, respectively. In emb. 2.4056, the 1 st and 2nd s.s. are SID 4056 & any one of SID 101-1708, respectively. In emb. 2.4057, the 1 st and 2nd s.s. are SID 4057 & any one of SID 101-1708, respectively. In emb. 2.4058, the 1 st and 2nd s.s. are SID 4058 & any one of SID 101-1708, respectively. In emb. 2.4059, the 1 st and 2nd s.s. are SID 4059 & any one of SID 101-1708, respectively. In emb. 2.4060, the 1 st and 2nd s.s. are SID 4060 & any one of SID 101-1708, respectively. In emb. 2.4061, the 1 st and 2nd s.s. are SID 4061 & any one of SID 101-1708, respectively. In emb. 2.4062, the 1 st and 2nd s.s. are SID 4062 & any one of SID 101-1708, respectively. In emb. 2.4063, the 1 st and 2nd s.s. are SID 4063 & any one of SID 101-1708, respectively. In emb. 2.4064, the 1 st and 2nd s.s. are SID 4064 & any one of SID 101-1708, respectively. In emb. 2.4065, the 1 st and 2nd s.s. are SID 4065 & any one of SID 101-1708, respectively. In emb. 2.4066, the 1 st and 2nd s.s. are SID 4066 & any one of SID 101-1708, respectively. In emb. 2.4067, the 1 st and 2nd s.s. are SID 4067 & any one of SID 101-1708, respectively. In emb. 2.4068, the 1 st and 2nd s.s. are SID 4068 & any one of SID 101-1708, respectively. In emb. 2.4069, the 1 st and 2nd s.s. are SID 4069 & any one of SID 101-1708, respectively. In emb. 2.4070, the 1 st and 2nd s.s. are SID 4070 & any one of SID 101-1708, respectively. In emb. 2.4071, the 1 st and 2nd s.s. are SID 4071 & any one of SID 101-1708, respectively. In emb. 2.4072, the 1 st and 2nd s.s. are SID 4072 & any one of SID 101-1708, respectively. In emb. 2.4073, the 1 st and 2nd s.s. are SID 4073 & any one of SID 101-1708, respectively. In emb. 2.4074, the 1 st and 2nd s.s. are SID 4074 & any one of SID 101-1708, respectively. In emb. 2.4075, the 1 st and 2nd s.s. are SID 4075 & any one of SID 101-1708, respectively. In emb. 2.4076, the 1 st and 2nd s.s. are SID 4076 & any one of SID 101-1708, respectively.
[0047] Embodiment 2c is a composition comprising a pair of guide RNAs comprising a pair of spacer sequences, or one or more nucleic acids encoding the pair of guide RNAs, wherein the pair of spacer sequences comprise a 1 st spacer sequence selected from SEQ ID NOs: 5001-5496, and a 2nd spacer sequence selected from SEQ ID NOs: 5497-6080. Embodiments 2.05070-2.05334 are embodiments according to embodiment 12c with additional features. See above for meanings of abbreviations. In emb. 2.05070, the 1 st and 2nd s.s. are SID 5070 & any one of SID 5497-6080, respectively. In emb. 2.05262, the 1 st and 2nd s.s. are SID 5262 & any one of SID 5497-6080, respectively. In emb. 2.05310, the 1 st and 2nd s.s. are SID 5310 & any one of SID 5497-6080, respectively. In emb. 2.05334, the 1 st and 2nd s.s. are SID 5334 & any one of SID 5497-6080, respectively.
[0048] Embodiment 2d is a composition comprising a pair of guide RNAs comprising a pair of spacer sequences, or one or more nucleic acids encoding the pair of guide RNAs, wherein the pair of spacer sequences comprise a 1 st spacer sequence selected from SEQ ID NOs: 46597-53028, and a 2nd spacer sequence selected from SEQ ID NOs: 7301-46596. Embodiments 2.46768-2.52898 are embodiments according to embodiment 12d with additional features. See above for meanings of abbreviations. In emb. 2.46768, the 1 st and 2nd s.s. are SID 46768 & any one of SID 7301-46596, respectively. In emb. 2.46967, the 1 st and 2nd s.s. are SID 46967 & any one of SID 7301-46596, respectively. In emb. 2.47032, the 1 st and 2nd s.s. are SID 47032 & any one of SID 7301-46596, respectively. In emb. 2.47047, the 1 st and 2nd s.s. are SID 47047 & any one of SID 7301-46596, respectively. In emb. 2.50538, the 1 st and 2nd s.s. are SID 50538 & any one of SID 7301-46596, respectively. In emb. 2.50674, the 1 st and 2nd s.s. are SID 50674 & any one of SID 7301-46596, respectively. In emb. 2.50682, the 1 st and 2nd s.s. are SID 50682 & any one of SID 7301-46596, respectively. In emb. 2.50706, the 1 st and 2nd s.s. are SID 50706 & any one of SID 7301-46596, respectively. In emb. 2.50714, the 1 st and 2nd s.s. are SID 50714 & any one of SID 7301-46596, respectively. In emb. 2.50898, the 1 st and 2nd s.s. are SID 50898 & any one of SID 7301-46596, respectively. In emb. 2.50978, the 1 st and 2nd s.s. are SID 50978 & any one of SID 7301-46596, respectively. In emb. 2.51058, the 1 st and 2nd s.s. are SID 51058 & any one of SID 7301-46596, respectively. In emb. 2.51162, the 1 st and 2nd s.s. are SID 51162 & any one of SID 7301-46596, respectively. In emb. 2.51362, the 1 st and 2nd s.s. are SID 51362 & any one of SID 7301-46596, respectively. In emb. 2.51394, the 1 st and 2nd s.s. are SID 51394 & any one of SID 7301-46596, respectively. In emb. 2.51466, the 1 st and 2nd s.s. are SID 51466 & any one of SID 7301-46596, respectively. In emb. 2.51474, the 1 st and 2nd s.s. are SID 51474 & any one of SID 7301-46596, respectively. In emb. 2.51490, the 1 st and 2nd s.s. are SID 51490 & any one of SID 7301-46596, respectively. In emb. 2.51498, the 1 st and 2nd s.s. are SID 51498 & any one of SID 7301-46596, respectively. In emb. 2.51506, the 1 st and 2nd s.s. are SID 51506 & any one of SID 7301-46596, respectively. In emb. 2.51650, the 1 st and 2nd s.s. are SID 51650 & any one of SID 7301-46596, respectively. In emb. 2.51658, the 1 st and 2nd s.s. are SID 51658 & any one of SID 7301-46596, respectively. In emb. 2.51682, the 1 st and 2nd s.s. are SID 51682 & any one of SID 7301-46596, respectively. In emb. 2.51706, the 1 st and 2nd s.s. are SID 51706 & any one of SID 7301-46596, respectively. In emb. 2.51746, the 1 st and 2nd s.s. are SID 51746 & any one of SID 7301-46596, respectively. In emb. 2.51754, the 1 st and 2nd s.s. are SID 51754 & any one of SID 7301-46596, respectively. In emb. 2.51762, the 1 st and 2nd s.s. are SID 51762 & any one of SID 7301-46596, respectively. In emb. 2.51810, the 1 st and 2nd s.s. are SID 51810 & any one of SID 7301-46596, respectively. In emb. 2.51898, the 1 st and 2nd s.s. are SID 51898 & any one of SID 7301-46596, respectively. In emb. 2.51914, the 1 st and 2nd s.s. are SID 51914 & any one of SID 7301-46596, respectively. In emb. 2.51930, the 1 st and 2nd s.s. are SID 51930 & any one of SID 7301-46596, respectively. In emb. 2.51954, the 1 st and 2nd s.s. are SID 51954 & any one of SID 7301-46596, respectively. In emb. 2.52066, the 1 st and 2nd s.s. are SID 52066 & any one of SID 7301-46596, respectively. In emb. 2.52082, the 1 st and 2nd s.s. are SID 52082 & any one of SID 7301-46596, respectively. In emb. 2.52090, the 1 st and 2nd s.s. are SID 52090 & any one of SID 7301-46596, respectively. In emb. 2.52098, the 1 st and 2nd s.s. are SID 52098 & any one of SID 7301-46596, respectively. In emb. 2.52106, the 1 st and 2nd s.s. are SID 52106 & any one of SID 7301-46596, respectively. In emb. 2.52250, the 1 st and 2nd s.s. are SID 52250 & any one of SID 7301-46596, respectively. In emb. 2.52258, the 1 st and 2nd s.s. are SID 52258 & any one of SID 7301-46596, respectively. In emb. 2.52266, the 1 st and 2nd s.s. are SID 52266 & any one of SID 7301-46596, respectively. In emb. 2.52290, the 1 st and 2nd s.s. are SID 52290 & any one of SID 7301-46596, respectively. In emb. 2.52298, the 1 st and 2nd s.s. are SID 52298 & any one of SID 7301-46596, respectively. In emb. 2.52306, the 1 st and 2nd s.s. are SID 52306 & any one of SID 7301-46596, respectively. In emb. 2.52354, the 1 st and 2nd s.s. are SID 52354 & any one of SID 7301-46596, respectively. In emb. 2.52386, the 1 st and 2nd s.s. are SID 52386 & any one of SID 7301-46596, respectively. In emb. 2.52418, the 1 st and 2nd s.s. are SID 52418 & any one of SID 7301-46596, respectively. In emb. 2.52434, the 1 st and 2nd s.s. are SID 52434 & any one of SID 7301-46596, respectively. In emb. 2.52458, the 1 st and 2nd s.s. are SID 52458 & any one of SID 7301-46596, respectively. In emb. 2.52474, the 1 st and 2nd s.s. are SID 52474 & any one of SID 7301-46596, respectively. In emb. 2.52498, the 1 st and 2nd s.s. are SID 52498 & any one of SID 7301-46596, respectively. In emb. 2.52506, the 1 st and 2nd s.s. are SID 52506 & any one of SID 7301-46596, respectively. In emb. 2.52522, the 1 st and 2nd s.s. are SID 52522 & any one of SID 7301-46596, respectively. In emb. 2.52530, the 1 st and 2nd s.s. are SID 52530 & any one of SID 7301-46596, respectively. In emb. 2.52546, the 1 st and 2nd s.s. are SID 52546 & any one of SID 7301-46596, respectively. In emb. 2.52554, the 1 st and 2nd s.s. are SID 52554 & any one of SID 7301-46596, respectively. In emb. 2.52594, the 1 st and 2nd s.s. are SID 52594 & any one of SID 7301-46596, respectively. In emb. 2.52610, the 1 st and 2nd s.s. are SID 52610 & any one of SID 7301-46596, respectively. In emb. 2.52618, the 1 st and 2nd s.s. are SID 52618 & any one of SID 7301-46596, respectively. In emb. 2.52634, the 1 st and 2nd s.s. are SID 52634 & any one of SID 7301-46596, respectively. In emb. 2.52666, the 1 st and 2nd s.s. are SID 52666 & any one of SID 7301-46596, respectively. In emb. 2.52898, the 1 st and 2nd s.s. are SID 52898 & any one of SID 7301-46596, respectively.
[0049] Embodiment 3 A composition comprising:
[0050] i) a guide RNA comprising a spacer sequence, or a nucleic acid encoding the guide RNA, comprising:
   [0051] a. a spacer sequence selected from SEQ ID NOs: 5262, 5782, 5830, 5926, 5950, 5998, 6022, 5310, and 5334; or
   [0052] b. a spacer sequence selected from SEQ ID NOs: 5830, 6022, 5262, and 5310; or
   [0053] c. a spacer sequence selected from SEQ ID NOs: 5262, 5334, and 5830; or
   [0054] d. SEQ ID NO: 5262; or
   [0055] e. a spacer sequence selected from SEQ ID NOs: 5264, 5336, 5832, 6024, and 5312; or
   [0056] f. a spacer sequence comprising at least 17, 18, 19, or 20 contiguous nucleotides of any one of the spacer sequences of a) through e); or
   [0057] g. a spacer sequence that is at least 99%, 98%, 97%, 96%, 95%, 94%, 93%, 92%, 91%, or 90% identical to any one of the spacer sequences of a) through f); or
[0058] ii) a pair of guide RNAs comprising a first and second spacer sequence, or one or more nucleic acids encoding the pair of guide RNAs, comprising:
   [0059] a. a first and second spacer sequence selected from SEQ ID NOs: 5782 and 5262; 5830 and 5262; 5926 and 5262; 5950 and 5262; and 5998 and 5262; or
   [0060] b. a first and second spacer sequence selected from SEQ ID NOs: 5830 and 5262; and 6022 and 5310; or
   [0061] c. SEQ ID NOs: 5334 and 5830; or
   [0062] d. a first and second spacer sequence comprising at least 17, 18, 19, or 20 contiguous nucleotides of any of the first and second spacer sequences of a) through c); or
   [0063] e. a first and second spacer sequence that is at least 99%, 98%, 97%, 96%, 95%, 94%, 93%, 92%, 91%, or 90% identical to any of the first and second spacer sequences of a) through d).
[0064] Embodiment 4 A composition comprising:
[0065] i) a guide RNA comprising a spacer sequence, or a nucleic acid encoding the guide RNA, comprising:
   [0066] a. a spacer sequence selected from SEQ ID NOs: 28130, 34442, 45906, 26562, 52666, 51322, 46599, 52898, 26546, 7447, 47047, 49986, 51762, 51754, 52290, 52298, 51474, 52306, 50682, 51706, 52098, 50714, 51498, 52498, 50978, 51746, 52106, 51506, 50674, 52082, 52506, 50538, 52066, 52386, 52090, 52266, 52474, 52258, 52434, 50706, 51490, 52458, 51466, 52354, 51914, 51362, 51058, 50170, 51954, 52250, 51930, 51682, 52594, 52610, 51162, 49162, 50898, 49226, 51658, 52554, 52634, 51394, 49034, 52546, 52522, 52618, 52530, 28322, 26530, 26578, 26602, 26634, 26626, 26698, 26746, 26754, 26786, 26882, 27722, 27730, 27738, 27770, 27754, 27762, 27802, 27850, 27842, 27922, 27946, 27986, 28114, 28122, 28146, 28186, 28194, 28338, 28346, 28322, 28378, 28370, 28458, 28506, 28634, 28642, 28650, 34442, and 45906; or
   [0067] b. a spacer sequence selected from SEQ ID NOs: 51706, 51058, 51754, 52090, 52594, 52098, 52298, 52106, 51682, 52066, 52354, 52458, 52290, 52498, 51658, 51930, 51162, 52506, 51762, 51746, 52386, 52258, 52530, 52634, 27850, 28634, 26882, 28650, 28370, 28194, 26626, 26634, 26786, 26754, 27770, 26578, 28130, 27738, 28338, 28642, 26602, 27754, 27730, and 28122; or
   [0068] c. a spacer sequence selected from SEQ ID NOs: 47047, 7447, 7463, 46967, 46768, 7680, and 47032; or
   [0069] d. a spacer sequence selected from SEQ ID NOs: 47045, 7445, 7461, 46766, 7678, and 47030; or
   [0070] e. a spacer sequence comprising at least 17, 18, 19, or 20 contiguous nucleotides of any one of the spacer sequences of a) through d); or
   [0071] f. a spacer sequence that is at least 99%, 98%, 97%, 96%, 95%, 94%, 93%, 92%, 91%, or 90% identical to any one of the spacer sequences of a) through e); or
[0072] ii) a pair of guide RNAs comprising a first and second spacer sequence, or one or more nucleic acids encoding the pair of guide RNAs, comprising:
   [0073] a. a first and second spacer sequence selected from SEQ ID NOs: 47047 and 7447; 7463 and 46967; 46768 and 7680; and 47032 and 7447; or
   [0074] b. SEQ ID NOs: 47047 and 7447; or
   [0075] c. SEQ ID NOs: 52898 and 26546; or
   [0076] d. a first and second spacer sequence comprising at least 17, 18, 19, or 20 contiguous nucleotides of any of the first and second spacer sequences of a) through c); or
   [0077] e. a first and second spacer sequence that is at least 99%, 98%, 97%, 96%, 95%, 94%, 93%, 92%, 91%, or 90% identical to any of the first and second spacer sequences of a) through d).
[0078] Embodiment 5 The composition of any one of the preceding embodiments, further comprising an RNA-targeted endonuclease, or a nucleic acid encoding the RNA-targeted endonuclease.
[0079] Embodiment 6 The composition of any one of the preceding embodiments, wherein the RNA-targeted endonuclease is a Cas nuclease.
[0080] Embodiment 7 The composition of embodiment 6, wherein the Cas nuclease is Cas9.
[0081] Embodiment 8 The composition of embodiment 7, wherein the Cas9 nuclease is from Streptococcus pyogenes.
[0082] Embodiment 9 The composition of embodiment 7, wherein the Cas9 nuclease is from Staphylococcus aureus.
[0083] Embodiment 10 The composition of embodiment 6, wherein the Cas nuclease is a Cpf1 nuclease.
[0084] Embodiment 11 The composition of any one of the preceding embodiments, further comprising a DNA-PK inhibitor.
[0085] Embodiment 12 The composition of any of the preceding embodiments, wherein the guide RNA is an sgRNA.
[0086] Embodiment 13 The composition of embodiment 12, wherein the sgRNA is modified.
[0087] Embodiment 14 The composition of embodiment 13, wherein the modification alters one or more 2′ positions and/or phosphodiester linkages.
[0088] Embodiment 15 The composition of any one of embodiments 13-14, wherein the modification alters one or more, or all, of the first three nucleotides of the sgRNA.
[0089] Embodiment 16 The composition of any one of embodiments 13-15, wherein the modification alters one or more, or all, of the last three nucleotides of the sgRNA.
[0090] Embodiment 17 The composition of any one of embodiments 13-16, wherein the modification includes one or more of a phosphorothioate modification, a 2′-OME modification, a 2′-O-MOE modification, a 2′-F modification, a 2′-O-methine-4′ bridge modification, a 3′-thiophosphonoacetate modification, or a 2′-deoxy modification.
[0091] Embodiment 18 The composition of any one of the preceding embodiments, wherein the composition further comprises a pharmaceutically acceptable excipient.
[0092] Embodiment 19 The composition of any one of the preceding embodiments, wherein the guide RNA is associated with a lipid nanoparticle (LNP) or a viral vector.
[0093] Embodiment 20 The composition of embodiment 19, wherein the viral vector is an adeno-associated virus vector, a lentiviral vector, an integrase-deficient lentiviral vector, an adenoviral vector, a vaccinia viral vector, an alphaviral vector, or a herpes simplex viral vector.
[0094] Embodiment 21 The composition of embodiment 19, wherein the viral vector is an adeno-associated virus (AAV) vector.
[0095] Embodiment 22 The composition of embodiment 21, wherein the AAV vector is an AAV1, AAV2, AAV3, AAV4, AAV5, AAV6, AAV7, AAV8, AAVrh10, AAVrh74, or AAV9 vector, wherein the number following AAV indicates the AAV serotype.
[0096] Embodiment 23 The composition of embodiment 22, wherein the AAV vector is an AAV serotype 9 vector.
[0097] Embodiment 24 The composition of embodiment 22, wherein the AAV vector is an AAVrh10 vector.
[0098] Embodiment 25 The composition of embodiment 22, wherein the AAV vector is an AAVrh74 vector.
[0099] Embodiment 26 The composition of any one of embodiments 19-25, wherein the viral vector comprises a tissue-specific promoter.
[0100] Embodiment 27 The composition of any one of embodiments 19-26, comprising a viral vector, wherein the viral vector comprises a muscle-specific promoter, optionally wherein the muscle-specific promoter is a muscle creatine kinase promoter, a desmin promoter, an MHCK7 promoter, an SPc5-12 promoter, or a CK8e promoter.
[0101] Embodiment 28 The composition of any one of embodiments 19-25, wherein the viral vector comprises a neuron-specific promoter, optionally wherein the neuron-specific promoter is an enolase promoter.
[0102] Embodiment 29 A method of treating a disease or disorder characterized by a trinucleotide repeat (TNR) in DNA, the method comprising delivering to a cell that comprises a TNR i) a guide RNA or a pair of guide RNAs comprising a spacer sequence or a pair of spacer sequences that directs an RNA-targeted endonuclease to or near the TNR, or a nucleic acid encoding the guide RNA or pair of guide RNAs; ii) an RNA-targeted endonuclease or a nucleic acid encoding the RNA-targeted endonuclease; and iii) a DNA-PK inhibitor.
[0103] Embodiment 30 A method of excising a self-complementary region in DNA comprising delivering to a cell that comprises the self-complementary region i) a guide RNA or a pair of guide RNAs comprising a spacer sequence or a pair of spacer sequences that directs an RNA-targeted endonuclease to or near the self-complementary region, or a nucleic acid encoding the guide RNA or pair of guide RNAs; ii) an RNA-targeted endonuclease or a nucleic acid encoding the RNA-targeted endonuclease; and iii) a DNA-PK inhibitor, wherein the self-complementary region is excised.
[0104] Embodiment 31 A method of excising a trinucleotide repeat (TNR) in DNA comprising delivering to a cell that comprises the TNR i) a guide RNA or a pair of guide RNAs comprising a spacer sequence or a pair of spacer sequences that directs an RNA-targeted endonuclease to or near the TNR, or a nucleic acid encoding the guide RNA or pair of guide RNAs; ii) an RNA-targeted endonuclease or a nucleic acid encoding the RNA-targeted endonuclease; and iii) a DNA-PK inhibitor, wherein at least one TNR is excised.
[0105] Embodiment 32 The method of embodiment 30, wherein the self-complementary region comprises a palindromic sequence, a direct repeat, an inverted repeat, a GC-rich sequence, or an AT-rich sequence, optionally wherein the GC-richness or AT-richness is at least 70%, 75%, 80%, 85%, 90%, or 95% over a length of at least 10 nucleotides which are optionally interrupted by a loop-forming sequence.
[0106] Embodiment 33 The method of any one of embodiments 29-32, comprising a pair of guide RNAs comprising a pair of spacer sequences that deliver the RNA-targeted endonuclease to or near a TNR or self-complementary region, or one or more nucleic acids encoding the pair of guide RNAs, are delivered to the cell.
[0107] Embodiment 34 The method of any one of embodiments 29-33, wherein the target is (i) in the TNR or self-complementary region or (ii) within 10, 15, 20, 25, 30, 40, or 50 nucleotides of the TNR or self-complementary region.
[0108] Embodiment 35 The method of any one of embodiments 29-34 for the preparation of a medicament for treating a human subject having DM1, HD, FA, FXS, FXTAS, FXPOI, FXES, XSBMA, SCA1, SCA2, SCA3, SCA6, SCA7, SCA8, SCA12, SCA17, or DRPLA.
[0109] Embodiment 36 The method of any one of embodiments 29, or 31-35, wherein the TNR is a CTG in the 3′ untranslated region (UTR) of the DMPK gene.
[0110] Embodiment 37 The method of embodiment 36, comprising excising at least a portion of the 3′ UTR of the DMPK gene, wherein the excision results in treatment of myotonic dystrophy type 1 (DM1).
[0111] Embodiment 38 The method of any one of the embodiments 29, or 31-35, wherein the TNR is within the FMR1 gene.
[0112] Embodiment 39 The method of embodiment 38, wherein the excision results in treatment of Fragile X syndrome.
[0113] Embodiment 40 The method of any one of embodiments 29, or 31-35, wherein the TNR is within the FXN gene.
[0114] Embodiment 41 The method of embodiment 40, wherein the excision results in treatment of Friedrich's Ataxis (FA).
[0115] Embodiment 42 The method of any one of embodiments 29, or 31-35, wherein the TNR is within the huntingtin, frataxin (FXN), Fragile X Mental Retardation 1 (FMR1), Fragile X Mental Retardation 2 (FMR2), androgen receptor (AR), aristaless related homeobox (ARX), Ataxin 1 (ATXN1), Ataxin 2 (ATXN2), Ataxin 3 (ATXN3), Calcium voltage-gated channel subunit alphal A (CACNA1A), Ataxin 7 (ATXN7), ATXN8 opposite strand lncRNA (ATXN8OS), Serine/threonine-protein phosphatase 2A 55 kDa regulatory subunit B beta isoform (PPP2R2B), TATA binding protein (TBP), or Atrophin-1 (ATN1) gene, or the TNR is adjacent to the 5′ UTR of FMR2.
[0116] Embodiment 43 The method of embodiment 42, wherein the excision in huntingtin (HTT) results in treatment of Huntington's disease (HD); the excision in FXN results in treatment of Friedrich's ataxia (FA); the excision in FMR1 results in treatment of Fragile X syndrome (FXS), Fragile X associated primary ovarian insufficiency (FXPOI), or fragile X-associated tremor/ataxia syndrome (FXTAS); the excision in FMR2 or adjacent to the 5′ UTR of FMR2 results in treatment of fragile XE syndrome (FXES); the excision in AR results in treatment of X-linked spinal and bulbar muscular atrophy (XSBMA); the excision in ATXN1 results in treatment of spinocerebellar ataxia type 1 (SCA1), the excision in ATXN2 results in treatment of spinocerebellar ataxia type 2 (SCA2), the excision in ATXN3 results in treatment of spinocerebellar ataxia type 3 (SCA3), the excision in CACNA1A results in treatment of spinocerebellar ataxia type 6 (SCA6), the excision in ATXN7 results in treatment of spinocerebellar ataxia type 7 (SCAT), the excision in ATXN8OS results in treatment of spinocerebellar ataxia type 8 (SCAB), the excision in PPP2R2B results in treatment of spinocerebellar ataxia type 12 (SCA12), the excision in TBP results in treatment of spinocerebellar ataxia type 17 (SCA17), or the excision in ATN1 results in treatment of Dentatorubropallidoluysian atrophy (DRPLA).
[0117] Embodiment 44 The method of any one of embodiments 29, or 31-43, wherein at least 1, 2, 3, 4, 5, 6, 7, 8, 9, 10, 15, 20, 25, 30, 40, 50, 60, 70, 80, 90, 100, 150, 200, 300, 400, 500, 600, 700, 800, 900, 1000, 1500, 2000, 3000, 4000, 5000, 6000, 7000, 8000, 9000, or 10,000 TNRs are excised.
[0118] Embodiment 45 The method of any one of embodiments 29, or 31-43, wherein 1-5, 5-10, 10-20, 20-30, 40-60, 60-80, 80-100, 100-150, 150-200, 200-300, 300-500, 500-700, 700-1000, 1000-1500, 1500-2000, 2000-3000, 3000-4000, 4000-5000, 5000-6000, 6000-7000, 7000-8000, 8000-9000, or 9000-10,000 TNRs are excised.
[0119] Embodiment 46 The method of any one of embodiments 29, or 31-35, wherein the TNRs are within the DMPK gene, and wherein excision of the TNRs ameliorates one or more phenotypes associated with an expanded-repeat DMPK gene, said amelioration optionally comprising one or more of increasing myotonic dystrophy protein kinase activity; increasing phosphorylation of phospholemman, dihydropyridine receptor, myogenin, L-type calcium channel beta subunit, and/or myosin phosphatase targeting subunit; increasing inhibition of myosin phosphatase; and/or ameliorating muscle loss, muscle weakness, hypersomnia, one or more executive function deficiencies, insulin resistance, cataract formation, balding, or male infertility or low fertility.
[0120] Embodiment 47 The method of any one of embodiments 29, or 31-35, wherein the TNRs are within the HTT gene, and wherein excision of the TNRs ameliorates one or more phenotypes associated with an expanded-repeat HTT gene, said amelioration optionally comprising ameliorating one or more of striatal neuron loss, involuntary movements, irritability, depression, small involuntary movements, poor coordination, difficulty learning new information or making decisions, difficulty walking, speaking, and/or swallowing, and/or a decline in thinking and/or reasoning abilities.
[0121] Embodiment 48 The method of any one of embodiments 29, or 31-35, wherein the TNRs are within the FMR1 gene, and wherein excision of the TNRs ameliorates one or more phenotypes associated with an expanded-repeat FMR1 gene, said amelioration optionally comprising ameliorating one or more of aberrant FMR1 transcript or Fragile X Mental Retardation Protein levels, translational dysregulation of mRNAs normally associated with FMRP, lowered levels of phospho-cofilin (CFL1), increased levels of phospho-cofilin phosphatase PPP2CA, diminished mRNA transport to neuronal synapses, increased expression of HSP27, HSP70, and/or CRYAB, abnormal cellular distribution of lamin A/C isoforms, early-onset menopause such as menopause before age 40 years, defects in ovarian development or function, elevated level of serum gonadotropins (e.g., FSH), progressive intention tremor, parkinsonism, cognitive decline, generalized brain atrophy, impotence, and/or developmental delay.
[0122] Embodiment 49 The method of any one of embodiments 29, or 31-35, wherein the TNRs are within the FMR2 gene or adjacent to the 5′ UTR of FMR2, and wherein excision of the TNRs ameliorates one or more phenotypes associated with expanded-repeats in or adjacent to the FMR2 gene, said amelioration optionally comprising ameliorating one or more of aberrant FMR2 expression, developmental delays, poor eye contact, repetitive use of language, and hand-flapping.
[0123] Embodiment 50 The method of any one of embodiments 29, or 31-35, wherein the TNRs are within the AR gene, and wherein excision of the TNRs ameliorates one or more phenotypes associated with an expanded-repeat AR gene, said amelioration optionally comprising ameliorating one or more of aberrant AR expression; production of a C-terminally truncated fragment of the androgen receptor protein; proteolysis of androgen receptor protein by caspase-3 and/or through the ubiquitin-proteasome pathway; formation of nuclear inclusions comprising CREB-binding protein; aberrant phosphorylation of p44/42, p38, and/or SAPK/JNK; muscle weakness; muscle wasting; difficulty walking, swallowing, and/or speaking; gynecomastia; and/or male infertility.
[0124] Embodiment 51 The method of any one of embodiments 29, or 31-35, wherein the TNRs are within the ATXN1 gene, and wherein excision of the TNRs ameliorates one or more phenotypes associated with an expanded-repeat ATXN1 gene, said amelioration optionally comprising ameliorating one or more of formation of aggregates comprising ATXN1; Purkinje cell death; ataxia; muscle stiffness; rapid, involuntary eye movements; limb numbness, tingling, or pain; and/or muscle twitches.
[0125] Embodiment 52 The method of any one of embodiments 29, or 31-35, wherein the TNRs are within the ATXN2 gene, and wherein excision of the TNRs ameliorates one or more phenotypes associated with an expanded-repeat ATXN2 gene, said amelioration optionally comprising ameliorating one or more of aberrant ATXN2 production; Purkinje cell death; ataxia; difficulty speaking or swallowing; loss of sensation and weakness in the limbs; dementia; muscle wasting; uncontrolled muscle tensing; and/or involuntary jerking movements.
[0126] Embodiment 53 The method of any one of embodiments 29, or 31-35, wherein the TNRs are within the ATXN3 gene, and wherein excision of the TNRs ameliorates one or more phenotypes associated with an expanded-repeat ATXN3 gene, said amelioration optionally comprising ameliorating one or more of aberrant ATXN3 levels; aberrant beclin-1 levels; inhibition of autophagy; impaired regulation of superoxide dismutase 2; ataxia; difficulty swallowing; loss of sensation and weakness in the limbs; dementia; muscle stiffness; uncontrolled muscle tensing; tremors; restless leg symptoms; and/or muscle cramps.
[0127] Embodiment 54 The method of any one of embodiments 29, or 31-35, wherein the TNRs are within the CACNA1A gene, and wherein excision of the TNRs ameliorates one or more phenotypes associated with an expanded-repeat CACNA1A gene, said amelioration optionally comprising ameliorating one or more of aberrant CaV2.1 voltage-gated calcium channels in CACNA1A-expressing cells; ataxia; difficulty speaking; involuntary eye movements; double vision; loss of arm coordination; tremors; and/or uncontrolled muscle tensing.
[0128] Embodiment 55 The method of any one of embodiments 29, or 31-35, wherein the TNRs are within the ATXN7 gene, and wherein excision of the TNRs ameliorates one or more phenotypes associated with an expanded-repeat ATXN7 gene, said amelioration optionally comprising ameliorating one or more of aberrant histone acetylation; aberrant histone deubiquitination; impairment of transactivation by CRX; formation of nuclear inclusions comprising ATXN7; ataxia; incoordination of gait; poor coordination of hands, speech and/or eye movements; retinal degeneration; and/or pigmentary macular dystrophy.
[0129] Embodiment 56 The method of any one of embodiments 29, or 31-35, wherein the TNRs are within the ATXN8OS gene, and wherein excision of the TNRs ameliorates one or more phenotypes associated with an expanded-repeat ATXN8OS gene, said amelioration optionally comprising ameliorating one or more of formation of ribonuclear inclusions comprising ATXN8OS mRNA; aberrant KLHL1 protein expression; ataxia; difficulty speaking and/or walking; and/or involuntary eye movements.
[0130] Embodiment 57 The method of any one of embodiments 29, or 31-35, wherein the TNRs are within the PPP2R2B gene, and wherein excision of the TNRs ameliorates one or more phenotypes associated with an expanded-repeat PPP2R2B gene, said amelioration optionally comprising ameliorating one or more of aberrant PPP2R2B expression; aberrant phosphatase 2 activity; ataxia; cerebellar degeneration; difficulty walking; and/or poor coordination of hands, speech and/or eye movements.
[0131] Embodiment 58 The method of any one of embodiments 29, or 31-35, wherein the TNRs are within the TBP gene, and wherein excision of the TNRs ameliorates one or more phenotypes associated with an expanded-repeat TBP gene, said amelioration optionally comprising ameliorating one or more of aberrant transcription initiation; aberrant TBP protein accumulation (e.g., in cerebellar neurons); aberrant cerebellar neuron cell death; ataxia; difficulty walking; muscle weakness; and/or loss of cognitive abilities.
[0132] Embodiment 59 The method of any one of embodiments 29, or 31-35, wherein the TNRs are within the ATN1 gene, and wherein excision of the TNRs ameliorates one or more phenotypes associated with an expanded-repeat ATN1 gene, said amelioration optionally comprising ameliorating one or more of aberrant transcriptional regulation; aberrant ATN1 protein accumulation (e.g., in neurons); aberrant neuron cell death; involuntary movements; and/or loss of cognitive abilities.
[0133] Embodiment 60 A pharmaceutical composition comprising the composition of any one of embodiments 1-28.
[0134] Embodiment 61 A method of treating a disease or disorder characterized by a trinucleotide repeat (TNR) in the 3′ UTR of the DMPK gene, the method comprising administering the composition of any one of embodiments 1-2, 2b, 2.2709-2.4076, or 5-28, or the pharmaceutical formulation of embodiment 60.
[0135] Embodiment 62 A method of excising a trinucleotide repeat (TNR) in the 3′ UTR of the DMPK gene, the method comprising administering the composition of any one of embodiments 1-2, 2b, 2.2709-2.4076, or 5-28, or the pharmaceutical formulation of embodiment 60.
[0136] Embodiment 63 The method of embodiment 61 or 62, wherein only one gRNA is administered and a CTG repeat in the 3′ UTR of the DMPK gene is excised.
[0137] Embodiment 64 The method of embodiment 63, wherein the gRNA comprises a spacer sequence comprising:
[0138] a. a spacer sequence selected from SEQ ID NOs: 3746, 3778, 3394, 3386, 3938, 3818, 3722, 3858, 3370, 1706, 2210, 2114, 1538, and 2594; or
[0139] b. a spacer sequence selected from SEQ ID NOs: 3330, 3746, 3778, 3394, 4026, 3386, 3938, 3818, 3722, 3802, 3858, 3514, 3770, 3370, 2202, 1706, 2210, 1778, 2114, 1738, 1746, 2322, 1538, 2514, 2458, 2194, and 2594; or
[0140] c. a spacer sequence selected from SEQ ID NOs: 3330, 3314, 2658, 2690, 2554, and 2498; or
[0141] d. a spacer sequence selected from SEQ ID NOs: 3314, 2690, 2554, and 2498; or
[0142] e. a spacer sequence selected from SEQ ID NOs: 3914, 3514, 1778, 2458, 3858, 3418, 1706, and 2258; or
[0143] f. SEQ ID NO: 3914; or
[0144] g. SEQ ID NO: 3418; or
[0145] h. SEQ ID NO: 3938; or
[0146] i. a spacer sequence selected from SEQ ID NOs: 3916, 3420, and 3940.
[0147] Embodiment 65 A method of treating a disease or disorder characterized by a trinucleotide repeat (TNR) in the 5′ UTR of the FMR1 gene, the method comprising administering the composition of any one of embodiments 2c, 2.05070-2.05334, 3, or 5-28, or the pharmaceutical formulation of embodiment 60.
[0148] Embodiment 66 A method of excising a trinucleotide repeat (TNR) in the 5′ UTR of the FMR1 gene, the method comprising administering the composition of any one of embodiments 2c, 2.05070-2.05334, 3, or 5-28, or the pharmaceutical formulation of embodiment 60.
[0149] Embodiment 67 The method of embodiment 65 or embodiment 66, wherein only one gRNA is administered and a TNR in the 5′ UTR of the FMR1 gene is excised.
[0150] Embodiment 68 The method of embodiment 67, wherein the gRNA comprises a spacer sequence comprising:
[0151] a. a spacer sequence selected from SEQ ID NOs: 5830, 6022, 5262, and 5310; or
[0152] b. a spacer sequence selected from SEQ ID NOs: 5262, 5334, and 5830; or
[0153] c. SEQ ID NO: 5262
[0154] d. a spacer sequence selected from SEQ ID NOs: 5264, 5336, 5832, 6024, and 5312.
[0155] Embodiment 69 A method of treating a disease or disorder characterized by a trinucleotide repeat (TNR) in an intron of the FXN gene, the method comprising administering the composition of any one of embodiments 2d, 2.46768-2.52898, 4-28, or the pharmaceutical formulation of embodiment 60.
[0156] Embodiment 70 A method of excising a trinucleotide repeat (TNR) in the 5′ UTR of the FXN gene, the method comprising administering the composition of any one of embodiments 2d, 2.46768-2.52898, 4-28, or the pharmaceutical formulation of embodiment 60.
[0157] Embodiment 71 The method of embodiment 69 or embodiment 70, wherein only one gRNA is administered and a TNR in the 5′ UTR of the FXN gene is excised.
[0158] Embodiment 72 The method of embodiment 71, wherein the gRNA comprises a spacer sequence comprising
[0159] a. a spacer sequence selected from SEQ ID NOs: 47047, 7447, 7463, 46967, 46768, 7680, and 47032; or
[0160] b. a spacer sequence selected from SEQ ID NOs: 47045, 7445, 7461, 46766, 7678, and 47030.
[0161] Embodiment 73 The method of any one of embodiments 29-59 or 61-72, further comprising administering a DNA-PK inhibitor.
[0162] Embodiment 74 The method of embodiment 73, wherein the DNA-PK inhibitor is Compound 6.
[0163] Embodiment 75 The method of embodiment 73, wherein the DNA-PK inhibitor is Compound 3.
[0164] Embodiment 76 A method of excising a trinucleotide repeat (TNR) in the 3′ UTR of the DMPK gene, the method comprising administering a pair of guide RNAs comprising a pair of spacer sequences, wherein the first spacer sequence directs a RNA-guided DNA nuclease to any nucleotide within a first stretch of sequence, wherein the first stretch:
[0165] a. starts 1 nucleotide from the DMPK-U29 cut site with spCas9 and continues through the repeat; or
[0166] b. starts 1 nucleotide from the DMPK-U30 cut site with spCas9 and continues through 1 nucleotide before the DMPK-U56 cut site; or
[0167] c. starts 1 nucleotide from the DMPK-U30 cut site with spCas9 and continues through 1 nucleotide before the DMPK-U52 cut site; or
[0168] d. is SEQ ID NO: 53413; or
[0169] e. is SEQ ID NO: 53414; or
[0170] f. is SEQ ID NO: 53415.
[0171] Embodiment 77 A method of excising a trinucleotide repeat (TNR) in the 3′ UTR of the DMPK gene, the method comprising administering a pair of guide RNAs comprising a pair of spacer sequences, wherein a second spacer sequence directs a RNA-guided DNA nuclease to any nucleotide within a second stretch of sequence, wherein the second stretch:
[0172] a. starts 1 nucleotide in from the DMPK-D15 cut site with spCas9 and continues until 1 nucleotide before the DMPK-D51 cut site; or
[0173] b. starts 1 nucleotide from the DMPK-D35 cut site with spCas9 and continues until 1 nucleotide before the DMPK-D51 cut site; or
[0174] c. is SEQ ID NO: 53416; or
[0175] d. is SEQ ID NO: 53417.
[0176] Embodiment 78 A method of excising a trinucleotide repeat (TNR) in the 3′ UTR of the DMPK gene, the method comprising administering a pair of guide RNAs comprising a pair of spacer sequences, wherein
[0177] i. the first spacer sequence directs a RNA-guided DNA nuclease to any nucleotide within a first stretch of sequence, wherein the first stretch:
   [0178] a. starts 1 nucleotide from the DMPK-U29 cut site with spCas9 and continues through the repeat; or
   [0179] b. starts 1 nucleotide from the DMPK-U30 cut site with spCas9 and continues through 1 nucleotide before the DMPK-U56 cut site; or
   [0180] c. starts 1 nucleotide from the DMPK-U30 cut site with spCas9 and continues through 1 nucleotide before the DMPK-U52 cut site; or
   [0181] d. is SEQ ID NO: 53413; or
   [0182] e. is SEQ ID NO: 53414; or
   [0183] f. is SEQ ID NO: 53415; and
[0184] ii. a second spacer sequence directs a RNA-guided DNA nuclease to any nucleotide within a second stretch of sequence, wherein the second stretch:
   [0185] a. starts 1 nucleotide in from the DMPK-D15 cut site with spCas9 and continues until 1 nucleotide before the DMPK-D51 cut site; or
   [0186] b. starts 1 nucleotide from the DMPK-D35 cut site with spCas9 and continues until 1 nucleotide before the DMPK-D51 cut site; or
   [0187] c. is SEQ ID NO: 53416; or
   [0188] d. is SEQ ID NO: 53417.
[0189] Embodiment 79 The method of embodiments 76-78, further comprising administering a DNA-PK inhibitor.
[0190] Embodiment 80 The method of embodiment 79, wherein the DNA-PK inhibitor is Compound 6.
[0191] Embodiment 81 The method of embodiment 79, wherein the DNA-PK inhibitor is Compound 3.
[0192] Embodiment 82 The method of any one of embodiments 76-81, further comprising administering an RNA-targeted endonuclease, or a nucleic acid encoding the RNA-targeted endonuclease.
[0193] Embodiment 83 The method of embodiment 82, wherein the RNA-targeted endonuclease is a Cas nuclease.
[0194] Embodiment 84 The method of embodiment 83, wherein the Cas nuclease is Cas9.
[0195] Embodiment 85 The method of embodiment 84, wherein the Cas9 nuclease is from Streptococcus pyogenes.
[0196] Embodiment 86 The method of embodiment 84, wherein the Cas9 nuclease is from Staphylococcus aureus.
[0197] Embodiment 87 The method of embodiment 83, wherein the Cas nuclease is a Cpf1 nuclease.
[0198] Embodiment 88 The method of any one of embodiments 76-87, wherein:
[0199] (i) the U29 cut site is on chr19 between nucleotides 45,770,383 and 45,770,384, which corresponds to * in the following sequence: ttcacaaccgctccgag*cgtggg;
[0200] (ii) the U30 cut site is: chr19: between 45,770,385 and 45,770,386, which corresponds to * in the following sequence: gctgggcggagacccac*gctcgg;
[0201] (iii) the D15 cut site is: chr19: between 45,770,154 and 45,770,155, which corresponds to * in the following sequence: ggctgaggccctgacgt*ggatgg; and
[0202] (iv) the D35 cut site is: chr19: between 45,770,078 and 45,770,079, which corresponds to * in the following sequence: cacgcacccccacctat*cgttgg.
[0203] Embodiment 89 A method of screening for a guide RNA that is capable of excising a TNR or self-complementary region of DNA, the method comprising:
[0204] a) contacting:
   [0205] i. a cell with a guide RNA, an RNA-targeted endonuclease, and a DNA-PK inhibitor;
   [0206] ii. the same type of cell as used in i) with the guide RNA, the RNA-targeted endonuclease but without a DNA-PK inhibitor;
[0207] b) comparing the excision of the TNR or self-complementary region from the cell contacted in steps a) i) as compared to the cell contacted in step a) ii); and
[0208] c) selecting a guide RNA wherein the excision is improved in the presence of the DNA-PK inhibitor as compared to without the DNA-PK inhibitor.
[0209] Embodiment 90 A method of screening for a pair of guide RNAs that is capable of excising a TNR or self-complementary region, the method comprising:
[0210] a. contacting:
   [0211] i. a cell with a pair of guide RNAs, an RNA-targeted endonuclease, and a DNA-PK inhibitor;
   [0212] ii. the same type of cell as used in i) with the guide RNA, the RNA-targeted endonuclease but without a DNA-PK inhibitor;
[0213] b. comparing the excision of the TNR or self-complementary region from the cell contacted in steps a) i) as compared to the cell contacted in step a) ii); and
[0214] c. selecting a pair of guide RNAs wherein the excision is improved in the presence of the DNA-PK inhibitor as compared to without the DNA-PK inhibitor.
[0215] Embodiment 91 The method of embodiment 89 or embodiment 90, wherein the DNA-PK inhibitor is Compound 6.
[0216] Embodiment 92 The method of embodiment 89 or embodiment 90, wherein the DNA-PK inhibitor is Compound 3.
[0217] Embodiment 93 The method of any one of embodiments 89-92, wherein the guide RNA or pair of guide RNAs directs the RNA-targeted endonuclease to the 3′ UTR of the DMPK gene.
[0218] Embodiment 94 The method of any one of embodiments 89-92, wherein the guide RNA or pair of guide RNAs directs the RNA-targeted endonuclease to the 5′ UTR of the FMR1 gene.
[0219] Embodiment 95 The method of any one of embodiments 89-92, wherein the guide RNA or pair of guide RNAs directs the RNA-targeted endonuclease to the 5′ UTR of the FXN gene.

### BRIEF DESCRIPTION OF THE DRAWINGS

[0220] FIG. 1 shows a schematic of an exemplary structure of a gene containing an expanded trinucleotide sequence (triangles) located in either a 5′ untranslated region (UTR), intron, exon, or 3′ UTR. Examples of trinucleotide repeat expansions include (CGG)ₙ in the 5′UTR of the FMR1 gene, (CAG)ₙ in exon 1 of the HTT gene, (GAA)ₙ in the first intron of the FXN gene and (CTG)ₙ in the 3′ UTR of the DMPK gene.

[0221] FIGS. 2A-2B show an overview of trinucleotide repeat excision using two gRNAs. Two gRNA strategies with various DNA repair outcomes mediated by error-prone NHEJ (FIG. 2A). Improved trinucleotide repeat excision by inhibiting NHEJ repair with DNA-PKi (FIG. 2B). NHEJ: non-homologous end joining; MMEJ: microhomology -mediated end joining.

[0222] FIG. 3 shows an overview of trinucleotide repeat excision using a single gRNA. Enhanced MMEJ repair and improved trinucleotide repeat excision by inhibiting NHEJ repair machinery with DNA-PKi.

[0223] FIG. 4 shows an overview of an AAV vector for trinucleotide repeat excision using one gRNA with respect to viral packaging and delivery.

[0224] FIG. 5 shows a schematic overview of the canonical non-homologous end joining (C-NHEJ) and microhomology-mediated end joining (MMEJ) DNA repair pathways after DNA paired double strand breaks are induced. Pathways other than MMEJ (including but not limited to HDR) may be activated downstream of MRE11-RAD5O-NBS1 complex (MRN), depending on the editing conditions, locus sequence composition, and cell type.

[0225] FIG. 6 shows a model for single gRNA excision of CTG trinucleotide expansion in DM1. A DNA double strand break (DSB) activates C-NHEJ and MMEJ (or other alternative) pathways. MMEJ relies on pre-existing microhomologies (box) around the DSB. MRN (MRE11-RAD5O-NBS1 complex)/CtIP stimulation of 5′ resection and cleavage of CTG secondary structure is a pre-dominant repair pathway when DNA-PK is inhibited. Pathways other than MMEJ may be activated downstream of MRN/CtIP (including but not limited to HDR pathways) depending on the editing conditions, locus sequence composition, and cell type.

[0226] FIG. 7 shows separation by DNA gel-electrophoresis of wild type and excised DNA in wild-type cardiomyocytes after SpCas9 RNP electroporation. A PCR amplified DMPK1 CTG repeat locus is shown after targeting with one of gRNA pairs A-H (see Table 6).

[0227] FIGS. 8A-C show CTG repeat excision in disease models for DM1 using a paired gRNA approach. SpCas9 RNP electroporation in DM1 cardiomyocytes (FIG. 8A) and primary fibroblasts (FIG. 8B) show excision of CTG repeats. The leftmost panel in FIG. 8A is a reproduction of bands B and C from FIG. 7. DNA gel-electrophoresis separates wild type and excised DNA of PCR amplified DMPK1 locus. Examples of two gRNA pairs (DM1 Pair 1 and 2) are shown. FIG. 8C shows confirmation by Sanger-Sequencing of excision of a window including the CTG repeat.

[0228] FIGS. 9A-9B show phenotypic rescue after CTG repeat excision in primary DM1 fibroblasts with two gRNAs and SpCas9. FIG. 9A shows reduced CUG RNA foci compared to control (−) demonstrated by FISH. FIG. 9B shows reduced MBNL1 protein foci compared to control (−) demonstrated by immunofluorescence.

[0229] FIGS. 10A-E show rescue of disease phenotype after dual gRNA CTG repeat excision in primary DM1 fibroblasts. FIGS. 10A-10D show qPCR results showing partial restoration of RNA splicing in MBNL1 (FIG. 10A), NCOR2 (FIG. 10B), FN1 (FIG. 10C) and KIF13A (FIG. 10D) mRNAs. The vertical axes in FIGS. 10A-10D are expressed as the ratio of mis-spliced transcript relative to total transcript, normalized to the wild-type ratio (i.e., wild-type cells give a normalized ratio of 1). FIG. 10E shows quantitative analysis of mis-splicing correction, expressed as percentage rescue (i.e., the ratio between healthy untreated and patient edited values, such that 100% rescue means that patient edited and healthy untreated are equal and 50% rescue means that there is twice as much mis-splicing in patient edited as in healthy untreated) in excised DM1 fibroblasts.

[0230] FIG. 11 shows the effect of the indicated guide pairs on the number of CUG foci in DM1 primary fibroblasts. An increased number of cells show cell nuclei with 0 CUG foci as compared to unedited control cells (white bars) as demonstrated by FISH. Examples of four DM1 sgRNA pairs (pairs A-D as the second through fifth bars in each set of 5) shown for SpCas9.

[0231] FIG. 12 shows that paired gRNA CTG repeat excision in hTert-transformed DM1 fibroblasts is improved with DNA-PKi Compound 6 (10 uM). The DMPK1 locus was amplified by PCR and wild type DNA was separated by DNA gel-electrophoresis. Three biological replicates are shown (1-3) per condition.

[0232] FIG. 13 shows CTG repeat excision using a single gRNA in hTert transformed DM1 fibroblasts (left, no Inhibitor) and enhanced repeat excision after DNA-PK inhibition (right, 10 uM Compound 6). DNA gel-electrophoresis separates wild type from excised DNA. Repeat excision experiments for six individual gRNAs (4, 5, 6, 7, 9, and 10) are shown.

[0233] FIGS. 14A-14E show the effect of the indicated guide pairs plus or minus DNA-PK inhibitor on the number of CUG foci in DM1 transformed fibroblasts. Guide pairs A, B, C, and D using SpCas9 are shown in FIGS. 14B, 14C, 14D, and 14E, respectively. An increased number of cells show cell nuclei with 0 CUG foci as compared to unedited control cells (FIG. 14A) as demonstrated by FISH. The x axis shows the number of CUG foci per nucleus. The effect is further enhanced in the presence of DNA-PKi (10 uM Compound 6).

[0234] FIGS. 15A-D show rescue of disease phenotype after CTG repeat excision using a gRNA pair in transformed DM1 fibroblasts. Partial restoration of RNA splicing was confirmed by qPCR in MBNL1 (FIG. 15A), NCOR2 (FIG. 15B), FM1 (FIG. 15C), and the observed effect is further enhanced in the presence of DNA-PKi (10 uM, Compound 6). Furthermore, editing does not significantly alter expression of the targeted DMPK gene (FIG. 15D). Mock-treated (M) and cells treated with a control guide targeting AAVS1 (NT) were also analyzed.

[0235] FIG. 16 shows an overview of gRNAs used for single gRNA CTG repeat excision in human DMPK locus. gRNAs were designed to target a site 5′ or 3′ of the CTG repeat. Only exemplary guides are shown.

[0236] FIG. 17 shows a schematic representation of the 5′ UTR region of FMR1 and exemplary tested gRNAs relative to the CGGn repeat.

[0237] FIG. 18 shows CGG repeat excision in M28 CHOC2 and mosaic CHOC1 neuronal precursor cells (NPC). Five possible 5′ gRNAs are shown to the left of the repeat, and one possible 3′ gRNA is shown to the right of the repeat. Cells were treated with one of gRNAs a-e (5′ gRNA) in combination with a 3′ gRNA after SpCas9 RNP electroporation. ACGG: control derived from CGG excised iPSC. C1 and C2: CHOC1 unedited controls. Note: the PCR failed for the C1 control lane.

[0238] FIG. 19 shows 5′ UTR genotyping results indicating the location of a small pre-existing deletion (CHOC1 A) in CHOC1 NPCs that overlaps the target sequences of certain guide sequences. FIG. 19 also includes a schematic of the CHOC1 A relative to exemplary guide positions.

[0239] FIG. 20 shows a representation of sequencing reads from single CHOC1 clones after excision using a single gRNA (SEQ ID NO: 5262).

[0240] FIGS. 21A-B show evidence for CGG repeat excision using single or paired gRNAs after SpCas9 RNP electroporation. FIG. 21A shows CGG repeat excision without treatment with a DNA-PK inhibitor in differentiated, post-mitotic CHOC2 neurons. Arrow indicates excised DNA band as confirmed by Sanger-sequencing. FIG. 21B shows a single guide excision experiment with SpCas9 in CHOC2 neuronal precursor cells (NPCs). PCR amplified FMR1 DNA was separated by electrophoresis using Agilent's 2200 TapeStation. gRNA GDG_Cas9_Fmr1_1 (SEQ ID NO: 5262) (lane B1=DMSO; lane A2=Compound 6) shows excision of CGG repeats.

[0241] FIG. 22 shows the effect on GAA repeat excision at the Frataxin locus in iPS cells (4670 and 68FA) of treatment with a DNA-PK inhibitor (“+Inhibitor”; luM Compound 3) in a paired gRNA approach with Cpf1 or SpCas9.

[0242] FIG. 23 shows the shift from all NHEJ repair to 50% MMEJ repair observed upon treatment of iPS cells with a DNA-PK inhibitor (luM Compound 3) and paired guide GAA repeat excision at the Frataxin locus. Dotted lines indicate expected cut site. Bolded and underlined letters indicate inserted nucleotides (typical in NHEJ repair). Bolded letters highlight microhomology at the two ends of repair (shown at both ends for clarity, though only one copy of the micro homologous sequence is preserved in the actual sequence).

[0243] FIGS. 24A-C show elevated FXN levels after GAA excision in FA iPSCs with SpCas9 with (“+ Inh.”) or without (“− Inh.”) a DNA-PK inhibitor. FIG. 24A shows workflow for Cas9-medited gene editing in iPSCs. FIG. 24B, representative Western Blot after paired gRNA excision of a 0.4, 1.5, 5 and 11 kb fragment compared to control (AAVS1 gRNA, spacer sequence SEQ ID NO: 31). FIG. 24C shows analysis of individual clones sorted by FACS compared to unedited control.

[0244] FIG. 25 shows a model for MMEJ-based CGG-repeat excision at the Fragile-X locus. Cleavage using a single gRNA and 5′ DNA resection result in an end with microhomology (box) to a site upstream of the CGG repeat site, facilitating MMEJ repair.

[0245] FIGS. 26A-C show editing efficiencies (% indels) of sgRNAs targeting the 3′ UTR of DMPK including upstream sgRNAs (FIG. 26A), downstream sgRNAs (FIG. 26B), and sgRNAs located within or adjacent the CTG repeat expansion (FIG. 26C) in HEK293T cells with Lipofectamine 3000 transfection. Genomic DNA was isolated 72 hr post transfection, and editing efficiencies were assessed by Sanger sequencing and TIDE analysis (error bars =SEM from 3 replicates).

[0246] FIGS. 27A-C show editing efficiencies (% indels) of sgRNAs targeting the 3′ UTR of DMPK including upstream sgRNAs (FIG. 27A), downstream sgRNAs (FIG. 27B), and sgRNAs located within or adjacent the CTG repeat expansion (FIG. 27C) in HEK293T cells with Lipofectamine 2000 transfection. Genomic DNA was isolated 48 hr post transfection, and editing efficiencies were assessed by Sanger sequencing and TIDE analysis (error bars =SEM from 4 replicates).

[0247] FIGS. 28A-B show editing efficiency of individual sgRNAs targeting the 3′ UTR of DMPK in DM1 myoblasts at three concentrations of Cas9 (10 pmole (triangles), 20 pmole (squares), and 30 pmol (circles)) at a ratio of 1:6 Cas9: sgRNA, by TIDE analysis. The percent editing efficiencies are displayed on the Y axis (FIG. 28A) and as a heatmap (FIG. 28B).

[0248] FIG. 29 shows the Spearman correlation of percent editing efficiency results for 42 individual sgRNAs in HEK 293T cells and DM1 myoblasts. Spearman correlation value, rho=0.528. The p-value=0.0002.

[0249] FIG. 30 shows low-frequency large indels induced using individual sgRNAs and Cas9 delivered in RNPs (20 pmol) to DM1 myoblasts. The DMPK 3′ UTR region was amplified by GoTaq PCR and visualized by DNA gel electrophoresis; PCR products were excised and subjected to Sanger sequencing.

[0250] FIGS. 31A-B shows low-frequency large indels induced using individual sgRNAs and Cas9 delivered in RNPs to DM1 myoblasts. FIG. 31A shows Sanger sequencing traces for sgRNA SEQ ID NO: 3938 (DMPK-U14) and DM383 control. FIG. 31B shows PCR products by DNA gel electrophoresis following treatment of DM1 myoblasts with sgRNAs and Cas9 at two concentrations of Cas9 (20 pmol and 30 pmol).

[0251] FIG. 32 depicts exemplary large indels induced by individual sgRNAs targeting the 3′ UTR of DMPK and Cas9 delivered in RNPs in DM1 myoblasts, and exemplary sgRNAs that additionally excise the CTG repeat by inducing a large indel. The arrows indicate the genomic target site for each sgRNA.

[0252] FIGS. 33A-C show CTG repeat excision using paired sgRNAs in DM1 myoblasts. FIG. 33A shows a schematic representation of target sites for select sgRNAs in a WT and disease allele of DMPK. FIG. 33B shows separation of PCR products by DNA gel-electrophoresis of wild type DNA and excised DNA (referred to as “DoubleCut edited alleles”). FIG. 33C shows CTG repeat excision efficiency for individual sgRNAs and pairs of sgRNAs measured by loss-of signal ddPCR assay. U1 is SEQ ID NO: 3778 (DMPK-U27); U2 is SEQ ID NO: 3386 (DMPK-U56); U3 is SEQ ID NO: 3354 (DMPK-U58); D1 is SEQ ID NO: 2514 (DMPK-D15); D2 is SEQ ID NO: 2258 (DMPK-D34); D3 is SEQ ID NO: 2210 (DMPK-D42). Pair 1 corresponds to sgRNA SEQ ID NO: 3778 (DMPK-U27) and sgRNA SEQ ID NO: 2258 (DMPK-D34); Pair 2 corresponds to sgRNA SEQ ID NO: 3778 (DMPK-U27) and sgRNA SEQ ID NO: 2210 (DMPK-D42); Pair 3 corresponds to sgRNA SEQ ID NO: 3386 (DMPK-U56) and sgRNA SEQ ID NO: 2258 (DMPK-D34); Pair 4 corresponds to sgRNA SEQ ID NO: 3386 (DMPK-U56) and sgRNA SEQ ID NO: 2210 (DMPK-D42); and Pair 5 corresponds to sgRNA SEQ ID NO: 3354 (DMPK-U58) and sgRNA SEQ ID NO: 2514 (DMPK-D15).

[0253] FIGS. 34A-B show the reduction of (CUG). repeat RNA foci in DM1 myoblasts using individual sgRNAs or paired sgRNAs by FISH as compared to DM1 and healthy control samples. Immunofluorescence is shown Single Cut sgRNA 1 and Pair 4 (FIG. 34A). Results are shown as % relative frequency of the number of (CUG). repeat RNA foci observed per nuclei for sgRNAs 1-6 and Pairs 1-5 (FIG. 34B). sgRNA1 is SEQ ID NO: 3778 (DMPK-U27); sgRNA2 is SEQ ID NO: 3386 (DMPK-U56); sgRNA3 is SEQ ID NO: 3354 (DMPK-U58); sgRNA4 is SEQ ID NO: 2514 (DMPK-D15); sgRNA5 is SEQ ID NO: 2258 (DMPK-D34); sgRNA6 is SEQ ID NO: 2210 (DMPK-D42). Pair 1 corresponds to sgRNA SEQ ID NO: 3778 (DMPK-U27) and sgRNA SEQ ID NO: 2258 (DMPK-D34); Pair 2 corresponds to sgRNA SEQ ID NO: 3778 (DMPK-U27) and sgRNA SEQ ID NO: 2210 (DMPK-D42); Pair 3 corresponds to sgRNA SEQ ID NO: 3386 (DMPK-U56) and sgRNA SEQ ID NO: 2258 (DMPK-D34); Pair 4 corresponds to sgRNA SEQ ID NO: 3386 (DMPK-U56) and sgRNA SEQ ID NO: 2210 (DMPK-D42); and Pair 5 corresponds to sgRNA SEQ ID NO: 3354 (DMPK-U58) and sgRNA SEQ ID NO: 2514 (DMPK-D15).

[0254] FIGS. 35A-B show the reduction of (CUG). repeat RNA foci in DM1 myotubes using individual sgRNAs or paired sgRNAs by FISH as compared to DM1 and healthy controls. Immunofluorescence is shown for DAPI, myogenin, MBLN1, and (CUG). RNA foci for sgRNA1 (SEQ ID NO: 3778, DMPK-U27) and Pair 4 (sgRNA SEQ ID NO: 3386 (DMPK-U56) and sgRNA SEQ ID NO: 2210 (DMPK-D42)) (FIG. 35A). Results are shown as % relative frequency of the number of (CUG). repeat RNA foci observed per nuclei for sgRNAs 1-6 and Pairs 1-5 (FIG. 35B). sgRNA1 is SEQ ID NO: 3778 (DMPK-U27); sgRNA2 is SEQ ID NO: 3386 (DMPK-U56); sgRNA3 is SEQ ID NO: 3354 (DMPK-U58); sgRNA4 is SEQ ID NO: 2514 (DMPK-D15); sgRNA5 is SEQ ID NO: 2258 (DMPK-D34); sgRNA6 is SEQ ID NO: 2210 (DMPK-D42). Pair 1 corresponds to sgRNA SEQ ID NO: 3778 (DMPK-U27) and sgRNA SEQ ID NO: 2258 (DMPK-D34); Pair 2 corresponds to sgRNA SEQ ID NO: 3778 (DMPK-U27) and sgRNA SEQ ID NO: 2210 (DMPK-D42); Pair 3 corresponds to sgRNA SEQ ID NO: 3386 (DMPK-U56) and sgRNA SEQ ID NO: 2258 (DMPK-D34); Pair 4 corresponds to sgRNA SEQ ID NO: 3386 (DMPK-U56) and sgRNA SEQ ID NO: 2210 (DMPK-D42); and Pair 5 corresponds to sgRNA SEQ ID NO: 3354 (DMPK-U58) and sgRNA SEQ ID NO: 2514 (DMPK-D15).

[0255] FIG. 36A-D shows correction of mis-splicing by CTG repeat excision using paired sgRNAs in DM1 myotubes. Results show qPCR data showing partial restoration of RNA splicing in BIN1 (FIG. 37A), DMD (FIG. 37B), KIF13A (FIG. 37C), and CACNA2D1 (FIG. 37D) mRNAs.

[0256] FIG. 37 shows a single guide excision experiment with SpCas9 in DM1 myoblasts. FIG. 37 shows PCR amplified DMPK DNA separated by electrophoresis using Agilent's 2200 TapeStation for example traces of excised CTG repeats +/- 3 uM Compound 6 and 8 individual guides (DMPK-U10 (SEQ ID NO: 3914), DMPK-U40 (SEQ ID NO: 3514), DMPK-D59 (SEQ ID NO: 1778), DMPK-D13 (SEQ ID NO: 2458), DMPK-U16 (SEQ ID NO: 3858), DMPK-U54 (SEQ ID NO: 3418), DMPK-D63 (SEQ ID NO: 1706), or DMPK-D34 (SEQ ID NO: 2258)). More prominent bands in Compound 6 treated samples indicate enhanced excision rates compared to the DMSO control (encircled).

[0257] FIGS. 38A-C show mis-splicing correction in DM1 myoblasts after dual gRNA CTG repeat excision after SpCas9 RNP delivery +/−3 uM Compound 6 (open circle (+ Inh), black circle (− Inh)) with a guide pair (SEQ ID NOs: 3330 and 2554) (FIG. 38A). AAVS1 gRNA (FIG. 38B) and mock electroporated cells (FIG. 38C) served as controls. Mis-splicing correction was evaluated for genes GFTP1, BIN1, MBNL2, DMD, NFIX, GOLGA4, and KIF13A. The frequency of a given splicing event was measured by NGS; data are normalized to mock treated.

[0258] FIGS. 39A-B show a dose response of DNA-PK inhibitor on CTG repeat excision in DM1 patient fibroblasts treated with RNPs containing spCas9 and guide pairs (SEQ ID NO: 3330 (GDG_DMPK3) and SEQ ID NO: 2506 (CRISPR-3) (FIG. 39A); or SEQ ID NO: 3330 (GDGDMPK3) and SEQ ID NO: 2546 (CRISPR-4) (FIG. 39B)). Fibroblasts were treated with an increasing dose of Compound 6 (30nM, 300nM, 3p.M, and 1004), or DMSO. Excised products are observed as bands by DNA gel electrophoresis.

[0259] FIG. 40 shows exemplary DNA electrophoresis of single gRNA excision with SaCas9 with and without Compound 6 for two gRNAs (SEQ ID NO: 1153 (gRNA 1), SEQ ID NO: 1129 (gRNA2)) in DM1 patient fibroblasts.

[0260] FIGS. 41A-B show composites of electropherograms of PCR amplified 3′UTR region of DMPK from DM1 patient myoblasts edited with 42 individual SpCas9 sgRNAs targeting the 3′ UTR of DMPK gene. After electroporation cells were incubated with DMSO (top row) or 3 uM Compound 6 (bottom row) for 24 hours. Arrows indicate the expected size for unedited healthy allele. Unedited disease (expanded CTG allele does not amplify). Bands below the arrow are presumptive edited alleles. Mock =electroporated without RNP. NTC (non-targeting control) electroporated with an RNP targeting elsewhere in the genome. FIG. 41A shows replicate 1. FIG. 41B shows replicate 2.

[0261] FIGS. 42A-F show exemplary PacBio sequencing results for single cut excision experiments with and without DNA-PK inhibition. FIG. 42A shows results with a mock guide; FIG. 42B shows results with guide DMPK-D43; FIG. 42C shows results with DMPK-D51; FIG. 42D shows results with guide DMPK-U10; FIG. 42E shows results with guide DMPK-U52; FIG. 42F shows results guide DMPK-U58. Results show read count for the healthy allele. Read pileup figures for each condition, spanning the 1195-bp amplicon (shown on the positive strand). The black solid region represents the 3′ UTR, and the patterned region represents the repeat. The dashed line represents the cut site of the sgRNA. Approximate fraction of reads in each condition with zero repeats in the region of interest (i.e. the fraction of reads with repeat excision). This was calculated by extracting the portion of the CIGAR string corresponding to the repetitive region (after performing quality control). Guides are ordered by position of cut site along the amplicon. Read length distributions for each condition after quality control.

[0262] FIGS. 43A-E show composites of electropherograms of PCR amplified 3′UTR region of DMPK from DM1 patient fibroblasts edited with all pairwise combinations of 42 SpCas9 sgRNAs targeting the 3′ UTR of DMPK gene (22 sgRNAs upstream of the CTG repeat and 20 downstream). After electroporation with RNPs pre-loaded with each guide pair cells were incubated with DMSO (top row of each pair) or 3 uM Compound 6 (bottom row for each pair) for 24 hours. Arrows indicate the expected size for unedited healthy allele. Unedited patient allele does not amplify. Bands below the arrow are presumptive edited alleles; bands above the healthy line are presumptive duplication or other complex rearrangements. FIG. 43A shows plate 1 of screen. FIG. 43B shows plate 2 of the screen. FIG. 43C shows plate 3 of the screen. FIG. 43D shows plate 4 of the screen. FIG. 43E shows plate 5 of the screen.

[0263] FIG. 44 shows a heatmap of % indel efficiency for sgRNAs targeting the FXN gene in a screen of conditions with varying Cas9 and sgRNA concentrations in a FA lymphoblastoid cell line (LCL).

[0264] FIG. 45 shows a heatmap representing the indel efficiency (%) for 56 individual sgRNAs targeting upstream of the GAA repeat in the FXN gene in two patient cell lines (GM14518 and GM03665). The concentration of RNP delivered is denoted as “High” (15 pmol Cas9 +45 pmol sgRNA) or “Low” (7.5 pmol Cas9 +22.5 pmol sgRNA).

[0265] FIG. 46 shows a heatmap representing the indel efficiency (%) for 40 individual sgRNAs targeting downstream of the GAA repeat in the FXN gene in two patient cell lines (GM14518 and GM03665). The concentration of RNP delivered is denoted as “High” (15 pmol Cas9 +45 pmol sgRNA) or “Low” (7.5 pmol Cas9 +22.5 pmol sgRNA). Indel efficiency for sgRNA SEQ ID NO: 26562 (FXN-D25) could not be calculated due to a SNP (single nucleotide polymorphism) present in the GM14518 patient line that was located within the targeted guide RNA sequence. CDC42BPB and RELA were used as experimental assay controls due to their known high and moderate efficiencies, respectively.

[0266] FIGS. 47A-C show a dual guide excision experiment with SpCas9 in FA cardiomyocytes using RNP electroporation with a guide pair flanking the GAA repeat (SEQ ID NOs 52666 and 26562). GAA excision significantly improved with 3 uM Compound 6 (FIG. 47A) and led to higher FXN mRNA (FIG. 47B, GAA+Inh)) and FXN protein levels (FIG. 47C, GAA+Inh). “NTC” refers to non-targeting control. “GAA” refers to the pair guides flanking the GAA repeat.

[0267] FIG. 48 shows a dual guide excision experiment with Cpf1 (Cas12a) and SpCas9 in wildtype (WT) and FA iPSCs using RNP electroporation. FIG. 48 shows a DNA gel-electrophoresis showing excised DNA bands after GAA repeat excision with Cpf1 (boxes, GD1&2 (SEQ ID NOs: 47047 and 7447)) and SpCas9 (Cas9 LG5&11 (SEQ ID NOs: 52666 and 26562)).

[0268] FIG. 49 shows a dual guide excision experiment with Cpf1 (Cas12a) in wildtype iPSC-derived cortical neurons. DNA gel-electrophoresis showing excised DNA bands after GAA repeat excision with Cpf1 using RNP electroporation with the following guide pairs: Guides 1&2 (SEQ ID NOs: 47047 and 7447); Guides 3&4 (SEQ ID NOs: 7463 and 46967); Guides 5&6 (SEQ ID NOs: 46768 and 7680); Guides 7&2 (SEQ ID NOs: 47032 and 7447).

[0269] FIG. 50 shows an exemplary AAV vector design for targeting neurons in adult YG8+/−mice. hSynapsin 1 promoter drives expression of AsCpf1 (Cas12a, vector 1) and mCherry-KASH (vector 2) in neurons. Two Cpf1 gRNAs (SEQ ID NOs: 47047 and 7447) were cloned in tandem under control of one U6 promoter to excise the GAA repeat.

[0270] FIGS. 51A-C shows a dual guide excision experiment with AsCpf1 (Cas12a) in an in vivo mouse model for Friedreich's Ataxia with dual AAV delivery (1:1 ratio) into striatum of adult YG8+/−mice. FIG. 51A shows brain histology 2 weeks after stereotactic injection showing mCherry positive striatum. FIG. 51B shows nuclei sorting of targeted neurons by FACS. FIG. 51C shows DNA gel-electrophoresis showing excised DNA bands after GAA repeat excision with Cpf1 in targeted neurons (mCherry +) versus non-targeted cells (mCherry -).

[0271] FIG. 52 shows characterization of the DM1 iPSC cell line SB1 as compared to a wildtype iPSC cell line by Southern blot analysis following digestion of genomic DNA with Bgl I to confirm the CTG repeat region. The SB1 cells contain a CTG repeat region of -300 CTG repeats (CTG repeat allele shown at -4.4kB).

[0272] FIG. 53 shows a schematic for the two loss-of-signal (LOS) digital droplet PCR (ddPCR) assays (5′ LOS ddPCR assay and 3′ LOS ddPCR assay) used to detect deletion of the CTG repeat region in the 3′ UTR of the DMPK gene.

[0273] FIG. 54 shows a schematic of six upstream gRNAs (5′ side of the CTG repeat region) (SEQ ID NOs: 3778, 4026, 3794, 4010, 3906, and 3746) and six downstream gRNAs (3′ side of the CTG repeat region) (SEQ ID NOs: 1778, 1746, 1770, 1586, 1914, and 2210) that were selected for evaluation of editing efficiency with SpCas9 in the DM1 iPSC cell line SB1.

[0274] FIG. 55 shows the percent editing efficiency results for six upstream gRNAs (SEQ ID NOs: 3778, 4026, 3794, 4010, 3906, and 3746) and six downstream gRNAs (SEQ ID NOs: 1778, 1746, 1770, 1586, 1914, and 2210) with SpCas9 in the DM1 iPSC cell line SB1.

[0275] FIG. 56 shows the percent deletion of the CTG repeat region for gRNAs tested as individual gRNAs and for 36 pair combinations that are each of the 6 upstream gRNAs (SEQ ID NOs: 3778, 4026, 3794, 4010, 3906, and 3746) with each of the 6 downstream gRNAs (SEQ ID NOs: 1778, 1746, 1770, 1586, 1914, and 2210) with SpCas9 in the DM1 iPSC cell line SB1 by the two LOS ddPCR assays (5′ and 3′). The % deletion shown is a combined average repeat deletion from both LOS ddPCR assays.

[0276] FIG. 57 shows a comparison of 5′ and 3′ LOS ddPCR results across SpCas9 gRNA pairs and individual gRNAs in the DM1 iPSC cell line SB1. Results are shown as percent deletion.

[0277] FIG. 58 shows a schematic of five upstream gRNAs (SEQ ID NOs: 3778, 4026, 3794, 3906, and 3746) and five downstream gRNAs (SEQ ID NOs: 1778, 1746, 1770, 1586, and 2210) that were selected for evaluation of editing efficiency with SpCas9 in the DM1 iPSC cell line 4033-4.

[0278] FIG. 59 shows the percent deletion of the CTG repeat region for gRNAs tested as individual gRNAs and for 25 pair combinations of 5 upstream gRNAs (SEQ ID NOs: 3778, 4026, 3794, 3906, and 3746) and 5 downstream gRNAs (SEQ ID NOs: 1778, 1746, 1770, 1586, and 2210) with SpCas9 in the DM1 iPSC cell line 4033-4 by the two LOS ddPCR assays (5′ and 3′). Results are shown as percent deletion for both the 5′ and 3′ LOS ddPCR assays.

[0279] FIGS. 60A-B shows the average repeat deletion across gRNAs pairs and individual gRNAs with SpCas9 in SB1 cells (FIG. 60A) (˜1 kb CTG repeat allele) (n=1) and in 4033-4 cells (FIG. 60B) (˜7.5 kb CTG repeat allele) (n=2). Both 5′ and 3′ LOS ddPCR assays were used for each experiment.

[0280] FIG. 61 shows a schematic of five upstream gRNAs (SEQ ID NOs: 3778, 4026, 3794, 3906, and 3746) and five downstream gRNAs (SEQ ID NOs: 1778, 1746, 1770, 1586, and 2210) that were selected for evaluation of editing efficiency with SpCas9 in DM1 cardiomyocytes.

[0281] FIG. 62 shows editing efficiency of five upstream gRNAs (SEQ ID NOs: 3778, 4026, 3794, 3906, and 3746) and five downstream gRNAs (SEQ ID NOs: 1778, 1746, 1770, 1586, and 2210) with SpCas9 in DM1 cardiomyocytes as compared to editing efficiency in DM1 iPSC SB1 cells. Editing efficiency is shown as percent indels (n=1).

[0282] FIG. 63 shows the percent deletion of the CTG repeat region for three gRNA pairs (SEQ ID NOs: 3746/2210, 4026/1586, and 3778/1778) with SpCas9 in DM1 cardiomyocytes (“CM”) and DM1 iPSC SB1 cells (“iPSC”) (n=1).

[0283] FIG. 64 shows the percent deletion of the CTG repeat region for gRNAs tested as individual gRNAs and for 36 pair combinations of 6 upstream gRNAs (SEQ ID NOs: 3778, 4026, 3794, 4010, 3906, and 3746) and 6 downstream gRNAs (SEQ ID NOs: 1778, 1746, 1770, 1586, 1914, and 2210) with SpCas9 in the DM1 iPSC cell line SB1 by the two LOS ddPCR assays (5′ and 3′). Arrows indicate gRNA pairs identified as “clean” (white), “off-target <1%” (gray), or “off-target >1%” (black) based on the hybrid capture off-target analysis.

[0284] FIG. 65 shows a schematic of 30 upstream gRNAs and 30 downstream gRNAs that were selected for evaluation of editing efficiency with SaCas9 in the DM1 iPSC cell line SB1.

[0285] FIG. 66 shows the percent editing efficiency results 30 upstream gRNAs and 30 downstream gRNAs with SaCas9 in wildtype iPSC cells.

[0286] FIG. 67 shows a schematic of 4 upstream gRNAs (SEQ ID NOs: 3256, 2896, 3136, and 3224) and 6 downstream gRNAs (SEQ ID NOs: 4989, 560, 672, 976, 760, 984, and 616) that were selected for evaluation of CTG repeat deletion with SaCas9 in the DM1 iPSC cell line SB1.

[0287] FIGS. 68A-B show percent CTG repeat deletion (FIG. 68A) and editing efficiency (FIG. 68B) for saCas9 gRNAs. The percent repeat deletion data is shown for pairs and individual saCas9 gRNAs from the 3′ LOS ddPCR assay. The spCas9 gRNA pair (SEQ ID NOs: 3746 and 2210) was used as a control. In FIG. 68B, # 2 refers to gRNA Sa2, # 3 refers to gRNA Sa3, # 4 refers to gRNA Sa4, # 21 refers to gRNA Sa21, # 1 refers to gRNA Sal, # 10 refers to gRNA Sa10, # 17 refers to gRNA Sa17, # 19 refers to gRNA Sa19, # 25 refers to gRNA Sa25, and # 29 refers to gRNA Sa29 (see also Table 21).

### DETAILED DESCRIPTION

[0288] Reference will now be made in detail to certain embodiments of the invention, examples of which are illustrated in the accompanying drawings. While the invention is described in conjunction with the illustrated embodiments, it will be understood that they are not intended to limit the invention to those embodiments. On the contrary, the invention is intended to cover all alternatives, modifications, and equivalents, which may be included within the invention as defined by the appended claims and included embodiments.

[0289] Before describing the present teachings in detail, it is to be understood that the disclosure is not limited to specific compositions or process steps, as such may vary. It should be noted that, as used in this specification and the appended claims, the singular form “a”, “an” and “the” include plural references unless the context clearly dictates otherwise. Thus, for example, reference to “a guide” includes a plurality of guides and reference to “a cell” includes a plurality of cells and the like.

[0290] Numeric ranges are inclusive of the numbers defining the range. Measured and measurable values are understood to be approximate, taking into account significant digits and the error associated with the measurement. Also, the use of “comprise”, “comprises”, “comprising”, “contain”, “contains”, “containing”, “include”, “includes”, and “including” are not intended to be limiting. It is to be understood that both the foregoing general description and detailed description are exemplary and explanatory only and are not restrictive of the teachings.

[0291] Unless specifically noted in the specification, embodiments in the specification that recite “comprising” various components are also contemplated as “consisting of” or “consisting essentially of” the recited components; embodiments in the specification that recite “consisting of” various components are also contemplated as “comprising” or “consisting essentially of” the recited components; and embodiments in the specification that recite “consisting essentially of” various components are also contemplated as “consisting of” or “comprising” the recited components (this interchangeability does not apply to the use of these terms in the claims). The term “or” is used in an inclusive sense, i.e., equivalent to “and/or,” unless the context clearly indicates otherwise.

[0292] The section headings used herein are for organizational purposes only and are not to be construed as limiting the desired subject matter in any way. In the event that any material incorporated by reference contradicts any term defined in this specification or any other express content of this specification, this specification controls. While the present teachings are described in conjunction with various embodiments, it is not intended that the present teachings be limited to such embodiments. On the contrary, the present teachings encompass various alternatives, modifications, and equivalents, as will be appreciated by those of skill in the art. -

### I. Definitions

[0293] Unless stated otherwise, the following terms and phrases as used herein are intended to have the following meanings:

[0294] “Polynucleotide” and “nucleic acid” are used herein to refer to a multimeric compound comprising nucleosides or nucleoside analogs which have nitrogenous heterocyclic bases or base analogs linked together along a backbone, including conventional RNA, DNA, mixed RNA-DNA, and polymers that are analogs thereof. A nucleic acid “backbone” can be made up of a variety of linkages, including one or more of sugar-phosphodiester linkages, peptide-nucleic acid bonds (“peptide nucleic acids” or PNA; PCT No. WO 95/32305), phosphorothioate linkages, methylphosphonate linkages, or combinations thereof. Sugar moieties of a nucleic acid can be ribose, deoxyribose, or similar compounds with substitutions, e.g., 2′ methoxy or 2′ halide substitutions. Nitrogenous bases can be conventional bases (A, G, C, T, U), analogs thereof (e.g., modified uridines such as 5-methoxyuridine, pseudouridine, or N1-methylpseudouridine, or others); inosine; derivatives of purines or pyrimidines (e.g., N⁴-methyl deoxyguanosine, deaza- or aza-purines, deaza- or aza-pyrimidines, pyrimidine bases with substituent groups at the 5 or 6 position (e.g., 5-methylcytosine), purine bases with a substituent at the 2, 6, or 8 positions, 2-amino-6-methylaminopurine, O⁶-methylguanine, 4-thio-pyrimidines, 4-amino-pyrimidines, 4-dimethylhydrazine-pyrimidines, and O⁴-alkyl-pyrimidines; U.S. Pat. No. 5,378,825 and PCT No. WO 93/13121). For general discussion see The Biochemistry of the Nucleic Acids 5-36, Adams et al., ed., 11^{th} ed., 1992). Nucleic acids can include one or more “abasic” residues where the backbone includes no nitrogenous base for position(s) of the polymer (US Pat. No. 5,585,481). A nucleic acid can comprise only conventional RNA or DNA sugars, bases and linkages, or can include both conventional components and substitutions (e.g., conventional bases with 2′ methoxy linkages, or polymers containing both conventional bases and one or more base analogs). Nucleic acid includes “locked nucleic acid” (LNA), an analogue containing one or more LNA nucleotide monomers with a bicyclic furanose unit locked in an RNA mimicking sugar conformation, which enhance hybridization affinity toward complementary RNA and DNA sequences (Vester and Wengel, 2004, Biochemistry 43(42):13233-41). RNA and DNA have different sugar moieties and can differ by the presence of uracil or analogs thereof in RNA and thymine or analogs thereof in DNA.

[0295] “Guide RNA”, “gRNA”, and simply “guide” are used herein interchangeably to refer to either a crRNA (also known as CRISPR RNA), or the combination of a crRNA and a trRNA (also known as tracrRNA). The crRNA and trRNA may be associated as a single RNA molecule (single guide RNA, sgRNA) or in two separate RNA molecules (dual guide RNA, dgRNA). “Guide RNA” or “gRNA” refers to each type. The trRNA may be a naturally-occurring sequence, or a trRNA sequence with modifications or variations compared to naturally-occurring sequences.

[0296] As used herein, a “spacer sequence,” sometimes also referred to herein and in the literature as a “guide sequence,” or “targeting sequence” refers to a sequence within a guide RNA that is complementary to a target sequence and functions to direct a guide RNA to a target sequence for cleavage by an RNA-targeted endonuclease. A guide sequence can be 20 base pairs in length, e.g., in the case of Streptococcus pyogenes (i.e., Spy Cas9, SpCas9) and related Cas9 homologs/orthologs. Shorter or longer sequences can also be used as guides, e.g., 15-, 16-, 17-, 18-, 19-, 21-, 22-, 23-, 24-, or 25-nucleotides in length. For example, in some embodiments, the guide sequence comprises at least 17, 18, 19, 20, 21, 22, 23, 24, or 25 contiguous nucleotides of a sequence selected from SEQ ID NOs: 101-4988, 5001-7264, or 7301-53372. In some embodiments, the guide sequence comprises a sequence selected from SEQ ID NOs: 101-4988, 5001-7264, or 7301-53372. In some embodiments, the target sequence is in a gene or on a chromosome, for example, and is complementary to the guide sequence. In some embodiments, the degree of complementarity or identity between a guide sequence and its corresponding target sequence may be about 75%, 80%, 85%, 90%, 95%, 96%, 97%, 98%, 99%, or 100%. For example, in some embodiments, the guide sequence comprises a sequence with about 75%, 80%, 85%, 90%, 95%, 96%, 97%, 98%, 99%, or 100% identity to at least 17, 18, 19, 20, 21, 22, 23, 24, or 25 contiguous nucleotides of a sequence selected from SEQ ID NOs: 101-4988, 5001-7264, or 7301-53372. In some embodiments, the guide sequence comprises a sequence with about 75%, 80%, 85%, 90%, 95%, 96%, 97%, 98%, 99%, or 100% identity to a sequence selected from SEQ ID NOs: 101-4988, 5001-7264, or 7301-53372. In some embodiments, the guide sequence and the target region may be 100% complementary or identical. In other embodiments, the guide sequence and the target region may contain at least one mismatch. For example, the guide sequence and the target sequence may contain 1, 2, 3, or 4 mismatches, where the total length of the target sequence is at least 17, 18, 19, 20 or more base pairs. In some embodiments, the guide sequence and the target region may contain 1-4 mismatches where the guide sequence comprises at least 17, 18, 19, 20 or more nucleotides. In some embodiments, the guide sequence and the target region may contain 1, 2, 3, or 4 mismatches where the guide sequence comprises 20 nucleotides.

[0297] In some embodiments, the guide sequence comprises a sequence selected from SEQ ID NOs: 101-4988, 5001-7264, or 7301-53372, wherein if the 5′ terminal nucleotide is not guanine, one or more guanine (g) is added to the sequence at its 5′ end. The 5′ g or gg is required in some instances for transcription, for example, for expression by the RNA polymerase III-dependent U6 promoter or the T7 promoter. In some embodiments, a 5′ guanine is added to any one of the guide sequences or pairs of guide sequences disclosed herein.

[0298] Target sequences for RNA-targeted endonucleases include both the positive and negative strands of genomic DNA (i.e., the sequence given and the sequence's reverse compliment), as a nucleic acid substrate for an RNA-targeted endonuclease is a double stranded nucleic acid. Accordingly, where a guide sequence is said to be “complementary to a target sequence”, it is to be understood that the guide sequence may direct a guide RNA to bind to the reverse complement of a target sequence. Thus, in some embodiments, where the guide sequence binds the reverse complement of a target sequence, the guide sequence is identical to certain nucleotides of the target sequence (e.g., the target sequence not including the PAM) except for the substitution of U for T in the guide sequence.

[0299] As used herein, a “pair of guide RNAs” or “guide pair” or “gRNA pair” or “paired guide RNAs” refers to two guide RNAs that do not have identical spacer sequences. The first spacer sequence refers to the spacer sequence of one of the gRNAs of the pair, and the second spacer sequence refers to the spacer sequence of the other gRNA of the pair. In some embodiments, use of a pair of guide RNAs is also referred to as a “double cut” or “DoubleCut” strategy, in which two cuts are made. In contrast, in some embodiments, use of only one guide RNA is referred to as a “single cut” or “SingleCut” strategy, in which one cut is made.

[0300] As used herein, an “RNA-targeted endonuclease” means a polypeptide or complex of polypeptides having RNA and DNA binding activity and DNA cleavage activity, or a DNA-binding subunit of such a complex, wherein the DNA binding activity is sequence-specific and depends on the sequence of the RNA. Exemplary RNA-targeted endonucleases include Cas cleavases/nickases. “Cas nuclease”, also called “Cas protein” as used herein, encompasses Cas cleavases and Cas nickases. Cas cleavases/nickases include a Csm or Cmr complex of a type III CRISPR system, the Cas10, Csm1, or Cmr2 subunit thereof, a Cascade complex of a type I CRISPR system, the Cas3 subunit thereof, and Class 2 Cas nucleases. In some embodiments, the RNA-targeted endonuclease is Class 1 Cas nuclease. In some embodiments, the RNA-targeted endonuclease is Class 2 Cas nuclease. As used herein, a “Class 2 Cas nuclease” is a single-chain polypeptide with RNA-targeted endonuclease activity. Class 2 Cas nucleases include Class 2 Cas cleavases/nickases (e.g., H840A, D10A, or N863A variants), which further have RNA-guided DNA cleavases or nickase activity. Class 2 Cas nucleases include, for example, Cas9, Cpf1, C2c1, C2c2, C2c3, HF Cas9 (e.g., N497A, R661A, Q695A, Q926A variants), HypaCas9 (e.g., N692A, M694A, Q695A, H698A variants), eSPCas9(1.0) (e.g, K810A, K1003A, R1060A variants), and eSPCas9(1.1) (e.g., K848A, K1003A, R1060A variants) proteins and modifications thereof. Cpf1 protein, Zetsche et al., Cell, 163: 1-13 (2015), is homologous to Cas9, and contains a RuvC-like nuclease domain. Cpf1 sequences of Zetsche are incorporated by reference in their entirety. See, e.g., Zetsche, Tables S1 and S3. See, e.g., Makarova et al., Nat Rev Microbiol, 13(11): 722-36 (2015); Shmakov et al., Molecular Cell, 60:385-397 (2015). Class 1 is divided into types I, III, and IV Cas nucleases. Class 2 is divided into types II, V, and VI Cas nucleases. In some embodiments, the RNA-targeted endonuclease is a Type I, II, III, IV, V, or VI Cas nuclease.

[0301] As used herein, “ribonucleoprotein” (RNP) or “RNP complex” refers to a guide RNA together with an RNA-targeted endonuclease, such as a Cas nuclease, e.g., a Cas cleavase or Cas nickase (e.g., Cas9). In some embodiments, the guide RNA guides the RNA-targeted endonuclease such as Cas9 to a target sequence, and the guide RNA hybridizes with and the agent binds to the target sequence, which can be followed by cleaving or nicking.

[0302] As used herein, a “self-complementary region” refers to any portion of a nucleic acid that can form secondary structure (e.g., hairpins, cruciforms, etc.) through hybridization to itself, e.g., when the region has at least one free double-strand end. Various forms of repeats and GC-rich or AT-rich nucleic acids qualify as self-complementary and can form secondary structures. Self-complementarity does not require perfect self-complementarity, as secondary structures may form despite the presence of some mismatched bases and/or non-canonical base pairs. In some embodiments, a self-complementary region comprises 40 nucleotides. Self-complementary regions may be interrupted by a loop-forming sequence, which is not necessarily self-complementary and may exist in a single-stranded state between segments of the self-complementary region that form the stem in a hairpin or other secondary structure.

[0303] As used herein, a first sequence is considered to “comprise a sequence with at least X % identity to” a second sequence if an alignment of the first sequence to the second sequence shows that X % or more of the positions of the second sequence in its entirety are matched by the first sequence. For example, the sequence AAGA comprises a sequence with 100% identity to the sequence AAG because an alignment would give 100% identity in that there are matches to all three positions of the second sequence. The differences between RNA and DNA (generally the exchange of uridine for thymidine or vice versa) and the presence of nucleoside analogs such as modified uridines do not contribute to differences in identity or complementarity among polynucleotides as long as the relevant nucleotides (such as thymidine, uridine, or modified uridine) have the same complement (e.g., adenosine for all of thymidine, uridine, or modified uridine; another example is cytosine and 5-methylcytosine, both of which have guanosine or modified guanosine as a complement). Thus, for example, the sequence 5′-AXG where X is any modified uridine, such as pseudouridine, N1-methyl pseudouridine, or 5-methoxyuridine, is considered 100% identical to AUG in that both are perfectly complementary to the same sequence (5′-CAU). Exemplary alignment algorithms are the Smith-Waterman and Needleman-Wunsch algorithms, which are well-known in the art. One skilled in the art will understand what choice of algorithm and parameter settings are appropriate for a given pair of sequences to be aligned; for sequences of generally similar length and expected identity >50% for amino acids or >75% for nucleotides, the Needleman-Wunsch algorithm with default settings of the Needleman-Wunsch algorithm interface provided by the EBI at the www.ebi.ac.uk web server is generally appropriate.

[0304] “mRNA” is used herein to refer to a polynucleotide that is not DNA and comprises an open reading frame that can be translated into a polypeptide (i.e., can serve as a substrate for translation by a ribosome and amino-acylated tRNAs). mRNA can comprise a phosphate-sugar backbone including ribose residues or analogs thereof, e.g., 2′-methoxy ribose residues. In some embodiments, the sugars of an mRNA phosphate-sugar backbone consist essentially of ribose residues, 2′-methoxy ribose residues, or a combination thereof.

[0305] Guide sequences useful in the guide RNA compositions and methods described herein are shown in Table 2 and the Sequence Listing and throughout the application.

[0306] As used herein, a “target sequence” refers to a sequence of nucleic acid in a target gene that has complementarity to the guide sequence of the gRNA. The interaction of the target sequence and the guide sequence directs an RNA-targeted endonuclease to bind, and potentially nick or cleave (depending on the activity of the agent), within the target sequence.

[0307] As used herein, “treatment” refers to any administration or application of a therapeutic for disease or disorder in a subject, and includes inhibiting the disease or development of the disease (which may occur before or after the disease is formally diagnosed, e.g., in cases where a subject has a genotype that has the potential or is likely to result in development of the disease), arresting its development, relieving one or more symptoms of the disease, curing the disease, or preventing reoccurrence of one or more symptoms of the disease. For example, treatment of DM1 may comprise alleviating symptoms of DM1.

[0308] As used herein, “ameliorating” refers to any beneficial effect on a phenotype or symptom, such as reducing its severity, slowing or delaying its development, arresting its development, or partially or completely reversing or eliminating it. In the case of quantitative phenotypes such as expression levels, ameliorating encompasses changing the expression level so that it is closer to the expression level seen in healthy or unaffected cells or individuals.

[0309] As used herein, a target sequence is “near” a trinucleotide repeat or self-complementary sequence if cleavage of the target followed by MMEJ or other non-NHEJ repair results in excision of the trinucleotide repeat or self-complementary sequence to a detectable extent. In some embodiments, a target sequence is within 10, 20, 30, 40, 50 or 100 nucleotides of the trinucleotide repeat or self-complementary sequence, where the distance from the target to the trinucleotide repeat or self-complementary sequence is measured as the number of nucleotides between the closest nucleotide of the trinucleotide repeat or self-complementary sequence and the site in the target that undergoes cleavage.

[0310] As used herein, “excision” of a sequence means and process that results in removal of the sequence from nucleic acid (e.g., DNA, such as gDNA) in which it originally occurred, including but not limited to processes comprising one or two double strand cleavage events or two or more nicking events followed by any repair process that does not include the sequence in the repair product, which may comprise one or more of ligation of distal ends (e.g., FIG. 5), resection (e.g., FIGS. 5 and 6), or secondary structure formation by at least part of the region being excised (e.g., FIG. 6).

[0311] As used herein, an “expanded amino acid repeat” refers to a segment of a given amino acid (e.g., one of glutamine, alanine, etc.) in a polypeptide that contains more instances of the amino acid than normally appears in wild-type versions of the polypeptide. For trinucleotide repeats in Table 1 that are listed as occurring in exons, the normal range indicates the range of instances of the amino acid than normally appears in wild-type versions of the corresponding polypeptide.

[0312] As used herein, “DM1 myoblasts” refer to precursors of muscle cells that have a genotype associated with DM1, and include e.g., cells derived from or isolated from a subject with DM1. DM1 myoblasts include primary cells, cultured cells, or cell lines.

[0313] A “pharmaceutically acceptable excipient” refers to an agent that is included in a pharmaceutical formulation that is not the active ingredient. Pharmaceutically acceptable excipients may e.g., aid in drug delivery or support or enhance stability or bioavailability.

[0314] The term “about” or “approximately” means an acceptable error for a particular value as determined by one of ordinary skill in the art, which depends in part on how the value is measured or determined.

### II. Overview of Repetitive DNA Excision

[0315] Disclosed herein are compositions and methods based on our discovery that RNA-directed endonucleases can excise trinucleotide repeats or self-complementary regions in combination with single or paired guide RNAs that target the endonuclease to sites flanking the TNR, as well as our finding that DNA-PK inhibitors provide improved excision of such sequences. As illustrated in FIGS. 2A-B, inhibiting DNA-PK is considered to reduce or eliminate repair through the non-homologous end joining (NHEJ) pathway in favor of one or more alternate pathways, likely including microhomology-mediated end joining (MMEJ).

[0316] Additionally, we have also found that DNA-PK inhibitors can facilitate excision of trinucleotide repeats by an RNA-directed nuclease such as Cas9 or Cpf1 in combination with one gRNA, as illustrated in FIG. 3. Again, inhibiting DNA-PK is considered to reduce or eliminate repair through the non-homologous end joining (NHEJ) pathway, which when only one gRNA is used would generally not result in trinucleotide repeat excision, in favor of one or more alternate pathways. The alternate repair pathways involve exonucleolytic resection of DNA ends at the cut site, resulting in excision of trinucleotide repeats. As illustrated in FIG. 4, providing a single gRNA facilitates the use of smaller vectors, such as AAV vectors.

[0317] FIG. 5 illustrates repair pathways following cleavage at two sites by an RNA-directed nuclease in more detail. Canonical NHEJ (C-NHEJ) is ordinarily a faster pathway and is DNA-PK dependent. Where cleavage sites flank the TNRs, C-NHEJ may result in resealing of both double-strand breaks (DSBs), preserving the TNRs, or a single joining of the ends of the DNA that do not comprise the TNR, resulting in excision. Inhibition of DNA-PK provides an increased opportunity for action by MRE11-RAD5O-NBS1 complex (MRN), including end resection. A microhomology search may ensue as part of the MMEJ pathway and result in a repair product from which the TNRs have been excised.

[0318] FIG. 6 illustrates repair pathways following cleavage at one site by an RNA-directed nuclease in more detail. C-NHEJ may result in resealing of the double-strand break and possibly the introduction of a small insertion or deletion (indel), completely or substantially preserving the TNRs. Inhibition of DNA-PK provides an increased opportunity for action by MRE11-RAD5O-NBS1 complex (MRN), including end resection and potentially CtIP stimulation of 5′ resection and cleavage of CTG secondary structure. A microhomology search may ensue as part of the MMEJ pathway and result in a repair product from which the TNRs have been excised.

[0319] Methods and compositions provided herein can be used to excise trinucleotide repeats or self-complementary sequences to ameliorate genotypes associated with various disorders. Table 1 provides information regarding exemplary genes, disorders, and trinucleotide repeats.

TABLE 1

| | Genetic Locus; | | | Pathological |
|---|---|---|---|---|
| | inheritance | | Normal repeat | repeat copy |
| Disorder | pattern | TNR | copy number | number |
| DM1/myotonic dystrophy | DMPK 3′ UTR | CTG | 5-34 | 50-5000 in most |
| type 1 | Autosomal | | (35−49 = | cells; may be |
| | dominant | | premutation, | higher in muscle |
| | | | children at risk) | cells |
| Huntington's Disease | Huntingtin (HTT) | CAG | 10-35 | 36 to >120 |
| | exon | | | 36-39: at risk |
| | Autosomal | | | 40 or more: |
| | dominant | | | disease almost |
| | | | | always develops |
| Friedrich's Ataxia | Frataxin (FXN) | GAA | 5-33 | 66 to >1000 |
| | intron | | | |
| | Autosomal | | | |
| | recessive | | | |
| Fragile X Syndrome (FXS) | Fragile X Mental | CGG | 5-40 | >200 |
| (see also FXPOI and | Retardation 1 | | (55-200 = | |
| FXTAS below: same locus, | (FMR1) 5′ UTR | | premutation; | |
| different copy number | X-linked dominant | | risk for FXPOI | |
| ranges) | | | in females and | |
| | | | for FXTAS; | |
| | | | children of | |
| | | | women with | |
| | | | premutation at | |
| | | | risk for FXS) | |
| Fragile X associated | Fragile X Mental | CGG | 5-40 | 55-200 |
| primary ovarian | Retardation 1 | | | |
| insufficiency (FXPOI), | (FMR1) 5′ UTR | | | |
| fragile X-associated | X-linked dominant | | | |
| tremor/ataxia syndrome | | | | |
| (FXTAS) | | | | |
| fragile site associated | Fragile X Mental | CGG | 4-40 | >200 |
| mental retardation/ | Retardation 2 | | (50-200 = | |
| FRAXE-associated mental | (FMR2, aka AFF2) | | premutation- | |
| deficiency; Fragile XE | 5′ UTR or 5′ UTR- | | considered | |
| syndrome | adjacent | | asymptomatic | |
| | X-linked; Females | | but children at | |
| | rarely diagnosed | | risk) | |
| X-linked spinal and bulbar | Androgen Receptor | CAG | Up to 36 | >38 or >39, e.g., |
| muscular atrophy (Kennedy | (AR) exon | | | 2x-3x normal (up |
| disease) | | | | to ~100) |
| ARX-associated infantile | aristaless related | GCG | Complex: ARX | Expansion to add |
| epileptic encephalopathy/ | homeobox (ARX) | | contains 4 | 1-7 repeats to first |
| Early infantile epileptic | exon | | distinct repeats | tract associated |
| encephalopathy 1/ | X-linked recessive | | of 7-16 alanine | with mental |
| Ohtahara syndrome; | | | codons each. | retardation. |
| Partington syndrome; West | | | First tract is | |
| syndrome | | | normally 16 | |
| | | | repeats. | |
| Spinocerebellar ataxia type | Ataxin 1 (ATXN1) | CAG | 4-39 | 40-80+ |
| 1 | exon | | | 40-50: mid |
| | Autosomal | | | adulthood onset |
| | dominant | | | >70: onset by |
| | | | | teens |
| Spinocerebellar ataxia type | Ataxin 2 (ATXN2) | CAG | ~22-31 | >32 |
| 2 | exon | | | 32-33: late |
| | Autosomal | | | adulthood onset |
| | dominant | | | >45: onset by |
| | | | | teens |
| Spinocerebellar ataxia type | Ataxin 3 (ATXN3) | CAG | 12-43; usually | >44 |
| 3 | exon | | 12-30 | 44-52 = |
| | Autosomal | | | intermediate, |
| | dominant | | | condition may or |
| | | | | may not develop; |
| | | | | up to 75 results in |
| | | | | mid-adulthood |
| | | | | onset; 80 results |
| | | | | in teenage onset; |
| | | | | homozygosity |
| | | | | results in |
| | | | | childhood onset |
| | | | | and increased |
| | | | | severity |
| Spinocerebellar ataxia type | Calcium voltage- | CAG | 4-35 | 37-306 |
| 6 | gated channel | | | |
| | subunit alpha1 A | | | |
| | (CACNA1A) exon | | | |
| | Autosomal | | | |
| | dominant | | | |
| Spinocerebellar ataxia type | Ataxin 7 (ATXN7) | CAG | 4-35 | 37-306 |
| 7 | exon | | | |
| | Autosomal | | | |
| | dominant | | | |
| Spinocerebellar ataxia type | ATXN8 opposite | TAC/ | 16-37 | 107-128 or |
| 8 | strand lncRNA | TGC | | 110-250 |
| | (ATXN8OS/SCA8) | | | |
| | Noncoding RNA | | | |
| | Antisense of intron | | | |
| | in KLHL1/ATXN8 | | | |
| | Autosomal | | | |
| | dominant | | | |
| Spinocerebellar ataxia type | Serine/threonine- | CAG | 7-28 | 66-78 |
| 12 | protein | | | |
| | phosphatase 2A 55 | | | |
| | kDa regulatory | | | |
| | subunit B beta | | | |
| | isoform | | | |
| | (PPP2R2B) 5′ | | | |
| | UTR | | | |
| | Autosomal | | | |
| | dominant | | | |
| Spinocerebellar ataxia type | TATA binding | CAG | 25-42 | 50-63 |
| 17 | protein (TBP) | | | |
| | exon | | | |
| | Autosomal | | | |
| | dominant | | | |
| Dentatorubropallidoluysian | Atrophin-1 (ATN1 | CAG | 6-35 | 49-88 |
| atrophy (DRPLA) | or DRPLA) | | | |
| | exon | | | |
| | Autosomal | | | |
| | dominant | | | |

### III. Methods of Excising Trinucleotide Repeats and Self-Complementary Regions; Methods of Treatment

[0320] This disclosure provides compositions for use in, and methods, of excising trinucleotide repeats or self-complementary regions and/or treating a disease or disorder characterized by a trinucleotide repeat (TNR) in DNA. In some embodiments, one or more gRNAs described herein (e.g., a pair of gRNAs) or a vector encoding the gRNAs are delivered to a cell in combination with an RNA-targeted endonuclease or a nucleic acid encoding the RNA-targeted endonuclease. Exemplary gRNAs, vectors, and RNA-targeted endonucleases are described herein, e.g., in the Summary and Composition sections. In some embodiments, the method further comprises delivering a DNA-PK inhibitor to the cell.

[0321] Provided is a method of treating a disease or disorder characterized by a trinucleotide repeat (TNR) in DNA, the method comprising delivering to a cell that comprises a TNR i) a guide RNA or a pair of guide RNAs comprising a spacer sequence or a pair of spacer sequences that directs an RNA-targeted endonuclease to or near the TNR, or a nucleic acid encoding the guide RNA or pair of guide RNAs; ii) an RNA-targeted endonuclease or a nucleic acid encoding the RNA-targeted endonuclease; and optionally iii) a DNA-PK inhibitor. In some embodiments, the method comprises a DNA-PK inhibitor. In some embodiments, the DNA-PK inhibitor is Compound 3 or Compound 6.

[0322] In some embodiments, a method is provided of treating a disease or disorder characterized by a trinucleotide repeat (TNR) in DNA, the method comprising delivering to a cell that comprises a TNR i) a guide RNA or a pair of guide RNAs comprising a spacer or a pair of spacer sequences that directs an RNA-targeted endonuclease to or near the TNR, or a nucleic acid encoding the guide RNA or pair of guide RNAs; ii) an RNA-targeted endonuclease or a nucleic acid encoding the RNA-targeted endonuclease; and iii) a DNA-PK inhibitor which is Compound 3 or Compound 6.

[0323] Also provided is a method of excising a self-complementary region comprising delivering to a cell that comprises the self-complementary region i) a guide RNA or pair of guide RNAs comprising a spacer or a pair of spacer sequences that directs an RNA-targeted endonuclease to or near the self-complementary region, or a nucleic acid encoding the guide RNA or pair of guide RNAs; ii) an RNA-targeted endonuclease or a nucleic acid encoding the RNA-targeted endonuclease; and optionally iii) a DNA-PK inhibitor, wherein the self-complementary region is excised. In some embodiments, the method comprises a DNA-PK inhibitor. In some embodiments, the DNA-PK inhibitor is Compound 3 or Compound 6.

[0324] In some embodiments, a method is provided of excising a trinucleotide repeat (TNR) in DNA comprising delivering to a cell that comprises the TNR i) a guide RNA comprising a spacer that directs an RNA-targeted endonuclease to or near the TNR, or a nucleic acid encoding the guide RNA; ii) an RNA-targeted endonuclease or a nucleic acid encoding the RNA-targeted endonuclease; and optionally iii) a DNA-PK inhibitor, wherein at least one TNR is excised. In some embodiments, the method comprises a DNA-PK inhibitor. In some embodiments, the DNA-PK inhibitor is Compound 3 or Compound 6.

[0325] In some embodiments, the method of excising a self-complementary region and/or method of excising a TNR in DNA is for the treatment of a disease or disorder provided in Table 1.

[0326] Also provided is a method of treating a disease or disorder characterized by a trinucleotide repeat (TNR) in the 3′ UTR of the DMPK gene, the method comprising delivering to a cell that comprises a TNR in the 3′ UTR of the DMPK gene i) a guide RNA comprising a spacer comprising a sequence of any one of SEQ ID NOs 101-4988, or a nucleic acid encoding the guide RNA; ii) an RNA-targeted endonuclease or a nucleic acid encoding the RNA-targeted endonuclease; and iii) optionally a DNA-PK inhibitor. In some embodiments, the method comprises a DNA-PK inhibitor. In some embodiments, the DNA-PK inhibitor is Compound 3 or Compound 6.

[0327] Also provided is a method of treating a disease or disorder characterized by a trinucleotide repeat (TNR) in the 3′ UTR of the DMPK gene, the method comprising delivering to a cell that comprises a TNR in the 3′ UTR of the DMPK gene i) a guide RNA comprising a spacer comprising a sequence of any one of SEQ ID NOs: 4018, 4010, 4002, 4042, 4034, 4026, 3954, 3946, 3994, 3914, 3978, 3906, 3898, 3938, 3922, 3858, 3850, 3882, 3826, 3818, 3842, 3794, 3786, 3762, 3810, 3746, 3778, 3738, 3770, 3722, 3754, 3690, 3666, 3658, 3634, 3586, 3546, 3530, 3642, 3514, 3506, 3490, 3618, 3610, 3602, 3578, 3442, 3522, 3410, 3378, 3434, 3370, 3426, 3418, 3394, 3386, 3330, 3354, 3346, 3314, 3930, 3890, 3834, 3802, 3706, 3698, 3682, 3674, 3570, 3554, 3538, 3498, 3482, 3458, 3474, 3450, 2667, 2666, 2650, 2642, 2626, 2618, 2706, 2690, 2682, 2610, 2674, 2658, 2602, 2594, 2634, 2554, 2546, 2586, 2538, 2578, 2570, 2522, 2498, 2490, 2466, 2458, 2450, 2514, 2506, 2418, 2482, 2474, 2394, 2442, 2434, 2370, 2378, 2354, 2346, 2338, 2314, 2298, 2282, 2274, 2266, 2330, 2258, 2322, 2242, 2234, 2290, 2250, 2218, 2226, 2210, 2194, 2146, 2138, 2122, 2106, 2098, 2090, 2130, 2114, 2034, 2026, 2058, 2050, 2042, 1914, 1786, 1778, 1770, 1842, 1738, 1706, 1690, 1746, 1714, 1650, 1642, 1610, 1586, 1562, 1546, 1578, 1538, 1378, 1370, 1922, 1898, 1906, 1794, 1762, 1698, 1674, 1722, 1362, 1450, 2202, 2178, 2170, 2162, 2018, 2010, 1890, 1962, 1946, 1850, 1818, 1658, 1634, 1602, 1554, 1434, 1426, 1338, 1346, 1978, 1994, 1986, 1970, 1938, 1930, 1810, 1834, 1826, 1802, 1626, 1594, 1514, 1498, 1490, 1482, 1474, 1458, 1442, 1418, 1410, 1402, 1394, or 1386, or a nucleic acid encoding the guide RNA; ii) an RNA-targeted endonuclease or a nucleic acid encoding the RNA-targeted endonuclease; and iii) optionally a DNA-PK inhibitor. Also provided is a method of excising a trinucleotide repeat (TNR) in the 3′ UTR of the DMPK gene comprising delivering to a cell that comprises the TNR i) a guide RNA comprising a spacer comprising a sequence of any one of SEQ ID NOs 4018, 4010, 4002, 4042, 4034, 4026, 3954, 3946, 3994, 3914, 3978, 3906, 3898, 3938, 3922, 3858, 3850, 3882, 3826, 3818, 3842, 3794, 3786, 3762, 3810, 3746, 3778, 3738, 3770, 3722, 3754, 3690, 3666, 3658, 3634, 3586, 3546, 3530, 3642, 3514, 3506, 3490, 3618, 3610, 3602, 3578, 3442, 3522, 3410, 3378, 3434, 3370, 3426, 3418, 3394, 3386, 3330, 3354, 3346, 3314, 3930, 3890, 3834, 3802, 3706, 3698, 3682, 3674, 3570, 3554, 3538, 3498, 3482, 3458, 3474, 3450, 2667, 2666, 2650, 2642, 2626, 2618, 2706, 2690, 2682, 2610, 2674, 2658, 2602, 2594, 2634, 2554, 2546, 2586, 2538, 2578, 2570, 2522, 2498, 2490, 2466, 2458, 2450, 2514, 2506, 2418, 2482, 2474, 2394, 2442, 2434, 2370, 2378, 2354, 2346, 2338, 2314, 2298, 2282, 2274, 2266, 2330, 2258, 2322, 2242, 2234, 2290, 2250, 2218, 2226, 2210, 2194, 2146, 2138, 2122, 2106, 2098, 2090, 2130, 2114, 2034, 2026, 2058, 2050, 2042, 1914, 1786, 1778, 1770, 1842, 1738, 1706, 1690, 1746, 1714, 1650, 1642, 1610, 1586, 1562, 1546, 1578, 1538, 1378, 1370, 1922, 1898, 1906, 1794, 1762, 1698, 1674, 1722, 1362, 1450, 2202, 2178, 2170, 2162, 2018, 2010, 1890, 1962, 1946, 1850, 1818, 1658, 1634, 1602, 1554, 1434, 1426, 1338, 1346, 1978, 1994, 1986, 1970, 1938, 1930, 1810, 1834, 1826, 1802, 1626, 1594, 1514, 1498, 1490, 1482, 1474, 1458, 1442, 1418, 1410, 1402, 1394, or 1386, or a nucleic acid encoding the guide RNA; ii) an RNA-targeted endonuclease or a nucleic acid encoding the RNA-targeted endonuclease; and iii) optionally a DNA-PK inhibitor, wherein at least one TNR is excised. In some embodiments, the gRNA comprises a spacer sequence comprising a sequence of any one of SEQ ID NOs: 3330, 3914, 3418, 3746, 3778, 3394, 4026, 3690, 3794, 3386, 3938, 3682, 3818, 3658, 3722, 3802, 3858, 3514, 3770, 3370, 3354, 4010, 2202, 1706, 2210, 2170, 1778, 2258, 2114, 2178, 1642, 1738, 1746, 2322, 1770, 1538, 2514, 2458, 2194, 2594, 2162, or 2618. In some embodiments, the gRNA comprises a spacer sequence comprising a sequence of any one of SEQ ID NOs: 3746, 3778, 3394, 3386, 3938, 3818, 3722, 3858, 3370, 1706, 2210, 2114, 1538, or 2594. In some embodiments, the gRNA comprises a spacer sequence comprising a sequence of any one of SEQ ID NOs: 3330, 3746, 3778, 3394, 4026, 3386, 3938, 3818, 3722, 3802, 3858, 3514, 3770, 3370, 2202, 1706, 2210, 1778, 2114, 1738, 1746, 2322, 1538, 2514, 2458, 2194, or 2594. In some embodiments, the gRNA comprises a spacer sequence comprising a sequence of any one of SEQ ID NOs: 3330, 3914, 3418, 3746, 3778, 3394, 4026, 3690, 3794, 3386, 3938, 3682, 3818, 3658, or 3722. In some embodiments, the gRNA comprises a spacer sequence comprising a sequence of any one of SEQ ID NOs: 2202, 1706, 2210, 2170, 1778, 2258, 2114, 2178, 1642, 1738, 1746, or 2322. In some embodiments, the gRNA comprises a spacer sequence comprising a sequence of any one of SEQ ID NOs: 3778, 4026, 3794, 4010, 3906, 3746, 1778, 1746, 1770, 1586, 1914, or 2210. In some embodiments, the gRNA comprises a spacer sequence comprising a sequence of any one of SEQ ID NOs: 3378, 3354, 3346, 3330, 3314, 2658, 2690, 2546, 2554, 2498, or 2506. In some embodiments, the gRNA comprises a spacer sequence comprising a sequence of any one of SEQ ID NOs: 3330, 3314, 2658, 2690, 2554, or 2498. In some embodiments, the gRNA comprises a spacer sequence comprising a sequence of any one of SEQ ID NOs: 3314, 2690, 2554, or 2498. In some embodiments, the gRNA comprises a spacer sequence comprising a sequence of any one of SEQ ID NOs: 3914, 3514, 1778, 2458, 3858, 3418, 1706, or 2258. . In some embodiments, the gRNA comprises a spacer sequence comprising a sequence of any one of SEQ ID NOs: 3916, 3420, or 3940. In some embodiments, the gRNA comprises a spacer sequence comprising SEQ ID NO: 3914. In some embodiments, the gRNA comprises a spacer sequence comprising SEQ ID NO: 3418. In some embodiments, the gRNA comprises a spacer sequence comprising SEQ ID NO: 3938. In some embodiments, the methods further comprise administering a DNA-PK inhibitor. In some embodiments, the DNA-PK inhibitor is Compound 6. In some embodiments, the DNA-PK inhibitor is Compound 3.

[0328] Also provided is a method of treating a disease or disorder characterized by a trinucleotide repeat (TNR) in the 5′ UTR of the FMR1 gene, the method comprising delivering to a cell that comprises a TNR in the 5′ UTR of the FMR1 gene i) a guide RNA comprising a spacer comprising a sequence of any one of SEQ ID NOs 5001-7264, or a nucleic acid encoding the guide RNA; ii) an RNA-targeted endonuclease or a nucleic acid encoding the RNA-targeted endonuclease; and iii) optionally a DNA-PK inhibitor. In some embodiments, the method comprises a DNA-PK inhibitor. In some embodiments, the DNA-PK inhibitor is Compound 3 or Compound 6.

[0329] Also provided is a method of treating a disease or disorder characterized by a trinucleotide repeat (TNR) in the 5′ UTR of the FMR1 gene, the method comprising delivering to a cell that comprises a TNR i) a guide RNA comprising a spacer having a sequence of any one of SEQ ID NOs 5262, 5782, 5830, 5926, 5950, 5998, 6022, 5310, and 5334, or a nucleic acid encoding the guide RNA; ii) an RNA-targeted endonuclease or a nucleic acid encoding the RNA-targeted endonuclease; and iii) optionally a DNA-PK inhibitor. Also provided is a method of excising a trinucleotide repeat (TNR) in the 5′ UTR of the FMR1 gene comprising delivering to a cell that comprises the TNR i) a guide RNA comprising a spacer comprising a sequence of any one of SEQ ID NOs 5262, 5782, 5830, 5926, 5950, 5998, 6022, 5310, and 5334, or a nucleic acid encoding the guide RNA; ii) an RNA-targeted endonuclease or a nucleic acid encoding the RNA-targeted endonuclease; and iii) optionally a DNA-PK inhibitor, wherein at least one TNR is excised. In some embodiments, the gRNA comprises a spacer sequence comprising a sequence of any one of SEQ ID NOs: 5830, 6022, 5262, or 5310. In some embodiments, the gRNA comprises a spacer sequence comprising a sequence of any one of SEQ ID NOs: 5262, 5334, and 5830. In some embodiments, the gRNA comprises a spacer sequence comprising a sequence of any one of SEQ ID NOs: 5264, 5336, 5832, 6024, or 5312. In some embodiments, the gRNA comprises a spacer sequence comprising SEQ ID NO: 5262. In some embodiments, the gRNA comprises a spacer sequence comprising SEQ ID NO: 5264. In some embodiments, the methods further comprise administering a DNA-PK inhibitor. In some embodiments, the DNA-PK inhibitor is Compound 6. In some embodiments, the DNA-PK inhibitor is Compound 3.

[0330] Also provided is a method of treating a disease or disorder characterized by a trinucleotide repeat (TNR) in the 5′ UTR of the FXN gene, the method comprising delivering to a cell that comprises a TNR in the 5′ UTR of the FXN gene i) a guide RNA comprising a spacer comprising a sequence of any one of SEQ ID NOs 7301-53372, or a nucleic acid encoding the guide RNA; ii) an RNA-targeted endonuclease or a nucleic acid encoding the RNA-targeted endonuclease; and iii) optionally a DNA-PK inhibitor. In some embodiments, the method comprises a DNA-PK inhibitor. In some embodiments, the DNA-PK inhibitor is Compound 3 or Compound 6.

[0331] Also provided is a method of treating a disease or disorder characterized by a trinucleotide repeat (TNR) in an intron of the FXN gene, the method comprising delivering to a cell that comprises a TNR i) a guide RNA comprising a spacer comprising a sequence of any one of SEQ ID NOs 28130, 34442, 45906, 26562, 52666, 51322, 46599, 52898, 26546, 7447, 47047, 49986, 51762, 51754, 52290, 52298, 51474, 52306, 50682, 51706, 52098, 50714, 51498, 52498, 50978, 51746, 52106, 51506, 50674, 52082, 52506, 50538, 52066, 52386, 52090, 52266, 52474, 52258, 52434, 50706, 51490, 52458, 51466, 52354, 51914, 51362, 51058, 50170, 51954, 52250, 51930, 51682, 52594, 52610, 51162, 49162, 50898, 49226, 51658, 52554, 52634, 51394, 49034, 52546, 52522, 52618, 52530, 28322, 26530, 26578, 26602, 26634, 26626, 26698, 26746, 26754, 26786, 26882, 27722, 27730, 27738, 27770, 27754, 27762, 27802, 27850, 27842, 27922, 27946, 27986, 28114, 28122, 28146, 28186, 28194, 28338, 28346, 28322, 28378, 28370, 28458, 28506, 28634, 28642, 28650, 34442, or 45906, or a nucleic acid encoding the guide RNA; ii) an RNA-targeted endonuclease or a nucleic acid encoding the RNA-targeted endonuclease; and iii) optionally a DNA-PK inhibitor. Also provided is a method of excising a trinucleotide repeat (TNR) in the 5′ UTR of the FXN gene comprising delivering to a cell that comprises the TNR i) a guide RNA comprising a spacer comprising a sequence of any one of SEQ ID NOs 28130, 34442, 45906, 26562, 52666, 51322, 46599, 52898, 26546, 7447, 47047, 49986, 51762, 51754, 52290, 52298, 51474, 52306, 50682, 51706, 52098, 50714, 51498, 52498, 50978, 51746, 52106, 51506, 50674, 52082, 52506, 50538, 52066, 52386, 52090, 52266, 52474, 52258, 52434, 50706, 51490, 52458, 51466, 52354, 51914, 51362, 51058, 50170, 51954, 52250, 51930, 51682, 52594, 52610, 51162, 49162, 50898, 49226, 51658, 52554, 52634, 51394, 49034, 52546, 52522, 52618, 52530, 28322, 26530, 26578, 26602, 26634, 26626, 26698, 26746, 26754, 26786, 26882, 27722, 27730, 27738, 27770, 27754, 27762, 27802, 27850, 27842, 27922, 27946, 27986, 28114, 28122, 28146, 28186, 28194, 28338, 28346, 28322, 28378, 28370, 28458, 28506, 28634, 28642, 28650, 34442, or 45906, or a nucleic acid encoding the guide RNA; ii) an RNA-targeted endonuclease or a nucleic acid encoding the RNA-targeted endonuclease; and iii) optionally a DNA-PK inhibitor, wherein at least one TNR is excised. In some embodiments, the gRNA comprises a spacer sequence comprising a sequence of any one of SEQ ID NOs: 51706, 51058, 51754, 52090, 52594, 52098, 52298, 52106, 51682, 52066, 52354, 52458, 52290, 52498, 51658, 51930, 51162, 52506, 51762, 51746, 52386, 52258, 52530, 52634, 27850, 28634, 26882, 28650, 28370, 28194, 26626, 26634, 26786, 26754, 27770, 26578, 28130, 27738, 28338, 28642, 26602, 27754, 27730, and 28122. In some embodiments, the gRNA comprises a spacer sequence comprising a sequence of any one of SEQ ID NOs: 47047, 7447, 7463, 46967, 46768, 7680, and 47032. In some embodiments, the gRNA comprises a spacer sequence comprising a sequence of any one of SEQ ID NOs: 47045, 7445, 7461, 46766, 7678, and 47030. In some embodiments, the methods further comprise administering a DNA-PK inhibitor. In some embodiments, the DNA-PK inhibitor is Compound 6. In some embodiments, the DNA-PK inhibitor is Compound 3.

[0332] In some embodiments of methods described herein, only one gRNA or vector encoding only one gRNA is provided or delivered, i.e., the method does not involve providing two or more guides that promote cleavage near a TNR or self-complementary region.

[0333] In some embodiments, methods are provided for treating a disease or characterized by a trinucleotide repeat (TNR) in the 3′ UTR of the DMPK gene, the method comprising administering only one guide RNA, or a vector encoding the guide RNA. In some embodiments, methods are provided for method of excising a trinucleotide repeat (TNR) in the 3′ UTR of the DMPK gene, the method comprising administering only one guide RNA, or a vector encoding the guide RNA. In some embodiments, methods are provided for administering only one gRNA, wherein a CTG repeat of the 3′ UTR of the DMPK gene is excised. In some embodiments, wherein only one gRNA, and wherein a CTG repeat of the 3′ UTR of the DMPK gene is excised, the gRNA comprises a spacer sequence comprising a sequence selected from SEQ ID NOs: 3746, 3778, 3394, 3386, 3938, 3818, 3722, 3858, 3370, 1706, 2210, 2114, 1538, and 2594. In some embodiments, wherein only one gRNA, and wherein a CTG repeat of the 3′ UTR of the DMPK gene is excised, the gRNA comprises a spacer sequence comprising a sequence selected from SEQ ID NOs: 3330, 3746, 3778, 3394, 4026, 3386, 3938, 3818, 3722, 3802, 3858, 3514, 3770, 3370, 2202, 1706, 2210, 1778, 2114, 1738, 1746, 2322, 1538, 2514, 2458, 2194, and 2594. In some embodiments, wherein only one gRNA, and wherein a CTG repeat of the 3′ UTR of the DMPK gene is excised, the gRNA comprises a spacer sequence comprising a sequence selected from SEQ ID NOs: 3330, 3314, 2658, 2690, 2554, and 2498. In some embodiments, wherein only one gRNA, and wherein a CTG repeat of the 3′ UTR of the DMPK gene is excised, the gRNA comprises a spacer sequence comprising a sequence selected from SEQ ID NOs: 3314, 2690, 2554, and 2498. In some embodiments, wherein only one gRNA, and wherein a CTG repeat of the 3′ UTR of the DMPK gene is excised, the gRNA comprises a spacer sequence comprising a sequence selected from SEQ ID NOs: 3914, 3514, 1778, 2458, 3858, 3418, 1706, and 2258. In some embodiments, wherein only one gRNA, and wherein a CTG repeat of the 3′ UTR of the DMPK gene is excised, the gRNA comprises a spacer sequence comprising a sequence selected from SEQ ID NOs: 3914, 3418, or 3938. In some embodiments, wherein only one gRNA, and wherein a CTG repeat of the 3′ UTR of the DMPK gene is excised, the gRNA comprises a spacer sequence comprising a sequence selected from SEQ ID NOs: 3916, 3420, or 3940. In some embodiments, wherein only one gRNA, and wherein a CTG repeat of the 3′ UTR of the DMPK gene is excised, the gRNA comprises the sequence of SEQ ID NO: 3914. In some embodiments, wherein only one gRNA, and wherein a CTG repeat of the 3′ UTR of the DMPK gene is excised, the gRNA comprises the sequence of SEQ ID NO: 3418. In some embodiments, wherein only one gRNA, and wherein a CTG repeat of the 3′ UTR of the DMPK gene is excised, the gRNA comprises the sequence of SEQ ID NO: 3938. In some embodiments, the methods comprise further administering a DNA-PK inhibitor. In some embodiments, the DNA-PK inhibitor is Compound 6. In some embodiments, the DNA-PK inhibitor is Compound 3.

[0334] In some embodiments, methods are provided for treating a disease or characterized by a trinucleotide repeat (TNR) in the 5′ UTR of the FMR1 gene, the method comprising administering only one guide RNA, or a vector encoding the guide RNA. In some embodiments, methods are provided for method of excising a trinucleotide repeat (TNR) in the 5′ UTR of the FMR1 gene, the method comprising administering only one guide RNA, or a vector encoding the guide RNA. In some embodiments, methods are provided for administering only one gRNA, wherein a TNR in the 5′ UTR of the FMR1 gene is excised. In some embodiments, wherein only one gRNA, and wherein a TNR in the 5′ UTR of the FMR1 gene is excised, the gRNA comprises a spacer sequence comprising a sequence selected from SEQ ID NOs: 5830, 6022, 5262, and 5310. In some embodiments, wherein only one gRNA, and wherein a TNR in the 5′ UTR of the FMR1 gene is excised, the gRNA comprises a spacer sequence comprising a sequence selected from SEQ ID NOs: 5262, 5334, and 5830. In some embodiments, wherein only one gRNA, and wherein a TNR in the 5′ UTR of the FMR1 gene is excised, the gRNA comprises a spacer sequence comprising a sequence selected from SEQ ID NOs: 5264, 5336, 5832, 6024, or 5312. In some embodiments, wherein only one gRNA, and wherein a TNR in the 5′ UTR of the FMR1 gene is excised, the gRNA comprises the sequence of SEQ ID NO: 5262. In some embodiments, wherein only one gRNA, and wherein a TNR in the 5′ UTR of the FMR1 gene is excised, the gRNA comprises the sequence of SEQ ID NO: 5264. In some embodiments, the methods comprise further administering a DNA-PK inhibitor. In some embodiments, the DNA-PK inhibitor is Compound 6. In some embodiments, the DNA-PK inhibitor is Compound 3.

[0335] In some embodiments, methods are provided for treating a disease or characterized by a trinucleotide repeat (TNR) in the 5′ UTR of the FXN gene, the method comprising administering only one guide RNA, or a vector encoding the guide RNA. In some embodiments, methods are provided for method of excising a trinucleotide repeat (TNR) in the 5′ UTR of the FXN gene, the method comprising administering only one guide RNA, or a vector encoding the guide RNA. In some embodiments, methods are provided for administering only one gRNA, wherein a TNR in the 5′ UTR of the FXN gene is excised. In some embodiments, wherein only one gRNA, and wherein a TNR in the 5′ UTR of the FXN gene is excised, the gRNA comprises a spacer sequence comprising a sequence selected from SEQ ID NOs: 47047, 7447, 7463, 46967, 46768, 7680, and 47032. In some embodiments, wherein only one gRNA, and wherein a TNR in the 5′ UTR of the FXN gene is excised, the gRNA comprises a spacer sequence comprising a sequence selected from SEQ ID NOs: 47045, 7445, 7461, 46766, 7678, and 47030. In some embodiments, the methods comprise further administering a DNA-PK inhibitor. In some embodiments, the DNA-PK inhibitor is Compound 6. In some embodiments, the DNA-PK inhibitor is Compound 3.

[0336] In some embodiments of methods described herein, a pair of guide RNAs that comprise a first and second spacer that deliver the RNA-targeted endonuclease to or near the TNR, or one or more nucleic acids encoding the pair of guide RNAs, are provided or delivered to a cell. For example, where the TNR is in the 3′ UTR of the DMPK gene, the first and second spacers may have the sequences of any one of the following pairs of SEQ ID NOs: 2202 and 3418; 2202 and 3370; 2202 and 3514; 2202 and 3658; 2178 and 3418; 2178 and 3370; 2178 and 3514; 2178 and 3658; 2170 and 3418; 2170 and 3370; 2170 and 3514; 2170 and 3658; 2162 and 3418; 2162 and 3370; 2162 and 3514; 2162 and 3658; 2202 and 4010; 2202 and 4026; 2202 and 3914; 2202 and 3938; 2202 and 3858; 2202 and 3818; 2202 and 3794; 2202 and 3802; 2202 and 3746; 2202 and 3778; 2202 and 3770; 2202 and 3722; 2202 and 3690; 2202 and 3682; 2202 and 3330; 2202 and 3354; 2202 and 3394; 2202 and 3386; 2178 and 4010; 2178 and 4026; 2178 and 3914; 2178 and 3938; 2178 and 3858; 2178 and 3818; 2178 and 3794; 2178 and 3802; 2178 and 3746; 2178 and 3778; 2178 and 3770; 2178 and 3722; 2178 and 3690; 2178 and 3682; 2178 and 3330; 2178 and 3354; 2178 and 3394; 2178 and 3386; 2170 and 4010; 2170 and 4026; 2170 and 3914; 2170 and 3938; 2170 and 3858; 2170 and 3818; 2170 and 3794; 2170 and 3802; 2170 and 3746; 2170 and 3778; 2170 and 3770; 2170 and 3722; 2170 and 3690; 2170 and 3682; 2170 and 3330; 2170 and 3354; 2170 and 3394; 2170 and 3386; 2162 and 4010; 2162 and 4026; 2162 and 3914; 2162 and 3938; 2162 and 3858; 2162 and 3818; 2162 and 3794; 2162 and 3802; 2162 and 3746; 2162 and 3778; 2162 and 3770; 2162 and 3722; 2162 and 3690; 2162 and 3682; 2162 and 3330; 2162 and 3354; 2162 and 3394; 2162 and 3386; 1706 and 3418; 1706 and 3370; 1706 and 3514; 1706 and 3658; 1706 and 4010; 1706 and 4026; 1706 and 3914; 1706 and 3938; 1706 and 3858; 1706 and 3818; 1706 and 3794; 1706 and 3802; 1706 and 3746; 1706 and 3778; 1706 and 3770; 1706 and 3722; 1706 and 3690; 1706 and 3682; 1706 and 3330; 1706 and 3354; 1706 and 3394; 1706 and 3386; 2210 and 3418; 2210 and 3370; 2210 and 3514; 2210 and 3658; 2210 and 4010; 2210 and 4026; 2210 and 3914; 2210 and 3938; 2210 and 3858; 2210 and 3818; 2210 and 3794; 2210 and 3802; 2210 and 3746; 2210 and 3778; 2210 and 3770; 2210 and 3722; 2210 and 3690; 2210 and 3682; 2210 and 3330; 2210 and 3354; 2210 and 3394; 2210 and 3386; 1778 and 3418; 1778 and 3370; 1778 and 3514; 1778 and 3658; 1778 and 4010; 1778 and 4026; 1778 and 3914; 1778 and 3938; 1778 and 3858; 1778 and 3818; 1778 and 3794; 1778 and 3802; 1778 and 3746; 1778 and 3778; 1778 and 3770; 1778 and 3722; 1778 and 3690; 1778 and 3682; 1778 and 3330; 1778 and 3354; 1778 and 3394; 1778 and 3386; 2258 and 3418; 2258 and 3370; 2258 and 3514; 2258 and 3658; 2258 and 4010; 2258 and 4026; 2258 and 3914; 2258 and 3938; 2258 and 3858; 2258 and 3818; 2258 and 3794; 2258 and 3802; 2258 and 3746; 2258 and 3778; 2258 and 3770; 2258 and 3722; 2258 and 3690; 2258 and 3682; 2258 and 3330; 2258 and 3354; 2258 and 3394; 2258 and 3386; 2114 and 3418; 2114 and 3370; 2114 and 3514; 2114 and 3658; 2114 and 4010; 2114 and 4026; 2114 and 3914; 2114 and 3938; 2114 and 3858; 2114 and 3818; 2114 and 3794; 2114 and 3802; 2114 and 3746; 2114 and 3778; 2114 and 3770; 2114 and 3722; 2114 and 3690; 2114 and 3682; 2114 and 3330; 2114 and 3354; 2114 and 3394; 2114 and 3386; 1642 and 3418; 1642 and 3370; 1642 and 3514; 1642 and 3658; 1642 and 4010; 1642 and 4026; 1642 and 3914; 1642 and 3938; 1642 and 3858; 1642 and 3818; 1642 and 3794; 1642 and 3802; 1642 and 3746; 1642 and 3778; 1642 and 3770; 1642 and 3722; 1642 and 3690; 1642 and 3682; 1642 and 3330; 1642 and 3354; 1642 and 3394; 1642 and 3386; 1738 and 3418; 1738 and 3370; 1738 and 3514; 1738 and 3658; 1738 and 4010; 1738 and 4026; 1738 and 3914; 1738 and 3938; 1738 and 3858; 1738 and 3818; 1738 and 3794; 1738 and 3802; 1738 and 3746; 1738 and 3778; 1738 and 3770; 1738 and 3722; 1738 and 3690; 1738 and 3682; 1738 and 3330; 1738 and 3354; 1738 and 3394; 1738 and 3386; 2258 and 3418; 2258 and 3370; 2258 and 3514; 2258 and 3658; 2258 and 4010; 2258 and 4026; 2258 and 3914; 2258 and 3938; 2258 and 3858; 2258 and 3818; 2258 and 3794; 2258 and 3802; 2258 and 3746; 2258 and 3778; 2258 and 3770; 2258 and 3722; 2258 and 3690; 2258 and 3682; 2258 and 3330; 2258 and 3354; 2258 and 3394; 2258 and 3386; 2114 and 3418; 2114 and 3370; 2114 and 3514; 2114 and 3658; 2114 and 4010; 2114 and 4026; 2114 and 3914; 2114 and 3938; 2114 and 3858; 2114 and 3818; 2114 and 3794; 2114 and 3802; 2114 and 3746; 2114 and 3778; 2114 and 3770; 2114 and 3722; 2114 and 3690; 2114 and 3682; 2114 and 3330; 2114 and 3354; 2114 and 3394; 1706 and 3386; 1642 and 3418; 1642 and 3370; 1642 and 3514; 1642 and 3658; 1642 and 4010; 1642 and 4026; 1642 and 3914; 1642 and 3938; 1642 and 3858; 1642 and 3818; 1642 and 3794; 1642 and 3802; 1642 and 3746; 1642 and 3778; 1642 and 3770; 1642 and 3722; 1642 and 3690; 1642 and 3682; 1642 and 3330; 1642 and 3354; 1642 and 3394; 1642 and 3386; 1738 and 3418; 1738 and 3370; 1738 and 3514; 1738 and 3658; 1738 and 4010; 1738 and 4026; 1738 and 3914; 1738 and 3938; 1738 and 3858; 1738 and 3818; 1738 and 3794; 1738 and 3802; 1738 and 3746; 1738 and 3778; 1738 and 3770; 1738 and 3722; 1738 and 3690; 1738 and 3682; 1738 and 3330; 1738 and 3354; 1738 and 3394; 1738 and 3386; 1746 and 3418; 1746 and 3370; 1746 and 3514; 1746 and 3658; 1746 and 4010; 1746 and 4026; 1746 and 3914; 1746 and 3938; 1746 and 3858; 1746 and 3818; 1746 and 3794; 1746 and 3802; 1746 and 3746; 1746 and 3778; 1746 and 3770; 1746 and 3722; 1746 and 3690; 1746 and 3682; 1746 and 3330; 1746 and 3354; 1746 and 3394; 1746 and 3386; 2322 and 3418; 2322 and 3370; 2322 and 3514; 2322 and 3658; 2322 and 4010; 2322 and 4026; 2322 and 3914; 2322 and 3938; 2322 and 3858; 2322 and 3818; 2322 and 3794; 2322 and 3802; 2322 and 3746; 2322 and 3778; 2322 and 3770; 2322 and 3722; 2322 and 3690; 2322 and 3682; 2322 and 3330; 2322 and 3354; 2322 and 3394; 2322 and 3386; 1770 and 3418; 1770 and 3370; 1770 and 3514; 1770 and 3658; 1770 and 4010; 1770 and 4026; 1770 and 3914; 1770 and 3938; 1770 and 3858; 1770 and 3818; 1770 and 3794; 1770 and 3802; 1770 and 3746; 1770 and 3778; 1770 and 3770; 1770 and 3722; 1770 and 3690; 1770 and 3682; 1770 and 3330; 1770 and 3354; 1770 and 3394; 1770 and 3386; 1538 and 3418; 1538 and 3370; 1538 and 3514; 1538 and 3658; 1538 and 4010; 1538 and 4026; 1538 and 3914; 1538 and 3938; 1538 and 3858; 1538 and 3818; 1538 and 3794; 1538 and 3802; 1538 and 3746; 1538 and 3778; 1538 and 3770; 1538 and 3722; 1538 and 3690; 1538 and 3682; 1538 and 3330; 1538 and 3354; 1538 and 3394; 1538 and 3386; 2514 and 3418; 2514 and 3370; 2514 and 3514; 2514 and 3658; 2514 and 4010; 2514 and 4026; 2514 and 3914; 2514 and 3938; 2514 and 3858; 2514 and 3818; 2514 and 3794; 2514 and 3802; 2514 and 3746; 2514 and 3778; 2514 and 3770; 2514 and 3722; 2514 and 3690; 2514 and 3682; 2514 and 3330; 2514 and 3354; 2514 and 3394; 2514 and 3386; 2458 and 3418; 2458 and 3370; 2458 and 3514; 2458 and 3658; 2458 and 4010; 2458 and 4026; 2458 and 3914; 2458 and 3938; 2458 and 3858; 2458 and 3818; 2458 and 3794; 2458 and 3802; 2458 and 3746; 2458 and 3778; 2458 and 3770; 2458 and 3722; 2458 and 3690; 2458 and 3682; 2458 and 3330; 2458 and 3354; 2458 and 3394; 2458 and 3386; 2194 and 3418; 2194 and 3370; 2194 and 3514; 2194 and 3658; 2194 and 4010; 2194 and 4026; 2194 and 3914; 2194 and 3938; 2194 and 3858; 2194 and 3818; 2194 and 3794; 2194 and 3802; 2194 and 3746; 2194 and 3778; 2194 and 3770; 2194 and 3722; 2194 and 3690; 2194 and 3682; 2194 and 3330; 2194 and 3354; 2194 and 3394; 2194 and 3386; 2594 and 3418; 2594 and 3370; 2594 and 3514; 2594 and 3658; 2594 and 4010; 2594 and 4026; 2594 and 3914; 2594 and 3938; 2594 and 3858; 2594 and 3818; 2594 and 3794; 2594 and 3802; 2594 and 3746; 2594 and 3778; 2594 and 3770; 2594 and 3722; 2594 and 3690; 2594 and 3682; 2594 and 3330; 2594 and 3354; 2594 and 3394; 2594 and 3386; 2618 and 3418; 2618 and 3370; 2618 and 3514; 2618 and 3658; 2618 and 4010; 2618 and 4026; 2618 and 3914; 2618 and 3938; 2618 and 3858; 2618 and 3818; 2618 and 3794; 2618 and 3802; 2618 and 3746; 2618 and 3778; 2618 and 3770; 2618 and 3722; 2618 and 3690; 2618 and 3682; 2618 and 3330; 2618 and 3354; 2618 and 3394; and 2618 and 3386. In some embodiments, the methods comprise further administering a DNA-PK inhibitor. In some embodiments, the DNA-PK inhibitor is Compound 6. In some embodiments, the DNA-PK inhibitor is Compound 3.

[0337] In a further example, where the TNR is in the 5′ UTR of the FMR1 gene, the first and second spacers may have the sequences of any one of the following pairs of SEQ ID NOs: 5782 and 5262; 5830 and 5262; 5926 and 5262; 5950 and 5262; and 5998 and 5262. In some embodiments, the methods comprise further administering a DNA-PK inhibitor. In some embodiments, the DNA-PK inhibitor is Compound 6. In some embodiments, the DNA-PK inhibitor is Compound 3.

[0338] In a further example, where the TNR is in an intron of the FXN gene, the first and second spacers may have the sequences of any one of the following pairs of SEQ ID NOs: 47047 and 7447; 7463 and 46967; 46768 and 7680; 47032 and 7447. In some embodiments, the methods comprise further administering a DNA-PK inhibitor. In some embodiments, the DNA-PK inhibitor is Compound 6. In some embodiments, the DNA-PK inhibitor is Compound 3.

[0339] In some embodiments, methods are provided for treating a disease or characterized by a trinucleotide repeat (TNR) in the 3′ UTR of the DMPK gene, the method comprising administering a composition comprising a pair of guide RNAs comprising a first and second spacer sequence, or one or more nucleic acids encoding the pair of guide RNAs. In some embodiments, methods are provided for methods of excising a trinucleotide repeat (TNR) in the 3′ UTR of the DMPK gene, the method comprising administering a composition comprising a pair of guide RNAs comprising a first and second spacer sequence, or one or more nucleic acids encoding the pair of guide RNAs. In some embodiments, the pair of guide RNAs comprise a first and second spacer sequence selected from SEQ ID NOs: 2202 and 3418; 2202 and 3370; 2202 and 3514; 2202 and 3658; 2178 and 3418; 2178 and 3370; 2178 and 3514; 2178 and 3658; 2170 and 3418; 2170 and 3370; 2170 and 3514; 2170 and 3658; 2162 and 3418; 2162 and 3370; 2162 and 3514; 2162 and 3658; 2202 and 4010; 2202 and 4026; 2202 and 3914; 2202 and 3938; 2202 and 3858; 2202 and 3818; 2202 and 3794; 2202 and 3802; 2202 and 3746; 2202 and 3778; 2202 and 3770; 2202 and 3722; 2202 and 3690; 2202 and 3682; 2202 and 3330; 2202 and 3354; 2202 and 3394; 2202 and 3386; 2178 and 4010; 2178 and 4026; 2178 and 3914; 2178 and 3938; 2178 and 3858; 2178 and 3818; 2178 and 3794; 2178 and 3802; 2178 and 3746; 2178 and 3778; 2178 and 3770; 2178 and 3722; 2178 and 3690; 2178 and 3682; 2178 and 3330; 2178 and 3354; 2178 and 3394; 2178 and 3386; 2170 and 4010; 2170 and 4026; 2170 and 3914; 2170 and 3938; 2170 and 3858; 2170 and 3818; 2170 and 3794; 2170 and 3802; 2170 and 3746; 2170 and 3778; 2170 and 3770; 2170 and 3722; 2170 and 3690; 2170 and 3682; 2170 and 3330; 2170 and 3354; 2170 and 3394; 2170 and 3386; 2162 and 4010; 2162 and 4026; 2162 and 3914; 2162 and 3938; 2162 and 3858; 2162 and 3818; 2162 and 3794; 2162 and 3802; 2162 and 3746; 2162 and 3778; 2162 and 3770; 2162 and 3722; 2162 and 3690; 2162 and 3682; 2162 and 3330; 2162 and 3354; 2162 and 3394; 2162 and 3386; 1706 and 3418; 1706 and 3370; 1706 and 3514; 1706 and 3658; 1706 and 4010; 1706 and 4026; 1706 and 3914; 1706 and 3938; 1706 and 3858; 1706 and 3818; 1706 and 3794; 1706 and 3802; 1706 and 3746; 1706 and 3778; 1706 and 3770; 1706 and 3722; 1706 and 3690; 1706 and 3682; 1706 and 3330; 1706 and 3354; 1706 and 3394; 1706 and 3386; 2210 and 3418; 2210 and 3370; 2210 and 3514; 2210 and 3658; 2210 and 4010; 2210 and 4026; 2210 and 3914; 2210 and 3938; 2210 and 3858; 2210 and 3818; 2210 and 3794; 2210 and 3802; 2210 and 3746; 2210 and 3778; 2210 and 3770; 2210 and 3722; 2210 and 3690; 2210 and 3682; 2210 and 3330; 2210 and 3354; 2210 and 3394; 2210 and 3386; 1778 and 3418; 1778 and 3370; 1778 and 3514; 1778 and 3658; 1778 and 4010; 1778 and 4026; 1778 and 3914; 1778 and 3938; 1778 and 3858; 1778 and 3818; 1778 and 3794; 1778 and 3802; 1778 and 3746; 1778 and 3778; 1778 and 3770; 1778 and 3722; 1778 and 3690; 1778 and 3682; 1778 and 3330; 1778 and 3354; 1778 and 3394; 1778 and 3386; 2258 and 3418; 2258 and 3370; 2258 and 3514; 2258 and 3658; 2258 and 4010; 2258 and 4026; 2258 and 3914; 2258 and 3938; 2258 and 3858; 2258 and 3818; 2258 and 3794; 2258 and 3802; 2258 and 3746; 2258 and 3778; 2258 and 3770; 2258 and 3722; 2258 and 3690; 2258 and 3682; 2258 and 3330; 2258 and 3354; 2258 and 3394; 2258 and 3386; 2114 and 3418; 2114 and 3370; 2114 and 3514; 2114 and 3658; 2114 and 4010; 2114 and 4026; 2114 and 3914; 2114 and 3938; 2114 and 3858; 2114 and 3818; 2114 and 3794; 2114 and 3802; 2114 and 3746; 2114 and 3778; 2114 and 3770; 2114 and 3722; 2114 and 3690; 2114 and 3682; 2114 and 3330; 2114 and 3354; 2114 and 3394; 2114 and 3386; 1642 and 3418; 1642 and 3370; 1642 and 3514; 1642 and 3658; 1642 and 4010; 1642 and 4026; 1642 and 3914; 1642 and 3938; 1642 and 3858; 1642 and 3818; 1642 and 3794; 1642 and 3802; 1642 and 3746; 1642 and 3778; 1642 and 3770; 1642 and 3722; 1642 and 3690; 1642 and 3682; 1642 and 3330; 1642 and 3354; 1642 and 3394; 1642 and 3386; 1738 and 3418; 1738 and 3370; 1738 and 3514; 1738 and 3658; 1738 and 4010; 1738 and 4026; 1738 and 3914; 1738 and 3938; 1738 and 3858; 1738 and 3818; 1738 and 3794; 1738 and 3802; 1738 and 3746; 1738 and 3778; 1738 and 3770; 1738 and 3722; 1738 and 3690; 1738 and 3682; 1738 and 3330; 1738 and 3354; 1738 and 3394; 1738 and 3386; 2258 and 3418; 2258 and 3370; 2258 and 3514; 2258 and 3658; 2258 and 4010; 2258 and 4026; 2258 and 3914; 2258 and 3938; 2258 and 3858; 2258 and 3818; 2258 and 3794; 2258 and 3802; 2258 and 3746; 2258 and 3778; 2258 and 3770; 2258 and 3722; 2258 and 3690; 2258 and 3682; 2258 and 3330; 2258 and 3354; 2258 and 3394; 2258 and 3386; 2114 and 3418; 2114 and 3370; 2114 and 3514; 2114 and 3658; 2114 and 4010; 2114 and 4026; 2114 and 3914; 2114 and 3938; 2114 and 3858; 2114 and 3818; 2114 and 3794; 2114 and 3802; 2114 and 3746; 2114 and 3778; 2114 and 3770; 2114 and 3722; 2114 and 3690; 2114 and 3682; 2114 and 3330; 2114 and 3354; 2114 and 3394; 1706 and 3386; 1642 and 3418; 1642 and 3370; 1642 and 3514; 1642 and 3658; 1642 and 4010; 1642 and 4026; 1642 and 3914; 1642 and 3938; 1642 and 3858; 1642 and 3818; 1642 and 3794; 1642 and 3802; 1642 and 3746; 1642 and 3778; 1642 and 3770; 1642 and 3722; 1642 and 3690; 1642 and 3682; 1642 and 3330; 1642 and 3354; 1642 and 3394; 1642 and 3386; 1738 and 3418; 1738 and 3370; 1738 and 3514; 1738 and 3658; 1738 and 4010; 1738 and 4026; 1738 and 3914; 1738 and 3938; 1738 and 3858; 1738 and 3818; 1738 and 3794; 1738 and 3802; 1738 and 3746; 1738 and 3778; 1738 and 3770; 1738 and 3722; 1738 and 3690; 1738 and 3682; 1738 and 3330; 1738 and 3354; 1738 and 3394; 1738 and 3386; 1746 and 3418; 1746 and 3370; 1746 and 3514; 1746 and 3658; 1746 and 4010; 1746 and 4026; 1746 and 3914; 1746 and 3938; 1746 and 3858; 1746 and 3818; 1746 and 3794; 1746 and 3802; 1746 and 3746; 1746 and 3778; 1746 and 3770; 1746 and 3722; 1746 and 3690; 1746 and 3682; 1746 and 3330; 1746 and 3354; 1746 and 3394; 1746 and 3386; 2322 and 3418; 2322 and 3370; 2322 and 3514; 2322 and 3658; 2322 and 4010; 2322 and 4026; 2322 and 3914; 2322 and 3938; 2322 and 3858; 2322 and 3818; 2322 and 3794; 2322 and 3802; 2322 and 3746; 2322 and 3778; 2322 and 3770; 2322 and 3722; 2322 and 3690; 2322 and 3682; 2322 and 3330; 2322 and 3354; 2322 and 3394; 2322 and 3386; 1770 and 3418; 1770 and 3370; 1770 and 3514; 1770 and 3658; 1770 and 4010; 1770 and 4026; 1770 and 3914; 1770 and 3938; 1770 and 3858; 1770 and 3818; 1770 and 3794; 1770 and 3802; 1770 and 3746; 1770 and 3778; 1770 and 3770; 1770 and 3722; 1770 and 3690; 1770 and 3682; 1770 and 3330; 1770 and 3354; 1770 and 3394; 1770 and 3386; 1538 and 3418; 1538 and 3370; 1538 and 3514; 1538 and 3658; 1538 and 4010; 1538 and 4026; 1538 and 3914; 1538 and 3938; 1538 and 3858; 1538 and 3818; 1538 and 3794; 1538 and 3802; 1538 and 3746; 1538 and 3778; 1538 and 3770; 1538 and 3722; 1538 and 3690; 1538 and 3682; 1538 and 3330; 1538 and 3354; 1538 and 3394; 1538 and 3386; 2514 and 3418; 2514 and 3370; 2514 and 3514; 2514 and 3658; 2514 and 4010; 2514 and 4026; 2514 and 3914; 2514 and 3938; 2514 and 3858; 2514 and 3818; 2514 and 3794; 2514 and 3802; 2514 and 3746; 2514 and 3778; 2514 and 3770; 2514 and 3722; 2514 and 3690; 2514 and 3682; 2514 and 3330; 2514 and 3354; 2514 and 3394; 2514 and 3386; 2458 and 3418; 2458 and 3370; 2458 and 3514; 2458 and 3658; 2458 and 4010; 2458 and 4026; 2458 and 3914; 2458 and 3938; 2458 and 3858; 2458 and 3818; 2458 and 3794; 2458 and 3802; 2458 and 3746; 2458 and 3778; 2458 and 3770; 2458 and 3722; 2458 and 3690; 2458 and 3682; 2458 and 3330; 2458 and 3354; 2458 and 3394; 2458 and 3386; 2194 and 3418; 2194 and 3370; 2194 and 3514; 2194 and 3658; 2194 and 4010; 2194 and 4026; 2194 and 3914; 2194 and 3938; 2194 and 3858; 2194 and 3818; 2194 and 3794; 2194 and 3802; 2194 and 3746; 2194 and 3778; 2194 and 3770; 2194 and 3722; 2194 and 3690; 2194 and 3682; 2194 and 3330; 2194 and 3354; 2194 and 3394; 2194 and 3386; 2594 and 3418; 2594 and 3370; 2594 and 3514; 2594 and 3658; 2594 and 4010; 2594 and 4026; 2594 and 3914; 2594 and 3938; 2594 and 3858; 2594 and 3818; 2594 and 3794; 2594 and 3802; 2594 and 3746; 2594 and 3778; 2594 and 3770; 2594 and 3722; 2594 and 3690; 2594 and 3682; 2594 and 3330; 2594 and 3354; 2594 and 3394; 2594 and 3386; 2618 and 3418; 2618 and 3370; 2618 and 3514; 2618 and 3658; 2618 and 4010; 2618 and 4026; 2618 and 3914; 2618 and 3938; 2618 and 3858; 2618 and 3818; 2618 and 3794; 2618 and 3802; 2618 and 3746; 2618 and 3778; 2618 and 3770; 2618 and 3722; 2618 and 3690; 2618 and 3682; 2618 and 3330; 2618 and 3354; 2618 and 3394; and 2618 and 3386. In some embodiments, the pair of guide RNAs comprise a first and second spacer sequence selected from SEQ ID NOs: 2202 and 3418; 2202 and 3370; 2202 and 3514; 2202 and 3658; 2178 and 3418; 2178 and 3370; 2178 and 3514; 2178 and 3658; 2170 and 3418; 2170 and 3370; 2170 and 3514; 2170 and 3658; 2162 and 3418; 2162 and 3370; 2162 and 3514; 2162 and 3658; 2202 and 4010; 2202 and 4026; 2202 and 3914; 2202 and 3938; 2202 and 3858; 2202 and 3818; 2202 and 3794; 2202 and 3802; 2202 and 3746; 2202 and 3778; 2202 and 3770; 2202 and 3722; 2202 and 3690; 2202 and 3682; 2202 and 3330; 2202 and 3354; 2202 and 3394; 2202 and 3386; 2178 and 4010; 2178 and 4026; 2178 and 3914; 2178 and 3938; 2178 and 3858; 2178 and 3818; 2178 and 3794; 2178 and 3802; 2178 and 3746; 2178 and 3778; 2178 and 3770; 2178 and 3722; 2178 and 3690; 2178 and 3682; 2178 and 3330; 2178 and 3354; 2178 and 3394; 2178 and 3386; 2170 and 4010; 2170 and 4026; 2170 and 3914; 2170 and 3938; 2170 and 3858; 2170 and 3818; 2170 and 3794; 2170 and 3802; 2170 and 3746; 2170 and 3778; 2170 and 3770; 2170 and 3722; 2170 and 3690; 2170 and 3682; 2170 and 3330; 2170 and 3354; 2170 and 3394; 2170 and 3386; 2162 and 4010; 2162 and 4026; 2162 and 3914; 2162 and 3938; 2162 and 3858; 2162 and 3818; 2162 and 3794; 2162 and 3802; 2162 and 3746; 2162 and 3778; 2162 and 3770; 2162 and 3722; 2162 and 3690; 2162 and 3682; 2162 and 3330; 2162 and 3354; 2162 and 3394; 2162 and 3386. In some embodiments, the pair of guide RNAs comprise a first and second spacer sequence selected from SEQ ID NOs: 2202 and 3418; 2202 and 3370; 2202 and 3514; 2202 and 3658; 2178 and 3418; 2178 and 3370; 2178 and 3514; 2178 and 3658; 2170 and 3418; 2170 and 3370; 2170 and 3514; 2170 and 3658; 2162 and 3418; 2162 and 3370; 2162 and 3514; and 2162 and 3658. In some embodiments, the pair of guide RNAs comprise a first and second spacer sequence selected from SEQ ID NOs: 3778 and 2514; 3778 and 2258; 3778 and 2210; 3386 and 2514; 3386 and 2258; 3386 and 2210; 3354 and 2514; 3354 and 2258; and 3354 and 2210. In some embodiments, the pair of guide RNAs comprise a first and second spacer sequence selected from SEQ ID NOs: 3778 and 2258; 3778 and 2210; 3386 and 2258; 3386 and 2210; and 3354 and 2514. In some embodiments, the pair of guide RNAs comprise a first and second spacer sequence selected from SEQ ID NOs: 3346 and 2554; 3346 and 2498; 3330 and 2554; 3330 and 2498; 3330 and 2506; and 3330 and 2546. In some embodiments, the pair of guide RNAs comprise a first and second spacer sequence selected from SEQ ID NOs: 3346 and 2554; 3346 and 2498; 3330 and 2554; 3330 and 2498; 3354 and 2546; 3354 and 2506; 3378 and 2546; 3378 and 2506. In some embodiments, the pair of guide RNAs comprise a first and second spacer sequence selected from SEQ ID NOs: 3346 and 2554; 3346 and 2498; 3330 and 2554; and 3330 and 2498. In some embodiments, the pair of guide RNAs comprise a first and second spacer comprising SEQ ID NOs: 1153 and 1129. In some embodiments, the pair of guide RNAs comprise a first and second spacer sequence, wherein the pair of spacer sequences comprise a first spacer sequence selected from SEQ ID NOs: 2856, 2864, 2880, 2896, 2904, 2912, 2936, 2944, 2960, 2992, 3016, 3024, 3064, 3096, 3112, 3128, 3136, 3144, 3160, 3168, 3192, 3200, 3208, 3216, 3224, 3232, 3240, 3248, 3256, 3264, 3314, 3330, 3346, 3354, 3370, 3378, 3386, 3394, 3410, 3418, 3426, 3434, 3442, 3450, 3458, 3474, 3482, 3490, 3498, 3506, 3514, 3522, 3530, 3538, 3546, 3554, 3570, 3578, 3586, 3602, 3610, 3618, 3634, 3642, 3658, 3674, 3682, 3690, 3698, 3706, 3722, 3746, 3762, 3770, 3778, 3794, 3802, 3818, 3826, 3834, 3850, 3858, 3890, 3898, 3906, 3914, 3922, 3930, 3938, 3946, 3994, 4010, 4018, 4026, 4034, 4042, 4208, or 4506, and a second spacer sequence selected from SEQ ID NOs: 560, 584, 608, 616, 656, 672, 688, 696, 712, 744, 752, 760, 840, 864, 960, 976, 984, 1008, 1056, 1128, 1136, 1152, 1224, 1240, 1272, 1338, 1346, 1370, 1378, 1386, 1394, 1402, 1410, 1418, 1426, 1434, 1442, 1458, 1474, 1482, 1490, 1498, 1514, 1538, 1546, 1554, 1562, 1578, 1586, 1594, 1602, 1610, 1626, 1634, 1642, 1650, 1658, 1690, 1706, 1714, 1738, 1746, 1770, 1778, 1786, 1802, 1810, 1818, 1826, 1834, 1842, 1850, 1890, 1914, 1930, 1938, 1946, 1962, 1970, 1978, 1986, 1994, 2010, 2018, 2026, 2042, 2050, 2058, 2090, 2114, 2130, 2162, 2170, 2178, 2202, 2210, 2226, 2242, 2258, 2266, 2274, 2282, 2298, 2314, 2322, 2330, 2338, 2346, 2354, 2370, 2378, 2394, 2418, 2434, 2442, 2458, 2466, 2474, 2498, 2506, 2514, 2522, 2546, 2554, 2570, 2586, 2658, 4989, 4990, 4991, or 4992. In some embodiments, the pair of guide RNAs comprise a first and second spacer sequence, wherein the pair of spacer sequences comprise a first spacer sequence selected from SEQ ID NOs: 3778, 4026, 3794, 4010, 3906 and 3746, and a second spacer sequence selected from SEQ ID NOs: 1778, 1746, 1770, 1586, 1914, and 2210. In some embodiments, the pair of guide RNAs comprise a first and second spacer sequence, wherein the pair of spacer sequences comprise a first and second spacer sequence selected from SEQ ID NOs: 3778 and 1778; 3778 and 1746; 3778 and 1770; 3778 and 1586; 3778 and 1914; 3778 and 2210; 4026 and 1778; 4026 and 1746; 4026 and 1770; 4026 and 1586; 4026 and 1914; 4026 and 2210; 3794 and 1778; 3794 and 1746; 3794 and 1770; 3794 and 1586; 3794 and 1586; 3794 and 1914; 3794 and 2210; 4010 and 1778; 4010 and 1770; 4010 and 1746; 4010 and 1586; 4010 and 1914; 4010 and 2210; 3906 and 1778; 3906 and 1778; 3906 and 1746; 3906 and 1770; 3906 and 1586; 3906 and 1914; 3906 and 2210; 3746 and 1778; 3746 and 1746; 3746 and 1770; 3746 and 1586; 3746 and 1914; and 3746 and 2210. In some embodiments, the pair of guide RNAs comprise a first and second spacer sequence, wherein the pair of spacer sequences comprise a first spacer sequence selected from SEQ ID NOs: 3256, 2896, 3136, and 3224, and a second spacer sequence selected from SEQ ID NOs: 4989, 560, 672, 976, 760, 984, and 616. In some embodiments, the pair of guide RNAs comprise a first and second spacer sequence, wherein the pair of spacer sequences comprise a first and second spacer sequence selected from SEQ ID NOs: 3256 and 4989; 3256 and 984; 3256 and 616; 2896 and 4989; 2896 and 672; 2896 and 760; 3136 and 4989; 3136 and 560; 3224 and 4989; 3224 and 976; and 3224 and 760. In some embodiments, the methods comprise further administering a DNA-PK inhibitor. In some embodiments, the DNA-PK inhibitor is Compound 6. In some embodiments, the DNA-PK inhibitor is Compound 3.

[0340] In some embodiments, methods are provided for treating a disease or characterized by a trinucleotide repeat (TNR) in the 5′ UTR of the FMR1 gene, the method comprising administering a composition comprising a pair of guide RNAs comprising a first and second spacer sequence, or one or more nucleic acids encoding the pair of guide RNAs. In some embodiments, methods are provided for method of excising a trinucleotide repeat (TNR) in the 5′ UTR of the FMR1 gene, the method comprising administering a composition comprising a pair of guide RNAs comprising a first and second spacer sequence, or one or more nucleic acids encoding the pair of guide RNAs. In some embodiments, the pair of guide RNAs comprise a first and second spacer sequence selected from SEQ ID NOs: 5782 and 5262; 5830 and 5262; 5926 and 5262; 5950 and 5262; and 5998 and 5262. In some embodiments, the pair of guide RNAs comprise a first and second spacer sequence selected from SEQ ID NOs: 5830 and 5262; and 6022 and 5310. In some embodiments, the pair of guide RNAs comprise a first and second spacer sequence comprising SEQ ID NOs: 5334 and 5830. In some embodiments, the methods comprise further administering a DNA-PK inhibitor. In some embodiments, the DNA-PK inhibitor is Compound 6. In some embodiments, the DNA-PK inhibitor is Compound 3.

[0341] In some embodiments, methods are provided for treating a disease or characterized by a trinucleotide repeat (TNR) in the 5′ UTR of the FXN gene, the method comprising administering a composition comprising a pair of guide RNAs comprising a first and second spacer sequence, or one or more nucleic acids encoding the pair of guide RNAs. In some embodiments, methods are provided for method of excising a trinucleotide repeat (TNR) in the 5′ UTR of the FXN gene, the method comprising administering a composition comprising a pair of guide RNAs comprising a first and second spacer sequence, or one or more nucleic acids encoding the pair of guide RNAs. In some embodiments, the pair of guide RNAs comprise a first and second spacer sequence selected from SEQ ID NOs: 47047 and 7447; 7463 and 46967; 46768 and 7680; 47032 and 7447. In some embodiments, the pair of guide RNAs comprise a first and second spacer sequence comprising SEQ ID NOs: 47047 and 7447. In some embodiments, the pair of guide RNAs comprise a first and second spacer sequence comprising SEQ ID NOs: 52898 and 36546. In some embodiments, the methods comprise further administering a DNA-PK inhibitor. In some embodiments, the DNA-PK inhibitor is Compound 6. In some embodiments, the DNA-PK inhibitor is Compound 3.

[0342] In some embodiments, methods are provided for excising a trinucleotide repeat (TNR) in the 3′ UTR of the DMPK gene, the method comprising administering a pair of guide RNAs comprising a pair of spacer sequences, wherein the first spacer sequence directs a RNA-guided DNA nuclease to any nucleotide within a first stretch of sequence, wherein the first stretch starts 1 nucleotide from the DMPK-U29 cut site with spCas9 and continues through the repeat. In some embodiments, the first stretch starts 1 nucleotide from the DMPK-U30 cut site with spCas9 and continues through 1 nucleotide before the DMPK-U56 cut site. In some embodiments, the first stretch starts 1 nucleotide from the DMPK-U30 cut site with spCas9 and continues through 1 nucleotide before the DMPK-U52 cut site. In some embodiments, the first stretch is SEQ ID NO: 53413. In some embodiments, the first stretch is SEQ ID NO: 53414. In some embodiments, the first stretch is SEQ ID NO: 53415.

[0343] In some embodiments, methods are provided for excising a trinucleotide repeat (TNR) in the 3′ UTR of the DMPK gene, the method comprising administering a pair of guide RNAs comprising a pair of spacer sequences, wherein the second spacer sequence directs a RNA-guided DNA nuclease to any nucleotide within a second stretch of sequence, wherein the second stretch starts 1 nucleotide in from the DMPK-D15 cut site with spCas9 and continues until 1 nucleotide before the DMPK-D51 cut site. In some embodiments, the second stretch starts 1 nucleotide from the DMPK-D35 cut site with spCas9 and continues until 1 nucleotide before the DMPK-D51 cut site. In some embodiments, the second stretch is SEQ ID NO: 53416. In some embodiments, the second stretch is SEQ ID NO: 53417.

[0344] In some embodiments, methods are provided for excising a trinucleotide repeat (TNR) in the 3′ UTR of the DMPK gene, the method comprising administering a pair of guide RNAs comprising a pair of spacer sequences, wherein the first spacer sequence directs a RNA-guided DNA nuclease to any nucleotide within a first stretch of sequence, and wherein the second spacer sequence directs a RNA-guided DNA nuclease to any nucleotide within a second stretch of sequence. In some embodiments, the first stretch starts 1 nucleotide from the DMPK-U29 cut site with spCas9 and continues through the repeat. In some embodiments, the first stretch starts 1 nucleotide from the DMPK-U30 cut site with spCas9 and continues through 1 nucleotide before the DMPK-U56 cut site. In some embodiments, the first stretch starts 1 nucleotide from the DMPK-U30 cut site with spCas9 and continues through 1 nucleotide before the DMPK-U52 cut site. In some embodiments, the first stretch is SEQ ID NO: 53413. In some embodiments, the first stretch is SEQ ID NO: 53414. In some embodiments, the first stretch is SEQ ID NO: 53415. In some embodiments, the second stretch starts 1 nucleotide in from the DMPK-D15 cut site with spCas9 and continues until 1 nucleotide before the DMPK-D51 cut site. In some embodiments, the second stretch starts 1 nucleotide from the DMPK-D35 cut site with spCas9 and continues until 1 nucleotide before the DMPK-D51 cut site. In some embodiments, the second stretch is SEQ ID NO: 53416. In some embodiments, the second stretch is SEQ ID NO: 53417. In some embodiments, the methods comprise further administering a DNA-PK inhibitor. In some embodiments, the DNA-PK inhibitor is Compound 6. In some embodiments, the DNA-PK inhibitor is Compound 3.

[0345] In some embodiments, the methods further comprise administering an RNA-targeted endonuclease, or a nucleic acid encoding the RNA-targeted endonuclease. In some embodiments, the RNA-targeted endonuclease is a Cas nuclease. In some embodiments, the Cas nuclease is Cas9. In some embodiments, the Cas9 nuclease is from Streptococcus pyogenes (spCas9). In some embodiments, the Cas9 nuclease is from Staphylococcus aureus. In some embodiments, the Cas nuclease is Cpf1.

[0346] Any of the foregoing methods and any other method described herein may be combined to the extent feasible with any of the additional features described herein, including in the sections above, the following discussion, and the examples.

[0347] In some embodiments, the one or more gRNAs direct the RNA-targeted endonuclease to a site in or near a TNR or self-complementary region. For example, the RNA-targeted endonuclease may be directed to cut within 10, 20, 30, 40, or 50 nucleotides of the TNR or self-complementary region.

[0348] In some embodiments, at least a pair of gRNAs are provided which direct the RNA-targeted endonuclease to a pair of sites flanking (i.e., on opposite sides of) a TNR or self-complementary region. For example, the pair of sites flanking a TNR or self-complementary region may each be within 10, 20, 30, 40, or 50 nucleotides of the TNR or self-complementary region but on opposite sides thereof

[0349] Where a DNA-PK inhibitor is used in a method disclosed herein, it may be any DNA-PK inhibitor known in the art. DNA-PK inhibitors are discussed in detail, for example, in WO2014/159690; WO2013/163190; WO2018/013840; WO 2019/143675; WO 2019/143677; WO 2019/143678; and Robert et al., Genome Medicine (2015) 7:93, each of which are incorporated by reference herein. In some embodiments, the DNA-PK inhibitor is NU7441, KU-0060648, or any one of Compounds 1, 2, 3, 4, 5, or 6 (structures shown below), each of which is also described in at least one of the foregoing citations. In some embodiments, the DNA-PK inhibitor is Compound 6. In some embodiments, the DNA-PK inhibitor is Compound 3. Structures for exemplary DNA-PK inhibitors are as follows in Table 1A. Unless otherwise indicated, reference to a DNA-PK inhibitor by name or structure encompasses pharmaceutically acceptable salts thereof.

TABLE 1A

| DNA-PK Inhibitor | Structure |
|---|---|
| NU7441 | [chemical structure] |
| KU-0060648 | [chemical structure] |
| Compound 1 | [chemical structure] |
| Compound 2 | [chemical structure] |
| Compound 3 | [chemical structure] |
| Compound 4 | [chemical structure] |
| Compound 5 | [chemical structure] |
| Compound 6 | [chemical structure] |

[0350] In any of the foregoing embodiments where a DNA-PK inhibitor is used, it may be used in combination with only one gRNA or vector encoding only one gRNA to promote excision, i.e., the method does not always involve providing two or more guides that promote cleavage near a TNR or self-complementary region.

[0351] In some embodiments, trinucleotide repeats or a self-complementary region is excised from a locus or gene associated with a disorder, such as a repeat expansion disorder, which may be a trinucleotide repeat expansion disorder. A repeat expansion disorder is one in which unaffected individuals have alleles with a number of repeats in a normal range, and individuals having the disorder or at risk for the disorder have one or two alleles with a number of repeats in an elevated range relative to the normal range. Exemplary repeat expansion disorders are listed and described in Table 1. In some embodiments, the repeat expansion disorder is any one of the disorders listed in Table 1. In some embodiments, the repeat expansion disorder is DM1. In some embodiments, the repeat expansion disorder is HD. In some embodiments, the repeat expansion disorder is FXS. In some embodiments, the repeat expansion disorder is a spinocerebellar ataxia. In some embodiments, the locus or gene from which the trinucleotide repeats are excised is a gene listed in Table 1. In some embodiments, the locus or gene from which the trinucleotide repeats are excised is DMPK. In some embodiments, the locus or gene from which the trinucleotide repeats are excised is HTT. In some embodiments, the locus or gene from which the trinucleotide repeats are excised is Frataxin. In some embodiments, the locus or gene from which the trinucleotide repeats are excised is FMR1. In some embodiments, the locus or gene from which the trinucleotide repeats are excised is an Ataxin. In some embodiments, the locus or gene from which the trinucleotide repeats are excised is a gene associated with a type of spinocerebellar ataxia.

[0352] The number of repeats that is excised may be at least 1, 2, 3, 4, 5, 6, 7, 8, 9, 10, 15, 20, 25, 30, 40, 50, 60, 70, 80, 90, 100, 150, 200, 300, 400, 500, 600, 700, 800, 900, 1000, 1500, 2000, 3000, 4000, 5000, 6000, 7000, 8000, 9000, or 10,000, or in a range bounded by any two of the foregoing numbers, inclusive, or in any of the ranges listed in the Summary above. In some embodiments, the number of repeats that is excised is in a range listed in Table 1, e.g., as a pathological, premutation, at-risk, or intermediate range.

[0353] In some embodiments, excision of a repeat or self-complementary region ameliorates at least one phenotype or symptom associated with the repeat or self-complementary region or associated with a disorder associated with the repeat or self-complementary region. This may include ameliorating aberrant expression of a gene encompassing or near the repeat or self-complementary region, or ameliorating aberrant activity of a gene product (noncoding RNA, mRNA, or polypeptide) encoded by a gene encompassing the repeat or self-complementary region.

[0354] For example, where the TNRs are within the DMPK gene, excision of the TNRs may ameliorate one or more phenotypes associated with an expanded-repeat DMPK gene, e.g., one or more of increasing myotonic dystrophy protein kinase activity; increasing phosphorylation of phospholemman, dihydropyridine receptor, myogenin, L-type calcium channel beta subunit, and/or myosin phosphatase targeting subunit; increasing inhibition of myosin phosphatase; and/or ameliorating muscle loss, muscle weakness, hypersomnia, one or more executive function deficiencies, insulin resistance, cataract formation, balding, or male infertility or low fertility.

[0355] Where the TNRs are within the HTT gene, excision of the TNRs may ameliorate one or more phenotypes associated with an expanded-repeat HTT gene, e.g., one or more of striatal neuron loss, involuntary movements, irritability, depression, small involuntary movements, poor coordination, difficulty learning new information or making decisions, difficulty walking, speaking, and/or swallowing, and/or a decline in thinking and/or reasoning abilities.

[0356] Where the TNRs are within the FMR1 gene, excision of the TNRs may ameliorate one or more phenotypes associated with an expanded-repeat FMR1 gene, e.g., one or more of aberrant FMR1 transcript or Fragile X Mental Retardation Protein levels, translational dysregulation of mRNAs normally associated with FMRP, lowered levels of phospho-cofilin (CFL1), increased levels of phospho-cofilin phosphatase PPP2CA, diminished mRNA transport to neuronal synapses, increased expression of HSP27, HSP70, and/or CRYAB, abnormal cellular distribution of lamin A/C isoforms, early-onset menopause such as menopause before age 40 years, defects in ovarian development or function, elevated level of serum gonadotropins (e.g., FSH), progressive intention tremor, parkinsonism, cognitive decline, generalized brain atrophy, impotence, and/or developmental delay.

[0357] Where the TNRs are within the FMR2 gene or adjacent to the 5′ UTR of FMR2, excision of the TNRs may ameliorate one or more phenotypes associated with expanded-repeats in or adjacent to the FMR2 gene, e.g., one or more of aberrant FMR2 expression, developmental delays, poor eye contact, repetitive use of language, and hand-flapping.

[0358] Where the TNRs are within the AR gene, excision of the TNRs may ameliorate one or more phenotypes associated with an expanded-repeat AR gene, e.g., one or more of aberrant AR expression; production of a C-terminally truncated fragment of the androgen receptor protein; proteolysis of androgen receptor protein by caspase-3 and/or through the ubiquitin-proteasome pathway; formation of nuclear inclusions comprising CREB-binding protein; aberrant phosphorylation of p44/42, p38, and/or SAPK/JNK; muscle weakness; muscle wasting; difficulty walking, swallowing, and/or speaking; gynecomastia; and/or male infertility.

[0359] Where the TNRs are within the ATXN1 gene, excision of the TNRs may ameliorate one or more phenotypes associated with an expanded-repeat ATXN1 gene, e.g., one or more of formation of aggregates comprising ATXN1; Purkinje cell death; ataxia; muscle stiffness; rapid, involuntary eye movements; limb numbness, tingling, or pain; and/or muscle twitches.

[0360] Where the TNRs are within the ATXN2 gene, excision of the TNRs may ameliorate one or more phenotypes associated with an expanded-repeat ATXN2 gene, e.g., one or more of aberrant ATXN2 production; Purkinje cell death; ataxia; difficulty speaking or swallowing; loss of sensation and weakness in the limbs; dementia; muscle wasting; uncontrolled muscle tensing; and/or involuntary jerking movements.

[0361] Where the TNRs are within the ATXN3 gene, excision of the TNRs may ameliorate one or more phenotypes associated with an expanded-repeat ATXN3 gene, e.g., one or more of aberrant ATXN3 levels; aberrant beclin-1 levels; inhibition of autophagy; impaired regulation of superoxide dismutase 2; ataxia; difficulty swallowing; loss of sensation and weakness in the limbs; dementia; muscle stiffness; uncontrolled muscle tensing; tremors; restless leg symptoms; and/or muscle cramps.

[0362] Where the TNRs are within the CACNA1A gene, excision of the TNRs may ameliorate one or more phenotypes associated with an expanded-repeat CACNA1A gene, e.g., one or more of aberrant CaV2.1 voltage-gated calcium channels in CACNA1A-expressing cells; ataxia; difficulty speaking; involuntary eye movements; double vision; loss of arm coordination; tremors; and/or uncontrolled muscle tensing.

[0363] Where the TNRs are within the ATXN7 gene, excision of the TNRs may ameliorate one or more phenotypes associated with an expanded-repeat ATXN7 gene, e.g., one or more of aberrant histone acetylation; aberrant histone deubiquitination; impairment of transactivation by CRX; formation of nuclear inclusions comprising ATXN7; ataxia; incoordination of gait; poor coordination of hands, speech and/or eye movements; retinal degeneration; and/or pigmentary macular dystrophy.

[0364] Where the TNRs are within the ATXN8OS gene, excision of the TNRs may ameliorate one or more phenotypes associated with an expanded-repeat ATXN8OS gene, e.g., one or more of formation of ribonuclear inclusions comprising ATXN8OS mRNA; aberrant KLHL1 protein expression; ataxia; difficulty speaking and/or walking; and/or involuntary eye movements.

[0365] Where the TNRs are within the PPP2R2B gene, excision of the TNRs may ameliorate one or more phenotypes associated with an expanded-repeat PPP2R2B gene, e.g., one or more of aberrant PPP2R2B expression; aberrant phosphatase 2 activity; ataxia; cerebellar degeneration; difficulty walking; and/or poor coordination of hands, speech and/or eye movements.

[0366] Where the TNRs are within the TBP gene, excision of the TNRs may ameliorate one or more phenotypes associated with an expanded-repeat TBP gene, e.g., one or more of aberrant transcription initiation; aberrant TBP protein accumulation (e.g., in cerebellar neurons); aberrant cerebellar neuron cell death; ataxia; difficulty walking; muscle weakness; and/or loss of cognitive abilities.

[0367] Where the TNRs are within the ATN1 gene, excision of the TNRs may ameliorate one or more phenotypes associated with an expanded-repeat ATN1 gene, e.g., one or more of aberrant transcriptional regulation; aberrant ATN1 protein accumulation (e.g., in neurons); aberrant neuron cell death; involuntary movements; and/or loss of cognitive abilities.

[0368] In some embodiments, any one or more of the gRNAs, vectors, DNA-PK inhibitors, compositions, or pharmaceutical formulations described herein is for use in a method disclosed herein or in preparing a medicament for treating or preventing a disease or disorder in a subject. In some embodiments, treatment and/or prevention is accomplished with a single dose, e.g., one-time treatment, of medicament/composition.

[0369] In some embodiments, the invention comprises a method of treating or preventing a disease or disorder in subject comprising administering any one or more of the gRNAs, vectors, compositions, or pharmaceutical formulations described herein. In some embodiments, the gRNAs, vectors, compositions, or pharmaceutical formulations described herein are administered as a single dose, e.g., at one time. In some embodiments, the single dose achieves durable treatment and/or prevention. In some embodiments, the method achieves durable treatment and/or prevention. Durable treatment and/or prevention, as used herein, includes treatment and/or prevention that extends at least i) 3, 4, 5, 6, 7, 8, 9, 10, 11, 12, 13, 14, or 15 weeks; ii) 1, 2, 3, 4, 5, 6, 7, 8, 9, 10, 11, 12, 18, 24, 30, or 36 months; or iii) 1, 2, 3, 4, 5, 6, 7, 8, 9, or 10 years. In some embodiments, a single dose of the gRNAs, vectors, compositions, or pharmaceutical formulations described herein is sufficient to treat and/or prevent any of the indications described herein for the duration of the subject's life.

[0370] In some embodiments, a method of excising a TNR is provided comprising administering a composition comprising a guide RNA, or a vector encoding a guide RNA, comprising any one or more guide sequences of SEQ ID Nos: 101-4988, 5001-7264, or 7301-53372. In some embodiments, gRNAs comprising any one or more of the guide sequences of SEQ ID NOs: 101-4988, 5001-7264, or 7301-53372 are administered to excise a TNR. The guide RNAs may be administered together with an RNA-guided DNA nuclease such as a Cas nuclease (e.g., Cas9) or an mRNA or vector encoding an RNA-guided DNA nuclease such as a Cas nuclease (e.g., Cas9). Any of these methods may further comprise administering a DNA-PK inhibitor, such as any of those described herein.

[0371] In some embodiments, a method of treating a TNR-associated disease or disorder is provided comprising administering a composition comprising a guide RNA comprising any one or more of the guide sequences of SEQ ID NOs: 101-4988, 5001-7264, or 7301-53372. The guide RNAs may be administered together with an RNA-guided DNA nuclease such as a Cas nuclease (e.g., Cas9) or an mRNA or vector encoding an RNA-guided DNA nuclease such as a Cas nuclease (e.g., Cas9). Any of these methods may further comprise administering a DNA-PK inhibitor, such as any of those described herein.

[0372] In some embodiments, a method of decreasing or eliminating production of an mRNA comprising an expanded trinucleotide repeat is provided comprising administering a guide RNA comprising any one or more of the guide sequences of 101-4988, 5001-7264, or 7301-53372. The guide RNAs may be administered together with an RNA-guided DNA nuclease such as a Cas nuclease (e.g., Cas9) or an mRNA or vector encoding an RNA-guided DNA nuclease such as a Cas nuclease (e.g., Cas9). Any of these methods may further comprise administering a DNA-PK inhibitor, such as any of those described herein.

[0373] In some embodiments, a method of decreasing or eliminating production of a protein comprising an expanded amino acid repeat is provided comprising administering a guide RNA comprising any one or more of the guide sequences of 101-4988, 5001-7264, or 7301-53372. The guide RNAs may be administered together with an RNA-guided DNA nuclease such as a Cas nuclease (e.g., Cas9) or an mRNA or vector encoding an RNA-guided DNA nuclease such as a Cas nuclease (e.g., Cas9). Any of these methods may further comprise administering a DNA-PK inhibitor, such as any of those described herein.

[0374] In some embodiments, gRNAs comprising any one or more of the guide sequences of SEQ ID NOs: 101-4988, 5001-7264, or 7301-53372 are administered to reduce expression of a polypeptide comprising an expanded amino acid repeat. The gRNAs may be administered together with an RNA-guided DNA nuclease such as a Cas nuclease (e.g., Cas9) or an mRNA or vector encoding an RNA-guided DNA nuclease such as a Cas nuclease (e.g., Cas9). Any of these methods may further comprise administering a DNA-PK inhibitor, such as any of those described herein.

[0375] In some embodiments, the gRNAs comprising the guide sequences of Table 2 or of the Sequence Listing together with an RNA-guided DNA nuclease such as a Cas nuclease and a DNA-PK inhibitor induce DSBs, and microhomology-mediated end joining (MMEJ) during repair leads to a mutation in the targeted gene. In some embodiments, MMEJ leads to excision of trinucleotide repeats or a self-complementary sequence.

[0376] In some embodiments, the subject is mammalian In some embodiments, the subject is human. In some embodiments, the subject is cow, pig, monkey, sheep, dog, cat, fish, or poultry.

[0377] In some embodiments, the use of a guide RNAs comprising any one or more of the guide sequences in Table 2 and/or the Sequence Listing (e.g., in a composition provided herein) is provided for the preparation of a medicament for treating a human subject having a disorder listed in Table 1, such as DM1. Such use may be in combination with administering a DNA-PK inhibitor, such as any of those described herein.

[0378] In some embodiments, the guide RNAs, compositions, and formulations are administered intravenously. In some embodiments, the guide RNAs, compositions, and formulations are administered intramuscularly. In some embodiments, the guide RNAs, compositions, and formulations are administered intracranially. In some embodiments, the guide RNAs, compositions, and formulations are administered to cells ex vivo. Where a DNA-PK inhibitor is administered, it may be administered in the same composition as or a different composition from the composition comprising the guide RNA, and may be administered by the same or a different route as the guide RNA. In some embodiments, the DNA-PK inhibitor may be administered intravenously. In some embodiments, the DNA-PK inhibitor may be administered orally.

[0379] In some embodiments, the guide RNAs, compositions, and formulations are administered concomitantly with the DNA-PK inhibitor. In some embodiments, DNA-PK inhibitor is administered accordingly to its own dosing schedule.

[0380] In some embodiments, a single administration of a composition comprising a guide RNA provided herein is sufficient to excise TNRs or a self-complementary region. In other embodiments, more than one administration of a composition comprising a guide RNA provided herein may be beneficial to maximize therapeutic effects.

### Combination Therapy

[0381] In some embodiments, the invention comprises combination therapies comprising any of the methods described herein (e.g., one or more of the gRNAs comprising any one or more of the guide sequences disclosed in Table 2 and/or the Sequence Listing (e.g., in a composition provided herein) together with an additional therapy suitable for ameliorating a disorder associated with the targeted gene and/or one or more symptoms thereof, as described above. Suitable additional therapies for use in ameliorating various disorders, such as those listed in Table 1, and/or one or more symptoms thereof are known in the art.

Delivery of gRNA Compositions

[0382] The methods and uses disclosed herein may use any suitable approach for delivering the gRNAs and compositions described herein. Exemplary delivery approaches include vectors, such as viral vectors; lipid nanoparticles; transfection; and electroporation. In some embodiments, vectors or LNPs associated with the gRNAs disclosed herein are for use in preparing a medicament for treating a disease or disorder.

[0383] Where a vector is used, it may be a viral vector, such as a non-integrating viral vector. In some embodiments, viral vector is an adeno-associated virus vector, a lentiviral vector, an integrase-deficient lentiviral vector, an adenoviral vector, a vaccinia viral vector, an alphaviral vector, or a herpes simplex viral vector. In some embodiments, the viral vector is an adeno-associated virus (AAV) vector. In some embodiments, the AAV vector is an AAV1, AAV2, AAV3, AAV4, AAV5, AAV6, AAV7, AAV8, AAVrh10 (see, e.g., SEQ ID NO: 81 of US 9,790,472, which is incorporated by reference herein in its entirety), AAVrh74 (see, e.g., SEQ ID NO: 1 of US 2015/0111955, which is incorporated by reference herein in its entirety), or AAV9 vector, wherein the number following AAV indicates the AAV serotype. Any variant of an AAV vector or serotype thereof, such as a self-complementary AAV (scAAV) vector, is encompassed within the general terms AAV vector, AAV1 vector, etc. See, e.g., McCarty et al., Gene Ther. 2001;8:1248-54, Naso et al., BioDrugs 2017; 31:317-334, and references cited therein for detailed discussion of various AAV vectors.

[0384] In some embodiments, the vector (e.g., viral vector, such as an adeno-associated viral vector) comprises a tissue-specific (e.g., muscle-specific) promoter, e.g., which is operatively linked to a sequence encoding the gRNA. In some embodiments, the muscle-specific promoter is a muscle creatine kinase promoter, a desmin promoter, an MHCK7 promoter, or an SPc5-12 promoter. In some embodiments, the muscle-specific promoter is a CK8 promoter. In some embodiments, the muscle-specific promoter is a CK8e promoter. Muscle-specific promoters are described in detail, e.g., in US2004/0175727 A1; Wang et al., Expert Opin Drug Deliv. (2014) 11, 345-364; Wang et al., Gene Therapy (2008) 15, 1489-1499. In some embodiments, the tissue-specific promoter is a neuron-specific promoter, such as an enolase promoter. See, e.g., Naso et al., BioDrugs 2017; 31:317-334; Dashkoff et al., Mol Ther Methods Clin Dev. 2016;3:16081, and references cited therein for detailed discussion of tissue-specific promoters including neuron-specific promoters.

[0385] In some embodiments, in addition to guide RNA sequences, the vectors further comprise nucleic acids that do not encode guide RNAs. Nucleic acids that do not encode guide RNA include, but are not limited to, promoters, enhancers, regulatory sequences, and nucleic acids encoding an RNA-guided DNA nuclease, which can be a nuclease such as Cas9. In some embodiments, the vector comprises one or more nucleotide sequence(s) encoding a crRNA, a trRNA, or a crRNA and trRNA. In some embodiments, the vector comprises one or more nucleotide sequence(s) encoding a sgRNA and an mRNA encoding an RNA-guided DNA nuclease, which can be a Cas nuclease, such as Cas9 or Cpf1. In some embodiments, the vector comprises one or more nucleotide sequence(s) encoding a crRNA, a trRNA, and an mRNA encoding an RNA-guided DNA nuclease, which can be a Cas protein, such as, Cas9. In one embodiment, the Cas9 is from Streptococcus pyogenes (i.e., Spy Cas9 or SpCas9). In some embodiments, the nucleotide sequence encoding the crRNA, trRNA, or crRNA and trRNA (which may be a sgRNA) comprises or consists of a guide sequence flanked by all or a portion of a repeat sequence from a naturally-occurring CRISPR/Cas system. The nucleic acid comprising or consisting of the crRNA, trRNA, or crRNA and trRNA may further comprise a vector sequence wherein the vector sequence comprises or consists of nucleic acids that are not naturally found together with the crRNA, trRNA, or crRNA and trRNA.

[0386] Lipid nanoparticles (LNPs) are a known means for delivery of nucleotide and protein cargo, and may be used for delivery of the guide RNAs, compositions, or pharmaceutical formulations disclosed herein. In some embodiments, the LNPs deliver nucleic acid, protein, or nucleic acid together with protein.

[0387] In some embodiments, the invention comprises a method for delivering any one of the gRNAs disclosed herein to a subject, wherein the gRNA is associated with an LNP. In some embodiments, the gRNA/LNP is also associated with a Cas9 or an mRNA encoding Cas9.

[0388] In some embodiments, the invention comprises a composition comprising any one of the gRNAs disclosed and an LNP. In some embodiments, the composition further comprises a Cas9 or an mRNA encoding Cas9.

[0389] Electroporation is a well-known means for delivery of cargo, and any electroporation methodology may be used for delivery of any one of the gRNAs disclosed herein. In some embodiments, electroporation may be used to deliver any one of the gRNAs disclosed herein and Cas9 or an mRNA encoding Cas9.

[0390] In some embodiments, the invention comprises a method for delivering any one of the gRNAs disclosed herein to an ex vivo cell, wherein the gRNA is encoded by a vector, associated with an LNP, or in aqueous solution. In some embodiments, the gRNA/LNP or gRNA is also associated with a Cas9 or sequence encoding Cas9 (e.g., in the same vector, LNP, or solution).

Screening of gRNA Compositions with a DNA-PK Inhibitor

[0391] In some embodiments, methods are provided for screening for a guide RNA that is capable of excising a TNR or self-complementary region, the method comprising: a) contacting a cell with a guide RNA, a RNA-targeted endonuclease, and a DNA-PK inhibitor; b) repeating step a) without a DNA-PK inhibitor; c) comparing the excision of the TNR or self-complementary region from the cell contacted in steps a) as compared to the cell contacted in step b); and d) selecting a guide RNA wherein the excision is improved in the presence of the DNA-PK inhibitor as compared to without the DNA-PK inhibitor.

[0392] In some embodiments, methods are provided for screening for a guide RNA that is capable of excising a TNR or self-complementary region in DNA, the method comprising: a) contacting: i) a cell (e.g., a myoblast) with a guide RNA, an RNA-targeted endonuclease, and a DNA-PK inhibitor; and ii) the same type of cell as used in i) with a guide RNA, an RNA-targeted endonuclease but without a DNA-PK inhibitor; b) comparing the excision of the TNR or self-complementary region in DNA from the cell contacted in steps a) i) as compared to the cell contacted in step a) ii); and c) selecting a guide RNA wherein the excision is improved in the presence of the DNA-PK inhibitor as compared to without the DNA-PK inhibitor.

[0393] In some embodiments, methods are provided for screening for a pair of guide RNAs that is capable of excising a TNR or self-complementary region in DNA, the method comprising: a) contacting a cell with a pair of guide RNAs, a RNA-targeted endonuclease, and a DNA-PK inhibitor; b) repeating step a) without a DNA-PK inhibitor; c) comparing the excision of the TNR or self-complementary region in DNA from the cell contacted in steps a) as compared to the cell contacted in step b); and d) selecting a pair of guide RNAs wherein the excision is improved in the presence of the DNA-PK inhibitor as compared to without the DNA-PK inhibitor. In some embodiments, methods are provided for screening for a pair of guide RNAs that is capable of excising a TNR or self-complementary region in DNA, the method comprising: a) contacting: i) a cell (e.g., a myoblast) with a pair of guide RNAs, an RNA-targeted endonuclease, and a DNA-PK inhibitor, and ii) the same type of cell as used in a), i) with a pair of guide RNAs, an RNA-targeted endonuclease but without a DNA-PK inhibitor; b) comparing the excision of the TNR or self-complementary region in DNA from the cell contacted in steps a), i) as compared to the cell contacted in step a), ii); and c) selecting a pair of guide RNAs wherein the excision is improved in the presence of the DNA-PK inhibitor as compared to without the DNA-PK inhibitor.

[0394] As used herein, “excision is improved” or “improved excision” may refer to a greater amount of excision of a TNR or self-complementary region in DNA, and/or a more desirable excision product (e.g., based on the size or location of the deletion). In some embodiments, determining whether a guide RNA or pair of guide RNAs has improved excision of a TNR or self-complementary region in DNA from DNA of a cell may be done by PCR of genomic DNA of the cell using primers designed to amplify a region of DNA surrounding the TNR or self-complementary region in DNA. PCR products may be evaluated by DNA gel electrophoresis and analyzed for excision of a TNR or self-complementary region in DNA. In some embodiments, excision of the TNR or self-complementary region in DNA may evaluated by sequencing methods (e.g., Sanger sequencing, PacBio sequencing). In some embodiments, percent deletion of the TNR or self-complementary region in DNA may be determined using a ddPCR assay (see e.g. FIG. 53). In some embodiments, “excision is improved” or “improved excision” is determined by assessing cellular features such as, in the case of DMPK: CUG foci reduction, MBNL1 foci reduction, or improved splicing efficiency of MBNL1, NCOR2, FN1 and/or KIF13A mRNAs.

[0395] In some embodiments, the guide RNA or pair of guide RNAs directs the RNA-targeted endonuclease to the 3′ UTR of the DMPK gene. In some embodiments, the guide RNA or pair of guide RNAs directs the RNA-targeted endonuclease to the 5′ UTR of the FMR1 gene. In some embodiments, the guide RNA or pair of guide RNAs directs the RNA-targeted endonuclease to the 5′ UTR of the FXN gene.

[0396] In some embodiments, the DNA-PK inhibitor is Compound 6 or Compound 3. In some embodiments, the cell is a wildtype cell, e.g., a wildtype iPSC cell. In some embodiments, the cell is a disease cell, e.g., a cell derived from a patient, e.g., a DM1 iPSC cell, DM1 myoblast, DM1 fibroblast. The screen may include adding DNA-PK inhibitor in increasing doses to evaluate the enhancement of DNA-PK inhibition on single guide excision. The screen may include adding DNA-PK inhibitor in increasing doses to evaluate the enhancement of DNA-PK inhibition on paired guide excision.

### IV. Compositions

[0397] Compositions Comprising Guide RNA (gRNAs)

[0398] Provided herein are compositions useful for treating diseases and disorders associated with trinucleotide repeats (TNRs) or self-complementary regions of DNA (e.g., the diseases and disorders of Table 1) and for excising trinucleotide repeats or self-complementary regions from DNA, e.g., using one or more guide RNAs or a nucleic encoding the one or more guide RNAs, with an RNA-targeted endonuclease (e.g., a CRISPR/Cas system). The compositions may comprise the guide RNA(s) or a vector(s) encoding the guide RNA(s) and may be administered to subjects having or suspected of having a disease associated with the trinucleotide repeats or self-complementary regions, and may further comprise or be administered in combination with a DNA-PK inhibitor, such as any of those described herein. Exemplary guide sequences are shown in the Table 2 and in the Sequence Listing at SEQ ID NOs: 101-4988, 5001-7264, or 7301-53372.

[0399] In some embodiments, the one or more gRNAs direct the RNA-targeted endonuclease to a site in or near a TNR or self-complementary region. For example, the RNA-targeted endonuclease may be directed to cut within 10, 20, 30, 40, or 50 nucleotides of the TNR or self-complementary region.

[0400] In some embodiments, at least a pair of gRNAs are provided which direct the RNA-targeted endonuclease to a pair of sites flanking (i.e., on opposite sides of) a TNR or self-complementary region. For example, the pair of sites flanking a TNR or self-complementary region may each be within 10, 20, 30, 40, or 50 nucleotides of the TNR or self-complementary region but on opposite sides thereof. In some embodiments, a pair of gRNAs is provided that comprise guide sequences from Table 2 and/or the Sequence Listing and direct the RNA-targeted endonuclease to a pair of sites according to any of the foregoing embodiments.

[0401] Each of the guide sequences shown in Table 2 and in the Sequence Listing at SEQ ID NOs: 101-4988, 5001-7264, or 7301-53372 may further comprise additional nucleotides to form or encode a crRNA, e.g., using any known sequence appropriate for the RNA-targeted endonuclease being used. In some embodiments, the crRNA comprises (5′ to 3′) at least a spacer sequence and a first complementarity domain. The first complementary domain is sufficiently complementary to a second complementarity domain, which may be part of the same molecule in the case of an sgRNA or in a tracrRNA in the case of a dual or modular gRNA, to form a duplex. See, e.g., US 2017/0007679 for detailed discussion of crRNA and gRNA domains, including first and second complementarity domains. For example, an exemplary sequence suitable for use with SpCas9 to follow the guide sequence at its 3′ end is: GUUUUAGAGCUAUGCUGUUUUG (SEQ ID NO: 99) in 5′ to 3′ orientation. In some embodiments, an exemplary sequence for use with SpCas9 to follow the 3′ end of the guide sequence is a sequence that is at least 80%, 85%, 90%, 91%, 92%, 93%, 94%, 95%, 96%, 97%, 98%, 99% or 100% identical to SEQ ID NO: 99, or a sequence that differs from SEQ ID NO: 99 by no more than 1, 2, 3, 4 or 5 nucleotides. Where a tracrRNA is used, in some embodiments, it comprises (5′ to 3′) a second complementary domain and a proximal domain. In the case of a sgRNA, the above guide sequences may further comprise additional nucleotides to form or encode a sgRNA, e.g., using any known sequence appropriate for the RNA-targeted endonuclease being used. In some embodiments, an sgRNA comprises (5′ to 3′) at least a spacer sequence, a first complementary domain, a linking domain, a second complementary domain, and a proximal domain. A sgRNA or tracrRNA may further comprise a tail domain. The linking domain may be hairpin-forming. See, e.g., US 2017/0007679 for detailed discussion and examples of crRNA and gRNA domains, including second complementarity domains, linking domains, proximal domains, and tail domains. For example, an exemplary sequence suitable for use with SpCas9 to follow the 3′ end of the guide sequence is: GUUUUAGAGCUAGAAAUAGCAAGUUAAAAUAAGGCUAGUCCGUUAUCAACUUGAAAA AGUGGCACCGAGUCGGUGC (SEQ ID NO:100) in 5′ to 3′ orientation. In some embodiments, an exemplary sequence for use with SpCas9 to follow the 3′ end of the guide sequence is a sequence that is at least 80%, 85%, 90%, 91%, 92%, 93%, 94%, 95%, 96%, 97%, 98%, 99% or 100% identical to SEQ ID NO: 100, or a sequence that differs from SEQ ID NO: 100 by no more than 1, 2, 3, 4, 5, 6, 7, 8, 9, or 10 nucleotides.

[0402] In general, in the case of a DNA vector encoding a gRNA, the U residues in any of the RNA sequences described herein may be replaced with T residues.

TABLE 2
Exemplary guide sequences and chromosomal coordinates (Hg38 Coordinates)

| SEQIDNO | Guide RNA name | Sequence | Enzyme |
|---|---|---|---|
| 101 | DMPK 3 forward 19:45769716-45769738 | GGCAGATGGAGGGCCTTT | As/LbCpf1 |
| 102 | DMPK 3 forward 19:45769716-45769739 | GGCAGATGGAGGGCCTTTT | As/LbCpf1 |
| 103 | DMPK 3 forward 19:45769716-45769740 | GGCAGATGGAGGGCCTTTTA | As/LbCpf1 |
| 104 | DMPK 3 forward 19:45769716-45769741 | GGCAGATGGAGGGCCTTTTAT | As/LbCpf1 |
| 105 | DMPK 3 forward 19:45769716-45769742 | GGCAGATGGAGGGCCTTTTATT | As/LbCpf1 |
| 106 | DMPK 3 forward 19:45769716-45769743 | GGCAGATGGAGGGCCTTTTATTC | As/LbCpf1 |
| 107 | DMPK 3 forward 19:45769716-45769744 | GGCAGATGGAGGGCCTTTTATTCG | As/LbCpf1 |
| 108 | DMPK 3 forward 19:45769716-45769745 | GGCAGATGGAGGGCCTTTTATTCGC | As/LbCpf1 |
| 109 | DMPK 3 forward 19:45769735-45769757 | ATTCGCGAGGGTCGGGGG | As/LbCpf1 |
| 110 | DMPK 3 forward 19:45769735-45769758 | ATTCGCGAGGGTCGGGGGT | As/LbCpf1 |
| 111 | DMPK 3 forward 19:45769735-45769759 | ATTCGCGAGGGTCGGGGGTG | As/LbCpf1 |
| 112 | DMPK 3 forward 19:45769735-45769760 | ATTCGCGAGGGTCGGGGGTGG | As/LbCpf1 |
| 113 | DMPK 3 forward 19:45769735-45769761 | ATTCGCGAGGGTCGGGGGTGGG | As/LbCpf1 |
| 114 | DMPK 3 forward 19:45769735-45769762 | ATTCGCGAGGGTCGGGGGTGGGG | As/LbCpf1 |
| 115 | DMPK 3 forward 19:45769735-45769763 | ATTCGCGAGGGTCGGGGGTGGGGG | As/LbCpf1 |
| 116 | DMPK 3 forward 19:45769735-45769764 | ATTCGCGAGGGTCGGGGGTGGGGGT | As/LbCpf1 |
| 117 | DMPK 3 forward 19:45769736-45769758 | TTCGCGAGGGTCGGGGGT | As/LbCpf1 |
| 118 | DMPK 3 forward 19:45769736-45769759 | TTCGCGAGGGTCGGGGGTG | As/LbCpf1 |
| 119 | DMPK 3 forward 19:45769736-45769760 | TTCGCGAGGGTCGGGGGTGG | As/LbCpf1 |
| 120 | DMPK 3 forward 19:45769736-45769761 | TTCGCGAGGGTCGGGGGTGGG | As/LbCpf1 |
| 121 | DMPK 3 forward 19:45769736-45769762 | TTCGCGAGGGTCGGGGGTGGGG | As/LbCpf1 |
| 122 | DMPK 3 forward 19:45769736-45769763 | TTCGCGAGGGTCGGGGGTGGGGG | As/LbCpf1 |
| 123 | DMPK 3 forward 19:45769736-45769764 | TTCGCGAGGGTCGGGGGTGGGGGT | As/LbCpf1 |
| 124 | DMPK 3 forward 19:45769736-45769765 | TTCGCGAGGGTCGGGGGTGGGGGTC | As/LbCpf1 |
| 125 | DMPK 3 reverse 19:45769758-45769780 | TTGTCTGTCCCCACCTAG | As/LbCpf1 |
| 126 | DMPK 3 reverse 19:45769758-45769781 | TTGTCTGTCCCCACCTAGG | As/LbCpf1 |
| 127 | DMPK 3 reverse 19:45769758-45769782 | TTGTCTGTCCCCACCTAGGA | As/LbCpf1 |
| 128 | DMPK 3 reverse 19:45769758-45769783 | TTGTCTGTCCCCACCTAGGAC | As/LbCpf1 |
| 129 | DMPK 3 reverse 19:45769758-45769784 | TTGTCTGTCCCCACCTAGGACC | As/LbCpf1 |
| 130 | DMPK 3 reverse 19:45769758-45769785 | TTGTCTGTCCCCACCTAGGACCC | As/LbCpf1 |
| 131 | DMPK 3 reverse 19:45769758-45769786 | TTGTCTGTCCCCACCTAGGACCCC | As/LbCpf1 |
| 132 | DMPK 3 reverse 19:45769758-45769787 | TTGTCTGTCCCCACCTAGGACCCCC | As/LbCpf1 |
| 133 | DMPK 3 reverse 19:45769792-45769814 | GATGCACTGAGACCCCGA | As/LbCpf1 |
| 134 | DMPK 3 reverse 19:45769792-45769815 | GATGCACTGAGACCCCGAC | As/LbCpf1 |
| 135 | DMPK 3 reverse 19:45769792-45769816 | GATGCACTGAGACCCCGACA | As/LbCpf1 |
| 136 | DMPK 3 reverse 19:45769792-45769817 | GATGCACTGAGACCCCGACAT | As/LbCpf1 |
| 137 | DMPK 3 reverse 19:45769792-45769818 | GATGCACTGAGACCCCGACATT | As/LbCpf1 |
| 138 | DMPK 3 reverse 19:45769792-45769819 | GATGCACTGAGACCCCGACATTC | As/LbCpf1 |
| 139 | DMPK 3 reverse 19:45769792-45769820 | GATGCACTGAGACCCCGACATTCC | As/LbCpf1 |
| 140 | DMPK 3 reverse 19:45769792-45769821 | GATGCACTGAGACCCCGACATTCCT | As/LbCpf1 |
| 141 | DMPK 3 reverse 19:45769793-45769815 | GGATGCACTGAGACCCCG | As/LbCpf1 |
| 142 | DMPK 3 reverse 19:45769793-45769816 | GGATGCACTGAGACCCCGA | As/LbCpf1 |
| 143 | DMPK 3 reverse 19:45769793-45769817 | GGATGCACTGAGACCCCGAC | As/LbCpf1 |
| 144 | DMPK 3 reverse 19:45769793-45769818 | GGATGCACTGAGACCCCGACA | As/LbCpf1 |
| 145 | DMPK 3 reverse 19:45769793-45769819 | GGATGCACTGAGACCCCGACAT | As/LbCpf1 |
| 146 | DMPK 3 reverse 19:45769793-45769820 | GGATGCACTGAGACCCCGACATT | As/LbCpf1 |
| 147 | DMPK 3 reverse 19:45769793-45769821 | GGATGCACTGAGACCCCGACATTC | As/LbCpf1 |
| 148 | DMPK 3 reverse 19:45769793-45769822 | GGATGCACTGAGACCCCGACATTCC | As/LbCpf1 |
| 149 | DMPK 3 reverse 19:45769856-45769878 | TTGACCTCGTCCTCCGAC | As/LbCpf1 |
| 150 | DMPK 3 reverse 19:45769856-45769879 | TTGACCTCGTCCTCCGACT | As/LbCpf1 |
| 151 | DMPK 3 reverse 19:45769856-45769880 | TTGACCTCGTCCTCCGACTC | As/LbCpf1 |
| 152 | DMPK 3 reverse 19:45769856-45769881 | TTGACCTCGTCCTCCGACTCG | As/LbCpf1 |
| 153 | DMPK 3 reverse 19:45769856-45769882 | TTGACCTCGTCCTCCGACTCGC | As/LbCpf1 |
| 154 | DMPK 3 reverse 19:45769856-45769883 | TTGACCTCGTCCTCCGACTCGCT | As/LbCpf1 |
| 155 | DMPK 3 reverse 19:45769856-45769884 | TTGACCTCGTCCTCCGACTCGCTG | As/LbCpf1 |
| 156 | DMPK 3 reverse 19:45769856-45769885 | TTGACCTCGTCCTCCGACTCGCTGA | As/LbCpf1 |
| 157 | DMPK 3 reverse 19:45769864-45769886 | GATATTTATTGACCTCGT | As/LbCpf1 |
| 158 | DMPK 3 reverse 19:45769864-45769887 | GATATTTATTGACCTCGTC | As/LbCpf1 |
| 159 | DMPK 3 reverse 19:45769864-45769888 | GATATTTATTGACCTCGTCC | As/LbCpf1 |
| 160 | DMPK 3 reverse 19:45769864-45769889 | GATATTTATTGACCTCGTCCT | As/LbCpf1 |
| 161 | DMPK 3 reverse 19:45769864-45769890 | GATATTTATTGACCTCGTCCTC | As/LbCpf1 |
| 162 | DMPK 3 reverse 19:45769864-45769891 | GATATTTATTGACCTCGTCCTCC | As/LbCpf1 |
| 163 | DMPK 3 reverse 19:45769864-45769892 | GATATTTATTGACCTCGTCCTCCG | As/LbCpf1 |
| 164 | DMPK 3 reverse 19:45769864-45769893 | GATATTTATTGACCTCGTCCTCCGA | As/LbCpf1 |
| 165 | DMPK 3 reverse 19:45769938-45769960 | GGGGATCCCGCGCCCCCC | As/LbCpf1 |
| 166 | DMPK 3 reverse 19:45769938-45769961 | GGGGATCCCGCGCCCCCCT | As/LbCpf1 |
| 167 | DMPK 3 reverse 19:45769938-45769962 | GGGGATCCCGCGCCCCCCTC | As/LbCpf1 |
| 168 | DMPK 3 reverse 19:45769938-45769963 | GGGGATCCCGCGCCCCCCTCC | As/LbCpf1 |
| 169 | DMPK 3 reverse 19:45769938-45769964 | GGGGATCCCGCGCCCCCCTCCT | As/LbCpf1 |
| 170 | DMPK 3 reverse 19:45769938-45769965 | GGGGATCCCGCGCCCCCCTCCTC | As/LbCpf1 |
| 171 | DMPK 3 reverse 19:45769938-45769966 | GGGGATCCCGCGCCCCCCTCCTCA | As/LbCpf1 |
| 172 | DMPK 3 reverse 19:45769938-45769967 | GGGGATCCCGCGCCCCCCTCCTCAC | As/LbCpf1 |
| 173 | DMPK 3 reverse 19:45769939-45769961 | CGGGGATCCCGCGCCCCC | As/LbCpf1 |
| 174 | DMPK 3 reverse 19:45769939-45769962 | CGGGGATCCCGCGCCCCCC | As/LbCpf1 |
| 175 | DMPK 3 reverse 19:45769939-45769963 | CGGGGATCCCGCGCCCCCCT | As/LbCpf1 |
| 176 | DMPK 3 reverse 19:45769939-45769964 | CGGGGATCCCGCGCCCCCCTC | As/LbCpf1 |
| 177 | DMPK 3 reverse 19:45769939-45769965 | CGGGGATCCCGCGCCCCCCTCC | As/LbCpf1 |
| 178 | DMPK 3 reverse 19:45769939-45769966 | CGGGGATCCCGCGCCCCCCTCCT | As/LbCpf1 |
| 179 | DMPK 3 reverse 19:45769939-45769967 | CGGGGATCCCGCGCCCCCCTCCTC | As/LbCpf1 |
| 180 | DMPK 3 reverse 19:45769939-45769968 | CGGGGATCCCGCGCCCCCCTCCTCA | As/LbCpf1 |
| 181 | DMPK 3 reverse 19:45769940-45769962 | TCGGGGATCCCGCGCCCC | As/LbCpf1 |
| 182 | DMPK 3 reverse 19:45769940-45769963 | TCGGGGATCCCGCGCCCCC | As/LbCpf1 |
| 183 | DMPK 3 reverse 19:45769940-45769964 | TCGGGGATCCCGCGCCCCCC | As/LbCpf1 |
| 184 | DMPK 3 reverse 19:45769940-45769965 | TCGGGGATCCCGCGCCCCCCT | As/LbCpf1 |
| 185 | DMPK 3 reverse 19:45769940-45769966 | TCGGGGATCCCGCGCCCCCCTC | As/LbCpf1 |
| 186 | DMPK 3 reverse 19:45769940-45769967 | TCGGGGATCCCGCGCCCCCCTCC | As/LbCpf1 |
| 187 | DMPK 3 reverse 19:45769940-45769968 | TCGGGGATCCCGCGCCCCCCTCCT | As/LbCpf1 |
| 188 | DMPK 3 reverse 19:45769940-45769969 | TCGGGGATCCCGCGCCCCCCTCCTC | As/LbCpf1 |
| 189 | DMPK 3 reverse 19:45769954-45769976 | CCAAACCCGCTTTTTCGG | As/LbCpf1 |
| 190 | DMPK 3 reverse 19:45769954-45769977 | CCAAACCCGCTTTTTCGGG | As/LbCpf1 |
| 191 | DMPK 3 reverse 19:45769954-45769978 | CCAAACCCGCTTTTTCGGGG | As/LbCpf1 |
| 192 | DMPK 3 reverse 19:45769954-45769979 | CCAAACCCGCTTTTTCGGGGA | As/LbCpf1 |
| 193 | DMPK 3 reverse 19:45769954-45769980 | CCAAACCCGCTTTTTCGGGGAT | As/LbCpf1 |
| 194 | DMPK 3 reverse 19:45769954-45769981 | CCAAACCCGCTTTTTCGGGGATC | As/LbCpf1 |
| 195 | DMPK 3 reverse 19:45769954-45769982 | CCAAACCCGCTTTTTCGGGGATCC | As/LbCpf1 |
| 196 | DMPK 3 reverse 19:45769954-45769983 | CCAAACCCGCTTTTTCGGGGATCCC | As/LbCpf1 |
| 197 | DMPK 3 reverse 19:45769955-45769977 | GCCAAACCCGCTTTTTCG | As/LbCpf1 |
| 198 | DMPK 3 reverse 19:45769955-45769978 | GCCAAACCCGCTTTTTCGG | As/LbCpf1 |
| 199 | DMPK 3 reverse 19:45769955-45769979 | GCCAAACCCGCTTTTTCGGG | As/LbCpf1 |
| 200 | DMPK 3 reverse 19:45769955-45769980 | GCCAAACCCGCTTTTTCGGGG | As/LbCpf1 |
| 201 | DMPK 3 reverse 19:45769955-45769981 | GCCAAACCCGCTTTTTCGGGGA | As/LbCpf1 |
| 202 | DMPK 3 reverse 19:45769955-45769982 | GCCAAACCCGCTTTTTCGGGGAT | As/LbCpf1 |
| 203 | DMPK 3 reverse 19:45769955-45769983 | GCCAAACCCGCTTTTTCGGGGATC | As/LbCpf1 |
| 204 | DMPK 3 reverse 19:45769955-45769984 | GCCAAACCCGCTTTTTCGGGGATCC | As/LbCpf1 |
| 205 | DMPK 3 reverse 19:45769960-45769982 | CTTTTGCCAAACCCGCTT | As/LbCpf1 |
| 206 | DMPK 3 reverse 19:45769960-45769983 | CTTTTGCCAAACCCGCTTT | As/LbCpf1 |
| 207 | DMPK 3 reverse 19:45769960-45769984 | CTTTTGCCAAACCCGCTTTT | As/LbCpf1 |
| 208 | DMPK 3 reverse 19:45769960-45769985 | CTTTTGCCAAACCCGCTTTTT | As/LbCpf1 |
| 209 | DMPK 3 reverse 19:45769960-45769986 | CTTTTGCCAAACCCGCTTTTTC | As/LbCpf1 |
| 210 | DMPK 3 reverse 19:45769960-45769987 | CTTTTGCCAAACCCGCTTTTTCG | As/LbCpf1 |
| 211 | DMPK 3 reverse 19:45769960-45769988 | CTTTTGCCAAACCCGCTTTTTCGG | As/LbCpf1 |
| 212 | DMPK 3 reverse 19:45769960-45769989 | CTTTTGCCAAACCCGCTTTTTCGGG | As/LbCpf1 |
| 213 | DMPK 3 forward 19:45769974-45769996 | GCAAAAGCAAATTTCCCG | As/LbCpf1 |
| 214 | DMPK 3 forward 19:45769974-45769997 | GCAAAAGCAAATTTCCCGA | As/LbCpf1 |
| 215 | DMPK 3 forward 19:45769974-45769998 | GCAAAAGCAAATTTCCCGAG | As/LbCpf1 |
| 216 | DMPK 3 forward 19:45769974-45769999 | GCAAAAGCAAATTTCCCGAGT | As/LbCpf1 |
| 217 | DMPK 3 forward 19:45769974-45770000 | GCAAAAGCAAATTTCCCGAGTA | As/LbCpf1 |
| 218 | DMPK 3 forward 19:45769974-45770001 | GCAAAAGCAAATTTCCCGAGTAA | As/LbCpf1 |
| 219 | DMPK 3 forward 19:45769974-45770002 | GCAAAAGCAAATTTCCCGAGTAAG | As/LbCpf1 |
| 220 | DMPK 3 forward 19:45769974-45770003 | GCAAAAGCAAATTTCCCGAGTAAGC | As/LbCpf1 |
| 221 | DMPK 3 forward 19:45769989-45770011 | CCGAGTAAGCAGGCAGAG | As/LbCpf1 |
| 222 | DMPK 3 forward 19:45769989-45770012 | CCGAGTAAGCAGGCAGAGA | As/LbCpf1 |
| 223 | DMPK 3 forward 19:45769989-45770013 | CCGAGTAAGCAGGCAGAGAT | As/LbCpf1 |
| 224 | DMPK 3 forward 19:45769989-45770014 | CCGAGTAAGCAGGCAGAGATC | As/LbCpf1 |
| 225 | DMPK 3 forward 19:45769989-45770015 | CCGAGTAAGCAGGCAGAGATCG | As/LbCpf1 |
| 226 | DMPK 3 forward 19:45769989-45770016 | CCGAGTAAGCAGGCAGAGATCGC | As/LbCpf1 |
| 227 | DMPK 3 forward 19:45769989-45770017 | CCGAGTAAGCAGGCAGAGATCGCG | As/LbCpf1 |
| 228 | DMPK 3 forward 19:45769989-45770018 | CCGAGTAAGCAGGCAGAGATCGCGC | As/LbCpf1 |
| 229 | DMPK 3 reverse 19:45770026-45770048 | TTGTGCATGACGCCCTGC | As/LbCpf1 |
| 230 | DMPK 3 reverse 19:45770026-45770049 | TTGTGCATGACGCCCTGCT | As/LbCpf1 |
| 231 | DMPK 3 reverse 19:45770026-45770050 | TTGTGCATGACGCCCTGCTC | As/LbCpf1 |
| 232 | DMPK 3 reverse 19:45770026-45770051 | TTGTGCATGACGCCCTGCTCT | As/LbCpf1 |
| 233 | DMPK 3 reverse 19:45770026-45770052 | TTGTGCATGACGCCCTGCTCTG | As/LbCpf1 |
| 234 | DMPK 3 reverse 19:45770026-45770053 | TTGTGCATGACGCCCTGCTCTGG | As/LbCpf1 |
| 235 | DMPK 3 reverse 19:45770026-45770054 | TTGTGCATGACGCCCTGCTCTGGG | As/LbCpf1 |
| 236 | DMPK 3 reverse 19:45770026-45770055 | TTGTGCATGACGCCCTGCTCTGGGG | As/LbCpf1 |
| 237 | DMPK 3 forward 19:45770057-45770079 | CACTTTGCGAACCAACGA | As/LbCpf1 |
| 238 | DMPK 3 forward 19:45770057-45770080 | CACTTTGCGAACCAACGAT | As/LbCpf1 |
| 239 | DMPK 3 forward 19:45770057-45770081 | CACTTTGCGAACCAACGATA | As/LbCpf1 |
| 240 | DMPK 3 forward 19:45770057-45770082 | CACTTTGCGAACCAACGATAG | As/LbCpf1 |
| 241 | DMPK 3 forward 19:45770057-45770083 | CACTTTGCGAACCAACGATAGG | As/LbCpf1 |
| 242 | DMPK 3 forward 19:45770057-45770084 | CACTTTGCGAACCAACGATAGGT | As/LbCpf1 |
| 243 | DMPK 3 forward 19:45770057-45770085 | CACTTTGCGAACCAACGATAGGTG | As/LbCpf1 |
| 244 | DMPK 3 forward 19:45770057-45770086 | CACTTTGCGAACCAACGATAGGTGG | As/LbCpf1 |
| 245 | DMPK 3 forward 19:45770064-45770086 | CGAACCAACGATAGGTGG | As/LbCpf1 |
| 246 | DMPK 3 forward 19:45770064-45770087 | CGAACCAACGATAGGTGGG | As/LbCpf1 |
| 247 | DMPK 3 forward 19:45770064-45770088 | CGAACCAACGATAGGTGGGG | As/LbCpf1 |
| 248 | DMPK 3 forward 19:45770064-45770089 | CGAACCAACGATAGGTGGGGG | As/LbCpf1 |
| 249 | DMPK 3 forward 19:45770064-45770090 | CGAACCAACGATAGGTGGGGGT | As/LbCpf1 |
| 250 | DMPK 3 forward 19:45770064-45770091 | CGAACCAACGATAGGTGGGGGTG | As/LbCpf1 |
| 251 | DMPK 3 forward 19:45770064-45770092 | CGAACCAACGATAGGTGGGGGTGC | As/LbCpf1 |
| 252 | DMPK 3 forward 19:45770064-45770093 | CGAACCAACGATAGGTGGGGGTGCG | As/LbCpf1 |
| 253 | DMPK 3 forward 19:45770143-45770165 | CCCATCCACGTCAGGGCC | As/LbCpf1 |
| 254 | DMPK 3 forward 19:45770143-45770166 | CCCATCCACGTCAGGGCCT | As/LbCpf1 |
| 255 | DMPK 3 forward 19:45770143-45770167 | CCCATCCACGTCAGGGCCTC | As/LbCpf1 |
| 256 | DMPK 3 forward 19:45770143-45770168 | CCCATCCACGTCAGGGCCTCA | As/LbCpf1 |
| 257 | DMPK 3 forward 19:45770143-45770169 | CCCATCCACGTCAGGGCCTCAG | As/LbCpf1 |
| 258 | DMPK 3 forward 19:45770143-45770170 | CCCATCCACGTCAGGGCCTCAGC | As/LbCpf1 |
| 259 | DMPK 3 forward 19:45770143-45770171 | CCCATCCACGTCAGGGCCTCAGCC | As/LbCpf1 |
| 260 | DMPK 3 forward 19:45770143-45770172 | CCCATCCACGTCAGGGCCTCAGCCT | As/LbCpf1 |
| 261 | DMPK 3 reverse 19:45770151-45770173 | GGCCAGGCTGAGGCCCTG | As/LbCpf1 |
| 262 | DMPK 3 reverse 19:45770151-45770174 | GGCCAGGCTGAGGCCCTGA | As/LbCpf1 |
| 263 | DMPK 3 reverse 19:45770151-45770175 | GGCCAGGCTGAGGCCCTGAC | As/LbCpf1 |
| 264 | DMPK 3 reverse 19:45770151-45770176 | GGCCAGGCTGAGGCCCTGACG | As/LbCpf1 |
| 265 | DMPK 3 reverse 19:45770151-45770177 | GGCCAGGCTGAGGCCCTGACGT | As/LbCpf1 |
| 266 | DMPK 3 reverse 19:45770151-45770178 | GGCCAGGCTGAGGCCCTGACGTG | As/LbCpf1 |
| 267 | DMPK 3 reverse 19:45770151-45770179 | GGCCAGGCTGAGGCCCTGACGTGG | As/LbCpf1 |
| 268 | DMPK 3 reverse 19:45770151-45770180 | GGCCAGGCTGAGGCCCTGACGTGGA | As/LbCpf1 |
| 269 | DMPK 3 reverse 19:45770155-45770177 | TTTCGGCCAGGCTGAGGC | As/LbCpf1 |
| 270 | DMPK 3 reverse 19:45770155-45770178 | TTTCGGCCAGGCTGAGGCC | As/LbCpf1 |
| 271 | DMPK 3 reverse 19:45770155-45770179 | TTTCGGCCAGGCTGAGGCCC | As/LbCpf1 |
| 272 | DMPK 3 reverse 19:45770155-45770180 | TTTCGGCCAGGCTGAGGCCCT | As/LbCpf1 |
| 273 | DMPK 3 reverse 19:45770155-45770181 | TTTCGGCCAGGCTGAGGCCCTG | As/LbCpf1 |
| 274 | DMPK 3 reverse 19:45770155-45770182 | TTTCGGCCAGGCTGAGGCCCTGA | As/LbCpf1 |
| 275 | DMPK 3 reverse 19:45770155-45770183 | TTTCGGCCAGGCTGAGGCCCTGAC | As/LbCpf1 |
| 276 | DMPK 3 reverse 19:45770155-45770184 | TTTCGGCCAGGCTGAGGCCCTGACG | As/LbCpf1 |
| 277 | DMPK 3 reverse 19:45770159-45770181 | TTTCTTTCGGCCAGGCTG | As/LbCpf1 |
| 278 | DMPK 3 reverse 19:45770159-45770182 | TTTCTTTCGGCCAGGCTGA | As/LbCpf1 |
| 279 | DMPK 3 reverse 19:45770159-45770183 | TTTCTTTCGGCCAGGCTGAG | As/LbCpf1 |
| 280 | DMPK 3 reverse 19:45770159-45770184 | TTTCTTTCGGCCAGGCTGAGG | As/LbCpf1 |
| 281 | DMPK 3 reverse 19:45770159-45770185 | TTTCTTTCGGCCAGGCTGAGGC | As/LbCpf1 |
| 282 | DMPK 3 reverse 19:45770159-45770186 | TTTCTTTCGGCCAGGCTGAGGCC | As/LbCpf1 |
| 283 | DMPK 3 reverse 19:45770159-45770187 | TTTCTTTCGGCCAGGCTGAGGCCC | As/LbCpf1 |
| 284 | DMPK 3 reverse 19:45770159-45770188 | TTTCTTTCGGCCAGGCTGAGGCCCT | As/LbCpf1 |
| 285 | DMPK 3 forward 19:45769708-45769730 | GAGCTTTGGGCAGATGGA | AsCpf1-1 |
| 286 | DMPK 3 forward 19:45769708-45769731 | GAGCTTTGGGCAGATGGAG | AsCpf1-1 |
| 287 | DMPK 3 forward 19:45769708-45769732 | GAGCTTTGGGCAGATGGAGG | AsCpf1-1 |
| 288 | DMPK 3 forward 19:45769708-45769733 | GAGCTTTGGGCAGATGGAGGG | AsCpf1-1 |
| 289 | DMPK 3 forward 19:45769708-45769734 | GAGCTTTGGGCAGATGGAGGGC | AsCpf1-1 |
| 290 | DMPK 3 forward 19:45769708-45769735 | GAGCTTTGGGCAGATGGAGGGCC | AsCpf1-1 |
| 291 | DMPK 3 forward 19:45769708-45769736 | GAGCTTTGGGCAGATGGAGGGCCT | AsCpf1-1 |
| 292 | DMPK 3 forward 19:45769708-45769737 | GAGCTTTGGGCAGATGGAGGGCCTT | AsCpf1-1 |
| 293 | DMPK 3 forward 19:45769740-45769762 | CGAGGGTCGGGGGTGGGG | AsCpf1-1 |
| 294 | DMPK 3 forward 19:45769740-45769763 | CGAGGGTCGGGGGTGGGGG | AsCpf1-1 |
| 295 | DMPK 3 forward 19:45769740-45769764 | CGAGGGTCGGGGGTGGGGGT | AsCpf1-1 |
| 296 | DMPK 3 forward 19:45769740-45769765 | CGAGGGTCGGGGGTGGGGGTC | AsCpf1-1 |
| 297 | DMPK 3 forward 19:45769740-45769766 | CGAGGGTCGGGGGTGGGGGTCC | AsCpf1-1 |
| 298 | DMPK 3 forward 19:45769740-45769767 | CGAGGGTCGGGGGTGGGGGTCCT | AsCpf1-1 |
| 299 | DMPK 3 forward 19:45769740-45769768 | CGAGGGTCGGGGGTGGGGGTCCTA | AsCpf1-1 |
| 300 | DMPK 3 forward 19:45769740-45769769 | CGAGGGTCGGGGGTGGGGGTCCTAG | AsCpf1-1 |
| 301 | DMPK 3 reverse 19:45769747-45769769 | CACCTAGGACCCCCACCC | AsCpf1-1 |
| 302 | DMPK 3 reverse 19:45769747-45769770 | CACCTAGGACCCCCACCCC | AsCpf1-1 |
| 303 | DMPK 3 reverse 19:45769747-45769771 | CACCTAGGACCCCCACCCCC | AsCpf1-1 |
| 304 | DMPK 3 reverse 19:45769747-45769772 | CACCTAGGACCCCCACCCCCG | AsCpf1-1 |
| 305 | DMPK 3 reverse 19:45769747-45769773 | CACCTAGGACCCCCACCCCCGA | AsCpf1-1 |
| 306 | DMPK 3 reverse 19:45769747-45769774 | CACCTAGGACCCCCACCCCCGAC | AsCpf1-1 |
| 307 | DMPK 3 reverse 19:45769747-45769775 | CACCTAGGACCCCCACCCCCGACC | AsCpf1-1 |
| 308 | DMPK 3 reverse 19:45769747-45769776 | CACCTAGGACCCCCACCCCCGACCC | AsCpf1-1 |
| 309 | DMPK 3 reverse 19:45769768-45769790 | TCGGTATTTATTGTCTGT | AsCpf1-1 |
| 310 | DMPK 3 reverse 19:45769768-45769791 | TCGGTATTTATTGTCTGTC | AsCpf1-1 |
| 311 | DMPK 3 reverse 19:45769768-45769792 | TCGGTATTTATTGTCTGTCC | AsCpf1-1 |
| 312 | DMPK 3 reverse 19:45769768-45769793 | TCGGTATTTATTGTCTGTCCC | AsCpf1-1 |
| 313 | DMPK 3 reverse 19:45769768-45769794 | TCGGTATTTATTGTCTGTCCCC | AsCpf1-1 |
| 314 | DMPK 3 reverse 19:45769768-45769795 | TCGGTATTTATTGTCTGTCCCCA | AsCpf1-1 |
| 315 | DMPK 3 reverse 19:45769768-45769796 | TCGGTATTTATTGTCTGTCCCCAC | AsCpf1-1 |
| 316 | DMPK 3 reverse 19:45769768-45769797 | TCGGTATTTATTGTCTGTCCCCACC | AsCpf1-1 |
| 317 | DMPK 3 reverse 19:45769799-45769821 | CGTTTTGGATGCACTGAG | AsCpf1-1 |
| 318 | DMPK 3 reverse 19:45769799-45769822 | CGTTTTGGATGCACTGAGA | AsCpf1-1 |
| 319 | DMPK 3 reverse 19:45769799-45769823 | CGTTTTGGATGCACTGAGAC | AsCpf1-1 |
| 320 | DMPK 3 reverse 19:45769799-45769824 | CGTTTTGGATGCACTGAGACC | AsCpf1-1 |
| 321 | DMPK 3 reverse 19:45769799-45769825 | CGTTTTGGATGCACTGAGACCC | AsCpf1-1 |
| 322 | DMPK 3 reverse 19:45769799-45769826 | CGTTTTGGATGCACTGAGACCCC | AsCpf1-1 |
| 323 | DMPK 3 reverse 19:45769799-45769827 | CGTTTTGGATGCACTGAGACCCCG | AsCpf1-1 |
| 324 | DMPK 3 reverse 19:45769799-45769828 | CGTTTTGGATGCACTGAGACCCCGA | AsCpf1-1 |
| 325 | DMPK 3 forward 19:45769815-45769837 | AAACGTGGATTGGGGTTG | AsCpf1-1 |
| 326 | DMPK 3 forward 19:45769815-45769838 | AAACGTGGATTGGGGTTGT | AsCpf1-1 |
| 327 | DMPK 3 forward 19:45769815-45769839 | AAACGTGGATTGGGGTTGTT | AsCpf1-1 |
| 328 | DMPK 3 forward 19:45769815-45769840 | AAACGTGGATTGGGGTTGTTG | AsCpf1-1 |
| 329 | DMPK 3 forward 19:45769815-45769841 | AAACGTGGATTGGGGTTGTTGG | AsCpf1-1 |
| 330 | DMPK 3 forward 19:45769815-45769842 | AAACGTGGATTGGGGTTGTTGGG | AsCpf1-1 |
| 331 | DMPK 3 forward 19:45769815-45769843 | AAACGTGGATTGGGGTTGTTGGGG | AsCpf1-1 |
| 332 | DMPK 3 forward 19:45769815-45769844 | AAACGTGGATTGGGGTTGTTGGGGG | AsCpf1-1 |
| 333 | DMPK 3 reverse 19:45769840-45769862 | ACTCGCTGACAGGCTACA | AsCpf1-1 |
| 334 | DMPK 3 reverse 19:45769840-45769863 | ACTCGCTGACAGGCTACAG | AsCpf1-1 |
| 335 | DMPK 3 reverse 19:45769840-45769864 | ACTCGCTGACAGGCTACAGG | AsCpf1-1 |
| 336 | DMPK 3 reverse 19:45769840-45769865 | ACTCGCTGACAGGCTACAGGA | AsCpf1-1 |
| 337 | DMPK 3 reverse 19:45769840-45769866 | ACTCGCTGACAGGCTACAGGAC | AsCpf1-1 |
| 338 | DMPK 3 reverse 19:45769840-45769867 | ACTCGCTGACAGGCTACAGGACC | AsCpf1-1 |
| 339 | DMPK 3 reverse 19:45769840-45769868 | ACTCGCTGACAGGCTACAGGACCC | AsCpf1-1 |
| 340 | DMPK 3 reverse 19:45769840-45769869 | ACTCGCTGACAGGCTACAGGACCCC | AsCpf1-1 |
| 341 | DMPK 3 reverse 19:45769872-45769894 | GCGGTTTGGATATTTATT | AsCpf1-1 |
| 342 | DMPK 3 reverse 19:45769872-45769895 | GCGGTTTGGATATTTATTG | AsCpf1-1 |
| 343 | DMPK 3 reverse 19:45769872-45769896 | GCGGTTTGGATATTTATTGA | AsCpf1-1 |
| 344 | DMPK 3 reverse 19:45769872-45769897 | GCGGTTTGGATATTTATTGAC | AsCpf1-1 |
| 345 | DMPK 3 reverse 19:45769872-45769898 | GCGGTTTGGATATTTATTGACC | AsCpf1-1 |
| 346 | DMPK 3 reverse 19:45769872-45769899 | GCGGTTTGGATATTTATTGACCT | AsCpf1-1 |
| 347 | DMPK 3 reverse 19:45769872-45769900 | GCGGTTTGGATATTTATTGACCTC | AsCpf1-1 |
| 348 | DMPK 3 reverse 19:45769872-45769901 | GCGGTTTGGATATTTATTGACCTCG | AsCpf1-1 |
| 349 | DMPK 3 reverse 19:45769881-45769903 | CCCGCTTCGGCGGTTTGG | AsCpf1-1 |
| 350 | DMPK 3 reverse 19:45769881-45769904 | CCCGCTTCGGCGGTTTGGA | AsCpf1-1 |
| 351 | DMPK 3 reverse 19:45769881-45769905 | CCCGCTTCGGCGGTTTGGAT | AsCpf1-1 |
| 352 | DMPK 3 reverse 19:45769881-45769906 | CCCGCTTCGGCGGTTTGGATA | AsCpf1-1 |
| 353 | DMPK 3 reverse 19:45769881-45769907 | CCCGCTTCGGCGGTTTGGATAT | AsCpf1-1 |
| 354 | DMPK 3 reverse 19:45769881-45769908 | CCCGCTTCGGCGGTTTGGATATT | AsCpf1-1 |
| 355 | DMPK 3 reverse 19:45769881-45769909 | CCCGCTTCGGCGGTTTGGATATTT | AsCpf1-1 |
| 356 | DMPK 3 reverse 19:45769881-45769910 | CCCGCTTCGGCGGTTTGGATATTTA | AsCpf1-1 |
| 357 | DMPK 3 forward 19:45769887-45769909 | AACCGCCGAAGCGGGCGG | AsCpf1-1 |
| 358 | DMPK 3 forward 19:45769887-45769910 | AACCGCCGAAGCGGGCGGA | AsCpf1-1 |
| 359 | DMPK 3 forward 19:45769887-45769911 | AACCGCCGAAGCGGGCGGAG | AsCpf1-1 |
| 360 | DMPK 3 forward 19:45769887-45769912 | AACCGCCGAAGCGGGCGGAGC | AsCpf1-1 |
| 361 | DMPK 3 forward 19:45769887-45769913 | AACCGCCGAAGCGGGCGGAGCC | AsCpf1-1 |
| 362 | DMPK 3 forward 19:45769887-45769914 | AACCGCCGAAGCGGGCGGAGCCG | AsCpf1-1 |
| 363 | DMPK 3 forward 19:45769887-45769915 | AACCGCCGAAGCGGGCGGAGCCGG | AsCpf1-1 |
| 364 | DMPK 3 forward 19:45769887-45769916 | AACCGCCGAAGCGGGCGGAGCCGGC | AsCpf1-1 |
| 365 | DMPK 3 forward 19:45769922-45769944 | AGAGCAGCGCAAGTGAGG | AsCpf1-1 |
| 366 | DMPK 3 forward 19:45769922-45769945 | AGAGCAGCGCAAGTGAGGA | AsCpf1-1 |
| 367 | DMPK 3 forward 19:45769922-45769946 | AGAGCAGCGCAAGTGAGGAG | AsCpf1-1 |
| 368 | DMPK 3 forward 19:45769922-45769947 | AGAGCAGCGCAAGTGAGGAGG | AsCpf1-1 |
| 369 | DMPK 3 forward 19:45769922-45769948 | AGAGCAGCGCAAGTGAGGAGGG | AsCpf1-1 |
| 370 | DMPK 3 forward 19:45769922-45769949 | AGAGCAGCGCAAGTGAGGAGGGG | AsCpf1-1 |
| 371 | DMPK 3 forward 19:45769922-45769950 | AGAGCAGCGCAAGTGAGGAGGGGG | AsCpf1-1 |
| 372 | DMPK 3 forward 19:45769922-45769951 | AGAGCAGCGCAAGTGAGGAGGGGGG | AsCpf1-1 |
| 373 | DMPK 3 reverse 19:45769929-45769951 | GCGCCCCCCTCCTCACTT | AsCpf1-1 |
| 374 | DMPK 3 reverse 19:45769929-45769952 | GCGCCCCCCTCCTCACTTG | AsCpf1-1 |
| 375 | DMPK 3 reverse 19:45769929-45769953 | GCGCCCCCCTCCTCACTTGC | AsCpf1-1 |
| 376 | DMPK 3 reverse 19:45769929-45769954 | GCGCCCCCCTCCTCACTTGCG | AsCpf1-1 |
| 377 | DMPK 3 reverse 19:45769929-45769955 | GCGCCCCCCTCCTCACTTGCGC | AsCpf1-1 |
| 378 | DMPK 3 reverse 19:45769929-45769956 | GCGCCCCCCTCCTCACTTGCGCT | AsCpf1-1 |
| 379 | DMPK 3 reverse 19:45769929-45769957 | GCGCCCCCCTCCTCACTTGCGCTG | AsCpf1-1 |
| 380 | DMPK 3 reverse 19:45769929-45769958 | GCGCCCCCCTCCTCACTTGCGCTGC | AsCpf1-1 |
| 381 | DMPK 3 reverse 19:45769937-45769959 | GGGATCCCGCGCCCCCCT | AsCpf1-1 |
| 382 | DMPK 3 reverse 19:45769937-45769960 | GGGATCCCGCGCCCCCCTC | AsCpf1-1 |
| 383 | DMPK 3 reverse 19:45769937-45769961 | GGGATCCCGCGCCCCCCTCC | AsCpf1-1 |
| 384 | DMPK 3 reverse 19:45769937-45769962 | GGGATCCCGCGCCCCCCTCCT | AsCpf1-1 |
| 385 | DMPK 3 reverse 19:45769937-45769963 | GGGATCCCGCGCCCCCCTCCTC | AsCpf1-1 |
| 386 | DMPK 3 reverse 19:45769937-45769964 | GGGATCCCGCGCCCCCCTCCTCA | AsCpf1-1 |
| 387 | DMPK 3 reverse 19:45769937-45769965 | GGGATCCCGCGCCCCCCTCCTCAC | AsCpf1-1 |
| 388 | DMPK 3 reverse 19:45769937-45769966 | GGGATCCCGCGCCCCCCTCCTCACT | AsCpf1-1 |
| 389 | DMPK 3 forward 19:45769958-45769980 | CGAAAAAGCGGGTTTGGC | AsCpf1-1 |
| 390 | DMPK 3 forward 19:45769958-45769981 | CGAAAAAGCGGGTTTGGCA | AsCpf1-1 |
| 391 | DMPK 3 forward 19:45769958-45769982 | CGAAAAAGCGGGTTTGGCAA | AsCpf1-1 |
| 392 | DMPK 3 forward 19:45769958-45769983 | CGAAAAAGCGGGTTTGGCAAA | AsCpf1-1 |
| 393 | DMPK 3 forward 19:45769958-45769984 | CGAAAAAGCGGGTTTGGCAAAA | AsCpf1-1 |
| 394 | DMPK 3 forward 19:45769958-45769985 | CGAAAAAGCGGGTTTGGCAAAAG | AsCpf1-1 |
| 395 | DMPK 3 forward 19:45769958-45769986 | CGAAAAAGCGGGTTTGGCAAAAGC | AsCpf1-1 |
| 396 | DMPK 3 forward 19:45769958-45769987 | CGAAAAAGCGGGTTTGGCAAAAGCA | AsCpf1-1 |
| 397 | DMPK 3 forward 19:45769990-45770012 | CGAGTAAGCAGGCAGAGA | AsCpf1-1 |
| 398 | DMPK 3 forward 19:45769990-45770013 | CGAGTAAGCAGGCAGAGAT | AsCpf1-1 |
| 399 | DMPK 3 forward 19:45769990-45770014 | CGAGTAAGCAGGCAGAGATC | AsCpf1-1 |
| 400 | DMPK 3 forward 19:45769990-45770015 | CGAGTAAGCAGGCAGAGATCG | AsCpf1-1 |
| 401 | DMPK 3 forward 19:45769990-45770016 | CGAGTAAGCAGGCAGAGATCGC | AsCpf1-1 |
| 402 | DMPK 3 forward 19:45769990-45770017 | CGAGTAAGCAGGCAGAGATCGCG | AsCpf1-1 |
| 403 | DMPK 3 forward 19:45769990-45770018 | CGAGTAAGCAGGCAGAGATCGCGC | AsCpf1-1 |
| 404 | DMPK 3 forward 19:45769990-45770019 | CGAGTAAGCAGGCAGAGATCGCGCC | AsCpf1-1 |
| 405 | DMPK 3 forward 19:45769991-45770013 | GAGTAAGCAGGCAGAGAT | AsCpf1-1 |
| 406 | DMPK 3 forward 19:45769991-45770014 | GAGTAAGCAGGCAGAGATC | AsCpf1-1 |
| 407 | DMPK 3 forward 19:45769991-45770015 | GAGTAAGCAGGCAGAGATCG | AsCpf1-1 |
| 408 | DMPK 3 forward 19:45769991-45770016 | GAGTAAGCAGGCAGAGATCGC | AsCpf1-1 |
| 409 | DMPK 3 forward 19:45769991-45770017 | GAGTAAGCAGGCAGAGATCGCG | AsCpf1-1 |
| 410 | DMPK 3 forward 19:45769991-45770018 | GAGTAAGCAGGCAGAGATCGCGC | AsCpf1-1 |
| 411 | DMPK 3 forward 19:45769991-45770019 | GAGTAAGCAGGCAGAGATCGCGCC | AsCpf1-1 |
| 412 | DMPK 3 forward 19:45769991-45770020 | GAGTAAGCAGGCAGAGATCGCGCCA | AsCpf1-1 |
| 413 | DMPK 3 forward 19:45770025-45770047 | CAGAGCAGGGCGTCATGC | AsCpf1-1 |
| 414 | DMPK 3 forward 19:45770025-45770048 | CAGAGCAGGGCGTCATGCA | AsCpf1-1 |
| 415 | DMPK 3 forward 19:45770025-45770049 | CAGAGCAGGGCGTCATGCAC | AsCpf1-1 |
| 416 | DMPK 3 forward 19:45770025-45770050 | CAGAGCAGGGCGTCATGCACA | AsCpf1-1 |
| 417 | DMPK 3 forward 19:45770025-45770051 | CAGAGCAGGGCGTCATGCACAA | AsCpf1-1 |
| 418 | DMPK 3 forward 19:45770025-45770052 | CAGAGCAGGGCGTCATGCACAAG | AsCpf1-1 |
| 419 | DMPK 3 forward 19:45770025-45770053 | CAGAGCAGGGCGTCATGCACAAGA | AsCpf1-1 |
| 420 | DMPK 3 forward 19:45770025-45770054 | CAGAGCAGGGCGTCATGCACAAGAA | AsCpf1-1 |
| 421 | DMPK 3 reverse 19:45770043-45770065 | CAAAGTGCAAAGCTTTCT | AsCpf1-1 |
| 422 | DMPK 3 reverse 19:45770043-45770066 | CAAAGTGCAAAGCTTTCTT | AsCpf1-1 |
| 423 | DMPK 3 reverse 19:45770043-45770067 | CAAAGTGCAAAGCTTTCTTG | AsCpf1-1 |
| 424 | DMPK 3 reverse 19:45770043-45770068 | CAAAGTGCAAAGCTTTCTTGT | AsCpf1-1 |
| 425 | DMPK 3 reverse 19:45770043-45770069 | CAAAGTGCAAAGCTTTCTTGTG | AsCpf1-1 |
| 426 | DMPK 3 reverse 19:45770043-45770070 | CAAAGTGCAAAGCTTTCTTGTGC | AsCpf1-1 |
| 427 | DMPK 3 reverse 19:45770043-45770071 | CAAAGTGCAAAGCTTTCTTGTGCA | AsCpf1-1 |
| 428 | DMPK 3 reverse 19:45770043-45770072 | CAAAGTGCAAAGCTTTCTTGTGCAT | AsCpf1-1 |
| 429 | DMPK 3 reverse 19:45770068-45770090 | CGCACCCCCACCTATCGT | AsCpf1-1 |
| 430 | DMPK 3 reverse 19:45770068-45770091 | CGCACCCCCACCTATCGTT | AsCpf1-1 |
| 431 | DMPK 3 reverse 19:45770068-45770092 | CGCACCCCCACCTATCGTTG | AsCpf1-1 |
| 432 | DMPK 3 reverse 19:45770068-45770093 | CGCACCCCCACCTATCGTTGG | AsCpf1-1 |
| 433 | DMPK 3 reverse 19:45770068-45770094 | CGCACCCCCACCTATCGTTGGT | AsCpf1-1 |
| 434 | DMPK 3 reverse 19:45770068-45770095 | CGCACCCCCACCTATCGTTGGTT | AsCpf1-1 |
| 435 | DMPK 3 reverse 19:45770068-45770096 | CGCACCCCCACCTATCGTTGGTTC | AsCpf1-1 |
| 436 | DMPK 3 reverse 19:45770068-45770097 | CGCACCCCCACCTATCGTTGGTTCG | AsCpf1-1 |
| 437 | DMPK 3 reverse 19:45770075-45770097 | TCCTCCACGCACCCCCAC | AsCpf1-1 |
| 438 | DMPK 3 reverse 19:45770075-45770098 | TCCTCCACGCACCCCCACC | AsCpf1-1 |
| 439 | DMPK 3 reverse 19:45770075-45770099 | TCCTCCACGCACCCCCACCT | AsCpf1-1 |
| 440 | DMPK 3 reverse 19:45770075-45770100 | TCCTCCACGCACCCCCACCTA | AsCpf1-1 |
| 441 | DMPK 3 reverse 19:45770075-45770101 | TCCTCCACGCACCCCCACCTAT | AsCpf1-1 |
| 442 | DMPK 3 reverse 19:45770075-45770102 | TCCTCCACGCACCCCCACCTATC | AsCpf1-1 |
| 443 | DMPK 3 reverse 19:45770075-45770103 | TCCTCCACGCACCCCCACCTATCG | AsCpf1-1 |
| 444 | DMPK 3 reverse 19:45770075-45770104 | TCCTCCACGCACCCCCACCTATCGT | AsCpf1-1 |
| 445 | DMPK 3 reverse 19:45770076-45770098 | ATCCTCCACGCACCCCCA | AsCpf1-1 |
| 446 | DMPK 3 reverse 19:45770076-45770099 | ATCCTCCACGCACCCCCAC | AsCpf1-1 |
| 447 | DMPK 3 reverse 19:45770076-45770100 | ATCCTCCACGCACCCCCACC | AsCpf1-1 |
| 448 | DMPK 3 reverse 19:45770076-45770101 | ATCCTCCACGCACCCCCACCT | AsCpf1-1 |
| 449 | DMPK 3 reverse 19:45770076-45770102 | ATCCTCCACGCACCCCCACCTA | AsCpf1-1 |
| 450 | DMPK 3 reverse 19:45770076-45770103 | ATCCTCCACGCACCCCCACCTAT | AsCpf1-1 |
| 451 | DMPK 3 reverse 19:45770076-45770104 | ATCCTCCACGCACCCCCACCTATC | AsCpf1-1 |
| 452 | DMPK 3 reverse 19:45770076-45770105 | ATCCTCCACGCACCCCCACCTATCG | AsCpf1-1 |
| 453 | DMPK 3 reverse 19:45770082-45770104 | TGTTCCATCCTCCACGCA | AsCpf1-1 |
| 454 | DMPK 3 reverse 19:45770082-45770105 | TGTTCCATCCTCCACGCAC | AsCpf1-1 |
| 455 | DMPK 3 reverse 19:45770082-45770106 | TGTTCCATCCTCCACGCACC | AsCpf1-1 |
| 456 | DMPK 3 reverse 19:45770082-45770107 | TGTTCCATCCTCCACGCACCC | AsCpf1-1 |
| 457 | DMPK 3 reverse 19:45770082-45770108 | TGTTCCATCCTCCACGCACCCC | AsCpf1-1 |
| 458 | DMPK 3 reverse 19:45770082-45770109 | TGTTCCATCCTCCACGCACCCCC | AsCpf1-1 |
| 459 | DMPK 3 reverse 19:45770082-45770110 | TGTTCCATCCTCCACGCACCCCCA | AsCpf1-1 |
| 460 | DMPK 3 reverse 19:45770082-45770111 | TGTTCCATCCTCCACGCACCCCCAC | AsCpf1-1 |
| 461 | DMPK 3 forward 19:45770128-45770150 | CAGGCCTGCAGTTTGCCC | AsCpf1-1 |
| 462 | DMPK 3 forward 19:45770128-45770151 | CAGGCCTGCAGTTTGCCCA | AsCpf1-1 |
| 463 | DMPK 3 forward 19:45770128-45770152 | CAGGCCTGCAGTTTGCCCAT | AsCpf1-1 |
| 464 | DMPK 3 forward 19:45770128-45770153 | CAGGCCTGCAGTTTGCCCATC | AsCpf1-1 |
| 465 | DMPK 3 forward 19:45770128-45770154 | CAGGCCTGCAGTTTGCCCATCC | AsCpf1-1 |
| 466 | DMPK 3 forward 19:45770128-45770155 | CAGGCCTGCAGTTTGCCCATCCA | AsCpf1-1 |
| 467 | DMPK 3 forward 19:45770128-45770156 | CAGGCCTGCAGTTTGCCCATCCAC | AsCpf1-1 |
| 468 | DMPK 3 forward 19:45770128-45770157 | CAGGCCTGCAGTTTGCCCATCCACG | AsCpf1-1 |
| 469 | DMPK 3 forward 19:45770129-45770151 | AGGCCTGCAGTTTGCCCA | AsCpf1-1 |
| 470 | DMPK 3 forward 19:45770129-45770152 | AGGCCTGCAGTTTGCCCAT | AsCpf1-1 |
| 471 | DMPK 3 forward 19:45770129-45770153 | AGGCCTGCAGTTTGCCCATC | AsCpf1-1 |
| 472 | DMPK 3 forward 19:45770129-45770154 | AGGCCTGCAGTTTGCCCATCC | AsCpf1-1 |
| 473 | DMPK 3 forward 19:45770129-45770155 | AGGCCTGCAGTTTGCCCATCCA | AsCpf1-1 |
| 474 | DMPK 3 forward 19:45770129-45770156 | AGGCCTGCAGTTTGCCCATCCAC | AsCpf1-1 |
| 475 | DMPK 3 forward 19:45770129-45770157 | AGGCCTGCAGTTTGCCCATCCACG | AsCpf1-1 |
| 476 | DMPK 3 forward 19:45770129-45770158 | AGGCCTGCAGTTTGCCCATCCACGT | AsCpf1-1 |
| 477 | DMPK 3 reverse 19:45770150-45770172 | GCCAGGCTGAGGCCCTGA | AsCpf1-1 |
| 478 | DMPK 3 reverse 19:45770150-45770173 | GCCAGGCTGAGGCCCTGAC | AsCpf1-1 |
| 479 | DMPK 3 reverse 19:45770150-45770174 | GCCAGGCTGAGGCCCTGACG | AsCpf1-1 |
| 480 | DMPK 3 reverse 19:45770150-45770175 | GCCAGGCTGAGGCCCTGACGT | AsCpf1-1 |
| 481 | DMPK 3 reverse 19:45770150-45770176 | GCCAGGCTGAGGCCCTGACGTG | AsCpf1-1 |
| 482 | DMPK 3 reverse 19:45770150-45770177 | GCCAGGCTGAGGCCCTGACGTGG | AsCpf1-1 |
| 483 | DMPK 3 reverse 19:45770150-45770178 | GCCAGGCTGAGGCCCTGACGTGGA | AsCpf1-1 |
| 484 | DMPK 3 reverse 19:45770150-45770179 | GCCAGGCTGAGGCCCTGACGTGGAT | AsCpf1-1 |
| 485 | DMPK 3 forward 19:45770151-45770173 | CGTCAGGGCCTCAGCCTG | AsCpf1-1 |
| 486 | DMPK 3 forward 19:45770151-45770174 | CGTCAGGGCCTCAGCCTGG | AsCpf1-1 |
| 487 | DMPK 3 forward 19:45770151-45770175 | CGTCAGGGCCTCAGCCTGGC | AsCpf1-1 |
| 488 | DMPK 3 forward 19:45770151-45770176 | CGTCAGGGCCTCAGCCTGGCC | AsCpf1-1 |
| 489 | DMPK 3 forward 19:45770151-45770177 | CGTCAGGGCCTCAGCCTGGCCG | AsCpf1-1 |
| 490 | DMPK 3 forward 19:45770151-45770178 | CGTCAGGGCCTCAGCCTGGCCGA | AsCpf1-1 |
| 491 | DMPK 3 forward 19:45770151-45770179 | CGTCAGGGCCTCAGCCTGGCCGAA | AsCpf1-1 |
| 492 | DMPK 3 forward 19:45770151-45770180 | CGTCAGGGCCTCAGCCTGGCCGAAA | AsCpf1-1 |
| 493 | DMPK 3 forward 19:45770198-45770220 | CCCAGCAGCAGCAGCAGC | AsCpf1-1 |
| 494 | DMPK 3 forward 19:45770198-45770221 | CCCAGCAGCAGCAGCAGCA | AsCpf1-1 |
| 495 | DMPK 3 forward 19:45770198-45770222 | CCCAGCAGCAGCAGCAGCAG | AsCpf1-1 |
| 496 | DMPK 3 forward 19:45770198-45770223 | CCCAGCAGCAGCAGCAGCAGC | AsCpf1-1 |
| 497 | DMPK 3 forward 19:45770198-45770224 | CCCAGCAGCAGCAGCAGCAGCA | AsCpf1-1 |
| 498 | DMPK 3 forward 19:45770198-45770225 | CCCAGCAGCAGCAGCAGCAGCAG | AsCpf1-1 |
| 499 | DMPK 3 forward 19:45770198-45770226 | CCCAGCAGCAGCAGCAGCAGCAGC | AsCpf1-1 |
| 500 | DMPK 3 forward 19:45770198-45770227 | CCCAGCAGCAGCAGCAGCAGCAGCA | AsCpf1-1 |
| 501 | DMPK 3 forward 19:45769885-45769907 | CAAACCGCCGAAGCGGGC | AsCpf1-2 |
| 502 | DMPK 3 forward 19:45769885-45769908 | CAAACCGCCGAAGCGGGCG | AsCpf1-2 |
| 503 | DMPK 3 forward 19:45769885-45769909 | CAAACCGCCGAAGCGGGCGG | AsCpf1-2 |
| 504 | DMPK 3 forward 19:45769885-45769910 | CAAACCGCCGAAGCGGGCGGA | AsCpf1-2 |
| 505 | DMPK 3 forward 19:45769885-45769911 | CAAACCGCCGAAGCGGGCGGAG | AsCpf1-2 |
| 506 | DMPK 3 forward 19:45769885-45769912 | CAAACCGCCGAAGCGGGCGGAGC | AsCpf1-2 |
| 507 | DMPK 3 forward 19:45769885-45769913 | CAAACCGCCGAAGCGGGCGGAGCC | AsCpf1-2 |
| 508 | DMPK 3 forward 19:45769885-45769914 | CAAACCGCCGAAGCGGGCGGAGCCG | AsCpf1-2 |
| 509 | DMPK 3 reverse 19:45770052-45770074 | GTTGGTTCGCAAAGTGCA | AsCpf1-2 |
| 510 | DMPK 3 reverse 19:45770052-45770075 | GTTGGTTCGCAAAGTGCAA | AsCpf1-2 |
| 511 | DMPK 3 reverse 19:45770052-45770076 | GTTGGTTCGCAAAGTGCAAA | AsCpf1-2 |
| 512 | DMPK 3 reverse 19:45770052-45770077 | GTTGGTTCGCAAAGTGCAAAG | AsCpf1-2 |
| 513 | DMPK 3 reverse 19:45770052-45770078 | GTTGGTTCGCAAAGTGCAAAGC | AsCpf1-2 |
| 514 | DMPK 3 reverse 19:45770052-45770079 | GTTGGTTCGCAAAGTGCAAAGCT | AsCpf1-2 |
| 515 | DMPK 3 reverse 19:45770052-45770080 | GTTGGTTCGCAAAGTGCAAAGCTT | AsCpf1-2 |
| 516 | DMPK 3 reverse 19:45770052-45770081 | GTTGGTTCGCAAAGTGCAAAGCTTT | AsCpf1-2 |
| 517 | DMPK 3 forward 19:45769700-45769731 | CTGTGGAGTCCAGAGCTTTGGGCAG | SaCas9 |
| 518 | DMPK 3 forward 19:45769701-45769731 | TGTGGAGTCCAGAGCTTTGGGCAG | SaCas9 |
| 519 | DMPK 3 forward 19:45769702-45769731 | GTGGAGTCCAGAGCTTTGGGCAG | SaCas9 |
| 520 | DMPK 3 forward 19:45769703-45769731 | TGGAGTCCAGAGCTTTGGGCAG | SaCas9 |
| 521 | DMPK 3 forward 19:45769704-45769731 | GGAGTCCAGAGCTTTGGGCAG | SaCas9 |
| 522 | DMPK 3 forward 19:45769705-45769731 | GAGTCCAGAGCTTTGGGCAG | SaCas9 |
| 523 | DMPK 3 forward 19:45769706-45769731 | AGTCCAGAGCTTTGGGCAG | SaCas9 |
| 524 | DMPK 3 forward 19:45769707-45769731 | GTCCAGAGCTTTGGGCAG | SaCas9 |
| 525 | DMPK 3 forward 19:45769701-45769732 | TGTGGAGTCCAGAGCTTTGGGCAGA | SaCas9 |
| 526 | DMPK 3 forward 19:45769702-45769732 | GTGGAGTCCAGAGCTTTGGGCAGA | SaCas9 |
| 527 | DMPK 3 forward 19:45769703-45769732 | TGGAGTCCAGAGCTTTGGGCAGA | SaCas9 |
| 528 | DMPK 3 forward 19:45769704-45769732 | GGAGTCCAGAGCTTTGGGCAGA | SaCas9 |
| 529 | DMPK 3 forward 19:45769705-45769732 | GAGTCCAGAGCTTTGGGCAGA | SaCas9 |
| 530 | DMPK 3 forward 19:45769706-45769732 | AGTCCAGAGCTTTGGGCAGA | SaCas9 |
| 531 | DMPK 3 forward 19:45769707-45769732 | GTCCAGAGCTTTGGGCAGA | SaCas9 |
| 532 | DMPK 3 forward 19:45769708-45769732 | TCCAGAGCTTTGGGCAGA | SaCas9 |
| 533 | DMPK 3 forward 19:45769703-45769734 | TGGAGTCCAGAGCTTTGGGCAGATG | SaCas9 |
| 534 | DMPK 3 forward 19:45769704-45769734 | GGAGTCCAGAGCTTTGGGCAGATG | SaCas9 |
| 535 | DMPK 3 forward 19:45769705-45769734 | GAGTCCAGAGCTTTGGGCAGATG | SaCas9 |
| 536 | DMPK 3 forward 19:45769706-45769734 | AGTCCAGAGCTTTGGGCAGATG | SaCas9 |
| 537 | DMPK 3 forward 19:45769707-45769734 | GTCCAGAGCTTTGGGCAGATG | SaCas9 |
| 538 | DMPK 3 forward 19:45769708-45769734 | TCCAGAGCTTTGGGCAGATG | SaCas9 |
| 539 | DMPK 3 forward 19:45769709-45769734 | CCAGAGCTTTGGGCAGATG | SaCas9 |
| 540 | DMPK 3 forward 19:45769710-45769734 | CAGAGCTTTGGGCAGATG | SaCas9 |
| 541 | DMPK 3 reverse 19:45769707-45769738 | AAAGGCCCTCCATCTGCCCAAAGCT | SaCas9 |
| 542 | DMPK 3 reverse 19:45769708-45769738 | AAGGCCCTCCATCTGCCCAAAGCT | SaCas9 |
| 543 | DMPK 3 reverse 19:45769709-45769738 | AGGCCCTCCATCTGCCCAAAGCT | SaCas9 |
| 544 | DMPK 3 reverse 19:45769710-45769738 | GGCCCTCCATCTGCCCAAAGCT | SaCas9 |
| 545 | DMPK 3 reverse 19:45769711-45769738 | GCCCTCCATCTGCCCAAAGCT | SaCas9 |
| 546 | DMPK 3 reverse 19:45769712-45769738 | CCCTCCATCTGCCCAAAGCT | SaCas9 |
| 547 | DMPK 3 reverse 19:45769713-45769738 | CCTCCATCTGCCCAAAGCT | SaCas9 |
| 548 | DMPK 3 reverse 19:45769714-45769738 | CTCCATCTGCCCAAAGCT | SaCas9 |
| 549 | DMPK 3 forward 19:45769718-45769749 | TGGGCAGATGGAGGGCCTTTTATTC | SaCas9 |
| 550 | DMPK 3 forward 19:45769719-45769749 | GGGCAGATGGAGGGCCTTTTATTC | SaCas9 |
| 551 | DMPK 3 forward 19:45769720-45769749 | GGCAGATGGAGGGCCTTTTATTC | SaCas9 |
| 552 | DMPK 3 forward 19:45769721-45769749 | GCAGATGGAGGGCCTTTTATTC | SaCas9 |
| 553 | DMPK 3 forward 19:45769722-45769749 | CAGATGGAGGGCCTTTTATTC | SaCas9 |
| 554 | DMPK 3 forward 19:45769723-45769749 | AGATGGAGGGCCTTTTATTC | SaCas9 |
| 555 | DMPK 3 forward 19:45769724-45769749 | GATGGAGGGCCTTTTATTC | SaCas9 |
| 556 | DMPK 3 forward 19:45769725-45769749 | ATGGAGGGCCTTTTATTC | SaCas9 |
| 557 | DMPK 3 forward 19:45769720-45769751 | GGCAGATGGAGGGCCTTTTATTCGC | SaCas9 |
| 558 | DMPK 3 forward 19:45769721-45769751 | GCAGATGGAGGGCCTTTTATTCGC | SaCas9 |
| 559 | DMPK 3 forward 19:45769722-45769751 | CAGATGGAGGGCCTTTTATTCGC | SaCas9 |
| 560 | DMPK 3 forward 19:45769723-45769751 | AGATGGAGGGCCTTTTATTCGC | SaCas9 |
| 561 | DMPK 3 forward 19:45769724-45769751 | GATGGAGGGCCTTTTATTCGC | SaCas9 |
| 562 | DMPK 3 forward 19:45769725-45769751 | ATGGAGGGCCTTTTATTCGC | SaCas9 |
| 563 | DMPK 3 forward 19:45769726-45769751 | TGGAGGGCCTTTTATTCGC | SaCas9 |
| 564 | DMPK 3 forward 19:45769727-45769751 | GGAGGGCCTTTTATTCGC | SaCas9 |
| 565 | DMPK 3 forward 19:45769725-45769756 | ATGGAGGGCCTTTTATTCGCGAGGG | SaCas9 |
| 566 | DMPK 3 forward 19:45769726-45769756 | TGGAGGGCCTTTTATTCGCGAGGG | SaCas9 |
| 567 | DMPK 3 forward 19:45769727-45769756 | GGAGGGCCTTTTATTCGCGAGGG | SaCas9 |
| 568 | DMPK 3 forward 19:45769728-45769756 | GAGGGCCTTTTATTCGCGAGGG | SaCas9 |
| 569 | DMPK 3 forward 19:45769729-45769756 | AGGGCCTTTTATTCGCGAGGG | SaCas9 |
| 570 | DMPK 3 forward 19:45769730-45769756 | GGGCCTTTTATTCGCGAGGG | SaCas9 |
| 571 | DMPK 3 forward 19:45769731-45769756 | GGCCTTTTATTCGCGAGGG | SaCas9 |
| 572 | DMPK 3 forward 19:45769732-45769756 | GCCTTTTATTCGCGAGGG | SaCas9 |
| 573 | DMPK 3 forward 19:45769726-45769757 | TGGAGGGCCTTTTATTCGCGAGGGT | SaCas9 |
| 574 | DMPK 3 forward 19:45769727-45769757 | GGAGGGCCTTTTATTCGCGAGGGT | SaCas9 |
| 575 | DMPK 3 forward 19:45769728-45769757 | GAGGGCCTTTTATTCGCGAGGGT | SaCas9 |
| 576 | DMPK 3 forward 19:45769729-45769757 | AGGGCCTTTTATTCGCGAGGGT | SaCas9 |
| 577 | DMPK 3 forward 19:45769730-45769757 | GGGCCTTTTATTCGCGAGGGT | SaCas9 |
| 578 | DMPK 3 forward 19:45769731-45769757 | GGCCTTTTATTCGCGAGGGT | SaCas9 |
| 579 | DMPK 3 forward 19:45769732-45769757 | GCCTTTTATTCGCGAGGGT | SaCas9 |
| 580 | DMPK 3 forward 19:45769733-45769757 | CCTTTTATTCGCGAGGGT | SaCas9 |
| 581 | DMPK 3 forward 19:45769727-45769758 | GGAGGGCCTTTTATTCGCGAGGGTC | SaCas9 |
| 582 | DMPK 3 forward 19:45769728-45769758 | GAGGGCCTTTTATTCGCGAGGGTC | SaCas9 |
| 583 | DMPK 3 forward 19:45769729-45769758 | AGGGCCTTTTATTCGCGAGGGTC | SaCas9 |
| 584 | DMPK 3 forward 19:45769730-45769758 | GGGCCTTTTATTCGCGAGGGTC | SaCas9 |
| 585 | DMPK 3 forward 19:45769731-45769758 | GGCCTTTTATTCGCGAGGGTC | SaCas9 |
| 586 | DMPK 3 forward 19:45769732-45769758 | GCCTTTTATTCGCGAGGGTC | SaCas9 |
| 587 | DMPK 3 forward 19:45769733-45769758 | CCTTTTATTCGCGAGGGTC | SaCas9 |
| 588 | DMPK 3 forward 19:45769734-45769758 | CTTTTATTCGCGAGGGTC | SaCas9 |
| 589 | DMPK 3 forward 19:45769731-45769762 | GGCCTTTTATTCGCGAGGGTCGGGG | SaCas9 |
| 590 | DMPK 3 forward 19:45769732-45769762 | GCCTTTTATTCGCGAGGGTCGGGG | SaCas9 |
| 591 | DMPK 3 forward 19:45769733-45769762 | CCTTTTATTCGCGAGGGTCGGGG | SaCas9 |
| 592 | DMPK 3 forward 19:45769734-45769762 | CTTTTATTCGCGAGGGTCGGGG | SaCas9 |
| 593 | DMPK 3 forward 19:45769735-45769762 | TTTTATTCGCGAGGGTCGGGG | SaCas9 |
| 594 | DMPK 3 forward 19:45769736-45769762 | TTTATTCGCGAGGGTCGGGG | SaCas9 |
| 595 | DMPK 3 forward 19:45769737-45769762 | TTATTCGCGAGGGTCGGGG | SaCas9 |
| 596 | DMPK 3 forward 19:45769738-45769762 | TATTCGCGAGGGTCGGGG | SaCas9 |
| 597 | DMPK 3 forward 19:45769732-45769763 | GCCTTTTATTCGCGAGGGTCGGGGG | SaCas9 |
| 598 | DMPK 3 forward 19:45769733-45769763 | CCTTTTATTCGCGAGGGTCGGGGG | SaCas9 |
| 599 | DMPK 3 forward 19:45769734-45769763 | CTTTTATTCGCGAGGGTCGGGGG | SaCas9 |
| 600 | DMPK 3 forward 19:45769735-45769763 | TTTTATTCGCGAGGGTCGGGGG | SaCas9 |
| 601 | DMPK 3 forward 19:45769736-45769763 | TTTATTCGCGAGGGTCGGGGG | SaCas9 |
| 602 | DMPK 3 forward 19:45769737-45769763 | TTATTCGCGAGGGTCGGGGG | SaCas9 |
| 603 | DMPK 3 forward 19:45769738-45769763 | TATTCGCGAGGGTCGGGGG | SaCas9 |
| 604 | DMPK 3 forward 19:45769739-45769763 | ATTCGCGAGGGTCGGGGG | SaCas9 |
| 605 | DMPK 3 forward 19:45769733-45769764 | CCTTTTATTCGCGAGGGTCGGGGGT | SaCas9 |
| 606 | DMPK 3 forward 19:45769734-45769764 | CTTTTATTCGCGAGGGTCGGGGGT | SaCas9 |
| 607 | DMPK 3 forward 19:45769735-45769764 | TTTTATTCGCGAGGGTCGGGGGT | SaCas9 |
| 608 | DMPK 3 forward 19:45769736-45769764 | TTTATTCGCGAGGGTCGGGGGT | SaCas9 |
| 609 | DMPK 3 forward 19:45769737-45769764 | TTATTCGCGAGGGTCGGGGGT | SaCas9 |
| 610 | DMPK 3 forward 19:45769738-45769764 | TATTCGCGAGGGTCGGGGGT | SaCas9 |
| 611 | DMPK 3 forward 19:45769739-45769764 | ATTCGCGAGGGTCGGGGGT | SaCas9 |
| 612 | DMPK 3 forward 19:45769740-45769764 | TTCGCGAGGGTCGGGGGT | SaCas9 |
| 613 | DMPK 3 reverse 19:45769739-45769770 | CCTAGGACCCCCACCCCCGACCCTC | SaCas9 |
| 614 | DMPK 3 reverse 19:45769740-45769770 | CTAGGACCCCCACCCCCGACCCTC | SaCas9 |
| 615 | DMPK 3 reverse 19:45769741-45769770 | TAGGACCCCCACCCCCGACCCTC | SaCas9 |
| 616 | DMPK 3 reverse 19:45769742-45769770 | AGGACCCCCACCCCCGACCCTC | SaCas9 |
| 617 | DMPK 3 reverse 19:45769743-45769770 | GGACCCCCACCCCCGACCCTC | SaCas9 |
| 618 | DMPK 3 reverse 19:45769744-45769770 | GACCCCCACCCCCGACCCTC | SaCas9 |
| 619 | DMPK 3 reverse 19:45769745-45769770 | ACCCCCACCCCCGACCCTC | SaCas9 |
| 620 | DMPK 3 reverse 19:45769746-45769770 | CCCCCACCCCCGACCCTC | SaCas9 |
| 621 | DMPK 3 forward 19:45769744-45769775 | CGAGGGTCGGGGGTGGGGGTCCTAG | SaCas9 |
| 622 | DMPK 3 forward 19:45769745-45769775 | GAGGGTCGGGGGTGGGGGTCCTAG | SaCas9 |
| 623 | DMPK 3 forward 19:45769746-45769775 | AGGGTCGGGGGTGGGGGTCCTAG | SaCas9 |
| 624 | DMPK 3 forward 19:45769747-45769775 | GGGTCGGGGGTGGGGGTCCTAG | SaCas9 |
| 625 | DMPK 3 forward 19:45769748-45769775 | GGTCGGGGGTGGGGGTCCTAG | SaCas9 |
| 626 | DMPK 3 forward 19:45769749-45769775 | GTCGGGGGTGGGGGTCCTAG | SaCas9 |
| 627 | DMPK 3 forward 19:45769750-45769775 | TCGGGGGTGGGGGTCCTAG | SaCas9 |
| 628 | DMPK 3 forward 19:45769751-45769775 | CGGGGGTGGGGGTCCTAG | SaCas9 |
| 629 | DMPK 3 forward 19:45769745-45769776 | GAGGGTCGGGGGTGGGGGTCCTAGG | SaCas9 |
| 630 | DMPK 3 forward 19:45769746-45769776 | AGGGTCGGGGGTGGGGGTCCTAGG | SaCas9 |
| 631 | DMPK 3 forward 19:45769747-45769776 | GGGTCGGGGGTGGGGGTCCTAGG | SaCas9 |
| 632 | DMPK 3 forward 19:45769748-45769776 | GGTCGGGGGTGGGGGTCCTAGG | SaCas9 |
| 633 | DMPK 3 forward 19:45769749-45769776 | GTCGGGGGTGGGGGTCCTAGG | SaCas9 |
| 634 | DMPK 3 forward 19:45769750-45769776 | TCGGGGGTGGGGGTCCTAGG | SaCas9 |
| 635 | DMPK 3 forward 19:45769751-45769776 | CGGGGGTGGGGGTCCTAGG | SaCas9 |
| 636 | DMPK 3 forward 19:45769752-45769776 | GGGGGTGGGGGTCCTAGG | SaCas9 |
| 637 | DMPK 3 forward 19:45769746-45769777 | AGGGTCGGGGGTGGGGGTCCTAGGT | SaCas9 |
| 638 | DMPK 3 forward 19:45769747-45769777 | GGGTCGGGGGTGGGGGTCCTAGGT | SaCas9 |
| 639 | DMPK 3 forward 19:45769748-45769777 | GGTCGGGGGTGGGGGTCCTAGGT | SaCas9 |
| 640 | DMPK 3 forward 19:45769749-45769777 | GTCGGGGGTGGGGGTCCTAGGT | SaCas9 |
| 641 | DMPK 3 forward 19:45769750-45769777 | TCGGGGGTGGGGGTCCTAGGT | SaCas9 |
| 642 | DMPK 3 forward 19:45769751-45769777 | CGGGGGTGGGGGTCCTAGGT | SaCas9 |
| 643 | DMPK 3 forward 19:45769752-45769777 | GGGGGTGGGGGTCCTAGGT | SaCas9 |
| 644 | DMPK 3 forward 19:45769753-45769777 | GGGGTGGGGGTCCTAGGT | SaCas9 |
| 645 | DMPK 3 reverse 19:45769762-45769793 | TCGGTATTTATTGTCTGTCCCCACC | SaCas9 |
| 646 | DMPK 3 reverse 19:45769763-45769793 | CGGTATTTATTGTCTGTCCCCACC | SaCas9 |
| 647 | DMPK 3 reverse 19:45769764-45769793 | GGTATTTATTGTCTGTCCCCACC | SaCas9 |
| 648 | DMPK 3 reverse 19:45769765-45769793 | GTATTTATTGTCTGTCCCCACC | SaCas9 |
| 649 | DMPK 3 reverse 19:45769766-45769793 | TATTTATTGTCTGTCCCCACC | SaCas9 |
| 650 | DMPK 3 reverse 19:45769767-45769793 | ATTTATTGTCTGTCCCCACC | SaCas9 |
| 651 | DMPK 3 reverse 19:45769768-45769793 | TTTATTGTCTGTCCCCACC | SaCas9 |
| 652 | DMPK 3 reverse 19:45769769-45769793 | TTATTGTCTGTCCCCACC | SaCas9 |
| 653 | DMPK 3 forward 19:45769764-45769795 | CCTAGGTGGGGACAGACAATAAATA | SaCas9 |
| 654 | DMPK 3 forward 19:45769765-45769795 | CTAGGTGGGGACAGACAATAAATA | SaCas9 |
| 655 | DMPK 3 forward 19:45769766-45769795 | TAGGTGGGGACAGACAATAAATA | SaCas9 |
| 656 | DMPK 3 forward 19:45769767-45769795 | AGGTGGGGACAGACAATAAATA | SaCas9 |
| 657 | DMPK 3 forward 19:45769768-45769795 | GGTGGGGACAGACAATAAATA | SaCas9 |
| 658 | DMPK 3 forward 19:45769769-45769795 | GTGGGGACAGACAATAAATA | SaCas9 |
| 659 | DMPK 3 forward 19:45769770-45769795 | TGGGGACAGACAATAAATA | SaCas9 |
| 660 | DMPK 3 forward 19:45769771-45769795 | GGGGACAGACAATAAATA | SaCas9 |
| 661 | DMPK 3 forward 19:45769766-45769797 | TAGGTGGGGACAGACAATAAATACC | SaCas9 |
| 662 | DMPK 3 forward 19:45769767-45769797 | AGGTGGGGACAGACAATAAATACC | SaCas9 |
| 663 | DMPK 3 forward 19:45769768-45769797 | GGTGGGGACAGACAATAAATACC | SaCas9 |
| 664 | DMPK 3 forward 19:45769769-45769797 | GTGGGGACAGACAATAAATACC | SaCas9 |
| 665 | DMPK 3 forward 19:45769770-45769797 | TGGGGACAGACAATAAATACC | SaCas9 |
| 666 | DMPK 3 forward 19:45769771-45769797 | GGGGACAGACAATAAATACC | SaCas9 |
| 667 | DMPK 3 forward 19:45769772-45769797 | GGGACAGACAATAAATACC | SaCas9 |
| 668 | DMPK 3 forward 19:45769773-45769797 | GGACAGACAATAAATACC | SaCas9 |
| 669 | DMPK 3 forward 19:45769767-45769798 | AGGTGGGGACAGACAATAAATACCG | SaCas9 |
| 670 | DMPK 3 forward 19:45769768-45769798 | GGTGGGGACAGACAATAAATACCG | SaCas9 |
| 671 | DMPK 3 forward 19:45769769-45769798 | GTGGGGACAGACAATAAATACCG | SaCas9 |
| 672 | DMPK 3 forward 19:45769770-45769798 | TGGGGACAGACAATAAATACCG | SaCas9 |
| 673 | DMPK 3 forward 19:45769771-45769798 | GGGGACAGACAATAAATACCG | SaCas9 |
| 674 | DMPK 3 forward 19:45769772-45769798 | GGGACAGACAATAAATACCG | SaCas9 |
| 675 | DMPK 3 forward 19:45769773-45769798 | GGACAGACAATAAATACCG | SaCas9 |
| 676 | DMPK 3 forward 19:45769774-45769798 | GACAGACAATAAATACCG | SaCas9 |
| 677 | DMPK 3 forward 19:45769774-45769805 | GACAGACAATAAATACCGAGGAATG | SaCas9 |
| 678 | DMPK 3 forward 19:45769775-45769805 | ACAGACAATAAATACCGAGGAATG | SaCas9 |
| 679 | DMPK 3 forward 19:45769776-45769805 | CAGACAATAAATACCGAGGAATG | SaCas9 |
| 680 | DMPK 3 forward 19:45769777-45769805 | AGACAATAAATACCGAGGAATG | SaCas9 |
| 681 | DMPK 3 forward 19:45769778-45769805 | GACAATAAATACCGAGGAATG | SaCas9 |
| 682 | DMPK 3 forward 19:45769779-45769805 | ACAATAAATACCGAGGAATG | SaCas9 |
| 683 | DMPK 3 forward 19:45769780-45769805 | CAATAAATACCGAGGAATG | SaCas9 |
| 684 | DMPK 3 forward 19:45769781-45769805 | AATAAATACCGAGGAATG | SaCas9 |
| 685 | DMPK 3 forward 19:45769775-45769806 | ACAGACAATAAATACCGAGGAATGT | SaCas9 |
| 686 | DMPK 3 forward 19:45769776-45769806 | CAGACAATAAATACCGAGGAATGT | SaCas9 |
| 687 | DMPK 3 forward 19:45769777-45769806 | AGACAATAAATACCGAGGAATGT | SaCas9 |
| 688 | DMPK 3 forward 19:45769778-45769806 | GACAATAAATACCGAGGAATGT | SaCas9 |
| 689 | DMPK 3 forward 19:45769779-45769806 | ACAATAAATACCGAGGAATGT | SaCas9 |
| 690 | DMPK 3 forward 19:45769780-45769806 | CAATAAATACCGAGGAATGT | SaCas9 |
| 691 | DMPK 3 forward 19:45769781-45769806 | AATAAATACCGAGGAATGT | SaCas9 |
| 692 | DMPK 3 forward 19:45769782-45769806 | ATAAATACCGAGGAATGT | SaCas9 |
| 693 | DMPK 3 forward 19:45769798-45769829 | GTCGGGGTCTCAGTGCATCCAAAAC | SaCas9 |
| 694 | DMPK 3 forward 19:45769799-45769829 | TCGGGGTCTCAGTGCATCCAAAAC | SaCas9 |
| 695 | DMPK 3 forward 19:45769800-45769829 | CGGGGTCTCAGTGCATCCAAAAC | SaCas9 |
| 696 | DMPK 3 forward 19:45769801-45769829 | GGGGTCTCAGTGCATCCAAAAC | SaCas9 |
| 697 | DMPK 3 forward 19:45769802-45769829 | GGGTCTCAGTGCATCCAAAAC | SaCas9 |
| 698 | DMPK 3 forward 19:45769803-45769829 | GGTCTCAGTGCATCCAAAAC | SaCas9 |
| 699 | DMPK 3 forward 19:45769804-45769829 | GTCTCAGTGCATCCAAAAC | SaCas9 |
| 700 | DMPK 3 forward 19:45769805-45769829 | TCTCAGTGCATCCAAAAC | SaCas9 |
| 701 | DMPK 3 forward 19:45769803-45769834 | GGTCTCAGTGCATCCAAAACGTGGA | SaCas9 |
| 702 | DMPK 3 forward 19:45769804-45769834 | GTCTCAGTGCATCCAAAACGTGGA | SaCas9 |
| 703 | DMPK 3 forward 19:45769805-45769834 | TCTCAGTGCATCCAAAACGTGGA | SaCas9 |
| 704 | DMPK 3 forward 19:45769806-45769834 | CTCAGTGCATCCAAAACGTGGA | SaCas9 |
| 705 | DMPK 3 forward 19:45769807-45769834 | TCAGTGCATCCAAAACGTGGA | SaCas9 |
| 706 | DMPK 3 forward 19:45769808-45769834 | CAGTGCATCCAAAACGTGGA | SaCas9 |
| 707 | DMPK 3 forward 19:45769809-45769834 | AGTGCATCCAAAACGTGGA | SaCas9 |
| 708 | DMPK 3 forward 19:45769810-45769834 | GTGCATCCAAAACGTGGA | SaCas9 |
| 709 | DMPK 3 forward 19:45769804-45769835 | GTCTCAGTGCATCCAAAACGTGGAT | SaCas9 |
| 710 | DMPK 3 forward 19:45769805-45769835 | TCTCAGTGCATCCAAAACGTGGAT | SaCas9 |
| 711 | DMPK 3 forward 19:45769806-45769835 | CTCAGTGCATCCAAAACGTGGAT | SaCas9 |
| 712 | DMPK 3 forward 19:45769807-45769835 | TCAGTGCATCCAAAACGTGGAT | SaCas9 |
| 713 | DMPK 3 forward 19:45769808-45769835 | CAGTGCATCCAAAACGTGGAT | SaCas9 |
| 714 | DMPK 3 forward 19:45769809-45769835 | AGTGCATCCAAAACGTGGAT | SaCas9 |
| 715 | DMPK 3 forward 19:45769810-45769835 | GTGCATCCAAAACGTGGAT | SaCas9 |
| 716 | DMPK 3 forward 19:45769811-45769835 | TGCATCCAAAACGTGGAT | SaCas9 |
| 717 | DMPK 3 reverse 19:45769805-45769836 | AACCCCAATCCACGTTTTGGATGCA | SaCas9 |
| 718 | DMPK 3 reverse 19:45769806-45769836 | ACCCCAATCCACGTTTTGGATGCA | SaCas9 |
| 719 | DMPK 3 reverse 19:45769807-45769836 | CCCCAATCCACGTTTTGGATGCA | SaCas9 |
| 720 | DMPK 3 reverse 19:45769808-45769836 | CCCAATCCACGTTTTGGATGCA | SaCas9 |
| 721 | DMPK 3 reverse 19:45769809-45769836 | CCAATCCACGTTTTGGATGCA | SaCas9 |
| 722 | DMPK 3 reverse 19:45769810-45769836 | CAATCCACGTTTTGGATGCA | SaCas9 |
| 723 | DMPK 3 reverse 19:45769811-45769836 | AATCCACGTTTTGGATGCA | SaCas9 |
| 724 | DMPK 3 reverse 19:45769812-45769836 | ATCCACGTTTTGGATGCA | SaCas9 |
| 725 | DMPK 3 forward 19:45769812-45769843 | GCATCCAAAACGTGGATTGGGGTTG | SaCas9 |
| 726 | DMPK 3 forward 19:45769813-45769843 | CATCCAAAACGTGGATTGGGGTTG | SaCas9 |
| 727 | DMPK 3 forward 19:45769814-45769843 | ATCCAAAACGTGGATTGGGGTTG | SaCas9 |
| 728 | DMPK 3 forward 19:45769815-45769843 | TCCAAAACGTGGATTGGGGTTG | SaCas9 |
| 729 | DMPK 3 forward 19:45769816-45769843 | CCAAAACGTGGATTGGGGTTG | SaCas9 |
| 730 | DMPK 3 forward 19:45769817-45769843 | CAAAACGTGGATTGGGGTTG | SaCas9 |
| 731 | DMPK 3 forward 19:45769818-45769843 | AAAACGTGGATTGGGGTTG | SaCas9 |
| 732 | DMPK 3 forward 19:45769819-45769843 | AAACGTGGATTGGGGTTG | SaCas9 |
| 733 | DMPK 3 forward 19:45769813-45769844 | CATCCAAAACGTGGATTGGGGTTGT | SaCas9 |
| 734 | DMPK 3 forward 19:45769814-45769844 | ATCCAAAACGTGGATTGGGGTTGT | SaCas9 |
| 735 | DMPK 3 forward 19:45769815-45769844 | TCCAAAACGTGGATTGGGGTTGT | SaCas9 |
| 736 | DMPK 3 forward 19:45769816-45769844 | CCAAAACGTGGATTGGGGTTGT | SaCas9 |
| 737 | DMPK 3 forward 19:45769817-45769844 | CAAAACGTGGATTGGGGTTGT | SaCas9 |
| 738 | DMPK 3 forward 19:45769818-45769844 | AAAACGTGGATTGGGGTTGT | SaCas9 |
| 739 | DMPK 3 forward 19:45769819-45769844 | AAACGTGGATTGGGGTTGT | SaCas9 |
| 740 | DMPK 3 forward 19:45769820-45769844 | AACGTGGATTGGGGTTGT | SaCas9 |
| 741 | DMPK 3 forward 19:45769814-45769845 | ATCCAAAACGTGGATTGGGGTTGTT | SaCas9 |
| 742 | DMPK 3 forward 19:45769815-45769845 | TCCAAAACGTGGATTGGGGTTGTT | SaCas9 |
| 743 | DMPK 3 forward 19:45769816-45769845 | CCAAAACGTGGATTGGGGTTGTT | SaCas9 |
| 744 | DMPK 3 forward 19:45769817-45769845 | CAAAACGTGGATTGGGGTTGTT | SaCas9 |
| 745 | DMPK 3 forward 19:45769818-45769845 | AAAACGTGGATTGGGGTTGTT | SaCas9 |
| 746 | DMPK 3 forward 19:45769819-45769845 | AAACGTGGATTGGGGTTGTT | SaCas9 |
| 747 | DMPK 3 forward 19:45769820-45769845 | AACGTGGATTGGGGTTGTT | SaCas9 |
| 748 | DMPK 3 forward 19:45769821-45769845 | ACGTGGATTGGGGTTGTT | SaCas9 |
| 749 | DMPK 3 reverse 19:45769814-45769845 | ACCCCCAACAACCCCAATCCACGTT | SaCas9 |
| 750 | DMPK 3 reverse 19:45769815-45769845 | CCCCCAACAACCCCAATCCACGTT | SaCas9 |
| 751 | DMPK 3 reverse 19:45769816-45769845 | CCCCAACAACCCCAATCCACGTT | SaCas9 |
| 752 | DMPK 3 reverse 19:45769817-45769845 | CCCAACAACCCCAATCCACGTT | SaCas9 |
| 753 | DMPK 3 reverse 19:45769818-45769845 | CCAACAACCCCAATCCACGTT | SaCas9 |
| 754 | DMPK 3 reverse 19:45769819-45769845 | CAACAACCCCAATCCACGTT | SaCas9 |
| 755 | DMPK 3 reverse 19:45769820-45769845 | AACAACCCCAATCCACGTT | SaCas9 |
| 756 | DMPK 3 reverse 19:45769821-45769845 | ACAACCCCAATCCACGTT | SaCas9 |
| 757 | DMPK 3 forward 19:45769834-45769865 | TTGTTGGGGGTCCTGTAGCCTGTCA | SaCas9 |
| 758 | DMPK 3 forward 19:45769835-45769865 | TGTTGGGGGTCCTGTAGCCTGTCA | SaCas9 |
| 759 | DMPK 3 forward 19:45769836-45769865 | GTTGGGGGTCCTGTAGCCTGTCA | SaCas9 |
| 760 | DMPK 3 forward 19:45769837-45769865 | TTGGGGGTCCTGTAGCCTGTCA | SaCas9 |
| 761 | DMPK 3 forward 19:45769838-45769865 | TGGGGGTCCTGTAGCCTGTCA | SaCas9 |
| 762 | DMPK 3 forward 19:45769839-45769865 | GGGGGTCCTGTAGCCTGTCA | SaCas9 |
| 763 | DMPK 3 forward 19:45769840-45769865 | GGGGTCCTGTAGCCTGTCA | SaCas9 |
| 764 | DMPK 3 forward 19:45769841-45769865 | GGGTCCTGTAGCCTGTCA | SaCas9 |
| 765 | DMPK 3 forward 19:45769839-45769870 | GGGGGTCCTGTAGCCTGTCAGCGAG | SaCas9 |
| 766 | DMPK 3 forward 19:45769840-45769870 | GGGGTCCTGTAGCCTGTCAGCGAG | SaCas9 |
| 767 | DMPK 3 forward 19:45769841-45769870 | GGGTCCTGTAGCCTGTCAGCGAG | SaCas9 |
| 768 | DMPK 3 forward 19:45769842-45769870 | GGTCCTGTAGCCTGTCAGCGAG | SaCas9 |
| 769 | DMPK 3 forward 19:45769843-45769870 | GTCCTGTAGCCTGTCAGCGAG | SaCas9 |
| 770 | DMPK 3 forward 19:45769844-45769870 | TCCTGTAGCCTGTCAGCGAG | SaCas9 |
| 771 | DMPK 3 forward 19:45769845-45769870 | CCTGTAGCCTGTCAGCGAG | SaCas9 |
| 772 | DMPK 3 forward 19:45769846-45769870 | CTGTAGCCTGTCAGCGAG | SaCas9 |
| 773 | DMPK 3 forward 19:45769840-45769871 | GGGGTCCTGTAGCCTGTCAGCGAGT | SaCas9 |
| 774 | DMPK 3 forward 19:45769841-45769871 | GGGTCCTGTAGCCTGTCAGCGAGT | SaCas9 |
| 775 | DMPK 3 forward 19:45769842-45769871 | GGTCCTGTAGCCTGTCAGCGAGT | SaCas9 |
| 776 | DMPK 3 forward 19:45769843-45769871 | GTCCTGTAGCCTGTCAGCGAGT | SaCas9 |
| 777 | DMPK 3 forward 19:45769844-45769871 | TCCTGTAGCCTGTCAGCGAGT | SaCas9 |
| 778 | DMPK 3 forward 19:45769845-45769871 | CCTGTAGCCTGTCAGCGAGT | SaCas9 |
| 779 | DMPK 3 forward 19:45769846-45769871 | CTGTAGCCTGTCAGCGAGT | SaCas9 |
| 780 | DMPK 3 forward 19:45769847-45769871 | TGTAGCCTGTCAGCGAGT | SaCas9 |
| 781 | DMPK 3 forward 19:45769842-45769873 | GGTCCTGTAGCCTGTCAGCGAGTCG | SaCas9 |
| 782 | DMPK 3 forward 19:45769843-45769873 | GTCCTGTAGCCTGTCAGCGAGTCG | SaCas9 |
| 783 | DMPK 3 forward 19:45769844-45769873 | TCCTGTAGCCTGTCAGCGAGTCG | SaCas9 |
| 784 | DMPK 3 forward 19:45769845-45769873 | CCTGTAGCCTGTCAGCGAGTCG | SaCas9 |
| 785 | DMPK 3 forward 19:45769846-45769873 | CTGTAGCCTGTCAGCGAGTCG | SaCas9 |
| 786 | DMPK 3 forward 19:45769847-45769873 | TGTAGCCTGTCAGCGAGTCG | SaCas9 |
| 787 | DMPK 3 forward 19:45769848-45769873 | GTAGCCTGTCAGCGAGTCG | SaCas9 |
| 788 | DMPK 3 forward 19:45769849-45769873 | TAGCCTGTCAGCGAGTCG | SaCas9 |
| 789 | DMPK 3 reverse 19:45769843-45769874 | CGTCCTCCGACTCGCTGACAGGCTA | SaCas9 |
| 790 | DMPK 3 reverse 19:45769844-45769874 | GTCCTCCGACTCGCTGACAGGCTA | SaCas9 |
| 791 | DMPK 3 reverse 19:45769845-45769874 | TCCTCCGACTCGCTGACAGGCTA | SaCas9 |
| 792 | DMPK 3 reverse 19:45769846-45769874 | CCTCCGACTCGCTGACAGGCTA | SaCas9 |
| 793 | DMPK 3 reverse 19:45769847-45769874 | CTCCGACTCGCTGACAGGCTA | SaCas9 |
| 794 | DMPK 3 reverse 19:45769848-45769874 | TCCGACTCGCTGACAGGCTA | SaCas9 |
| 795 | DMPK 3 reverse 19:45769849-45769874 | CCGACTCGCTGACAGGCTA | SaCas9 |
| 796 | DMPK 3 reverse 19:45769850-45769874 | CGACTCGCTGACAGGCTA | SaCas9 |
| 797 | DMPK 3 forward 19:45769846-45769877 | CTGTAGCCTGTCAGCGAGTCGGAGG | SaCas9 |
| 798 | DMPK 3 forward 19:45769847-45769877 | TGTAGCCTGTCAGCGAGTCGGAGG | SaCas9 |
| 799 | DMPK 3 forward 19:45769848-45769877 | GTAGCCTGTCAGCGAGTCGGAGG | SaCas9 |
| 800 | DMPK 3 forward 19:45769849-45769877 | TAGCCTGTCAGCGAGTCGGAGG | SaCas9 |
| 801 | DMPK 3 forward 19:45769850-45769877 | AGCCTGTCAGCGAGTCGGAGG | SaCas9 |
| 802 | DMPK 3 forward 19:45769851-45769877 | GCCTGTCAGCGAGTCGGAGG | SaCas9 |
| 803 | DMPK 3 forward 19:45769852-45769877 | CCTGTCAGCGAGTCGGAGG | SaCas9 |
| 804 | DMPK 3 forward 19:45769853-45769877 | CTGTCAGCGAGTCGGAGG | SaCas9 |
| 805 | DMPK 3 forward 19:45769871-45769902 | ACGAGGTCAATAAATATCCAAACCG | SaCas9 |
| 806 | DMPK 3 forward 19:45769872-45769902 | CGAGGTCAATAAATATCCAAACCG | SaCas9 |
| 807 | DMPK 3 forward 19:45769873-45769902 | GAGGTCAATAAATATCCAAACCG | SaCas9 |
| 808 | DMPK 3 forward 19:45769874-45769902 | AGGTCAATAAATATCCAAACCG | SaCas9 |
| 809 | DMPK 3 forward 19:45769875-45769902 | GGTCAATAAATATCCAAACCG | SaCas9 |
| 810 | DMPK 3 forward 19:45769876-45769902 | GTCAATAAATATCCAAACCG | SaCas9 |
| 811 | DMPK 3 forward 19:45769877-45769902 | TCAATAAATATCCAAACCG | SaCas9 |
| 812 | DMPK 3 forward 19:45769878-45769902 | CAATAAATATCCAAACCG | SaCas9 |
| 813 | DMPK 3 forward 19:45769876-45769907 | GTCAATAAATATCCAAACCGCCGAA | SaCas9 |
| 814 | DMPK 3 forward 19:45769877-45769907 | TCAATAAATATCCAAACCGCCGAA | SaCas9 |
| 815 | DMPK 3 forward 19:45769878-45769907 | CAATAAATATCCAAACCGCCGAA | SaCas9 |
| 816 | DMPK 3 forward 19:45769879-45769907 | AATAAATATCCAAACCGCCGAA | SaCas9 |
| 817 | DMPK 3 forward 19:45769880-45769907 | ATAAATATCCAAACCGCCGAA | SaCas9 |
| 818 | DMPK 3 forward 19:45769881-45769907 | TAAATATCCAAACCGCCGAA | SaCas9 |
| 819 | DMPK 3 forward 19:45769882-45769907 | AAATATCCAAACCGCCGAA | SaCas9 |
| 820 | DMPK 3 forward 19:45769883-45769907 | AATATCCAAACCGCCGAA | SaCas9 |
| 821 | DMPK 3 forward 19:45769880-45769911 | ATAAATATCCAAACCGCCGAAGCGG | SaCas9 |
| 822 | DMPK 3 forward 19:45769881-45769911 | TAAATATCCAAACCGCCGAAGCGG | SaCas9 |
| 823 | DMPK 3 forward 19:45769882-45769911 | AAATATCCAAACCGCCGAAGCGG | SaCas9 |
| 824 | DMPK 3 forward 19:45769883-45769911 | AATATCCAAACCGCCGAAGCGG | SaCas9 |
| 825 | DMPK 3 forward 19:45769884-45769911 | ATATCCAAACCGCCGAAGCGG | SaCas9 |
| 826 | DMPK 3 forward 19:45769885-45769911 | TATCCAAACCGCCGAAGCGG | SaCas9 |
| 827 | DMPK 3 forward 19:45769886-45769911 | ATCCAAACCGCCGAAGCGG | SaCas9 |
| 828 | DMPK 3 forward 19:45769887-45769911 | TCCAAACCGCCGAAGCGG | SaCas9 |
| 829 | DMPK 3 forward 19:45769881-45769912 | TAAATATCCAAACCGCCGAAGCGGG | SaCas9 |
| 830 | DMPK 3 forward 19:45769882-45769912 | AAATATCCAAACCGCCGAAGCGGG | SaCas9 |
| 831 | DMPK 3 forward 19:45769883-45769912 | AATATCCAAACCGCCGAAGCGGG | SaCas9 |
| 832 | DMPK 3 forward 19:45769884-45769912 | ATATCCAAACCGCCGAAGCGGG | SaCas9 |
| 833 | DMPK 3 forward 19:45769885-45769912 | TATCCAAACCGCCGAAGCGGG | SaCas9 |
| 834 | DMPK 3 forward 19:45769886-45769912 | ATCCAAACCGCCGAAGCGGG | SaCas9 |
| 835 | DMPK 3 forward 19:45769887-45769912 | TCCAAACCGCCGAAGCGGG | SaCas9 |
| 836 | DMPK 3 forward 19:45769888-45769912 | CCAAACCGCCGAAGCGGG | SaCas9 |
| 837 | DMPK 3 reverse 19:45769886-45769917 | AGCCGGCTCCGCCCGCTTCGGCGGT | SaCas9 |
| 838 | DMPK 3 reverse 19:45769887-45769917 | GCCGGCTCCGCCCGCTTCGGCGGT | SaCas9 |
| 839 | DMPK 3 reverse 19:45769888-45769917 | CCGGCTCCGCCCGCTTCGGCGGT | SaCas9 |
| 840 | DMPK 3 reverse 19:45769889-45769917 | CGGCTCCGCCCGCTTCGGCGGT | SaCas9 |
| 841 | DMPK 3 reverse 19:45769890-45769917 | GGCTCCGCCCGCTTCGGCGGT | SaCas9 |
| 842 | DMPK 3 reverse 19:45769891-45769917 | GCTCCGCCCGCTTCGGCGGT | SaCas9 |
| 843 | DMPK 3 reverse 19:45769892-45769917 | CTCCGCCCGCTTCGGCGGT | SaCas9 |
| 844 | DMPK 3 reverse 19:45769893-45769917 | TCCGCCCGCTTCGGCGGT | SaCas9 |
| 845 | DMPK 3 forward 19:45769890-45769921 | AAACCGCCGAAGCGGGCGGAGCCGG | SaCas9 |
| 846 | DMPK 3 forward 19:45769891-45769921 | AACCGCCGAAGCGGGCGGAGCCGG | SaCas9 |
| 847 | DMPK 3 forward 19:45769892-45769921 | ACCGCCGAAGCGGGCGGAGCCGG | SaCas9 |
| 848 | DMPK 3 forward 19:45769893-45769921 | CCGCCGAAGCGGGCGGAGCCGG | SaCas9 |
| 849 | DMPK 3 forward 19:45769894-45769921 | CGCCGAAGCGGGCGGAGCCGG | SaCas9 |
| 850 | DMPK 3 forward 19:45769895-45769921 | GCCGAAGCGGGCGGAGCCGG | SaCas9 |
| 851 | DMPK 3 forward 19:45769896-45769921 | CCGAAGCGGGCGGAGCCGG | SaCas9 |
| 852 | DMPK 3 forward 19:45769897-45769921 | CGAAGCGGGCGGAGCCGG | SaCas9 |
| 853 | DMPK 3 forward 19:45769891-45769922 | AACCGCCGAAGCGGGCGGAGCCGGC | SaCas9 |
| 854 | DMPK 3 forward 19:45769892-45769922 | ACCGCCGAAGCGGGCGGAGCCGGC | SaCas9 |
| 855 | DMPK 3 forward 19:45769893-45769922 | CCGCCGAAGCGGGCGGAGCCGGC | SaCas9 |
| 856 | DMPK 3 forward 19:45769894-45769922 | CGCCGAAGCGGGCGGAGCCGGC | SaCas9 |
| 857 | DMPK 3 forward 19:45769895-45769922 | GCCGAAGCGGGCGGAGCCGGC | SaCas9 |
| 858 | DMPK 3 forward 19:45769896-45769922 | CCGAAGCGGGCGGAGCCGGC | SaCas9 |
| 859 | DMPK 3 forward 19:45769897-45769922 | CGAAGCGGGCGGAGCCGGC | SaCas9 |
| 860 | DMPK 3 forward 19:45769898-45769922 | GAAGCGGGCGGAGCCGGC | SaCas9 |
| 861 | DMPK 3 forward 19:45769898-45769929 | GAAGCGGGCGGAGCCGGCTGGGGCT | SaCas9 |
| 862 | DMPK 3 forward 19:45769899-45769929 | AAGCGGGCGGAGCCGGCTGGGGCT | SaCas9 |
| 863 | DMPK 3 forward 19:45769900-45769929 | AGCGGGCGGAGCCGGCTGGGGCT | SaCas9 |
| 864 | DMPK 3 forward 19:45769901-45769929 | GCGGGCGGAGCCGGCTGGGGCT | SaCas9 |
| 865 | DMPK 3 forward 19:45769902-45769929 | CGGGCGGAGCCGGCTGGGGCT | SaCas9 |
| 866 | DMPK 3 forward 19:45769903-45769929 | GGGCGGAGCCGGCTGGGGCT | SaCas9 |
| 867 | DMPK 3 forward 19:45769904-45769929 | GGCGGAGCCGGCTGGGGCT | SaCas9 |
| 868 | DMPK 3 forward 19:45769905-45769929 | GCGGAGCCGGCTGGGGCT | SaCas9 |
| 869 | DMPK 3 forward 19:45769900-45769931 | AGCGGGCGGAGCCGGCTGGGGCTCC | SaCas9 |
| 870 | DMPK 3 forward 19:45769901-45769931 | GCGGGCGGAGCCGGCTGGGGCTCC | SaCas9 |
| 871 | DMPK 3 forward 19:45769902-45769931 | CGGGCGGAGCCGGCTGGGGCTCC | SaCas9 |
| 872 | DMPK 3 forward 19:45769903-45769931 | GGGCGGAGCCGGCTGGGGCTCC | SaCas9 |
| 873 | DMPK 3 forward 19:45769904-45769931 | GGCGGAGCCGGCTGGGGCTCC | SaCas9 |
| 874 | DMPK 3 forward 19:45769905-45769931 | GCGGAGCCGGCTGGGGCTCC | SaCas9 |
| 875 | DMPK 3 forward 19:45769906-45769931 | CGGAGCCGGCTGGGGCTCC | SaCas9 |
| 876 | DMPK 3 forward 19:45769907-45769931 | GGAGCCGGCTGGGGCTCC | SaCas9 |
| 877 | DMPK 3 forward 19:45769913-45769944 | GGCTGGGGCTCCGAGAGCAGCGCAA | SaCas9 |
| 878 | DMPK 3 forward 19:45769914-45769944 | GCTGGGGCTCCGAGAGCAGCGCAA | SaCas9 |
| 879 | DMPK 3 forward 19:45769915-45769944 | CTGGGGCTCCGAGAGCAGCGCAA | SaCas9 |
| 880 | DMPK 3 forward 19:45769916-45769944 | TGGGGCTCCGAGAGCAGCGCAA | SaCas9 |
| 881 | DMPK 3 forward 19:45769917-45769944 | GGGGCTCCGAGAGCAGCGCAA | SaCas9 |
| 882 | DMPK 3 forward 19:45769918-45769944 | GGGCTCCGAGAGCAGCGCAA | SaCas9 |
| 883 | DMPK 3 forward 19:45769919-45769944 | GGCTCCGAGAGCAGCGCAA | SaCas9 |
| 884 | DMPK 3 forward 19:45769920-45769944 | GCTCCGAGAGCAGCGCAA | SaCas9 |
| 885 | DMPK 3 forward 19:45769915-45769946 | CTGGGGCTCCGAGAGCAGCGCAAGT | SaCas9 |
| 886 | DMPK 3 forward 19:45769916-45769946 | TGGGGCTCCGAGAGCAGCGCAAGT | SaCas9 |
| 887 | DMPK 3 forward 19:45769917-45769946 | GGGGCTCCGAGAGCAGCGCAAGT | SaCas9 |
| 888 | DMPK 3 forward 19:45769918-45769946 | GGGCTCCGAGAGCAGCGCAAGT | SaCas9 |
| 889 | DMPK 3 forward 19:45769919-45769946 | GGCTCCGAGAGCAGCGCAAGT | SaCas9 |
| 890 | DMPK 3 forward 19:45769920-45769946 | GCTCCGAGAGCAGCGCAAGT | SaCas9 |
| 891 | DMPK 3 forward 19:45769921-45769946 | CTCCGAGAGCAGCGCAAGT | SaCas9 |
| 892 | DMPK 3 forward 19:45769922-45769946 | TCCGAGAGCAGCGCAAGT | SaCas9 |
| 893 | DMPK 3 forward 19:45769916-45769947 | TGGGGCTCCGAGAGCAGCGCAAGTG | SaCas9 |
| 894 | DMPK 3 forward 19:45769917-45769947 | GGGGCTCCGAGAGCAGCGCAAGTG | SaCas9 |
| 895 | DMPK 3 forward 19:45769918-45769947 | GGGCTCCGAGAGCAGCGCAAGTG | SaCas9 |
| 896 | DMPK 3 forward 19:45769919-45769947 | GGCTCCGAGAGCAGCGCAAGTG | SaCas9 |
| 897 | DMPK 3 forward 19:45769920-45769947 | GCTCCGAGAGCAGCGCAAGTG | SaCas9 |
| 898 | DMPK 3 forward 19:45769921-45769947 | CTCCGAGAGCAGCGCAAGTG | SaCas9 |
| 899 | DMPK 3 forward 19:45769922-45769947 | TCCGAGAGCAGCGCAAGTG | SaCas9 |
| 900 | DMPK 3 forward 19:45769923-45769947 | CCGAGAGCAGCGCAAGTG | SaCas9 |
| 901 | DMPK 3 forward 19:45769918-45769949 | GGGCTCCGAGAGCAGCGCAAGTGAG | SaCas9 |
| 902 | DMPK 3 forward 19:45769919-45769949 | GGCTCCGAGAGCAGCGCAAGTGAG | SaCas9 |
| 903 | DMPK 3 forward 19:45769920-45769949 | GCTCCGAGAGCAGCGCAAGTGAG | SaCas9 |
| 904 | DMPK 3 forward 19:45769921-45769949 | CTCCGAGAGCAGCGCAAGTGAG | SaCas9 |
| 905 | DMPK 3 forward 19:45769922-45769949 | TCCGAGAGCAGCGCAAGTGAG | SaCas9 |
| 906 | DMPK 3 forward 19:45769923-45769949 | CCGAGAGCAGCGCAAGTGAG | SaCas9 |
| 907 | DMPK 3 forward 19:45769924-45769949 | CGAGAGCAGCGCAAGTGAG | SaCas9 |
| 908 | DMPK 3 forward 19:45769925-45769949 | GAGAGCAGCGCAAGTGAG | SaCas9 |
| 909 | DMPK 3 forward 19:45769919-45769950 | GGCTCCGAGAGCAGCGCAAGTGAGG | SaCas9 |
| 910 | DMPK 3 forward 19:45769920-45769950 | GCTCCGAGAGCAGCGCAAGTGAGG | SaCas9 |
| 911 | DMPK 3 forward 19:45769921-45769950 | CTCCGAGAGCAGCGCAAGTGAGG | SaCas9 |
| 912 | DMPK 3 forward 19:45769922-45769950 | TCCGAGAGCAGCGCAAGTGAGG | SaCas9 |
| 913 | DMPK 3 forward 19:45769923-45769950 | CCGAGAGCAGCGCAAGTGAGG | SaCas9 |
| 914 | DMPK 3 forward 19:45769924-45769950 | CGAGAGCAGCGCAAGTGAGG | SaCas9 |
| 915 | DMPK 3 forward 19:45769925-45769950 | GAGAGCAGCGCAAGTGAGG | SaCas9 |
| 916 | DMPK 3 forward 19:45769926-45769950 | AGAGCAGCGCAAGTGAGG | SaCas9 |
| 917 | DMPK 3 forward 19:45769920-45769951 | GCTCCGAGAGCAGCGCAAGTGAGGA | SaCas9 |
| 918 | DMPK 3 forward 19:45769921-45769951 | CTCCGAGAGCAGCGCAAGTGAGGA | SaCas9 |
| 919 | DMPK 3 forward 19:45769922-45769951 | TCCGAGAGCAGCGCAAGTGAGGA | SaCas9 |
| 920 | DMPK 3 forward 19:45769923-45769951 | CCGAGAGCAGCGCAAGTGAGGA | SaCas9 |
| 921 | DMPK 3 forward 19:45769924-45769951 | CGAGAGCAGCGCAAGTGAGGA | SaCas9 |
| 922 | DMPK 3 forward 19:45769925-45769951 | GAGAGCAGCGCAAGTGAGGA | SaCas9 |
| 923 | DMPK 3 forward 19:45769926-45769951 | AGAGCAGCGCAAGTGAGGA | SaCas9 |
| 924 | DMPK 3 forward 19:45769927-45769951 | GAGCAGCGCAAGTGAGGA | SaCas9 |
| 925 | DMPK 3 reverse 19:45769920-45769951 | CCCCCCTCCTCACTTGCGCTGCTCT | SaCas9 |
| 926 | DMPK 3 reverse 19:45769921-45769951 | CCCCCTCCTCACTTGCGCTGCTCT | SaCas9 |
| 927 | DMPK 3 reverse 19:45769922-45769951 | CCCCTCCTCACTTGCGCTGCTCT | SaCas9 |
| 928 | DMPK 3 reverse 19:45769923-45769951 | CCCTCCTCACTTGCGCTGCTCT | SaCas9 |
| 929 | DMPK 3 reverse 19:45769924-45769951 | CCTCCTCACTTGCGCTGCTCT | SaCas9 |
| 930 | DMPK 3 reverse 19:45769925-45769951 | CTCCTCACTTGCGCTGCTCT | SaCas9 |
| 931 | DMPK 3 reverse 19:45769926-45769951 | TCCTCACTTGCGCTGCTCT | SaCas9 |
| 932 | DMPK 3 reverse 19:45769927-45769951 | CCTCACTTGCGCTGCTCT | SaCas9 |
| 933 | DMPK 3 forward 19:45769921-45769952 | CTCCGAGAGCAGCGCAAGTGAGGAG | SaCas9 |
| 934 | DMPK 3 forward 19:45769922-45769952 | TCCGAGAGCAGCGCAAGTGAGGAG | SaCas9 |
| 935 | DMPK 3 forward 19:45769923-45769952 | CCGAGAGCAGCGCAAGTGAGGAG | SaCas9 |
| 936 | DMPK 3 forward 19:45769924-45769952 | CGAGAGCAGCGCAAGTGAGGAG | SaCas9 |
| 937 | DMPK 3 forward 19:45769925-45769952 | GAGAGCAGCGCAAGTGAGGAG | SaCas9 |
| 938 | DMPK 3 forward 19:45769926-45769952 | AGAGCAGCGCAAGTGAGGAG | SaCas9 |
| 939 | DMPK 3 forward 19:45769927-45769952 | GAGCAGCGCAAGTGAGGAG | SaCas9 |
| 940 | DMPK 3 forward 19:45769928-45769952 | AGCAGCGCAAGTGAGGAG | SaCas9 |
| 941 | DMPK 3 reverse 19:45769921-45769952 | GCCCCCCTCCTCACTTGCGCTGCTC | SaCas9 |
| 942 | DMPK 3 reverse 19:45769922-45769952 | CCCCCCTCCTCACTTGCGCTGCTC | SaCas9 |
| 943 | DMPK 3 reverse 19:45769923-45769952 | CCCCCTCCTCACTTGCGCTGCTC | SaCas9 |
| 944 | DMPK 3 reverse 19:45769924-45769952 | CCCCTCCTCACTTGCGCTGCTC | SaCas9 |
| 945 | DMPK 3 reverse 19:45769925-45769952 | CCCTCCTCACTTGCGCTGCTC | SaCas9 |
| 946 | DMPK 3 reverse 19:45769926-45769952 | CCTCCTCACTTGCGCTGCTC | SaCas9 |
| 947 | DMPK 3 reverse 19:45769927-45769952 | CTCCTCACTTGCGCTGCTC | SaCas9 |
| 948 | DMPK 3 reverse 19:45769928-45769952 | TCCTCACTTGCGCTGCTC | SaCas9 |
| 949 | DMPK 3 forward 19:45769927-45769958 | GAGCAGCGCAAGTGAGGAGGGGGGC | SaCas9 |
| 950 | DMPK 3 forward 19:45769928-45769958 | AGCAGCGCAAGTGAGGAGGGGGGC | SaCas9 |
| 951 | DMPK 3 forward 19:45769929-45769958 | GCAGCGCAAGTGAGGAGGGGGGC | SaCas9 |
| 952 | DMPK 3 forward 19:45769930-45769958 | CAGCGCAAGTGAGGAGGGGGGC | SaCas9 |
| 953 | DMPK 3 forward 19:45769931-45769958 | AGCGCAAGTGAGGAGGGGGGC | SaCas9 |
| 954 | DMPK 3 forward 19:45769932-45769958 | GCGCAAGTGAGGAGGGGGGC | SaCas9 |
| 955 | DMPK 3 forward 19:45769933-45769958 | CGCAAGTGAGGAGGGGGGC | SaCas9 |
| 956 | DMPK 3 forward 19:45769934-45769958 | GCAAGTGAGGAGGGGGGC | SaCas9 |
| 957 | DMPK 3 forward 19:45769928-45769959 | AGCAGCGCAAGTGAGGAGGGGGGCG | SaCas9 |
| 958 | DMPK 3 forward 19:45769929-45769959 | GCAGCGCAAGTGAGGAGGGGGGCG | SaCas9 |
| 959 | DMPK 3 forward 19:45769930-45769959 | CAGCGCAAGTGAGGAGGGGGGCG | SaCas9 |
| 960 | DMPK 3 forward 19:45769931-45769959 | AGCGCAAGTGAGGAGGGGGGCG | SaCas9 |
| 961 | DMPK 3 forward 19:45769932-45769959 | GCGCAAGTGAGGAGGGGGGCG | SaCas9 |
| 962 | DMPK 3 forward 19:45769933-45769959 | CGCAAGTGAGGAGGGGGGCG | SaCas9 |
| 963 | DMPK 3 forward 19:45769934-45769959 | GCAAGTGAGGAGGGGGGCG | SaCas9 |
| 964 | DMPK 3 forward 19:45769935-45769959 | CAAGTGAGGAGGGGGGCG | SaCas9 |
| 965 | DMPK 3 forward 19:45769936-45769967 | AAGTGAGGAGGGGGGCGCGGGATCC | SaCas9 |
| 966 | DMPK 3 forward 19:45769937-45769967 | AGTGAGGAGGGGGGCGCGGGATCC | SaCas9 |
| 967 | DMPK 3 forward 19:45769938-45769967 | GTGAGGAGGGGGGCGCGGGATCC | SaCas9 |
| 968 | DMPK 3 forward 19:45769939-45769967 | TGAGGAGGGGGGCGCGGGATCC | SaCas9 |
| 969 | DMPK 3 forward 19:45769940-45769967 | GAGGAGGGGGGCGCGGGATCC | SaCas9 |
| 970 | DMPK 3 forward 19:45769941-45769967 | AGGAGGGGGGCGCGGGATCC | SaCas9 |
| 971 | DMPK 3 forward 19:45769942-45769967 | GGAGGGGGGCGCGGGATCC | SaCas9 |
| 972 | DMPK 3 forward 19:45769943-45769967 | GAGGGGGGCGCGGGATCC | SaCas9 |
| 973 | DMPK 3 forward 19:45769944-45769975 | AGGGGGGCGCGGGATCCCCGAAAAA | SaCas9 |
| 974 | DMPK 3 forward 19:45769945-45769975 | GGGGGGCGCGGGATCCCCGAAAAA | SaCas9 |
| 975 | DMPK 3 forward 19:45769946-45769975 | GGGGGCGCGGGATCCCCGAAAAA | SaCas9 |
| 976 | DMPK 3 forward 19:45769947-45769975 | GGGGCGCGGGATCCCCGAAAAA | SaCas9 |
| 977 | DMPK 3 forward 19:45769948-45769975 | GGGCGCGGGATCCCCGAAAAA | SaCas9 |
| 978 | DMPK 3 forward 19:45769949-45769975 | GGCGCGGGATCCCCGAAAAA | SaCas9 |
| 979 | DMPK 3 forward 19:45769950-45769975 | GCGCGGGATCCCCGAAAAA | SaCas9 |
| 980 | DMPK 3 forward 19:45769951-45769975 | CGCGGGATCCCCGAAAAA | SaCas9 |
| 981 | DMPK 3 reverse 19:45769957-45769988 | TTGCTTTTGCCAAACCCGCTTTTTC | SaCas9 |
| 982 | DMPK 3 reverse 19:45769958-45769988 | TGCTTTTGCCAAACCCGCTTTTTC | SaCas9 |
| 983 | DMPK 3 reverse 19:45769959-45769988 | GCTTTTGCCAAACCCGCTTTTTC | SaCas9 |
| 984 | DMPK 3 reverse 19:45769960-45769988 | CTTTTGCCAAACCCGCTTTTTC | SaCas9 |
| 985 | DMPK 3 reverse 19:45769961-45769988 | TTTTGCCAAACCCGCTTTTTC | SaCas9 |
| 986 | DMPK 3 reverse 19:45769962-45769988 | TTTGCCAAACCCGCTTTTTC | SaCas9 |
| 987 | DMPK 3 reverse 19:45769963-45769988 | TTGCCAAACCCGCTTTTTC | SaCas9 |
| 988 | DMPK 3 reverse 19:45769964-45769988 | TGCCAAACCCGCTTTTTC | SaCas9 |
| 989 | DMPK 3 reverse 19:45769958-45769989 | TTTGCTTTTGCCAAACCCGCTTTTT | SaCas9 |
| 990 | DMPK 3 reverse 19:45769959-45769989 | TTGCTTTTGCCAAACCCGCTTTTT | SaCas9 |
| 991 | DMPK 3 reverse 19:45769960-45769989 | TGCTTTTGCCAAACCCGCTTTTT | SaCas9 |
| 992 | DMPK 3 reverse 19:45769961-45769989 | GCTTTTGCCAAACCCGCTTTTT | SaCas9 |
| 993 | DMPK 3 reverse 19:45769962-45769989 | CTTTTGCCAAACCCGCTTTTT | SaCas9 |
| 994 | DMPK 3 reverse 19:45769963-45769989 | TTTTGCCAAACCCGCTTTTT | SaCas9 |
| 995 | DMPK 3 reverse 19:45769964-45769989 | TTTGCCAAACCCGCTTTTT | SaCas9 |
| 996 | DMPK 3 reverse 19:45769965-45769989 | TTGCCAAACCCGCTTTTT | SaCas9 |
| 997 | DMPK 3 reverse 19:45769959-45769990 | ATTTGCTTTTGCCAAACCCGCTTTT | SaCas9 |
| 998 | DMPK 3 reverse 19:45769960-45769990 | TTTGCTTTTGCCAAACCCGCTTTT | SaCas9 |
| 999 | DMPK 3 reverse 19:45769961-45769990 | TTGCTTTTGCCAAACCCGCTTTT | SaCas9 |
| 1000 | DMPK 3 reverse 19:45769962-45769990 | TGCTTTTGCCAAACCCGCTTTT | SaCas9 |
| 1001 | DMPK 3 reverse 19:45769963-45769990 | GCTTTTGCCAAACCCGCTTTT | SaCas9 |
| 1002 | DMPK 3 reverse 19:45769964-45769990 | CTTTTGCCAAACCCGCTTTT | SaCas9 |
| 1003 | DMPK 3 reverse 19:45769965-45769990 | TTTTGCCAAACCCGCTTTT | SaCas9 |
| 1004 | DMPK 3 reverse 19:45769966-45769990 | TTTGCCAAACCCGCTTTT | SaCas9 |
| 1005 | DMPK 3 forward 19:45769968-45769999 | AGCGGGTTTGGCAAAAGCAAATTTC | SaCas9 |
| 1006 | DMPK 3 forward 19:45769969-45769999 | GCGGGTTTGGCAAAAGCAAATTTC | SaCas9 |
| 1007 | DMPK 3 forward 19:45769970-45769999 | CGGGTTTGGCAAAAGCAAATTTC | SaCas9 |
| 1008 | DMPK 3 forward 19:45769971-45769999 | GGGTTTGGCAAAAGCAAATTTC | SaCas9 |
| 1009 | DMPK 3 forward 19:45769972-45769999 | GGTTTGGCAAAAGCAAATTTC | SaCas9 |
| 1010 | DMPK 3 forward 19:45769973-45769999 | GTTTGGCAAAAGCAAATTTC | SaCas9 |
| 1011 | DMPK 3 forward 19:45769974-45769999 | TTTGGCAAAAGCAAATTTC | SaCas9 |
| 1012 | DMPK 3 forward 19:45769975-45769999 | TTGGCAAAAGCAAATTTC | SaCas9 |
| 1013 | DMPK 3 forward 19:45769981-45770012 | AAAGCAAATTTCCCGAGTAAGCAGG | SaCas9 |
| 1014 | DMPK 3 forward 19:45769982-45770012 | AAGCAAATTTCCCGAGTAAGCAGG | SaCas9 |
| 1015 | DMPK 3 forward 19:45769983-45770012 | AGCAAATTTCCCGAGTAAGCAGG | SaCas9 |
| 1016 | DMPK 3 forward 19:45769984-45770012 | GCAAATTTCCCGAGTAAGCAGG | SaCas9 |
| 1017 | DMPK 3 forward 19:45769985-45770012 | CAAATTTCCCGAGTAAGCAGG | SaCas9 |
| 1018 | DMPK 3 forward 19:45769986-45770012 | AAATTTCCCGAGTAAGCAGG | SaCas9 |
| 1019 | DMPK 3 forward 19:45769987-45770012 | AATTTCCCGAGTAAGCAGG | SaCas9 |
| 1020 | DMPK 3 forward 19:45769988-45770012 | ATTTCCCGAGTAAGCAGG | SaCas9 |
| 1021 | DMPK 3 reverse 19:45769989-45770020 | TGGCGCGATCTCTGCCTGCTTACTC | SaCas9 |
| 1022 | DMPK 3 reverse 19:45769990-45770020 | GGCGCGATCTCTGCCTGCTTACTC | SaCas9 |
| 1023 | DMPK 3 reverse 19:45769991-45770020 | GCGCGATCTCTGCCTGCTTACTC | SaCas9 |
| 1024 | DMPK 3 reverse 19:45769992-45770020 | CGCGATCTCTGCCTGCTTACTC | SaCas9 |
| 1025 | DMPK 3 reverse 19:45769993-45770020 | GCGATCTCTGCCTGCTTACTC | SaCas9 |
| 1026 | DMPK 3 reverse 19:45769994-45770020 | CGATCTCTGCCTGCTTACTC | SaCas9 |
| 1027 | DMPK 3 reverse 19:45769995-45770020 | GATCTCTGCCTGCTTACTC | SaCas9 |
| 1028 | DMPK 3 reverse 19:45769996-45770020 | ATCTCTGCCTGCTTACTC | SaCas9 |
| 1029 | DMPK 3 reverse 19:45769990-45770021 | CTGGCGCGATCTCTGCCTGCTTACT | SaCas9 |
| 1030 | DMPK 3 reverse 19:45769991-45770021 | TGGCGCGATCTCTGCCTGCTTACT | SaCas9 |
| 1031 | DMPK 3 reverse 19:45769992-45770021 | GGCGCGATCTCTGCCTGCTTACT | SaCas9 |
| 1032 | DMPK 3 reverse 19:45769993-45770021 | GCGCGATCTCTGCCTGCTTACT | SaCas9 |
| 1033 | DMPK 3 reverse 19:45769994-45770021 | CGCGATCTCTGCCTGCTTACT | SaCas9 |
| 1034 | DMPK 3 reverse 19:45769995-45770021 | GCGATCTCTGCCTGCTTACT | SaCas9 |
| 1035 | DMPK 3 reverse 19:45769996-45770021 | CGATCTCTGCCTGCTTACT | SaCas9 |
| 1036 | DMPK 3 reverse 19:45769997-45770021 | GATCTCTGCCTGCTTACT | SaCas9 |
| 1037 | DMPK 3 reverse 19:45769991-45770022 | TCTGGCGCGATCTCTGCCTGCTTAC | SaCas9 |
| 1038 | DMPK 3 reverse 19:45769992-45770022 | CTGGCGCGATCTCTGCCTGCTTAC | SaCas9 |
| 1039 | DMPK 3 reverse 19:45769993-45770022 | TGGCGCGATCTCTGCCTGCTTAC | SaCas9 |
| 1040 | DMPK 3 reverse 19:45769994-45770022 | GGCGCGATCTCTGCCTGCTTAC | SaCas9 |
| 1041 | DMPK 3 reverse 19:45769995-45770022 | GCGCGATCTCTGCCTGCTTAC | SaCas9 |
| 1042 | DMPK 3 reverse 19:45769996-45770022 | CGCGATCTCTGCCTGCTTAC | SaCas9 |
| 1043 | DMPK 3 reverse 19:45769997-45770022 | GCGATCTCTGCCTGCTTAC | SaCas9 |
| 1044 | DMPK 3 reverse 19:45769998-45770022 | CGATCTCTGCCTGCTTAC | SaCas9 |
| 1045 | DMPK 3 forward 19:45770004-45770035 | GGCAGAGATCGCGCCAGACGCTCCC | SaCas9 |
| 1046 | DMPK 3 forward 19:45770005-45770035 | GCAGAGATCGCGCCAGACGCTCCC | SaCas9 |
| 1047 | DMPK 3 forward 19:45770006-45770035 | CAGAGATCGCGCCAGACGCTCCC | SaCas9 |
| 1048 | DMPK 3 forward 19:45770007-45770035 | AGAGATCGCGCCAGACGCTCCC | SaCas9 |
| 1049 | DMPK 3 forward 19:45770008-45770035 | GAGATCGCGCCAGACGCTCCC | SaCas9 |
| 1050 | DMPK 3 forward 19:45770009-45770035 | AGATCGCGCCAGACGCTCCC | SaCas9 |
| 1051 | DMPK 3 forward 19:45770010-45770035 | GATCGCGCCAGACGCTCCC | SaCas9 |
| 1052 | DMPK 3 forward 19:45770011-45770035 | ATCGCGCCAGACGCTCCC | SaCas9 |
| 1053 | DMPK 3 forward 19:45770009-45770040 | AGATCGCGCCAGACGCTCCCCAGAG | SaCas9 |
| 1054 | DMPK 3 forward 19:45770010-45770040 | GATCGCGCCAGACGCTCCCCAGAG | SaCas9 |
| 1055 | DMPK 3 forward 19:45770011-45770040 | ATCGCGCCAGACGCTCCCCAGAG | SaCas9 |
| 1056 | DMPK 3 forward 19:45770012-45770040 | TCGCGCCAGACGCTCCCCAGAG | SaCas9 |
| 1057 | DMPK 3 forward 19:45770013-45770040 | CGCGCCAGACGCTCCCCAGAG | SaCas9 |
| 1058 | DMPK 3 forward 19:45770014-45770040 | GCGCCAGACGCTCCCCAGAG | SaCas9 |
| 1059 | DMPK 3 forward 19:45770015-45770040 | CGCCAGACGCTCCCCAGAG | SaCas9 |
| 1060 | DMPK 3 forward 19:45770016-45770040 | GCCAGACGCTCCCCAGAG | SaCas9 |
| 1061 | DMPK 3 reverse 19:45770023-45770054 | TTCTTGTGCATGACGCCCTGCTCTG | SaCas9 |
| 1062 | DMPK 3 reverse 19:45770024-45770054 | TCTTGTGCATGACGCCCTGCTCTG | SaCas9 |
| 1063 | DMPK 3 reverse 19:45770025-45770054 | CTTGTGCATGACGCCCTGCTCTG | SaCas9 |
| 1064 | DMPK 3 reverse 19:45770026-45770054 | TTGTGCATGACGCCCTGCTCTG | SaCas9 |
| 1065 | DMPK 3 reverse 19:45770027-45770054 | TGTGCATGACGCCCTGCTCTG | SaCas9 |
| 1066 | DMPK 3 reverse 19:45770028-45770054 | GTGCATGACGCCCTGCTCTG | SaCas9 |
| 1067 | DMPK 3 reverse 19:45770029-45770054 | TGCATGACGCCCTGCTCTG | SaCas9 |
| 1068 | DMPK 3 reverse 19:45770030-45770054 | GCATGACGCCCTGCTCTG | SaCas9 |
| 1069 | DMPK 3 forward 19:45770024-45770055 | CTCCCCAGAGCAGGGCGTCATGCAC | SaCas9 |
| 1070 | DMPK 3 forward 19:45770025-45770055 | TCCCCAGAGCAGGGCGTCATGCAC | SaCas9 |
| 1071 | DMPK 3 forward 19:45770026-45770055 | CCCCAGAGCAGGGCGTCATGCAC | SaCas9 |
| 1072 | DMPK 3 forward 19:45770027-45770055 | CCCAGAGCAGGGCGTCATGCAC | SaCas9 |
| 1073 | DMPK 3 forward 19:45770028-45770055 | CCAGAGCAGGGCGTCATGCAC | SaCas9 |
| 1074 | DMPK 3 forward 19:45770029-45770055 | CAGAGCAGGGCGTCATGCAC | SaCas9 |
| 1075 | DMPK 3 forward 19:45770030-45770055 | AGAGCAGGGCGTCATGCAC | SaCas9 |
| 1076 | DMPK 3 forward 19:45770031-45770055 | GAGCAGGGCGTCATGCAC | SaCas9 |
| 1077 | DMPK 3 reverse 19:45770024-45770055 | TTTCTTGTGCATGACGCCCTGCTCT | SaCas9 |
| 1078 | DMPK 3 reverse 19:45770025-45770055 | TTCTTGTGCATGACGCCCTGCTCT | SaCas9 |
| 1079 | DMPK 3 reverse 19:45770026-45770055 | TCTTGTGCATGACGCCCTGCTCT | SaCas9 |
| 1080 | DMPK 3 reverse 19:45770027-45770055 | CTTGTGCATGACGCCCTGCTCT | SaCas9 |
| 1081 | DMPK 3 reverse 19:45770028-45770055 | TTGTGCATGACGCCCTGCTCT | SaCas9 |
| 1082 | DMPK 3 reverse 19:45770029-45770055 | TGTGCATGACGCCCTGCTCT | SaCas9 |
| 1083 | DMPK 3 reverse 19:45770030-45770055 | GTGCATGACGCCCTGCTCT | SaCas9 |
| 1084 | DMPK 3 reverse 19:45770031-45770055 | TGCATGACGCCCTGCTCT | SaCas9 |
| 1085 | DMPK 3 reverse 19:45770025-45770056 | CTTTCTTGTGCATGACGCCCTGCTC | SaCas9 |
| 1086 | DMPK 3 reverse 19:45770026-45770056 | TTTCTTGTGCATGACGCCCTGCTC | SaCas9 |
| 1087 | DMPK 3 reverse 19:45770027-45770056 | TTCTTGTGCATGACGCCCTGCTC | SaCas9 |
| 1088 | DMPK 3 reverse 19:45770028-45770056 | TCTTGTGCATGACGCCCTGCTC | SaCas9 |
| 1089 | DMPK 3 reverse 19:45770029-45770056 | CTTGTGCATGACGCCCTGCTC | SaCas9 |
| 1090 | DMPK 3 reverse 19:45770030-45770056 | TTGTGCATGACGCCCTGCTC | SaCas9 |
| 1091 | DMPK 3 reverse 19:45770031-45770056 | TGTGCATGACGCCCTGCTC | SaCas9 |
| 1092 | DMPK 3 reverse 19:45770032-45770056 | GTGCATGACGCCCTGCTC | SaCas9 |
| 1093 | DMPK 3 reverse 19:45770026-45770057 | GCTTTCTTGTGCATGACGCCCTGCT | SaCas9 |
| 1094 | DMPK 3 reverse 19:45770027-45770057 | CTTTCTTGTGCATGACGCCCTGCT | SaCas9 |
| 1095 | DMPK 3 reverse 19:45770028-45770057 | TTTCTTGTGCATGACGCCCTGCT | SaCas9 |
| 1096 | DMPK 3 reverse 19:45770029-45770057 | TTCTTGTGCATGACGCCCTGCT | SaCas9 |
| 1097 | DMPK 3 reverse 19:45770030-45770057 | TCTTGTGCATGACGCCCTGCT | SaCas9 |
| 1098 | DMPK 3 reverse 19:45770031-45770057 | CTTGTGCATGACGCCCTGCT | SaCas9 |
| 1099 | DMPK 3 reverse 19:45770032-45770057 | TTGTGCATGACGCCCTGCT | SaCas9 |
| 1100 | DMPK 3 reverse 19:45770033-45770057 | TGTGCATGACGCCCTGCT | SaCas9 |
| 1101 | DMPK 3 forward 19:45770042-45770073 | CATGCACAAGAAAGCTTTGCACTTT | SaCas9 |
| 1102 | DMPK 3 forward 19:45770043-45770073 | ATGCACAAGAAAGCTTTGCACTTT | SaCas9 |
| 1103 | DMPK 3 forward 19:45770044-45770073 | TGCACAAGAAAGCTTTGCACTTT | SaCas9 |
| 1104 | DMPK 3 forward 19:45770045-45770073 | GCACAAGAAAGCTTTGCACTTT | SaCas9 |
| 1105 | DMPK 3 forward 19:45770046-45770073 | CACAAGAAAGCTTTGCACTTT | SaCas9 |
| 1106 | DMPK 3 forward 19:45770047-45770073 | ACAAGAAAGCTTTGCACTTT | SaCas9 |
| 1107 | DMPK 3 forward 19:45770048-45770073 | CAAGAAAGCTTTGCACTTT | SaCas9 |
| 1108 | DMPK 3 forward 19:45770049-45770073 | AAGAAAGCTTTGCACTTT | SaCas9 |
| 1109 | DMPK 3 forward 19:45770057-45770088 | TTTGCACTTTGCGAACCAACGATAG | SaCas9 |
| 1110 | DMPK 3 forward 19:45770058-45770088 | TTGCACTTTGCGAACCAACGATAG | SaCas9 |
| 1111 | DMPK 3 forward 19:45770059-45770088 | TGCACTTTGCGAACCAACGATAG | SaCas9 |
| 1112 | DMPK 3 forward 19:45770060-45770088 | GCACTTTGCGAACCAACGATAG | SaCas9 |
| 1113 | DMPK 3 forward 19:45770061-45770088 | CACTTTGCGAACCAACGATAG | SaCas9 |
| 1114 | DMPK 3 forward 19:45770062-45770088 | ACTTTGCGAACCAACGATAG | SaCas9 |
| 1115 | DMPK 3 forward 19:45770063-45770088 | CTTTGCGAACCAACGATAG | SaCas9 |
| 1116 | DMPK 3 forward 19:45770064-45770088 | TTTGCGAACCAACGATAG | SaCas9 |
| 1117 | DMPK 3 forward 19:45770058-45770089 | TTGCACTTTGCGAACCAACGATAGG | SaCas9 |
| 1118 | DMPK 3 forward 19:45770059-45770089 | TGCACTTTGCGAACCAACGATAGG | SaCas9 |
| 1119 | DMPK 3 forward 19:45770060-45770089 | GCACTTTGCGAACCAACGATAGG | SaCas9 |
| 1120 | DMPK 3 forward 19:45770061-45770089 | CACTTTGCGAACCAACGATAGG | SaCas9 |
| 1121 | DMPK 3 forward 19:45770062-45770089 | ACTTTGCGAACCAACGATAGG | SaCas9 |
| 1122 | DMPK 3 forward 19:45770063-45770089 | CTTTGCGAACCAACGATAGG | SaCas9 |
| 1123 | DMPK 3 forward 19:45770064-45770089 | TTTGCGAACCAACGATAGG | SaCas9 |
| 1124 | DMPK 3 forward 19:45770065-45770089 | TTGCGAACCAACGATAGG | SaCas9 |
| 1125 | DMPK 3 forward 19:45770059-45770090 | TGCACTTTGCGAACCAACGATAGGT | SaCas9 |
| 1126 | DMPK 3 forward 19:45770060-45770090 | GCACTTTGCGAACCAACGATAGGT | SaCas9 |
| 1127 | DMPK 3 forward 19:45770061-45770090 | CACTTTGCGAACCAACGATAGGT | SaCas9 |
| 1128 | DMPK 3 forward 19:45770062-45770090 | ACTTTGCGAACCAACGATAGGT | SaCas9 |
| 1129 | DMPK 3 forward 19:45770063-45770090 | CTTTGCGAACCAACGATAGGT | SaCas9 |
| 1130 | DMPK 3 forward 19:45770064-45770090 | TTTGCGAACCAACGATAGGT | SaCas9 |
| 1131 | DMPK 3 forward 19:45770065-45770090 | TTGCGAACCAACGATAGGT | SaCas9 |
| 1132 | DMPK 3 forward 19:45770066-45770090 | TGCGAACCAACGATAGGT | SaCas9 |
| 1133 | DMPK 3 forward 19:45770067-45770098 | GCGAACCAACGATAGGTGGGGGTGC | SaCas9 |
| 1134 | DMPK 3 forward 19:45770068-45770098 | CGAACCAACGATAGGTGGGGGTGC | SaCas9 |
| 1135 | DMPK 3 forward 19:45770069-45770098 | GAACCAACGATAGGTGGGGGTGC | SaCas9 |
| 1136 | DMPK 3 forward 19:45770070-45770098 | AACCAACGATAGGTGGGGGTGC | SaCas9 |
| 1137 | DMPK 3 forward 19:45770071-45770098 | ACCAACGATAGGTGGGGGTGC | SaCas9 |
| 1138 | DMPK 3 forward 19:45770072-45770098 | CCAACGATAGGTGGGGGTGC | SaCas9 |
| 1139 | DMPK 3 forward 19:45770073-45770098 | CAACGATAGGTGGGGGTGC | SaCas9 |
| 1140 | DMPK 3 forward 19:45770074-45770098 | AACGATAGGTGGGGGTGC | SaCas9 |
| 1141 | DMPK 3 forward 19:45770068-45770099 | CGAACCAACGATAGGTGGGGGTGCG | SaCas9 |
| 1142 | DMPK 3 forward 19:45770069-45770099 | GAACCAACGATAGGTGGGGGTGCG | SaCas9 |
| 1143 | DMPK 3 forward 19:45770070-45770099 | AACCAACGATAGGTGGGGGTGCG | SaCas9 |
| 1144 | DMPK 3 forward 19:45770071-45770099 | ACCAACGATAGGTGGGGGTGCG | SaCas9 |
| 1145 | DMPK 3 forward 19:45770072-45770099 | CCAACGATAGGTGGGGGTGCG | SaCas9 |
| 1146 | DMPK 3 forward 19:45770073-45770099 | CAACGATAGGTGGGGGTGCG | SaCas9 |
| 1147 | DMPK 3 forward 19:45770074-45770099 | AACGATAGGTGGGGGTGCG | SaCas9 |
| 1148 | DMPK 3 forward 19:45770075-45770099 | ACGATAGGTGGGGGTGCG | SaCas9 |
| 1149 | DMPK 3 forward 19:45770070-45770101 | AACCAACGATAGGTGGGGGTGCGTG | SaCas9 |
| 1150 | DMPK 3 forward 19:45770071-45770101 | ACCAACGATAGGTGGGGGTGCGTG | SaCas9 |
| 1151 | DMPK 3 forward 19:45770072-45770101 | CCAACGATAGGTGGGGGTGCGTG | SaCas9 |
| 1152 | DMPK 3 forward 19:45770073-45770101 | CAACGATAGGTGGGGGTGCGTG | SaCas9 |
| 1153 | DMPK 3 forward 19:45770074-45770101 | AACGATAGGTGGGGGTGCGTG | SaCas9 |
| 1154 | DMPK 3 forward 19:45770075-45770101 | ACGATAGGTGGGGGTGCGTG | SaCas9 |
| 1155 | DMPK 3 forward 19:45770076-45770101 | CGATAGGTGGGGGTGCGTG | SaCas9 |
| 1156 | DMPK 3 forward 19:45770077-45770101 | GATAGGTGGGGGTGCGTG | SaCas9 |
| 1157 | DMPK 3 forward 19:45770074-45770105 | AACGATAGGTGGGGGTGCGTGGAGG | SaCas9 |
| 1158 | DMPK 3 forward 19:45770075-45770105 | ACGATAGGTGGGGGTGCGTGGAGG | SaCas9 |
| 1159 | DMPK 3 forward 19:45770076-45770105 | CGATAGGTGGGGGTGCGTGGAGG | SaCas9 |
| 1160 | DMPK 3 forward 19:45770077-45770105 | GATAGGTGGGGGTGCGTGGAGG | SaCas9 |
| 1161 | DMPK 3 forward 19:45770078-45770105 | ATAGGTGGGGGTGCGTGGAGG | SaCas9 |
| 1162 | DMPK 3 forward 19:45770079-45770105 | TAGGTGGGGGTGCGTGGAGG | SaCas9 |
| 1163 | DMPK 3 forward 19:45770080-45770105 | AGGTGGGGGTGCGTGGAGG | SaCas9 |
| 1164 | DMPK 3 forward 19:45770081-45770105 | GGTGGGGGTGCGTGGAGG | SaCas9 |
| 1165 | DMPK 3 forward 19:45770075-45770106 | ACGATAGGTGGGGGTGCGTGGAGGA | SaCas9 |
| 1166 | DMPK 3 forward 19:45770076-45770106 | CGATAGGTGGGGGTGCGTGGAGGA | SaCas9 |
| 1167 | DMPK 3 forward 19:45770077-45770106 | GATAGGTGGGGGTGCGTGGAGGA | SaCas9 |
| 1168 | DMPK 3 forward 19:45770078-45770106 | ATAGGTGGGGGTGCGTGGAGGA | SaCas9 |
| 1169 | DMPK 3 forward 19:45770079-45770106 | TAGGTGGGGGTGCGTGGAGGA | SaCas9 |
| 1170 | DMPK 3 forward 19:45770080-45770106 | AGGTGGGGGTGCGTGGAGGA | SaCas9 |
| 1171 | DMPK 3 forward 19:45770081-45770106 | GGTGGGGGTGCGTGGAGGA | SaCas9 |
| 1172 | DMPK 3 forward 19:45770082-45770106 | GTGGGGGTGCGTGGAGGA | SaCas9 |
| 1173 | DMPK 3 forward 19:45770081-45770112 | GGTGGGGGTGCGTGGAGGATGGAAC | SaCas9 |
| 1174 | DMPK 3 forward 19:45770082-45770112 | GTGGGGGTGCGTGGAGGATGGAAC | SaCas9 |
| 1175 | DMPK 3 forward 19:45770083-45770112 | TGGGGGTGCGTGGAGGATGGAAC | SaCas9 |
| 1176 | DMPK 3 forward 19:45770084-45770112 | GGGGGTGCGTGGAGGATGGAAC | SaCas9 |
| 1177 | DMPK 3 forward 19:45770085-45770112 | GGGGTGCGTGGAGGATGGAAC | SaCas9 |
| 1178 | DMPK 3 forward 19:45770086-45770112 | GGGTGCGTGGAGGATGGAAC | SaCas9 |
| 1179 | DMPK 3 forward 19:45770087-45770112 | GGTGCGTGGAGGATGGAAC | SaCas9 |
| 1180 | DMPK 3 forward 19:45770088-45770112 | GTGCGTGGAGGATGGAAC | SaCas9 |
| 1181 | DMPK 3 reverse 19:45770113-45770144 | ACTGCAGGCCTGGGAAGGCAGCAAG | SaCas9 |
| 1182 | DMPK 3 reverse 19:45770114-45770144 | CTGCAGGCCTGGGAAGGCAGCAAG | SaCas9 |
| 1183 | DMPK 3 reverse 19:45770115-45770144 | TGCAGGCCTGGGAAGGCAGCAAG | SaCas9 |
| 1184 | DMPK 3 reverse 19:45770116-45770144 | GCAGGCCTGGGAAGGCAGCAAG | SaCas9 |
| 1185 | DMPK 3 reverse 19:45770117-45770144 | CAGGCCTGGGAAGGCAGCAAG | SaCas9 |
| 1186 | DMPK 3 reverse 19:45770118-45770144 | AGGCCTGGGAAGGCAGCAAG | SaCas9 |
| 1187 | DMPK 3 reverse 19:45770119-45770144 | GGCCTGGGAAGGCAGCAAG | SaCas9 |
| 1188 | DMPK 3 reverse 19:45770120-45770144 | GCCTGGGAAGGCAGCAAG | SaCas9 |
| 1189 | DMPK 3 reverse 19:45770127-45770158 | ACGTGGATGGGCAAACTGCAGGCCT | SaCas9 |
| 1190 | DMPK 3 reverse 19:45770128-45770158 | CGTGGATGGGCAAACTGCAGGCCT | SaCas9 |
| 1191 | DMPK 3 reverse 19:45770129-45770158 | GTGGATGGGCAAACTGCAGGCCT | SaCas9 |
| 1192 | DMPK 3 reverse 19:45770130-45770158 | TGGATGGGCAAACTGCAGGCCT | SaCas9 |
| 1193 | DMPK 3 reverse 19:45770131-45770158 | GGATGGGCAAACTGCAGGCCT | SaCas9 |
| 1194 | DMPK 3 reverse 19:45770132-45770158 | GATGGGCAAACTGCAGGCCT | SaCas9 |
| 1195 | DMPK 3 reverse 19:45770133-45770158 | ATGGGCAAACTGCAGGCCT | SaCas9 |
| 1196 | DMPK 3 reverse 19:45770134-45770158 | TGGGCAAACTGCAGGCCT | SaCas9 |
| 1197 | DMPK 3 reverse 19:45770128-45770159 | GACGTGGATGGGCAAACTGCAGGCC | SaCas9 |
| 1198 | DMPK 3 reverse 19:45770129-45770159 | ACGTGGATGGGCAAACTGCAGGCC | SaCas9 |
| 1199 | DMPK 3 reverse 19:45770130-45770159 | CGTGGATGGGCAAACTGCAGGCC | SaCas9 |
| 1200 | DMPK 3 reverse 19:45770131-45770159 | GTGGATGGGCAAACTGCAGGCC | SaCas9 |
| 1201 | DMPK 3 reverse 19:45770132-45770159 | TGGATGGGCAAACTGCAGGCC | SaCas9 |
| 1202 | DMPK 3 reverse 19:45770133-45770159 | GGATGGGCAAACTGCAGGCC | SaCas9 |
| 1203 | DMPK 3 reverse 19:45770134-45770159 | GATGGGCAAACTGCAGGCC | SaCas9 |
| 1204 | DMPK 3 reverse 19:45770135-45770159 | ATGGGCAAACTGCAGGCC | SaCas9 |
| 1205 | DMPK 3 reverse 19:45770129-45770160 | TGACGTGGATGGGCAAACTGCAGGC | SaCas9 |
| 1206 | DMPK 3 reverse 19:45770130-45770160 | GACGTGGATGGGCAAACTGCAGGC | SaCas9 |
| 1207 | DMPK 3 reverse 19:45770131-45770160 | ACGTGGATGGGCAAACTGCAGGC | SaCas9 |
| 1208 | DMPK 3 reverse 19:45770132-45770160 | CGTGGATGGGCAAACTGCAGGC | SaCas9 |
| 1209 | DMPK 3 reverse 19:45770133-45770160 | GTGGATGGGCAAACTGCAGGC | SaCas9 |
| 1210 | DMPK 3 reverse 19:45770134-45770160 | TGGATGGGCAAACTGCAGGC | SaCas9 |
| 1211 | DMPK 3 reverse 19:45770135-45770160 | GGATGGGCAAACTGCAGGC | SaCas9 |
| 1212 | DMPK 3 reverse 19:45770136-45770160 | GATGGGCAAACTGCAGGC | SaCas9 |
| 1213 | DMPK 3 forward 19:45770133-45770164 | AGGCCTGCAGTTTGCCCATCCACGT | SaCas9 |
| 1214 | DMPK 3 forward 19:45770134-45770164 | GGCCTGCAGTTTGCCCATCCACGT | SaCas9 |
| 1215 | DMPK 3 forward 19:45770135-45770164 | GCCTGCAGTTTGCCCATCCACGT | SaCas9 |
| 1216 | DMPK 3 forward 19:45770136-45770164 | CCTGCAGTTTGCCCATCCACGT | SaCas9 |
| 1217 | DMPK 3 forward 19:45770137-45770164 | CTGCAGTTTGCCCATCCACGT | SaCas9 |
| 1218 | DMPK 3 forward 19:45770138-45770164 | TGCAGTTTGCCCATCCACGT | SaCas9 |
| 1219 | DMPK 3 forward 19:45770139-45770164 | GCAGTTTGCCCATCCACGT | SaCas9 |
| 1220 | DMPK 3 forward 19:45770140-45770164 | CAGTTTGCCCATCCACGT | SaCas9 |
| 1221 | DMPK 3 reverse 19:45770146-45770177 | CGGCCAGGCTGAGGCCCTGACGTGG | SaCas9 |
| 1222 | DMPK 3 reverse 19:45770147-45770177 | GGCCAGGCTGAGGCCCTGACGTGG | SaCas9 |
| 1223 | DMPK 3 reverse 19:45770148-45770177 | GCCAGGCTGAGGCCCTGACGTGG | SaCas9 |
| 1224 | DMPK 3 reverse 19:45770149-45770177 | CCAGGCTGAGGCCCTGACGTGG | SaCas9 |
| 1225 | DMPK 3 reverse 19:45770150-45770177 | CAGGCTGAGGCCCTGACGTGG | SaCas9 |
| 1226 | DMPK 3 reverse 19:45770151-45770177 | AGGCTGAGGCCCTGACGTGG | SaCas9 |
| 1227 | DMPK 3 reverse 19:45770152-45770177 | GGCTGAGGCCCTGACGTGG | SaCas9 |
| 1228 | DMPK 3 reverse 19:45770153-45770177 | GCTGAGGCCCTGACGTGG | SaCas9 |
| 1229 | DMPK 3 forward 19:45770149-45770180 | CATCCACGTCAGGGCCTCAGCCTGG | SaCas9 |
| 1230 | DMPK 3 forward 19:45770150-45770180 | ATCCACGTCAGGGCCTCAGCCTGG | SaCas9 |
| 1231 | DMPK 3 forward 19:45770151-45770180 | TCCACGTCAGGGCCTCAGCCTGG | SaCas9 |
| 1232 | DMPK 3 forward 19:45770152-45770180 | CCACGTCAGGGCCTCAGCCTGG | SaCas9 |
| 1233 | DMPK 3 forward 19:45770153-45770180 | CACGTCAGGGCCTCAGCCTGG | SaCas9 |
| 1234 | DMPK 3 forward 19:45770154-45770180 | ACGTCAGGGCCTCAGCCTGG | SaCas9 |
| 1235 | DMPK 3 forward 19:45770155-45770180 | CGTCAGGGCCTCAGCCTGG | SaCas9 |
| 1236 | DMPK 3 forward 19:45770156-45770180 | GTCAGGGCCTCAGCCTGG | SaCas9 |
| 1237 | DMPK 3 reverse 19:45770150-45770181 | CTTTCGGCCAGGCTGAGGCCCTGAC | SaCas9 |
| 1238 | DMPK 3 reverse 19:45770151-45770181 | TTTCGGCCAGGCTGAGGCCCTGAC | SaCas9 |
| 1239 | DMPK 3 reverse 19:45770152-45770181 | TTCGGCCAGGCTGAGGCCCTGAC | SaCas9 |
| 1240 | DMPK 3 reverse 19:45770153-45770181 | TCGGCCAGGCTGAGGCCCTGAC | SaCas9 |
| 1241 | DMPK 3 reverse 19:45770154-45770181 | CGGCCAGGCTGAGGCCCTGAC | SaCas9 |
| 1242 | DMPK 3 reverse 19:45770155-45770181 | GGCCAGGCTGAGGCCCTGAC | SaCas9 |
| 1243 | DMPK 3 reverse 19:45770156-45770181 | GCCAGGCTGAGGCCCTGAC | SaCas9 |
| 1244 | DMPK 3 reverse 19:45770157-45770181 | CCAGGCTGAGGCCCTGAC | SaCas9 |
| 1245 | DMPK 3 forward 19:45770153-45770184 | CACGTCAGGGCCTCAGCCTGGCCGA | SaCas9 |
| 1246 | DMPK 3 forward 19:45770154-45770184 | ACGTCAGGGCCTCAGCCTGGCCGA | SaCas9 |
| 1247 | DMPK 3 forward 19:45770155-45770184 | CGTCAGGGCCTCAGCCTGGCCGA | SaCas9 |
| 1248 | DMPK 3 forward 19:45770156-45770184 | GTCAGGGCCTCAGCCTGGCCGA | SaCas9 |
| 1249 | DMPK 3 forward 19:45770157-45770184 | TCAGGGCCTCAGCCTGGCCGA | SaCas9 |
| 1250 | DMPK 3 forward 19:45770158-45770184 | CAGGGCCTCAGCCTGGCCGA | SaCas9 |
| 1251 | DMPK 3 forward 19:45770159-45770184 | AGGGCCTCAGCCTGGCCGA | SaCas9 |
| 1252 | DMPK 3 forward 19:45770160-45770184 | GGGCCTCAGCCTGGCCGA | SaCas9 |
| 1253 | DMPK 3 forward 19:45770157-45770188 | TCAGGGCCTCAGCCTGGCCGAAAGA | SaCas9 |
| 1254 | DMPK 3 forward 19:45770158-45770188 | CAGGGCCTCAGCCTGGCCGAAAGA | SaCas9 |
| 1255 | DMPK 3 forward 19:45770159-45770188 | AGGGCCTCAGCCTGGCCGAAAGA | SaCas9 |
| 1256 | DMPK 3 forward 19:45770160-45770188 | GGGCCTCAGCCTGGCCGAAAGA | SaCas9 |
| 1257 | DMPK 3 forward 19:45770161-45770188 | GGCCTCAGCCTGGCCGAAAGA | SaCas9 |
| 1258 | DMPK 3 forward 19:45770162-45770188 | GCCTCAGCCTGGCCGAAAGA | SaCas9 |
| 1259 | DMPK 3 forward 19:45770163-45770188 | CCTCAGCCTGGCCGAAAGA | SaCas9 |
| 1260 | DMPK 3 forward 19:45770164-45770188 | CTCAGCCTGGCCGAAAGA | SaCas9 |
| 1261 | DMPK 3 reverse 19:45770163-45770194 | AGACCATTTCTTTCTTTCGGCCAGG | SaCas9 |
| 1262 | DMPK 3 reverse 19:45770164-45770194 | GACCATTTCTTTCTTTCGGCCAGG | SaCas9 |
| 1263 | DMPK 3 reverse 19:45770165-45770194 | ACCATTTCTTTCTTTCGGCCAGG | SaCas9 |
| 1264 | DMPK 3 reverse 19:45770166-45770194 | CCATTTCTTTCTTTCGGCCAGG | SaCas9 |
| 1265 | DMPK 3 reverse 19:45770167-45770194 | CATTTCTTTCTTTCGGCCAGG | SaCas9 |
| 1266 | DMPK 3 reverse 19:45770168-45770194 | ATTTCTTTCTTTCGGCCAGG | SaCas9 |
| 1267 | DMPK 3 reverse 19:45770169-45770194 | TTTCTTTCTTTCGGCCAGG | SaCas9 |
| 1268 | DMPK 3 reverse 19:45770170-45770194 | TTCTTTCTTTCGGCCAGG | SaCas9 |
| 1269 | DMPK 3 reverse 19:45770197-45770228 | CTGCTGCTGCTGCTGCTGCTGCTGG | SaCas9 |
| 1270 | DMPK 3 reverse 19:45770198-45770228 | TGCTGCTGCTGCTGCTGCTGCTGG | SaCas9 |
| 1271 | DMPK 3 reverse 19:45770199-45770228 | GCTGCTGCTGCTGCTGCTGCTGG | SaCas9 |
| 1272 | DMPK 3 reverse 19:45770200-45770228 | CTGCTGCTGCTGCTGCTGCTGG | SaCas9 |
| 1273 | DMPK 3 reverse 19:45770201-45770228 | TGCTGCTGCTGCTGCTGCTGG | SaCas9 |
| 1274 | DMPK 3 reverse 19:45770202-45770228 | GCTGCTGCTGCTGCTGCTGG | SaCas9 |
| 1275 | DMPK 3 reverse 19:45770203-45770228 | CTGCTGCTGCTGCTGCTGG | SaCas9 |
| 1276 | DMPK 3 reverse 19:45770204-45770228 | TGCTGCTGCTGCTGCTGG | SaCas9 |
| 1277 | DMPK 3 reverse 19:45770198-45770229 | GCTGCTGCTGCTGCTGCTGCTGCTG | SaCas9 |
| 1278 | DMPK 3 reverse 19:45770199-45770229 | CTGCTGCTGCTGCTGCTGCTGCTG | SaCas9 |
| 1279 | DMPK 3 reverse 19:45770200-45770229 | TGCTGCTGCTGCTGCTGCTGCTG | SaCas9 |
| 1280 | DMPK 3 reverse 19:45770201-45770229 | GCTGCTGCTGCTGCTGCTGCTG | SaCas9 |
| 1281 | DMPK 3 reverse 19:45770202-45770229 | CTGCTGCTGCTGCTGCTGCTG | SaCas9 |
| 1282 | DMPK 3 reverse 19:45770203-45770229 | TGCTGCTGCTGCTGCTGCTG | SaCas9 |
| 1283 | DMPK 3 reverse 19:45770204-45770229 | GCTGCTGCTGCTGCTGCTG | SaCas9 |
| 1284 | DMPK 3 reverse 19:45770205-45770229 | CTGCTGCTGCTGCTGCTG | SaCas9 |
| 1285 | DMPK 3 reverse 19:45770199-45770230 | TGCTGCTGCTGCTGCTGCTGCTGCT | SaCas9 |
| 1286 | DMPK 3 reverse 19:45770200-45770230 | GCTGCTGCTGCTGCTGCTGCTGCT | SaCas9 |
| 1287 | DMPK 3 reverse 19:45770201-45770230 | CTGCTGCTGCTGCTGCTGCTGCT | SaCas9 |
| 1288 | DMPK 3 reverse 19:45770202-45770230 | TGCTGCTGCTGCTGCTGCTGCT | SaCas9 |
| 1289 | DMPK 3 reverse 19:45770203-45770230 | GCTGCTGCTGCTGCTGCTGCT | SaCas9 |
| 1290 | DMPK 3 reverse 19:45770204-45770230 | CTGCTGCTGCTGCTGCTGCT | SaCas9 |
| 1291 | DMPK 3 reverse 19:45770205-45770230 | TGCTGCTGCTGCTGCTGCT | SaCas9 |
| 1292 | DMPK 3 reverse 19:45770206-45770230 | GCTGCTGCTGCTGCTGCT | SaCas9 |
| 1293 | DMPK 3 reverse 19:45770200-45770231 | CTGCTGCTGCTGCTGCTGCTGCTGC | SaCas9 |
| 1294 | DMPK 3 reverse 19:45770201-45770231 | TGCTGCTGCTGCTGCTGCTGCTGC | SaCas9 |
| 1295 | DMPK 3 reverse 19:45770202-45770231 | GCTGCTGCTGCTGCTGCTGCTGC | SaCas9 |
| 1296 | DMPK 3 reverse 19:45770203-45770231 | CTGCTGCTGCTGCTGCTGCTGC | SaCas9 |
| 1297 | DMPK 3 reverse 19:45770204-45770231 | TGCTGCTGCTGCTGCTGCTGC | SaCas9 |
| 1298 | DMPK 3 reverse 19:45770205-45770231 | GCTGCTGCTGCTGCTGCTGC | SaCas9 |
| 1299 | DMPK 3 reverse 19:45770206-45770231 | CTGCTGCTGCTGCTGCTGC | SaCas9 |
| 1300 | DMPK 3 reverse 19:45770207-45770231 | TGCTGCTGCTGCTGCTGC | SaCas9 |
| 1301 | DMPK 3 reverse 19:45770201-45770232 | GCTGCTGCTGCTGCTGCTGCTGCTG | SaCas9 |
| 1302 | DMPK 3 reverse 19:45770202-45770232 | CTGCTGCTGCTGCTGCTGCTGCTG | SaCas9 |
| 1303 | DMPK 3 reverse 19:45770203-45770232 | TGCTGCTGCTGCTGCTGCTGCTG | SaCas9 |
| 1304 | DMPK 3 reverse 19:45770204-45770232 | GCTGCTGCTGCTGCTGCTGCTG | SaCas9 |
| 1305 | DMPK 3 reverse 19:45770205-45770232 | CTGCTGCTGCTGCTGCTGCTG | SaCas9 |
| 1306 | DMPK 3 reverse 19:45770206-45770232 | TGCTGCTGCTGCTGCTGCTG | SaCas9 |
| 1307 | DMPK 3 reverse 19:45770207-45770232 | GCTGCTGCTGCTGCTGCTG | SaCas9 |
| 1308 | DMPK 3 reverse 19:45770208-45770232 | CTGCTGCTGCTGCTGCTG | SaCas9 |
| 1309 | DMPK 3 forward 19:45769697-45769725 | ACACTGTGGAGTCCAGAGCTTTGGG | SpCas9 |
| 1310 | DMPK 3 forward 19:45769698-45769725 | CACTGTGGAGTCCAGAGCTTTGGG | SpCas9 |
| 1311 | DMPK 3 forward 19:45769699-45769725 | ACTGTGGAGTCCAGAGCTTTGGG | SpCas9 |
| 1312 | DMPK 3 forward 19:45769700-45769725 | CTGTGGAGTCCAGAGCTTTGGG | SpCas9 |
| 1313 | DMPK 3 forward 19:45769701-45769725 | TGTGGAGTCCAGAGCTTTGGG | SpCas9 |
| 1314 | DMPK 3 forward 19:45769702-45769725 | GTGGAGTCCAGAGCTTTGGG | SpCas9 |
| 1315 | DMPK 3 forward 19:45769703-45769725 | TGGAGTCCAGAGCTTTGGG | SpCas9 |
| 1316 | DMPK 3 forward 19:45769704-45769725 | GGAGTCCAGAGCTTTGGG | SpCas9 |
| 1317 | DMPK 3 forward 19:45769701-45769729 | TGTGGAGTCCAGAGCTTTGGGCAGA | SpCas9 |
| 1318 | DMPK 3 forward 19:45769702-45769729 | GTGGAGTCCAGAGCTTTGGGCAGA | SpCas9 |
| 1319 | DMPK 3 forward 19:45769703-45769729 | TGGAGTCCAGAGCTTTGGGCAGA | SpCas9 |
| 1320 | DMPK 3 forward 19:45769704-45769729 | GGAGTCCAGAGCTTTGGGCAGA | SpCas9 |
| 1321 | DMPK 3 forward 19:45769705-45769729 | GAGTCCAGAGCTTTGGGCAGA | SpCas9 |
| 1322 | DMPK 3 forward 19:45769706-45769729 | AGTCCAGAGCTTTGGGCAGA | SpCas9 |
| 1323 | DMPK 3 forward 19:45769707-45769729 | GTCCAGAGCTTTGGGCAGA | SpCas9 |
| 1324 | DMPK 3 forward 19:45769708-45769729 | TCCAGAGCTTTGGGCAGA | SpCas9 |
| 1325 | DMPK 3 forward 19:45769703-45769731 | TGGAGTCCAGAGCTTTGGGCAGATG | SpCas9 |
| 1326 | DMPK 3 forward 19:45769704-45769731 | GGAGTCCAGAGCTTTGGGCAGATG | SpCas9 |
| 1327 | DMPK 3 forward 19:45769705-45769731 | GAGTCCAGAGCTTTGGGCAGATG | SpCas9 |
| 1328 | DMPK 3 forward 19:45769706-45769731 | AGTCCAGAGCTTTGGGCAGATG | SpCas9 |
| 1329 | DMPK 3 forward 19:45769707-45769731 | GTCCAGAGCTTTGGGCAGATG | SpCas9 |
| 1330 | DMPK 3 forward 19:45769708-45769731 | TCCAGAGCTTTGGGCAGATG | SpCas9 |
| 1331 | DMPK 3 forward 19:45769709-45769731 | CCAGAGCTTTGGGCAGATG | SpCas9 |
| 1332 | DMPK 3 forward 19:45769710-45769731 | CAGAGCTTTGGGCAGATG | SpCas9 |
| 1333 | DMPK 3 forward 19:45769704-45769732 | GGAGTCCAGAGCTTTGGGCAGATGG | SpCas9 |
| 1334 | DMPK 3 forward 19:45769705-45769732 | GAGTCCAGAGCTTTGGGCAGATGG | SpCas9 |
| 1335 | DMPK 3 forward 19:45769706-45769732 | AGTCCAGAGCTTTGGGCAGATGG | SpCas9 |
| 1336 | DMPK 3 forward 19:45769707-45769732 | GTCCAGAGCTTTGGGCAGATGG | SpCas9 |
| 1337 | DMPK 3 forward 19:45769708-45769732 | TCCAGAGCTTTGGGCAGATGG | SpCas9 |
| 1338 | DMPK 3 forward 19:45769709-45769732 | CCAGAGCTTTGGGCAGATGG | SpCas9 |
| 1339 | DMPK 3 forward 19:45769710-45769732 | CAGAGCTTTGGGCAGATGG | SpCas9 |
| 1340 | DMPK 3 forward 19:45769711-45769732 | AGAGCTTTGGGCAGATGG | SpCas9 |
| 1341 | DMPK 3 forward 19:45769705-45769733 | GAGTCCAGAGCTTTGGGCAGATGGA | SpCas9 |
| 1342 | DMPK 3 forward 19:45769706-45769733 | AGTCCAGAGCTTTGGGCAGATGGA | SpCas9 |
| 1343 | DMPK 3 forward 19:45769707-45769733 | GTCCAGAGCTTTGGGCAGATGGA | SpCas9 |
| 1344 | DMPK 3 forward 19:45769708-45769733 | TCCAGAGCTTTGGGCAGATGGA | SpCas9 |
| 1345 | DMPK 3 forward 19:45769709-45769733 | CCAGAGCTTTGGGCAGATGGA | SpCas9 |
| 1346 | DMPK 3 forward 19:45769710-45769733 | CAGAGCTTTGGGCAGATGGA | SpCas9 |
| 1347 | DMPK 3 forward 19:45769711-45769733 | AGAGCTTTGGGCAGATGGA | SpCas9 |
| 1348 | DMPK 3 forward 19:45769712-45769733 | GAGCTTTGGGCAGATGGA | SpCas9 |
| 1349 | DMPK 3 reverse 19:45769715-45769743 | GAATAAAAGGCCCTCCATCTGCCCA | SpCas9 |
| 1350 | DMPK 3 reverse 19:45769716-45769743 | AATAAAAGGCCCTCCATCTGCCCA | SpCas9 |
| 1351 | DMPK 3 reverse 19:45769717-45769743 | ATAAAAGGCCCTCCATCTGCCCA | SpCas9 |
| 1352 | DMPK 3 reverse 19:45769718-45769743 | TAAAAGGCCCTCCATCTGCCCA | SpCas9 |
| 1353 | DMPK 3 reverse 19:45769719-45769743 | AAAAGGCCCTCCATCTGCCCA | SpCas9 |
| 1354 | DMPK 3 reverse 19:45769720-45769743 | AAAGGCCCTCCATCTGCCCA | SpCas9 |
| 1355 | DMPK 3 reverse 19:45769721-45769743 | AAGGCCCTCCATCTGCCCA | SpCas9 |
| 1356 | DMPK 3 reverse 19:45769722-45769743 | AGGCCCTCCATCTGCCCA | SpCas9 |
| 1357 | DMPK 3 forward 19:45769720-45769748 | GGCAGATGGAGGGCCTTTTATTCGC | SpCas9 |
| 1358 | DMPK 3 forward 19:45769721-45769748 | GCAGATGGAGGGCCTTTTATTCGC | SpCas9 |
| 1359 | DMPK 3 forward 19:45769722-45769748 | CAGATGGAGGGCCTTTTATTCGC | SpCas9 |
| 1360 | DMPK 3 forward 19:45769723-45769748 | AGATGGAGGGCCTTTTATTCGC | SpCas9 |
| 1361 | DMPK 3 forward 19:45769724-45769748 | GATGGAGGGCCTTTTATTCGC | SpCas9 |
| 1362 | DMPK 3 forward 19:45769725-45769748 | ATGGAGGGCCTTTTATTCGC | SpCas9 |
| 1363 | DMPK 3 forward 19:45769726-45769748 | TGGAGGGCCTTTTATTCGC | SpCas9 |
| 1364 | DMPK 3 forward 19:45769727-45769748 | GGAGGGCCTTTTATTCGC | SpCas9 |
| 1365 | DMPK 3 forward 19:45769721-45769749 | GCAGATGGAGGGCCTTTTATTCGCG | SpCas9 |
| 1366 | DMPK 3 forward 19:45769722-45769749 | CAGATGGAGGGCCTTTTATTCGCG | SpCas9 |
| 1367 | DMPK 3 forward 19:45769723-45769749 | AGATGGAGGGCCTTTTATTCGCG | SpCas9 |
| 1368 | DMPK 3 forward 19:45769724-45769749 | GATGGAGGGCCTTTTATTCGCG | SpCas9 |
| 1369 | DMPK 3 forward 19:45769725-45769749 | ATGGAGGGCCTTTTATTCGCG | SpCas9 |
| 1370 | DMPK 3 forward 19:45769726-45769749 | TGGAGGGCCTTTTATTCGCG | SpCas9 |
| 1371 | DMPK 3 forward 19:45769727-45769749 | GGAGGGCCTTTTATTCGCG | SpCas9 |
| 1372 | DMPK 3 forward 19:45769728-45769749 | GAGGGCCTTTTATTCGCG | SpCas9 |
| 1373 | DMPK 3 forward 19:45769722-45769750 | CAGATGGAGGGCCTTTTATTCGCGA | SpCas9 |
| 1374 | DMPK 3 forward 19:45769723-45769750 | AGATGGAGGGCCTTTTATTCGCGA | SpCas9 |
| 1375 | DMPK 3 forward 19:45769724-45769750 | GATGGAGGGCCTTTTATTCGCGA | SpCas9 |
| 1376 | DMPK 3 forward 19:45769725-45769750 | ATGGAGGGCCTTTTATTCGCGA | SpCas9 |
| 1377 | DMPK 3 forward 19:45769726-45769750 | TGGAGGGCCTTTTATTCGCGA | SpCas9 |
| 1378 | DMPK 3 forward 19:45769727-45769750 | GGAGGGCCTTTTATTCGCGA | SpCas9 |
| 1379 | DMPK 3 forward 19:45769728-45769750 | GAGGGCCTTTTATTCGCGA | SpCas9 |
| 1380 | DMPK 3 forward 19:45769729-45769750 | AGGGCCTTTTATTCGCGA | SpCas9 |
| 1381 | DMPK 3 forward 19:45769726-45769754 | TGGAGGGCCTTTTATTCGCGAGGGT | SpCas9 |
| 1382 | DMPK 3 forward 19:45769727-45769754 | GGAGGGCCTTTTATTCGCGAGGGT | SpCas9 |
| 1383 | DMPK 3 forward 19:45769728-45769754 | GAGGGCCTTTTATTCGCGAGGGT | SpCas9 |
| 1384 | DMPK 3 forward 19:45769729-45769754 | AGGGCCTTTTATTCGCGAGGGT | SpCas9 |
| 1385 | DMPK 3 forward 19:45769730-45769754 | GGGCCTTTTATTCGCGAGGGT | SpCas9 |
| 1386 | DMPK 3 forward 19:45769731-45769754 | GGCCTTTTATTCGCGAGGGT | SpCas9 |
| 1387 | DMPK 3 forward 19:45769732-45769754 | GCCTTTTATTCGCGAGGGT | SpCas9 |
| 1388 | DMPK 3 forward 19:45769733-45769754 | CCTTTTATTCGCGAGGGT | SpCas9 |
| 1389 | DMPK 3 forward 19:45769727-45769755 | GGAGGGCCTTTTATTCGCGAGGGTC | SpCas9 |
| 1390 | DMPK 3 forward 19:45769728-45769755 | GAGGGCCTTTTATTCGCGAGGGTC | SpCas9 |
| 1391 | DMPK 3 forward 19:45769729-45769755 | AGGGCCTTTTATTCGCGAGGGTC | SpCas9 |
| 1392 | DMPK 3 forward 19:45769730-45769755 | GGGCCTTTTATTCGCGAGGGTC | SpCas9 |
| 1393 | DMPK 3 forward 19:45769731-45769755 | GGCCTTTTATTCGCGAGGGTC | SpCas9 |
| 1394 | DMPK 3 forward 19:45769732-45769755 | GCCTTTTATTCGCGAGGGTC | SpCas9 |
| 1395 | DMPK 3 forward 19:45769733-45769755 | CCTTTTATTCGCGAGGGTC | SpCas9 |
| 1396 | DMPK 3 forward 19:45769734-45769755 | CTTTTATTCGCGAGGGTC | SpCas9 |
| 1397 | DMPK 3 forward 19:45769728-45769756 | GAGGGCCTTTTATTCGCGAGGGTCG | SpCas9 |
| 1398 | DMPK 3 forward 19:45769729-45769756 | AGGGCCTTTTATTCGCGAGGGTCG | SpCas9 |
| 1399 | DMPK 3 forward 19:45769730-45769756 | GGGCCTTTTATTCGCGAGGGTCG | SpCas9 |
| 1400 | DMPK 3 forward 19:45769731-45769756 | GGCCTTTTATTCGCGAGGGTCG | SpCas9 |
| 1401 | DMPK 3 forward 19:45769732-45769756 | GCCTTTTATTCGCGAGGGTCG | SpCas9 |
| 1402 | DMPK 3 forward 19:45769733-45769756 | CCTTTTATTCGCGAGGGTCG | SpCas9 |
| 1403 | DMPK 3 forward 19:45769734-45769756 | CTTTTATTCGCGAGGGTCG | SpCas9 |
| 1404 | DMPK 3 forward 19:45769735-45769756 | TTTTATTCGCGAGGGTCG | SpCas9 |
| 1405 | DMPK 3 forward 19:45769729-45769757 | AGGGCCTTTTATTCGCGAGGGTCGG | SpCas9 |
| 1406 | DMPK 3 forward 19:45769730-45769757 | GGGCCTTTTATTCGCGAGGGTCGG | SpCas9 |
| 1407 | DMPK 3 forward 19:45769731-45769757 | GGCCTTTTATTCGCGAGGGTCGG | SpCas9 |
| 1408 | DMPK 3 forward 19:45769732-45769757 | GCCTTTTATTCGCGAGGGTCGG | SpCas9 |
| 1409 | DMPK 3 forward 19:45769733-45769757 | CCTTTTATTCGCGAGGGTCGG | SpCas9 |
| 1410 | DMPK 3 forward 19:45769734-45769757 | CTTTTATTCGCGAGGGTCGG | SpCas9 |
| 1411 | DMPK 3 forward 19:45769735-45769757 | TTTTATTCGCGAGGGTCGG | SpCas9 |
| 1412 | DMPK 3 forward 19:45769736-45769757 | TTTATTCGCGAGGGTCGG | SpCas9 |
| 1413 | DMPK 3 forward 19:45769732-45769760 | GCCTTTTATTCGCGAGGGTCGGGGG | SpCas9 |
| 1414 | DMPK 3 forward 19:45769733-45769760 | CCTTTTATTCGCGAGGGTCGGGGG | SpCas9 |
| 1415 | DMPK 3 forward 19:45769734-45769760 | CTTTTATTCGCGAGGGTCGGGGG | SpCas9 |
| 1416 | DMPK 3 forward 19:45769735-45769760 | TTTTATTCGCGAGGGTCGGGGG | SpCas9 |
| 1417 | DMPK 3 forward 19:45769736-45769760 | TTTATTCGCGAGGGTCGGGGG | SpCas9 |
| 1418 | DMPK 3 forward 19:45769737-45769760 | TTATTCGCGAGGGTCGGGGG | SpCas9 |
| 1419 | DMPK 3 forward 19:45769738-45769760 | TATTCGCGAGGGTCGGGGG | SpCas9 |
| 1420 | DMPK 3 forward 19:45769739-45769760 | ATTCGCGAGGGTCGGGGG | SpCas9 |
| 1421 | DMPK 3 forward 19:45769733-45769761 | CCTTTTATTCGCGAGGGTCGGGGGT | SpCas9 |
| 1422 | DMPK 3 forward 19:45769734-45769761 | CTTTTATTCGCGAGGGTCGGGGGT | SpCas9 |
| 1423 | DMPK 3 forward 19:45769735-45769761 | TTTTATTCGCGAGGGTCGGGGGT | SpCas9 |
| 1424 | DMPK 3 forward 19:45769736-45769761 | TTTATTCGCGAGGGTCGGGGGT | SpCas9 |
| 1425 | DMPK 3 forward 19:45769737-45769761 | TTATTCGCGAGGGTCGGGGGT | SpCas9 |
| 1426 | DMPK 3 forward 19:45769738-45769761 | TATTCGCGAGGGTCGGGGGT | SpCas9 |
| 1427 | DMPK 3 forward 19:45769739-45769761 | ATTCGCGAGGGTCGGGGGT | SpCas9 |
| 1428 | DMPK 3 forward 19:45769740-45769761 | TTCGCGAGGGTCGGGGGT | SpCas9 |
| 1429 | DMPK 3 reverse 19:45769733-45769761 | CCCACCCCCGACCCTCGCGAATAAA | SpCas9 |
| 1430 | DMPK 3 reverse 19:45769734-45769761 | CCACCCCCGACCCTCGCGAATAAA | SpCas9 |
| 1431 | DMPK 3 reverse 19:45769735-45769761 | CACCCCCGACCCTCGCGAATAAA | SpCas9 |
| 1432 | DMPK 3 reverse 19:45769736-45769761 | ACCCCCGACCCTCGCGAATAAA | SpCas9 |
| 1433 | DMPK 3 reverse 19:45769737-45769761 | CCCCCGACCCTCGCGAATAAA | SpCas9 |
| 1434 | DMPK 3 reverse 19:45769738-45769761 | CCCCGACCCTCGCGAATAAA | SpCas9 |
| 1435 | DMPK 3 reverse 19:45769739-45769761 | CCCGACCCTCGCGAATAAA | SpCas9 |
| 1436 | DMPK 3 reverse 19:45769740-45769761 | CCGACCCTCGCGAATAAA | SpCas9 |
| 1437 | DMPK 3 forward 19:45769734-45769762 | CTTTTATTCGCGAGGGTCGGGGGTG | SpCas9 |
| 1438 | DMPK 3 forward 19:45769735-45769762 | TTTTATTCGCGAGGGTCGGGGGTG | SpCas9 |
| 1439 | DMPK 3 forward 19:45769736-45769762 | TTTATTCGCGAGGGTCGGGGGTG | SpCas9 |
| 1440 | DMPK 3 forward 19:45769737-45769762 | TTATTCGCGAGGGTCGGGGGTG | SpCas9 |
| 1441 | DMPK 3 forward 19:45769738-45769762 | TATTCGCGAGGGTCGGGGGTG | SpCas9 |
| 1442 | DMPK 3 forward 19:45769739-45769762 | ATTCGCGAGGGTCGGGGGTG | SpCas9 |
| 1443 | DMPK 3 forward 19:45769740-45769762 | TTCGCGAGGGTCGGGGGTG | SpCas9 |
| 1444 | DMPK 3 forward 19:45769741-45769762 | TCGCGAGGGTCGGGGGTG | SpCas9 |
| 1445 | DMPK 3 reverse 19:45769734-45769762 | CCCCACCCCCGACCCTCGCGAATAA | SpCas9 |
| 1446 | DMPK 3 reverse 19:45769735-45769762 | CCCACCCCCGACCCTCGCGAATAA | SpCas9 |
| 1447 | DMPK 3 reverse 19:45769736-45769762 | CCACCCCCGACCCTCGCGAATAA | SpCas9 |
| 1448 | DMPK 3 reverse 19:45769737-45769762 | CACCCCCGACCCTCGCGAATAA | SpCas9 |
| 1449 | DMPK 3 reverse 19:45769738-45769762 | ACCCCCGACCCTCGCGAATAA | SpCas9 |
| 1450 | DMPK 3 reverse 19:45769739-45769762 | CCCCCGACCCTCGCGAATAA | SpCas9 |
| 1451 | DMPK 3 reverse 19:45769740-45769762 | CCCCGACCCTCGCGAATAA | SpCas9 |
| 1452 | DMPK 3 reverse 19:45769741-45769762 | CCCGACCCTCGCGAATAA | SpCas9 |
| 1453 | DMPK 3 forward 19:45769735-45769763 | TTTTATTCGCGAGGGTCGGGGGTGG | SpCas9 |
| 1454 | DMPK 3 forward 19:45769736-45769763 | TTTATTCGCGAGGGTCGGGGGTGG | SpCas9 |
| 1455 | DMPK 3 forward 19:45769737-45769763 | TTATTCGCGAGGGTCGGGGGTGG | SpCas9 |
| 1456 | DMPK 3 forward 19:45769738-45769763 | TATTCGCGAGGGTCGGGGGTGG | SpCas9 |
| 1457 | DMPK 3 forward 19:45769739-45769763 | ATTCGCGAGGGTCGGGGGTGG | SpCas9 |
| 1458 | DMPK 3 forward 19:45769740-45769763 | TTCGCGAGGGTCGGGGGTGG | SpCas9 |
| 1459 | DMPK 3 forward 19:45769741-45769763 | TCGCGAGGGTCGGGGGTGG | SpCas9 |
| 1460 | DMPK 3 forward 19:45769742-45769763 | CGCGAGGGTCGGGGGTGG | SpCas9 |
| 1461 | DMPK 3 forward 19:45769741-45769769 | TCGCGAGGGTCGGGGGTGGGGGTCC | SpCas9 |
| 1462 | DMPK 3 forward 19:45769742-45769769 | CGCGAGGGTCGGGGGTGGGGGTCC | SpCas9 |
| 1463 | DMPK 3 forward 19:45769743-45769769 | GCGAGGGTCGGGGGTGGGGGTCC | SpCas9 |
| 1464 | DMPK 3 forward 19:45769744-45769769 | CGAGGGTCGGGGGTGGGGGTCC | SpCas9 |
| 1465 | DMPK 3 forward 19:45769745-45769769 | GAGGGTCGGGGGTGGGGGTCC | SpCas9 |
| 1466 | DMPK 3 forward 19:45769746-45769769 | AGGGTCGGGGGTGGGGGTCC | SpCas9 |
| 1467 | DMPK 3 forward 19:45769747-45769769 | GGGTCGGGGGTGGGGGTCC | SpCas9 |
| 1468 | DMPK 3 forward 19:45769748-45769769 | GGTCGGGGGTGGGGGTCC | SpCas9 |
| 1469 | DMPK 3 forward 19:45769742-45769770 | CGCGAGGGTCGGGGGTGGGGGTCCT | SpCas9 |
| 1470 | DMPK 3 forward 19:45769743-45769770 | GCGAGGGTCGGGGGTGGGGGTCCT | SpCas9 |
| 1471 | DMPK 3 forward 19:45769744-45769770 | CGAGGGTCGGGGGTGGGGGTCCT | SpCas9 |
| 1472 | DMPK 3 forward 19:45769745-45769770 | GAGGGTCGGGGGTGGGGGTCCT | SpCas9 |
| 1473 | DMPK 3 forward 19:45769746-45769770 | AGGGTCGGGGGTGGGGGTCCT | SpCas9 |
| 1474 | DMPK 3 forward 19:45769747-45769770 | GGGTCGGGGGTGGGGGTCCT | SpCas9 |
| 1475 | DMPK 3 forward 19:45769748-45769770 | GGTCGGGGGTGGGGGTCCT | SpCas9 |
| 1476 | DMPK 3 forward 19:45769749-45769770 | GTCGGGGGTGGGGGTCCT | SpCas9 |
| 1477 | DMPK 3 forward 19:45769745-45769773 | GAGGGTCGGGGGTGGGGGTCCTAGG | SpCas9 |
| 1478 | DMPK 3 forward 19:45769746-45769773 | AGGGTCGGGGGTGGGGGTCCTAGG | SpCas9 |
| 1479 | DMPK 3 forward 19:45769747-45769773 | GGGTCGGGGGTGGGGGTCCTAGG | SpCas9 |
| 1480 | DMPK 3 forward 19:45769748-45769773 | GGTCGGGGGTGGGGGTCCTAGG | SpCas9 |
| 1481 | DMPK 3 forward 19:45769749-45769773 | GTCGGGGGTGGGGGTCCTAGG | SpCas9 |
| 1482 | DMPK 3 forward 19:45769750-45769773 | TCGGGGGTGGGGGTCCTAGG | SpCas9 |
| 1483 | DMPK 3 forward 19:45769751-45769773 | CGGGGGTGGGGGTCCTAGG | SpCas9 |
| 1484 | DMPK 3 forward 19:45769752-45769773 | GGGGGTGGGGGTCCTAGG | SpCas9 |
| 1485 | DMPK 3 forward 19:45769746-45769774 | AGGGTCGGGGGTGGGGGTCCTAGGT | SpCas9 |
| 1486 | DMPK 3 forward 19:45769747-45769774 | GGGTCGGGGGTGGGGGTCCTAGGT | SpCas9 |
| 1487 | DMPK 3 forward 19:45769748-45769774 | GGTCGGGGGTGGGGGTCCTAGGT | SpCas9 |
| 1488 | DMPK 3 forward 19:45769749-45769774 | GTCGGGGGTGGGGGTCCTAGGT | SpCas9 |
| 1489 | DMPK 3 forward 19:45769750-45769774 | TCGGGGGTGGGGGTCCTAGGT | SpCas9 |
| 1490 | DMPK 3 forward 19:45769751-45769774 | CGGGGGTGGGGGTCCTAGGT | SpCas9 |
| 1491 | DMPK 3 forward 19:45769752-45769774 | GGGGGTGGGGGTCCTAGGT | SpCas9 |
| 1492 | DMPK 3 forward 19:45769753-45769774 | GGGGTGGGGGTCCTAGGT | SpCas9 |
| 1493 | DMPK 3 forward 19:45769747-45769775 | GGGTCGGGGGTGGGGGTCCTAGGTG | SpCas9 |
| 1494 | DMPK 3 forward 19:45769748-45769775 | GGTCGGGGGTGGGGGTCCTAGGTG | SpCas9 |
| 1495 | DMPK 3 forward 19:45769749-45769775 | GTCGGGGGTGGGGGTCCTAGGTG | SpCas9 |
| 1496 | DMPK 3 forward 19:45769750-45769775 | TCGGGGGTGGGGGTCCTAGGTG | SpCas9 |
| 1497 | DMPK 3 forward 19:45769751-45769775 | CGGGGGTGGGGGTCCTAGGTG | SpCas9 |
| 1498 | DMPK 3 forward 19:45769752-45769775 | GGGGGTGGGGGTCCTAGGTG | SpCas9 |
| 1499 | DMPK 3 forward 19:45769753-45769775 | GGGGTGGGGGTCCTAGGTG | SpCas9 |
| 1500 | DMPK 3 forward 19:45769754-45769775 | GGGTGGGGGTCCTAGGTG | SpCas9 |
| 1501 | DMPK 3 forward 19:45769751-45769779 | CGGGGGTGGGGGTCCTAGGTGGGGA | SpCas9 |
| 1502 | DMPK 3 forward 19:45769752-45769779 | GGGGGTGGGGGTCCTAGGTGGGGA | SpCas9 |
| 1503 | DMPK 3 forward 19:45769753-45769779 | GGGGTGGGGGTCCTAGGTGGGGA | SpCas9 |
| 1504 | DMPK 3 forward 19:45769754-45769779 | GGGTGGGGGTCCTAGGTGGGGA | SpCas9 |
| 1505 | DMPK 3 forward 19:45769755-45769779 | GGTGGGGGTCCTAGGTGGGGA | SpCas9 |
| 1506 | DMPK 3 forward 19:45769756-45769779 | GTGGGGGTCCTAGGTGGGGA | SpCas9 |
| 1507 | DMPK 3 forward 19:45769757-45769779 | TGGGGGTCCTAGGTGGGGA | SpCas9 |
| 1508 | DMPK 3 forward 19:45769758-45769779 | GGGGGTCCTAGGTGGGGA | SpCas9 |
| 1509 | DMPK 3 reverse 19:45769764-45769792 | CGGTATTTATTGTCTGTCCCCACCT | SpCas9 |
| 1510 | DMPK 3 reverse 19:45769765-45769792 | GGTATTTATTGTCTGTCCCCACCT | SpCas9 |
| 1511 | DMPK 3 reverse 19:45769766-45769792 | GTATTTATTGTCTGTCCCCACCT | SpCas9 |
| 1512 | DMPK 3 reverse 19:45769767-45769792 | TATTTATTGTCTGTCCCCACCT | SpCas9 |
| 1513 | DMPK 3 reverse 19:45769768-45769792 | ATTTATTGTCTGTCCCCACCT | SpCas9 |
| 1514 | DMPK 3 reverse 19:45769769-45769792 | TTTATTGTCTGTCCCCACCT | SpCas9 |
| 1515 | DMPK 3 reverse 19:45769770-45769792 | TTATTGTCTGTCCCCACCT | SpCas9 |
| 1516 | DMPK 3 reverse 19:45769771-45769792 | TATTGTCTGTCCCCACCT | SpCas9 |
| 1517 | DMPK 3 reverse 19:45769765-45769793 | TCGGTATTTATTGTCTGTCCCCACC | SpCas9 |
| 1518 | DMPK 3 reverse 19:45769766-45769793 | CGGTATTTATTGTCTGTCCCCACC | SpCas9 |
| 1519 | DMPK 3 reverse 19:45769767-45769793 | GGTATTTATTGTCTGTCCCCACC | SpCas9 |
| 1520 | DMPK 3 reverse 19:45769768-45769793 | GTATTTATTGTCTGTCCCCACC | SpCas9 |
| 1521 | DMPK 3 reverse 19:45769769-45769793 | TATTTATTGTCTGTCCCCACC | SpCas9 |
| 1522 | DMPK 3 reverse 19:45769770-45769793 | ATTTATTGTCTGTCCCCACC | SpCas9 |
| 1523 | DMPK 3 reverse 19:45769771-45769793 | TTTATTGTCTGTCCCCACC | SpCas9 |
| 1524 | DMPK 3 reverse 19:45769772-45769793 | TTATTGTCTGTCCCCACC | SpCas9 |
| 1525 | DMPK 3 forward 19:45769766-45769794 | TAGGTGGGGACAGACAATAAATACC | SpCas9 |
| 1526 | DMPK 3 forward 19:45769767-45769794 | AGGTGGGGACAGACAATAAATACC | SpCas9 |
| 1527 | DMPK 3 forward 19:45769768-45769794 | GGTGGGGACAGACAATAAATACC | SpCas9 |
| 1528 | DMPK 3 forward 19:45769769-45769794 | GTGGGGACAGACAATAAATACC | SpCas9 |
| 1529 | DMPK 3 forward 19:45769770-45769794 | TGGGGACAGACAATAAATACC | SpCas9 |
| 1530 | DMPK 3 forward 19:45769771-45769794 | GGGGACAGACAATAAATACC | SpCas9 |
| 1531 | DMPK 3 forward 19:45769772-45769794 | GGGACAGACAATAAATACC | SpCas9 |
| 1532 | DMPK 3 forward 19:45769773-45769794 | GGACAGACAATAAATACC | SpCas9 |
| 1533 | DMPK 3 forward 19:45769767-45769795 | AGGTGGGGACAGACAATAAATACCG | SpCas9 |
| 1534 | DMPK 3 forward 19:45769768-45769795 | GGTGGGGACAGACAATAAATACCG | SpCas9 |
| 1535 | DMPK 3 forward 19:45769769-45769795 | GTGGGGACAGACAATAAATACCG | SpCas9 |
| 1536 | DMPK 3 forward 19:45769770-45769795 | TGGGGACAGACAATAAATACCG | SpCas9 |
| 1537 | DMPK 3 forward 19:45769771-45769795 | GGGGACAGACAATAAATACCG | SpCas9 |
| 1538 | DMPK 3 forward 19:45769772-45769795 | GGGACAGACAATAAATACCG | SpCas9 |
| 1539 | DMPK 3 forward 19:45769773-45769795 | GGACAGACAATAAATACCG | SpCas9 |
| 1540 | DMPK 3 forward 19:45769774-45769795 | GACAGACAATAAATACCG | SpCas9 |
| 1541 | DMPK 3 forward 19:45769775-45769803 | ACAGACAATAAATACCGAGGAATGT | SpCas9 |
| 1542 | DMPK 3 forward 19:45769776-45769803 | CAGACAATAAATACCGAGGAATGT | SpCas9 |
| 1543 | DMPK 3 forward 19:45769777-45769803 | AGACAATAAATACCGAGGAATGT | SpCas9 |
| 1544 | DMPK 3 forward 19:45769778-45769803 | GACAATAAATACCGAGGAATGT | SpCas9 |
| 1545 | DMPK 3 forward 19:45769779-45769803 | ACAATAAATACCGAGGAATGT | SpCas9 |
| 1546 | DMPK 3 forward 19:45769780-45769803 | CAATAAATACCGAGGAATGT | SpCas9 |
| 1547 | DMPK 3 forward 19:45769781-45769803 | AATAAATACCGAGGAATGT | SpCas9 |
| 1548 | DMPK 3 forward 19:45769782-45769803 | ATAAATACCGAGGAATGT | SpCas9 |
| 1549 | DMPK 3 forward 19:45769776-45769804 | CAGACAATAAATACCGAGGAATGTC | SpCas9 |
| 1550 | DMPK 3 forward 19:45769777-45769804 | AGACAATAAATACCGAGGAATGTC | SpCas9 |
| 1551 | DMPK 3 forward 19:45769778-45769804 | GACAATAAATACCGAGGAATGTC | SpCas9 |
| 1552 | DMPK 3 forward 19:45769779-45769804 | ACAATAAATACCGAGGAATGTC | SpCas9 |
| 1553 | DMPK 3 forward 19:45769780-45769804 | CAATAAATACCGAGGAATGTC | SpCas9 |
| 1554 | DMPK 3 forward 19:45769781-45769804 | AATAAATACCGAGGAATGTC | SpCas9 |
| 1555 | DMPK 3 forward 19:45769782-45769804 | ATAAATACCGAGGAATGTC | SpCas9 |
| 1556 | DMPK 3 forward 19:45769783-45769804 | TAAATACCGAGGAATGTC | SpCas9 |
| 1557 | DMPK 3 forward 19:45769777-45769805 | AGACAATAAATACCGAGGAATGTCG | SpCas9 |
| 1558 | DMPK 3 forward 19:45769778-45769805 | GACAATAAATACCGAGGAATGTCG | SpCas9 |
| 1559 | DMPK 3 forward 19:45769779-45769805 | ACAATAAATACCGAGGAATGTCG | SpCas9 |
| 1560 | DMPK 3 forward 19:45769780-45769805 | CAATAAATACCGAGGAATGTCG | SpCas9 |
| 1561 | DMPK 3 forward 19:45769781-45769805 | AATAAATACCGAGGAATGTCG | SpCas9 |
| 1562 | DMPK 3 forward 19:45769782-45769805 | ATAAATACCGAGGAATGTCG | SpCas9 |
| 1563 | DMPK 3 forward 19:45769783-45769805 | TAAATACCGAGGAATGTCG | SpCas9 |
| 1564 | DMPK 3 forward 19:45769784-45769805 | AAATACCGAGGAATGTCG | SpCas9 |
| 1565 | DMPK 3 forward 19:45769783-45769811 | TAAATACCGAGGAATGTCGGGGTCT | SpCas9 |
| 1566 | DMPK 3 forward 19:45769784-45769811 | AAATACCGAGGAATGTCGGGGTCT | SpCas9 |
| 1567 | DMPK 3 forward 19:45769785-45769811 | AATACCGAGGAATGTCGGGGTCT | SpCas9 |
| 1568 | DMPK 3 forward 19:45769786-45769811 | ATACCGAGGAATGTCGGGGTCT | SpCas9 |
| 1569 | DMPK 3 forward 19:45769787-45769811 | TACCGAGGAATGTCGGGGTCT | SpCas9 |
| 1570 | DMPK 3 forward 19:45769788-45769811 | ACCGAGGAATGTCGGGGTCT | SpCas9 |
| 1571 | DMPK 3 forward 19:45769789-45769811 | CCGAGGAATGTCGGGGTCT | SpCas9 |
| 1572 | DMPK 3 forward 19:45769790-45769811 | CGAGGAATGTCGGGGTCT | SpCas9 |
| 1573 | DMPK 3 reverse 19:45769789-45769817 | GATGCACTGAGACCCCGACATTCCT | SpCas9 |
| 1574 | DMPK 3 reverse 19:45769790-45769817 | ATGCACTGAGACCCCGACATTCCT | SpCas9 |
| 1575 | DMPK 3 reverse 19:45769791-45769817 | TGCACTGAGACCCCGACATTCCT | SpCas9 |
| 1576 | DMPK 3 reverse 19:45769792-45769817 | GCACTGAGACCCCGACATTCCT | SpCas9 |
| 1577 | DMPK 3 reverse 19:45769793-45769817 | CACTGAGACCCCGACATTCCT | SpCas9 |
| 1578 | DMPK 3 reverse 19:45769794-45769817 | ACTGAGACCCCGACATTCCT | SpCas9 |
| 1579 | DMPK 3 reverse 19:45769795-45769817 | CTGAGACCCCGACATTCCT | SpCas9 |
| 1580 | DMPK 3 reverse 19:45769796-45769817 | TGAGACCCCGACATTCCT | SpCas9 |
| 1581 | DMPK 3 forward 19:45769799-45769827 | TCGGGGTCTCAGTGCATCCAAAACG | SpCas9 |
| 1582 | DMPK 3 forward 19:45769800-45769827 | CGGGGTCTCAGTGCATCCAAAACG | SpCas9 |
| 1583 | DMPK 3 forward 19:45769801-45769827 | GGGGTCTCAGTGCATCCAAAACG | SpCas9 |
| 1584 | DMPK 3 forward 19:45769802-45769827 | GGGTCTCAGTGCATCCAAAACG | SpCas9 |
| 1585 | DMPK 3 forward 19:45769803-45769827 | GGTCTCAGTGCATCCAAAACG | SpCas9 |
| 1586 | DMPK 3 forward 19:45769804-45769827 | GTCTCAGTGCATCCAAAACG | SpCas9 |
| 1587 | DMPK 3 forward 19:45769805-45769827 | TCTCAGTGCATCCAAAACG | SpCas9 |
| 1588 | DMPK 3 forward 19:45769806-45769827 | CTCAGTGCATCCAAAACG | SpCas9 |
| 1589 | DMPK 3 forward 19:45769804-45769832 | GTCTCAGTGCATCCAAAACGTGGAT | SpCas9 |
| 1590 | DMPK 3 forward 19:45769805-45769832 | TCTCAGTGCATCCAAAACGTGGAT | SpCas9 |
| 1591 | DMPK 3 forward 19:45769806-45769832 | CTCAGTGCATCCAAAACGTGGAT | SpCas9 |
| 1592 | DMPK 3 forward 19:45769807-45769832 | TCAGTGCATCCAAAACGTGGAT | SpCas9 |
| 1593 | DMPK 3 forward 19:45769808-45769832 | CAGTGCATCCAAAACGTGGAT | SpCas9 |
| 1594 | DMPK 3 forward 19:45769809-45769832 | AGTGCATCCAAAACGTGGAT | SpCas9 |
| 1595 | DMPK 3 forward 19:45769810-45769832 | GTGCATCCAAAACGTGGAT | SpCas9 |
| 1596 | DMPK 3 forward 19:45769811-45769832 | TGCATCCAAAACGTGGAT | SpCas9 |
| 1597 | DMPK 3 forward 19:45769805-45769833 | TCTCAGTGCATCCAAAACGTGGATT | SpCas9 |
| 1598 | DMPK 3 forward 19:45769806-45769833 | CTCAGTGCATCCAAAACGTGGATT | SpCas9 |
| 1599 | DMPK 3 forward 19:45769807-45769833 | TCAGTGCATCCAAAACGTGGATT | SpCas9 |
| 1600 | DMPK 3 forward 19:45769808-45769833 | CAGTGCATCCAAAACGTGGATT | SpCas9 |
| 1601 | DMPK 3 forward 19:45769809-45769833 | AGTGCATCCAAAACGTGGATT | SpCas9 |
| 1602 | DMPK 3 forward 19:45769810-45769833 | GTGCATCCAAAACGTGGATT | SpCas9 |
| 1603 | DMPK 3 forward 19:45769811-45769833 | TGCATCCAAAACGTGGATT | SpCas9 |
| 1604 | DMPK 3 forward 19:45769812-45769833 | GCATCCAAAACGTGGATT | SpCas9 |
| 1605 | DMPK 3 forward 19:45769806-45769834 | CTCAGTGCATCCAAAACGTGGATTG | SpCas9 |
| 1606 | DMPK 3 forward 19:45769807-45769834 | TCAGTGCATCCAAAACGTGGATTG | SpCas9 |
| 1607 | DMPK 3 forward 19:45769808-45769834 | CAGTGCATCCAAAACGTGGATTG | SpCas9 |
| 1608 | DMPK 3 forward 19:45769809-45769834 | AGTGCATCCAAAACGTGGATTG | SpCas9 |
| 1609 | DMPK 3 forward 19:45769810-45769834 | GTGCATCCAAAACGTGGATTG | SpCas9 |
| 1610 | DMPK 3 forward 19:45769811-45769834 | TGCATCCAAAACGTGGATTG | SpCas9 |
| 1611 | DMPK 3 forward 19:45769812-45769834 | GCATCCAAAACGTGGATTG | SpCas9 |
| 1612 | DMPK 3 forward 19:45769813-45769834 | CATCCAAAACGTGGATTG | SpCas9 |
| 1613 | DMPK 3 reverse 19:45769806-45769834 | CCCCAATCCACGTTTTGGATGCACT | SpCas9 |
| 1614 | DMPK 3 reverse 19:45769807-45769834 | CCCAATCCACGTTTTGGATGCACT | SpCas9 |
| 1615 | DMPK 3 reverse 19:45769808-45769834 | CCAATCCACGTTTTGGATGCACT | SpCas9 |
| 1616 | DMPK 3 reverse 19:45769809-45769834 | CAATCCACGTTTTGGATGCACT | SpCas9 |
| 1617 | DMPK 3 reverse 19:45769810-45769834 | AATCCACGTTTTGGATGCACT | SpCas9 |
| 1618 | DMPK 3 reverse 19:45769811-45769834 | ATCCACGTTTTGGATGCACT | SpCas9 |
| 1619 | DMPK 3 reverse 19:45769812-45769834 | TCCACGTTTTGGATGCACT | SpCas9 |
| 1620 | DMPK 3 reverse 19:45769813-45769834 | CCACGTTTTGGATGCACT | SpCas9 |
| 1621 | DMPK 3 forward 19:45769813-45769841 | CATCCAAAACGTGGATTGGGGTTGT | SpCas9 |
| 1622 | DMPK 3 forward 19:45769814-45769841 | ATCCAAAACGTGGATTGGGGTTGT | SpCas9 |
| 1623 | DMPK 3 forward 19:45769815-45769841 | TCCAAAACGTGGATTGGGGTTGT | SpCas9 |
| 1624 | DMPK 3 forward 19:45769816-45769841 | CCAAAACGTGGATTGGGGTTGT | SpCas9 |
| 1625 | DMPK 3 forward 19:45769817-45769841 | CAAAACGTGGATTGGGGTTGT | SpCas9 |
| 1626 | DMPK 3 forward 19:45769818-45769841 | AAAACGTGGATTGGGGTTGT | SpCas9 |
| 1627 | DMPK 3 forward 19:45769819-45769841 | AAACGTGGATTGGGGTTGT | SpCas9 |
| 1628 | DMPK 3 forward 19:45769820-45769841 | AACGTGGATTGGGGTTGT | SpCas9 |
| 1629 | DMPK 3 forward 19:45769814-45769842 | ATCCAAAACGTGGATTGGGGTTGTT | SpCas9 |
| 1630 | DMPK 3 forward 19:45769815-45769842 | TCCAAAACGTGGATTGGGGTTGTT | SpCas9 |
| 1631 | DMPK 3 forward 19:45769816-45769842 | CCAAAACGTGGATTGGGGTTGTT | SpCas9 |
| 1632 | DMPK 3 forward 19:45769817-45769842 | CAAAACGTGGATTGGGGTTGTT | SpCas9 |
| 1633 | DMPK 3 forward 19:45769818-45769842 | AAAACGTGGATTGGGGTTGTT | SpCas9 |
| 1634 | DMPK 3 forward 19:45769819-45769842 | AAACGTGGATTGGGGTTGTT | SpCas9 |
| 1635 | DMPK 3 forward 19:45769820-45769842 | AACGTGGATTGGGGTTGTT | SpCas9 |
| 1636 | DMPK 3 forward 19:45769821-45769842 | ACGTGGATTGGGGTTGTT | SpCas9 |
| 1637 | DMPK 3 forward 19:45769815-45769843 | TCCAAAACGTGGATTGGGGTTGTTG | SpCas9 |
| 1638 | DMPK 3 forward 19:45769816-45769843 | CCAAAACGTGGATTGGGGTTGTTG | SpCas9 |
| 1639 | DMPK 3 forward 19:45769817-45769843 | CAAAACGTGGATTGGGGTTGTTG | SpCas9 |
| 1640 | DMPK 3 forward 19:45769818-45769843 | AAAACGTGGATTGGGGTTGTTG | SpCas9 |
| 1641 | DMPK 3 forward 19:45769819-45769843 | AAACGTGGATTGGGGTTGTTG | SpCas9 |
| 1642 | DMPK 3 forward 19:45769820-45769843 | AACGTGGATTGGGGTTGTTG | SpCas9 |
| 1643 | DMPK 3 forward 19:45769821-45769843 | ACGTGGATTGGGGTTGTTG | SpCas9 |
| 1644 | DMPK 3 forward 19:45769822-45769843 | CGTGGATTGGGGTTGTTG | SpCas9 |
| 1645 | DMPK 3 forward 19:45769816-45769844 | CCAAAACGTGGATTGGGGTTGTTGG | SpCas9 |
| 1646 | DMPK 3 forward 19:45769817-45769844 | CAAAACGTGGATTGGGGTTGTTGG | SpCas9 |
| 1647 | DMPK 3 forward 19:45769818-45769844 | AAAACGTGGATTGGGGTTGTTGG | SpCas9 |
| 1648 | DMPK 3 forward 19:45769819-45769844 | AAACGTGGATTGGGGTTGTTGG | SpCas9 |
| 1649 | DMPK 3 forward 19:45769820-45769844 | AACGTGGATTGGGGTTGTTGG | SpCas9 |
| 1650 | DMPK 3 forward 19:45769821-45769844 | ACGTGGATTGGGGTTGTTGG | SpCas9 |
| 1651 | DMPK 3 forward 19:45769822-45769844 | CGTGGATTGGGGTTGTTGG | SpCas9 |
| 1652 | DMPK 3 forward 19:45769823-45769844 | GTGGATTGGGGTTGTTGG | SpCas9 |
| 1653 | DMPK 3 reverse 19:45769816-45769844 | CCCCCAACAACCCCAATCCACGTTT | SpCas9 |
| 1654 | DMPK 3 reverse 19:45769817-45769844 | CCCCAACAACCCCAATCCACGTTT | SpCas9 |
| 1655 | DMPK 3 reverse 19:45769818-45769844 | CCCAACAACCCCAATCCACGTTT | SpCas9 |
| 1656 | DMPK 3 reverse 19:45769819-45769844 | CCAACAACCCCAATCCACGTTT | SpCas9 |
| 1657 | DMPK 3 reverse 19:45769820-45769844 | CAACAACCCCAATCCACGTTT | SpCas9 |
| 1658 | DMPK 3 reverse 19:45769821-45769844 | AACAACCCCAATCCACGTTT | SpCas9 |
| 1659 | DMPK 3 reverse 19:45769822-45769844 | ACAACCCCAATCCACGTTT | SpCas9 |
| 1660 | DMPK 3 reverse 19:45769823-45769844 | CAACCCCAATCCACGTTT | SpCas9 |
| 1661 | DMPK 3 forward 19:45769824-45769852 | TGGATTGGGGTTGTTGGGGGTCCTG | SpCas9 |
| 1662 | DMPK 3 forward 19:45769825-45769852 | GGATTGGGGTTGTTGGGGGTCCTG | SpCas9 |
| 1663 | DMPK 3 forward 19:45769826-45769852 | GATTGGGGTTGTTGGGGGTCCTG | SpCas9 |
| 1664 | DMPK 3 forward 19:45769827-45769852 | ATTGGGGTTGTTGGGGGTCCTG | SpCas9 |
| 1665 | DMPK 3 forward 19:45769828-45769852 | TTGGGGTTGTTGGGGGTCCTG | SpCas9 |
| 1666 | DMPK 3 forward 19:45769829-45769852 | TGGGGTTGTTGGGGGTCCTG | SpCas9 |
| 1667 | DMPK 3 forward 19:45769830-45769852 | GGGGTTGTTGGGGGTCCTG | SpCas9 |
| 1668 | DMPK 3 forward 19:45769831-45769852 | GGGTTGTTGGGGGTCCTG | SpCas9 |
| 1669 | DMPK 3 forward 19:45769832-45769860 | GGTTGTTGGGGGTCCTGTAGCCTGT | SpCas9 |
| 1670 | DMPK 3 forward 19:45769833-45769860 | GTTGTTGGGGGTCCTGTAGCCTGT | SpCas9 |
| 1671 | DMPK 3 forward 19:45769834-45769860 | TTGTTGGGGGTCCTGTAGCCTGT | SpCas9 |
| 1672 | DMPK 3 forward 19:45769835-45769860 | TGTTGGGGGTCCTGTAGCCTGT | SpCas9 |
| 1673 | DMPK 3 forward 19:45769836-45769860 | GTTGGGGGTCCTGTAGCCTGT | SpCas9 |
| 1674 | DMPK 3 forward 19:45769837-45769860 | TTGGGGGTCCTGTAGCCTGT | SpCas9 |
| 1675 | DMPK 3 forward 19:45769838-45769860 | TGGGGGTCCTGTAGCCTGT | SpCas9 |
| 1676 | DMPK 3 forward 19:45769839-45769860 | GGGGGTCCTGTAGCCTGT | SpCas9 |
| 1677 | DMPK 3 forward 19:45769836-45769864 | GTTGGGGGTCCTGTAGCCTGTCAGC | SpCas9 |
| 1678 | DMPK 3 forward 19:45769837-45769864 | TTGGGGGTCCTGTAGCCTGTCAGC | SpCas9 |
| 1679 | DMPK 3 forward 19:45769838-45769864 | TGGGGGTCCTGTAGCCTGTCAGC | SpCas9 |
| 1680 | DMPK 3 forward 19:45769839-45769864 | GGGGGTCCTGTAGCCTGTCAGC | SpCas9 |
| 1681 | DMPK 3 forward 19:45769840-45769864 | GGGGTCCTGTAGCCTGTCAGC | SpCas9 |
| 1682 | DMPK 3 forward 19:45769841-45769864 | GGGTCCTGTAGCCTGTCAGC | SpCas9 |
| 1683 | DMPK 3 forward 19:45769842-45769864 | GGTCCTGTAGCCTGTCAGC | SpCas9 |
| 1684 | DMPK 3 forward 19:45769843-45769864 | GTCCTGTAGCCTGTCAGC | SpCas9 |
| 1685 | DMPK 3 forward 19:45769840-45769868 | GGGGTCCTGTAGCCTGTCAGCGAGT | SpCas9 |
| 1686 | DMPK 3 forward 19:45769841-45769868 | GGGTCCTGTAGCCTGTCAGCGAGT | SpCas9 |
| 1687 | DMPK 3 forward 19:45769842-45769868 | GGTCCTGTAGCCTGTCAGCGAGT | SpCas9 |
| 1688 | DMPK 3 forward 19:45769843-45769868 | GTCCTGTAGCCTGTCAGCGAGT | SpCas9 |
| 1689 | DMPK 3 forward 19:45769844-45769868 | TCCTGTAGCCTGTCAGCGAGT | SpCas9 |
| 1690 | DMPK 3 forward 19:45769845-45769868 | CCTGTAGCCTGTCAGCGAGT | SpCas9 |
| 1691 | DMPK 3 forward 19:45769846-45769868 | CTGTAGCCTGTCAGCGAGT | SpCas9 |
| 1692 | DMPK 3 forward 19:45769847-45769868 | TGTAGCCTGTCAGCGAGT | SpCas9 |
| 1693 | DMPK 3 forward 19:45769842-45769870 | GGTCCTGTAGCCTGTCAGCGAGTCG | SpCas9 |
| 1694 | DMPK 3 forward 19:45769843-45769870 | GTCCTGTAGCCTGTCAGCGAGTCG | SpCas9 |
| 1695 | DMPK 3 forward 19:45769844-45769870 | TCCTGTAGCCTGTCAGCGAGTCG | SpCas9 |
| 1696 | DMPK 3 forward 19:45769845-45769870 | CCTGTAGCCTGTCAGCGAGTCG | SpCas9 |
| 1697 | DMPK 3 forward 19:45769846-45769870 | CTGTAGCCTGTCAGCGAGTCG | SpCas9 |
| 1698 | DMPK 3 forward 19:45769847-45769870 | TGTAGCCTGTCAGCGAGTCG | SpCas9 |
| 1699 | DMPK 3 forward 19:45769848-45769870 | GTAGCCTGTCAGCGAGTCG | SpCas9 |
| 1700 | DMPK 3 forward 19:45769849-45769870 | TAGCCTGTCAGCGAGTCG | SpCas9 |
| 1701 | DMPK 3 forward 19:45769843-45769871 | GTCCTGTAGCCTGTCAGCGAGTCGG | SpCas9 |
| 1702 | DMPK 3 forward 19:45769844-45769871 | TCCTGTAGCCTGTCAGCGAGTCGG | SpCas9 |
| 1703 | DMPK 3 forward 19:45769845-45769871 | CCTGTAGCCTGTCAGCGAGTCGG | SpCas9 |
| 1704 | DMPK 3 forward 19:45769846-45769871 | CTGTAGCCTGTCAGCGAGTCGG | SpCas9 |
| 1705 | DMPK 3 forward 19:45769847-45769871 | TGTAGCCTGTCAGCGAGTCGG | SpCas9 |
| 1706 | DMPK 3 forward 19:45769848-45769871 | GTAGCCTGTCAGCGAGTCGG | SpCas9 |
| 1707 | DMPK 3 forward 19:45769849-45769871 | TAGCCTGTCAGCGAGTCGG | SpCas9 |
| 1708 | DMPK 3 forward 19:45769850-45769871 | AGCCTGTCAGCGAGTCGG | SpCas9 |
| 1709 | DMPK 3 reverse 19:45769845-45769873 | GTCCTCCGACTCGCTGACAGGCTAC | SpCas9 |
| 1710 | DMPK 3 reverse 19:45769846-45769873 | TCCTCCGACTCGCTGACAGGCTAC | SpCas9 |
| 1711 | DMPK 3 reverse 19:45769847-45769873 | CCTCCGACTCGCTGACAGGCTAC | SpCas9 |
| 1712 | DMPK 3 reverse 19:45769848-45769873 | CTCCGACTCGCTGACAGGCTAC | SpCas9 |
| 1713 | DMPK 3 reverse 19:45769849-45769873 | TCCGACTCGCTGACAGGCTAC | SpCas9 |
| 1714 | DMPK 3 reverse 19:45769850-45769873 | CCGACTCGCTGACAGGCTAC | SpCas9 |
| 1715 | DMPK 3 reverse 19:45769851-45769873 | CGACTCGCTGACAGGCTAC | SpCas9 |
| 1716 | DMPK 3 reverse 19:45769852-45769873 | GACTCGCTGACAGGCTAC | SpCas9 |
| 1717 | DMPK 3 reverse 19:45769846-45769874 | CGTCCTCCGACTCGCTGACAGGCTA | SpCas9 |
| 1718 | DMPK 3 reverse 19:45769847-45769874 | GTCCTCCGACTCGCTGACAGGCTA | SpCas9 |
| 1719 | DMPK 3 reverse 19:45769848-45769874 | TCCTCCGACTCGCTGACAGGCTA | SpCas9 |
| 1720 | DMPK 3 reverse 19:45769849-45769874 | CCTCCGACTCGCTGACAGGCTA | SpCas9 |
| 1721 | DMPK 3 reverse 19:45769850-45769874 | CTCCGACTCGCTGACAGGCTA | SpCas9 |
| 1722 | DMPK 3 reverse 19:45769851-45769874 | TCCGACTCGCTGACAGGCTA | SpCas9 |
| 1723 | DMPK 3 reverse 19:45769852-45769874 | CCGACTCGCTGACAGGCTA | SpCas9 |
| 1724 | DMPK 3 reverse 19:45769853-45769874 | CGACTCGCTGACAGGCTA | SpCas9 |
| 1725 | DMPK 3 forward 19:45769848-45769876 | GTAGCCTGTCAGCGAGTCGGAGGAC | SpCas9 |
| 1726 | DMPK 3 forward 19:45769849-45769876 | TAGCCTGTCAGCGAGTCGGAGGAC | SpCas9 |
| 1727 | DMPK 3 forward 19:45769850-45769876 | AGCCTGTCAGCGAGTCGGAGGAC | SpCas9 |
| 1728 | DMPK 3 forward 19:45769851-45769876 | GCCTGTCAGCGAGTCGGAGGAC | SpCas9 |
| 1729 | DMPK 3 forward 19:45769852-45769876 | CCTGTCAGCGAGTCGGAGGAC | SpCas9 |
| 1730 | DMPK 3 forward 19:45769853-45769876 | CTGTCAGCGAGTCGGAGGAC | SpCas9 |
| 1731 | DMPK 3 forward 19:45769854-45769876 | TGTCAGCGAGTCGGAGGAC | SpCas9 |
| 1732 | DMPK 3 forward 19:45769855-45769876 | GTCAGCGAGTCGGAGGAC | SpCas9 |
| 1733 | DMPK 3 forward 19:45769849-45769877 | TAGCCTGTCAGCGAGTCGGAGGACG | SpCas9 |
| 1734 | DMPK 3 forward 19:45769850-45769877 | AGCCTGTCAGCGAGTCGGAGGACG | SpCas9 |
| 1735 | DMPK 3 forward 19:45769851-45769877 | GCCTGTCAGCGAGTCGGAGGACG | SpCas9 |
| 1736 | DMPK 3 forward 19:45769852-45769877 | CCTGTCAGCGAGTCGGAGGACG | SpCas9 |
| 1737 | DMPK 3 forward 19:45769853-45769877 | CTGTCAGCGAGTCGGAGGACG | SpCas9 |
| 1738 | DMPK 3 forward 19:45769854-45769877 | TGTCAGCGAGTCGGAGGACG | SpCas9 |
| 1739 | DMPK 3 forward 19:45769855-45769877 | GTCAGCGAGTCGGAGGACG | SpCas9 |
| 1740 | DMPK 3 forward 19:45769856-45769877 | TCAGCGAGTCGGAGGACG | SpCas9 |
| 1741 | DMPK 3 reverse 19:45769852-45769880 | TGACCTCGTCCTCCGACTCGCTGAC | SpCas9 |
| 1742 | DMPK 3 reverse 19:45769853-45769880 | GACCTCGTCCTCCGACTCGCTGAC | SpCas9 |
| 1743 | DMPK 3 reverse 19:45769854-45769880 | ACCTCGTCCTCCGACTCGCTGAC | SpCas9 |
| 1744 | DMPK 3 reverse 19:45769855-45769880 | CCTCGTCCTCCGACTCGCTGAC | SpCas9 |
| 1745 | DMPK 3 reverse 19:45769856-45769880 | CTCGTCCTCCGACTCGCTGAC | SpCas9 |
| 1746 | DMPK 3 reverse 19:45769857-45769880 | TCGTCCTCCGACTCGCTGAC | SpCas9 |
| 1747 | DMPK 3 reverse 19:45769858-45769880 | CGTCCTCCGACTCGCTGAC | SpCas9 |
| 1748 | DMPK 3 reverse 19:45769859-45769880 | GTCCTCCGACTCGCTGAC | SpCas9 |
| 1749 | DMPK 3 reverse 19:45769853-45769881 | TTGACCTCGTCCTCCGACTCGCTGA | SpCas9 |
| 1750 | DMPK 3 reverse 19:45769854-45769881 | TGACCTCGTCCTCCGACTCGCTGA | SpCas9 |
| 1751 | DMPK 3 reverse 19:45769855-45769881 | GACCTCGTCCTCCGACTCGCTGA | SpCas9 |
| 1752 | DMPK 3 reverse 19:45769856-45769881 | ACCTCGTCCTCCGACTCGCTGA | SpCas9 |
| 1753 | DMPK 3 reverse 19:45769857-45769881 | CCTCGTCCTCCGACTCGCTGA | SpCas9 |
| 1754 | DMPK 3 reverse 19:45769858-45769881 | CTCGTCCTCCGACTCGCTGA | SpCas9 |
| 1755 | DMPK 3 reverse 19:45769859-45769881 | TCGTCCTCCGACTCGCTGA | SpCas9 |
| 1756 | DMPK 3 reverse 19:45769860-45769881 | CGTCCTCCGACTCGCTGA | SpCas9 |
| 1757 | DMPK 3 forward 19:45769874-45769902 | AGGTCAATAAATATCCAAACCGCCG | SpCas9 |
| 1758 | DMPK 3 forward 19:45769875-45769902 | GGTCAATAAATATCCAAACCGCCG | SpCas9 |
| 1759 | DMPK 3 forward 19:45769876-45769902 | GTCAATAAATATCCAAACCGCCG | SpCas9 |
| 1760 | DMPK 3 forward 19:45769877-45769902 | TCAATAAATATCCAAACCGCCG | SpCas9 |
| 1761 | DMPK 3 forward 19:45769878-45769902 | CAATAAATATCCAAACCGCCG | SpCas9 |
| 1762 | DMPK 3 forward 19:45769879-45769902 | AATAAATATCCAAACCGCCG | SpCas9 |
| 1763 | DMPK 3 forward 19:45769880-45769902 | ATAAATATCCAAACCGCCG | SpCas9 |
| 1764 | DMPK 3 forward 19:45769881-45769902 | TAAATATCCAAACCGCCG | SpCas9 |
| 1765 | DMPK 3 forward 19:45769877-45769905 | TCAATAAATATCCAAACCGCCGAAG | SpCas9 |
| 1766 | DMPK 3 forward 19:45769878-45769905 | CAATAAATATCCAAACCGCCGAAG | SpCas9 |
| 1767 | DMPK 3 forward 19:45769879-45769905 | AATAAATATCCAAACCGCCGAAG | SpCas9 |
| 1768 | DMPK 3 forward 19:45769880-45769905 | ATAAATATCCAAACCGCCGAAG | SpCas9 |
| 1769 | DMPK 3 forward 19:45769881-45769905 | TAAATATCCAAACCGCCGAAG | SpCas9 |
| 1770 | DMPK 3 forward 19:45769882-45769905 | AAATATCCAAACCGCCGAAG | SpCas9 |
| 1771 | DMPK 3 forward 19:45769883-45769905 | AATATCCAAACCGCCGAAG | SpCas9 |
| 1772 | DMPK 3 forward 19:45769884-45769905 | ATATCCAAACCGCCGAAG | SpCas9 |
| 1773 | DMPK 3 forward 19:45769878-45769906 | CAATAAATATCCAAACCGCCGAAGC | SpCas9 |
| 1774 | DMPK 3 forward 19:45769879-45769906 | AATAAATATCCAAACCGCCGAAGC | SpCas9 |
| 1775 | DMPK 3 forward 19:45769880-45769906 | ATAAATATCCAAACCGCCGAAGC | SpCas9 |
| 1776 | DMPK 3 forward 19:45769881-45769906 | TAAATATCCAAACCGCCGAAGC | SpCas9 |
| 1777 | DMPK 3 forward 19:45769882-45769906 | AAATATCCAAACCGCCGAAGC | SpCas9 |
| 1778 | DMPK 3 forward 19:45769883-45769906 | AATATCCAAACCGCCGAAGC | SpCas9 |
| 1779 | DMPK 3 forward 19:45769884-45769906 | ATATCCAAACCGCCGAAGC | SpCas9 |
| 1780 | DMPK 3 forward 19:45769885-45769906 | TATCCAAACCGCCGAAGC | SpCas9 |
| 1781 | DMPK 3 forward 19:45769881-45769909 | TAAATATCCAAACCGCCGAAGCGGG | SpCas9 |
| 1782 | DMPK 3 forward 19:45769882-45769909 | AAATATCCAAACCGCCGAAGCGGG | SpCas9 |
| 1783 | DMPK 3 forward 19:45769883-45769909 | AATATCCAAACCGCCGAAGCGGG | SpCas9 |
| 1784 | DMPK 3 forward 19:45769884-45769909 | ATATCCAAACCGCCGAAGCGGG | SpCas9 |
| 1785 | DMPK 3 forward 19:45769885-45769909 | TATCCAAACCGCCGAAGCGGG | SpCas9 |
| 1786 | DMPK 3 forward 19:45769886-45769909 | ATCCAAACCGCCGAAGCGGG | SpCas9 |
| 1787 | DMPK 3 forward 19:45769887-45769909 | TCCAAACCGCCGAAGCGGG | SpCas9 |
| 1788 | DMPK 3 forward 19:45769888-45769909 | CCAAACCGCCGAAGCGGG | SpCas9 |
| 1789 | DMPK 3 forward 19:45769883-45769911 | AATATCCAAACCGCCGAAGCGGGCG | SpCas9 |
| 1790 | DMPK 3 forward 19:45769884-45769911 | ATATCCAAACCGCCGAAGCGGGCG | SpCas9 |
| 1791 | DMPK 3 forward 19:45769885-45769911 | TATCCAAACCGCCGAAGCGGGCG | SpCas9 |
| 1792 | DMPK 3 forward 19:45769886-45769911 | ATCCAAACCGCCGAAGCGGGCG | SpCas9 |
| 1793 | DMPK 3 forward 19:45769887-45769911 | TCCAAACCGCCGAAGCGGGCG | SpCas9 |
| 1794 | DMPK 3 forward 19:45769888-45769911 | CCAAACCGCCGAAGCGGGCG | SpCas9 |
| 1795 | DMPK 3 forward 19:45769889-45769911 | CAAACCGCCGAAGCGGGCG | SpCas9 |
| 1796 | DMPK 3 forward 19:45769890-45769911 | AAACCGCCGAAGCGGGCG | SpCas9 |
| 1797 | DMPK 3 forward 19:45769887-45769915 | TCCAAACCGCCGAAGCGGGCGGAGC | SpCas9 |
| 1798 | DMPK 3 forward 19:45769888-45769915 | CCAAACCGCCGAAGCGGGCGGAGC | SpCas9 |
| 1799 | DMPK 3 forward 19:45769889-45769915 | CAAACCGCCGAAGCGGGCGGAGC | SpCas9 |
| 1800 | DMPK 3 forward 19:45769890-45769915 | AAACCGCCGAAGCGGGCGGAGC | SpCas9 |
| 1801 | DMPK 3 forward 19:45769891-45769915 | AACCGCCGAAGCGGGCGGAGC | SpCas9 |
| 1802 | DMPK 3 forward 19:45769892-45769915 | ACCGCCGAAGCGGGCGGAGC | SpCas9 |
| 1803 | DMPK 3 forward 19:45769893-45769915 | CCGCCGAAGCGGGCGGAGC | SpCas9 |
| 1804 | DMPK 3 forward 19:45769894-45769915 | CGCCGAAGCGGGCGGAGC | SpCas9 |
| 1805 | DMPK 3 reverse 19:45769888-45769916 | GCCGGCTCCGCCCGCTTCGGCGGTT | SpCas9 |
| 1806 | DMPK 3 reverse 19:45769889-45769916 | CCGGCTCCGCCCGCTTCGGCGGTT | SpCas9 |
| 1807 | DMPK 3 reverse 19:45769890-45769916 | CGGCTCCGCCCGCTTCGGCGGTT | SpCas9 |
| 1808 | DMPK 3 reverse 19:45769891-45769916 | GGCTCCGCCCGCTTCGGCGGTT | SpCas9 |
| 1809 | DMPK 3 reverse 19:45769892-45769916 | GCTCCGCCCGCTTCGGCGGTT | SpCas9 |
| 1810 | DMPK 3 reverse 19:45769893-45769916 | CTCCGCCCGCTTCGGCGGTT | SpCas9 |
| 1811 | DMPK 3 reverse 19:45769894-45769916 | TCCGCCCGCTTCGGCGGTT | SpCas9 |
| 1812 | DMPK 3 reverse 19:45769895-45769916 | CCGCCCGCTTCGGCGGTT | SpCas9 |
| 1813 | DMPK 3 forward 19:45769891-45769919 | AACCGCCGAAGCGGGCGGAGCCGGC | SpCas9 |
| 1814 | DMPK 3 forward 19:45769892-45769919 | ACCGCCGAAGCGGGCGGAGCCGGC | SpCas9 |
| 1815 | DMPK 3 forward 19:45769893-45769919 | CCGCCGAAGCGGGCGGAGCCGGC | SpCas9 |
| 1816 | DMPK 3 forward 19:45769894-45769919 | CGCCGAAGCGGGCGGAGCCGGC | SpCas9 |
| 1817 | DMPK 3 forward 19:45769895-45769919 | GCCGAAGCGGGCGGAGCCGGC | SpCas9 |
| 1818 | DMPK 3 forward 19:45769896-45769919 | CCGAAGCGGGCGGAGCCGGC | SpCas9 |
| 1819 | DMPK 3 forward 19:45769897-45769919 | CGAAGCGGGCGGAGCCGGC | SpCas9 |
| 1820 | DMPK 3 forward 19:45769898-45769919 | GAAGCGGGCGGAGCCGGC | SpCas9 |
| 1821 | DMPK 3 forward 19:45769892-45769920 | ACCGCCGAAGCGGGCGGAGCCGGCT | SpCas9 |
| 1822 | DMPK 3 forward 19:45769893-45769920 | CCGCCGAAGCGGGCGGAGCCGGCT | SpCas9 |
| 1823 | DMPK 3 forward 19:45769894-45769920 | CGCCGAAGCGGGCGGAGCCGGCT | SpCas9 |
| 1824 | DMPK 3 forward 19:45769895-45769920 | GCCGAAGCGGGCGGAGCCGGCT | SpCas9 |
| 1825 | DMPK 3 forward 19:45769896-45769920 | CCGAAGCGGGCGGAGCCGGCT | SpCas9 |
| 1826 | DMPK 3 forward 19:45769897-45769920 | CGAAGCGGGCGGAGCCGGCT | SpCas9 |
| 1827 | DMPK 3 forward 19:45769898-45769920 | GAAGCGGGCGGAGCCGGCT | SpCas9 |
| 1828 | DMPK 3 forward 19:45769899-45769920 | AAGCGGGCGGAGCCGGCT | SpCas9 |
| 1829 | DMPK 3 forward 19:45769893-45769921 | CCGCCGAAGCGGGCGGAGCCGGCTG | SpCas9 |
| 1830 | DMPK 3 forward 19:45769894-45769921 | CGCCGAAGCGGGCGGAGCCGGCTG | SpCas9 |
| 1831 | DMPK 3 forward 19:45769895-45769921 | GCCGAAGCGGGCGGAGCCGGCTG | SpCas9 |
| 1832 | DMPK 3 forward 19:45769896-45769921 | CCGAAGCGGGCGGAGCCGGCTG | SpCas9 |
| 1833 | DMPK 3 forward 19:45769897-45769921 | CGAAGCGGGCGGAGCCGGCTG | SpCas9 |
| 1834 | DMPK 3 forward 19:45769898-45769921 | GAAGCGGGCGGAGCCGGCTG | SpCas9 |
| 1835 | DMPK 3 forward 19:45769899-45769921 | AAGCGGGCGGAGCCGGCTG | SpCas9 |
| 1836 | DMPK 3 forward 19:45769900-45769921 | AGCGGGCGGAGCCGGCTG | SpCas9 |
| 1837 | DMPK 3 reverse 19:45769893-45769921 | CCCCAGCCGGCTCCGCCCGCTTCGG | SpCas9 |
| 1838 | DMPK 3 reverse 19:45769894-45769921 | CCCAGCCGGCTCCGCCCGCTTCGG | SpCas9 |
| 1839 | DMPK 3 reverse 19:45769895-45769921 | CCAGCCGGCTCCGCCCGCTTCGG | SpCas9 |
| 1840 | DMPK 3 reverse 19:45769896-45769921 | CAGCCGGCTCCGCCCGCTTCGG | SpCas9 |
| 1841 | DMPK 3 reverse 19:45769897-45769921 | AGCCGGCTCCGCCCGCTTCGG | SpCas9 |
| 1842 | DMPK 3 reverse 19:45769898-45769921 | GCCGGCTCCGCCCGCTTCGG | SpCas9 |
| 1843 | DMPK 3 reverse 19:45769899-45769921 | CCGGCTCCGCCCGCTTCGG | SpCas9 |
| 1844 | DMPK 3 reverse 19:45769900-45769921 | CGGCTCCGCCCGCTTCGG | SpCas9 |
| 1845 | DMPK 3 reverse 19:45769896-45769924 | GAGCCCCAGCCGGCTCCGCCCGCTT | SpCas9 |
| 1846 | DMPK 3 reverse 19:45769897-45769924 | AGCCCCAGCCGGCTCCGCCCGCTT | SpCas9 |
| 1847 | DMPK 3 reverse 19:45769898-45769924 | GCCCCAGCCGGCTCCGCCCGCTT | SpCas9 |
| 1848 | DMPK 3 reverse 19:45769899-45769924 | CCCCAGCCGGCTCCGCCCGCTT | SpCas9 |
| 1849 | DMPK 3 reverse 19:45769900-45769924 | CCCAGCCGGCTCCGCCCGCTT | SpCas9 |
| 1850 | DMPK 3 reverse 19:45769901-45769924 | CCAGCCGGCTCCGCCCGCTT | SpCas9 |
| 1851 | DMPK 3 reverse 19:45769902-45769924 | CAGCCGGCTCCGCCCGCTT | SpCas9 |
| 1852 | DMPK 3 reverse 19:45769903-45769924 | AGCCGGCTCCGCCCGCTT | SpCas9 |
| 1853 | DMPK 3 forward 19:45769900-45769928 | AGCGGGCGGAGCCGGCTGGGGCTCC | SpCas9 |
| 1854 | DMPK 3 forward 19:45769901-45769928 | GCGGGCGGAGCCGGCTGGGGCTCC | SpCas9 |
| 1855 | DMPK 3 forward 19:45769902-45769928 | CGGGCGGAGCCGGCTGGGGCTCC | SpCas9 |
| 1856 | DMPK 3 forward 19:45769903-45769928 | GGGCGGAGCCGGCTGGGGCTCC | SpCas9 |
| 1857 | DMPK 3 forward 19:45769904-45769928 | GGCGGAGCCGGCTGGGGCTCC | SpCas9 |
| 1858 | DMPK 3 forward 19:45769905-45769928 | GCGGAGCCGGCTGGGGCTCC | SpCas9 |
| 1859 | DMPK 3 forward 19:45769906-45769928 | CGGAGCCGGCTGGGGCTCC | SpCas9 |
| 1860 | DMPK 3 forward 19:45769907-45769928 | GGAGCCGGCTGGGGCTCC | SpCas9 |
| 1861 | DMPK 3 forward 19:45769902-45769930 | CGGGCGGAGCCGGCTGGGGCTCCGA | SpCas9 |
| 1862 | DMPK 3 forward 19:45769903-45769930 | GGGCGGAGCCGGCTGGGGCTCCGA | SpCas9 |
| 1863 | DMPK 3 forward 19:45769904-45769930 | GGCGGAGCCGGCTGGGGCTCCGA | SpCas9 |
| 1864 | DMPK 3 forward 19:45769905-45769930 | GCGGAGCCGGCTGGGGCTCCGA | SpCas9 |
| 1865 | DMPK 3 forward 19:45769906-45769930 | CGGAGCCGGCTGGGGCTCCGA | SpCas9 |
| 1866 | DMPK 3 forward 19:45769907-45769930 | GGAGCCGGCTGGGGCTCCGA | SpCas9 |
| 1867 | DMPK 3 forward 19:45769908-45769930 | GAGCCGGCTGGGGCTCCGA | SpCas9 |
| 1868 | DMPK 3 forward 19:45769909-45769930 | AGCCGGCTGGGGCTCCGA | SpCas9 |
| 1869 | DMPK 3 forward 19:45769905-45769933 | GCGGAGCCGGCTGGGGCTCCGAGAG | SpCas9 |
| 1870 | DMPK 3 forward 19:45769906-45769933 | CGGAGCCGGCTGGGGCTCCGAGAG | SpCas9 |
| 1871 | DMPK 3 forward 19:45769907-45769933 | GGAGCCGGCTGGGGCTCCGAGAG | SpCas9 |
| 1872 | DMPK 3 forward 19:45769908-45769933 | GAGCCGGCTGGGGCTCCGAGAG | SpCas9 |
| 1873 | DMPK 3 forward 19:45769909-45769933 | AGCCGGCTGGGGCTCCGAGAG | SpCas9 |
| 1874 | DMPK 3 forward 19:45769910-45769933 | GCCGGCTGGGGCTCCGAGAG | SpCas9 |
| 1875 | DMPK 3 forward 19:45769911-45769933 | CCGGCTGGGGCTCCGAGAG | SpCas9 |
| 1876 | DMPK 3 forward 19:45769912-45769933 | CGGCTGGGGCTCCGAGAG | SpCas9 |
| 1877 | DMPK 3 forward 19:45769911-45769939 | CCGGCTGGGGCTCCGAGAGCAGCGC | SpCas9 |
| 1878 | DMPK 3 forward 19:45769912-45769939 | CGGCTGGGGCTCCGAGAGCAGCGC | SpCas9 |
| 1879 | DMPK 3 forward 19:45769913-45769939 | GGCTGGGGCTCCGAGAGCAGCGC | SpCas9 |
| 1880 | DMPK 3 forward 19:45769914-45769939 | GCTGGGGCTCCGAGAGCAGCGC | SpCas9 |
| 1881 | DMPK 3 forward 19:45769915-45769939 | CTGGGGCTCCGAGAGCAGCGC | SpCas9 |
| 1882 | DMPK 3 forward 19:45769916-45769939 | TGGGGCTCCGAGAGCAGCGC | SpCas9 |
| 1883 | DMPK 3 forward 19:45769917-45769939 | GGGGCTCCGAGAGCAGCGC | SpCas9 |
| 1884 | DMPK 3 forward 19:45769918-45769939 | GGGCTCCGAGAGCAGCGC | SpCas9 |
| 1885 | DMPK 3 reverse 19:45769911-45769939 | CTTGCGCTGCTCTCGGAGCCCCAGC | SpCas9 |
| 1886 | DMPK 3 reverse 19:45769912-45769939 | TTGCGCTGCTCTCGGAGCCCCAGC | SpCas9 |
| 1887 | DMPK 3 reverse 19:45769913-45769939 | TGCGCTGCTCTCGGAGCCCCAGC | SpCas9 |
| 1888 | DMPK 3 reverse 19:45769914-45769939 | GCGCTGCTCTCGGAGCCCCAGC | SpCas9 |
| 1889 | DMPK 3 reverse 19:45769915-45769939 | CGCTGCTCTCGGAGCCCCAGC | SpCas9 |
| 1890 | DMPK 3 reverse 19:45769916-45769939 | GCTGCTCTCGGAGCCCCAGC | SpCas9 |
| 1891 | DMPK 3 reverse 19:45769917-45769939 | CTGCTCTCGGAGCCCCAGC | SpCas9 |
| 1892 | DMPK 3 reverse 19:45769918-45769939 | TGCTCTCGGAGCCCCAGC | SpCas9 |
| 1893 | DMPK 3 forward 19:45769915-45769943 | CTGGGGCTCCGAGAGCAGCGCAAGT | SpCas9 |
| 1894 | DMPK 3 forward 19:45769916-45769943 | TGGGGCTCCGAGAGCAGCGCAAGT | SpCas9 |
| 1895 | DMPK 3 forward 19:45769917-45769943 | GGGGCTCCGAGAGCAGCGCAAGT | SpCas9 |
| 1896 | DMPK 3 forward 19:45769918-45769943 | GGGCTCCGAGAGCAGCGCAAGT | SpCas9 |
| 1897 | DMPK 3 forward 19:45769919-45769943 | GGCTCCGAGAGCAGCGCAAGT | SpCas9 |
| 1898 | DMPK 3 forward 19:45769920-45769943 | GCTCCGAGAGCAGCGCAAGT | SpCas9 |
| 1899 | DMPK 3 forward 19:45769921-45769943 | CTCCGAGAGCAGCGCAAGT | SpCas9 |
| 1900 | DMPK 3 forward 19:45769922-45769943 | TCCGAGAGCAGCGCAAGT | SpCas9 |
| 1901 | DMPK 3 reverse 19:45769915-45769943 | CTCACTTGCGCTGCTCTCGGAGCCC | SpCas9 |
| 1902 | DMPK 3 reverse 19:45769916-45769943 | TCACTTGCGCTGCTCTCGGAGCCC | SpCas9 |
| 1903 | DMPK 3 reverse 19:45769917-45769943 | CACTTGCGCTGCTCTCGGAGCCC | SpCas9 |
| 1904 | DMPK 3 reverse 19:45769918-45769943 | ACTTGCGCTGCTCTCGGAGCCC | SpCas9 |
| 1905 | DMPK 3 reverse 19:45769919-45769943 | CTTGCGCTGCTCTCGGAGCCC | SpCas9 |
| 1906 | DMPK 3 reverse 19:45769920-45769943 | TTGCGCTGCTCTCGGAGCCC | SpCas9 |
| 1907 | DMPK 3 reverse 19:45769921-45769943 | TGCGCTGCTCTCGGAGCCC | SpCas9 |
| 1908 | DMPK 3 reverse 19:45769922-45769943 | GCGCTGCTCTCGGAGCCC | SpCas9 |
| 1909 | DMPK 3 forward 19:45769916-45769944 | TGGGGCTCCGAGAGCAGCGCAAGTG | SpCas9 |
| 1910 | DMPK 3 forward 19:45769917-45769944 | GGGGCTCCGAGAGCAGCGCAAGTG | SpCas9 |
| 1911 | DMPK 3 forward 19:45769918-45769944 | GGGCTCCGAGAGCAGCGCAAGTG | SpCas9 |
| 1912 | DMPK 3 forward 19:45769919-45769944 | GGCTCCGAGAGCAGCGCAAGTG | SpCas9 |
| 1913 | DMPK 3 forward 19:45769920-45769944 | GCTCCGAGAGCAGCGCAAGTG | SpCas9 |
| 1914 | DMPK 3 forward 19:45769921-45769944 | CTCCGAGAGCAGCGCAAGTG | SpCas9 |
| 1915 | DMPK 3 forward 19:45769922-45769944 | TCCGAGAGCAGCGCAAGTG | SpCas9 |
| 1916 | DMPK 3 forward 19:45769923-45769944 | CCGAGAGCAGCGCAAGTG | SpCas9 |
| 1917 | DMPK 3 forward 19:45769918-45769946 | GGGCTCCGAGAGCAGCGCAAGTGAG | SpCas9 |
| 1918 | DMPK 3 forward 19:45769919-45769946 | GGCTCCGAGAGCAGCGCAAGTGAG | SpCas9 |
| 1919 | DMPK 3 forward 19:45769920-45769946 | GCTCCGAGAGCAGCGCAAGTGAG | SpCas9 |
| 1920 | DMPK 3 forward 19:45769921-45769946 | CTCCGAGAGCAGCGCAAGTGAG | SpCas9 |
| 1921 | DMPK 3 forward 19:45769922-45769946 | TCCGAGAGCAGCGCAAGTGAG | SpCas9 |
| 1922 | DMPK 3 forward 19:45769923-45769946 | CCGAGAGCAGCGCAAGTGAG | SpCas9 |
| 1923 | DMPK 3 forward 19:45769924-45769946 | CGAGAGCAGCGCAAGTGAG | SpCas9 |
| 1924 | DMPK 3 forward 19:45769925-45769946 | GAGAGCAGCGCAAGTGAG | SpCas9 |
| 1925 | DMPK 3 forward 19:45769919-45769947 | GGCTCCGAGAGCAGCGCAAGTGAGG | SpCas9 |
| 1926 | DMPK 3 forward 19:45769920-45769947 | GCTCCGAGAGCAGCGCAAGTGAGG | SpCas9 |
| 1927 | DMPK 3 forward 19:45769921-45769947 | CTCCGAGAGCAGCGCAAGTGAGG | SpCas9 |
| 1928 | DMPK 3 forward 19:45769922-45769947 | TCCGAGAGCAGCGCAAGTGAGG | SpCas9 |
| 1929 | DMPK 3 forward 19:45769923-45769947 | CCGAGAGCAGCGCAAGTGAGG | SpCas9 |
| 1930 | DMPK 3 forward 19:45769924-45769947 | CGAGAGCAGCGCAAGTGAGG | SpCas9 |
| 1931 | DMPK 3 forward 19:45769925-45769947 | GAGAGCAGCGCAAGTGAGG | SpCas9 |
| 1932 | DMPK 3 forward 19:45769926-45769947 | AGAGCAGCGCAAGTGAGG | SpCas9 |
| 1933 | DMPK 3 forward 19:45769920-45769948 | GCTCCGAGAGCAGCGCAAGTGAGGA | SpCas9 |
| 1934 | DMPK 3 forward 19:45769921-45769948 | CTCCGAGAGCAGCGCAAGTGAGGA | SpCas9 |
| 1935 | DMPK 3 forward 19:45769922-45769948 | TCCGAGAGCAGCGCAAGTGAGGA | SpCas9 |
| 1936 | DMPK 3 forward 19:45769923-45769948 | CCGAGAGCAGCGCAAGTGAGGA | SpCas9 |
| 1937 | DMPK 3 forward 19:45769924-45769948 | CGAGAGCAGCGCAAGTGAGGA | SpCas9 |
| 1938 | DMPK 3 forward 19:45769925-45769948 | GAGAGCAGCGCAAGTGAGGA | SpCas9 |
| 1939 | DMPK 3 forward 19:45769926-45769948 | AGAGCAGCGCAAGTGAGGA | SpCas9 |
| 1940 | DMPK 3 forward 19:45769927-45769948 | GAGCAGCGCAAGTGAGGA | SpCas9 |
| 1941 | DMPK 3 forward 19:45769921-45769949 | CTCCGAGAGCAGCGCAAGTGAGGAG | SpCas9 |
| 1942 | DMPK 3 forward 19:45769922-45769949 | TCCGAGAGCAGCGCAAGTGAGGAG | SpCas9 |
| 1943 | DMPK 3 forward 19:45769923-45769949 | CCGAGAGCAGCGCAAGTGAGGAG | SpCas9 |
| 1944 | DMPK 3 forward 19:45769924-45769949 | CGAGAGCAGCGCAAGTGAGGAG | SpCas9 |
| 1945 | DMPK 3 forward 19:45769925-45769949 | GAGAGCAGCGCAAGTGAGGAG | SpCas9 |
| 1946 | DMPK 3 forward 19:45769926-45769949 | AGAGCAGCGCAAGTGAGGAG | SpCas9 |
| 1947 | DMPK 3 forward 19:45769927-45769949 | GAGCAGCGCAAGTGAGGAG | SpCas9 |
| 1948 | DMPK 3 forward 19:45769928-45769949 | AGCAGCGCAAGTGAGGAG | SpCas9 |
| 1949 | DMPK 3 reverse 19:45769921-45769949 | CCCCTCCTCACTTGCGCTGCTCTCG | SpCas9 |
| 1950 | DMPK 3 reverse 19:45769922-45769949 | CCCTCCTCACTTGCGCTGCTCTCG | SpCas9 |
| 1951 | DMPK 3 reverse 19:45769923-45769949 | CCTCCTCACTTGCGCTGCTCTCG | SpCas9 |
| 1952 | DMPK 3 reverse 19:45769924-45769949 | CTCCTCACTTGCGCTGCTCTCG | SpCas9 |
| 1953 | DMPK 3 reverse 19:45769925-45769949 | TCCTCACTTGCGCTGCTCTCG | SpCas9 |
| 1954 | DMPK 3 reverse 19:45769926-45769949 | CCTCACTTGCGCTGCTCTCG | SpCas9 |
| 1955 | DMPK 3 reverse 19:45769927-45769949 | CTCACTTGCGCTGCTCTCG | SpCas9 |
| 1956 | DMPK 3 reverse 19:45769928-45769949 | TCACTTGCGCTGCTCTCG | SpCas9 |
| 1957 | DMPK 3 forward 19:45769922-45769950 | TCCGAGAGCAGCGCAAGTGAGGAGG | SpCas9 |
| 1958 | DMPK 3 forward 19:45769923-45769950 | CCGAGAGCAGCGCAAGTGAGGAGG | SpCas9 |
| 1959 | DMPK 3 forward 19:45769924-45769950 | CGAGAGCAGCGCAAGTGAGGAGG | SpCas9 |
| 1960 | DMPK 3 forward 19:45769925-45769950 | GAGAGCAGCGCAAGTGAGGAGG | SpCas9 |
| 1961 | DMPK 3 forward 19:45769926-45769950 | AGAGCAGCGCAAGTGAGGAGG | SpCas9 |
| 1962 | DMPK 3 forward 19:45769927-45769950 | GAGCAGCGCAAGTGAGGAGG | SpCas9 |
| 1963 | DMPK 3 forward 19:45769928-45769950 | AGCAGCGCAAGTGAGGAGG | SpCas9 |
| 1964 | DMPK 3 forward 19:45769929-45769950 | GCAGCGCAAGTGAGGAGG | SpCas9 |
| 1965 | DMPK 3 forward 19:45769923-45769951 | CCGAGAGCAGCGCAAGTGAGGAGGG | SpCas9 |
| 1966 | DMPK 3 forward 19:45769924-45769951 | CGAGAGCAGCGCAAGTGAGGAGGG | SpCas9 |
| 1967 | DMPK 3 forward 19:45769925-45769951 | GAGAGCAGCGCAAGTGAGGAGGG | SpCas9 |
| 1968 | DMPK 3 forward 19:45769926-45769951 | AGAGCAGCGCAAGTGAGGAGGG | SpCas9 |
| 1969 | DMPK 3 forward 19:45769927-45769951 | GAGCAGCGCAAGTGAGGAGGG | SpCas9 |
| 1970 | DMPK 3 forward 19:45769928-45769951 | AGCAGCGCAAGTGAGGAGGG | SpCas9 |
| 1971 | DMPK 3 forward 19:45769929-45769951 | GCAGCGCAAGTGAGGAGGG | SpCas9 |
| 1972 | DMPK 3 forward 19:45769930-45769951 | CAGCGCAAGTGAGGAGGG | SpCas9 |
| 1973 | DMPK 3 reverse 19:45769923-45769951 | CCCCCCTCCTCACTTGCGCTGCTCT | SpCas9 |
| 1974 | DMPK 3 reverse 19:45769924-45769951 | CCCCCTCCTCACTTGCGCTGCTCT | SpCas9 |
| 1975 | DMPK 3 reverse 19:45769925-45769951 | CCCCTCCTCACTTGCGCTGCTCT | SpCas9 |
| 1976 | DMPK 3 reverse 19:45769926-45769951 | CCCTCCTCACTTGCGCTGCTCT | SpCas9 |
| 1977 | DMPK 3 reverse 19:45769927-45769951 | CCTCCTCACTTGCGCTGCTCT | SpCas9 |
| 1978 | DMPK 3 reverse 19:45769928-45769951 | CTCCTCACTTGCGCTGCTCT | SpCas9 |
| 1979 | DMPK 3 reverse 19:45769929-45769951 | TCCTCACTTGCGCTGCTCT | SpCas9 |
| 1980 | DMPK 3 reverse 19:45769930-45769951 | CCTCACTTGCGCTGCTCT | SpCas9 |
| 1981 | DMPK 3 forward 19:45769928-45769956 | AGCAGCGCAAGTGAGGAGGGGGGCG | SpCas9 |
| 1982 | DMPK 3 forward 19:45769929-45769956 | GCAGCGCAAGTGAGGAGGGGGGCG | SpCas9 |
| 1983 | DMPK 3 forward 19:45769930-45769956 | CAGCGCAAGTGAGGAGGGGGGCG | SpCas9 |
| 1984 | DMPK 3 forward 19:45769931-45769956 | AGCGCAAGTGAGGAGGGGGGCG | SpCas9 |
| 1985 | DMPK 3 forward 19:45769932-45769956 | GCGCAAGTGAGGAGGGGGGCG | SpCas9 |
| 1986 | DMPK 3 forward 19:45769933-45769956 | CGCAAGTGAGGAGGGGGGCG | SpCas9 |
| 1987 | DMPK 3 forward 19:45769934-45769956 | GCAAGTGAGGAGGGGGGCG | SpCas9 |
| 1988 | DMPK 3 forward 19:45769935-45769956 | CAAGTGAGGAGGGGGGCG | SpCas9 |
| 1989 | DMPK 3 forward 19:45769929-45769957 | GCAGCGCAAGTGAGGAGGGGGGCGC | SpCas9 |
| 1990 | DMPK 3 forward 19:45769930-45769957 | CAGCGCAAGTGAGGAGGGGGGCGC | SpCas9 |
| 1991 | DMPK 3 forward 19:45769931-45769957 | AGCGCAAGTGAGGAGGGGGGCGC | SpCas9 |
| 1992 | DMPK 3 forward 19:45769932-45769957 | GCGCAAGTGAGGAGGGGGGCGC | SpCas9 |
| 1993 | DMPK 3 forward 19:45769933-45769957 | CGCAAGTGAGGAGGGGGGCGC | SpCas9 |
| 1994 | DMPK 3 forward 19:45769934-45769957 | GCAAGTGAGGAGGGGGGCGC | SpCas9 |
| 1995 | DMPK 3 forward 19:45769935-45769957 | CAAGTGAGGAGGGGGGCGC | SpCas9 |
| 1996 | DMPK 3 forward 19:45769936-45769957 | AAGTGAGGAGGGGGGCGC | SpCas9 |
| 1997 | DMPK 3 forward 19:45769942-45769970 | GGAGGGGGGCGCGGGATCCCCGAAA | SpCas9 |
| 1998 | DMPK 3 forward 19:45769943-45769970 | GAGGGGGGCGCGGGATCCCCGAAA | SpCas9 |
| 1999 | DMPK 3 forward 19:45769944-45769970 | AGGGGGGCGCGGGATCCCCGAAA | SpCas9 |
| 2000 | DMPK 3 forward 19:45769945-45769970 | GGGGGGCGCGGGATCCCCGAAA | SpCas9 |
| 2001 | DMPK 3 forward 19:45769946-45769970 | GGGGGCGCGGGATCCCCGAAA | SpCas9 |
| 2002 | DMPK 3 forward 19:45769947-45769970 | GGGGCGCGGGATCCCCGAAA | SpCas9 |
| 2003 | DMPK 3 forward 19:45769948-45769970 | GGGCGCGGGATCCCCGAAA | SpCas9 |
| 2004 | DMPK 3 forward 19:45769949-45769970 | GGCGCGGGATCCCCGAAA | SpCas9 |
| 2005 | DMPK 3 forward 19:45769945-45769973 | GGGGGGCGCGGGATCCCCGAAAAAG | SpCas9 |
| 2006 | DMPK 3 forward 19:45769946-45769973 | GGGGGCGCGGGATCCCCGAAAAAG | SpCas9 |
| 2007 | DMPK 3 forward 19:45769947-45769973 | GGGGCGCGGGATCCCCGAAAAAG | SpCas9 |
| 2008 | DMPK 3 forward 19:45769948-45769973 | GGGCGCGGGATCCCCGAAAAAG | SpCas9 |
| 2009 | DMPK 3 forward 19:45769949-45769973 | GGCGCGGGATCCCCGAAAAAG | SpCas9 |
| 2010 | DMPK 3 forward 19:45769950-45769973 | GCGCGGGATCCCCGAAAAAG | SpCas9 |
| 2011 | DMPK 3 forward 19:45769951-45769973 | CGCGGGATCCCCGAAAAAG | SpCas9 |
| 2012 | DMPK 3 forward 19:45769952-45769973 | GCGGGATCCCCGAAAAAG | SpCas9 |
| 2013 | DMPK 3 forward 19:45769946-45769974 | GGGGGCGCGGGATCCCCGAAAAAGC | SpCas9 |
| 2014 | DMPK 3 forward 19:45769947-45769974 | GGGGCGCGGGATCCCCGAAAAAGC | SpCas9 |
| 2015 | DMPK 3 forward 19:45769948-45769974 | GGGCGCGGGATCCCCGAAAAAGC | SpCas9 |
| 2016 | DMPK 3 forward 19:45769949-45769974 | GGCGCGGGATCCCCGAAAAAGC | SpCas9 |
| 2017 | DMPK 3 forward 19:45769950-45769974 | GCGCGGGATCCCCGAAAAAGC | SpCas9 |
| 2018 | DMPK 3 forward 19:45769951-45769974 | CGCGGGATCCCCGAAAAAGC | SpCas9 |
| 2019 | DMPK 3 forward 19:45769952-45769974 | GCGGGATCCCCGAAAAAGC | SpCas9 |
| 2020 | DMPK 3 forward 19:45769953-45769974 | CGGGATCCCCGAAAAAGC | SpCas9 |
| 2021 | DMPK 3 forward 19:45769951-45769979 | CGCGGGATCCCCGAAAAAGCGGGTT | SpCas9 |
| 2022 | DMPK 3 forward 19:45769952-45769979 | GCGGGATCCCCGAAAAAGCGGGTT | SpCas9 |
| 2023 | DMPK 3 forward 19:45769953-45769979 | CGGGATCCCCGAAAAAGCGGGTT | SpCas9 |
| 2024 | DMPK 3 forward 19:45769954-45769979 | GGGATCCCCGAAAAAGCGGGTT | SpCas9 |
| 2025 | DMPK 3 forward 19:45769955-45769979 | GGATCCCCGAAAAAGCGGGTT | SpCas9 |
| 2026 | DMPK 3 forward 19:45769956-45769979 | GATCCCCGAAAAAGCGGGTT | SpCas9 |
| 2027 | DMPK 3 forward 19:45769957-45769979 | ATCCCCGAAAAAGCGGGTT | SpCas9 |
| 2028 | DMPK 3 forward 19:45769958-45769979 | TCCCCGAAAAAGCGGGTT | SpCas9 |
| 2029 | DMPK 3 forward 19:45769957-45769985 | ATCCCCGAAAAAGCGGGTTTGGCAA | SpCas9 |
| 2030 | DMPK 3 forward 19:45769958-45769985 | TCCCCGAAAAAGCGGGTTTGGCAA | SpCas9 |
| 2031 | DMPK 3 forward 19:45769959-45769985 | CCCCGAAAAAGCGGGTTTGGCAA | SpCas9 |
| 2032 | DMPK 3 forward 19:45769960-45769985 | CCCGAAAAAGCGGGTTTGGCAA | SpCas9 |
| 2033 | DMPK 3 forward 19:45769961-45769985 | CCGAAAAAGCGGGTTTGGCAA | SpCas9 |
| 2034 | DMPK 3 forward 19:45769962-45769985 | CGAAAAAGCGGGTTTGGCAA | SpCas9 |
| 2035 | DMPK 3 forward 19:45769963-45769985 | GAAAAAGCGGGTTTGGCAA | SpCas9 |
| 2036 | DMPK 3 forward 19:45769964-45769985 | AAAAAGCGGGTTTGGCAA | SpCas9 |
| 2037 | DMPK 3 reverse 19:45769959-45769987 | TGCTTTTGCCAAACCCGCTTTTTCG | SpCas9 |
| 2038 | DMPK 3 reverse 19:45769960-45769987 | GCTTTTGCCAAACCCGCTTTTTCG | SpCas9 |
| 2039 | DMPK 3 reverse 19:45769961-45769987 | CTTTTGCCAAACCCGCTTTTTCG | SpCas9 |
| 2040 | DMPK 3 reverse 19:45769962-45769987 | TTTTGCCAAACCCGCTTTTTCG | SpCas9 |
| 2041 | DMPK 3 reverse 19:45769963-45769987 | TTTGCCAAACCCGCTTTTTCG | SpCas9 |
| 2042 | DMPK 3 reverse 19:45769964-45769987 | TTGCCAAACCCGCTTTTTCG | SpCas9 |
| 2043 | DMPK 3 reverse 19:45769965-45769987 | TGCCAAACCCGCTTTTTCG | SpCas9 |
| 2044 | DMPK 3 reverse 19:45769966-45769987 | GCCAAACCCGCTTTTTCG | SpCas9 |
| 2045 | DMPK 3 reverse 19:45769960-45769988 | TTGCTTTTGCCAAACCCGCTTTTTC | SpCas9 |
| 2046 | DMPK 3 reverse 19:45769961-45769988 | TGCTTTTGCCAAACCCGCTTTTTC | SpCas9 |
| 2047 | DMPK 3 reverse 19:45769962-45769988 | GCTTTTGCCAAACCCGCTTTTTC | SpCas9 |
| 2048 | DMPK 3 reverse 19:45769963-45769988 | CTTTTGCCAAACCCGCTTTTTC | SpCas9 |
| 2049 | DMPK 3 reverse 19:45769964-45769988 | TTTTGCCAAACCCGCTTTTTC | SpCas9 |
| 2050 | DMPK 3 reverse 19:45769965-45769988 | TTTGCCAAACCCGCTTTTTC | SpCas9 |
| 2051 | DMPK 3 reverse 19:45769966-45769988 | TTGCCAAACCCGCTTTTTC | SpCas9 |
| 2052 | DMPK 3 reverse 19:45769967-45769988 | TGCCAAACCCGCTTTTTC | SpCas9 |
| 2053 | DMPK 3 reverse 19:45769961-45769989 | TTTGCTTTTGCCAAACCCGCTTTTT | SpCas9 |
| 2054 | DMPK 3 reverse 19:45769962-45769989 | TTGCTTTTGCCAAACCCGCTTTTT | SpCas9 |
| 2055 | DMPK 3 reverse 19:45769963-45769989 | TGCTTTTGCCAAACCCGCTTTTT | SpCas9 |
| 2056 | DMPK 3 reverse 19:45769964-45769989 | GCTTTTGCCAAACCCGCTTTTT | SpCas9 |
| 2057 | DMPK 3 reverse 19:45769965-45769989 | CTTTTGCCAAACCCGCTTTTT | SpCas9 |
| 2058 | DMPK 3 reverse 19:45769966-45769989 | TTTTGCCAAACCCGCTTTTT | SpCas9 |
| 2059 | DMPK 3 reverse 19:45769967-45769989 | TTTGCCAAACCCGCTTTTT | SpCas9 |
| 2060 | DMPK 3 reverse 19:45769968-45769989 | TTGCCAAACCCGCTTTTT | SpCas9 |
| 2061 | DMPK 3 forward 19:45769970-45769998 | CGGGTTTGGCAAAAGCAAATTTCCC | SpCas9 |
| 2062 | DMPK 3 forward 19:45769971-45769998 | GGGTTTGGCAAAAGCAAATTTCCC | SpCas9 |
| 2063 | DMPK 3 forward 19:45769972-45769998 | GGTTTGGCAAAAGCAAATTTCCC | SpCas9 |
| 2064 | DMPK 3 forward 19:45769973-45769998 | GTTTGGCAAAAGCAAATTTCCC | SpCas9 |
| 2065 | DMPK 3 forward 19:45769974-45769998 | TTTGGCAAAAGCAAATTTCCC | SpCas9 |
| 2066 | DMPK 3 forward 19:45769975-45769998 | TTGGCAAAAGCAAATTTCCC | SpCas9 |
| 2067 | DMPK 3 forward 19:45769976-45769998 | TGGCAAAAGCAAATTTCCC | SpCas9 |
| 2068 | DMPK 3 forward 19:45769977-45769998 | GGCAAAAGCAAATTTCCC | SpCas9 |
| 2069 | DMPK 3 forward 19:45769974-45770002 | TTTGGCAAAAGCAAATTTCCCGAGT | SpCas9 |
| 2070 | DMPK 3 forward 19:45769975-45770002 | TTGGCAAAAGCAAATTTCCCGAGT | SpCas9 |
| 2071 | DMPK 3 forward 19:45769976-45770002 | TGGCAAAAGCAAATTTCCCGAGT | SpCas9 |
| 2072 | DMPK 3 forward 19:45769977-45770002 | GGCAAAAGCAAATTTCCCGAGT | SpCas9 |
| 2073 | DMPK 3 forward 19:45769978-45770002 | GCAAAAGCAAATTTCCCGAGT | SpCas9 |
| 2074 | DMPK 3 forward 19:45769979-45770002 | CAAAAGCAAATTTCCCGAGT | SpCas9 |
| 2075 | DMPK 3 forward 19:45769980-45770002 | AAAAGCAAATTTCCCGAGT | SpCas9 |
| 2076 | DMPK 3 forward 19:45769981-45770002 | AAAGCAAATTTCCCGAGT | SpCas9 |
| 2077 | DMPK 3 forward 19:45769977-45770005 | GGCAAAAGCAAATTTCCCGAGTAAG | SpCas9 |
| 2078 | DMPK 3 forward 19:45769978-45770005 | GCAAAAGCAAATTTCCCGAGTAAG | SpCas9 |
| 2079 | DMPK 3 forward 19:45769979-45770005 | CAAAAGCAAATTTCCCGAGTAAG | SpCas9 |
| 2080 | DMPK 3 forward 19:45769980-45770005 | AAAAGCAAATTTCCCGAGTAAG | SpCas9 |
| 2081 | DMPK 3 forward 19:45769981-45770005 | AAAGCAAATTTCCCGAGTAAG | SpCas9 |
| 2082 | DMPK 3 forward 19:45769982-45770005 | AAGCAAATTTCCCGAGTAAG | SpCas9 |
| 2083 | DMPK 3 forward 19:45769983-45770005 | AGCAAATTTCCCGAGTAAG | SpCas9 |
| 2084 | DMPK 3 forward 19:45769984-45770005 | GCAAATTTCCCGAGTAAG | SpCas9 |
| 2085 | DMPK 3 forward 19:45769978-45770006 | GCAAAAGCAAATTTCCCGAGTAAGC | SpCas9 |
| 2086 | DMPK 3 forward 19:45769979-45770006 | CAAAAGCAAATTTCCCGAGTAAGC | SpCas9 |
| 2087 | DMPK 3 forward 19:45769980-45770006 | AAAAGCAAATTTCCCGAGTAAGC | SpCas9 |
| 2088 | DMPK 3 forward 19:45769981-45770006 | AAAGCAAATTTCCCGAGTAAGC | SpCas9 |
| 2089 | DMPK 3 forward 19:45769982-45770006 | AAGCAAATTTCCCGAGTAAGC | SpCas9 |
| 2090 | DMPK 3 forward 19:45769983-45770006 | AGCAAATTTCCCGAGTAAGC | SpCas9 |
| 2091 | DMPK 3 forward 19:45769984-45770006 | GCAAATTTCCCGAGTAAGC | SpCas9 |
| 2092 | DMPK 3 forward 19:45769985-45770006 | CAAATTTCCCGAGTAAGC | SpCas9 |
| 2093 | DMPK 3 forward 19:45769981-45770009 | AAAGCAAATTTCCCGAGTAAGCAGG | SpCas9 |
| 2094 | DMPK 3 forward 19:45769982-45770009 | AAGCAAATTTCCCGAGTAAGCAGG | SpCas9 |
| 2095 | DMPK 3 forward 19:45769983-45770009 | AGCAAATTTCCCGAGTAAGCAGG | SpCas9 |
| 2096 | DMPK 3 forward 19:45769984-45770009 | GCAAATTTCCCGAGTAAGCAGG | SpCas9 |
| 2097 | DMPK 3 forward 19:45769985-45770009 | CAAATTTCCCGAGTAAGCAGG | SpCas9 |
| 2098 | DMPK 3 forward 19:45769986-45770009 | AAATTTCCCGAGTAAGCAGG | SpCas9 |
| 2099 | DMPK 3 forward 19:45769987-45770009 | AATTTCCCGAGTAAGCAGG | SpCas9 |
| 2100 | DMPK 3 forward 19:45769988-45770009 | ATTTCCCGAGTAAGCAGG | SpCas9 |
| 2101 | DMPK 3 forward 19:45769983-45770011 | AGCAAATTTCCCGAGTAAGCAGGCA | SpCas9 |
| 2102 | DMPK 3 forward 19:45769984-45770011 | GCAAATTTCCCGAGTAAGCAGGCA | SpCas9 |
| 2103 | DMPK 3 forward 19:45769985-45770011 | CAAATTTCCCGAGTAAGCAGGCA | SpCas9 |
| 2104 | DMPK 3 forward 19:45769986-45770011 | AAATTTCCCGAGTAAGCAGGCA | SpCas9 |
| 2105 | DMPK 3 forward 19:45769987-45770011 | AATTTCCCGAGTAAGCAGGCA | SpCas9 |
| 2106 | DMPK 3 forward 19:45769988-45770011 | ATTTCCCGAGTAAGCAGGCA | SpCas9 |
| 2107 | DMPK 3 forward 19:45769989-45770011 | TTTCCCGAGTAAGCAGGCA | SpCas9 |
| 2108 | DMPK 3 forward 19:45769990-45770011 | TTCCCGAGTAAGCAGGCA | SpCas9 |
| 2109 | DMPK 3 reverse 19:45769992-45770020 | TGGCGCGATCTCTGCCTGCTTACTC | SpCas9 |
| 2110 | DMPK 3 reverse 19:45769993-45770020 | GGCGCGATCTCTGCCTGCTTACTC | SpCas9 |
| 2111 | DMPK 3 reverse 19:45769994-45770020 | GCGCGATCTCTGCCTGCTTACTC | SpCas9 |
| 2112 | DMPK 3 reverse 19:45769995-45770020 | CGCGATCTCTGCCTGCTTACTC | SpCas9 |
| 2113 | DMPK 3 reverse 19:45769996-45770020 | GCGATCTCTGCCTGCTTACTC | SpCas9 |
| 2114 | DMPK 3 reverse 19:45769997-45770020 | CGATCTCTGCCTGCTTACTC | SpCas9 |
| 2115 | DMPK 3 reverse 19:45769998-45770020 | GATCTCTGCCTGCTTACTC | SpCas9 |
| 2116 | DMPK 3 reverse 19:45769999-45770020 | ATCTCTGCCTGCTTACTC | SpCas9 |
| 2117 | DMPK 3 forward 19:45769993-45770021 | CCGAGTAAGCAGGCAGAGATCGCGC | SpCas9 |
| 2118 | DMPK 3 forward 19:45769994-45770021 | CGAGTAAGCAGGCAGAGATCGCGC | SpCas9 |
| 2119 | DMPK 3 forward 19:45769995-45770021 | GAGTAAGCAGGCAGAGATCGCGC | SpCas9 |
| 2120 | DMPK 3 forward 19:45769996-45770021 | AGTAAGCAGGCAGAGATCGCGC | SpCas9 |
| 2121 | DMPK 3 forward 19:45769997-45770021 | GTAAGCAGGCAGAGATCGCGC | SpCas9 |
| 2122 | DMPK 3 forward 19:45769998-45770021 | TAAGCAGGCAGAGATCGCGC | SpCas9 |
| 2123 | DMPK 3 forward 19:45769999-45770021 | AAGCAGGCAGAGATCGCGC | SpCas9 |
| 2124 | DMPK 3 forward 19:45770000-45770021 | AGCAGGCAGAGATCGCGC | SpCas9 |
| 2125 | DMPK 3 reverse 19:45769993-45770021 | CTGGCGCGATCTCTGCCTGCTTACT | SpCas9 |
| 2126 | DMPK 3 reverse 19:45769994-45770021 | TGGCGCGATCTCTGCCTGCTTACT | SpCas9 |
| 2127 | DMPK 3 reverse 19:45769995-45770021 | GGCGCGATCTCTGCCTGCTTACT | SpCas9 |
| 2128 | DMPK 3 reverse 19:45769996-45770021 | GCGCGATCTCTGCCTGCTTACT | SpCas9 |
| 2129 | DMPK 3 reverse 19:45769997-45770021 | CGCGATCTCTGCCTGCTTACT | SpCas9 |
| 2130 | DMPK 3 reverse 19:45769998-45770021 | GCGATCTCTGCCTGCTTACT | SpCas9 |
| 2131 | DMPK 3 reverse 19:45769999-45770021 | CGATCTCTGCCTGCTTACT | SpCas9 |
| 2132 | DMPK 3 reverse 19:45770000-45770021 | GATCTCTGCCTGCTTACT | SpCas9 |
| 2133 | DMPK 3 forward 19:45770004-45770032 | GGCAGAGATCGCGCCAGACGCTCCC | SpCas9 |
| 2134 | DMPK 3 forward 19:45770005-45770032 | GCAGAGATCGCGCCAGACGCTCCC | SpCas9 |
| 2135 | DMPK 3 forward 19:45770006-45770032 | CAGAGATCGCGCCAGACGCTCCC | SpCas9 |
| 2136 | DMPK 3 forward 19:45770007-45770032 | AGAGATCGCGCCAGACGCTCCC | SpCas9 |
| 2137 | DMPK 3 forward 19:45770008-45770032 | GAGATCGCGCCAGACGCTCCC | SpCas9 |
| 2138 | DMPK 3 forward 19:45770009-45770032 | AGATCGCGCCAGACGCTCCC | SpCas9 |
| 2139 | DMPK 3 forward 19:45770010-45770032 | GATCGCGCCAGACGCTCCC | SpCas9 |
| 2140 | DMPK 3 forward 19:45770011-45770032 | ATCGCGCCAGACGCTCCC | SpCas9 |
| 2141 | DMPK 3 forward 19:45770006-45770034 | CAGAGATCGCGCCAGACGCTCCCCA | SpCas9 |
| 2142 | DMPK 3 forward 19:45770007-45770034 | AGAGATCGCGCCAGACGCTCCCCA | SpCas9 |
| 2143 | DMPK 3 forward 19:45770008-45770034 | GAGATCGCGCCAGACGCTCCCCA | SpCas9 |
| 2144 | DMPK 3 forward 19:45770009-45770034 | AGATCGCGCCAGACGCTCCCCA | SpCas9 |
| 2145 | DMPK 3 forward 19:45770010-45770034 | GATCGCGCCAGACGCTCCCCA | SpCas9 |
| 2146 | DMPK 3 forward 19:45770011-45770034 | ATCGCGCCAGACGCTCCCCA | SpCas9 |
| 2147 | DMPK 3 forward 19:45770012-45770034 | TCGCGCCAGACGCTCCCCA | SpCas9 |
| 2148 | DMPK 3 forward 19:45770013-45770034 | CGCGCCAGACGCTCCCCA | SpCas9 |
| 2149 | DMPK 3 forward 19:45770009-45770037 | AGATCGCGCCAGACGCTCCCCAGAG | SpCas9 |
| 2150 | DMPK 3 forward 19:45770010-45770037 | GATCGCGCCAGACGCTCCCCAGAG | SpCas9 |
| 2151 | DMPK 3 forward 19:45770011-45770037 | ATCGCGCCAGACGCTCCCCAGAG | SpCas9 |
| 2152 | DMPK 3 forward 19:45770012-45770037 | TCGCGCCAGACGCTCCCCAGAG | SpCas9 |
| 2153 | DMPK 3 forward 19:45770013-45770037 | CGCGCCAGACGCTCCCCAGAG | SpCas9 |
| 2154 | DMPK 3 forward 19:45770014-45770037 | GCGCCAGACGCTCCCCAGAG | SpCas9 |
| 2155 | DMPK 3 forward 19:45770015-45770037 | CGCCAGACGCTCCCCAGAG | SpCas9 |
| 2156 | DMPK 3 forward 19:45770016-45770037 | GCCAGACGCTCCCCAGAG | SpCas9 |
| 2157 | DMPK 3 forward 19:45770010-45770038 | GATCGCGCCAGACGCTCCCCAGAGC | SpCas9 |
| 2158 | DMPK 3 forward 19:45770011-45770038 | ATCGCGCCAGACGCTCCCCAGAGC | SpCas9 |
| 2159 | DMPK 3 forward 19:45770012-45770038 | TCGCGCCAGACGCTCCCCAGAGC | SpCas9 |
| 2160 | DMPK 3 forward 19:45770013-45770038 | CGCGCCAGACGCTCCCCAGAGC | SpCas9 |
| 2161 | DMPK 3 forward 19:45770014-45770038 | GCGCCAGACGCTCCCCAGAGC | SpCas9 |
| 2162 | DMPK 3 forward 19:45770015-45770038 | CGCCAGACGCTCCCCAGAGC | SpCas9 |
| 2163 | DMPK 3 forward 19:45770016-45770038 | GCCAGACGCTCCCCAGAGC | SpCas9 |
| 2164 | DMPK 3 forward 19:45770017-45770038 | CCAGACGCTCCCCAGAGC | SpCas9 |
| 2165 | DMPK 3 forward 19:45770011-45770039 | ATCGCGCCAGACGCTCCCCAGAGCA | SpCas9 |
| 2166 | DMPK 3 forward 19:45770012-45770039 | TCGCGCCAGACGCTCCCCAGAGCA | SpCas9 |
| 2167 | DMPK 3 forward 19:45770013-45770039 | CGCGCCAGACGCTCCCCAGAGCA | SpCas9 |
| 2168 | DMPK 3 forward 19:45770014-45770039 | GCGCCAGACGCTCCCCAGAGCA | SpCas9 |
| 2169 | DMPK 3 forward 19:45770015-45770039 | CGCCAGACGCTCCCCAGAGCA | SpCas9 |
| 2170 | DMPK 3 forward 19:45770016-45770039 | GCCAGACGCTCCCCAGAGCA | SpCas9 |
| 2171 | DMPK 3 forward 19:45770017-45770039 | CCAGACGCTCCCCAGAGCA | SpCas9 |
| 2172 | DMPK 3 forward 19:45770018-45770039 | CAGACGCTCCCCAGAGCA | SpCas9 |
| 2173 | DMPK 3 reverse 19:45770017-45770045 | ATGACGCCCTGCTCTGGGGAGCGTC | SpCas9 |
| 2174 | DMPK 3 reverse 19:45770018-45770045 | TGACGCCCTGCTCTGGGGAGCGTC | SpCas9 |
| 2175 | DMPK 3 reverse 19:45770019-45770045 | GACGCCCTGCTCTGGGGAGCGTC | SpCas9 |
| 2176 | DMPK 3 reverse 19:45770020-45770045 | ACGCCCTGCTCTGGGGAGCGTC | SpCas9 |
| 2177 | DMPK 3 reverse 19:45770021-45770045 | CGCCCTGCTCTGGGGAGCGTC | SpCas9 |
| 2178 | DMPK 3 reverse 19:45770022-45770045 | GCCCTGCTCTGGGGAGCGTC | SpCas9 |
| 2179 | DMPK 3 reverse 19:45770023-45770045 | CCCTGCTCTGGGGAGCGTC | SpCas9 |
| 2180 | DMPK 3 reverse 19:45770024-45770045 | CCTGCTCTGGGGAGCGTC | SpCas9 |
| 2181 | DMPK 3 forward 19:45770024-45770052 | CTCCCCAGAGCAGGGCGTCATGCAC | SpCas9 |
| 2182 | DMPK 3 forward 19:45770025-45770052 | TCCCCAGAGCAGGGCGTCATGCAC | SpCas9 |
| 2183 | DMPK 3 forward 19:45770026-45770052 | CCCCAGAGCAGGGCGTCATGCAC | SpCas9 |
| 2184 | DMPK 3 forward 19:45770027-45770052 | CCCAGAGCAGGGCGTCATGCAC | SpCas9 |
| 2185 | DMPK 3 forward 19:45770028-45770052 | CCAGAGCAGGGCGTCATGCAC | SpCas9 |
| 2186 | DMPK 3 forward 19:45770029-45770052 | CAGAGCAGGGCGTCATGCAC | SpCas9 |
| 2187 | DMPK 3 forward 19:45770030-45770052 | AGAGCAGGGCGTCATGCAC | SpCas9 |
| 2188 | DMPK 3 forward 19:45770031-45770052 | GAGCAGGGCGTCATGCAC | SpCas9 |
| 2189 | DMPK 3 reverse 19:45770024-45770052 | CTTGTGCATGACGCCCTGCTCTGGG | SpCas9 |
| 2190 | DMPK 3 reverse 19:45770025-45770052 | TTGTGCATGACGCCCTGCTCTGGG | SpCas9 |
| 2191 | DMPK 3 reverse 19:45770026-45770052 | TGTGCATGACGCCCTGCTCTGGG | SpCas9 |
| 2192 | DMPK 3 reverse 19:45770027-45770052 | GTGCATGACGCCCTGCTCTGGG | SpCas9 |
| 2193 | DMPK 3 reverse 19:45770028-45770052 | TGCATGACGCCCTGCTCTGGG | SpCas9 |
| 2194 | DMPK 3 reverse 19:45770029-45770052 | GCATGACGCCCTGCTCTGGG | SpCas9 |
| 2195 | DMPK 3 reverse 19:45770030-45770052 | CATGACGCCCTGCTCTGGG | SpCas9 |
| 2196 | DMPK 3 reverse 19:45770031-45770052 | ATGACGCCCTGCTCTGGG | SpCas9 |
| 2197 | DMPK 3 reverse 19:45770026-45770054 | TTCTTGTGCATGACGCCCTGCTCTG | SpCas9 |
| 2198 | DMPK 3 reverse 19:45770027-45770054 | TCTTGTGCATGACGCCCTGCTCTG | SpCas9 |
| 2199 | DMPK 3 reverse 19:45770028-45770054 | CTTGTGCATGACGCCCTGCTCTG | SpCas9 |
| 2200 | DMPK 3 reverse 19:45770029-45770054 | TTGTGCATGACGCCCTGCTCTG | SpCas9 |
| 2201 | DMPK 3 reverse 19:45770030-45770054 | TGTGCATGACGCCCTGCTCTG | SpCas9 |
| 2202 | DMPK 3 reverse 19:45770031-45770054 | GTGCATGACGCCCTGCTCTG | SpCas9 |
| 2203 | DMPK 3 reverse 19:45770032-45770054 | TGCATGACGCCCTGCTCTG | SpCas9 |
| 2204 | DMPK 3 reverse 19:45770033-45770054 | GCATGACGCCCTGCTCTG | SpCas9 |
| 2205 | DMPK 3 reverse 19:45770027-45770055 | TTTCTTGTGCATGACGCCCTGCTCT | SpCas9 |
| 2206 | DMPK 3 reverse 19:45770028-45770055 | TTCTTGTGCATGACGCCCTGCTCT | SpCas9 |
| 2207 | DMPK 3 reverse 19:45770029-45770055 | TCTTGTGCATGACGCCCTGCTCT | SpCas9 |
| 2208 | DMPK 3 reverse 19:45770030-45770055 | CTTGTGCATGACGCCCTGCTCT | SpCas9 |
| 2209 | DMPK 3 reverse 19:45770031-45770055 | TTGTGCATGACGCCCTGCTCT | SpCas9 |
| 2210 | DMPK 3 reverse 19:45770032-45770055 | TGTGCATGACGCCCTGCTCT | SpCas9 |
| 2211 | DMPK 3 reverse 19:45770033-45770055 | GTGCATGACGCCCTGCTCT | SpCas9 |
| 2212 | DMPK 3 reverse 19:45770034-45770055 | TGCATGACGCCCTGCTCT | SpCas9 |
| 2213 | DMPK 3 forward 19:45770028-45770056 | CCAGAGCAGGGCGTCATGCACAAGA | SpCas9 |
| 2214 | DMPK 3 forward 19:45770029-45770056 | CAGAGCAGGGCGTCATGCACAAGA | SpCas9 |
| 2215 | DMPK 3 forward 19:45770030-45770056 | AGAGCAGGGCGTCATGCACAAGA | SpCas9 |
| 2216 | DMPK 3 forward 19:45770031-45770056 | GAGCAGGGCGTCATGCACAAGA | SpCas9 |
| 2217 | DMPK 3 forward 19:45770032-45770056 | AGCAGGGCGTCATGCACAAGA | SpCas9 |
| 2218 | DMPK 3 forward 19:45770033-45770056 | GCAGGGCGTCATGCACAAGA | SpCas9 |
| 2219 | DMPK 3 forward 19:45770034-45770056 | CAGGGCGTCATGCACAAGA | SpCas9 |
| 2220 | DMPK 3 forward 19:45770035-45770056 | AGGGCGTCATGCACAAGA | SpCas9 |
| 2221 | DMPK 3 reverse 19:45770028-45770056 | CTTTCTTGTGCATGACGCCCTGCTC | SpCas9 |
| 2222 | DMPK 3 reverse 19:45770029-45770056 | TTTCTTGTGCATGACGCCCTGCTC | SpCas9 |
| 2223 | DMPK 3 reverse 19:45770030-45770056 | TTCTTGTGCATGACGCCCTGCTC | SpCas9 |
| 2224 | DMPK 3 reverse 19:45770031-45770056 | TCTTGTGCATGACGCCCTGCTC | SpCas9 |
| 2225 | DMPK 3 reverse 19:45770032-45770056 | CTTGTGCATGACGCCCTGCTC | SpCas9 |
| 2226 | DMPK 3 reverse 19:45770033-45770056 | TTGTGCATGACGCCCTGCTC | SpCas9 |
| 2227 | DMPK 3 reverse 19:45770034-45770056 | TGTGCATGACGCCCTGCTC | SpCas9 |
| 2228 | DMPK 3 reverse 19:45770035-45770056 | GTGCATGACGCCCTGCTC | SpCas9 |
| 2229 | DMPK 3 forward 19:45770054-45770082 | AGCTTTGCACTTTGCGAACCAACGA | SpCas9 |
| 2230 | DMPK 3 forward 19:45770055-45770082 | GCTTTGCACTTTGCGAACCAACGA | SpCas9 |
| 2231 | DMPK 3 forward 19:45770056-45770082 | CTTTGCACTTTGCGAACCAACGA | SpCas9 |
| 2232 | DMPK 3 forward 19:45770057-45770082 | TTTGCACTTTGCGAACCAACGA | SpCas9 |
| 2233 | DMPK 3 forward 19:45770058-45770082 | TTGCACTTTGCGAACCAACGA | SpCas9 |
| 2234 | DMPK 3 forward 19:45770059-45770082 | TGCACTTTGCGAACCAACGA | SpCas9 |
| 2235 | DMPK 3 forward 19:45770060-45770082 | GCACTTTGCGAACCAACGA | SpCas9 |
| 2236 | DMPK 3 forward 19:45770061-45770082 | CACTTTGCGAACCAACGA | SpCas9 |
| 2237 | DMPK 3 forward 19:45770055-45770083 | GCTTTGCACTTTGCGAACCAACGAT | SpCas9 |
| 2238 | DMPK 3 forward 19:45770056-45770083 | CTTTGCACTTTGCGAACCAACGAT | SpCas9 |
| 2239 | DMPK 3 forward 19:45770057-45770083 | TTTGCACTTTGCGAACCAACGAT | SpCas9 |
| 2240 | DMPK 3 forward 19:45770058-45770083 | TTGCACTTTGCGAACCAACGAT | SpCas9 |
| 2241 | DMPK 3 forward 19:45770059-45770083 | TGCACTTTGCGAACCAACGAT | SpCas9 |
| 2242 | DMPK 3 forward 19:45770060-45770083 | GCACTTTGCGAACCAACGAT | SpCas9 |
| 2243 | DMPK 3 forward 19:45770061-45770083 | CACTTTGCGAACCAACGAT | SpCas9 |
| 2244 | DMPK 3 forward 19:45770062-45770083 | ACTTTGCGAACCAACGAT | SpCas9 |
| 2245 | DMPK 3 reverse 19:45770056-45770084 | ACCTATCGTTGGTTCGCAAAGTGCA | SpCas9 |
| 2246 | DMPK 3 reverse 19:45770057-45770084 | CCTATCGTTGGTTCGCAAAGTGCA | SpCas9 |
| 2247 | DMPK 3 reverse 19:45770058-45770084 | CTATCGTTGGTTCGCAAAGTGCA | SpCas9 |
| 2248 | DMPK 3 reverse 19:45770059-45770084 | TATCGTTGGTTCGCAAAGTGCA | SpCas9 |
| 2249 | DMPK 3 reverse 19:45770060-45770084 | ATCGTTGGTTCGCAAAGTGCA | SpCas9 |
| 2250 | DMPK 3 reverse 19:45770061-45770084 | TCGTTGGTTCGCAAAGTGCA | SpCas9 |
| 2251 | DMPK 3 reverse 19:45770062-45770084 | CGTTGGTTCGCAAAGTGCA | SpCas9 |
| 2252 | DMPK 3 reverse 19:45770063-45770084 | GTTGGTTCGCAAAGTGCA | SpCas9 |
| 2253 | DMPK 3 forward 19:45770058-45770086 | TTGCACTTTGCGAACCAACGATAGG | SpCas9 |
| 2254 | DMPK 3 forward 19:45770059-45770086 | TGCACTTTGCGAACCAACGATAGG | SpCas9 |
| 2255 | DMPK 3 forward 19:45770060-45770086 | GCACTTTGCGAACCAACGATAGG | SpCas9 |
| 2256 | DMPK 3 forward 19:45770061-45770086 | CACTTTGCGAACCAACGATAGG | SpCas9 |
| 2257 | DMPK 3 forward 19:45770062-45770086 | ACTTTGCGAACCAACGATAGG | SpCas9 |
| 2258 | DMPK 3 forward 19:45770063-45770086 | CTTTGCGAACCAACGATAGG | SpCas9 |
| 2259 | DMPK 3 forward 19:45770064-45770086 | TTTGCGAACCAACGATAGG | SpCas9 |
| 2260 | DMPK 3 forward 19:45770065-45770086 | TTGCGAACCAACGATAGG | SpCas9 |
| 2261 | DMPK 3 forward 19:45770059-45770087 | TGCACTTTGCGAACCAACGATAGGT | SpCas9 |
| 2262 | DMPK 3 forward 19:45770060-45770087 | GCACTTTGCGAACCAACGATAGGT | SpCas9 |
| 2263 | DMPK 3 forward 19:45770061-45770087 | CACTTTGCGAACCAACGATAGGT | SpCas9 |
| 2264 | DMPK 3 forward 19:45770062-45770087 | ACTTTGCGAACCAACGATAGGT | SpCas9 |
| 2265 | DMPK 3 forward 19:45770063-45770087 | CTTTGCGAACCAACGATAGGT | SpCas9 |
| 2266 | DMPK 3 forward 19:45770064-45770087 | TTTGCGAACCAACGATAGGT | SpCas9 |
| 2267 | DMPK 3 forward 19:45770065-45770087 | TTGCGAACCAACGATAGGT | SpCas9 |
| 2268 | DMPK 3 forward 19:45770066-45770087 | TGCGAACCAACGATAGGT | SpCas9 |
| 2269 | DMPK 3 forward 19:45770060-45770088 | GCACTTTGCGAACCAACGATAGGTG | SpCas9 |
| 2270 | DMPK 3 forward 19:45770061-45770088 | CACTTTGCGAACCAACGATAGGTG | SpCas9 |
| 2271 | DMPK 3 forward 19:45770062-45770088 | ACTTTGCGAACCAACGATAGGTG | SpCas9 |
| 2272 | DMPK 3 forward 19:45770063-45770088 | CTTTGCGAACCAACGATAGGTG | SpCas9 |
| 2273 | DMPK 3 forward 19:45770064-45770088 | TTTGCGAACCAACGATAGGTG | SpCas9 |
| 2274 | DMPK 3 forward 19:45770065-45770088 | TTGCGAACCAACGATAGGTG | SpCas9 |
| 2275 | DMPK 3 forward 19:45770066-45770088 | TGCGAACCAACGATAGGTG | SpCas9 |
| 2276 | DMPK 3 forward 19:45770067-45770088 | GCGAACCAACGATAGGTG | SpCas9 |
| 2277 | DMPK 3 forward 19:45770061-45770089 | CACTTTGCGAACCAACGATAGGTGG | SpCas9 |
| 2278 | DMPK 3 forward 19:45770062-45770089 | ACTTTGCGAACCAACGATAGGTGG | SpCas9 |
| 2279 | DMPK 3 forward 19:45770063-45770089 | CTTTGCGAACCAACGATAGGTGG | SpCas9 |
| 2280 | DMPK 3 forward 19:45770064-45770089 | TTTGCGAACCAACGATAGGTGG | SpCas9 |
| 2281 | DMPK 3 forward 19:45770065-45770089 | TTGCGAACCAACGATAGGTGG | SpCas9 |
| 2282 | DMPK 3 forward 19:45770066-45770089 | TGCGAACCAACGATAGGTGG | SpCas9 |
| 2283 | DMPK 3 forward 19:45770067-45770089 | GCGAACCAACGATAGGTGG | SpCas9 |
| 2284 | DMPK 3 forward 19:45770068-45770089 | CGAACCAACGATAGGTGG | SpCas9 |
| 2285 | DMPK 3 reverse 19:45770063-45770091 | CACCCCCACCTATCGTTGGTTCGCA | SpCas9 |
| 2286 | DMPK 3 reverse 19:45770064-45770091 | ACCCCCACCTATCGTTGGTTCGCA | SpCas9 |
| 2287 | DMPK 3 reverse 19:45770065-45770091 | CCCCCACCTATCGTTGGTTCGCA | SpCas9 |
| 2288 | DMPK 3 reverse 19:45770066-45770091 | CCCCACCTATCGTTGGTTCGCA | SpCas9 |
| 2289 | DMPK 3 reverse 19:45770067-45770091 | CCCACCTATCGTTGGTTCGCA | SpCas9 |
| 2290 | DMPK 3 reverse 19:45770068-45770091 | CCACCTATCGTTGGTTCGCA | SpCas9 |
| 2291 | DMPK 3 reverse 19:45770069-45770091 | CACCTATCGTTGGTTCGCA | SpCas9 |
| 2292 | DMPK 3 reverse 19:45770070-45770091 | ACCTATCGTTGGTTCGCA | SpCas9 |
| 2293 | DMPK 3 forward 19:45770068-45770096 | CGAACCAACGATAGGTGGGGGTGCG | SpCas9 |
| 2294 | DMPK 3 forward 19:45770069-45770096 | GAACCAACGATAGGTGGGGGTGCG | SpCas9 |
| 2295 | DMPK 3 forward 19:45770070-45770096 | AACCAACGATAGGTGGGGGTGCG | SpCas9 |
| 2296 | DMPK 3 forward 19:45770071-45770096 | ACCAACGATAGGTGGGGGTGCG | SpCas9 |
| 2297 | DMPK 3 forward 19:45770072-45770096 | CCAACGATAGGTGGGGGTGCG | SpCas9 |
| 2298 | DMPK 3 forward 19:45770073-45770096 | CAACGATAGGTGGGGGTGCG | SpCas9 |
| 2299 | DMPK 3 forward 19:45770074-45770096 | AACGATAGGTGGGGGTGCG | SpCas9 |
| 2300 | DMPK 3 forward 19:45770075-45770096 | ACGATAGGTGGGGGTGCG | SpCas9 |
| 2301 | DMPK 3 forward 19:45770070-45770098 | AACCAACGATAGGTGGGGGTGCGTG | SpCas9 |
| 2302 | DMPK 3 forward 19:45770071-45770098 | ACCAACGATAGGTGGGGGTGCGTG | SpCas9 |
| 2303 | DMPK 3 forward 19:45770072-45770098 | CCAACGATAGGTGGGGGTGCGTG | SpCas9 |
| 2304 | DMPK 3 forward 19:45770073-45770098 | CAACGATAGGTGGGGGTGCGTG | SpCas9 |
| 2305 | DMPK 3 forward 19:45770074-45770098 | AACGATAGGTGGGGGTGCGTG | SpCas9 |
| 2306 | DMPK 3 forward 19:45770075-45770098 | ACGATAGGTGGGGGTGCGTG | SpCas9 |
| 2307 | DMPK 3 forward 19:45770076-45770098 | CGATAGGTGGGGGTGCGTG | SpCas9 |
| 2308 | DMPK 3 forward 19:45770077-45770098 | GATAGGTGGGGGTGCGTG | SpCas9 |
| 2309 | DMPK 3 forward 19:45770071-45770099 | ACCAACGATAGGTGGGGGTGCGTGG | SpCas9 |
| 2310 | DMPK 3 forward 19:45770072-45770099 | CCAACGATAGGTGGGGGTGCGTGG | SpCas9 |
| 2311 | DMPK 3 forward 19:45770073-45770099 | CAACGATAGGTGGGGGTGCGTGG | SpCas9 |
| 2312 | DMPK 3 forward 19:45770074-45770099 | AACGATAGGTGGGGGTGCGTGG | SpCas9 |
| 2313 | DMPK 3 forward 19:45770075-45770099 | ACGATAGGTGGGGGTGCGTGG | SpCas9 |
| 2314 | DMPK 3 forward 19:45770076-45770099 | CGATAGGTGGGGGTGCGTGG | SpCas9 |
| 2315 | DMPK 3 forward 19:45770077-45770099 | GATAGGTGGGGGTGCGTGG | SpCas9 |
| 2316 | DMPK 3 forward 19:45770078-45770099 | ATAGGTGGGGGTGCGTGG | SpCas9 |
| 2317 | DMPK 3 reverse 19:45770072-45770100 | TCCTCCACGCACCCCCACCTATCGT | SpCas9 |
| 2318 | DMPK 3 reverse 19:45770073-45770100 | CCTCCACGCACCCCCACCTATCGT | SpCas9 |
| 2319 | DMPK 3 reverse 19:45770074-45770100 | CTCCACGCACCCCCACCTATCGT | SpCas9 |
| 2320 | DMPK 3 reverse 19:45770075-45770100 | TCCACGCACCCCCACCTATCGT | SpCas9 |
| 2321 | DMPK 3 reverse 19:45770076-45770100 | CCACGCACCCCCACCTATCGT | SpCas9 |
| 2322 | DMPK 3 reverse 19:45770077-45770100 | CACGCACCCCCACCTATCGT | SpCas9 |
| 2323 | DMPK 3 reverse 19:45770078-45770100 | ACGCACCCCCACCTATCGT | SpCas9 |
| 2324 | DMPK 3 reverse 19:45770079-45770100 | CGCACCCCCACCTATCGT | SpCas9 |
| 2325 | DMPK 3 forward 19:45770075-45770103 | ACGATAGGTGGGGGTGCGTGGAGGA | SpCas9 |
| 2326 | DMPK 3 forward 19:45770076-45770103 | CGATAGGTGGGGGTGCGTGGAGGA | SpCas9 |
| 2327 | DMPK 3 forward 19:45770077-45770103 | GATAGGTGGGGGTGCGTGGAGGA | SpCas9 |
| 2328 | DMPK 3 forward 19:45770078-45770103 | ATAGGTGGGGGTGCGTGGAGGA | SpCas9 |
| 2329 | DMPK 3 forward 19:45770079-45770103 | TAGGTGGGGGTGCGTGGAGGA | SpCas9 |
| 2330 | DMPK 3 forward 19:45770080-45770103 | AGGTGGGGGTGCGTGGAGGA | SpCas9 |
| 2331 | DMPK 3 forward 19:45770081-45770103 | GGTGGGGGTGCGTGGAGGA | SpCas9 |
| 2332 | DMPK 3 forward 19:45770082-45770103 | GTGGGGGTGCGTGGAGGA | SpCas9 |
| 2333 | DMPK 3 forward 19:45770082-45770110 | GTGGGGGTGCGTGGAGGATGGAACA | SpCas9 |
| 2334 | DMPK 3 forward 19:45770083-45770110 | TGGGGGTGCGTGGAGGATGGAACA | SpCas9 |
| 2335 | DMPK 3 forward 19:45770084-45770110 | GGGGGTGCGTGGAGGATGGAACA | SpCas9 |
| 2336 | DMPK 3 forward 19:45770085-45770110 | GGGGTGCGTGGAGGATGGAACA | SpCas9 |
| 2337 | DMPK 3 forward 19:45770086-45770110 | GGGTGCGTGGAGGATGGAACA | SpCas9 |
| 2338 | DMPK 3 forward 19:45770087-45770110 | GGTGCGTGGAGGATGGAACA | SpCas9 |
| 2339 | DMPK 3 forward 19:45770088-45770110 | GTGCGTGGAGGATGGAACA | SpCas9 |
| 2340 | DMPK 3 forward 19:45770089-45770110 | TGCGTGGAGGATGGAACA | SpCas9 |
| 2341 | DMPK 3 forward 19:45770086-45770114 | GGGTGCGTGGAGGATGGAACACGGA | SpCas9 |
| 2342 | DMPK 3 forward 19:45770087-45770114 | GGTGCGTGGAGGATGGAACACGGA | SpCas9 |
| 2343 | DMPK 3 forward 19:45770088-45770114 | GTGCGTGGAGGATGGAACACGGA | SpCas9 |
| 2344 | DMPK 3 forward 19:45770089-45770114 | TGCGTGGAGGATGGAACACGGA | SpCas9 |
| 2345 | DMPK 3 forward 19:45770090-45770114 | GCGTGGAGGATGGAACACGGA | SpCas9 |
| 2346 | DMPK 3 forward 19:45770091-45770114 | CGTGGAGGATGGAACACGGA | SpCas9 |
| 2347 | DMPK 3 forward 19:45770092-45770114 | GTGGAGGATGGAACACGGA | SpCas9 |
| 2348 | DMPK 3 forward 19:45770093-45770114 | TGGAGGATGGAACACGGA | SpCas9 |
| 2349 | DMPK 3 forward 19:45770091-45770119 | CGTGGAGGATGGAACACGGACGGCC | SpCas9 |
| 2350 | DMPK 3 forward 19:45770092-45770119 | GTGGAGGATGGAACACGGACGGCC | SpCas9 |
| 2351 | DMPK 3 forward 19:45770093-45770119 | TGGAGGATGGAACACGGACGGCC | SpCas9 |
| 2352 | DMPK 3 forward 19:45770094-45770119 | GGAGGATGGAACACGGACGGCC | SpCas9 |
| 2353 | DMPK 3 forward 19:45770095-45770119 | GAGGATGGAACACGGACGGCC | SpCas9 |
| 2354 | DMPK 3 forward 19:45770096-45770119 | AGGATGGAACACGGACGGCC | SpCas9 |
| 2355 | DMPK 3 forward 19:45770097-45770119 | GGATGGAACACGGACGGCC | SpCas9 |
| 2356 | DMPK 3 forward 19:45770098-45770119 | GATGGAACACGGACGGCC | SpCas9 |
| 2357 | DMPK 3 forward 19:45770107-45770135 | CGGACGGCCCGGCTTGCTGCCTTCC | SpCas9 |
| 2358 | DMPK 3 forward 19:45770108-45770135 | GGACGGCCCGGCTTGCTGCCTTCC | SpCas9 |
| 2359 | DMPK 3 forward 19:45770109-45770135 | GACGGCCCGGCTTGCTGCCTTCC | SpCas9 |
| 2360 | DMPK 3 forward 19:45770110-45770135 | ACGGCCCGGCTTGCTGCCTTCC | SpCas9 |
| 2361 | DMPK 3 forward 19:45770111-45770135 | CGGCCCGGCTTGCTGCCTTCC | SpCas9 |
| 2362 | DMPK 3 forward 19:45770112-45770135 | GGCCCGGCTTGCTGCCTTCC | SpCas9 |
| 2363 | DMPK 3 forward 19:45770113-45770135 | GCCCGGCTTGCTGCCTTCC | SpCas9 |
| 2364 | DMPK 3 forward 19:45770114-45770135 | CCCGGCTTGCTGCCTTCC | SpCas9 |
| 2365 | DMPK 3 forward 19:45770108-45770136 | GGACGGCCCGGCTTGCTGCCTTCCC | SpCas9 |
| 2366 | DMPK 3 forward 19:45770109-45770136 | GACGGCCCGGCTTGCTGCCTTCCC | SpCas9 |
| 2367 | DMPK 3 forward 19:45770110-45770136 | ACGGCCCGGCTTGCTGCCTTCCC | SpCas9 |
| 2368 | DMPK 3 forward 19:45770111-45770136 | CGGCCCGGCTTGCTGCCTTCCC | SpCas9 |
| 2369 | DMPK 3 forward 19:45770112-45770136 | GGCCCGGCTTGCTGCCTTCCC | SpCas9 |
| 2370 | DMPK 3 forward 19:45770113-45770136 | GCCCGGCTTGCTGCCTTCCC | SpCas9 |
| 2371 | DMPK 3 forward 19:45770114-45770136 | CCCGGCTTGCTGCCTTCCC | SpCas9 |
| 2372 | DMPK 3 forward 19:45770115-45770136 | CCGGCTTGCTGCCTTCCC | SpCas9 |
| 2373 | DMPK 3 reverse 19:45770114-45770142 | TGCAGGCCTGGGAAGGCAGCAAGCC | SpCas9 |
| 2374 | DMPK 3 reverse 19:45770115-45770142 | GCAGGCCTGGGAAGGCAGCAAGCC | SpCas9 |
| 2375 | DMPK 3 reverse 19:45770116-45770142 | CAGGCCTGGGAAGGCAGCAAGCC | SpCas9 |
| 2376 | DMPK 3 reverse 19:45770117-45770142 | AGGCCTGGGAAGGCAGCAAGCC | SpCas9 |
| 2377 | DMPK 3 reverse 19:45770118-45770142 | GGCCTGGGAAGGCAGCAAGCC | SpCas9 |
| 2378 | DMPK 3 reverse 19:45770119-45770142 | GCCTGGGAAGGCAGCAAGCC | SpCas9 |
| 2379 | DMPK 3 reverse 19:45770120-45770142 | CCTGGGAAGGCAGCAAGCC | SpCas9 |
| 2380 | DMPK 3 reverse 19:45770121-45770142 | CTGGGAAGGCAGCAAGCC | SpCas9 |
| 2381 | DMPK 3 forward 19:45770115-45770143 | CCGGCTTGCTGCCTTCCCAGGCCTG | SpCas9 |
| 2382 | DMPK 3 forward 19:45770116-45770143 | CGGCTTGCTGCCTTCCCAGGCCTG | SpCas9 |
| 2383 | DMPK 3 forward 19:45770117-45770143 | GGCTTGCTGCCTTCCCAGGCCTG | SpCas9 |
| 2384 | DMPK 3 forward 19:45770118-45770143 | GCTTGCTGCCTTCCCAGGCCTG | SpCas9 |
| 2385 | DMPK 3 forward 19:45770119-45770143 | CTTGCTGCCTTCCCAGGCCTG | SpCas9 |
| 2386 | DMPK 3 forward 19:45770120-45770143 | TTGCTGCCTTCCCAGGCCTG | SpCas9 |
| 2387 | DMPK 3 forward 19:45770121-45770143 | TGCTGCCTTCCCAGGCCTG | SpCas9 |
| 2388 | DMPK 3 forward 19:45770122-45770143 | GCTGCCTTCCCAGGCCTG | SpCas9 |
| 2389 | DMPK 3 reverse 19:45770115-45770143 | CTGCAGGCCTGGGAAGGCAGCAAGC | SpCas9 |
| 2390 | DMPK 3 reverse 19:45770116-45770143 | TGCAGGCCTGGGAAGGCAGCAAGC | SpCas9 |
| 2391 | DMPK 3 reverse 19:45770117-45770143 | GCAGGCCTGGGAAGGCAGCAAGC | SpCas9 |
| 2392 | DMPK 3 reverse 19:45770118-45770143 | CAGGCCTGGGAAGGCAGCAAGC | SpCas9 |
| 2393 | DMPK 3 reverse 19:45770119-45770143 | AGGCCTGGGAAGGCAGCAAGC | SpCas9 |
| 2394 | DMPK 3 reverse 19:45770120-45770143 | GGCCTGGGAAGGCAGCAAGC | SpCas9 |
| 2395 | DMPK 3 reverse 19:45770121-45770143 | GCCTGGGAAGGCAGCAAGC | SpCas9 |
| 2396 | DMPK 3 reverse 19:45770122-45770143 | CCTGGGAAGGCAGCAAGC | SpCas9 |
| 2397 | DMPK 3 reverse 19:45770119-45770147 | CAAACTGCAGGCCTGGGAAGGCAGC | SpCas9 |
| 2398 | DMPK 3 reverse 19:45770120-45770147 | AAACTGCAGGCCTGGGAAGGCAGC | SpCas9 |
| 2399 | DMPK 3 reverse 19:45770121-45770147 | AACTGCAGGCCTGGGAAGGCAGC | SpCas9 |
| 2400 | DMPK 3 reverse 19:45770122-45770147 | ACTGCAGGCCTGGGAAGGCAGC | SpCas9 |
| 2401 | DMPK 3 reverse 19:45770123-45770147 | CTGCAGGCCTGGGAAGGCAGC | SpCas9 |
| 2402 | DMPK 3 reverse 19:45770124-45770147 | TGCAGGCCTGGGAAGGCAGC | SpCas9 |
| 2403 | DMPK 3 reverse 19:45770125-45770147 | GCAGGCCTGGGAAGGCAGC | SpCas9 |
| 2404 | DMPK 3 reverse 19:45770126-45770147 | CAGGCCTGGGAAGGCAGC | SpCas9 |
| 2405 | DMPK 3 reverse 19:45770123-45770151 | TGGGCAAACTGCAGGCCTGGGAAGG | SpCas9 |
| 2406 | DMPK 3 reverse 19:45770124-45770151 | GGGCAAACTGCAGGCCTGGGAAGG | SpCas9 |
| 2407 | DMPK 3 reverse 19:45770125-45770151 | GGCAAACTGCAGGCCTGGGAAGG | SpCas9 |
| 2408 | DMPK 3 reverse 19:45770126-45770151 | GCAAACTGCAGGCCTGGGAAGG | SpCas9 |
| 2409 | DMPK 3 reverse 19:45770127-45770151 | CAAACTGCAGGCCTGGGAAGG | SpCas9 |
| 2410 | DMPK 3 reverse 19:45770128-45770151 | AAACTGCAGGCCTGGGAAGG | SpCas9 |
| 2411 | DMPK 3 reverse 19:45770129-45770151 | AACTGCAGGCCTGGGAAGG | SpCas9 |
| 2412 | DMPK 3 reverse 19:45770130-45770151 | ACTGCAGGCCTGGGAAGG | SpCas9 |
| 2413 | DMPK 3 reverse 19:45770126-45770154 | GGATGGGCAAACTGCAGGCCTGGGA | SpCas9 |
| 2414 | DMPK 3 reverse 19:45770127-45770154 | GATGGGCAAACTGCAGGCCTGGGA | SpCas9 |
| 2415 | DMPK 3 reverse 19:45770128-45770154 | ATGGGCAAACTGCAGGCCTGGGA | SpCas9 |
| 2416 | DMPK 3 reverse 19:45770129-45770154 | TGGGCAAACTGCAGGCCTGGGA | SpCas9 |
| 2417 | DMPK 3 reverse 19:45770130-45770154 | GGGCAAACTGCAGGCCTGGGA | SpCas9 |
| 2418 | DMPK 3 reverse 19:45770131-45770154 | GGCAAACTGCAGGCCTGGGA | SpCas9 |
| 2419 | DMPK 3 reverse 19:45770132-45770154 | GCAAACTGCAGGCCTGGGA | SpCas9 |
| 2420 | DMPK 3 reverse 19:45770133-45770154 | CAAACTGCAGGCCTGGGA | SpCas9 |
| 2421 | DMPK 3 reverse 19:45770127-45770155 | TGGATGGGCAAACTGCAGGCCTGGG | SpCas9 |
| 2422 | DMPK 3 reverse 19:45770128-45770155 | GGATGGGCAAACTGCAGGCCTGGG | SpCas9 |
| 2423 | DMPK 3 reverse 19:45770129-45770155 | GATGGGCAAACTGCAGGCCTGGG | SpCas9 |
| 2424 | DMPK 3 reverse 19:45770130-45770155 | ATGGGCAAACTGCAGGCCTGGG | SpCas9 |
| 2425 | DMPK 3 reverse 19:45770131-45770155 | TGGGCAAACTGCAGGCCTGGG | SpCas9 |
| 2426 | DMPK 3 reverse 19:45770132-45770155 | GGGCAAACTGCAGGCCTGGG | SpCas9 |
| 2427 | DMPK 3 reverse 19:45770133-45770155 | GGCAAACTGCAGGCCTGGG | SpCas9 |
| 2428 | DMPK 3 reverse 19:45770134-45770155 | GCAAACTGCAGGCCTGGG | SpCas9 |
| 2429 | DMPK 3 reverse 19:45770130-45770158 | ACGTGGATGGGCAAACTGCAGGCCT | SpCas9 |
| 2430 | DMPK 3 reverse 19:45770131-45770158 | CGTGGATGGGCAAACTGCAGGCCT | SpCas9 |
| 2431 | DMPK 3 reverse 19:45770132-45770158 | GTGGATGGGCAAACTGCAGGCCT | SpCas9 |
| 2432 | DMPK 3 reverse 19:45770133-45770158 | TGGATGGGCAAACTGCAGGCCT | SpCas9 |
| 2433 | DMPK 3 reverse 19:45770134-45770158 | GGATGGGCAAACTGCAGGCCT | SpCas9 |
| 2434 | DMPK 3 reverse 19:45770135-45770158 | GATGGGCAAACTGCAGGCCT | SpCas9 |
| 2435 | DMPK 3 reverse 19:45770136-45770158 | ATGGGCAAACTGCAGGCCT | SpCas9 |
| 2436 | DMPK 3 reverse 19:45770137-45770158 | TGGGCAAACTGCAGGCCT | SpCas9 |
| 2437 | DMPK 3 reverse 19:45770131-45770159 | GACGTGGATGGGCAAACTGCAGGCC | SpCas9 |
| 2438 | DMPK 3 reverse 19:45770132-45770159 | ACGTGGATGGGCAAACTGCAGGCC | SpCas9 |
| 2439 | DMPK 3 reverse 19:45770133-45770159 | CGTGGATGGGCAAACTGCAGGCC | SpCas9 |
| 2440 | DMPK 3 reverse 19:45770134-45770159 | GTGGATGGGCAAACTGCAGGCC | SpCas9 |
| 2441 | DMPK 3 reverse 19:45770135-45770159 | TGGATGGGCAAACTGCAGGCC | SpCas9 |
| 2442 | DMPK 3 reverse 19:45770136-45770159 | GGATGGGCAAACTGCAGGCC | SpCas9 |
| 2443 | DMPK 3 reverse 19:45770137-45770159 | GATGGGCAAACTGCAGGCC | SpCas9 |
| 2444 | DMPK 3 reverse 19:45770138-45770159 | ATGGGCAAACTGCAGGCC | SpCas9 |
| 2445 | DMPK 3 forward 19:45770133-45770161 | AGGCCTGCAGTTTGCCCATCCACGT | SpCas9 |
| 2446 | DMPK 3 forward 19:45770134-45770161 | GGCCTGCAGTTTGCCCATCCACGT | SpCas9 |
| 2447 | DMPK 3 forward 19:45770135-45770161 | GCCTGCAGTTTGCCCATCCACGT | SpCas9 |
| 2448 | DMPK 3 forward 19:45770136-45770161 | CCTGCAGTTTGCCCATCCACGT | SpCas9 |
| 2449 | DMPK 3 forward 19:45770137-45770161 | CTGCAGTTTGCCCATCCACGT | SpCas9 |
| 2450 | DMPK 3 forward 19:45770138-45770161 | TGCAGTTTGCCCATCCACGT | SpCas9 |
| 2451 | DMPK 3 forward 19:45770139-45770161 | GCAGTTTGCCCATCCACGT | SpCas9 |
| 2452 | DMPK 3 forward 19:45770140-45770161 | CAGTTTGCCCATCCACGT | SpCas9 |
| 2453 | DMPK 3 forward 19:45770134-45770162 | GGCCTGCAGTTTGCCCATCCACGTC | SpCas9 |
| 2454 | DMPK 3 forward 19:45770135-45770162 | GCCTGCAGTTTGCCCATCCACGTC | SpCas9 |
| 2455 | DMPK 3 forward 19:45770136-45770162 | CCTGCAGTTTGCCCATCCACGTC | SpCas9 |
| 2456 | DMPK 3 forward 19:45770137-45770162 | CTGCAGTTTGCCCATCCACGTC | SpCas9 |
| 2457 | DMPK 3 forward 19:45770138-45770162 | TGCAGTTTGCCCATCCACGTC | SpCas9 |
| 2458 | DMPK 3 forward 19:45770139-45770162 | GCAGTTTGCCCATCCACGTC | SpCas9 |
| 2459 | DMPK 3 forward 19:45770140-45770162 | CAGTTTGCCCATCCACGTC | SpCas9 |
| 2460 | DMPK 3 forward 19:45770141-45770162 | AGTTTGCCCATCCACGTC | SpCas9 |
| 2461 | DMPK 3 forward 19:45770135-45770163 | GCCTGCAGTTTGCCCATCCACGTCA | SpCas9 |
| 2462 | DMPK 3 forward 19:45770136-45770163 | CCTGCAGTTTGCCCATCCACGTCA | SpCas9 |
| 2463 | DMPK 3 forward 19:45770137-45770163 | CTGCAGTTTGCCCATCCACGTCA | SpCas9 |
| 2464 | DMPK 3 forward 19:45770138-45770163 | TGCAGTTTGCCCATCCACGTCA | SpCas9 |
| 2465 | DMPK 3 forward 19:45770139-45770163 | GCAGTTTGCCCATCCACGTCA | SpCas9 |
| 2466 | DMPK 3 forward 19:45770140-45770163 | CAGTTTGCCCATCCACGTCA | SpCas9 |
| 2467 | DMPK 3 forward 19:45770141-45770163 | AGTTTGCCCATCCACGTCA | SpCas9 |
| 2468 | DMPK 3 forward 19:45770142-45770163 | GTTTGCCCATCCACGTCA | SpCas9 |
| 2469 | DMPK 3 reverse 19:45770136-45770164 | GCCCTGACGTGGATGGGCAAACTGC | SpCas9 |
| 2470 | DMPK 3 reverse 19:45770137-45770164 | CCCTGACGTGGATGGGCAAACTGC | SpCas9 |
| 2471 | DMPK 3 reverse 19:45770138-45770164 | CCTGACGTGGATGGGCAAACTGC | SpCas9 |
| 2472 | DMPK 3 reverse 19:45770139-45770164 | CTGACGTGGATGGGCAAACTGC | SpCas9 |
| 2473 | DMPK 3 reverse 19:45770140-45770164 | TGACGTGGATGGGCAAACTGC | SpCas9 |
| 2474 | DMPK 3 reverse 19:45770141-45770164 | GACGTGGATGGGCAAACTGC | SpCas9 |
| 2475 | DMPK 3 reverse 19:45770142-45770164 | ACGTGGATGGGCAAACTGC | SpCas9 |
| 2476 | DMPK 3 reverse 19:45770143-45770164 | CGTGGATGGGCAAACTGC | SpCas9 |
| 2477 | DMPK 3 reverse 19:45770137-45770165 | GGCCCTGACGTGGATGGGCAAACTG | SpCas9 |
| 2478 | DMPK 3 reverse 19:45770138-45770165 | GCCCTGACGTGGATGGGCAAACTG | SpCas9 |
| 2479 | DMPK 3 reverse 19:45770139-45770165 | CCCTGACGTGGATGGGCAAACTG | SpCas9 |
| 2480 | DMPK 3 reverse 19:45770140-45770165 | CCTGACGTGGATGGGCAAACTG | SpCas9 |
| 2481 | DMPK 3 reverse 19:45770141-45770165 | CTGACGTGGATGGGCAAACTG | SpCas9 |
| 2482 | DMPK 3 reverse 19:45770142-45770165 | TGACGTGGATGGGCAAACTG | SpCas9 |
| 2483 | DMPK 3 reverse 19:45770143-45770165 | GACGTGGATGGGCAAACTG | SpCas9 |
| 2484 | DMPK 3 reverse 19:45770144-45770165 | ACGTGGATGGGCAAACTG | SpCas9 |
| 2485 | DMPK 3 forward 19:45770141-45770169 | AGTTTGCCCATCCACGTCAGGGCCT | SpCas9 |
| 2486 | DMPK 3 forward 19:45770142-45770169 | GTTTGCCCATCCACGTCAGGGCCT | SpCas9 |
| 2487 | DMPK 3 forward 19:45770143-45770169 | TTTGCCCATCCACGTCAGGGCCT | SpCas9 |
| 2488 | DMPK 3 forward 19:45770144-45770169 | TTGCCCATCCACGTCAGGGCCT | SpCas9 |
| 2489 | DMPK 3 forward 19:45770145-45770169 | TGCCCATCCACGTCAGGGCCT | SpCas9 |
| 2490 | DMPK 3 forward 19:45770146-45770169 | GCCCATCCACGTCAGGGCCT | SpCas9 |
| 2491 | DMPK 3 forward 19:45770147-45770169 | CCCATCCACGTCAGGGCCT | SpCas9 |
| 2492 | DMPK 3 forward 19:45770148-45770169 | CCATCCACGTCAGGGCCT | SpCas9 |
| 2493 | DMPK 3 forward 19:45770146-45770174 | GCCCATCCACGTCAGGGCCTCAGCC | SpCas9 |
| 2494 | DMPK 3 forward 19:45770147-45770174 | CCCATCCACGTCAGGGCCTCAGCC | SpCas9 |
| 2495 | DMPK 3 forward 19:45770148-45770174 | CCATCCACGTCAGGGCCTCAGCC | SpCas9 |
| 2496 | DMPK 3 forward 19:45770149-45770174 | CATCCACGTCAGGGCCTCAGCC | SpCas9 |
| 2497 | DMPK 3 forward 19:45770150-45770174 | ATCCACGTCAGGGCCTCAGCC | SpCas9 |
| 2498 | DMPK 3 forward 19:45770151-45770174 | TCCACGTCAGGGCCTCAGCC | SpCas9 |
| 2499 | DMPK 3 forward 19:45770152-45770174 | CCACGTCAGGGCCTCAGCC | SpCas9 |
| 2500 | DMPK 3 forward 19:45770153-45770174 | CACGTCAGGGCCTCAGCC | SpCas9 |
| 2501 | DMPK 3 reverse 19:45770147-45770175 | GCCAGGCTGAGGCCCTGACGTGGAT | SpCas9 |
| 2502 | DMPK 3 reverse 19:45770148-45770175 | CCAGGCTGAGGCCCTGACGTGGAT | SpCas9 |
| 2503 | DMPK 3 reverse 19:45770149-45770175 | CAGGCTGAGGCCCTGACGTGGAT | SpCas9 |
| 2504 | DMPK 3 reverse 19:45770150-45770175 | AGGCTGAGGCCCTGACGTGGAT | SpCas9 |
| 2505 | DMPK 3 reverse 19:45770151-45770175 | GGCTGAGGCCCTGACGTGGAT | SpCas9 |
| 2506 | DMPK 3 reverse 19:45770152-45770175 | GCTGAGGCCCTGACGTGGAT | SpCas9 |
| 2507 | DMPK 3 reverse 19:45770153-45770175 | CTGAGGCCCTGACGTGGAT | SpCas9 |
| 2508 | DMPK 3 reverse 19:45770154-45770175 | TGAGGCCCTGACGTGGAT | SpCas9 |
| 2509 | DMPK 3 reverse 19:45770148-45770176 | GGCCAGGCTGAGGCCCTGACGTGGA | SpCas9 |
| 2510 | DMPK 3 reverse 19:45770149-45770176 | GCCAGGCTGAGGCCCTGACGTGGA | SpCas9 |
| 2511 | DMPK 3 reverse 19:45770150-45770176 | CCAGGCTGAGGCCCTGACGTGGA | SpCas9 |
| 2512 | DMPK 3 reverse 19:45770151-45770176 | CAGGCTGAGGCCCTGACGTGGA | SpCas9 |
| 2513 | DMPK 3 reverse 19:45770152-45770176 | AGGCTGAGGCCCTGACGTGGA | SpCas9 |
| 2514 | DMPK 3 reverse 19:45770153-45770176 | GGCTGAGGCCCTGACGTGGA | SpCas9 |
| 2515 | DMPK 3 reverse 19:45770154-45770176 | GCTGAGGCCCTGACGTGGA | SpCas9 |
| 2516 | DMPK 3 reverse 19:45770155-45770176 | CTGAGGCCCTGACGTGGA | SpCas9 |
| 2517 | DMPK 3 reverse 19:45770152-45770180 | TTTCGGCCAGGCTGAGGCCCTGACG | SpCas9 |
| 2518 | DMPK 3 reverse 19:45770153-45770180 | TTCGGCCAGGCTGAGGCCCTGACG | SpCas9 |
| 2519 | DMPK 3 reverse 19:45770154-45770180 | TCGGCCAGGCTGAGGCCCTGACG | SpCas9 |
| 2520 | DMPK 3 reverse 19:45770155-45770180 | CGGCCAGGCTGAGGCCCTGACG | SpCas9 |
| 2521 | DMPK 3 reverse 19:45770156-45770180 | GGCCAGGCTGAGGCCCTGACG | SpCas9 |
| 2522 | DMPK 3 reverse 19:45770157-45770180 | GCCAGGCTGAGGCCCTGACG | SpCas9 |
| 2523 | DMPK 3 reverse 19:45770158-45770180 | CCAGGCTGAGGCCCTGACG | SpCas9 |
| 2524 | DMPK 3 reverse 19:45770159-45770180 | CAGGCTGAGGCCCTGACG | SpCas9 |
| 2525 | DMPK 3 forward 19:45770153-45770181 | CACGTCAGGGCCTCAGCCTGGCCGA | SpCas9 |
| 2526 | DMPK 3 forward 19:45770154-45770181 | ACGTCAGGGCCTCAGCCTGGCCGA | SpCas9 |
| 2527 | DMPK 3 forward 19:45770155-45770181 | CGTCAGGGCCTCAGCCTGGCCGA | SpCas9 |
| 2528 | DMPK 3 forward 19:45770156-45770181 | GTCAGGGCCTCAGCCTGGCCGA | SpCas9 |
| 2529 | DMPK 3 forward 19:45770157-45770181 | TCAGGGCCTCAGCCTGGCCGA | SpCas9 |
| 2530 | DMPK 3 forward 19:45770158-45770181 | CAGGGCCTCAGCCTGGCCGA | SpCas9 |
| 2531 | DMPK 3 forward 19:45770159-45770181 | AGGGCCTCAGCCTGGCCGA | SpCas9 |
| 2532 | DMPK 3 forward 19:45770160-45770181 | GGGCCTCAGCCTGGCCGA | SpCas9 |
| 2533 | DMPK 3 forward 19:45770157-45770185 | TCAGGGCCTCAGCCTGGCCGAAAGA | SpCas9 |
| 2534 | DMPK 3 forward 19:45770158-45770185 | CAGGGCCTCAGCCTGGCCGAAAGA | SpCas9 |
| 2535 | DMPK 3 forward 19:45770159-45770185 | AGGGCCTCAGCCTGGCCGAAAGA | SpCas9 |
| 2536 | DMPK 3 forward 19:45770160-45770185 | GGGCCTCAGCCTGGCCGAAAGA | SpCas9 |
| 2537 | DMPK 3 forward 19:45770161-45770185 | GGCCTCAGCCTGGCCGAAAGA | SpCas9 |
| 2538 | DMPK 3 forward 19:45770162-45770185 | GCCTCAGCCTGGCCGAAAGA | SpCas9 |
| 2539 | DMPK 3 forward 19:45770163-45770185 | CCTCAGCCTGGCCGAAAGA | SpCas9 |
| 2540 | DMPK 3 forward 19:45770164-45770185 | CTCAGCCTGGCCGAAAGA | SpCas9 |
| 2541 | DMPK 3 forward 19:45770163-45770191 | CCTCAGCCTGGCCGAAAGAAAGAAA | SpCas9 |
| 2542 | DMPK 3 forward 19:45770164-45770191 | CTCAGCCTGGCCGAAAGAAAGAAA | SpCas9 |
| 2543 | DMPK 3 forward 19:45770165-45770191 | TCAGCCTGGCCGAAAGAAAGAAA | SpCas9 |
| 2544 | DMPK 3 forward 19:45770166-45770191 | CAGCCTGGCCGAAAGAAAGAAA | SpCas9 |
| 2545 | DMPK 3 forward 19:45770167-45770191 | AGCCTGGCCGAAAGAAAGAAA | SpCas9 |
| 2546 | DMPK 3 forward 19:45770168-45770191 | GCCTGGCCGAAAGAAAGAAA | SpCas9 |
| 2547 | DMPK 3 forward 19:45770169-45770191 | CCTGGCCGAAAGAAAGAAA | SpCas9 |
| 2548 | DMPK 3 forward 19:45770170-45770191 | CTGGCCGAAAGAAAGAAA | SpCas9 |
| 2549 | DMPK 3 reverse 19:45770163-45770191 | CCATTTCTTTCTTTCGGCCAGGCTG | SpCas9 |
| 2550 | DMPK 3 reverse 19:45770164-45770191 | CATTTCTTTCTTTCGGCCAGGCTG | SpCas9 |
| 2551 | DMPK 3 reverse 19:45770165-45770191 | ATTTCTTTCTTTCGGCCAGGCTG | SpCas9 |
| 2552 | DMPK 3 reverse 19:45770166-45770191 | TTTCTTTCTTTCGGCCAGGCTG | SpCas9 |
| 2553 | DMPK 3 reverse 19:45770167-45770191 | TTCTTTCTTTCGGCCAGGCTG | SpCas9 |
| 2554 | DMPK 3 reverse 19:45770168-45770191 | TCTTTCTTTCGGCCAGGCTG | SpCas9 |
| 2555 | DMPK 3 reverse 19:45770169-45770191 | CTTTCTTTCGGCCAGGCTG | SpCas9 |
| 2556 | DMPK 3 reverse 19:45770170-45770191 | TTTCTTTCGGCCAGGCTG | SpCas9 |
| 2557 | DMPK 3 reverse 19:45770164-45770192 | ACCATTTCTTTCTTTCGGCCAGGCT | SpCas9 |
| 2558 | DMPK 3 reverse 19:45770165-45770192 | CCATTTCTTTCTTTCGGCCAGGCT | SpCas9 |
| 2559 | DMPK 3 reverse 19:45770166-45770192 | CATTTCTTTCTTTCGGCCAGGCT | SpCas9 |
| 2560 | DMPK 3 reverse 19:45770167-45770192 | ATTTCTTTCTTTCGGCCAGGCT | SpCas9 |
| 2561 | DMPK 3 reverse 19:45770168-45770192 | TTTCTTTCTTTCGGCCAGGCT | SpCas9 |
| 2562 | DMPK 3 reverse 19:45770169-45770192 | TTCTTTCTTTCGGCCAGGCT | SpCas9 |
| 2563 | DMPK 3 reverse 19:45770170-45770192 | TCTTTCTTTCGGCCAGGCT | SpCas9 |
| 2564 | DMPK 3 reverse 19:45770171-45770192 | CTTTCTTTCGGCCAGGCT | SpCas9 |
| 2565 | DMPK 3 reverse 19:45770169-45770197 | CACAGACCATTTCTTTCTTTCGGCC | SpCas9 |
| 2566 | DMPK 3 reverse 19:45770170-45770197 | ACAGACCATTTCTTTCTTTCGGCC | SpCas9 |
| 2567 | DMPK 3 reverse 19:45770171-45770197 | CAGACCATTTCTTTCTTTCGGCC | SpCas9 |
| 2568 | DMPK 3 reverse 19:45770172-45770197 | AGACCATTTCTTTCTTTCGGCC | SpCas9 |
| 2569 | DMPK 3 reverse 19:45770173-45770197 | GACCATTTCTTTCTTTCGGCC | SpCas9 |
| 2570 | DMPK 3 reverse 19:45770174-45770197 | ACCATTTCTTTCTTTCGGCC | SpCas9 |
| 2571 | DMPK 3 reverse 19:45770175-45770197 | CCATTTCTTTCTTTCGGCC | SpCas9 |
| 2572 | DMPK 3 reverse 19:45770176-45770197 | CATTTCTTTCTTTCGGCC | SpCas9 |
| 2573 | DMPK 3 reverse 19:45770170-45770198 | TCACAGACCATTTCTTTCTTTCGGC | SpCas9 |
| 2574 | DMPK 3 reverse 19:45770171-45770198 | CACAGACCATTTCTTTCTTTCGGC | SpCas9 |
| 2575 | DMPK 3 reverse 19:45770172-45770198 | ACAGACCATTTCTTTCTTTCGGC | SpCas9 |
| 2576 | DMPK 3 reverse 19:45770173-45770198 | CAGACCATTTCTTTCTTTCGGC | SpCas9 |
| 2577 | DMPK 3 reverse 19:45770174-45770198 | AGACCATTTCTTTCTTTCGGC | SpCas9 |
| 2578 | DMPK 3 reverse 19:45770175-45770198 | GACCATTTCTTTCTTTCGGC | SpCas9 |
| 2579 | DMPK 3 reverse 19:45770176-45770198 | ACCATTTCTTTCTTTCGGC | SpCas9 |
| 2580 | DMPK 3 reverse 19:45770177-45770198 | CCATTTCTTTCTTTCGGC | SpCas9 |
| 2581 | DMPK 3 reverse 19:45770174-45770202 | GGGATCACAGACCATTTCTTTCTTT | SpCas9 |
| 2582 | DMPK 3 reverse 19:45770175-45770202 | GGATCACAGACCATTTCTTTCTTT | SpCas9 |
| 2583 | DMPK 3 reverse 19:45770176-45770202 | GATCACAGACCATTTCTTTCTTT | SpCas9 |
| 2584 | DMPK 3 reverse 19:45770177-45770202 | ATCACAGACCATTTCTTTCTTT | SpCas9 |
| 2585 | DMPK 3 reverse 19:45770178-45770202 | TCACAGACCATTTCTTTCTTT | SpCas9 |
| 2586 | DMPK 3 reverse 19:45770179-45770202 | CACAGACCATTTCTTTCTTT | SpCas9 |
| 2587 | DMPK 3 reverse 19:45770180-45770202 | ACAGACCATTTCTTTCTTT | SpCas9 |
| 2588 | DMPK 3 reverse 19:45770181-45770202 | CAGACCATTTCTTTCTTT | SpCas9 |
| 2589 | DMPK 3 forward 19:45770179-45770207 | AGAAAGAAATGGTCTGTGATCCCCC | SpCas9 |
| 2590 | DMPK 3 forward 19:45770180-45770207 | GAAAGAAATGGTCTGTGATCCCCC | SpCas9 |
| 2591 | DMPK 3 forward 19:45770181-45770207 | AAAGAAATGGTCTGTGATCCCCC | SpCas9 |
| 2592 | DMPK 3 forward 19:45770182-45770207 | AAGAAATGGTCTGTGATCCCCC | SpCas9 |
| 2593 | DMPK 3 forward 19:45770183-45770207 | AGAAATGGTCTGTGATCCCCC | SpCas9 |
| 2594 | DMPK 3 forward 19:45770184-45770207 | GAAATGGTCTGTGATCCCCC | SpCas9 |
| 2595 | DMPK 3 forward 19:45770185-45770207 | AAATGGTCTGTGATCCCCC | SpCas9 |
| 2596 | DMPK 3 forward 19:45770186-45770207 | AATGGTCTGTGATCCCCC | SpCas9 |
| 2597 | DMPK 3 forward 19:45770182-45770210 | AAGAAATGGTCTGTGATCCCCCCAG | SpCas9 |
| 2598 | DMPK 3 forward 19:45770183-45770210 | AGAAATGGTCTGTGATCCCCCCAG | SpCas9 |
| 2599 | DMPK 3 forward 19:45770184-45770210 | GAAATGGTCTGTGATCCCCCCAG | SpCas9 |
| 2600 | DMPK 3 forward 19:45770185-45770210 | AAATGGTCTGTGATCCCCCCAG | SpCas9 |
| 2601 | DMPK 3 forward 19:45770186-45770210 | AATGGTCTGTGATCCCCCCAG | SpCas9 |
| 2602 | DMPK 3 forward 19:45770187-45770210 | ATGGTCTGTGATCCCCCCAG | SpCas9 |
| 2603 | DMPK 3 forward 19:45770188-45770210 | TGGTCTGTGATCCCCCCAG | SpCas9 |
| 2604 | DMPK 3 forward 19:45770189-45770210 | GGTCTGTGATCCCCCCAG | SpCas9 |
| 2605 | DMPK 3 forward 19:45770185-45770213 | AAATGGTCTGTGATCCCCCCAGCAG | SpCas9 |
| 2606 | DMPK 3 forward 19:45770186-45770213 | AATGGTCTGTGATCCCCCCAGCAG | SpCas9 |
| 2607 | DMPK 3 forward 19:45770187-45770213 | ATGGTCTGTGATCCCCCCAGCAG | SpCas9 |
| 2608 | DMPK 3 forward 19:45770188-45770213 | TGGTCTGTGATCCCCCCAGCAG | SpCas9 |
| 2609 | DMPK 3 forward 19:45770189-45770213 | GGTCTGTGATCCCCCCAGCAG | SpCas9 |
| 2610 | DMPK 3 forward 19:45770190-45770213 | GTCTGTGATCCCCCCAGCAG | SpCas9 |
| 2611 | DMPK 3 forward 19:45770191-45770213 | TCTGTGATCCCCCCAGCAG | SpCas9 |
| 2612 | DMPK 3 forward 19:45770192-45770213 | CTGTGATCCCCCCAGCAG | SpCas9 |
| 2613 | DMPK 3 forward 19:45770188-45770216 | TGGTCTGTGATCCCCCCAGCAGCAG | SpCas9 |
| 2614 | DMPK 3 forward 19:45770189-45770216 | GGTCTGTGATCCCCCCAGCAGCAG | SpCas9 |
| 2615 | DMPK 3 forward 19:45770190-45770216 | GTCTGTGATCCCCCCAGCAGCAG | SpCas9 |
| 2616 | DMPK 3 forward 19:45770191-45770216 | TCTGTGATCCCCCCAGCAGCAG | SpCas9 |
| 2617 | DMPK 3 forward 19:45770192-45770216 | CTGTGATCCCCCCAGCAGCAG | SpCas9 |
| 2618 | DMPK 3 forward 19:45770193-45770216 | TGTGATCCCCCCAGCAGCAG | SpCas9 |
| 2619 | DMPK 3 forward 19:45770194-45770216 | GTGATCCCCCCAGCAGCAG | SpCas9 |
| 2620 | DMPK 3 forward 19:45770195-45770216 | TGATCCCCCCAGCAGCAG | SpCas9 |
| 2621 | DMPK 3 forward 19:45770191-45770219 | TCTGTGATCCCCCCAGCAGCAGCAG | SpCas9 |
| 2622 | DMPK 3 forward 19:45770192-45770219 | CTGTGATCCCCCCAGCAGCAGCAG | SpCas9 |
| 2623 | DMPK 3 forward 19:45770193-45770219 | TGTGATCCCCCCAGCAGCAGCAG | SpCas9 |
| 2624 | DMPK 3 forward 19:45770194-45770219 | GTGATCCCCCCAGCAGCAGCAG | SpCas9 |
| 2625 | DMPK 3 forward 19:45770195-45770219 | TGATCCCCCCAGCAGCAGCAG | SpCas9 |
| 2626 | DMPK 3 forward 19:45770196-45770219 | GATCCCCCCAGCAGCAGCAG | SpCas9 |
| 2627 | DMPK 3 forward 19:45770197-45770219 | ATCCCCCCAGCAGCAGCAG | SpCas9 |
| 2628 | DMPK 3 forward 19:45770198-45770219 | TCCCCCCAGCAGCAGCAG | SpCas9 |
| 2629 | DMPK 3 reverse 19:45770192-45770220 | GCTGCTGCTGCTGCTGGGGGGATCA | SpCas9 |
| 2630 | DMPK 3 reverse 19:45770193-45770220 | CTGCTGCTGCTGCTGGGGGGATCA | SpCas9 |
| 2631 | DMPK 3 reverse 19:45770194-45770220 | TGCTGCTGCTGCTGGGGGGATCA | SpCas9 |
| 2632 | DMPK 3 reverse 19:45770195-45770220 | GCTGCTGCTGCTGGGGGGATCA | SpCas9 |
| 2633 | DMPK 3 reverse 19:45770196-45770220 | CTGCTGCTGCTGGGGGGATCA | SpCas9 |
| 2634 | DMPK 3 reverse 19:45770197-45770220 | TGCTGCTGCTGGGGGGATCA | SpCas9 |
| 2635 | DMPK 3 reverse 19:45770198-45770220 | GCTGCTGCTGGGGGGATCA | SpCas9 |
| 2636 | DMPK 3 reverse 19:45770199-45770220 | CTGCTGCTGGGGGGATCA | SpCas9 |
| 2637 | DMPK 3 forward 19:45770194-45770222 | GTGATCCCCCCAGCAGCAGCAGCAG | SpCas9 |
| 2638 | DMPK 3 forward 19:45770195-45770222 | TGATCCCCCCAGCAGCAGCAGCAG | SpCas9 |
| 2639 | DMPK 3 forward 19:45770196-45770222 | GATCCCCCCAGCAGCAGCAGCAG | SpCas9 |
| 2640 | DMPK 3 forward 19:45770197-45770222 | ATCCCCCCAGCAGCAGCAGCAG | SpCas9 |
| 2641 | DMPK 3 forward 19:45770198-45770222 | TCCCCCCAGCAGCAGCAGCAG | SpCas9 |
| 2642 | DMPK 3 forward 19:45770199-45770222 | CCCCCCAGCAGCAGCAGCAG | SpCas9 |
| 2643 | DMPK 3 forward 19:45770200-45770222 | CCCCCAGCAGCAGCAGCAG | SpCas9 |
| 2644 | DMPK 3 forward 19:45770201-45770222 | CCCCAGCAGCAGCAGCAG | SpCas9 |
| 2645 | DMPK 3 forward 19:45770197-45770225 | ATCCCCCCAGCAGCAGCAGCAGCAG | SpCas9 |
| 2646 | DMPK 3 forward 19:45770198-45770225 | TCCCCCCAGCAGCAGCAGCAGCAG | SpCas9 |
| 2647 | DMPK 3 forward 19:45770199-45770225 | CCCCCCAGCAGCAGCAGCAGCAG | SpCas9 |
| 2648 | DMPK 3 forward 19:45770200-45770225 | CCCCCAGCAGCAGCAGCAGCAG | SpCas9 |
| 2649 | DMPK 3 forward 19:45770201-45770225 | CCCCAGCAGCAGCAGCAGCAG | SpCas9 |
| 2650 | DMPK 3 forward 19:45770202-45770225 | CCCAGCAGCAGCAGCAGCAG | SpCas9 |
| 2651 | DMPK 3 forward 19:45770203-45770225 | CCAGCAGCAGCAGCAGCAG | SpCas9 |
| 2652 | DMPK 3 forward 19:45770204-45770225 | CAGCAGCAGCAGCAGCAG | SpCas9 |
| 2653 | DMPK 3 reverse 19:45770199-45770227 | TGCTGCTGCTGCTGCTGCTGCTGGG | SpCas9 |
| 2654 | DMPK 3 reverse 19:45770200-45770227 | GCTGCTGCTGCTGCTGCTGCTGGG | SpCas9 |
| 2655 | DMPK 3 reverse 19:45770201-45770227 | CTGCTGCTGCTGCTGCTGCTGGG | SpCas9 |
| 2656 | DMPK 3 reverse 19:45770202-45770227 | TGCTGCTGCTGCTGCTGCTGGG | SpCas9 |
| 2657 | DMPK 3 reverse 19:45770203-45770227 | GCTGCTGCTGCTGCTGCTGGG | SpCas9 |
| 2658 | DMPK 3 reverse 19:45770204-45770227 | CTGCTGCTGCTGCTGCTGGG | SpCas9 |
| 2659 | DMPK 3 reverse 19:45770205-45770227 | TGCTGCTGCTGCTGCTGGG | SpCas9 |
| 2660 | DMPK 3 reverse 19:45770206-45770227 | GCTGCTGCTGCTGCTGGG | SpCas9 |
| 2661 | DMPK 3 forward 19:45770200-45770228 | CCCCCAGCAGCAGCAGCAGCAGCAG | SpCas9 |
| 2662 | DMPK 3 forward 19:45770201-45770228 | CCCCAGCAGCAGCAGCAGCAGCAG | SpCas9 |
| 2663 | DMPK 3 forward 19:45770202-45770228 | CCCAGCAGCAGCAGCAGCAGCAG | SpCas9 |
| 2664 | DMPK 3 forward 19:45770203-45770228 | CCAGCAGCAGCAGCAGCAGCAG | SpCas9 |
| 2665 | DMPK 3 forward 19:45770204-45770228 | CAGCAGCAGCAGCAGCAGCAG | SpCas9 |
| 2666 | DMPK 3 forward 19:45770205-45770228 | AGCAGCAGCAGCAGCAGCAG | SpCas9 |
| 2667 | DMPK 3 forward 19:45770206-45770228 | GCAGCAGCAGCAGCAGCAG | SpCas9 |
| 2668 | DMPK 3 forward 19:45770207-45770228 | CAGCAGCAGCAGCAGCAG | SpCas9 |
| 2669 | DMPK 3 reverse 19:45770200-45770228 | CTGCTGCTGCTGCTGCTGCTGCTGG | SpCas9 |
| 2670 | DMPK 3 reverse 19:45770201-45770228 | TGCTGCTGCTGCTGCTGCTGCTGG | SpCas9 |
| 2671 | DMPK 3 reverse 19:45770202-45770228 | GCTGCTGCTGCTGCTGCTGCTGG | SpCas9 |
| 2672 | DMPK 3 reverse 19:45770203-45770228 | CTGCTGCTGCTGCTGCTGCTGG | SpCas9 |
| 2673 | DMPK 3 reverse 19:45770204-45770228 | TGCTGCTGCTGCTGCTGCTGG | SpCas9 |
| 2674 | DMPK 3 reverse 19:45770205-45770228 | GCTGCTGCTGCTGCTGCTGG | SpCas9 |
| 2675 | DMPK 3 reverse 19:45770206-45770228 | CTGCTGCTGCTGCTGCTGG | SpCas9 |
| 2676 | DMPK 3 reverse 19:45770207-45770228 | TGCTGCTGCTGCTGCTGG | SpCas9 |
| 2677 | DMPK 3 reverse 19:45770201-45770229 | GCTGCTGCTGCTGCTGCTGCTGCTG | SpCas9 |
| 2678 | DMPK 3 reverse 19:45770202-45770229 | CTGCTGCTGCTGCTGCTGCTGCTG | SpCas9 |
| 2679 | DMPK 3 reverse 19:45770203-45770229 | TGCTGCTGCTGCTGCTGCTGCTG | SpCas9 |
| 2680 | DMPK 3 reverse 19:45770204-45770229 | GCTGCTGCTGCTGCTGCTGCTG | SpCas9 |
| 2681 | DMPK 3 reverse 19:45770205-45770229 | CTGCTGCTGCTGCTGCTGCTG | SpCas9 |
| 2682 | DMPK 3 reverse 19:45770206-45770229 | TGCTGCTGCTGCTGCTGCTG | SpCas9 |
| 2683 | DMPK 3 reverse 19:45770207-45770229 | GCTGCTGCTGCTGCTGCTG | SpCas9 |
| 2684 | DMPK 3 reverse 19:45770208-45770229 | CTGCTGCTGCTGCTGCTG | SpCas9 |
| 2685 | DMPK 3 reverse 19:45770202-45770230 | TGCTGCTGCTGCTGCTGCTGCTGCT | SpCas9 |
| 2686 | DMPK 3 reverse 19:45770203-45770230 | GCTGCTGCTGCTGCTGCTGCTGCT | SpCas9 |
| 2687 | DMPK 3 reverse 19:45770204-45770230 | CTGCTGCTGCTGCTGCTGCTGCT | SpCas9 |
| 2688 | DMPK 3 reverse 19:45770205-45770230 | TGCTGCTGCTGCTGCTGCTGCT | SpCas9 |
| 2689 | DMPK 3 reverse 19:45770206-45770230 | GCTGCTGCTGCTGCTGCTGCT | SpCas9 |
| 2690 | DMPK 3 reverse 19:45770207-45770230 | CTGCTGCTGCTGCTGCTGCT | SpCas9 |
| 2691 | DMPK 3 reverse 19:45770208-45770230 | TGCTGCTGCTGCTGCTGCT | SpCas9 |
| 2692 | DMPK 3 reverse 19:45770209-45770230 | GCTGCTGCTGCTGCTGCT | SpCas9 |
| 2693 | DMPK 3 forward 19:45770203-45770231 | CCAGCAGCAGCAGCAGCAGCAGCAG | SpCas9 |
| 2694 | DMPK 3 forward 19:45770204-45770231 | CAGCAGCAGCAGCAGCAGCAGCAG | SpCas9 |
| 2695 | DMPK 3 forward 19:45770205-45770231 | AGCAGCAGCAGCAGCAGCAGCAG | SpCas9 |
| 2696 | DMPK 3 forward 19:45770206-45770231 | GCAGCAGCAGCAGCAGCAGCAG | SpCas9 |
| 2697 | DMPK 3 forward 19:45770207-45770231 | CAGCAGCAGCAGCAGCAGCAG | SpCas9 |
| 2698 | DMPK 3 forward 19:45770208-45770231 | AGCAGCAGCAGCAGCAGCAG | SpCas9 |
| 2699 | DMPK 3 forward 19:45770209-45770231 | GCAGCAGCAGCAGCAGCAG | SpCas9 |
| 2700 | DMPK 3 forward 19:45770210-45770231 | CAGCAGCAGCAGCAGCAG | SpCas9 |
| 2701 | DMPK 3 reverse 19:45770203-45770231 | CTGCTGCTGCTGCTGCTGCTGCTGC | SpCas9 |
| 2702 | DMPK 3 reverse 19:45770204-45770231 | TGCTGCTGCTGCTGCTGCTGCTGC | SpCas9 |
| 2703 | DMPK 3 reverse 19:45770205-45770231 | GCTGCTGCTGCTGCTGCTGCTGC | SpCas9 |
| 2704 | DMPK 3 reverse 19:45770206-45770231 | CTGCTGCTGCTGCTGCTGCTGC | SpCas9 |
| 2705 | DMPK 3 reverse 19:45770207-45770231 | TGCTGCTGCTGCTGCTGCTGC | SpCas9 |
| 2706 | DMPK 3 reverse 19:45770208-45770231 | GCTGCTGCTGCTGCTGCTGC | SpCas9 |
| 2707 | DMPK 3 reverse 19:45770209-45770231 | CTGCTGCTGCTGCTGCTGC | SpCas9 |
| 2708 | DMPK 3 reverse 19:45770210-45770231 | TGCTGCTGCTGCTGCTGC | SpCas9 |
| 2709 | DMPK 5 forward 19:45770266-45770288 | CGGCTACAAGGACCCTTC | AsCpf1-1 |
| 2710 | DMPK 5 forward 19:45770266-45770289 | CGGCTACAAGGACCCTTCG | AsCpf1-1 |
| 2711 | DMPK 5 forward 19:45770266-45770290 | CGGCTACAAGGACCCTTCGA | AsCpf1-1 |
| 2712 | DMPK 5 forward 19:45770266-45770291 | CGGCTACAAGGACCCTTCGAG | AsCpf1-1 |
| 2713 | DMPK 5 forward 19:45770266-45770292 | CGGCTACAAGGACCCTTCGAGC | AsCpf1-1 |
| 2714 | DMPK 5 forward 19:45770266-45770293 | CGGCTACAAGGACCCTTCGAGCC | AsCpf1-1 |
| 2715 | DMPK 5 forward 19:45770266-45770294 | CGGCTACAAGGACCCTTCGAGCCC | AsCpf1-1 |
| 2716 | DMPK 5 forward 19:45770266-45770295 | CGGCTACAAGGACCCTTCGAGCCCC | AsCpf1-1 |
| 2717 | DMPK 5 forward 19:45770267-45770289 | GGCTACAAGGACCCTTCG | AsCpf1-1 |
| 2718 | DMPK 5 forward 19:45770267-45770290 | GGCTACAAGGACCCTTCGA | AsCpf1-1 |
| 2719 | DMPK 5 forward 19:45770267-45770291 | GGCTACAAGGACCCTTCGAG | AsCpf1-1 |
| 2720 | DMPK 5 forward 19:45770267-45770292 | GGCTACAAGGACCCTTCGAGC | AsCpf1-1 |
| 2721 | DMPK 5 forward 19:45770267-45770293 | GGCTACAAGGACCCTTCGAGCC | AsCpf1-1 |
| 2722 | DMPK 5 forward 19:45770267-45770294 | GGCTACAAGGACCCTTCGAGCCC | AsCpf1-1 |
| 2723 | DMPK 5 forward 19:45770267-45770295 | GGCTACAAGGACCCTTCGAGCCCC | AsCpf1-1 |
| 2724 | DMPK 5 forward 19:45770267-45770296 | GGCTACAAGGACCCTTCGAGCCCCG | AsCpf1-1 |
| 2725 | DMPK 5 reverse 19:45770282-45770304 | CGGCCGGCGAACGGGGCT | AsCpf1-1 |
| 2726 | DMPK 5 reverse 19:45770282-45770305 | CGGCCGGCGAACGGGGCTC | AsCpf1-1 |
| 2727 | DMPK 5 reverse 19:45770282-45770306 | CGGCCGGCGAACGGGGCTCG | AsCpf1-1 |
| 2728 | DMPK 5 reverse 19:45770282-45770307 | CGGCCGGCGAACGGGGCTCGA | AsCpf1-1 |
| 2729 | DMPK 5 reverse 19:45770282-45770308 | CGGCCGGCGAACGGGGCTCGAA | AsCpf1-1 |
| 2730 | DMPK 5 reverse 19:45770282-45770309 | CGGCCGGCGAACGGGGCTCGAAG | AsCpf1-1 |
| 2731 | DMPK 5 reverse 19:45770282-45770310 | CGGCCGGCGAACGGGGCTCGAAGG | AsCpf1-1 |
| 2732 | DMPK 5 reverse 19:45770282-45770311 | CGGCCGGCGAACGGGGCTCGAAGGG | AsCpf1-1 |
| 2733 | DMPK 5 forward 19:45770285-45770307 | AGCCCCGTTCGCCGGCCG | AsCpf1-1 |
| 2734 | DMPK 5 forward 19:45770285-45770308 | AGCCCCGTTCGCCGGCCGC | AsCpf1-1 |
| 2735 | DMPK 5 forward 19:45770285-45770309 | AGCCCCGTTCGCCGGCCGCG | AsCpf1-1 |
| 2736 | DMPK 5 forward 19:45770285-45770310 | AGCCCCGTTCGCCGGCCGCGG | AsCpf1-1 |
| 2737 | DMPK 5 forward 19:45770285-45770311 | AGCCCCGTTCGCCGGCCGCGGA | AsCpf1-1 |
| 2738 | DMPK 5 forward 19:45770285-45770312 | AGCCCCGTTCGCCGGCCGCGGAC | AsCpf1-1 |
| 2739 | DMPK 5 forward 19:45770285-45770313 | AGCCCCGTTCGCCGGCCGCGGACC | AsCpf1-1 |
| 2740 | DMPK 5 forward 19:45770285-45770314 | AGCCCCGTTCGCCGGCCGCGGACCC | AsCpf1-1 |
| 2741 | DMPK 5 forward 19:45770296-45770318 | CCGGCCGCGGACCCGGCC | AsCpf1-1 |
| 2742 | DMPK 5 forward 19:45770296-45770319 | CCGGCCGCGGACCCGGCCC | AsCpf1-1 |
| 2743 | DMPK 5 forward 19:45770296-45770320 | CCGGCCGCGGACCCGGCCCC | AsCpf1-1 |
| 2744 | DMPK 5 forward 19:45770296-45770321 | CCGGCCGCGGACCCGGCCCCT | AsCpf1-1 |
| 2745 | DMPK 5 forward 19:45770296-45770322 | CCGGCCGCGGACCCGGCCCCTC | AsCpf1-1 |
| 2746 | DMPK 5 forward 19:45770296-45770323 | CCGGCCGCGGACCCGGCCCCTCC | AsCpf1-1 |
| 2747 | DMPK 5 forward 19:45770296-45770324 | CCGGCCGCGGACCCGGCCCCTCCC | AsCpf1-1 |
| 2748 | DMPK 5 forward 19:45770296-45770325 | CCGGCCGCGGACCCGGCCCCTCCCT | AsCpf1-1 |
| 2749 | DMPK 5 forward 19:45770320-45770342 | TCCCCGGCCGCTAGGGGG | AsCpf1-1 |
| 2750 | DMPK 5 forward 19:45770320-45770343 | TCCCCGGCCGCTAGGGGGC | AsCpf1-1 |
| 2751 | DMPK 5 forward 19:45770320-45770344 | TCCCCGGCCGCTAGGGGGCG | AsCpf1-1 |
| 2752 | DMPK 5 forward 19:45770320-45770345 | TCCCCGGCCGCTAGGGGGCGG | AsCpf1-1 |
| 2753 | DMPK 5 forward 19:45770320-45770346 | TCCCCGGCCGCTAGGGGGCGGG | AsCpf1-1 |
| 2754 | DMPK 5 forward 19:45770320-45770347 | TCCCCGGCCGCTAGGGGGCGGGC | AsCpf1-1 |
| 2755 | DMPK 5 forward 19:45770320-45770348 | TCCCCGGCCGCTAGGGGGCGGGCC | AsCpf1-1 |
| 2756 | DMPK 5 forward 19:45770320-45770349 | TCCCCGGCCGCTAGGGGGCGGGCCC | AsCpf1-1 |
| 2757 | DMPK 5 reverse 19:45770323-45770345 | GGCCCGCCCCCTAGCGGC | AsCpf1-1 |
| 2758 | DMPK 5 reverse 19:45770323-45770346 | GGCCCGCCCCCTAGCGGCC | AsCpf1-1 |
| 2759 | DMPK 5 reverse 19:45770323-45770347 | GGCCCGCCCCCTAGCGGCCG | AsCpf1-1 |
| 2760 | DMPK 5 reverse 19:45770323-45770348 | GGCCCGCCCCCTAGCGGCCGG | AsCpf1-1 |
| 2761 | DMPK 5 reverse 19:45770323-45770349 | GGCCCGCCCCCTAGCGGCCGGG | AsCpf1-1 |
| 2762 | DMPK 5 reverse 19:45770323-45770350 | GGCCCGCCCCCTAGCGGCCGGGG | AsCpf1-1 |
| 2763 | DMPK 5 reverse 19:45770323-45770351 | GGCCCGCCCCCTAGCGGCCGGGGA | AsCpf1-1 |
| 2764 | DMPK 5 reverse 19:45770323-45770352 | GGCCCGCCCCCTAGCGGCCGGGGAG | AsCpf1-1 |
| 2765 | DMPK 5 forward 19:45770324-45770346 | CGGCCGCTAGGGGGCGGG | AsCpf1-1 |
| 2766 | DMPK 5 forward 19:45770324-45770347 | CGGCCGCTAGGGGGCGGGC | AsCpf1-1 |
| 2767 | DMPK 5 forward 19:45770324-45770348 | CGGCCGCTAGGGGGCGGGCC | AsCpf1-1 |
| 2768 | DMPK 5 forward 19:45770324-45770349 | CGGCCGCTAGGGGGCGGGCCC | AsCpf1-1 |
| 2769 | DMPK 5 forward 19:45770324-45770350 | CGGCCGCTAGGGGGCGGGCCCG | AsCpf1-1 |
| 2770 | DMPK 5 forward 19:45770324-45770351 | CGGCCGCTAGGGGGCGGGCCCGG | AsCpf1-1 |
| 2771 | DMPK 5 forward 19:45770324-45770352 | CGGCCGCTAGGGGGCGGGCCCGGA | AsCpf1-1 |
| 2772 | DMPK 5 forward 19:45770324-45770353 | CGGCCGCTAGGGGGCGGGCCCGGAT | AsCpf1-1 |
| 2773 | DMPK 5 reverse 19:45770336-45770358 | GTCCTGTGATCCGGGCCC | AsCpf1-1 |
| 2774 | DMPK 5 reverse 19:45770336-45770359 | GTCCTGTGATCCGGGCCCG | AsCpf1-1 |
| 2775 | DMPK 5 reverse 19:45770336-45770360 | GTCCTGTGATCCGGGCCCGC | AsCpf1-1 |
| 2776 | DMPK 5 reverse 19:45770336-45770361 | GTCCTGTGATCCGGGCCCGCC | AsCpf1-1 |
| 2777 | DMPK 5 reverse 19:45770336-45770362 | GTCCTGTGATCCGGGCCCGCCC | AsCpf1-1 |
| 2778 | DMPK 5 reverse 19:45770336-45770363 | GTCCTGTGATCCGGGCCCGCCCC | AsCpf1-1 |
| 2779 | DMPK 5 reverse 19:45770336-45770364 | GTCCTGTGATCCGGGCCCGCCCCC | AsCpf1-1 |
| 2780 | DMPK 5 reverse 19:45770336-45770365 | GTCCTGTGATCCGGGCCCGCCCCCT | AsCpf1-1 |
| 2781 | DMPK 5 reverse 19:45770346-45770368 | CCCAGCTCCAGTCCTGTG | AsCpf1-1 |
| 2782 | DMPK 5 reverse 19:45770346-45770369 | CCCAGCTCCAGTCCTGTGA | AsCpf1-1 |
| 2783 | DMPK 5 reverse 19:45770346-45770370 | CCCAGCTCCAGTCCTGTGAT | AsCpf1-1 |
| 2784 | DMPK 5 reverse 19:45770346-45770371 | CCCAGCTCCAGTCCTGTGATC | AsCpf1-1 |
| 2785 | DMPK 5 reverse 19:45770346-45770372 | CCCAGCTCCAGTCCTGTGATCC | AsCpf1-1 |
| 2786 | DMPK 5 reverse 19:45770346-45770373 | CCCAGCTCCAGTCCTGTGATCCG | AsCpf1-1 |
| 2787 | DMPK 5 reverse 19:45770346-45770374 | CCCAGCTCCAGTCCTGTGATCCGG | AsCpf1-1 |
| 2788 | DMPK 5 reverse 19:45770346-45770375 | CCCAGCTCCAGTCCTGTGATCCGGG | AsCpf1-1 |
| 2789 | DMPK 5 reverse 19:45770360-45770382 | AGCGTGGGTCTCCGCCCA | AsCpf1-1 |
| 2790 | DMPK 5 reverse 19:45770360-45770383 | AGCGTGGGTCTCCGCCCAG | AsCpf1-1 |
| 2791 | DMPK 5 reverse 19:45770360-45770384 | AGCGTGGGTCTCCGCCCAGC | AsCpf1-1 |
| 2792 | DMPK 5 reverse 19:45770360-45770385 | AGCGTGGGTCTCCGCCCAGCT | AsCpf1-1 |
| 2793 | DMPK 5 reverse 19:45770360-45770386 | AGCGTGGGTCTCCGCCCAGCTC | AsCpf1-1 |
| 2794 | DMPK 5 reverse 19:45770360-45770387 | AGCGTGGGTCTCCGCCCAGCTCC | AsCpf1-1 |
| 2795 | DMPK 5 reverse 19:45770360-45770388 | AGCGTGGGTCTCCGCCCAGCTCCA | AsCpf1-1 |
| 2796 | DMPK 5 reverse 19:45770360-45770389 | AGCGTGGGTCTCCGCCCAGCTCCAG | AsCpf1-1 |
| 2797 | DMPK 5 reverse 19:45770371-45770393 | CAACCGCTCCGAGCGTGG | AsCpf1-1 |
| 2798 | DMPK 5 reverse 19:45770371-45770394 | CAACCGCTCCGAGCGTGGG | AsCpf1-1 |
| 2799 | DMPK 5 reverse 19:45770371-45770395 | CAACCGCTCCGAGCGTGGGT | AsCpf1-1 |
| 2800 | DMPK 5 reverse 19:45770371-45770396 | CAACCGCTCCGAGCGTGGGTC | AsCpf1-1 |
| 2801 | DMPK 5 reverse 19:45770371-45770397 | CAACCGCTCCGAGCGTGGGTCT | AsCpf1-1 |
| 2802 | DMPK 5 reverse 19:45770371-45770398 | CAACCGCTCCGAGCGTGGGTCTC | AsCpf1-1 |
| 2803 | DMPK 5 reverse 19:45770371-45770399 | CAACCGCTCCGAGCGTGGGTCTCC | AsCpf1-1 |
| 2804 | DMPK 5 reverse 19:45770371-45770400 | CAACCGCTCCGAGCGTGGGTCTCCG | AsCpf1-1 |
| 2805 | DMPK 5 reverse 19:45770438-45770460 | GGGCCCCGTTGGAAGACT | AsCpf1-1 |
| 2806 | DMPK 5 reverse 19:45770438-45770461 | GGGCCCCGTTGGAAGACTG | AsCpf1-1 |
| 2807 | DMPK 5 reverse 19:45770438-45770462 | GGGCCCCGTTGGAAGACTGA | AsCpf1-1 |
| 2808 | DMPK 5 reverse 19:45770438-45770463 | GGGCCCCGTTGGAAGACTGAG | AsCpf1-1 |
| 2809 | DMPK 5 reverse 19:45770438-45770464 | GGGCCCCGTTGGAAGACTGAGT | AsCpf1-1 |
| 2810 | DMPK 5 reverse 19:45770438-45770465 | GGGCCCCGTTGGAAGACTGAGTG | AsCpf1-1 |
| 2811 | DMPK 5 reverse 19:45770438-45770466 | GGGCCCCGTTGGAAGACTGAGTGC | AsCpf1-1 |
| 2812 | DMPK 5 reverse 19:45770438-45770467 | GGGCCCCGTTGGAAGACTGAGTGCC | AsCpf1-1 |
| 2813 | DMPK 5 reverse 19:45770444-45770466 | ACTCCGGGGCCCCGTTGG | AsCpf1-1 |
| 2814 | DMPK 5 reverse 19:45770444-45770467 | ACTCCGGGGCCCCGTTGGA | AsCpf1-1 |
| 2815 | DMPK 5 reverse 19:45770444-45770468 | ACTCCGGGGCCCCGTTGGAA | AsCpf1-1 |
| 2816 | DMPK 5 reverse 19:45770444-45770469 | ACTCCGGGGCCCCGTTGGAAG | AsCpf1-1 |
| 2817 | DMPK 5 reverse 19:45770444-45770470 | ACTCCGGGGCCCCGTTGGAAGA | AsCpf1-1 |
| 2818 | DMPK 5 reverse 19:45770444-45770471 | ACTCCGGGGCCCCGTTGGAAGAC | AsCpf1-1 |
| 2819 | DMPK 5 reverse 19:45770444-45770472 | ACTCCGGGGCCCCGTTGGAAGACT | AsCpf1-1 |
| 2820 | DMPK 5 reverse 19:45770444-45770473 | ACTCCGGGGCCCCGTTGGAAGACTG | AsCpf1-1 |
| 2821 | DMPK 5 forward 19:45770449-45770471 | AACGGGGCCCCGGAGTCG | AsCpf1-1 |
| 2822 | DMPK 5 forward 19:45770449-45770472 | AACGGGGCCCCGGAGTCGA | AsCpf1-1 |
| 2823 | DMPK 5 forward 19:45770449-45770473 | AACGGGGCCCCGGAGTCGAA | AsCpf1-1 |
| 2824 | DMPK 5 forward 19:45770449-45770474 | AACGGGGCCCCGGAGTCGAAG | AsCpf1-1 |
| 2825 | DMPK 5 forward 19:45770449-45770475 | AACGGGGCCCCGGAGTCGAAGA | AsCpf1-1 |
| 2826 | DMPK 5 forward 19:45770449-45770476 | AACGGGGCCCCGGAGTCGAAGAC | AsCpf1-1 |
| 2827 | DMPK 5 forward 19:45770449-45770477 | AACGGGGCCCCGGAGTCGAAGACA | AsCpf1-1 |
| 2828 | DMPK 5 forward 19:45770449-45770478 | AACGGGGCCCCGGAGTCGAAGACAG | AsCpf1-1 |
| 2829 | DMPK 5 forward 19:45770450-45770472 | ACGGGGCCCCGGAGTCGA | AsCpf1-1 |
| 2830 | DMPK 5 forward 19:45770450-45770473 | ACGGGGCCCCGGAGTCGAA | AsCpf1-1 |
| 2831 | DMPK 5 forward 19:45770450-45770474 | ACGGGGCCCCGGAGTCGAAG | AsCpf1-1 |
| 2832 | DMPK 5 forward 19:45770450-45770475 | ACGGGGCCCCGGAGTCGAAGA | AsCpf1-1 |
| 2833 | DMPK 5 forward 19:45770450-45770476 | ACGGGGCCCCGGAGTCGAAGAC | AsCpf1-1 |
| 2834 | DMPK 5 forward 19:45770450-45770477 | ACGGGGCCCCGGAGTCGAAGACA | AsCpf1-1 |
| 2835 | DMPK 5 forward 19:45770450-45770478 | ACGGGGCCCCGGAGTCGAAGACAG | AsCpf1-1 |
| 2836 | DMPK 5 forward 19:45770450-45770479 | ACGGGGCCCCGGAGTCGAAGACAGT | AsCpf1-1 |
| 2837 | DMPK 5 reverse 19:45770465-45770487 | TGAACCCTAGAACTGTCT | AsCpf1-1 |
| 2838 | DMPK 5 reverse 19:45770465-45770488 | TGAACCCTAGAACTGTCTT | AsCpf1-1 |
| 2839 | DMPK 5 reverse 19:45770465-45770489 | TGAACCCTAGAACTGTCTTC | AsCpf1-1 |
| 2840 | DMPK 5 reverse 19:45770465-45770490 | TGAACCCTAGAACTGTCTTCG | AsCpf1-1 |
| 2841 | DMPK 5 reverse 19:45770465-45770491 | TGAACCCTAGAACTGTCTTCGA | AsCpf1-1 |
| 2842 | DMPK 5 reverse 19:45770465-45770492 | TGAACCCTAGAACTGTCTTCGAC | AsCpf1-1 |
| 2843 | DMPK 5 reverse 19:45770465-45770493 | TGAACCCTAGAACTGTCTTCGACT | AsCpf1-1 |
| 2844 | DMPK 5 reverse 19:45770465-45770494 | TGAACCCTAGAACTGTCTTCGACTC | AsCpf1-1 |
| 2845 | DMPK 5 forward 19:45770252-45770283 | CAGCAGCAGCAGCATTCCCGGCTAC | SaCas9 |
| 2846 | DMPK 5 forward 19:45770253-45770283 | AGCAGCAGCAGCATTCCCGGCTAC | SaCas9 |
| 2847 | DMPK 5 forward 19:45770254-45770283 | GCAGCAGCAGCATTCCCGGCTAC | SaCas9 |
| 2848 | DMPK 5 forward 19:45770255-45770283 | CAGCAGCAGCATTCCCGGCTAC | SaCas9 |
| 2849 | DMPK 5 forward 19:45770256-45770283 | AGCAGCAGCATTCCCGGCTAC | SaCas9 |
| 2850 | DMPK 5 forward 19:45770257-45770283 | GCAGCAGCATTCCCGGCTAC | SaCas9 |
| 2851 | DMPK 5 forward 19:45770258-45770283 | CAGCAGCATTCCCGGCTAC | SaCas9 |
| 2852 | DMPK 5 forward 19:45770259-45770283 | AGCAGCATTCCCGGCTAC | SaCas9 |
| 2853 | DMPK 5 forward 19:45770261-45770292 | CAGCATTCCCGGCTACAAGGACCCT | SaCas9 |
| 2854 | DMPK 5 forward 19:45770262-45770292 | AGCATTCCCGGCTACAAGGACCCT | SaCas9 |
| 2855 | DMPK 5 forward 19:45770263-45770292 | GCATTCCCGGCTACAAGGACCCT | SaCas9 |
| 2856 | DMPK 5 forward 19:45770264-45770292 | CATTCCCGGCTACAAGGACCCT | SaCas9 |
| 2857 | DMPK 5 forward 19:45770265-45770292 | ATTCCCGGCTACAAGGACCCT | SaCas9 |
| 2858 | DMPK 5 forward 19:45770266-45770292 | TTCCCGGCTACAAGGACCCT | SaCas9 |
| 2859 | DMPK 5 forward 19:45770267-45770292 | TCCCGGCTACAAGGACCCT | SaCas9 |
| 2860 | DMPK 5 forward 19:45770268-45770292 | CCCGGCTACAAGGACCCT | SaCas9 |
| 2861 | DMPK 5 reverse 19:45770265-45770296 | CGGGGCTCGAAGGGTCCTTGTAGCC | SaCas9 |
| 2862 | DMPK 5 reverse 19:45770266-45770296 | GGGGCTCGAAGGGTCCTTGTAGCC | SaCas9 |
| 2863 | DMPK 5 reverse 19:45770267-45770296 | GGGCTCGAAGGGTCCTTGTAGCC | SaCas9 |
| 2864 | DMPK 5 reverse 19:45770268-45770296 | GGCTCGAAGGGTCCTTGTAGCC | SaCas9 |
| 2865 | DMPK 5 reverse 19:45770269-45770296 | GCTCGAAGGGTCCTTGTAGCC | SaCas9 |
| 2866 | DMPK 5 reverse 19:45770270-45770296 | CTCGAAGGGTCCTTGTAGCC | SaCas9 |
| 2867 | DMPK 5 reverse 19:45770271-45770296 | TCGAAGGGTCCTTGTAGCC | SaCas9 |
| 2868 | DMPK 5 reverse 19:45770272-45770296 | CGAAGGGTCCTTGTAGCC | SaCas9 |
| 2869 | DMPK 5 reverse 19:45770266-45770297 | ACGGGGCTCGAAGGGTCCTTGTAGC | SaCas9 |
| 2870 | DMPK 5 reverse 19:45770267-45770297 | CGGGGCTCGAAGGGTCCTTGTAGC | SaCas9 |
| 2871 | DMPK 5 reverse 19:45770268-45770297 | GGGGCTCGAAGGGTCCTTGTAGC | SaCas9 |
| 2872 | DMPK 5 reverse 19:45770269-45770297 | GGGCTCGAAGGGTCCTTGTAGC | SaCas9 |
| 2873 | DMPK 5 reverse 19:45770270-45770297 | GGCTCGAAGGGTCCTTGTAGC | SaCas9 |
| 2874 | DMPK 5 reverse 19:45770271-45770297 | GCTCGAAGGGTCCTTGTAGC | SaCas9 |
| 2875 | DMPK 5 reverse 19:45770272-45770297 | CTCGAAGGGTCCTTGTAGC | SaCas9 |
| 2876 | DMPK 5 reverse 19:45770273-45770297 | TCGAAGGGTCCTTGTAGC | SaCas9 |
| 2877 | DMPK 5 reverse 19:45770267-45770298 | AACGGGGCTCGAAGGGTCCTTGTAG | SaCas9 |
| 2878 | DMPK 5 reverse 19:45770268-45770298 | ACGGGGCTCGAAGGGTCCTTGTAG | SaCas9 |
| 2879 | DMPK 5 reverse 19:45770269-45770298 | CGGGGCTCGAAGGGTCCTTGTAG | SaCas9 |
| 2880 | DMPK 5 reverse 19:45770270-45770298 | GGGGCTCGAAGGGTCCTTGTAG | SaCas9 |
| 2881 | DMPK 5 reverse 19:45770271-45770298 | GGGCTCGAAGGGTCCTTGTAG | SaCas9 |
| 2882 | DMPK 5 reverse 19:45770272-45770298 | GGCTCGAAGGGTCCTTGTAG | SaCas9 |
| 2883 | DMPK 5 reverse 19:45770273-45770298 | GCTCGAAGGGTCCTTGTAG | SaCas9 |
| 2884 | DMPK 5 reverse 19:45770274-45770298 | CTCGAAGGGTCCTTGTAG | SaCas9 |
| 2885 | DMPK 5 forward 19:45770281-45770312 | ACCCTTCGAGCCCCGTTCGCCGGCC | SaCas9 |
| 2886 | DMPK 5 forward 19:45770282-45770312 | CCCTTCGAGCCCCGTTCGCCGGCC | SaCas9 |
| 2887 | DMPK 5 forward 19:45770283-45770312 | CCTTCGAGCCCCGTTCGCCGGCC | SaCas9 |
| 2888 | DMPK 5 forward 19:45770284-45770312 | CTTCGAGCCCCGTTCGCCGGCC | SaCas9 |
| 2889 | DMPK 5 forward 19:45770285-45770312 | TTCGAGCCCCGTTCGCCGGCC | SaCas9 |
| 2890 | DMPK 5 forward 19:45770286-45770312 | TCGAGCCCCGTTCGCCGGCC | SaCas9 |
| 2891 | DMPK 5 forward 19:45770287-45770312 | CGAGCCCCGTTCGCCGGCC | SaCas9 |
| 2892 | DMPK 5 forward 19:45770288-45770312 | GAGCCCCGTTCGCCGGCC | SaCas9 |
| 2893 | DMPK 5 reverse 19:45770281-45770312 | GTCCGCGGCCGGCGAACGGGGCTCG | SaCas9 |
| 2894 | DMPK 5 reverse 19:45770282-45770312 | TCCGCGGCCGGCGAACGGGGCTCG | SaCas9 |
| 2895 | DMPK 5 reverse 19:45770283-45770312 | CCGCGGCCGGCGAACGGGGCTCG | SaCas9 |
| 2896 | DMPK 5 reverse 19:45770284-45770312 | CGCGGCCGGCGAACGGGGCTCG | SaCas9 |
| 2897 | DMPK 5 reverse 19:45770285-45770312 | GCGGCCGGCGAACGGGGCTCG | SaCas9 |
| 2898 | DMPK 5 reverse 19:45770286-45770312 | CGGCCGGCGAACGGGGCTCG | SaCas9 |
| 2899 | DMPK 5 reverse 19:45770287-45770312 | GGCCGGCGAACGGGGCTCG | SaCas9 |
| 2900 | DMPK 5 reverse 19:45770288-45770312 | GCCGGCGAACGGGGCTCG | SaCas9 |
| 2901 | DMPK 5 reverse 19:45770284-45770315 | CGGGTCCGCGGCCGGCGAACGGGGC | SaCas9 |
| 2902 | DMPK 5 reverse 19:45770285-45770315 | GGGTCCGCGGCCGGCGAACGGGGC | SaCas9 |
| 2903 | DMPK 5 reverse 19:45770286-45770315 | GGTCCGCGGCCGGCGAACGGGGC | SaCas9 |
| 2904 | DMPK 5 reverse 19:45770287-45770315 | GTCCGCGGCCGGCGAACGGGGC | SaCas9 |
| 2905 | DMPK 5 reverse 19:45770288-45770315 | TCCGCGGCCGGCGAACGGGGC | SaCas9 |
| 2906 | DMPK 5 reverse 19:45770289-45770315 | CCGCGGCCGGCGAACGGGGC | SaCas9 |
| 2907 | DMPK 5 reverse 19:45770290-45770315 | CGCGGCCGGCGAACGGGGC | SaCas9 |
| 2908 | DMPK 5 reverse 19:45770291-45770315 | GCGGCCGGCGAACGGGGC | SaCas9 |
| 2909 | DMPK 5 reverse 19:45770290-45770321 | AGGGGCCGGGTCCGCGGCCGGCGAA | SaCas9 |
| 2910 | DMPK 5 reverse 19:45770291-45770321 | GGGGCCGGGTCCGCGGCCGGCGAA | SaCas9 |
| 2911 | DMPK 5 reverse 19:45770292-45770321 | GGGCCGGGTCCGCGGCCGGCGAA | SaCas9 |
| 2912 | DMPK 5 reverse 19:45770293-45770321 | GGCCGGGTCCGCGGCCGGCGAA | SaCas9 |
| 2913 | DMPK 5 reverse 19:45770294-45770321 | GCCGGGTCCGCGGCCGGCGAA | SaCas9 |
| 2914 | DMPK 5 reverse 19:45770295-45770321 | CCGGGTCCGCGGCCGGCGAA | SaCas9 |
| 2915 | DMPK 5 reverse 19:45770296-45770321 | CGGGTCCGCGGCCGGCGAA | SaCas9 |
| 2916 | DMPK 5 reverse 19:45770297-45770321 | GGGTCCGCGGCCGGCGAA | SaCas9 |
| 2917 | DMPK 5 reverse 19:45770291-45770322 | GAGGGGCCGGGTCCGCGGCCGGCGA | SaCas9 |
| 2918 | DMPK 5 reverse 19:45770292-45770322 | AGGGGCCGGGTCCGCGGCCGGCGA | SaCas9 |
| 2919 | DMPK 5 reverse 19:45770293-45770322 | GGGGCCGGGTCCGCGGCCGGCGA | SaCas9 |
| 2920 | DMPK 5 reverse 19:45770294-45770322 | GGGCCGGGTCCGCGGCCGGCGA | SaCas9 |
| 2921 | DMPK 5 reverse 19:45770295-45770322 | GGCCGGGTCCGCGGCCGGCGA | SaCas9 |
| 2922 | DMPK 5 reverse 19:45770296-45770322 | GCCGGGTCCGCGGCCGGCGA | SaCas9 |
| 2923 | DMPK 5 reverse 19:45770297-45770322 | CCGGGTCCGCGGCCGGCGA | SaCas9 |
| 2924 | DMPK 5 reverse 19:45770298-45770322 | CGGGTCCGCGGCCGGCGA | SaCas9 |
| 2925 | DMPK 5 reverse 19:45770295-45770326 | GAGGGAGGGGCCGGGTCCGCGGCCG | SaCas9 |
| 2926 | DMPK 5 reverse 19:45770296-45770326 | AGGGAGGGGCCGGGTCCGCGGCCG | SaCas9 |
| 2927 | DMPK 5 reverse 19:45770297-45770326 | GGGAGGGGCCGGGTCCGCGGCCG | SaCas9 |
| 2928 | DMPK 5 reverse 19:45770298-45770326 | GGAGGGGCCGGGTCCGCGGCCG | SaCas9 |
| 2929 | DMPK 5 reverse 19:45770299-45770326 | GAGGGGCCGGGTCCGCGGCCG | SaCas9 |
| 2930 | DMPK 5 reverse 19:45770300-45770326 | AGGGGCCGGGTCCGCGGCCG | SaCas9 |
| 2931 | DMPK 5 reverse 19:45770301-45770326 | GGGGCCGGGTCCGCGGCCG | SaCas9 |
| 2932 | DMPK 5 reverse 19:45770302-45770326 | GGGCCGGGTCCGCGGCCG | SaCas9 |
| 2933 | DMPK 5 forward 19:45770310-45770341 | ACCCGGCCCCTCCCTCCCCGGCCGC | SaCas9 |
| 2934 | DMPK 5 forward 19:45770311-45770341 | CCCGGCCCCTCCCTCCCCGGCCGC | SaCas9 |
| 2935 | DMPK 5 forward 19:45770312-45770341 | CCGGCCCCTCCCTCCCCGGCCGC | SaCas9 |
| 2936 | DMPK 5 forward 19:45770313-45770341 | CGGCCCCTCCCTCCCCGGCCGC | SaCas9 |
| 2937 | DMPK 5 forward 19:45770314-45770341 | GGCCCCTCCCTCCCCGGCCGC | SaCas9 |
| 2938 | DMPK 5 forward 19:45770315-45770341 | GCCCCTCCCTCCCCGGCCGC | SaCas9 |
| 2939 | DMPK 5 forward 19:45770316-45770341 | CCCCTCCCTCCCCGGCCGC | SaCas9 |
| 2940 | DMPK 5 forward 19:45770317-45770341 | CCCTCCCTCCCCGGCCGC | SaCas9 |
| 2941 | DMPK 5 reverse 19:45770310-45770341 | CCCCTAGCGGCCGGGGAGGGAGGGG | SaCas9 |
| 2942 | DMPK 5 reverse 19:45770311-45770341 | CCCTAGCGGCCGGGGAGGGAGGGG | SaCas9 |
| 2943 | DMPK 5 reverse 19:45770312-45770341 | CCTAGCGGCCGGGGAGGGAGGGG | SaCas9 |
| 2944 | DMPK 5 reverse 19:45770313-45770341 | CTAGCGGCCGGGGAGGGAGGGG | SaCas9 |
| 2945 | DMPK 5 reverse 19:45770314-45770341 | TAGCGGCCGGGGAGGGAGGGG | SaCas9 |
| 2946 | DMPK 5 reverse 19:45770315-45770341 | AGCGGCCGGGGAGGGAGGGG | SaCas9 |
| 2947 | DMPK 5 reverse 19:45770316-45770341 | GCGGCCGGGGAGGGAGGGG | SaCas9 |
| 2948 | DMPK 5 reverse 19:45770317-45770341 | CGGCCGGGGAGGGAGGGG | SaCas9 |
| 2949 | DMPK 5 forward 19:45770311-45770342 | CCCGGCCCCTCCCTCCCCGGCCGCT | SaCas9 |
| 2950 | DMPK 5 forward 19:45770312-45770342 | CCGGCCCCTCCCTCCCCGGCCGCT | SaCas9 |
| 2951 | DMPK 5 forward 19:45770313-45770342 | CGGCCCCTCCCTCCCCGGCCGCT | SaCas9 |
| 2952 | DMPK 5 forward 19:45770314-45770342 | GGCCCCTCCCTCCCCGGCCGCT | SaCas9 |
| 2953 | DMPK 5 forward 19:45770315-45770342 | GCCCCTCCCTCCCCGGCCGCT | SaCas9 |
| 2954 | DMPK 5 forward 19:45770316-45770342 | CCCCTCCCTCCCCGGCCGCT | SaCas9 |
| 2955 | DMPK 5 forward 19:45770317-45770342 | CCCTCCCTCCCCGGCCGCT | SaCas9 |
| 2956 | DMPK 5 forward 19:45770318-45770342 | CCTCCCTCCCCGGCCGCT | SaCas9 |
| 2957 | DMPK 5 forward 19:45770312-45770343 | CCGGCCCCTCCCTCCCCGGCCGCTA | SaCas9 |
| 2958 | DMPK 5 forward 19:45770313-45770343 | CGGCCCCTCCCTCCCCGGCCGCTA | SaCas9 |
| 2959 | DMPK 5 forward 19:45770314-45770343 | GGCCCCTCCCTCCCCGGCCGCTA | SaCas9 |
| 2960 | DMPK 5 forward 19:45770315-45770343 | GCCCCTCCCTCCCCGGCCGCTA | SaCas9 |
| 2961 | DMPK 5 forward 19:45770316-45770343 | CCCCTCCCTCCCCGGCCGCTA | SaCas9 |
| 2962 | DMPK 5 forward 19:45770317-45770343 | CCCTCCCTCCCCGGCCGCTA | SaCas9 |
| 2963 | DMPK 5 forward 19:45770318-45770343 | CCTCCCTCCCCGGCCGCTA | SaCas9 |
| 2964 | DMPK 5 forward 19:45770319-45770343 | CTCCCTCCCCGGCCGCTA | SaCas9 |
| 2965 | DMPK 5 reverse 19:45770315-45770346 | CCCGCCCCCTAGCGGCCGGGGAGGG | SaCas9 |
| 2966 | DMPK 5 reverse 19:45770316-45770346 | CCGCCCCCTAGCGGCCGGGGAGGG | SaCas9 |
| 2967 | DMPK 5 reverse 19:45770317-45770346 | CGCCCCCTAGCGGCCGGGGAGGG | SaCas9 |
| 2968 | DMPK 5 reverse 19:45770318-45770346 | GCCCCCTAGCGGCCGGGGAGGG | SaCas9 |
| 2969 | DMPK 5 reverse 19:45770319-45770346 | CCCCCTAGCGGCCGGGGAGGG | SaCas9 |
| 2970 | DMPK 5 reverse 19:45770320-45770346 | CCCCTAGCGGCCGGGGAGGG | SaCas9 |
| 2971 | DMPK 5 reverse 19:45770321-45770346 | CCCTAGCGGCCGGGGAGGG | SaCas9 |
| 2972 | DMPK 5 reverse 19:45770322-45770346 | CCTAGCGGCCGGGGAGGG | SaCas9 |
| 2973 | DMPK 5 forward 19:45770316-45770347 | CCCCTCCCTCCCCGGCCGCTAGGGG | SaCas9 |
| 2974 | DMPK 5 forward 19:45770317-45770347 | CCCTCCCTCCCCGGCCGCTAGGGG | SaCas9 |
| 2975 | DMPK 5 forward 19:45770318-45770347 | CCTCCCTCCCCGGCCGCTAGGGG | SaCas9 |
| 2976 | DMPK 5 forward 19:45770319-45770347 | CTCCCTCCCCGGCCGCTAGGGG | SaCas9 |
| 2977 | DMPK 5 forward 19:45770320-45770347 | TCCCTCCCCGGCCGCTAGGGG | SaCas9 |
| 2978 | DMPK 5 forward 19:45770321-45770347 | CCCTCCCCGGCCGCTAGGGG | SaCas9 |
| 2979 | DMPK 5 forward 19:45770322-45770347 | CCTCCCCGGCCGCTAGGGG | SaCas9 |
| 2980 | DMPK 5 forward 19:45770323-45770347 | CTCCCCGGCCGCTAGGGG | SaCas9 |
| 2981 | DMPK 5 reverse 19:45770316-45770347 | GCCCGCCCCCTAGCGGCCGGGGAGG | SaCas9 |
| 2982 | DMPK 5 reverse 19:45770317-45770347 | CCCGCCCCCTAGCGGCCGGGGAGG | SaCas9 |
| 2983 | DMPK 5 reverse 19:45770318-45770347 | CCGCCCCCTAGCGGCCGGGGAGG | SaCas9 |
| 2984 | DMPK 5 reverse 19:45770319-45770347 | CGCCCCCTAGCGGCCGGGGAGG | SaCas9 |
| 2985 | DMPK 5 reverse 19:45770320-45770347 | GCCCCCTAGCGGCCGGGGAGG | SaCas9 |
| 2986 | DMPK 5 reverse 19:45770321-45770347 | CCCCCTAGCGGCCGGGGAGG | SaCas9 |
| 2987 | DMPK 5 reverse 19:45770322-45770347 | CCCCTAGCGGCCGGGGAGG | SaCas9 |
| 2988 | DMPK 5 reverse 19:45770323-45770347 | CCCTAGCGGCCGGGGAGG | SaCas9 |
| 2989 | DMPK 5 reverse 19:45770318-45770349 | GGGCCCGCCCCCTAGCGGCCGGGGA | SaCas9 |
| 2990 | DMPK 5 reverse 19:45770319-45770349 | GGCCCGCCCCCTAGCGGCCGGGGA | SaCas9 |
| 2991 | DMPK 5 reverse 19:45770320-45770349 | GCCCGCCCCCTAGCGGCCGGGGA | SaCas9 |
| 2992 | DMPK 5 reverse 19:45770321-45770349 | CCCGCCCCCTAGCGGCCGGGGA | SaCas9 |
| 2993 | DMPK 5 reverse 19:45770322-45770349 | CCGCCCCCTAGCGGCCGGGGA | SaCas9 |
| 2994 | DMPK 5 reverse 19:45770323-45770349 | CGCCCCCTAGCGGCCGGGGA | SaCas9 |
| 2995 | DMPK 5 reverse 19:45770324-45770349 | GCCCCCTAGCGGCCGGGGA | SaCas9 |
| 2996 | DMPK 5 reverse 19:45770325-45770349 | CCCCCTAGCGGCCGGGGA | SaCas9 |
| 2997 | DMPK 5 reverse 19:45770319-45770350 | CGGGCCCGCCCCCTAGCGGCCGGGG | SaCas9 |
| 2998 | DMPK 5 reverse 19:45770320-45770350 | GGGCCCGCCCCCTAGCGGCCGGGG | SaCas9 |
| 2999 | DMPK 5 reverse 19:45770321-45770350 | GGCCCGCCCCCTAGCGGCCGGGG | SaCas9 |
| 3000 | DMPK 5 reverse 19:45770322-45770350 | GCCCGCCCCCTAGCGGCCGGGG | SaCas9 |
| 3001 | DMPK 5 reverse 19:45770323-45770350 | CCCGCCCCCTAGCGGCCGGGG | SaCas9 |
| 3002 | DMPK 5 reverse 19:45770324-45770350 | CCGCCCCCTAGCGGCCGGGG | SaCas9 |
| 3003 | DMPK 5 reverse 19:45770325-45770350 | CGCCCCCTAGCGGCCGGGG | SaCas9 |
| 3004 | DMPK 5 reverse 19:45770326-45770350 | GCCCCCTAGCGGCCGGGG | SaCas9 |
| 3005 | DMPK 5 reverse 19:45770320-45770351 | CCGGGCCCGCCCCCTAGCGGCCGGG | SaCas9 |
| 3006 | DMPK 5 reverse 19:45770321-45770351 | CGGGCCCGCCCCCTAGCGGCCGGG | SaCas9 |
| 3007 | DMPK 5 reverse 19:45770322-45770351 | GGGCCCGCCCCCTAGCGGCCGGG | SaCas9 |
| 3008 | DMPK 5 reverse 19:45770323-45770351 | GGCCCGCCCCCTAGCGGCCGGG | SaCas9 |
| 3009 | DMPK 5 reverse 19:45770324-45770351 | GCCCGCCCCCTAGCGGCCGGG | SaCas9 |
| 3010 | DMPK 5 reverse 19:45770325-45770351 | CCCGCCCCCTAGCGGCCGGG | SaCas9 |
| 3011 | DMPK 5 reverse 19:45770326-45770351 | CCGCCCCCTAGCGGCCGGG | SaCas9 |
| 3012 | DMPK 5 reverse 19:45770327-45770351 | CGCCCCCTAGCGGCCGGG | SaCas9 |
| 3013 | DMPK 5 forward 19:45770322-45770353 | CCTCCCCGGCCGCTAGGGGGCGGGC | SaCas9 |
| 3014 | DMPK 5 forward 19:45770323-45770353 | CTCCCCGGCCGCTAGGGGGCGGGC | SaCas9 |
| 3015 | DMPK 5 forward 19:45770324-45770353 | TCCCCGGCCGCTAGGGGGCGGGC | SaCas9 |
| 3016 | DMPK 5 forward 19:45770325-45770353 | CCCCGGCCGCTAGGGGGCGGGC | SaCas9 |
| 3017 | DMPK 5 forward 19:45770326-45770353 | CCCGGCCGCTAGGGGGCGGGC | SaCas9 |
| 3018 | DMPK 5 forward 19:45770327-45770353 | CCGGCCGCTAGGGGGCGGGC | SaCas9 |
| 3019 | DMPK 5 forward 19:45770328-45770353 | CGGCCGCTAGGGGGCGGGC | SaCas9 |
| 3020 | DMPK 5 forward 19:45770329-45770353 | GGCCGCTAGGGGGCGGGC | SaCas9 |
| 3021 | DMPK 5 reverse 19:45770322-45770353 | ATCCGGGCCCGCCCCCTAGCGGCCG | SaCas9 |
| 3022 | DMPK 5 reverse 19:45770323-45770353 | TCCGGGCCCGCCCCCTAGCGGCCG | SaCas9 |
| 3023 | DMPK 5 reverse 19:45770324-45770353 | CCGGGCCCGCCCCCTAGCGGCCG | SaCas9 |
| 3024 | DMPK 5 reverse 19:45770325-45770353 | CGGGCCCGCCCCCTAGCGGCCG | SaCas9 |
| 3025 | DMPK 5 reverse 19:45770326-45770353 | GGGCCCGCCCCCTAGCGGCCG | SaCas9 |
| 3026 | DMPK 5 reverse 19:45770327-45770353 | GGCCCGCCCCCTAGCGGCCG | SaCas9 |
| 3027 | DMPK 5 reverse 19:45770328-45770353 | GCCCGCCCCCTAGCGGCCG | SaCas9 |
| 3028 | DMPK 5 reverse 19:45770329-45770353 | CCCGCCCCCTAGCGGCCG | SaCas9 |
| 3029 | DMPK 5 reverse 19:45770323-45770354 | GATCCGGGCCCGCCCCCTAGCGGCC | SaCas9 |
| 3030 | DMPK 5 reverse 19:45770324-45770354 | ATCCGGGCCCGCCCCCTAGCGGCC | SaCas9 |
| 3031 | DMPK 5 reverse 19:45770325-45770354 | TCCGGGCCCGCCCCCTAGCGGCC | SaCas9 |
| 3032 | DMPK 5 reverse 19:45770326-45770354 | CCGGGCCCGCCCCCTAGCGGCC | SaCas9 |
| 3033 | DMPK 5 reverse 19:45770327-45770354 | CGGGCCCGCCCCCTAGCGGCC | SaCas9 |
| 3034 | DMPK 5 reverse 19:45770328-45770354 | GGGCCCGCCCCCTAGCGGCC | SaCas9 |
| 3035 | DMPK 5 reverse 19:45770329-45770354 | GGCCCGCCCCCTAGCGGCC | SaCas9 |
| 3036 | DMPK 5 reverse 19:45770330-45770354 | GCCCGCCCCCTAGCGGCC | SaCas9 |
| 3037 | DMPK 5 reverse 19:45770324-45770355 | TGATCCGGGCCCGCCCCCTAGCGGC | SaCas9 |
| 3038 | DMPK 5 reverse 19:45770325-45770355 | GATCCGGGCCCGCCCCCTAGCGGC | SaCas9 |
| 3039 | DMPK 5 reverse 19:45770326-45770355 | ATCCGGGCCCGCCCCCTAGCGGC | SaCas9 |
| 3040 | DMPK 5 reverse 19:45770327-45770355 | TCCGGGCCCGCCCCCTAGCGGC | SaCas9 |
| 3041 | DMPK 5 reverse 19:45770328-45770355 | CCGGGCCCGCCCCCTAGCGGC | SaCas9 |
| 3042 | DMPK 5 reverse 19:45770329-45770355 | CGGGCCCGCCCCCTAGCGGC | SaCas9 |
| 3043 | DMPK 5 reverse 19:45770330-45770355 | GGGCCCGCCCCCTAGCGGC | SaCas9 |
| 3044 | DMPK 5 reverse 19:45770331-45770355 | GGCCCGCCCCCTAGCGGC | SaCas9 |
| 3045 | DMPK 5 reverse 19:45770325-45770356 | GTGATCCGGGCCCGCCCCCTAGCGG | SaCas9 |
| 3046 | DMPK 5 reverse 19:45770326-45770356 | TGATCCGGGCCCGCCCCCTAGCGG | SaCas9 |
| 3047 | DMPK 5 reverse 19:45770327-45770356 | GATCCGGGCCCGCCCCCTAGCGG | SaCas9 |
| 3048 | DMPK 5 reverse 19:45770328-45770356 | ATCCGGGCCCGCCCCCTAGCGG | SaCas9 |
| 3049 | DMPK 5 reverse 19:45770329-45770356 | TCCGGGCCCGCCCCCTAGCGG | SaCas9 |
| 3050 | DMPK 5 reverse 19:45770330-45770356 | CCGGGCCCGCCCCCTAGCGG | SaCas9 |
| 3051 | DMPK 5 reverse 19:45770331-45770356 | CGGGCCCGCCCCCTAGCGG | SaCas9 |
| 3052 | DMPK 5 reverse 19:45770332-45770356 | GGGCCCGCCCCCTAGCGG | SaCas9 |
| 3053 | DMPK 5 forward 19:45770330-45770361 | GCCGCTAGGGGGCGGGCCCGGATCA | SaCas9 |
| 3054 | DMPK 5 forward 19:45770331-45770361 | CCGCTAGGGGGCGGGCCCGGATCA | SaCas9 |
| 3055 | DMPK 5 forward 19:45770332-45770361 | CGCTAGGGGGCGGGCCCGGATCA | SaCas9 |
| 3056 | DMPK 5 forward 19:45770333-45770361 | GCTAGGGGGCGGGCCCGGATCA | SaCas9 |
| 3057 | DMPK 5 forward 19:45770334-45770361 | CTAGGGGGCGGGCCCGGATCA | SaCas9 |
| 3058 | DMPK 5 forward 19:45770335-45770361 | TAGGGGGCGGGCCCGGATCA | SaCas9 |
| 3059 | DMPK 5 forward 19:45770336-45770361 | AGGGGGCGGGCCCGGATCA | SaCas9 |
| 3060 | DMPK 5 forward 19:45770337-45770361 | GGGGGCGGGCCCGGATCA | SaCas9 |
| 3061 | DMPK 5 forward 19:45770335-45770366 | TAGGGGGCGGGCCCGGATCACAGGA | SaCas9 |
| 3062 | DMPK 5 forward 19:45770336-45770366 | AGGGGGCGGGCCCGGATCACAGGA | SaCas9 |
| 3063 | DMPK 5 forward 19:45770337-45770366 | GGGGGCGGGCCCGGATCACAGGA | SaCas9 |
| 3064 | DMPK 5 forward 19:45770338-45770366 | GGGGCGGGCCCGGATCACAGGA | SaCas9 |
| 3065 | DMPK 5 forward 19:45770339-45770366 | GGGCGGGCCCGGATCACAGGA | SaCas9 |
| 3066 | DMPK 5 forward 19:45770340-45770366 | GGCGGGCCCGGATCACAGGA | SaCas9 |
| 3067 | DMPK 5 forward 19:45770341-45770366 | GCGGGCCCGGATCACAGGA | SaCas9 |
| 3068 | DMPK 5 forward 19:45770342-45770366 | CGGGCCCGGATCACAGGA | SaCas9 |
| 3069 | DMPK 5 forward 19:45770336-45770367 | AGGGGGCGGGCCCGGATCACAGGAC | SaCas9 |
| 3070 | DMPK 5 forward 19:45770337-45770367 | GGGGGCGGGCCCGGATCACAGGAC | SaCas9 |
| 3071 | DMPK 5 forward 19:45770338-45770367 | GGGGCGGGCCCGGATCACAGGAC | SaCas9 |
| 3072 | DMPK 5 forward 19:45770339-45770367 | GGGCGGGCCCGGATCACAGGAC | SaCas9 |
| 3073 | DMPK 5 forward 19:45770340-45770367 | GGCGGGCCCGGATCACAGGAC | SaCas9 |
| 3074 | DMPK 5 forward 19:45770341-45770367 | GCGGGCCCGGATCACAGGAC | SaCas9 |
| 3075 | DMPK 5 forward 19:45770342-45770367 | CGGGCCCGGATCACAGGAC | SaCas9 |
| 3076 | DMPK 5 forward 19:45770343-45770367 | GGGCCCGGATCACAGGAC | SaCas9 |
| 3077 | DMPK 5 forward 19:45770341-45770372 | GCGGGCCCGGATCACAGGACTGGAG | SaCas9 |
| 3078 | DMPK 5 forward 19:45770342-45770372 | CGGGCCCGGATCACAGGACTGGAG | SaCas9 |
| 3079 | DMPK 5 forward 19:45770343-45770372 | GGGCCCGGATCACAGGACTGGAG | SaCas9 |
| 3080 | DMPK 5 forward 19:45770344-45770372 | GGCCCGGATCACAGGACTGGAG | SaCas9 |
| 3081 | DMPK 5 forward 19:45770345-45770372 | GCCCGGATCACAGGACTGGAG | SaCas9 |
| 3082 | DMPK 5 forward 19:45770346-45770372 | CCCGGATCACAGGACTGGAG | SaCas9 |
| 3083 | DMPK 5 forward 19:45770347-45770372 | CCGGATCACAGGACTGGAG | SaCas9 |
| 3084 | DMPK 5 forward 19:45770348-45770372 | CGGATCACAGGACTGGAG | SaCas9 |
| 3085 | DMPK 5 forward 19:45770345-45770376 | GCCCGGATCACAGGACTGGAGCTGG | SaCas9 |
| 3086 | DMPK 5 forward 19:45770346-45770376 | CCCGGATCACAGGACTGGAGCTGG | SaCas9 |
| 3087 | DMPK 5 forward 19:45770347-45770376 | CCGGATCACAGGACTGGAGCTGG | SaCas9 |
| 3088 | DMPK 5 forward 19:45770348-45770376 | CGGATCACAGGACTGGAGCTGG | SaCas9 |
| 3089 | DMPK 5 forward 19:45770349-45770376 | GGATCACAGGACTGGAGCTGG | SaCas9 |
| 3090 | DMPK 5 forward 19:45770350-45770376 | GATCACAGGACTGGAGCTGG | SaCas9 |
| 3091 | DMPK 5 forward 19:45770351-45770376 | ATCACAGGACTGGAGCTGG | SaCas9 |
| 3092 | DMPK 5 forward 19:45770352-45770376 | TCACAGGACTGGAGCTGG | SaCas9 |
| 3093 | DMPK 5 reverse 19:45770345-45770376 | CTCCGCCCAGCTCCAGTCCTGTGAT | SaCas9 |
| 3094 | DMPK 5 reverse 19:45770346-45770376 | TCCGCCCAGCTCCAGTCCTGTGAT | SaCas9 |
| 3095 | DMPK 5 reverse 19:45770347-45770376 | CCGCCCAGCTCCAGTCCTGTGAT | SaCas9 |
| 3096 | DMPK 5 reverse 19:45770348-45770376 | CGCCCAGCTCCAGTCCTGTGAT | SaCas9 |
| 3097 | DMPK 5 reverse 19:45770349-45770376 | GCCCAGCTCCAGTCCTGTGAT | SaCas9 |
| 3098 | DMPK 5 reverse 19:45770350-45770376 | CCCAGCTCCAGTCCTGTGAT | SaCas9 |
| 3099 | DMPK 5 reverse 19:45770351-45770376 | CCAGCTCCAGTCCTGTGAT | SaCas9 |
| 3100 | DMPK 5 reverse 19:45770352-45770376 | CAGCTCCAGTCCTGTGAT | SaCas9 |
| 3101 | DMPK 5 forward 19:45770346-45770377 | CCCGGATCACAGGACTGGAGCTGGG | SaCas9 |
| 3102 | DMPK 5 forward 19:45770347-45770377 | CCGGATCACAGGACTGGAGCTGGG | SaCas9 |
| 3103 | DMPK 5 forward 19:45770348-45770377 | CGGATCACAGGACTGGAGCTGGG | SaCas9 |
| 3104 | DMPK 5 forward 19:45770349-45770377 | GGATCACAGGACTGGAGCTGGG | SaCas9 |
| 3105 | DMPK 5 forward 19:45770350-45770377 | GATCACAGGACTGGAGCTGGG | SaCas9 |
| 3106 | DMPK 5 forward 19:45770351-45770377 | ATCACAGGACTGGAGCTGGG | SaCas9 |
| 3107 | DMPK 5 forward 19:45770352-45770377 | TCACAGGACTGGAGCTGGG | SaCas9 |
| 3108 | DMPK 5 forward 19:45770353-45770377 | CACAGGACTGGAGCTGGG | SaCas9 |
| 3109 | DMPK 5 forward 19:45770359-45770390 | ACTGGAGCTGGGCGGAGACCCACGC | SaCas9 |
| 3110 | DMPK 5 forward 19:45770360-45770390 | CTGGAGCTGGGCGGAGACCCACGC | SaCas9 |
| 3111 | DMPK 5 forward 19:45770361-45770390 | TGGAGCTGGGCGGAGACCCACGC | SaCas9 |
| 3112 | DMPK 5 forward 19:45770362-45770390 | GGAGCTGGGCGGAGACCCACGC | SaCas9 |
| 3113 | DMPK 5 forward 19:45770363-45770390 | GAGCTGGGCGGAGACCCACGC | SaCas9 |
| 3114 | DMPK 5 forward 19:45770364-45770390 | AGCTGGGCGGAGACCCACGC | SaCas9 |
| 3115 | DMPK 5 forward 19:45770365-45770390 | GCTGGGCGGAGACCCACGC | SaCas9 |
| 3116 | DMPK 5 forward 19:45770366-45770390 | CTGGGCGGAGACCCACGC | SaCas9 |
| 3117 | DMPK 5 forward 19:45770360-45770391 | CTGGAGCTGGGCGGAGACCCACGCT | SaCas9 |
| 3118 | DMPK 5 forward 19:45770361-45770391 | TGGAGCTGGGCGGAGACCCACGCT | SaCas9 |
| 3119 | DMPK 5 forward 19:45770362-45770391 | GGAGCTGGGCGGAGACCCACGCT | SaCas9 |
| 3120 | DMPK 5 forward 19:45770363-45770391 | GAGCTGGGCGGAGACCCACGCT | SaCas9 |
| 3121 | DMPK 5 forward 19:45770364-45770391 | AGCTGGGCGGAGACCCACGCT | SaCas9 |
| 3122 | DMPK 5 forward 19:45770365-45770391 | GCTGGGCGGAGACCCACGCT | SaCas9 |
| 3123 | DMPK 5 forward 19:45770366-45770391 | CTGGGCGGAGACCCACGCT | SaCas9 |
| 3124 | DMPK 5 forward 19:45770367-45770391 | TGGGCGGAGACCCACGCT | SaCas9 |
| 3125 | DMPK 5 forward 19:45770370-45770401 | GCGGAGACCCACGCTCGGAGCGGTT | SaCas9 |
| 3126 | DMPK 5 forward 19:45770371-45770401 | CGGAGACCCACGCTCGGAGCGGTT | SaCas9 |
| 3127 | DMPK 5 forward 19:45770372-45770401 | GGAGACCCACGCTCGGAGCGGTT | SaCas9 |
| 3128 | DMPK 5 forward 19:45770373-45770401 | GAGACCCACGCTCGGAGCGGTT | SaCas9 |
| 3129 | DMPK 5 forward 19:45770374-45770401 | AGACCCACGCTCGGAGCGGTT | SaCas9 |
| 3130 | DMPK 5 forward 19:45770375-45770401 | GACCCACGCTCGGAGCGGTT | SaCas9 |
| 3131 | DMPK 5 forward 19:45770376-45770401 | ACCCACGCTCGGAGCGGTT | SaCas9 |
| 3132 | DMPK 5 forward 19:45770377-45770401 | CCCACGCTCGGAGCGGTT | SaCas9 |
| 3133 | DMPK 5 reverse 19:45770376-45770407 | CTGCCAGTTCACAACCGCTCCGAGC | SaCas9 |
| 3134 | DMPK 5 reverse 19:45770377-45770407 | TGCCAGTTCACAACCGCTCCGAGC | SaCas9 |
| 3135 | DMPK 5 reverse 19:45770378-45770407 | GCCAGTTCACAACCGCTCCGAGC | SaCas9 |
| 3136 | DMPK 5 reverse 19:45770379-45770407 | CCAGTTCACAACCGCTCCGAGC | SaCas9 |
| 3137 | DMPK 5 reverse 19:45770380-45770407 | CAGTTCACAACCGCTCCGAGC | SaCas9 |
| 3138 | DMPK 5 reverse 19:45770381-45770407 | AGTTCACAACCGCTCCGAGC | SaCas9 |
| 3139 | DMPK 5 reverse 19:45770382-45770407 | GTTCACAACCGCTCCGAGC | SaCas9 |
| 3140 | DMPK 5 reverse 19:45770383-45770407 | TTCACAACCGCTCCGAGC | SaCas9 |
| 3141 | DMPK 5 reverse 19:45770382-45770413 | CACCGCCTGCCAGTTCACAACCGCT | SaCas9 |
| 3142 | DMPK 5 reverse 19:45770383-45770413 | ACCGCCTGCCAGTTCACAACCGCT | SaCas9 |
| 3143 | DMPK 5 reverse 19:45770384-45770413 | CCGCCTGCCAGTTCACAACCGCT | SaCas9 |
| 3144 | DMPK 5 reverse 19:45770385-45770413 | CGCCTGCCAGTTCACAACCGCT | SaCas9 |
| 3145 | DMPK 5 reverse 19:45770386-45770413 | GCCTGCCAGTTCACAACCGCT | SaCas9 |
| 3146 | DMPK 5 reverse 19:45770387-45770413 | CCTGCCAGTTCACAACCGCT | SaCas9 |
| 3147 | DMPK 5 reverse 19:45770388-45770413 | CTGCCAGTTCACAACCGCT | SaCas9 |
| 3148 | DMPK 5 reverse 19:45770389-45770413 | TGCCAGTTCACAACCGCT | SaCas9 |
| 3149 | DMPK 5 forward 19:45770385-45770416 | CGGAGCGGTTGTGAACTGGCAGGCG | SaCas9 |
| 3150 | DMPK 5 forward 19:45770386-45770416 | GGAGCGGTTGTGAACTGGCAGGCG | SaCas9 |
| 3151 | DMPK 5 forward 19:45770387-45770416 | GAGCGGTTGTGAACTGGCAGGCG | SaCas9 |
| 3152 | DMPK 5 forward 19:45770388-45770416 | AGCGGTTGTGAACTGGCAGGCG | SaCas9 |
| 3153 | DMPK 5 forward 19:45770389-45770416 | GCGGTTGTGAACTGGCAGGCG | SaCas9 |
| 3154 | DMPK 5 forward 19:45770390-45770416 | CGGTTGTGAACTGGCAGGCG | SaCas9 |
| 3155 | DMPK 5 forward 19:45770391-45770416 | GGTTGTGAACTGGCAGGCG | SaCas9 |
| 3156 | DMPK 5 forward 19:45770392-45770416 | GTTGTGAACTGGCAGGCG | SaCas9 |
| 3157 | DMPK 5 forward 19:45770410-45770441 | GTGGGCGCGGCTTCTGTGCCGTGCC | SaCas9 |
| 3158 | DMPK 5 forward 19:45770411-45770441 | TGGGCGCGGCTTCTGTGCCGTGCC | SaCas9 |
| 3159 | DMPK 5 forward 19:45770412-45770441 | GGGCGCGGCTTCTGTGCCGTGCC | SaCas9 |
| 3160 | DMPK 5 forward 19:45770413-45770441 | GGCGCGGCTTCTGTGCCGTGCC | SaCas9 |
| 3161 | DMPK 5 forward 19:45770414-45770441 | GCGCGGCTTCTGTGCCGTGCC | SaCas9 |
| 3162 | DMPK 5 forward 19:45770415-45770441 | CGCGGCTTCTGTGCCGTGCC | SaCas9 |
| 3163 | DMPK 5 forward 19:45770416-45770441 | GCGGCTTCTGTGCCGTGCC | SaCas9 |
| 3164 | DMPK 5 forward 19:45770417-45770441 | CGGCTTCTGTGCCGTGCC | SaCas9 |
| 3165 | DMPK 5 reverse 19:45770420-45770451 | AAGACTGAGTGCCCGGGGCACGGCA | SaCas9 |
| 3166 | DMPK 5 reverse 19:45770421-45770451 | AGACTGAGTGCCCGGGGCACGGCA | SaCas9 |
| 3167 | DMPK 5 reverse 19:45770422-45770451 | GACTGAGTGCCCGGGGCACGGCA | SaCas9 |
| 3168 | DMPK 5 reverse 19:45770423-45770451 | ACTGAGTGCCCGGGGCACGGCA | SaCas9 |
| 3169 | DMPK 5 reverse 19:45770424-45770451 | CTGAGTGCCCGGGGCACGGCA | SaCas9 |
| 3170 | DMPK 5 reverse 19:45770425-45770451 | TGAGTGCCCGGGGCACGGCA | SaCas9 |
| 3171 | DMPK 5 reverse 19:45770426-45770451 | GAGTGCCCGGGGCACGGCA | SaCas9 |
| 3172 | DMPK 5 reverse 19:45770427-45770451 | AGTGCCCGGGGCACGGCA | SaCas9 |
| 3173 | DMPK 5 forward 19:45770429-45770460 | CGTGCCCCGGGCACTCAGTCTTCCA | SaCas9 |
| 3174 | DMPK 5 forward 19:45770430-45770460 | GTGCCCCGGGCACTCAGTCTTCCA | SaCas9 |
| 3175 | DMPK 5 forward 19:45770431-45770460 | TGCCCCGGGCACTCAGTCTTCCA | SaCas9 |
| 3176 | DMPK 5 forward 19:45770432-45770460 | GCCCCGGGCACTCAGTCTTCCA | SaCas9 |
| 3177 | DMPK 5 forward 19:45770433-45770460 | CCCCGGGCACTCAGTCTTCCA | SaCas9 |
| 3178 | DMPK 5 forward 19:45770434-45770460 | CCCGGGCACTCAGTCTTCCA | SaCas9 |
| 3179 | DMPK 5 forward 19:45770435-45770460 | CCGGGCACTCAGTCTTCCA | SaCas9 |
| 3180 | DMPK 5 forward 19:45770436-45770460 | CGGGCACTCAGTCTTCCA | SaCas9 |
| 3181 | DMPK 5 forward 19:45770430-45770461 | GTGCCCCGGGCACTCAGTCTTCCAA | SaCas9 |
| 3182 | DMPK 5 forward 19:45770431-45770461 | TGCCCCGGGCACTCAGTCTTCCAA | SaCas9 |
| 3183 | DMPK 5 forward 19:45770432-45770461 | GCCCCGGGCACTCAGTCTTCCAA | SaCas9 |
| 3184 | DMPK 5 forward 19:45770433-45770461 | CCCCGGGCACTCAGTCTTCCAA | SaCas9 |
| 3185 | DMPK 5 forward 19:45770434-45770461 | CCCGGGCACTCAGTCTTCCAA | SaCas9 |
| 3186 | DMPK 5 forward 19:45770435-45770461 | CCGGGCACTCAGTCTTCCAA | SaCas9 |
| 3187 | DMPK 5 forward 19:45770436-45770461 | CGGGCACTCAGTCTTCCAA | SaCas9 |
| 3188 | DMPK 5 forward 19:45770437-45770461 | GGGCACTCAGTCTTCCAA | SaCas9 |
| 3189 | DMPK 5 reverse 19:45770432-45770463 | GGGCCCCGTTGGAAGACTGAGTGCC | SaCas9 |
| 3190 | DMPK 5 reverse 19:45770433-45770463 | GGCCCCGTTGGAAGACTGAGTGCC | SaCas9 |
| 3191 | DMPK 5 reverse 19:45770434-45770463 | GCCCCGTTGGAAGACTGAGTGCC | SaCas9 |
| 3192 | DMPK 5 reverse 19:45770435-45770463 | CCCCGTTGGAAGACTGAGTGCC | SaCas9 |
| 3193 | DMPK 5 reverse 19:45770436-45770463 | CCCGTTGGAAGACTGAGTGCC | SaCas9 |
| 3194 | DMPK 5 reverse 19:45770437-45770463 | CCGTTGGAAGACTGAGTGCC | SaCas9 |
| 3195 | DMPK 5 reverse 19:45770438-45770463 | CGTTGGAAGACTGAGTGCC | SaCas9 |
| 3196 | DMPK 5 reverse 19:45770439-45770463 | GTTGGAAGACTGAGTGCC | SaCas9 |
| 3197 | DMPK 5 reverse 19:45770433-45770464 | GGGGCCCCGTTGGAAGACTGAGTGC | SaCas9 |
| 3198 | DMPK 5 reverse 19:45770434-45770464 | GGGCCCCGTTGGAAGACTGAGTGC | SaCas9 |
| 3199 | DMPK 5 reverse 19:45770435-45770464 | GGCCCCGTTGGAAGACTGAGTGC | SaCas9 |
| 3200 | DMPK 5 reverse 19:45770436-45770464 | GCCCCGTTGGAAGACTGAGTGC | SaCas9 |
| 3201 | DMPK 5 reverse 19:45770437-45770464 | CCCCGTTGGAAGACTGAGTGC | SaCas9 |
| 3202 | DMPK 5 reverse 19:45770438-45770464 | CCCGTTGGAAGACTGAGTGC | SaCas9 |
| 3203 | DMPK 5 reverse 19:45770439-45770464 | CCGTTGGAAGACTGAGTGC | SaCas9 |
| 3204 | DMPK 5 reverse 19:45770440-45770464 | CGTTGGAAGACTGAGTGC | SaCas9 |
| 3205 | DMPK 5 forward 19:45770437-45770468 | GGGCACTCAGTCTTCCAACGGGGCC | SaCas9 |
| 3206 | DMPK 5 forward 19:45770438-45770468 | GGCACTCAGTCTTCCAACGGGGCC | SaCas9 |
| 3207 | DMPK 5 forward 19:45770439-45770468 | GCACTCAGTCTTCCAACGGGGCC | SaCas9 |
| 3208 | DMPK 5 forward 19:45770440-45770468 | CACTCAGTCTTCCAACGGGGCC | SaCas9 |
| 3209 | DMPK 5 forward 19:45770441-45770468 | ACTCAGTCTTCCAACGGGGCC | SaCas9 |
| 3210 | DMPK 5 forward 19:45770442-45770468 | CTCAGTCTTCCAACGGGGCC | SaCas9 |
| 3211 | DMPK 5 forward 19:45770443-45770468 | TCAGTCTTCCAACGGGGCC | SaCas9 |
| 3212 | DMPK 5 forward 19:45770444-45770468 | CAGTCTTCCAACGGGGCC | SaCas9 |
| 3213 | DMPK 5 forward 19:45770438-45770469 | GGCACTCAGTCTTCCAACGGGGCCC | SaCas9 |
| 3214 | DMPK 5 forward 19:45770439-45770469 | GCACTCAGTCTTCCAACGGGGCCC | SaCas9 |
| 3215 | DMPK 5 forward 19:45770440-45770469 | CACTCAGTCTTCCAACGGGGCCC | SaCas9 |
| 3216 | DMPK 5 forward 19:45770441-45770469 | ACTCAGTCTTCCAACGGGGCCC | SaCas9 |
| 3217 | DMPK 5 forward 19:45770442-45770469 | CTCAGTCTTCCAACGGGGCCC | SaCas9 |
| 3218 | DMPK 5 forward 19:45770443-45770469 | TCAGTCTTCCAACGGGGCCC | SaCas9 |
| 3219 | DMPK 5 forward 19:45770444-45770469 | CAGTCTTCCAACGGGGCCC | SaCas9 |
| 3220 | DMPK 5 forward 19:45770445-45770469 | AGTCTTCCAACGGGGCCC | SaCas9 |
| 3221 | DMPK 5 reverse 19:45770441-45770472 | TCGACTCCGGGGCCCCGTTGGAAGA | SaCas9 |
| 3222 | DMPK 5 reverse 19:45770442-45770472 | CGACTCCGGGGCCCCGTTGGAAGA | SaCas9 |
| 3223 | DMPK 5 reverse 19:45770443-45770472 | GACTCCGGGGCCCCGTTGGAAGA | SaCas9 |
| 3224 | DMPK 5 reverse 19:45770444-45770472 | ACTCCGGGGCCCCGTTGGAAGA | SaCas9 |
| 3225 | DMPK 5 reverse 19:45770445-45770472 | CTCCGGGGCCCCGTTGGAAGA | SaCas9 |
| 3226 | DMPK 5 reverse 19:45770446-45770472 | TCCGGGGCCCCGTTGGAAGA | SaCas9 |
| 3227 | DMPK 5 reverse 19:45770447-45770472 | CCGGGGCCCCGTTGGAAGA | SaCas9 |
| 3228 | DMPK 5 reverse 19:45770448-45770472 | CGGGGCCCCGTTGGAAGA | SaCas9 |
| 3229 | DMPK 5 forward 19:45770443-45770474 | TCAGTCTTCCAACGGGGCCCCGGAG | SaCas9 |
| 3230 | DMPK 5 forward 19:45770444-45770474 | CAGTCTTCCAACGGGGCCCCGGAG | SaCas9 |
| 3231 | DMPK 5 forward 19:45770445-45770474 | AGTCTTCCAACGGGGCCCCGGAG | SaCas9 |
| 3232 | DMPK 5 forward 19:45770446-45770474 | GTCTTCCAACGGGGCCCCGGAG | SaCas9 |
| 3233 | DMPK 5 forward 19:45770447-45770474 | TCTTCCAACGGGGCCCCGGAG | SaCas9 |
| 3234 | DMPK 5 forward 19:45770448-45770474 | CTTCCAACGGGGCCCCGGAG | SaCas9 |
| 3235 | DMPK 5 forward 19:45770449-45770474 | TTCCAACGGGGCCCCGGAG | SaCas9 |
| 3236 | DMPK 5 forward 19:45770450-45770474 | TCCAACGGGGCCCCGGAG | SaCas9 |
| 3237 | DMPK 5 reverse 19:45770448-45770479 | ACTGTCTTCGACTCCGGGGCCCCGT | SaCas9 |
| 3238 | DMPK 5 reverse 19:45770449-45770479 | CTGTCTTCGACTCCGGGGCCCCGT | SaCas9 |
| 3239 | DMPK 5 reverse 19:45770450-45770479 | TGTCTTCGACTCCGGGGCCCCGT | SaCas9 |
| 3240 | DMPK 5 reverse 19:45770451-45770479 | GTCTTCGACTCCGGGGCCCCGT | SaCas9 |
| 3241 | DMPK 5 reverse 19:45770452-45770479 | TCTTCGACTCCGGGGCCCCGT | SaCas9 |
| 3242 | DMPK 5 reverse 19:45770453-45770479 | CTTCGACTCCGGGGCCCCGT | SaCas9 |
| 3243 | DMPK 5 reverse 19:45770454-45770479 | TTCGACTCCGGGGCCCCGT | SaCas9 |
| 3244 | DMPK 5 reverse 19:45770455-45770479 | TCGACTCCGGGGCCCCGT | SaCas9 |
| 3245 | DMPK 5 reverse 19:45770449-45770480 | AACTGTCTTCGACTCCGGGGCCCCG | SaCas9 |
| 3246 | DMPK 5 reverse 19:45770450-45770480 | ACTGTCTTCGACTCCGGGGCCCCG | SaCas9 |
| 3247 | DMPK 5 reverse 19:45770451-45770480 | CTGTCTTCGACTCCGGGGCCCCG | SaCas9 |
| 3248 | DMPK 5 reverse 19:45770452-45770480 | TGTCTTCGACTCCGGGGCCCCG | SaCas9 |
| 3249 | DMPK 5 reverse 19:45770453-45770480 | GTCTTCGACTCCGGGGCCCCG | SaCas9 |
| 3250 | DMPK 5 reverse 19:45770454-45770480 | TCTTCGACTCCGGGGCCCCG | SaCas9 |
| 3251 | DMPK 5 reverse 19:45770455-45770480 | CTTCGACTCCGGGGCCCCG | SaCas9 |
| 3252 | DMPK 5 reverse 19:45770456-45770480 | TTCGACTCCGGGGCCCCG | SaCas9 |
| 3253 | DMPK 5 forward 19:45770456-45770487 | GGGGCCCCGGAGTCGAAGACAGTTC | SaCas9 |
| 3254 | DMPK 5 forward 19:45770457-45770487 | GGGCCCCGGAGTCGAAGACAGTTC | SaCas9 |
| 3255 | DMPK 5 forward 19:45770458-45770487 | GGCCCCGGAGTCGAAGACAGTTC | SaCas9 |
| 3256 | DMPK 5 forward 19:45770459-45770487 | GCCCCGGAGTCGAAGACAGTTC | SaCas9 |
| 3257 | DMPK 5 forward 19:45770460-45770487 | CCCCGGAGTCGAAGACAGTTC | SaCas9 |
| 3258 | DMPK 5 forward 19:45770461-45770487 | CCCGGAGTCGAAGACAGTTC | SaCas9 |
| 3259 | DMPK 5 forward 19:45770462-45770487 | CCGGAGTCGAAGACAGTTC | SaCas9 |
| 3260 | DMPK 5 forward 19:45770463-45770487 | CGGAGTCGAAGACAGTTC | SaCas9 |
| 3261 | DMPK 5 reverse 19:45770459-45770490 | TGAACCCTAGAACTGTCTTCGACTC | SaCas9 |
| 3262 | DMPK 5 reverse 19:45770460-45770490 | GAACCCTAGAACTGTCTTCGACTC | SaCas9 |
| 3263 | DMPK 5 reverse 19:45770461-45770490 | AACCCTAGAACTGTCTTCGACTC | SaCas9 |
| 3264 | DMPK 5 reverse 19:45770462-45770490 | ACCCTAGAACTGTCTTCGACTC | SaCas9 |
| 3265 | DMPK 5 reverse 19:45770463-45770490 | CCCTAGAACTGTCTTCGACTC | SaCas9 |
| 3266 | DMPK 5 reverse 19:45770464-45770490 | CCTAGAACTGTCTTCGACTC | SaCas9 |
| 3267 | DMPK 5 reverse 19:45770465-45770490 | CTAGAACTGTCTTCGACTC | SaCas9 |
| 3268 | DMPK 5 reverse 19:45770466-45770490 | TAGAACTGTCTTCGACTC | SaCas9 |
| 3269 | DMPK 5 reverse 19:45770460-45770491 | CTGAACCCTAGAACTGTCTTCGACT | SaCas9 |
| 3270 | DMPK 5 reverse 19:45770461-45770491 | TGAACCCTAGAACTGTCTTCGACT | SaCas9 |
| 3271 | DMPK 5 reverse 19:45770462-45770491 | GAACCCTAGAACTGTCTTCGACT | SaCas9 |
| 3272 | DMPK 5 reverse 19:45770463-45770491 | AACCCTAGAACTGTCTTCGACT | SaCas9 |
| 3273 | DMPK 5 reverse 19:45770464-45770491 | ACCCTAGAACTGTCTTCGACT | SaCas9 |
| 3274 | DMPK 5 reverse 19:45770465-45770491 | CCCTAGAACTGTCTTCGACT | SaCas9 |
| 3275 | DMPK 5 reverse 19:45770466-45770491 | CCTAGAACTGTCTTCGACT | SaCas9 |
| 3276 | DMPK 5 reverse 19:45770467-45770491 | CTAGAACTGTCTTCGACT | SaCas9 |
| 3277 | DMPK 5 forward 19:45770463-45770494 | CGGAGTCGAAGACAGTTCTAGGGTT | SaCas9 |
| 3278 | DMPK 5 forward 19:45770464-45770494 | GGAGTCGAAGACAGTTCTAGGGTT | SaCas9 |
| 3279 | DMPK 5 forward 19:45770465-45770494 | GAGTCGAAGACAGTTCTAGGGTT | SaCas9 |
| 3280 | DMPK 5 forward 19:45770466-45770494 | AGTCGAAGACAGTTCTAGGGTT | SaCas9 |
| 3281 | DMPK 5 forward 19:45770467-45770494 | GTCGAAGACAGTTCTAGGGTT | SaCas9 |
| 3282 | DMPK 5 forward 19:45770468-45770494 | TCGAAGACAGTTCTAGGGTT | SaCas9 |
| 3283 | DMPK 5 forward 19:45770469-45770494 | CGAAGACAGTTCTAGGGTT | SaCas9 |
| 3284 | DMPK 5 forward 19:45770470-45770494 | GAAGACAGTTCTAGGGTT | SaCas9 |
| 3285 | DMPK 5 forward 19:45770464-45770495 | GGAGTCGAAGACAGTTCTAGGGTTC | SaCas9 |
| 3286 | DMPK 5 forward 19:45770465-45770495 | GAGTCGAAGACAGTTCTAGGGTTC | SaCas9 |
| 3287 | DMPK 5 forward 19:45770466-45770495 | AGTCGAAGACAGTTCTAGGGTTC | SaCas9 |
| 3288 | DMPK 5 forward 19:45770467-45770495 | GTCGAAGACAGTTCTAGGGTTC | SaCas9 |
| 3289 | DMPK 5 forward 19:45770468-45770495 | TCGAAGACAGTTCTAGGGTTC | SaCas9 |
| 3290 | DMPK 5 forward 19:45770469-45770495 | CGAAGACAGTTCTAGGGTTC | SaCas9 |
| 3291 | DMPK 5 forward 19:45770470-45770495 | GAAGACAGTTCTAGGGTTC | SaCas9 |
| 3292 | DMPK 5 forward 19:45770471-45770495 | AAGACAGTTCTAGGGTTC | SaCas9 |
| 3293 | DMPK 5 forward 19:45770465-45770496 | GAGTCGAAGACAGTTCTAGGGTTCA | SaCas9 |
| 3294 | DMPK 5 forward 19:45770466-45770496 | AGTCGAAGACAGTTCTAGGGTTCA | SaCas9 |
| 3295 | DMPK 5 forward 19:45770467-45770496 | GTCGAAGACAGTTCTAGGGTTCA | SaCas9 |
| 3296 | DMPK 5 forward 19:45770468-45770496 | TCGAAGACAGTTCTAGGGTTCA | SaCas9 |
| 3297 | DMPK 5 forward 19:45770469-45770496 | CGAAGACAGTTCTAGGGTTCA | SaCas9 |
| 3298 | DMPK 5 forward 19:45770470-45770496 | GAAGACAGTTCTAGGGTTCA | SaCas9 |
| 3299 | DMPK 5 forward 19:45770471-45770496 | AAGACAGTTCTAGGGTTCA | SaCas9 |
| 3300 | DMPK 5 forward 19:45770472-45770496 | AGACAGTTCTAGGGTTCA | SaCas9 |
| 3301 | DMPK 5 reverse 19:45770477-45770508 | GGAGCCGCCCGCGCTCCCTGAACCC | SaCas9 |
| 3302 | DMPK 5 reverse 19:45770478-45770508 | GAGCCGCCCGCGCTCCCTGAACCC | SaCas9 |
| 3303 | DMPK 5 reverse 19:45770479-45770508 | AGCCGCCCGCGCTCCCTGAACCC | SaCas9 |
| 3304 | DMPK 5 reverse 19:45770480-45770508 | GCCGCCCGCGCTCCCTGAACCC | SaCas9 |
| 3305 | DMPK 5 reverse 19:45770481-45770508 | CCGCCCGCGCTCCCTGAACCC | SaCas9 |
| 3306 | DMPK 5 reverse 19:45770482-45770508 | CGCCCGCGCTCCCTGAACCC | SaCas9 |
| 3307 | DMPK 5 reverse 19:45770483-45770508 | GCCCGCGCTCCCTGAACCC | SaCas9 |
| 3308 | DMPK 5 reverse 19:45770484-45770508 | CCCGCGCTCCCTGAACCC | SaCas9 |
| 3309 | DMPK 5 forward 19:45770245-45770273 | GCAGCAGCAGCAGCAGCAGCATTCC | SpCas9 |
| 3310 | DMPK 5 forward 19:45770246-45770273 | CAGCAGCAGCAGCAGCAGCATTCC | SpCas9 |
| 3311 | DMPK 5 forward 19:45770247-45770273 | AGCAGCAGCAGCAGCAGCATTCC | SpCas9 |
| 3312 | DMPK 5 forward 19:45770248-45770273 | GCAGCAGCAGCAGCAGCATTCC | SpCas9 |
| 3313 | DMPK 5 forward 19:45770249-45770273 | CAGCAGCAGCAGCAGCATTCC | SpCas9 |
| 3314 | DMPK 5 forward 19:45770250-45770273 | AGCAGCAGCAGCAGCATTCC | SpCas9 |
| 3315 | DMPK 5 forward 19:45770251-45770273 | GCAGCAGCAGCAGCATTCC | SpCas9 |
| 3316 | DMPK 5 forward 19:45770252-45770273 | CAGCAGCAGCAGCATTCC | SpCas9 |
| 3317 | DMPK 5 forward 19:45770252-45770280 | CAGCAGCAGCAGCATTCCCGGCTAC | SpCas9 |
| 3318 | DMPK 5 forward 19:45770253-45770280 | AGCAGCAGCAGCATTCCCGGCTAC | SpCas9 |
| 3319 | DMPK 5 forward 19:45770254-45770280 | GCAGCAGCAGCATTCCCGGCTAC | SpCas9 |
| 3320 | DMPK 5 forward 19:45770255-45770280 | CAGCAGCAGCATTCCCGGCTAC | SpCas9 |
| 3321 | DMPK 5 forward 19:45770256-45770280 | AGCAGCAGCATTCCCGGCTAC | SpCas9 |
| 3322 | DMPK 5 forward 19:45770257-45770280 | GCAGCAGCATTCCCGGCTAC | SpCas9 |
| 3323 | DMPK 5 forward 19:45770258-45770280 | CAGCAGCATTCCCGGCTAC | SpCas9 |
| 3324 | DMPK 5 forward 19:45770259-45770280 | AGCAGCATTCCCGGCTAC | SpCas9 |
| 3325 | DMPK 5 forward 19:45770253-45770281 | AGCAGCAGCAGCATTCCCGGCTACA | SpCas9 |
| 3326 | DMPK 5 forward 19:45770254-45770281 | GCAGCAGCAGCATTCCCGGCTACA | SpCas9 |
| 3327 | DMPK 5 forward 19:45770255-45770281 | CAGCAGCAGCATTCCCGGCTACA | SpCas9 |
| 3328 | DMPK 5 forward 19:45770256-45770281 | AGCAGCAGCATTCCCGGCTACA | SpCas9 |
| 3329 | DMPK 5 forward 19:45770257-45770281 | GCAGCAGCATTCCCGGCTACA | SpCas9 |
| 3330 | DMPK 5 forward 19:45770258-45770281 | CAGCAGCATTCCCGGCTACA | SpCas9 |
| 3331 | DMPK 5 forward 19:45770259-45770281 | AGCAGCATTCCCGGCTACA | SpCas9 |
| 3332 | DMPK 5 forward 19:45770260-45770281 | GCAGCATTCCCGGCTACA | SpCas9 |
| 3333 | DMPK 5 forward 19:45770263-45770291 | GCATTCCCGGCTACAAGGACCCTTC | SpCas9 |
| 3334 | DMPK 5 forward 19:45770264-45770291 | CATTCCCGGCTACAAGGACCCTTC | SpCas9 |
| 3335 | DMPK 5 forward 19:45770265-45770291 | ATTCCCGGCTACAAGGACCCTTC | SpCas9 |
| 3336 | DMPK 5 forward 19:45770266-45770291 | TTCCCGGCTACAAGGACCCTTC | SpCas9 |
| 3337 | DMPK 5 forward 19:45770267-45770291 | TCCCGGCTACAAGGACCCTTC | SpCas9 |
| 3338 | DMPK 5 forward 19:45770268-45770291 | CCCGGCTACAAGGACCCTTC | SpCas9 |
| 3339 | DMPK 5 forward 19:45770269-45770291 | CCGGCTACAAGGACCCTTC | SpCas9 |
| 3340 | DMPK 5 forward 19:45770270-45770291 | CGGCTACAAGGACCCTTC | SpCas9 |
| 3341 | DMPK 5 reverse 19:45770268-45770296 | CGGGGCTCGAAGGGTCCTTGTAGCC | SpCas9 |
| 3342 | DMPK 5 reverse 19:45770269-45770296 | GGGGCTCGAAGGGTCCTTGTAGCC | SpCas9 |
| 3343 | DMPK 5 reverse 19:45770270-45770296 | GGGCTCGAAGGGTCCTTGTAGCC | SpCas9 |
| 3344 | DMPK 5 reverse 19:45770271-45770296 | GGCTCGAAGGGTCCTTGTAGCC | SpCas9 |
| 3345 | DMPK 5 reverse 19:45770272-45770296 | GCTCGAAGGGTCCTTGTAGCC | SpCas9 |
| 3346 | DMPK 5 reverse 19:45770273-45770296 | CTCGAAGGGTCCTTGTAGCC | SpCas9 |
| 3347 | DMPK 5 reverse 19:45770274-45770296 | TCGAAGGGTCCTTGTAGCC | SpCas9 |
| 3348 | DMPK 5 reverse 19:45770275-45770296 | CGAAGGGTCCTTGTAGCC | SpCas9 |
| 3349 | DMPK 5 reverse 19:45770269-45770297 | ACGGGGCTCGAAGGGTCCTTGTAGC | SpCas9 |
| 3350 | DMPK 5 reverse 19:45770270-45770297 | CGGGGCTCGAAGGGTCCTTGTAGC | SpCas9 |
| 3351 | DMPK 5 reverse 19:45770271-45770297 | GGGGCTCGAAGGGTCCTTGTAGC | SpCas9 |
| 3352 | DMPK 5 reverse 19:45770272-45770297 | GGGCTCGAAGGGTCCTTGTAGC | SpCas9 |
| 3353 | DMPK 5 reverse 19:45770273-45770297 | GGCTCGAAGGGTCCTTGTAGC | SpCas9 |
| 3354 | DMPK 5 reverse 19:45770274-45770297 | GCTCGAAGGGTCCTTGTAGC | SpCas9 |
| 3355 | DMPK 5 reverse 19:45770275-45770297 | CTCGAAGGGTCCTTGTAGC | SpCas9 |
| 3356 | DMPK 5 reverse 19:45770276-45770297 | TCGAAGGGTCCTTGTAGC | SpCas9 |
| 3357 | DMPK 5 reverse 19:45770273-45770301 | GCGAACGGGGCTCGAAGGGTCCTTG | SpCas9 |
| 3358 | DMPK 5 reverse 19:45770274-45770301 | CGAACGGGGCTCGAAGGGTCCTTG | SpCas9 |
| 3359 | DMPK 5 reverse 19:45770275-45770301 | GAACGGGGCTCGAAGGGTCCTTG | SpCas9 |
| 3360 | DMPK 5 reverse 19:45770276-45770301 | AACGGGGCTCGAAGGGTCCTTG | SpCas9 |
| 3361 | DMPK 5 reverse 19:45770277-45770301 | ACGGGGCTCGAAGGGTCCTTG | SpCas9 |
| 3362 | DMPK 5 reverse 19:45770278-45770301 | CGGGGCTCGAAGGGTCCTTG | SpCas9 |
| 3363 | DMPK 5 reverse 19:45770279-45770301 | GGGGCTCGAAGGGTCCTTG | SpCas9 |
| 3364 | DMPK 5 reverse 19:45770280-45770301 | GGGCTCGAAGGGTCCTTG | SpCas9 |
| 3365 | DMPK 5 forward 19:45770276-45770304 | CAAGGACCCTTCGAGCCCCGTTCGC | SpCas9 |
| 3366 | DMPK 5 forward 19:45770277-45770304 | AAGGACCCTTCGAGCCCCGTTCGC | SpCas9 |
| 3367 | DMPK 5 forward 19:45770278-45770304 | AGGACCCTTCGAGCCCCGTTCGC | SpCas9 |
| 3368 | DMPK 5 forward 19:45770279-45770304 | GGACCCTTCGAGCCCCGTTCGC | SpCas9 |
| 3369 | DMPK 5 forward 19:45770280-45770304 | GACCCTTCGAGCCCCGTTCGC | SpCas9 |
| 3370 | DMPK 5 forward 19:45770281-45770304 | ACCCTTCGAGCCCCGTTCGC | SpCas9 |
| 3371 | DMPK 5 forward 19:45770282-45770304 | CCCTTCGAGCCCCGTTCGC | SpCas9 |
| 3372 | DMPK 5 forward 19:45770283-45770304 | CCTTCGAGCCCCGTTCGC | SpCas9 |
| 3373 | DMPK 5 forward 19:45770282-45770310 | CCCTTCGAGCCCCGTTCGCCGGCCG | SpCas9 |
| 3374 | DMPK 5 forward 19:45770283-45770310 | CCTTCGAGCCCCGTTCGCCGGCCG | SpCas9 |
| 3375 | DMPK 5 forward 19:45770284-45770310 | CTTCGAGCCCCGTTCGCCGGCCG | SpCas9 |
| 3376 | DMPK 5 forward 19:45770285-45770310 | TTCGAGCCCCGTTCGCCGGCCG | SpCas9 |
| 3377 | DMPK 5 forward 19:45770286-45770310 | TCGAGCCCCGTTCGCCGGCCG | SpCas9 |
| 3378 | DMPK 5 forward 19:45770287-45770310 | CGAGCCCCGTTCGCCGGCCG | SpCas9 |
| 3379 | DMPK 5 forward 19:45770288-45770310 | GAGCCCCGTTCGCCGGCCG | SpCas9 |
| 3380 | DMPK 5 forward 19:45770289-45770310 | AGCCCCGTTCGCCGGCCG | SpCas9 |
| 3381 | DMPK 5 reverse 19:45770282-45770310 | CCGCGGCCGGCGAACGGGGCTCGAA | SpCas9 |
| 3382 | DMPK 5 reverse 19:45770283-45770310 | CGCGGCCGGCGAACGGGGCTCGAA | SpCas9 |
| 3383 | DMPK 5 reverse 19:45770284-45770310 | GCGGCCGGCGAACGGGGCTCGAA | SpCas9 |
| 3384 | DMPK 5 reverse 19:45770285-45770310 | CGGCCGGCGAACGGGGCTCGAA | SpCas9 |
| 3385 | DMPK 5 reverse 19:45770286-45770310 | GGCCGGCGAACGGGGCTCGAA | SpCas9 |
| 3386 | DMPK 5 reverse 19:45770287-45770310 | GCCGGCGAACGGGGCTCGAA | SpCas9 |
| 3387 | DMPK 5 reverse 19:45770288-45770310 | CCGGCGAACGGGGCTCGAA | SpCas9 |
| 3388 | DMPK 5 reverse 19:45770289-45770310 | CGGCGAACGGGGCTCGAA | SpCas9 |
| 3389 | DMPK 5 reverse 19:45770283-45770311 | TCCGCGGCCGGCGAACGGGGCTCGA | SpCas9 |
| 3390 | DMPK 5 reverse 19:45770284-45770311 | CCGCGGCCGGCGAACGGGGCTCGA | SpCas9 |
| 3391 | DMPK 5 reverse 19:45770285-45770311 | CGCGGCCGGCGAACGGGGCTCGA | SpCas9 |
| 3392 | DMPK 5 reverse 19:45770286-45770311 | GCGGCCGGCGAACGGGGCTCGA | SpCas9 |
| 3393 | DMPK 5 reverse 19:45770287-45770311 | CGGCCGGCGAACGGGGCTCGA | SpCas9 |
| 3394 | DMPK 5 reverse 19:45770288-45770311 | GGCCGGCGAACGGGGCTCGA | SpCas9 |
| 3395 | DMPK 5 reverse 19:45770289-45770311 | GCCGGCGAACGGGGCTCGA | SpCas9 |
| 3396 | DMPK 5 reverse 19:45770290-45770311 | CCGGCGAACGGGGCTCGA | SpCas9 |
| 3397 | DMPK 5 reverse 19:45770284-45770312 | GTCCGCGGCCGGCGAACGGGGCTCG | SpCas9 |
| 3398 | DMPK 5 reverse 19:45770285-45770312 | TCCGCGGCCGGCGAACGGGGCTCG | SpCas9 |
| 3399 | DMPK 5 reverse 19:45770286-45770312 | CCGCGGCCGGCGAACGGGGCTCG | SpCas9 |
| 3400 | DMPK 5 reverse 19:45770287-45770312 | CGCGGCCGGCGAACGGGGCTCG | SpCas9 |
| 3401 | DMPK 5 reverse 19:45770288-45770312 | GCGGCCGGCGAACGGGGCTCG | SpCas9 |
| 3402 | DMPK 5 reverse 19:45770289-45770312 | CGGCCGGCGAACGGGGCTCG | SpCas9 |
| 3403 | DMPK 5 reverse 19:45770290-45770312 | GGCCGGCGAACGGGGCTCG | SpCas9 |
| 3404 | DMPK 5 reverse 19:45770291-45770312 | GCCGGCGAACGGGGCTCG | SpCas9 |
| 3405 | DMPK 5 forward 19:45770288-45770316 | GAGCCCCGTTCGCCGGCCGCGGACC | SpCas9 |
| 3406 | DMPK 5 forward 19:45770289-45770316 | AGCCCCGTTCGCCGGCCGCGGACC | SpCas9 |
| 3407 | DMPK 5 forward 19:45770290-45770316 | GCCCCGTTCGCCGGCCGCGGACC | SpCas9 |
| 3408 | DMPK 5 forward 19:45770291-45770316 | CCCCGTTCGCCGGCCGCGGACC | SpCas9 |
| 3409 | DMPK 5 forward 19:45770292-45770316 | CCCGTTCGCCGGCCGCGGACC | SpCas9 |
| 3410 | DMPK 5 forward 19:45770293-45770316 | CCGTTCGCCGGCCGCGGACC | SpCas9 |
| 3411 | DMPK 5 forward 19:45770294-45770316 | CGTTCGCCGGCCGCGGACC | SpCas9 |
| 3412 | DMPK 5 forward 19:45770295-45770316 | GTTCGCCGGCCGCGGACC | SpCas9 |
| 3413 | DMPK 5 reverse 19:45770291-45770319 | GGGCCGGGTCCGCGGCCGGCGAACG | SpCas9 |
| 3414 | DMPK 5 reverse 19:45770292-45770319 | GGCCGGGTCCGCGGCCGGCGAACG | SpCas9 |
| 3415 | DMPK 5 reverse 19:45770293-45770319 | GCCGGGTCCGCGGCCGGCGAACG | SpCas9 |
| 3416 | DMPK 5 reverse 19:45770294-45770319 | CCGGGTCCGCGGCCGGCGAACG | SpCas9 |
| 3417 | DMPK 5 reverse 19:45770295-45770319 | CGGGTCCGCGGCCGGCGAACG | SpCas9 |
| 3418 | DMPK 5 reverse 19:45770296-45770319 | GGGTCCGCGGCCGGCGAACG | SpCas9 |
| 3419 | DMPK 5 reverse 19:45770297-45770319 | GGTCCGCGGCCGGCGAACG | SpCas9 |
| 3420 | DMPK 5 reverse 19:45770298-45770319 | GTCCGCGGCCGGCGAACG | SpCas9 |
| 3421 | DMPK 5 reverse 19:45770292-45770320 | GGGGCCGGGTCCGCGGCCGGCGAAC | SpCas9 |
| 3422 | DMPK 5 reverse 19:45770293-45770320 | GGGCCGGGTCCGCGGCCGGCGAAC | SpCas9 |
| 3423 | DMPK 5 reverse 19:45770294-45770320 | GGCCGGGTCCGCGGCCGGCGAAC | SpCas9 |
| 3424 | DMPK 5 reverse 19:45770295-45770320 | GCCGGGTCCGCGGCCGGCGAAC | SpCas9 |
| 3425 | DMPK 5 reverse 19:45770296-45770320 | CCGGGTCCGCGGCCGGCGAAC | SpCas9 |
| 3426 | DMPK 5 reverse 19:45770297-45770320 | CGGGTCCGCGGCCGGCGAAC | SpCas9 |
| 3427 | DMPK 5 reverse 19:45770298-45770320 | GGGTCCGCGGCCGGCGAAC | SpCas9 |
| 3428 | DMPK 5 reverse 19:45770299-45770320 | GGTCCGCGGCCGGCGAAC | SpCas9 |
| 3429 | DMPK 5 reverse 19:45770293-45770321 | AGGGGCCGGGTCCGCGGCCGGCGAA | SpCas9 |
| 3430 | DMPK 5 reverse 19:45770294-45770321 | GGGGCCGGGTCCGCGGCCGGCGAA | SpCas9 |
| 3431 | DMPK 5 reverse 19:45770295-45770321 | GGGCCGGGTCCGCGGCCGGCGAA | SpCas9 |
| 3432 | DMPK 5 reverse 19:45770296-45770321 | GGCCGGGTCCGCGGCCGGCGAA | SpCas9 |
| 3433 | DMPK 5 reverse 19:45770297-45770321 | GCCGGGTCCGCGGCCGGCGAA | SpCas9 |
| 3434 | DMPK 5 reverse 19:45770298-45770321 | CCGGGTCCGCGGCCGGCGAA | SpCas9 |
| 3435 | DMPK 5 reverse 19:45770299-45770321 | CGGGTCCGCGGCCGGCGAA | SpCas9 |
| 3436 | DMPK 5 reverse 19:45770300-45770321 | GGGTCCGCGGCCGGCGAA | SpCas9 |
| 3437 | DMPK 5 reverse 19:45770300-45770328 | GGGAGGGAGGGGCCGGGTCCGCGGC | SpCas9 |
| 3438 | DMPK 5 reverse 19:45770301-45770328 | GGAGGGAGGGGCCGGGTCCGCGGC | SpCas9 |
| 3439 | DMPK 5 reverse 19:45770302-45770328 | GAGGGAGGGGCCGGGTCCGCGGC | SpCas9 |
| 3440 | DMPK 5 reverse 19:45770303-45770328 | AGGGAGGGGCCGGGTCCGCGGC | SpCas9 |
| 3441 | DMPK 5 reverse 19:45770304-45770328 | GGGAGGGGCCGGGTCCGCGGC | SpCas9 |
| 3442 | DMPK 5 reverse 19:45770305-45770328 | GGAGGGGCCGGGTCCGCGGC | SpCas9 |
| 3443 | DMPK 5 reverse 19:45770306-45770328 | GAGGGGCCGGGTCCGCGGC | SpCas9 |
| 3444 | DMPK 5 reverse 19:45770307-45770328 | AGGGGCCGGGTCCGCGGC | SpCas9 |
| 3445 | DMPK 5 forward 19:45770303-45770331 | GCCGCGGACCCGGCCCCTCCCTCCC | SpCas9 |
| 3446 | DMPK 5 forward 19:45770304-45770331 | CCGCGGACCCGGCCCCTCCCTCCC | SpCas9 |
| 3447 | DMPK 5 forward 19:45770305-45770331 | CGCGGACCCGGCCCCTCCCTCCC | SpCas9 |
| 3448 | DMPK 5 forward 19:45770306-45770331 | GCGGACCCGGCCCCTCCCTCCC | SpCas9 |
| 3449 | DMPK 5 forward 19:45770307-45770331 | CGGACCCGGCCCCTCCCTCCC | SpCas9 |
| 3450 | DMPK 5 forward 19:45770308-45770331 | GGACCCGGCCCCTCCCTCCC | SpCas9 |
| 3451 | DMPK 5 forward 19:45770309-45770331 | GACCCGGCCCCTCCCTCCC | SpCas9 |
| 3452 | DMPK 5 forward 19:45770310-45770331 | ACCCGGCCCCTCCCTCCC | SpCas9 |
| 3453 | DMPK 5 reverse 19:45770304-45770332 | GCCGGGGAGGGAGGGGCCGGGTCCG | SpCas9 |
| 3454 | DMPK 5 reverse 19:45770305-45770332 | CCGGGGAGGGAGGGGCCGGGTCCG | SpCas9 |
| 3455 | DMPK 5 reverse 19:45770306-45770332 | CGGGGAGGGAGGGGCCGGGTCCG | SpCas9 |
| 3456 | DMPK 5 reverse 19:45770307-45770332 | GGGGAGGGAGGGGCCGGGTCCG | SpCas9 |
| 3457 | DMPK 5 reverse 19:45770308-45770332 | GGGAGGGAGGGGCCGGGTCCG | SpCas9 |
| 3458 | DMPK 5 reverse 19:45770309-45770332 | GGAGGGAGGGGCCGGGTCCG | SpCas9 |
| 3459 | DMPK 5 reverse 19:45770310-45770332 | GAGGGAGGGGCCGGGTCCG | SpCas9 |
| 3460 | DMPK 5 reverse 19:45770311-45770332 | AGGGAGGGGCCGGGTCCG | SpCas9 |
| 3461 | DMPK 5 forward 19:45770310-45770338 | ACCCGGCCCCTCCCTCCCCGGCCGC | SpCas9 |
| 3462 | DMPK 5 forward 19:45770311-45770338 | CCCGGCCCCTCCCTCCCCGGCCGC | SpCas9 |
| 3463 | DMPK 5 forward 19:45770312-45770338 | CCGGCCCCTCCCTCCCCGGCCGC | SpCas9 |
| 3464 | DMPK 5 forward 19:45770313-45770338 | CGGCCCCTCCCTCCCCGGCCGC | SpCas9 |
| 3465 | DMPK 5 forward 19:45770314-45770338 | GGCCCCTCCCTCCCCGGCCGC | SpCas9 |
| 3466 | DMPK 5 forward 19:45770315-45770338 | GCCCCTCCCTCCCCGGCCGC | SpCas9 |
| 3467 | DMPK 5 forward 19:45770316-45770338 | CCCCTCCCTCCCCGGCCGC | SpCas9 |
| 3468 | DMPK 5 forward 19:45770317-45770338 | CCCTCCCTCCCCGGCCGC | SpCas9 |
| 3469 | DMPK 5 forward 19:45770311-45770339 | CCCGGCCCCTCCCTCCCCGGCCGCT | SpCas9 |
| 3470 | DMPK 5 forward 19:45770312-45770339 | CCGGCCCCTCCCTCCCCGGCCGCT | SpCas9 |
| 3471 | DMPK 5 forward 19:45770313-45770339 | CGGCCCCTCCCTCCCCGGCCGCT | SpCas9 |
| 3472 | DMPK 5 forward 19:45770314-45770339 | GGCCCCTCCCTCCCCGGCCGCT | SpCas9 |
| 3473 | DMPK 5 forward 19:45770315-45770339 | GCCCCTCCCTCCCCGGCCGCT | SpCas9 |
| 3474 | DMPK 5 forward 19:45770316-45770339 | CCCCTCCCTCCCCGGCCGCT | SpCas9 |
| 3475 | DMPK 5 forward 19:45770317-45770339 | CCCTCCCTCCCCGGCCGCT | SpCas9 |
| 3476 | DMPK 5 forward 19:45770318-45770339 | CCTCCCTCCCCGGCCGCT | SpCas9 |
| 3477 | DMPK 5 reverse 19:45770311-45770339 | CCTAGCGGCCGGGGAGGGAGGGGCC | SpCas9 |
| 3478 | DMPK 5 reverse 19:45770312-45770339 | CTAGCGGCCGGGGAGGGAGGGGCC | SpCas9 |
| 3479 | DMPK 5 reverse 19:45770313-45770339 | TAGCGGCCGGGGAGGGAGGGGCC | SpCas9 |
| 3480 | DMPK 5 reverse 19:45770314-45770339 | AGCGGCCGGGGAGGGAGGGGCC | SpCas9 |
| 3481 | DMPK 5 reverse 19:45770315-45770339 | GCGGCCGGGGAGGGAGGGGCC | SpCas9 |
| 3482 | DMPK 5 reverse 19:45770316-45770339 | CGGCCGGGGAGGGAGGGGCC | SpCas9 |
| 3483 | DMPK 5 reverse 19:45770317-45770339 | GGCCGGGGAGGGAGGGGCC | SpCas9 |
| 3484 | DMPK 5 reverse 19:45770318-45770339 | GCCGGGGAGGGAGGGGCC | SpCas9 |
| 3485 | DMPK 5 forward 19:45770312-45770340 | CCGGCCCCTCCCTCCCCGGCCGCTA | SpCas9 |
| 3486 | DMPK 5 forward 19:45770313-45770340 | CGGCCCCTCCCTCCCCGGCCGCTA | SpCas9 |
| 3487 | DMPK 5 forward 19:45770314-45770340 | GGCCCCTCCCTCCCCGGCCGCTA | SpCas9 |
| 3488 | DMPK 5 forward 19:45770315-45770340 | GCCCCTCCCTCCCCGGCCGCTA | SpCas9 |
| 3489 | DMPK 5 forward 19:45770316-45770340 | CCCCTCCCTCCCCGGCCGCTA | SpCas9 |
| 3490 | DMPK 5 forward 19:45770317-45770340 | CCCTCCCTCCCCGGCCGCTA | SpCas9 |
| 3491 | DMPK 5 forward 19:45770318-45770340 | CCTCCCTCCCCGGCCGCTA | SpCas9 |
| 3492 | DMPK 5 forward 19:45770319-45770340 | CTCCCTCCCCGGCCGCTA | SpCas9 |
| 3493 | DMPK 5 reverse 19:45770312-45770340 | CCCTAGCGGCCGGGGAGGGAGGGGC | SpCas9 |
| 3494 | DMPK 5 reverse 19:45770313-45770340 | CCTAGCGGCCGGGGAGGGAGGGGC | SpCas9 |
| 3495 | DMPK 5 reverse 19:45770314-45770340 | CTAGCGGCCGGGGAGGGAGGGGC | SpCas9 |
| 3496 | DMPK 5 reverse 19:45770315-45770340 | TAGCGGCCGGGGAGGGAGGGGC | SpCas9 |
| 3497 | DMPK 5 reverse 19:45770316-45770340 | AGCGGCCGGGGAGGGAGGGGC | SpCas9 |
| 3498 | DMPK 5 reverse 19:45770317-45770340 | GCGGCCGGGGAGGGAGGGGC | SpCas9 |
| 3499 | DMPK 5 reverse 19:45770318-45770340 | CGGCCGGGGAGGGAGGGGC | SpCas9 |
| 3500 | DMPK 5 reverse 19:45770319-45770340 | GGCCGGGGAGGGAGGGGC | SpCas9 |
| 3501 | DMPK 5 forward 19:45770313-45770341 | CGGCCCCTCCCTCCCCGGCCGCTAG | SpCas9 |
| 3502 | DMPK 5 forward 19:45770314-45770341 | GGCCCCTCCCTCCCCGGCCGCTAG | SpCas9 |
| 3503 | DMPK 5 forward 19:45770315-45770341 | GCCCCTCCCTCCCCGGCCGCTAG | SpCas9 |
| 3504 | DMPK 5 forward 19:45770316-45770341 | CCCCTCCCTCCCCGGCCGCTAG | SpCas9 |
| 3505 | DMPK 5 forward 19:45770317-45770341 | CCCTCCCTCCCCGGCCGCTAG | SpCas9 |
| 3506 | DMPK 5 forward 19:45770318-45770341 | CCTCCCTCCCCGGCCGCTAG | SpCas9 |
| 3507 | DMPK 5 forward 19:45770319-45770341 | CTCCCTCCCCGGCCGCTAG | SpCas9 |
| 3508 | DMPK 5 forward 19:45770320-45770341 | TCCCTCCCCGGCCGCTAG | SpCas9 |
| 3509 | DMPK 5 forward 19:45770314-45770342 | GGCCCCTCCCTCCCCGGCCGCTAGG | SpCas9 |
| 3510 | DMPK 5 forward 19:45770315-45770342 | GCCCCTCCCTCCCCGGCCGCTAGG | SpCas9 |
| 3511 | DMPK 5 forward 19:45770316-45770342 | CCCCTCCCTCCCCGGCCGCTAGG | SpCas9 |
| 3512 | DMPK 5 forward 19:45770317-45770342 | CCCTCCCTCCCCGGCCGCTAGG | SpCas9 |
| 3513 | DMPK 5 forward 19:45770318-45770342 | CCTCCCTCCCCGGCCGCTAGG | SpCas9 |
| 3514 | DMPK 5 forward 19:45770319-45770342 | CTCCCTCCCCGGCCGCTAGG | SpCas9 |
| 3515 | DMPK 5 forward 19:45770320-45770342 | TCCCTCCCCGGCCGCTAGG | SpCas9 |
| 3516 | DMPK 5 forward 19:45770321-45770342 | CCCTCCCCGGCCGCTAGG | SpCas9 |
| 3517 | DMPK 5 reverse 19:45770316-45770344 | CGCCCCCTAGCGGCCGGGGAGGGAG | SpCas9 |
| 3518 | DMPK 5 reverse 19:45770317-45770344 | GCCCCCTAGCGGCCGGGGAGGGAG | SpCas9 |
| 3519 | DMPK 5 reverse 19:45770318-45770344 | CCCCCTAGCGGCCGGGGAGGGAG | SpCas9 |
| 3520 | DMPK 5 reverse 19:45770319-45770344 | CCCCTAGCGGCCGGGGAGGGAG | SpCas9 |
| 3521 | DMPK 5 reverse 19:45770320-45770344 | CCCTAGCGGCCGGGGAGGGAG | SpCas9 |
| 3522 | DMPK 5 reverse 19:45770321-45770344 | CCTAGCGGCCGGGGAGGGAG | SpCas9 |
| 3523 | DMPK 5 reverse 19:45770322-45770344 | CTAGCGGCCGGGGAGGGAG | SpCas9 |
| 3524 | DMPK 5 reverse 19:45770323-45770344 | TAGCGGCCGGGGAGGGAG | SpCas9 |
| 3525 | DMPK 5 forward 19:45770317-45770345 | CCCTCCCTCCCCGGCCGCTAGGGGG | SpCas9 |
| 3526 | DMPK 5 forward 19:45770318-45770345 | CCTCCCTCCCCGGCCGCTAGGGGG | SpCas9 |
| 3527 | DMPK 5 forward 19:45770319-45770345 | CTCCCTCCCCGGCCGCTAGGGGG | SpCas9 |
| 3528 | DMPK 5 forward 19:45770320-45770345 | TCCCTCCCCGGCCGCTAGGGGG | SpCas9 |
| 3529 | DMPK 5 forward 19:45770321-45770345 | CCCTCCCCGGCCGCTAGGGGG | SpCas9 |
| 3530 | DMPK 5 forward 19:45770322-45770345 | CCTCCCCGGCCGCTAGGGGG | SpCas9 |
| 3531 | DMPK 5 forward 19:45770323-45770345 | CTCCCCGGCCGCTAGGGGG | SpCas9 |
| 3532 | DMPK 5 forward 19:45770324-45770345 | TCCCCGGCCGCTAGGGGG | SpCas9 |
| 3533 | DMPK 5 reverse 19:45770317-45770345 | CCGCCCCCTAGCGGCCGGGGAGGGA | SpCas9 |
| 3534 | DMPK 5 reverse 19:45770318-45770345 | CGCCCCCTAGCGGCCGGGGAGGGA | SpCas9 |
| 3535 | DMPK 5 reverse 19:45770319-45770345 | GCCCCCTAGCGGCCGGGGAGGGA | SpCas9 |
| 3536 | DMPK 5 reverse 19:45770320-45770345 | CCCCCTAGCGGCCGGGGAGGGA | SpCas9 |
| 3537 | DMPK 5 reverse 19:45770321-45770345 | CCCCTAGCGGCCGGGGAGGGA | SpCas9 |
| 3538 | DMPK 5 reverse 19:45770322-45770345 | CCCTAGCGGCCGGGGAGGGA | SpCas9 |
| 3539 | DMPK 5 reverse 19:45770323-45770345 | CCTAGCGGCCGGGGAGGGA | SpCas9 |
| 3540 | DMPK 5 reverse 19:45770324-45770345 | CTAGCGGCCGGGGAGGGA | SpCas9 |
| 3541 | DMPK 5 forward 19:45770318-45770346 | CCTCCCTCCCCGGCCGCTAGGGGGC | SpCas9 |
| 3542 | DMPK 5 forward 19:45770319-45770346 | CTCCCTCCCCGGCCGCTAGGGGGC | SpCas9 |
| 3543 | DMPK 5 forward 19:45770320-45770346 | TCCCTCCCCGGCCGCTAGGGGGC | SpCas9 |
| 3544 | DMPK 5 forward 19:45770321-45770346 | CCCTCCCCGGCCGCTAGGGGGC | SpCas9 |
| 3545 | DMPK 5 forward 19:45770322-45770346 | CCTCCCCGGCCGCTAGGGGGC | SpCas9 |
| 3546 | DMPK 5 forward 19:45770323-45770346 | CTCCCCGGCCGCTAGGGGGC | SpCas9 |
| 3547 | DMPK 5 forward 19:45770324-45770346 | TCCCCGGCCGCTAGGGGGC | SpCas9 |
| 3548 | DMPK 5 forward 19:45770325-45770346 | CCCCGGCCGCTAGGGGGC | SpCas9 |
| 3549 | DMPK 5 reverse 19:45770318-45770346 | CCCGCCCCCTAGCGGCCGGGGAGGG | SpCas9 |
| 3550 | DMPK 5 reverse 19:45770319-45770346 | CCGCCCCCTAGCGGCCGGGGAGGG | SpCas9 |
| 3551 | DMPK 5 reverse 19:45770320-45770346 | CGCCCCCTAGCGGCCGGGGAGGG | SpCas9 |
| 3552 | DMPK 5 reverse 19:45770321-45770346 | GCCCCCTAGCGGCCGGGGAGGG | SpCas9 |
| 3553 | DMPK 5 reverse 19:45770322-45770346 | CCCCCTAGCGGCCGGGGAGGG | SpCas9 |
| 3554 | DMPK 5 reverse 19:45770323-45770346 | CCCCTAGCGGCCGGGGAGGG | SpCas9 |
| 3555 | DMPK 5 reverse 19:45770324-45770346 | CCCTAGCGGCCGGGGAGGG | SpCas9 |
| 3556 | DMPK 5 reverse 19:45770325-45770346 | CCTAGCGGCCGGGGAGGG | SpCas9 |
| 3557 | DMPK 5 reverse 19:45770319-45770347 | GCCCGCCCCCTAGCGGCCGGGGAGG | SpCas9 |
| 3558 | DMPK 5 reverse 19:45770320-45770347 | CCCGCCCCCTAGCGGCCGGGGAGG | SpCas9 |
| 3559 | DMPK 5 reverse 19:45770321-45770347 | CCGCCCCCTAGCGGCCGGGGAGG | SpCas9 |
| 3560 | DMPK 5 reverse 19:45770322-45770347 | CGCCCCCTAGCGGCCGGGGAGG | SpCas9 |
| 3561 | DMPK 5 reverse 19:45770323-45770347 | GCCCCCTAGCGGCCGGGGAGG | SpCas9 |
| 3562 | DMPK 5 reverse 19:45770324-45770347 | CCCCCTAGCGGCCGGGGAGG | SpCas9 |
| 3563 | DMPK 5 reverse 19:45770325-45770347 | CCCCTAGCGGCCGGGGAGG | SpCas9 |
| 3564 | DMPK 5 reverse 19:45770326-45770347 | CCCTAGCGGCCGGGGAGG | SpCas9 |
| 3565 | DMPK 5 reverse 19:45770321-45770349 | GGGCCCGCCCCCTAGCGGCCGGGGA | SpCas9 |
| 3566 | DMPK 5 reverse 19:45770322-45770349 | GGCCCGCCCCCTAGCGGCCGGGGA | SpCas9 |
| 3567 | DMPK 5 reverse 19:45770323-45770349 | GCCCGCCCCCTAGCGGCCGGGGA | SpCas9 |
| 3568 | DMPK 5 reverse 19:45770324-45770349 | CCCGCCCCCTAGCGGCCGGGGA | SpCas9 |
| 3569 | DMPK 5 reverse 19:45770325-45770349 | CCGCCCCCTAGCGGCCGGGGA | SpCas9 |
| 3570 | DMPK 5 reverse 19:45770326-45770349 | CGCCCCCTAGCGGCCGGGGA | SpCas9 |
| 3571 | DMPK 5 reverse 19:45770327-45770349 | GCCCCCTAGCGGCCGGGGA | SpCas9 |
| 3572 | DMPK 5 reverse 19:45770328-45770349 | CCCCCTAGCGGCCGGGGA | SpCas9 |
| 3573 | DMPK 5 reverse 19:45770322-45770350 | CGGGCCCGCCCCCTAGCGGCCGGGG | SpCas9 |
| 3574 | DMPK 5 reverse 19:45770323-45770350 | GGGCCCGCCCCCTAGCGGCCGGGG | SpCas9 |
| 3575 | DMPK 5 reverse 19:45770324-45770350 | GGCCCGCCCCCTAGCGGCCGGGG | SpCas9 |
| 3576 | DMPK 5 reverse 19:45770325-45770350 | GCCCGCCCCCTAGCGGCCGGGG | SpCas9 |
| 3577 | DMPK 5 reverse 19:45770326-45770350 | CCCGCCCCCTAGCGGCCGGGG | SpCas9 |
| 3578 | DMPK 5 reverse 19:45770327-45770350 | CCGCCCCCTAGCGGCCGGGG | SpCas9 |
| 3579 | DMPK 5 reverse 19:45770328-45770350 | CGCCCCCTAGCGGCCGGGG | SpCas9 |
| 3580 | DMPK 5 reverse 19:45770329-45770350 | GCCCCCTAGCGGCCGGGG | SpCas9 |
| 3581 | DMPK 5 forward 19:45770323-45770351 | CTCCCCGGCCGCTAGGGGGCGGGCC | SpCas9 |
| 3582 | DMPK 5 forward 19:45770324-45770351 | TCCCCGGCCGCTAGGGGGCGGGCC | SpCas9 |
| 3583 | DMPK 5 forward 19:45770325-45770351 | CCCCGGCCGCTAGGGGGCGGGCC | SpCas9 |
| 3584 | DMPK 5 forward 19:45770326-45770351 | CCCGGCCGCTAGGGGGCGGGCC | SpCas9 |
| 3585 | DMPK 5 forward 19:45770327-45770351 | CCGGCCGCTAGGGGGCGGGCC | SpCas9 |
| 3586 | DMPK 5 forward 19:45770328-45770351 | CGGCCGCTAGGGGGCGGGCC | SpCas9 |
| 3587 | DMPK 5 forward 19:45770329-45770351 | GGCCGCTAGGGGGCGGGCC | SpCas9 |
| 3588 | DMPK 5 forward 19:45770330-45770351 | GCCGCTAGGGGGCGGGCC | SpCas9 |
| 3589 | DMPK 5 reverse 19:45770323-45770351 | CCGGGCCCGCCCCCTAGCGGCCGGG | SpCas9 |
| 3590 | DMPK 5 reverse 19:45770324-45770351 | CGGGCCCGCCCCCTAGCGGCCGGG | SpCas9 |
| 3591 | DMPK 5 reverse 19:45770325-45770351 | GGGCCCGCCCCCTAGCGGCCGGG | SpCas9 |
| 3592 | DMPK 5 reverse 19:45770326-45770351 | GGCCCGCCCCCTAGCGGCCGGG | SpCas9 |
| 3593 | DMPK 5 reverse 19:45770327-45770351 | GCCCGCCCCCTAGCGGCCGGG | SpCas9 |
| 3594 | DMPK 5 reverse 19:45770328-45770351 | CCCGCCCCCTAGCGGCCGGG | SpCas9 |
| 3595 | DMPK 5 reverse 19:45770329-45770351 | CCGCCCCCTAGCGGCCGGG | SpCas9 |
| 3596 | DMPK 5 reverse 19:45770330-45770351 | CGCCCCCTAGCGGCCGGG | SpCas9 |
| 3597 | DMPK 5 reverse 19:45770325-45770353 | ATCCGGGCCCGCCCCCTAGCGGCCG | SpCas9 |
| 3598 | DMPK 5 reverse 19:45770326-45770353 | TCCGGGCCCGCCCCCTAGCGGCCG | SpCas9 |
| 3599 | DMPK 5 reverse 19:45770327-45770353 | CCGGGCCCGCCCCCTAGCGGCCG | SpCas9 |
| 3600 | DMPK 5 reverse 19:45770328-45770353 | CGGGCCCGCCCCCTAGCGGCCG | SpCas9 |
| 3601 | DMPK 5 reverse 19:45770329-45770353 | GGGCCCGCCCCCTAGCGGCCG | SpCas9 |
| 3602 | DMPK 5 reverse 19:45770330-45770353 | GGCCCGCCCCCTAGCGGCCG | SpCas9 |
| 3603 | DMPK 5 reverse 19:45770331-45770353 | GCCCGCCCCCTAGCGGCCG | SpCas9 |
| 3604 | DMPK 5 reverse 19:45770332-45770353 | CCCGCCCCCTAGCGGCCG | SpCas9 |
| 3605 | DMPK 5 reverse 19:45770326-45770354 | GATCCGGGCCCGCCCCCTAGCGGCC | SpCas9 |
| 3606 | DMPK 5 reverse 19:45770327-45770354 | ATCCGGGCCCGCCCCCTAGCGGCC | SpCas9 |
| 3607 | DMPK 5 reverse 19:45770328-45770354 | TCCGGGCCCGCCCCCTAGCGGCC | SpCas9 |
| 3608 | DMPK 5 reverse 19:45770329-45770354 | CCGGGCCCGCCCCCTAGCGGCC | SpCas9 |
| 3609 | DMPK 5 reverse 19:45770330-45770354 | CGGGCCCGCCCCCTAGCGGCC | SpCas9 |
| 3610 | DMPK 5 reverse 19:45770331-45770354 | GGGCCCGCCCCCTAGCGGCC | SpCas9 |
| 3611 | DMPK 5 reverse 19:45770332-45770354 | GGCCCGCCCCCTAGCGGCC | SpCas9 |
| 3612 | DMPK 5 reverse 19:45770333-45770354 | GCCCGCCCCCTAGCGGCC | SpCas9 |
| 3613 | DMPK 5 reverse 19:45770327-45770355 | TGATCCGGGCCCGCCCCCTAGCGGC | SpCas9 |
| 3614 | DMPK 5 reverse 19:45770328-45770355 | GATCCGGGCCCGCCCCCTAGCGGC | SpCas9 |
| 3615 | DMPK 5 reverse 19:45770329-45770355 | ATCCGGGCCCGCCCCCTAGCGGC | SpCas9 |
| 3616 | DMPK 5 reverse 19:45770330-45770355 | TCCGGGCCCGCCCCCTAGCGGC | SpCas9 |
| 3617 | DMPK 5 reverse 19:45770331-45770355 | CCGGGCCCGCCCCCTAGCGGC | SpCas9 |
| 3618 | DMPK 5 reverse 19:45770332-45770355 | CGGGCCCGCCCCCTAGCGGC | SpCas9 |
| 3619 | DMPK 5 reverse 19:45770333-45770355 | GGGCCCGCCCCCTAGCGGC | SpCas9 |
| 3620 | DMPK 5 reverse 19:45770334-45770355 | GGCCCGCCCCCTAGCGGC | SpCas9 |
| 3621 | DMPK 5 forward 19:45770330-45770358 | GCCGCTAGGGGGCGGGCCCGGATCA | SpCas9 |
| 3622 | DMPK 5 forward 19:45770331-45770358 | CCGCTAGGGGGCGGGCCCGGATCA | SpCas9 |
| 3623 | DMPK 5 forward 19:45770332-45770358 | CGCTAGGGGGCGGGCCCGGATCA | SpCas9 |
| 3624 | DMPK 5 forward 19:45770333-45770358 | GCTAGGGGGCGGGCCCGGATCA | SpCas9 |
| 3625 | DMPK 5 forward 19:45770334-45770358 | CTAGGGGGCGGGCCCGGATCA | SpCas9 |
| 3626 | DMPK 5 forward 19:45770335-45770358 | TAGGGGGCGGGCCCGGATCA | SpCas9 |
| 3627 | DMPK 5 forward 19:45770336-45770358 | AGGGGGCGGGCCCGGATCA | SpCas9 |
| 3628 | DMPK 5 forward 19:45770337-45770358 | GGGGGCGGGCCCGGATCA | SpCas9 |
| 3629 | DMPK 5 forward 19:45770331-45770359 | CCGCTAGGGGGCGGGCCCGGATCAC | SpCas9 |
| 3630 | DMPK 5 forward 19:45770332-45770359 | CGCTAGGGGGCGGGCCCGGATCAC | SpCas9 |
| 3631 | DMPK 5 forward 19:45770333-45770359 | GCTAGGGGGCGGGCCCGGATCAC | SpCas9 |
| 3632 | DMPK 5 forward 19:45770334-45770359 | CTAGGGGGCGGGCCCGGATCAC | SpCas9 |
| 3633 | DMPK 5 forward 19:45770335-45770359 | TAGGGGGCGGGCCCGGATCAC | SpCas9 |
| 3634 | DMPK 5 forward 19:45770336-45770359 | AGGGGGCGGGCCCGGATCAC | SpCas9 |
| 3635 | DMPK 5 forward 19:45770337-45770359 | GGGGGCGGGCCCGGATCAC | SpCas9 |
| 3636 | DMPK 5 forward 19:45770338-45770359 | GGGGCGGGCCCGGATCAC | SpCas9 |
| 3637 | DMPK 5 reverse 19:45770331-45770359 | CCTGTGATCCGGGCCCGCCCCCTAG | SpCas9 |
| 3638 | DMPK 5 reverse 19:45770332-45770359 | CTGTGATCCGGGCCCGCCCCCTAG | SpCas9 |
| 3639 | DMPK 5 reverse 19:45770333-45770359 | TGTGATCCGGGCCCGCCCCCTAG | SpCas9 |
| 3640 | DMPK 5 reverse 19:45770334-45770359 | GTGATCCGGGCCCGCCCCCTAG | SpCas9 |
| 3641 | DMPK 5 reverse 19:45770335-45770359 | TGATCCGGGCCCGCCCCCTAG | SpCas9 |
| 3642 | DMPK 5 reverse 19:45770336-45770359 | GATCCGGGCCCGCCCCCTAG | SpCas9 |
| 3643 | DMPK 5 reverse 19:45770337-45770359 | ATCCGGGCCCGCCCCCTAG | SpCas9 |
| 3644 | DMPK 5 reverse 19:45770338-45770359 | TCCGGGCCCGCCCCCTAG | SpCas9 |
| 3645 | DMPK 5 reverse 19:45770334-45770362 | AGTCCTGTGATCCGGGCCCGCCCCC | SpCas9 |
| 3646 | DMPK 5 reverse 19:45770335-45770362 | GTCCTGTGATCCGGGCCCGCCCCC | SpCas9 |
| 3647 | DMPK 5 reverse 19:45770336-45770362 | TCCTGTGATCCGGGCCCGCCCCC | SpCas9 |
| 3648 | DMPK 5 reverse 19:45770337-45770362 | CCTGTGATCCGGGCCCGCCCCC | SpCas9 |
| 3649 | DMPK 5 reverse 19:45770338-45770362 | CTGTGATCCGGGCCCGCCCCC | SpCas9 |
| 3650 | DMPK 5 reverse 19:45770339-45770362 | TGTGATCCGGGCCCGCCCCC | SpCas9 |
| 3651 | DMPK 5 reverse 19:45770340-45770362 | GTGATCCGGGCCCGCCCCC | SpCas9 |
| 3652 | DMPK 5 reverse 19:45770341-45770362 | TGATCCGGGCCCGCCCCC | SpCas9 |
| 3653 | DMPK 5 forward 19:45770336-45770364 | AGGGGGCGGGCCCGGATCACAGGAC | SpCas9 |
| 3654 | DMPK 5 forward 19:45770337-45770364 | GGGGGCGGGCCCGGATCACAGGAC | SpCas9 |
| 3655 | DMPK 5 forward 19:45770338-45770364 | GGGGCGGGCCCGGATCACAGGAC | SpCas9 |
| 3656 | DMPK 5 forward 19:45770339-45770364 | GGGCGGGCCCGGATCACAGGAC | SpCas9 |
| 3657 | DMPK 5 forward 19:45770340-45770364 | GGCGGGCCCGGATCACAGGAC | SpCas9 |
| 3658 | DMPK 5 forward 19:45770341-45770364 | GCGGGCCCGGATCACAGGAC | SpCas9 |
| 3659 | DMPK 5 forward 19:45770342-45770364 | CGGGCCCGGATCACAGGAC | SpCas9 |
| 3660 | DMPK 5 forward 19:45770343-45770364 | GGGCCCGGATCACAGGAC | SpCas9 |
| 3661 | DMPK 5 forward 19:45770338-45770366 | GGGGCGGGCCCGGATCACAGGACTG | SpCas9 |
| 3662 | DMPK 5 forward 19:45770339-45770366 | GGGCGGGCCCGGATCACAGGACTG | SpCas9 |
| 3663 | DMPK 5 forward 19:45770340-45770366 | GGCGGGCCCGGATCACAGGACTG | SpCas9 |
| 3664 | DMPK 5 forward 19:45770341-45770366 | GCGGGCCCGGATCACAGGACTG | SpCas9 |
| 3665 | DMPK 5 forward 19:45770342-45770366 | CGGGCCCGGATCACAGGACTG | SpCas9 |
| 3666 | DMPK 5 forward 19:45770343-45770366 | GGGCCCGGATCACAGGACTG | SpCas9 |
| 3667 | DMPK 5 forward 19:45770344-45770366 | GGCCCGGATCACAGGACTG | SpCas9 |
| 3668 | DMPK 5 forward 19:45770345-45770366 | GCCCGGATCACAGGACTG | SpCas9 |
| 3669 | DMPK 5 forward 19:45770342-45770370 | CGGGCCCGGATCACAGGACTGGAGC | SpCas9 |
| 3670 | DMPK 5 forward 19:45770343-45770370 | GGGCCCGGATCACAGGACTGGAGC | SpCas9 |
| 3671 | DMPK 5 forward 19:45770344-45770370 | GGCCCGGATCACAGGACTGGAGC | SpCas9 |
| 3672 | DMPK 5 forward 19:45770345-45770370 | GCCCGGATCACAGGACTGGAGC | SpCas9 |
| 3673 | DMPK 5 forward 19:45770346-45770370 | CCCGGATCACAGGACTGGAGC | SpCas9 |
| 3674 | DMPK 5 forward 19:45770347-45770370 | CCGGATCACAGGACTGGAGC | SpCas9 |
| 3675 | DMPK 5 forward 19:45770348-45770370 | CGGATCACAGGACTGGAGC | SpCas9 |
| 3676 | DMPK 5 forward 19:45770349-45770370 | GGATCACAGGACTGGAGC | SpCas9 |
| 3677 | DMPK 5 forward 19:45770343-45770371 | GGGCCCGGATCACAGGACTGGAGCT | SpCas9 |
| 3678 | DMPK 5 forward 19:45770344-45770371 | GGCCCGGATCACAGGACTGGAGCT | SpCas9 |
| 3679 | DMPK 5 forward 19:45770345-45770371 | GCCCGGATCACAGGACTGGAGCT | SpCas9 |
| 3680 | DMPK 5 forward 19:45770346-45770371 | CCCGGATCACAGGACTGGAGCT | SpCas9 |
| 3681 | DMPK 5 forward 19:45770347-45770371 | CCGGATCACAGGACTGGAGCT | SpCas9 |
| 3682 | DMPK 5 forward 19:45770348-45770371 | CGGATCACAGGACTGGAGCT | SpCas9 |
| 3683 | DMPK 5 forward 19:45770349-45770371 | GGATCACAGGACTGGAGCT | SpCas9 |
| 3684 | DMPK 5 forward 19:45770350-45770371 | GATCACAGGACTGGAGCT | SpCas9 |
| 3685 | DMPK 5 forward 19:45770346-45770374 | CCCGGATCACAGGACTGGAGCTGGG | SpCas9 |
| 3686 | DMPK 5 forward 19:45770347-45770374 | CCGGATCACAGGACTGGAGCTGGG | SpCas9 |
| 3687 | DMPK 5 forward 19:45770348-45770374 | CGGATCACAGGACTGGAGCTGGG | SpCas9 |
| 3688 | DMPK 5 forward 19:45770349-45770374 | GGATCACAGGACTGGAGCTGGG | SpCas9 |
| 3689 | DMPK 5 forward 19:45770350-45770374 | GATCACAGGACTGGAGCTGGG | SpCas9 |
| 3690 | DMPK 5 forward 19:45770351-45770374 | ATCACAGGACTGGAGCTGGG | SpCas9 |
| 3691 | DMPK 5 forward 19:45770352-45770374 | TCACAGGACTGGAGCTGGG | SpCas9 |
| 3692 | DMPK 5 forward 19:45770353-45770374 | CACAGGACTGGAGCTGGG | SpCas9 |
| 3693 | DMPK 5 reverse 19:45770346-45770374 | CCGCCCAGCTCCAGTCCTGTGATCC | SpCas9 |
| 3694 | DMPK 5 reverse 19:45770347-45770374 | CGCCCAGCTCCAGTCCTGTGATCC | SpCas9 |
| 3695 | DMPK 5 reverse 19:45770348-45770374 | GCCCAGCTCCAGTCCTGTGATCC | SpCas9 |
| 3696 | DMPK 5 reverse 19:45770349-45770374 | CCCAGCTCCAGTCCTGTGATCC | SpCas9 |
| 3697 | DMPK 5 reverse 19:45770350-45770374 | CCAGCTCCAGTCCTGTGATCC | SpCas9 |
| 3698 | DMPK 5 reverse 19:45770351-45770374 | CAGCTCCAGTCCTGTGATCC | SpCas9 |
| 3699 | DMPK 5 reverse 19:45770352-45770374 | AGCTCCAGTCCTGTGATCC | SpCas9 |
| 3700 | DMPK 5 reverse 19:45770353-45770374 | GCTCCAGTCCTGTGATCC | SpCas9 |
| 3701 | DMPK 5 reverse 19:45770347-45770375 | TCCGCCCAGCTCCAGTCCTGTGATC | SpCas9 |
| 3702 | DMPK 5 reverse 19:45770348-45770375 | CCGCCCAGCTCCAGTCCTGTGATC | SpCas9 |
| 3703 | DMPK 5 reverse 19:45770349-45770375 | CGCCCAGCTCCAGTCCTGTGATC | SpCas9 |
| 3704 | DMPK 5 reverse 19:45770350-45770375 | GCCCAGCTCCAGTCCTGTGATC | SpCas9 |
| 3705 | DMPK 5 reverse 19:45770351-45770375 | CCCAGCTCCAGTCCTGTGATC | SpCas9 |
| 3706 | DMPK 5 reverse 19:45770352-45770375 | CCAGCTCCAGTCCTGTGATC | SpCas9 |
| 3707 | DMPK 5 reverse 19:45770353-45770375 | CAGCTCCAGTCCTGTGATC | SpCas9 |
| 3708 | DMPK 5 reverse 19:45770354-45770375 | AGCTCCAGTCCTGTGATC | SpCas9 |
| 3709 | DMPK 5 forward 19:45770348-45770376 | CGGATCACAGGACTGGAGCTGGGCG | SpCas9 |
| 3710 | DMPK 5 forward 19:45770349-45770376 | GGATCACAGGACTGGAGCTGGGCG | SpCas9 |
| 3711 | DMPK 5 forward 19:45770350-45770376 | GATCACAGGACTGGAGCTGGGCG | SpCas9 |
| 3712 | DMPK 5 forward 19:45770351-45770376 | ATCACAGGACTGGAGCTGGGCG | SpCas9 |
| 3713 | DMPK 5 forward 19:45770352-45770376 | TCACAGGACTGGAGCTGGGCG | SpCas9 |
| 3714 | DMPK 5 forward 19:45770353-45770376 | CACAGGACTGGAGCTGGGCG | SpCas9 |
| 3715 | DMPK 5 forward 19:45770354-45770376 | ACAGGACTGGAGCTGGGCG | SpCas9 |
| 3716 | DMPK 5 forward 19:45770355-45770376 | CAGGACTGGAGCTGGGCG | SpCas9 |
| 3717 | DMPK 5 forward 19:45770360-45770388 | CTGGAGCTGGGCGGAGACCCACGCT | SpCas9 |
| 3718 | DMPK 5 forward 19:45770361-45770388 | TGGAGCTGGGCGGAGACCCACGCT | SpCas9 |
| 3719 | DMPK 5 forward 19:45770362-45770388 | GGAGCTGGGCGGAGACCCACGCT | SpCas9 |
| 3720 | DMPK 5 forward 19:45770363-45770388 | GAGCTGGGCGGAGACCCACGCT | SpCas9 |
| 3721 | DMPK 5 forward 19:45770364-45770388 | AGCTGGGCGGAGACCCACGCT | SpCas9 |
| 3722 | DMPK 5 forward 19:45770365-45770388 | GCTGGGCGGAGACCCACGCT | SpCas9 |
| 3723 | DMPK 5 forward 19:45770366-45770388 | CTGGGCGGAGACCCACGCT | SpCas9 |
| 3724 | DMPK 5 forward 19:45770367-45770388 | TGGGCGGAGACCCACGCT | SpCas9 |
| 3725 | DMPK 5 reverse 19:45770360-45770388 | CCGAGCGTGGGTCTCCGCCCAGCTC | SpCas9 |
| 3726 | DMPK 5 reverse 19:45770361-45770388 | CGAGCGTGGGTCTCCGCCCAGCTC | SpCas9 |
| 3727 | DMPK 5 reverse 19:45770362-45770388 | GAGCGTGGGTCTCCGCCCAGCTC | SpCas9 |
| 3728 | DMPK 5 reverse 19:45770363-45770388 | AGCGTGGGTCTCCGCCCAGCTC | SpCas9 |
| 3729 | DMPK 5 reverse 19:45770364-45770388 | GCGTGGGTCTCCGCCCAGCTC | SpCas9 |
| 3730 | DMPK 5 reverse 19:45770365-45770388 | CGTGGGTCTCCGCCCAGCTC | SpCas9 |
| 3731 | DMPK 5 reverse 19:45770366-45770388 | GTGGGTCTCCGCCCAGCTC | SpCas9 |
| 3732 | DMPK 5 reverse 19:45770367-45770388 | TGGGTCTCCGCCCAGCTC | SpCas9 |
| 3733 | DMPK 5 forward 19:45770362-45770390 | GGAGCTGGGCGGAGACCCACGCTCG | SpCas9 |
| 3734 | DMPK 5 forward 19:45770363-45770390 | GAGCTGGGCGGAGACCCACGCTCG | SpCas9 |
| 3735 | DMPK 5 forward 19:45770364-45770390 | AGCTGGGCGGAGACCCACGCTCG | SpCas9 |
| 3736 | DMPK 5 forward 19:45770365-45770390 | GCTGGGCGGAGACCCACGCTCG | SpCas9 |
| 3737 | DMPK 5 forward 19:45770366-45770390 | CTGGGCGGAGACCCACGCTCG | SpCas9 |
| 3738 | DMPK 5 forward 19:45770367-45770390 | TGGGCGGAGACCCACGCTCG | SpCas9 |
| 3739 | DMPK 5 forward 19:45770368-45770390 | GGGCGGAGACCCACGCTCG | SpCas9 |
| 3740 | DMPK 5 forward 19:45770369-45770390 | GGCGGAGACCCACGCTCG | SpCas9 |
| 3741 | DMPK 5 forward 19:45770365-45770393 | GCTGGGCGGAGACCCACGCTCGGAG | SpCas9 |
| 3742 | DMPK 5 forward 19:45770366-45770393 | CTGGGCGGAGACCCACGCTCGGAG | SpCas9 |
| 3743 | DMPK 5 forward 19:45770367-45770393 | TGGGCGGAGACCCACGCTCGGAG | SpCas9 |
| 3744 | DMPK 5 forward 19:45770368-45770393 | GGGCGGAGACCCACGCTCGGAG | SpCas9 |
| 3745 | DMPK 5 forward 19:45770369-45770393 | GGCGGAGACCCACGCTCGGAG | SpCas9 |
| 3746 | DMPK 5 forward 19:45770370-45770393 | GCGGAGACCCACGCTCGGAG | SpCas9 |
| 3747 | DMPK 5 forward 19:45770371-45770393 | CGGAGACCCACGCTCGGAG | SpCas9 |
| 3748 | DMPK 5 forward 19:45770372-45770393 | GGAGACCCACGCTCGGAG | SpCas9 |
| 3749 | DMPK 5 reverse 19:45770366-45770394 | ACCGCTCCGAGCGTGGGTCTCCGCC | SpCas9 |
| 3750 | DMPK 5 reverse 19:45770367-45770394 | CCGCTCCGAGCGTGGGTCTCCGCC | SpCas9 |
| 3751 | DMPK 5 reverse 19:45770368-45770394 | CGCTCCGAGCGTGGGTCTCCGCC | SpCas9 |
| 3752 | DMPK 5 reverse 19:45770369-45770394 | GCTCCGAGCGTGGGTCTCCGCC | SpCas9 |
| 3753 | DMPK 5 reverse 19:45770370-45770394 | CTCCGAGCGTGGGTCTCCGCC | SpCas9 |
| 3754 | DMPK 5 reverse 19:45770371-45770394 | TCCGAGCGTGGGTCTCCGCC | SpCas9 |
| 3755 | DMPK 5 reverse 19:45770372-45770394 | CCGAGCGTGGGTCTCCGCC | SpCas9 |
| 3756 | DMPK 5 reverse 19:45770373-45770394 | CGAGCGTGGGTCTCCGCC | SpCas9 |
| 3757 | DMPK 5 forward 19:45770376-45770404 | ACCCACGCTCGGAGCGGTTGTGAAC | SpCas9 |
| 3758 | DMPK 5 forward 19:45770377-45770404 | CCCACGCTCGGAGCGGTTGTGAAC | SpCas9 |
| 3759 | DMPK 5 forward 19:45770378-45770404 | CCACGCTCGGAGCGGTTGTGAAC | SpCas9 |
| 3760 | DMPK 5 forward 19:45770379-45770404 | CACGCTCGGAGCGGTTGTGAAC | SpCas9 |
| 3761 | DMPK 5 forward 19:45770380-45770404 | ACGCTCGGAGCGGTTGTGAAC | SpCas9 |
| 3762 | DMPK 5 forward 19:45770381-45770404 | CGCTCGGAGCGGTTGTGAAC | SpCas9 |
| 3763 | DMPK 5 forward 19:45770382-45770404 | GCTCGGAGCGGTTGTGAAC | SpCas9 |
| 3764 | DMPK 5 forward 19:45770383-45770404 | CTCGGAGCGGTTGTGAAC | SpCas9 |
| 3765 | DMPK 5 reverse 19:45770377-45770405 | GCCAGTTCACAACCGCTCCGAGCGT | SpCas9 |
| 3766 | DMPK 5 reverse 19:45770378-45770405 | CCAGTTCACAACCGCTCCGAGCGT | SpCas9 |
| 3767 | DMPK 5 reverse 19:45770379-45770405 | CAGTTCACAACCGCTCCGAGCGT | SpCas9 |
| 3768 | DMPK 5 reverse 19:45770380-45770405 | AGTTCACAACCGCTCCGAGCGT | SpCas9 |
| 3769 | DMPK 5 reverse 19:45770381-45770405 | GTTCACAACCGCTCCGAGCGT | SpCas9 |
| 3770 | DMPK 5 reverse 19:45770382-45770405 | TTCACAACCGCTCCGAGCGT | SpCas9 |
| 3771 | DMPK 5 reverse 19:45770383-45770405 | TCACAACCGCTCCGAGCGT | SpCas9 |
| 3772 | DMPK 5 reverse 19:45770384-45770405 | CACAACCGCTCCGAGCGT | SpCas9 |
| 3773 | DMPK 5 reverse 19:45770378-45770406 | TGCCAGTTCACAACCGCTCCGAGCG | SpCas9 |
| 3774 | DMPK 5 reverse 19:45770379-45770406 | GCCAGTTCACAACCGCTCCGAGCG | SpCas9 |
| 3775 | DMPK 5 reverse 19:45770380-45770406 | CCAGTTCACAACCGCTCCGAGCG | SpCas9 |
| 3776 | DMPK 5 reverse 19:45770381-45770406 | CAGTTCACAACCGCTCCGAGCG | SpCas9 |
| 3777 | DMPK 5 reverse 19:45770382-45770406 | AGTTCACAACCGCTCCGAGCG | SpCas9 |
| 3778 | DMPK 5 reverse 19:45770383-45770406 | GTTCACAACCGCTCCGAGCG | SpCas9 |
| 3779 | DMPK 5 reverse 19:45770384-45770406 | TTCACAACCGCTCCGAGCG | SpCas9 |
| 3780 | DMPK 5 reverse 19:45770385-45770406 | TCACAACCGCTCCGAGCG | SpCas9 |
| 3781 | DMPK 5 forward 19:45770379-45770407 | CACGCTCGGAGCGGTTGTGAACTGG | SpCas9 |
| 3782 | DMPK 5 forward 19:45770380-45770407 | ACGCTCGGAGCGGTTGTGAACTGG | SpCas9 |
| 3783 | DMPK 5 forward 19:45770381-45770407 | CGCTCGGAGCGGTTGTGAACTGG | SpCas9 |
| 3784 | DMPK 5 forward 19:45770382-45770407 | GCTCGGAGCGGTTGTGAACTGG | SpCas9 |
| 3785 | DMPK 5 forward 19:45770383-45770407 | CTCGGAGCGGTTGTGAACTGG | SpCas9 |
| 3786 | DMPK 5 forward 19:45770384-45770407 | TCGGAGCGGTTGTGAACTGG | SpCas9 |
| 3787 | DMPK 5 forward 19:45770385-45770407 | CGGAGCGGTTGTGAACTGG | SpCas9 |
| 3788 | DMPK 5 forward 19:45770386-45770407 | GGAGCGGTTGTGAACTGG | SpCas9 |
| 3789 | DMPK 5 forward 19:45770380-45770408 | ACGCTCGGAGCGGTTGTGAACTGGC | SpCas9 |
| 3790 | DMPK 5 forward 19:45770381-45770408 | CGCTCGGAGCGGTTGTGAACTGGC | SpCas9 |
| 3791 | DMPK 5 forward 19:45770382-45770408 | GCTCGGAGCGGTTGTGAACTGGC | SpCas9 |
| 3792 | DMPK 5 forward 19:45770383-45770408 | CTCGGAGCGGTTGTGAACTGGC | SpCas9 |
| 3793 | DMPK 5 forward 19:45770384-45770408 | TCGGAGCGGTTGTGAACTGGC | SpCas9 |
| 3794 | DMPK 5 forward 19:45770385-45770408 | CGGAGCGGTTGTGAACTGGC | SpCas9 |
| 3795 | DMPK 5 forward 19:45770386-45770408 | GGAGCGGTTGTGAACTGGC | SpCas9 |
| 3796 | DMPK 5 forward 19:45770387-45770408 | GAGCGGTTGTGAACTGGC | SpCas9 |
| 3797 | DMPK 5 forward 19:45770383-45770411 | CTCGGAGCGGTTGTGAACTGGCAGG | SpCas9 |
| 3798 | DMPK 5 forward 19:45770384-45770411 | TCGGAGCGGTTGTGAACTGGCAGG | SpCas9 |
| 3799 | DMPK 5 forward 19:45770385-45770411 | CGGAGCGGTTGTGAACTGGCAGG | SpCas9 |
| 3800 | DMPK 5 forward 19:45770386-45770411 | GGAGCGGTTGTGAACTGGCAGG | SpCas9 |
| 3801 | DMPK 5 forward 19:45770387-45770411 | GAGCGGTTGTGAACTGGCAGG | SpCas9 |
| 3802 | DMPK 5 forward 19:45770388-45770411 | AGCGGTTGTGAACTGGCAGG | SpCas9 |
| 3803 | DMPK 5 forward 19:45770389-45770411 | GCGGTTGTGAACTGGCAGG | SpCas9 |
| 3804 | DMPK 5 forward 19:45770390-45770411 | CGGTTGTGAACTGGCAGG | SpCas9 |
| 3805 | DMPK 5 reverse 19:45770383-45770411 | CCGCCTGCCAGTTCACAACCGCTCC | SpCas9 |
| 3806 | DMPK 5 reverse 19:45770384-45770411 | CGCCTGCCAGTTCACAACCGCTCC | SpCas9 |
| 3807 | DMPK 5 reverse 19:45770385-45770411 | GCCTGCCAGTTCACAACCGCTCC | SpCas9 |
| 3808 | DMPK 5 reverse 19:45770386-45770411 | CCTGCCAGTTCACAACCGCTCC | SpCas9 |
| 3809 | DMPK 5 reverse 19:45770387-45770411 | CTGCCAGTTCACAACCGCTCC | SpCas9 |
| 3810 | DMPK 5 reverse 19:45770388-45770411 | TGCCAGTTCACAACCGCTCC | SpCas9 |
| 3811 | DMPK 5 reverse 19:45770389-45770411 | GCCAGTTCACAACCGCTCC | SpCas9 |
| 3812 | DMPK 5 reverse 19:45770390-45770411 | CCAGTTCACAACCGCTCC | SpCas9 |
| 3813 | DMPK 5 forward 19:45770386-45770414 | GGAGCGGTTGTGAACTGGCAGGCGG | SpCas9 |
| 3814 | DMPK 5 forward 19:45770387-45770414 | GAGCGGTTGTGAACTGGCAGGCGG | SpCas9 |
| 3815 | DMPK 5 forward 19:45770388-45770414 | AGCGGTTGTGAACTGGCAGGCGG | SpCas9 |
| 3816 | DMPK 5 forward 19:45770389-45770414 | GCGGTTGTGAACTGGCAGGCGG | SpCas9 |
| 3817 | DMPK 5 forward 19:45770390-45770414 | CGGTTGTGAACTGGCAGGCGG | SpCas9 |
| 3818 | DMPK 5 forward 19:45770391-45770414 | GGTTGTGAACTGGCAGGCGG | SpCas9 |
| 3819 | DMPK 5 forward 19:45770392-45770414 | GTTGTGAACTGGCAGGCGG | SpCas9 |
| 3820 | DMPK 5 forward 19:45770393-45770414 | TTGTGAACTGGCAGGCGG | SpCas9 |
| 3821 | DMPK 5 forward 19:45770387-45770415 | GAGCGGTTGTGAACTGGCAGGCGGT | SpCas9 |
| 3822 | DMPK 5 forward 19:45770388-45770415 | AGCGGTTGTGAACTGGCAGGCGGT | SpCas9 |
| 3823 | DMPK 5 forward 19:45770389-45770415 | GCGGTTGTGAACTGGCAGGCGGT | SpCas9 |
| 3824 | DMPK 5 forward 19:45770390-45770415 | CGGTTGTGAACTGGCAGGCGGT | SpCas9 |
| 3825 | DMPK 5 forward 19:45770391-45770415 | GGTTGTGAACTGGCAGGCGGT | SpCas9 |
| 3826 | DMPK 5 forward 19:45770392-45770415 | GTTGTGAACTGGCAGGCGGT | SpCas9 |
| 3827 | DMPK 5 forward 19:45770393-45770415 | TTGTGAACTGGCAGGCGGT | SpCas9 |
| 3828 | DMPK 5 forward 19:45770394-45770415 | TGTGAACTGGCAGGCGGT | SpCas9 |
| 3829 | DMPK 5 forward 19:45770392-45770420 | GTTGTGAACTGGCAGGCGGTGGGCG | SpCas9 |
| 3830 | DMPK 5 forward 19:45770393-45770420 | TTGTGAACTGGCAGGCGGTGGGCG | SpCas9 |
| 3831 | DMPK 5 forward 19:45770394-45770420 | TGTGAACTGGCAGGCGGTGGGCG | SpCas9 |
| 3832 | DMPK 5 forward 19:45770395-45770420 | GTGAACTGGCAGGCGGTGGGCG | SpCas9 |
| 3833 | DMPK 5 forward 19:45770396-45770420 | TGAACTGGCAGGCGGTGGGCG | SpCas9 |
| 3834 | DMPK 5 forward 19:45770397-45770420 | GAACTGGCAGGCGGTGGGCG | SpCas9 |
| 3835 | DMPK 5 forward 19:45770398-45770420 | AACTGGCAGGCGGTGGGCG | SpCas9 |
| 3836 | DMPK 5 forward 19:45770399-45770420 | ACTGGCAGGCGGTGGGCG | SpCas9 |
| 3837 | DMPK 5 reverse 19:45770400-45770428 | CACAGAAGCCGCGCCCACCGCCTGC | SpCas9 |
| 3838 | DMPK 5 reverse 19:45770401-45770428 | ACAGAAGCCGCGCCCACCGCCTGC | SpCas9 |
| 3839 | DMPK 5 reverse 19:45770402-45770428 | CAGAAGCCGCGCCCACCGCCTGC | SpCas9 |
| 3840 | DMPK 5 reverse 19:45770403-45770428 | AGAAGCCGCGCCCACCGCCTGC | SpCas9 |
| 3841 | DMPK 5 reverse 19:45770404-45770428 | GAAGCCGCGCCCACCGCCTGC | SpCas9 |
| 3842 | DMPK 5 reverse 19:45770405-45770428 | AAGCCGCGCCCACCGCCTGC | SpCas9 |
| 3843 | DMPK 5 reverse 19:45770406-45770428 | AGCCGCGCCCACCGCCTGC | SpCas9 |
| 3844 | DMPK 5 reverse 19:45770407-45770428 | GCCGCGCCCACCGCCTGC | SpCas9 |
| 3845 | DMPK 5 forward 19:45770411-45770439 | TGGGCGCGGCTTCTGTGCCGTGCCC | SpCas9 |
| 3846 | DMPK 5 forward 19:45770412-45770439 | GGGCGCGGCTTCTGTGCCGTGCCC | SpCas9 |
| 3847 | DMPK 5 forward 19:45770413-45770439 | GGCGCGGCTTCTGTGCCGTGCCC | SpCas9 |
| 3848 | DMPK 5 forward 19:45770414-45770439 | GCGCGGCTTCTGTGCCGTGCCC | SpCas9 |
| 3849 | DMPK 5 forward 19:45770415-45770439 | CGCGGCTTCTGTGCCGTGCCC | SpCas9 |
| 3850 | DMPK 5 forward 19:45770416-45770439 | GCGGCTTCTGTGCCGTGCCC | SpCas9 |
| 3851 | DMPK 5 forward 19:45770417-45770439 | CGGCTTCTGTGCCGTGCCC | SpCas9 |
| 3852 | DMPK 5 forward 19:45770418-45770439 | GGCTTCTGTGCCGTGCCC | SpCas9 |
| 3853 | DMPK 5 forward 19:45770412-45770440 | GGGCGCGGCTTCTGTGCCGTGCCCC | SpCas9 |
| 3854 | DMPK 5 forward 19:45770413-45770440 | GGCGCGGCTTCTGTGCCGTGCCCC | SpCas9 |
| 3855 | DMPK 5 forward 19:45770414-45770440 | GCGCGGCTTCTGTGCCGTGCCCC | SpCas9 |
| 3856 | DMPK 5 forward 19:45770415-45770440 | CGCGGCTTCTGTGCCGTGCCCC | SpCas9 |
| 3857 | DMPK 5 forward 19:45770416-45770440 | GCGGCTTCTGTGCCGTGCCCC | SpCas9 |
| 3858 | DMPK 5 forward 19:45770417-45770440 | CGGCTTCTGTGCCGTGCCCC | SpCas9 |
| 3859 | DMPK 5 forward 19:45770418-45770440 | GGCTTCTGTGCCGTGCCCC | SpCas9 |
| 3860 | DMPK 5 forward 19:45770419-45770440 | GCTTCTGTGCCGTGCCCC | SpCas9 |
| 3861 | DMPK 5 forward 19:45770419-45770447 | GCTTCTGTGCCGTGCCCCGGGCACT | SpCas9 |
| 3862 | DMPK 5 forward 19:45770420-45770447 | CTTCTGTGCCGTGCCCCGGGCACT | SpCas9 |
| 3863 | DMPK 5 forward 19:45770421-45770447 | TTCTGTGCCGTGCCCCGGGCACT | SpCas9 |
| 3864 | DMPK 5 forward 19:45770422-45770447 | TCTGTGCCGTGCCCCGGGCACT | SpCas9 |
| 3865 | DMPK 5 forward 19:45770423-45770447 | CTGTGCCGTGCCCCGGGCACT | SpCas9 |
| 3866 | DMPK 5 forward 19:45770424-45770447 | TGTGCCGTGCCCCGGGCACT | SpCas9 |
| 3867 | DMPK 5 forward 19:45770425-45770447 | GTGCCGTGCCCCGGGCACT | SpCas9 |
| 3868 | DMPK 5 forward 19:45770426-45770447 | TGCCGTGCCCCGGGCACT | SpCas9 |
| 3869 | DMPK 5 reverse 19:45770420-45770448 | ACTGAGTGCCCGGGGCACGGCACAG | SpCas9 |
| 3870 | DMPK 5 reverse 19:45770421-45770448 | CTGAGTGCCCGGGGCACGGCACAG | SpCas9 |
| 3871 | DMPK 5 reverse 19:45770422-45770448 | TGAGTGCCCGGGGCACGGCACAG | SpCas9 |
| 3872 | DMPK 5 reverse 19:45770423-45770448 | GAGTGCCCGGGGCACGGCACAG | SpCas9 |
| 3873 | DMPK 5 reverse 19:45770424-45770448 | AGTGCCCGGGGCACGGCACAG | SpCas9 |
| 3874 | DMPK 5 reverse 19:45770425-45770448 | GTGCCCGGGGCACGGCACAG | SpCas9 |
| 3875 | DMPK 5 reverse 19:45770426-45770448 | TGCCCGGGGCACGGCACAG | SpCas9 |
| 3876 | DMPK 5 reverse 19:45770427-45770448 | GCCCGGGGCACGGCACAG | SpCas9 |
| 3877 | DMPK 5 reverse 19:45770423-45770451 | AAGACTGAGTGCCCGGGGCACGGCA | SpCas9 |
| 3878 | DMPK 5 reverse 19:45770424-45770451 | AGACTGAGTGCCCGGGGCACGGCA | SpCas9 |
| 3879 | DMPK 5 reverse 19:45770425-45770451 | GACTGAGTGCCCGGGGCACGGCA | SpCas9 |
| 3880 | DMPK 5 reverse 19:45770426-45770451 | ACTGAGTGCCCGGGGCACGGCA | SpCas9 |
| 3881 | DMPK 5 reverse 19:45770427-45770451 | CTGAGTGCCCGGGGCACGGCA | SpCas9 |
| 3882 | DMPK 5 reverse 19:45770428-45770451 | TGAGTGCCCGGGGCACGGCA | SpCas9 |
| 3883 | DMPK 5 reverse 19:45770429-45770451 | GAGTGCCCGGGGCACGGCA | SpCas9 |
| 3884 | DMPK 5 reverse 19:45770430-45770451 | AGTGCCCGGGGCACGGCA | SpCas9 |
| 3885 | DMPK 5 reverse 19:45770428-45770456 | GTTGGAAGACTGAGTGCCCGGGGCA | SpCas9 |
| 3886 | DMPK 5 reverse 19:45770429-45770456 | TTGGAAGACTGAGTGCCCGGGGCA | SpCas9 |
| 3887 | DMPK 5 reverse 19:45770430-45770456 | TGGAAGACTGAGTGCCCGGGGCA | SpCas9 |
| 3888 | DMPK 5 reverse 19:45770431-45770456 | GGAAGACTGAGTGCCCGGGGCA | SpCas9 |
| 3889 | DMPK 5 reverse 19:45770432-45770456 | GAAGACTGAGTGCCCGGGGCA | SpCas9 |
| 3890 | DMPK 5 reverse 19:45770433-45770456 | AAGACTGAGTGCCCGGGGCA | SpCas9 |
| 3891 | DMPK 5 reverse 19:45770434-45770456 | AGACTGAGTGCCCGGGGCA | SpCas9 |
| 3892 | DMPK 5 reverse 19:45770435-45770456 | GACTGAGTGCCCGGGGCA | SpCas9 |
| 3893 | DMPK 5 forward 19:45770430-45770458 | GTGCCCCGGGCACTCAGTCTTCCAA | SpCas9 |
| 3894 | DMPK 5 forward 19:45770431-45770458 | TGCCCCGGGCACTCAGTCTTCCAA | SpCas9 |
| 3895 | DMPK 5 forward 19:45770432-45770458 | GCCCCGGGCACTCAGTCTTCCAA | SpCas9 |
| 3896 | DMPK 5 forward 19:45770433-45770458 | CCCCGGGCACTCAGTCTTCCAA | SpCas9 |
| 3897 | DMPK 5 forward 19:45770434-45770458 | CCCGGGCACTCAGTCTTCCAA | SpCas9 |
| 3898 | DMPK 5 forward 19:45770435-45770458 | CCGGGCACTCAGTCTTCCAA | SpCas9 |
| 3899 | DMPK 5 forward 19:45770436-45770458 | CGGGCACTCAGTCTTCCAA | SpCas9 |
| 3900 | DMPK 5 forward 19:45770437-45770458 | GGGCACTCAGTCTTCCAA | SpCas9 |
| 3901 | DMPK 5 forward 19:45770431-45770459 | TGCCCCGGGCACTCAGTCTTCCAAC | SpCas9 |
| 3902 | DMPK 5 forward 19:45770432-45770459 | GCCCCGGGCACTCAGTCTTCCAAC | SpCas9 |
| 3903 | DMPK 5 forward 19:45770433-45770459 | CCCCGGGCACTCAGTCTTCCAAC | SpCas9 |
| 3904 | DMPK 5 forward 19:45770434-45770459 | CCCGGGCACTCAGTCTTCCAAC | SpCas9 |
| 3905 | DMPK 5 forward 19:45770435-45770459 | CCGGGCACTCAGTCTTCCAAC | SpCas9 |
| 3906 | DMPK 5 forward 19:45770436-45770459 | CGGGCACTCAGTCTTCCAAC | SpCas9 |
| 3907 | DMPK 5 forward 19:45770437-45770459 | GGGCACTCAGTCTTCCAAC | SpCas9 |
| 3908 | DMPK 5 forward 19:45770438-45770459 | GGCACTCAGTCTTCCAAC | SpCas9 |
| 3909 | DMPK 5 forward 19:45770432-45770460 | GCCCCGGGCACTCAGTCTTCCAACG | SpCas9 |
| 3910 | DMPK 5 forward 19:45770433-45770460 | CCCCGGGCACTCAGTCTTCCAACG | SpCas9 |
| 3911 | DMPK 5 forward 19:45770434-45770460 | CCCGGGCACTCAGTCTTCCAACG | SpCas9 |
| 3912 | DMPK 5 forward 19:45770435-45770460 | CCGGGCACTCAGTCTTCCAACG | SpCas9 |
| 3913 | DMPK 5 forward 19:45770436-45770460 | CGGGCACTCAGTCTTCCAACG | SpCas9 |
| 3914 | DMPK 5 forward 19:45770437-45770460 | GGGCACTCAGTCTTCCAACG | SpCas9 |
| 3915 | DMPK 5 forward 19:45770438-45770460 | GGCACTCAGTCTTCCAACG | SpCas9 |
| 3916 | DMPK 5 forward 19:45770439-45770460 | GCACTCAGTCTTCCAACG | SpCas9 |
| 3917 | DMPK 5 reverse 19:45770433-45770461 | GCCCCGTTGGAAGACTGAGTGCCCG | SpCas9 |
| 3918 | DMPK 5 reverse 19:45770434-45770461 | CCCCGTTGGAAGACTGAGTGCCCG | SpCas9 |
| 3919 | DMPK 5 reverse 19:45770435-45770461 | CCCGTTGGAAGACTGAGTGCCCG | SpCas9 |
| 3920 | DMPK 5 reverse 19:45770436-45770461 | CCGTTGGAAGACTGAGTGCCCG | SpCas9 |
| 3921 | DMPK 5 reverse 19:45770437-45770461 | CGTTGGAAGACTGAGTGCCCG | SpCas9 |
| 3922 | DMPK 5 reverse 19:45770438-45770461 | GTTGGAAGACTGAGTGCCCG | SpCas9 |
| 3923 | DMPK 5 reverse 19:45770439-45770461 | TTGGAAGACTGAGTGCCCG | SpCas9 |
| 3924 | DMPK 5 reverse 19:45770440-45770461 | TGGAAGACTGAGTGCCCG | SpCas9 |
| 3925 | DMPK 5 reverse 19:45770434-45770462 | GGCCCCGTTGGAAGACTGAGTGCCC | SpCas9 |
| 3926 | DMPK 5 reverse 19:45770435-45770462 | GCCCCGTTGGAAGACTGAGTGCCC | SpCas9 |
| 3927 | DMPK 5 reverse 19:45770436-45770462 | CCCCGTTGGAAGACTGAGTGCCC | SpCas9 |
| 3928 | DMPK 5 reverse 19:45770437-45770462 | CCCGTTGGAAGACTGAGTGCCC | SpCas9 |
| 3929 | DMPK 5 reverse 19:45770438-45770462 | CCGTTGGAAGACTGAGTGCCC | SpCas9 |
| 3930 | DMPK 5 reverse 19:45770439-45770462 | CGTTGGAAGACTGAGTGCCC | SpCas9 |
| 3931 | DMPK 5 reverse 19:45770440-45770462 | GTTGGAAGACTGAGTGCCC | SpCas9 |
| 3932 | DMPK 5 reverse 19:45770441-45770462 | TTGGAAGACTGAGTGCCC | SpCas9 |
| 3933 | DMPK 5 reverse 19:45770435-45770463 | GGGCCCCGTTGGAAGACTGAGTGCC | SpCas9 |
| 3934 | DMPK 5 reverse 19:45770436-45770463 | GGCCCCGTTGGAAGACTGAGTGCC | SpCas9 |
| 3935 | DMPK 5 reverse 19:45770437-45770463 | GCCCCGTTGGAAGACTGAGTGCC | SpCas9 |
| 3936 | DMPK 5 reverse 19:45770438-45770463 | CCCCGTTGGAAGACTGAGTGCC | SpCas9 |
| 3937 | DMPK 5 reverse 19:45770439-45770463 | CCCGTTGGAAGACTGAGTGCC | SpCas9 |
| 3938 | DMPK 5 reverse 19:45770440-45770463 | CCGTTGGAAGACTGAGTGCC | SpCas9 |
| 3939 | DMPK 5 reverse 19:45770441-45770463 | CGTTGGAAGACTGAGTGCC | SpCas9 |
| 3940 | DMPK 5 reverse 19:45770442-45770463 | GTTGGAAGACTGAGTGCC | SpCas9 |
| 3941 | DMPK 5 forward 19:45770438-45770466 | GGCACTCAGTCTTCCAACGGGGCCC | SpCas9 |
| 3942 | DMPK 5 forward 19:45770439-45770466 | GCACTCAGTCTTCCAACGGGGCCC | SpCas9 |
| 3943 | DMPK 5 forward 19:45770440-45770466 | CACTCAGTCTTCCAACGGGGCCC | SpCas9 |
| 3944 | DMPK 5 forward 19:45770441-45770466 | ACTCAGTCTTCCAACGGGGCCC | SpCas9 |
| 3945 | DMPK 5 forward 19:45770442-45770466 | CTCAGTCTTCCAACGGGGCCC | SpCas9 |
| 3946 | DMPK 5 forward 19:45770443-45770466 | TCAGTCTTCCAACGGGGCCC | SpCas9 |
| 3947 | DMPK 5 forward 19:45770444-45770466 | CAGTCTTCCAACGGGGCCC | SpCas9 |
| 3948 | DMPK 5 forward 19:45770445-45770466 | AGTCTTCCAACGGGGCCC | SpCas9 |
| 3949 | DMPK 5 forward 19:45770440-45770468 | CACTCAGTCTTCCAACGGGGCCCCG | SpCas9 |
| 3950 | DMPK 5 forward 19:45770441-45770468 | ACTCAGTCTTCCAACGGGGCCCCG | SpCas9 |
| 3951 | DMPK 5 forward 19:45770442-45770468 | CTCAGTCTTCCAACGGGGCCCCG | SpCas9 |
| 3952 | DMPK 5 forward 19:45770443-45770468 | TCAGTCTTCCAACGGGGCCCCG | SpCas9 |
| 3953 | DMPK 5 forward 19:45770444-45770468 | CAGTCTTCCAACGGGGCCCCG | SpCas9 |
| 3954 | DMPK 5 forward 19:45770445-45770468 | AGTCTTCCAACGGGGCCCCG | SpCas9 |
| 3955 | DMPK 5 forward 19:45770446-45770468 | GTCTTCCAACGGGGCCCCG | SpCas9 |
| 3956 | DMPK 5 forward 19:45770447-45770468 | TCTTCCAACGGGGCCCCG | SpCas9 |
| 3957 | DMPK 5 reverse 19:45770442-45770470 | GACTCCGGGGCCCCGTTGGAAGACT | SpCas9 |
| 3958 | DMPK 5 reverse 19:45770443-45770470 | ACTCCGGGGCCCCGTTGGAAGACT | SpCas9 |
| 3959 | DMPK 5 reverse 19:45770444-45770470 | CTCCGGGGCCCCGTTGGAAGACT | SpCas9 |
| 3960 | DMPK 5 reverse 19:45770445-45770470 | TCCGGGGCCCCGTTGGAAGACT | SpCas9 |
| 3961 | DMPK 5 reverse 19:45770446-45770470 | CCGGGGCCCCGTTGGAAGACT | SpCas9 |
| 3962 | DMPK 5 reverse 19:45770447-45770470 | CGGGGCCCCGTTGGAAGACT | SpCas9 |
| 3963 | DMPK 5 reverse 19:45770448-45770470 | GGGGCCCCGTTGGAAGACT | SpCas9 |
| 3964 | DMPK 5 reverse 19:45770449-45770470 | GGGCCCCGTTGGAAGACT | SpCas9 |
| 3965 | DMPK 5 forward 19:45770446-45770474 | GTCTTCCAACGGGGCCCCGGAGTCG | SpCas9 |
| 3966 | DMPK 5 forward 19:45770447-45770474 | TCTTCCAACGGGGCCCCGGAGTCG | SpCas9 |
| 3967 | DMPK 5 forward 19:45770448-45770474 | CTTCCAACGGGGCCCCGGAGTCG | SpCas9 |
| 3968 | DMPK 5 forward 19:45770449-45770474 | TTCCAACGGGGCCCCGGAGTCG | SpCas9 |
| 3969 | DMPK 5 forward 19:45770450-45770474 | TCCAACGGGGCCCCGGAGTCG | SpCas9 |
| 3970 | DMPK 5 forward 19:45770451-45770474 | CCAACGGGGCCCCGGAGTCG | SpCas9 |
| 3971 | DMPK 5 forward 19:45770452-45770474 | CAACGGGGCCCCGGAGTCG | SpCas9 |
| 3972 | DMPK 5 forward 19:45770453-45770474 | AACGGGGCCCCGGAGTCG | SpCas9 |
| 3973 | DMPK 5 reverse 19:45770448-45770476 | GTCTTCGACTCCGGGGCCCCGTTGG | SpCas9 |
| 3974 | DMPK 5 reverse 19:45770449-45770476 | TCTTCGACTCCGGGGCCCCGTTGG | SpCas9 |
| 3975 | DMPK 5 reverse 19:45770450-45770476 | CTTCGACTCCGGGGCCCCGTTGG | SpCas9 |
| 3976 | DMPK 5 reverse 19:45770451-45770476 | TTCGACTCCGGGGCCCCGTTGG | SpCas9 |
| 3977 | DMPK 5 reverse 19:45770452-45770476 | TCGACTCCGGGGCCCCGTTGG | SpCas9 |
| 3978 | DMPK 5 reverse 19:45770453-45770476 | CGACTCCGGGGCCCCGTTGG | SpCas9 |
| 3979 | DMPK 5 reverse 19:45770454-45770476 | GACTCCGGGGCCCCGTTGG | SpCas9 |
| 3980 | DMPK 5 reverse 19:45770455-45770476 | ACTCCGGGGCCCCGTTGG | SpCas9 |
| 3981 | DMPK 5 forward 19:45770450-45770478 | TCCAACGGGGCCCCGGAGTCGAAGA | SpCas9 |
| 3982 | DMPK 5 forward 19:45770451-45770478 | CCAACGGGGCCCCGGAGTCGAAGA | SpCas9 |
| 3983 | DMPK 5 forward 19:45770452-45770478 | CAACGGGGCCCCGGAGTCGAAGA | SpCas9 |
| 3984 | DMPK 5 forward 19:45770453-45770478 | AACGGGGCCCCGGAGTCGAAGA | SpCas9 |
| 3985 | DMPK 5 forward 19:45770454-45770478 | ACGGGGCCCCGGAGTCGAAGA | SpCas9 |
| 3986 | DMPK 5 forward 19:45770455-45770478 | CGGGGCCCCGGAGTCGAAGA | SpCas9 |
| 3987 | DMPK 5 forward 19:45770456-45770478 | GGGGCCCCGGAGTCGAAGA | SpCas9 |
| 3988 | DMPK 5 forward 19:45770457-45770478 | GGGCCCCGGAGTCGAAGA | SpCas9 |
| 3989 | DMPK 5 reverse 19:45770451-45770479 | ACTGTCTTCGACTCCGGGGCCCCGT | SpCas9 |
| 3990 | DMPK 5 reverse 19:45770452-45770479 | CTGTCTTCGACTCCGGGGCCCCGT | SpCas9 |
| 3991 | DMPK 5 reverse 19:45770453-45770479 | TGTCTTCGACTCCGGGGCCCCGT | SpCas9 |
| 3992 | DMPK 5 reverse 19:45770454-45770479 | GTCTTCGACTCCGGGGCCCCGT | SpCas9 |
| 3993 | DMPK 5 reverse 19:45770455-45770479 | TCTTCGACTCCGGGGCCCCGT | SpCas9 |
| 3994 | DMPK 5 reverse 19:45770456-45770479 | CTTCGACTCCGGGGCCCCGT | SpCas9 |
| 3995 | DMPK 5 reverse 19:45770457-45770479 | TTCGACTCCGGGGCCCCGT | SpCas9 |
| 3996 | DMPK 5 reverse 19:45770458-45770479 | TCGACTCCGGGGCCCCGT | SpCas9 |
| 3997 | DMPK 5 forward 19:45770456-45770484 | GGGGCCCCGGAGTCGAAGACAGTTC | SpCas9 |
| 3998 | DMPK 5 forward 19:45770457-45770484 | GGGCCCCGGAGTCGAAGACAGTTC | SpCas9 |
| 3999 | DMPK 5 forward 19:45770458-45770484 | GGCCCCGGAGTCGAAGACAGTTC | SpCas9 |
| 4000 | DMPK 5 forward 19:45770459-45770484 | GCCCCGGAGTCGAAGACAGTTC | SpCas9 |
| 4001 | DMPK 5 forward 19:45770460-45770484 | CCCCGGAGTCGAAGACAGTTC | SpCas9 |
| 4002 | DMPK 5 forward 19:45770461-45770484 | CCCGGAGTCGAAGACAGTTC | SpCas9 |
| 4003 | DMPK 5 forward 19:45770462-45770484 | CCGGAGTCGAAGACAGTTC | SpCas9 |
| 4004 | DMPK 5 forward 19:45770463-45770484 | CGGAGTCGAAGACAGTTC | SpCas9 |
| 4005 | DMPK 5 forward 19:45770457-45770485 | GGGCCCCGGAGTCGAAGACAGTTCT | SpCas9 |
| 4006 | DMPK 5 forward 19:45770458-45770485 | GGCCCCGGAGTCGAAGACAGTTCT | SpCas9 |
| 4007 | DMPK 5 forward 19:45770459-45770485 | GCCCCGGAGTCGAAGACAGTTCT | SpCas9 |
| 4008 | DMPK 5 forward 19:45770460-45770485 | CCCCGGAGTCGAAGACAGTTCT | SpCas9 |
| 4009 | DMPK 5 forward 19:45770461-45770485 | CCCGGAGTCGAAGACAGTTCT | SpCas9 |
| 4010 | DMPK 5 forward 19:45770462-45770485 | CCGGAGTCGAAGACAGTTCT | SpCas9 |
| 4011 | DMPK 5 forward 19:45770463-45770485 | CGGAGTCGAAGACAGTTCT | SpCas9 |
| 4012 | DMPK 5 forward 19:45770464-45770485 | GGAGTCGAAGACAGTTCT | SpCas9 |
| 4013 | DMPK 5 forward 19:45770458-45770486 | GGCCCCGGAGTCGAAGACAGTTCTA | SpCas9 |
| 4014 | DMPK 5 forward 19:45770459-45770486 | GCCCCGGAGTCGAAGACAGTTCTA | SpCas9 |
| 4015 | DMPK 5 forward 19:45770460-45770486 | CCCCGGAGTCGAAGACAGTTCTA | SpCas9 |
| 4016 | DMPK 5 forward 19:45770461-45770486 | CCCGGAGTCGAAGACAGTTCTA | SpCas9 |
| 4017 | DMPK 5 forward 19:45770462-45770486 | CCGGAGTCGAAGACAGTTCTA | SpCas9 |
| 4018 | DMPK 5 forward 19:45770463-45770486 | CGGAGTCGAAGACAGTTCTA | SpCas9 |
| 4019 | DMPK 5 forward 19:45770464-45770486 | GGAGTCGAAGACAGTTCTA | SpCas9 |
| 4020 | DMPK 5 forward 19:45770465-45770486 | GAGTCGAAGACAGTTCTA | SpCas9 |
| 4021 | DMPK 5 reverse 19:45770460-45770488 | AACCCTAGAACTGTCTTCGACTCCG | SpCas9 |
| 4022 | DMPK 5 reverse 19:45770461-45770488 | ACCCTAGAACTGTCTTCGACTCCG | SpCas9 |
| 4023 | DMPK 5 reverse 19:45770462-45770488 | CCCTAGAACTGTCTTCGACTCCG | SpCas9 |
| 4024 | DMPK 5 reverse 19:45770463-45770488 | CCTAGAACTGTCTTCGACTCCG | SpCas9 |
| 4025 | DMPK 5 reverse 19:45770464-45770488 | CTAGAACTGTCTTCGACTCCG | SpCas9 |
| 4026 | DMPK 5 reverse 19:45770465-45770488 | TAGAACTGTCTTCGACTCCG | SpCas9 |
| 4027 | DMPK 5 reverse 19:45770466-45770488 | AGAACTGTCTTCGACTCCG | SpCas9 |
| 4028 | DMPK 5 reverse 19:45770467-45770488 | GAACTGTCTTCGACTCCG | SpCas9 |
| 4029 | DMPK 5 reverse 19:45770461-45770489 | GAACCCTAGAACTGTCTTCGACTCC | SpCas9 |
| 4030 | DMPK 5 reverse 19:45770462-45770489 | AACCCTAGAACTGTCTTCGACTCC | SpCas9 |
| 4031 | DMPK 5 reverse 19:45770463-45770489 | ACCCTAGAACTGTCTTCGACTCC | SpCas9 |
| 4032 | DMPK 5 reverse 19:45770464-45770489 | CCCTAGAACTGTCTTCGACTCC | SpCas9 |
| 4033 | DMPK 5 reverse 19:45770465-45770489 | CCTAGAACTGTCTTCGACTCC | SpCas9 |
| 4034 | DMPK 5 reverse 19:45770466-45770489 | CTAGAACTGTCTTCGACTCC | SpCas9 |
| 4035 | DMPK 5 reverse 19:45770467-45770489 | TAGAACTGTCTTCGACTCC | SpCas9 |
| 4036 | DMPK 5 reverse 19:45770468-45770489 | AGAACTGTCTTCGACTCC | SpCas9 |
| 4037 | DMPK 5 reverse 19:45770462-45770490 | TGAACCCTAGAACTGTCTTCGACTC | SpCas9 |
| 4038 | DMPK 5 reverse 19:45770463-45770490 | GAACCCTAGAACTGTCTTCGACTC | SpCas9 |
| 4039 | DMPK 5 reverse 19:45770464-45770490 | AACCCTAGAACTGTCTTCGACTC | SpCas9 |
| 4040 | DMPK 5 reverse 19:45770465-45770490 | ACCCTAGAACTGTCTTCGACTC | SpCas9 |
| 4041 | DMPK 5 reverse 19:45770466-45770490 | CCCTAGAACTGTCTTCGACTC | SpCas9 |
| 4042 | DMPK 5 reverse 19:45770467-45770490 | CCTAGAACTGTCTTCGACTC | SpCas9 |
| 4043 | DMPK 5 reverse 19:45770468-45770490 | CTAGAACTGTCTTCGACTC | SpCas9 |
| 4044 | DMPK 5 reverse 19:45770469-45770490 | TAGAACTGTCTTCGACTC | SpCas9 |
| 4045 | DMPK 5 forward 19:45770463-45770491 | CGGAGTCGAAGACAGTTCTAGGGTT | SpCas9 |
| 4046 | DMPK 5 forward 19:45770464-45770491 | GGAGTCGAAGACAGTTCTAGGGTT | SpCas9 |
| 4047 | DMPK 5 forward 19:45770465-45770491 | GAGTCGAAGACAGTTCTAGGGTT | SpCas9 |
| 4048 | DMPK 5 forward 19:45770466-45770491 | AGTCGAAGACAGTTCTAGGGTT | SpCas9 |
| 4049 | DMPK 5 forward 19:45770467-45770491 | GTCGAAGACAGTTCTAGGGTT | SpCas9 |
| 4050 | DMPK 5 forward 19:45770468-45770491 | TCGAAGACAGTTCTAGGGTT | SpCas9 |
| 4051 | DMPK 5 forward 19:45770469-45770491 | CGAAGACAGTTCTAGGGTT | SpCas9 |
| 4052 | DMPK 5 forward 19:45770470-45770491 | GAAGACAGTTCTAGGGTT | SpCas9 |
| 4053 | DMPK 5 forward 19:45770464-45770492 | GGAGTCGAAGACAGTTCTAGGGTTC | SpCas9 |
| 4054 | DMPK 5 forward 19:45770465-45770492 | GAGTCGAAGACAGTTCTAGGGTTC | SpCas9 |
| 4055 | DMPK 5 forward 19:45770466-45770492 | AGTCGAAGACAGTTCTAGGGTTC | SpCas9 |
| 4056 | DMPK 5 forward 19:45770467-45770492 | GTCGAAGACAGTTCTAGGGTTC | SpCas9 |
| 4057 | DMPK 5 forward 19:45770468-45770492 | TCGAAGACAGTTCTAGGGTTC | SpCas9 |
| 4058 | DMPK 5 forward 19:45770469-45770492 | CGAAGACAGTTCTAGGGTTC | SpCas9 |
| 4059 | DMPK 5 forward 19:45770470-45770492 | GAAGACAGTTCTAGGGTTC | SpCas9 |
| 4060 | DMPK 5 forward 19:45770471-45770492 | AAGACAGTTCTAGGGTTC | SpCas9 |
| 4061 | DMPK 5 forward 19:45770465-45770493 | GAGTCGAAGACAGTTCTAGGGTTCA | SpCas9 |
| 4062 | DMPK 5 forward 19:45770466-45770493 | AGTCGAAGACAGTTCTAGGGTTCA | SpCas9 |
| 4063 | DMPK 5 forward 19:45770467-45770493 | GTCGAAGACAGTTCTAGGGTTCA | SpCas9 |
| 4064 | DMPK 5 forward 19:45770468-45770493 | TCGAAGACAGTTCTAGGGTTCA | SpCas9 |
| 4065 | DMPK 5 forward 19:45770469-45770493 | CGAAGACAGTTCTAGGGTTCA | SpCas9 |
| 4066 | DMPK 5 forward 19:45770470-45770493 | GAAGACAGTTCTAGGGTTCA | SpCas9 |
| 4067 | DMPK 5 forward 19:45770471-45770493 | AAGACAGTTCTAGGGTTCA | SpCas9 |
| 4068 | DMPK 5 forward 19:45770472-45770493 | AGACAGTTCTAGGGTTCA | SpCas9 |
| 4069 | DMPK 5 reverse 19:45770480-45770508 | GGAGCCGCCCGCGCTCCCTGAACCC | SpCas9 |
| 4070 | DMPK 5 reverse 19:45770481-45770508 | GAGCCGCCCGCGCTCCCTGAACCC | SpCas9 |
| 4071 | DMPK 5 reverse 19:45770482-45770508 | AGCCGCCCGCGCTCCCTGAACCC | SpCas9 |
| 4072 | DMPK 5 reverse 19:45770483-45770508 | GCCGCCCGCGCTCCCTGAACCC | SpCas9 |
| 4073 | DMPK 5 reverse 19:45770484-45770508 | CCGCCCGCGCTCCCTGAACCC | SpCas9 |
| 4074 | DMPK 5 reverse 19:45770485-45770508 | CGCCCGCGCTCCCTGAACCC | SpCas9 |
| 4075 | DMPK 5 reverse 19:45770486-45770508 | GCCCGCGCTCCCTGAACCC | SpCas9 |
| 4076 | DMPK 5 reverse 19:45770487-45770508 | CCCGCGCTCCCTGAACCC | SpCas9 |
| 4077 | DMPK O reverse 19:45770583-45770605 | CCTGCTCCTGTTCGCCGT | As/LbCpf1 |
| 4078 | DMPK O reverse 19:45770583-45770606 | CCTGCTCCTGTTCGCCGTT | As/LbCpf1 |
| 4079 | DMPK O reverse 19:45770583-45770607 | CCTGCTCCTGTTCGCCGTTG | As/LbCpf1 |
| 4080 | DMPK O reverse 19:45770583-45770608 | CCTGCTCCTGTTCGCCGTTGT | As/LbCpf1 |
| 4081 | DMPK O reverse 19:45770583-45770609 | CCTGCTCCTGTTCGCCGTTGTT | As/LbCpf1 |
| 4082 | DMPK O reverse 19:45770583-45770610 | CCTGCTCCTGTTCGCCGTTGTTC | As/LbCpf1 |
| 4083 | DMPK O reverse 19:45770583-45770611 | CCTGCTCCTGTTCGCCGTTGTTCT | As/LbCpf1 |
| 4084 | DMPK O reverse 19:45770583-45770612 | CCTGCTCCTGTTCGCCGTTGTTCTG | As/LbCpf1 |
| 4085 | DMPK O reverse 19:45769669-45769691 | CGGTTTGCGTTGTGGGCC | AsCpf1-1 |
| 4086 | DMPK O reverse 19:45769669-45769692 | CGGTTTGCGTTGTGGGCCG | AsCpf1-1 |
| 4087 | DMPK O reverse 19:45769669-45769693 | CGGTTTGCGTTGTGGGCCGG | AsCpf1-1 |
| 4088 | DMPK O reverse 19:45769669-45769694 | CGGTTTGCGTTGTGGGCCGGA | AsCpf1-1 |
| 4089 | DMPK O reverse 19:45769669-45769695 | CGGTTTGCGTTGTGGGCCGGAG | AsCpf1-1 |
| 4090 | DMPK O reverse 19:45769669-45769696 | CGGTTTGCGTTGTGGGCCGGAGG | AsCpf1-1 |
| 4091 | DMPK O reverse 19:45769669-45769697 | CGGTTTGCGTTGTGGGCCGGAGGC | AsCpf1-1 |
| 4092 | DMPK O reverse 19:45769669-45769698 | CGGTTTGCGTTGTGGGCCGGAGGCT | AsCpf1-1 |
| 4093 | DMPK O forward 19:45769673-45769695 | GCCCACAACGCAAACCGC | AsCpf1-1 |
| 4094 | DMPK O forward 19:45769673-45769696 | GCCCACAACGCAAACCGCG | AsCpf1-1 |
| 4095 | DMPK O forward 19:45769673-45769697 | GCCCACAACGCAAACCGCGG | AsCpf1-1 |
| 4096 | DMPK O forward 19:45769673-45769698 | GCCCACAACGCAAACCGCGGA | AsCpf1-1 |
| 4097 | DMPK O forward 19:45769673-45769699 | GCCCACAACGCAAACCGCGGAC | AsCpf1-1 |
| 4098 | DMPK O forward 19:45769673-45769700 | GCCCACAACGCAAACCGCGGACA | AsCpf1-1 |
| 4099 | DMPK O forward 19:45769673-45769701 | GCCCACAACGCAAACCGCGGACAC | AsCpf1-1 |
| 4100 | DMPK O forward 19:45769673-45769702 | GCCCACAACGCAAACCGCGGACACT | AsCpf1-1 |
| 4101 | DMPK O reverse 19:45769678-45769700 | CAGTGTCCGCGGTTTGCG | AsCpf1-1 |
| 4102 | DMPK O reverse 19:45769678-45769701 | CAGTGTCCGCGGTTTGCGT | AsCpf1-1 |
| 4103 | DMPK O reverse 19:45769678-45769702 | CAGTGTCCGCGGTTTGCGTT | AsCpf1-1 |
| 4104 | DMPK O reverse 19:45769678-45769703 | CAGTGTCCGCGGTTTGCGTTG | AsCpf1-1 |
| 4105 | DMPK O reverse 19:45769678-45769704 | CAGTGTCCGCGGTTTGCGTTGT | AsCpf1-1 |
| 4106 | DMPK O reverse 19:45769678-45769705 | CAGTGTCCGCGGTTTGCGTTGTG | AsCpf1-1 |
| 4107 | DMPK O reverse 19:45769678-45769706 | CAGTGTCCGCGGTTTGCGTTGTGG | AsCpf1-1 |
| 4108 | DMPK O reverse 19:45769678-45769707 | CAGTGTCCGCGGTTTGCGTTGTGGG | AsCpf1-1 |
| 4109 | DMPK O reverse 19:45769701-45769723 | TCTGCCCAAAGCTCTGGA | AsCpf1-1 |
| 4110 | DMPK O reverse 19:45769701-45769724 | TCTGCCCAAAGCTCTGGAC | AsCpf1-1 |
| 4111 | DMPK O reverse 19:45769701-45769725 | TCTGCCCAAAGCTCTGGACT | AsCpf1-1 |
| 4112 | DMPK O reverse 19:45769701-45769726 | TCTGCCCAAAGCTCTGGACTC | AsCpf1-1 |
| 4113 | DMPK O reverse 19:45769701-45769727 | TCTGCCCAAAGCTCTGGACTCC | AsCpf1-1 |
| 4114 | DMPK O reverse 19:45769701-45769728 | TCTGCCCAAAGCTCTGGACTCCA | AsCpf1-1 |
| 4115 | DMPK O reverse 19:45769701-45769729 | TCTGCCCAAAGCTCTGGACTCCAC | AsCpf1-1 |
| 4116 | DMPK O reverse 19:45769701-45769730 | TCTGCCCAAAGCTCTGGACTCCACA | AsCpf1-1 |
| 4117 | DMPK O forward 19:45770486-45770508 | GGGAGCGCGGGCGGCTCC | AsCpf1-1 |
| 4118 | DMPK O forward 19:45770486-45770509 | GGGAGCGCGGGCGGCTCCT | AsCpf1-1 |
| 4119 | DMPK O forward 19:45770486-45770510 | GGGAGCGCGGGCGGCTCCTG | AsCpf1-1 |
| 4120 | DMPK O forward 19:45770486-45770511 | GGGAGCGCGGGCGGCTCCTGG | AsCpf1-1 |
| 4121 | DMPK O forward 19:45770486-45770512 | GGGAGCGCGGGCGGCTCCTGGG | AsCpf1-1 |
| 4122 | DMPK O forward 19:45770486-45770513 | GGGAGCGCGGGCGGCTCCTGGGC | AsCpf1-1 |
| 4123 | DMPK O forward 19:45770486-45770514 | GGGAGCGCGGGCGGCTCCTGGGCG | AsCpf1-1 |
| 4124 | DMPK O forward 19:45770486-45770515 | GGGAGCGCGGGCGGCTCCTGGGCGG | AsCpf1-1 |
| 4125 | DMPK O reverse 19:45770569-45770591 | CCGTTGTTCTGTCTCGTG | AsCpf1-1 |
| 4126 | DMPK O reverse 19:45770569-45770592 | CCGTTGTTCTGTCTCGTGC | AsCpf1-1 |
| 4127 | DMPK O reverse 19:45770569-45770593 | CCGTTGTTCTGTCTCGTGCC | AsCpf1-1 |
| 4128 | DMPK O reverse 19:45770569-45770594 | CCGTTGTTCTGTCTCGTGCCG | AsCpf1-1 |
| 4129 | DMPK O reverse 19:45770569-45770595 | CCGTTGTTCTGTCTCGTGCCGC | AsCpf1-1 |
| 4130 | DMPK O reverse 19:45770569-45770596 | CCGTTGTTCTGTCTCGTGCCGCC | AsCpf1-1 |
| 4131 | DMPK O reverse 19:45770569-45770597 | CCGTTGTTCTGTCTCGTGCCGCCG | AsCpf1-1 |
| 4132 | DMPK O reverse 19:45770569-45770598 | CCGTTGTTCTGTCTCGTGCCGCCGC | AsCpf1-1 |
| 4133 | DMPK O reverse 19:45770581-45770603 | TGCTCCTGTTCGCCGTTG | AsCpf1-1 |
| 4134 | DMPK O reverse 19:45770581-45770604 | TGCTCCTGTTCGCCGTTGT | AsCpf1-1 |
| 4135 | DMPK O reverse 19:45770581-45770605 | TGCTCCTGTTCGCCGTTGTT | AsCpf1-1 |
| 4136 | DMPK O reverse 19:45770581-45770606 | TGCTCCTGTTCGCCGTTGTTC | AsCpf1-1 |
| 4137 | DMPK O reverse 19:45770581-45770607 | TGCTCCTGTTCGCCGTTGTTCT | AsCpf1-1 |
| 4138 | DMPK O reverse 19:45770581-45770608 | TGCTCCTGTTCGCCGTTGTTCTG | AsCpf1-1 |
| 4139 | DMPK O reverse 19:45770581-45770609 | TGCTCCTGTTCGCCGTTGTTCTGT | AsCpf1-1 |
| 4140 | DMPK O reverse 19:45770581-45770610 | TGCTCCTGTTCGCCGTTGTTCTGTC | AsCpf1-1 |
| 4141 | DMPK O reverse 19:45770582-45770604 | CTGCTCCTGTTCGCCGTT | AsCpf1-1 |
| 4142 | DMPK O reverse 19:45770582-45770605 | CTGCTCCTGTTCGCCGTTG | AsCpf1-1 |
| 4143 | DMPK O reverse 19:45770582-45770606 | CTGCTCCTGTTCGCCGTTGT | AsCpf1-1 |
| 4144 | DMPK O reverse 19:45770582-45770607 | CTGCTCCTGTTCGCCGTTGTT | AsCpf1-1 |
| 4145 | DMPK O reverse 19:45770582-45770608 | CTGCTCCTGTTCGCCGTTGTTC | AsCpf1-1 |
| 4146 | DMPK O reverse 19:45770582-45770609 | CTGCTCCTGTTCGCCGTTGTTCT | AsCpf1-1 |
| 4147 | DMPK O reverse 19:45770582-45770610 | CTGCTCCTGTTCGCCGTTGTTCTG | AsCpf1-1 |
| 4148 | DMPK O reverse 19:45770582-45770611 | CTGCTCCTGTTCGCCGTTGTTCTGT | AsCpf1-1 |
| 4149 | DMPK O reverse 19:45770610-45770632 | TAGGCCTGGCCTATCGGA | AsCpf1-1 |
| 4150 | DMPK O reverse 19:45770610-45770633 | TAGGCCTGGCCTATCGGAG | AsCpf1-1 |
| 4151 | DMPK O reverse 19:45770610-45770634 | TAGGCCTGGCCTATCGGAGG | AsCpf1-1 |
| 4152 | DMPK O reverse 19:45770610-45770635 | TAGGCCTGGCCTATCGGAGGC | AsCpf1-1 |
| 4153 | DMPK O reverse 19:45770610-45770636 | TAGGCCTGGCCTATCGGAGGCG | AsCpf1-1 |
| 4154 | DMPK O reverse 19:45770610-45770637 | TAGGCCTGGCCTATCGGAGGCGC | AsCpf1-1 |
| 4155 | DMPK O reverse 19:45770610-45770638 | TAGGCCTGGCCTATCGGAGGCGCT | AsCpf1-1 |
| 4156 | DMPK O reverse 19:45770610-45770639 | TAGGCCTGGCCTATCGGAGGCGCTT | AsCpf1-1 |
| 4157 | DMPK O reverse 19:45770595-45770617 | GGAGGCGCTTTCCCTGCT | AsCpf1-2 |
| 4158 | DMPK O reverse 19:45770595-45770618 | GGAGGCGCTTTCCCTGCTC | AsCpf1-2 |
| 4159 | DMPK O reverse 19:45770595-45770619 | GGAGGCGCTTTCCCTGCTCC | AsCpf1-2 |
| 4160 | DMPK O reverse 19:45770595-45770620 | GGAGGCGCTTTCCCTGCTCCT | AsCpf1-2 |
| 4161 | DMPK O reverse 19:45770595-45770621 | GGAGGCGCTTTCCCTGCTCCTG | AsCpf1-2 |
| 4162 | DMPK O reverse 19:45770595-45770622 | GGAGGCGCTTTCCCTGCTCCTGT | AsCpf1-2 |
| 4163 | DMPK O reverse 19:45770595-45770623 | GGAGGCGCTTTCCCTGCTCCTGTT | AsCpf1-2 |
| 4164 | DMPK O reverse 19:45770595-45770624 | GGAGGCGCTTTCCCTGCTCCTGTTC | AsCpf1-2 |
| 4165 | DMPK O forward 19:45769668-45769699 | GAGCCTCCGGCCCACAACGCAAACC | SaCas9 |
| 4166 | DMPK O forward 19:45769669-45769699 | AGCCTCCGGCCCACAACGCAAACC | SaCas9 |
| 4167 | DMPK O forward 19:45769670-45769699 | GCCTCCGGCCCACAACGCAAACC | SaCas9 |
| 4168 | DMPK O forward 19:45769671-45769699 | CCTCCGGCCCACAACGCAAACC | SaCas9 |
| 4169 | DMPK O forward 19:45769672-45769699 | CTCCGGCCCACAACGCAAACC | SaCas9 |
| 4170 | DMPK O forward 19:45769673-45769699 | TCCGGCCCACAACGCAAACC | SaCas9 |
| 4171 | DMPK O forward 19:45769674-45769699 | CCGGCCCACAACGCAAACC | SaCas9 |
| 4172 | DMPK O forward 19:45769675-45769699 | CGGCCCACAACGCAAACC | SaCas9 |
| 4173 | DMPK O reverse 19:45769671-45769702 | AGTGTCCGCGGTTTGCGTTGTGGGC | SaCas9 |
| 4174 | DMPK O reverse 19:45769672-45769702 | GTGTCCGCGGTTTGCGTTGTGGGC | SaCas9 |
| 4175 | DMPK O reverse 19:45769673-45769702 | TGTCCGCGGTTTGCGTTGTGGGC | SaCas9 |
| 4176 | DMPK O reverse 19:45769674-45769702 | GTCCGCGGTTTGCGTTGTGGGC | SaCas9 |
| 4177 | DMPK O reverse 19:45769675-45769702 | TCCGCGGTTTGCGTTGTGGGC | SaCas9 |
| 4178 | DMPK O reverse 19:45769676-45769702 | CCGCGGTTTGCGTTGTGGGC | SaCas9 |
| 4179 | DMPK O reverse 19:45769677-45769702 | CGCGGTTTGCGTTGTGGGC | SaCas9 |
| 4180 | DMPK O reverse 19:45769678-45769702 | GCGGTTTGCGTTGTGGGC | SaCas9 |
| 4181 | DMPK O reverse 19:45769672-45769703 | CAGTGTCCGCGGTTTGCGTTGTGGG | SaCas9 |
| 4182 | DMPK O reverse 19:45769673-45769703 | AGTGTCCGCGGTTTGCGTTGTGGG | SaCas9 |
| 4183 | DMPK O reverse 19:45769674-45769703 | GTGTCCGCGGTTTGCGTTGTGGG | SaCas9 |
| 4184 | DMPK O reverse 19:45769675-45769703 | TGTCCGCGGTTTGCGTTGTGGG | SaCas9 |
| 4185 | DMPK O reverse 19:45769676-45769703 | GTCCGCGGTTTGCGTTGTGGG | SaCas9 |
| 4186 | DMPK O reverse 19:45769677-45769703 | TCCGCGGTTTGCGTTGTGGG | SaCas9 |
| 4187 | DMPK O reverse 19:45769678-45769703 | CCGCGGTTTGCGTTGTGGG | SaCas9 |
| 4188 | DMPK O reverse 19:45769679-45769703 | CGCGGTTTGCGTTGTGGG | SaCas9 |
| 4189 | DMPK O forward 19:45769677-45769708 | GCCCACAACGCAAACCGCGGACACT | SaCas9 |
| 4190 | DMPK O forward 19:45769678-45769708 | CCCACAACGCAAACCGCGGACACT | SaCas9 |
| 4191 | DMPK O forward 19:45769679-45769708 | CCACAACGCAAACCGCGGACACT | SaCas9 |
| 4192 | DMPK O forward 19:45769680-45769708 | CACAACGCAAACCGCGGACACT | SaCas9 |
| 4193 | DMPK O forward 19:45769681-45769708 | ACAACGCAAACCGCGGACACT | SaCas9 |
| 4194 | DMPK O forward 19:45769682-45769708 | CAACGCAAACCGCGGACACT | SaCas9 |
| 4195 | DMPK O forward 19:45769683-45769708 | AACGCAAACCGCGGACACT | SaCas9 |
| 4196 | DMPK O forward 19:45769684-45769708 | ACGCAAACCGCGGACACT | SaCas9 |
| 4197 | DMPK O reverse 19:45769677-45769708 | CTCCACAGTGTCCGCGGTTTGCGTT | SaCas9 |
| 4198 | DMPK O reverse 19:45769678-45769708 | TCCACAGTGTCCGCGGTTTGCGTT | SaCas9 |
| 4199 | DMPK O reverse 19:45769679-45769708 | CCACAGTGTCCGCGGTTTGCGTT | SaCas9 |
| 4200 | DMPK O reverse 19:45769680-45769708 | CACAGTGTCCGCGGTTTGCGTT | SaCas9 |
| 4201 | DMPK O reverse 19:45769681-45769708 | ACAGTGTCCGCGGTTTGCGTT | SaCas9 |
| 4202 | DMPK O reverse 19:45769682-45769708 | CAGTGTCCGCGGTTTGCGTT | SaCas9 |
| 4203 | DMPK O reverse 19:45769683-45769708 | AGTGTCCGCGGTTTGCGTT | SaCas9 |
| 4204 | DMPK O reverse 19:45769684-45769708 | GTGTCCGCGGTTTGCGTT | SaCas9 |
| 4205 | DMPK O forward 19:45769678-45769709 | CCCACAACGCAAACCGCGGACACTG | SaCas9 |
| 4206 | DMPK O forward 19:45769679-45769709 | CCACAACGCAAACCGCGGACACTG | SaCas9 |
| 4207 | DMPK O forward 19:45769680-45769709 | CACAACGCAAACCGCGGACACTG | SaCas9 |
| 4208 | DMPK O forward 19:45769681-45769709 | ACAACGCAAACCGCGGACACTG | SaCas9 |
| 4209 | DMPK O forward 19:45769682-45769709 | CAACGCAAACCGCGGACACTG | SaCas9 |
| 4210 | DMPK O forward 19:45769683-45769709 | AACGCAAACCGCGGACACTG | SaCas9 |
| 4211 | DMPK O forward 19:45769684-45769709 | ACGCAAACCGCGGACACTG | SaCas9 |
| 4212 | DMPK O forward 19:45769685-45769709 | CGCAAACCGCGGACACTG | SaCas9 |
| 4213 | DMPK O forward 19:45769685-45769716 | CGCAAACCGCGGACACTGTGGAGTC | SaCas9 |
| 4214 | DMPK O forward 19:45769686-45769716 | GCAAACCGCGGACACTGTGGAGTC | SaCas9 |
| 4215 | DMPK O forward 19:45769687-45769716 | CAAACCGCGGACACTGTGGAGTC | SaCas9 |
| 4216 | DMPK O forward 19:45769688-45769716 | AAACCGCGGACACTGTGGAGTC | SaCas9 |
| 4217 | DMPK O forward 19:45769689-45769716 | AACCGCGGACACTGTGGAGTC | SaCas9 |
| 4218 | DMPK O forward 19:45769690-45769716 | ACCGCGGACACTGTGGAGTC | SaCas9 |
| 4219 | DMPK O forward 19:45769691-45769716 | CCGCGGACACTGTGGAGTC | SaCas9 |
| 4220 | DMPK O forward 19:45769692-45769716 | CGCGGACACTGTGGAGTC | SaCas9 |
| 4221 | DMPK O forward 19:45769692-45769723 | CGCGGACACTGTGGAGTCCAGAGCT | SaCas9 |
| 4222 | DMPK O forward 19:45769693-45769723 | GCGGACACTGTGGAGTCCAGAGCT | SaCas9 |
| 4223 | DMPK O forward 19:45769694-45769723 | CGGACACTGTGGAGTCCAGAGCT | SaCas9 |
| 4224 | DMPK O forward 19:45769695-45769723 | GGACACTGTGGAGTCCAGAGCT | SaCas9 |
| 4225 | DMPK O forward 19:45769696-45769723 | GACACTGTGGAGTCCAGAGCT | SaCas9 |
| 4226 | DMPK O forward 19:45769697-45769723 | ACACTGTGGAGTCCAGAGCT | SaCas9 |
| 4227 | DMPK O forward 19:45769698-45769723 | CACTGTGGAGTCCAGAGCT | SaCas9 |
| 4228 | DMPK O forward 19:45769699-45769723 | ACTGTGGAGTCCAGAGCT | SaCas9 |
| 4229 | DMPK O forward 19:45770471-45770502 | AAGACAGTTCTAGGGTTCAGGGAGC | SaCas9 |
| 4230 | DMPK O forward 19:45770472-45770502 | AGACAGTTCTAGGGTTCAGGGAGC | SaCas9 |
| 4231 | DMPK O forward 19:45770473-45770502 | GACAGTTCTAGGGTTCAGGGAGC | SaCas9 |
| 4232 | DMPK O forward 19:45770474-45770502 | ACAGTTCTAGGGTTCAGGGAGC | SaCas9 |
| 4233 | DMPK O forward 19:45770475-45770502 | CAGTTCTAGGGTTCAGGGAGC | SaCas9 |
| 4234 | DMPK O forward 19:45770476-45770502 | AGTTCTAGGGTTCAGGGAGC | SaCas9 |
| 4235 | DMPK O forward 19:45770477-45770502 | GTTCTAGGGTTCAGGGAGC | SaCas9 |
| 4236 | DMPK O forward 19:45770478-45770502 | TTCTAGGGTTCAGGGAGC | SaCas9 |
| 4237 | DMPK O forward 19:45770482-45770513 | AGGGTTCAGGGAGCGCGGGCGGCTC | SaCas9 |
| 4238 | DMPK O forward 19:45770483-45770513 | GGGTTCAGGGAGCGCGGGCGGCTC | SaCas9 |
| 4239 | DMPK O forward 19:45770484-45770513 | GGTTCAGGGAGCGCGGGCGGCTC | SaCas9 |
| 4240 | DMPK O forward 19:45770485-45770513 | GTTCAGGGAGCGCGGGCGGCTC | SaCas9 |
| 4241 | DMPK O forward 19:45770486-45770513 | TTCAGGGAGCGCGGGCGGCTC | SaCas9 |
| 4242 | DMPK O forward 19:45770487-45770513 | TCAGGGAGCGCGGGCGGCTC | SaCas9 |
| 4243 | DMPK O forward 19:45770488-45770513 | CAGGGAGCGCGGGCGGCTC | SaCas9 |
| 4244 | DMPK O forward 19:45770489-45770513 | AGGGAGCGCGGGCGGCTC | SaCas9 |
| 4245 | DMPK O reverse 19:45770485-45770516 | GCCGCCCAGGAGCCGCCCGCGCTCC | SaCas9 |
| 4246 | DMPK O reverse 19:45770486-45770516 | CCGCCCAGGAGCCGCCCGCGCTCC | SaCas9 |
| 4247 | DMPK O reverse 19:45770487-45770516 | CGCCCAGGAGCCGCCCGCGCTCC | SaCas9 |
| 4248 | DMPK O reverse 19:45770488-45770516 | GCCCAGGAGCCGCCCGCGCTCC | SaCas9 |
| 4249 | DMPK O reverse 19:45770489-45770516 | CCCAGGAGCCGCCCGCGCTCC | SaCas9 |
| 4250 | DMPK O reverse 19:45770490-45770516 | CCAGGAGCCGCCCGCGCTCC | SaCas9 |
| 4251 | DMPK O reverse 19:45770491-45770516 | CAGGAGCCGCCCGCGCTCC | SaCas9 |
| 4252 | DMPK O reverse 19:45770492-45770516 | AGGAGCCGCCCGCGCTCC | SaCas9 |
| 4253 | DMPK O forward 19:45770502-45770533 | GGCTCCTGGGCGGCGCCAGACTGCG | SaCas9 |
| 4254 | DMPK O forward 19:45770503-45770533 | GCTCCTGGGCGGCGCCAGACTGCG | SaCas9 |
| 4255 | DMPK O forward 19:45770504-45770533 | CTCCTGGGCGGCGCCAGACTGCG | SaCas9 |
| 4256 | DMPK O forward 19:45770505-45770533 | TCCTGGGCGGCGCCAGACTGCG | SaCas9 |
| 4257 | DMPK O forward 19:45770506-45770533 | CCTGGGCGGCGCCAGACTGCG | SaCas9 |
| 4258 | DMPK O forward 19:45770507-45770533 | CTGGGCGGCGCCAGACTGCG | SaCas9 |
| 4259 | DMPK O forward 19:45770508-45770533 | TGGGCGGCGCCAGACTGCG | SaCas9 |
| 4260 | DMPK O forward 19:45770509-45770533 | GGGCGGCGCCAGACTGCG | SaCas9 |
| 4261 | DMPK O reverse 19:45770503-45770534 | AACTCACCGCAGTCTGGCGCCGCCC | SaCas9 |
| 4262 | DMPK O reverse 19:45770504-45770534 | ACTCACCGCAGTCTGGCGCCGCCC | SaCas9 |
| 4263 | DMPK O reverse 19:45770505-45770534 | CTCACCGCAGTCTGGCGCCGCCC | SaCas9 |
| 4264 | DMPK O reverse 19:45770506-45770534 | TCACCGCAGTCTGGCGCCGCCC | SaCas9 |
| 4265 | DMPK O reverse 19:45770507-45770534 | CACCGCAGTCTGGCGCCGCCC | SaCas9 |
| 4266 | DMPK O reverse 19:45770508-45770534 | ACCGCAGTCTGGCGCCGCCC | SaCas9 |
| 4267 | DMPK O reverse 19:45770509-45770534 | CCGCAGTCTGGCGCCGCCC | SaCas9 |
| 4268 | DMPK O reverse 19:45770510-45770534 | CGCAGTCTGGCGCCGCCC | SaCas9 |
| 4269 | DMPK O reverse 19:45770504-45770535 | CAACTCACCGCAGTCTGGCGCCGCC | SaCas9 |
| 4270 | DMPK O reverse 19:45770505-45770535 | AACTCACCGCAGTCTGGCGCCGCC | SaCas9 |
| 4271 | DMPK O reverse 19:45770506-45770535 | ACTCACCGCAGTCTGGCGCCGCC | SaCas9 |
| 4272 | DMPK O reverse 19:45770507-45770535 | CTCACCGCAGTCTGGCGCCGCC | SaCas9 |
| 4273 | DMPK O reverse 19:45770508-45770535 | TCACCGCAGTCTGGCGCCGCC | SaCas9 |
| 4274 | DMPK O reverse 19:45770509-45770535 | CACCGCAGTCTGGCGCCGCC | SaCas9 |
| 4275 | DMPK O reverse 19:45770510-45770535 | ACCGCAGTCTGGCGCCGCC | SaCas9 |
| 4276 | DMPK O reverse 19:45770511-45770535 | CCGCAGTCTGGCGCCGCC | SaCas9 |
| 4277 | DMPK O forward 19:45770516-45770547 | GCCAGACTGCGGTGAGTTGGCCGGC | SaCas9 |
| 4278 | DMPK O forward 19:45770517-45770547 | CCAGACTGCGGTGAGTTGGCCGGC | SaCas9 |
| 4279 | DMPK O forward 19:45770518-45770547 | CAGACTGCGGTGAGTTGGCCGGC | SaCas9 |
| 4280 | DMPK O forward 19:45770519-45770547 | AGACTGCGGTGAGTTGGCCGGC | SaCas9 |
| 4281 | DMPK O forward 19:45770520-45770547 | GACTGCGGTGAGTTGGCCGGC | SaCas9 |
| 4282 | DMPK O forward 19:45770521-45770547 | ACTGCGGTGAGTTGGCCGGC | SaCas9 |
| 4283 | DMPK O forward 19:45770522-45770547 | CTGCGGTGAGTTGGCCGGC | SaCas9 |
| 4284 | DMPK O forward 19:45770523-45770547 | TGCGGTGAGTTGGCCGGC | SaCas9 |
| 4285 | DMPK O forward 19:45770540-45770571 | CGTGGGCCACCAACCCAATGCAGCC | SaCas9 |
| 4286 | DMPK O forward 19:45770541-45770571 | GTGGGCCACCAACCCAATGCAGCC | SaCas9 |
| 4287 | DMPK O forward 19:45770542-45770571 | TGGGCCACCAACCCAATGCAGCC | SaCas9 |
| 4288 | DMPK O forward 19:45770543-45770571 | GGGCCACCAACCCAATGCAGCC | SaCas9 |
| 4289 | DMPK O forward 19:45770544-45770571 | GGCCACCAACCCAATGCAGCC | SaCas9 |
| 4290 | DMPK O forward 19:45770545-45770571 | GCCACCAACCCAATGCAGCC | SaCas9 |
| 4291 | DMPK O forward 19:45770546-45770571 | CCACCAACCCAATGCAGCC | SaCas9 |
| 4292 | DMPK O forward 19:45770547-45770571 | CACCAACCCAATGCAGCC | SaCas9 |
| 4293 | DMPK O forward 19:45770552-45770583 | ACCCAATGCAGCCCAGGGCGGCGGC | SaCas9 |
| 4294 | DMPK O forward 19:45770553-45770583 | CCCAATGCAGCCCAGGGCGGCGGC | SaCas9 |
| 4295 | DMPK O forward 19:45770554-45770583 | CCAATGCAGCCCAGGGCGGCGGC | SaCas9 |
| 4296 | DMPK O forward 19:45770555-45770583 | CAATGCAGCCCAGGGCGGCGGC | SaCas9 |
| 4297 | DMPK O forward 19:45770556-45770583 | AATGCAGCCCAGGGCGGCGGC | SaCas9 |
| 4298 | DMPK O forward 19:45770557-45770583 | ATGCAGCCCAGGGCGGCGGC | SaCas9 |
| 4299 | DMPK O forward 19:45770558-45770583 | TGCAGCCCAGGGCGGCGGC | SaCas9 |
| 4300 | DMPK O forward 19:45770559-45770583 | GCAGCCCAGGGCGGCGGC | SaCas9 |
| 4301 | DMPK O reverse 19:45770552-45770583 | TCTCGTGCCGCCGCCCTGGGCTGCA | SaCas9 |
| 4302 | DMPK O reverse 19:45770553-45770583 | CTCGTGCCGCCGCCCTGGGCTGCA | SaCas9 |
| 4303 | DMPK O reverse 19:45770554-45770583 | TCGTGCCGCCGCCCTGGGCTGCA | SaCas9 |
| 4304 | DMPK O reverse 19:45770555-45770583 | CGTGCCGCCGCCCTGGGCTGCA | SaCas9 |
| 4305 | DMPK O reverse 19:45770556-45770583 | GTGCCGCCGCCCTGGGCTGCA | SaCas9 |
| 4306 | DMPK O reverse 19:45770557-45770583 | TGCCGCCGCCCTGGGCTGCA | SaCas9 |
| 4307 | DMPK O reverse 19:45770558-45770583 | GCCGCCGCCCTGGGCTGCA | SaCas9 |
| 4308 | DMPK O reverse 19:45770559-45770583 | CCGCCGCCCTGGGCTGCA | SaCas9 |
| 4309 | DMPK O forward 19:45770558-45770589 | TGCAGCCCAGGGCGGCGGCACGAGA | SaCas9 |
| 4310 | DMPK O forward 19:45770559-45770589 | GCAGCCCAGGGCGGCGGCACGAGA | SaCas9 |
| 4311 | DMPK O forward 19:45770560-45770589 | CAGCCCAGGGCGGCGGCACGAGA | SaCas9 |
| 4312 | DMPK O forward 19:45770561-45770589 | AGCCCAGGGCGGCGGCACGAGA | SaCas9 |
| 4313 | DMPK O forward 19:45770562-45770589 | GCCCAGGGCGGCGGCACGAGA | SaCas9 |
| 4314 | DMPK O forward 19:45770563-45770589 | CCCAGGGCGGCGGCACGAGA | SaCas9 |
| 4315 | DMPK O forward 19:45770564-45770589 | CCAGGGCGGCGGCACGAGA | SaCas9 |
| 4316 | DMPK O forward 19:45770565-45770589 | CAGGGCGGCGGCACGAGA | SaCas9 |
| 4317 | DMPK O reverse 19:45770562-45770593 | CGTTGTTCTGTCTCGTGCCGCCGCC | SaCas9 |
| 4318 | DMPK O reverse 19:45770563-45770593 | GTTGTTCTGTCTCGTGCCGCCGCC | SaCas9 |
| 4319 | DMPK O reverse 19:45770564-45770593 | TTGTTCTGTCTCGTGCCGCCGCC | SaCas9 |
| 4320 | DMPK O reverse 19:45770565-45770593 | TGTTCTGTCTCGTGCCGCCGCC | SaCas9 |
| 4321 | DMPK O reverse 19:45770566-45770593 | GTTCTGTCTCGTGCCGCCGCC | SaCas9 |
| 4322 | DMPK O reverse 19:45770567-45770593 | TTCTGTCTCGTGCCGCCGCC | SaCas9 |
| 4323 | DMPK O reverse 19:45770568-45770593 | TCTGTCTCGTGCCGCCGCC | SaCas9 |
| 4324 | DMPK O reverse 19:45770569-45770593 | CTGTCTCGTGCCGCCGCC | SaCas9 |
| 4325 | DMPK O forward 19:45770568-45770599 | GGCGGCGGCACGAGACAGAACAACG | SaCas9 |
| 4326 | DMPK O forward 19:45770569-45770599 | GCGGCGGCACGAGACAGAACAACG | SaCas9 |
| 4327 | DMPK O forward 19:45770570-45770599 | CGGCGGCACGAGACAGAACAACG | SaCas9 |
| 4328 | DMPK O forward 19:45770571-45770599 | GGCGGCACGAGACAGAACAACG | SaCas9 |
| 4329 | DMPK O forward 19:45770572-45770599 | GCGGCACGAGACAGAACAACG | SaCas9 |
| 4330 | DMPK O forward 19:45770573-45770599 | CGGCACGAGACAGAACAACG | SaCas9 |
| 4331 | DMPK O forward 19:45770574-45770599 | GGCACGAGACAGAACAACG | SaCas9 |
| 4332 | DMPK O forward 19:45770575-45770599 | GCACGAGACAGAACAACG | SaCas9 |
| 4333 | DMPK O forward 19:45770573-45770604 | CGGCACGAGACAGAACAACGGCGAA | SaCas9 |
| 4334 | DMPK O forward 19:45770574-45770604 | GGCACGAGACAGAACAACGGCGAA | SaCas9 |
| 4335 | DMPK O forward 19:45770575-45770604 | GCACGAGACAGAACAACGGCGAA | SaCas9 |
| 4336 | DMPK O forward 19:45770576-45770604 | CACGAGACAGAACAACGGCGAA | SaCas9 |
| 4337 | DMPK O forward 19:45770577-45770604 | ACGAGACAGAACAACGGCGAA | SaCas9 |
| 4338 | DMPK O forward 19:45770578-45770604 | CGAGACAGAACAACGGCGAA | SaCas9 |
| 4339 | DMPK O forward 19:45770579-45770604 | GAGACAGAACAACGGCGAA | SaCas9 |
| 4340 | DMPK O forward 19:45770580-45770604 | AGACAGAACAACGGCGAA | SaCas9 |
| 4341 | DMPK O forward 19:45770574-45770605 | GGCACGAGACAGAACAACGGCGAAC | SaCas9 |
| 4342 | DMPK O forward 19:45770575-45770605 | GCACGAGACAGAACAACGGCGAAC | SaCas9 |
| 4343 | DMPK O forward 19:45770576-45770605 | CACGAGACAGAACAACGGCGAAC | SaCas9 |
| 4344 | DMPK O forward 19:45770577-45770605 | ACGAGACAGAACAACGGCGAAC | SaCas9 |
| 4345 | DMPK O forward 19:45770578-45770605 | CGAGACAGAACAACGGCGAAC | SaCas9 |
| 4346 | DMPK O forward 19:45770579-45770605 | GAGACAGAACAACGGCGAAC | SaCas9 |
| 4347 | DMPK O forward 19:45770580-45770605 | AGACAGAACAACGGCGAAC | SaCas9 |
| 4348 | DMPK O forward 19:45770581-45770605 | GACAGAACAACGGCGAAC | SaCas9 |
| 4349 | DMPK O forward 19:45770579-45770610 | GAGACAGAACAACGGCGAACAGGAG | SaCas9 |
| 4350 | DMPK O forward 19:45770580-45770610 | AGACAGAACAACGGCGAACAGGAG | SaCas9 |
| 4351 | DMPK O forward 19:45770581-45770610 | GACAGAACAACGGCGAACAGGAG | SaCas9 |
| 4352 | DMPK O forward 19:45770582-45770610 | ACAGAACAACGGCGAACAGGAG | SaCas9 |
| 4353 | DMPK O forward 19:45770583-45770610 | CAGAACAACGGCGAACAGGAG | SaCas9 |
| 4354 | DMPK O forward 19:45770584-45770610 | AGAACAACGGCGAACAGGAG | SaCas9 |
| 4355 | DMPK O forward 19:45770585-45770610 | GAACAACGGCGAACAGGAG | SaCas9 |
| 4356 | DMPK O forward 19:45770586-45770610 | AACAACGGCGAACAGGAG | SaCas9 |
| 4357 | DMPK O forward 19:45770580-45770611 | AGACAGAACAACGGCGAACAGGAGC | SaCas9 |
| 4358 | DMPK O forward 19:45770581-45770611 | GACAGAACAACGGCGAACAGGAGC | SaCas9 |
| 4359 | DMPK O forward 19:45770582-45770611 | ACAGAACAACGGCGAACAGGAGC | SaCas9 |
| 4360 | DMPK O forward 19:45770583-45770611 | CAGAACAACGGCGAACAGGAGC | SaCas9 |
| 4361 | DMPK O forward 19:45770584-45770611 | AGAACAACGGCGAACAGGAGC | SaCas9 |
| 4362 | DMPK O forward 19:45770585-45770611 | GAACAACGGCGAACAGGAGC | SaCas9 |
| 4363 | DMPK O forward 19:45770586-45770611 | AACAACGGCGAACAGGAGC | SaCas9 |
| 4364 | DMPK O forward 19:45770587-45770611 | ACAACGGCGAACAGGAGC | SaCas9 |
| 4365 | DMPK O forward 19:45770581-45770612 | GACAGAACAACGGCGAACAGGAGCA | SaCas9 |
| 4366 | DMPK O forward 19:45770582-45770612 | ACAGAACAACGGCGAACAGGAGCA | SaCas9 |
| 4367 | DMPK O forward 19:45770583-45770612 | CAGAACAACGGCGAACAGGAGCA | SaCas9 |
| 4368 | DMPK O forward 19:45770584-45770612 | AGAACAACGGCGAACAGGAGCA | SaCas9 |
| 4369 | DMPK O forward 19:45770585-45770612 | GAACAACGGCGAACAGGAGCA | SaCas9 |
| 4370 | DMPK O forward 19:45770586-45770612 | AACAACGGCGAACAGGAGCA | SaCas9 |
| 4371 | DMPK O forward 19:45770587-45770612 | ACAACGGCGAACAGGAGCA | SaCas9 |
| 4372 | DMPK O forward 19:45770588-45770612 | CAACGGCGAACAGGAGCA | SaCas9 |
| 4373 | DMPK O forward 19:45770608-45770639 | GAAAGCGCCTCCGATAGGCCAGGCC | SaCas9 |
| 4374 | DMPK O forward 19:45770609-45770639 | AAAGCGCCTCCGATAGGCCAGGCC | SaCas9 |
| 4375 | DMPK O forward 19:45770610-45770639 | AAGCGCCTCCGATAGGCCAGGCC | SaCas9 |
| 4376 | DMPK O forward 19:45770611-45770639 | AGCGCCTCCGATAGGCCAGGCC | SaCas9 |
| 4377 | DMPK O forward 19:45770612-45770639 | GCGCCTCCGATAGGCCAGGCC | SaCas9 |
| 4378 | DMPK O forward 19:45770613-45770639 | CGCCTCCGATAGGCCAGGCC | SaCas9 |
| 4379 | DMPK O forward 19:45770614-45770639 | GCCTCCGATAGGCCAGGCC | SaCas9 |
| 4380 | DMPK O forward 19:45770615-45770639 | CCTCCGATAGGCCAGGCC | SaCas9 |
| 4381 | DMPK O forward 19:45770609-45770640 | AAAGCGCCTCCGATAGGCCAGGCCT | SaCas9 |
| 4382 | DMPK O forward 19:45770610-45770640 | AAGCGCCTCCGATAGGCCAGGCCT | SaCas9 |
| 4383 | DMPK O forward 19:45770611-45770640 | AGCGCCTCCGATAGGCCAGGCCT | SaCas9 |
| 4384 | DMPK O forward 19:45770612-45770640 | GCGCCTCCGATAGGCCAGGCCT | SaCas9 |
| 4385 | DMPK O forward 19:45770613-45770640 | CGCCTCCGATAGGCCAGGCCT | SaCas9 |
| 4386 | DMPK O forward 19:45770614-45770640 | GCCTCCGATAGGCCAGGCCT | SaCas9 |
| 4387 | DMPK O forward 19:45770615-45770640 | CCTCCGATAGGCCAGGCCT | SaCas9 |
| 4388 | DMPK O forward 19:45770616-45770640 | CTCCGATAGGCCAGGCCT | SaCas9 |
| 4389 | DMPK O forward 19:45769669-45769697 | AGCCTCCGGCCCACAACGCAAACCG | SpCas9 |
| 4390 | DMPK O forward 19:45769670-45769697 | GCCTCCGGCCCACAACGCAAACCG | SpCas9 |
| 4391 | DMPK O forward 19:45769671-45769697 | CCTCCGGCCCACAACGCAAACCG | SpCas9 |
| 4392 | DMPK O forward 19:45769672-45769697 | CTCCGGCCCACAACGCAAACCG | SpCas9 |
| 4393 | DMPK O forward 19:45769673-45769697 | TCCGGCCCACAACGCAAACCG | SpCas9 |
| 4394 | DMPK O forward 19:45769674-45769697 | CCGGCCCACAACGCAAACCG | SpCas9 |
| 4395 | DMPK O forward 19:45769675-45769697 | CGGCCCACAACGCAAACCG | SpCas9 |
| 4396 | DMPK O forward 19:45769676-45769697 | GGCCCACAACGCAAACCG | SpCas9 |
| 4397 | DMPK O reverse 19:45769671-45769699 | GTCCGCGGTTTGCGTTGTGGGCCGG | SpCas9 |
| 4398 | DMPK O reverse 19:45769672-45769699 | TCCGCGGTTTGCGTTGTGGGCCGG | SpCas9 |
| 4399 | DMPK O reverse 19:45769673-45769699 | CCGCGGTTTGCGTTGTGGGCCGG | SpCas9 |
| 4400 | DMPK O reverse 19:45769674-45769699 | CGCGGTTTGCGTTGTGGGCCGG | SpCas9 |
| 4401 | DMPK O reverse 19:45769675-45769699 | GCGGTTTGCGTTGTGGGCCGG | SpCas9 |
| 4402 | DMPK O reverse 19:45769676-45769699 | CGGTTTGCGTTGTGGGCCGG | SpCas9 |
| 4403 | DMPK O reverse 19:45769677-45769699 | GGTTTGCGTTGTGGGCCGG | SpCas9 |
| 4404 | DMPK O reverse 19:45769678-45769699 | GTTTGCGTTGTGGGCCGG | SpCas9 |
| 4405 | DMPK O reverse 19:45769672-45769700 | TGTCCGCGGTTTGCGTTGTGGGCCG | SpCas9 |
| 4406 | DMPK O reverse 19:45769673-45769700 | GTCCGCGGTTTGCGTTGTGGGCCG | SpCas9 |
| 4407 | DMPK O reverse 19:45769674-45769700 | TCCGCGGTTTGCGTTGTGGGCCG | SpCas9 |
| 4408 | DMPK O reverse 19:45769675-45769700 | CCGCGGTTTGCGTTGTGGGCCG | SpCas9 |
| 4409 | DMPK O reverse 19:45769676-45769700 | CGCGGTTTGCGTTGTGGGCCG | SpCas9 |
| 4410 | DMPK O reverse 19:45769677-45769700 | GCGGTTTGCGTTGTGGGCCG | SpCas9 |
| 4411 | DMPK O reverse 19:45769678-45769700 | CGGTTTGCGTTGTGGGCCG | SpCas9 |
| 4412 | DMPK O reverse 19:45769679-45769700 | GGTTTGCGTTGTGGGCCG | SpCas9 |
| 4413 | DMPK O reverse 19:45769674-45769702 | AGTGTCCGCGGTTTGCGTTGTGGGC | SpCas9 |
| 4414 | DMPK O reverse 19:45769675-45769702 | GTGTCCGCGGTTTGCGTTGTGGGC | SpCas9 |
| 4415 | DMPK O reverse 19:45769676-45769702 | TGTCCGCGGTTTGCGTTGTGGGC | SpCas9 |
| 4416 | DMPK O reverse 19:45769677-45769702 | GTCCGCGGTTTGCGTTGTGGGC | SpCas9 |
| 4417 | DMPK O reverse 19:45769678-45769702 | TCCGCGGTTTGCGTTGTGGGC | SpCas9 |
| 4418 | DMPK O reverse 19:45769679-45769702 | CCGCGGTTTGCGTTGTGGGC | SpCas9 |
| 4419 | DMPK O reverse 19:45769680-45769702 | CGCGGTTTGCGTTGTGGGC | SpCas9 |
| 4420 | DMPK O reverse 19:45769681-45769702 | GCGGTTTGCGTTGTGGGC | SpCas9 |
| 4421 | DMPK O forward 19:45769678-45769706 | CCCACAACGCAAACCGCGGACACTG | SpCas9 |
| 4422 | DMPK O forward 19:45769679-45769706 | CCACAACGCAAACCGCGGACACTG | SpCas9 |
| 4423 | DMPK O forward 19:45769680-45769706 | CACAACGCAAACCGCGGACACTG | SpCas9 |
| 4424 | DMPK O forward 19:45769681-45769706 | ACAACGCAAACCGCGGACACTG | SpCas9 |
| 4425 | DMPK O forward 19:45769682-45769706 | CAACGCAAACCGCGGACACTG | SpCas9 |
| 4426 | DMPK O forward 19:45769683-45769706 | AACGCAAACCGCGGACACTG | SpCas9 |
| 4427 | DMPK O forward 19:45769684-45769706 | ACGCAAACCGCGGACACTG | SpCas9 |
| 4428 | DMPK O forward 19:45769685-45769706 | CGCAAACCGCGGACACTG | SpCas9 |
| 4429 | DMPK O reverse 19:45769678-45769706 | CCACAGTGTCCGCGGTTTGCGTTGT | SpCas9 |
| 4430 | DMPK O reverse 19:45769679-45769706 | CACAGTGTCCGCGGTTTGCGTTGT | SpCas9 |
| 4431 | DMPK O reverse 19:45769680-45769706 | ACAGTGTCCGCGGTTTGCGTTGT | SpCas9 |
| 4432 | DMPK O reverse 19:45769681-45769706 | CAGTGTCCGCGGTTTGCGTTGT | SpCas9 |
| 4433 | DMPK O reverse 19:45769682-45769706 | AGTGTCCGCGGTTTGCGTTGT | SpCas9 |
| 4434 | DMPK O reverse 19:45769683-45769706 | GTGTCCGCGGTTTGCGTTGT | SpCas9 |
| 4435 | DMPK O reverse 19:45769684-45769706 | TGTCCGCGGTTTGCGTTGT | SpCas9 |
| 4436 | DMPK O reverse 19:45769685-45769706 | GTCCGCGGTTTGCGTTGT | SpCas9 |
| 4437 | DMPK O reverse 19:45769679-45769707 | TCCACAGTGTCCGCGGTTTGCGTTG | SpCas9 |
| 4438 | DMPK O reverse 19:45769680-45769707 | CCACAGTGTCCGCGGTTTGCGTTG | SpCas9 |
| 4439 | DMPK O reverse 19:45769681-45769707 | CACAGTGTCCGCGGTTTGCGTTG | SpCas9 |
| 4440 | DMPK O reverse 19:45769682-45769707 | ACAGTGTCCGCGGTTTGCGTTG | SpCas9 |
| 4441 | DMPK O reverse 19:45769683-45769707 | CAGTGTCCGCGGTTTGCGTTG | SpCas9 |
| 4442 | DMPK O reverse 19:45769684-45769707 | AGTGTCCGCGGTTTGCGTTG | SpCas9 |
| 4443 | DMPK O reverse 19:45769685-45769707 | GTGTCCGCGGTTTGCGTTG | SpCas9 |
| 4444 | DMPK O reverse 19:45769686-45769707 | TGTCCGCGGTTTGCGTTG | SpCas9 |
| 4445 | DMPK O forward 19:45769680-45769708 | CACAACGCAAACCGCGGACACTGTG | SpCas9 |
| 4446 | DMPK O forward 19:45769681-45769708 | ACAACGCAAACCGCGGACACTGTG | SpCas9 |
| 4447 | DMPK O forward 19:45769682-45769708 | CAACGCAAACCGCGGACACTGTG | SpCas9 |
| 4448 | DMPK O forward 19:45769683-45769708 | AACGCAAACCGCGGACACTGTG | SpCas9 |
| 4449 | DMPK O forward 19:45769684-45769708 | ACGCAAACCGCGGACACTGTG | SpCas9 |
| 4450 | DMPK O forward 19:45769685-45769708 | CGCAAACCGCGGACACTGTG | SpCas9 |
| 4451 | DMPK O forward 19:45769686-45769708 | GCAAACCGCGGACACTGTG | SpCas9 |
| 4452 | DMPK O forward 19:45769687-45769708 | CAAACCGCGGACACTGTG | SpCas9 |
| 4453 | DMPK O forward 19:45769685-45769713 | CGCAAACCGCGGACACTGTGGAGTC | SpCas9 |
| 4454 | DMPK O forward 19:45769686-45769713 | GCAAACCGCGGACACTGTGGAGTC | SpCas9 |
| 4455 | DMPK O forward 19:45769687-45769713 | CAAACCGCGGACACTGTGGAGTC | SpCas9 |
| 4456 | DMPK O forward 19:45769688-45769713 | AAACCGCGGACACTGTGGAGTC | SpCas9 |
| 4457 | DMPK O forward 19:45769689-45769713 | AACCGCGGACACTGTGGAGTC | SpCas9 |
| 4458 | DMPK O forward 19:45769690-45769713 | ACCGCGGACACTGTGGAGTC | SpCas9 |
| 4459 | DMPK O forward 19:45769691-45769713 | CCGCGGACACTGTGGAGTC | SpCas9 |
| 4460 | DMPK O forward 19:45769692-45769713 | CGCGGACACTGTGGAGTC | SpCas9 |
| 4461 | DMPK O forward 19:45769687-45769715 | CAAACCGCGGACACTGTGGAGTCCA | SpCas9 |
| 4462 | DMPK O forward 19:45769688-45769715 | AAACCGCGGACACTGTGGAGTCCA | SpCas9 |
| 4463 | DMPK O forward 19:45769689-45769715 | AACCGCGGACACTGTGGAGTCCA | SpCas9 |
| 4464 | DMPK O forward 19:45769690-45769715 | ACCGCGGACACTGTGGAGTCCA | SpCas9 |
| 4465 | DMPK O forward 19:45769691-45769715 | CCGCGGACACTGTGGAGTCCA | SpCas9 |
| 4466 | DMPK O forward 19:45769692-45769715 | CGCGGACACTGTGGAGTCCA | SpCas9 |
| 4467 | DMPK O forward 19:45769693-45769715 | GCGGACACTGTGGAGTCCA | SpCas9 |
| 4468 | DMPK O forward 19:45769694-45769715 | CGGACACTGTGGAGTCCA | SpCas9 |
| 4469 | DMPK O reverse 19:45769691-45769719 | AAAGCTCTGGACTCCACAGTGTCCG | SpCas9 |
| 4470 | DMPK O reverse 19:45769692-45769719 | AAGCTCTGGACTCCACAGTGTCCG | SpCas9 |
| 4471 | DMPK O reverse 19:45769693-45769719 | AGCTCTGGACTCCACAGTGTCCG | SpCas9 |
| 4472 | DMPK O reverse 19:45769694-45769719 | GCTCTGGACTCCACAGTGTCCG | SpCas9 |
| 4473 | DMPK O reverse 19:45769695-45769719 | CTCTGGACTCCACAGTGTCCG | SpCas9 |
| 4474 | DMPK O reverse 19:45769696-45769719 | TCTGGACTCCACAGTGTCCG | SpCas9 |
| 4475 | DMPK O reverse 19:45769697-45769719 | CTGGACTCCACAGTGTCCG | SpCas9 |
| 4476 | DMPK O reverse 19:45769698-45769719 | TGGACTCCACAGTGTCCG | SpCas9 |
| 4477 | DMPK O forward 19:45769693-45769721 | GCGGACACTGTGGAGTCCAGAGCTT | SpCas9 |
| 4478 | DMPK O forward 19:45769694-45769721 | CGGACACTGTGGAGTCCAGAGCTT | SpCas9 |
| 4479 | DMPK O forward 19:45769695-45769721 | GGACACTGTGGAGTCCAGAGCTT | SpCas9 |
| 4480 | DMPK O forward 19:45769696-45769721 | GACACTGTGGAGTCCAGAGCTT | SpCas9 |
| 4481 | DMPK O forward 19:45769697-45769721 | ACACTGTGGAGTCCAGAGCTT | SpCas9 |
| 4482 | DMPK O forward 19:45769698-45769721 | CACTGTGGAGTCCAGAGCTT | SpCas9 |
| 4483 | DMPK O forward 19:45769699-45769721 | ACTGTGGAGTCCAGAGCTT | SpCas9 |
| 4484 | DMPK O forward 19:45769700-45769721 | CTGTGGAGTCCAGAGCTT | SpCas9 |
| 4485 | DMPK O forward 19:45769694-45769722 | CGGACACTGTGGAGTCCAGAGCTTT | SpCas9 |
| 4486 | DMPK O forward 19:45769695-45769722 | GGACACTGTGGAGTCCAGAGCTTT | SpCas9 |
| 4487 | DMPK O forward 19:45769696-45769722 | GACACTGTGGAGTCCAGAGCTTT | SpCas9 |
| 4488 | DMPK O forward 19:45769697-45769722 | ACACTGTGGAGTCCAGAGCTTT | SpCas9 |
| 4489 | DMPK O forward 19:45769698-45769722 | CACTGTGGAGTCCAGAGCTTT | SpCas9 |
| 4490 | DMPK O forward 19:45769699-45769722 | ACTGTGGAGTCCAGAGCTTT | SpCas9 |
| 4491 | DMPK O forward 19:45769700-45769722 | CTGTGGAGTCCAGAGCTTT | SpCas9 |
| 4492 | DMPK O forward 19:45769701-45769722 | TGTGGAGTCCAGAGCTTT | SpCas9 |
| 4493 | DMPK O reverse 19:45769700-45769728 | CATCTGCCCAAAGCTCTGGACTCCA | SpCas9 |
| 4494 | DMPK O reverse 19:45769701-45769728 | ATCTGCCCAAAGCTCTGGACTCCA | SpCas9 |
| 4495 | DMPK O reverse 19:45769702-45769728 | TCTGCCCAAAGCTCTGGACTCCA | SpCas9 |
| 4496 | DMPK O reverse 19:45769703-45769728 | CTGCCCAAAGCTCTGGACTCCA | SpCas9 |
| 4497 | DMPK O reverse 19:45769704-45769728 | TGCCCAAAGCTCTGGACTCCA | SpCas9 |
| 4498 | DMPK O reverse 19:45769705-45769728 | GCCCAAAGCTCTGGACTCCA | SpCas9 |
| 4499 | DMPK O reverse 19:45769706-45769728 | CCCAAAGCTCTGGACTCCA | SpCas9 |
| 4500 | DMPK O reverse 19:45769707-45769728 | CCAAAGCTCTGGACTCCA | SpCas9 |
| 4501 | DMPK O reverse 19:45769709-45769737 | AAGGCCCTCCATCTGCCCAAAGCTC | SpCas9 |
| 4502 | DMPK O reverse 19:45769710-45769737 | AGGCCCTCCATCTGCCCAAAGCTC | SpCas9 |
| 4503 | DMPK O reverse 19:45769711-45769737 | GGCCCTCCATCTGCCCAAAGCTC | SpCas9 |
| 4504 | DMPK O reverse 19:45769712-45769737 | GCCCTCCATCTGCCCAAAGCTC | SpCas9 |
| 4505 | DMPK O reverse 19:45769713-45769737 | CCCTCCATCTGCCCAAAGCTC | SpCas9 |
| 4506 | DMPK O reverse 19:45769714-45769737 | CCTCCATCTGCCCAAAGCTC | SpCas9 |
| 4507 | DMPK O reverse 19:45769715-45769737 | CTCCATCTGCCCAAAGCTC | SpCas9 |
| 4508 | DMPK O reverse 19:45769716-45769737 | TCCATCTGCCCAAAGCTC | SpCas9 |
| 4509 | DMPK O forward 19:45770206-45770234 | GCAGCAGCAGCAGCAGCAGCAGCAG | SpCas9 |
| 4510 | DMPK O forward 19:45770207-45770234 | CAGCAGCAGCAGCAGCAGCAGCAG | SpCas9 |
| 4511 | DMPK O forward 19:45770208-45770234 | AGCAGCAGCAGCAGCAGCAGCAG | SpCas9 |
| 4512 | DMPK O forward 19:45770209-45770234 | GCAGCAGCAGCAGCAGCAGCAG | SpCas9 |
| 4513 | DMPK O forward 19:45770210-45770234 | CAGCAGCAGCAGCAGCAGCAG | SpCas9 |
| 4514 | DMPK O forward 19:45770211-45770234 | AGCAGCAGCAGCAGCAGCAG | SpCas9 |
| 4515 | DMPK O forward 19:45770212-45770234 | GCAGCAGCAGCAGCAGCAG | SpCas9 |
| 4516 | DMPK O forward 19:45770213-45770234 | CAGCAGCAGCAGCAGCAG | SpCas9 |
| 4517 | DMPK O forward 19:45770209-45770237 | GCAGCAGCAGCAGCAGCAGCAGCAG | SpCas9 |
| 4518 | DMPK O forward 19:45770210-45770237 | CAGCAGCAGCAGCAGCAGCAGCAG | SpCas9 |
| 4519 | DMPK O forward 19:45770211-45770237 | AGCAGCAGCAGCAGCAGCAGCAG | SpCas9 |
| 4520 | DMPK O forward 19:45770212-45770237 | GCAGCAGCAGCAGCAGCAGCAG | SpCas9 |
| 4521 | DMPK O forward 19:45770213-45770237 | CAGCAGCAGCAGCAGCAGCAG | SpCas9 |
| 4522 | DMPK O forward 19:45770214-45770237 | AGCAGCAGCAGCAGCAGCAG | SpCas9 |
| 4523 | DMPK O forward 19:45770215-45770237 | GCAGCAGCAGCAGCAGCAG | SpCas9 |
| 4524 | DMPK O forward 19:45770216-45770237 | CAGCAGCAGCAGCAGCAG | SpCas9 |
| 4525 | DMPK O forward 19:45770212-45770240 | GCAGCAGCAGCAGCAGCAGCAGCAG | SpCas9 |
| 4526 | DMPK O forward 19:45770213-45770240 | CAGCAGCAGCAGCAGCAGCAGCAG | SpCas9 |
| 4527 | DMPK O forward 19:45770214-45770240 | AGCAGCAGCAGCAGCAGCAGCAG | SpCas9 |
| 4528 | DMPK O forward 19:45770215-45770240 | GCAGCAGCAGCAGCAGCAGCAG | SpCas9 |
| 4529 | DMPK O forward 19:45770216-45770240 | CAGCAGCAGCAGCAGCAGCAG | SpCas9 |
| 4530 | DMPK O forward 19:45770217-45770240 | AGCAGCAGCAGCAGCAGCAG | SpCas9 |
| 4531 | DMPK O forward 19:45770218-45770240 | GCAGCAGCAGCAGCAGCAG | SpCas9 |
| 4532 | DMPK O forward 19:45770219-45770240 | CAGCAGCAGCAGCAGCAG | SpCas9 |
| 4533 | DMPK O forward 19:45770215-45770243 | GCAGCAGCAGCAGCAGCAGCAGCAG | SpCas9 |
| 4534 | DMPK O forward 19:45770216-45770243 | CAGCAGCAGCAGCAGCAGCAGCAG | SpCas9 |
| 4535 | DMPK O forward 19:45770217-45770243 | AGCAGCAGCAGCAGCAGCAGCAG | SpCas9 |
| 4536 | DMPK O forward 19:45770218-45770243 | GCAGCAGCAGCAGCAGCAGCAG | SpCas9 |
| 4537 | DMPK O forward 19:45770219-45770243 | CAGCAGCAGCAGCAGCAGCAG | SpCas9 |
| 4538 | DMPK O forward 19:45770220-45770243 | AGCAGCAGCAGCAGCAGCAG | SpCas9 |
| 4539 | DMPK O forward 19:45770221-45770243 | GCAGCAGCAGCAGCAGCAG | SpCas9 |
| 4540 | DMPK O forward 19:45770222-45770243 | CAGCAGCAGCAGCAGCAG | SpCas9 |
| 4541 | DMPK O forward 19:45770218-45770246 | GCAGCAGCAGCAGCAGCAGCAGCAG | SpCas9 |
| 4542 | DMPK O forward 19:45770219-45770246 | CAGCAGCAGCAGCAGCAGCAGCAG | SpCas9 |
| 4543 | DMPK O forward 19:45770220-45770246 | AGCAGCAGCAGCAGCAGCAGCAG | SpCas9 |
| 4544 | DMPK O forward 19:45770221-45770246 | GCAGCAGCAGCAGCAGCAGCAG | SpCas9 |
| 4545 | DMPK O forward 19:45770222-45770246 | CAGCAGCAGCAGCAGCAGCAG | SpCas9 |
| 4546 | DMPK O forward 19:45770223-45770246 | AGCAGCAGCAGCAGCAGCAG | SpCas9 |
| 4547 | DMPK O forward 19:45770224-45770246 | GCAGCAGCAGCAGCAGCAG | SpCas9 |
| 4548 | DMPK O forward 19:45770225-45770246 | CAGCAGCAGCAGCAGCAG | SpCas9 |
| 4549 | DMPK O forward 19:45770221-45770249 | GCAGCAGCAGCAGCAGCAGCAGCAG | SpCas9 |
| 4550 | DMPK O forward 19:45770222-45770249 | CAGCAGCAGCAGCAGCAGCAGCAG | SpCas9 |
| 4551 | DMPK O forward 19:45770223-45770249 | AGCAGCAGCAGCAGCAGCAGCAG | SpCas9 |
| 4552 | DMPK O forward 19:45770224-45770249 | GCAGCAGCAGCAGCAGCAGCAG | SpCas9 |
| 4553 | DMPK O forward 19:45770225-45770249 | CAGCAGCAGCAGCAGCAGCAG | SpCas9 |
| 4554 | DMPK O forward 19:45770226-45770249 | AGCAGCAGCAGCAGCAGCAG | SpCas9 |
| 4555 | DMPK O forward 19:45770227-45770249 | GCAGCAGCAGCAGCAGCAG | SpCas9 |
| 4556 | DMPK O forward 19:45770228-45770249 | CAGCAGCAGCAGCAGCAG | SpCas9 |
| 4557 | DMPK O forward 19:45770224-45770252 | GCAGCAGCAGCAGCAGCAGCAGCAG | SpCas9 |
| 4558 | DMPK O forward 19:45770225-45770252 | CAGCAGCAGCAGCAGCAGCAGCAG | SpCas9 |
| 4559 | DMPK O forward 19:45770226-45770252 | AGCAGCAGCAGCAGCAGCAGCAG | SpCas9 |
| 4560 | DMPK O forward 19:45770227-45770252 | GCAGCAGCAGCAGCAGCAGCAG | SpCas9 |
| 4561 | DMPK O forward 19:45770228-45770252 | CAGCAGCAGCAGCAGCAGCAG | SpCas9 |
| 4562 | DMPK O forward 19:45770229-45770252 | AGCAGCAGCAGCAGCAGCAG | SpCas9 |
| 4563 | DMPK O forward 19:45770230-45770252 | GCAGCAGCAGCAGCAGCAG | SpCas9 |
| 4564 | DMPK O forward 19:45770231-45770252 | CAGCAGCAGCAGCAGCAG | SpCas9 |
| 4565 | DMPK O forward 19:45770227-45770255 | GCAGCAGCAGCAGCAGCAGCAGCAG | SpCas9 |
| 4566 | DMPK O forward 19:45770228-45770255 | CAGCAGCAGCAGCAGCAGCAGCAG | SpCas9 |
| 4567 | DMPK O forward 19:45770229-45770255 | AGCAGCAGCAGCAGCAGCAGCAG | SpCas9 |
| 4568 | DMPK O forward 19:45770230-45770255 | GCAGCAGCAGCAGCAGCAGCAG | SpCas9 |
| 4569 | DMPK O forward 19:45770231-45770255 | CAGCAGCAGCAGCAGCAGCAG | SpCas9 |
| 4570 | DMPK O forward 19:45770232-45770255 | AGCAGCAGCAGCAGCAGCAG | SpCas9 |
| 4571 | DMPK O forward 19:45770233-45770255 | GCAGCAGCAGCAGCAGCAG | SpCas9 |
| 4572 | DMPK O forward 19:45770234-45770255 | CAGCAGCAGCAGCAGCAG | SpCas9 |
| 4573 | DMPK O forward 19:45770230-45770258 | GCAGCAGCAGCAGCAGCAGCAGCAG | SpCas9 |
| 4574 | DMPK O forward 19:45770231-45770258 | CAGCAGCAGCAGCAGCAGCAGCAG | SpCas9 |
| 4575 | DMPK O forward 19:45770232-45770258 | AGCAGCAGCAGCAGCAGCAGCAG | SpCas9 |
| 4576 | DMPK O forward 19:45770233-45770258 | GCAGCAGCAGCAGCAGCAGCAG | SpCas9 |
| 4577 | DMPK O forward 19:45770234-45770258 | CAGCAGCAGCAGCAGCAGCAG | SpCas9 |
| 4578 | DMPK O forward 19:45770235-45770258 | AGCAGCAGCAGCAGCAGCAG | SpCas9 |
| 4579 | DMPK O forward 19:45770236-45770258 | GCAGCAGCAGCAGCAGCAG | SpCas9 |
| 4580 | DMPK O forward 19:45770237-45770258 | CAGCAGCAGCAGCAGCAG | SpCas9 |
| 4581 | DMPK O forward 19:45770233-45770261 | GCAGCAGCAGCAGCAGCAGCAGCAG | SpCas9 |
| 4582 | DMPK O forward 19:45770234-45770261 | CAGCAGCAGCAGCAGCAGCAGCAG | SpCas9 |
| 4583 | DMPK O forward 19:45770235-45770261 | AGCAGCAGCAGCAGCAGCAGCAG | SpCas9 |
| 4584 | DMPK O forward 19:45770236-45770261 | GCAGCAGCAGCAGCAGCAGCAG | SpCas9 |
| 4585 | DMPK O forward 19:45770237-45770261 | CAGCAGCAGCAGCAGCAGCAG | SpCas9 |
| 4586 | DMPK O forward 19:45770238-45770261 | AGCAGCAGCAGCAGCAGCAG | SpCas9 |
| 4587 | DMPK O forward 19:45770239-45770261 | GCAGCAGCAGCAGCAGCAG | SpCas9 |
| 4588 | DMPK O forward 19:45770240-45770261 | CAGCAGCAGCAGCAGCAG | SpCas9 |
| 4589 | DMPK O forward 19:45770236-45770264 | GCAGCAGCAGCAGCAGCAGCAGCAG | SpCas9 |
| 4590 | DMPK O forward 19:45770237-45770264 | CAGCAGCAGCAGCAGCAGCAGCAG | SpCas9 |
| 4591 | DMPK O forward 19:45770238-45770264 | AGCAGCAGCAGCAGCAGCAGCAG | SpCas9 |
| 4592 | DMPK O forward 19:45770239-45770264 | GCAGCAGCAGCAGCAGCAGCAG | SpCas9 |
| 4593 | DMPK O forward 19:45770240-45770264 | CAGCAGCAGCAGCAGCAGCAG | SpCas9 |
| 4594 | DMPK O forward 19:45770241-45770264 | AGCAGCAGCAGCAGCAGCAG | SpCas9 |
| 4595 | DMPK O forward 19:45770242-45770264 | GCAGCAGCAGCAGCAGCAG | SpCas9 |
| 4596 | DMPK O forward 19:45770243-45770264 | CAGCAGCAGCAGCAGCAG | SpCas9 |
| 4597 | DMPK O forward 19:45770467-45770495 | GTCGAAGACAGTTCTAGGGTTCAGG | SpCas9 |
| 4598 | DMPK O forward 19:45770468-45770495 | TCGAAGACAGTTCTAGGGTTCAGG | SpCas9 |
| 4599 | DMPK O forward 19:45770469-45770495 | CGAAGACAGTTCTAGGGTTCAGG | SpCas9 |
| 4600 | DMPK O forward 19:45770470-45770495 | GAAGACAGTTCTAGGGTTCAGG | SpCas9 |
| 4601 | DMPK O forward 19:45770471-45770495 | AAGACAGTTCTAGGGTTCAGG | SpCas9 |
| 4602 | DMPK O forward 19:45770472-45770495 | AGACAGTTCTAGGGTTCAGG | SpCas9 |
| 4603 | DMPK O forward 19:45770473-45770495 | GACAGTTCTAGGGTTCAGG | SpCas9 |
| 4604 | DMPK O forward 19:45770474-45770495 | ACAGTTCTAGGGTTCAGG | SpCas9 |
| 4605 | DMPK O forward 19:45770472-45770500 | AGACAGTTCTAGGGTTCAGGGAGCG | SpCas9 |
| 4606 | DMPK O forward 19:45770473-45770500 | GACAGTTCTAGGGTTCAGGGAGCG | SpCas9 |
| 4607 | DMPK O forward 19:45770474-45770500 | ACAGTTCTAGGGTTCAGGGAGCG | SpCas9 |
| 4608 | DMPK O forward 19:45770475-45770500 | CAGTTCTAGGGTTCAGGGAGCG | SpCas9 |
| 4609 | DMPK O forward 19:45770476-45770500 | AGTTCTAGGGTTCAGGGAGCG | SpCas9 |
| 4610 | DMPK O forward 19:45770477-45770500 | GTTCTAGGGTTCAGGGAGCG | SpCas9 |
| 4611 | DMPK O forward 19:45770478-45770500 | TTCTAGGGTTCAGGGAGCG | SpCas9 |
| 4612 | DMPK O forward 19:45770479-45770500 | TCTAGGGTTCAGGGAGCG | SpCas9 |
| 4613 | DMPK O forward 19:45770473-45770501 | GACAGTTCTAGGGTTCAGGGAGCGC | SpCas9 |
| 4614 | DMPK O forward 19:45770474-45770501 | ACAGTTCTAGGGTTCAGGGAGCGC | SpCas9 |
| 4615 | DMPK O forward 19:45770475-45770501 | CAGTTCTAGGGTTCAGGGAGCGC | SpCas9 |
| 4616 | DMPK O forward 19:45770476-45770501 | AGTTCTAGGGTTCAGGGAGCGC | SpCas9 |
| 4617 | DMPK O forward 19:45770477-45770501 | GTTCTAGGGTTCAGGGAGCGC | SpCas9 |
| 4618 | DMPK O forward 19:45770478-45770501 | TTCTAGGGTTCAGGGAGCGC | SpCas9 |
| 4619 | DMPK O forward 19:45770479-45770501 | TCTAGGGTTCAGGGAGCGC | SpCas9 |
| 4620 | DMPK O forward 19:45770480-45770501 | CTAGGGTTCAGGGAGCGC | SpCas9 |
| 4621 | DMPK O forward 19:45770476-45770504 | AGTTCTAGGGTTCAGGGAGCGCGGG | SpCas9 |
| 4622 | DMPK O forward 19:45770477-45770504 | GTTCTAGGGTTCAGGGAGCGCGGG | SpCas9 |
| 4623 | DMPK O forward 19:45770478-45770504 | TTCTAGGGTTCAGGGAGCGCGGG | SpCas9 |
| 4624 | DMPK O forward 19:45770479-45770504 | TCTAGGGTTCAGGGAGCGCGGG | SpCas9 |
| 4625 | DMPK O forward 19:45770480-45770504 | CTAGGGTTCAGGGAGCGCGGG | SpCas9 |
| 4626 | DMPK O forward 19:45770481-45770504 | TAGGGTTCAGGGAGCGCGGG | SpCas9 |
| 4627 | DMPK O forward 19:45770482-45770504 | AGGGTTCAGGGAGCGCGGG | SpCas9 |
| 4628 | DMPK O forward 19:45770483-45770504 | GGGTTCAGGGAGCGCGGG | SpCas9 |
| 4629 | DMPK O forward 19:45770483-45770511 | GGGTTCAGGGAGCGCGGGCGGCTCC | SpCas9 |
| 4630 | DMPK O forward 19:45770484-45770511 | GGTTCAGGGAGCGCGGGCGGCTCC | SpCas9 |
| 4631 | DMPK O forward 19:45770485-45770511 | GTTCAGGGAGCGCGGGCGGCTCC | SpCas9 |
| 4632 | DMPK O forward 19:45770486-45770511 | TTCAGGGAGCGCGGGCGGCTCC | SpCas9 |
| 4633 | DMPK O forward 19:45770487-45770511 | TCAGGGAGCGCGGGCGGCTCC | SpCas9 |
| 4634 | DMPK O forward 19:45770488-45770511 | CAGGGAGCGCGGGCGGCTCC | SpCas9 |
| 4635 | DMPK O forward 19:45770489-45770511 | AGGGAGCGCGGGCGGCTCC | SpCas9 |
| 4636 | DMPK O forward 19:45770490-45770511 | GGGAGCGCGGGCGGCTCC | SpCas9 |
| 4637 | DMPK O forward 19:45770484-45770512 | GGTTCAGGGAGCGCGGGCGGCTCCT | SpCas9 |
| 4638 | DMPK O forward 19:45770485-45770512 | GTTCAGGGAGCGCGGGCGGCTCCT | SpCas9 |
| 4639 | DMPK O forward 19:45770486-45770512 | TTCAGGGAGCGCGGGCGGCTCCT | SpCas9 |
| 4640 | DMPK O forward 19:45770487-45770512 | TCAGGGAGCGCGGGCGGCTCCT | SpCas9 |
| 4641 | DMPK O forward 19:45770488-45770512 | CAGGGAGCGCGGGCGGCTCCT | SpCas9 |
| 4642 | DMPK O forward 19:45770489-45770512 | AGGGAGCGCGGGCGGCTCCT | SpCas9 |
| 4643 | DMPK O forward 19:45770490-45770512 | GGGAGCGCGGGCGGCTCCT | SpCas9 |
| 4644 | DMPK O forward 19:45770491-45770512 | GGAGCGCGGGCGGCTCCT | SpCas9 |
| 4645 | DMPK O forward 19:45770487-45770515 | TCAGGGAGCGCGGGCGGCTCCTGGG | SpCas9 |
| 4646 | DMPK O forward 19:45770488-45770515 | CAGGGAGCGCGGGCGGCTCCTGGG | SpCas9 |
| 4647 | DMPK O forward 19:45770489-45770515 | AGGGAGCGCGGGCGGCTCCTGGG | SpCas9 |
| 4648 | DMPK O forward 19:45770490-45770515 | GGGAGCGCGGGCGGCTCCTGGG | SpCas9 |
| 4649 | DMPK O forward 19:45770491-45770515 | GGAGCGCGGGCGGCTCCTGGG | SpCas9 |
| 4650 | DMPK O forward 19:45770492-45770515 | GAGCGCGGGCGGCTCCTGGG | SpCas9 |
| 4651 | DMPK O forward 19:45770493-45770515 | AGCGCGGGCGGCTCCTGGG | SpCas9 |
| 4652 | DMPK O forward 19:45770494-45770515 | GCGCGGGCGGCTCCTGGG | SpCas9 |
| 4653 | DMPK O forward 19:45770493-45770521 | AGCGCGGGCGGCTCCTGGGCGGCGC | SpCas9 |
| 4654 | DMPK O forward 19:45770494-45770521 | GCGCGGGCGGCTCCTGGGCGGCGC | SpCas9 |
| 4655 | DMPK O forward 19:45770495-45770521 | CGCGGGCGGCTCCTGGGCGGCGC | SpCas9 |
| 4656 | DMPK O forward 19:45770496-45770521 | GCGGGCGGCTCCTGGGCGGCGC | SpCas9 |
| 4657 | DMPK O forward 19:45770497-45770521 | CGGGCGGCTCCTGGGCGGCGC | SpCas9 |
| 4658 | DMPK O forward 19:45770498-45770521 | GGGCGGCTCCTGGGCGGCGC | SpCas9 |
| 4659 | DMPK O forward 19:45770499-45770521 | GGCGGCTCCTGGGCGGCGC | SpCas9 |
| 4660 | DMPK O forward 19:45770500-45770521 | GCGGCTCCTGGGCGGCGC | SpCas9 |
| 4661 | DMPK O forward 19:45770500-45770528 | GCGGCTCCTGGGCGGCGCCAGACTG | SpCas9 |
| 4662 | DMPK O forward 19:45770501-45770528 | CGGCTCCTGGGCGGCGCCAGACTG | SpCas9 |
| 4663 | DMPK O forward 19:45770502-45770528 | GGCTCCTGGGCGGCGCCAGACTG | SpCas9 |
| 4664 | DMPK O forward 19:45770503-45770528 | GCTCCTGGGCGGCGCCAGACTG | SpCas9 |
| 4665 | DMPK O forward 19:45770504-45770528 | CTCCTGGGCGGCGCCAGACTG | SpCas9 |
| 4666 | DMPK O forward 19:45770505-45770528 | TCCTGGGCGGCGCCAGACTG | SpCas9 |
| 4667 | DMPK O forward 19:45770506-45770528 | CCTGGGCGGCGCCAGACTG | SpCas9 |
| 4668 | DMPK O forward 19:45770507-45770528 | CTGGGCGGCGCCAGACTG | SpCas9 |
| 4669 | DMPK O forward 19:45770504-45770532 | CTCCTGGGCGGCGCCAGACTGCGGT | SpCas9 |
| 4670 | DMPK O forward 19:45770505-45770532 | TCCTGGGCGGCGCCAGACTGCGGT | SpCas9 |
| 4671 | DMPK O forward 19:45770506-45770532 | CCTGGGCGGCGCCAGACTGCGGT | SpCas9 |
| 4672 | DMPK O forward 19:45770507-45770532 | CTGGGCGGCGCCAGACTGCGGT | SpCas9 |
| 4673 | DMPK O forward 19:45770508-45770532 | TGGGCGGCGCCAGACTGCGGT | SpCas9 |
| 4674 | DMPK O forward 19:45770509-45770532 | GGGCGGCGCCAGACTGCGGT | SpCas9 |
| 4675 | DMPK O forward 19:45770510-45770532 | GGCGGCGCCAGACTGCGGT | SpCas9 |
| 4676 | DMPK O forward 19:45770511-45770532 | GCGGCGCCAGACTGCGGT | SpCas9 |
| 4677 | DMPK O reverse 19:45770504-45770532 | CTCACCGCAGTCTGGCGCCGCCCAG | SpCas9 |
| 4678 | DMPK O reverse 19:45770505-45770532 | TCACCGCAGTCTGGCGCCGCCCAG | SpCas9 |
| 4679 | DMPK O reverse 19:45770506-45770532 | CACCGCAGTCTGGCGCCGCCCAG | SpCas9 |
| 4680 | DMPK O reverse 19:45770507-45770532 | ACCGCAGTCTGGCGCCGCCCAG | SpCas9 |
| 4681 | DMPK O reverse 19:45770508-45770532 | CCGCAGTCTGGCGCCGCCCAG | SpCas9 |
| 4682 | DMPK O reverse 19:45770509-45770532 | CGCAGTCTGGCGCCGCCCAG | SpCas9 |
| 4683 | DMPK O reverse 19:45770510-45770532 | GCAGTCTGGCGCCGCCCAG | SpCas9 |
| 4684 | DMPK O reverse 19:45770511-45770532 | CAGTCTGGCGCCGCCCAG | SpCas9 |
| 4685 | DMPK O reverse 19:45770506-45770534 | AACTCACCGCAGTCTGGCGCCGCCC | SpCas9 |
| 4686 | DMPK O reverse 19:45770507-45770534 | ACTCACCGCAGTCTGGCGCCGCCC | SpCas9 |
| 4687 | DMPK O reverse 19:45770508-45770534 | CTCACCGCAGTCTGGCGCCGCCC | SpCas9 |
| 4688 | DMPK O reverse 19:45770509-45770534 | TCACCGCAGTCTGGCGCCGCCC | SpCas9 |
| 4689 | DMPK O reverse 19:45770510-45770534 | CACCGCAGTCTGGCGCCGCCC | SpCas9 |
| 4690 | DMPK O reverse 19:45770511-45770534 | ACCGCAGTCTGGCGCCGCCC | SpCas9 |
| 4691 | DMPK O reverse 19:45770512-45770534 | CCGCAGTCTGGCGCCGCCC | SpCas9 |
| 4692 | DMPK O reverse 19:45770513-45770534 | CGCAGTCTGGCGCCGCCC | SpCas9 |
| 4693 | DMPK O reverse 19:45770507-45770535 | CAACTCACCGCAGTCTGGCGCCGCC | SpCas9 |
| 4694 | DMPK O reverse 19:45770508-45770535 | AACTCACCGCAGTCTGGCGCCGCC | SpCas9 |
| 4695 | DMPK O reverse 19:45770509-45770535 | ACTCACCGCAGTCTGGCGCCGCC | SpCas9 |
| 4696 | DMPK O reverse 19:45770510-45770535 | CTCACCGCAGTCTGGCGCCGCC | SpCas9 |
| 4697 | DMPK O reverse 19:45770511-45770535 | TCACCGCAGTCTGGCGCCGCC | SpCas9 |
| 4698 | DMPK O reverse 19:45770512-45770535 | CACCGCAGTCTGGCGCCGCC | SpCas9 |
| 4699 | DMPK O reverse 19:45770513-45770535 | ACCGCAGTCTGGCGCCGCC | SpCas9 |
| 4700 | DMPK O reverse 19:45770514-45770535 | CCGCAGTCTGGCGCCGCC | SpCas9 |
| 4701 | DMPK O forward 19:45770508-45770536 | TGGGCGGCGCCAGACTGCGGTGAGT | SpCas9 |
| 4702 | DMPK O forward 19:45770509-45770536 | GGGCGGCGCCAGACTGCGGTGAGT | SpCas9 |
| 4703 | DMPK O forward 19:45770510-45770536 | GGCGGCGCCAGACTGCGGTGAGT | SpCas9 |
| 4704 | DMPK O forward 19:45770511-45770536 | GCGGCGCCAGACTGCGGTGAGT | SpCas9 |
| 4705 | DMPK O forward 19:45770512-45770536 | CGGCGCCAGACTGCGGTGAGT | SpCas9 |
| 4706 | DMPK O forward 19:45770513-45770536 | GGCGCCAGACTGCGGTGAGT | SpCas9 |
| 4707 | DMPK O forward 19:45770514-45770536 | GCGCCAGACTGCGGTGAGT | SpCas9 |
| 4708 | DMPK O forward 19:45770515-45770536 | CGCCAGACTGCGGTGAGT | SpCas9 |
| 4709 | DMPK O forward 19:45770512-45770540 | CGGCGCCAGACTGCGGTGAGTTGGC | SpCas9 |
| 4710 | DMPK O forward 19:45770513-45770540 | GGCGCCAGACTGCGGTGAGTTGGC | SpCas9 |
| 4711 | DMPK O forward 19:45770514-45770540 | GCGCCAGACTGCGGTGAGTTGGC | SpCas9 |
| 4712 | DMPK O forward 19:45770515-45770540 | CGCCAGACTGCGGTGAGTTGGC | SpCas9 |
| 4713 | DMPK O forward 19:45770516-45770540 | GCCAGACTGCGGTGAGTTGGC | SpCas9 |
| 4714 | DMPK O forward 19:45770517-45770540 | CCAGACTGCGGTGAGTTGGC | SpCas9 |
| 4715 | DMPK O forward 19:45770518-45770540 | CAGACTGCGGTGAGTTGGC | SpCas9 |
| 4716 | DMPK O forward 19:45770519-45770540 | AGACTGCGGTGAGTTGGC | SpCas9 |
| 4717 | DMPK O forward 19:45770517-45770545 | CCAGACTGCGGTGAGTTGGCCGGCG | SpCas9 |
| 4718 | DMPK O forward 19:45770518-45770545 | CAGACTGCGGTGAGTTGGCCGGCG | SpCas9 |
| 4719 | DMPK O forward 19:45770519-45770545 | AGACTGCGGTGAGTTGGCCGGCG | SpCas9 |
| 4720 | DMPK O forward 19:45770520-45770545 | GACTGCGGTGAGTTGGCCGGCG | SpCas9 |
| 4721 | DMPK O forward 19:45770521-45770545 | ACTGCGGTGAGTTGGCCGGCG | SpCas9 |
| 4722 | DMPK O forward 19:45770522-45770545 | CTGCGGTGAGTTGGCCGGCG | SpCas9 |
| 4723 | DMPK O forward 19:45770523-45770545 | TGCGGTGAGTTGGCCGGCG | SpCas9 |
| 4724 | DMPK O forward 19:45770524-45770545 | GCGGTGAGTTGGCCGGCG | SpCas9 |
| 4725 | DMPK O reverse 19:45770517-45770545 | CCACGCCGGCCAACTCACCGCAGTC | SpCas9 |
| 4726 | DMPK O reverse 19:45770518-45770545 | CACGCCGGCCAACTCACCGCAGTC | SpCas9 |
| 4727 | DMPK O reverse 19:45770519-45770545 | ACGCCGGCCAACTCACCGCAGTC | SpCas9 |
| 4728 | DMPK O reverse 19:45770520-45770545 | CGCCGGCCAACTCACCGCAGTC | SpCas9 |
| 4729 | DMPK O reverse 19:45770521-45770545 | GCCGGCCAACTCACCGCAGTC | SpCas9 |
| 4730 | DMPK O reverse 19:45770522-45770545 | CCGGCCAACTCACCGCAGTC | SpCas9 |
| 4731 | DMPK O reverse 19:45770523-45770545 | CGGCCAACTCACCGCAGTC | SpCas9 |
| 4732 | DMPK O reverse 19:45770524-45770545 | GGCCAACTCACCGCAGTC | SpCas9 |
| 4733 | DMPK O forward 19:45770518-45770546 | CAGACTGCGGTGAGTTGGCCGGCGT | SpCas9 |
| 4734 | DMPK O forward 19:45770519-45770546 | AGACTGCGGTGAGTTGGCCGGCGT | SpCas9 |
| 4735 | DMPK O forward 19:45770520-45770546 | GACTGCGGTGAGTTGGCCGGCGT | SpCas9 |
| 4736 | DMPK O forward 19:45770521-45770546 | ACTGCGGTGAGTTGGCCGGCGT | SpCas9 |
| 4737 | DMPK O forward 19:45770522-45770546 | CTGCGGTGAGTTGGCCGGCGT | SpCas9 |
| 4738 | DMPK O forward 19:45770523-45770546 | TGCGGTGAGTTGGCCGGCGT | SpCas9 |
| 4739 | DMPK O forward 19:45770524-45770546 | GCGGTGAGTTGGCCGGCGT | SpCas9 |
| 4740 | DMPK O forward 19:45770525-45770546 | CGGTGAGTTGGCCGGCGT | SpCas9 |
| 4741 | DMPK O reverse 19:45770522-45770550 | GTGGCCCACGCCGGCCAACTCACCG | SpCas9 |
| 4742 | DMPK O reverse 19:45770523-45770550 | TGGCCCACGCCGGCCAACTCACCG | SpCas9 |
| 4743 | DMPK O reverse 19:45770524-45770550 | GGCCCACGCCGGCCAACTCACCG | SpCas9 |
| 4744 | DMPK O reverse 19:45770525-45770550 | GCCCACGCCGGCCAACTCACCG | SpCas9 |
| 4745 | DMPK O reverse 19:45770526-45770550 | CCCACGCCGGCCAACTCACCG | SpCas9 |
| 4746 | DMPK O reverse 19:45770527-45770550 | CCACGCCGGCCAACTCACCG | SpCas9 |
| 4747 | DMPK O reverse 19:45770528-45770550 | CACGCCGGCCAACTCACCG | SpCas9 |
| 4748 | DMPK O reverse 19:45770529-45770550 | ACGCCGGCCAACTCACCG | SpCas9 |
| 4749 | DMPK O forward 19:45770535-45770563 | GCCGGCGTGGGCCACCAACCCAATG | SpCas9 |
| 4750 | DMPK O forward 19:45770536-45770563 | CCGGCGTGGGCCACCAACCCAATG | SpCas9 |
| 4751 | DMPK O forward 19:45770537-45770563 | CGGCGTGGGCCACCAACCCAATG | SpCas9 |
| 4752 | DMPK O forward 19:45770538-45770563 | GGCGTGGGCCACCAACCCAATG | SpCas9 |
| 4753 | DMPK O forward 19:45770539-45770563 | GCGTGGGCCACCAACCCAATG | SpCas9 |
| 4754 | DMPK O forward 19:45770540-45770563 | CGTGGGCCACCAACCCAATG | SpCas9 |
| 4755 | DMPK O forward 19:45770541-45770563 | GTGGGCCACCAACCCAATG | SpCas9 |
| 4756 | DMPK O forward 19:45770542-45770563 | TGGGCCACCAACCCAATG | SpCas9 |
| 4757 | DMPK O reverse 19:45770536-45770564 | GCTGCATTGGGTTGGTGGCCCACGC | SpCas9 |
| 4758 | DMPK O reverse 19:45770537-45770564 | CTGCATTGGGTTGGTGGCCCACGC | SpCas9 |
| 4759 | DMPK O reverse 19:45770538-45770564 | TGCATTGGGTTGGTGGCCCACGC | SpCas9 |
| 4760 | DMPK O reverse 19:45770539-45770564 | GCATTGGGTTGGTGGCCCACGC | SpCas9 |
| 4761 | DMPK O reverse 19:45770540-45770564 | CATTGGGTTGGTGGCCCACGC | SpCas9 |
| 4762 | DMPK O reverse 19:45770541-45770564 | ATTGGGTTGGTGGCCCACGC | SpCas9 |
| 4763 | DMPK O reverse 19:45770542-45770564 | TTGGGTTGGTGGCCCACGC | SpCas9 |
| 4764 | DMPK O reverse 19:45770543-45770564 | TGGGTTGGTGGCCCACGC | SpCas9 |
| 4765 | DMPK O forward 19:45770540-45770568 | CGTGGGCCACCAACCCAATGCAGCC | SpCas9 |
| 4766 | DMPK O forward 19:45770541-45770568 | GTGGGCCACCAACCCAATGCAGCC | SpCas9 |
| 4767 | DMPK O forward 19:45770542-45770568 | TGGGCCACCAACCCAATGCAGCC | SpCas9 |
| 4768 | DMPK O forward 19:45770543-45770568 | GGGCCACCAACCCAATGCAGCC | SpCas9 |
| 4769 | DMPK O forward 19:45770544-45770568 | GGCCACCAACCCAATGCAGCC | SpCas9 |
| 4770 | DMPK O forward 19:45770545-45770568 | GCCACCAACCCAATGCAGCC | SpCas9 |
| 4771 | DMPK O forward 19:45770546-45770568 | CCACCAACCCAATGCAGCC | SpCas9 |
| 4772 | DMPK O forward 19:45770547-45770568 | CACCAACCCAATGCAGCC | SpCas9 |
| 4773 | DMPK O forward 19:45770541-45770569 | GTGGGCCACCAACCCAATGCAGCCC | SpCas9 |
| 4774 | DMPK O forward 19:45770542-45770569 | TGGGCCACCAACCCAATGCAGCCC | SpCas9 |
| 4775 | DMPK O forward 19:45770543-45770569 | GGGCCACCAACCCAATGCAGCCC | SpCas9 |
| 4776 | DMPK O forward 19:45770544-45770569 | GGCCACCAACCCAATGCAGCCC | SpCas9 |
| 4777 | DMPK O forward 19:45770545-45770569 | GCCACCAACCCAATGCAGCCC | SpCas9 |
| 4778 | DMPK O forward 19:45770546-45770569 | CCACCAACCCAATGCAGCCC | SpCas9 |
| 4779 | DMPK O forward 19:45770547-45770569 | CACCAACCCAATGCAGCCC | SpCas9 |
| 4780 | DMPK O forward 19:45770548-45770569 | ACCAACCCAATGCAGCCC | SpCas9 |
| 4781 | DMPK O forward 19:45770542-45770570 | TGGGCCACCAACCCAATGCAGCCCA | SpCas9 |
| 4782 | DMPK O forward 19:45770543-45770570 | GGGCCACCAACCCAATGCAGCCCA | SpCas9 |
| 4783 | DMPK O forward 19:45770544-45770570 | GGCCACCAACCCAATGCAGCCCA | SpCas9 |
| 4784 | DMPK O forward 19:45770545-45770570 | GCCACCAACCCAATGCAGCCCA | SpCas9 |
| 4785 | DMPK O forward 19:45770546-45770570 | CCACCAACCCAATGCAGCCCA | SpCas9 |
| 4786 | DMPK O forward 19:45770547-45770570 | CACCAACCCAATGCAGCCCA | SpCas9 |
| 4787 | DMPK O forward 19:45770548-45770570 | ACCAACCCAATGCAGCCCA | SpCas9 |
| 4788 | DMPK O forward 19:45770549-45770570 | CCAACCCAATGCAGCCCA | SpCas9 |
| 4789 | DMPK O forward 19:45770545-45770573 | GCCACCAACCCAATGCAGCCCAGGG | SpCas9 |
| 4790 | DMPK O forward 19:45770546-45770573 | CCACCAACCCAATGCAGCCCAGGG | SpCas9 |
| 4791 | DMPK O forward 19:45770547-45770573 | CACCAACCCAATGCAGCCCAGGG | SpCas9 |
| 4792 | DMPK O forward 19:45770548-45770573 | ACCAACCCAATGCAGCCCAGGG | SpCas9 |
| 4793 | DMPK O forward 19:45770549-45770573 | CCAACCCAATGCAGCCCAGGG | SpCas9 |
| 4794 | DMPK O forward 19:45770550-45770573 | CAACCCAATGCAGCCCAGGG | SpCas9 |
| 4795 | DMPK O forward 19:45770551-45770573 | AACCCAATGCAGCCCAGGG | SpCas9 |
| 4796 | DMPK O forward 19:45770552-45770573 | ACCCAATGCAGCCCAGGG | SpCas9 |
| 4797 | DMPK O reverse 19:45770546-45770574 | GCCGCCCTGGGCTGCATTGGGTTGG | SpCas9 |
| 4798 | DMPK O reverse 19:45770547-45770574 | CCGCCCTGGGCTGCATTGGGTTGG | SpCas9 |
| 4799 | DMPK O reverse 19:45770548-45770574 | CGCCCTGGGCTGCATTGGGTTGG | SpCas9 |
| 4800 | DMPK O reverse 19:45770549-45770574 | GCCCTGGGCTGCATTGGGTTGG | SpCas9 |
| 4801 | DMPK O reverse 19:45770550-45770574 | CCCTGGGCTGCATTGGGTTGG | SpCas9 |
| 4802 | DMPK O reverse 19:45770551-45770574 | CCTGGGCTGCATTGGGTTGG | SpCas9 |
| 4803 | DMPK O reverse 19:45770552-45770574 | CTGGGCTGCATTGGGTTGG | SpCas9 |
| 4804 | DMPK O reverse 19:45770553-45770574 | TGGGCTGCATTGGGTTGG | SpCas9 |
| 4805 | DMPK O forward 19:45770548-45770576 | ACCAACCCAATGCAGCCCAGGGCGG | SpCas9 |
| 4806 | DMPK O forward 19:45770549-45770576 | CCAACCCAATGCAGCCCAGGGCGG | SpCas9 |
| 4807 | DMPK O forward 19:45770550-45770576 | CAACCCAATGCAGCCCAGGGCGG | SpCas9 |
| 4808 | DMPK O forward 19:45770551-45770576 | AACCCAATGCAGCCCAGGGCGG | SpCas9 |
| 4809 | DMPK O forward 19:45770552-45770576 | ACCCAATGCAGCCCAGGGCGG | SpCas9 |
| 4810 | DMPK O forward 19:45770553-45770576 | CCCAATGCAGCCCAGGGCGG | SpCas9 |
| 4811 | DMPK O forward 19:45770554-45770576 | CCAATGCAGCCCAGGGCGG | SpCas9 |
| 4812 | DMPK O forward 19:45770555-45770576 | CAATGCAGCCCAGGGCGG | SpCas9 |
| 4813 | DMPK O reverse 19:45770549-45770577 | GCCGCCGCCCTGGGCTGCATTGGGT | SpCas9 |
| 4814 | DMPK O reverse 19:45770550-45770577 | CCGCCGCCCTGGGCTGCATTGGGT | SpCas9 |
| 4815 | DMPK O reverse 19:45770551-45770577 | CGCCGCCCTGGGCTGCATTGGGT | SpCas9 |
| 4816 | DMPK O reverse 19:45770552-45770577 | GCCGCCCTGGGCTGCATTGGGT | SpCas9 |
| 4817 | DMPK O reverse 19:45770553-45770577 | CCGCCCTGGGCTGCATTGGGT | SpCas9 |
| 4818 | DMPK O reverse 19:45770554-45770577 | CGCCCTGGGCTGCATTGGGT | SpCas9 |
| 4819 | DMPK O reverse 19:45770555-45770577 | GCCCTGGGCTGCATTGGGT | SpCas9 |
| 4820 | DMPK O reverse 19:45770556-45770577 | CCCTGGGCTGCATTGGGT | SpCas9 |
| 4821 | DMPK O reverse 19:45770553-45770581 | TCGTGCCGCCGCCCTGGGCTGCATT | SpCas9 |
| 4822 | DMPK O reverse 19:45770554-45770581 | CGTGCCGCCGCCCTGGGCTGCATT | SpCas9 |
| 4823 | DMPK O reverse 19:45770555-45770581 | GTGCCGCCGCCCTGGGCTGCATT | SpCas9 |
| 4824 | DMPK O reverse 19:45770556-45770581 | TGCCGCCGCCCTGGGCTGCATT | SpCas9 |
| 4825 | DMPK O reverse 19:45770557-45770581 | GCCGCCGCCCTGGGCTGCATT | SpCas9 |
| 4826 | DMPK O reverse 19:45770558-45770581 | CCGCCGCCCTGGGCTGCATT | SpCas9 |
| 4827 | DMPK O reverse 19:45770559-45770581 | CGCCGCCCTGGGCTGCATT | SpCas9 |
| 4828 | DMPK O reverse 19:45770560-45770581 | GCCGCCCTGGGCTGCATT | SpCas9 |
| 4829 | DMPK O forward 19:45770554-45770582 | CCAATGCAGCCCAGGGCGGCGGCAC | SpCas9 |
| 4830 | DMPK O forward 19:45770555-45770582 | CAATGCAGCCCAGGGCGGCGGCAC | SpCas9 |
| 4831 | DMPK O forward 19:45770556-45770582 | AATGCAGCCCAGGGCGGCGGCAC | SpCas9 |
| 4832 | DMPK O forward 19:45770557-45770582 | ATGCAGCCCAGGGCGGCGGCAC | SpCas9 |
| 4833 | DMPK O forward 19:45770558-45770582 | TGCAGCCCAGGGCGGCGGCAC | SpCas9 |
| 4834 | DMPK O forward 19:45770559-45770582 | GCAGCCCAGGGCGGCGGCAC | SpCas9 |
| 4835 | DMPK O forward 19:45770560-45770582 | CAGCCCAGGGCGGCGGCAC | SpCas9 |
| 4836 | DMPK O forward 19:45770561-45770582 | AGCCCAGGGCGGCGGCAC | SpCas9 |
| 4837 | DMPK O reverse 19:45770554-45770582 | CTCGTGCCGCCGCCCTGGGCTGCAT | SpCas9 |
| 4838 | DMPK O reverse 19:45770555-45770582 | TCGTGCCGCCGCCCTGGGCTGCAT | SpCas9 |
| 4839 | DMPK O reverse 19:45770556-45770582 | CGTGCCGCCGCCCTGGGCTGCAT | SpCas9 |
| 4840 | DMPK O reverse 19:45770557-45770582 | GTGCCGCCGCCCTGGGCTGCAT | SpCas9 |
| 4841 | DMPK O reverse 19:45770558-45770582 | TGCCGCCGCCCTGGGCTGCAT | SpCas9 |
| 4842 | DMPK O reverse 19:45770559-45770582 | GCCGCCGCCCTGGGCTGCAT | SpCas9 |
| 4843 | DMPK O reverse 19:45770560-45770582 | CCGCCGCCCTGGGCTGCAT | SpCas9 |
| 4844 | DMPK O reverse 19:45770561-45770582 | CGCCGCCCTGGGCTGCAT | SpCas9 |
| 4845 | DMPK O forward 19:45770558-45770586 | TGCAGCCCAGGGCGGCGGCACGAGA | SpCas9 |
| 4846 | DMPK O forward 19:45770559-45770586 | GCAGCCCAGGGCGGCGGCACGAGA | SpCas9 |
| 4847 | DMPK O forward 19:45770560-45770586 | CAGCCCAGGGCGGCGGCACGAGA | SpCas9 |
| 4848 | DMPK O forward 19:45770561-45770586 | AGCCCAGGGCGGCGGCACGAGA | SpCas9 |
| 4849 | DMPK O forward 19:45770562-45770586 | GCCCAGGGCGGCGGCACGAGA | SpCas9 |
| 4850 | DMPK O forward 19:45770563-45770586 | CCCAGGGCGGCGGCACGAGA | SpCas9 |
| 4851 | DMPK O forward 19:45770564-45770586 | CCAGGGCGGCGGCACGAGA | SpCas9 |
| 4852 | DMPK O forward 19:45770565-45770586 | CAGGGCGGCGGCACGAGA | SpCas9 |
| 4853 | DMPK O reverse 19:45770563-45770591 | TTGTTCTGTCTCGTGCCGCCGCCCT | SpCas9 |
| 4854 | DMPK O reverse 19:45770564-45770591 | TGTTCTGTCTCGTGCCGCCGCCCT | SpCas9 |
| 4855 | DMPK O reverse 19:45770565-45770591 | GTTCTGTCTCGTGCCGCCGCCCT | SpCas9 |
| 4856 | DMPK O reverse 19:45770566-45770591 | TTCTGTCTCGTGCCGCCGCCCT | SpCas9 |
| 4857 | DMPK O reverse 19:45770567-45770591 | TCTGTCTCGTGCCGCCGCCCT | SpCas9 |
| 4858 | DMPK O reverse 19:45770568-45770591 | CTGTCTCGTGCCGCCGCCCT | SpCas9 |
| 4859 | DMPK O reverse 19:45770569-45770591 | TGTCTCGTGCCGCCGCCCT | SpCas9 |
| 4860 | DMPK O reverse 19:45770570-45770591 | GTCTCGTGCCGCCGCCCT | SpCas9 |
| 4861 | DMPK O reverse 19:45770564-45770592 | GTTGTTCTGTCTCGTGCCGCCGCCC | SpCas9 |
| 4862 | DMPK O reverse 19:45770565-45770592 | TTGTTCTGTCTCGTGCCGCCGCCC | SpCas9 |
| 4863 | DMPK O reverse 19:45770566-45770592 | TGTTCTGTCTCGTGCCGCCGCCC | SpCas9 |
| 4864 | DMPK O reverse 19:45770567-45770592 | GTTCTGTCTCGTGCCGCCGCCC | SpCas9 |
| 4865 | DMPK O reverse 19:45770568-45770592 | TTCTGTCTCGTGCCGCCGCCC | SpCas9 |
| 4866 | DMPK O reverse 19:45770569-45770592 | TCTGTCTCGTGCCGCCGCCC | SpCas9 |
| 4867 | DMPK O reverse 19:45770570-45770592 | CTGTCTCGTGCCGCCGCCC | SpCas9 |
| 4868 | DMPK O reverse 19:45770571-45770592 | TGTCTCGTGCCGCCGCCC | SpCas9 |
| 4869 | DMPK O forward 19:45770566-45770594 | AGGGCGGCGGCACGAGACAGAACAA | SpCas9 |
| 4870 | DMPK O forward 19:45770567-45770594 | GGGCGGCGGCACGAGACAGAACAA | SpCas9 |
| 4871 | DMPK O forward 19:45770568-45770594 | GGCGGCGGCACGAGACAGAACAA | SpCas9 |
| 4872 | DMPK O forward 19:45770569-45770594 | GCGGCGGCACGAGACAGAACAA | SpCas9 |
| 4873 | DMPK O forward 19:45770570-45770594 | CGGCGGCACGAGACAGAACAA | SpCas9 |
| 4874 | DMPK O forward 19:45770571-45770594 | GGCGGCACGAGACAGAACAA | SpCas9 |
| 4875 | DMPK O forward 19:45770572-45770594 | GCGGCACGAGACAGAACAA | SpCas9 |
| 4876 | DMPK O forward 19:45770573-45770594 | CGGCACGAGACAGAACAA | SpCas9 |
| 4877 | DMPK O forward 19:45770573-45770601 | CGGCACGAGACAGAACAACGGCGAA | SpCas9 |
| 4878 | DMPK O forward 19:45770574-45770601 | GGCACGAGACAGAACAACGGCGAA | SpCas9 |
| 4879 | DMPK O forward 19:45770575-45770601 | GCACGAGACAGAACAACGGCGAA | SpCas9 |
| 4880 | DMPK O forward 19:45770576-45770601 | CACGAGACAGAACAACGGCGAA | SpCas9 |
| 4881 | DMPK O forward 19:45770577-45770601 | ACGAGACAGAACAACGGCGAA | SpCas9 |
| 4882 | DMPK O forward 19:45770578-45770601 | CGAGACAGAACAACGGCGAA | SpCas9 |
| 4883 | DMPK O forward 19:45770579-45770601 | GAGACAGAACAACGGCGAA | SpCas9 |
| 4884 | DMPK O forward 19:45770580-45770601 | AGACAGAACAACGGCGAA | SpCas9 |
| 4885 | DMPK O forward 19:45770574-45770602 | GGCACGAGACAGAACAACGGCGAAC | SpCas9 |
| 4886 | DMPK O forward 19:45770575-45770602 | GCACGAGACAGAACAACGGCGAAC | SpCas9 |
| 4887 | DMPK O forward 19:45770576-45770602 | CACGAGACAGAACAACGGCGAAC | SpCas9 |
| 4888 | DMPK O forward 19:45770577-45770602 | ACGAGACAGAACAACGGCGAAC | SpCas9 |
| 4889 | DMPK O forward 19:45770578-45770602 | CGAGACAGAACAACGGCGAAC | SpCas9 |
| 4890 | DMPK O forward 19:45770579-45770602 | GAGACAGAACAACGGCGAAC | SpCas9 |
| 4891 | DMPK O forward 19:45770580-45770602 | AGACAGAACAACGGCGAAC | SpCas9 |
| 4892 | DMPK O forward 19:45770581-45770602 | GACAGAACAACGGCGAAC | SpCas9 |
| 4893 | DMPK O forward 19:45770576-45770604 | CACGAGACAGAACAACGGCGAACAG | SpCas9 |
| 4894 | DMPK O forward 19:45770577-45770604 | ACGAGACAGAACAACGGCGAACAG | SpCas9 |
| 4895 | DMPK O forward 19:45770578-45770604 | CGAGACAGAACAACGGCGAACAG | SpCas9 |
| 4896 | DMPK O forward 19:45770579-45770604 | GAGACAGAACAACGGCGAACAG | SpCas9 |
| 4897 | DMPK O forward 19:45770580-45770604 | AGACAGAACAACGGCGAACAG | SpCas9 |
| 4898 | DMPK O forward 19:45770581-45770604 | GACAGAACAACGGCGAACAG | SpCas9 |
| 4899 | DMPK O forward 19:45770582-45770604 | ACAGAACAACGGCGAACAG | SpCas9 |
| 4900 | DMPK O forward 19:45770583-45770604 | CAGAACAACGGCGAACAG | SpCas9 |
| 4901 | DMPK O forward 19:45770579-45770607 | GAGACAGAACAACGGCGAACAGGAG | SpCas9 |
| 4902 | DMPK O forward 19:45770580-45770607 | AGACAGAACAACGGCGAACAGGAG | SpCas9 |
| 4903 | DMPK O forward 19:45770581-45770607 | GACAGAACAACGGCGAACAGGAG | SpCas9 |
| 4904 | DMPK O forward 19:45770582-45770607 | ACAGAACAACGGCGAACAGGAG | SpCas9 |
| 4905 | DMPK O forward 19:45770583-45770607 | CAGAACAACGGCGAACAGGAG | SpCas9 |
| 4906 | DMPK O forward 19:45770584-45770607 | AGAACAACGGCGAACAGGAG | SpCas9 |
| 4907 | DMPK O forward 19:45770585-45770607 | GAACAACGGCGAACAGGAG | SpCas9 |
| 4908 | DMPK O forward 19:45770586-45770607 | AACAACGGCGAACAGGAG | SpCas9 |
| 4909 | DMPK O forward 19:45770580-45770608 | AGACAGAACAACGGCGAACAGGAGC | SpCas9 |
| 4910 | DMPK O forward 19:45770581-45770608 | GACAGAACAACGGCGAACAGGAGC | SpCas9 |
| 4911 | DMPK O forward 19:45770582-45770608 | ACAGAACAACGGCGAACAGGAGC | SpCas9 |
| 4912 | DMPK O forward 19:45770583-45770608 | CAGAACAACGGCGAACAGGAGC | SpCas9 |
| 4913 | DMPK O forward 19:45770584-45770608 | AGAACAACGGCGAACAGGAGC | SpCas9 |
| 4914 | DMPK O forward 19:45770585-45770608 | GAACAACGGCGAACAGGAGC | SpCas9 |
| 4915 | DMPK O forward 19:45770586-45770608 | AACAACGGCGAACAGGAGC | SpCas9 |
| 4916 | DMPK O forward 19:45770587-45770608 | ACAACGGCGAACAGGAGC | SpCas9 |
| 4917 | DMPK O forward 19:45770581-45770609 | GACAGAACAACGGCGAACAGGAGCA | SpCas9 |
| 4918 | DMPK O forward 19:45770582-45770609 | ACAGAACAACGGCGAACAGGAGCA | SpCas9 |
| 4919 | DMPK O forward 19:45770583-45770609 | CAGAACAACGGCGAACAGGAGCA | SpCas9 |
| 4920 | DMPK O forward 19:45770584-45770609 | AGAACAACGGCGAACAGGAGCA | SpCas9 |
| 4921 | DMPK O forward 19:45770585-45770609 | GAACAACGGCGAACAGGAGCA | SpCas9 |
| 4922 | DMPK O forward 19:45770586-45770609 | AACAACGGCGAACAGGAGCA | SpCas9 |
| 4923 | DMPK O forward 19:45770587-45770609 | ACAACGGCGAACAGGAGCA | SpCas9 |
| 4924 | DMPK O forward 19:45770588-45770609 | CAACGGCGAACAGGAGCA | SpCas9 |
| 4925 | DMPK O forward 19:45770585-45770613 | GAACAACGGCGAACAGGAGCAGGGA | SpCas9 |
| 4926 | DMPK O forward 19:45770586-45770613 | AACAACGGCGAACAGGAGCAGGGA | SpCas9 |
| 4927 | DMPK O forward 19:45770587-45770613 | ACAACGGCGAACAGGAGCAGGGA | SpCas9 |
| 4928 | DMPK O forward 19:45770588-45770613 | CAACGGCGAACAGGAGCAGGGA | SpCas9 |
| 4929 | DMPK O forward 19:45770589-45770613 | AACGGCGAACAGGAGCAGGGA | SpCas9 |
| 4930 | DMPK O forward 19:45770590-45770613 | ACGGCGAACAGGAGCAGGGA | SpCas9 |
| 4931 | DMPK O forward 19:45770591-45770613 | CGGCGAACAGGAGCAGGGA | SpCas9 |
| 4932 | DMPK O forward 19:45770592-45770613 | GGCGAACAGGAGCAGGGA | SpCas9 |
| 4933 | DMPK O forward 19:45770597-45770625 | ACAGGAGCAGGGAAAGCGCCTCCGA | SpCas9 |
| 4934 | DMPK O forward 19:45770598-45770625 | CAGGAGCAGGGAAAGCGCCTCCGA | SpCas9 |
| 4935 | DMPK O forward 19:45770599-45770625 | AGGAGCAGGGAAAGCGCCTCCGA | SpCas9 |
| 4936 | DMPK O forward 19:45770600-45770625 | GGAGCAGGGAAAGCGCCTCCGA | SpCas9 |
| 4937 | DMPK O forward 19:45770601-45770625 | GAGCAGGGAAAGCGCCTCCGA | SpCas9 |
| 4938 | DMPK O forward 19:45770602-45770625 | AGCAGGGAAAGCGCCTCCGA | SpCas9 |
| 4939 | DMPK O forward 19:45770603-45770625 | GCAGGGAAAGCGCCTCCGA | SpCas9 |
| 4940 | DMPK O forward 19:45770604-45770625 | CAGGGAAAGCGCCTCCGA | SpCas9 |
| 4941 | DMPK O forward 19:45770598-45770626 | CAGGAGCAGGGAAAGCGCCTCCGAT | SpCas9 |
| 4942 | DMPK O forward 19:45770599-45770626 | AGGAGCAGGGAAAGCGCCTCCGAT | SpCas9 |
| 4943 | DMPK O forward 19:45770600-45770626 | GGAGCAGGGAAAGCGCCTCCGAT | SpCas9 |
| 4944 | DMPK O forward 19:45770601-45770626 | GAGCAGGGAAAGCGCCTCCGAT | SpCas9 |
| 4945 | DMPK O forward 19:45770602-45770626 | AGCAGGGAAAGCGCCTCCGAT | SpCas9 |
| 4946 | DMPK O forward 19:45770603-45770626 | GCAGGGAAAGCGCCTCCGAT | SpCas9 |
| 4947 | DMPK O forward 19:45770604-45770626 | CAGGGAAAGCGCCTCCGAT | SpCas9 |
| 4948 | DMPK O forward 19:45770605-45770626 | AGGGAAAGCGCCTCCGAT | SpCas9 |
| 4949 | DMPK O forward 19:45770602-45770630 | AGCAGGGAAAGCGCCTCCGATAGGC | SpCas9 |
| 4950 | DMPK O forward 19:45770603-45770630 | GCAGGGAAAGCGCCTCCGATAGGC | SpCas9 |
| 4951 | DMPK O forward 19:45770604-45770630 | CAGGGAAAGCGCCTCCGATAGGC | SpCas9 |
| 4952 | DMPK O forward 19:45770605-45770630 | AGGGAAAGCGCCTCCGATAGGC | SpCas9 |
| 4953 | DMPK O forward 19:45770606-45770630 | GGGAAAGCGCCTCCGATAGGC | SpCas9 |
| 4954 | DMPK O forward 19:45770607-45770630 | GGAAAGCGCCTCCGATAGGC | SpCas9 |
| 4955 | DMPK O forward 19:45770608-45770630 | GAAAGCGCCTCCGATAGGC | SpCas9 |
| 4956 | DMPK O forward 19:45770609-45770630 | AAAGCGCCTCCGATAGGC | SpCas9 |
| 4957 | DMPK O forward 19:45770603-45770631 | GCAGGGAAAGCGCCTCCGATAGGCC | SpCas9 |
| 4958 | DMPK O forward 19:45770604-45770631 | CAGGGAAAGCGCCTCCGATAGGCC | SpCas9 |
| 4959 | DMPK O forward 19:45770605-45770631 | AGGGAAAGCGCCTCCGATAGGCC | SpCas9 |
| 4960 | DMPK O forward 19:45770606-45770631 | GGGAAAGCGCCTCCGATAGGCC | SpCas9 |
| 4961 | DMPK O forward 19:45770607-45770631 | GGAAAGCGCCTCCGATAGGCC | SpCas9 |
| 4962 | DMPK O forward 19:45770608-45770631 | GAAAGCGCCTCCGATAGGCC | SpCas9 |
| 4963 | DMPK O forward 19:45770609-45770631 | AAAGCGCCTCCGATAGGCC | SpCas9 |
| 4964 | DMPK O forward 19:45770610-45770631 | AAGCGCCTCCGATAGGCC | SpCas9 |
| 4965 | DMPK O forward 19:45770608-45770636 | GAAAGCGCCTCCGATAGGCCAGGCC | SpCas9 |
| 4966 | DMPK O forward 19:45770609-45770636 | AAAGCGCCTCCGATAGGCCAGGCC | SpCas9 |
| 4967 | DMPK O forward 19:45770610-45770636 | AAGCGCCTCCGATAGGCCAGGCC | SpCas9 |
| 4968 | DMPK O forward 19:45770611-45770636 | AGCGCCTCCGATAGGCCAGGCC | SpCas9 |
| 4969 | DMPK O forward 19:45770612-45770636 | GCGCCTCCGATAGGCCAGGCC | SpCas9 |
| 4970 | DMPK O forward 19:45770613-45770636 | CGCCTCCGATAGGCCAGGCC | SpCas9 |
| 4971 | DMPK O forward 19:45770614-45770636 | GCCTCCGATAGGCCAGGCC | SpCas9 |
| 4972 | DMPK O forward 19:45770615-45770636 | CCTCCGATAGGCCAGGCC | SpCas9 |
| 4973 | DMPK O forward 19:45770609-45770637 | AAAGCGCCTCCGATAGGCCAGGCCT | SpCas9 |
| 4974 | DMPK O forward 19:45770610-45770637 | AAGCGCCTCCGATAGGCCAGGCCT | SpCas9 |
| 4975 | DMPK O forward 19:45770611-45770637 | AGCGCCTCCGATAGGCCAGGCCT | SpCas9 |
| 4976 | DMPK O forward 19:45770612-45770637 | GCGCCTCCGATAGGCCAGGCCT | SpCas9 |
| 4977 | DMPK O forward 19:45770613-45770637 | CGCCTCCGATAGGCCAGGCCT | SpCas9 |
| 4978 | DMPK O forward 19:45770614-45770637 | GCCTCCGATAGGCCAGGCCT | SpCas9 |
| 4979 | DMPK O forward 19:45770615-45770637 | CCTCCGATAGGCCAGGCCT | SpCas9 |
| 4980 | DMPK O forward 19:45770616-45770637 | CTCCGATAGGCCAGGCCT | SpCas9 |
| 4981 | DMPK O forward 19:45770610-45770638 | AAGCGCCTCCGATAGGCCAGGCCTA | SpCas9 |
| 4982 | DMPK O forward 19:45770611-45770638 | AGCGCCTCCGATAGGCCAGGCCTA | SpCas9 |
| 4983 | DMPK O forward 19:45770612-45770638 | GCGCCTCCGATAGGCCAGGCCTA | SpCas9 |
| 4984 | DMPK O forward 19:45770613-45770638 | CGCCTCCGATAGGCCAGGCCTA | SpCas9 |
| 4985 | DMPK O forward 19:45770614-45770638 | GCCTCCGATAGGCCAGGCCTA | SpCas9 |
| 4986 | DMPK O forward 19:45770615-45770638 | CCTCCGATAGGCCAGGCCTA | SpCas9 |
| 4987 | DMPK O forward 19:45770616-45770638 | CTCCGATAGGCCAGGCCTA | SpCas9 |
| 4988 | DMPK O forward 19:45770617-45770638 | TCCGATAGGCCAGGCCTA | SpCas9 |
| 4989-5000 | Not used | | |
| 5070 | FMR1 3 forward X:147912120-147912146 | AGCGCCCGCAGCCCACCTCT | SaCas9 |
| 5262 | FMR1 3 forward X:147912120-147912143 | AGCGCCCGCAGCCCACCTCT | SpCas9 |
| 5264 | FMR1 3 forward X:147912122-147912143 | CGCCCGCAGCCCACCTCT | SpCas9 |
| 5310 | FMR1 3 forward X:147912126-147912149 | CGCAGCCCACCTCTCGGGGG | SpCas9 |
| 5312 | FMR1 3 forward X:147912128-147912149 | CAGCCCACCTCTCGGGGG | SpCas9 |
| 5334 | FMR1 3 reverse X:147912130-147912153 | CGCCCCCGAGAGGTGGGCTG | SpCas9 |
| 5336 | FMR1 3 reverse X:147912132-147912153 | CCCCCGAGAGGTGGGCTG | SpCas9 |
| 5622 | FMR1 5 reverse X:147911956-147911982 | GCTCAGAGGCGGCCCTCCAC | SaCas9 |
| 5782 | FMR1 5 reverse X:147911959-147911982 | GCTCAGAGGCGGCCCTCCAC | SpCas9 |
| 5830 | FMR1 5 reverse X:147911973-147911996 | TCGGCCCGCCGCCCGCTCAG | SpCas9 |
| 5832 | FMR1 5 reverse X:147911975-147911996 | GGCCCGCCGCCCGCTCAG | SpCas9 |
| 5926 | FMR1 5 forward X:147911999-147912022 | GCGGGCGGCGGCGGTGACGG | SpCas9 |
| 5950 | FMR1 5 forward X:147912013-147912036 | TGACGGAGGCGCCGCTGCCA | SpCas9 |
| 5998 | FMR1 5 forward X:147912030-147912053 | CCAGGGGGCGTGCGGCAGCG | SpCas9 |
| 6022 | FMR1 5 reverse X:147912035-147912058 | CCGCGCTGCCGCACGCCCCC | SpCas9 |
| 6024 | FMR1 5 reverse X:147912037-147912058 | GCGCTGCCGCACGCCCCC | SpCas9 |
| 7265-7300 | Not Used | | |
| 7445 | FXN 3 forward 9:69037505-69037527 | CCAGCATCTCTGGAAAAA | As/LbCpf1 |
| 7447 | FXN 3 forward 9:69037505-69037529 | CCAGCATCTCTGGAAAAATA | As/LbCpf1 |
| 7461 | FXN 3 forward 9:69037578-69037600 | TTACTTGGCTTCTGTGCA | As/LbCpf1 |
| 7463 | FXN 3 forward 9:69037578-69037602 | TTACTTGGCTTCTGTGCACT | As/LbCpf1 |
| 7678 | FXN 3 forward 9:69038085-69038108 | TGGATAGATGGTTAGCAAC | As/LbCpf1 |
| 7680 | FXN 3 forward 9:69038085-69038110 | TGGATAGATGGTTAGCAACCT | As/LbCpf1 |
| 26530 | FXN 3 forward 9:69037499-69037522 | AATGGATTTCCCAGCATCTC | SpCas9 |
| 26546 | FXN 3 forward 9:69037508-69037531 | CCCAGCATCTCTGGAAAAAT | SpCas9 |
| 26562 | FXN 3 reverse 9:69037513-69037536 | CCTATTTTTCCAGAGATGCT | SpCas9 |
| 26570 | FXN 3 reverse 9:69037514-69037537 | GCCTATTTTTCCAGAGATGC | SpCas9 |
| 26578 | FXN 3 forward 9:69037517-69037540 | TCTGGAAAAATAGGCAAGTG | SpCas9 |
| 26602 | FXN 3 forward 9:69037526-69037549 | ATAGGCAAGTGTGGCCATGA | SpCas9 |
| 26626 | FXN 3 forward 9:69037545-69037568 | ATGGTCCTTAGATCTCCTCT | SpCas9 |
| 26634 | FXN 3 reverse 9:69037545-69037568 | AGGAGATCTAAGGACCATCA | SpCas9 |
| 26698 | FXN 3 forward 9:69037567-69037590 | GAAAGCAGACATTTATTACT | SpCas9 |
| 26746 | FXN 3 forward 9:69037600-69037623 | CTATCTGAGCTGCCACGTAT | SpCas9 |
| 26754 | FXN 3 forward 9:69037601-69037624 | TATCTGAGCTGCCACGTATT | SpCas9 |
| 26786 | FXN 3 reverse 9:69037617-69037640 | AGGGGTGGAAGCCCAATACG | SpCas9 |
| 26882 | FXN 3 reverse 9:69037641-69037664 | ACAACCCATGCTGTCCACAC | SpCas9 |
| 27722 | FXN 3 forward 9:69037985-69038008 | AGGTGGTACAGTTTTTTAGA | SpCas9 |
| 27730 | FXN 3 forward 9:69037992-69038015 | ACAGTTTTTTAGATGGTACC | SpCas9 |
| 27738 | FXN 3 forward 9:69037995-69038018 | GTTTTTTAGATGGTACCTGG | SpCas9 |
| 27754 | FXN 3 forward 9:69038004-69038027 | ATGGTACCTGGTGGCTGTTA | SpCas9 |
| 27762 | FXN 3 forward 9:69038005-69038028 | TGGTACCTGGTGGCTGTTAA | SpCas9 |
| 27770 | FXN 3 reverse 9:69038015-69038038 | AATAGCCCTTAACAGCCACC | SpCas9 |
| 27802 | FXN 3 forward 9:69038034-69038057 | ACTGACAAACACACCCAACT | SpCas9 |
| 27842 | FXN 3 forward 9:69038051-69038074 | ACTTGGCGCTGCCGCCCAGG | SpCas9 |
| 27850 | FXN 3 reverse 9:69038052-69038075 | CTGGGCGGCAGCGCCAAGTT | SpCas9 |
| 27922 | FXN 3 reverse 9:69038070-69038093 | AAACCCAGTGTCCACCTCCT | SpCas9 |
| 27946 | FXN 3 forward 9:69038077-69038100 | ACACTGGGTTTCTGGATAGA | SpCas9 |
| 27986 | FXN 3 forward 9:69038101-69038124 | TAGCAACCTCTGTCACCAGC | SpCas9 |
| 28114 | FXN 3 forward 9:69038175-69038198 | CATAGTTCCCTTGCACATCT | SpCas9 |
| 28122 | FXN 3 forward 9:69038176-69038199 | ATAGTTCCCTTGCACATCTT | SpCas9 |
| 28130 | FXN 3 reverse 9:69038179-69038202 | CAAGATGTGCAAGGGAACTA | SpCas9 |
| 28146 | FXN 3 forward 9:69038185-69038208 | TTGCACATCTTGGGTATTTG | SpCas9 |
| 28186 | FXN 3 forward 9:69038191-69038214 | ATCTTGGGTATTTGAGGAGT | SpCas9 |
| 28194 | FXN 3 forward 9:69038192-69038215 | TCTTGGGTATTTGAGGAGTT | SpCas9 |
| 28322 | FXN 3 forward 9:69038256-69038279 | TTTTAAAGCCCTGACTGTCC | SpCas9 |
| 28338 | FXN 3 reverse 9:69038269-69038292 | GGGTCAATCCAGGACAGTCA | SpCas9 |
| 28346 | FXN 3 reverse 9:69038270-69038293 | AGGGTCAATCCAGGACAGTC | SpCas9 |
| 28370 | FXN 3 forward 9:69038278-69038301 | GATTGACCCTAAGCTCCCCC | SpCas9 |
| 28378 | FXN 3 reverse 9:69038279-69038302 | GGGGAGCTTAGGGTCAATCC | SpCas9 |
| 28458 | FXN 3 reverse 9:69038301-69038324 | TCTGATGAATTTTGGAGACC | SpCas9 |
| 28506 | FXN 3 forward 9:69038315-69038338 | CAGAAACTGAGTTCACTTGA | SpCas9 |
| 28634 | FXN 3 reverse 9:69038366-69038389 | GCTTTAGAAGTAGATGCAAG | SpCas9 |
| 28642 | FXN 3 reverse 9:69038367-69038390 | TGCTTTAGAAGTAGATGCAA | SpCas9 |
| 28650 | FXN 3 reverse 9:69038368-69038391 | CTGCTTTAGAAGTAGATGCA | SpCas9 |
| 33388 | FXN 3 reverse 9:69040573-69040594 | CACGCCATTCTCCTGCCT | SpCas9 |
| 34442 | FXN 3 reverse 9:69041083-69041106 | ACAAATTCTATCTCTTAACC | SpCas9 |
| 45906 | FXN 3 reverse 9:69046038-69046061 | AGACCAAAGCAAACCCATCA | SpCas9 |
| 46766 | FXN 5 forward 9:69036522-69036545 | GAAACTGACCCGACCTTTA | As/LbCpf1 |
| 46768 | FXN 5 forward 9:69036522-69036547 | GAAACTGACCCGACCTTTATT | As/LbCpf1 |
| 46967 | FXN 5 reverse 9:69037058-69037082 | TTCAAACACAATGTGGGCCA | As/LbCpf1 |
| 47030 | FXN 5 forward 9:69037135-69037158 | CTGGCAGGACGCGGTGGCT | As/LbCpf1 |
| 47032 | FXN 5 forward 9:69037135-69037160 | CTGGCAGGACGCGGTGGCTCA | As/LbCpf1 |
| 47045 | FXN 5 reverse 9:69037219-69037241 | ACCATGTTGGCCAGGTTA | As/LbCpf1 |
| 47047 | FXN 5 reverse 9:69037219-69037243 | ACCATGTTGGCCAGGTTAGT | As/LbCpf1 |
| 49986 | FXN 5 forward 9:69035996-69036019 | CGCCGCACGCCTGCGCAGGG | SpCas9 |
| 50394 | FXN 5 forward 9:69036141-69036164 | CACTGGCTTCTGCTTTCCGA | SpCas9 |
| 50538 | FXN 5 forward 9:69036189-69036212 | GCGACTGCGGGTCAAGGCAC | SpCas9 |
| 50674 | FXN 5 forward 9:69036229-69036252 | GGTGGAGGGGACCGGTTCCG | SpCas9 |
| 50682 | FXN 5 forward 9:69036230-69036253 | GTGGAGGGGACCGGTTCCGA | SpCas9 |
| 50706 | FXN 5 forward 9:69036238-69036261 | GACCGGTTCCGAGGGGTGTG | SpCas9 |
| 50714 | FXN 5 reverse 9:69036245-69036268 | AGCCGCACACCCCTCGGAAC | SpCas9 |
| 50898 | FXN 5 forward 9:69036417-69036440 | ACACCTAATATTTTCAAGGC | SpCas9 |
| 50978 | FXN 5 reverse 9:69036467-69036490 | TGAAAGTTTCACCTCGTTCC | SpCas9 |
| 51058 | FXN 5 forward 9:69036490-69036513 | GCAGAATAGCTAGAGCAGCA | SpCas9 |
| 51162 | FXN 5 reverse 9:69036540-69036563 | GCAGAATCTGGAATAAAGGT | SpCas9 |
| 51322 | FXN 5 forward 9:69036592-69036615 | CCCCTAACCTCTCTGAGACG | SpCas9 |
| 51362 | FXN 5 reverse 9:69036604-69036627 | AACAAAGCCACGTCTCAGAG | SpCas9 |
| 51394 | FXN 5 forward 9:69036608-69036631 | GACGTGGCTTTGTTTTCTGT | SpCas9 |
| 51466 | FXN 5 forward 9:69036638-69036661 | TAAAGGTGACGCCCATTTTG | SpCas9 |
| 51474 | FXN 5 forward 9:69036644-69036667 | TGACGCCCATTTTGCGGACC | SpCas9 |
| 51490 | FXN 5 forward 9:69036651-69036674 | CATTTTGCGGACCTGGTGTG | SpCas9 |
| 51498 | FXN 5 reverse 9:69036654-69036677 | TCACACCAGGTCCGCAAAAT | SpCas9 |
| 51506 | FXN 5 reverse 9:69036655-69036678 | CTCACACCAGGTCCGCAAAA | SpCas9 |
| 51650 | FXN 5 reverse 9:69036728-69036751 | GTACCCCCCAAAGGAAGAAA | SpCas9 |
| 51658 | FXN 5 reverse 9:69036729-69036752 | TGTACCCCCCAAAGGAAGAA | SpCas9 |
| 51682 | FXN 5 reverse 9:69036737-69036760 | TATTTCTTTGTACCCCCCAA | SpCas9 |
| 51706 | FXN 5 forward 9:69036753-69036776 | TATCTGACCCAGTTACGCCA | SpCas9 |
| 51746 | FXN 5 forward 9:69036765-69036788 | TTACGCCACGGCTTGAAAGG | SpCas9 |
| 51754 | FXN 5 reverse 9:69036765-69036788 | TTTCAAGCCGTGGCGTAACT | SpCas9 |
| 51762 | FXN 5 reverse 9:69036766-69036789 | CTTTCAAGCCGTGGCGTAAC | SpCas9 |
| 51810 | FXN 5 forward 9:69036787-69036810 | GAAACCCAAAGAATGGCTGT | SpCas9 |
| 51898 | FXN 5 forward 9:69036810-69036833 | GATGAGGAAGATTCCTCAAG | SpCas9 |
| 51914 | FXN 5 forward 9:69036813-69036836 | GAGGAAGATTCCTCAAGGGG | SpCas9 |
| 51930 | FXN 5 reverse 9:69036828-69036851 | AATACCATGTCCTCCCCTTG | SpCas9 |
| 51954 | FXN 5 forward 9:69036831-69036854 | GGAGGACATGGTATTTAATG | SpCas9 |
| 52066 | FXN 5 forward 9:69036874-69036897 | GTGGTAGAGGGTGTTTCACG | SpCas9 |
| 52082 | FXN 5 forward 9:69036877-69036900 | GTAGAGGGTGTTTCACGAGG | SpCas9 |
| 52090 | FXN 5 forward 9:69036878-69036901 | TAGAGGGTGTTTCACGAGGA | SpCas9 |
| 52098 | FXN 5 forward 9:69036888-69036911 | TTCACGAGGAGGGAACCGTC | SpCas9 |
| 52106 | FXN 5 forward 9:69036889-69036912 | TCACGAGGAGGGAACCGTCT | SpCas9 |
| 52250 | FXN 5 forward 9:69036932-69036955 | GGGGATCCCTTCAGAGTGGC | SpCas9 |
| 52258 | FXN 5 reverse 9:69036943-69036966 | GGCGTACCAGCCACTCTGAA | SpCas9 |
| 52266 | FXN 5 reverse 9:69036944-69036967 | CGGCGTACCAGCCACTCTGA | SpCas9 |
| 52290 | FXN 5 forward 9:69036950-69036973 | GCTGGTACGCCGCATGTATT | SpCas9 |
| 52298 | FXN 5 forward 9:69036951-69036974 | CTGGTACGCCGCATGTATTA | SpCas9 |
| 52306 | FXN 5 forward 9:69036952-69036975 | TGGTACGCCGCATGTATTAG | SpCas9 |
| 52354 | FXN 5 reverse 9:69036964-69036987 | TTCATCTCCCCTAATACATG | SpCas9 |
| 52386 | FXN 5 reverse 9:69036996-69037019 | ACACAAATATGGCTTGGACG | SpCas9 |
| 52418 | FXN 5 reverse 9:69037007-69037030 | TCCGGAGAGCAACACAAATA | SpCas9 |
| 52434 | FXN 5 forward 9:69037016-69037039 | CTCTCCGGAGTTTGTACTTT | SpCas9 |
| 52458 | FXN 5 reverse 9:69037025-69037048 | CAAGCCTAAAGTACAAACTC | SpCas9 |
| 52474 | FXN 5 forward 9:69037043-69037066 | AACTTCCCACACGTGTTATT | SpCas9 |
| 52498 | FXN 5 reverse 9:69037053-69037076 | GTGGGCCAAATAACACGTGT | SpCas9 |
| 52506 | FXN 5 reverse 9:69037054-69037077 | TGTGGGCCAAATAACACGTG | SpCas9 |
| 52522 | FXN 5 forward 9:69037070-69037093 | CATTGTGTTTGAAGAAACTT | SpCas9 |
| 52530 | FXN 5 forward 9:69037071-69037094 | ATTGTGTTTGAAGAAACTTT | SpCas9 |
| 52546 | FXN 5 reverse 9:69037072-69037095 | AAGTTTCTTCAAACACAATG | SpCas9 |
| 52554 | FXN 5 forward 9:69037076-69037099 | GTTTGAAGAAACTTTGGGAT | SpCas9 |
| 52594 | FXN 5 forward 9:69037098-69037121 | GTTGCCAGTGCTTAAAAGTT | SpCas9 |
| 52610 | FXN 5 reverse 9:69037107-69037130 | AAGTCCTAACTTTTAAGCAC | SpCas9 |
| 52618 | FXN 5 forward 9:69037111-69037134 | AAAAGTTAGGACTTAGAAAA | SpCas9 |
| 52634 | FXN 5 forward 9:69037120-69037143 | GACTTAGAAAATGGATTTCC | SpCas9 |
| 52666 | FXN 5 forward 9:69037130-69037153 | ATGGATTTCCTGGCAGGACG | SpCas9 |
| 52898 | FXN 5 reverse 9:69037217-69037240 | GCCAGGTTAGTCTTGAACTC | SpCas9 |

[0403] SID means SEQ ID NO. In Table 2, the descriptions have the following meaning. The target locus is indicated first, followed by a 5 or 3 to indicate whether the guide directs cleavage 5′ or 3′ of the repeat region (in the orientation of the forward strand) or an 0 to indicate that the guide falls within the repeat region or outside of the segment (e.g., UTR or intron) where the repeats occur, followed by “forward” or “reverse” to indicate the strand to which the sequence corresponds, followed by the genomic coordinates of the sequence (version GRCh38 of the human genome). Thus, for example, for SEQ ID NO: 101, the designation “DMPK 3 forward 19:45769716-45769738” means that the guide directs cleavage 3′ of the repeat region of DMPK and corresponds to the sequence of the forward strand of chromosome 19 positions 45769716-45769738. As/LbCpf1 is sometimes referred to herein as Cpf1. Where a combination of guides is to be used to direct cleavage 5′ and 3′ of a repeat region, one skilled in the art can select a combination of a 5′ guide disclosed herein and a 3′ guide disclosed herein for a given target such as DMPK, FMR1, or FXN.

[0404] Provided herein are compositions comprising one or more guide RNAs or one or more nucleic acids encoding one or more guide RNAs. Such compositions may comprise any one or more of the spacer sequences disclosed herein (see, e.g., Table 2 and the Sequence Listing).

[0405] The following are guide sequences directed to DMPK: SEQ ID NOs 101-4988. In some embodiments, a composition comprising a guide RNA or a nucleic acid encoding a guide RNA is provided, wherein the guide RNA comprises a spacer sequence comprising any one of SEQ ID NOs 101-4988. A composition comprising a guide RNA or a nucleic acid encoding a guide RNA is provided, wherein the guide RNA comprises a spacer sequence of any one of SEQ ID NOs 101-4988. The following are guide sequences directed to FMR1: SEQ ID NOs 5001-7264. In some embodiments, a composition comprising a guide RNA or a nucleic acid encoding a guide RNA is provided, wherein the guide RNA comprises a spacer sequence comprising any one of SEQ ID NOs 5001-7264. In some embodiments, a composition comprising a guide RNA or a nucleic acid encoding a guide RNA is provided, wherein the guide RNA comprises a spacer sequence of any one of SEQ ID NOs 5001-7264. The following are guide sequences directed to FXN: SEQ ID NOs 7301-53372. In some embodiments, a composition comprising a guide RNA or a nucleic acid encoding a guide RNA is provided, wherein the guide RNA comprises a spacer sequence comprising any one of SEQ ID NOs 7301-53372. In some embodiments, a composition comprising a guide RNA or a nucleic acid encoding a guide RNA is provided, wherein the guide RNA comprises a spacer sequence of any one of SEQ ID NOs 7301-53372.

[0406] In some embodiments, a composition comprising one or more guide RNAs (gRNAs), or one or more nucleic acids encoding one or more guide RNAs, is provided, wherein the guide RNAs comprise guide sequences that direct an RNA-targeted endonuclease (e.g., a Cas nuclease such as Cas9), to a target DNA sequence in or near the CTG repeat region in the myotonic dystrophy protein kinase gene (DMPK) associated with myotonic dystrophy type 1. In some embodiments, a composition is provided comprising a gRNA, or nucleic acid encoding a gRNA, wherein the gRNA comprises a DMPK guide sequence shown in Table 2 or the Sequence Listing at SEQ ID NOs: 101-4988. In some embodiments, a composition is provided comprising a gRNA, or nucleic acid encoding a gRNA, wherein the gRNA comprises 17, 18, 19, or 20 contiguous nucleotides of a DMPK guide sequence shown in Table 2 or the Sequence Listing at SEQ ID NOs: 101-4988.

[0407] In some embodiments, a composition is provided comprising a gRNA, or nucleic acid encoding a gRNA, wherein the gRNA comprises 17, 18, 19, or 20 contiguous nucleotides of any one of SEQ ID NOs: 4018, 4010, 4002, 4042, 4034, 4026, 3954, 3946, 3994, 3914, 3978, 3906, 3898, 3938, 3922, 3858, 3850, 3882, 3826, 3818, 3842, 3794, 3786, 3762, 3810, 3746, 3778, 3738, 3770, 3722, 3754, 3690, 3666, 3658, 3634, 3586, 3546, 3530, 3642, 3514, 3506, 3490, 3618, 3610, 3602, 3578, 3442, 3522, 3410, 3378, 3434, 3370, 3426, 3418, 3394, 3386, 3330, 3354, 3346, 3314, 3930, 3890, 3834, 3802, 3706, 3698, 3682, 3674, 3570, 3554, 3538, 3498, 3482, 3458, 3474, 3450, 2667, 2666, 2650, 2642, 2626, 2618, 2706, 2690, 2682, 2610, 2674, 2658, 2602, 2594, 2634, 2554, 2546, 2586, 2538, 2578, 2570, 2522, 2498, 2490, 2466, 2458, 2450, 2514, 2506, 2418, 2482, 2474, 2394, 2442, 2434, 2370, 2378, 2354, 2346, 2338, 2314, 2298, 2282, 2274, 2266, 2330, 2258, 2322, 2242, 2234, 2290, 2250, 2218, 2226, 2210, 2194, 2146, 2138, 2122, 2106, 2098, 2090, 2130, 2114, 2034, 2026, 2058, 2050, 2042, 1914, 1786, 1778, 1770, 1842, 1738, 1706, 1690, 1746, 1714, 1650, 1642, 1610, 1586, 1562, 1546, 1578, 1538, 1378, 1370, 1922, 1898, 1906, 1794, 1762, 1698, 1674, 1722, 1362, 1450, 2202, 2178, 2170, 2162, 2018, 2010, 1890, 1962, 1946, 1850, 1818, 1658, 1634, 1602, 1554, 1434, 1426, 1338, 1346, 1978, 1994, 1986, 1970, 1938, 1930, 1810, 1834, 1826, 1802, 1626, 1594, 1514, 1498, 1490, 1482, 1474, 1458, 1442, 1418, 1410, 1402, 1394, or 1386.

[0408] In some embodiments, a composition is provided comprising a gRNA, or nucleic acid encoding a gRNA, wherein the gRNA comprises a sequence with about 75%, 80%, 85%, 90%, 95%, 96%, 97%, 98%, 99%, or 100% identity to at least 17, 18, 19, or 20 contiguous nucleotides of a DMPK guide sequence shown in Table 2 or the Sequence Listing. In some embodiments, a composition is provided comprising a gRNA, or nucleic acid encoding a gRNA, wherein the gRNA comprises a sequence with about 75%, 80%, 85%, 90%, 95%, 96%, 97%, 98%, 99%, or 100% identity to a guide sequence shown in Table 2. In some embodiments, a composition is provided comprising a gRNA, or nucleic acid encoding a gRNA, wherein the gRNA further comprises a trRNA. In each composition and method embodiment described herein, the crRNA (comprising the spacer sequence) and trRNA may be associated as a single RNA (sgRNA) or may be on separate RNAs (dgRNA). In the context of sgRNAs, the crRNA and trRNA components may be covalently linked, e.g., via a phosphodiester bond or other covalent bond.

[0409] In some embodiments, a composition is provided comprising a gRNA, or nucleic acid encoding a gRNA, wherein the gRNA comprises a spacer sequence selected from SEQ ID NOs: 4018, 4010, 4002, 4042, 4034, 4026, 3954, 3946, 3994, 3914, 3978, 3906, 3898, 3938, 3922, 3858, 3850, 3882, 3826, 3818, 3842, 3794, 3786, 3762, 3810, 3746, 3778, 3738, 3770, 3722, 3754, 3690, 3666, 3658, 3634, 3586, 3546, 3530, 3642, 3514, 3506, 3490, 3618, 3610, 3602, 3578, 3442, 3522, 3410, 3378, 3434, 3370, 3426, 3418, 3394, 3386, 3330, 3354, 3346, 3314, 3930, 3890, 3834, 3802, 3706, 3698, 3682, 3674, 3570, 3554, 3538, 3498, 3482, 3458, 3474, 3450, 2667, 2666, 2650, 2642, 2626, 2618, 2706, 2690, 2682, 2610, 2674, 2658, 2602, 2594, 2634, 2554, 2546, 2586, 2538, 2578, 2570, 2522, 2498, 2490, 2466, 2458, 2450, 2514, 2506, 2418, 2482, 2474, 2394, 2442, 2434, 2370, 2378, 2354, 2346, 2338, 2314, 2298, 2282, 2274, 2266, 2330, 2258, 2322, 2242, 2234, 2290, 2250, 2218, 2226, 2210, 2194, 2146, 2138, 2122, 2106, 2098, 2090, 2130, 2114, 2034, 2026, 2058, 2050, 2042, 1914, 1786, 1778, 1770, 1842, 1738, 1706, 1690, 1746, 1714, 1650, 1642, 1610, 1586, 1562, 1546, 1578, 1538, 1378, 1370, 1922, 1898, 1906, 1794, 1762, 1698, 1674, 1722, 1362, 1450, 2202, 2178, 2170, 2162, 2018, 2010, 1890, 1962, 1946, 1850, 1818, 1658, 1634, 1602, 1554, 1434, 1426, 1338, 1346, 1978, 1994, 1986, 1970, 1938, 1930, 1810, 1834, 1826, 1802, 1626, 1594, 1514, 1498, 1490, 1482, 1474, 1458, 1442, 1418, 1410, 1402, 1394, or 1386. In some embodiments, a composition is provided comprising a gRNA, or nucleic acid encoding a gRNA, wherein the gRNA comprises a spacer sequence selected from SEQ ID NOs: 3330, 3914, 3418, 3746, 3778, 3394, 4026, 3690, 3794, 3386, 3938, 3682, 3818, 3658, 3722, 3802, 3858, 3514, 3770, 3370, 3354, 4010, 2202, 1706, 2210, 2170, 1778, 2258, 2114, 2178, 1642, 1738, 1746, 2322, 1770, 1538, 2514, 2458, 2194, 2594, 2162, and 2618. In some embodiments, a composition is provided comprising a gRNA, or nucleic acid encoding a gRNA, wherein the gRNA comprises a spacer sequence selected from SEQ ID NOs: 3746, 3778, 3394, 3386, 3938, 3818, 3722, 3858, 3370, 1706, 2210, 2114, 1538, and 2594. In some embodiments, a composition is provided comprising a gRNA, or nucleic acid encoding a gRNA, wherein the gRNA comprises a spacer sequence selected from SEQ ID NOs: 3330, 3746, 3778, 3394, 4026, 3386, 3938, 3818, 3722, 3802, 3858, 3514, 3770, 3370, 2202, 1706, 2210, 1778, 2114, 1738, 1746, 2322, 1538, 2514, 2458, 2194, and 2594. In some embodiments, a composition is provided comprising a gRNA, or nucleic acid encoding a gRNA, wherein the gRNA comprises a spacer sequence selected from SEQ ID NOs: 3330, 3914, 3418, 3746, 3778, 3394, 4026, 3690, 3794, 3386, 3938, 3682, 3818, 3658, and 3722. In some embodiments, a composition is provided comprising a gRNA, or nucleic acid encoding a gRNA, wherein the gRNA comprises a spacer sequence selected from SEQ ID NOs: 2202, 1706, 2210, 2170, 1778, 2258, 2114, 2178, 1642, 1738, 1746, and 2322. In some embodiments, a composition is provided comprising a gRNA, or nucleic acid encoding a gRNA, wherein the gRNA comprises a spacer sequence selected from SEQ ID NOs: 3778, 4026, 3794, 4010, 3906, 3746, 1778, 1746, 1770, 1586, 1914, and 2210. In some embodiments, a composition is provided comprising a gRNA, or nucleic acid encoding a gRNA, wherein the gRNA comprises a spacer sequence selected from SEQ ID NOs: 3378, 3354, 3346, 3330, 3314, 2658, 2690, 2546, 2554, 2498, and 2506. In some embodiments, a composition is provided comprising a gRNA, or nucleic acid encoding a gRNA, wherein the gRNA comprises a spacer sequence selected from SEQ ID NOs: 3330, 3314, 2658, 2690, 2554, and 2498. In some embodiments, a composition is provided comprising a gRNA, or nucleic acid encoding a gRNA, wherein the gRNA comprises a spacer sequence selected from SEQ ID NOs: 3314, 2690, 2554, and 2498. In some embodiments, a composition is provided comprising a gRNA, or nucleic acid encoding a gRNA, wherein the gRNA comprises a spacer sequence selected from SEQ ID NOs: 3914, 3514, 1778, 2458, 3858, 3418, 1706, and 2258. In some embodiments, a composition is provided comprising a gRNA, or nucleic acid encoding a gRNA, wherein the gRNA comprises a spacer sequence selected from SEQ ID NOs: 3914, 2114, 2618, and 3418. In some embodiments, a composition is provided comprising a gRNA, or nucleic acid encoding a gRNA, wherein the gRNA comprises a spacer sequence selected from SEQ ID NOs: 3916, 3420, and 3940. In some embodiments, a composition is provided comprising a gRNA, or nucleic acid encoding a gRNA, wherein the gRNA comprises a spacer sequence selected from SEQ ID NOs: 3914 and 3418. In some embodiments, a composition is provided comprising a gRNA, or nucleic acid encoding a gRNA, wherein the gRNA comprises SEQ ID NO: 3938.

[0410] In some embodiments, a composition is provided comprising a gRNA, or nucleic acid encoding a gRNA, wherein the gRNA comprises 17, 18, 19, or 20 contiguous nucleotides of a FXN guide sequence selected from SEQ ID NOs: 4018, 4010, 4002, 4042, 4034, 4026, 3954, 3946, 3994, 3914, 3978, 3906, 3898, 3938, 3922, 3858, 3850, 3882, 3826, 3818, 3842, 3794, 3786, 3762, 3810, 3746, 3778, 3738, 3770, 3722, 3754, 3690, 3666, 3658, 3634, 3586, 3546, 3530, 3642, 3514, 3506, 3490, 3618, 3610, 3602, 3578, 3442, 3522, 3410, 3378, 3434, 3370, 3426, 3418, 3394, 3386, 3330, 3354, 3346, 3314, 3930, 3890, 3834, 3802, 3706, 3698, 3682, 3674, 3570, 3554, 3538, 3498, 3482, 3458, 3474, 3450, 2667, 2666, 2650, 2642, 2626, 2618, 2706, 2690, 2682, 2610, 2674, 2658, 2602, 2594, 2634, 2554, 2546, 2586, 2538, 2578, 2570, 2522, 2498, 2490, 2466, 2458, 2450, 2514, 2506, 2418, 2482, 2474, 2394, 2442, 2434, 2370, 2378, 2354, 2346, 2338, 2314, 2298, 2282, 2274, 2266, 2330, 2258, 2322, 2242, 2234, 2290, 2250, 2218, 2226, 2210, 2194, 2146, 2138, 2122, 2106, 2098, 2090, 2130, 2114, 2034, 2026, 2058, 2050, 2042, 1914, 1786, 1778, 1770, 1842, 1738, 1706, 1690, 1746, 1714, 1650, 1642, 1610, 1586, 1562, 1546, 1578, 1538, 1378, 1370, 1922, 1898, 1906, 1794, 1762, 1698, 1674, 1722, 1362, 1450, 2202, 2178, 2170, 2162, 2018, 2010, 1890, 1962, 1946, 1850, 1818, 1658, 1634, 1602, 1554, 1434, 1426, 1338, 1346, 1978, 1994, 1986, 1970, 1938, 1930, 1810, 1834, 1826, 1802, 1626, 1594, 1514, 1498, 1490, 1482, 1474, 1458, 1442, 1418, 1410, 1402, 1394, or 1386.

[0411] In some embodiments a gRNA is useful for single cut excision of a TNR from the DMPK gene with DNA-PK inhibition. In some embodiments, the DNA-PK inhibitor enhances the single cut excision. In some embodiments, a composition is provided comprising a gRNA, or nucleic acid encoding a gRNA, wherein the gRNA comprises a spacer sequence comprising the sequence of SEQ ID NOs: 3914. In some embodiments, a composition is provided comprising a gRNA, or nucleic acid encoding a gRNA, wherein the gRNA comprises the sequence of SEQ ID NOs: 3418. In some embodiments, a composition is provided comprising a gRNA, or nucleic acid encoding a gRNA, wherein the gRNA comprises the sequence of SEQ ID NOs: 3938. In some embodiments, a composition is provided comprising a gRNA, or nucleic acid encoding a gRNA, wherein the gRNA comprises the sequence of SEQ ID NOs: 3916. In some embodiments, a composition is provided comprising a gRNA, or nucleic acid encoding a gRNA, wherein the gRNA comprises the sequence of SEQ ID NOs: 3420. In some embodiments, a composition is provided comprising a gRNA, or nucleic acid encoding a gRNA, wherein the gRNA comprises the sequence of SEQ ID NOs: 3940.

[0412] In some embodiments, a pair of guide RNAs or one or more nucleic acids encoding a pair of guide RNAs is provided as one or more compositions, wherein the pair of guide RNAs comprise a first and second spacer sequence selected from: SEQ ID NOs: 2202 and 3418; 2202 and 3370; 2202 and 3514; 2202 and 3658; 2178 and 3418; 2178 and 3370; 2178 and 3514; 2178 and 3658; 2170 and 3418; 2170 and 3370; 2170 and 3514; 2170 and 3658; 2162 and 3418; 2162 and 3370; 2162 and 3514; 2162 and 3658; 2202 and 4010; 2202 and 4026; 2202 and 3914; 2202 and 3938; 2202 and 3858; 2202 and 3818; 2202 and 3794; 2202 and 3802; 2202 and 3746; 2202 and 3778; 2202 and 3770; 2202 and 3722; 2202 and 3690; 2202 and 3682; 2202 and 3330; 2202 and 3354; 2202 and 3394; 2202 and 3386; 2178 and 4010; 2178 and 4026; 2178 and 3914; 2178 and 3938; 2178 and 3858; 2178 and 3818; 2178 and 3794; 2178 and 3802; 2178 and 3746; 2178 and 3778; 2178 and 3770; 2178 and 3722; 2178 and 3690; 2178 and 3682; 2178 and 3330; 2178 and 3354; 2178 and 3394; 2178 and 3386; 2170 and 4010; 2170 and 4026; 2170 and 3914; 2170 and 3938; 2170 and 3858; 2170 and 3818; 2170 and 3794; 2170 and 3802; 2170 and 3746; 2170 and 3778; 2170 and 3770; 2170 and 3722; 2170 and 3690; 2170 and 3682; 2170 and 3330; 2170 and 3354; 2170 and 3394; 2170 and 3386; 2162 and 4010; 2162 and 4026; 2162 and 3914; 2162 and 3938; 2162 and 3858; 2162 and 3818; 2162 and 3794; 2162 and 3802; 2162 and 3746; 2162 and 3778; 2162 and 3770; 2162 and 3722; 2162 and 3690; 2162 and 3682; 2162 and 3330; 2162 and 3354; 2162 and 3394; 2162 and 3386; 1706 and 3418; 1706 and 3370; 1706 and 3514; 1706 and 3658; 1706 and 4010; 1706 and 4026; 1706 and 3914; 1706 and 3938; 1706 and 3858; 1706 and 3818; 1706 and 3794; 1706 and 3802; 1706 and 3746; 1706 and 3778; 1706 and 3770; 1706 and 3722; 1706 and 3690; 1706 and 3682; 1706 and 3330; 1706 and 3354; 1706 and 3394; 1706 and 3386; 2210 and 3418; 2210 and 3370; 2210 and 3514; 2210 and 3658; 2210 and 4010; 2210 and 4026; 2210 and 3914; 2210 and 3938; 2210 and 3858; 2210 and 3818; 2210 and 3794; 2210 and 3802; 2210 and 3746; 2210 and 3778; 2210 and 3770; 2210 and 3722; 2210 and 3690; 2210 and 3682; 2210 and 3330; 2210 and 3354; 2210 and 3394; 2210 and 3386; 1778 and 3418; 1778 and 3370; 1778 and 3514; 1778 and 3658; 1778 and 4010; 1778 and 4026; 1778 and 3914; 1778 and 3938; 1778 and 3858; 1778 and 3818; 1778 and 3794; 1778 and 3802; 1778 and 3746; 1778 and 3778; 1778 and 3770; 1778 and 3722; 1778 and 3690; 1778 and 3682; 1778 and 3330; 1778 and 3354; 1778 and 3394; 1778 and 3386; 2258 and 3418; 2258 and 3370; 2258 and 3514; 2258 and 3658; 2258 and 4010; 2258 and 4026; 2258 and 3914; 2258 and 3938; 2258 and 3858; 2258 and 3818; 2258 and 3794; 2258 and 3802; 2258 and 3746; 2258 and 3778; 2258 and 3770; 2258 and 3722; 2258 and 3690; 2258 and 3682; 2258 and 3330; 2258 and 3354; 2258 and 3394; 2258 and 3386; 2114 and 3418; 2114 and 3370; 2114 and 3514; 2114 and 3658; 2114 and 4010; 2114 and 4026; 2114 and 3914; 2114 and 3938; 2114 and 3858; 2114 and 3818; 2114 and 3794; 2114 and 3802; 2114 and 3746; 2114 and 3778; 2114 and 3770; 2114 and 3722; 2114 and 3690; 2114 and 3682; 2114 and 3330; 2114 and 3354; 2114 and 3394; 2114 and 3386; 1642 and 3418; 1642 and 3370; 1642 and 3514; 1642 and 3658; 1642 and 4010; 1642 and 4026; 1642 and 3914; 1642 and 3938; 1642 and 3858; 1642 and 3818; 1642 and 3794; 1642 and 3802; 1642 and 3746; 1642 and 3778; 1642 and 3770; 1642 and 3722; 1642 and 3690; 1642 and 3682; 1642 and 3330; 1642 and 3354; 1642 and 3394; 1642 and 3386; 1738 and 3418; 1738 and 3370; 1738 and 3514; 1738 and 3658; 1738 and 4010; 1738 and 4026; 1738 and 3914; 1738 and 3938; 1738 and 3858; 1738 and 3818; 1738 and 3794; 1738 and 3802; 1738 and 3746; 1738 and 3778; 1738 and 3770; 1738 and 3722; 1738 and 3690; 1738 and 3682; 1738 and 3330; 1738 and 3354; 1738 and 3394; 1738 and 3386; 2258 and 3418; 2258 and 3370; 2258 and 3514; 2258 and 3658; 2258 and 4010; 2258 and 4026; 2258 and 3914; 2258 and 3938; 2258 and 3858; 2258 and 3818; 2258 and 3794; 2258 and 3802; 2258 and 3746; 2258 and 3778; 2258 and 3770; 2258 and 3722; 2258 and 3690; 2258 and 3682; 2258 and 3330; 2258 and 3354; 2258 and 3394; 2258 and 3386; 2114 and 3418; 2114 and 3370; 2114 and 3514; 2114 and 3658; 2114 and 4010; 2114 and 4026; 2114 and 3914; 2114 and 3938; 2114 and 3858; 2114 and 3818; 2114 and 3794; 2114 and 3802; 2114 and 3746; 2114 and 3778; 2114 and 3770; 2114 and 3722; 2114 and 3690; 2114 and 3682; 2114 and 3330; 2114 and 3354; 2114 and 3394; 1706 and 3386; 1642 and 3418; 1642 and 3370; 1642 and 3514; 1642 and 3658; 1642 and 4010; 1642 and 4026; 1642 and 3914; 1642 and 3938; 1642 and 3858; 1642 and 3818; 1642 and 3794; 1642 and 3802; 1642 and 3746; 1642 and 3778; 1642 and 3770; 1642 and 3722; 1642 and 3690; 1642 and 3682; 1642 and 3330; 1642 and 3354; 1642 and 3394; 1642 and 3386; 1738 and 3418; 1738 and 3370; 1738 and 3514; 1738 and 3658; 1738 and 4010; 1738 and 4026; 1738 and 3914; 1738 and 3938; 1738 and 3858; 1738 and 3818; 1738 and 3794; 1738 and 3802; 1738 and 3746; 1738 and 3778; 1738 and 3770; 1738 and 3722; 1738 and 3690; 1738 and 3682; 1738 and 3330; 1738 and 3354; 1738 and 3394; 1738 and 3386; 1746 and 3418; 1746 and 3370; 1746 and 3514; 1746 and 3658; 1746 and 4010; 1746 and 4026; 1746 and 3914; 1746 and 3938; 1746 and 3858; 1746 and 3818; 1746 and 3794; 1746 and 3802; 1746 and 3746; 1746 and 3778; 1746 and 3770; 1746 and 3722; 1746 and 3690; 1746 and 3682; 1746 and 3330; 1746 and 3354; 1746 and 3394; 1746 and 3386; 2322 and 3418; 2322 and 3370; 2322 and 3514; 2322 and 3658; 2322 and 4010; 2322 and 4026; 2322 and 3914; 2322 and 3938; 2322 and 3858; 2322 and 3818; 2322 and 3794; 2322 and 3802; 2322 and 3746; 2322 and 3778; 2322 and 3770; 2322 and 3722; 2322 and 3690; 2322 and 3682; 2322 and 3330; 2322 and 3354; 2322 and 3394; 2322 and 3386; 1770 and 3418; 1770 and 3370; 1770 and 3514; 1770 and 3658; 1770 and 4010; 1770 and 4026; 1770 and 3914; 1770 and 3938; 1770 and 3858; 1770 and 3818; 1770 and 3794; 1770 and 3802; 1770 and 3746; 1770 and 3778; 1770 and 3770; 1770 and 3722; 1770 and 3690; 1770 and 3682; 1770 and 3330; 1770 and 3354; 1770 and 3394; 1770 and 3386; 1538 and 3418; 1538 and 3370; 1538 and 3514; 1538 and 3658; 1538 and 4010; 1538 and 4026; 1538 and 3914; 1538 and 3938; 1538 and 3858; 1538 and 3818; 1538 and 3794; 1538 and 3802; 1538 and 3746; 1538 and 3778; 1538 and 3770; 1538 and 3722; 1538 and 3690; 1538 and 3682; 1538 and 3330; 1538 and 3354; 1538 and 3394; 1538 and 3386; 2514 and 3418; 2514 and 3370; 2514 and 3514; 2514 and 3658; 2514 and 4010; 2514 and 4026; 2514 and 3914; 2514 and 3938; 2514 and 3858; 2514 and 3818; 2514 and 3794; 2514 and 3802; 2514 and 3746; 2514 and 3778; 2514 and 3770; 2514 and 3722; 2514 and 3690; 2514 and 3682; 2514 and 3330; 2514 and 3354; 2514 and 3394; 2514 and 3386; 2458 and 3418; 2458 and 3370; 2458 and 3514; 2458 and 3658; 2458 and 4010; 2458 and 4026; 2458 and 3914; 2458 and 3938; 2458 and 3858; 2458 and 3818; 2458 and 3794; 2458 and 3802; 2458 and 3746; 2458 and 3778; 2458 and 3770; 2458 and 3722; 2458 and 3690; 2458 and 3682; 2458 and 3330; 2458 and 3354; 2458 and 3394; 2458 and 3386; 2194 and 3418; 2194 and 3370; 2194 and 3514; 2194 and 3658; 2194 and 4010; 2194 and 4026; 2194 and 3914; 2194 and 3938; 2194 and 3858; 2194 and 3818; 2194 and 3794; 2194 and 3802; 2194 and 3746; 2194 and 3778; 2194 and 3770; 2194 and 3722; 2194 and 3690; 2194 and 3682; 2194 and 3330; 2194 and 3354; 2194 and 3394; 2194 and 3386; 2594 and 3418; 2594 and 3370; 2594 and 3514; 2594 and 3658; 2594 and 4010; 2594 and 4026; 2594 and 3914; 2594 and 3938; 2594 and 3858; 2594 and 3818; 2594 and 3794; 2594 and 3802; 2594 and 3746; 2594 and 3778; 2594 and 3770; 2594 and 3722; 2594 and 3690; 2594 and 3682; 2594 and 3330; 2594 and 3354; 2594 and 3394; 2594 and 3386; 2618 and 3418; 2618 and 3370; 2618 and 3514; 2618 and 3658; 2618 and 4010; 2618 and 4026; 2618 and 3914; 2618 and 3938; 2618 and 3858; 2618 and 3818; 2618 and 3794; 2618 and 3802; 2618 and 3746; 2618 and 3778; 2618 and 3770; 2618 and 3722; 2618 and 3690; 2618 and 3682; 2618 and 3330; 2618 and 3354; 2618 and 3394; and 2618 and 3386.

[0413] In some embodiments, a pair of guide RNAs or one or more nucleic acids encoding a pair of guide RNAs is provided as one or more compositions, wherein the pair of guide RNAs comprise a first and second spacer sequence comprising a first and second spacer sequence selected from SEQ ID NOs: 2202 and 3418; 2202 and 3370; 2202 and 3514; 2202 and 3658; 2178 and 3418; 2178 and 3370; 2178 and 3514; 2178 and 3658; 2170 and 3418; 2170 and 3370; 2170 and 3514; 2170 and 3658; 2162 and 3418; 2162 and 3370; 2162 and 3514; 2162 and 3658; 2202 and 4010; 2202 and 4026; 2202 and 3914; 2202 and 3938; 2202 and 3858; 2202 and 3818; 2202 and 3794; 2202 and 3802; 2202 and 3746; 2202 and 3778; 2202 and 3770; 2202 and 3722; 2202 and 3690; 2202 and 3682; 2202 and 3330; 2202 and 3354; 2202 and 3394; 2202 and 3386; 2178 and 4010; 2178 and 4026; 2178 and 3914; 2178 and 3938; 2178 and 3858; 2178 and 3818; 2178 and 3794; 2178 and 3802; 2178 and 3746; 2178 and 3778; 2178 and 3770; 2178 and 3722; 2178 and 3690; 2178 and 3682; 2178 and 3330; 2178 and 3354; 2178 and 3394; 2178 and 3386; 2170 and 4010; 2170 and 4026; 2170 and 3914; 2170 and 3938; 2170 and 3858; 2170 and 3818; 2170 and 3794; 2170 and 3802; 2170 and 3746; 2170 and 3778; 2170 and 3770; 2170 and 3722; 2170 and 3690; 2170 and 3682; 2170 and 3330; 2170 and 3354; 2170 and 3394; 2170 and 3386; 2162 and 4010; 2162 and 4026; 2162 and 3914; 2162 and 3938; 2162 and 3858; 2162 and 3818; 2162 and 3794; 2162 and 3802; 2162 and 3746; 2162 and 3778; 2162 and 3770; 2162 and 3722; 2162 and 3690; 2162 and 3682; 2162 and 3330; 2162 and 3354; 2162 and 3394; 2162 and 3386. In some embodiments, a pair of guide RNAs or one or more nucleic acids encoding a pair of guide RNAs is provided as one or more compositions, wherein the pair of guide RNAs comprise a first and second spacer sequence comprising a first and second spacer sequence selected from SEQ ID NOs: 2202 and 3418; 2202 and 3370; 2202 and 3514; 2202 and 3658; 2178 and 3418; 2178 and 3370; 2178 and 3514; 2178 and 3658; 2170 and 3418; 2170 and 3370; 2170 and 3514; 2170 and 3658; 2162 and 3418; 2162 and 3370; 2162 and 3514; and 2162 and 3658. In some embodiments, a pair of guide RNAs or one or more nucleic acids encoding a pair of guide RNAs is provided as one or more compositions, wherein the pair of guide RNAs comprise a first and second spacer sequence comprising a first and second spacer sequence selected from SEQ ID NOs: 3778 and 2514; 3778 and 2258; 3778 and 2210; 3386 and 2514; 3386 and 2258; 3386 and 2210; 3354 and 2514; 3354 and 2258; and 3354 and 2210. In some embodiments, a pair of guide RNAs or one or more nucleic acids encoding a pair of guide RNAs is provided as one or more compositions, wherein the pair of guide RNAs comprise a first and second spacer sequence comprising a first and second spacer sequence selected from SEQ ID NOs: 3778 and 2258; 3778 and 2210; 3386 and 2258; 3386 and 2210; and 3354 and 2514. In some embodiments, a pair of guide RNAs or one or more nucleic acids encoding a pair of guide RNAs is provided as one or more compositions, wherein the pair of guide RNAs comprise a first and second spacer sequence comprising a first and second spacer sequence selected from SEQ ID NOs: 3346 and 2554; 3346 and 2498; 3330 and 2554; 3330 and 2498; 3330 and 2506; and 3330 and 2546. In some embodiments, a pair of guide RNAs or one or more nucleic acids encoding a pair of guide RNAs is provided as one or more compositions, wherein the pair of guide RNAs comprise a first and second spacer sequence comprising a first and second spacer sequence selected from SEQ ID NOs: 3346 and 2554; 3346 and 2498; 3330 and 2554; 3330 and 2498; 3354 and 2546; 3354 and 2506; 3378 and 2546; 3378 and 2506. In some embodiments, a pair of guide RNAs or one or more nucleic acids encoding a pair of guide RNAs is provided as one or more compositions, wherein the pair of guide RNAs comprise a first and second spacer sequence comprising a first and second spacer sequence selected from SEQ ID NOs: 3346 and 2554; 3346 and 2498; 3330 and 2554; and 3330 and 2498. In some embodiments, a pair of guide RNAs or one or more nucleic acids encoding a pair of guide RNAs is provided as one or more compositions, wherein the pair of guide RNAs comprise a first and second spacer sequence comprising SEQ ID NOs: 1153 and 1129.

[0414] In some embodiments, a pair of guide RNAs or one or more nucleic acids encoding a pair of guide RNAs is provided as one or more compositions, wherein the pair of guide RNAs comprise a first and second spacer sequence comprising a first spacer sequence selected from SEQ ID NOs: 2856, 2864, 2880, 2896, 2904, 2912, 2936, 2944, 2960, 2992, 3016, 3024, 3064, 3096, 3112, 3128, 3136, 3144, 3160, 3168, 3192, 3200, 3208, 3216, 3224, 3232, 3240, 3248, 3256, 3264, 3314, 3330, 3346, 3354, 3370, 3378, 3386, 3394, 3410, 3418, 3426, 3434, 3442, 3450, 3458, 3474, 3482, 3490, 3498, 3506, 3514, 3522, 3530, 3538, 3546, 3554, 3570, 3578, 3586, 3602, 3610, 3618, 3634, 3642, 3658, 3674, 3682, 3690, 3698, 3706, 3722, 3746, 3762, 3770, 3778, 3794, 3802, 3818, 3826, 3834, 3850, 3858, 3890, 3898, 3906, 3914, 3922, 3930, 3938, 3946, 3994, 4010, 4018, 4026, 4034, 4042, 4208, and 4506, and a second spacer sequence selected from SEQ ID NOs: 560, 584, 608, 616, 656, 672, 688, 696, 712, 744, 752, 760, 840, 864, 960, 976, 984, 1008, 1056, 1128, 1136, 1152, 1224, 1240, 1272, 1338, 1346, 1370, 1378, 1386, 1394, 1402, 1410, 1418, 1426, 1434, 1442, 1458, 1474, 1482, 1490, 1498, 1514, 1538, 1546, 1554, 1562, 1578, 1586, 1594, 1602, 1610, 1626, 1634, 1642, 1650, 1658, 1690, 1706, 1714, 1738, 1746, 1770, 1778, 1786, 1802, 1810, 1818, 1826, 1834, 1842, 1850, 1890, 1914, 1930, 1938, 1946, 1962, 1970, 1978, 1986, 1994, 2010, 2018, 2026, 2042, 2050, 2058, 2090, 2114, 2130, 2162, 2170, 2178, 2202, 2210, 2226, 2242, 2258, 2266, 2274, 2282, 2298, 2314, 2322, 2330, 2338, 2346, 2354, 2370, 2378, 2394, 2418, 2434, 2442, 2458, 2466, 2474, 2498, 2506, 2514, 2522, 2546, 2554, 2570, 2586, 2658, 4989, 4990, 4991, and 4992. In some embodiments, a pair of guide RNAs or one or more nucleic acids encoding a pair of guide RNAs is provided as one or more compositions, wherein the pair of guide RNAs comprise a first and second spacer sequence comprising a first spacer sequence selected from SEQ ID NOs: 3778, 4026, 3794, 4010, 3906 and 3746, and a second spacer sequence selected from SEQ ID NOs: 1778, 1746, 1770, 1586, 1914, and 2210.

[0415] In some embodiments, a pair of guide RNAs or one or more nucleic acids encoding a pair of guide RNAs is provided as one or more compositions, wherein the pair of guide RNAs comprise a first and second spacer sequence comprising a first and second spacer sequence selected from SEQ ID NOs: 3778 and 1778; 3778 and 1746; 3778 and 1770; 3778 and 1586; 3778 and 1914; 3778 and 2210; 4026 and 1778; 4026 and 1746; 4026 and 1770; 4026 and 1586; 4026 and 1914; 4026 and 2210; 3794 and 1778; 3794 and 1746; 3794 and 1770; 3794 and 1586; 3794 and 1586; 3794 and 1914; 3794 and 2210; 4010 and 1778; 4010 and 1770; 4010 and 1746; 4010 and 1586; 4010 and 1914; 4010 and 2210; 3906 and 1778; 3906 and 1778; 3906 and 1746; 3906 and 1770; 3906 and 1586; 3906 and 1914; 3906 and 2210; 3746 and 1778; 3746 and 1746; 3746 and 1770; 3746 and 1586; 3746 and 1914; and 3746 and 2210. In some embodiments, a pair of guide RNAs or one or more nucleic acids encoding a pair of guide RNAs is provided as one or more compositions, wherein the pair of guide RNAs comprise a first and second spacer sequence comprising a first and second spacer sequence selected from first spacer sequence selected from SEQ ID NOs: 3256, 2896, 3136, and 3224, and a second spacer sequence selected from SEQ ID NOs: 4989, 560, 672, 976, 760, 984, and 616. In some embodiments, a pair of guide RNAs or one or more nucleic acids encoding a pair of guide RNAs is provided as one or more compositions, wherein the pair of guide RNAs comprise a first and second spacer sequence comprising a first and second spacer sequence selected from SEQ ID NOs: 3256 and 4989; 3256 and 984; 3256 and 616; 2896 and 4989; 2896 and 672; 2896 and 760; 3136 and 4989; 3136 and 560; 3224 and 4989; 3224 and 976; and 3224 and 760.

[0416] In some embodiments, a composition is provided comprising a guide RNA or a nucleic acid encoding a guide RNA is provided, wherein the guide RNA comprises a spacer sequence, wherein the spacer sequence directs a RNA-guided DNA nuclease to any nucleotide within a stretch of sequence, wherein the stretch starts 1 nucleotide from the DMPK-U29 cut site and continues through the repeat.

[0417] In some embodiments, a composition comprising a guide RNA or a nucleic acid encoding a guide RNA is provided, wherein the guide RNA comprises a spacer sequence, wherein the spacer sequence directs a RNA-guided DNA nuclease to any nucleotide within a stretch of sequence, wherein the stretch is SEQ ID NO: 53413:

gtgggtctccgcccagctccagtcctgtgatccgggcccgccccc
tagcggccggggagggaggggccgggtccgcggccggcgaacggg
gctcgaagggtccttgtagccgggaatgctgctgctg.

[0418] In some embodiments, a composition comprising a guide RNA or a nucleic acid encoding a guide RNA is provided, wherein the guide RNA comprises a spacer sequence, wherein the spacer sequence directs a RNA-guided DNA nuclease to any nucleotide within a stretch of sequence, wherein the stretch starts 1 nucleotide from the DMPK-U30 cut site and continues through 1 nucleotide before the DMPK-U56 cut site.

[0419] In some embodiments, a composition comprising a guide RNA or a nucleic acid encoding a guide RNA is provided, wherein the guide RNA comprises a spacer sequence, wherein the spacer sequence directs a RNA-guided DNA nuclease to any nucleotide within a stretch of sequence, wherein the stretch is SEQ ID NO: 53414:

tgggtctccgcccagctccagtcctgtgatccgggcccgccccct
agcggccggggagggaggggccgggtccgcggccggcgaacgggg.

[0420] In some embodiments, a composition comprising a guide RNA or a nucleic acid encoding a guide RNA is provided, wherein the guide RNA comprises a spacer sequence, wherein the spacer sequence directs a RNA-guided DNA nuclease to any nucleotide within a stretch of sequence, wherein the stretch starts 1 nucleotide from the DMPK-U30 cut site and continues through 1 nucleotide before the DMPK-U52 cut site.

[0421] In some embodiments, a composition comprising a guide RNA or a nucleic acid encoding a guide RNA is provided, wherein the guide RNA comprises a spacer sequence, wherein the spacer sequence directs a RNA-guided DNA nuclease to any nucleotide within a stretch of sequence, wherein the stretch is SEQ ID NO: 53415:

tgggtctccgcccagctccagtcctgtgatccgggcccgccccct
agcggccggggagggaggggccgggtccgcggccggc.

[0422] In some embodiments, a composition comprising a guide RNA or a nucleic acid encoding a guide RNA is provided, wherein the guide RNA comprises a spacer sequence, wherein the spacer sequence directs a RNA-guided DNA nuclease to any nucleotide within a stretch of sequence, wherein the stretch starts 1 nucleotide from the DMPK-D15 cut site and continues through 1 nucleotide before the DMPK-D51 cut site.

[0423] In some embodiments, a composition comprising a guide RNA or a nucleic acid encoding a guide RNA is provided, wherein the guide RNA comprises a spacer sequence, wherein the spacer sequence directs a RNA-guided DNA nuclease to any nucleotide within a stretch of sequence, wherein the stretch is SEQ ID NO: 53416:

gatgggcaaactgcaggcctgggaaggcagcaagccgggccgtccg
tgttccatcctccacgcacccccacctatcgttggttcgcaaagtg
caaagctttcttgtgcatgacgccctgctctggggagcgtctggcg
cgatctctgcctgctt.

[0424] In some embodiments, the stretch starts 1 nucleotide from the DMPK-D35 cut site and continues through 1 nucleotide before the DMPK-D51 cut site.

[0425] In some embodiments, a composition comprising a guide RNA or a nucleic acid encoding a guide RNA is provided, wherein the guide RNA comprises a spacer sequence, wherein the spacer sequence directs a RNA-guided DNA nuclease to any nucleotide within a stretch of sequence, wherein the stretch is SEQ ID NO: 53417:

gttggttcgcaaagtgcaaagctttcttgtgcatgacgccctgctc
tggggagcgtctggcgcgatctctgcctgctt.

[0426] The U29 cut site is: chr19: between nucleotides 45,770,383 and 45,770,384 (using Hg38 coordinates), which corresponds to * in the following sequence: ttcacaaccgctccgag*cgtggg.

[0427] The U30 cut site is: chr19: between 45,770,385 and 45,770,386 (using Hg38 coordinates), which corresponds to * in the following sequence: gctgggcggagacccac*gctcgg.

[0428] The D15 cut site is: chr19: between 45,770,154 and 45,770,155 (using Hg38 coordinates), which corresponds to * in the following sequence: ggctgaggccctgacgt*ggatgg.

[0429] The D35 cut site is: chr19: between 45,770,078 and 45,770,079 (using Hg38 coordinates), which corresponds to * in the following sequence: cacgcacccccacctat*cgttgg.

[0430] In some embodiments, a composition is provided comprising one or more guide RNAs (gRNA) or one or more nucleic acids encoding one or more guide RNAs, wherein the one or more guide RNAs comprise guide sequences that direct an RNA-targeted endonuclease (e.g., a Cas nuclease such as Cas9), to a target DNA sequence in or near the CTG repeat region in the myotonic dystrophy protein kinase gene (FXN) associated with myotonic dystrophy type 1. In some embodiments, a composition is provided comprising a gRNA, or nucleic acid encoding a gRNA, wherein the gRNA comprises a crRNA comprising a FXN guide sequence shown in Table 2 or the Sequence Listing. In some embodiments, a composition is provided comprising a gRNA, or nucleic acid encoding a gRNA, wherein the gRNA comprises a crRNA comprising 17, 18, 19, or 20 contiguous nucleotides of a FXN guide sequence shown in Table 2 or the Sequence Listing. In some embodiments, a composition is provided comprising a gRNA, or nucleic acid encoding a gRNA, wherein the gRNA comprises a crRNA comprising a sequence with about 75%, 80%, 85%, 90%, 95%, 96%, 97%, 98%, 99%, or 100% identity to at least 17, 18, 19, or 20 contiguous nucleotides of a FXN guide sequence shown in Table 2 or the Sequence Listing. In some embodiments, a composition is provided comprising a gRNA, or nucleic acid encoding a gRNA, wherein the gRNA comprises a crRNA comprising a sequence with about 75%, 80%, 85%, 90%, 95%, 96%, 97%, 98%, 99%, or 100% identity to a guide sequence shown in Table 2 or the Sequence Listing. In some embodiments, a composition is provided comprising a gRNA, or nucleic acid encoding a gRNA, wherein the gRNA further comprises a trRNA. In each composition and method embodiment described herein, the crRNA and trRNA may be associated as a single RNA (sgRNA) or may be on separate RNAs (dgRNA). In the context of sgRNAs, the crRNA and trRNA components may be covalently linked, e.g., via a phosphodiester bond or other covalent bond.

[0431] In some embodiments, a composition is provided comprising a gRNA, or nucleic acid encoding a gRNA, wherein the gRNA comprises a spacer sequence comprising a spacer sequence selected from SEQ ID NOs: 28130, 34442, 45906, 26562, 52666, 51322, 46599, 52898, 26546, 7447, 47047, 49986, 51762, 51754, 52290, 52298, 51474, 52306, 50682, 51706, 52098, 50714, 51498, 52498, 50978, 51746, 52106, 51506, 50674, 52082, 52506, 50538, 52066, 52386, 52090, 52266, 52474, 52258, 52434, 50706, 51490, 52458, 51466, 52354, 51914, 51362, 51058, 50170, 51954, 52250, 51930, 51682, 52594, 52610, 51162, 49162, 50898, 49226, 51658, 52554, 52634, 51394, 49034, 52546, 52522, 52618, 52530, 28322, 26530, 26578, 26602, 26634, 26626, 26698, 26746, 26754, 26786, 26882, 27722, 27730, 27738, 27770, 27754, 27762, 27802, 27850, 27842, 27922, 27946, 27986, 28114, 28122, 28146, 28186, 28194, 28338, 28346, 28322, 28378, 28370, 28458, 28506, 28634, 28642, 28650, 34442, or 45906.

[0432] In some embodiments, a composition is provided comprising a gRNA, or nucleic acid encoding a gRNA, wherein the gRNA comprises 17, 18, 19, or 20 contiguous nucleotides of a FXN guide sequence selected from SEQ ID NOs: 28130, 34442, 45906, 26562, 52666, 51322, 46599, 52898, 26546, 7447, 47047, 49986, 51762, 51754, 52290, 52298, 51474, 52306, 50682, 51706, 52098, 50714, 51498, 52498, 50978, 51746, 52106, 51506, 50674, 52082, 52506, 50538, 52066, 52386, 52090, 52266, 52474, 52258, 52434, 50706, 51490, 52458, 51466, 52354, 51914, 51362, 51058, 50170, 51954, 52250, 51930, 51682, 52594, 52610, 51162, 49162, 50898, 49226, 51658, 52554, 52634, 51394, 49034, 52546, 52522, 52618, 52530, 28322, 26530, 26578, 26602, 26634, 26626, 26698, 26746, 26754, 26786, 26882, 27722, 27730, 27738, 27770, 27754, 27762, 27802, 27850, 27842, 27922, 27946, 27986, 28114, 28122, 28146, 28186, 28194, 28338, 28346, 28322, 28378, 28370, 28458, 28506, 28634, 28642, 28650, 34442, or 45906.

[0433] In some embodiments, a composition is provided comprising a gRNA, or nucleic acid encoding a gRNA, wherein the gRNA comprises a spacer sequence selected from SEQ ID NOs: 51706, 51058, 51754, 52090, 52594, 52098, 52298, 52106, 51682, 52066, 52354, 52458, 52290, 52498, 51658, 51930, 51162, 52506, 51762, 51746, 52386, 52258, 52530, 52634, 27850, 28634, 26882, 28650, 28370, 28194, 26626, 26634, 26786, 26754, 27770, 26578, 28130, 27738, 28338, 28642, 26602, 27754, 27730, and 28122. In some embodiments, a composition is provided comprising a gRNA, or nucleic acid encoding a gRNA, wherein the gRNA comprises a spacer sequence selected from SEQ ID NOs: 47047, 7447, 7463, 46967, 46768, 7680, and 47032. In some embodiments, a composition is provided comprising a gRNA, or nucleic acid encoding a gRNA, wherein the gRNA comprises a spacer sequence selected from SEQ ID NOs: 47045, 7445, 7461, 46766, 7678, and 47030.

[0434] In some embodiments, a pair of guide RNAs or one or more nucleic acids encoding a pair of guide RNAs is provided as one or more compositions, wherein the pair of guide RNAs comprise a first and second spacer sequence selected from SEQ ID NOs: 47047 and 7447; 7463 and 46967; 46768 and 7680; 47032 and 7447. In some embodiments, a pair of guide RNAs or one or more nucleic acids encoding a pair of guide RNAs is provided as one or more compositions, wherein the pair of guide RNAs comprise SEQ ID NOs: 47047 and 7447. In some embodiments, a pair of guide RNAs or one or more nucleic acids encoding a pair of guide RNAs is provided as one or more compositions, wherein the pair of guide RNAs comprise SEQ ID NOs: 52898 and 26546.

[0435] In some embodiments, a composition is provided comprising one or more guide RNAs (gRNA) or one or more nucleic acids encoding one or more guide RNAs, wherein the one or more guide RNAs comprise guide sequences that direct an RNA-targeted endonuclease (e.g., a Cas nuclease such as Cas9), to a target DNA sequence in or near the CTG repeat region in the myotonic dystrophy protein kinase gene (FMR1) associated with myotonic dystrophy type 1. In some embodiments, a composition is provided comprising a gRNA, or nucleic acid encoding a gRNA, wherein the gRNA comprises a crRNA comprising a FMR1 guide sequence shown in Table 2 or the Sequence Listing. In some embodiments, a composition is provided comprising a gRNA, or nucleic acid encoding a gRNA, wherein the gRNA comprises a crRNA comprising 17, 18, 19, or 20 contiguous nucleotides of a FMR1 guide sequence shown in Table 2 or the Sequence Listing. In some embodiments, a composition is provided comprising a gRNA, or nucleic acid encoding a gRNA, wherein the gRNA comprises a crRNA comprising a sequence with about 75%, 80%, 85%, 90%, 95%, 96%, 97%, 98%, 99%, or 100% identity to at least 17, 18, 19, or 20 contiguous nucleotides of a FMR1 guide sequence shown in Table 2 or the Sequence Listing. In some embodiments, a composition is provided comprising a gRNA, or nucleic acid encoding a gRNA, wherein the gRNA comprises a sequence with about 75%, 80%, 85%, 90%, 95%, 96%, 97%, 98%, 99%, or 100% identity to a guide sequence shown in Table 2 or the Sequence Listing. In some embodiments, a composition is provided comprising a gRNA, or nucleic acid encoding a gRNA, wherein the gRNA further comprises a trRNA. In each composition and method embodiment described herein, the crRNA and trRNA may be associated as a single RNA (sgRNA) or may be on separate RNAs (dgRNA). In the context of sgRNAs, the crRNA and trRNA components may be covalently linked, e.g., via a phosphodiester bond or other covalent bond.

[0436] In some embodiments, a composition is provided comprising a gRNA, or nucleic acid encoding a gRNA, wherein the gRNA comprises a spacer sequence comprising a spacer sequence selected from SEQ ID NOs: 5262, 5782, 5830, 5926, 5950, 5998, 6022, 5310, and 5334.

[0437] In some embodiments, a composition is provided comprising a gRNA, or nucleic acid encoding a gRNA, wherein the gRNA comprises a spacer sequence comprising a spacer sequence selected from SEQ ID NOs: 5830, 6022, 5262, and 5310. In some embodiments, a composition is provided comprising a gRNA, or nucleic acid encoding a gRNA, wherein the gRNA comprises a spacer sequence comprising a spacer sequence selected from SEQ ID NOs: 5262, 5334, and 5830. In some embodiments, a composition is provided comprising a gRNA, or nucleic acid encoding a gRNA, wherein the gRNA comprises a spacer sequence selected from SEQ ID NOs: 5264, 5336, 5832, 6024, and 5312. In some embodiments, a composition is provided comprising a gRNA, or nucleic acid encoding a gRNA, wherein the gRNA comprises a spacer sequence comprising SEQ ID NO: 5262. In some embodiments, a composition is provided comprising a gRNA, or nucleic acid encoding a gRNA, wherein the gRNA comprises a spacer sequence comprising a spacer sequence selected from SEQ ID NOs: 5264.

[0438] In some embodiments, a composition is provided comprising a gRNA, or nucleic acid encoding a gRNA, wherein the gRNA comprises 17, 18, 19, or 20 contiguous nucleotides of a FMR1 guide sequence selected from SEQ ID NOs: 5262, 5782, 5830, 5926, 5950, 5998, 6022, 5310, or 5334.

[0439] In some embodiments, a pair of guide RNAs or one or more nucleic acids encoding a pair of guide RNAs is provided as one or more compositions, wherein the pair of guide RNAs comprise a first and second spacer sequence selected from SEQ ID NOs: 5782 and 5262; 5830 and 5262; 5926 and 5262; 5950 and 5262; and 5998 and 5262. In some embodiments, a pair of guide RNAs or one or more nucleic acids encoding a pair of guide RNAs is provided as one or more compositions, wherein the pair of guide RNAs comprise a first and second spacer sequence selected from SEQ ID NOs: 5830 and 5262; and 6022 and 5310. In some embodiments, a pair of guide RNAs or one or more nucleic acids encoding a pair of guide RNAs is provided as one or more compositions, wherein the pair of guide RNAs comprise SEQ ID NOs: 5334 and 5830.

[0440] In some embodiments, a composition is provided comprising one or more guide RNAs (gRNA) or one or more nucleic acids encoding one or more guide RNAs, wherein the one or more guide RNAs comprise guide sequences that direct an RNA-targeted endonuclease (e.g., a Cas nuclease such as Cas9), to a target DNA sequence in or near the repeat region in the huntingtin (HTT) gene associated with Huntington's disease.

[0441] In some embodiments, a composition is provided comprising one or more guide RNAs (gRNA) or one or more nucleic acids encoding one or more guide RNAs, wherein the one or more guide RNAs comprise guide sequences that direct an RNA-targeted endonuclease (e.g., a Cas nuclease such as Cas9), to a target DNA sequence in or near the repeat region in or adjacent to the Fragile X Mental Retardation 2 (FMR2) gene associated with Fragile XE syndrome.

[0442] In some embodiments, a composition is provided comprising one or more guide RNAs (gRNA) or one or more nucleic acids encoding one or more guide RNAs, wherein the one or more guide RNAs comprise guide sequences that direct an RNA-targeted endonuclease (e.g., a Cas nuclease such as Cas9), to a target DNA sequence in or near the repeat region in the androgen receptor (AR) gene associated with X-linked spinal and bulbar muscular atrophy (Kennedy disease).

[0443] In some embodiments, a composition is provided comprising one or more guide RNAs (gRNA) or one or more nucleic acids encoding one or more guide RNAs, wherein the one or more guide RNAs comprise guide sequences that direct an RNA-targeted endonuclease (e.g., a Cas nuclease such as Cas9), to a target DNA sequence in or near the repeat region in the aristaless related homeobox (ARX) gene associated with ARX-associated infantile epileptic encephalopathy, Early infantile epileptic encephalopathy 1, Ohtahara syndrome, Partington syndrome, or West syndrome.

[0444] In some embodiments, a composition is provided comprising one or more guide RNAs (gRNA) or one or more nucleic acids encoding one or more guide RNAs, wherein the one or more guide RNAs comprise guide sequences that direct an RNA-targeted endonuclease (e.g., a Cas nuclease such as Cas9), to a target DNA sequence in or near the repeat region in the Ataxin 1 (ATXN1), Ataxin 2 (ATXN2), Ataxin 3 (ATXN3), Calcium voltage-gated channel subunit alpha 1 A (CACNA1A), Ataxin 7 (ATXN7), ATXN8 opposite strand lncRNA (ATXN80S/SCA8), Serine/threonine-protein phosphatase 2A 55 kDa regulatory subunit B beta isoform (PPP2R2B), or TATA binding protein (TBP) gene associated with a form of spinocerebellar ataxia.

[0445] In some embodiments, a composition is provided comprising one or more guide RNAs (gRNA) or one or more nucleic acids encoding one or more guide RNAs, wherein the one or more guide RNAs comprise guide sequences that direct an RNA-targeted endonuclease (e.g., a Cas nuclease such as Cas9), to a target DNA sequence in or near the repeat region in the Atrophin-1 (ATN1) gene associated with Dentatorubropallidoluysian atrophy (DRPLA).

[0446] In each of the composition, use, and method embodiments described herein, the guide RNA may comprise two RNA molecules as a “dual guide RNA” or “dgRNA.” The dgRNA comprises a first RNA molecule comprising a crRNA comprising, e.g., a guide sequence shown in Table 2 and the Sequence Listing, and a second RNA molecule comprising a trRNA. The first and second RNA molecules may not be covalently linked, but may form an RNA duplex via the base pairing between portions of the crRNA and the trRNA.

[0447] In each of the composition, use, and method embodiments described herein, the guide RNA may comprise a single RNA molecule as a “single guide RNA” or “sgRNA”. The sgRNA may comprise a crRNA (or a portion thereof) comprising a guide sequence shown in Table 2 covalently linked to a trRNA. The sgRNA may comprise 17, 18, 19, or 20 contiguous nucleotides of a guide sequence shown in Table 2 and the Sequence Listing. In some embodiments, the crRNA and the trRNA are covalently linked via a linker. In some embodiments, the sgRNA forms a stem-loop structure via the base pairing between portions of the crRNA and the trRNA. In some embodiments, the crRNA and the trRNA are covalently linked via one or more bonds that are not a phosphodiester bond.

[0448] In some embodiments, the trRNA may comprise all or a portion of a trRNA sequence derived from a naturally-occurring CRISPR/Cas system. In some embodiments, the trRNA comprises a truncated or modified wild type trRNA. The length of the trRNA depends on the CRISPR/Cas system used. In some embodiments, the trRNA comprises or consists of 5, 6, 7, 8, 9, 10, 11, 12, 13, 14, 15, 16, 17, 18, 19, 20, 25, 30, 40, 50, 60, 70, 80, 90, 100, or more than 100 nucleotides. In some embodiments, the trRNA may comprise certain secondary structures, such as, for example, one or more hairpin or stem-loop structures, or one or more bulge structures.

[0449] In some embodiments, a composition is provided comprising one or more guide RNAs (or one or more nucleic acids encoding one or more guide RNAs) wherein the one or more gRNAs comprise a guide sequence of any one of SEQ ID NOs: 101-4988, 5001-7264, or 7301-53372.

[0450] In one aspect, a composition is provided comprising a gRNA or a vector encoding a gRNA that comprises a guide sequence that is at least 99%, 98%, 97%, 96%, 95%, 94%, 93%, 92%, 91%, or 90% identical to any of the nucleic acids of SEQ ID NOs: 101-4988, 5001-7264, or 7301-53372.

[0451] In other embodiments, the composition comprises at least one, e.g., at least two gRNAs, or one or more nucleic acids encoding at least one, e.g., at least two gRNAs, wherein the gRNAs comprise guide sequences selected from any two or more of the guide sequences of SEQ ID NOs: 101-4988, 5001-7264, or 7301-53372. In some embodiments, the composition comprises at least two gRNAs that each comprise a guide sequence at least 99%, 98%, 97%, 96%, 95%, 94%, 93%, 92%, 91%, or 90% identical to any of the nucleic acids of SEQ ID NOs: 101-4988, 5001-7264, or 7301-53372.

[0452] In some embodiments, a composition is provided comprising a nucleic acid encoding a guide RNA, wherein the nucleic acid encoding the guide RNA is a vector. In some embodiments, a composition is provided comprising one or more nucleic acids encoding one or more guide RNAs, wherein the one or more nucleic acids encoding one or more guide RNAs is one or more vectors.

[0453] Any type of vector, such as any of those described herein, may be used. In some embodiments, the composition comprises one or more nucleic acids encoding one or more gRNAs described herein. In some embodiments, the vector is a viral vector. In some embodiments, the viral vector is a non-integrating viral vector (i.e., that does not insert sequence from the vector into a host chromosome). In some embodiments, the viral vector is an adeno-associated virus vector, a lentiviral vector, an integrase-deficient lentiviral vector, an adenoviral vector, a vaccinia viral vector, an alphaviral vector, or a herpes simplex viral vector. In some embodiments, the vector comprises a muscle-specific promoter. Exemplary muscle-specific promoters include a muscle creatine kinase promoter, a desmin promoter, an MHCK7 promoter, or an SPc5-12 promoter. See US 2004/0175727 A1; Wang et al., Expert Opin Drug Deliv. (2014) 11, 345-364; Wang et al., Gene Therapy (2008) 15, 1489-1499. In some embodiments, the muscle-specific promoter is a CK8 promoter. In some embodiments, the muscle-specific promoter is a CK8e promoter. In any of the foregoing embodiments, the vector may be an adeno-associated virus vector.

[0454] The guide RNA compositions disclosed herein are designed to recognize (e.g., hybridize to) a target sequence in or near a trinucleotide repeat or self-complementary region, such as a trinucleotide repeat or self-complementary region in the DIVIPK gene. For example, the target sequence may be recognized and cleaved by a provided Cas cleavase comprising a guide RNA. In some embodiments, an RNA-targeted endonuclease, such as a Cas cleavase, may be directed by a guide RNA to the target sequence, where the guide sequence of the guide RNA hybridizes with the target sequence and the RNA-targeted endonuclease, such as a Cas cleavase, cleaves the target sequence.

[0455] In some embodiments, the selection of the one or more guide RNAs is determined based on target sequences within a gene of interest, such as any gene associated with a trinucleotide repeat expansion disease. Exemplary genes of interest are listed in Table 1.

[0456] Without being bound by any particular theory, mutations (e.g., excision resulting from repair of a nuclease-mediated DSB) may be provided more efficiently and/or better tolerated when cleavage occurs in certain regions of the gene, thus the location of a DSB is an important factor in the post-excision allele that may result.

[0457] In some embodiments, the guide sequence is at least 99%, 98%, 97%, 96%, 95%, 94%, 93%, 92%, 91%, or 90% identical to a target sequence present in the human gene of interest. In some embodiments, the target sequence may be complementary to the guide sequence of the guide RNA. In some embodiments, the degree of complementarity or identity between a guide sequence of a guide RNA and its corresponding target sequence may be at least 80%, 85%, 90%, 95%, 96%, 97%, 98%, 99%, or 100%. In some embodiments, the target sequence and the guide sequence of the gRNA may be 100% complementary or identical. In other embodiments, the target sequence and the guide sequence of the gRNA may contain at least one mismatch. For example, the target sequence and the guide sequence of the gRNA may contain 1, 2, 3, or 4 mismatches, where the total length of the guide sequence is 20. In some embodiments, the target sequence and the guide sequence of the gRNA may contain 1-4 mismatches where the guide sequence is 20 nucleotides.

[0458] In some embodiments, a composition or formulation disclosed herein comprises an mRNA comprising an open reading frame (ORF) encoding an RNA-targeted endonuclease, such as a Cas nuclease as described herein. In some embodiments, an mRNA comprising an ORF encoding an RNA-targeted endonuclease, such as a Cas nuclease, is provided, used, or administered.

Modified gRNAs

[0459] In some embodiments, the gRNA is chemically modified. A gRNA comprising one or more modified nucleosides or nucleotides is called a “modified” gRNA or “chemically modified” gRNA, to describe the presence of one or more non-naturally and/or naturally occurring components or configurations that are used instead of or in addition to the canonical A, G, C, and U residues. In some embodiments, a modified gRNA is synthesized with a non-canonical nucleoside or nucleotide, is here called “modified.” Modified nucleosides and nucleotides can include one or more of: (i) alteration, e.g., replacement, of one or both of the non-linking phosphate oxygens and/or of one or more of the linking phosphate oxygens in the phosphodiester backbone linkage (an exemplary backbone modification); (ii) alteration, e.g., replacement, of a constituent of the ribose sugar, e.g., of the 2′ hydroxyl on the ribose sugar (an exemplary sugar modification); (iii) wholesale replacement of the phosphate moiety with “dephospho” linkers (an exemplary backbone modification); (iv) modification or replacement of a naturally occurring nucleobase, including with a non-canonical nucleobase (an exemplary base modification); (v) replacement or modification of the ribose-phosphate backbone (an exemplary backbone modification); (vi) modification of the 3′ end or 5′ end of the oligonucleotide, e.g., removal, modification or replacement of a terminal phosphate group or conjugation of a moiety, cap or linker (such 3′ or 5′ cap modifications may comprise a sugar and/or backbone modification); and (vii) modification or replacement of the sugar (an exemplary sugar modification).

[0460] Chemical modifications such as those listed above can be combined to provide modified gRNAs comprising nucleosides and nucleotides (collectively “residues”) that can have two, three, four, or more modifications. For example, a modified residue can have a modified sugar and a modified nucleobase, or a modified sugar and a modified phosphodiester. In some embodiments, every base of a gRNA is modified, e.g., all bases have a modified phosphate group, such as a phosphorothioate group. In certain embodiments, all, or substantially all, of the phosphate groups of an gRNA molecule are replaced with phosphorothioate groups. In some embodiments, modified gRNAs comprise at least one modified residue at or near the 5′ end of the RNA. In some embodiments, modified gRNAs comprise at least one modified residue at or near the 3′ end of the RNA.

[0461] In some embodiments, the gRNA comprises one, two, three or more modified residues. In some embodiments, at least 5% (e.g., at least 5%, at least 10%, at least 15%, at least 20%, at least 25%, at least 30%, at least 35%, at least 40%, at least 45%, at least 50%, at least 55%, at least 60%, at least 65%, at least 70%, at least 75%, at least 80%, at least 85%, at least 90%, at least 95%, or 100%) of the positions in a modified gRNA are modified nucleosides or nucleotides.

[0462] Unmodified nucleic acids can be prone to degradation by, e.g., intracellular nucleases or those found in serum. For example, nucleases can hydrolyze nucleic acid phosphodiester bonds. Accordingly, in one aspect the gRNAs described herein can contain one or more modified nucleosides or nucleotides, e.g., to introduce stability toward intracellular or serum-based nucleases. In some embodiments, the modified gRNA molecules described herein can exhibit a reduced innate immune response when introduced into a population of cells, both in vivo and ex vivo. The term “innate immune response” includes a cellular response to exogenous nucleic acids, including single stranded nucleic acids, which involves the induction of cytokine expression and release, particularly the interferons, and cell death.

[0463] In some embodiments of a backbone modification, the phosphate group of a modified residue can be modified by replacing one or more of the oxygens with a different substituent. Further, the modified residue, e.g., modified residue present in a modified nucleic acid, can include the wholesale replacement of an unmodified phosphate moiety with a modified phosphate group as described herein. In some embodiments, the backbone modification of the phosphate backbone can include alterations that result in either an uncharged linker or a charged linker with unsymmetrical charge distribution.

[0464] Examples of modified phosphate groups include, phosphorothioate, phosphoroselenates, borano phosphates, borano phosphate esters, hydrogen phosphonates, phosphoroamidates, alkyl or aryl phosphonates and phosphotriesters. The phosphorous atom in an unmodified phosphate group is achiral. However, replacement of one of the non-bridging oxygens with one of the above atoms or groups of atoms can render the phosphorous atom chiral. The stereogenic phosphorous atom can possess either the “R” configuration (herein Rp) or the “S” configuration (herein Sp). The backbone can also be modified by replacement of a bridging oxygen, (i.e., the oxygen that links the phosphate to the nucleoside), with nitrogen (bridged phosphoroamidates), sulfur (bridged phosphorothioates) and carbon (bridged methylenephosphonates). The replacement can occur at either linking oxygen or at both of the linking oxygens.

[0465] The phosphate group can be replaced by non-phosphorus containing connectors in certain backbone modifications. In some embodiments, the charged phosphate group can be replaced by a neutral moiety. Examples of moieties which can replace the phosphate group can include, without limitation, e.g., methyl phosphonate, hydroxylamino, siloxane, carbonate, carboxymethyl, carbamate, amide, thioether, ethylene oxide linker, sulfonate, sulfonamide, thioformacetal, formacetal, oxime, methyleneimino, methylenemethylimino, methylenehydrazo, methylenedimethylhydrazo and methyleneoxymethylimino.

[0466] Scaffolds that can mimic nucleic acids can also be constructed wherein the phosphate linker and ribose sugar are replaced by nuclease resistant nucleoside or nucleotide surrogates. Such modifications may comprise backbone and sugar modifications. In some embodiments, the nucleobases can be tethered by a surrogate backbone. Examples can include, without limitation, the morpholino, cyclobutyl, pyrrolidine and peptide nucleic acid (PNA) nucleoside surrogates.

[0467] The modified nucleosides and modified nucleotides can include one or more modifications to the sugar group, i.e. at sugar modification. For example, the 2′ hydroxyl group (OH) can be modified, e.g. replaced with a number of different “oxy” or “deoxy” substituents. In some embodiments, modifications to the 2′ hydroxyl group can enhance the stability of the nucleic acid since the hydroxyl can no longer be deprotonated to form a 2′-alkoxide ion.

[0468] Examples of 2′ hydroxyl group modifications can include alkoxy or aryloxy (OR, wherein “R” can be, e.g., alkyl, cycloalkyl, aryl, aralkyl, heteroaryl or a sugar); polyethyleneglycols (PEG), O(CH₂CH₂O).CH₂CH₂OR wherein R can be, e.g., H or optionally substituted alkyl, and n can be an integer from 0 to 20 (e.g., from 0 to 4, from 0 to 8, from 0 to 10, from 0 to 16, from 1 to 4, from 1 to 8, from 1 to 10, from 1 to 16, from 1 to 20, from 2 to 4, from 2 to 8, from 2 to 10, from 2 to 16, from 2 to 20, from 4 to 8, from 4 to 10, from 4 to 16, and from 4 to 20). In some embodiments, the 2′ hydroxyl group modification can be 2′-O—Me. In some embodiments, the 2′ hydroxyl group modification can be a 2′-fluoro modification, which replaces the 2′ hydroxyl group with a fluoride. In some embodiments, the 2′ hydroxyl group modification can include “locked” nucleic acids (LNA) in which the 2′ hydroxyl can be connected, e.g., by a C₁₋₆ alkylene or C₁₋₆ heteroalkylene bridge, to the 4′ carbon of the same ribose sugar, where exemplary bridges can include methylene, propylene, ether, or amino bridges; 0-amino (wherein amino can be, e.g., NH₂; alkylamino, dialkylamino, heterocyclyl, arylamino, diarylamino, heteroarylamino, or diheteroarylamino, ethylenediamine, or polyamino) and aminoalkoxy, 0(CH₂).-amino, (wherein amino can be, e.g., NH₂; alkylamino, dialkylamino, heterocyclyl, arylamino, diarylamino, heteroarylamino, or diheteroarylamino, ethylenediamine, or polyamino) In some embodiments, the 2′ hydroxyl group modification can include “unlocked” nucleic acids (UNA) in which the ribose ring lacks the C2′-C3′ bond. In some embodiments, the 2′ hydroxyl group modification can include the methoxyethyl group (MOE), (OCH₂CH₂OCH₃, e.g., a PEG derivative).

[0469] “Deoxy” 2′ modifications can include hydrogen (i.e. deoxyribose sugars, e.g., at the overhang portions of partially dsRNA); halo (e.g., bromo, chloro, fluoro, or iodo); amino (wherein amino can be, e.g., NH2; alkylamino, dialkylamino, heterocyclyl, arylamino, diarylamino, heteroarylamino, diheteroarylamino, or amino acid); NH(CH₂CH₂NH).CH₂CH₂-amino (wherein amino can be, e.g., as described herein), —NHC(O)R (wherein R can be, e.g., alkyl, cycloalkyl, aryl, aralkyl, heteroaryl or sugar), cyano; mercapto; alkyl-thio-alkyl; thioalkoxy; and alkyl, cycloalkyl, aryl, alkenyl and alkynyl, which may be optionally substituted with e.g., an amino as described herein.

[0470] The sugar modification can comprise a sugar group which may also contain one or more carbons that possess the opposite stereochemical configuration than that of the corresponding carbon in ribose. Thus, a modified nucleic acid can include nucleotides containing e.g., arabinose, as the sugar. The modified nucleic acids can also include abasic sugars. These abasic sugars can also be further modified at one or more of the constituent sugar atoms. The modified nucleic acids can also include one or more sugars that are in the L form, e.g. L- nucleosides.

[0471] The modified nucleosides and modified nucleotides described herein, which can be incorporated into a modified nucleic acid, can include a modified base, also called a nucleobase. Examples of nucleobases include, but are not limited to, adenine (A), guanine (G), cytosine (C), and uracil (U). These nucleobases can be modified or wholly replaced to provide modified residues that can be incorporated into modified nucleic acids. The nucleobase of the nucleotide can be independently selected from a purine, a pyrimidine, a purine analog, or pyrimidine analog. In some embodiments, the nucleobase can include, for example, naturally-occurring and synthetic derivatives of a base.

[0472] In embodiments employing a dual guide RNA, each of the crRNA and the tracr RNA can contain modifications. Such modifications may be at one or both ends of the crRNA and/or tracr RNA. In embodiments comprising an sgRNA, one or more residues at one or both ends of the sgRNA may be chemically modified, and/or internal nucleosides may be modified, and/or the entire sgRNA may be chemically modified. Certain embodiments comprise a 5′ end modification. Certain embodiments comprise a 3′ end modification.

[0473] Modifications of 2′-O-methyl are encompassed.

[0474] Another chemical modification that has been shown to influence nucleotide sugar rings is halogen substitution. For example, 2′-fluoro (2′-F) substitution on nucleotide sugar rings can increase oligonucleotide binding affinity and nuclease stability. Modifications of 2′-fluoro (2′-F) are encompassed.

[0475] Phosphorothioate (PS) linkage or bond refers to a bond where a sulfur is substituted for one nonbridging phosphate oxygen in a phosphodiester linkage, for example in the bonds between nucleotides bases. When phosphorothioates are used to generate oligonucleotides, the modified oligonucleotides may also be referred to as S-oligos.

[0476] Abasic nucleotides refer to those which lack nitrogenous bases.

[0477] Inverted bases refer to those with linkages that are inverted from the normal 5′ to 3′ linkage (i.e., either a 5′ to 5′ linkage or a 3′ to 3′ linkage).

[0478] An abasic nucleotide can be attached with an inverted linkage. For example, an abasic nucleotide may be attached to the terminal 5′ nucleotide via a 5′ to 5′ linkage, or an abasic nucleotide may be attached to the terminal 3′ nucleotide via a 3′ to 3′ linkage. An inverted abasic nucleotide at either the terminal 5′ or 3′ nucleotide may also be called an inverted abasic end cap.

[0479] In some embodiments, one or more of the first three, four, or five nucleotides at the 5′ terminus, and one or more of the last three, four, or five nucleotides at the 3′ terminus are modified. In some embodiments, the modification is a 2′-O—Me, 2′-F, inverted abasic nucleotide, PS bond, or other nucleotide modification well known in the art to increase stability and/or performance.

[0480] In some embodiments, the first four nucleotides at the 5′ terminus, and the last four nucleotides at the 3′ terminus are linked with phosphorothioate (PS) bonds.

[0481] In some embodiments, the first three nucleotides at the 5′ terminus, and the last three nucleotides at the 3′ terminus comprise a 2′-O-methyl (2′-O—Me) modified nucleotide. In some embodiments, the first three nucleotides at the 5′ terminus, and the last three nucleotides at the 3′ terminus comprise a 2′-fluoro (2′-F) modified nucleotide.

### Ribonucleoprotein Complex

[0482] In some embodiments, a composition is encompassed comprising one or more gRNAs comprising one or more guide sequences from Table 2 or the Sequence Listing and an RNA-targeted endonuclease, e.g., a nuclease, such as a Cas nuclease, such as Cas9. In some embodiments, the RNA-targeted endonuclease has cleavase activity, which can also be referred to as double-strand endonuclease activity. In some embodiments, the RNA-targeted endonuclease comprises a Cas nuclease. Examples of Cas9 nucleases include those of the type II CRISPR systems of S. pyogenes, S. aureus, and other prokaryotes (see, e.g., the list in the next paragraph), and modified (e.g., engineered or mutant) versions thereof. See, e.g., US2016/0312198 A1; US 2016/0312199 A1. Other examples of Cas nucleases include a Csm or Cmr complex of a type III CRISPR system or the Cas10, Csm 1, or Cmr2 subunit thereof; and a Cascade complex of a type I CRISPR system, or the Cas3 subunit thereof. In some embodiments, the Cas nuclease may be from a Type-IIA, Type-IIB, or Type-IIC system. For discussion of various CRISPR systems and Cas nucleases see, e.g., Makarova et al., NAT. REV. MICROBIOL. 9:467-477 (2011); Makarova et al., NAT. REV. MICROBIOL, 13: 722-36 (2015); Shmakov et al., MOLECULAR CELL, 60:385-397 (2015).

[0483] Non-limiting exemplary species that the Cas nuclease can be derived from include Streptococcus pyogenes, Streptococcus thermophilus, Streptococcus sp., Staphylococcus aureus, Listeria innocua, Lactobacillus gasseri, Francisella novicida, Wolinella succinogenes, Sutterella wadsworthensis, Gammaproteobacterium, Neisseria meningitidis, Campylobacter jejuni, Pasteurella multocida, Fibrobacter succinogene, Rhodospirillum rubrum, Nocardiopsis dassonvillei, Streptomyces pristinaespiralis, Streptomyces viridochromogenes, Streptomyces viridochromogenes, Streptosporangium roseum, Streptosporangium roseum, Alicyclobacillus acidocaldarius, Bacillus pseudomycoides, Bacillus selenitireducens, Exiguobacterium sibiricum, Lactobacillus delbrueckii, Lactobacillus salivarius, Lactobacillus buchneri, Treponema denficola, Microscilla marina, Burkholderiales bacterium, Polaromonas naphthalenivorans, Polaromonas sp., Crocosphaera watsonii, Cyanothece sp., Microcystis aeruginosa, Synechococcus sp., Acetohalobium arabaficum, Ammonifex degensii, Caldicelulosiruptor becscii, Candidatus Desulforudis, Clostridium botulinum, Clostridium difficile, Finegoldia magna, Natranaerobius thermophilus, Pelotomaculum thermopropionicum, Acidithiobacillus caldus, Acidithiobacillus ferrooxidans, Allochromatium vinosum, Marinobacter sp., Nitrosococcus halophilus, Nitrosococcus watsoni, Pseudoalteromonas haloplanktis, Ktedonobacter racemifer, Methanohalobium evestigatum, Anabaena variabilis, Nodularia spumigena, Nostoc sp., Arthrospira maxima, Arthrospira platensis, Arthrospira sp., Lyngbya sp., Microcoleus chthonoplastes, Oscillatoria sp., Petrotoga mobilis, Thermosipho africanus, Streptococcus pasteurianus, Neisseria cinerea, Campylobacter lari, Parvibaculum lavamentivorans, Corynebacterium diphtheria, Acidaminococcus sp., Lachnospiraceae bacterium ND2006, and Acaryochloris marina.

[0484] In some embodiments, the Cas nuclease is the Cas9 nuclease from Streptococcus pyogenes. In some embodiments, the Cas nuclease is the Cas9 nuclease from Streptococcus thermophilus. In some embodiments, the Cas nuclease is the Cas9 nuclease from Neisseria meningitidis. In some embodiments, the Cas nuclease is the Cas9 nuclease is from Staphylococcus aureus. In some embodiments, the Cas nuclease is the Cpf1 nuclease from Francisella novicida. In some embodiments, the Cas nuclease is the Cpf1 nuclease from Acidaminococcus sp. In some embodiments, the Cas nuclease is the Cpf1 nuclease from Lachnospiraceae bacterium ND2006. In further embodiments, the Cas nuclease is the Cpf1 nuclease from Francisella tularensis, Lachnospiraceae bacterium, Butyrivibrio proteoclasticus, Peregrinibacteria bacterium, Parcubacteria bacterium, Smithella, Acidaminococcus, Candidatus Methanoplasma termitum, Eubacterium eligens, Moraxella bovoculi, Leptospira inadai, Porphyromonas crevioricanis, Prevotella disiens, or Porphyromonas macacae. In certain embodiments, the Cas nuclease is a Cpf1 nuclease from an Acidaminococcus or Lachnospiraceae.

[0485] In some embodiments, the gRNA together with an RNA-targeted endonuclease is called a ribonucleoprotein complex (RNP). In some embodiments, the RNA-targeted endonuclease is a Cas nuclease. In some embodiments, the gRNA together with a Cas nuclease is called a Cas RNP. In some embodiments, the RNP comprises Type-I, Type-II, Type-III, Type-IV, or Type-V components. In some embodiments, the Cas nuclease may be from a Type-V system, such as Cas12, or Cas12a (previously known as Cpf1). In some embodiments, the Cas nuclease is the Cas9 protein from the Type-II CRISPR/Cas system. In some embodiment, the gRNA together with Cas9 is called a Cas9 RNP.

[0486] Wild type Cas9 has two nuclease domains: RuvC and HNH. The RuvC domain cleaves the non-target DNA strand, and the HNH domain cleaves the target strand of DNA. In some embodiments, the Cas9 protein comprises more than one RuvC domain and/or more than one HNH domain. In some embodiments, the Cas9 protein is a wild type Cas9. In each of the composition, use, and method embodiments, the Cas induces a double strand break in target DNA.

[0487] In some embodiments, chimeric Cas nucleases are used, where one domain or region of the protein is replaced by a portion of a different protein. In some embodiments, a Cas nuclease domain may be replaced with a domain from a different nuclease such as Fok 1. In some embodiments, a Cas nuclease may be a modified nuclease.

[0488] In other embodiments, the Cas nuclease may be from a Type-I CRISPR/Cas system. In some embodiments, the Cas nuclease may be a component of the Cascade complex of a Type-I CRISPR/Cas system. In some embodiments, the Cas nuclease may be a Cas3 protein. In some embodiments, the Cas nuclease may be from a Type-III CRISPR/Cas system. In some embodiments, the Cas nuclease may have an RNA cleavage activity.

[0489] In some embodiments, the RNA-targeted endonuclease has single-strand nickase activity, i.e., can cut one DNA strand to produce a single-strand break, also known as a “nick.” In some embodiments, the RNA-targeted endonuclease comprises a Cas nickase. A nickase is an enzyme that creates a nick in dsDNA, i.e., cuts one strand but not the other of the DNA double helix. In some embodiments, a Cas nickase is a version of a Cas nuclease (e.g., a Cas nuclease discussed above) in which an endonucleolytic active site is inactivated, e.g., by one or more alterations (e.g., point mutations) in a catalytic domain. See, e.g., U.S. Pat. No. 8,889,356 for discussion of Cas nickases and exemplary catalytic domain alterations. In some embodiments, a Cas nickase such as a Cas9 nickase has an inactivated RuvC or HNH domain.

[0490] In some embodiments, the RNA-targeted endonuclease is modified to contain only one functional nuclease domain. For example, the agent protein may be modified such that one of the nuclease domains is mutated or fully or partially deleted to reduce its nucleic acid cleavage activity. In some embodiments, a nickase is used having a RuvC domain with reduced activity. In some embodiments, a nickase is used having an inactive RuvC domain. In some embodiments, a nickase is used having an HNH domain with reduced activity. In some embodiments, a nickase is used having an inactive HNH domain.

[0491] In some embodiments, a conserved amino acid within a Cas protein nuclease domain is substituted to reduce or alter nuclease activity. In some embodiments, a Cas nuclease may comprise an amino acid substitution in the RuvC or RuvC-like nuclease domain. Exemplary amino acid substitutions in the RuvC or RuvC-like nuclease domain include DlOA (based on the S. pyogenes Cas9 protein). See, e.g., Zetsche et al. (2015) Cell Oct 22:163(3): 759-771. In some embodiments, the Cas nuclease may comprise an amino acid substitution in the HNH or HNH-like nuclease domain. Exemplary amino acid substitutions in the HNH or HNH-like nuclease domain include E762A, H840A, N863A, H983A, and D986A (based on the S. pyogenes Cas9 protein). See, e.g., Zetsche et al. (2015). Further exemplary amino acid substitutions include D917A, E1006A, and D1255A (based on the Francisella novicida U112 Cpf1 (FnCpf1) sequence (UniProtKB-A0Q7Q2 (CPFl_FRATN)).

[0492] In some embodiments, an mRNA encoding a nickase is provided in combination with a pair of guide RNAs that are complementary to the sense and antisense strands of the target sequence, respectively. In this embodiment, the guide RNAs direct the nickase to a target sequence and introduce a DSB by generating a nick on opposite strands of the target sequence (i.e., double nicking). In some embodiments, use of double nicking may improve specificity and reduce off-target effects. In some embodiments, a nickase is used together with two separate guide RNAs targeting opposite strands of DNA to produce a double nick in the target DNA. In some embodiments, a nickase is used together with two separate guide RNAs that are selected to be in close proximity to produce a double nick in the target DNA.

[0493] In some embodiments, the RNA-targeted endonuclease lacks cleavase and nickase activity. In some embodiments, the RNA-targeted endonuclease comprises a dCas DNA-binding polypeptide. A dCas polypeptide has DNA-binding activity while essentially lacking catalytic (cleavase/nickase) activity. In some embodiments, the dCas polypeptide is a dCas9 polypeptide. In some embodiments, the RNA-targeted endonuclease lacking cleavase and nickase activity or the dCas DNA-binding polypeptide is a version of a Cas nuclease (e.g., a Cas nuclease discussed above) in which its endonucleolytic active sites are inactivated, e.g., by one or more alterations (e.g., point mutations) in its catalytic domains. See, e.g., US 2014/0186958 A1; US 2015/0166980 A1.

[0494] In some embodiments, the RNA-targeted endonuclease comprises one or more heterologous functional domains (e.g., is or comprises a fusion polypeptide).

[0495] In some embodiments, the heterologous functional domain may facilitate transport of the RNA-targeted endonuclease into the nucleus of a cell. For example, the heterologous functional domain may be a nuclear localization signal (NLS). In some embodiments, the RNA-targeted endonuclease may be fused with 1-10 NLS(s). In some embodiments, the RNA-targeted endonuclease may be fused with 1-5 NLS(s). In some embodiments, the RNA-targeted endonuclease may be fused with one NLS. Where one NLS is used, the NLS may be linked at the N-terminus or the C-terminus of the RNA-targeted endonuclease sequence. It may also be inserted within the RNA-targeted endonuclease sequence. In other embodiments, the RNA-targeted endonuclease may be fused with more than one NLS. In some embodiments, the RNA-targeted endonuclease may be fused with 2, 3, 4, or 5 NLSs. In some embodiments, the RNA-targeted endonuclease may be fused with two NLSs. In certain circumstances, the two NLSs may be the same (e.g., two SV40 NLSs) or different. In some embodiments, the RNA-targeted endonuclease is fused to two SV40 NLS sequences linked at the carboxy terminus. In some embodiments, the RNA-targeted endonuclease may be fused with two NLSs, one linked at the N-terminus and one at the C-terminus. In some embodiments, the RNA-targeted endonuclease may be fused with 3 NLSs. In some embodiments, the RNA-targeted endonuclease may be fused with no NLS.

[0496] In some embodiments, the heterologous functional domain may be capable of modifying the intracellular half-life of the RNA-targeted endonuclease. In some embodiments, the half-life of the RNA-targeted endonuclease may be increased. In some embodiments, the half-life of the RNA-targeted endonuclease may be reduced. In some embodiments, the heterologous functional domain may be capable of increasing the stability of the RNA-targeted endonuclease. In some embodiments, the heterologous functional domain may be capable of reducing the stability of the RNA-targeted endonuclease. In some embodiments, the heterologous functional domain may act as a signal peptide for protein degradation. In some embodiments, the protein degradation may be mediated by proteolytic enzymes, such as, for example, proteasomes, lysosomal proteases, or calpain proteases. In some embodiments, the heterologous functional domain may comprise a PEST sequence. In some embodiments, the RNA-targeted endonuclease may be modified by addition of ubiquitin or a polyubiquitin chain In some embodiments, the ubiquitin may be a ubiquitin-like protein (UBL). Non-limiting examples of ubiquitin-like proteins include small ubiquitin-like modifier (SUMO), ubiquitin cross-reactive protein (UCRP, also known as interferon-stimulated gene-15 (ISG15)), ubiquitin-related modifier-1 (URM1), neuronal-precursor-cell-expressed developmentally downregulated protein-8 (NEDD8, also called Rubl in S. cerevisiae), human leukocyte antigen F-associated (FAT10), autophagy-8 (ATG8) and -12 (ATG12), Fau ubiquitin-like protein (FUB1), membrane-anchored UBL (MUB), ubiquitin fold-modifier-1 (UFM1), and ubiquitin-like protein-5 (UBLS).

[0497] In some embodiments, the heterologous functional domain may be a marker domain. Non-limiting examples of marker domains include fluorescent proteins, purification tags, epitope tags, and reporter gene sequences. In some embodiments, the marker domain may be a fluorescent protein. Non-limiting examples of suitable fluorescent proteins include green fluorescent proteins (e.g., GFP, GFP-2, tagGFP, turboGFP, sfGFP, EGFP, Emerald, Azami Green, Monomeric Azami Green, CopGFP, AceGFP, ZsGreen1), yellow fluorescent proteins (e.g., YFP, EYFP, Citrine, Venus, YPet, PhiYFP, ZsYellow 1), blue fluorescent proteins (e.g., EBFP, EBFP2, Azurite, mKalamal, GFPuv, Sapphire, T-sapphire,), cyan fluorescent proteins (e.g., ECFP, Cerulean, CyPet, AmCyanl, Midoriishi-Cyan), red fluorescent proteins (e.g., mKate, mKate2, mPlum, DsRed monomer, mCherry, mRFP1, DsRed-Express, DsRed2, DsRed-Monomer, HcRed-Tandem, HcRedl, AsRed2, eqFP611, mRasberry, mStrawberry, Jred), and orange fluorescent proteins (mOrange, mKO, Kusabira-Orange, Monomeric Kusabira-Orange, mTangerine, tdTomato) or any other suitable fluorescent protein. In other embodiments, the marker domain may be a purification tag and/or an epitope tag. Non-limiting exemplary tags include glutathione-S-transferase (GST), chitin binding protein (CBP), maltose binding protein (MBP), thioredoxin (TRX), poly(NANP), tandem affinity purification (TAP) tag, myc, AcV5, AU1, AUS, E, ECS, E2, FLAG, HA, nus, Softag 1, Softag 3, Strep, SBP, Glu-Glu, HSV, KT3, S, 51, T7, V5, VSV-G, 6xHis, 8xHis, biotin carboxyl carrier protein (BCCP), poly-His, and calmodulin. Non-limiting exemplary reporter genes include glutathione-S-transferase (GST), horseradish peroxidase (HRP), chloramphenicol acetyltransferase (CAT), beta-galactosidase, beta-glucuronidase, luciferase, or fluorescent proteins.

[0498] In additional embodiments, the heterologous functional domain may target the RNA-targeted endonuclease to a specific organelle, cell type, tissue, or organ. In some embodiments, the heterologous functional domain may target the RNA-targeted endonuclease to muscle.

[0499] In further embodiments, the heterologous functional domain may be an effector domain. When the RNA-targeted endonuclease is directed to its target sequence, e.g., when a Cas nuclease is directed to a target sequence by a gRNA, the effector domain may modify or affect the target sequence. In some embodiments, the effector domain may be chosen from a nucleic acid binding domain or a nuclease domain (e.g., a non-Cas nuclease domain) In some embodiments, the heterologous functional domain is a nuclease, such as a FokI nuclease. See, e.g., U.S. Pat. No. 9,023,649.

Determination of Efficacy of gRNAs

[0500] In some embodiments, the efficacy of a gRNA is determined when delivered or expressed together with other components forming an RNP. In some embodiments, the gRNA is expressed together with an RNA-targeted endonuclease, such as a Cas protein, e.g., Cas9. In some embodiments, the gRNA is delivered to or expressed in a cell line that already stably expresses an RNA-guided DNA nuclease, such as a Cas nuclease or nickase, e.g., Cas9 nuclease or nickase. In some embodiments the gRNA is delivered to a cell as part of a RNP. In some embodiments, the gRNA is delivered to a cell along with a mRNA encoding an RNA-guided DNA nuclease, such as a Cas nuclease or nickase, e.g., Cas9 nuclease or nickase.

[0501] As described herein, use of an RNA-guided DNA nuclease and one or more guide RNAs disclosed herein can lead to double-stranded breaks in the DNA which can produce excision of a trinucleotide repeat or self-complementary region upon repair by cellular machinery, e.g., in the presence of a DNA-PK inhibitor.

[0502] In some embodiments, the efficacy of particular gRNAs is determined based on in vitro models. In some embodiments, the in vitro model is a cell line containing a target trinucleotide repeat or self-complementary region, such as any such cell line described in the Example section below.

[0503] In some embodiments, the efficacy of particular gRNAs is determined across multiple in vitro cell models for a gRNA selection process. In some embodiments, a cell line comparison of data with selected gRNAs is performed. In some embodiments, cross screening in multiple cell models is performed.

[0504] In some embodiments, the efficacy of particular gRNAs is determined based on in vivo models. In some embodiments, the in vivo model is a rodent model. In some embodiments, the rodent model is a mouse which expresses a gene comprising an expanded trinucleotide repeat or a self-complementary region. The gene may be the human version or a rodent (e.g., murine) homolog of any of the genes listed in Table 1. In some embodiments, the gene is human DMPK. In some embodiments, the gene is a rodent (e.g., murine) homolog of DMPK In some embodiments, the in vivo model is a non-human primate, for example cynomolgus monkey.

[0505] In some embodiments, the efficacy of a guide RNA is measured by an amount of excision of a trinucleotide repeat of interest. The amount of excision may be determined by any appropriate method, e.g., quantitative sequencing; quantitative PCR; quantitative analysis of a Southern blot; etc.

[0506] Additional embodiments are provided:

[0507] Embodiment 1A is a method of treating a disease or disorder characterized by a trinucleotide repeat (TNR) in DNA, the method comprising delivering to a cell that comprises a TNR i) a guide RNA comprising a spacer that directs an RNA-targeted endonuclease to or near the TNR, or a nucleic acid encoding the guide RNA; ii) an RNA-targeted endonuclease or a nucleic acid encoding the RNA-targeted endonuclease; and iii) optionally a DNA-PK inhibitor.
[0508] Embodiment 2A is a method of excising a self-complementary region in DNA comprising delivering to a cell that comprises the self-complementary region i) a guide RNA comprising a spacer that directs an RNA-targeted endonuclease to or near the self-complementary region, or a nucleic acid encoding the guide RNA; ii) an RNA-targeted endonuclease or a nucleic acid encoding the RNA-targeted endonuclease; and iii) optionally a DNA-PK inhibitor, wherein the self-complementary region is excised.
[0509] Embodiment 3A is a method of excising a trinucleotide repeat (TNR) in DNA comprising delivering to a cell that comprises the TNR i) a guide RNA comprising a spacer that directs an RNA-targeted endonuclease to or near the TNR, or a nucleic acid encoding the guide RNA; ii) an RNA-targeted endonuclease or a nucleic acid encoding the RNA-targeted endonuclease; and iii) optionally a DNA-PK inhibitor, wherein at least one TNR is excised.
[0510] Embodiment 4A The method of embodiment 2A, wherein the self-complementary region comprises a palindromic sequence, a direct repeat, an inverted repeat, a GC-rich sequence, or an AT-rich sequence, optionally wherein the GC-richness or AT-richness is at least 70%, 75%, 80%, 85%, 90%, or 95% over a length of at least 10 nucleotides which are optionally interrupted by a loop-forming sequence.
[0511] Embodiment 5A The method of any one of the preceding embodiments, wherein a pair of guide RNAs that comprise a first and second spacer that deliver the RNA-targeted endonuclease to or near a TNR or self-complementary region, or one or more nucleic acids encoding the pair of guide RNAs, are delivered to the cell.
[0512] Embodiment 6A The method of any one of the preceding embodiments, wherein the target is (i) in the TNR or self-complementary region or (ii) within 10, 15, 20, 25, 30, 40, or 50 nucleotides of the TNR or self-complementary region.
[0513] Embodiment 7A The method of any one of embodiments 1A, 3A, 5A, and 6A, wherein the TNR is a CTG in the 3′ untranslated region (UTR) of the DMPK gene.
[0514] Embodiment 8A The method of embodiment 7A, wherein the excision results in treatment of myotonic dystrophy type 1 (DM1).
[0515] Embodiment 9A The method of any one of embodiments 1A, 3A, 5A, and 6A, wherein the TNR is within the huntingtin, frataxin (FXN), Fragile X Mental Retardation 1 (FMR1), Fragile X Mental Retardation 2 (FMR2), androgen receptor (AR), aristaless related homeobox (ARX), Ataxin 1 (ATXN1), Ataxin 2 (ATXN2), Ataxin 3 (ATXN3), Calcium voltage-gated channel subunit alphal A (CACNA1A), Ataxin 7 (ATXN7), ATXN8 opposite strand lncRNA (ATXN8OS), Serine/threonine-protein phosphatase 2A 55 kDa regulatory subunit B beta isoform (PPP2R2B), TATA binding protein (TBP), or Atrophin-1 (ATN1) gene, or the TNR is adjacent to the 5′ UTR of FMR2.
[0516] Embodiment 10A The method of embodiment 9A, wherein the excision in huntingtin (HTT) results in treatment of Huntington's disease (HD); the excision in FXN results in treatment of Friedrich's ataxia (FA); the excision in FMR1 results in treatment of Fragile X syndrome (FXS), Fragile X associated primary ovarian insufficiency (FXPOI), or fragile X-associated tremor/ataxia syndrome (FXTAS); the excision in FMR2 or adjacent to the 5′ UTR of FMR2 results in treatment of fragile XE syndrome (FXES); the excision in AR results in treatment of X-linked spinal and bulbar muscular atrophy (XSBMA); the excision in ATXN1 results in treatment of spinocerebellar ataxia type 1 (SCA1), the excision in ATXN2 results in treatment of spinocerebellar ataxia type 2 (SCA2), the excision in ATXN3 results in treatment of spinocerebellar ataxia type 3 (SCA3), the excision in CACNA1A results in treatment of spinocerebellar ataxia type 6 (SCA6), the excision in ATXN7 results in treatment of spinocerebellar ataxia type 7 (SCAT), the excision in ATXN8OS results in treatment of spinocerebellar ataxia type 8 (SCAB), the excision in PPP2R2B results in treatment of spinocerebellar ataxia type 12 (SCA12), the excision in TBP results in treatment of spinocerebellar ataxia type 17 (SCA17), or the excision in ATN1 results in treatment of Dentatorubropallidoluysian atrophy (DRPLA).
[0517] Embodiment 11A The method of any one of the preceding embodiments comprising administering a DNA-PK inhibitor.
[0518] Embodiment 12A A composition comprising:
   [0519] a guide RNA comprising a spacer sequence, or a nucleic acid encoding the guide RNA, wherein the spacer sequence comprises:
   [0520] a spacer sequence selected from SEQ ID NOs: 101-4988, 5001-7264, or 7301-53372; or
   [0521] a spacer sequence having at least 17, 18, 19, or 20 contiguous nucleotides of a sequence selected from SEQ ID NOs: 101-4988, 5001-7264, or 7301-53372; or
   [0522] a spacer sequence that is at least 99%, 98%, 97%, 96%, 95%, 94%, 93%, 92%, 91%, or 90% identical to a sequence selected from SEQ ID NOs: 101-4988, 5001-7264, or 7301-53372; or
   [0523] a pair of guide RNAs comprising a pair of spacer sequences, or one or more nucleic acids encoding the pair of guide RNAs, wherein the pair of spacer sequences comprise:
   [0524] a first spacer sequence selected from SEQ ID NOs: 2709-4076, and a second spacer sequence selected from SEQ ID NOs: 101-2708; or
   [0525] a first spacer sequence having at least 17, 18, 19, or 20 contiguous nucleotides of a sequence selected from SEQ ID NOs: 2709-4076 and a second spacer sequence having at least 17, 18, 19, or 20 contiguous nucleotides of a sequence selected from SEQ ID NOs: 101-2708; or
   [0526] a first spacer sequence that is at least 99%, 98%, 97%, 96%, 95%, 94%, 93%, 92%, 91%, or 90% identical to a sequence selected from SEQ ID NOs: 2709-4076, and a second spacer sequence that is at least 99%, 98%, 97%, 96%, 95%, 94%, 93%, 92%, 91%, or 90% identical to a sequence selected from SEQ ID NOs: 101-2708; or
   [0527] a pair of guide RNAs comprising a pair of spacer sequences, or one or more nucleic acids encoding the guide RNAs, wherein the pair of spacer sequences comprise:
   [0528] a first spacer sequence selected from SEQ ID NOs: 5001-5496, and a second spacer sequence selected from SEQ ID NOs: 5497-6080; or
   [0529] a first spacer sequence having at least 17, 18, 19, or 20 contiguous nucleotides of a sequence selected from SEQ ID NOs: 5001-5496 and a second spacer sequence having at least 17, 18, 19, or 20 contiguous nucleotides of a sequence selected from SEQ ID NOs: 5497-6080; or
   [0530] a first spacer sequence that is at least 99%, 98%, 97%, 96%, 95%, 94%, 93%, 92%, 91%, or 90% identical to a sequence selected from SEQ ID NOs: 5001-5496, and a second spacer sequence that is at least 99%, 98%, 97%, 96%, 95%, 94%, 93%, 92%, 91%, or 90% identical to a sequence selected from SEQ ID NOs: 5497-6080; or
   [0531] a pair of guide RNAs comprising a pair of spacer sequences, or one or more nucleic acids encoding the guide RNAs, wherein the pair of spacer sequences comprise:
   [0532] a first spacer sequence selected from SEQ ID NOs: 46597-53028, and a second spacer sequence selected from SEQ ID NOs: 7301-46596; or
   [0533] a first spacer sequence having at least 17, 18, 19, or 20 contiguous nucleotides of a sequence selected from SEQ ID NOs: 46597-53028 and a second spacer sequence having at least 17, 18, 19, or 20 contiguous nucleotides of a sequence selected from SEQ ID NOs: 7301-46596; or
   [0534] a first spacer sequence that is at least 99%, 98%, 97%, 96%, 95%, 94%, 93%, 92%, 91%, or 90% identical to a sequence selected from SEQ ID NOs: 46597-53028, and a second spacer sequence that is at least 99%, 98%, 97%, 96%, 95%, 94%, 93%, 92%, 91%, or 90% identical to a sequence selected from SEQ ID NOs: 7301-46596.
[0535] Embodiment 13A is the composition of embodiment 12A, comprising a guide RNA comprising a spacer sequence, wherein the spacer sequence is any one of SEQ ID NOs 3378, 3354 3346, 3330, 3314, 2658, 2690, 2546, 2554, 2498, 2506, 4010, 4026, 3914, 3938, 3858, 3818, 3794, 3746, 3778, 3770, 3722, 3690, 3658, 3514, 3370, 3418, 3394, 3386, 3802, 3682, 2618, 2594, 2458, 2514, 2258, 2322, 2210, 2194, 2114, 1914, 1778, 1770, 1738, 1706, 1746, 1642, 1538, 2202, 2178, 2170, or 2162.
[0536] Embodiment 14A The composition of embodiment 13A, wherein the spacer sequence has the sequence of SEQ ID NO: 3378.
[0537] Embodiment 15A The composition of embodiment 13A, wherein the spacer sequence has the sequence of SEQ ID NO: 3354.
[0538] Embodiment 16A The composition of embodiment 13A, wherein the spacer sequence has the sequence of SEQ ID NO: 3346.
[0539] Embodiment 17A The composition of embodiment 13A, wherein the spacer sequence has the sequence of SEQ ID NO: 3330.
[0540] Embodiment 18A The composition of embodiment 13A, wherein the spacer sequence has the sequence of SEQ ID NO: 3314.
[0541] Embodiment 19A The composition of embodiment 13A, wherein the spacer sequence has the sequence of SEQ ID NO: 2658.
[0542] Embodiment 20A The composition of embodiment 13A, wherein the spacer sequence has the sequence of SEQ ID NO: 2690.
[0543] Embodiment 21A The composition of embodiment 13A, wherein the spacer sequence has the sequence of SEQ ID NO: 2546.
[0544] Embodiment 22A The composition of embodiment 13A, wherein the spacer sequence has the sequence of SEQ ID NO: 2554.
[0545] Embodiment 23A The composition of embodiment 13A, wherein the spacer sequence has the sequence of SEQ ID NO: 2498.
[0546] Embodiment 24A The composition of embodiment 13A, wherein the spacer sequence has the sequence of SEQ ID NO: 2506.
[0547] Embodiment 25A The composition of embodiment 13A, wherein the spacer sequence has the sequence of SEQ ID NO: 4010.
[0548] Embodiment 26A The composition of embodiment 13A, wherein the spacer sequence has the sequence of SEQ ID NO: 4026.
[0549] Embodiment 27A The composition of embodiment 13A, wherein the spacer sequence has the sequence of SEQ ID NO: 3914.
[0550] Embodiment 28A The composition of embodiment 13A, wherein the spacer sequence has the sequence of SEQ ID NO: 3938.
[0551] Embodiment 29A The composition of embodiment 13A, wherein the spacer sequence has the sequence of SEQ ID NO: 3858.
[0552] Embodiment 30A The composition of embodiment 13A, wherein the spacer sequence has the sequence of SEQ ID NO: 3818.
[0553] Embodiment 31A The composition of embodiment 13A, wherein the spacer sequence has the sequence of SEQ ID NO: 3794.
[0554] Embodiment 32A The composition of embodiment 13A, wherein the spacer sequence has the sequence of SEQ ID NO: 3746.
[0555] Embodiment 33A The composition of embodiment 13A, wherein the spacer sequence has the sequence of SEQ ID NO: 3778.
[0556] Embodiment 34A The composition of embodiment 13A, wherein the spacer sequence has the sequence of SEQ ID NO: 3770.
[0557] Embodiment 35A The composition of embodiment 13A, wherein the spacer sequence has the sequence of SEQ ID NO: 3272.
[0558] Embodiment 36A The composition of embodiment 13A, wherein the spacer sequence has the sequence of SEQ ID NO: 3690.
[0559] Embodiment 37A The composition of embodiment 13A, wherein the spacer sequence has the sequence of SEQ ID NO: 3658.
[0560] Embodiment 38A The composition of embodiment 13A, wherein the spacer sequence has the sequence of SEQ ID NO: 3514.
[0561] Embodiment 39A The composition of embodiment 13A, wherein the spacer sequence has the sequence of SEQ ID NO: 3370.
[0562] Embodiment 40A The composition of embodiment 13A, wherein the spacer sequence has the sequence of SEQ ID NO: 3418.
[0563] Embodiment 41A The composition of embodiment 13A, wherein the spacer sequence has the sequence of SEQ ID NO: 3394.
[0564] Embodiment 42A The composition of embodiment 13A, wherein the spacer sequence has the sequence of SEQ ID NO: 3386.
[0565] Embodiment 43A The composition of embodiment 13A, wherein the spacer sequence has the sequence of SEQ ID NO: 3802.
[0566] Embodiment 44A The composition of embodiment 13A, wherein the spacer sequence has the sequence of SEQ ID NO: 3682.
[0567] Embodiment 45A The composition of embodiment 13A, wherein the spacer sequence has the sequence of SEQ ID NO: 2618.
[0568] Embodiment 46A The composition of embodiment 13A, wherein the spacer sequence has the sequence of SEQ ID NO: 2594.
[0569] Embodiment 47A The composition of embodiment 13A, wherein the spacer sequence has the sequence of SEQ ID NO: 2458.
[0570] Embodiment 48A The composition of embodiment 13A, wherein the spacer sequence has the sequence of SEQ ID NO: 2514.
[0571] Embodiment 49A The composition of embodiment 13A, wherein the spacer sequence has the sequence of SEQ ID NO: 2258.
[0572] Embodiment 50A The composition of embodiment 13A, wherein the spacer sequence has the sequence of SEQ ID NO: 2322.
[0573] Embodiment 51A The composition of embodiment 13A, wherein the spacer sequence has the sequence of SEQ ID NO: 2210.
[0574] Embodiment 52A The composition of embodiment 13A, wherein the spacer sequence has the sequence of SEQ ID NO: 2194.
[0575] Embodiment 53A The composition of embodiment 13A, wherein the spacer sequence has the sequence of SEQ ID NO: 2114.
[0576] Embodiment 54A The composition of embodiment 13A, wherein the spacer sequence has the sequence of SEQ ID NO: 1914.
[0577] Embodiment 55A The composition of embodiment 13A, wherein the spacer sequence has the sequence of SEQ ID NO: 1778.
[0578] Embodiment 56A The composition of embodiment 13A, wherein the spacer sequence has the sequence of SEQ ID NO: 1770.
[0579] Embodiment 57A The composition of embodiment 13A, wherein the spacer sequence has the sequence of SEQ ID NO: 1738.
[0580] Embodiment 58A The composition of embodiment 13A, wherein the spacer sequence has the sequence of SEQ ID NO: 1706.
[0581] Embodiment 59A The composition of embodiment 13A, wherein the spacer sequence has the sequence of SEQ ID NO: 1746.
[0582] Embodiment 60A The composition of embodiment 13A, wherein the spacer sequence has the sequence of SEQ ID NO: 1642.
[0583] Embodiment 61A The composition of embodiment 13A, wherein the spacer sequence has the sequence of SEQ ID NO: 1538.
[0584] Embodiment 62A The composition of embodiment 13A, wherein the spacer sequence has the sequence of SEQ ID NO: 2202.
[0585] Embodiment 63A The composition of embodiment 13A, wherein the spacer sequence has the sequence of SEQ ID NO: 2178.
[0586] Embodiment 64A The composition of embodiment 13A, wherein the spacer sequence has the sequence of SEQ ID NO: 2170.
[0587] Embodiment 65A The composition of embodiment 13A, wherein the spacer sequence has the sequence of SEQ ID NO: 2162.
[0588] Embodiment 66A The composition of embodiment 12A, comprising a pair of guide RNAs comprising a pair of spacer sequences, wherein
   [0589] the first spacer sequence is SEQ ID NO 3346, and wherein the second spacer sequence is SEQ ID NO 2554; or
   [0590] the first spacer sequence is SEQ ID NO 3346, and wherein the second spacer sequence is SEQ ID NO 1498; or
   [0591] the first spacer sequence is SEQ ID NO 3330, and wherein the second spacer sequence is SEQ ID NO 2554; or
   [0592] the first spacer sequence is SEQ ID NO 3330, and wherein the second spacer sequence is SEQ ID NO 2498; or
   [0593] the first spacer sequence is SEQ ID NO 3378, and wherein the second spacer sequence is SEQ ID NO 2546; or
   [0594] the first spacer sequence is SEQ ID NO 3354, and wherein the second spacer sequence is SEQ ID NO 2546; or
   [0595] the first spacer sequence is SEQ ID NO 3354, and wherein the second spacer sequence is SEQ ID NO 2506.
[0596] Embodiment 67A The composition of embodiment 12A, further comprising an RNA-targeted endonuclease, or a nucleic acid encoding the RNA-targeted endonuclease.
[0597] Embodiment 68A The composition of embodiment 12A or 67A, further comprising a DNA-PK inhibitor.
[0598] Embodiment 69A The method or composition of any of the preceding embodiments, wherein the guide RNA is an sgRNA.
[0599] Embodiment 70A The method or composition of embodiment 69A, wherein the sgRNA is modified.
[0600] Embodiment 71A The method or composition of embodiment 70A, wherein the modifications alter one or more 2′ positions and/or phosphodiester linkages.
[0601] Embodiment 72A The method or composition of any one of embodiments 70A-71A, wherein the modifications alter one or more, or all, of the first three nucleotides of the sgRNA.
[0602] Embodiment 73A The method or composition of any one of embodiments 70A-72A, wherein the modifications alter one or more, or all, of the last three nucleotides of the sgRNA.
[0603] Embodiment 74A The method or composition of any one of embodiments 70A-73A, wherein the modifications include one or more of a phosphorothioate modification, a 2′-OMe modification, a 2′-O-moe modification, a 2′-F modification, a 2′-O-methine-4′ bridge modification, a 3′-thiophosphonoacetate modification, and a 2′-deoxy modification.
[0604] Embodiment 75A The method or composition of any of the preceding embodiments, wherein the DNA-PK inhibitor is NU7441, KU-0060648, Compound 1, Compound 2, Compound 3, Compound 4, Compound 5, or Compound 6.
[0605] Embodiment 76A The method or composition of embodiment 75A, wherein the DNA-PK inhibitor is Compound 3 or Compound 6.
[0606] Embodiment 77A The method or composition of any of the preceding embodiments, wherein at least 1, 2, 3, 4, 5, 6, 7, 8, 9, 10, 15, 20, 25, 30, 40, 50, 60, 70, 80, 90, 100, 150, 200, 300, 400, 500, 600, 700, 800, 900, 1000, 1500, 2000, 3000, 4000, 5000, 6000, 7000, 8000, 9000, or 10,000 TNRs are excised.
[0607] Embodiment 78A The method or composition of any of the preceding embodiments, wherein 1-5, 5-10, 10-20, 20-30, 40-60, 60-80, 80-100, 100-150, 150-200, 200-300, 300-500, 500-700, 700-1000, 1000-1500, 1500-2000, 2000-3000, 3000-4000, 4000-5000, 5000-6000, 6000-7000, 7000-8000, 8000-9000, or 9000-10,000 TNRs are excised.
[0608] Embodiment 79A The method or composition of any one of the preceding embodiments, wherein the TNRs are within the DMPK gene, and wherein excision of the TNRs ameliorates one or more phenotypes associated with an expanded-repeat DMPK gene, said amelioration optionally comprising one or more of increasing myotonic dystrophy protein kinase activity; increasing phosphorylation of phospholemman, dihydropyridine receptor, myogenin, L-type calcium channel beta subunit, and/or myosin phosphatase targeting subunit; increasing inhibition of myosin phosphatase; and/or ameliorating muscle loss, muscle weakness, hypersomnia, one or more executive function deficiencies, insulin resistance, cataract formation, balding, or male infertility or low fertility.
[0609] Embodiment 80A The method or composition of any one of the preceding embodiments, wherein the TNRs are within the HTT gene, and wherein excision of the TNRs ameliorates one or more phenotypes associated with an expanded-repeat HTT gene, said amelioration optionally comprising ameliorating one or more of striatal neuron loss, involuntary movements, irritability, depression, small involuntary movements, poor coordination, difficulty learning new information or making decisions, difficulty walking, speaking, and/or swallowing, and/or a decline in thinking and/or reasoning abilities.
[0610] Embodiment 81A The method or composition of any one of the preceding embodiments, wherein the TNRs are within the FMR1 gene, and wherein excision of the TNRs ameliorates one or more phenotypes associated with an expanded-repeat FMR1 gene, said amelioration optionally comprising ameliorating one or more of aberrant FMR1 transcript or Fragile X Mental Retardation Protein levels, translational dysregulation of mRNAs normally associated with FMRP, lowered levels of phospho-cofilin (CFL1), increased levels of phospho-cofilin phosphatase PPP2CA, diminished mRNA transport to neuronal synapses, increased expression of HSP27, HSP70, and/or CRYAB, abnormal cellular distribution of lamin A/C isoforms, early-onset menopause such as menopause before age 40 years, defects in ovarian development or function, elevated level of serum gonadotropins (e.g., FSH), progressive intention tremor, parkinsonism, cognitive decline, generalized brain atrophy, impotence, and/or developmental delay.
[0611] Embodiment 82A The method or composition of any one of the preceding embodiments, wherein the TNRs are within the FMR2 gene or adjacent to the 5′ UTR of FMR2, and wherein excision of the TNRs ameliorates one or more phenotypes associated with expanded-repeats in or adjacent to the FMR2 gene, said amelioration optionally comprising ameliorating one or more of aberrant FMR2 expression, developmental delays, poor eye contact, repetitive use of language, and hand-flapping.
[0612] Embodiment 83A The method or composition of any one of the preceding embodiments, wherein the TNRs are within the AR gene, and wherein excision of the TNRs ameliorates one or more phenotypes associated with an expanded-repeat AR gene, said amelioration optionally comprising ameliorating one or more of aberrant AR expression; production of a C-terminally truncated fragment of the androgen receptor protein; proteolysis of androgen receptor protein by caspase-3 and/or through the ubiquitin-proteasome pathway; formation of nuclear inclusions comprising CREB-binding protein; aberrant phosphorylation of p44/42, p38, and/or SAPK/JNK; muscle weakness; muscle wasting; difficulty walking, swallowing, and/or speaking; gynecomastia; and/or male infertility.
[0613] Embodiment 84A The method or composition of any one of the preceding embodiments, wherein the TNRs are within the ATXN1 gene, and wherein excision of the TNRs ameliorates one or more phenotypes associated with an expanded-repeat ATXN1 gene, said amelioration optionally comprising ameliorating one or more of formation of aggregates comprising ATXN1; Purkinje cell death; ataxia; muscle stiffness; rapid, involuntary eye movements; limb numbness, tingling, or pain; and/or muscle twitches.
[0614] Embodiment 85A The method or composition of any one of the preceding embodiments, wherein the TNRs are within the ATXN2 gene, and wherein excision of the TNRs ameliorates one or more phenotypes associated with an expanded-repeat ATXN2 gene, said amelioration optionally comprising ameliorating one or more of aberrant ATXN2 production; Purkinje cell death; ataxia; difficulty speaking or swallowing; loss of sensation and weakness in the limbs; dementia; muscle wasting; uncontrolled muscle tensing; and/or involuntary jerking movements.
[0615] Embodiment 86A The method or composition of any one of the preceding embodiments, wherein the TNRs are within the ATXN3 gene, and wherein excision of the TNRs ameliorates one or more phenotypes associated with an expanded-repeat ATXN3 gene, said amelioration optionally comprising ameliorating one or more of aberrant ATXN3 levels; aberrant beclin-1 levels; inhibition of autophagy; impaired regulation of superoxide dismutase 2; ataxia; difficulty swallowing; loss of sensation and weakness in the limbs; dementia; muscle stiffness; uncontrolled muscle tensing; tremors; restless leg symptoms; and/or muscle cramps.
[0616] Embodiment 87A The method or composition of any one of the preceding embodiments, wherein the TNRs are within the CACNA1A gene, and wherein excision of the TNRs ameliorates one or more phenotypes associated with an expanded-repeat CACNA1A gene, said amelioration optionally comprising ameliorating one or more of aberrant CaV2.1 voltage-gated calcium channels in CACNA1A-expressing cells; ataxia; difficulty speaking; involuntary eye movements; double vision; loss of arm coordination; tremors; and/or uncontrolled muscle tensing.
[0617] Embodiment 88A The method or composition of any one of the preceding embodiments, wherein the TNRs are within the ATXN7 gene, and wherein excision of the TNRs ameliorates one or more phenotypes associated with an expanded-repeat ATXN7 gene, said amelioration optionally comprising ameliorating one or more of aberrant histone acetylation; aberrant histone deubiquitination; impairment of transactivation by CRX; formation of nuclear inclusions comprising ATXN7; ataxia; incoordination of gait; poor coordination of hands, speech and/or eye movements; retinal degeneration; and/or pigmentary macular dystrophy.
[0618] Embodiment 89A The method or composition of any one of the preceding embodiments, wherein the TNRs are within the ATXN8OS gene, and wherein excision of the TNRs ameliorates one or more phenotypes associated with an expanded-repeat ATXN8OS gene, said amelioration optionally comprising ameliorating one or more of formation of ribonuclear inclusions comprising ATXN8OS mRNA; aberrant KLHL1 protein expression; ataxia; difficulty speaking and/or walking; and/or involuntary eye movements.
[0619] Embodiment 90A The method or composition of any one of the preceding embodiments, wherein the TNRs are within the PPP2R2B gene, and wherein excision of the TNRs ameliorates one or more phenotypes associated with an expanded-repeat PPP2R2B gene, said amelioration optionally comprising ameliorating one or more of aberrant PPP2R2B expression; aberrant phosphatase 2 activity; ataxia; cerebellar degeneration; difficulty walking; and/or poor coordination of hands, speech and/or eye movements.
[0620] Embodiment 91A The method or composition of any one of the preceding embodiments, wherein the TNRs are within the TBP gene, and wherein excision of the TNRs ameliorates one or more phenotypes associated with an expanded-repeat TBP gene, said amelioration optionally comprising ameliorating one or more of aberrant transcription initiation; aberrant TBP protein accumulation (e.g., in cerebellar neurons); aberrant cerebellar neuron cell death; ataxia; difficulty walking; muscle weakness; and/or loss of cognitive abilities.
[0621] Embodiment 92A The method or composition of any one of the preceding embodiments, wherein the TNRs are within the ATN1 gene, and wherein excision of the TNRs ameliorates one or more phenotypes associated with an expanded-repeat ATN1 gene, said amelioration optionally comprising ameliorating one or more of aberrant transcriptional regulation; aberrant ATN1 protein accumulation (e.g., in neurons); aberrant neuron cell death; involuntary movements; and/or loss of cognitive abilities.
[0622] Embodiment 93A The method or composition of any one of the preceding embodiments, wherein the composition further comprises a pharmaceutically acceptable excipient.
[0623] Embodiment 94A The method or composition of any one of the preceding embodiments, wherein the guide RNA is associated with a lipid nanoparticle (LNP), or encoded by a viral vector.
[0624] Embodiment 95A The method or composition of embodiment 94A, wherein the viral vector is an adeno-associated virus vector, a lentiviral vector, an integrase-deficient lentiviral vector, an adenoviral vector, a vaccinia viral vector, an alphaviral vector, or a herpes simplex viral vector.
[0625] Embodiment 96A The method or composition of embodiment 95A, wherein the viral vector is an adeno-associated virus (AAV) vector.
[0626] Embodiment 97A The method or composition of embodiment 96A, wherein the AAV vector is an AAV1, AAV2, AAV3, AAV4, AAV5, AAV6, AAV7, AAV8, or AAV9 vector, wherein the number following AAV indicates the AAV serotype.
[0627] Embodiment 98A The method or composition of embodiment 96A, wherein the AAV vector is an AAV serotype 9 vector.
[0628] Embodiment 99A The method or composition of any one of embodiments 94A-98A, wherein the viral vector comprises a tissue-specific promoter.
[0629] Embodiment 100A The method or composition of any one of embodiments 94A-99A, wherein the viral vector comprises a muscle-specific promoter, optionally wherein the muscle-specific promoter is a muscle creatine kinase promoter, a desmin promoter, an MHCK7 promoter, or an SPc5-12 promoter.
[0630] Embodiment 101A The method or composition of any one of embodiments 94A-100A, wherein the viral vector comprises a neuron-specific promoter, optionally wherein the neuron-specific promoter is an enolase promoter.
[0631] Embodiment 102A Use of a composition of any one of the preceding embodiments for the preparation of a medicament for treating a human subject having DM1, HD, FA, FXS, FXTAS, FXPOI, FXES, XSBMA, SCA1, SCA2, SCA3, SCA6, SCA7, SCA8, SCA12, SCA17, or DRPLA.
[0632] Embodiment 103A A method of treating a disease or disorder characterized by a trinucleotide repeat (TNR) in DNA, the method comprising delivering to a cell that comprises a TNR i) a guide RNA comprising a spacer that directs an RNA-targeted endonuclease to or near the TNR, or a nucleic acid encoding the guide RNA; ii) an RNA-targeted endonuclease or a nucleic acid encoding the RNA-targeted endonuclease; and iii) a DNA-PK inhibitor which is Compound 3 or Compound 6.
[0633] Embodiment 104A A method of excising a self-complementary region in DNA comprising delivering to a cell that comprises the self-complementary region i) a guide RNA comprising a spacer that directs an RNA-targeted endonuclease to or near the self-complementary region, or a nucleic acid encoding the guide RNA; ii) an RNA-targeted endonuclease or a nucleic acid encoding the RNA-targeted endonuclease; and iii) a DNA-PK inhibitor which is Compound 3 or Compound 6, wherein the self-complementary region is excised.
[0634] Embodiment 105A A method of excising a trinucleotide repeat (TNR) in DNA comprising delivering to a cell that comprises the TNR i) a guide RNA comprising a spacer that directs an RNA-targeted endonuclease to or near the TNR, or a nucleic acid encoding the guide RNA; ii) an RNA-targeted endonuclease or a nucleic acid encoding the RNA-targeted endonuclease; and iii) a DNA-PK inhibitor which is Compound 3 or Compound 6, wherein at least one TNR is excised.
[0635] Embodiment 106A The method of embodiment 103A or 105A, wherein the DNA-PK inhibitor is Compound 3.
[0636] Embodiment 107A The method of embodiment 106A, wherein the TNR is within the frataxin gene.
[0637] Embodiment 108A The method of embodiment 103A or 105A, wherein the DNA-PK inhibitor is Compound 6.
[0638] Embodiment 109A The method of embodiment 108A, wherein the TNR is a CTG in the 3′ UTR of the DMPK gene.
[0639] Embodiment 110A The method of embodiment 108A, wherein the TNR is within the frataxin gene.
[0640] Embodiment 111A The method of any one of embodiments 103A-110A, wherein a pair of guide

[0641] RNAs that comprise a first and second spacer that deliver the RNA-targeted endonuclease to or near a TNR or self-complementary region, or one or more nucleic acids encoding the pair of guide RNAs, are delivered to the cell.
[0642] Embodiment 112A A method of treating a disease or disorder characterized by a trinucleotide repeat (TNR) in the 3′ UTR of the DMPK gene, the method comprising delivering to a cell that comprises a TNR i) a guide RNA comprising a spacer having a sequence of any one of SEQ ID NOs 3378, 3354, 3346, 3330, 3314, 2658, 2690, 2546, 2554, 2498, 2506, 4010, 4026, 3914, 3938, 3858, 3818, 3794, 3746, 3778, 3770, 3722, 3690, 3658, 3514, 3370, 3418, 3394, 3386, 3802, 3682, 2618, 2594, 2458, 2514, 2258, 2322, 2210, 2194, 2114, 1914, 1778, 1770, 1738, 1706, 1746, 1642, 1538, 2202, 2178, 2170, or 2162, or a nucleic acid encoding the guide RNA; ii) an RNA-targeted endonuclease or a nucleic acid encoding the RNA-targeted endonuclease; and iii) optionally a DNA-PK inhibitor.
[0643] Embodiment 113A A method of excising a trinucleotide repeat (TNR) in the 3′ UTR of the DMPK gene comprising delivering to a cell that comprises the TNR i) a guide RNA comprising a spacer having a sequence of any one of SEQ ID NOs 3378, 3354, 3346, 3330, 3314, 2658, 2690, 2546, 2554, 2498, 2506, 4010, 4026, 3914, 3938, 3858, 3818, 3794, 3746, 3778, 3770, 3722, 3690, 3658, 3514, 3370, 3418, 3394, 3386, 3802, 3682, 2618, 2594, 2458, 2514, 2258, 2322, 2210, 2194, 2114, 1914, 1778, 1770, 1738, 1706, 1746, 1642, 1538, 2202, 2178, 2170, or 2162, or a nucleic acid encoding the guide RNA; ii) an RNA-targeted endonuclease or a nucleic acid encoding the RNA-targeted endonuclease; and iii) optionally a DNA-PK inhibitor, wherein at least one TNR is excised.
[0644] Embodiment 114A The method of embodiment 112A or 113A, wherein the DNA-PK inhibitor is delivered.
[0645] Embodiment 115A The method of embodiment 114A, wherein the DNA-PK inhibitor is Compound 6.
[0646] Embodiment 116A The method of any one of embodiments 112A-115A, wherein the spacer sequence has the sequence of SEQ ID NO: 3378.
[0647] Embodiment 117A The method of any one of embodiments 112A-115A, wherein the spacer sequence has the sequence of SEQ ID NO: 3354.
[0648] Embodiment 118A The method of any one of embodiments 112A-115A, wherein the spacer sequence has the sequence of SEQ ID NO: 3346.
[0649] Embodiment 119A The method of any one of embodiments 112A-115A, wherein the spacer sequence has the sequence of SEQ ID NO: 3330.
[0650] Embodiment 120A The method of any one of embodiments 112A-115A, wherein the spacer sequence has the sequence of SEQ ID NO: 3314.
[0651] Embodiment 121A The method of any one of embodiments 112A-115A, wherein the spacer sequence has the sequence of SEQ ID NO: 2658.
[0652] Embodiment 122A The method of any one of embodiments 112A-115A, wherein the spacer sequence has the sequence of SEQ ID NO: 2690.
[0653] Embodiment 123A The method of any one of embodiments 112A-115A, wherein the spacer sequence has the sequence of SEQ ID NO: 2546.
[0654] Embodiment 124A The method of any one of embodiments 112A-115A, wherein the spacer sequence has the sequence of SEQ ID NO: 2554.
[0655] Embodiment 125A The method of any one of embodiments 112A-115A, wherein the spacer sequence has the sequence of SEQ ID NO: 2498.
[0656] Embodiment 126A The method of any one of embodiments 112A-115A, wherein the spacer sequence has the sequence of SEQ ID NO: 2506.
[0657] Embodiment 127A The method of any one of embodiments 112A-115A, wherein the spacer sequence has the sequence of SEQ ID NO: 4010.
[0658] Embodiment 128A The method of any one of embodiments 112A-115A, wherein the spacer sequence has the sequence of SEQ ID NO: 4026.
[0659] Embodiment 129A The method of any one of embodiments 112A-115A, wherein the spacer sequence has the sequence of SEQ ID NO: 3914.
[0660] Embodiment 130A The method of any one of embodiments112A-115A, wherein the spacer sequence has the sequence of SEQ ID NO: 3938.
[0661] Embodiment 131A The method of any one of embodiments 112A-115A, wherein the spacer sequence has the sequence of SEQ ID NO: 3858.
[0662] Embodiment 132A The method of any one of embodiments 112A-115A, wherein the spacer sequence has the sequence of SEQ ID NO: 3818.
[0663] Embodiment 133A The method of any one of embodiments 112A-115A, wherein the spacer sequence has the sequence of SEQ ID NO: 3794.
[0664] Embodiment 134A The method of any one of embodiments 112A-115A, wherein the spacer sequence has the sequence of SEQ ID NO: 3746.
[0665] Embodiment 135A The method of any one of embodiments 112A-115A, wherein the spacer sequence has the sequence of SEQ ID NO: 3778.
[0666] Embodiment 136A The method of any one of embodiments 112A-115A, wherein the spacer sequence has the sequence of SEQ ID NO: 3770.
[0667] Embodiment 137A The method of any one of embodiments 112A-115A, wherein the spacer sequence has the sequence of SEQ ID NO: 3722.
[0668] Embodiment 138A The method of any one of embodiments 112A-115A, wherein the spacer sequence has the sequence of SEQ ID NO: 3690.
[0669] Embodiment 139A The method of any one of embodiments 112A-115A, wherein the spacer sequence has the sequence of SEQ ID NO: 3658.
[0670] Embodiment 140A The method of any one of embodiments 112A-115A, wherein the spacer sequence has the sequence of SEQ ID NO: 3514.
[0671] Embodiment 141A The method of any one of embodiments 112A-115A, wherein the spacer sequence has the sequence of SEQ ID NO: 3370.
[0672] Embodiment 142A The method of any one of embodiments 112A-115A, wherein the spacer sequence has the sequence of SEQ ID NO: 3418.
[0673] Embodiment 143A The method of any one of embodiments 112A-115A, wherein the spacer sequence has the sequence of SEQ ID NO: 3394.
[0674] Embodiment 144A The method of any one of embodiments 112A-115A, wherein the spacer sequence has the sequence of SEQ ID NO: 3386.
[0675] Embodiment 145A The method of any one of embodiments 112A-115A, wherein the spacer sequence has the sequence of SEQ ID NO: 3802.
[0676] Embodiment 146A The method of any one of embodiments 112A-115A, wherein the spacer sequence has the sequence of SEQ ID NO: 3682.
[0677] Embodiment 147A The method of any one of embodiments 112A-115A, wherein the spacer sequence has the sequence of SEQ ID NO: 2618.
[0678] Embodiment 148A The method of any one of embodiments 112A-115A, wherein the spacer sequence has the sequence of SEQ ID NO: 2594.
[0679] Embodiment 149A The method of any one of embodiments 112A-115A, wherein the spacer sequence has the sequence of SEQ ID NO: 2458.
[0680] Embodiment 150A The method of any one of embodiments 112A-115A, wherein the spacer sequence has the sequence of SEQ ID NO: 2514.
[0681] Embodiment 151A The method of any one of embodiments 112A-115A, wherein the spacer sequence has the sequence of SEQ ID NO: 2258.
[0682] Embodiment 152A The method of any one of embodiments 112A-115A, wherein the spacer sequence has the sequence of SEQ ID NO: 2322.
[0683] Embodiment 153A The method of any one of embodiments 112A-115A, wherein the spacer sequence has the sequence of SEQ ID NO: 2210.
[0684] Embodiment 154A The method of any one of embodiments 112A-115A, wherein the spacer sequence has the sequence of SEQ ID NO: 2194.
[0685] Embodiment 155A The method of any one of embodiments 112A-115A, wherein the spacer sequence has the sequence of SEQ ID NO: 2114.
[0686] Embodiment 156A The method of any one of embodiments 112A-115A, wherein the spacer sequence has the sequence of SEQ ID NO: 1914.
[0687] Embodiment 157A The method of any one of embodiments 112A-115A, wherein the spacer sequence has the sequence of SEQ ID NO: 1778.
[0688] Embodiment 158A The method of any one of embodiments 112A-115A, wherein the spacer sequence has the sequence of SEQ ID NO: 1770.
[0689] Embodiment 159A The method of any one of embodiments 112A-115A, wherein the spacer sequence has the sequence of SEQ ID NO: 1738.
[0690] Embodiment 160A The method of any one of embodiments 112A-115A, wherein the spacer sequence has the sequence of SEQ ID NO: 1706.
[0691] Embodiment 161A The method of any one of embodiments 112A-115A, wherein the spacer sequence has the sequence of SEQ ID NO: 1746.
[0692] Embodiment 162A The method of any one of embodiments 112A-115A, wherein the spacer sequence has the sequence of SEQ ID NO: 1642.
[0693] Embodiment 163A The method of any one of embodiments 112A-115A, wherein the spacer sequence has the sequence of SEQ ID NO: 1538.
[0694] Embodiment 164A The method of any one of embodiments 112A-115A, wherein the spacer sequence has the sequence of SEQ ID NO: 2202.
[0695] Embodiment 165A The method of any one of embodiments 112A-115A, wherein the spacer sequence has the sequence of SEQ ID NO: 2178.
[0696] Embodiment 166A The method of any one of embodiments 112A-115A, wherein the spacer sequence has the sequence of SEQ ID NO: 2170.
[0697] Embodiment 167A The method of any one of embodiments 112A-115A, wherein the spacer sequence has the sequence of SEQ ID NO: 2162.
[0698] Embodiment 168A The method of any one of embodiments 112A-167A, wherein a pair of guide RNAs that comprise a first and second spacer that deliver the RNA-targeted endonuclease to or near a TNR or self-complementary region, or one or more nucleic acids encoding the pair of guide RNAs, are delivered to the cell.
[0699] Embodiment 169A The method of embodiment 168A, wherein the first and second spacers have the sequences of SEQ ID NOs 3346 and 2554.
[0700] Embodiment 170A The method of embodiment 168A, wherein the first and second spacers have the sequences of SEQ ID NOs 3346 and 2498.
[0701] Embodiment 171A The method of embodiment 168A, wherein the first and second spacers have the sequences of SEQ ID NOs 3330 and 2554.
[0702] Embodiment 172A The method of embodiment 168A, wherein the first and second spacers have the sequences of SEQ ID NOs 3330 and 2498.
[0703] Embodiment 173A The method of embodiment 168A, wherein the first and second spacers have the sequences of SEQ ID NOs 3378 and 2546.
[0704] Embodiment 174A The method of embodiment 168A, wherein the first and second spacers have the sequences of SEQ ID NOs 3378 and 2506.
[0705] Embodiment 175A The method of embodiment 168A, wherein the first and second spacers have the sequences of SEQ ID NOs 3354 and 2546.
[0706] Embodiment 176A The method of embodiment 168A, wherein the first and second spacers have the sequences of SEQ ID NOs 3354 and 2506.
[0707] Embodiment 177A A method of treating a disease or disorder characterized by a trinucleotide repeat (TNR) in the 5′ UTR of the FMR1 gene, the method comprising delivering to a cell that comprises a TNR i) a guide RNA comprising a spacer having a sequence of any one of SEQ ID NOs 5830, 6022, 5070, 5310, 5334, 5622, 5926, 5950, or 5998, or a nucleic acid encoding the guide RNA; ii) an RNA-targeted endonuclease or a nucleic acid encoding the RNA-targeted endonuclease; and iii) optionally a DNA-PK inhibitor.
[0708] Embodiment 178A A method of excising a trinucleotide repeat (TNR) in the 5′ UTR of the FMR1 gene comprising delivering to a cell that comprises the TNR i) a guide RNA comprising a spacer having a sequence of any one of SEQ ID NOs 5830, 6022, 5070, 5310, 5334, 5622, 5926, 5950, or 5998, or a nucleic acid encoding the guide RNA; ii) an RNA-targeted endonuclease or a nucleic acid encoding the RNA-targeted endonuclease; and iii) optionally a DNA-PK inhibitor, wherein at least one TNR is excised.
[0709] Embodiment 179A The method of embodiment 177A or 178A, wherein the DNA-PK inhibitor is delivered.
[0710] Embodiment 180A The method of any one of embodiments 177A-179A, wherein the spacer sequence has the sequence of SEQ ID NO: 5830.
[0711] Embodiment 181A The method of any one of embodiments 177A-179A, wherein the spacer sequence has the sequence of SEQ ID NO: 6022.
[0712] Embodiment 182A The method of any one of embodiments 177A-179A, wherein the spacer sequence has the sequence of SEQ ID NO: 5070.
[0713] Embodiment 183A The method of any one of embodiments 177A-179A, wherein the spacer sequence has the sequence of SEQ ID NO: 5310.
[0714] Embodiment 184A The method of any one of embodiments 177A-179A, wherein the spacer sequence has the sequence of SEQ ID NO: 5334.
[0715] Embodiment 185A The method of any one of embodiments 177A-179A, wherein the spacer sequence has the sequence of SEQ ID NO: 5622.
[0716] Embodiment 186A The method of any one of embodiments 177A-179A, wherein the spacer sequence has the sequence of SEQ ID NO: 5926.
[0717] Embodiment 187A The method of any one of embodiments 177A-179A, wherein the spacer sequence has the sequence of SEQ ID NO: 5950.
[0718] Embodiment 188A The method of any one of embodiments 177A-179A, wherein the spacer sequence has the sequence of SEQ ID NO:5998.
[0719] Embodiment 189A The method of any one of embodiments 177A-188A, wherein a pair of guide RNAs that comprise a first and second spacer that deliver the RNA-targeted endonuclease to or near a TNR or self-complementary region, or one or more nucleic acids encoding the pair of guide RNAs, are delivered to the cell.
[0720] Embodiment 190A The method of embodiment 189A, wherein the first and second spacers have the sequences of SEQ ID NOs 5830 and 5070.
[0721] Embodiment 191A The method of embodiment 189A, wherein the first and second spacers have the sequences of SEQ ID NOs 6022 and 5310.
[0722] Embodiment 192A The method of embodiment 189A, wherein the first and second spacers have the sequences of SEQ ID NOs 5622 and 5070.
[0723] Embodiment 193A The method of embodiment 189A, wherein the first and second spacers have the sequences of SEQ ID NOs 5926 and 5070.
[0724] Embodiment 194A The method of embodiment 189A, wherein the first and second spacers have the sequences of SEQ ID NOs 5950 and 5070.
[0725] Embodiment 195A The method of embodiment 189A, wherein the first and second spacers have the sequences of SEQ ID NOs 5998 and 5070.
[0726] Embodiment 196A A method of treating a disease or disorder characterized by a trinucleotide repeat (TNR) in an intron of the FXN gene, the method comprising delivering to a cell that comprises a TNR i) a guide RNA comprising a spacer having a sequence of any one of SEQ ID NOs 16690, 34442, 45906, 15994, 52666, 51322, 46599, 52898, 26546, 7447, 47047, or 49986, or a nucleic acid encoding the guide RNA; ii) an RNA-targeted endonuclease or a nucleic acid encoding the RNA-targeted endonuclease; and iii) optionally a DNA-PK inhibitor.
[0727] Embodiment 197A A method of excising a trinucleotide repeat (TNR) in the 5′ UTR of the FMR1 gene comprising delivering to a cell that comprises the TNR i) a guide RNA comprising a spacer having a sequence of any one of SEQ ID NOs 16690, 34442, 45906, 15994, 52666, 51322, 46599, 52898, 26546, 7447, 47047, or 49986, or a nucleic acid encoding the guide RNA; ii) an RNA-targeted endonuclease or a nucleic acid encoding the RNA-targeted endonuclease; and iii) optionally a DNA-PK inhibitor, wherein at least one TNR is excised.
[0728] Embodiment 198A The method of embodiment 196A or 197A, wherein the DNA-PK inhibitor is delivered.
[0729] Embodiment 199A The method of embodiment 198A, wherein the DNA-PK inhibitor is Compound 3.
[0730] Embodiment 200A The method of any one of embodiments 196A-199A, wherein the spacer sequence has the sequence of SEQ ID NO: 16690.
[0731] Embodiment 201A The method of any one of embodiments 196A-199A, wherein the spacer sequence has the sequence of SEQ ID NO: 34442.
[0732] Embodiment 202A The method of any one of embodiments 196A-199A, wherein the spacer sequence has the sequence of SEQ ID NO: 45906.
[0733] Embodiment 203A The method of any one of embodiments 196A-199A, wherein the spacer sequence has the sequence of SEQ ID NO: 15994.
[0734] Embodiment 204A The method of any one of embodiments 196A-199A, wherein the spacer sequence has the sequence of SEQ ID NO: 52666.
[0735] Embodiment 205A The method of any one of embodiments 196A-199A, wherein the spacer sequence has the sequence of SEQ ID NO: 51322.
[0736] Embodiment 206A The method of any one of embodiments 196A-199A, wherein the spacer sequence has the sequence of SEQ ID NO: 46599.
[0737] Embodiment 207A The method of any one of embodiments 196A-199A, wherein the spacer sequence has the sequence of SEQ ID NO: 49986.
[0738] Embodiment 208A The method of any one of embodiments 196A-199A, wherein the spacer sequence has the sequence of SEQ ID NO: 52898.
[0739] Embodiment 209A The method of any one of embodiments 196A-199A, wherein the spacer sequence has the sequence of SEQ ID NO: 26546.
[0740] Embodiment 210A The method of any one of embodiments 196A-199A, wherein the spacer sequence has the sequence of SEQ ID NO: 7447.
[0741] Embodiment 211A The method of any one of embodiments 196A-199A, wherein the spacer sequence has the sequence of SEQ ID NO: 47047.
[0742] Embodiment 212A The method of any one of embodiments 196A-211A, wherein a pair of guide RNAs that comprise a first and second spacer that deliver the RNA-targeted endonuclease to or near the TNR, or one or more nucleic acids encoding the pair of guide RNAs, are delivered to the cell.
[0743] Embodiment 213A The method of embodiment 212A, wherein the first and second spacers have the sequences of SEQ ID NOs 52898 and 26546.
[0744] Embodiment 214A The method of embodiment 212A, wherein the first and second spacers have the sequences of SEQ ID NOs 47047 and 7447.
[0745] Embodiment 215A The method of embodiment 212A, wherein the first and second spacers have the sequences of SEQ ID NOs 52666 and 15994.
[0746] Embodiment 216A The method or composition of any one of embodiments 1A-4A, 6A-167A, 177A-188A, or 196A-211A, wherein only one gRNA or vector encoding only one gRNA is provided or delivered.
[0747] Embodiment 1B is a composition comprising:
[0748] a pair of guide RNAs comprising a pair of spacer sequences, or one or more nucleic acids encoding the pair of guide RNAs, wherein the pair of spacer sequences comprise:
   [0749] i. a first spacer sequence selected from SEQ ID NOs: 2856, 2864, 2880, 2896, 2904, 2912, 2936, 2944, 2960, 2992, 3016, 3024, 3064, 3096, 3112, 3128, 3136, 3144, 3160, 3168, 3192, 3200, 3208, 3216, 3224, 3232, 3240, 3248, 3256, 3264, 3314, 3330, 3346, 3354, 3370, 3378, 3386, 3394, 3410, 3418, 3426, 3434, 3442, 3450, 3458, 3474, 3482, 3490, 3498, 3506, 3514, 3522, 3530, 3538, 3546, 3554, 3570, 3578, 3586, 3602, 3610, 3618, 3634, 3642, 3658, 3674, 3682, 3690, 3698, 3706, 3722, 3746, 3762, 3770, 3778, 3794, 3802, 3818, 3826, 3834, 3850, 3858, 3890, 3898, 3906, 3914, 3922, 3930, 3938, 3946, 3994, 4010, 4018, 4026, 4034, 4042, 4208, or 4506; and a second spacer sequence selected from SEQ ID NOs: 560, 584, 608, 616, 656, 672, 688, 696, 712, 744, 752, 760, 840, 864, 960, 976, 984, 1008, 1056, 1128, 1136, 1152, 1224, 1240, 1272, 1338, 1346, 1370, 1378, 1386, 1394, 1402, 1410, 1418, 1426, 1434, 1442, 1458, 1474, 1482, 1490, 1498, 1514, 1538, 1546, 1554, 1562, 1578, 1586, 1594, 1602, 1610, 1626, 1634, 1642, 1650, 1658, 1690, 1706, 1714, 1738, 1746, 1770, 1778, 1786, 1802, 1810, 1818, 1826, 1834, 1842, 1850, 1890, 1914, 1930, 1938, 1946, 1962, 1970, 1978, 1986, 1994, 2010, 2018, 2026, 2042, 2050, 2058, 2090, 2114, 2130, 2162, 2170, 2178, 2202, 2210, 2226, 2242, 2258, 2266, 2274, 2282, 2298, 2314, 2322, 2330, 2338, 2346, 2354, 2370, 2378, 2394, 2418, 2434, 2442, 2458, 2466, 2474, 2498, 2506, 2514, 2522, 2546, 2554, 2570, 2586, 2658, 4989, 4990, 4991, or 4992; and/or
   [0750] ii. a first spacer sequence having at least 17, 18, 19, or 20 contiguous nucleotides of a sequence selected from SEQ ID NOs: 2856, 2864, 2880, 2896, 2904, 2912, 2936, 2944, 2960, 2992, 3016, 3024, 3064, 3096, 3112, 3128, 3136, 3144, 3160, 3168, 3192, 3200, 3208, 3216, 3224, 3232, 3240, 3248, 3256, 3264, 3314, 3330, 3346, 3354, 3370, 3378, 3386, 3394, 3410, 3418, 3426, 3434, 3442, 3450, 3458, 3474, 3482, 3490, 3498, 3506, 3514, 3522, 3530, 3538, 3546, 3554, 3570, 3578, 3586, 3602, 3610, 3618, 3634, 3642, 3658, 3674, 3682, 3690, 3698, 3706, 3722, 3746, 3762, 3770, 3778, 3794, 3802, 3818, 3826, 3834, 3850, 3858, 3890, 3898, 3906, 3914, 3922, 3930, 3938, 3946, 3994, 4010, 4018, 4026, 4034, 4042, 4208, or 4506, and a second spacer sequence having at least 17, 18, 19, or 20 contiguous nucleotides of a sequence selected from SEQ ID NOs: 560, 584, 608, 616, 656, 672, 688, 696, 712, 744, 752, 760, 840, 864, 960, 976, 984, 1008, 1056, 1128, 1136, 1152, 1224, 1240, 1272, 1338, 1346, 1370, 1378, 1386, 1394, 1402, 1410, 1418, 1426, 1434, 1442, 1458, 1474, 1482, 1490, 1498, 1514, 1538, 1546, 1554, 1562, 1578, 1586, 1594, 1602, 1610, 1626, 1634, 1642, 1650, 1658, 1690, 1706, 1714, 1738, 1746, 1770, 1778, 1786, 1802, 1810, 1818, 1826, 1834, 1842, 1850, 1890, 1914, 1930, 1938, 1946, 1962, 1970, 1978, 1986, 1994, 2010, 2018, 2026, 2042, 2050, 2058, 2090, 2114, 2130, 2162, 2170, 2178, 2202, 2210, 2226, 2242, 2258, 2266, 2274, 2282, 2298, 2314, 2322, 2330, 2338, 2346, 2354, 2370, 2378, 2394, 2418, 2434, 2442, 2458, 2466, 2474, 2498, 2506, 2514, 2522, 2546, 2554, 2570, 2586, 2658, 4989, 4990, 4991, or 4992; and/or
   [0751] iii. a first spacer sequence that is at least 99%, 98%, 97%, 96%, 95%, 94%, 93%, 92%, 91%, or 90% identical to a sequence selected from SEQ ID NOs: 2856, 2864, 2880, 2896, 2904, 2912, 2936, 2944, 2960, 2992, 3016, 3024, 3064, 3096, 3112, 3128, 3136, 3144, 3160, 3168, 3192, 3200, 3208, 3216, 3224, 3232, 3240, 3248, 3256, 3264, 3314, 3330, 3346, 3354, 3370, 3378, 3386, 3394, 3410, 3418, 3426, 3434, 3442, 3450, 3458, 3474, 3482, 3490, 3498, 3506, 3514, 3522, 3530, 3538, 3546, 3554, 3570, 3578, 3586, 3602, 3610, 3618, 3634, 3642, 3658, 3674, 3682, 3690, 3698, 3706, 3722, 3746, 3762, 3770, 3778, 3794, 3802, 3818, 3826, 3834, 3850, 3858, 3890, 3898, 3906, 3914, 3922, 3930, 3938, 3946, 3994, 4010, 4018, 4026, 4034, 4042, 4208, or 4506, and a second spacer sequence that is at least 99%, 98%, 97%, 96%, 95%, 94%, 93%, 92%, 91%, or 90% identical to a sequence selected from SEQ ID NOs: 560, 584, 608, 616, 656, 672, 688, 696, 712, 744, 752, 760, 840, 864, 960, 976, 984, 1008, 1056, 1128, 1136, 1152, 1224, 1240, 1272, 1338, 1346, 1370, 1378, 1386, 1394, 1402, 1410, 1418, 1426, 1434, 1442, 1458, 1474, 1482, 1490, 1498, 1514, 1538, 1546, 1554, 1562, 1578, 1586, 1594, 1602, 1610, 1626, 1634, 1642, 1650, 1658, 1690, 1706, 1714, 1738, 1746, 1770, 1778, 1786, 1802, 1810, 1818, 1826, 1834, 1842, 1850, 1890, 1914, 1930, 1938, 1946, 1962, 1970, 1978, 1986, 1994, 2010, 2018, 2026, 2042, 2050, 2058, 2090, 2114, 2130, 2162, 2170, 2178, 2202, 2210, 2226, 2242, 2258, 2266, 2274, 2282, 2298, 2314, 2322, 2330, 2338, 2346, 2354, 2370, 2378, 2394, 2418, 2434, 2442, 2458, 2466, 2474, 2498, 2506, 2514, 2522, 2546, 2554, 2570, 2586, 2658, 4989, 4990, 4991, or 4992.
[0752] Embodiment 2B is a composition comprising:
[0753] a pair of guide RNAs comprising a pair of spacer sequences, or one or more nucleic acids encoding the pair of guide RNAs, wherein the pair of spacer sequences comprise:
   [0754] iv. a first spacer sequence selected from SEQ ID NOs: 3778, 4026, 3794, 4010, 3906 or 3746, and a second spacer sequence selected from SEQ ID NOs: 1778, 1746, 1770, 1586, 1914, or 2210; and/or
   [0755] v. a first spacer sequence selected from SEQ ID NOs: 3256, 2896, 3136, or 3224, and a second spacer sequence selected from SEQ ID NOs: 4989, 560, 672, 976, 760, 984, or 616; and/or
   [0756] vi. a first spacer sequence and a second spacer sequence selected from SEQ ID NOs: 3778 and 1778; 3778 and 1746; 3778 and 1770; 3778 and 1586; 3778 and 1914; 3778 and 2210; 4026 and 1778; 4026 and 1746; 4026 and 1770; 4026 and 1586; 4026 and 1914; 4026 and 2210; 3794 and 1778; 3794 and 1746; 3794 and 1770; 3794 and 1586; 3794 and 1586; 3794 and 1914; 3794 and 2210; 4010 and 1778; 4010 and 1770; 4010 and 1746; 4010 and 1586; 4010 and 1914; 4010 and 2210; 3906 and 1778; 3906 and 1778; 3906 and 1746; 3906 and 1770; 3906 and 1586; 3906 and 1914; 3906 and 2210; 3746 and 1778; 3746 and 1746; 3746 and 1770; 3746 and 1586; 3746 and 1914; or 3746 and 2210; and/or
   [0757] vii. a first spacer sequence and a second spacer sequence selected from SEQ ID NOs: 3256 and 4989; 3256 and 984; 3256 and 616; 2896 and 4989; 2896 and 672; 2896 and 760; 3136 and 4989; 3136 and 560; 3224 and 4989; 3224 and 976; or 3224 and 760.
[0758] Embodiment 3B is the composition of embodiment 1B or 2B, further comprising an RNA-targeted endonuclease, or a nucleic acid encoding the RNA-targeted endonuclease.
[0759] Embodiment 4B is the composition of any of the preceding embodiments, wherein the guide RNA is an sgRNA.
[0760] Embodiment 5B is the composition of embodiment 4B, wherein the sgRNA is modified.
[0761] Embodiment 6B is the composition of embodiment 5B, wherein the modifications alter one or more 2′ positions and/or phosphodiester linkages.
[0762] Embodiment 7B is the composition of any one of embodiments 5B-6B, wherein the modifications alter one or more, or all, of the first three nucleotides of the sgRNA.
[0763] Embodiment 8B is the composition of any one of embodiments 5B-7B, wherein the modifications alter one or more, or all, of the last three nucleotides of the sgRNA.
[0764] Embodiment 9B is the composition of any one of embodiments 5B-8B, wherein the modifications include one or more of a phosphorothioate modification, a 2′-OMe modification, a 2′-O-MOE modification, a 2′-F modification, a 2′-O-methine-4′ bridge modification, a 3′-thiophosphonoacetate modification, and a 2′-deoxy modification.
[0765] Embodiment 10B is the composition of any of the preceding embodiments, wherein the composition further comprises a pharmaceutically acceptable excipient.
[0766] Embodiment 11B is the composition of any of the preceding embodiments, wherein the guide RNA is associated with a lipid nanoparticle (LNP), or encoded by a viral vector.
[0767] Embodiment 12B is the composition of embodiment 11B, wherein the viral vector is an adeno-associated virus vector, a lentiviral vector, an integrase-deficient lentiviral vector, an adenoviral vector, a vaccinia viral vector, an alphaviral vector, or a herpes simplex viral vector.
[0768] Embodiment 13B is the composition of embodiment 12B, wherein the viral vector is an adeno-associated virus (AAV) vector.
[0769] Embodiment 14B is the composition of embodiment 13B, wherein the AAV vector is an AAV1, AAV2, AAV3, AAV4, AAV5, AAV6, AAV7, AAV8, AAVrh10, AAVrh74, or AAV9 vector, wherein the number following AAV indicates the AAV serotype.
[0770] Embodiment 15B is the composition of embodiment 14B, wherein the AAV vector is an AAV serotype 9 vector.
[0771] Embodiment 16B is the composition of any one of embodiments 11B-15B, wherein the viral vector comprises a tissue-specific promoter.
[0772] Embodiment 17B is the composition of any one of embodiments 11B-16B, wherein the viral vector comprises a muscle-specific promoter, optionally wherein the muscle-specific promoter is a muscle creatine kinase promoter, a desmin promoter, an MHCK7 promoter, or an SPc5-12 promoter.
[0773] Embodiment 18B is the composition of any one of embodiments 11B-17B, wherein the viral vector comprises a neuron-specific promoter, optionally wherein the neuron-specific promoter is an enolase promoter.
[0774] Embodiment 19B is the composition of any one of the preceding embodiments, wherein the second spacer sequence has the sequence of SEQ ID NO: 560.
[0775] Embodiment 20B is the composition of any one of the preceding embodiments, wherein the second spacer sequence has the sequence of SEQ ID NO: 584.
[0776] Embodiment 21B is the composition of any one of the preceding embodiments, wherein the second spacer sequence has the sequence of SEQ ID NO: 608.
[0777] Embodiment 22B is the composition of any one of the preceding embodiments, wherein the second spacer sequence has the sequence of SEQ ID NO: 616.
[0778] Embodiment 23B is the composition of any one of the preceding embodiments, wherein the second spacer sequence has the sequence of SEQ ID NO: 656.
[0779] Embodiment 24B is the composition of any one of the preceding embodiments, wherein the second spacer sequence has the sequence of SEQ ID NO: 672.
[0780] Embodiment 25B is the composition of any one of the preceding embodiments, wherein the second spacer sequence has the sequence of SEQ ID NO: 688.
[0781] Embodiment 26B is the composition of any one of the preceding embodiments, wherein the second spacer sequence has the sequence of SEQ ID NO: 696.
[0782] Embodiment 27B is the composition of any one of the preceding embodiments, wherein the second spacer sequence has the sequence of SEQ ID NO: 712.
[0783] Embodiment 28B is the composition of any one of the preceding embodiments, wherein the second spacer sequence has the sequence of SEQ ID NO: 744.
[0784] Embodiment 29B is the composition of any one of the preceding embodiments, wherein the second spacer sequence has the sequence of SEQ ID NO: 752.
[0785] Embodiment 30B is the composition of any one of the preceding embodiments, wherein the second spacer sequence has the sequence of SEQ ID NO: 760.
[0786] Embodiment 31B is the composition of any one of the preceding embodiments, wherein the second spacer sequence has the sequence of SEQ ID NO: 840.
[0787] Embodiment 32B is the composition of any one of the preceding embodiments, wherein the second spacer sequence has the sequence of SEQ ID NO: 864.
[0788] Embodiment 33B is the composition of any one of the preceding embodiments, wherein the second spacer sequence has the sequence of SEQ ID NO: 960.
[0789] Embodiment 34B is the composition of any one of the preceding embodiments, wherein the second spacer sequence has the sequence of SEQ ID NO: 976.
[0790] Embodiment 35B is the composition of any one of the preceding embodiments, wherein the second spacer sequence has the sequence of SEQ ID NO: 984.
[0791] Embodiment 36B is the composition of any one of the preceding embodiments, wherein the second spacer sequence has the sequence of SEQ ID NO: 1008.
[0792] Embodiment 37B is the composition of any one of the preceding embodiments, wherein the second spacer sequence has the sequence of SEQ ID NO: 1056.
[0793] Embodiment 38B is the composition of any one of the preceding embodiments, wherein the second spacer sequence has the sequence of SEQ ID NO: 1128.
[0794] Embodiment 39B is the composition of any one of the preceding embodiments, wherein the second spacer sequence has the sequence of SEQ ID NO: 1136.
[0795] Embodiment 40B is the composition of any one of the preceding embodiments, wherein the second spacer sequence has the sequence of SEQ ID NO: 1152.
[0796] Embodiment 41B is the composition of any one of the preceding embodiments, wherein the second spacer sequence has the sequence of SEQ ID NO: 1224.
[0797] Embodiment 42B is the composition of any one of the preceding embodiments, wherein the second spacer sequence has the sequence of SEQ ID NO: 1240.
[0798] Embodiment 43B is the composition of any one of the preceding embodiments, wherein the second spacer sequence has the sequence of SEQ ID NO: 1272.
[0799] Embodiment 44B is the composition of any one of the preceding embodiments, wherein the second spacer sequence has the sequence of SEQ ID NO: 1338.
[0800] Embodiment 45B is the composition of any one of the preceding embodiments, wherein the second spacer sequence has the sequence of SEQ ID NO: 1346.
[0801] Embodiment 46B is the composition of any one of the preceding embodiments, wherein the second spacer sequence has the sequence of SEQ ID NO: 1370.
[0802] Embodiment 47B is the composition of any one of the preceding embodiments, wherein the second spacer sequence has the sequence of SEQ ID NO: 1378.
[0803] Embodiment 48B is the composition of any one of the preceding embodiments, wherein the second spacer sequence has the sequence of SEQ ID NO: 1386.
[0804] Embodiment 49B is the composition of any one of the preceding embodiments, wherein the second spacer sequence has the sequence of SEQ ID NO: 1394.
[0805] Embodiment 50B is the composition of any one of the preceding embodiments, wherein the second spacer sequence has the sequence of SEQ ID NO: 1402.
[0806] Embodiment 51B is the composition of any one of the preceding embodiments, wherein the second spacer sequence has the sequence of SEQ ID NO: 1410.
[0807] Embodiment 52B is the composition of any one of the preceding embodiments, wherein the second spacer sequence has the sequence of SEQ ID NO: 1418.
[0808] Embodiment 53B is the composition of any one of the preceding embodiments, wherein the second spacer sequence has the sequence of SEQ ID NO: 1426.
[0809] Embodiment 54B is the composition of any one of the preceding embodiments, wherein the second spacer sequence has the sequence of SEQ ID NO: 1434.
[0810] Embodiment 55B is the composition of any one of the preceding embodiments, wherein the second spacer sequence has the sequence of SEQ ID NO: 1442.
[0811] Embodiment 56B is the composition of any one of the preceding embodiments, wherein the second spacer sequence has the sequence of SEQ ID NO: 1458.
[0812] Embodiment 57B is the composition of any one of the preceding embodiments, wherein the second spacer sequence has the sequence of SEQ ID NO: 1474.
[0813] Embodiment 58B is the composition of any one of the preceding embodiments, wherein the second spacer sequence has the sequence of SEQ ID NO: 1482.
[0814] Embodiment 59B is the composition of any one of the preceding embodiments, wherein the second spacer sequence has the sequence of SEQ ID NO: 1490.
[0815] Embodiment 60B is the composition of any one of the preceding embodiments, wherein the second spacer sequence has the sequence of SEQ ID NO: 1498.
[0816] Embodiment 61B is the composition of any one of the preceding embodiments, wherein the second spacer sequence has the sequence of SEQ ID NO: 1514.
[0817] Embodiment 62B is the composition of any one of the preceding embodiments, wherein the second spacer sequence has the sequence of SEQ ID NO: 1538.
[0818] Embodiment 63B is the composition of any one of the preceding embodiments, wherein the second spacer sequence has the sequence of SEQ ID NO: 1546.
[0819] Embodiment 64B is the composition of any one of the preceding embodiments, wherein the second spacer sequence has the sequence of SEQ ID NO: 1554.
[0820] Embodiment 65B is the composition of any one of the preceding embodiments, wherein the second spacer sequence has the sequence of SEQ ID NO: 1562.
[0821] Embodiment 66B is the composition of any one of the preceding embodiments, wherein the second spacer sequence has the sequence of SEQ ID NO: 1578.
[0822] Embodiment 67B is the composition of any one of the preceding embodiments, wherein the second spacer sequence has the sequence of SEQ ID NO: 1586.
[0823] Embodiment 68B is the composition of any one of the preceding embodiments, wherein the second spacer sequence has the sequence of SEQ ID NO: 1594.
[0824] Embodiment 69B is the composition of any one of the preceding embodiments, wherein the second spacer sequence has the sequence of SEQ ID NO: 1602.
[0825] Embodiment 70B is the composition of any one of the preceding embodiments, wherein the second spacer sequence has the sequence of SEQ ID NO: 1610.
[0826] Embodiment 71B is the composition of any one of the preceding embodiments, wherein the second spacer sequence has the sequence of SEQ ID NO: 1626.
[0827] Embodiment 72B is the composition of any one of the preceding embodiments, wherein the second spacer sequence has the sequence of SEQ ID NO: 1634.
[0828] Embodiment 73B is the composition of any one of the preceding embodiments, wherein the second spacer sequence has the sequence of SEQ ID NO: 1642.
[0829] Embodiment 74B is the composition of any one of the preceding embodiments, wherein the second spacer sequence has the sequence of SEQ ID NO: 1650.
[0830] Embodiment 75B is the composition of any one of the preceding embodiments, wherein the second spacer sequence has the sequence of SEQ ID NO: 1658.
[0831] Embodiment 76B is the composition of any one of the preceding embodiments, wherein the second spacer sequence has the sequence of SEQ ID NO: 1690.
[0832] Embodiment 77B is the composition of any one of the preceding embodiments, wherein the second spacer sequence has the sequence of SEQ ID NO: 1706.
[0833] Embodiment 78B is the composition of any one of the preceding embodiments, wherein the second spacer sequence has the sequence of SEQ ID NO: 1714.
[0834] Embodiment 79B is the composition of any one of the preceding embodiments, wherein the second spacer sequence has the sequence of SEQ ID NO: 1738.
[0835] Embodiment 80B is the composition of any one of the preceding embodiments, wherein the second spacer sequence has the sequence of SEQ ID NO: 1746.
[0836] Embodiment 81B is the composition of any one of the preceding embodiments, wherein the second spacer sequence has the sequence of SEQ ID NO: 1770.
[0837] Embodiment 82B is the composition of any one of the preceding embodiments, wherein the second spacer sequence has the sequence of SEQ ID NO: 1778.
[0838] Embodiment 83B is the composition of any one of the preceding embodiments, wherein the second spacer sequence has the sequence of SEQ ID NO: 1786.
[0839] Embodiment 84B is the composition of any one of the preceding embodiments, wherein the second spacer sequence has the sequence of SEQ ID NO: 1802.
[0840] Embodiment 85B is the composition of any one of the preceding embodiments, wherein the second spacer sequence has the sequence of SEQ ID NO: 1810.
[0841] Embodiment 86B is the composition of any one of the preceding embodiments, wherein the second spacer sequence has the sequence of SEQ ID NO: 1818.
[0842] Embodiment 87B is the composition of any one of the preceding embodiments, wherein the second spacer sequence has the sequence of SEQ ID NO: 1826.
[0843] Embodiment 88B is the composition of any one of the preceding embodiments, wherein the second spacer sequence has the sequence of SEQ ID NO: 1834.
[0844] Embodiment 89B is the composition of any one of the preceding embodiments, wherein the second spacer sequence has the sequence of SEQ ID NO: 1842.
[0845] Embodiment 90B is the composition of any one of the preceding embodiments, wherein the second spacer sequence has the sequence of SEQ ID NO: 1850.
[0846] Embodiment 91B is the composition of any one of the preceding embodiments, wherein the second spacer sequence has the sequence of SEQ ID NO: 1890.
[0847] Embodiment 92B is the composition of any one of the preceding embodiments, wherein the second spacer sequence has the sequence of SEQ ID NO: 1914.
[0848] Embodiment 93B is the composition of any one of the preceding embodiments, wherein the second spacer sequence has the sequence of SEQ ID NO: 1930.
[0849] Embodiment 94B is the composition of any one of the preceding embodiments, wherein the second spacer sequence has the sequence of SEQ ID NO: 1938.
[0850] Embodiment 95B is the composition of any one of the preceding embodiments, wherein the second spacer sequence has the sequence of SEQ ID NO: 1946.
[0851] Embodiment 96B is the composition of any one of the preceding embodiments, wherein the second spacer sequence has the sequence of SEQ ID NO: 1962.
[0852] Embodiment 97B is the composition of any one of the preceding embodiments, wherein the second spacer sequence has the sequence of SEQ ID NO: 1970.
[0853] Embodiment 98B is the composition of any one of the preceding embodiments, wherein the second spacer sequence has the sequence of SEQ ID NO: 1978.
[0854] Embodiment 99B is the composition of any one of the preceding embodiments, wherein the second spacer sequence has the sequence of SEQ ID NO: 1986.
[0855] Embodiment 100B is the composition of any one of the preceding embodiments, wherein the second spacer sequence has the sequence of SEQ ID NO: 1994.
[0856] Embodiment 101B is the composition of any one of the preceding embodiments, wherein the second spacer sequence has the sequence of SEQ ID NO: 2010.
[0857] Embodiment 102B is the composition of any one of the preceding embodiments, wherein the second spacer sequence has the sequence of SEQ ID NO: 2018.
[0858] Embodiment 103B is the composition of any one of the preceding embodiments, wherein the second spacer sequence has the sequence of SEQ ID NO: 2026.
[0859] Embodiment 104B is the composition of any one of the preceding embodiments, wherein the second spacer sequence has the sequence of SEQ ID NO: 2042.
[0860] Embodiment 105B is the composition of any one of the preceding embodiments, wherein the second spacer sequence has the sequence of SEQ ID NO: 2050.
[0861] Embodiment 106B is the composition of any one of the preceding embodiments, wherein the second spacer sequence has the sequence of SEQ ID NO: 2058.
[0862] Embodiment 107B is the composition of any one of the preceding embodiments, wherein the second spacer sequence has the sequence of SEQ ID NO: 2090.
[0863] Embodiment 108B is the composition of any one of the preceding embodiments, wherein the second spacer sequence has the sequence of SEQ ID NO: 2114.
[0864] Embodiment 109B is the composition of any one of the preceding embodiments, wherein the second spacer sequence has the sequence of SEQ ID NO: 2130.
[0865] Embodiment 110B is the composition of any one of the preceding embodiments, wherein the second spacer sequence has the sequence of SEQ ID NO: 2162.
[0866] Embodiment 111B is the composition of any one of the preceding embodiments, wherein the second spacer sequence has the sequence of SEQ ID NO: 2170.
[0867] Embodiment 112B is the composition of any one of the preceding embodiments, wherein the second spacer sequence has the sequence of SEQ ID NO: 2178.
[0868] Embodiment 113B is the composition of any one of the preceding embodiments, wherein the second spacer sequence has the sequence of SEQ ID NO: 2202.
[0869] Embodiment 114B is the composition of any one of the preceding embodiments, wherein the second spacer sequence has the sequence of SEQ ID NO: 2210.
[0870] Embodiment 115B is the composition of any one of the preceding embodiments, wherein the second spacer sequence has the sequence of SEQ ID NO: 2226.
[0871] Embodiment 116B is the composition of any one of the preceding embodiments, wherein the second spacer sequence has the sequence of SEQ ID NO: 2242.
[0872] Embodiment 117B is the composition of any one of the preceding embodiments, wherein the second spacer sequence has the sequence of SEQ ID NO: 2258.
[0873] Embodiment 118B is the composition of any one of the preceding embodiments, wherein the second spacer sequence has the sequence of SEQ ID NO: 2266.
[0874] Embodiment 119B is the composition of any one of the preceding embodiments, wherein the second spacer sequence has the sequence of SEQ ID NO: 2274.
[0875] Embodiment 120B is the composition of any one of the preceding embodiments, wherein the second spacer sequence has the sequence of SEQ ID NO: 2282.
[0876] Embodiment 121B is the composition of any one of the preceding embodiments, wherein the second spacer sequence has the sequence of SEQ ID NO: 2298.
[0877] Embodiment 122B is the composition of any one of the preceding embodiments, wherein the second spacer sequence has the sequence of SEQ ID NO: 2314.
[0878] Embodiment 123B is the composition of any one of the preceding embodiments, wherein the second spacer sequence has the sequence of SEQ ID NO: 2322.
[0879] Embodiment 124B is the composition of any one of the preceding embodiments, wherein the second spacer sequence has the sequence of SEQ ID NO: 2330.
[0880] Embodiment 125B is the composition of any one of the preceding embodiments, wherein the second spacer sequence has the sequence of SEQ ID NO: 2338.
[0881] Embodiment 126B is the composition of any one of the preceding embodiments, wherein the second spacer sequence has the sequence of SEQ ID NO: 2346.
[0882] Embodiment 127B is the composition of any one of the preceding embodiments, wherein the second spacer sequence has the sequence of SEQ ID NO: 2354.
[0883] Embodiment 128B is the composition of any one of the preceding embodiments, wherein the second spacer sequence has the sequence of SEQ ID NO: 2370.
[0884] Embodiment 129B is the composition of any one of the preceding embodiments, wherein the second spacer sequence has the sequence of SEQ ID NO: 2378.
[0885] Embodiment 130B is the composition of any one of the preceding embodiments, wherein the second spacer sequence has the sequence of SEQ ID NO: 2394.
[0886] Embodiment 131B is the composition of any one of the preceding embodiments, wherein the second spacer sequence has the sequence of SEQ ID NO: 2418.
[0887] Embodiment 132B is the composition of any one of the preceding embodiments, wherein the second spacer sequence has the sequence of SEQ ID NO: 2434.
[0888] Embodiment 133B is the composition of any one of the preceding embodiments, wherein the second spacer sequence has the sequence of SEQ ID NO: 2442.
[0889] Embodiment 134B is the composition of any one of the preceding embodiments, wherein the second spacer sequence has the sequence of SEQ ID NO: 2458.
[0890] Embodiment 135B is the composition of any one of the preceding embodiments, wherein the second spacer sequence has the sequence of SEQ ID NO: 2466.
[0891] Embodiment 136B is the composition of any one of the preceding embodiments, wherein the second spacer sequence has the sequence of SEQ ID NO: 2474.
[0892] Embodiment 137B is the composition of any one of the preceding embodiments, wherein the second spacer sequence has the sequence of SEQ ID NO: 2498.
[0893] Embodiment 138B is the composition of any one of the preceding embodiments, wherein the second spacer sequence has the sequence of SEQ ID NO: 2506.
[0894] Embodiment 139B is the composition of any one of the preceding embodiments, wherein the second spacer sequence has the sequence of SEQ ID NO: 2514.
[0895] Embodiment 140B is the composition of any one of the preceding embodiments, wherein the second spacer sequence has the sequence of SEQ ID NO: 2522.
[0896] Embodiment 141B is the composition of any one of the preceding embodiments, wherein the second spacer sequence has the sequence of SEQ ID NO: 2546.
[0897] Embodiment 142B is the composition of any one of the preceding embodiments, wherein the second spacer sequence has the sequence of SEQ ID NO: 2554.
[0898] Embodiment 143B is the composition of any one of the preceding embodiments, wherein the second spacer sequence has the sequence of SEQ ID NO: 2570.
[0899] Embodiment 144B is the composition of any one of the preceding embodiments, wherein the second spacer sequence has the sequence of SEQ ID NO: 2586.
[0900] Embodiment 145B is the composition of any one of the preceding embodiments, wherein the second spacer sequence has the sequence of SEQ ID NO: 2658.
[0901] Embodiment 146B is the composition of any one of the preceding embodiments, wherein the first spacer sequence has the sequence of SEQ ID NO: 2856.
[0902] Embodiment 147B is the composition of any one of the preceding embodiments, wherein the first spacer sequence has the sequence of SEQ ID NO: 2864.
[0903] Embodiment 148B is the composition of any one of the preceding embodiments, wherein the first spacer sequence has the sequence of SEQ ID NO: 2880.
[0904] Embodiment 149B is the composition of any one of the preceding embodiments, wherein the first spacer sequence has the sequence of SEQ ID NO: 2896.
[0905] Embodiment 150B is the composition of any one of the preceding embodiments, wherein the first spacer sequence has the sequence of SEQ ID NO: 2904.
[0906] Embodiment 151B is the composition of any one of the preceding embodiments, wherein the first spacer sequence has the sequence of SEQ ID NO: 2912.
[0907] Embodiment 152B is the composition of any one of the preceding embodiments, wherein the first spacer sequence has the sequence of SEQ ID NO: 2936.
[0908] Embodiment 153B is the composition of any one of the preceding embodiments, wherein the first spacer sequence has the sequence of SEQ ID NO: 2944.
[0909] Embodiment 154B is the composition of any one of the preceding embodiments, wherein the first spacer sequence has the sequence of SEQ ID NO: 2960.
[0910] Embodiment 155B is the composition of any one of the preceding embodiments, wherein the first spacer sequence has the sequence of SEQ ID NO: 2992.
[0911] Embodiment 156B is the composition of any one of the preceding embodiments, wherein the first spacer sequence has the sequence of SEQ ID NO: 3016.
[0912] Embodiment 157B is the composition of any one of the preceding embodiments, wherein the first spacer sequence has the sequence of SEQ ID NO: 3024.
[0913] Embodiment 158B is the composition of any one of the preceding embodiments, wherein the first spacer sequence has the sequence of SEQ ID NO: 3064.
[0914] Embodiment 159B is the composition of any one of the preceding embodiments, wherein the first spacer sequence has the sequence of SEQ ID NO: 3096.
[0915] Embodiment 160B is the composition of any one of the preceding embodiments, wherein the first spacer sequence has the sequence of SEQ ID NO: 3112.
[0916] Embodiment 161B is the composition of any one of the preceding embodiments, wherein the first spacer sequence has the sequence of SEQ ID NO: 3128.
[0917] Embodiment 162B is the composition of any one of the preceding embodiments, wherein the first spacer sequence has the sequence of SEQ ID NO: 3136.
[0918] Embodiment 163B is the composition of any one of the preceding embodiments, wherein the first spacer sequence has the sequence of SEQ ID NO: 3144.
[0919] Embodiment 164B is the composition of any one of the preceding embodiments, wherein the first spacer sequence has the sequence of SEQ ID NO: 3160.
[0920] Embodiment 165B is the composition of any one of the preceding embodiments, wherein the first spacer sequence has the sequence of SEQ ID NO: 3168.
[0921] Embodiment 166B is the composition of any one of the preceding embodiments, wherein the first spacer sequence has the sequence of SEQ ID NO: 3192.
[0922] Embodiment 167B is the composition of any one of the preceding embodiments, wherein the first spacer sequence has the sequence of SEQ ID NO: 3200.
[0923] Embodiment 168B is the composition of any one of the preceding embodiments, wherein the first spacer sequence has the sequence of SEQ ID NO: 3208.
[0924] Embodiment 169B is the composition of any one of the preceding embodiments, wherein the first spacer sequence has the sequence of SEQ ID NO: 3216.
[0925] Embodiment 170B is the composition of any one of the preceding embodiments, wherein the first spacer sequence has the sequence of SEQ ID NO: 3224.
[0926] Embodiment 171B is the composition of any one of the preceding embodiments, wherein the first spacer sequence has the sequence of SEQ ID NO: 3232.
[0927] Embodiment 172B is the composition of any one of the preceding embodiments, wherein the first spacer sequence has the sequence of SEQ ID NO: 3240.
[0928] Embodiment 173B is the composition of any one of the preceding embodiments, wherein the first spacer sequence has the sequence of SEQ ID NO: 3248.
[0929] Embodiment 174B is the composition of any one of the preceding embodiments, wherein the first spacer sequence has the sequence of SEQ ID NO: 3256.
[0930] Embodiment 175B is the composition of any one of the preceding embodiments, wherein the first spacer sequence has the sequence of SEQ ID NO: 3264.
[0931] Embodiment 176B is the composition of any one of the preceding embodiments, wherein the first spacer sequence has the sequence of SEQ ID NO: 3314.
[0932] Embodiment 177B is the composition of any one of the preceding embodiments, wherein the first spacer sequence has the sequence of SEQ ID NO: 3330.
[0933] Embodiment 178B is the composition of any one of the preceding embodiments, wherein the first spacer sequence has the sequence of SEQ ID NO: 3346.
[0934] Embodiment 179B is the composition of any one of the preceding embodiments, wherein the first spacer sequence has the sequence of SEQ ID NO: 3354.
[0935] Embodiment 180B is the composition of any one of the preceding embodiments, wherein the first spacer sequence has the sequence of SEQ ID NO: 3370.
[0936] Embodiment 181B is the composition of any one of the preceding embodiments, wherein the first spacer sequence has the sequence of SEQ ID NO: 3378.
[0937] Embodiment 182B is the composition of any one of the preceding embodiments, wherein the first spacer sequence has the sequence of SEQ ID NO: 3386.
[0938] Embodiment 183B is the composition of any one of the preceding embodiments, wherein the first spacer sequence has the sequence of SEQ ID NO: 3394.
[0939] Embodiment 184B is the composition of any one of the preceding embodiments, wherein the first spacer sequence has the sequence of SEQ ID NO: 3410.
[0940] Embodiment 185B is the composition of any one of the preceding embodiments, wherein the first spacer sequence has the sequence of SEQ ID NO: 3418.
[0941] Embodiment 186B is the composition of any one of the preceding embodiments, wherein the first spacer sequence has the sequence of SEQ ID NO: 3426.
[0942] Embodiment 187B is the composition of any one of the preceding embodiments, wherein the first spacer sequence has the sequence of SEQ ID NO: 3434.
[0943] Embodiment 188B is the composition of any one of the preceding embodiments, wherein the first spacer sequence has the sequence of SEQ ID NO: 3442.
[0944] Embodiment 189B is the composition of any one of the preceding embodiments, wherein the first spacer sequence has the sequence of SEQ ID NO: 3450.
[0945] Embodiment 190B is the composition of any one of the preceding embodiments, wherein the first spacer sequence has the sequence of SEQ ID NO: 3458.
[0946] Embodiment 191B is the composition of any one of the preceding embodiments, wherein the first spacer sequence has the sequence of SEQ ID NO: 3474.
[0947] Embodiment 192B is the composition of any one of the preceding embodiments, wherein the first spacer sequence has the sequence of SEQ ID NO: 3482.
[0948] Embodiment 193B is the composition of any one of the preceding embodiments, wherein the first spacer sequence has the sequence of SEQ ID NO: 3490.
[0949] Embodiment 194B is the composition of any one of the preceding embodiments, wherein the first spacer sequence has the sequence of SEQ ID NO: 3498.
[0950] Embodiment 195B is the composition of any one of the preceding embodiments, wherein the first spacer sequence has the sequence of SEQ ID NO: 3506.
[0951] Embodiment 196B is the composition of any one of the preceding embodiments, wherein the first spacer sequence has the sequence of SEQ ID NO: 3514.
[0952] Embodiment 197B is the composition of any one of the preceding embodiments, wherein the first spacer sequence has the sequence of SEQ ID NO: 3522.
[0953] Embodiment 198B is the composition of any one of the preceding embodiments, wherein the first spacer sequence has the sequence of SEQ ID NO: 3530.
[0954] Embodiment 199B is the composition of any one of the preceding embodiments, wherein the first spacer sequence has the sequence of SEQ ID NO: 3538.
[0955] Embodiment 200B is the composition of any one of the preceding embodiments, wherein the first spacer sequence has the sequence of SEQ ID NO: 3546.
[0956] Embodiment 201B is the composition of any one of the preceding embodiments, wherein the first spacer sequence has the sequence of SEQ ID NO: 3554.
[0957] Embodiment 202B is the composition of any one of the preceding embodiments, wherein the first spacer sequence has the sequence of SEQ ID NO: 3570.
[0958] Embodiment 203B is the composition of any one of the preceding embodiments, wherein the first spacer sequence has the sequence of SEQ ID NO: 3578.
[0959] Embodiment 204B is the composition of any one of the preceding embodiments, wherein the first spacer sequence has the sequence of SEQ ID NO: 3586.
[0960] Embodiment 205B is the composition of any one of the preceding embodiments, wherein the first spacer sequence has the sequence of SEQ ID NO: 3602.
[0961] Embodiment 206B is the composition of any one of the preceding embodiments, wherein the first spacer sequence has the sequence of SEQ ID NO: 3610.
[0962] Embodiment 207B is the composition of any one of the preceding embodiments, wherein the first spacer sequence has the sequence of SEQ ID NO: 3618.
[0963] Embodiment 208B is the composition of any one of the preceding embodiments, wherein the first spacer sequence has the sequence of SEQ ID NO: 3634.
[0964] Embodiment 209B is the composition of any one of the preceding embodiments, wherein the first spacer sequence has the sequence of SEQ ID NO: 3642.
[0965] Embodiment 210B is the composition of any one of the preceding embodiments, wherein the first spacer sequence has the sequence of SEQ ID NO: 3658.
[0966] Embodiment 211B is the composition of any one of the preceding embodiments, wherein the first spacer sequence has the sequence of SEQ ID NO: 3674.
[0967] Embodiment 212B is the composition of any one of the preceding embodiments, wherein the first spacer sequence has the sequence of SEQ ID NO: 3682.
[0968] Embodiment 213B is the composition of any one of the preceding embodiments, wherein the first spacer sequence has the sequence of SEQ ID NO: 3690.
[0969] Embodiment 214B is the composition of any one of the preceding embodiments, wherein the first spacer sequence has the sequence of SEQ ID NO: 3698.
[0970] Embodiment 215B is the composition of any one of the preceding embodiments, wherein the first spacer sequence has the sequence of SEQ ID NO: 3706.
[0971] Embodiment 216B is the composition of any one of the preceding embodiments, wherein the first spacer sequence has the sequence of SEQ ID NO: 3722.
[0972] Embodiment 217B is the composition of any one of the preceding embodiments, wherein the first spacer sequence has the sequence of SEQ ID NO: 3746.
[0973] Embodiment 218B is the composition of any one of the preceding embodiments, wherein the first spacer sequence has the sequence of SEQ ID NO: 3762.
[0974] Embodiment 219B is the composition of any one of the preceding embodiments, wherein the first spacer sequence has the sequence of SEQ ID NO: 3770.
[0975] Embodiment 220B is the composition of any one of the preceding embodiments, wherein the first spacer sequence has the sequence of SEQ ID NO: 3778.
[0976] Embodiment 221B is the composition of any one of the preceding embodiments, wherein the first spacer sequence has the sequence of SEQ ID NO: 3794.
[0977] Embodiment 222B is the composition of any one of the preceding embodiments, wherein the first spacer sequence has the sequence of SEQ ID NO: 3802.
[0978] Embodiment 223B is the composition of any one of the preceding embodiments, wherein the first spacer sequence has the sequence of SEQ ID NO: 3818.
[0979] Embodiment 224B is the composition of any one of the preceding embodiments, wherein the first spacer sequence has the sequence of SEQ ID NO: 3826.
[0980] Embodiment 225B is the composition of any one of the preceding embodiments, wherein the first spacer sequence has the sequence of SEQ ID NO: 3834.
[0981] Embodiment 226B is the composition of any one of the preceding embodiments, wherein the first spacer sequence has the sequence of SEQ ID NO: 3850.
[0982] Embodiment 227B is the composition of any one of the preceding embodiments, wherein the first spacer sequence has the sequence of SEQ ID NO: 3858.
[0983] Embodiment 228B is the composition of any one of the preceding embodiments, wherein the first spacer sequence has the sequence of SEQ ID NO: 3890.
[0984] Embodiment 229B is the composition of any one of the preceding embodiments, wherein the first spacer sequence has the sequence of SEQ ID NO: 3898.
[0985] Embodiment 230B is the composition of any one of the preceding embodiments, wherein the first spacer sequence has the sequence of SEQ ID NO: 3906.
[0986] Embodiment 231B is the composition of any one of the preceding embodiments, wherein the first spacer sequence has the sequence of SEQ ID NO: 3914.
[0987] Embodiment 232B is the composition of any one of the preceding embodiments, wherein the first spacer sequence has the sequence of SEQ ID NO: 3922.
[0988] Embodiment 233B is the composition of any one of the preceding embodiments, wherein the first spacer sequence has the sequence of SEQ ID NO: 3930.
[0989] Embodiment 234B is the composition of any one of the preceding embodiments, wherein the first spacer sequence has the sequence of SEQ ID NO: 3938.
[0990] Embodiment 235B is the composition of any one of the preceding embodiments, wherein the first spacer sequence has the sequence of SEQ ID NO: 3946.
[0991] Embodiment 236B is the composition of any one of the preceding embodiments, wherein the first spacer sequence has the sequence of SEQ ID NO: 3994.
[0992] Embodiment 237B is the composition of any one of the preceding embodiments, wherein the first spacer sequence has the sequence of SEQ ID NO: 4010.
[0993] Embodiment 238B is the composition of any one of the preceding embodiments, wherein the first spacer sequence has the sequence of SEQ ID NO: 4018.
[0994] Embodiment 239B is the composition of any one of the preceding embodiments, wherein the first spacer sequence has the sequence of SEQ ID NO: 4026.
[0995] Embodiment 240B is the composition of any one of the preceding embodiments, wherein the first spacer sequence has the sequence of SEQ ID NO: 4034.
[0996] Embodiment 241B is the composition of any one of the preceding embodiments, wherein the first spacer sequence has the sequence of SEQ ID NO: 4042.
[0997] Embodiment 242B is the composition of any one of the preceding embodiments, wherein the first spacer sequence has the sequence of SEQ ID NO: 4208.
[0998] Embodiment 243B is the composition of any one of the preceding embodiments, wherein the first spacer sequence has the sequence of SEQ ID NO: 4506.
[0999] Embodiment 244B is the composition of any one of the preceding embodiments, wherein the first spacer sequence has the sequence of SEQ ID NO: 4989.
[1000] Embodiment 245B is the composition of any one of the preceding embodiments, wherein the first spacer sequence has the sequence of SEQ ID NO: 4990.
[1001] Embodiment 246B is the composition of any one of the preceding embodiments, wherein the first spacer sequence has the sequence of SEQ ID NO: 4991.
[1002] Embodiment 247B is the composition of any one of the preceding embodiments, wherein the first spacer sequence has the sequence of SEQ ID NO: 4992.
[1003] Embodiment 248B is the use of a composition of any one of the preceding embodiments for the preparation of a medicament for treating a human subject having DM1.
[1004] Embodiment 249B is a method of treating muscular dystrophy characterized by a trinucleotide repeat (TNR) in the 3′ UTR of the DMPK gene, the method comprising delivering to a cell that comprises a TNR in the 3′ UTR of the DMPK gene a pair of guide RNAs comprising a pair of spacer sequences, or one or more nucleic acids encoding the pair of guide RNAs, wherein the pair of spacer sequences comprise:
   [1005] i. a first spacer sequence selected from SEQ ID NOs: 2856, 2864, 2880, 2896, 2904, 2912, 2936, 2944, 2960, 2992, 3016, 3024, 3064, 3096, 3112, 3128, 3136, 3144, 3160, 3168, 3192, 3200, 3208, 3216, 3224, 3232, 3240, 3248, 3256, 3264, 3314, 3330, 3346, 3354, 3370, 3378, 3386, 3394, 3410, 3418, 3426, 3434, 3442, 3450, 3458, 3474, 3482, 3490, 3498, 3506, 3514, 3522, 3530, 3538, 3546, 3554, 3570, 3578, 3586, 3602, 3610, 3618, 3634, 3642, 3658, 3674, 3682, 3690, 3698, 3706, 3722, 3746, 3762, 3770, 3778, 3794, 3802, 3818, 3826, 3834, 3850, 3858, 3890, 3898, 3906, 3914, 3922, 3930, 3938, 3946, 3994, 4010, 4018, 4026, 4034, 4042, 4208, or 4506, and a second spacer sequence selected from SEQ ID NOs: 560, 584, 608, 616, 656, 672, 688, 696, 712, 744, 752, 760, 840, 864, 960, 976, 984, 1008, 1056, 1128, 1136, 1152, 1224, 1240, 1272, 1338, 1346, 1370, 1378, 1386, 1394, 1402, 1410, 1418, 1426, 1434, 1442, 1458, 1474, 1482, 1490, 1498, 1514, 1538, 1546, 1554, 1562, 1578, 1586, 1594, 1602, 1610, 1626, 1634, 1642, 1650, 1658, 1690, 1706, 1714, 1738, 1746, 1770, 1778, 1786, 1802, 1810, 1818, 1826, 1834, 1842, 1850, 1890, 1914, 1930, 1938, 1946, 1962, 1970, 1978, 1986, 1994, 2010, 2018, 2026, 2042, 2050, 2058, 2090, 2114, 2130, 2162, 2170, 2178, 2202, 2210, 2226, 2242, 2258, 2266, 2274, 2282, 2298, 2314, 2322, 2330, 2338, 2346, 2354, 2370, 2378, 2394, 2418, 2434, 2442, 2458, 2466, 2474, 2498, 2506, 2514, 2522, 2546, 2554, 2570, 2586, 2658, 4989, 4990, 4991, or 4992, or a nucleic acid encoding the guide RNA; and ii) an RNA-targeted endonuclease or a nucleic acid encoding the RNA-targeted endonuclease.
[1006] Embodiment 250B is a method of excising a trinucleotide repeat (TNR) in the 3′ UTR of the DMPK gene comprising delivering to a cell that comprises the TNR in the 3′ UTR of the DMPK gene a pair of guide RNAs comprising a pair of spacer sequences, or one or more nucleic acids encoding the pair of guide RNAs, wherein the pair of spacer sequences comprise:
   [1007] ii. a first spacer sequence selected from SEQ ID NOs: 2856, 2864, 2880, 2896, 2904, 2912, 2936, 2944, 2960, 2992, 3016, 3024, 3064, 3096, 3112, 3128, 3136, 3144, 3160, 3168, 3192, 3200, 3208, 3216, 3224, 3232, 3240, 3248, 3256, 3264, 3314, 3330, 3346, 3354, 3370, 3378, 3386, 3394, 3410, 3418, 3426, 3434, 3442, 3450, 3458, 3474, 3482, 3490, 3498, 3506, 3514, 3522, 3530, 3538, 3546, 3554, 3570, 3578, 3586, 3602, 3610, 3618, 3634, 3642, 3658, 3674, 3682, 3690, 3698, 3706, 3722, 3746, 3762, 3770, 3778, 3794, 3802, 3818, 3826, 3834, 3850, 3858, 3890, 3898, 3906, 3914, 3922, 3930, 3938, 3946, 3994, 4010, 4018, 4026, 4034, 4042, 4208, or 4506, and a second spacer sequence selected from SEQ ID NOs: 560, 584, 608, 616, 656, 672, 688, 696, 712, 744, 752, 760, 840, 864, 960, 976, 984, 1008, 1056, 1128, 1136, 1152, 1224, 1240, 1272, 1338, 1346, 1370, 1378, 1386, 1394, 1402, 1410, 1418, 1426, 1434, 1442, 1458, 1474, 1482, 1490, 1498, 1514, 1538, 1546, 1554, 1562, 1578, 1586, 1594, 1602, 1610, 1626, 1634, 1642, 1650, 1658, 1690, 1706, 1714, 1738, 1746, 1770, 1778, 1786, 1802, 1810, 1818, 1826, 1834, 1842, 1850, 1890, 1914, 1930, 1938, 1946, 1962, 1970, 1978, 1986, 1994, 2010, 2018, 2026, 2042, 2050, 2058, 2090, 2114, 2130, 2162, 2170, 2178, 2202, 2210, 2226, 2242, 2258, 2266, 2274, 2282, 2298, 2314, 2322, 2330, 2338, 2346, 2354, 2370, 2378, 2394, 2418, 2434, 2442, 2458, 2466, 2474, 2498, 2506, 2514, 2522, 2546, 2554, 2570, 2586, 2658, 4989, 4990, 4991, or 4992, or a nucleic acid encoding the guide RNA; and ii) an RNA-targeted endonuclease or a nucleic acid encoding the RNA-targeted endonuclease, wherein at least one TNR is excised.
[1008] Embodiment 251B is the method of any one of embodiments 249B-250B, wherein a pair of guide RNAs that comprise a first and second spacer that deliver the RNA-targeted endonuclease to or near a TNR or self-complementary region, or one or more nucleic acids encoding the pair of guide RNAs, are delivered to the cell.
[1009] Embodiment 252B is the method of any one of embodiments 249B-251B, wherein the first and second spacer sequences have the sequences of SEQ ID NOs 3778 and 1778.
[1010] Embodiment 253B is the method of any one of embodiments 249B-251B, wherein the first and second spacer sequences have the sequences of SEQ ID NOs 3778 and 1746.
[1011] Embodiment 254B is the method of any one of embodiments 249B-251B, wherein the first and second spacer sequences have the sequences of SEQ ID NOs 3778 and 1770.
[1012] Embodiment 255B is the method of any one of embodiments 249B-251B, wherein the first and second spacer sequences have the sequences of SEQ ID NOs 3778 and 1586.
[1013] Embodiment 256B is the method of any one of embodiments 249B-251B, wherein the first and second spacer sequences have the sequences of SEQ ID NOs 3778 and 1914.
[1014] Embodiment 257B is the method of any one of embodiments 249B-251B, wherein the first and second spacer sequences have the sequences of SEQ ID NOs 3778 and 2210.
[1015] Embodiment 258B is the method of any one of embodiments 249B-251B, wherein the first and second spacer sequences have the sequences of SEQ ID NOs 4026 and 1778.
[1016] Embodiment 259B is the method of any one of embodiments 249B-251B, wherein the first and second spacer sequences have the sequences of SEQ ID NOs 4026 and 1746.
[1017] Embodiment 260B is the method of any one of embodiments 249B-251B, wherein the first and second spacer sequences have the sequences of SEQ ID NOs 4026 and 1770.
[1018] Embodiment 261B is the method of any one of embodiments 249B-251B, wherein the first and second spacer sequences have the sequences of SEQ ID NOs 4026 and 1586.
[1019] Embodiment 262B is the method of any one of embodiments 249B-251B, wherein the first and second spacer sequences have the sequences of SEQ ID NOs 4026 and 1914.
[1020] Embodiment 263B is the method of any one of embodiments 249B-251B, wherein the first and second spacer sequences have the sequences of SEQ ID NOs 4026 and 2210.
[1021] Embodiment 264B is the method of any one of embodiments 249B-251B, wherein the first and second spacer sequences have the sequences of SEQ ID NOs 3794 and 1778.
[1022] Embodiment 265B is the method of any one of embodiments 249B-251B, wherein the first and second spacer sequences have the sequences of SEQ ID NOs 3794 and 1746.
[1023] Embodiment 266B is the method of any one of embodiments 249B-251B, wherein the first and second spacer sequences have the sequences of SEQ ID NOs 3794 and 1770.
[1024] Embodiment 267B is the method of any one of embodiments 249B-251B, wherein the first and second spacer sequences have the sequences of SEQ ID NOs 3794 and 1586.
[1025] Embodiment 268B is the method of any one of embodiments 249B-251B, wherein the first and second spacer sequences have the sequences of SEQ ID NOs 3794 and 1914.
[1026] Embodiment 269B is the method of any one of embodiments 249B-251B, wherein the first and second spacer sequences have the sequences of SEQ ID NOs 3794 and 2210.
[1027] Embodiment 270B is the method of any one of embodiments 249B-251B, wherein the first and second spacer sequences have the sequences of SEQ ID NOs 4010 and 1778.
[1028] Embodiment 271B is the method of any one of embodiments 249B-251B, wherein the first and second spacer sequences have the sequences of SEQ ID NOs 4010 and 1746.
[1029] Embodiment 272B is the method of any one of embodiments 249B-251B, wherein the first and second spacer sequences have the sequences of SEQ ID NOs 4010 and 1770.
[1030] Embodiment 273B is the method of any one of embodiments 249B-251B, wherein the first and second spacer sequences have the sequences of SEQ ID NOs 4010 and 1586.
[1031] Embodiment 274B is the method of any one of embodiments 249B-251B, wherein the first and second spacer sequences have the sequences of SEQ ID NOs 4010 and 1914.
[1032] Embodiment 275B is the method of any one of embodiments 249B-251B, wherein the first and second spacer sequences have the sequences of SEQ ID NOs 4010 and 2210.
[1033] Embodiment 276B is the method of any one of embodiments 249B-251B, wherein the first and second spacer sequences have the sequences of SEQ ID NOs 3906 and 1778.
[1034] Embodiment 277B is the method of any one of embodiments 249B-251B, wherein the first and second spacer sequences have the sequences of SEQ ID NOs 3906 and 1746.
[1035] Embodiment 278B is the method of any one of embodiments 249B-251B, wherein the first and second spacer sequences have the sequences of SEQ ID NOs 3906 and 1770.
[1036] Embodiment 279B is the method of any one of embodiments 249B-251B, wherein the first and second spacer sequences have the sequences of SEQ ID NOs 3906 and 1586.
[1037] Embodiment 280B is the method of any one of embodiments 249B-251B, wherein the first and second spacer sequences have the sequences of SEQ ID NOs 3906 and 1914.
[1038] Embodiment 281B is the method of any one of embodiments 249B-251B, wherein the first and second spacer sequences have the sequences of SEQ ID NOs 3906 and 2210.
[1039] Embodiment 282B is the method of any one of embodiments 249B-251B, wherein the first and second spacer sequences have the sequences of SEQ ID NOs 3746 and 1778.
[1040] Embodiment 283B is the method of any one of embodiments 249B-251B, wherein the first and second spacer sequences have the sequences of SEQ ID NOs 3746 and 1746.
[1041] Embodiment 284B is the method of any one of embodiments 249B-251B, wherein the first and second spacer sequences have the sequences of SEQ ID NOs 3746 and 1770.
[1042] Embodiment 285B is the method of any one of embodiments 249B-251B, wherein the first and second spacer sequences have the sequences of SEQ ID NOs 3746 and 1586.
[1043] Embodiment 286B is the method of any one of embodiments 249B-251B, wherein the first and second spacer sequences have the sequences of SEQ ID NOs 3746 and 1914.
[1044] Embodiment 287B is the method of any one of embodiments 249B-251B, wherein the first and second spacer sequences have the sequences of SEQ ID NOs 3746 and 2210.
[1045] Embodiment 288B is the method of any one of embodiments 249B-251B, wherein the first and second spacer sequences have the sequences of SEQ ID NOs 3256 and 4989.
[1046] Embodiment 289B is the method of any one of embodiments 249B-251B, wherein the first and second spacer sequences have the sequences of SEQ ID NOs 3256 and 560.
[1047] Embodiment 290B is the method of any one of embodiments 249B-251B, wherein the first and second spacer sequences have the sequences of SEQ ID NOs 3256 and 672.
[1048] Embodiment 291B is the method of any one of embodiments 249B-251B, wherein the first and second spacer sequences have the sequences of SEQ ID NOs 3256 and 976.
[1049] Embodiment 292B is the method of any one of embodiments 249B-251B, wherein the first and second spacer sequences have the sequences of SEQ ID NOs 3256 and 760.
[1050] Embodiment 293B is the method of any one of embodiments 249B-251B, wherein the first and second spacer sequences have the sequences of SEQ ID NOs 3256 and 984.
[1051] Embodiment 294B is the method of any one of embodiments 249B-251B, wherein the first and second spacer sequences have the sequences of SEQ ID NOs 3256 and 616.
[1052] Embodiment 295B is the method of any one of embodiments 249B-251B, wherein the first and second spacer sequences have the sequences of SEQ ID NOs 2896 and 4989.
[1053] Embodiment 296B is the method of any one of embodiments 249B-251B, wherein the first and second spacer sequences have the sequences of SEQ ID NOs 2896 and 560.
[1054] Embodiment 297B is the method of any one of embodiments 249B-251B, wherein the first and second spacer sequences have the sequences of SEQ ID NOs 2896 and 672.
[1055] Embodiment 298B is the method of any one of embodiments 249B-251B, wherein the first and second spacer sequences have the sequences of SEQ ID NOs 2896 and 976.
[1056] Embodiment 299B is the method of any one of embodiments 249B-251B, wherein the first and second spacer sequences have the sequences of SEQ ID NOs 2896 and 760.
[1057] Embodiment 300B is the method of any one of embodiments 249B-251B, wherein the first and second spacer sequences have the sequences of SEQ ID NOs 2896 and 984.
[1058] Embodiment 301B is the method of any one of embodiments 249B-251B, wherein the first and second spacer sequences have the sequences of SEQ ID NOs 2896 and 616.
[1059] Embodiment 302B is the method of any one of embodiments 249B-251B, wherein the first and second spacer sequences have the sequences of SEQ ID NOs 3136 and 4989.
[1060] Embodiment 303B is the method of any one of embodiments 249B-251B, wherein the first and second spacer sequences have the sequences of SEQ ID NOs 3136 and 560.
[1061] Embodiment 304B is the method of any one of embodiments 249B-251B, wherein the first and second spacer sequences have the sequences of SEQ ID NOs 3136 and 672.
[1062] Embodiment 305B is the method of any one of embodiments 249B-251B, wherein the first and second spacer sequences have the sequences of SEQ ID NOs 3136 and 976.
[1063] Embodiment 306B is the method of any one of embodiments 249B-251B, wherein the first and second spacer sequences have the sequences of SEQ ID NOs 3136 and 760.
[1064] Embodiment 307B is the method of any one of embodiments 249B-251B, wherein the first and second spacer sequences have the sequences of SEQ ID NOs 3136 and 984.
[1065] Embodiment 308B is the method of any one of embodiments 249B-251B, wherein the first and second spacer sequences have the sequences of SEQ ID NOs 3136 and 616.
[1066] Embodiment 309B is the method of any one of embodiments 249B-251B, wherein the first and second spacer sequences have the sequences of SEQ ID NOs 3224 and 4989.
[1067] Embodiment 310B is the method of any one of embodiments 249B-251B, wherein the first and second spacer sequences have the sequences of SEQ ID NOs 3224 and 560.
[1068] Embodiment 311B is the method of any one of embodiments 249B-251B, wherein the first and second spacer sequences have the sequences of SEQ ID NOs 3224 and 672.
[1069] Embodiment 312B is the method of any one of embodiments 249B-251B, wherein the first and second spacer sequences have the sequences of SEQ ID NOs 3224 and 976.
[1070] Embodiment 313B is the method of any one of embodiments 249B-251B, wherein the first and second spacer sequences have the sequences of SEQ ID NOs 3224 and 760.
[1071] Embodiment 314B is the method of any one of embodiments 249B-251B, wherein the first and second spacer sequences have the sequences of SEQ ID NOs 3224 and 984.
[1072] Embodiment 315B is the method of any one of embodiments 249B-251B, wherein the first and second spacer sequences have the sequences of SEQ ID NOs 3224 and 616.
[1073] Embodiment 316B is the method of any one of embodiments 249B-315B, further comprising an RNA-targeted endonuclease, or a nucleic acid encoding the RNA-targeted endonuclease.
[1074] Embodiment 317B is the method of any one of embodiments 249B-316B, wherein the guide RNA is an sgRNA.
[1075] Embodiment 318B is the method of embodiment 317B, wherein the sgRNA is modified.
[1076] Embodiment 319B is the method of embodiment 318B, wherein the modifications alter one or more 2′ positions and/or phosphodiester linkages.
[1077] Embodiment 320B is the method of embodiments 318B-319B, wherein the modifications alter one or more, or all, of the first three nucleotides of the sgRNA.
[1078] Embodiment 321B is the method of embodiments 318B-320B, wherein the modifications alter one or more, or all, of the last three nucleotides of the sgRNA.
[1079] Embodiment 322B is the method of embodiments 318B-321B, wherein the modifications include one or more of a phosphorothioate modification, a 2′-OMe modification, a 2′-O-MOE modification, a 2′-F modification, a 2′-O-methine-4′ bridge modification, a 3′-thiophosphonoacetate modification, and a 2′-deoxy modification.
[1080] Embodiment 323B is the method of any one of embodiments 249B-322B, wherein the composition further comprises a pharmaceutically acceptable excipient.
[1081] Embodiment 324B is the method of any one of embodiments 249B-323B, wherein the guide RNA is associated with a lipid nanoparticle (LNP), or encoded by a viral vector.
[1082] Embodiment 325B is the method of embodiment 324B, wherein the viral vector is an adeno-associated virus vector, a lentiviral vector, an integrase-deficient lentiviral vector, an adenoviral vector, a vaccinia viral vector, an alphaviral vector, or a herpes simplex viral vector.
[1083] Embodiment 326B is the method of embodiment 325B, wherein the viral vector is an adeno-associated virus (AAV) vector.
[1084] Embodiment 327B is the method of embodiment 326B, wherein the AAV vector is an AAV1, AAV2, AAV3, AAV4, AAV5, AAV6, AAV7, AAV8, AAVrh10, AAVrh74, or AAV9 vector, wherein the number following AAV indicates the AAV serotype.
[1085] Embodiment 328B is the method of embodiment 327B, wherein the AAV vector is an AAV serotype 9 vector.
[1086] Embodiment 329B is the method of any one of embodiments 324B-328B, wherein the viral vector comprises a tissue-specific promoter.
[1087] Embodiment 330B is the method of any one of embodiments 324B-329B, wherein the viral vector comprises a muscle-specific promoter, optionally wherein the muscle-specific promoter is a muscle creatine kinase promoter, a desmin promoter, an MHCK7 promoter, or an SPc5-12 promoter.
[1088] Embodiment 331B is the method of any one of embodiments 324B-330B, wherein the viral vector comprises a neuron-specific promoter, optionally wherein the neuron-specific promoter is an enolase promoter.

### EXAMPLES

[1089] The following examples are provided to illustrate certain disclosed embodiments and are not to be construed as limiting the scope of this disclosure in any way.

[1090] 1. Materials and Methods

[1091] Guide RNA and Primer sequences. Primer sequences are shown in the Table of Additional Sequences. Cas9 Guide RNAs were used as a dual guide (dgRNA) format unless otherwise indicated as the single guide format (sgRNA). The crRNA contained the spacer sequence listed in the Table of Additional Sequences and was obtained from IDT as AltR-crRNA. The tracrRNA used with SpCas9 was AltR-tracrRNA (IDT Cat. No. 1072534).

[1092] Fibroblast immortalization. 2×10⁵ fibroblasts (GM04033 and GM07492, Cone11 Institute) were seeded in 6 well plates. The following day fibroblasts were transduced at MOI 5 with hTERT-neo lentivirus with 10 ug/mL polybrene. Media was changed 24 hours post-transduction. Cells were selected with 0.5mg/ml G418 48 hrs post-transduction in MEM+15% FBS+NEAA.

[1093] Immortalized fibroblast electroporation & DNA-PK inhibitor treatment (paired guides). 200 uM crRNA (resuspended in IDTE, IDT Cat. No. 11-01-02-05) and 200 uM tracrRNA (resuspended in IDT duplex buffer, Cat. No. 11-01-03-01) were mixed 1:1 and pre-annealed (incubated 5min at 95° C., then cooled to room temperature). Unless otherwise indicated, RNP assembly was performed using 2 μL of 100 μM pre-annealed 5′ guide, 2 μL of 100 μM pre-annealed 3′ guide, and 2 μL of nuclease where a pair of guides were used, or 4 μL of 100 μM pre-annealed guide and 2 μL of nuclease where only one guide was used. Each RNP was assembled in triplicate. The SpCas9 (IDT) stock solution had a concentration of 10 ug/ul.

[1094] Guide (100 uM pre-annealed) and SpCas9 protein (10 ug/ul IDT) were mixed for each nucleofection in 1.7 ml Eppendorf tubes and incubated at room temperature ˜10 minutes to pre-assemble RNPs. (Note: experiments were generally carried out in biological triplicates for each condition.)

[1095] 20 ul of P2 nucleofection solution (Lonza, Cat. No. V4XP-2032; pre-warmed to room temperature and prepared by adding the included supplement) was added to each RNP mixture.

[1096] Cell preparation: 04033 hTert-transformed DM1 patient fibroblasts and 7492 hTert-transformed heathy control fibroblasts were expanded in a T175 flask until confluent. Cells were washed 1× with PBS-, treated with 5 ml of 1× TrypLE Express for 7 minutes, and washed off in 25 ml of serum-containing media (MEM with GlutaMAX, 15% FBS, 1xNEAA).

[1097] Cells were spun down for 5 minutes at 500 g and re-suspended in fresh media. Suspensions were filtered through 44 uM filter to ensure a single cell suspension. Cells were counted and aliquoted at ˜300K per electroporation condition in a 15 ml conical tube. All the aliquots were pelleted for 5 minutes at 500 g and media removed just prior to nucleofection.

[1098] Nucleofection: 20 ul of the RNP/P2 mixture was used to resuspend the 300K cell pellet and resulting suspension was moved to a 16 well electroporation cuvette. Nucleofection was carried out on the Lonza X-unit (Lonza Bioscience) with the following settings: solution P2 and pulse code EN150.

[1099] Plating: Each nucleofected well (˜300K cells in 20 ul) was split into 2 wells of 12-well plates (8 ul per well) containing lml pre-warmed (1) plain medium or (2) medium supplemented with 10 uM Compound 6. Media was changed to plain medium (without Compound 6) in all wells 24 hours after plating. Cells were expanded for 10 days with media changes every 3 days until most wells were nearing confluence.

[1100] Harvesting: On day 10 after nucleofection, cells were washed 1× with PBS-, treated with 200 ul of 1X TrypLE Express for 7 minutes, and washed off in 2 ml of serum-containing media. Cells were pelleted for 5 min at 500 g and re-suspended in lml of fresh medium.

[1101] CUG foci FISH assay: cells were counted and plated in 384 well high content imaging plates in quadruplicate at 5K cells per well. Cells were allowed to attach overnight before fixation.

[1102] Preparation of samples for genotyping: 100 ul of cell suspension was pelleted in 1.7 ml tubes for 5 minutes at 500 g. Cell pellets were re-suspended in 100 ul of Lucigen QuickExtract buffer and lysed at 65° C. for 15 minutes followed by heat inactivation at 98° C. for 2 minutes. Extracts were stored at -80° C.

[1103] Preparation of samples for splicing assays: all remaining cells were pelleted in 1.7 ml tubes for 5 min at 500 g. Media was removed, and pellets were frozen until RNA processing.

[1104] Genotyping: A PCR mastermix was prepared as follows for 20 ul reactions: 10 ul Phusion 2× Master Mix, 1 ul 10 uM DMPK-nest-F primer, 1 ul 10 uM DMPK-nest-R primer, 7 ul of water. 3 ul of sample in QuickExtract DNA extraction buffer was added to 17 ul of master mix for each reaction. Cycling was performed as a touchdown program: 98° C. for 30 s, followed by 8 cycles of melting at 98° C. for 10 sec, annealing at 72° C. for lOs (decreasing by 0.5C per cycle), extension 72° C. for 30 s. Followed by 27 cycles of 98° C. for 10 s, 68° C. for 10 s, 72° C. for 30 S. Final extension at 72° C. for 10 minutes. Products were analyzed by electrophoresis on 2% agarose gels.

[1105] Electroporation & DNAPK-I Treatment (Individual Guides)

[1106] The protocol was as described above for the paired guide protocol, except as indicated herein. Electroporations were performed using P3 solution and pulse code CA137 and grown in 24 well plate with or without 10 uM Compound 6. RNP assembly was performed using 4 μL pre-annealed 100 μM guide and 2 μL Cas9 as described above. Harvesting: 48 hrs after nucleofection, cells were washed 1× with PBS-, treated with 200 ul of 1× TrypLE Express for 7 min, and washed off in 2 ml of serum-containing media. Cells were pelleted for 5 min at 500 g and re-suspended in lml fresh media.

[1107] For genotyping 50 ul of cell suspension was pelleted in 1.7 ml tubes for 5 min at 500 g. Cell pellets were re-suspended in 100 ul of Lucigen QuickExtract buffer and lysed at 65° C. for 15 min followed by heat inactivation at 98° C. for 2 min. Extracts were stored at −80° C.

[1108] Fluorescence In Situ Hybridization (FISH)/IF Co-Staining

[1109] MBNL1/(CUG)n foci imaging was used as an orthogonal method to evaluate CTG repeat excision with DMPK guide RNAs in DM1 fibroblasts.

[1110] Cells were fixed for 15 min at RT with 4% PFA and washed 5 times for 10 min in 1× PBS at RT. Cells were stored at 4° C. if not probed immediately.

[1111] For the fluorescence in situ hybridization (FISH) procedure, cells were permeabilized with 0.5% triton X-100, in 1× PBS at RT for 5 min.

[1112] Cells were prewashed with 30% formamide, 2× SSC for 10 min at RT. Cells were then probed for 2 hrs at 37° C., with a 1 ng/uL of Alexa546-(CAG)io probe in 30% formamide, 2× SSC, 2 ug/mL BSA, 66 ug/mL yeast tRNA, 2 mM vanadyl complex.

[1113] Cells were then washed for 30 min in 30% formamide, 2× SSC at 42° C., and then in 30% formamide, 2× SSC for 30 min at 37° C., then in 1× SSC for 10 min at RT, and last in 1× PBS for 10 min at RT. Cells were next probed overnight, at 4° C. with anti-MBNL1 antibody (1:1000 dilution, santacruz, 3A4) in 1× PBS +1%BSA. Cells were washed 2 times for 10 min at RT with 1× PBS. Cells were incubated with goat anti-rabbit Alexa 647 in 1× PBS +1%BSA (1:500 dilution) for 1 h at RT. Cells were washed 2 times, for 10 min at RT with 1× PBS. Cells were stained with Hoechst solution (0.1mg/m1) for 5 min, and then washed with 1× PBS once for 5 min.

[1114] PBS was aspirated and fresh PBS (100 ul) was added per well. Imaging plates were sealed with adhesive aluminum foils and imaged using MetaXpress (Molecular Devices).

[1115] Electroporation of iPS Cells

[1116] SpCas9 RNPs for electroporation into iPS cells were prepared as follows. SpCas9 crRNAs were resuspended at 200 μM in IDTE and tracrRNA was resuspended at 200 μM in duplex buffer. Equal amounts of 200 uM crRNA and 200 uM tracrRNA were mixed in a PCR tube, heated to 95° C., and allowed to cool to room temperature, giving guide complex at 100 μM.

[1117] Cpf1 guides were resuspended at 100 mM in IDTE.

[1118] RNP complexes for experiments corresponding to FIG. 22 were prepared by assembling 2 μL each of the 5′ guide, the 3′ guide, and the nuclease.

[1119] RNP complexes for experiments corresponding to FIG. 24 were prepared by assembling 4 μL each of the 5′ guide and the 3′ guide (or 8 μL of one guide where only one guide was used), and 3 μL of the nuclease.

[1120] Cell pellets were resuspended in 100 ul of pre-mixed P3 nucleofection solution and transferred to the tube containing pre-assembled RNP. 100 ul of RNP/Cell mixture was transferred to a nucleofection cuvette. Nucleofection was performed using a Lonza X-unit set for solution P3 and pulse code CA137. The cells were promptly moved from the cuvette to the pre-warmed media in the Laminin-coated plate splitting each nucleofection between pain medium or medium supplemented with 3 uM Compound 6 (for experiments corresponding to FIG. 24) or 1 μM Compound 3 (for experiments corresponding to FIGS. 22 and 23). The next day, media was changed to StemFlex +10 uM rock inhibitor. The following day, the media was changed again to StemFlex without rock inhibitor. Culture was continued for a total of 5 days.

[1121] Cells were detached using ReLeSR at 37° C. for 6 min and washed off with 2 ml StemFlex. 200 μ1 were passaged into a new 6-well dish with 2 ml StemFlex +4 ul Lamin 411 for further culturing and clonal isolation. The rest was split into 1.7 ml tubes as follows: 600 ul for protein; and 100 ul for DNA extraction.

[1122] DNA was extracted using Qiagen Blood and Tissue Kit following the manufacturer's protocol. Genotyping was performed as a nested PCR:

[1123] PCR1:

### Primers: GDO_FA_F7 and GDO_FA_R7

| reagent | for 1 rxn | |
|---|---|---|
| 10X buffer | 2.5 | ul |
| dNTP (2.5 uM) | 2 | ul |
| Fwd primer (10 uM) | 0.5 | ul |
| Rev primer (10 uM) | 0.5 | ul |
| ExTaq | 0.125 | ul |
| DNA | 50 | ng |
| ddH2O | To 25 | ul |

[1125] Cycling conditions:

| Step | temp | time |
|---|---|---|
| 1 | 98 C. | 30 sec |
| 2 | 98 C. | 10 sec |
| 3 | 58 C. | 15 sec |
| 4 | 72 C. | 5 min |
| 5 | goto step 2 | 9 times |
| 6 | 72 C. | 15 min |
| 7 | 12 C. | hold |

[1126] Following completion, the PCR was diluted 1:10 and 2 ul was used as input in the next reaction (PCR2):

### Primers: GDO_FA_F2 and GDO_FA_R2

| reagent | for 1 rxn | |
|---|---|---|
| 10X buffer | 2.5 | ul |
| dNTP (2.5 uM) | 2 | ul |
| Fwd primer (10 uM) | 0.5 | ul |
| Rev primer (10 uM) | 0.5 | ul |
| ExTaq | 0.125 | ul |
| DNA | 2 | ul from PCR1 |
| ddH2O | To 25 | ul |

[1128] Cycling conditions:

| Step | temp | time |
|---|---|---|
| 1 | 98 C. | 30 sec |
| 2 | 98 C. | 10 sec |
| 3 | 61.8 C. | 15 sec |
| 4 | 72 C. | 5 min |
| 5 | goto step 2 | 34 times |
| 6 | 72 C. | 15 min |
| 7 | 12 C. | hold |

[1129] Products were analyzed on a 2% agarose gel.

[1130] Cardiomyocyte differentiation protocol

[1131] Cardiomyocytes were prepared as follows. A culture of iPSCs was purified of differentiated cells by aspiration, then treated with accutase. Cells were plated at 0.133×10⁶ cells per cm² in StemFlex with ROCKi (10 uM final conc.) and were fed with StemFlex for 2 more days. Then (on “day 0”) media was changed to RPMI/B27 -insulin with small molecule CHIR99021 (StemCell Tech. Cat. no. 72052) (concentration depends on line). For days 1-3, media was changed to RPMI/B27 -insulin. For days 3-5, media was changed to RPMI/B27-insulin with small molecule IWP2 (Tocris Cat no. 3533) (5 uM). For days 5-7, media was changed to RPMI/B27 -insulin. For days 7-11, media was changed to RPMI/B27 +insulin. For days 11-15, media was changed to CDM3L:

| | Stock | Example | Final |
|---|---|---|---|
| RPMI 1640 without | Basal | 100 mL | |
| glucose | | | |
| rHA (Sigma Cat no. | 75 mg/mL | 670 ul | 500 ug/mL |
| A9731-5 G) | | | |
| L-ascorbic acid 2- | 200 mM | 330 ul | 0.65 mM |
| phosphate (Sigma | | | |
| Cat no. A8960) | | | |
| Sodium DL-lactate | 1M | 500 ul | 5 mM |
| (Sigma Cat no. | | | |
| L4263) | | | |

[1132] Cardiomyocyte Nucleofection Protocol

[1133] Plates were prepared as follows. lmg/ml Fibronectin was diluted 1:100 in PBS and 200 ul was added per well in s 24-well plate. Plates were left at room temp for 2 hours. Fibronectin was removed and 500 ul of iCell Cardiomyocytes Maintenance Medium was added to each well and pre-warmed at 37° C.

[1134] RNPs were prepared essentially according to procedures described above for fibroblast experiments. Following RNP complex assembly, 20 ul of P3 solution (with supplement added) was added to each RNP and lul of electroporation enhancer (IDT) was added to each RNP mixture.

[1135] To prepare cells, media was aspirated from iPSC-derived cardiomyocytes grown in a 6-well dish and cells were washed 1× with 2 ml PBS per well. lml of TrypLE™ Select Enzyme (10X×) was added per well and cells were incubated for 10 min at 37° C.

[1136] Cells were gently pipetted and added to a 15mL tube with lml FBS +8 ml PBS per well in 6 well plate to inactivate TrypLE enzymes. Cells were spun down at 1000 RPM for 5 min, PBS was aspirated and cells were resuspended in fresh iCell Cardiomyocytes Maintenance Medium. Cells were passed through a 100um filter to 50mL tube, and slowly pipetted the resuspended cells through. Cells were counted and aliquoted ˜100K cardiomyocytes per nucleofection in 15 ml tubes. Cells were pelleted at 1000RPM for 5 minutes, and media was removed prior to nucleofection.

[1137] 20 ul of the RNP/P3 mixture was used to resuspend the -100k cell pellet and the suspension was transferred to a 16 well electroporation cuvette. Nucleofection was carried out on the Lonza X-unit, with solution set to P3 and pulse code CA137. After nucleofections cells were plated in prepared 24 well plates and recovered for 48 hours prior to harvesting.

[1138] Media was removed and 100 ul of QuickExtract DNA extraction buffer was added to each well and pipetted up and down to remove all cells, then transferred to PCR tubes. Lysis was performed for 15 minutes at 65° C. followed by inactivation for 2 minutes at 98° C. Lysates were stored at −80° C.

[1139] Preparation of Neural Progenitor Cells

[1140] Basal media was prepared as follows:

| Component | Part Number | Volume |
|---|---|---|
| Neurobasal Media | Gibco, 21103-049 | 250 mL |
| Advanced DMEM/F12 Media | Gibco, 12634-010 | 250 mL |
| SM1 w/o Vitamin A | StemCell, 05731 | 10 mL |
| N2-B | StemCell, 07156 | 5 mL |
| GlutaMAX | Gibco, 35050-061 | 5 mL |
| Normocin | Invivogen, Ant-NR-2 | 1 mL |

[1141] The following media were also used. Media 2: Basal media +1 μM LDN 193189 +10 μM SB431542. Media 3: Basal media +1 μM LDN 193189 +10 μM SB431542 +1 μM Cyclopamine +10 ng/mL FGF2. Media 4: Basal media +1 μM Cyclopamine +10 ng/mL FGF2. Media 5: Basal media +10 ng/mL FGF2. NPC Maturation Seeding Media: Basal media +1:100 laminin +1:1,000 Y-27632 ROCK inhibitor. BrainPhys Maturation Media:

| Component | Part Number | Volume |
|---|---|---|
| BrainPhys Basal Media | StemCell, #05790 | 500 mL |
| SM1 w/ Vitamin A | StemCell, #05711 | 10 mL |
| N2-A | StemCell, #07152 | 5 mL |
| BDNF | Peprotech, 450-02 | 100 μL of 100 μg/mL |
| GDNF | Peprotech, 450-10 | 100 μL of 100 μg/mL |
| Dibutyryl cAMP | SCBT, SC-201567A | 2.5 mL of 100 mg/mL |
| Ascorbic Acid | Sigma, A4403-100MG | 350 μL of 50 μg/mL |
| Normocin | Invivogen, An-NR-2 | 1 mL |

[1142] To seed iPSCs for neural re-patterning, human iPSCs were subcultured using StemFlex media supplemented at seeding with Laminin5-1-1 (1:400) in 6-well plates to approximately 80% confluence. Monthly mycoplasma analyses and regular karyotyping (5-10 passages) were generally performed to prevent culture artifacts from propagating.

[1143] On the day of seeding for differentiation (defined as Day 0), iPSCs were inspected for aberrant spontaneous differentiation. Generally, less than 10% of cultures should exhibit differentiated or loose morphology. Culture media was aspirated and cells were rinsed once with 3 mL Dulbecco's PBS (DPBS, divalent cation-free, Thermo Fisher # 14190144). DPBS was aspirated and 1 mL of warmed (25-35° C.) Accutase solution (Thermo Fisher # A1110501) was immediately dispensed. The plate was gently swirled to ensure even and complete dissociation, then incubated in a 3TC incubator for 10 minutes. The plate was firmly taped every 3-5 minutes to encourage iPSC colonies to dissociate from the plate.

[1144] Accutase was neutralized with at least 2 mL of warmed (25-35° C.) culture medium, typically StemFlex (StemCell Tech # 85850) or StemFlex (Thermo Fisher # A3349401). The cell solution was gently triturated to further dissociate any clumped cells.

[1145] The cell solution was transferred to a clean 50 mL conical tube and cells were pelleted by centrifugation at ˜150 RCF for 5 minutes.

[1146] After aspirating supernatant, the cell pellet was broken up by adding 1 mL of warmed StemFlex supplemented with Y-27632 ROCK inhibitor (1:1000 v/v) and gently tapping tube against the back of the hand. An additional 9 mL of culture media was added, and gently inverted to mix. A viable cell count was obtained using a ViCell Cell Viability Analyzer or equivalent device. 6E6 viable cells were diluted into a total of 12 mL iPSC culture media supplemented with Y-27632 ROCK inhibitor (1:1000) followed by dispensing 2 mL of the cell solution to each well of a matrigel-coated 6-well plate (1E6 cells per well seeding density), then rocking the plate perpendicularly 3-4 times in each direction (left-to-right, front-to-back) to evenly distribute cells in each well. Culture was maintained in a 3TC, 5% CO₂, 85% RH incubator. The plates were then left undisturbed for at least 3 hours after seeding. Each day, the media was fully aspirated and replaced according to the following media schedule (see below regarding day 12). For each 6-well plate, prepare and warm at least 12-13 mL of media (2 mL per well). Cultures were inspected for morphological heterogeneity (should be low after first week) or matrigel layer breakdown. Media schedule:

| DIV | Media | |
|---|---|---|
| 0 | StemFlex + ROCKi | Plate at 1E6/well MG-coated 6-well |
| 1 | 1:1 StemFlex + Media 1 | |
| 2 | Media 2 | |
| 3 | Media 2 | |
| 4 | Media 3 | |
| 5 | Media 3 | |
| 6 | Media 3 | |
| 7 | Media 3 | |
| 8 | Media 3 | |
| 9 | Media 4 | |
| 10 | Media 4 | |
| 11 | Media 4 | |
| 12 | Media 4 | Accutase 10-15 m. Plate at |
| | | 1.5E6/well MG-coated 6-well |
| 13 | Media 5 | |
| 14 | Media 5 | |
| 15 | Media 5 | |
| 16 | Media 5 | Culture 2-3 passages, flow sort |
| 17 | Media 5 | (Yuan: CD184+/SSEA4−/Tra- |
| | | 1-60−/44−/271−/24+), expand in |
| | | 6-well, then T75/175/225, |
| | | bank, karyotype |

[1147] Passaging Re-Ppatterned NPCs

[1148] On Day 12, after inspecting the cultures for morphological heterogeneity, culture media was aspirated and cells were rinsed once with 3 mL Dulbecco's PBS (DPBS, divalent cation-free, Thermo Fisher # 14190144). DPBS was then aspirated followed by immediately dispensing 1 mL of warmed (25-35° C.) Accutase solution (Thermo Fisher # A1110501). The plate was gently swirled to ensure even and complete dissociation, then incubated in a 3TC incubator for 10 minutes. The plate was firmly tapped every 3-5 minutes to encourage iPSC colonies to dissociate from the plate. Accutase was neutralized with at least 2 mL of warmed (25-35° C.) Medium 4. Gently triturate cell solution to further dissociated any clumped cells.

[1149] Transfer cell solution to a clean 50 mL conical tube. Pellet cells by centrifugation at 300 RCF for 5 minutes. Supernatant was aspirated and the cell pellet was broken up by adding 1 mL of warmed culture media supplemented with Y-27632 ROCK inhibitor (1:1000 v/v) and gently tapping tube against the back of the hand. An additional 9 mL of culture media was added and the tube was gently inverted to mix cell solution. Cells were counted and 9E6 viable cells were diluted into a total of 12 mL iPSC culture media supplemented with Y-27632 ROCK inhibitor (1:1000). 2 mL of the cell solution was dispensed to each well of a matrigel-coated 6-well plate (1.5E6 cells per well maintenance density). The plate was rocked perpendicularly 3-4 times in each direction (left-to-right, front-to-back) to evenly distribute cells in each well. The culture was maintained in a 3TC, 5% CO₂, 85% RH incubator. Plates were left undisturbed for at least 3 hours after seeding.

[1150] Each day, media was fully aspirated and replaced according to the above media schedule (2 mL media per well).

[1151] NPCs were passaged once per week and passaged twice prior to FACS sorting definitive NPCs (takes place during Passage 3).

[1152] NPC Flow Cytometry Labeling Protocol

[1153] A single-cell suspension was generated and it was confirmed that NPCs are highly dense (seeded at 9E6/6-well plate, allowed to propagate for 5-7 days) and morphologically homogeneous. Culture media was aspirated and cells were washed once with divalent cation-free Dulbecco's PBS (Thermo Fisher, # 14190250), then aspirated, and 1 mL of warmed (25-35° C.) Accutase (Thermo Fisher, # A1110501) was added followed by incubation at 37° C. for 10-15 minutes. The plate was tapped firmly to dislodge adherent NPCs.

[1154] Accutase was neutralized by adding 2 mL of warmed (˜35° C.) DMEM-F12 (Thermo Fisher, # 11320033). Cells were pelleted by centrifugation at 300 ×g for 5 minutes at 22° C. Supernatant was aspirated and NPCs resuspended in 5 mL warmed DMEM-F12. A cell count was generated using a ViCell Cell Counting system.

[1155] To immunolabel NPCs, the following procedure was used: dispense 2-5E7 cells into 50 mL conical tubes; pellet cells by centrifugation at 300 ×g for 5 minutes at room temperature; aspirate supernatant, taking care not to disturb the cell pellet; wash the cells once in cation-free DPBS; gently triturate the cells to break up clumps; pellet cells by centrifugation at 300 ×g for 5 minutes at room temperature; aspirate supernatant. Label live/dead cells using the fixable dye Zombie Aqua (BioLegend, # 423102) by dispensing 100 μL of diluted (1:250) dye to each well (except autofluorescence controls or fluorescence minus one controls). Foil and incubate cells at 4° C. for 15-30 minutes; pellet cells by centrifugation at 300 ×g for 5 minutes at room temperature; aspirate supernatant; wash the cells once in cation-free DPBS. Gently triturate the cells to break up clumps; pellet cells by centrifugation at 300 ×g for 5 minutes at room temperature; aspirate supernatant. Block non-specific labeling using cold (4° C.) Cell Staining Buffer (BioLegend, # 420201) for 30 minutes at 4C (foiled). After dispensing, gently triturate the cells to break up clumps. Pellet cells by centrifugation at 300 ×g for 5 minutes at room temperature; aspirate supernatant. Dispense 100 μL of antibodies (see table below) per 5E6 total cells diluted in Cell Staining Buffer to each sample (except autofluorescence controls or fluorescence minus one controls). After dispensing, gently triturate the cells to break up clumps. Foil samples and incubate for 30 minutes at 4C. Note: Single-stained compensation controls can be produced using either water-lysed cells (Zombie Aqua L/D) or antibody capture beads (Thermo Fisher, # A10497)

| Antigen/Marker | Fluorescent Dye | Manufacturer, Part Number | Dilution |
|---|---|---|---|
| CD15 | PE/Cy5 | BioLegend, 323014 | 1:50 |
| CD24 | BV421 | BioLegend, 311122 | 1:100 |
| CD44 | APC/Fire750 | BioLegend, 103062 | 1:50 |
| CD184 | PE/Dazz1e594 | BioLegend, 306526 | 1:50 |
| CD271 | PE/Cy7 | BioLegend, 345110 | 1:50 |
| Tra-1-60 | PE | BioLegend, 330610 | 1:50 |
| SSEA4 | AF488 | BioLegend, 330412 | 1:50 |

[1156] After incubation, wash cells with 5 mL Cell Staining Buffer. Gently triturate the cells to break up clumps and evenly wash. Pellet cells by centrifugation at 300 ×g for 5 minutes at room temperature. Aspirate supernatant. Wash the cells once more in cold Cell Staining Buffer. Gently triturate the cells to break up clumps. Pellet cells by centrifugation at 300 ×g for 5 minutes at room temperature. Aspirate supernatant.

[1157] Resuspend cells in Pre-Sort Buffer (BD Bioscience, # 563503) supplemented with normocin (1:500) to a final concentration of 7-10E6 cells per mL. Foil and store at 4C until sorting on BD FACSAria Fusion (within 1-2 hours). Sort into chilled, 15 mL conical tubes pre-coated and filled with 7 mL Media 5 supplemented with Y-27632 ROCK inhibitor (1:1000), normocin (1:500), and 15 mMolar HEPES (Thermo Fisher # 15630080, 1:67 dilution of 1 M stock).

[1158] NPC Flow Cytometry Sorting and Analysis

[1159] The following procedure was used for NPC sorting and analysis. Set up instrument (BD FACSAria Fusion) using standard settings for a 100-micron nozzle (100 μm-20 psi) with 300 RPM sample agitation and 4° C. sample storage. Run CS&T using beads (BD Biosciences, # 655051; 1 drop in 350 μL DPBS). Do not modify voltages from the CS&T settings. Run Accudrop calibration (BD Biosciences, # 345249; 1 drop in 500 μL DPBS). Left deflector plate position should be set to 32 for calibration, 58-60 for sorting. Verify droplets hit the center of a 15 mL conical tube filled to 7 mL with 70% ethanol. For each sample, collect 10,000 pre-sort events with P1 scatter gate as the stop gate. Set gates as shown below. Collect: FSC-A/SSC-A P1 ->SSC-H/SSC-W P2 ->FSC-H/FSC-W P3->L/D Zombie Aqua (−) (live cells) ->CD184 (+) ->Tra-1-60 (−)/SSEA4 (−) (non-iPSCs)->CD44 (−)/CD271 (−) (non-glia, non-neural crest) ->CD24 (+)/CD15 (lo/mid) (NPC). Sort 1.5-2E6 cells from each line. Keep all samples chilled before and after sort. Seed 1.5E6 viable NPCs suspended in 2 mL of Media 5 supplemented with Y-27632 ROCK inhibitor (1:1000) into a matrigel-coated 6-well plate.

[1160] NPC Scale Up

[1161] The following procedure was used to scale up NPCs: Passage NPCs once per week. For passage 4 (first passage post-FACS sorting): Confirm NPCs are highly dense (seeded at 9E6/6-well plate, allowed to propagate for 5-7 days) and morphologically homogeneous. Aspirate culture media, wash once with divalent cation-free Dulbecco's PBS (Thermo Fisher, # 14190250). Aspirate the DPBS, and dispense 1 mL of warmed (25-35° C.) Accutase (Thermo Fisher, # A1110501). Incubate at 37C for 8-10 minutes. Tap firmly to dislodge adherent NPCs. Neutralize Accutase by adding 1 mL of warmed (˜35C) Media 5 supplemented with Y-27632 ROCK inhibitor (1:1,000). Pellet cells by centrifugation at 300 ×g for 5 minutes at 22° C. Aspirate supernatant and resuspend NPCs in 5 mL warmed Media 5 supplemented with Y-27632 ROCK inhibitor (1:1,000). Generate a cell count using a ViCell Cell Counting system. Resuspend 9E6 viable NPCs in 12 mL of Media 5 supplemented with Y-27632 ROCK inhibitor (1:1,000). Dispense 2 mL into each well of a matrigel-coated 6-well plate. For passage 5, repeat the above procedure, but scale up to seed 12.5E6 NPCs in 15 mL of Media 5 supplemented with Y-27632 ROCKi (1:1,000). Dispense all cells into a matrigel coated T75 flask.

[1162] NPC Banking/Cryopreservation

[1163] The following procedure was used for banking/cryopreservation of NPCs: Confirm NPCs are highly dense (seeded at 12.5E6/plate in T75 format, allowed to propagate for 5-7 days) and morphologically homogeneous. Aspirate culture media, wash once with divalent cation-free Dulbecco's PBS (Thermo Fisher, # 14190250). Aspirate the DPBS, and dispense 1 mL of warmed (25-35° C.) Accutase (Thermo Fisher, # A1110501). Incubate at 37C for 10-15 minutes. Tap firmly to dislodge adherent NPCs. Neutralize Accutase by adding 2 mL of warmed (˜35C) Basal Media supplemented with Y-27632 ROCK inhibitor (1:1,000).

[1164] Pellet cells by centrifugation at 300 ×g for 5 minutes at 22° C. Aspirate supernatant and resuspend NPCs in 5 mL warmed Basal Media supplemented with Y-27632 ROCK inhibitor (1:1,000). Generate a cell count using a ViCell Cell Counting system. NPCs are banked at 12.5E6/mL in 1 mL CryoStorlO (StemCell Technologies, # 07930). Calculate the number of cells needed to fill the desired number of banked aliquots, then dispense the required volume of the NPC-containing Basal Media supplemented with Y-27632 ROCK inhibitor (1:1,000) into a new 50 mL conical tube. Pellet cells by centrifugation at 300 ×g for 5 minutes at 22° C. Resuspend NPCs in required volume of CryoStor10 (1 mL per desired aliquot), and dispense into 2 mL cryovials (Corning, # 430659). Quickly transfer filled cryovials to a Mr. Frosty freezing container (Thermo, # 5100-0001). Store at −80° C. for at least 24 hr, then transfer to long-term storage in liquid nitrogen.

[1165] Neuronal Maturation

[1166] The following procedure was used to prepare polyethyleneimine-coated plates: To 474 mL of sterile distilled water, add 25 mL of Borate Buffer pH 8.2 (20X; Sigma, # 08059) and 1 mL of polyethyleneimine (50%; Sigma, # 03880). Swirl the PEI with a Stripette. Sterile filter and store at 4° C. for <1 month. Dispense 0.1% PEI into cell culture plates and incubate at RT for 1 hour. Aspirate PEI. Wash four times with sterile distilled water. Aspirate to dry. Air-dry in a cell culture hood overnight. Store at 4° C. for <2 weeks.

[1167] For neuronal maturation, the following procedure was used: On the day of reseeding, confirm NPCs are highly dense (seeded at 12.5E6/T75 flask, allowed to propagate for 5-7 days) and morphologically homogeneous. Aspirate culture media, wash once with divalent cation-free Dulbecco's PBS (Thermo Fisher, # 14190250). Aspirate the DPBS, and dispense 1 mL of warmed (25-35° C.) Accutase (Thermo Fisher, # A1110501). Incubate at 37C for 8-10 minutes. Tap firmly to dislodge adherent NPCs. Neutralize Accutase by adding 2 mL of warmed (˜35C) Basal Media supplemented with Y-27632 ROCK inhibitor (1:1,000). Pellet cells by centrifugation at 300 ×g for 5 minutes at 22° C. Aspirate supernatant and resuspend NPCs in 5 mL warmed Basal Media supplemented with Y-27632 ROCK inhibitor (1:1,000). Generate a cell count using a ViCell Cell Counting system (or equivalent).

[1168] Resuspend required number of viable NPCs in Basal Media supplemented with laminin (1:100) and Y-27632 ROCK inhibitor (1:1,000). Dispense cell solution into a polyethyleneimine-coated vessel. The following day (DIV1) perform a full media change of Basal Media with laminin (1:1,000). On DIV 2, perform a full media change of a 50:50 mix of Basal Media with laminin (1:1,000), and BrainPhys supplemented with PD 0332991 (1:5,000), DAPT (1:2,500), laminin (1:1,000). From DIV 3-5, perform daily full media changes with BrainPhys supplemented with PD 0332991 (1:5,000), DAPT (1:2,500), laminin (1:1,000). From DIV7+perform ¹/₂ media changes with BrainPhys supplemented with PD 0332991 (1:5,000), DAPT (1:2,500), laminin (1:1,000) 2-3 times per week.

[1169] NPC Nucleofection

[1170] RNP complexes were prepared essentially as described above for fibroblast experiments.

[1171] The following procedure was used to prepare the cells. For Basal Media preparation: Combine 500 mL of Neurobasal with 500 mL of Advanced DMEM/F12, then add 20 mL of SM1 supplement (without VitA), 10 mL N2-B supplement, 10 mL GlutaMax, and 2 mL Normocin.

[1172] To coat cell culture vessel: Thaw Matrigel on ice at 4C overnight. Dilute 5 mL Matrigel into 495 mL of cold DMEM (1% vol/vol) and stored at 4C. Dispense 0.5 mL per well of a 12 well plate and incubated for 1 hour at RT. Aspirate Matrigel solution immediately prior to cell plating.

[1173] To prepare the cells: Aspirate culture media, wash once with divalent cation-free Dulbecco's PBS. Aspirate the DPBS, and dispense 1 mL of warmed (25-35° C.) Accutase. Incubate at 37C for 10-15 minutes. Dislodge adherent NPCs by tapping flask. Neutralize Accutase by adding 2 mL of warmed (˜35C) Basal Media (as above). Pellet cells by centrifugation at 300 ×g for 5 minutes at 22° C. Aspirate supernatant and resuspend NPCs in 5 mL warmed Basal Media (as above), pass through 40um cell strainer, and count. Aliquot cells in 15 ml tubes at 2.5E6 per nucleofection.

[1174] To nucleofect: resuspend cell pellets in 100 ul of pre-mixed P3 nucleofection solution and transfer to the tube containing pre-assembled RNP. Transfer 100 ul of RNP/Cell mixture to a nucleofection cuvette. Nucleofect using Lonza X-unit. Set solution to P3 and used pulse code CA137. Wash cells 1× in DPBS. Promptly move the cells from the cuvette to a 12 well pre-coated dish with pre-warmed media containing Rock inhibitor. For recovery, the next day, change the media to Basal Media supplemented with l0ng/mL FGF-2. Continue to culture for total of 5 days, with daily media change supplemented with 1 Ong/mL FGF-2, as above. For harvesting: detach cells using Accutase at 37C for 10 min. Wash 1× with DPBS, pelleted cells, removed PBS and froze pellets at −80C.

[1175] DNA was extracted using Qiagen Blood and Tissue Kit following manufacturer's protocol. DNA was digested with HindIII and sized by PCR/agarose electrophoresis using standard techniques. PCR primers:

(SEQ ID NO: 55)
5′-AGTTCAGCGGCCGCGCTCAGCTCCG
TTTCGGTTTCACTTCCGGT-3′;
(SEQ ID NO: 56)
5′-CAAGTCGCGGCCGCCTTGTAGAAAG
CGCCATTGGAGCCCCGCA-3′.

[1176] Neuron Nucleofection

[1177] Neurons (e.g., differentiated from NPCs as described above) were nucleofected as follows. RNPs were prepared essentially as described above for fibroblast experiments.

[1178] The enclosed supplement was added to AD1 nucleofection solution and 350 ul of solution was added to each RNP complex tube. 7.5 ul of 100 uM electroporation enhancer was added to each RNP tube just prior to nucleofection.

[1179] Media was removed from cells one well at a time and replaced with 350 ul of RNP-containing nucleofection solution. Once all wells were replaced, the electrode was gently inserted into well, avoiding bubbles. Cells were nucleofected using Lonza Y-unit nucleofector set to solution AD1 and pulse code EH-158. After nucleofection, the RNP solution was gently removed and replaced with fresh pre-warmed Brainphys media (described in maturation protocol). Cells were allowed to recover for 72 hours at 37° C. prior to harvesting. To harvest media was removed and cells were re-suspended in 500 ul of PBS, pelleted, PBS removed and pellets frozen.

[1180] DNA extraction and genotyping was performed as described above for NPC nucleofection.

[1181] Western Blot Protocol

[1182] Cell Pellets were resuspended in 1× MSD lysis buffer supplemented with protease and phosphatase inhibitors. 50 μl lysis buffer was used for 200K cells.

[1183] Lysates were vortexed and sonicated briefly (5-10 sec) at 20 Amp (using a Cole Parmer ultrasonic sonicator) before clearing by centrifugation at 21000× g for 10min at 4° C. Supernatants obtained can be used for protein estimation (BCA assay).

[1184] 4× LDS buffer was added to the cleared supernatants to obtain a final concentration of lx LDS followed by boiling at 100° C. for 5min.

[1185] 5-15 μg of cell lysate was run on a 4-12% NuPage Bis-tris gel with 1× MES SDS running buffer, followed by transfer onto a 0.204 Nitrocellulose membrane using the Transblot Turbo system (Instruction manual for catalog # 1704150). The blot was blocked for 1 hour at room temperature with LiCoR PBS blocking buffer (catalog # 927-40000). After one hour, overnight incubation was performed in primary antibody in LiCor PBS blocking buffer with 0.2% Tween-20 at 4° C. with rocking. Concentrations varied with the primary antibody efficiency.

[1186] The next day, the membrane was washed 3x times with PBS-T (0.1% tween-20), followed by a 1 hour incubation in secondary antibody (LiCor IRdye 800 or 680) at 1:10000 dilution in LiCoR PBS blocking buffer with 0.1% tween-20. The membrane was washed 3 times with PBS-T (0.1% tween-20), and proceed to signal detection of LiCor fluorescence using Odyssey CLx detector. Antibodies Used (Abcam): Vinculin: ab129002 (1:5000); Frataxin: ab110328 (1:250).

[1187] RNA Extraction & qRT-PCR

[1188] Mis-splicing correction was used as a functional readout of CTG repeat excision by dual DMPK guide RNAs in DM1 fibroblasts. Total RNA was extracted using Quick-RNA 96 kit in a volume of 20 ul (ZYMO Research). 10 ul of RNA was used to generate first strand cDNA by mixing with 10 ul of 2× RT mastermix from the high capacity cDNA RT kit (Thermo Fisher 4368814). Reaction mixes were spun down to remove air bubbles and loaded into a thermal cycler.

[1189] Reverse transcription was performed using a 3-step program, which consisted of 10 minutes at 25° C., 120 minutes at 37° C. , and 5 minutes at 85° C., followed by holding at 4° C.

[1190] Splicing was evaluated by qRT-PCR using the PowerUp SYBR green mastermix (Thermo Fisher A25742) in a Quantstudio 12K Flex Real-time PCR system. The composition of 10 ul of a 1× reaction is shown in Table 3 below. Primer sequences are listed in the Table of Additional Sequences.

TABLE 3

| | Volume(ul) |
|---|---|
| SYBR MIX 2x | 5.0 |
| primer (10 uM) | 0.8 |
| cDNA | 0.15 |
| H2O | 4.05 |
| Total reaction | 10.0 |

[1191] Source of Materials

[1192] The materials listed in Table 4 were obtained from the indicated vendors.

TABLE 4

| Description | Catalog No. | Vendor |
|---|---|---|
| 10 × 2 ml IDTE pH 7.5 | 11-01-02-02 | IDT |
| (1X TE Solution) | | |
| 10 × 2 mL Nuclease Free Duplex | 11-01-03-01 | IDT |
| Buffer | | |
| 100 um Nylon Cell Strainer | 352360 | Corning |
| 100x NEAA | 11140050 | Thermo Fisher |
| 16% PFA | 28908 | Thermo Fisher |
| 40 um Nylon Cell Strainer | 352340 | Corning |
| Accutase | NC9971356 or | Stemcell Technologies or |
| | A1110501 | ThermoFisher |
| AD1 4D-Nucleofector ™ Y Kit | V4YP-1A24 | Lonza |
| Advanced DMEM/F12 | 12634-010 | Gibco |
| Advanced DMEM/F12 Media | 12634-010 | Gibco |
| Alt-R ® A.s. Cas12a (Cpfl) Ultra, 500 | 10001273 | IDT |
| μg | | |
| Alt-R ® Cas9 Electroporation Enhancer, | 1075916 | IDT |
| 10 nmol | | |
| Alt-R ® CRISPR-Cas9 crRNA, 10 nmol | custom | IDT |
| Alt-R ® CRISPR-Cas9 tracrRNA, 100 | 1072534 | IDT |
| nmol | | |
| Alt-R ® CRISPR-Cpfl crRNA, 10 nmol | custom | IDT |
| Alt-R ® S.p. Cas9 Nuclease V3, 500 μg | 1081059 | IDT |
| Anti-MBNL1 antibody | SC-47740 | Santa Cruz Biotechnology |
| Ascorbic Acid | A4403-100MG | Sigma |
| BDNF | 450-02 | PeproTech |
| BrainPhys Basal Media | #05790 | StemCell |
| Cyclopamine | 239806 | Millipore |
| DAPT | 565770 | Millipore |
| Dibutyryl cAMP | SC-201567A | SCBT |
| DM1 fibroblasts | GM04033 | Cornell Institute |
| DMEM/F-12 | 11320033 | ThermoFisher |
| DNeasy Blood and Tissue Kit (250) | 69506 | Qiagen |
| DPBS, no calcium, no magnesium | 14190144 | ThermoFisher |
| EmbryoMax 2-Mercaptoethanol (100X) | ES-007-E | EMD Millipore |
| FBS | F2442 | Sigma |
| Fetal Bovine Serum | F8317-500ML | Sigma-Aldrich |
| FGF2 | 100-18B | PeproTech |
| FGF-Basic (AA 10-155) Recombinant | PHG0021L | ThermoFisher |
| Human Protein Solution | | |
| Fibronectin bovine plasma | F1141-5MG | Sigma-Aldrich |
| Formamide | 221198 | Sigma |
| GDNF | 450-10 | PeproTech |
| GlutaMAX | 35050-061 | Gibco |
| GlutaMax | 35050-061 | Gibco |
| GlutaMAX Supplement (100X) | 35050061 | ThermoFisher |
| Goat anti-Mouse IgG, Alexa 647 | A32728 | Thermo Fisher |
| Healthy fibroblasts | GM07492 | Conic11 Institute |
| hESC-qualified Matrigel | 354277 | Corning |
| High capacity cDNA RT kit | 4368814 | Thermo Fisher |
| Hoechst 33258 | H3569 | Thermo Fisher |
| hTert-Neo Lentivirus | PLV-10133-200 | Cellomics Technology |
| iCell Cardiomyocytes Maintenance | M1004 | CellularDynamics |
| Medium | | |
| InSolution ™ Y-27632 (Rock inhibitor) | 688002-1MG | Millipore |
| Knockout DMEM | 10829-018 | Invitrogen |
| Knockout Serum Replacement | 10828-028 | Invitrogen |
| Laminin | L2020-1MG | Sigma |
| Laminin 5-1-1 | NP892-012 | StemGent |
| Laminin 5-1-1 | NP892-012 | StemGent |
| LDN 193189 | 04-0074-02 | StemGent |
| MEM media, HEPES, GlutaMAX | 42360032 | Thermo Fisher |
| N2-A | 07152 | StemCell Tech |
| N2-B | 07156 | StemCell Tech |
| Neurobasal Media | 21103-049 | Gibco |
| nonessential amino acids (100X) | 11140050 | ThermoFisher |
| Normocin | Ant-NR-2 | Invivogen |
| P2 Primary Cell 4D-NucleofectorTM X | V4XP-2032 | Lonza |
| Kit S | | |
| P3 Primary Cell 4D-NucleofectorTM X | V4XP-3032 | Lonza |
| Kit S | | |
| PD 0332991 | 4786 | Tocris |
| Phusion High-Fidelity PCR | F-531L | Thermo Fisher |
| Master Mix | | |
| PowerUp SYBR green mastermix | A25742 | Thermo Fisher |
| QuickExtract ™ DNA Extraction | QE09050 | Lucigen |
| Solution | | |
| Quick-RNA 96 kit | R1053 | ZYMO Research |
| Recombinant human FGF-2 | 100-18B | PeproTech |
| ReLeSR | 5872 | Stemcell Technologies |
| RPMI 1640 Medium, GlutaMAX ™ | 72400120 | ThermoFisher |
| Supplement, HEPES | | |
| SB431542 | S4317 | Sigma |
| SM1 supplement without VitA | 05731 | StemCell |
| SM1 w/ Vitamin A | #05711 | StemCell |
| StemFlex | A3349401 | ThermoFisher |
| TaKaRa Ex Taq ® DNA Polymerase | RR001B | Clonetech |
| TrypLE Express | 12604013 | Thermo Fisher |
| TrypLE ™ Select Enzyme (10X), no | A1217701 | ThermoFisher |
| phenol red | | |
| Vanadyl Complex | R3380 | Sigma |
| Y-27632 (ROCKi) | 688002 | EMD Millipore |
| Yeast tRNA | 15401029 | Thermo Fisher |

[1193] 2. TNR Excision of DMPK in Cardiomyocytes and Fibroblasts using paired gRNAs

[1194] Analysis of Excision by PCR and gel electrophoresis. Cardiomyocytes were treated with RNP comprising spCas9 and a pair of gRNAs targeting sites flanking the CTG repeat locus of DMPK1 via electroporation as described above. The gRNA pair was one of pairs A-H as indicated in Tables 5 and 6.

TABLE 5
Exemplary DMPK Guides

| | | SEQ |
|---|---|---|
| Guide | Spacer Region | ID |
| RNA | Sequence | NO |
| DMPK-U50 | cgagccccgttcgccggccg | 3378 |
| DMPK-U58 | gctcgaagggtccttgtagc | 3354 |
| DMPK-U59 | ctcgaagggtccttgtagcc | 3346 |
| DMPK-U57 | cagcagcattcccggctaca | 3330 |
| DMPK-U60 | agcagcagcagcagcattcc | 3314 |
| DMPK-R12 | ctgctgctgctgctgctggg | 2658 |
| DMPK-R08 | ctgctgctgctgctgctgct | 2690 |
| DMPK-D04 | gcctggccgaaagaaagaaa | 2546 |
| DMPK-D03 | tctactacggccaggctg | 2554 |
| DMPK-D10 | tccacgtcagggcctcagcc | 2498 |
| DMPK-D16 | gctgaggccctgacgtggat | 2506 |

TABLE 6
Exemplary DMPK Guide Pairs

| Pair | Guide RNAs | SEQ ID NO |
|---|---|---|
| A | DMPK-U59 & DMPK-D03 | 3346 & 2554 |
| B | DMPK-U59 & DMPK-D10 | 3346 & 2498 |
| C | DMPK-U57 & DMPK-D03 | 3330 & 2554 |
| D | DMPK-U57 & DMPK-D10 | 3330 & 2498 |
| E | DMPK-U58 & DMPK-D04 | 3354 & 2546 |
| F | DMPK-U58 & DMPK-D16 | 3354 & 2506 |
| G | DMPK-U50 & DMPK-D04 | 3378 & 2546 |
| H | DMPK-U50 & DMPK-D16 | 3378 & 2506 |

[1195] Pairs of guides comprising the following 18-mer spacer sequences were tested: SEQ ID NOs: 3348 and 2556; SEQ ID NOs: 3348 and 2500; SEQ ID NOs: 3332 and 2556; SEQ ID NOs: 3332 and 2500; SEQ ID NOs: 3356 and 2548; SEQ ID NOs: 3356 and 2508; SEQ ID NOs: 3380 and 2548; SEQ ID NOs: 3380 and 2508. More specifically, the tested guides were the tested 20-mer guide pairs in FIG. 7 as shown in Table 6.

[1196] The treatment resulted in excision of the CTG repeat locus to the extent indicated in FIG. 7, which shows electrophoretic separation of products of PCR using primers that flank the CTG repeat locus of DMPK1.

[1197] Wild-type and heterozygous DM1 patient cardiomyocytes were prepared from iPSCs and treated with RNP comprising spCas9 and a pair of gRNAs targeting sites flanking the CTG repeat locus of DMPK1 via electroporation as described above. The gRNA pair was one of pairs 1 or 2 (as shown in FIG. 8A), which are the same as pairs B and C, respectively, as indicated in Table 6. The treatment resulted in excision of the CTG repeat locus to the extent indicated in FIG. 8A, which shows electrophoretic separation of products of PCR using primers that flank the CTG repeat locus of DMPK1.

[1198] Wild-type and heterozygous DM1 patient fibroblasts were treated with RNP comprising spCas9 and a pair of gRNAs targeting sites flanking the CTG repeat locus of DMPK1 via electroporation as described above. The gRNA pair was one of pairs 1 or 2 (as shown in FIG. 8B) as indicated in Table 6. The treatment resulted in excision of the CTG repeat locus to the extent indicated in FIG. 8B, which shows electrophoretic separation of products of PCR using primers that flank the CTG repeat locus of DMPK1.

[1199] Excision of the CTG repeat locus was confirmed by Sanger sequencing for a representative product (FIG. 8C).

[1200] Analysis of excision by FISH for CUG foci and immunofluorescence for MBNL1 foci. Primary DM1 and wild-type fibroblasts were treated with RNP comprising spCas9 and a pair of gRNAs targeting sites flanking the CTG repeat locus of DMPK1 via electroporation as described above, or no gRNA (negative control). The gRNA pair was one of pairs A-D as indicated in Table 6. Samples of treated cells were assayed by FISH using the Alexa546-(CAG)io probe (custom-ordered from IDT) for the CUG repeat region of DMPK1 mRNA as described above. Samples of treated cells were also assayed by immunofluorescence for MBNL1 protein foci.

[1201] The number of CUG foci per nucleus was determined and is shown in FIG. 9A, with each of guide pairs A-D providing a reduction in CUG foci per nucleus relative to the negative control. A histogram of the number of CUG foci per nucleus in each treated cell population and unedited cells is shown in FIG. 11.

[1202] The number of MBNL1 foci per nucleus was determined and is shown in FIG. 9B, with each of guide pairs A-D providing a reduction in MBNL1 foci per nucleus relative to the negative control.

[1203] Analysis of RNA splicing. Primary DM1 fibroblasts were treated with RNP containing gRNA pair 7 (identical to pair C in Table 6) or mock-treated without gRNA as described above, or not treated. Splicing was assayed in MBNL1 (FIG. 10A), NCOR2 (FIG. 10B), FN1 (FIG. 10C) and KIF13A (FIG. 10D) mRNAs. Results indicated a decrease in mis-splicing in each assayed mRNA following treatment with RNP containing gRNA pair 7. FIG. 10E shows quantitative analysis of mis-splicing correction, expressed as percentage rescue in excised DM1 fibroblasts.

[1204] 3. TNR Excision of DMPK with Inhibition of DNA-PK

[1205] hTert-transformed DM1 fibroblasts were treated as described above with or without 10 uM of the DNA-PK inhibitor Compound 6 and with RNP containing one of the DMPK gRNA pairs A-D (see Table 6). The treatment resulted in excision of the CTG repeat locus to the extent indicated in FIG. 12, which shows electrophoretic separation of products of PCR using primers that flank the CTG repeat locus of DMPK1. The band representing the excision product was noticeably more intense, and the band representing wild-type product was noticeably less intense, in the samples treated with Compound 6.

[1206] gRNAs comprising the 18-mer spacer sequences of SEQ ID NOs: 3332, 3316, 2660, 2692, 2556, and 2500 were tested. More specifically, the tested guides were the 20-mer guides as shown in Table 5 and Table 6.

[1207] hTert-transformed DM1 fibroblasts were treated as described above with or without 10 uM of the DNA-PK inhibitor Compound 6 and with RNP containing one of the following DMPK gRNAs: DMPK-U57 (SEQ ID NO: 3330) (gRNA # 4), DMPK-U60 (SEQ ID NO: 3314) (gRNA # 5), DMPK-R12 (SEQ ID NO: 2658) (gRNA # 6), DMPK-R08 (SEQ ID NO: 2690) (gRNA# 7), DMPK-D03 (SEQ ID NO: 2554) (gRNA # 9), or DMPK-D10 (SEQ ID NO: 2498) (gRNA # 10) (see Table 5, FIG. 13, FIG. 16). The treatment resulted in excision of the CTG repeat locus to the extent indicated in FIG. 13, which shows electrophoretic separation of products of PCR using primers that flank the CTG repeat locus of DMPK1. In the samples treated with Compound 6, the band representing the excision product was noticeably more intense for guides DMPK-U60, DMPK-R08, DMPK-D03, and DMPK-D10, and the band representing wild-type product was noticeably less intense for guides DMPK-U60, DMPK-R12, and DMPK-R08.

[1208] hTert-transformed DM1 fibroblasts were treated as described above with or without 10 uM of the DNA-PK inhibitor Compound 6 and with RNP containing one of the following DMPK gRNA pairs: A, B, C, or D (see Table 6). Cells were assayed for CUG foci per nucleus by FISH as described above. FIG. 14 shows histograms of CUG foci per nucleus for triplicate experiments with gRNA pairs A, B, C, or D, and for unedited healthy and patient cells. Treatment with each guide pair in the presence of Compound 6 provided a greater frequency of cells with 0 foci than cells treated with the guide pair in the absence of Compound 6, which showed a greater frequency of cells with 0 foci than unedited patient cells.

[1209] hTert-transformed DM1 fibroblasts were treated as described above with or without 10 uM of the DNA-PK inhibitor Compound 6 and with RNP containing one of the following DMPK gRNA pairs: A, B, C, or D. Pair A =guides DMPK-U59 and DMPK-D03; pair B =guides DMPK-U59 and DMPK-D10; pair C =guides DMPK-U57 and DMPK-D03; pair D =guides DMPK-U57 and DMPK-D10 ((sequences shown above, Table 5, and the sequence listing). Mock-treated (M) and cells treated with a control guide targeting AAVS1 (NT) (spacer sequence: accccacagtggggccacta, SEQ ID NO: 31) were also analyzed. The percentages of mis-spliced transcripts were determined for MBNL1 (FIG. 15A), NCOR2 (FIG. 15B), and FM1 (FIG. 15C) as described above. Relative DMPK expression was also determined (FIG. 15D). Partial restoration of RNA splicing was confirmed by qPCR for each of MBNL1, NCOR2, and FM1, with many results showing further enhancement in the presence of Compound 6. Editing did not significantly alter expression of DMPK.

[1210] FIG. 16 shows an overview of exemplary gRNAs used for single gRNA CTG repeat excision in human DMPK locus. gRNAs were designed to target a site 5′ or 3′ of the CTG repeat and include e.g., guides comprising SEQ ID NO: 3378 (gRNA # 1), SEQ ID NO: 3354 (gRNA # 2), SEQ ID NO: 3346 (gRNA# 3), SEQ ID NO: 3330 (gRNA # 4), SEQ ID NO: 3314 (gRNA # 5), SEQ ID NO: 2658 (gRNA # 6), SEQ ID NO: 2690 (gRNA # 7), SEQ ID NO: 2546 (gRNA # 8), SEQ ID NO: 2554 (gRNA # 9), SEQ ID NO: 2498 (gRNA # 10), and SEQ ID NO: 2506 (gRNA # 11).

[1211] 4. Excision of Repeats of FMR1 Using Guide Pairs that Overlap Trinucleotide Repeats

[1212] M28 CHOC2 and mosaic CHOC1 neuronal precursor cells (NPC) were treated with a combination of 5′ and 3′ FMR1 gRNAs and SpCas9 via electroporation. Locations in FMR1 targeted by various guides are indicated in FIG. 17. DNA was isolated from cells treated with guides as follows. The 3′ guide for each of lanes A-E had the spacer sequence of SEQ ID NO: 5262. The 5′ guide had the spacer sequence of SEQ ID NOs: 5782, 5830, 5926, 5950, or 5998 for lanes A through E, respectively. Excision was analyzed by PCR and gel electrophoresis (FIG. 18). Excision products were visible for each tested guide combination.

[1213] 5. Excision of CGG Repeats of FMR1 in CHOC1 Cells and in CHOC2 Cells

[1214] a. Excision of CGG Repeats of FMR1 in CHOC1 Cells

[1215] CHOC1 cells were genotyped using PCR and electrophoresis of the targeted locus (FIG. 19), which revealed a pre-existing deletion in the 5′ UTR. The deletion was characterized by sequencing as a 71-bp loss 5′ of the CGG repeat region that eliminated certain gRNA binding sites (data not shown).

[1216] Nonetheless, treatment of CHOC1 cells with one gRNA targeting a site 3′ of the CGG repeat region of FMR1, paired with a 5′ guide that targeted a sequence in the deleted region and therefore should have been ineffective, still resulted in repeat excision, indicating that one effective guide can be used to excise the repeats. Sequences from clones that underwent such excision with a single guide RNA (SEQ ID NO: 5262) are shown in FIG. 20. Junction sequences were consistent with repair through the MMEJ pathway.

[1217] b. Excision of CGG Repeats of FMR1 in CHOC2 Cells

[1218] CGG repeat excision was evaluated using single or paired gRNAs in differentiated, post-mitotic CHOC2 neurons after SpCas9 RNP electroporation. CHOC2 post-mitotic neurons were treated with RNP comprising spCas9 and guides as indicated below in Table 7a without DNA-PK inhibition. SEQ ID NOs are provided for the spacer region sequences. See Table 2 and/or the Sequence Listing for sequences.

TABLE 7A

| Lane in | | |
|---|---|---|
| FIG. 21A | 5′ guide | 3′ guide |
| 1 | GDG_Cas9_IRES1 | none |
| | (SEQ ID NO: 5830) | |
| 2 | GDG_Cas9_Fmr1_GGG1 | none |
| | (SEQ ID NO: 6022) | |
| 3 | none | GDG_Cas9_Fmr1_1 |
| | | (SEQ ID NO: 5262) |
| 4 | none | GDG_Cas9_Fmr1_GGG2 |
| | | (SEQ ID NO: 5310) |
| 5 | GDG_Cas9_IRES1 | GDG_Cas9_Fmr1_1 |
| | (SEQ ID NO: 5830) | (SEQ ID NO: 5262) |
| 6 | GDG_Cas9_Fmr1_GGG1 | GDG_Cas9_Fmr1_GGG2 |
| | (SEQ ID NO: 6022) | (SEQ ID NO: 5310) |

[1219] Excision of CGG repeats was analyzed by PCR (FIG. 21A). The experiment with the 3′ guide SEQ ID NO: 5262 gave a visible band representing a CGG repeat excision product (FIG. 21A, lane 3), which was confirmed by Sanger sequencing (not shown).

[1220] Excision of CGG repeats of FMR1 was further evaluated with treatment of a DNA-PK inhibitor. CHOC2 neuronal precursor cells (NPCs) were treated with RNPs comprising spCas9 and guides as indicated below in Table 7b. SEQ ID NOs are provided for the spacer region sequences. See Table 2 and/or the Sequence Listing for sequences. Following electroporation, CHOC2 NPCs were treated with DMSO or 304 DNA-PK inhibitor (compound 6) as indicated below in Table 7b.

TABLE 7B

| Lane in | | Inhibitor |
|---|---|---|
| FIG. 21B | Guide | (Compound 6) |
| B1 | GDG_Cas9_Fmr1_1 | No |
| | (SEQ ID NO: 5262) | |
| Cl | GDG_Cas9_Fmr1_B | No |
| | (SEQ ID NO: 5334) | |
| D1 | Fmr1_IRES1 (SEQ ID NO: 5830) | No |
| E1 | GDG_Cas9_Fmr1_B and Fmr1_IRES1 | No |
| | (SEQ ID NOs: 5334 and 5830) | |
| F1 | GDG_AAVS1_1 (SEQ ID NO: 53373) | No |
| G1 | None (mock) | No |
| A2 | GDG_Cas9_Fmr1_1 | 3 μM |
| | (SEQ ID NO: 5262) | |
| B2 | GDG_Cas9_Fmr1_B | 3 μM |
| | (SEQ ID NO: 5334) | |
| C2 | Fmr1_IRES1 (SEQ ID NO: 5830) | 3 μM |
| D2 | GDG_Cas9_Fmr1_B and Fmr1_IRES1 | 3 μM |
| | (SEQ ID NOs: 5334 and 5830) | |
| E1 | GDG_AAVS1_1 (SEQ ID NO: 53373) | 3 μM |
| F2 | None (mock) | 3 μM |
| G2 | None (negative control for PCR) | N/A |

[1221] Excision of CGG repeats was analyzed by amplifying FMR1 DNA by PCR and separating the PCR products by electrophoresis using Agilent's 2200 TapeStation (FIG. 21B). The experiment with the 3′ guide SEQ ID NO: 5262 showed excision of CGG repeats (FIG. 21B, lanes B1 and A2). Of note, the more prominent bands (small arrowheads) in FIG. 21B, lane A2 demonstrate enhanced CTG excision with 3 uM Compound 6 compared to the DMSO control.

[1222] gRNAs comprising the 18-mer spacer sequences of SEQ ID NOs: 5264, 5336, 5832, 6024, and 5312 were tested. More specifically, the tested guides were the 20-mer guides as shown in Tables 7a and 7b.

[1223] 6. Excision of GAA Repeats at the Frataxin Locus of FXN

[1224] iPS cells (wild-type, 4670, or 68FA) were treated with an RNA-targeted endonuclease (Cpf1 or Cas9) and Frataxin gRNAs as follows, which flank the GAA repeats in the Frataxin locus, with or without 1μM Compound 3. Cpf1 FXN gRNA 1 and 2: SEQ ID NOs: 47047 and 7447, respectively; SpCas9 FXN gRNAs 1 and 2: SEQ ID NOs: 52898 and 26546. Repeat excision was analyzed by PCR and electrophoresis (FIG. 22). GAA repeat excision was improved in the presence of Compound 3. Clones that had undergone excision were sequenced at the Frataxin locus (FIG. 23). Sequences from clones that underwent excision in the absence of Compound 3 were consistent with repair by NHEJ only. 50% of the sequences from clones that underwent excision in the presence of Compound 3 were indicative of repair by MMEJ, and 50% were indicative of repair by NHEJ. Thus, treatment with Compound 3 reduced the frequency of NHEJ repair in favor of MMEJ repair.

[1225] Excision of repeats in the FXN locus resulted in elevated FXN levels (FIGS. 24B-C). Specifically, as illustrated in the workflow of FIG. 24A, FA iPSCs were electroporated with RNP comprising SpCas9 and a guide pair targeted to produce excision of a 0.4, 1.5, 5 or 11 kb fragment and grown with or without a Compound 6 (“Inh.” In FIG. 24A) and analyzed by Western blot either in bulk (FIG. 24B) or following clonal expansion of single cells isolated by FACS (FIG. 24C). Tested guide pairs were as follows: pair 1 (SEQ ID NOs: 52666 and 26562); pair 2 (GDG_SpCas9_FA_680 bp_5 (SEQ ID NO: 51322) and GDG_SpCas9_FA_880 bp_3 (SEQ ID NO: 28130)); pair 3 (GDG_SpCas9_FA_lkb_5 (SEQ ID NO: 50394) and GDG_SpCas9_FA_4 kb_3 (SEQ ID NO: 34442)); pair 4 (GDG_SpCas9_FA_1.3 kb_5 (SEQ ID NO: 49986) and GDG_SpCas9_FA_10 kb_3 (SEQ ID NO: 45906)). Bulk FXN expression noticeably increased relative to control in all DNA-PK-inhibitor treated populations (FIG. 24B). Multiple clones with increased expression were isolated from populations not treated with a DNA-PK inhibitor.

[1226] 7. Model for MMEJ-based CGG-repeat excision at the Fragile-X locus of FMR1

[1227] FIG. 25 illustrates a mechanism for CGG repeat excision through an MMEJ pathway at the Fragile X locus in FMR1. Cleavage at the indicated location is followed by 5′ resection of the DNA ends, which exposes a 3′ end in which the last two nucleotides are G and A (5′ to 3′ direction). A microhomology search may identify one of several TC dinucleotides in the complementary strand (indicated by boxes and thick arrowheads in FIG. 25). The repair product resulting from use of any of these TC dinucleotides in MMEJ will lack the repeat region.

[1228] 8. sgRNA screening in the 3′ UTR of DMPK

[1229] a. Materials and Methods

[1230] sgRNA selection. The 3′ untranslated region (UTR) of the DMPK gene was scanned for NGG or NAG SpCas9 protospacer adjacent motif (PAM) on either the sense or antisense strand, and 20-nucleotide sgRNA spacer sequences adjacent to the PAMs were identified. 172 sgRNAs with NGG PAM and 46 sgRNAs with NAG PAM were selected for evaluation of editing efficiency in HEK293T cells (Table 8).

[1231] Plasmids. An all-in-one expression vector pU6-sgRNA-Cbh-SpCas9-2A-EGFP that expresses sgRNA, SpCas9, and EGFP was used to subclone individual sgRNAs. The top and bottom strand oligos for each sgRNA were annealed and then subcloned into the Bbsl restriction sites of the pU6-sgRNA-Cbh-SpCas9-2A-EGFP vector as previously described (Ran, F.A. et al. (2013) Nat. Protoc. 8:2281-2308; PMID: 24157548).

[1232] Transfection and PCR amplification. pU6-sgRNA-Cbh-SpCas9-2A-EGFP vectors containing individual sgRNAs were transfected into HEK293T cells seeded in CELLSTAR black 96-well plates (Greiner) using either Lipofectamine 3000 (and 72 hr transfection time) or Lipofectamine 2000 (and 48 hr transfection time) as the transfection reagent (Thermo Fisher Scientific) following manufacturer's protocol. Post transfection, genomic DNA was isolated using DirectPCR lysis reagent (Viagen) supplemented with 0.5 mg/ml of proteinase K (Viagen), and used as template for subsequent PCR. The DMPK 3′ UTR region was amplified using GoTaq Green Master Mix (Promega) and PCR primers flanking the 3′ UTR region (SEQ ID NOs: 32 and 33) (Table of Additional Sequences). Amplification was conducted using the following cycling parameters: 1 cycle at 95° C. for 2 min; 40 cycles of 95° C. for 30 sec, 63° C. for 30 sec, and 72° C. for 90 sec; 1 cycle at 72° C. for 5 min.

[1233] Sanger sequencing and TIDE analysis. PCR products were sent to GeneWiz for purification and Sanger sequencing. Sequencing primer UTRsF3 (SEQ ID NO: 34) was used for sgRNAs upstream of the CTG repeat, while the reverse PCR primer (SEQ ID NO: 33) was used for downstream sgRNAs and 13 sgRNAs overlapping the CTG repeat region. The sgRNAs (DMPK-D75, DMPK-D76, DMPK-D85, DMPK-D86, DMPK-D102, DMPK-D103, DMPK-D104, DMPK-D105, DMPK-D119, DMPK-D120, DMPK-D121, DMPK-D122, DMPK-D123, DMPK-D124, DMPK-D125, DMPK-D126, DMPK-D127, DMPK-D128, DMPKD129) that were located close to the reverse PCR primer (SEQ ID NO: 33) were sequenced using sequencing primer UTRsF2 (SEQ ID NO: 35). Indel values were estimated using the TIDE analysis algorithm (DeskGen/Vertex) with the electrophoretograms obtained from Sanger sequencing. TIDE is a method based on the recovery of indels' spectrum from the sequencing electrophoretograms to quantify the proportion of template-mediated editing events (Brinkman, E. A. et al. (2014) Nucleic Acids Res. 42: e168; PMID: 25300484).

[1234] Off-target scoring of s2RNAs. Off-target sites were computationally predicted for each sgRNA based on sequence similarity to the hg38 human reference genome, specifically, any site that was identified to have up to 3 mismatches, or up to 2 mismatches and 1 DNA/RNA bulge, relative to the protospacer sequence as well as a protospacer adjacent motif (PAM) sequence of either NGG or NAG. An off-target score was then calculated for each sgRNA based on these computationally predicted off-target sites.

[1235] Specifically, each off-target site was given a weight representing the probability of it being edited, based on the site's degree of sequence similarity to the target site and its PAM sequence: (i) weighting based on the number of mismatches was calculated from the published metanalysis of empirical data at Haeussler, M. et. Al. (2016) Genome Biol., 17(148); PMID: 27380939 (if a DNA/RNA bulge was present at the off-target site, the bulge was counted as 2 additional mismatches, based on empirical data that off-target editing at sites with DNA/RNA bulges is observed less frequently than mismatches); and (ii) weighting based on the PAM sequence used the Cutting Frequency Determination model from Doench, J. G. et. Al. (2016) Nat Biotechnol., 34 (2): 184-191; PMID: 26780180. The weight for each off-target site was calculated by multiplying the site's weight based on number of mismatches with the site's weight based on PAM sequence. The overall off-target score for each sgRNA was calculated as the sum of weights for all associated predicted off-target sites. Overall, the off-target score for the sgRNA corresponds to the expected value of the number of off-target sites for that sgRNA. Higher off-target scores correspond with sgRNAs that are more likely to have off-target editing.

[1236] b. Results

[1237] Two hundred eighteen sgRNAs flanking the CTG repeat expansion of the DMPK gene (Table 8) were selected for editing the CTG repeat expansion. To avoid interference with the DIVIPK coding sequence and mRNA maturation, all selected sgRNAs were located within the 3′UTR of the DMPK gene between the stop codon and the end of the last exon. Among these 218 sgRNAs, 76 (DMPK-U01-DMPK-U76) are located upstream of the CTG repeat expansion (between the stop codon and the CTG repeat expansion), 129 sgRNAs (DMPK-D01-DMPK-D129) are located downstream of the CTG repeat expansion (between the CTG repeat expansion and the end of the last exon of DMPK), and 13 sgRNAs (DMPK-R01-DMPK-R13) are completely or partially overlapping the CTG repeat expansion.

[1238] Guides comprising the 18-mer spacer sequence of SEQ ID NOs: 4020, 4012, 4004, 4044, 4036, 4028, 3956, 3948, 3996, 3916, 3980, 3908, 3900, 3940, 3852, 3884, 2828, 3820, 3844, 3796, 3788, 3764, 3812, 3748, 3780, 3740, 3772, 3724, 3756, 3692, 3668, 3660, 3636, 3588, 3548, 3532, 3644, 3516, 3508, 3492, 3620, 3612, 3604, 3580, 3444, 3524, 3412, 3380, 3436, 3372, 3428, 3420, 3396, 3388, 3332, 3356, 3348, 3316, 3932, 3892, 3836, 3804, 3708, 3700, 3684, 3676, 3572, 3556, 3540, 3500, 3484, 3460, 3476, 3452, 2669, 2668, 2652, 2644, 2628, 2620, 2708, 2692, 2684, 2612, 2676, 2660, 2604, 2596, 2636, 2556, 2548, 2588, 2540, 2580, 2572, 2524, 2500, 2492, 2468, 2460, 2452, 2516, 2508, 2420, 2484, 2476, 2696, 2444, 2436, 2372, 2380, 2356, 2348, 2340, 2316, 2300, 2284, 2276, 2268, 2332, 2260, 2324, 2244, 2236, 2292, 2252, 2220, 2228, 2212, 2196, 2148, 2140, 2124, 2108, 2100, 2092, 2132, 2116, 2036, 2028, 2060, 2052, 2044, 1916, 1788, 1780, 1772, 1844, 1740, 1708, 1692, 1748, 1716, 1652, 1644, 1612, 1588, 1564, 1548, 1580, 1540, 1380, 1372, 1924, 1900, 1908, 1796, 1764, 1700, 1676, 1724, 1364, 1452, 2204, 2180, 2172, 2164, 2020, 2012, 1892, 1964, 1948, 1852, 1820, 1660, 1636, 1604, 1556, 1436, 1428, 1340, 1348, 1980, 1996, 1988, 1972, 1940, 1932, 1812, 1836, 1828, 1804, 1628, 1596, 1516, 1500, 1492, 1484, 1476, 1460, 1444, 1420, 1412, 1404, 1396, and 1388 were tested. More specifically, the exemplified guides were 20-mer guides as shown in Table 8.

[1239] To assess editing efficiencies, individual sgRNAs were subcloned into the pU6-sgRNA-Cbh-SpCas9-2A-EGFP vector, and transfected into HEK293T cells which contain 5 CTG repeats in the DMPK gene on both alleles. Genomic DNA was extracted 48 hr (for Lipofectamine 2000) or 72 hr (for Lipofectamine 3000) post transfection, and a 1174 bp sequence covering the CTG repeat expansion and the sgRNAs target sites was amplified by PCR. Sanger sequencing and TIDE analysis were then used to quantify the frequency of indels generated by each sgRNA. Results are shown from transfection with Lipofectamine 3000 for upstream guides (FIG. 26A), downstream guides (FIG. 26B), and guides located within or adjacent to CTG repeat expansion (FIG. 26C). Results are also shown from transfection with Lipofectamine 2000 for upstream guides (FIG. 27A), downstream guides (FIG. 27B), and guides located within or adjacent to CTG repeat expansion (FIG. 27C). With Lipofectamine 2000 transfection, thirteen upstream sgRNAs induced indels greater than 40% and 36 upstream sgRNAs induced indels greater than 20%, with DMPK-U32 displaying the highest activity (65% indel value) (FIG. 27A). Five downstream sgRNAs induced indels greater than 40% and 51 downstream sgRNAs induced indels greater than 20%, with DMPK-D87 displaying the highest activity (60% indel value) (FIG. 27B). Eight of the 13 sgRNAs overlapping the CTG repeat region contain more than five consecutive CTG or CAG repeat sequences and therefore didn't yield any indels in HEK293T cells (FIG. 27C). Among the five remaining CTG repeat region sgRNAs, DMPK-R06 resulted in the highest indel value of 20% (FIG. 27C). See also, Table 8, which provides the raw data shown in FIGS. 26 and 27, as well as the off-target score.

TABLE 8

| | | % Indels with | % Indels with | |
|---|---|---|---|---|
| SEQ | | Lipofectamine | Lipofectamine | Off- |
| ID | | 2000 (4 | 3000 (3 | target |
| NO | Guide RNA | replicates) | replicates) | Score |
| 4018 | DMPK-U01 | 7.60% | 18.27% | 0.056 |
| 4010 | DMPK-U02 | 18.90% | 16.00% | 0.102 |
| 4002 | DMPK-U03 | 3.85% | 4.70% | 0.173 |
| 4042 | DMPK-U04 | 2.28% | 3.47% | 0.094 |
| 4034 | DMPK-U05 | 16.18% | 11.53% | 0.117 |
| 4026 | DMPK-U06 | 27.28% | 25.27% | 0.028 |
| 3954 | DMPK-U07 | 10.85% | 15.20% | 0.185 |
| 3946 | DMPK-U08 | 27.65% | 28.23% | 0.463 |
| 3994 | DMPK-U09 | 19.95% | 21.90% | 0.040 |
| 3914 | DMPK-U10 | 28.83% | 41.97% | 0.171 |
| 3978 | DMPK-U11 | 13.53% | 8.30% | 0.046 |
| 3906 | DMPK-U12 | 2.55% | 6.17% | 0.194 |
| 3898 | DMPK-U13 | 37.20% | 23.27% | 0.512 |
| 3938 | DMPK-U14 | 48.23% | 27.00% | 0.186 |
| 3922 | DMPK-U15 | 31.93% | 20.23% | 0.290 |
| 3858 | DMPK-U16 | 15.68% | 12.67% | 0.194 |
| 3850 | DMPK-U17 | 8.10% | 9.70% | 0.262 |
| 3882 | DMPK-U18 | 7.43% | 9.77% | 0.780 |
| 3826 | DMPK-U19 | 24.05% | 32.00% | 0.299 |
| 3818 | DMPK-U20 | 49.85% | 41.70% | 0.323 |
| 3842 | DMPK-U21 | 7.20% | 6.23% | 0.447 |
| 3794 | DMPK-U22 | 63.90% | 57.70% | 0.116 |
| 3786 | DMPK-U23 | 11.33% | 11.10% | 0.068 |
| 3762 | DMPK-U24 | 21.63% | 19.20% | 0.001 |
| 3810 | DMPK-U25 | 9.23% | 8.80% | 0.141 |
| 3746 | DMPK-U26 | 62.30% | 47.97% | 0.205 |
| 3778 | DMPK-U27 | 61.83% | 74.53% | 0.002 |
| 3738 | DMPK-U28 | 9.05% | 12.50% | 0.052 |
| 3770 | DMPK-U29 | 31.70% | 47.33% | 0.070 |
| 3722 | DMPK-U30 | 23.45% | 22.07% | 0.299 |
| 3754 | DMPK-U31 | 11.98% | 20.20% | 0.040 |
| 3690 | DMPK-U32 | 64.85% | 55.17% | 1.925 |
| 3666 | DMPK-U33 | 5.43% | 10.17% | 0.707 |
| 3658 | DMPK-U34 | 33.28% | 41.87% | 0.201 |
| 3634 | DMPK-U35 | 5.98% | 7.70% | 0.358 |
| 3586 | DMPK-U36 | 0.85% | 4.13% | 0.714 |
| 3546 | DMPK-U37 | 9.05% | 8.90% | 0.375 |
| 3530 | DMPK-U38 | 20.33% | 12.80% | 0.538 |
| 3642 | DMPK-U39 | 18.15% | 14.57% | 0.213 |
| 3514 | DMPK-U40 | 46.98% | 23.93% | 0.600 |
| 3506 | DMPK-U41 | 25.73% | 15.60% | 0.950 |
| 3490 | DMPK-U42 | 15.70% | 15.07% | 0.593 |
| 3618 | DMPK-U43 | 11.80% | 12.57% | 0.358 |
| 3610 | DMPK-U44 | 20.40% | 18.40% | 0.533 |
| 3602 | DMPK-U45 | 16.10% | 16.10% | 1.297 |
| 3578 | DMPK-U46 | 4.00% | 4.83% | 1.282 |
| 3442 | DMPK-U47 | 11.78% | 10.63% | 4.424 |
| 3522 | DMPK-U48 | 28.43% | 19.40% | 0.904 |
| 3410 | DMPK-U49 | 12.23% | 7.53% | 0.194 |
| 3378 | DMPK-U50 | 28.23% | 21.30% | 0.169 |
| 3434 | DMPK-U51 | 24.25% | 9.97% | 0.187 |
| 3370 | DMPK-U52 | 41.18% | 22.80% | 0.019 |
| 3426 | DMPK-U53 | 20.28% | 12.53% | 0.047 |
| 3418 | DMPK-U54 | 54.73% | 50.63% | 0.138 |
| 3394 | DMPK-U55 | 56.33% | 51.47% | 0.177 |
| 3386 | DMPK-U56 | 54.28% | 39.60% | 0.033 |
| 3330 | DMPK-U57 | 44.20% | 36.90% | 0.307 |
| 3354 | DMPK-U58 | 30.58% | 23.77% | 0.055 |
| 3346 | DMPK-U59 | 18.33% | 11.20% | 0.117 |
| 3314 | DMPK-U60 | 19.80% | 12.70% | 21.127 |
| 3930 | DMPK-U61 | 27.07% | N/A | 0.370 |
| 3890 | DMPK-U62 | 16.93% | N/A | 1.013 |
| 3834 | DMPK-U63 | 26.15% | N/A | 1.228 |
| 3802 | DMPK-U64 | 33.60% | N/A | 0.359 |
| 3706 | DMPK-U65 | 19.95% | N/A | 0.614 |
| 3698 | DMPK-U66 | 21.58% | N/A | 1.017 |
| 3682 | DMPK-U67 | 55.28% | N/A | 0.685 |
| 3674 | DMPK-U68 | 24.73% | N/A | 0.340 |
| 3570 | DMPK-U69 | 4.95% | N/A | 1.838 |
| 3554 | DMPK-U70 | 13.03% | N/A | 0.728 |
| 3538 | DMPK-U71 | 14.03% | N/A | 0.365 |
| 3498 | DMPK-U72 | 7.73% | N/A | 10.292 |
| 3482 | DMPK-U73 | 6.28% | N/A | 5.222 |
| 3458 | DMPK-U74 | 11.35% | N/A | 6.087 |
| 3474 | DMPK-U75 | 13.23% | N/A | 2.078 |
| 3450 | DMPK-U76 | 9.08% | N/A | 4.829 |
| 2667 | DMPK-R01 | N/A | N/A | 1224.362 |
| 2666 | DMPK-R02 | N/A | N/A | 1022.174 |
| 2650 | DMPK-R03 | N/A | N/A | 197.587 |
| 2642 | DMPK-R04 | 2.20% | 3.13% | 19.022 |
| 2626 | DMPK-R05 | 17.85% | 15.37% | 1.897 |
| 2618 | DMPK-R06 | 20.33% | 24.83% | 1.003 |
| 2706 | DMPK-R07 | N/A | N/A | 395.659 |
| 2690 | DMPK-R08 | N/A | N/A | 195.498 |
| 2682 | DMPK-R09 | N/A | N/A | 232.734 |
| 2610 | DMPK-R10 | 9.38% | 8.07% | 0.343 |
| 2674 | DMPK-R11 | N/A | N/A | 258.336 |
| 2658 | DMPK-R12 | N/A | N/A | 72.335 |
| 2602 | DMPK-R13 | 12.93% | 7.43% | 72.335 |
| 2594 | DMPK-D01 | 31.30% | 20.13% | 0.304 |
| 2634 | DMPK-D02 | 6.10% | 3.63% | 1.456 |
| 2554 | DMPK-D03 | 22.75% | 16.77% | 40.745 |
| 2546 | DMPK-D04 | 20.43% | 13.43% | 1.066 |
| 2586 | DMPK-D05 | 16.18% | 13.17% | 2.268 |
| 2538 | DMPK-D06 | 9.33% | 6.57% | 0.725 |
| 2578 | DMPK-D07 | 6.88% | 4.57% | 0.187 |
| 2570 | DMPK-D08 | 20.73% | 16.17% | 0.327 |
| 2522 | DMPK-D09 | 11.03% | 6.50% | 1.280 |
| 2498 | DMPK-D10 | 20.05% | 21.30% | 0.803 |
| 2490 | DMPK-D11 | 8.50% | 0.97% | 0.335 |
| 2466 | DMPK-D12 | 14.15% | 16.60% | 0.159 |
| 2458 | DMPK-D13 | 26.68% | 15.47% | 0.061 |
| 2450 | DMPK-D14 | 11.68% | 8.23% | 0.34 |
| 2514 | DMPK-D15 | 35.75% | 33.37% | 0.886 |
| 2506 | DMPK-D16 | 21.08% | 16.97% | 0.281 |
| 2418 | DMPK-D17 | 22.90% | 16.40% | 1.703 |
| 2482 | DMPK-D18 | 16.30% | 5.50% | 0.368 |
| 2474 | DMPK-D19 | 19.70% | 12.53% | 0.152 |
| 2394 | DMPK-D20 | 11.55% | 8.43% | 3.383 |
| 2442 | DMPK-D21 | 17.40% | 16.30% | 2.035 |
| 2434 | DMPK-D22 | 14.80% | 19.23% | 2.634 |
| 2370 | DMPK-D23 | 18.53% | 12.43% | 0.840 |
| 2378 | DMPK-D24 | 10.53% | 9.23% | 2.370 |
| 2354 | DMPK-D25 | 4.55% | 2.27% | 0.146 |
| 2346 | DMPK-D26 | 24.80% | 12.23% | 0.199 |
| 2338 | DMPK-D27 | 24.85% | 10.63% | 2.016 |
| 2314 | DMPK-D28 | 26.30% | 14.97% | 0.382 |
| 2298 | DMPK-D29 | 19.68% | 14.83% | 0.054 |
| 2282 | DMPK-D30 | 19.73% | 17.47% | 0.006 |
| 2274 | DMPK-D31 | 18.63% | 12.10% | 0.002 |
| 2266 | DMPK-D32 | 21.33% | 18.00% | 0.009 |
| 2330 | DMPK-D33 | 15.08% | 11.30% | 4.191 |
| 2258 | DMPK-D34 | 40.00% | 29.83% | 0.048 |
| 2322 | DMPK-D35 | 38.65% | 31.00% | 0.046 |
| 2242 | DMPK-D36 | 20.98% | 26.20% | 0.171 |
| 2234 | DMPK-D37 | 6.98% | 4.47% | 0.080 |
| 2290 | DMPK-D38 | 5.63% | 6.57% | 0.004 |
| 2250 | DMPK-D39 | 6.78% | 6.97% | 0.149 |
| 2218 | DMPK-D40 | 14.88% | 15.17% | 0.125 |
| 2226 | DMPK-D41 | 27.53% | 22.87% | 0.245 |
| 2210 | DMPK-D42 | 40.40% | 30.37% | 0.152 |
| 2194 | DMPK-D43 | 26.45% | 20.00% | 0.647 |
| 2146 | DMPK-D44 | 27.78% | 18.47% | 0.005 |
| 2138 | DMPK-D45 | 11.40% | 10.07% | 0.285 |
| 2122 | DMPK-D46 | 7.28% | 6.17% | 0.039 |
| 2106 | DMPK-D47 | 13.65% | 14.00% | 0.276 |
| 2098 | DMPK-D48 | 5.00% | 6.63% | 0.201 |
| 2090 | DMPK-D49 | 19.80% | 13.57% | 0.174 |
| 2130 | DMPK-D50 | 9.33% | 5.30% | 0.151 |
| 2114 | DMPK-D51 | 15.75% | 12.03% | 0.228 |
| 2034 | DMPK-D52 | 5.50% | 4.93% | 0.064 |
| 2026 | DMPK-D53 | 19.35% | 12.93% | 0.065 |
| 2058 | DMPK-D54 | 7.65% | 4.37% | 0.196 |
| 2050 | DMPK-D55 | 1.38% | 4.93% | 0.309 |
| 2042 | DMPK-D56 | 5.23% | 4.47% | 0.042 |
| 1914 | DMPK-D57 | 34.05% | 16.67% | 0.175 |
| 1786 | DMPK-D58 | 22.35% | 13.10% | 0.031 |
| 1778 | DMPK-D59 | 28.95% | 21.53% | 0.005 |
| 1770 | DMPK-D60 | 19.00% | 12.90% | 0.157 |
| 1842 | DMPK-D61 | 27.95% | 10.80% | 0.222 |
| 1738 | DMPK-D62 | 29.33% | 16.63% | 0.163 |
| 1706 | DMPK-D63 | 37.30% | 24.57% | 0.446 |
| 1690 | DMPK-D64 | 16.45% | 8.23% | 0.346 |
| 1746 | DMPK-D65 | 33.53% | 24.00% | 0.014 |
| 1714 | DMPK-D66 | 25.80% | 18.23% | 0.046 |
| 1650 | DMPK-D67 | 30.55% | 20.13% | 0.343 |
| 1642 | DMPK-D68 | 29.15% | 17.27% | 0.264 |
| 1610 | DMPK-D69 | 23.95% | 16.43% | 0.250 |
| 1586 | DMPK-D70 | 23.45% | 15.37% | 0.143 |
| 1562 | DMPK-D71 | 16.18% | 14.63% | 0.143 |
| 1546 | DMPK-D72 | 12.18% | 8.17% | 0.393 |
| 1578 | DMPK-D73 | 30.68% | 10.13% | 0.486 |
| 1538 | DMPK-D74 | 32.03% | 14.77% | 0.253 |
| 1378 | DMPK-D75 | 26.23% | 10.83% | 0.055 |
| 1370 | DMPK-D76 | 15.15% | 5.60% | 0.011 |
| 1922 | DMPK-D77 | 13.03% | 9.03% | 0.258 |
| 1898 | DMPK-D78 | 6.45% | 3.63% | 0.217 |
| 1906 | DMPK-D79 | 8.13% | 5.67% | 0.278 |
| 1794 | DMPK-D80 | 4.25% | 2.37% | 0.003 |
| 1762 | DMPK-D81 | 11.93% | 6.67% | 0.140 |
| 1698 | DMPK-D82 | 8.73% | 8.97% | 0.226 |
| 1674 | DMPK-D83 | 7.00% | 5.00% | 0.600 |
| 1722 | DMPK-D84 | 3.50% | 3.97% | 0.073 |
| 1362 | DMPK-D85 | 5.30% | 1.43% | 0.132 |
| 1450 | DMPK-D86 | 3.93% | 3.37% | 0.043 |
| 2202 | DMPK-D87 | 59.63% | 39.33% | 0.317 |
| 2178 | DMPK-D88 | 46.20% | 22.33% | 0.836 |
| 2170 | DMPK-D89 | 50.28% | 38.60% | 0.635 |
| 2162 | DMPK-D90 | 29.68% | 15.60% | 0.343 |
| 2018 | DMPK-D91 | 19.75% | 6.40% | 0.029 |
| 2010 | DMPK-D92 | 17.85% | 10.90% | 0.011 |
| 1890 | DMPK-D93 | 18.80% | 7.37% | 0.862 |
| 1962 | DMPK-D94 | 22.55% | 9.10% | 1.425 |
| 1946 | DMPK-D95 | 17.23% | 6.90% | 0.911 |
| 1850 | DMPK-D96 | 21.38% | 11.90% | 0.166 |
| 1818 | DMPK-D97 | 21.28% | 12.37% | 0.526 |
| 1658 | DMPK-D98 | 11.23% | 10.83% | 0.164 |
| 1634 | DMPK-D99 | 23.30% | 16.90% | 0.471 |
| 1602 | DMPK-D100 | 23.33% | 18.67% | 0.100 |
| 1554 | DMPK-D101 | 24.90% | 15.37% | 0.449 |
| 1434 | DMPK-D102 | 17.80% | 12.70% | 0.039 |
| 1426 | DMPK-D103 | 9.35% | 8.60% | 0.056 |
| 1338 | DMPK-D104 | 8.95% | 15.53% | 1.981 |
| 1346 | DMPK-D105 | 9.53% | 14.97% | 1.563 |
| 1978 | DMPK-D106 | 18.70% | N/A | 0.461 |
| 1994 | DMPK-D107 | 19.80% | N/A | 1.238 |
| 1986 | DMPK-D108 | 5.13% | N/A | 0.630 |
| 1970 | DMPK-D109 | 14.23% | N/A | 0.861 |
| 1938 | DMPK-D110 | 16.70% | N/A | 0.879 |
| 1930 | DMPK-D111 | 18.05% | N/A | 0.256 |
| 1810 | DMPK-D112 | 23.23% | N/A | 0.025 |
| 1834 | DMPK-D113 | 15.80% | N/A | 0.805 |
| 1826 | DMPK-D114 | 17.57% | N/A | 0.137 |
| 1802 | DMPK-D115 | 21.10% | N/A | 0.116 |
| 1626 | DMPK-D116 | 21.28% | N/A | 0.528 |
| 1594 | DMPK-D117 | 33.60% | N/A | 0.035 |
| 1514 | DMPK-D118 | 37.05% | N/A | 0.803 |
| 1498 | DMPK-D119 | 9.50% | N/A | 5.865 |
| 1490 | DMPK-D120 | 12.55% | N/A | 1.462 |
| 1482 | DMPK-D121 | 11.23% | N/A | 1.430 |
| 1474 | DMPK-D122 | 3.80% | N/A | 6.627 |
| 1458 | DMPK-D123 | 12.48% | N/A | 0.689 |
| 1442 | DMPK-D124 | 14.85% | N/A | 0.211 |
| 1418 | DMPK-D125 | 13.03% | N/A | 0.066 |
| 1410 | DMPK-D126 | 15.83% | N/A | 0.036 |
| 1402 | DMPK-D127 | 21.25% | N/A | 0.043 |
| 1394 | DMPK-D128 | 19.48% | N/A | 0.019 |
| 1386 | DMPK-D129 | 18.48% | N/A | 0.039 |

* A guide may be referred to throughout, for example as “U6” or “U06”, without the zero preceding the number.

[1240] 9. CTG Repeat Excision of DMPK with and Without DNA-PK Inhibition

[1241] a. Materials and Methods

[1242] Preparation of DM1 myoblasts and myotubes. Healthy human myoblast (P01431-18F) and DM1 patient myoblast (03001-32F) were obtained from Cook myosite. Primary human myoblast were cultured in growth medium consisting of Myotonic™ Basal Medium (Cook myosite, MB-2222) plus MyoTonic™ Growth Supplement (Cook myosite, MS-3333). Myoblast differentiation was induced by changing culture medium to MYOTONIC DIFFERENTIATION MEDIA (Cook myoite, MD-5555). Myotubes were formed after changing to differentiation medium, and myotube samples were collected 7 days post differentiation induction. Primary human myoblasts were further purified with EasySep Human CD56 Positive Selection Kit II (StemCell Tech 17855) following manufacturer's protocol 3 days before Nucleofection and maintain in growth medium until nucleofection of RNPs.

[1243] sgRNA selection. 42 sgRNAs were selected from the DMPK 3′ UTR screen in HEK293 T cells (Example 8) for further evaluation in DM1 myoblasts. The sgRNAs were selected based on editing efficiency in HEK293 T cells, in silico off-target score, and coverage of regions flanking the CTG repeat region. Of the 42 sgRNAs, 22 upstream and 20 downstream sgRNAs were selected (Table 9).

[1244] Preparation of RNPs. RNPs containing Cas9 and sgRNA were prepared at a ratio of 1:6 (single-cut screen) and 1:3 (double-cut screen) Cas:sgRNA. For single-cut screening, RNP complexes were assembled with 30, 20 or 10 pmole of Cas9 and 180,120 or 60 pmole of sgRNA respectively in 10 uL of electroporation buffer. After incubation at room temperature for 20 minutes, 10 uL of this solution was mixed with 3×10⁵ primary myoblasts in 10 uL nucleofection buffer. For Double-cut screen, RNP complexes were first assembled for individual sgRNA with 10 pmole Cas9 and 30 pmole sgRNA in 5 uL electroporation buffer. After incubation at room temperature for 20 minutes, two RNPs were mixed at 1:1 ratio and then with 2×10⁵ primary myoblasts in 10 uL electroporation buffer, so that final RNPs in each reaction contained 20 pmole cas9 +30 pmole sgRNA1 +30 pmole sgRNA2.

[1245] Delivery of RNPs to DM1 myoblasts. DM1 myoblasts (Cook myosite 03001-32F; 3×10⁵ cells per reaction for single-cut screen; 2×10⁵ cells per reaction for double-cut screen) were nucleofected with Cas9/sgRNA RNPs. The Lonza Nucleofector 96-well shuttle system was used to deliver Cas9 (Aldevron) and chemically modified sgRNAs (Synthego). In the single-cut screen, three doses of Cas9 (10, 20, or 30 pmols) were evaluated. In the double-cut screen, 20 pmol Cas9 was used. Following electroporation, myoblasts from each well of nucleofection shuttle device were split into 6 identical wells of the 96-well cell culture plate. 24 hours post electroporation, fresh medium were changed. These myoblasts were cultured until 72 hours post electroporation at 37° C/5% CO₂, and then harvested for DNA extraction and fluorescent in situ hybridization (FISH) staining, or induced for myotube differentiation by replacing the culture medium with MYOTONIC DIFFERENTIATION MEDIA (Cook myoite, MD-5555) for additional 7 days. DM1 myotubes were then fixed for FISH or harvest for RNA extraction.

[1246] PCR Amplification. On day 3 post nucleofection, genomic DNA of DM1 myoblasts was isolated and amplified as described in Example 8.

[1247] Sanger sequencing and TIDE analysis. PCR products were analyzed as described in Example 8.

[1248] PacBio sequencing. PacBio long read sequencing was used to investigate the impact of guide and DNA PK inhibitor treatment on Cas9 gene editing near the DMPK CTG repeat. Long read sequencing was chosen over Illumina short read sequencing (<<300NT reads) to capture the full complexity of edits in our -1.2 kb amplicons. Gene specific primers CGCTAGGAAGCAGCCAATGA (SEQ ID NO: 53374) and TAGCTCCTCCCAGACCTTCG (SEQ ID NO: 53375), which amplify a 1219 NT amplicon centered on the CTG repeat of the DMPK gene, were appended with PacBio specific 16 NT indexes. The final format for the forward and reverse primers was /5Phos/GGGT(16NT_index) CGCTAGGAAGCAGCCAATGA (SEQ ID NO: 53376) and /5Phos/CAGT(16NT index) TAGCTCCTCCCAGACCTTCG (SEQ ID NO: 53377). The 5′ phosphorylation promotes ligation of the SMRTBell adaptor and the GGGT or CAGT bases added to the forward or reverse primers help to normalize ligation efficiency as well as to facilitate demultiplexing.

[1249] To generate the PacBio libraries, WT or DM1 cells were treated with guide and/or compound in 96 well plates. DNA was recovered using the DirectPCR Lysis Reagent (Viagen Bio, 301-C) according to the manufacturer's directions and frozen for future use. 2μl of this lysate was used in 25 μl PCR's with NEB's 2XQ5 PCR mix (New England Biolabs, M0491). Indexed primers were included at 250nM each. All primers and indexes used are shown below. A gradient was used to identify an optimal annealing temperature of 69° C. and a total of 30 cycles were used to generate sufficient amplicon for SMRTBell ligation while minimizing unnecessary amplification that could skew editing distributions. The cycling parameters used are below.

| | | |
|---|---|---|
| Initial Denaturation | 98° C. | 30S |
| 30 Cycles | 98° C. | 10S |
| | 69° C. | 10S |
| | 72° C. | 60S |
| | 72° C. | 2 mins |
| | 4° C. | hold |

[1250] PCR's were diluted 1:10 in Molecular Biology grade water and run on an Agilent 4200 TapeStation (Agilent, G2991AA) using high sensitivity D5000 tapes (Agilent, 5067-5592). Prominent peaks 1200 nucleotides (NT) were detected as well as several smaller bands in some samples, indicative of deletions. Samples were pooled and purified with 2 sequential 0.7 X ratio AmpureXP beads steps (Beckman Coulter, A63880). Serial elution was performed with 100 μl and 25 μl TE according to the manufacture's protocol. Samples were ligated to SMRTBell adaptor and sequenced on a PacBio Sequel II (Fornax Biosciences) using an 8M SMRTCell for 10 hr data collection. Sequence demultiplexing, adapter removal and processing of subreads into circular consensus sequences were performed by Fornax Biosciences. PacBio barcode primers- Indexes (IDT Technologies) are shown in Table 9.

TABLE 9

| Well | | | SEQ |
|---|---|---|---|
| Posi- | | | ID |
| tion | Printer | Sequence | NO |
| A1 | bc_1001_ | /5Phos/GGGTCACATATCAGAGT | 53378 |
| | FWD_ | GCGCGCTAGGAAGCAGCCAATGA | |
| | PacB.PCR | | |
| A2 | bc_1002_ | /5Phos/GGGTACACACAGACTGT | 53379 |
| | FWD_ | GAGCGCTAGGAAGCAGCCAATGA | |
| | PacB.PCR | | |
| A3 | bc_1003_ | /5Phos/GGGTACACATCTCGTGA | 53380 |
| | FWD_ | GAGCGCTAGGAAGCAGCCAATGA | |
| | PacB.PCR | | |
| A4 | bc_1004_ | /5Phos/GGGTCACGCACACACGC | 53381 |
| | FWD_ | CGCGGCTAGGAAGCAGCCAATGA | |
| | PacB.PCR | | |
| A5 | bc_1005_ | /5Phos/GGGTCACTCGACTCTCG | 53382 |
| | FWD_ | CGTCGCTAGGAAGCAGCCAATGA | |
| | PacB.PCR | | |
| A6 | bc_1006_ | /5Phos/GGGTCATATATATCAGC | 53383 |
| | FWD_ | TGTCGCTAGGAAGCAGCCAATGA | |
| | PacB.PCR | | |
| A7 | bc_1007_ | /5Phos/GGGTTCTGTATCTCTAT | 53384 |
| | FWD_ | GTGCGCTAGGAAGCAGCCAATGA | |
| | PacB.PCR | | |
| A8 | bc_1008_ | /5Phos/GGGTACAGTCGAGCGCT | 53385 |
| | FWD_ | GCGCGCTAGGAAGCAGCCAATGA | |
| | PacB.PCR | | |
| A9 | bc_l009_ | /5Phos/GGGTACACACGCGAGAC | 53386 |
| | FWD_ | AGACGCTAGGAAGCAGCCAATGA | |
| | PacB.PCR | | |
| A10 | bc_1010_ | /5Phos/GGGTACGCGCTATCTCA | 53387 |
| | FWD_ | GAGCGCTAGGAAGCAGCCAATGA | |
| | PacB.PCR | | |
| A11 | Bc_1011_ | /5Phos/GGGTCTATACGTATATC | 53388 |
| | FWD_ | TATCGCTAGGAAGCAGCCAATGA | |
| | PacB.PCR | | |
| A12 | bc_1012_ | /5Phos/GGGTACACTAGATCGCG | 53389 |
| | FWD_ | TGTCGCTAGGAAGCAGCCAATGA | |
| | PacB.PCR | | |
| C1 | bc_1025_ | /5Phos/CAGTGCGCGAGCGTGTC | 53390 |
| | REV_ | TGCGAGCTCCTCCCAGACCTTCG | |
| | PacB.PCR | | |
| C2 | bc_1026_ | /5Phos/CAGTTGTGCGTGTCTCT | 53391 |
| | REV_ | GTGTAGCTCCTCCCAGACCTTCG | |
| | PacB.PCR | | |
| C3 | bc_1027_ | /3Phos/CAGTTGTGAGAGAGTGT | 53392 |
| | REV_ | GAGTAGCTCCTCCCAGACCTTCG | |
| | PacB.PCR | | |
| C4 | bc_1028_ | /5Phos/CAGTGAGAGTCAGAGCA | 53393 |
| | REV_ | GAGTAGCTCCTCCCAGACCTTCG | |
| | PacB.PCR | | |
| C5 | bc_1029_ | /3Phos/CAGTTCTATAGACATAT | 53394 |
| | REV_ | ATATAGCTCCTCCCAGACCTTCG | |
| | PacB.PCR | | |
| C6 | bc_1030_ | /5Phos/CAGTGAGCGCGATAGAG | 53395 |
| | REV_ | AGATAGCTCCTCCCAGACCTTCG | |
| | PacB.PCR | | |
| C7 | bc_1031_ | /5Phos/CAGTCACACACTCAGAC | 53396 |
| | REV_ | ATCTAGCTCCTCCCAGACCTTCG | |
| | PacB.PCR | | |
| C8 | bc_1032_ | /5Phos/CAGTCACTATCTCTAGT | 53397 |
| | REV_ | CTCTAGCTCCTCCCAGACCTTCG | |
| | PacB.PCR | | |
| C9 | bc_1033_ | /5Phos/CAGTAGAGACTGCGACG | 53398 |
| | REV_ | AGATAGCTCCTCCCAGACCTTCG | |
| | PacB.PCR | | |
| C10 | bc_1034_ | /5Phos/CAGTATATCTATATACA | 53399 |
| | REV_ | CATTAGCTCCTCCCAGACCTTCG | |
| | PacB.PCR | | |
| C11 | bc_1035_ | /5Phos/CAGTCAGAGAGTGCGCG | 53400 |
| | REV_ | CGCTAGCTCCTCCCAGACCTTCG | |
| | PacB.PCR | | |
| C12 | bc_1036_ | /5Phos/CAGTGTGTGCGACGTGT | 53401 |
| | REV_ | CTCTAGCTCCTCCCAGACCTTCG | |
| | PacB.PCR | | |

[1251] PacBio data was processed using the PacBio SMRT Tools command line program. Circular consensus sequences were called and demultiplexed using the ccs and lima tools, respectively. Then, reads were aligned to the amplicon using pbmm2 (a wrapper for mimimap2). For alignment, the RNA sequencing presets in pbmm2 were used, on the assumption that these settings would allow detection of large deletions more accurately (because RNA sequencing alignment is already set up to detect introns).

[1252] For quality control, all reads were removed that did not map to the reference amplicon with a mapping score (MAPQ) of at least 30. Reads that were less than 400 or more than 1500 base pairs long were also removed. In addition, reads that were split across multiple alignments, reads with more than 20 soft-clipped bases at the beginning or end of the alignment, and reads which were not within at least 10 bp of spanning the entire CIGAR string were removed.

[1253] The CIGAR strings were parsed to call all variants observed in each read. Short indels in homopolymer regions were flagged as likely to be spurious, as PacBio sequencing is known to have a relatively high error rate in such areas. Pileups were generated with the bedtools genomecov tool.

[1254] Droplet digital PCR (ddPCR). ddPCR primer and probe sequences were designed with Primer3Plus (http://www.bioinformatics.nl/cgi-bin/primer3plus/primer3plus.cgi). The Target primer/probe set was used to detect CTG repeat excision, and the Reference primer/probe set was used as a control to amplify a region located in Exon 1 of DMPK gene. The primer and probe sequences are listed in Table 10 below.

TABLE 10

| ddPCR | | | | |
|---|---|---|---|---|
| | Oligo | | Sequence | SEQ ID |
| Set | Type | Name | (5′→3′) | NO |
| Target | Forward | UTRF1 | GGGGATCACA | 53402 |
| | Primer | | GACCATTTCT | |
| | Reverse | UTRR14 | TGGAGGATGG | 53403 |
| | Primer | | AACACGGAC | |
| | Probe | UTRP2- | TTCTTTCGGC | 53404 |
| | | FAM | CAGGCTGAGG | |
| | | | CCCT | |
| Reference | Forward | DMPKF8 | GGATATGTGA | 53405 |
| | Primer | | CCATGCTACC | |
| | Reverse | DMPKR7 | GGGTTGTATC | 53406 |
| | Primer | | CAGTACCTCT | |
| | Probe | DMPKP6- | TGTCCTGTTC | 53407 |
| | | HEX | CTTCCCCCAG | |
| | | | CCCCA | |

[1255] The 24 uL of ddPCR reaction consisted of 12 μL of Supermix for Probes (no dUTP) (Bio-Rad Laboratories), 1 μL of reference primers mix (21.6 μM), 1 μL of reference probe (6 μM), 1 IaL of target primers mix (21.6 μM), 1 μL of target probe (6 μM), and 8 μL of sample genomic DNA. Droplets were generated using probe oil with the QX200 Droplet Generator (Bio-Rad Laboratories). Droplets were transferred to a 96-well PCR plate, sealed and cycled in a C1000 deep well Thermocycler (Bio-Rad Laboratories) under the following cycling protocol: 95° C. for 10 min, followed by 40 cycles of 94° C. for 30 seconds (denaturation) and 58° C. for 1 min (annealing) followed by post-cycling steps of 98° C. for 10 min (enzyme inactivation) and an infinite 4° C. hold. The cycled plate was then transferred and read in the FAM and HEX channels using the Bio-Rad QX200 Droplet Reader run on a C1000 Thermal Cycler with a deep-well block (Bio-Rad Laboratories). All ddPCR reactions were run under the following thermal cycling conditions: 1) 95 ° C. for 10 min; 2) 94 ° C. for 30 sec; 3) 58 ° C. for 1 min; 4) steps 2 and 3 repeated 39 times; 5) 98 ° C. for 10 min. ddPCR analysis was performed by the Bio-Rad QuantaSoft Pro Software.

[1256] Fluorescence In Situ Hybridization (FISH).

[1257] MBNL1/(CUG)n foci imaging was used as an orthogonal method to evaluate CTG repeat excision with DMPK sgRNAs in DM1 myoblasts. Myogenin antibody were used to identify myonuclei in the myotubes differentiated from myoblasts.

[1258] Cells were fixed for 15 min at RT with 4% PFA and washed 5 times for 10 min each in lx PBS at RT. Cells were stored at 4° C. if not probed immediately.

[1259] For the FISH procedure, cells were permeabilized with 0.5% triton X-100, in 1× PBS at RT for 5 min.

[1260] Cells were prewashed with 30% formamide, 2x SSC for 10 min at RT. Cells were then probed for 15 minutes at 80° C., with a 1 ng/μL of Cy3-PNA(CAG)₅ probe (PNA Bio, F5001) in 30% formamide, 2× SSC, 2 μg/mL BSA, 66 μg/mL yeast tRNA, 2 mM vanadyl complex.

[1261] Cells were then washed for 30 min in 30% formamide, 2x SSC at 42° C., and then in 30% formamide, 2× SSC for 30 min at 37° C., then in 1× SSC for 10 min at RT, and last in 1× PBS for 10 min at RT. Cells were next probed overnight, at 4° C. with anti-MBNL1 antibody (1:1000 dilution, Santacruz, 3A4) anti-Myogenin antibody (1:500 dilution, Abcam-only for Myotube samples) in lx PBS +1% BSA. Cells were washed 2 times for 10 min each at RT with 1× PBS. Cells were incubated with goat anti-rabbit Alexa 647 and goat anti-rabbit Alexa 488 (only for Myotubes) in 1× PBS +1% BSA (1:500 dilution) for 1 hour at RT. Cells were washed 2 times, for 10 min each at RT with lx PBS. Cells were stained with Hoechst solution (0.1 mg/ml) for 5 min, and then washed with 1× PBS once for 5 min.

[1262] PBS was aspirated and fresh PBS (100 p.1) was added per well. Imaging plates were sealed with adhesive aluminum foils and imaged using MetaXpress (Molecular Devices).

[1263] RNA Extraction and uRT-PCR. Mis-splicing correction was used as a functional readout of CTG repeat excision by pairs of sgRNAs in DM1 myotubes. RNA was extracted with TaqMan® Gene Expression Cells-to-CTTM Kit (Thermal Fisher, AM1728) according to manufacturer's protocol and analyzed by qRT-PCR as described in Example 1.

[1264] Primer sequences are listed in the Table of Additional Sequences.

[1265] b. Screening of sgRNAs for Editing Efficiency of DMPK in DM1 Myoblasts

[1266] Forty two sgRNAs flanking the CTG repeat expansion of the DMPK gene were selected for editing the CTG repeat expansion. Among these 42 sgRNAs, 22 were located upstream of the CTG repeat expansion (between the stop codon and the CTG repeat expansion) and 20 were located downstream of the CTG repeat expansion (between the CTG repeat expansion and the end of the last exon of DMPK or are partially overlapping the CTG repeat expansion).

[1267] gRNA comprising the 18-mer spacer sequence of SEQ ID NOs: 3332, 3916, 3420, 3748, 3780, 3396, 4028, 3692, 3796, 3388, 3940, 3684, 3820, 3660, 3724, 3804, 3860, 3516, 3772, 3372, 3356, 4012, 2204, 1708, 2212, 2172, 1780, 2260, 2116, 2180, 1644, 1740, 1748, 2324, 1772, 1540, 2516, 2460, 2196, 2596, 2164, or 2620 were tested. More specifically, the tested guides were the exemplified 20-mer guides as shown in Table 11.

[1268] To assess editing efficiencies, individual sgRNAs were prepared as RNPs with spCas9 and delivered to DM1 myoblasts. Genomic DNA was isolated from the cells and amplified by PCR. Sanger sequencing and TIDE analysis were used to quantify the frequency of indels generated by each sgRNA. Results are shown for upstream and downstream guides at three concentrations spCas9 (10, 20, or 30 pmols) as % editing efficiency by TIDE analysis (FIG. 28A, FIG. 28B). The % editing efficiencies at 20 pmol spCas9 are shown in Table 11.

TABLE 11

| SEQ | | Upstream or | | | |
|---|---|---|---|---|---|
| ID | | Downstream | TIDE | Large | CTG |
| NO | Guide RNA | sgRNA | (%) | Indel | Excision |
| 3330 | DMPK-U57 | Upstream | 83.625 | Yes | No |
| 3914 | DMPK-U10 | Upstream | 82.7 | No | — |
| 3418 | DMPK-U54 | Upstream | 82.125 | No | — |
| 3746 | DMPK-U26 | Upstream | 78.025 | Yes | Yes |
| 3778 | DMPK-U27 | Upstream | 74.075 | Yes | Yes |
| 3394 | DMPK-U55 | Upstream | 73.825 | Yes | Yes |
| 4026 | DMPK-U06 | Upstream | 69.725 | Yes | No |
| 3690 | DMPK-U32 | Upstream | 60.475 | No | — |
| 3794 | DMPK-U22 | Upstream | 55.825 | No | — |
| 3386 | DMPK-U56 | Upstream | 50.275 | Yes | Yes |
| 3938 | DMPK-U14 | Upstream | 36.9 | Yes | Yes |
| 3682 | DMPK-U67 | Upstream | 35.625 | No | — |
| 3818 | DMPK-U20 | Upstream | 32.2 | Yes | Yes |
| 3658 | DMPK-U34 | Upstream | 31.725 | No | — |
| 3722 | DMPK-U30 | Upstream | 31.175 | Yes | Yes |
| 3802 | DMPK-U64 | Upstream | 23.7 | Yes | No |
| 3858 | DMPK-U16 | Upstream | 22.225 | Yes | Yes |
| 3514 | DMPK-U40 | Upstream | 21.8 | Yes | No |
| 3770 | DMPK-U29 | Upstream | 21.4 | Yes | No |
| 3370 | DMPK-U52 | Upstream | 16.55 | Yes | Yes |
| 3354 | DMPK-U58 | Upstream | 15.85 | No | — |
| 4010 | DMPK-U02 | Upstream | 6.775 | No | — |
| 2202 | DMPK-D87 | Downstream | 86.7 | Yes | — |
| 1706 | DMPK-D63 | Downstream | 78.525 | Yes | Yes |
| 2210 | DMPK-D42 | Downstream | 74.725 | Yes | Yes |
| 2170 | DMPK-D89 | Downstream | 73.95 | No | — |
| 1778 | DMPK-D59 | Downstream | 73.85 | Yes | — |
| 2258 | DMPK-D34 | Downstream | 56 | No | — |
| 2114 | DMPK-D51 | Downstream | 46.325 | Yes | Yes |
| 2178 | DMPK-D88 | Downstream | 42.075 | No | — |
| 1642 | DMPK-D68 | Downstream | 40.825 | No | — |
| 1738 | DMPK-D62 | Downstream | 37.05 | Yes | NA |
| 1746* | DMPK-D65 | Downstream | 33.275 | Yes | — |
| 2322 | DMPK-D35 | Downstream | 33.025 | Yes | No |
| 1770 | DMPK-D60 | Downstream | 21.025 | No | — |
| 1538 | DMPK-D74 | Downstream | 14.1 | Yes | Yes |
| 2514 | DMPK-D15 | Downstream | 12.925 | Yes | NA |
| 2458 | DMPK-D13 | Downstream | 10.1 | Yes | — |
| 2194 | DMPK-D43 | Downstream | 6.925 | Yes | NA |
| 2594 | DMPK-D01 | Downstream | 6.825 | Yes | Yes |
| 2162 | DMPK-D90 | Downstream | 6.475 | No | — |
| 2618 | DMPK-R06 | Downstream | 3 | No | — |

*May induce chromosomal rearrangement.

[1269] The editing efficiencies in DM1 myoblasts were compared to those obtained in HEK293T cells using a Spearman correlation (see Example 8 for HEK293 T cell data used in the analysis). FIG. 29 shows the Spearman correlation plot (myoblasts on the x axis and HEK293 T cells on the y axis) for the 42 upstream and downstream guide RNAs tested in both cell types. The comparison resulted in a Spearman correlation value of rho-0.528 and a p-value of 0.0002.

[1270] To visualize the editing efficiencies of individual sgRNAs targeting the 3′ UTR of DMPK, the PCR products from the genomic DNA of treated DM1 myoblasts were separated by DNA gel electrophoresis (FIG. 30). For some sgRNAs, high editing efficiency was not reflected in the TIDE score due to low-frequency large indels (>50 bp) induced in DM1 myoblasts. For example, sgRNA DMPK-U14 (SEQ ID NO: 3938) was found to induce a low-frequency large indels as evidenced by Sanger sequencing (FIG. 31A), and DNA gel electrophoresis (FIG. 31B). Other sgRNAs also induced large indels in DM1 myoblasts as indicated in Table 11 and as depicted in FIG. 32. Importantly, some individual sgRNAs induced large indels that resulted in excision of the CTG repeat region (see Table 11, FIG. 32).

[1271] Based on the TIDE scores in DM1 myoblasts (e.g., >30% editing efficiency, Table 11), 15 upstream sgRNAs (DMPK-U57, DMPK-U10, DMPK-U54, DMPK-U26, DMPK-U27, DMPK-U55, DMPK-U6, DMPK-U32, DMPK-U22, DMPK-U56, DMPK-U14, DMPK-U67, DMPK-U20, DMPK-U34, DMPK-U30) and 11 downstream sgRNAs (DMPK-D87, DMPK-D63, DMPK-D42, DMPK-D89, DMPK-D59, DMPK-D34, DMPK-D51, DMPK-D88, DMPK-D68, DMPK-D62, DMPK-D35) were identified for screening as pairs in DM1 myoblasts.

[1272] c. CTG repeat excision of DMPK with exemplary guide pairs in DM1 myoblasts

[1273] Pairs of sgRNAs were selected and tested for efficiency of CTG repeat excision in DM1 myoblasts, including 3 upstream sgRNAs (SEQ ID NOs: 3778, 3386, 3354) and 3 downstream sgRNAs (SEQ ID NOs: 2514, 2258, 2210). Each sgRNA was tested individually, and the following sgRNAs were tested as pairs (SEQ ID NOs: 3778 and 2258 (pair 1); 3778 and 2210 (pair 2); 3386 and 2258 (pair 3); 3386 and 2210 (pair 4); 3354 and 2514 (pair 5)).

[1274] To assess CTG repeat excision efficiencies, pairs of sgRNAs were prepared as RNPs with spCas9 (20 pmol) and delivered to DM1 myoblasts by nucleofection. CTG repeat excision was evaluated by PCR of the wildtype allele (schematic in FIG. 33A) in DM1 patient myoblasts treated with individual sgRNAs (SEQ ID NOs: 3778, 3386, 3354, 2514, 2258, 2210) or sgRNA pairs (SEQ ID NOs: 3778 and 2258; 3778 and 2210; 3386 and 2258; 3386 and 2210; 3354 and 2514) and were compared to healthy myoblasts. The wildtype allele and double-cut edited alleles were separated by DNA gel electrophoresis (FIG. 33B).

[1275] CTG repeat excision was further measured using a loss-of-signal ddPCR assay (schematic in FIG. 33A). The % correction of the disease allele was greater for the tested pairs of sgRNAs as compared to the individual sgRNAs (FIG. 33C).

[1276] CTG repeat excision was further evaluated by measuring the reduction of (CUG). RNA foci by FISH following treatment with sgRNA pairs or individual sgRNAs in DM1 myoblasts (FIG. 34) and DM1 myotubes (FIG. 35). In general, cells with mutant transcripts of CTG repeats are detained in nuclear RNA foci. Therefore, myoblasts treated with sgRNAs that excise the CTG repeats show a reduction in (CUG). RNA foci.

[1277] The accumulation of CUG repeat RNA can disrupt the function of proteins that normally regulate splicing, resulting in expression of mis-spliced mRNA products of other genes. The effect of CTG repeat excision in DMPK on splicing of other genes was evaluated in DM1 myotubes using the sgRNA pair (SEQ ID NO: 3386/2210). Results showed showing partial restoration of RNA splicing in BIN1 (FIG. 36A), DMD (FIG. 36B), KIF13A (FIG. 36C), and CACNA2D1 (FIG. 36D) mRNAs by qPCR.

[1278] d. CTG Repeat Excision of DMPK in DM1 Myoblasts with DNA-PK Inhibition

[1279] Individual guide RNAs from the screen for editing efficiency in DM1 myoblasts were further analyzed for CTG repeat excision with and without DNA-PK inhibition. Specifically, DM1 myoblasts were treated with RNPs containing spCas9 and guide RNAs (DMPK-U10 (SEQ ID NO: 3914), DMPK-U40 (SEQ ID NO: 3514), DMPK-D59 (SEQ ID NO: 1778), DMPK-D13 (SEQ ID NO: 2458), DMPK-U16 (SEQ ID NO: 3858), DMPK-U54 (SEQ ID NO: 3418), DMPK-D63 (SEQ ID NO: 1706), or DMPK-D34 (SEQ ID NO: 2258)) with 304 Compound 6 or DMSO. Samples were processed by PCR and TapeStation electrophoresis. More prominent bands in Compound 6 treated samples indicate enhanced excision rates compared to the DMSO control (FIG. 37, encircled).

[1280] Mis-splicing correction was also evaluated in DM1 myoblasts after dual gRNA CTG repeat excision with and without DNA-PK inhibition. DM1 myoblasts were treated with RNPs containing spCas9 and guide RNAs (SEQ ID NO: 3330 also referred to as DMPK-U57 and GDG_Cas9_Dmpk3; and SEQ ID NO: 2554 also referred to as DMPK-D03 and GDG_Cas9_Dmpk_6), with or without 3μM Compound 6. Mis-splicing correction was evaluated for genes GFTP1, BIN1, MBNL2, DMD, NFIX, GOLGA4, and KIF13A in cells treated with the pair of gRNAs (FIG. 38A), AAVS1 gRNA (FIG. 38B), or mock electroporated (FIG. 38C).

[1281] e. Dose Response of DNA-PK Inhibitor with Exemplary Guide Pairs

[1282] The dose response of DNA-PK inhibition on CTG repeat excision of DMPK was evaluated in DM1 patient fibroblasts (cells described above in Example 1). Cells were treated with RNPs containing spCas9 and guide pairs (SEQ ID NO: 3330 (GDG_DMPK3) and SEQ ID NO: 2506 (CRISPR-3); or SEQ ID NO: 3330 (GDG_DMPK3) and SEQ ID NO: 2546 (CRISPR-4)) and an increasing dose of Compound 6 (30nM, 300nM, 3 μM, and 10 μM), or DMSO. A stronger band corresponding to the excised product was observed for both pairs with increasing dose of DNA-PKi (FIG. 39A and FIG. 39B).

[1283] f. CTG repeat excision of DMPK with SaCas9 and with a DNA-PK inhibitor

[1284] Single guide excision was evaluated in DM1 patient fibroblasts (cells described above in Example 1) with and without DNA-PK inhibitor (Compound 6) using saCas9. Cells were treated with RNPs containing saCas9 and individual guides (FIG. 40B) (SEQ ID NO: 1153 (gRNA 1); SEQ ID NO: 1129 (gRNA2)).

[1285] g. Screening of CTG repeat excision with individual sgRNAs with DNA-PK inhibition

[1286] A screen of the 42 individual SpCas9 sgRNAs targeting the 3′ UTR of DMPK (Table 11) was performed in DM1 myoblasts with DMSO or 3 uM Compound 6. After electroporation cells were incubated with DMSO or 3 uM Compound 6 for 24 hours. FIGS. 41A-B show composites of electropherograms of PCR amplified 3′UTR region of DMPK from edited cells from two replicate experiments. Non-targeting control gRNAs included CDC42BPB gRNA (GAGCCGCACCUUGGCCGACA) (SEQ ID NO: 53408) and RELA gRNA (GAUCUCCACAUAGGGGCCAG) (SEQ ID NO: 53409). Exemplary PacBio sequencing read pileup results for single cut excision experiments show improved enhanced excision with DNA-PK inhibition (FIGS. 42A-F).

[1287] h. Screening of CTG repeat excision with guide pairs with DNA-PK inhibition

[1288] A screen of all pairwise combinations of the 42 SpCas9 sgRNAs targeting the 3′ UTR of DMPK gene (Table 11, 22 sgRNAs upstream of the CTG repeat and 20 downstream) was performed in DM1 patient fibroblasts (cells described above in Example 1). After electroporation with RNPs pre-loaded with each guide pair cells were incubated with DMSO or 3 uM Compound 6 for 24 hours. FIGS. 43A-E show composites of electropherograms of PCR amplified 3′UTR region of DMPK from edited cells. Samples (corresponding to the results shown in FIGS. 42A-E) were run on five plates as shown in Tables 12A-E below.

TABLE 12A

| Plate 1: | | 1 | 2 | 3 | 4 | 5 | 6 | 7 | 8 | 9 | 10 | 11 | 12 |
|---|---|---|---|---|---|---|---|---|---|---|---|---|---|
| A | Upstream | U02 | U06 | U10 | U14 | U16 | U20 | U22 | U26 | U27 | U29 | U30 | RelAg |
| | guide | | | | | | | | | | | | |
| | Downstream | R06 | R06 | R06 | R06 | R06 | R06 | R06 | R06 | R06 | R06 | R06 | R06 |
| | guide | | | | | | | | | | | | |
| B | Upstream | U02 | U06 | U10 | U14 | U16 | U20 | U22 | U26 | U27 | U29 | U30 | RelAg |
| | guide | | | | | | | | | | | | |
| | Downstream | D01 | D01 | D01 | D01 | D01 | D01 | D01 | D01 | D01 | D01 | D01 | D01 |
| | guide | | | | | | | | | | | | |
| C | Upstream | U02 | U06 | U10 | U14 | U16 | U20 | U22 | U26 | U27 | U29 | U30 | RelAg |
| | guide | | | | | | | | | | | | |
| | Downstream | D13 | D13 | D13 | D13 | D13 | D13 | D13 | D13 | D13 | D13 | D13 | D13 |
| | guide | | | | | | | | | | | | |
| D | Upstream | U02 | U06 | U10 | U14 | U16 | U20 | U22 | U26 | U27 | U29 | U30 | RelAg |
| | guide | | | | | | | | | | | | |
| | Downstream | D15 | D15 | D15 | D15 | D15 | D15 | D15 | D15 | D15 | D15 | D15 | D15 |
| | guide | | | | | | | | | | | | |
| E | Upstream | U02 | U06 | U10 | U14 | U16 | U20 | U22 | U26 | U27 | U29 | U30 | RelAg |
| | guide | | | | | | | | | | | | |
| | Downstream | D34 | D34 | D34 | D34 | D34 | D34 | D34 | D34 | D34 | D34 | D34 | D34 |
| | guide | | | | | | | | | | | | |
| F | Upstream | U02 | U06 | U10 | U14 | U16 | U20 | U22 | U26 | U27 | U29 | U30 | RelAg |
| | guide | | | | | | | | | | | | |
| | Downstream | D35 | D35 | D35 | D35 | D35 | D35 | D35 | D35 | D35 | D35 | D35 | D35 |
| | guide | | | | | | | | | | | | |
| G | Upstream | U02 | U06 | U10 | U14 | U16 | U20 | U22 | U26 | U27 | U29 | U30 | RelAg |
| | guide | | | | | | | | | | | | |
| | Downstream | D42 | D42 | D42 | D42 | D42 | D42 | D42 | D42 | D42 | D42 | D42 | D42 |
| | guide | | | | | | | | | | | | |
| H | Upstream | U02 | U06 | U10 | U14 | U16 | U20 | U22 | U26 | U27 | U29 | U30 | RelAg |
| | guide | | | | | | | | | | | | |
| | Downstream | D43 | D43 | D43 | D43 | D43 | D43 | D43 | D43 | D43 | D43 | D43 | D43 |
| | guide | | | | | | | | | | | | |

TABLE 12B

| Plate 2: | | 1 | 2 | 3 | 4 | 5 | 6 | 7 | 8 | 9 | 10 | 11 | 12 |
|---|---|---|---|---|---|---|---|---|---|---|---|---|---|
| A | Upstream | U02 | U06 | U10 | U14 | U16 | U20 | U22 | U26 | U27 | U29 | U30 | RelAg |
| | guide | | | | | | | | | | | | |
| | Downstream | D51 | D51 | D51 | D51 | D51 | D51 | D51 | D51 | D51 | D51 | D51 | D51 |
| | guide | | | | | | | | | | | | |
| B | Upstream | U02 | U06 | U10 | U14 | U16 | U20 | U22 | U26 | U27 | U29 | U30 | RelAg |
| | guide | | | | | | | | | | | | |
| | Downstream | D60 | D60 | D60 | D60 | D60 | D60 | D60 | D60 | D60 | D60 | D60 | D60 |
| | guide | | | | | | | | | | | | |
| C | Upstream | U02 | U06 | U10 | U14 | U16 | U20 | U22 | U26 | U27 | U29 | U30 | RelAg |
| | guide | | | | | | | | | | | | |
| | Downstream | D59 | D59 | D59 | D59 | D59 | D59 | D59 | D59 | D59 | D59 | D59 | D59 |
| | guide | | | | | | | | | | | | |
| D | Upstream | U02 | U06 | U10 | U14 | U16 | U20 | U22 | U26 | U27 | U29 | U30 | RelAg |
| | guide | | | | | | | | | | | | |
| | Downstream | D62 | D62 | D62 | D62 | D62 | D62 | D62 | D62 | D62 | D62 | D62 | D62 |
| | guide | | | | | | | | | | | | |
| E | Upstream | U02 | U06 | U10 | U14 | U16 | U20 | U22 | U26 | U27 | U29 | U30 | RelAg |
| | guide | | | | | | | | | | | | |
| | Downstream | D63 | D63 | D63 | D63 | D63 | D63 | D63 | D63 | D63 | D63 | D63 | D63 |
| | guide | | | | | | | | | | | | |
| F | Upstream | U02 | U06 | U10 | U14 | U16 | U20 | U22 | U26 | U27 | U29 | U30 | RelAg |
| | guide | | | | | | | | | | | | |
| | Downstream | D65 | D65 | D65 | D65 | D65 | D65 | D65 | D65 | D65 | D65 | D65 | D65 |
| | guide | | | | | | | | | | | | |
| G | Upstream | U02 | U06 | U10 | U14 | U16 | U20 | U22 | U26 | U27 | U29 | U30 | RelAg |
| | guide | | | | | | | | | | | | |
| | Downstream | D68 | D68 | D68 | D68 | D68 | D68 | D68 | D68 | D68 | D68 | D68 | D68 |
| | guide | | | | | | | | | | | | |
| H | Upstream | U02 | U06 | U10 | U14 | U16 | U20 | U22 | U26 | U27 | U29 | U30 | RelAg |
| | guide | | | | | | | | | | | | |
| | Downstream | D74 | D74 | D74 | D74 | D74 | D74 | D74 | D74 | D74 | D74 | D74 | D74 |
| | guide | | | | | | | | | | | | |

TABLE 12C

| Plate 3: | | 1 | 2 | 3 | 4 | 5 | 6 | 7 | 8 | 9 | 10 | 11 | 12 |
|---|---|---|---|---|---|---|---|---|---|---|---|---|---|
| A | Upstream | U32 | U34 | U40 | U52 | U54 | U55 | U56 | U57 | U58 | U64 | U67 | CD |
| | guide | | | | | | | | | | | | C42 |
| | | | | | | | | | | | | | BPB |
| | Downstream guide | R06 | R06 | R06 | R06 | R06 | R06 | R06 | R06 | R06 | R06 | R06 | R06 |
| B | Upstream | U32 | U34 | U40 | U52 | U54 | U55 | U56 | U57 | U58 | U64 | U67 | CD |
| | guide | | | | | | | | | | | | C42 |
| | | | | | | | | | | | | | BPB |
| | Downstream guide | D01 | D01 | D01 | D01 | D01 | D01 | D01 | D01 | D01 | D01 | D01 | D01 |
| C | Upstream | U32 | U34 | U40 | U52 | U54 | U55 | U56 | U57 | U58 | U64 | U67 | CD |
| | guide | | | | | | | | | | | | C42 |
| | | | | | | | | | | | | | BPB |
| | Downstream guide | D13 | D13 | D13 | D13 | D13 | D13 | D13 | D13 | D13 | D13 | D13 | D13 |
| D | Upstream | U32 | U34 | U40 | U52 | U54 | U55 | U56 | U57 | U58 | U64 | U67 | CD |
| | guide | | | | | | | | | | | | C42 |
| | | | | | | | | | | | | | BPB |
| | Downstream guide | D15 | D15 | D15 | D15 | D15 | D15 | D15 | D15 | D15 | D15 | D15 | D15 |
| E | Upstream | U32 | U34 | U40 | U52 | U54 | U55 | U56 | U57 | U58 | U64 | U67 | CD |
| | guide | | | | | | | | | | | | C42 |
| | | | | | | | | | | | | | BPB |
| | Downstream guide | D34 | D34 | D34 | D34 | D34 | D34 | D34 | D34 | D34 | D34 | D34 | D34 |
| F | Upstream | U32 | U34 | U40 | U52 | U54 | U55 | U56 | U57 | U58 | U64 | U67 | CD |
| | guide | | | | | | | | | | | | C42 |
| | | | | | | | | | | | | | BPB |
| | Downstream guide | D35 | D35 | D35 | D35 | D35 | D35 | D35 | D35 | D35 | D35 | D35 | D35 |
| G | Upstream | U32 | U34 | U40 | U52 | U54 | U55 | U56 | U57 | U58 | U64 | U67 | CD |
| | guide | | | | | | | | | | | | C42 |
| | | | | | | | | | | | | | BPB |
| | Downstream guide | D42 | D42 | D42 | D42 | D42 | D42 | D42 | D42 | D42 | D42 | D42 | D42 |
| H | Upstream | U32 | U34 | U40 | U52 | U54 | U55 | U56 | U57 | U58 | U64 | U67 | CD |
| | guide | | | | | | | | | | | | C42 |
| | | | | | | | | | | | | | BPB |
| | Downstream guide | D43 | D43 | D43 | D43 | D43 | D43 | D43 | D43 | D43 | D43 | D43 | D43 |

TABLE 12D

| Plate 4: | | 1 | 2 | 3 | 4 | 5 | 6 | 7 | 8 | 9 | 10 | 11 | 12 |
|---|---|---|---|---|---|---|---|---|---|---|---|---|---|
| A | Upstream guide | U32 | U34 | U40 | U52 | U54 | U55 | U56 | U57 | U58 | U64 | U67 | CD |
| | | | | | | | | | | | | | C42 |
| | | | | | | | | | | | | | BPB |
| | Downstream guide | D51 | D51 | D51 | D51 | D51 | D51 | D51 | D51 | D51 | D51 | D51 | D51 |
| B | Upstream guide | U32 | U34 | U40 | U52 | U54 | U55 | U56 | U57 | U58 | U64 | U67 | CD |
| | | | | | | | | | | | | | C42 |
| | | | | | | | | | | | | | BPB |
| | Downstream guide | D60 | D60 | D60 | D60 | D60 | D60 | D60 | D60 | D60 | D60 | D60 | D60 |
| C | Upstream guide | U32 | U34 | U40 | U52 | U54 | U55 | U56 | U57 | U58 | U64 | U67 | CD |
| | | | | | | | | | | | | | C42 |
| | | | | | | | | | | | | | BPB |
| | Downstream guide | D59 | D59 | D59 | D59 | D59 | D59 | D59 | D59 | D59 | D59 | D59 | D59 |
| D | Upstream guide | U32 | U34 | U40 | U52 | U54 | U55 | U56 | U57 | U58 | U64 | U67 | CD |
| | | | | | | | | | | | | | C42 |
| | | | | | | | | | | | | | BPB |
| | Downstream guide | D62 | D62 | D62 | D62 | D62 | D62 | D62 | D62 | D62 | D62 | D62 | D62 |
| E | Upstream guide | U32 | U34 | U40 | U52 | U54 | U55 | U56 | U57 | U58 | U64 | U67 | CD |
| | | | | | | | | | | | | | C42 |
| | | | | | | | | | | | | | BPB |
| | Downstream guide | D63 | D63 | D63 | D63 | D63 | D63 | D63 | D63 | D63 | D63 | D63 | D63 |
| F | Upstream guide | U32 | U34 | U40 | U52 | U54 | U55 | U56 | U57 | U58 | U64 | U67 | CD |
| | | | | | | | | | | | | | C42 |
| | | | | | | | | | | | | | BPB |
| | Downstream guide | D65 | D65 | D65 | D65 | D65 | D65 | D65 | D65 | D65 | D65 | D65 | D65 |
| G | Upstream guide | U32 | U34 | U40 | U52 | U54 | U55 | U56 | U57 | U58 | U64 | U67 | CD |
| | | | | | | | | | | | | | C42 |
| | | | | | | | | | | | | | BPB |
| | Downstream guide | D68 | D68 | D68 | D68 | D68 | D68 | D68 | D68 | D68 | D68 | D68 | D68 |
| H | Upstream guide | U32 | U34 | U40 | U52 | U54 | U55 | U56 | U57 | U58 | U64 | U67 | CD |
| | | | | | | | | | | | | | C42 |
| | | | | | | | | | | | | | BPB |
| | Downstream guide | D74 | D74 | D74 | D74 | D74 | D74 | D74 | D74 | D74 | D74 | D74 | D74 |

TABLE 12E

| Plate 5: | | 1 | 2 | 3 | 4 | 5 | 6 | 7 | 8 | 9 | 10 | 11 | 12 |
|---|---|---|---|---|---|---|---|---|---|---|---|---|---|
| A | Upstream guide | U02 | U06 | U10 | U14 | U16 | U20 | U22 | U26 | U27 | U29 | U30 | Rel |
| | | | | | | | | | | | | | Ag |
| | Downstream guide | D87 | D87 | D87 | D87 | D87 | D87 | D87 | D87 | D87 | D87 | D87 | D87 |
| B | Upstream guide | U02 | U06 | U10 | U14 | U16 | U20 | U22 | U26 | U27 | U29 | U30 | Rel |
| | | | | | | | | | | | | | Ag |
| | Downstream guide | D88 | D88 | D88 | D88 | D88 | D88 | D88 | D88 | D88 | D88 | D88 | D88 |
| C | Upstream guide | U02 | U06 | U10 | U14 | U16 | U20 | U22 | U26 | U27 | U29 | U30 | Rel |
| | | | | | | | | | | | | | Ag |
| | Downstream guide | D89 | D89 | D89 | D89 | D89 | D89 | D89 | D89 | D89 | D89 | D89 | D89 |
| D | Upstream guide | U02 | U06 | U10 | U14 | U16 | U20 | U22 | U26 | U27 | U29 | U30 | Rel |
| | | | | | | | | | | | | | Ag |
| | Downstream guide | D90 | D90 | D90 | D90 | D90 | D90 | D90 | D90 | D90 | D90 | D90 | D90 |
| E | Upstream guide | U32 | U34 | U40 | U52 | U54 | U55 | U56 | U57 | U58 | U64 | U67 | CD |
| | | | | | | | | | | | | | C42 |
| | | | | | | | | | | | | | BPB |
| | Downstream guide | D87 | D87 | D87 | D87 | D87 | D87 | D87 | D87 | D87 | D87 | D87 | D87 |
| F | Upstream guide | U32 | U34 | U40 | U52 | U54 | U55 | U56 | U57 | U58 | U64 | U67 | CD |
| | | | | | | | | | | | | | C42 |
| | | | | | | | | | | | | | BPB |
| | Downstream guide | D88 | D88 | D88 | D88 | D88 | D88 | D88 | D88 | D88 | D88 | D88 | D88 |
| G | Upstream guide | U32 | U34 | U40 | U52 | U54 | U55 | U56 | U57 | U58 | U64 | U67 | CD |
| | | | | | | | | | | | | | C42 |
| | | | | | | | | | | | | | BPB |
| | Downstream guide | D89 | D89 | D89 | D89 | D89 | D89 | D89 | D89 | D89 | D89 | D89 | D89 |
| H | Upstream guide | U32 | U34 | U40 | U52 | U54 | U55 | U56 | U57 | U58 | U64 | U67 | CD |
| | | | | | | | | | | | | | C42 |
| | | | | | | | | | | | | | BPB |
| | Downstream guide | D90 | D90 | D90 | D90 | D90 | D90 | D90 | D90 | D90 | D90 | D90 | D90 |

[1289] 10. Screen of Individual Frataxin sgRNAs

[1290] a. Materials and Methods

[1291] sgRNA Selection. A selected region containing the GAA repeat within intron 1 of the FXN gene was scanned for NGG SpCas9 protospacer adjacent motif (PAM) on either sense (+1) or antisense strand (−1), and guide sequences were generated based on the 20-nucleotide sgRNA spacer sequences adjacent to the PAMs. 218 sgRNAs were identified within the region upstream of the GAA repeat (chr9: 69 035 950-69 037 295), and 173 sgRNAs within the region downstream of the GAA repeat (chr9: 69 037 307-69 038 600) (Table 13). Computational off target prediction using an in-house algorithm was performed for each sgRNA in both upstream and downstream regions. Of the total 391 sgRNAs, a subset of 96 sgRNAs was selected to move forward into a screen evaluating editing efficacy in two patient cell lines of long repeat length and at two RNP (ribonucleoprotein) complex concentrations (see FIG. 44) for screen of Cas9/sgRNA RNP concentrations). The criteria for selection of sgRNAs included low off target score and genomic location. From this single-cut sgRNA screen, a total of 45 sgRNAs (25 sgRNAs upstream of the GAA repeat and 20 sgRNAs downstream of the GAA repeat) were selected to move forward into a sgRNA pair combination screen (Table 14).

[1292] The selection criteria included high editing efficacy across the conditions tested, genomic location and the presence of SNPs (single nucleotide polymorphisms).

[1293] Electroporation of RNP Complexes into FA Patient Cells. The Lonza Nucleofector 96-well shuttle system was used to deliver Cas9 (Aldevron) and chemically modified sgRNAs (Synthego) into two cell lines, derived from two patients with long GAA repeats: GM14518 (a lymphoblastoid cell line) and GM03665 (a fibroblast cell line) (Coriell Institute). RNP complexes were first assembled, comprising 36 pmol of Cas9 and 108 pmol sgRNA, in a volume of 12 uL of electroporation buffer. After incubation at room temperature for 30 minutes, this solution was mixed with cells in two dilutions, such that for each cell line two concentrations of RNPs were delivered: one with 15 pmol Cas9 +45 pmol sgRNA (“High”) and another with 7.5 pmol Cas9 +22.5 pmol sgRNA (“Low”). Following electroporation, cells were cultured for 72 hours at 37° C/5% CO₂, and then harvested for DNA extraction.

[1294] Sanger sequencing and ICE analysis. The relevant loci for each guide were amplified by PCR and the products were sent to GeneWiz for Sanger sequencing. Due to the length and complexity of the locus being analyzed, the sequencing primer was customized for each sgRNA. The primer sequences used for amplification and sequencing of the appropriate locus are shown in the Table of Additional Sequences (SEQ ID NOs: 36-54). Indel values were estimated using ICE (inference of CRISPR edits) analysis algorithm (Synthego). ICE analysis is a method that quantifies the identity and prevalence of indels using Sanger sequencing data (Hsiau, T. et al. (2018) bioRxiv haps://www.biorxiv.org/content/10.1101/251082v3).

[1295] b. Results of Single-Cut Screen of Frataxin sgRNAs

[1296] A set encompassing 96 sgRNAs flanking the GAA repeat of the FXN gene was selected for editing efficacy evaluation. Among these, 56 sgRNAs were located upstream of the GAA repeat and 40 sgRNAs were positioned downstream of the GAA repeat. To evaluate editing efficacy, RNP complexes containing a chemically modified sgRNA and Cas9 protein were delivered to patient cell lines by nucleofection. Two RNP concentrations were used to obtain a comprehensive overview of editing efficiencies and differentiate the leading sgRNAs with highest cutting efficacy. Additionally, the consistency of indel efficacy between different cell types/donors was assessed for each sgRNA. These cell types consisted of patient lymphoblasts and fibroblasts of long repeat length. FIG. 45 8shows the indel efficacy of the 56 sgRNAs located upstream of the GAA repeat expansion. Of these, 29 sgRNAs had an indel efficacy higher than 50%, which was consistent between the conditions tested. FIG. 46 shows the indel efficacy of the 40 sgRNAs located downstream of the GAA repeat, with 21 sgRNAs having an efficacy higher than 50% in all conditions. These results, in addition to genomic location and SNP evaluation, provided the criteria to select a set of 45 sgRNAs (25 sgRNAs upstream of the GAA repeat and 20 sgRNAs downstream of the GAA repeat) for evaluating in a sgRNA pair combination screen for repeat excision efficiency. Other readouts to be evaluated include rescue of FXN mRNA and protein levels. The sgRNA pair screen will evaluate all possible combinations of the selected 25 upstream sgRNAs paired with the 20 downstream sgRNAs, resulting in a total of 500 combinations.

TABLE 13
Guide RNAs selected within the selected region
of the first intron of FXN containing the
GAA repeat.

| SEQ | | | | Guide | PAM |
|---|---|---|---|---|---|
| ID | Guide | | | RNA | Se- |
| NO | RNA | Position | Strand | sequence | quence |
| 50106 | FXN-U1 | 69036048 | −1 | GCTAGTCCAGCGCGCGTACC | CGG |
| 51762 | FXN-U2 | 69036768 | −1 | CTTTCAAGCCGTGGCGTAAC | TGG |
| 50514 | FXN-U3 | 69036188 | −1 | TTGACCCGCAGTCGCACCGC | AGG |
| 51754 | FXN-U4 | 69036767 | −1 | TTTCAAGCCGTGGCGTAACT | GGG |
| 52290 | FXN-U5 | 69036968 | 1 | GCTGGTACGCCGCATGTATT | AGG |
| 50074 | FXN-U6 | 69036053 | 1 | GTCGCTCCGGGTACGCGCGC | TGG |
| 52298 | FXN-U7 | 69036969 | 1 | CTGGTACGCCGCATGTATTA | GGG |
| 51474 | FXN-U8 | 69036662 | 1 | TGACGCCCATTTTGCGGACC | TGG |
| 52306 | FXN-U9 | 69036970 | 1 | TGGTACGCCGCATGTATTAG | GGG |
| 50490 | FXN-U10 | 69036195 | 1 | TTGTCCTGCGGTGCGACTGC | GGG |
| 51730 | FXN-U11 | 69036780 | 1 | CAGTTACGCCACGGCTTGAA | AGG |
| 50682 | FXN-U12 | 69036248 | 1 | GTGGAGGGGACCGGTTCCGA | GGG |
| 51706 | FXN-U13 | 69036771 | 1 | TATCTGACCCAGTTACGCCA | CGG |
| 50258 | FXN-U14 | 69036095 | −1 | GTTGCAAGGCCGCTTCCGCC | GGG |
| 50266 | FXN-U15 | 69036096 | −1 | AGTTGCAAGGCCGCTTCCGC | CGG |
| 52890 | FXN-U16 | 69037229 | 1 | TCCGGAGTTCAAGACTAACC | TGG |
| 50482 | FXN-U17 | 69036194 | 1 | TTTGTCCTGCGGTGCGACTG | CGG |
| 52098 | FXN-U18 | 69036906 | 1 | TTCACGAGGAGGGAACCGTC | TGG |
| 50714 | FXN-U19 | 69036247 | −1 | AGCCGCACACCCCTCGGAAC | CGG |
| 50554 | FXN-U20 | 69036213 | 1 | GCGGGTCAAGGCACGGGCGA | AGG |
| 50506 | FXN-U21 | 69036201 | 1 | TGCGGTGCGACTGCGGGTCA | AGG |
| 51498 | FXN-U22 | 69036656 | −1 | TCACACCAGGTCCGCAAAAT | GGG |
| 52498 | FXN-U23 | 69037055 | −1 | GTGGGCCAAATAACACGTGT | GGG |
| 52874 | FXN-U24 | 69037211 | −1 | AGTCTTGAACTCCGGACCTC | AGG |
| 50978 | FXN-U25 | 69036469 | −1 | TGAAAGTTTCACCTCGTTCC | AGG |
| 50082 | FXN-U26 | 69036037 | −1 | GCGCGTACCCGGAGCGACCC | CGG |
| 51746 | FXN-U27 | 69036783 | 1 | TTACGCCACGGCTTGAAAGG | AGG |
| 52106 | FXN-U28 | 69036907 | 1 | TCACGAGGAGGGAACCGTCT | GGG |
| 51506 | FXN-U29 | 69036657 | −1 | CTCACACCAGGTCCGCAAAA | TGG |
| 50066 | FXN-U30 | 69036028 | −1 | CGGAGCGACCCCGGCGTGCG | CGG |
| 50690 | FXN-U31 | 69036249 | 1 | TGGAGGGGACCGGTTCCGAG | GGG |
| 50674 | FXN-U32 | 69036247 | 1 | GGTGGAGGGGACCGGTTCCG | AGG |
| 49882 | FXN-U33 | 69035971 | 1 | ATCCGCGCCGGGAACAGCCG | CGG |
| 50578 | FXN-U34 | 69036217 | 1 | GTCAAGGCACGGGCGAAGGC | AGG |
| 52082 | FXN-U35 | 69036895 | 1 | GTAGAGGGTGTTTCACGAGG | AGG |
| 52506 | FXN-U36 | 69037056 | −1 | TGTGGGCCAAATAACACGTG | TGG |
| 50346 | FXN-U37 | 69036142 | 1 | TCTCCCGGTTGCATTTACAC | TGG |
| 50538 | FXN-U38 | 69036207 | 1 | GCGACTGCGGGTCAAGGCAC | GGG |
| 50058 | FXN-U39 | 69036041 | 1 | GCGCACGCCGGGGTCGCTCC | GGG |
| 50050 | FXN-U40 | 69036040 | 1 | CGCGCACGCCGGGGTCGCTC | CGG |
| 52066 | FXN-U41 | 69036892 | 1 | GTGGTAGAGGGTGTTTCACG | AGG |
| 52386 | FXN-U42 | 69036998 | −1 | ACACAAATATGGCTTGGACG | TGG |
| 52090 | FXN-U43 | 69036896 | 1 | TAGAGGGTGTTTCACGAGGA | GGG |
| 50186 | FXN-U44 | 69036091 | 1 | TCCTTCTCAGGGCGGCCCGG | CGG |
| 52266 | FXN-U45 | 69036946 | −1 | CGGCGTACCAGCCACTCTGA | AGG |
| 50234 | FXN-U46 | 69036081 | −1 | TCCGCCGGGCCGCCCTGAGA | AGG |
| 52474 | FXN-U47 | 69037061 | 1 | AACTTCCCACACGTGTTATT | TGG |
| 49922 | FXN-U48 | 69035986 | 1 | AGCCGCGGGCCGCACGCCGC | GGG |
| 49994 | FXN-U49 | 69035998 | −1 | CTGCGCAGGCGTGCGGCGTG | CGG |
| 50586 | FXN-U50 | 69036218 | 1 | TCAAGGCACGGGCGAAGGCA | GGG |
| 52258 | FXN-U51 | 69036945 | −1 | GGCGTACCAGCCACTCTGAA | GGG |
| 52434 | FXN-U52 | 69037034 | 1 | CTCTCCGGAGTTTGTACTTT | AGG |
| 52674 | FXN-U53 | 69037151 | 1 | GATTTCCTGGCAGGACGCGG | TGG |
| 50033 | FXN-U54 | 69036029 | 1 | CAGGGAGGCGCCGCGCACGC | CGG |
| 51298 | FXN-U55 | 69036587 | −1 | GAGGTTAGGGGAATCCCCCA | AGG |
| 49962 | FXN-U56 | 69036010 | 1 | CGCACGCCGCACGCCTGCGC | AGG |
| 51330 | FXN-U57 | 69036599 | −1 | CCACGTCTCAGAGAGGTTAG | GGG |
| 50706 | FXN-U58 | 69036256 | 1 | GACCGGTTCCGAGGGGTGTG | CGG |
| 51778 | FXN-U59 | 69036777 | −1 | GGTTTCCTCCTTTCAAGCCG | TGG |
| 49986 | FXN-U60 | 69036014 | 1 | CGCCGCACGCCTGCGCAGGG | AGG |
| 51322 | FXN-U61 | 69036610 | 1 | CCCCTAACCTCTCTGAGACG | TGG |
| 50530 | FXN-U62 | 69036206 | 1 | TGCGACTGCGGGTCAAGGCA | CGG |
| 52826 | FXN-U63 | 69037206 | 1 | CTAGGAAGGTGGATCACCTG | AGG |
| 51234 | FXN-U64 | 69036565 | −1 | GTCACACAGCTCTGCGGAGT | GGG |
| 49906 | FXN-U65 | 69035967 | −1 | GTGCGGCCCGCGGCTGTTCC | CGG |
| 51338 | FXN-U66 | 69036600 | −1 | GCCACGTCTCAGAGAGGTTA | GGG |
| 49914 | FXN-U67 | 69035985 | 1 | CAGCCGCGGGCCGCACGCCG | CGG |
| 51218 | FXN-U68 | 69036564 | −1 | TCACACAGCTCTGCGGAGTG | GGG |
| 51114 | FXN-U69 | 69036522 | −1 | CGGGTCAGTTTCCAAAAGCC | AGG |
| 49970 | FXN-U70 | 69036011 | 1 | GCACGCCGCACGCCTGCGCA | GGG |
| 50226 | FXN-U71 | 69036097 | 1 | TCAGGGCGGCCCGGCGGAAG | CGG |
| 52898 | FXN-U72 | 69037219 | −1 | GCCAGGTTAGTCTTGAACTC | CGG |
| 50946 | FXN-U73 | 69036469 | 1 | CGAAATGCTTTCCTGGAACG | AGG |
| 50874 | FXN-U74 | 69036405 | 1 | GTGTGTGTGTTTGCGCGCAC | GGG |
| 51490 | FXN-U75 | 69036669 | 1 | CATTTTGCGGACCTGGTGTG | AGG |
| 52458 | FXN-U76 | 69037027 | −1 | CAAGCCTAAAGTACAAACTC | CGG |
| 50034 | FXN-U77 | 69036030 | 1 | AGGGAGGCGCCGCGCACGCC | GGG |
| 50010 | FXN-U78 | 69036012 | −1 | TGCGCGGCGCCTCCCTGCGC | AGG |
| 50042 | FXN-U79 | 69036031 | 1 | GGGAGGCGCCGCGCACGCCG | GGG |
| 49946 | FXN-U80 | 69035991 | −1 | GGCGTGCGGCGTGCGGCCCG | CGG |
| 52226 | FXN-U81 | 69036925 | −1 | GGGATCCCCTTCCGCCTTCC | TGG |
| 52666 | FXN-U82 | 69037148 | 1 | ATGGATTTCCTGGCAGGACG | CGG |
| 51466 | FXN-U83 | 69036656 | 1 | TAAAGGTGACGCCCATTTTG | CGG |
| 49890 | FXN-U84 | 69035972 | 1 | TCCGCGCCGGGAACAGCCGC | GGG |
| 52394 | FXN-U85 | 69037019 | 1 | GCCATATTTGTGTTGCTCTC | CGG |
| 50394 | FXN-U86 | 69036159 | 1 | CACTGGCTTCTGCTTTCCGA | AGG |
| 52682 | FXN-U87 | 69037145 | −1 | ATGAGCCACCGCGTCCTGCC | AGG |
| 49898 | FXN-U88 | 69035962 | −1 | GCCCGCGGCTGTTCCCGGCG | CGG |
| 52354 | FXN-U89 | 69036966 | −1 | TTCATCTCCCCTAATACATG | CGG |
| 50002 | FXN-U90 | 69036005 | −1 | CGCCTCCCTGCGCAGGCGTG | CGG |
| 51346 | FXN-U91 | 69036601 | −1 | AGCCACGTCTCAGAGAGGTT | AGG |
| 50866 | FXN-U92 | 69036404 | 1 | TGTGTGTGTGTTTGCGCGCA | CGG |
| 49938 | FXN-U93 | 69035984 | −1 | GGCGTGCGGCCCGCGGCGTG | CGG |
| 51250 | FXN-U94 | 69036566 | −1 | GGTCACACAGCTCTGCGGAG | TGG |
| 51154 | FXN-U95 | 69036541 | −1 | CAGAATCTGGAATAAAGGTC | GGG |
| 50370 | FXN-U96 | 69036134 | −1 | AAGCCAGTGTAAATGCAACC | GGG |
| 50890 | FXN-U97 | 69036431 | 1 | GCGCACACCTAATATTTTCA | AGG |
| 51914 | FXN-U98 | 69036831 | 1 | GAGGAAGATTCCTCAAGGGG | AGG |
| 50722 | FXN-U99 | 69036253 | −1 | GGAGACAGCCGCACACCCCT | CGG |
| 51362 | FXN-U100 | 69036606 | −1 | AACAAAGCCACGTCTCAGAG | AGG |
| 50378 | FXN-U101 | 69036135 | −1 | GAAGCCAGTGTAAATGCAAC | CGG |
| 51050 | FXN-U102 | 69036507 | 1 | TGCAGAATAGCTAGAGCAGC | AGG |
| 51058 | FXN-U103 | 69036508 | 1 | GCAGAATAGCTAGAGCAGCA | GGG |
| 50178 | FXN-U104 | 69036074 | −1 | GGCCGCCCTGAGAAGGAGCG | GGG |
| 50170 | FXN-U105 | 69036088 | 1 | CGCTCCTTCTCAGGGCGGCC | CGG |
| 52418 | FXN-U106 | 69037009 | −1 | TCCGGAGAGCAACACAAATA | TGG |
| 52194 | FXN-U107 | 69036930 | 1 | CAAAGGCCAGGAAGGCGGAA | GGG |
| 51202 | FXN-U108 | 69036554 | −1 | CTGCGGAGTGGGGCAGAATC | TGG |
| 51954 | FXN-U109 | 69036849 | 1 | GGAGGACATGGTATTTAATG | AGG |
| 52250 | FXN-U110 | 69036950 | 1 | GGGGATCCCTTCAGAGTGGC | TGG |
| 50410 | FXN-U111 | 69036165 | 1 | CTTCTGCTTTCCGAAGGAAA | AGG |
| 51930 | FXN-U112 | 69036830 | −1 | AATACCATGTCCTCCCCTTG | AGG |
| 51682 | FXN-U113 | 69036739 | −1 | TATTTCTTTGTACCCCCCAA | AGG |
| 52594 | FXN-U114 | 69037116 | 1 | GTTGCCAGTGCTTAAAAGTT | AGG |
| 52122 | FXN-U115 | 69036913 | 1 | GGAGGGAACCGTCTGGGCAA | AGG |
| 51842 | FXN-U116 | 69036798 | −1 | CATCCCCACAGCCATTCTTT | GGG |
| 51890 | FXN-U117 | 69036827 | 1 | GGATGAGGAAGATTCCTCAA | GGG |
| 49930 | FXN-U118 | 69035977 | −1 | GGCCCGCGGCGTGCGGCCCG | CGG |
| 52610 | FXN-U119 | 69037109 | −1 | AAGTCCTAACTTTTAAGCAC | TGG |
| 52834 | FXN-U120 | 69037194 | −1 | CTCAGGTGATCCACCTTCCT | AGG |
| 52242 | FXN-U121 | 69036946 | 1 | GGAAGGGGATCCCTTCAGAG | TGG |
| 51162 | FXN-U122 | 69036542 | −1 | GCAGAATCTGGAATAAAGGT | CGG |
| 51530 | FXN-U123 | 69036669 | −1 | TCCCATTTAATCCTCACACC | AGG |
| 49162 | FXN-U124 | 69036805 | 1 | GAAACCCAAAGAATGGCTGT | GGG |
| 50322 | FXN-U125 | 69036120 | −1 | GCAACCGGGAGAACCAGAGA | AGG |
| 51858 | FXN-U126 | 69036799 | −1 | TCATCCCCACAGCCATTCTT | TGG |
| 50154 | FXN-U127 | 69036083 | 1 | CACCCCGCTCCTTCTCAGGG | CGG |
| 52402 | FXN-U128 | 69037004 | −1 | AGAGCAACACAAATATGGCT | TGG |
| 51962 | FXN-U129 | 69036850 | 1 | GAGGACATGGTATTTAATGA | GGG |
| 50898 | FXN-U130 | 69036435 | 1 | ACACCTAATATTTTCAAGGC | TGG |
| 51898 | FXN-U131 | 69036828 | 1 | GATGAGGAAGATTCCTCAAG | GGG |
| 51818 | FXN-U132 | 69036806 | 1 | AAACCCAAAGAATGGCTGTG | GGG |
| 51802 | FXN-U133 | 69036804 | 1 | GGAAACCCAAAGAATGGCTG | TGG |
| 50202 | FXN-U134 | 69036076 | −1 | CGGGCCGCCCTGAGAAGGAG | CGG |
| 52786 | FXN-U135 | 69037192 | 1 | GCACTTTGGGAGGCCTAGGA | AGG |
| 51658 | FXN-U136 | 69036731 | −1 | TGTACCCCCCAAAGGAAGAA | AGG |
| 50474 | FXN-U137 | 69036183 | 1 | AAAGGGGACATTTTGTCCTG | CGG |
| 51258 | FXN-U138 | 69036583 | 1 | CGCAGAGCTGTGTGACCTTG | GGG |
| 52026 | FXN-U139 | 69036879 | 1 | AGATGCCAAGGAAGTGGTAG | AGG |
| 50930 | FXN-U140 | 69036462 | 1 | TTTTGAACGAAATGCTTTCC | TGG |
| 51402 | FXN-U141 | 69036627 | 1 | ACGTGGCTTTGTTTTCTGTA | GGG |
| 52210 | FXN-U142 | 69036931 | 1 | AAAGGCCAGGAAGGCGGAAG | GGG |
| 51986 | FXN-U143 | 69036867 | 1 | TGAGGGTCTTGAAGATGCCA | AGG |
| 50274 | FXN-U144 | 69036118 | 1 | GGCCTTGCAACTCCCTTCTC | TGG |
| 51170 | FXN-U145 | 69036546 | −1 | TGGGGCAGAATCTGGAATAA | AGG |
| 51106 | FXN-U146 | 69036521 | −1 | GGGTCAGTTTCCAAAAGCCA | GGG |
| 50314 | FXN-U147 | 69036119 | −1 | CAACCGGGAGAACCAGAGAA | GGG |
| 50138 | FXN-U148 | 69036080 | 1 | GCTCACCCCGCTCCTTCTCA | GGG |
| 52706 | FXN-U149 | 69037178 | 1 | TGCCCATAATCTCAGCACTT | TGG |
| 50746 | FXN-U150 | 69036274 | −1 | TCGCAGAGAAGTGACAAGCA | TGG |
| 51922 | FXN-U151 | 69036837 | 1 | GATTCCTCAAGGGGAGGACA | TGG |
| 52554 | FXN-U152 | 69037094 | 1 | GTTTGAAGAAACTTTGGGAT | TGG |
| 52050 | FXN-U153 | 69036873 | −1 | AACACCCTCTACCACTTCCT | TGG |
| 52634 | FXN-U154 | 69037138 | 1 | GACTTAGAAAATGGATTTCC | TGG |
| 51066 | FXN-U155 | 69036509 | 1 | CAGAATAGCTAGAGCAGCAG | GGG |
| 50130 | FXN-U156 | 69036079 | 1 | AGCTCACCCCGCTCCTTCTC | AGG |
| 52962 | FXN-U157 | 69037256 | −1 | TTGTATTTTTTAGTAGATAC | TGG |
| 52186 | FXN-U158 | 69036929 | 1 | GCAAAGGCCAGGAAGGCGGA | AGG |
| 52954 | FXN-U159 | 69037255 | −1 | TGTATTTTTTAGTAGATACT | GGG |
| 51394 | FXN-U160 | 69036626 | 1 | GACGTGGCTTTGTTTTCTGT | AGG |
| 51514 | FXN-U161 | 69036678 | 1 | GACCTGGTGTGAGGATTAAA | TGG |
| 52042 | FXN-U162 | 69036880 | 1 | GATGCCAAGGAAGTGGTAGA | GGG |
| 50418 | FXN-U163 | 69036166 | 1 | TTCTGCTTTCCGAAGGAAAA | GGG |
| 51522 | FXN-U164 | 69036679 | 1 | ACCTGGTGTGAGGATTAAAT | GGG |
| 50282 | FXN-U165 | 69036109 | −1 | AACCAGAGAAGGGAGTTGCA | AGG |
| 51450 | FXN-U166 | 69036639 | 1 | TTTCTGTAGGGAGAAGATAA | AGG |
| 51650 | FXN-U167 | 69036730 | −1 | GTACCCCCCAAAGGAAGAAA | GGG |
| 52546 | FXN-U168 | 69037074 | −1 | AAGTTTCTTCAAACACAATG | TGG |
| 52650 | FXN-U169 | 69037142 | 1 | TAGAAAATGGATTTCCTGGC | AGG |
| 50298 | FXN-U170 | 69036127 | 1 | ACTCCCTTCTCTGGTTCTCC | CGG |
| 51266 | FXN-U171 | 69036584 | 1 | GCAGAGCTGTGTGACCTTGG | GGG |
| 52170 | FXN-U172 | 69036910 | −1 | CTTCCTGGCCTTTGCCCAGA | CGG |
| 52538 | FXN-U173 | 69037073 | −1 | AGTTTCTTCAAACACAATGT | GGG |
| 52138 | FXN-U174 | 69036918 | 1 | GAACCGTCTGGGCAAAGGCC | AGG |
| 50434 | FXN-U175 | 69036167 | 1 | TCTGCTTTCCGAAGGAAAAG | GGG |
| 52002 | FXN-U176 | 69036873 | 1 | TCTTGAAGATGCCAAGGAAG | TGG |
| 52802 | FXN-U177 | 69037195 | 1 | CTTTGGGAGGCCTAGGAAGG | TGG |
| 50914 | FXN-U178 | 69036075 | −1 | GGGCCGCCCTGAGAAGGAGC | GGG |
| 51642 | FXN-U179 | 69036729 | −1 | TACCCCCCAAAGGAAGAAAG | GGG |
| 52522 | FXN-U180 | 69037088 | 1 | CATTGTGTTTGAAGAAACTT | TGG |
| 50802 | FXN-U181 | 69036314 | 1 | GTTTCAGTAATATTAATAGA | TGG |
| 50466 | FXN-U182 | 69036164 | −1 | CAAAATGTCCCCTTTTCCTT | CGG |
| 52154 | FXN-U183 | 69036922 | 1 | CGTCTGGGCAAAGGCCAGGA | AGG |
| 50906 | FXN-U184 | 69036427 | −1 | AATCCAGCCTTGAAAATATT | AGG |
| 51090 | FXN-U185 | 69036522 | 1 | GCAGCAGGGGCCCTGGCTTT | TGG |
| 52618 | FXN-U186 | 69037129 | 1 | AAAAGTTAGGACTTAGAAAA | TGG |
| 52530 | FXN-U187 | 69037089 | 1 | ATTGTGTTTGAAGAAACTTT | GGG |
| 51834 | FXN-U188 | 69036812 | 1 | AAAGAATGGCTGTGGGGATG | AGG |
| 52370 | FXN-U189 | 69036986 | 1 | TTAGGGGAGATGAAAGAGGC | AGG |
| 51594 | FXN-U190 | 69036734 | 1 | TTAGTTCCCCTTTCTTCCTT | TGG |
| 52714 | FXN-U191 | 69037179 | 1 | GCCCATAATCTCAGCACTTT | GGG |
| 51874 | FXN-U192 | 69036826 | 1 | GGGATGAGGAAGATTCCTCA | AGG |
| 51618 | FXN-U193 | 69036737 | 1 | GTTCCCCTTTCTTCCTTTGG | GGG |
| 51602 | FXN-U194 | 69036735 | 1 | TAGTTCCCCTTTCTTCCTTT | GGG |
| 51610 | FXN-U195 | 69036736 | 1 | AGTTCCCCTTTCTTCCTTTG | GGG |
| 52906 | FXN-U196 | 69037238 | 1 | CAAGACTAACCTGGCCAACA | TGG |
| 52946 | FXN-U197 | 69037241 | −1 | GATACTGGGTTTCACCATGT | TGG |
| 51626 | FXN-U198 | 69036738 | 1 | TTCCCCTTTCTTCCTTTGGG | GGG |
| 51082 | FXN-U199 | 69036515 | 1 | AGCTAGAGCAGCAGGGGCCC | TGG |
| 52162 | FXN-U200 | 69036925 | 1 | CTGGGCAAAGGCCAGGAAGG | CGG |
| 50602 | FXN-U201 | 69036222 | 1 | GGCACGGGCGAAGGCAGGGC | AGG |
| 50610 | FXN-U202 | 69036226 | 1 | CGGGCGAAGGCAGGGCAGGC | TGG |
| 51242 | FXN-U203 | 69036582 | 1 | CCGCAGAGCTGTGTGACCTT | GGG |
| 51786 | FXN-U204 | 69036798 | 1 | AAAGGAGGAAACCCAAAGAA | TGG |
| 52346 | FXN-U205 | 69036982 | 1 | TGTATTAGGGGAGATGAAAG | AGG |
| 52842 | FXN-U206 | 69037211 | 1 | AAGGTGGATCACCTGAGGTC | CGG |
| 52770 | FXN-U207 | 69037188 | 1 | CTCAGCACTTTGGGAGGCCT | AGG |
| 52746 | FXN-U208 | 69037169 | −1 | TCCCAAAGTGCTGAGATTAT | GGG |
| 50658 | FXN-U209 | 69036239 | 1 | GGCAGGCTGGTGGAGGGGAC | CGG |
| 51226 | FXN-U210 | 69036581 | 1 | TCCGCAGAGCTGTGTGACCT | TGG |
| 52738 | FXN-U211 | 69037182 | 1 | CATAATCTCAGCACTTTGGG | AGG |
| 50634 | FXN-U212 | 69036232 | 1 | AAGGCAGGGCAGGCTGGTGG | AGG |
| 50650 | FXN-U213 | 69036234 | 1 | GGCAGGGCAGGCTGGTGGAG | GGG |
| 51282 | FXN-U214 | 69036571 | −1 | CCCAAGGTCACACAGCTCTG | CGG |
| 50618 | FXN-U215 | 69036229 | 1 | GCGAAGGCAGGGCAGGCTGG | TGG |
| 50642 | FXN-U216 | 69036233 | 1 | AGGCAGGGCAGGCTGGTGGA | GGG |
| 52930 | FXN-U217 | 69037236 | −1 | TGGGTTTCACCATGTTGGCC | AGG |
| 52754 | FXN-U218 | 69037170 | −1 | CTCCCAAAGTGCTGAGATTA | TGG |
| 26138 | FXN-D1 | 69037325 | 1 | AAAGAAAAGTTAGCCGGGCG | TGG |
| 26146 | FXN-D2 | 69037327 | −1 | CAGGCGCGCGACACCACGCC | CGG |
| 26186 | FXN-D3 | 69037346 | −1 | TCTGGAGTAGCTGGGATTAC | AGG |
| 26226 | FXN-D4 | 69037354 | −1 | CCGCAGCCTCTGGAGTAGCT | GGG |
| 26242 | FXN-D5 | 69037355 | −1 | GCCGCAGCCTCTGGAGTAGC | TGG |
| 26178 | FXN-D6 | 69037359 | 1 | TGTAATCCCAGCTACTCCAG | AGG |
| 26266 | FXN-D7 | 69037364 | −1 | GATTCTCCTGCCGCAGCCTC | TGG |
| 26202 | FXN-D8 | 69037365 | 1 | CCCAGCTACTCCAGAGGCTG | CGG |
| 26218 | FXN-D9 | 69037369 | 1 | GCTACTCCAGAGGCTGCGGC | AGG |
| 26282 | FXN-D10 | 69037387 | 1 | GCAGGAGAATCGCTTGAGCC | CGG |
| 26298 | FXN-D11 | 69037388 | 1 | CAGGAGAATCGCTTGAGCCC | GGG |
| 26314 | FXN-D12 | 69037391 | 1 | GAGAATCGCTTGAGCCCGGG | AGG |
| 26362 | FXN-D13 | 69037394 | −1 | TAATGCAACCTCTGCCTCCC | GGG |
| 26370 | FXN-D14 | 69037395 | −1 | TTAATGCAACCTCTGCCTCC | CGG |
| 26338 | FXN-D15 | 69037397 | 1 | CGCTTGAGCCCGGGAGGCAG | AGG |
| 26394 | FXN-D16 | 69037419 | −1 | CGGAGTGCATTGGGCGATCT | TGG |
| 26426 | FXN-D17 | 69037428 | −1 | CGCCCAGGCCGGAGTGCATT | GGG |
| 26442 | FXN-D18 | 69037429 | −1 | TCGCCCAGGCCGGAGTGCAT | TGG |
| 26386 | FXN-D19 | 69037431 | 1 | CAAGATCGCCCAATGCACTC | CGG |
| 26402 | FXN-D20 | 69037436 | 1 | TCGCCCAATGCACTCCGGCC | TGG |
| 26410 | FXN-D21 | 69037437 | 1 | CGCCCAATGCACTCCGGCCT | GGG |
| 26466 | FXN-D22 | 69037439 | −1 | TCTTGCTCTGTCGCCCAGGC | CGG |
| 26474 | FXN-D23 | 69037443 | −1 | GGAGTCTTGCTCTGTCGCCC | AGG |
| 26498 | FXN-D24 | 69037464 | −1 | ATTATTATTATTTTTTGAGA | CGG |
| 26562 | FXN-D25 | 69037515 | −1 | CCTATTTTTCCAGAGATGCT | GGG |
| 26570 | FXN-D26 | 69037516 | −1 | GCCTATTTTTCCAGAGATGC | TGG |
| 26530 | FXN-D27 | 69037517 | 1 | AATGGATTTCCCAGCATCTC | TGG |
| 26546 | FXN-D28 | 69037526 | 1 | CCCAGCATCTCTGGAAAAAT | AGG |
| 26578 | FXN-D29 | 69037535 | 1 | TCTGGAAAAATAGGCAAGTG | TGG |
| 26602 | FXN-D30 | 69037544 | 1 | ATAGGCAAGTGTGGCCATGA | TGG |
| 26634 | FXN-D31 | 69037547 | −1 | AGGAGATCTAAGGACCATCA | TGG |
| 26658 | FXN-D32 | 69037557 | −1 | GCTTTCCTAGAGGAGATCTA | AGG |
| 26626 | FXN-D33 | 69037563 | 1 | ATGGTCCTTAGATCTCCTCT | AGG |
| 26682 | FXN-D34 | 69037567 | −1 | ATAAATGTCTGCTTTCCTAG | AGG |
| 26698 | FXN-D35 | 69037585 | 1 | GAAAGCAGACATTTATTACT | TGG |
| 26746 | FXN-D36 | 69037618 | 1 | CTATCTGAGCTGCCACGTAT | TGG |
| 26754 | FXN-D37 | 69037619 | 1 | TATCTGAGCTGCCACGTATT | GGG |
| 26786 | FXN-D38 | 69037619 | −1 | AGGGGTGGAAGCCCAATACG | TGG |
| 26834 | FXN-D39 | 69037634 | −1 | GCTGTCCACACAGGCAGGGG | TGG |
| 26842 | FXN-D40 | 69037637 | −1 | CATGCTGTCCACACAGGCAG | GGG |
| 26850 | FXN-D41 | 69037638 | −1 | CCATGCTGTCCACACAGGCA | GGG |
| 26858 | FXN-D42 | 69037639 | −1 | CCCATGCTGTCCACACAGGC | AGG |
| 26794 | FXN-D43 | 69037640 | 1 | GGCTTCCACCCCTGCCTGTG | TGG |
| 26882 | FXN-D44 | 69037643 | −1 | ACAACCCATGCTGTCCACAC | AGG |
| 26818 | FXN-D45 | 69037649 | 1 | CCCTGCCTGTGTGGACAGCA | TGG |
| 26826 | FXN-D46 | 69037650 | 1 | CCTGCCTGTGTGGACAGCAT | GGG |
| 26978 | FXN-D47 | 69037708 | −1 | CTCCAGCCTGGGCAACAAGA | GGG |
| 26986 | FXN-D48 | 69037709 | −1 | ACTCCAGCCTGGGCAACAAG | AGG |
| 26976 | FXN-D49 | 69037713 | 1 | GAGTTTCCCTCTTGTTGCCC | AGG |
| 26954 | FXN-D50 | 69037717 | 1 | TTCCCTCTTGTTGCCCAGGC | TGG |
| 27026 | FXN-D51 | 69037719 | −1 | GAGCCACTGCACTCCAGCCT | GGG |
| 27034 | FXN-D52 | 69037720 | −1 | TGAGCCACTGCACTCCAGCC | TGG |
| 27002 | FXN-D53 | 69037727 | 1 | TTGCCCAGGCTGGAGTGCAG | TGG |
| 27114 | FXN-D54 | 69037760 | −1 | CACTTGAACCCAGGAGGCAG | AGG |
| 27074 | FXN-D55 | 69037762 | 1 | TCACTGCAACCTCTGCCTCC | TGG |
| 27082 | FXN-D56 | 69037763 | 1 | CACTGCAACCTCTGCCTCCT | GGG |
| 27138 | FXN-D57 | 69037766 | −1 | GAGAATCACTTGAACCCAGG | AGG |
| 37002 | FXN-D58 | 69037769 | −1 | CAGGAGAATCACTTGAACCC | AGG |
| 27218 | FXN-D59 | 69037788 | −1 | GCTACTCGGGAGGCTGAGGC | AGG |
| 27234 | FXN-D60 | 69037792 | −1 | CCCAGCTACTCGGGAGGCTG | AGG |
| 27258 | FXN-D61 | 69037798 | −1 | GATAATCCCAGCTACTCGGG | AGG |
| 27274 | FXN-D62 | 69037801 | −1 | GCCGATAATCCCAGCTACTC | GGG |
| 29314 | FXN-D63 | 69037802 | 1 | GCCTCAGCCTCCCGAGTAGC | TGG |
| 27282 | FXN-D64 | 69037802 | −1 | AGCCGATAATCCCAGCTACT | CGG |
| 27210 | FXN-D65 | 69037803 | 1 | CCTCAGCCTCCCGAGTAGCT | GGG |
| 27250 | FXN-D66 | 69037811 | 1 | TCCCGAGTAGCTGGGATTAT | CGG |
| 27338 | FXN-D67 | 69037853 | 1 | AGAGACAGATTTCTCCATGT | TGG |
| 27378 | FXN-D68 | 69037856 | −1 | CGAGACCAGCCTGACCAACA | TGG |
| 27354 | FXN-D69 | 69037858 | 1 | CAGATTTCTCCATGTTGGTC | AGG |
| 27362 | FXN-D70 | 69037862 | 1 | TTTCTCCATGTTGGTCAGGC | TGG |
| 27394 | FXN-D71 | 69037883 | 1 | GGTCTCGAACTCCCAACCTC | AGG |
| 27426 | FXN-D72 | 69037883 | −1 | TGGGCGGATCACCTGAGGTT | GGG |
| 27434 | FXN-D73 | 69037884 | −1 | GTGGGCGGATCACCTGAGGT | TGG |
| 27442 | FXN-D74 | 69037888 | −1 | CGAGGTGGGCGGATCACCTG | AGG |
| 27466 | FXN-D75 | 69037899 | −1 | CTTTGGGAGGGCGAGGTGGG | CGG |
| 27482 | FXN-D76 | 69037902 | −1 | GCACTTTGGGAGGGCGAGGT | GGG |
| 27490 | FXN-D77 | 69037903 | −1 | AGCACTTTGGGAGGGCGAGG | TGG |
| 27498 | FXN-D78 | 69037906 | −1 | TCCAGCACTTTGGGAGGGCG | AGG |
| 27530 | FXN-D79 | 69037911 | −1 | GTAATTCCAGCACTTTGGGA | GGG |
| 27538 | FXN-D80 | 69037912 | −1 | TGTAATTCCAGCACTTTGGG | AGG |
| 27562 | FXN-D81 | 69037915 | −1 | GCCTGTAATTCCAGCACTTT | GGG |
| 27474 | FXN-D82 | 69037916 | 1 | ACCTCGCCCTCCCAAAGTGC | TGG |
| 27570 | FXN-D83 | 69037916 | −1 | CGCCTGTAATTCCAGCACTT | TGG |
| 27522 | FXN-D84 | 69037925 | 1 | TCCCAAAGTGCTGGAATTAC | AGG |
| 27618 | FXN-D85 | 69037943 | −1 | CTGCTGATGGCCAGACGCGG | TGG |
| 27586 | FXN-D86 | 69037944 | 1 | CAGGCGTGAGCCACCGCGTC | TGG |
| 27626 | FXN-D87 | 69037946 | −1 | ACTCTGCTGATGGCCAGACG | CGG |
| 27666 | FXN-D88 | 69037956 | −1 | TAAATTAAAAACTCTGCTGA | TGG |
| 27650 | FXN-D89 | 69037969 | 1 | ATCAGCAGAGTTTTTAATTT | AGG |
| 27690 | FXN-D90 | 69037983 | 1 | TAATTTAGGAGAATGACAAG | AGG |
| 27698 | FXN-D91 | 69037986 | 1 | TTTAGGAGAATGACAAGAGG | TGG |
| 27722 | FXN-D92 | 69038003 | 1 | AGGTGGTACAGTTTTTTAGA | TGG |
| 27730 | FXN-D93 | 69038010 | 1 | ACAGTTTTTTAGATGGTACC | TGG |
| 27738 | FXN-D94 | 69038013 | 1 | GTTTTTTAGATGGTACCTGG | TGG |
| 27770 | FXN-D95 | 69038017 | −1 | AATAGCCCTTAACAGCCACC | AGG |
| 27754 | FXN-D96 | 69038022 | 1 | ATGGTACCTGGTGGCTGTTA | AGG |
| 27762 | FXN-D97 | 69038023 | 1 | TGGTACCTGGTGGCTGTTAA | GGG |
| 27802 | FXN-D98 | 69038052 | 1 | ACTGACAAACACACCCAACT | TGG |
| 27850 | FXN-D99 | 69038054 | −1 | CTGGGCGGCAGCGCCAAGTT | GGG |
| 27858 | FXN-D100 | 69038055 | −1 | CCTGGGCGGCAGCGCCAAGT | TGG |
| 27826 | FXN-D101 | 69038066 | 1 | CCAACTTGGCGCTGCCGCCC | AGG |
| 27842 | FXN-D102 | 69038069 | 1 | ACTTGGCGCTGCCGCCCAGG | AGG |
| 27906 | FXN-D103 | 69038069 | −1 | CCCAGTGTCCACCTCCTGGG | CGG |
| 27866 | FXN-D104 | 69038072 | 1 | TGGCGCTGCCGCCCAGGAGG | TGG |
| 27922 | FXN-D105 | 69038072 | −1 | AAACCCAGTGTCCACCTCCT | GGG |
| 27930 | FXN-D106 | 69038073 | −1 | GAAACCCAGTGTCCACCTCC | TGG |
| 27882 | FXN-D107 | 69038079 | 1 | GCCGCCCAGGAGGTGGACAC | TGG |
| 27890 | FXN-D108 | 69038080 | 1 | CCGCCCAGGAGGTGGACACT | GGG |
| 27914 | FXN-D109 | 69038087 | 1 | GGAGGTGGACACTGGGTTTC | TGG |
| 27946 | FXN-D110 | 69038095 | 1 | ACACTGGGTTTCTGGATAGA | TGG |
| 28002 | FXN-D111 | 69038114 | −1 | AGAGGCCCAGCTGGTGACAG | AGG |
| 27986 | FXN-D112 | 69038119 | 1 | TAGCAACCTCTGTCACCAGC | TGG |
| 27994 | FXN-D113 | 69038120 | 1 | AGCAACCTCTGTCACCAGCT | GGG |
| 28026 | FXN-D114 | 69038123 | −1 | TAGAAAAAAAGAGGCCCAGC | TGG |
| 28042 | FXN-D115 | 69038132 | −1 | AATTCAGTATAGAAAAAAAG | AGG |
| 28090 | FXN-D116 | 69038171 | −1 | AAGGGAACTATGGAACAGAC | AGG |
| 28130 | FXN-D117 | 69038181 | −1 | CAAGATGTGCAAGGGAACTA | TGG |
| 28114 | FXN-D118 | 69038193 | 1 | CATAGTTCCCTTGCACATCT | TGG |
| 28122 | FXN-D119 | 69038194 | 1 | ATAGTTCCCTTGCACATCTT | GGG |
| 28162 | FXN-D120 | 69038189 | −1 | CAAATACCCAAGATGTGCAA | GGG |
| 28170 | FXN-D121 | 69038190 | −1 | TCAAATACCCAAGATGTGCA | AGG |
| 28146 | FXN-D122 | 69038203 | 1 | TTGCACATCTTGGGTATTTG | AGG |
| 28186 | FXN-D123 | 69038209 | 1 | ATCTTGGGTATTTGAGGAGT | TGG |
| 28194 | FXN-D124 | 69038210 | 1 | TCTTGGGTATTTGAGGAGTT | GGG |
| 28202 | FXN-D125 | 69038213 | 1 | TGGGTATTTGAGGAGTTGGG | TGG |
| 28210 | FXN-D126 | 69038214 | 1 | GGGTATTTGAGGAGTTGGGT | GGG |
| 28226 | FXN-D127 | 69038217 | 1 | TATTTGAGGAGTTGGGTGGG | TGG |
| 28242 | FXN-D128 | 69038223 | 1 | AGGAGTTGGGTGGGTGGCAG | TGG |
| 28250 | FXN-D129 | 69038230 | 1 | GGGTGGGTGGCAGTGGCAAC | TGG |
| 28258 | FXN-D130 | 69038231 | 1 | GGTGGGTGGCAGTGGCAACT | GGG |
| 28266 | FXN-D131 | 69038232 | 1 | GTGGGTGGCAGTGGCAACTG | GGG |
| 28290 | FXN-D132 | 69038244 | −1 | AAAATAATTAAACAGGATGG | TGG |
| 28298 | FXN-D133 | 69038247 | −1 | TTTAAAATAATTAAACAGGA | TGG |
| 28306 | FXN-D134 | 69038251 | −1 | GGGCTTTAAAATAATTAAAC | AGG |
| 28338 | FXN-D135 | 69038271 | −1 | GGGTCAATCCAGGACAGTCA | GGG |
| 28346 | FXN-D136 | 69038272 | −1 | AGGGTCAATCCAGGACAGTC | AGG |
| 28322 | FXN-D137 | 69038274 | 1 | TTTTAAAGCCCTGACTGTCC | TGG |
| 28378 | FXN-D138 | 69038281 | −1 | GGGGAGCTTAGGGTCAATCC | AGG |
| 28394 | FXN-D139 | 69038291 | −1 | TGGAGACCAGGGGGAGCTTA | GGG |
| 28402 | FXN-D140 | 69038292 | −1 | TTGGAGACCAGGGGGAGCTT | AGG |
| 28370 | FXN-D141 | 69038296 | 1 | GATTGACCCTAAGCTCCCCC | TGG |
| 28434 | FXN-D142 | 69038300 | −1 | GATGAATTTTGGAGACCAGG | GGG |
| 28442 | FXN-D143 | 69038301 | −1 | TGATGAATTTTGGAGACCAG | GGG |
| 28450 | FXN-D144 | 69038302 | −1 | CTGATGAATTTTGGAGACCA | GGG |
| 28458 | FXN-D145 | 69038303 | −1 | TCTGATGAATTTTGGAGACC | AGG |
| 28490 | FXN-D146 | 69038311 | −1 | ACTCAGTTTCTGATGAATTT | TGG |
| 28506 | FXN-D147 | 69038333 | 1 | CAGAAACTGAGTTCACTTGA | AGG |
| 28530 | FXN-D148 | 69038345 | −1 | TGGAGAAAAGGGTGGGGAAG | AGG |
| 28554 | FXN-D149 | 69038351 | −1 | AAGGGGTGGAGAAAAGGGTG | GGG |
| 28562 | FXN-D150 | 69038352 | −1 | CAAGGGGTGGAGAAAAGGGT | GGG |
| 28570 | FXN-D151 | 69038353 | −1 | GCAAGGGGTGGAGAAAAGGG | TGG |
| 28578 | FXN-D152 | 69038356 | −1 | GATGCAAGGGGTGGAGAAAA | GGG |
| 28586 | FXN-D153 | 69038357 | −1 | AGATGCAAGGGGTGGAGAAA | AGG |
| 28626 | FXN-D154 | 69038365 | −1 | TTAGAAGTAGATGCAAGGGG | TGG |
| 28634 | FXN-D155 | 69038368 | −1 | GCTTTAGAAGTAGATGCAAG | GGG |
| 28642 | FXN-D156 | 69038369 | −1 | TGCTTTAGAAGTAGATGCAA | GGG |
| 28650 | FXN-D157 | 69038370 | −1 | CTGCTTTAGAAGTAGATGCA | AGG |
| 28706 | FXN-D158 | 69038403 | 1 | GCTGTTCAACAGAAACAGAA | TGG |
| 28714 | FXN-D159 | 69038404 | 1 | CTGTTCAACAGAAACAGAAT | GGG |
| 28746 | FXN-D160 | 69038418 | −1 | AAAATGTAGAATTATGTGTG | TGG |
| 28786 | FXN-D161 | 69038488 | −1 | GATAATATTTTGTATGTACT | AGG |
| 28810 | FXN-D162 | 69038514 | −1 | TTAAAATACTGATTACATGT | TGG |
| 28842 | FXN-D163 | 69038545 | 1 | TAAAAATCAGTAATGAGACC | AGG |
| 28850 | FXN-D164 | 69038550 | 1 | ATCAGTAATGAGACCAGGCA | CGG |
| 28866 | FXN-D165 | 69038552 | −1 | CAGTCGTGAGCCACCGTGCC | TGG |
| 28858 | FXN-D166 | 69038553 | 1 | AGTAATGAGACCAGGCACGG | TGG |
| 28882 | FXN-D167 | 69038573 | 1 | TGGCTCACGACTGTAATCCC | AGG |
| 28962 | FXN-D168 | 69038579 | −1 | CCTCGGCCTCCCAAAGTCCT | GGG |
| 28890 | FXN-D169 | 69038580 | 1 | CGACTGTAATCCCAGGACTT | TGG |
| 28970 | FXN-D170 | 69038580 | −1 | GCCTCGGCCTCCCAAAGTCC | TGG |
| 28898 | FXN-D171 | 69038581 | 1 | GACTGTAATCCCAGGACTTT | GGG |
| 28922 | FXN-D172 | 69038584 | 1 | TGTAATCCCAGGACTTTGGG | AGG |
| 28946 | FXN-D173 | 69038590 | 1 | CCCAGGACTTTGGGAGGCCG | AGG |

TABLE 14
Selected sgRNAs for double-cut Screen for
repeat expansion excision efficiency and FXN
mRNA and protein rescue.

| SEQ ID | Guide | | | |
|---|---|---|---|---|
| NO | RNA | Strand | Sequence | PAM |
| 51706 | FXN-U13 | 1 | TATCTGACCCAGTTACGCCA | CGG |
| 51058 | FXN-U103 | 1 | GCAGAATAGCTAGAGCAGCA | GGG |
| 51754 | FXN-U4 | −1 | TTTCAAGCCGTGGCGTAACT | GGG |
| 52090 | FXN-U43 | 1 | TAGAGGGTGTTTCACGAGGA | GGG |
| 52594 | FXN-U114 | 1 | GTTGCCAGTGCTTAAAAGTT | AGG |
| 52098 | FXN-U18 | 1 | TTCACGAGGAGGGAACCGTC | TGG |
| 52298 | FXN-U7 | 1 | CTGGTACGCCGCATGTATTA | GGG |
| 52106 | FXN-U28 | 1 | TCACGAGGAGGGAACCGTCT | GGG |
| 51682 | FXN-U113 | −1 | TATTTCTTTGTACCCCCCAA | AGG |
| 52066 | FXN-U41 | 1 | GTGGTAGAGGGTGTTTCACG | AGG |
| 52354 | FXN-U89 | −1 | TTCATCTCCCCTAATACATG | CGG |
| 52458 | FXN-U76 | −1 | TAAGCCTAAAGTACAAACTC | CGG |
| 52290 | FXN-U5 | 1 | GCTGGTACGCCGCATGTATT | AGG |
| 52498 | FXN-U23 | −1 | GTGGGCCAAATAACACGTGT | GGG |
| 51658 | FXN-U136 | −1 | TGTACCCCCCAAAGGAAGAA | AGG |
| 51930 | FXN-U112 | −1 | AATACCATGTCCTCCCCTTG | AGG |
| 51162 | FXN-U122 | −1 | GCAGAATCTGGAATAAAGGT | CGG |
| 52506 | FXN-U36 | −1 | TGTGGGCCAAATAACACGTG | TGG |
| 51762 | FXN-U2 | −1 | CTTTCAAGCCGTGGCGTAAC | TGG |
| 51746 | FXN-U27 | 1 | TTACGCCACGGCTTGAAAGG | AGG |
| 52386 | FXN-U42 | −1 | ACACAAATATGGCTTGGACG | TGG |
| 52258 | FXN-U51 | −1 | GGCGTACCAGCCACTCTGAA | GGG |
| 52530 | FXN-U187 | 1 | ATTGTGTTTGAAGAAACTTT | GGG |
| 52634 | FXN-U154 | 1 | GACTTAGAAAATGGATTTCC | TGG |
| 52610 | FXN-U119 | −1 | AAGTCCTAACTTTTAAGCAC | TGG |
| 27850 | FXN-D99 | −1 | CTGGGCGGCAGCGCCAAGTT | GGG |
| 28634 | FXN-D155 | −1 | GCTTTAGAAGTAGATGCAAG | GGG |
| 26882 | FXN-D44 | −1 | ACAACCCATGCTGTCCACAC | AGG |
| 28650 | FXN-D157 | −1 | CTGCTTTAGAAGTAGATGCA | AGG |
| 28370 | FXN-D141 | 1 | GATTGACCCTAAGCTCCCCC | TGG |
| 28194 | FXN-D124 | 1 | TCTTGGGTATTTGAGGAGTT | GGG |
| 26626 | FXN-D33 | 1 | ATGGTCCTTAGATCTCCTCT | AGG |
| 26634 | FXN-D31 | −1 | AGGAGATCTAAGGACCATCA | TGG |
| 26786 | FXN-D38 | −1 | AGGGGTGGAAGCCCAATACG | TGG |
| 26754 | FXN-D37 | 1 | TATCTGAGCTGCCACGTATT | GGG |
| 27770 | FXN-D95 | −1 | AATAGCCCTTAACAGCCACC | AGG |
| 26578 | FXN-D29 | 1 | TCTGGAAAAATAGGCAAGTG | TGG |
| 28130 | FXN-D117 | −1 | CAAGATGTGCAAGGGAACTA | TGG |
| 27738 | FXN-D94 | 1 | GTTTTTTAGATGGTACCTGG | TGG |
| 28338 | FXN-D135 | −1 | GGGTCAATCCAGGACAGTCA | GGG |
| 28642 | FXN-D156 | −1 | TGCTTTAGAAGTAGATGCAA | GGG |
| 26602 | FXN-D30 | 1 | ATAGGCAAGTGTGGCCATGA | TGG |
| 27754 | FXN-D96 | 1 | ATGGTACCTGGTGGCTGTTA | AGG |
| 27730 | FXN-D93 | 1 | ACAGTTTTTTAGATGGTACC | TGG |
| 28122 | FXN-D119 | 1 | ATAGTTCCCTTGCACATCTT | GGG |

[1297] 11. GAA Repeat Excision at the Frataxin Locus of FXN in Cardiomyocytes with DNA-PK Inhibition

[1298] FA post-mitotic cardiomyocytes were prepared from a culture of iPSCs as described in Example 1.

[1299] Cells were treated with spCas9 and a guide pair flanking the GAA repeat (SEQ ID NOs 52666 and 26562) and Compound 6 (3ttM) for 24 hours or DMSO. The rate of repeat excision was evaluated on day 7 and day 14 by ddPCR assay (FIG. 47A). The relative level of FXN mRNA on day 14 was evaluated by qPCR (FIG. 47B), and the levels of frataxin protein were measured on day 14 by western blot (FIG. 47C). Treatment with a DNA-PK inhibitor enhanced the GAA repeat excision rate and resulted in increased FXN mRNA levels and frataxin protein in post-mitotic cardiomyocytes.

[1300] 12. GAA Repeat Excision at the Frataxin Locus of FXN in FA iPSCs

[1301] GAA repeat excision was evaluated with Cpf1 (Cas12a) and SpCas9 in wildtype (WT) and FA iPSCs (4670) using RNP electroporation. DNA gel-electrophoresis showed excised DNA bands after GAA repeat excision with Cpf1 (boxes, FIG. 48) using Cpf1 guide RNAs (GD1&2) (SEQ ID NOs 47047 and 7447) and SpCas9 guide RNAs (Cas9 LG5&11) (SEQ ID NOs 52666, and 26562).

[1302] 13. GAA Repeat Excision at the Frataxin Locus of FXN in Cortical Neurons with Cpf1

[1303] Additional Cpf1 guide pairs were selected for GAA repeat excision in iPSC-derived cortical neurons as shown in Table 15 below.

TABLE 15

| Guide RNA | SEQ ID NO | Sequence |
|---|---|---|
| GDG_Cpf1_FA_guide_1 | 47047 | ACCATGTTGGCCAGGTTAGT |
| GDG_Cpf1_FA_guide_2 | 7447 | CCAGCATCTCTGGAAAAATA |
| GDG_Cpf1_FA_guide_3 | 7463 | TTACTTGGCTTCTGTGCACT |
| GDG_Cpf1_FA_guide_4 | 46967 | TTCAAACACAATGTGGGCCA |
| GDG_Cpf1_FA_guide_5 | 46768 | GAAACTGACCCGACCTTTATT |
| GDG_Cpf1_FA_guide_6 | 7680 | TGGATAGATGGTTAGCAACCT |
| GDG_Cpf1_FA_guide_7 | 47032 | CTGGCAGGACGCGGTGGCTCA |

[1304] gRNAs comprising the 18-mer spacer sequences of SEQ ID NOs: 47045, 7445, 7461, 46766, 7678, and 47030 were tested. More specifically, the tested guides were the tested 20-mer guides as shown in Table 15.

[1305] Pairs of gRNAs were tested with Cpf1 (Cas12a) in the iPSC-derived cortical neurons. The following guide pairs were used: Guides 1&2 (SEQ ID NOs: 47047 and 7447); Guides 3&4 (SEQ ID NOs: 7463 and 46967); Guides 5&6 (SEQ ID NOs: 46768 and 7680); Guides 7&2 (SEQ ID NOs: 47032 and 7447). DNA gel electrophoresis of PCR products showed excised DNA bands after GAA repeat excision (FIG. 49).

[1306] GAA repeat excision was further confirmed in single cell nuclei of wildtype iPSC-derived cortical neurons using Cpf1 and gRNAs (SEQ ID NOs 47047 and 7447). Cell nuclei were prepared using the Nuclei Isolation Kit: Nuclei EZ prep (Sigma, NUC101) according to the manufacture's protocol. For nuclei isolation from mouse brain, tissue samples were dounced 2×25x in 2 ml lysis buffer with pestle A and pestle B (Sigma), respectively. Lysate was then transferred into a lml falcon tube on ice for 5min. Lysate was spin down at 500 ×g for 5min and pellet was resuspended in lml lysis buffer, additional 3 ml lysis buffer were added and kept on ice for 5min. Lysate was spin down at 500 ×g for 5min and pellet was resuspended in lml resuspension buffer. Vybrant DyeCycle Ruby Stain (Thermo Fisher, V10309, 1:800) or Hoechst (Invitrogen, H3570, 1:10,000) was added for fluorescent labeling of nuclei. Isolated nuclei were then sorted using a BD FACSMelody Cell Sorter (BD Biosciences) into QuickExtract DNA Extraction Solution (Lucigen, QE9050). Sequencing results showed 8/10 nuclei with a homogenous GAA repeat excision and 2/10 nuclei had a heterogenous GAA excision.

[1307] 14. In Vivo GAA repeat excision at the frataxin locus of FXN in adult mouse brain

[1308] An AAV vector was designed for targeting neurons in adult YG8+/− mice (FIG. 50). YG8+/− mice carry a human Frataxin transgene with expanded GAA repeat. hSynapsin 1 promoter drives expression of AsCpf1 (Cas12a, vector 1) and mCherry-KASH (vector 2) in neurons. Two Cpf1 gRNAs (SEQ ID NOs: 47047 and 7447) were cloned in tandem under control of one U6 promoter to excise the GAA repeat.

[1309] A dual guide excision experiment was performed with AsCpf1 (Cas12a) in a mouse model of Friedreich's Ataxis with dual AAV delivery (1:1 ratio) into stratum of adult YG8+/− mice.

[1310] Heterozygous adult male FXN^{em2.1Lutzy}Tg(FXN)YG8Pook/J mice (Jackson laboratory, 030930) were anesthetized and craniotomy was performed according to IACUC approved procedures. lul of mixed AAV (1:1) were injected into striatum (0.5mm Bregma, 1.5 mm lateral, 2.5mm deep). To prevent leakage, the pipette was held in place for 3min before retraction. The incision was sutured and post-operative analgesics were administered and mice were euthanized 2 weeks after AAV injection according to IACUC approved protocols and AVMA Guidelines for Euthanasia of Animals. Brain samples were fixed in 4% PFA for vibratome sectioning and fluorescent imaging of mCherry-KASH labeled striatal neurons. For nuclei isolation and FACS, striatum was dissected and shock frozen. Following AAV1 vectors have been used: a) hSyn-Cas12a and b) Cas12a sgRNA (Sap1) hSyn_mCh-KASH (SignaGen, ˜2.5×10^6 Vg/ml) (see Table 16 below and SEQ ID NOs 53411 and 53412, respectively).

[1311] All AAV constructs were synthesized by Genescript. Cas12a and gRNA array sequences have been published elsewhere (Zetsche et al., Nat Biotech, 2017). gRNA array DNA oligos were cloned using one-directional annealing and using a sticky-end design and Sapl restriction of the Cas12a sgRNA vector as described elsewhere (Zetsche et al., Nat Biotech, 2017).

[1312] The following fw oligo for cloning the dual Cas12a sgRNA array has been used:

agaTACCATGTTGGCCAGGTTAGTCTAATTTCTACTCTTGTAGATCCA
GCATCTCTGGAAAAATAG (SEQ ID NO: 53410) and
(Cas12a array: Italic: Cas12a direct repeat;
Bold: spacers, aga: SapI cloning overhang).

[1313] Results showed successful excision of the GAA repeat in neurons in vivo with dual Cas12a sgRNAs. Histology of the brain 2 weeks after stereotactic injection showed mCherry positive striatum (FIG. 51A). Nuclei were sorted of targeted neurons by FACS (FIG. 51B). DNA gel-electrophoresis showed excised DNA bands after GAA repeat excision with Cpf1 in targeted neurons (mCherry +) versus non-targeted cells (mCherry −) (FIG. 51C). Single clone Sanger Sequencing analysis of excised DNA bands showed successful GAA repeat excision in neurons in vivo.

TABLE 16
AAV1: hSyn-Cas12a (SEQ ID NO: 53411):
cctgcaggcagctgcgcgctcgctcgctcactgaggccgcccgggcaaagcccgggcgtcgggcgacctttggtcgcccggcctcagtgagcg
agcgagcgcgcagagagggagtggccaactccatcactaggggttcctgcggcctctagactgcagagggccctgcgtatgagtgcaagtggg
ttttaggaccaggatgaggcggggtgggggtgcctacctgacgaccgaccccgacccactggacaagcacccaacccccattccccaaattgc
gcatcccctatcagagagggggaggggaaacaggatgcggcgaggcgcgtgcgcactgccagcttcagcaccgcggacagtgccttcgccccc
gcctggcggcgcgcgccaccgccgcctcagcactgaaggcgcgctgacgtcactcgccggtcccccgcaaactccccttcccggccaccttgg
tcgcgtccgcgccgccgccggcccagccggaccgcaccacgcgaggcgcgagataggggggcacgggcgcgaccatctgcgctgcggcgcc
ggcgactcagcgctgcctcagtctgcggtgggcagcggaggagtcgtgtcgtgcctgagagcgcagtcgagaaggtaccggatccccgggtac
CGGTGCCACCatgtacccatacgatgttccagattacgcttcgccgaagaaaaagcgcaaggtcgaagcgtccACACAGTTCG
AGGGCTTTACCAACCTGTATCAGGTGAGCAAGACACTGCGGTTTGAGCTGATCCCACAG
GGCAAGACCCTGAAGCACATCCAGGAGCAGGGCTTCATCGAGGAGGACAAGGCCCGCA
ATGATCACTACAAGGAGCTGAAGCCCATCATCGATCGGATCTACAAGACCTATGCCGAC
CAGTGCCTGCAGCTGGTGCAGCTGGATTGGGAGAACCTGAGCGCCGCCATCGACTCCTAT
AGAAAGGAGAAAACCGAGGAGACAAGGAACGCCCTGATCGAGGAGCAGGCCACATATC
GCAATGCCATCCACGACTACTTCATCGGCCGGACAGACAACCTGACCGATGCCATCAAT
AAGAGACACGCCGAGATCTACAAGGGCCTGTTCAAGGCCGAGCTGTTTAATGGCAAGGT
GCTGAAGCAGCTGGGCACCGTGACCACAACCGAGCACGAGAACGCCCTGCTGCGGAGCT
TCGACAAGTTTACAACCTACTTCTCCGGCTTTTATGAGAACAGGAAGAACGTGTTCAGCG
CCGAGGATATCAGCACAGCCATCCCACACCGCATCGTGCAGGACAACTTCCCCAAGTTTA
AGGAGAATTGTCACATCTTCACACGCCTGATCACCGCCGTGCCCAGCCTGCGGGAGCACT
TTGAGAACGTGAAGAAGGCCATCGGCATCTTCGTGAGCACCTCCATCGAGGAGGTGTTTT
CCTTCCCTTTTTATAACCAGCTGCTGACACAGACCCAGATCGACCTGTATAACCAGCTGC
TGGGAGGAATCTCTCGGGAGGCAGGCACCGAGAAGATCAAGGGCCTGAACGAGGTGCT
GAATCTGGCCATCCAGAAGAATGATGAGACAGCCCACATCATCGCCTCCCTGCCACACA
GATTCATCCCCCTGTTTAAGCAGATCCTGTCCGATAGGAACACCCTGTCTTTCATCCTGGA
GGAGTTTAAGAGCGACGAGGAAGTGATCCAGTCCTTCTGCAAGTACAAGACACTGCTGA
GAAACGAGAACGTGCTGGAGACAGCCGAGGCCCTGTTTAACGAGCTGAACAGCATCGAC
CTGACACACATCTTCATCAGCCACAAGAAGCTGGAGACAATCAGCAGCGCCCTGTGCGA
CCACTGGGATACACTGAGGAATGCCCTGTATGAGCGGAGAATCTCCGAGCTGACAGGCA
AGATCACCAAGTCTGCCAAGGAGAAGGTGCAGCGCAGCCTGAAGCACGAGGATATCAAC
CTGCAGGAGATCATCTCTGCCGCAGGCAAGGAGCTGAGCGAGGCCTTCAAGCAGAAAAC
CAGCGAGATCCTGTCCCACGCACACGCCGCCCTGGATCAGCCACTGCCTACAACCCTGAA
GAAGCAGGAGGAGAAGGAGATCCTGAAGTCTCAGCTGGACAGCCTGCTGGGCCTGTACC
ACCTGCTGGACTGGTTTGCCGTGGATGAGTCCAACGAGGTGGACCCCGAGTTCTCTGCCC
GGCTGACCGGCATCAAGCTGGAGATGGAGCCTTCTCTGAGCTTCTACAACAAGGCCAGA
AATTATGCCACCAAGAAGCCCTACTCCGTGGAGAAGTTCAAGCTGAACTTTCAGATGCCT
ACACTGGCCTCTGGCTGGGACGTGAATAAGGAGAAGAACAATGGCGCCATCCTGTTTGT
GAAGAACGGCCTGTACTATCTGGGCATCATGCCAAAGCAGAAGGGCAGGTATAAGGCCC
TGAGCTTCGAGCCCACAGAGAAAACCAGCGAGGGCTTTGATAAGATGTACTATGACTAC
TTCCCTGATGCCGCCAAGATGATCCCAAAGTGCAGCACCCAGCTGAAGGCCGTGACAGC
CCACTTTCAGACCCACACAACCCCCATCCTGCTGTCCAACAATTTCATCGAGCCTCTGGA
GATCACAAAGGAGATCTACGACCTGAACAATCCTGAGAAGGAGCCAAAGAAGTTTCAGA
CAGCCTACGCCAAGAAAACCGGCGACCAGAAGGGCTACAGAGAGGCCCTGTGCAAGTG
GATCGACTTCACAAGGGATTTTCTGTCCAAGTATACCAAGACAACCTCTATCGATCTGTC
TAGCCTGCGGCCATCCTCTCAGTATAAGGACCTGGGCGAGTACTATGCCGAGCTGAATCC
CCTGCTGTACCACATCAGCTTCCAGAGAATCGCCGAGAAGGAGATCATGGATGCCGTGG
AGACAGGCAAGCTGTACCTGTTCCAGATCTATAACAAGGACTTTGCCAAGGGCCACCAC
GGCAAGCCTAATCTGCACACACTGTATTGGACCGGCCTGTTTTCTCCAGAGAACCTGGCC
AAGACAAGCATCAAGCTGAATGGCCAGGCCGAGCTGTTCTACCGCCCTAAGTCCAGGAT
GAAGAGGATGGCACACCGGCTGGGAGAGAAGATGCTGAACAAGAAGCTGAAGGATCAG
AAAACCCCAATCCCCGACACCCTGTACCAGGAGCTGTACGACTATGTGAATCACAGACT
GTCCCACGACCTGTCTGATGAGGCCAGGGCCCTGCTGCCCAACGTGATCACCAAGGAGG
TGTCTCACGAGATCATCAAGGATAGGCGCTTTACCAGCGACAAGTTCTTTTTCCACGTGC
CTATCACACTGAACTATCAGGCCGCCAATTCCCCATCTAAGTTCAACCAGAGGGTGAATG
CCTACCTGAAGGAGCACCCCGAGACACCTATCATCGGCATCGATCGGGGCGAGAGAAAC
CTGATCTATATCACAGTGATCGACTCCACCGGCAAGATCCTGGAGCAGCGGAGCCTGAA
CACCATCCAGCAGTTTGATTACCAGAAGAAGCTGGACAACAGGGAGAAGGAGAGGGTG
GCAGCAAGGCAGGCCTGGTCTGTGGTGGGCACAATCAAGGATCTGAAGCAGGGCTATCT
GAGCCAGGTCATCCACGAGATCGTGGACCTGATGATCCACTACCAGGCCGTGGTGGTGC
TGGAGAACCTGAATTTCGGCTTTAAGAGCAAGAGGACCGGCATCGCCGAGAAGGCCGTG
TACCAGCAGTTCGAGAAGATGCTGATCGATAAGCTGAATTGCCTGGTGCTGAAGGACTA
TCCAGCAGAGAAAGTGGGAGGCGTGCTGAACCCATACCAGCTGACAGACCAGTTCACCT
CCTTTGCCAAGATGGGCACCCAGTCTGGCTTCCTGTTTTACGTGCCTGCCCCATATACATC
TAAGATCGATCCCCTGACCGGCTTCGTGGACCCCTTCGTGTGGAAAACCATCAAGAATCA
CGAGAGCCGCAAGCACTTCCTGGAGGGCTTCGACTTTCTGCACTACGACGTGAAAACCG
GCGACTTCATCCTGCACTTTAAGATGAACAGAAATCTGTCCTTCCAGAGGGGCCTGCCCG
GCTTTATGCCTGCATGGGATATCGTGTTCGAGAAGAACGAGACACAGTTTGACGCCAAG
GGCACCCCTTTCATCGCCGGCAAGAGAATCGTGCCAGTGATCGAGAATCACAGATTCAC
CGGCAGATACCGGGACCTGTATCCTGCCAACGAGCTGATCGCCCTGCTGGAGGAGAAGG
GCATCGTGTTCAGGGATGGCTCCAACATCCTGCCAAAGCTGCTGGAGAATGACGATTCTC
ACGCCATCGACACCATGGTGGCCCTGATCCGCAGCGTGCTGCAGATGCGGAACTCCAAT
GCCGCCACAGGCGAGGACTATATCAACAGCCCCGTGCGCGATCTGAATGGCGTGTGCTT
CGACTCCCGGTTTCAGAACCCAGAGTGGCCCATGGACGCCGATGCCAATGGCGCCTACC
ACATCGCCCTGAAGGGCCAGCTGCTGCTGAATCACCTGAAGGAGAGCAAGGATCTGAAG
CTGCAGAACGGCATCTCCAATCAGGACTGGCTGGCCTACATCCAGGAGCTGCGCAACtaag
aattcAATAAAAGATCTTTATTTTCATTAGATCTGTGTGTTGGTTTTTTGTGTgcggccgcaggaacc
cctagtgatggagttggccactccctctctgcgcgctcgctcgctcactgaggccgggcgaccaaaggtcgcccgacgcccgggctttgcccg
ggcggcctcagtgagcgagcgagcgcgcagctgcctgcaggggcgcctgatgcggtattttctccttacgcatctgtgcggtatttcacaccg
catacgtcaaagcaaccatagtacgcgccctgtagcggcgcattaagcgcggcgggtgtggtggttacgcgcagcgtgaccgctacacttgcc
agcgccctagcgcccgctcctttcgctttcttcccttcctttctcgccacgttcgccggctttccccgtcaagctctaaatcgggggctccct
ttagggttccgatttagtgctttacggcacctcgaccccaaaaaacttgatttgggtgatggttcacgtagtgggccatcgccctgatagacg
gtttttcgccctttgacgttggagtccacgttctttaatagtggactcttgttccaaactggaacaacactcaaccctatctcgggctattct
tttgatttataagggattttgccgatttcggcctattggttaaaaaatgagctgatttaacaaaaatttaacgcgaattttaacaaaatatta
acgtttacaattttatggtgcactctcagtacaatctgctctgatgccgcatagttaagccagccccgacacccgccaacacccgctgacgcg
ccctgacgggcttgtctgctcccggcatccgcttacagacaagctgtgaccgtctccgggagctgcatgtgtcagaggttttcaccgtcatca
ccgaaacgcgcgagacgaaagggcctcgtgatacgcctttttataggttaatgtcatgataataatggtttcttagacgtcaggtggcacttt
tcggggaaatgtgcgcggaacccctatttgtttatttttctaaatacattcaaatatgtatccgctcatgagacaataaccctgataaatgct
tcaataatattgaaaaaggaagagtatgagtattcaacatttccgtgtcgcccttattcccttttttgcggcattttgccttcctgtttttgc
tcacccagaaacgctggtgaaagtaaaagatgctgaagatcagttgggtgcacgagtgggttacatcgaactggatctcaacagcggtaagat
ccttgagagttttcgccccgaagaacgttttccaatgatgagcacttttaaagttctgctatgtggcgcggtattatcccgtattgacgccgg
gcaagagcaactcggtcgccgcatacactattctcagaatgacttggttgagtactcaccagtcacagaaaagcatcttacggatggcatgac
agtaagagaattatgcagtgctgccataaccatgagtgataacactgcggccaacttacttctgacaacgatcggaggaccgaaggagctaac
cgcttttttgcacaacatgggggatcatgtaactcgccttgatcgagggaaccggagctgaatgaagccataccaaacgacgagcgtgacacc
acgatgcctgtagcaatggcaacaacgttgcgcaaactattaactggcgaactacttactctagcttcccggcaacaattaatagactggatg
gaggcggataaagttgcaggaccacttctgcgctcggcccttccggctggctggtttattgctgataaatctggagccggtgagcgtggaagc
cgcggtatcattgcagcactggggccagatggtaagccctcccgtatcgtagttatctacacgacggggagtcaggcaactatggatgaacga
aatagacagatcgctgagataggtgcctcactgattaagcattggtaactgtcagaccaagtttactcatatatactttagattgatttaaaa
cttcatttttaatttaaaaggatctaggtgaagatcctttttgataatctcatgaccaaaatcccttaacgtgagttttcgttccactgagcg
tcagaccccgtagaaaagatcaaaggatcttcttgagatcctttttttctgcgcgtaatctgctgcttgcaaacaaaaaaaccaccgctacca
gcggtggtttgtttgccggatcaagagctaccaactctttttccgaaggtaactggcttcagcagagcgcagataccaaatactgtccttcta
gtgtagccgtagttaggccaccacttcaagaactctgtagcaccgcctacatacctcgctctgctaatcctgttaccagtggctgctgccagt
ggcgataagtcgtgtcttaccgggttggactcaagacgatagttaccggataaggcgcagcggtcgggctgaacggggggttcgtgcacacag
cccagcttggagcgaacgacctacaccgaactgagatacctacagcgtgagctatgagaaagcgccacgcttcccgaagggagaaaggcggac
aggtatccggtaagcggcagggtcggaacaggagagcgcacgagggagcttccagggggaaacgcctggtatctttatagtcctgtcgggttt
cgccacctctgacttgagcgtcgatttttgtgatgctcgtcaggggggcggagcctatggaaaaacgccagcaacgcggcctttttacggttc
ctggccttttgctggccttttgctcacatgt
AAV1: Cas12a sgRNA (SapI)_hSyn_mCh-KASH
(SEQ ID NO: 53412)
cctgcaggcagctgcgcgctcgctcgctcactgaggccgcccgggcaaagcccgggcgtcgggcgacctttggtcgcccggcctcagtgagcg
tgcagcgagcgcgcagagagggagtggccaactccatcactaggggttcctgcggccgcacgcgtgagggcctatttcccatgattccttcat
attatatacgatacaaggctgttagagagataattggaattaatttgactgtaaacacaaagatattagtacaaaatacgtgacgtagaaagt
aataatttcttgggtagtttgcagttttaaaattatgttttaaaatggactatcatatgcttaccgtaacttgaaagtatttcgatttcttgg
ctttatatatcttgtggaaaggacgaaacaccgTAATTTCTACTCTTGTAGATgaagagcgagctcttcTTTTTTtctagactgcagagggcc
ctgcgtatgagtgcaagtgggttttaggaccaggatgaggcggggtgggggtgcctacctgacgaccgaccccgacccactggacaagcaccc
aacccccattccccaaattgcgcatcccctatcagagagggggaggggaaacaggatgcggcgaggcgcgtgcgcactgccagcttcagcacc
gcggacagtgccttcgcccccgcctggcggcgcgcgccaccgccgcctcagcactgaaggcgcgctgacgtcactcgccggtcccccgcaaac
tccccttcccggccaccttggtcgcgtccgcgccgccgccggcccagccggaccgcaccacgcgaggcgcgagataggggggcacgggcgcga
ccatctgcgctgcggcgccggcgactcagcgctgcctcagtctgcggtgggcagcggaggagtcgtgtcgtgcctgagagcgcagtcgagaag
gtaccgGatCcGGCCGCTCGAGTCGCCACCATGGTGAGCAAGGGCGAGGAGGATAACATGGCCATCA
TCAAGGAGTTCATGCGCTTCAAGGTGCACATGGAGGGCTCCGTGAACGGCCACGAGTTC
GAGATCGAGGGCGAGGGCGAGGGCCGCCCCTACGAGGGCACCCAGACCGCCAAGCTGA
AGGTGACCAAGGGTGGCCCCCTGCCCTTCGCCTGGGACATCCTGTCCCCTCAGTTCATGT
ACGGCTCCAAGGCCTACGTGAAGCACCCCGCCGACATCCCCGACTACTTGAAGCTGTCCT
TCCCCGAGGGCTTCAAGTGGGAGCGCGTGATGAACTTCGAGGACGGCGGCGTGGTGACC
GTGACCCAGGACTCCTCCCTGCAGGACGGCGAGTTCATCTACAAGGTGAAGCTGCGCGG
CACCAACTTCCCCTCCGACGGCCCCGTAATGCAGAAGAAGACCATGGGCTGGGAGGCCT
CCTCCGAGCGGATGTACCCCGAGGACGGCGCCCTGAAGGGCGAGATCAAGCAGAGGCTG
AAGCTGAAGGACGGCGGCCACTACGACGCTGAGGTCAAGACCACCTACAAGGCCAAGA
AGCCCGTGCAGCTGCCCGGCGCCTACAACGTCAACATCAAGTTGGACATCACCTCCCACA
ACGAGGACTACACCATCGTGGAACAGTACGAACGCGCCGAGGGCCGCCACTCCACCGGC
GGCATGGACGAGCTaTACAAGttGTACAAgtccggactcagatctcgagaggaggaggaggagacagacagcaggatgccccacctcgacagc
cccggcagctcccagccgagacgctccttcctctcaagggtgatcagggcagcgctaccgttgcagctgcttctgctgctgctgctgctcctg
gcctgcctgctacctgcctctgaagatgactacagctgcacccaggccaacaactttgcccgatccttctaccccatgctgcggtacaccaac
gggccacctcccacctaggaattcgatatcaagcttatcgataccgagcgctgctcgagagatctacgggtggcatccctgtgacccctcccc
agtgcctctcctggccctggaagttgccactccagtgcccaccagccttgtcctaataaaattaagttgcatcattttgtctgactaggtgtc
cttctataatattatggggtggaggggggtggtatggagcaaggggcaagttgggaagacaacctgtagggcctgcggggtctattgggaacc
aagctggagtgcagtggcacaatcttggctcactgcaatctccgcctcctgggttcaagcgattctcctgcctcagcctcccgagttgttggg
attccaggcatgcatgaccaggctcagctaatttttgtttttttggtagagacggggtttcaccatattggccaggctggtctccaactccta
atctcaggtgatctacccaccttggcctcccaaattgctgggattacaggcgtgaaccactgctcccttccctgtccttctgattttgtaggt
aaccacgtgcggaccgagcggccgcaggaacccctagtgatggagttggccactccctctctgcgcgctcgctcgctcactgaggccgggcga
ccaaaggtcgcccgacgcccgggctttgcccgggcggcctcagtgagcgagcgagcgcgcagctgcctgcaggggcgcctgatgcggtatttt
ctccttacgcatctgtgcggtatttcacaccgcatacgtcaaagcaaccatagtacgcgccctgtagcggcgcattaagcgcggcgggtgtgg
tggttacgcgcagcgtgaccgctacacttgccagcgccctagcgcccgctcctttcgctttcttcccttcctttctcgccacgttcgccggct
ttccccgtcaagctctaaatcgggggctccctttagggttccgatttagtgctttacggcacctcgaccccaaaaaacttgatttgggtgatg
gttcacgtagtgggccatcgccctgatagacggtattcgccctttgacgttggagtccacgttctttaatagtggactcttgttccaaactgg
aacaacactcaaccctatctcgggctattcttttgatttataagggattttgccgatttcggcctattggttaaaaaatgagctgatttaaca
aaaatttaacgcgaattttaacaaaatattaacgtttacaattttatggtgcactctcagtacaatctgctctgatgccgcatagttaagcca
gccccgacacccgccaacacccgctgacgcgccctgacgggcttgtctgctcccggcatccgcttacagacaagctgtgaccgtctccgggag
ctgcatgtgtcagaggttttcaccgtcatcaccgaaacgcgcgagacgaaagggcctcgtgatacgcctatttttataggttaatgtcatgat
aataatggtttcttagacgtcaggtggcacttttcggggaaatgtgcgcggaacccctatttgtttatttttctaaatacattcaaatatgta
tccgctcatgagacaataaccctgataaatgcttcaataatattgaaaaaggaagagtatgagtattcaacatttccgtgtcgcccttattcc
cttttttgcggcattttgccttcctgtttttgctcacccagaaacgctggtgaaagtaaaagatgctgaagatcagttgggtgcacgagtggg
ttacatcgaactggatctcaacagcggtaagatccttgagagttttcgccccgaagaacgttttccaatgatgagcacttttaaagttctgct
atgtggcgcggtattatcccgtattgacgccgggcaagagcaactcggtcgccgcatacactattctcagaatgacttggttgagtactcacc
agtcacagaaaagcatcttacggatggcatgacagtaagagaattatgcagtgctgccataaccatgagtgataacactgcggccaacttact
tctgacaacgatcggaggaccgaaggagctaaccgctttttgcacaacatgggggatcatgtaactcgccttgatcgttgggaaccggagctg
aatgaagccataccaaacgacgagcgtgacaccacgatgcctgtagcaatggcaacaacgttgcgcaaactattaactggcgaactacttact
ctagcttcccggcaacaattaatagactggatggaggcggataaagttgcaggaccacttctgcgctcggcccttccggctggctggtttatt
gctgataaatctggagccggtgagcgtgggtctcgcggtatcattgcagcactggggccagatggtaagccctcccgtatcgtagttatctac
acgacggggagtcaggcaactatggatgaacgaaatagacagatcgctgagataggtgcctcactgattaagcattggtaactgtcagaccaa
gtttactcatatatactttagattgatttaaaacttcatttttaatttaaaaggatctaggtgaagatcctttttgataatctcatgaccaaa
atcccttaacgtgagttttcgttccactgagcgtcagaccccgtagaaaagatcaaaggatcttcttgagatcctttttttctgcgcgtaatc
tgctgcttgcaaacaaaaaaaccaccgctaccagcggtggtttgtttgccggatcaagagctaccaactctttttccgaaggtaactggcttc
agcagagcgcagataccaaatactgtccttctagtgtagccgtagttaggccaccacttcaagaactctgtagcaccgcctacatacctcgct
ctgctaatcctgttaccagtggctgctgccagtggcgataagtcgtgtcttaccgggttggactcaagacgatagttaccggataaggcgcag
cggtcgggctgaacggggggttcgtgcacacagcccagcttggagcgaacgacctacaccgaactgagatacctacagcgtgagctatgagaa
agcgccacgcttcccgaagggagaaaggcggacaggtatccggtaagcggcagggtcggaacaggagagcgcacgagggagcttccaggggga
aacgcctggtatctttatagtcctgtcgggtttcgccacctctgacttgagcgtcgatttttgtgatgctcgtcaggggggcggagcctatgg
aaaaacgccagcaacgcggcctttttacggttcctggccttttgctggccttttgctcacatgt

[1314] 15. CTG Repeat Excision with Guide Pairs in DMPK

[1315] a. Materials and Methods

[1316] Guide and Primer sequences. Primer sequences are shown in the Table of Additional Sequences (SEQ ID NOs: 55-62). The crRNA and tracrRNA used for gRNAs with SpCas9 was GUUUUAGAGCUAGAAAUAGCAAGUUAAAAUAAGGCUAGUCCGUUAUCAACUUGAAAA AGUGGCACCGAGUCGGUGCUUUU (SEQ ID NO: 98). The crRNA and tracrRNA used for gRNAs with SaCas9 was GUUUUAGUACUCUGGAAACAGAAUCUACUAAAACAAGGCAAAAUGCCGUGUUUAUCU CGUCAACUUGUUGGCGAGAU (SEQ ID NO: 97).

[1317] Preparation and Transfection of SpCas9-Expressing HEK293 T Cells. A cell line stably expressing the CRISPR Cas9 nuclease was purchased from Genecopoeia. Cas9 is integrated at the human AAVS1 Safe Harbor locus (also known as PPP1R2C). This cell line also expresses copGFP and the puromycin resistance gene. In combination with separately transfected or transduced single guide RNAs (sgRNAs), this cell line will sustain double-strand DNA breaks (DSBs) at targeted genome sites. Cas9 expressing HEK 293 T cells were transfected with individual IVT gRNAs using MessengerMax lipofectamine-based delivery. Genomic DNA was isolated from the cells and amplified by PCR. Sanger sequencing and TIDE analysis were used to quantify the frequency of indels generated by each sgRNA.

[1318] Preparation and Electroporation of DM1 iPSC Cell Lines. SBI Cell Line: Cells were isolated from peripheral blood mononuclear cells from an adult female DM1 patient (source of cells from Nicholas E. Johnson (Virginia Commonwealth University)) and reprogrammed with the CytoTune®-iPS Sendai reprogramming kit. Individual iPSC clones were isolated, including clone SB1. The SB1 cell line had a pluripotency signature consistent with an iPSC cell line by Nanostring assay. High resolution aCGH karyotyping revealed no gross genomic abnormalities. Southern analysis confirmed that the SB1 cell line contains a pathogenic CTG repeat expansion (˜300 CTG repeats) (FIG. 52).

[1319] 4033-4 Cell Line: A parent fibroblast line derived from an adult DM1 male (GM04033, Coriell Institute) was reprogrammed using CytoTune®-iPS 2.0 Sendai Reprogramming Kit. Individual iPSC clones were isolated, including clone 4033-4. Southern blot analysis confirmed that the 4033-4 cell line contains a pathogenic CTG repeat expansion (3000 CTG repeats).

[1320] Electroporation of DM1 iPSC cells: DM1 iPSC cells (200,000 per reaction) were mixed with RNPs prepared as follows.

[1321] Broadly, RNP complexes for experiments corresponding to FIGS. 54-60 and FIGS. 67-68 were prepared by assembling 1.5 μg each of the 5′ guide, the 3′ guide, and 3 μg of the SpCas9 (FIGS. 54-60) or SaCas9 nuclease (FIGS. 67-68). Guide RNAs were diluted to 1.5 μg/μl and Cas9 nucleases were diluted to 3 μg/μl and 1μl of each component was combined together and complexed together for a minimum of 10 minutes at room temperature.

[1322] RNP complexes for experiments corresponding to FIGS. 55-56 were prepared by assembling 2 μg guide and 2 μg of the SaCas9 nuclease. Individual chemically synthesized guide RNAs were diluted to 2 μg/μl and Cas9 nucleases were diluted to 2 μg/μl and 1μl of each component was combined together and complexed together for a minimum of 10 minutes at room temperature.

[1323] Cells were electroporated with a Lonza Nucleofector (CA-137 setting) and harvested 72 hours post electroporation. Genomic DNA was isolated and used as template for subsequent PCR for TIDE analysis and ddPCR deletion analysis.

[1324] Sequencing and TIDE Analysis. PCR was Performed on Genomic DNA as Follows.

[1325] PCR Sample:

| | Volume (μl) |
|---|---|
| Platinum | 45 |
| Enhancer | 5 |
| Primer (10 μM) | 1 |
| DNA | 1 |

[1326] PCR Conditions:

| | 34X | | | | |
|---|---|---|---|---|---|
| 94 C. | 94 C. | 60 C. | 68 C. | 68 C. | 4 C. |
| 2 min | 15 sec | 30 sec | 3 min | 10 min | ∞ |

[1327] PCR products were cleaned up using AMPure bead-based PCR purification (Beckman Coulter). The AMPure bead bottle was vortexed and aliquoted into a falcon tube. Following incubation for 30 minutes at room temperature, 85 μL of beads were added to each well of PCR products, pipetted up and down 10 times and incubated for 10 minutes. The bead mixture was then placed on a magnet for 5 minutes. Liquid was aspirated, and beads were washed twice with 70% EtOH while keeping the plate on the magnet. The plate was then removed from the magnet and 20 μL of dH2O was added to the beads and pipetted up and down to mix. Following incubation for 5-10 minutes, the plate was placed on the magnet for 1 minute. The dH2O containing the DNA was removed and PCR concentrations were analyzed on by nanodrop.

[1328] PCR products were sent for sequenced using Forward Primer (SEQ ID NO: 57) and Reverse Primer (SEQ ID NO: 58). Indel values were estimated using the TIDE analysis algorithm. TIDE is a method based on the recovery of indels' spectrum from the sequencing electrophoretograms to quantify the proportion of template-mediated editing events (Brinkman, E A et al. (2014) Nucleic Acids Res. 42: e168; PMID: 25300484).

[1329] Two Loss-of-Signal (LOS) Droplet Digital PCR (ddPCR) Assay. The loss-of-signal ddPCR assay amplifies a region of the 3′ UTR of DMPK that is 5′ of the CTG repeat region or 3′ of the CTG region and detects the loss-of-signal of a probe targeting the amplified region as a result of successful deletion of the CTG repeat region (see FIG. 53 schematic of assay). The “dual” or “two” LOS ddPCR assay refers to results from both the 5′ LOS and 3′ LOS assays.

[1330] For the 5′ LOS ddPCR assay, Forward Primer (SEQ ID NO: 59), Reverse Primer (SEQ ID NO: 60), and Probe (SEQ ID NO: 61) were used.

[1331] For the 3′ LOS ddPCR assay, Forward Primer (SEQ ID NO: 62), Reverse Primer (SEQ ID NO: 63), and Probe (SEQ ID NO: 64) were used.

[1332] The ddPCR samples were setup at room temperature. DNA samples were diluted to a concentration of 10-20 ng/μL Diluted DNA (4 μL) was added to 21 μL of ddPCR mix.

[1333] dd PCR mix:

| | 1X |
|---|---|
| 2X Droplet PCR Supermix | 12.5 |
| Forward Primer (18 uM) | 1.25 |
| Reverse Primer (18 uM) | 1.25 |
| Probe (5 uM) | 1.25 |
| RPP30 (dHsaCP2500350) | 1 |
| HINDIII | 0.2 |
| H20 | 3.55 |
| Mix volume | 21 |

[1334] The plate was sealed with a heat seal and mixed by vortexing, and then centrifuged briefly. The final volume was 25 μL.

[1335] The samples were transferred to a 96 well plate for auto digital generation. Droplets (40 laL) were generated and the plate was transferred to the PCR machine.

[1336] A three-step cycling protocol was run:

| #Cycles | Temp | Duration of Cycle |
|---|---|---|
| 1 | 95 C. | 10 min |
| 40 | 94 C. | 30 sec |
| | 60 C. | 1 min |
| 1 | 98 C. | 10 min |
| 1 | 4 C. | forever |

[1337] The reference gene used for 5′ and 3′ loss-of-signal (LOS) ddPCRs was RPP30.

[1338] Differentiation Protocol for DM1 Cardiomyocytes. DM1 cardiomyocytes were prepared from the DM1 iSPC cell line SB1. Cells were activated with Wnt (4 ₗ uM CHIR) for 2 days, followed by Wnt inactivation (4 μM WNT-059) for 2 days. Cells were rested for a recovery period in CDM3 media for 6 days. Cells were then transferred to CDM3-no glucose media for metabolic selection for 1 day.

[1339] DM1 cardiomyocytes (250,000 per reaction) were mixed with RNPs prepared as follows. Individual chemically synthesized guide RNAs were diluted to 1.5 μg/μl and Cas9 nucleases were diluted to 3 μg/μl and 1 μl of each component was combined together and complexed together for a minimum of 10 minutes at room temperature.

[1340] RNP complexes for experiments corresponding to FIGS. 61-64 were prepared by assembling 1.5 μg each of the 5′ guide, the 3′ guide, and 3 μg of the SpCas9 nuclease.

[1341] Cells were electroporated a with Lonza Nucleofector (CA-137 setting) and incubated in iCell Maintenance Media. Cells were harvested 72 hours post electroporation. Genomic DNA was isolated and used as template for subsequent PCR for TIDE analysis and ddPCR deletion analysis.

[1342] Off-Target Analysis and Hybrid Capture Assay. Homology-dependent off-target site nomination. Off-target sites were computationally predicted for each sgRNA based on sequence similarity to the hg38 human reference genome and the presence of a protospacer adjacent motif (PAM) sequence using three prediction algorithms; CCTop, CRISPOR and COSMID. CCTop and CRISPOR were used to nominate potential off-target sites with up to 3 mismatches relative to the sgRNA sequence. The COSMID algorithm can nominate off-targets sites with gaps and was used to nominate potential off-target sites with up to 3 mismatches with no gaps or up to 2 mismatches with 1 gap relative to the sgRNA sequence. All three algorithms nominated potential off-target sites with the optimal SpCas9 NGG PAM. Alternate PAMs were also included in the search using COSMID (NAG) and CCTop (NAG, NGA, NAA, NCG, NGC, NTG, and NGT). Predicted off-target sites were filtered to exclude sites overlapping low-complexity regions since these regions are subject to promiscuous probe enrichment and sequencing errors that result in incorrect read mapping and indel calling. A total of 577 potential off-target sites were nominated across the 12 sgRNAs (SEQ ID NOs: 3778, 4026, 3794, 4010, 3906, 3746, 1778, 1746, 1770, 1586, 1914, and 2210).

[1343] Hybrid capture probe library design. Percent editing at the on-target site and off-target sites were measured using a hybrid capture assay. Hybrid capture probes were generated to enrich regions of the genome containing the on-target sites and predicted off-targets. For each site, 100 bp flanking region was added both upstream and downstream of the site, and then 120 bp probes were tiled across the site including both flanking regions. Multiple probes were designed per site for all predicted off-target sites as well as on-target sites. Hybrid capture probes from all 12 sgRNAs were pooled together and one Agilent SureSelect probe set was ordered. The total target region of the hybrid capture library was 124.85 kilobases.

[1344] Generation of edited and control samples. Hybrid capture assay samples were generated by electroporating two WT donor iPSC lines (1000,000 cells per reaction) with RNPs prepared by assembling 10 gg sgRNA and 10 gg of the SpCas9 nuclease. Cells were electroporated with a Lonza Nucleofector (CA-137 setting) and harvested 72 hours post electroporation. Samples were generated for 12 sgRNAs (SEQ ID NOs: 3778, 4026, 3794, 4010, 3906, 3746, 1778, 1746, 1770, 1586, 1914, and 2210). Control samples electroporated with only 10 gg of the SpCas9 nuclease were also generated. Genomic DNA was isolated (QlAamp UCP Micro Kit) for hybrid capture followed by sequencing. Only one donor was available for the sgRNA SEQ ID NO: 2210.

[1345] Hybrid capture library preparation. Hybrid capture enrichment of on-target and off-target regions using hybrid capture probes was performed as per sample preparation described for 200 ng input genomic DNA samples in the Agilent SureSelectXT HS manufacturer's protocol (Agilent Technologies, Santa Clara, Calif., USA).). Briefly, the genomic DNA was fragmented by acoustic shearing with a Covaris LE220 instrument. DNA fragments were end repaired and then adenylated at the 3′ ends. 5′ and 3′ specific adapters were ligated to the DNA fragments, and adapter-ligated DNA fragments were amplified and indexed with indexing primers. Adapter-ligated DNA fragments were validated using the Agilent D1000 ScreenTape assay on the Agilent 4200 TapeStation, and quantified using a Qubit 3.0 Fluorometer with the Qubit dsDNA BR Assay Kit. 1000 ng adapter-ligated DNA fragments were hybridized with biotinylated RNA baits using a pre-programmed thermocycler for 1.5 hours following the manufacturing recommendations. The hybridized DNAs were captured by streptavidin-coated magnetic beads (Dynabeads MyOne Streptavidin T1). After extensive washes, the captured DNA fragments were enriched with limited cycle PCR. Post-captured DNA libraries were validated using the Agilent High Sensitivity D1000 ScreenTape assay on the Agilent 4200 Tape Station and quantified using Qubit 3.0 Fluorometer with the Qubit dsDNA HS Assay Kit. The libraries were subpooled at a concentration of 50 ng/library, with 4-5 libraries per subpool. The subpools were diluted 1:10 in 10 mM Tris-HCl pH 8.0 and quantitated by qPCR using the KAPA Library Quantification kit-Universal. The subpools were normalized to 4 nM and combined equally to create the final sequencing pool.

[1346] Hybrid capture library sequencing and analysis. The final sequencing pool was loaded onto the Illumina NextSeq machine (Illumina, San Diego, Calif., USA) at a final concentration of 1.8 μM with 5% PhiX spiked in and sequenced using a Illumina high output v2.5 reagent kit with the following configuration: 150×8×8×150 to achieve 3000X coverage.

[1347] Illumina basecalls were converted to FASTQ format and de-multiplexed by sample-specific barcode using bcl2fastq Conversation Software. Sequencing data was aligned with the BWA MEM algorithm using default parameters to human genome build hg38. De-duplication of the aligned reads was completed with SAMtools. For each on-target site and predicted off-target site, primary read alignments that covered the site and an additional 20 bases on each end were considered for indel quantification. The sum of all reads containing indels within 10 bp of the potential SpCas9 cleavage site was divided by the total number of reads aligned to the cleavage site that passed the filtering criterion, giving the indel frequency at that candidate cut site. Sites with at least 0.2% indel frequency difference between at least one pair of edited and control samples were subject to statistical testing to identify sites that may show significant CRISPR/Cas9 editing. For such sites, a one- tailed paired Student's t-test was performed to test for significantly more editing in edited samples relative to controls. If the test result was significant with P <0.05, the site was considered a confirmed off-target. Since only two donors were available for 11 sgRNA and only one donor was available for the 12th sgRNA (SEQ ID NO: 2210), sites that failed the statistical test were manually inspected and if necessary annotated as “potential off-target sites”, and can be further investigated with more donors and higher sequencing depth.

[1348] Hybrid capture assay samples were prepared as shown below.

| Sample | Replicates | Total |
|---|---|---|
| Treated samples (1-12) | 2 | 24 |
| Untreated control | 2 | 2 |
| Total | | 26 |

[1349] b. Screening of gRNAs in HEK293 T Cells with SpCas9

[1350] To assess editing efficiency of individual gRNAs, 169 gRNAs flanking the CTG repeat region of the DMPK gene were selected for screening in HEK293 T cells expressing SpCas9. Cells were transfected with individual gRNAs using lipofectamine-based delivery. Genomic DNA was isolated from the cells and amplified by PCR. Sanger sequencing and TIDE analysis were used to quantify the frequency of indels generated by each sgRNA. Results are shown as % editing efficiency by TIDE analysis (Table 17).

TABLE 17

| Guide | SEQ | | Editing |
|---|---|---|---|
| RNA | ID NO | Guide Sequence | Efficiency (%) |
| T107 | 2202 | GTGCATGACGCCCTGCTCTG | 99 |
| T131 | 2170 | GCCAGACGCTCCCCAGAGCA | 98.9 |
| T18 | 1746 | TCGTCCTCCGACTCGCTGAC | 98.3 |
| T14 | 2258 | CTTTGCGAACCAACGATAGG | 98.2 |
| T83 | 2210 | TGTGCATGACGCCCTGCTCT | 98.2 |
| T150 | 1346 | CAGAGCTTTGGGCAGATGGA | 97.9 |
| T73 | 1914 | CTCCGAGAGCAGCGCAAGTG | 97.4 |
| T113 | 2178 | GCCCTGCTCTGGGGAGCGTC | 97.4 |
| T146 | 1338 | CCAGAGCTTTGGGCAGATGG | 96.7 |
| T98 | 1642 | AACGTGGATTGGGGTTGTTG | 96.5 |
| T20 | 2322 | CACGCACCCCCACCTATCGT | 95.8 |
| T108 | 1706 | GTAGCCTGTCAGCGAGTCGG | 95.6 |
| T79 | 2346 | CGTGGAGGATGGAACACGGA | 94.8 |
| T13 | 2242 | GCACTTTGCGAACCAACGAT | 94.2 |
| T10 | 1778 | AATATCCAAACCGCCGAAGC | 94.1 |
| T35 | 3794 | CGGAGCGGTTGTGAACTGGC | 93.9 |
| T49 | 1426 | TATTCGCGAGGGTCGGGGGT | 93.2 |
| T66 | 2050 | TTTGCCAAACCCGCTTTTTC | 91.8 |
| T72 | 1538 | GGGACAGACAATAAATACCG | 91.6 |
| T69 | 1578 | ACTGAGACCCCGACATTCCT | 91.5 |
| T160 | 1962 | GAGCAGCGCAAGTGAGGAGG | 91.2 |
| T53 | 1842 | GCCGGCTCCGCCCGCTTCGG | 91.1 |
| T114 | 2162 | CGCCAGACGCTCCCCAGAGC | 90.3 |
| T55 | 4010 | CCGGAGTCGAAGACAGTTCT | 90.2 |
| T8 | 4026 | TAGAACTGTCTTCGACTCCG | 89.9 |
| T50 | 1586 | GTCTCAGTGCATCCAAAACG | 89.9 |
| T80 | 1554 | AATAAATACCGAGGAATGTC | 89.6 |
| T39 | 3914 | GGGCACTCAGTCTTCCAACG | 89.5 |
| T24 | 2282 | TGCGAACCAACGATAGGTGG | 88.8 |
| T91 | 1634 | AAACGTGGATTGGGGTTGTT | 88.8 |
| T43 | 1738 | TGTCAGCGAGTCGGAGGACG | 88.7 |
| T26 | 1786 | ATCCAAACCGCCGAAGCGGG | 88.3 |
| T57 | 3906 | CGGGCACTCAGTCTTCCAAC | 87.9 |
| T22 | 2266 | TTTGCGAACCAACGATAGGT | 87.7 |
| T74 | 1658 | AACAACCCCAATCCACGTTT | 87.7 |
| T97 | 2114 | CGATCTCTGCCTGCTTACTC | 87.2 |
| T25 | 1434 | CCCCGACCCTCGCGAATAAA | 87 |
| T45 | 4018 | CGGAGTCGAAGACAGTTCTA | 87 |
| T103 | 3722 | GCTGGGCGGAGACCCACGCT | 86.8 |
| T42 | 4042 | CCTAGAACTGTCTTCGACTC | 86.7 |
| T87 | 3938 | CCGTTGGAAGACTGAGTGCC | 86.5 |
| T104 | 3898 | CCGGGCACTCAGTCTTCCAA | 85.5 |
| T58 | 3922 | GTTGGAAGACTGAGTGCCCG | 85.4 |
| T134 | 3818 | GGTTGTGAACTGGCAGGCGG | 84.5 |
| T135 | 1946 | AGAGCAGCGCAAGTGAGGAG | 84.5 |
| T147 | 2338 | GGTGCGTGGAGGATGGAACA | 84.5 |
| T44 | 1602 | GTGCATCCAAAACGTGGATT | 84.2 |
| T122 | 1890 | GCTGCTCTCGGAGCCCCAGC | 84.2 |
| T48 | 1850 | CCAGCCGGCTCCGCCCGCTT | 84 |
| T2 | 3778 | GTTCACAACCGCTCCGAGCG | 83.8 |
| T36 | 1714 | CCGACTCGCTGACAGGCTAC | 83.8 |
| T41 | 2090 | AGCAAATTTCCCGAGTAAGC | 83.8 |
| T154 | 3690 | ATCACAGGACTGGAGCTGGG | 83.5 |
| T33 | 1562 | ATAAATACCGAGGAATGTCG | 83.2 |
| T120 | 1690 | CCTGTAGCCTGTCAGCGAGT | 82.9 |
| T28 | 2010 | GCGCGGGATCCCCGAAAAAG | 82.3 |
| T30 | 2018 | CGCGGGATCCCCGAAAAAGC | 81.4 |
| T121 | 1818 | CCGAAGCGGGCGGAGCCGGC | 81 |
| T96 | 2130 | GCGATCTCTGCCTGCTTACT | 80.2 |
| T61 | 3746 | GCGGAGACCCACGCTCGGAG | 79.2 |
| T64 | 4034 | CTAGAACTGTCTTCGACTCC | 79.2 |
| T34 | 1770 | AAATATCCAAACCGCCGAAG | 78.9 |
| T117 | 3682 | CGGATCACAGGACTGGAGCT | 78.3 |
| T106 | 3802 | AGCGGTTGTGAACTGGCAGG | 78.2 |
| T105 | 3930 | CGTTGGAAGACTGAGTGCCC | 77.6 |
| T93 | 1978 | CTCCTCACTTGCGCTGCTCT | 77.5 |
| T102 | 3658 | GCGGGCCCGGATCACAGGAC | 77.3 |
| T115 | 3674 | CCGGATCACAGGACTGGAGC | 77.3 |
| T4 | 1378 | GGAGGGCCTTTTATTCGCGA | 77 |
| T60 | 1610 | TGCATCCAAAACGTGGATTG | 76.9 |
| T12 | 1386 | GGCCTTTTATTCGCGAGGGT | 76.1 |
| T137 | 1482 | TCGGGGGTGGGGGTCCTAGG | 75.4 |
| T6 | 1402 | CCTTTTATTCGCGAGGGTCG | 75.2 |
| T100 | 1930 | CGAGAGCAGCGCAAGTGAGG | 75.2 |
| T111 | 1546 | CAATAAATACCGAGGAATGT | 74.6 |
| T143 | 3834 | GAACTGGCAGGCGGTGGGCG | 74.6 |
| T139 | 1834 | GAAGCGGGCGGAGCCGGCTG | 74.4 |
| T16 | 1394 | GCCTTTTATTCGCGAGGGTC | 73.8 |
| T31 | 3418 | GGGTCCGCGGCCGGCGAACG | 73.7 |
| T119 | 1938 | GAGAGCAGCGCAAGTGAGGA | 73.7 |
| T27 | 2026 | GATCCCCGAAAAAGCGGGTT | 73.3 |
| T54 | 1418 | TTATTCGCGAGGGTCGGGGG | 73.3 |
| T84 | 3514 | CTCCCTCCCCGGCCGCTAGG | 73.3 |
| T21 | 3394 | GGCCGGCGAACGGGGCTCGA | 72.1 |
| T133 | 3330 | CAGCAGCATTCCCGGCTACA | 71.3 |
| T129 | 4506 | CCTCCATCTGCCCAAAGCTC | 71.2 |
| T99 | 3946 | TCAGTCTTCCAACGGGGCCC | 69.8 |
| T163 | 1970 | AGCAGCGCAAGTGAGGAGGG | 68.9 |
| T11 | 3770 | TTCACAACCGCTCCGAGCGT | 68.1 |
| T81 | 3610 | GGGCCCGCCCCCTAGCGGCC | 67.9 |
| T3 | 3370 | ACCCTTCGAGCCCCGTTCGC | 67.8 |
| T90 | 3858 | CGGCTTCTGTGCCGTGCCCC | 67.6 |
| T75 | 3826 | GTTGTGAACTGGCAGGCGGT | 66.6 |
| T1 | 1410 | CTTTTATTCGCGAGGGTCGG | 66.2 |
| T152 | 3474 | CCCCTCCCTCCCCGGCCGCT | 65.6 |
| T149 | 3314 | AGCAGCAGCAGCAGCATTCC | 65.2 |
| T136 | 2370 | GCCCGGCTTGCTGCCTTCCC | 64.6 |
| T156 | 3442 | GGAGGGGCCGGGTCCGCGGC | 64.5 |
| T89 | 3506 | CCTCCCTCCCCGGCCGCTAG | 63.9 |
| T92 | 3850 | GCGGCTTCTGTGCCGTGCCC | 63.6 |
| T95 | 3490 | CCCTCCCTCCCCGGCCGCTA | 62.9 |
| T158 | 2418 | GGCAAACTGCAGGCCTGGGA | 62.6 |
| T67 | 2506 | GCTGAGGCCCTGACGTGGAT | 62 |
| T86 | 3602 | GGCCCGCCCCCTAGCGGCCG | 61.9 |
| T130 | 1514 | TTTATTGTCTGTCCCCACCT | 61.9 |
| T138 | 3538 | CCCTAGCGGCCGGGGAGGGA | 60.2 |
| T63 | 3642 | GATCCGGGCCCGCCCCCTAG | 60 |
| T38 | 3434 | CCGGGTCCGCGGCCGGCGAA | 59.5 |
| T62 | 2474 | GACGTGGATGGGCAAACTGC | 59.4 |
| T164 | 3522 | CCTAGCGGCCGGGGAGGGAG | 59.2 |
| T125 | 3698 | CAGCTCCAGTCCTGTGATCC | 59 |
| T17 | 3386 | GCCGGCGAACGGGGCTCGAA | 58.2 |
| T76 | 2298 | CAACGATAGGTGGGGGTGCG | 57.7 |
| T148 | 2394 | GGCCTGGGAAGGCAGCAAGC | 57.7 |
| T29 | 2458 | GCAGTTTGCCCATCCACGTC | 57.4 |
| T82 | 3634 | AGGGGGCGGGCCCGGATCAC | 57.4 |
| T19 | 3426 | CGGGTCCGCGGCCGGCGAAC | 56.7 |
| T88 | 3530 | CCTCCCCGGCCGCTAGGGGG | 56.1 |
| T46 | 2226 | TTGTGCATGACGCCCTGCTC | 55.5 |
| T9 | 2042 | TTGCCAAACCCGCTTTTTCG | 55.1 |
| T112 | 3706 | CCAGCTCCAGTCCTGTGATC | 54.4 |
| T126 | 2522 | GCCAGGCTGAGGCCCTGACG | 54.1 |
| T85 | 3618 | CGGGCCCGCCCCCTAGCGGC | 53.1 |
| T70 | 1826 | CGAAGCGGGCGGAGCCGGCT | 52.5 |
| T68 | 1802 | ACCGCCGAAGCGGGCGGAGC | 52.1 |
| T116 | 1650 | ACGTGGATTGGGGTTGTTGG | 52 |
| T94 | 1626 | AAAACGTGGATTGGGGTTGT | 50.7 |
| T110 | 2514 | GGCTGAGGCCCTGACGTGGA | 49.3 |
| T118 | 3890 | AAGACTGAGTGCCCGGGGCA | 49.1 |
| T59 | 2466 | CAGTTTGCCCATCCACGTCA | 48.3 |
| T37 | 3354 | GCTCGAAGGGTCCTTGTAGC | 47.9 |
| T52 | 1594 | AGTGCATCCAAAACGTGGAT | 47.8 |
| T144 | 1498 | GGGGGTGGGGGTCCTAGGTG | 46.6 |
| T123 | 2314 | CGATAGGTGGGGGTGCGTGG | 46 |
| T71 | 3546 | CTCCCCGGCCGCTAGGGGGC | 44.2 |
| T167 | 3450 | GGACCCGGCCCCTCCCTCCC | 44.1 |
| T132 | 2442 | GGATGGGCAAACTGCAGGCC | 40.9 |
| T159 | 1458 | TTCGCGAGGGTCGGGGGTGG | 40.4 |
| T157 | 3458 | GGAGGGAGGGGCCGGGTCCG | 40.1 |
| T153 | 2546 | GCCTGGCCGAAAGAAAGAAA | 39.6 |
| T51 | 3410 | CCGTTCGCCGGCCGCGGACC | 38 |
| T128 | 2498 | TCCACGTCAGGGCCTCAGCC | 37.8 |
| T162 | 2330 | AGGTGGGGGTGCGTGGAGGA | 37.4 |
| T40 | 3378 | CGAGCCCCGTTCGCCGGCCG | 37.3 |
| T77 | 3570 | CGCCCCCTAGCGGCCGGGGA | 37.3 |
| T145 | 1994 | GCAAGTGAGGAGGGGGGCGC | 37 |
| T109 | 2570 | ACCATTTCTTTCTTTCGGCC | 36.6 |
| T56 | 3346 | CTCGAAGGGTCCTTGTAGCC | 35.4 |
| T140 | 3554 | CCCCTAGCGGCCGGGGAGGG | 33.6 |
| T101 | 1442 | ATTCGCGAGGGTCGGGGGTG | 33.1 |
| T168 | 2554 | TCTTTCTTTCGGCCAGGCTG | 28.2 |
| T78 | 3578 | CCGCCCCCTAGCGGCCGGGG | 26.7 |
| T5 | 1370 | TGGAGGGCCTTTTATTCGCG | 25.9 |
| T141 | 2434 | GATGGGCAAACTGCAGGCCT | 25.1 |
| T32 | 3994 | CTTCGACTCCGGGGCCCCGT | 21.4 |
| T124 | 1490 | CGGGGGTGGGGGTCCTAGGT | 20.8 |
| T7 | 1810 | CTCCGCCCGCTTCGGCGGTT | 15.3 |
| T172 | 3498 | GCGGCCGGGGAGGGAGGGGC | 15 |
| T15 | 2274 | TTGCGAACCAACGATAGGTG | 14.5 |
| T155 | 2378 | GCCTGGGAAGGCAGCAAGCC | 14.4 |
| T65 | 2058 | TTTTGCCAAACCCGCTTTTT | 12.3 |
| T142 | 2586 | CACAGACCATTTCTTTCTTT | 11.9 |
| T23 | 3762 | CGCTCGGAGCGGTTGTGAAC | 9.7 |
| T171 | 3482 | CGGCCGGGGAGGGAGGGGCC | 8.3 |
| T47 | 2354 | AGGATGGAACACGGACGGCC | 3.8 |
| T127 | 3586 | CGGCCGCTAGGGGGCGGGCC | 3.4 |
| T161 | 1474 | GGGTCGGGGGTGGGGGTCCT | 3.2 |
| T151 | 1986 | CGCAAGTGAGGAGGGGGGCG | 2.2 |
| T165 | 2658 | CTGCTGCTGCTGCTGCTGGG | |

*The same guide (based on SEQ ID NO) may be referred to throughout with a “U” number and a “T” number.

[1351] c. Screening of gRNAs in DM1 iPSC Cell Lines with SpCas9

[1352] Guide RNAs were selected for screening in two DM1 iPSC cell lines (SB1 and 4033-4). Both cell lines contain a pathogenic CTG repeat region.

[1353] Six upstream gRNAs (5′ side of the CTG repeat region) (SEQ ID NOs: 3778, 4026, 3794, 4010, 3906, and 3746) and six downstream gRNAs (3′ side of the CTG repeat region) (SEQ ID NOs: 1778, 1746, 1770, 1586, 1914, and 2210) (see FIG. 54 schematic) were tested for editing efficiency in SB1 cells delivered as RNPs with SpCas9. Results are shown as percent editing efficiency (FIG. 55).

[1354] The same gRNAs were further evaluated for the ability to delete the CTG repeat region of the DMPK gene either alone or in pairs in SB1 cells. Thirty six pair combinations were evaluated for CTG repeat region deletion. A two loss-of-signal ddPCR assay was used to detect repeat deletion (see FIG. 53 schematic). The percentage of CTG repeat region deletion ranged from 27% to 65% across the 36 pairs in SB1 cells (Table 18). The % deletion shown in FIG. 56 is a combined average repeat deletion from both LOS assays for individual gRNAs and pairs. The deletion efficiency results from each of the 5′ and 3′ LOS assays, as well as the average repeat deletion from both LOS assays, are shown in Table 18 for individual gRNAs and pairs. A comparison of the 5′ and 3′ LOS ddPCR results across SpCas9 pairs and individual gRNAs is shown in FIG. 57. Guide RNA (T34) showed CTG repeat region deletion activity as an individual guide and may be able to cause repeat deletion alone (FIG. 56, FIG. 57).

TABLE 18

| | | | | |
|---|---|---|---|---|
| | | | | Average |
| SEQ ID NO | SEQ ID NO | 5′ LOS Deletion | 3′ LOS Deletion | Deletion |
| (5′ Guide RNA) | (3′ Guide RNA) | Efficiency (%) | Efficiency (%) | Efficiency (%) |

gRNA Pairs

| | | | | |
|---|---|---|---|---|
| 3778 (T40) | 1778 (T10) | 44 | 46 | 45 |
| 3778 (T40) | 1746 (T18) | 32 | 31 | 31.5 |
| 3778 (T40) | 1770 (T34) | 43 | 45 | 44 |
| 3778 (T40) | 1586 (T50) | 37 | 36 | 36.5 |
| 3778 (T40) | 1914 (T73) | 38 | 33 | 35.5 |
| 3778 (T40) | 2210 (T83) | 48 | 48 | 48 |
| 4026 (T8) | 1778 (T10) | 43 | 41 | 42 |
| 4026 (T8) | 1746 (T18) | 40 | 42 | 41 |
| 4026 (T8) | 1770 (T34) | 45 | 42 | 43.5 |
| 4026 (T8) | 1586 (T50) | 43 | 46 | 44.5 |
| 4026 (T8) | 1914 (T73) | 41 | 35 | 38 |
| 4026 (T8) | 2210 (T83) | 45 | 46 | 45.5 |
| 3794 (T35) | 1778 (T10) | 38 | 33 | 35.5 |
| 3794 (T35) | 1746 (T18) | 28 | 26 | 27 |
| 3794 (T35) | 1770 (T34) | 44 | 41 | 42.5 |
| 3794 (T35) | 1586 (T50) | 34 | 31 | 32.5 |
| 3794 (T35) | 1914 (T73) | 32 | 33 | 32.5 |
| 3794 (T35) | 2210 (T83) | 48 | 45 | 46.5 |
| 4010 (T55) | 1778 (T10) | 33 | 46 | 39.5 |
| 4010 (T55) | 1746 (T18) | 42 | 37 | 39.5 |
| 4010 (T55) | 1770 (T34) | 47 | 43 | 45 |
| 4010 (T55) | 1586 (T50) | 38 | 37 | 37.5 |
| 4010 (T55) | 1914 (T73) | 42 | 38 | 40 |
| 4010 (T55) | 2210 (T83) | 64 | 67 | 65.5 |
| 3906 (T57) | 1778 (T10) | 39 | 35 | 37 |
| 3906 (T57) | 1746 (T18) | 37 | 32 | 34.5 |
| 3906 (T57) | 1770 (T34) | 44 | 40 | 42 |
| 3906 (T57) | 1586 (T50) | 37 | 34 | 35.5 |
| 3906 (T57) | 1914 (T73) | 35 | 33 | 34 |
| 3906 (T57) | 2210 (T83) | 43 | 45 | 44 |
| 3746 (T61) | 1778 (T10) | 50 | 45 | 47.5 |
| 3746 (T61) | 1746 (T18) | 45 | 47 | 46 |
| 3746 (T61) | 1770 (T34) | 49 | 48 | 48.5 |
| 3746 (T61) | 1586 (T50) | 47 | 46 | 46.5 |
| 3746 (T61) | 1914 (T73) | 44 | 43 | 43.5 |
| 3746 (T61) | 2210 (T83) | 58 | 58 | 58 |

Individual gRNAs

| | | | | |
|---|---|---|---|---|
| 3778 (T40) | | 6 | −1 | 2.5 |
| 4026 (T8) | | 10 | 1 | 5.5 |
| 3794 (T35) | | 4 | −4 | 0 |
| 4010 (T55) | | 10 | 3 | 6.5 |
| 3906 (T57) | | 3 | 0 | 1.5 |
| 3746 (T61) | | 8 | 3 | 5.5 |
| | 1778 (T10) | 5 | 3 | 4 |
| | 1746 (T18) | −2 | −5 | −3.5 |
| | 1770 (T34) | 18 | 18 | 18 |
| | 1586 (T50) | 6 | −1 | 2.5 |
| | 1914 (T73) | 2 | 2 | 2 |
| | 2210 (T83) | 4 | 7 | 5.5 |

[1355] Guide RNAs were selected for further testing with SpCas9 in another DM1 iPSC cell line (4033-4). Five upstream gRNAs (SEQ ID NOs: 3778, 4026, 3794, 3906, and 3746) and five downstream gRNAs (SEQ ID NOs: 1778, 1746, 1770, 1586, and 2210) were selected (see FIG. 58 schematic). The two loss-of-signal ddPCR assay was used to detect repeat deletion (see FIG. 53 schematic). FIG. 59 shows a comparison of 5′ and 3′ LOS ddPCR results across SpCas9 gRNA pairs and individual gRNAs in 4033-4 cells. Results are shown as percent deletion.

[1356] Similar CTG repeat deletion was observed between the DM1 iPSC cell line SB1 (FIG. 60A) and the DM1 iPSC cell line 4033-4 (FIG. 60B). It was further determined that the DM1 iPSC cell line SB1 has -1 kb CTG repeat allele, and the DM1 iPSC cell line 4033-4 has -7.5 kb CTG repeat allele.

[1357] d. Screening of gRNA Pairs in DM1 Cardiomyocytes with SpCas9

[1358] Guide RNAs were selected for further testing in DM1 cardiomyocytes with SpCas9. Five upstream gRNAs (SEQ ID NOs: 3778, 4026, 3794, 3906, and 3746) and five downstream gRNAs (SEQ ID NOs: 1778, 1746, 1770, 1586, and 2210) of the CTG repeat in the 3′ UTR of DMPK (see FIG. 61 schematic) were evaluated first for individual editing efficiency with SpCas9 in DM1 cardiomyocytes (FIG. 62). The editing results were similar in DM1 cardiomyocytes as obtained with DM1 iPSC SB1 cells (FIG. 62).

[1359] Three pairs of gRNAs (SEQ ID NOs: 3746 and 2210; 4026 and 1586; 3778 and 1778) were tested for CTG repeat deletion in DM1 cardiomyocytes and showed similar % deletion as obtained with DM1 iPSC SB1 cells by 5′ LOS ddPCR and 3′ LOS ddPCR (FIG. 63).

[1360] e. Off-Target Analysis

[1361] Twelve guide RNAs were tested for off-target activity with SpCas9 using a hybrid capture assay (SEQ ID NOs: 3778, 4026, 3794, 4010, 3906, 3746, 1778, 1746, 1770, 1586, 1914, and 2210). Results of editing at on-target site and maximum off-target editing across sites and 2 donors are shown in Table 19:

TABLE 19

| | | | Number of off- | Maximum | |
|---|---|---|---|---|---|
| | Editing at the | Number | target sites with | off-target | Conclusion from |
| | on-target site | of off- | >0.2% difference | editing | homology-based |
| | (%) from | target | between treated | across sites | hybrid capture for 2 |
| Guide | hybrid capture | sites | and untreated | and donors | donors (3 mm, 2 mm |
| RNA | data | tested | samples | (%) | 1 gap) |
| T02 | 97.48 | 6 | 0 | NA | No sequence-confirmed |
| | | | | | off-target sites |
| T08 | 97.28 | 19 | 0 | NA | No sequence-confirmed |
| | | | | | off-target sites |
| T10 | 98.05 | 15 | 0 | NA | No sequence-confirmed |
| | | | | | off-target sites |
| T18 | 98.37 | 15 | 0 | NA | No sequence-confirmed |
| | | | | | off-target sites |
| T34 | 84.29 | 48 | 0 | NA | No sequence-confirmed |
| | | | | | off-target sites |
| T35 | 97.07 | 22 | 0 | NA | No sequence-confirmed |
| | | | | | off-target sites |
| T50 | 92.13 | 54 | 1 | 0.23 | No sequence-confirmed |
| | | | | | off-target sites |
| T55 | 97.5 | 34 | 1 | 1.87 | >1% off-target site |
| T57 | 98.65 | 80 | 3 | 0.45 | Potential >0.2% off- |
| | | | | | target site |
| T61 | 97.5 | 102 | 3 | 0.48 | Potential >0.2% off- |
| | | | | | target site |
| T73 | 98.49 | 78 | 1 | 8.67 | >1% off-target site |
| T83 | 95.86 | 104 | 1 | 0.34 | Potential >0.2% off- |
| | | | | | target site |

[1362] Based on the off-target data, pairs of gRNAs identified as “clean,” “off-target <1%,” or “off-target >1%.” Multiple “clean” gRNAs pairs with SpCas9 were identified that also had greater than 25% CTG repeat deletion in SB1 cells (FIG. 64).

[1363] f. Screening of gRNAs with SaCas9

[1364] Thirty upstream gRNAs and thirty downstream gRNAs of the CTG repeat in the 3′ UTR of DMPK were selected (see FIG. 65 schematic) and tested for individual editing efficiency with SaCas9 in a wildtype iPSC line (FIG. 66, Table 20) by TIDE analysis. The wildtype iPSC cells used, cell line number 0052, is a GMP-grade iPSC line available through Rutgers University Cell and DNA Repository.

TABLE 20

| Guide | SEQ | | Editing |
|---|---|---|---|
| RNA | ID NO | Guide Sequence | Efficiency (%) |
| Sa1 | 4989 | GCGGGATGCGAAGCGGCCGAAT | 81.7 |
| Sa2 | 3256 | GCCCCGGAGTCGAAGACAGTTC | 78.5 |
| Sa3 | 2896 | CGCGGCCGGCGAACGGGGCTCG | 92.8 |
| Sa4 | 3136 | CCAGTTCACAACCGCTCCGAGC | 88.1 |
| Sa5 | 584 | GGGCCTTTTATTCGCGAGGGTC | 10.7 |
| Sa6 | 560 | AGATGGAGGGCCTTTTATTCGC | 71.5 |
| Sa7 | 4990 | GAGCTAGCGGGATGCGAAGCGG | 81.7 |
| Sa8 | 840 | CGGCTCCGCCCGCTTCGGCGGT | 0.7 |
| Sa9 | 1152 | CAACGATAGGTGGGGGTGCGTG | 32.1 |
| Sa10 | 672 | TGGGGACAGACAATAAATACCG | 4.1 |
| Sa11 | 752 | CCCAACAACCCCAATCCACGTT | 10.9 |
| Sa12 | 3216 | ACTCAGTCTTCCAACGGGGCCC | 86.1 |
| Sa13 | 696 | GGGGTCTCAGTGCATCCAAAAC | 1 |
| Sa14 | 4208 | ACAACGCAAACCGCGGACACTG | 88.3 |
| Sa15 | 4991 | CTTCGGCCGCCTCCACACGCCT | 70.2 |
| Sa16 | 3016 | CCCCGGCCGCTAGGGGGCGGGC | 1.8 |
| Sa17 | 976 | GGGGCGCGGGATCCCCGAAAAA | 46.7 |
| Sa18 | 744 | CAAAACGTGGATTGGGGTTGTT | 27.2 |
| Sa19 | 760 | TTGGGGGTCCTGTAGCCTGTCA | 84.4 |
| Sa20 | 712 | TCAGTGCATCCAAAACGTGGAT | 81.1 |
| Sa21 | 3224 | ACTCCGGGGCCCCGTTGGAAGA | 78.3 |
| Sa22 | 688 | GACAATAAATACCGAGGAATGT | 73.2 |
| Sa23 | 1240 | TCGGCCAGGCTGAGGCCCTGAC | 29 |
| Sa24 | 1128 | ACTTTGCGAACCAACGATAGGT | 79.3 |
| Sa25 | 984 | CTTTTGCCAAACCCGCTTTTTC | 12.3 |
| Sa26 | 2864 | GGCTCGAAGGGTCCTTGTAGCC | 85.5 |
| Sa27 | 608 | TTTATTCGCGAGGGTCGGGGGT | 47 |
| Sa28 | 4992 | CCGAAGGTCTGGGAGGAGCTAG | 6.5 |
| Sa29 | 616 | AGGACCCCCACCCCCGACCCTC | 21.4 |
| Sa30 | 1008 | GGGTTTGGCAAAAGCAAATTTC | 75.5 |
| Sa31 | 960 | AGCGCAAGTGAGGAGGGGGGCG | 1 |
| Sa32 | 2944 | CTAGCGGCCGGGGAGGGAGGGG | 1.6 |
| Sa33 | 1272 | CTGCTGCTGCTGCTGCTGCTGG | Cannot evaluate |
| | | | editing, gRNA |
| | | | cuts on the |
| | | | repeat |
| NSa1 | 1224 | CCAGGCTGAGGCCCTGACGTGG | 3.3 |
| NSa3 | 1136 | AACCAACGATAGGTGGGGGTGC | 0.7 |
| NSa4 | 3248 | TGTCTTCGACTCCGGGGCCCCG | 2.5 |
| NSa5 | 656 | AGGTGGGGACAGACAATAAATA | 2.6 |
| NSa6 | 864 | GCGGGCGGAGCCGGCTGGGGCT | 1.7 |
| NSa7 | 3144 | CGCCTGCCAGTTCACAACCGCT | 3.6 |
| NSa8 | 1056 | TCGCGCCAGACGCTCCCCAGAG | 1.8 |
| NSa12 | 3200 | GCCCCGTTGGAAGACTGAGTGC | 85.6 |
| NSa14 | 3096 | CGCCCAGCTCCAGTCCTGTGAT | 1.6 |
| NSa16 | 3160 | GGCGCGGCTTCTGTGCCGTGCC | 0.9 |
| NSa17 | 3064 | GGGGCGGGCCCGGATCACAGGA | 3 |
| NSa18 | 2880 | GGGGCTCGAAGGGTCCTTGTAG | 21.5 |
| NSa24 | 2856 | CATTCCCGGCTACAAGGACCCT | 27.4 |
| NSa34 | 2936 | CGGCCCCTCCCTCCCCGGCCGC | 1.4 |
| NSa40 | 3024 | CGGGCCCGCCCCCTAGCGGCCG | 2.2 |
| NSa41 | 2992 | CCCGCCCCCTAGCGGCCGGGGA | 1.5 |
| NSa42 | 3208 | CACTCAGTCTTCCAACGGGGCC | 53.2 |
| NSa45 | 3112 | GGAGCTGGGCGGAGACCCACGC | 54.5 |
| NSa49 | 2960 | GCCCCTCCCTCCCCGGCCGCTA | 2.5 |
| NSa51 | 3168 | ACTGAGTGCCCGGGGCACGGCA | 21.9 |
| NSa54 | 2904 | GTCCGCGGCCGGCGAACGGGGC | 14.9 |
| NSa55 | 3232 | GTCTTCCAACGGGGCCCCGGAG | 24.1 |
| NSa58 | 3128 | GAGACCCACGCTCGGAGCGGTT | 13.3 |
| NSa59 | 3240 | GTCTTCGACTCCGGGGCCCCGT | 49.8 |
| NSa63 | 3264 | ACCCTAGAACTGTCTTCGACTC | 1.2 |
| NSa64 | 3192 | CCCCGTTGGAAGACTGAGTGCC | 9.8 |
| NSa65 | 2912 | GGCCGGGTCCGCGGCCGGCGAA | 2 |

[1365] Four upstream gRNAs (SEQ ID NOs: 3256, 2896, 3136, and 3224) and six downstream gRNAs (SEQ ID NOs: 4989, 560, 672, 976, 760, 984, and 616) were selected for evaluation of CTG repeat region deletion in DM1 iPSC SB1 cells with saCas9 (see FIG. 67 schematic). The percentage of CTG repeat region deletion for saCas9 gRNA pairs and individual saCas9 gRNAs is shown in FIG. 68A based on results from the 3′ LOS ddPCR assay. The 5′ LOS assay did not accurately portray deletion due to single gRNAs knocking out the ddPCR primer site (n=1). Data from the 5′ and 3′ LOS ddPCR are shown in Table 21. The spCas9 gRNA pair (SEQ ID NOs: 3746/2210) was used as a control. Percent editing efficiencies are shown for individual saCas9 gRNAs in FIG. 68B.

TABLE 21

| SEQ ID NO | SEQ ID NO | 5′ LOS Deletion | 3′ LOS Deletion | Average Deletion |
|---|---|---|---|---|
| (5′ Guide RNA) | (3′ Guide RNA) | Efficiency (%) | Efficiency (%) | Efficiency (%) |
| 3256 (Sa2) | 4989 (Sa1) | 50 | 45 | 47.5 |
| 3256 (Sa2) | 984 (Sa25) | 51 | 44 | 47.5 |
| 3256 (Sa2) | 616 (Sa29) | 43 | 37 | 40 |
| 2896 (Sa3) | 4989 (Sa1) | Not determined | 43 | Not determined |
| 2896 (Sa3) | 672 (Sa10) | Not determined | 31 | Not determined |
| 2896 (Sa3) | 760 (Sa19) | Not determined | 66 | Not determined |
| 3136 (Sa4) | 4989 (Sa1) | 48 | 46 | 47 |
| 3136 (Sa4) | 560 (Sa6) | 55 | 49 | 52 |
| 3224 (Sa21) | 4989 (Sal) | 48 | 44 | 46 |
| 3224 (Sa21) | 976 (Sa17) | 42 | 40 | 41 |
| 3224 (Sa21) | 760 (Sa19) | 45 | 41 | 43 |
| | 4989 (Sa1) | 25 | 21 | 23 |
| 3256 (Sa2) | | 28 | 21 | 24.5 |
| 2896 (Sa3) | | Not determined | 16 | Not determined |
| 3136 (Sa4) | | 28 | 16 | 22 |
| | 560 (Sa6) | 24 | 24 | 24 |
| | 672 (Sa10) | −2 | −7 | −4.5 |
| | 976 (Sa17) | 6 | −1 | 2.5 |
| | 760 (Sa19) | 22 | 17 | 19.5 |
| 3224 (Sa21) | | 32 | 24 | 28 |
| | 984 (Sa25) | 2 | −5 | −1.5 |
| | 616 (Sa29) | 4 | −1 | 1.5 |

[1366] This description and exemplary embodiments should not be taken as limiting. For the purposes of this specification and appended claims, unless otherwise indicated, all numbers expressing quantities, percentages, or proportions, and other numerical values used in the specification and claims, are to be understood as being modified in all instances by the term “about,” to the extent they are not already so modified. Accordingly, unless indicated to the contrary, the numerical parameters set forth in the following specification and attached claims are approximations that may vary depending upon the desired properties sought to be obtained. At the very least, and not as an attempt to limit the application of the doctrine of equivalents to the scope of the claims, each numerical parameter should at least be construed in light of the number of reported significant digits and by applying ordinary rounding techniques.

[1367] It is noted that, as used in this specification and the appended claims, the singular forms “a,” “an,” and “the,” and any singular use of any word, include plural referents unless expressly and unequivocally limited to one referent. As used herein, the term “include” and its grammatical variants are intended to be non-limiting, such that recitation of items in a list is not to the exclusion of other like items that can be substituted or added to the listed items.

TABLE OF ADDITIONAL SEQUENCES

| SEQ | | |
|---|---|---|
| ID NO | Description | Sequence |
| 1 | F MBNL2 Ex5in qPCR | AGGCCAAAATCAAAGCTGCG |
| | primer | |
| 2 | R MBNL2 Ex5in qPCR | AAGGCCAGGTCTACAGTTGC |
| | primer | |
| 3 | F MBNL2 Ex4 (Total) | ACAGCACCATGATCGACACA |
| | qPCR primer | |
| 4 | R MBNL2 Ex4 (Total) | CGCAGCTTTGATTTTGGCCT |
| | qPCR primer | |
| 5 | F MBNL1 Ex5in qPCR | ATGCTCTCGGGAAAAGTGCA |
| | primer | |
| 6 | R MBNL1 Ex5in qPCR | AGGTCAAAGGTTGCCTCGAG |
| | primer | |
| 7 | F MBNL1 Ex4 (Total) | GTACCAACGTGGCAATTGCA |
| | qPCR primer | |
| 8 | R MBNL1 Ex4 (Total) | TGCACTTTTCCCGAGAGCAT |
| | qPCR primer | |
| 9 | F NCOR2 Ex45a in | TGCTATGCCCATAACCGCTGCTGA |
| | qPCR primer | |
| 10 | R NCOR2 Ex45a in | ACTTGGCTTTTCGGCTGCTG |
| | qPCR primer | |
| 11 | F NCOR2 (Total) qPCR | ACCCCAAAAAGCTGGCACCCTTCA |
| | primer | |
| 12 | R NCOR2 (Total) | AATGCCTTTGGTGATGCTTCCGCC |
| | qPCR primer | |
| 13 | F FN1 (Total) qPCR | GCAAACCCTGACACTGGAGT |
| | primer | |
| 14 | R FN1 (Total) qPCR | GCAGGAGCTCTGATCAGCAT |
| | primer | |
| 15 | F FN1 Ex25in qPCR | CTACACAGTCACAGGGCTGG |
| | primer | |
| 16 | R FN1 Ex25in qPCR | TGTTGGTGAATCGCAGGTCA |
| | primer | |
| 17 | F BIN1 (Total) qPCR | ACCCCCGAGATCAGAGTCAA |
| | primer | |
| 18 | R BIN1 (Total) qPCR | TGCTTGACTTCCTTGGACGG |
| | primer | |
| 19 | F BIN1 Exl1in qPCR | AACCTCAATGATGTGCTGGTCGGC |
| | primer | |
| 20 | R BIN1 Ex11in qPCR | AGGCGCGTTGTCACTGTTCTTC |
| | primer | |
| 21 | F KIF13A Ex26 | GGACAGTTACCAGGAAGAAGACT |
| | skipping qPCR primer | |
| 22 | R KIF13A Ex26 | ACCAGCACAGCATTCCTTTCC |
| | skipping qPCR primer | |
| 23 | F KIF13A (Total) qPCR | TGCGTAAGGGAGAGGTGGTCAGAT |
| | primer | |
| 24 | R KIF13A (Total) | TGGCACCAGCACAGCATTCCTT |
| | qPCR primer | |
| 25 | F GAPDH qPCR primer | GGTCTCCTCTGACTTCAACA |
| 26 | R GAPDH qPCR | GTGAGGGTCTCTCTCTTCCT |
| | primer | |
| 27 | F DMPK qPCR primer | CTGTTCGCCGTTGTTCTGTC |
| 28 | R DMPK qPCR primer | AGTTCTAGGGTTCAGGGAGC |
| 29 | DMPK-nest-F | CCTATCGGAGGCGCTTTCCC |
| | genotyping primer | |
| 30 | DMPK-nest-R | ACCGAGGAATGTCGGGGTCT |
| | genotyping primer | |
| 31 | AAVS1 gRNA | ACCCCACAGTGGGGCCACTA |
| 32 | DMPK 3′UTR forward | CGCTAGGAAGCAGCCAATGA |
| | PCR primer | |
| 33 | DMPK 3′UTR reverse | TAGCTCCTCCCAGACCTTCG |
| | PCR primer | |
| 34 | DMPK 3′UTR | AATGACGAGTTCGGACGG |
| | sequencing primer | |
| | UTRsF3 | |
| 35 | DMPK 3′UTR | TGTTCCATCCTCCACGCAC |
| | sequencing primer | |
| | UTRsF2 | |
| 36 | UpR2 | TCAAGCCTAAAGTACAAACTCCGG |
| 37 | AltF3 | TATCTGACCCAGTTACGCCACGGCT |
| 38 | Ouellet_seq_R3 | CAGTGAGCTGAGACTGAGCCA |
| 39 | Ouellet_seq_F2 | CAAGTGTGGCCATGATGGTCCT |
| 40 | Ouellet_seq_F1 | CCAGCATCTCTGGAAAAATAG |
| 41 | Ouellet R3 | AGGGGGAGCTTAGGGTCAAT |
| 42 | Ouellet F3 | GCTTTCCTGGAACGAGGTGA |
| 43 | LR_R6 | TAAAATACTGATTACATGTT |
| 44 | LR_R5 | ACTAGAAAATGTAGAATTATGTGTG |
| 45 | LR_R4 | GATAATATTTTGTATGTACTAGGTTG |
| 46 | LR_R1 | GCTGCTTTAGAAGTAGATGCAAGGGG |
| 47 | LR_F2 | ACTAGCTCACCCCGCTCCTTCTC |
| 48 | FXN_DWN_F4 | CCATCAGCAGAGTTTTTAATTTAGG |
| 49 | DwnSeqF2 | CTTGCACATCTTGGGTATTTGAGG |
| 50 | AltR1 | CAACCCATGCTGTCCACACAGG |
| 51 | AltF3RC | AGCCGTGGCGTAACTGGGTCAGATA |
| 52 | AltF1 | GATCCCTTCAGAGTGGCTGGTACG |
| 53 | 35 FWD | CACCGaaagaaaagttagccgggcg |
| 54 | 31 FWD mod | TGTATTTTTTAGTAGATACTGGG |
| 55 | NPC Primer 1 | AGTTCAGCGGCCGCGCTCAGCTCCGT |
| | | TTCGGTTTCACTTCCGGT |
| 56 | NPC Primer 2 | CAAGTCGCGGCCGCCTTGTAGAAAGC |
| | | GCCATTGGAGCCCCGCA |
| 53373 | GDG_AAVS1_1 | ATCCTGTCCCTAGTGGCCC |
| 53374 | Pac Bio primer 1 | CGCTAGGAAGCAGCCAATGA |
| 53375 | Pac Bio primer 2 | TAGCTCCTCCCAGACCTTCG |
| 53376 | Forward primer | CGCTAGGAAGCAGCCAATGA |
| | /5Phos/GGGT(16NT_in | |
| | dex) | |
| 53377 | Reverse primer | TAGCTCCTCCCAGACCTTCG |
| | /5Phos/CAGT(16NT_in | |
| | dex) | |
| 53378 | bc_1001_FWD_PacB.P | /5Phos/GGGTCACATATCAGAGTGCGCGCTAGGAAGCAG |
| | CR | CCAATGA |
| 53379 | bc_1002_FWD_PacB.P | /5Phos/GGGTACACACAGACTGTGAGCGCTAGGAAGCAG |
| | CR | CCAATGA |
| 53380 | bc_1003_FWD_PacB.P | /5Phos/GGGTACACATCTCGTGAGAGCGCTAGGAAGCAG |
| | CR | CCAATGA |
| 53381 | bc_1004_FWD_PacB.P | /5Phos/GGGTCACGCACACACGCGCGCGCTAGGAAGCAG |
| | CR | CCAATGA |
| 53382 | bc_1005_FWD_PacB.P | /5Phos/GGGTCACTCGACTCTCGCGTCGCTAGGAAGCAGC |
| | CR | CAATGA |
| 53383 | bc_1006_FWD_PacB.P | /5Phos/GGGTCATATATATCAGCTGTCGCTAGGAAGCAGC |
| | CR | CAATGA |
| 53384 | bc_1007_FWD_PacB.P | /5Phos/GGGTTCTGTATCTCTATGTGCGCTAGGAAGCAGC |
| | CR | CAATGA |
| 53385 | bc_1008_FWD_PacB.P | /5Phos/GGGTACAGTCGAGCGCTGCGCGCTAGGAAGCAG |
| | CR | CCAATGA |
| 53386 | bc_1009_FWD_PacB.P | /5Phos/GGGTACACACGCGAGACAGACGCTAGGAAGCAG |
| | CR | CCAATGA |
| 53387 | bc_1010_FWD_PacB.P | /5Phos/GGGTACGCGCTATCTCAGAGCGCTAGGAAGCAGC |
| | CR | CAATGA |
| 53388 | bc_1011_FWD_PacB.P | /5Phos/GGGTCTATACGTATATCTATCGCTAGGAAGCAGC |
| | CR | CAATGA |
| 53389 | bc_1012_FWD_PacB.P | /5Phos/GGGTACACTAGATCGCGTGTCGCTAGGAAGCAGC |
| | CR | CAATGA |
| 53390 | bc_1025_REV_PacB.P | /5Phos/CAGTGCGCGAGCGTGTCGCGTAGCTCCTCCCAGA |
| | CR | CCTTCG |
| 53391 | bc_1026_REV_PacB.P | /5Phos/CAGTTGTGCGTGTCTCTGTGTAGCTCCTCCCAGAC |
| | CR | CTTCG |
| 53392 | bc_1027_REV_PacB.P | /5Phos/CAGTTGTGAGAGAGTGTGAGTAGCTCCTCCCAGA |
| | CR | CCTTCG |
| 53393 | bc_1028_REV_PacB.P | /5Phos/CAGTGAGAGTCAGAGCAGAGTAGCTCCTCCCAGA |
| | CR | CCTTCG |
| 53394 | bc_1029_REV_PacB.P | /5Phos/CAGTTCTATAGACATATATATAGCTCCTCCCAGA |
| | CR | CCTTCG |
| 53395 | bc_1030_REV_PacB.P | /5Phos/CAGTGAGCGCGATAGAGAGATAGCTCCTCCCAGA |
| | CR | CCTTCG |
| 53396 | bc_1031_REV_PacB.P | /5Phos/CAGTCACACACTCAGACATCTAGCTCCTCCCAGA |
| | CR | CCTTCG |
| 53397 | bc_1032_REV_PacB.P | /5Phos/CAGTCACTATCTCTAGTCTCTAGCTCCTCCCAGAC |
| | CR | CTTCG |
| 53398 | bc_1033_REV_PacB.P | /5Phos/CAGTAGAGACTGCGACGAGATAGCTCCTCCCAGA |
| | CR | CCTTCG |
| 53399 | bc_1034_REV_PacB.P | /5Phos/CAGTATATCTATATACACATTAGCTCCTCCCAGA |
| | CR | CCTTCG |
| 53400 | bc_1035_REV_PacB.P | /5Phos/CAGTCAGAGAGTGCGCGCGCTAGCTCCTCCCAGA |
| | CR | CCTTCG |
| 53401 | bc_1036_REV_PacB.P | /5Phos/CAGTGTGTGCGACGTGTCTCTAGCTCCTCCCAGA |
| | CR | CCTTCG |
| 53402 | UTRF1 | GGGGATCACAGACCATTTCT |
| 53403 | UTRR14 | TGGAGGATGGAACACGGAC |
| 53404 | UTRP2-FAM | TTCTTTCGGCCAGGCTGAGGCCCT |
| 53405 | DMPKF8 | GGATATGTGACCATGCTACC |
| 53406 | DMPKR7 | GGGTTGTATCCAGTACCTCT |
| 53407 | DMPKP6-HEX | TGTCCTGTTCCTTCCCCCAGCCCCA |
| 53408 | CDC42BPB gRNA | GAGCCGCACCUUGGCCGACA |
| 53409 | RELA gRNA | GAUCUCCACAUAGGGGCCAG |
| 53410 | Fw oligo for dual | agaTACCATGTTGGCCAGGTTAGTCTAATTTCTACTCTT |
| | Cas12a sgRNA array | GTAGATCCAGCATCTCTGGAAAAATAG |

[1368] Primers are indicated as forward or reverse primers using F and R, respectively. qPCR primers for amplifying a product specific for a given form of an mRNA have descriptions including text such as “Ex5in,” which indicates that the primers give product in the presence of exon 5 of the indicated mRNA. qPCR primers for amplifying a product from all expected forms of an mRNA have descriptions including “Total.”

The application's sequence listing, which the Patent Office published only in electronic form, follows.

SEQUENCE LISTING (53417 sequences)

SEQ ID NO: 1 - DNA, 20 bp, Artificial Sequence
  Synthetic: F MBNL2 Ex5in qPCR primer
aggccaaaatcaaagctgcg

SEQ ID NO: 2 - DNA, 20 bp, Artificial Sequence
  Synthetic: R MBNL2 Ex5in qPCR primer
aaggccaggtctacagttgc

SEQ ID NO: 3 - DNA, 20 bp, Artificial Sequence
  Synthetic: F MBNL2 Ex4 (Total) qPCR primer
acagcaccatgatcgacaca

SEQ ID NO: 4 - DNA, 20 bp, Artificial Sequence
  Synthetic: R MBNL2 Ex4 (Total) qPCR primer
cgcagctttgattttggcct

SEQ ID NO: 5 - DNA, 20 bp, Artificial Sequence
  Synthetic: F MBNL1 Ex5in qPCR primer
atgctctcgggaaaagtgca

SEQ ID NO: 6 - DNA, 20 bp, Artificial Sequence
  Synthetic: R MBNL1 Ex5in qPCR primer
aggtcaaaggttgcctcgag

SEQ ID NO: 7 - DNA, 20 bp, Artificial Sequence
  Synthetic: F MBNL1 Ex4 (Total) qPCR primer
gtaccaacgtggcaattgca

SEQ ID NO: 8 - DNA, 20 bp, Artificial Sequence
  Synthetic: R MBNL1 Ex4 (Total) qPCR primer
tgcacttttcccgagagcat

SEQ ID NO: 9 - DNA, 24 bp, Artificial Sequence
  Synthetic: F NCOR2 Ex45a in qPCR primer
tgctatgcccataaccgctgctga

SEQ ID NO: 10 - DNA, 20 bp, Artificial Sequence
  Synthetic: R NCOR2 Ex45a in qPCR primer
acttggcttttcggctgctg

SEQ ID NO: 11 - DNA, 24 bp, Artificial Sequence
  Synthetic: F NCOR2 (Total) qPCR primer
accccaaaaagctggcacccttca

SEQ ID NO: 12 - DNA, 24 bp, Artificial Sequence
  Synthetic: R NCOR2 (Total) qPCR primer
aatgcctttggtgatgcttccgcc

SEQ ID NO: 13 - DNA, 20 bp, Artificial Sequence
  Synthetic: F FN1 (Total) qPCR primer
gcaaaccctgacactggagt

SEQ ID NO: 14 - DNA, 20 bp, Artificial Sequence
  Synthetic: R FN1 (Total) qPCR primer
gcaggagctctgatcagcat

SEQ ID NO: 15 - DNA, 20 bp, Artificial Sequence
  Synthetic: F FN1 Ex25in qPCR primer
ctacacagtcacagggctgg

SEQ ID NO: 16 - DNA, 20 bp, Artificial Sequence
  Synthetic: R FN1 Ex25in qPCR primer
tgttggtgaatcgcaggtca

SEQ ID NO: 17 - DNA, 20 bp, Artificial Sequence
  Synthetic: F BIN1 (Total) qPCR primer
acccccgagatcagagtcaa

SEQ ID NO: 18 - DNA, 20 bp, Artificial Sequence
  Synthetic: R BIN1 (Total) qPCR primer
tgcttgacttccttggacgg

SEQ ID NO: 19 - DNA, 24 bp, Artificial Sequence
  Synthetic: F BIN1 Ex11in qPCR primer
aacctcaatgatgtgctggtcggc

SEQ ID NO: 20 - DNA, 22 bp, Artificial Sequence
  Synthetic: R BIN1 Ex11in qPCR primer
aggcgcgttgtcactgttcttc

SEQ ID NO: 21 - DNA, 23 bp, Artificial Sequence
  Synthetic: F KIF13A Ex26 skipping qPCR primer
ggacagttaccaggaagaagact

SEQ ID NO: 22 - DNA, 21 bp, Artificial Sequence
  Synthetic: R KIF13A Ex26 skipping qPCR primer
accagcacagcattcctttcc

SEQ ID NO: 23 - DNA, 24 bp, Artificial Sequence
  Synthetic: F KIF13A (Total) qPCR primer
tgcgtaagggagaggtggtcagat

SEQ ID NO: 24 - DNA, 22 bp, Artificial Sequence
  Synthetic: R KIF13A (Total) qPCR primer
tggcaccagcacagcattcctt

SEQ ID NO: 25 - DNA, 20 bp, Artificial Sequence
  Synthetic: F GAPDH qPCR primer
ggtctcctctgacttcaaca

SEQ ID NO: 26 - DNA, 20 bp, Artificial Sequence
  Synthetic: R GAPDH qPCR primer
gtgagggtctctctcttcct

SEQ ID NO: 27 - DNA, 20 bp, Artificial Sequence
  Synthetic: F DMPK qPCR primer
ctgttcgccgttgttctgtc

SEQ ID NO: 28 - DNA, 20 bp, Artificial Sequence
  Synthetic: R DMPK qPCR primer
agttctagggttcagggagc

SEQ ID NO: 29 - DNA, 20 bp, Artificial Sequence
  Synthetic: DMPK-nest-F genotyping primer
cctatcggaggcgctttccc

SEQ ID NO: 30 - DNA, 20 bp, Artificial Sequence
  Synthetic: DMPK-nest-R genotyping primer
accgaggaatgtcggggtct

SEQ ID NO: 31 - DNA, 20 bp, Artificial Sequence
  Synthetic: AAVS1 Guide 1
accccacagtggggccacta

SEQ ID NO: 32 - DNA, 20 bp, Artificial Sequence
  Synthetic: DMPK 3UTR forward PCR primer
cgctaggaagcagccaatga

SEQ ID NO: 33 - DNA, 20 bp, Artificial Sequence
  Synthetic: DMPK 3UTR reverse PCR primer
tagctcctcccagaccttcg

SEQ ID NO: 34 - DNA, 18 bp, Artificial Sequence
  Synthetic: DMPK 3UTR sequencing primer UTRsF3
aatgacgagttcggacgg

SEQ ID NO: 35 - DNA, 19 bp, Artificial Sequence
  Synthetic: DMPK 3UTR sequencing primer UTRsF2
tgttccatcctccacgcac

SEQ ID NO: 36 - DNA, 24 bp, Artificial Sequence
  Synthetic: UpR2
tcaagcctaaagtacaaactccgg

SEQ ID NO: 37 - DNA, 25 bp, Artificial Sequence
  Synthetic: AltF3
tatctgacccagttacgccacggct

SEQ ID NO: 38 - DNA, 21 bp, Artificial Sequence
  Synthetic: Ouellet_seq_R3
cagtgagctgagactgagcca

SEQ ID NO: 39 - DNA, 22 bp, Artificial Sequence
  Synthetic: Ouellet_seq_F2
caagtgtggccatgatggtcct

SEQ ID NO: 40 - DNA, 21 bp, Artificial Sequence
  Synthetic: Ouellet_seq_F1
ccagcatctctggaaaaatag

SEQ ID NO: 41 - DNA, 20 bp, Artificial Sequence
  Synthetic: Ouellet_R3
agggggagcttagggtcaat

SEQ ID NO: 42 - DNA, 20 bp, Artificial Sequence
  Synthetic: Ouellet_F3
gctttcctggaacgaggtga

SEQ ID NO: 43 - DNA, 20 bp, Artificial Sequence
  Synthetic: LR_R6
taaaatactgattacatgtt

SEQ ID NO: 44 - DNA, 25 bp, Artificial Sequence
  Synthetic: LR_R5
actagaaaatgtagaattatgtgtg

SEQ ID NO: 45 - DNA, 26 bp, Artificial Sequence
  Synthetic: LR_R4
gataatattttgtatgtactaggttg

SEQ ID NO: 46 - DNA, 26 bp, Artificial Sequence
  Synthetic: LR_R1
gctgctttagaagtagatgcaagggg

SEQ ID NO: 47 - DNA, 23 bp, Artificial Sequence
  Synthetic: LR_F2
actagctcaccccgctccttctc

SEQ ID NO: 48 - DNA, 25 bp, Artificial Sequence
  Synthetic: FXN_DWN_F4
ccatcagcagagtttttaatttagg

SEQ ID NO: 49 - DNA, 24 bp, Artificial Sequence
  Synthetic: DwnSeqF2
cttgcacatcttgggtatttgagg

SEQ ID NO: 50 - DNA, 22 bp, Artificial Sequence
  Synthetic: AltR1
caacccatgctgtccacacagg

SEQ ID NO: 51 - DNA, 25 bp, Artificial Sequence
  Synthetic: AltF3RC
agccgtggcgtaactgggtcagata

SEQ ID NO: 52 - DNA, 24 bp, Artificial Sequence
  Synthetic: AltF1
gatcccttcagagtggctggtacg

SEQ ID NO: 53 - DNA, 25 bp, Artificial Sequence
  Synthetic: 35_FWD
caccgaaagaaaagttagccgggcg

SEQ ID NO: 54 - DNA, 23 bp, Artificial Sequence
  Synthetic: 31_FWD_mod
tgtattttttagtagatactggg

SEQ ID NO: 55 - DNA, 44 bp, Artificial Sequence
  Synthetic: NPC Primer 1
agttcagcggccgcgctcagctccgtttcggtttcacttccggt

SEQ ID NO: 56 - DNA, 43 bp, Artificial Sequence
  Synthetic: NPC Primer 2
caagtcgcggccgccttgtagaaagcgccattggagccccgca

SEQ ID NO: 57 - DNA, 19 bp, Artificial Sequence
  Synthetic: TIDE sequencing Forward Primer
gagtcccaggagccaatca

SEQ ID NO: 58 - DNA, 18 bp, Artificial Sequence
  Synthetic: TIDE sequencing Reverse Primer
cccctcttctcgacgctc

SEQ ID NO: 59 - DNA, 15 bp, Artificial Sequence
  Synthetic: 5 LOS ddPCR Forward Primer
ctagcggccggggag

SEQ ID NO: 60 - DNA, 17 bp, Artificial Sequence
  Synthetic: 5 LOS ddPCR Reverse Primer
agcagcattcccggcta

SEQ ID NO: 61 - DNA, 24 bp, Artificial Sequence
  Synthetic: 5 LOS ddPCR Probe
cgaacggggctcgaagggtccttg

SEQ ID NO: 62 - DNA, 21 bp, Artificial Sequence
  Synthetic: 3 LOS ddPCR Forward Primer
gggggatcacagaccatttct

SEQ ID NO: 63 - DNA, 20 bp, Artificial Sequence
  Synthetic: 3 LOS ddPCR Reverse Primer
cgaaccaacgataggtgggg

SEQ ID NO: 64 - DNA, 20 bp, Artificial Sequence
  Synthetic: 3 LOS ddPCR Probe
cctgggaaggcagcaagccg

SEQ ID NO: 65-98 - skipped (34 entries)

SEQ ID NO: 99 - RNA, 22 nt, Artificial Sequence
  Synthetic: Exemplary sequence 3' of guide for SpCas9
guuuuagagcuaugcuguuuug

SEQ ID NO: 100 - RNA, 76 nt, Artificial Sequence
  Synthetic: Exemplary sequence 3' of guide for SpCas9
guuuuagagcuagaaauagcaaguuaaaauaaggcuaguccguuaucaacuugaaaaaguggcaccgagucggugc

SEQ ID NO: 101 - DNA, 18 bp, Artificial Sequence
  Synthetic: DMPK 3 forward 19:45769716-45769738; As/LbCpf1
ggcagatggagggccttt

SEQ ID NO: 102 - DNA, 19 bp, Artificial Sequence
  Synthetic: DMPK 3 forward 19:45769716-45769739; As/LbCpf1
ggcagatggagggcctttt

SEQ ID NO: 103 - DNA, 20 bp, Artificial Sequence
  Synthetic: DMPK 3 forward 19:45769716-45769740; As/LbCpf1
ggcagatggagggcctttta

SEQ ID NO: 104 - DNA, 21 bp, Artificial Sequence
  Synthetic: DMPK 3 forward 19:45769716-45769741; As/LbCpf1
ggcagatggagggccttttat

SEQ ID NO: 105 - DNA, 22 bp, Artificial Sequence
  Synthetic: DMPK 3 forward 19:45769716-45769742; As/LbCpf1
ggcagatggagggccttttatt

SEQ ID NO: 106 - DNA, 23 bp, Artificial Sequence
  Synthetic: DMPK 3 forward 19:45769716-45769743; As/LbCpf1
ggcagatggagggccttttattc

SEQ ID NO: 107 - DNA, 24 bp, Artificial Sequence
  Synthetic: DMPK 3 forward 19:45769716-45769744; As/LbCpf1
ggcagatggagggccttttattcg

SEQ ID NO: 108 - DNA, 25 bp, Artificial Sequence
  Synthetic: DMPK 3 forward 19:45769716-45769745; As/LbCpf1
ggcagatggagggccttttattcgc

SEQ ID NO: 109 - DNA, 18 bp, Artificial Sequence
  Synthetic: DMPK 3 forward 19:45769735-45769757; As/LbCpf1
attcgcgagggtcggggg

SEQ ID NO: 110 - DNA, 19 bp, Artificial Sequence
  Synthetic: DMPK 3 forward 19:45769735-45769758; As/LbCpf1
attcgcgagggtcgggggt

SEQ ID NO: 111 - DNA, 20 bp, Artificial Sequence
  Synthetic: DMPK 3 forward 19:45769735-45769759; As/LbCpf1
attcgcgagggtcgggggtg

SEQ ID NO: 112 - DNA, 21 bp, Artificial Sequence
  Synthetic: DMPK 3 forward 19:45769735-45769760; As/LbCpf1
attcgcgagggtcgggggtgg

SEQ ID NO: 113 - DNA, 22 bp, Artificial Sequence
  Synthetic: DMPK 3 forward 19:45769735-45769761; As/LbCpf1
attcgcgagggtcgggggtggg

SEQ ID NO: 114 - DNA, 23 bp, Artificial Sequence
  Synthetic: DMPK 3 forward 19:45769735-45769762; As/LbCpf1
attcgcgagggtcgggggtgggg

SEQ ID NO: 115 - DNA, 24 bp, Artificial Sequence
  Synthetic: DMPK 3 forward 19:45769735-45769763; As/LbCpf1
attcgcgagggtcgggggtggggg

SEQ ID NO: 116 - DNA, 25 bp, Artificial Sequence
  Synthetic: DMPK 3 forward 19:45769735-45769764; As/LbCpf1
attcgcgagggtcgggggtgggggt

SEQ ID NO: 117 - DNA, 18 bp, Artificial Sequence
  Synthetic: DMPK 3 forward 19:45769736-45769758; As/LbCpf1
ttcgcgagggtcgggggt

SEQ ID NO: 118 - DNA, 19 bp, Artificial Sequence
  Synthetic: DMPK 3 forward 19:45769736-45769759; As/LbCpf1
ttcgcgagggtcgggggtg

SEQ ID NO: 119 - DNA, 20 bp, Artificial Sequence
  Synthetic: DMPK 3 forward 19:45769736-45769760; As/LbCpf1
ttcgcgagggtcgggggtgg

SEQ ID NO: 120 - DNA, 21 bp, Artificial Sequence
  Synthetic: DMPK 3 forward 19:45769736-45769761; As/LbCpf1
ttcgcgagggtcgggggtggg

SEQ ID NO: 121 - DNA, 22 bp, Artificial Sequence
  Synthetic: DMPK 3 forward 19:45769736-45769762; As/LbCpf1
ttcgcgagggtcgggggtgggg

SEQ ID NO: 122 - DNA, 23 bp, Artificial Sequence
  Synthetic: DMPK 3 forward 19:45769736-45769763; As/LbCpf1
ttcgcgagggtcgggggtggggg

SEQ ID NO: 123 - DNA, 24 bp, Artificial Sequence
  Synthetic: DMPK 3 forward 19:45769736-45769764; As/LbCpf1
ttcgcgagggtcgggggtgggggt

SEQ ID NO: 124 - DNA, 25 bp, Artificial Sequence
  Synthetic: DMPK 3 forward 19:45769736-45769765; As/LbCpf1
ttcgcgagggtcgggggtgggggtc

SEQ ID NO: 125 - DNA, 18 bp, Artificial Sequence
  Synthetic: DMPK 3 reverse 19:45769758-45769780; As/LbCpf1
ttgtctgtccccacctag

SEQ ID NO: 126 - DNA, 19 bp, Artificial Sequence
  Synthetic: DMPK 3 reverse 19:45769758-45769781; As/LbCpf1
ttgtctgtccccacctagg

SEQ ID NO: 127 - DNA, 20 bp, Artificial Sequence
  Synthetic: DMPK 3 reverse 19:45769758-45769782; As/LbCpf1
ttgtctgtccccacctagga

SEQ ID NO: 128 - DNA, 21 bp, Artificial Sequence
  Synthetic: DMPK 3 reverse 19:45769758-45769783; As/LbCpf1
ttgtctgtccccacctaggac

SEQ ID NO: 129 - DNA, 22 bp, Artificial Sequence
  Synthetic: DMPK 3 reverse 19:45769758-45769784; As/LbCpf1
ttgtctgtccccacctaggacc

SEQ ID NO: 130 - DNA, 23 bp, Artificial Sequence
  Synthetic: DMPK 3 reverse 19:45769758-45769785; As/LbCpf1
ttgtctgtccccacctaggaccc

SEQ ID NO: 131 - DNA, 24 bp, Artificial Sequence
  Synthetic: DMPK 3 reverse 19:45769758-45769786; As/LbCpf1
ttgtctgtccccacctaggacccc

SEQ ID NO: 132 - DNA, 25 bp, Artificial Sequence
  Synthetic: DMPK 3 reverse 19:45769758-45769787; As/LbCpf1
ttgtctgtccccacctaggaccccc

SEQ ID NO: 133 - DNA, 18 bp, Artificial Sequence
  Synthetic: DMPK 3 reverse 19:45769792-45769814; As/LbCpf1
gatgcactgagaccccga

SEQ ID NO: 134 - DNA, 19 bp, Artificial Sequence
  Synthetic: DMPK 3 reverse 19:45769792-45769815; As/LbCpf1
gatgcactgagaccccgac

SEQ ID NO: 135 - DNA, 20 bp, Artificial Sequence
  Synthetic: DMPK 3 reverse 19:45769792-45769816; As/LbCpf1
gatgcactgagaccccgaca

SEQ ID NO: 136 - DNA, 21 bp, Artificial Sequence
  Synthetic: DMPK 3 reverse 19:45769792-45769817; As/LbCpf1
gatgcactgagaccccgacat

SEQ ID NO: 137 - DNA, 22 bp, Artificial Sequence
  Synthetic: DMPK 3 reverse 19:45769792-45769818; As/LbCpf1
gatgcactgagaccccgacatt

SEQ ID NO: 138 - DNA, 23 bp, Artificial Sequence
  Synthetic: DMPK 3 reverse 19:45769792-45769819; As/LbCpf1
gatgcactgagaccccgacattc

SEQ ID NO: 139 - DNA, 24 bp, Artificial Sequence
  Synthetic: DMPK 3 reverse 19:45769792-45769820; As/LbCpf1
gatgcactgagaccccgacattcc

SEQ ID NO: 140 - DNA, 25 bp, Artificial Sequence
  Synthetic: DMPK 3 reverse 19:45769792-45769821; As/LbCpf1
gatgcactgagaccccgacattcct

SEQ ID NO: 141 - DNA, 18 bp, Artificial Sequence
  Synthetic: DMPK 3 reverse 19:45769793-45769815; As/LbCpf1
ggatgcactgagaccccg

SEQ ID NO: 142 - DNA, 19 bp, Artificial Sequence
  Synthetic: DMPK 3 reverse 19:45769793-45769816; As/LbCpf1
ggatgcactgagaccccga

SEQ ID NO: 143 - DNA, 20 bp, Artificial Sequence
  Synthetic: DMPK 3 reverse 19:45769793-45769817; As/LbCpf1
ggatgcactgagaccccgac

SEQ ID NO: 144 - DNA, 21 bp, Artificial Sequence
  Synthetic: DMPK 3 reverse 19:45769793-45769818; As/LbCpf1
ggatgcactgagaccccgaca

SEQ ID NO: 145 - DNA, 22 bp, Artificial Sequence
  Synthetic: DMPK 3 reverse 19:45769793-45769819; As/LbCpf1
ggatgcactgagaccccgacat

SEQ ID NO: 146 - DNA, 23 bp, Artificial Sequence
  Synthetic: DMPK 3 reverse 19:45769793-45769820; As/LbCpf1
ggatgcactgagaccccgacatt

SEQ ID NO: 147 - DNA, 24 bp, Artificial Sequence
  Synthetic: DMPK 3 reverse 19:45769793-45769821; As/LbCpf1
ggatgcactgagaccccgacattc

SEQ ID NO: 148 - DNA, 25 bp, Artificial Sequence
  Synthetic: DMPK 3 reverse 19:45769793-45769822; As/LbCpf1
ggatgcactgagaccccgacattcc

SEQ ID NO: 149 - DNA, 18 bp, Artificial Sequence
  Synthetic: DMPK 3 reverse 19:45769856-45769878; As/LbCpf1
ttgacctcgtcctccgac

SEQ ID NO: 150 - DNA, 19 bp, Artificial Sequence
  Synthetic: DMPK 3 reverse 19:45769856-45769879; As/LbCpf1
ttgacctcgtcctccgact

SEQ ID NO: 151 - DNA, 20 bp, Artificial Sequence
  Synthetic: DMPK 3 reverse 19:45769856-45769880; As/LbCpf1
ttgacctcgtcctccgactc

SEQ ID NO: 152 - DNA, 21 bp, Artificial Sequence
  Synthetic: DMPK 3 reverse 19:45769856-45769881; As/LbCpf1
ttgacctcgtcctccgactcg

SEQ ID NO: 153 - DNA, 22 bp, Artificial Sequence
  Synthetic: DMPK 3 reverse 19:45769856-45769882; As/LbCpf1
ttgacctcgtcctccgactcgc

SEQ ID NO: 154 - DNA, 23 bp, Artificial Sequence
  Synthetic: DMPK 3 reverse 19:45769856-45769883; As/LbCpf1
ttgacctcgtcctccgactcgct

SEQ ID NO: 155 - DNA, 24 bp, Artificial Sequence
  Synthetic: DMPK 3 reverse 19:45769856-45769884; As/LbCpf1
ttgacctcgtcctccgactcgctg

SEQ ID NO: 156 - DNA, 25 bp, Artificial Sequence
  Synthetic: DMPK 3 reverse 19:45769856-45769885; As/LbCpf1
ttgacctcgtcctccgactcgctga

SEQ ID NO: 157 - DNA, 18 bp, Artificial Sequence
  Synthetic: DMPK 3 reverse 19:45769864-45769886; As/LbCpf1
gatatttattgacctcgt

SEQ ID NO: 158 - DNA, 19 bp, Artificial Sequence
  Synthetic: DMPK 3 reverse 19:45769864-45769887; As/LbCpf1
gatatttattgacctcgtc

SEQ ID NO: 159 - DNA, 20 bp, Artificial Sequence
  Synthetic: DMPK 3 reverse 19:45769864-45769888; As/LbCpf1
gatatttattgacctcgtcc

SEQ ID NO: 160 - DNA, 21 bp, Artificial Sequence
  Synthetic: DMPK 3 reverse 19:45769864-45769889; As/LbCpf1
gatatttattgacctcgtcct

SEQ ID NO: 161 - DNA, 22 bp, Artificial Sequence
  Synthetic: DMPK 3 reverse 19:45769864-45769890; As/LbCpf1
gatatttattgacctcgtcctc

SEQ ID NO: 162 - DNA, 23 bp, Artificial Sequence
  Synthetic: DMPK 3 reverse 19:45769864-45769891; As/LbCpf1
gatatttattgacctcgtcctcc

SEQ ID NO: 163 - DNA, 24 bp, Artificial Sequence
  Synthetic: DMPK 3 reverse 19:45769864-45769892; As/LbCpf1
gatatttattgacctcgtcctccg

SEQ ID NO: 164 - DNA, 25 bp, Artificial Sequence
  Synthetic: DMPK 3 reverse 19:45769864-45769893; As/LbCpf1
gatatttattgacctcgtcctccga

SEQ ID NO: 165 - DNA, 18 bp, Artificial Sequence
  Synthetic: DMPK 3 reverse 19:45769938-45769960; As/LbCpf1
ggggatcccgcgcccccc

SEQ ID NO: 166 - DNA, 19 bp, Artificial Sequence
  Synthetic: DMPK 3 reverse 19:45769938-45769961; As/LbCpf1
ggggatcccgcgcccccct

SEQ ID NO: 167 - DNA, 20 bp, Artificial Sequence
  Synthetic: DMPK 3 reverse 19:45769938-45769962; As/LbCpf1
ggggatcccgcgcccccctc

SEQ ID NO: 168 - DNA, 21 bp, Artificial Sequence
  Synthetic: DMPK 3 reverse 19:45769938-45769963; As/LbCpf1
ggggatcccgcgcccccctcc

SEQ ID NO: 169 - DNA, 22 bp, Artificial Sequence
  Synthetic: DMPK 3 reverse 19:45769938-45769964; As/LbCpf1
ggggatcccgcgcccccctcct

SEQ ID NO: 170 - DNA, 23 bp, Artificial Sequence
  Synthetic: DMPK 3 reverse 19:45769938-45769965; As/LbCpf1
ggggatcccgcgcccccctcctc

SEQ ID NO: 171 - DNA, 24 bp, Artificial Sequence
  Synthetic: DMPK 3 reverse 19:45769938-45769966; As/LbCpf1
ggggatcccgcgcccccctcctca

SEQ ID NO: 172 - DNA, 25 bp, Artificial Sequence
  Synthetic: DMPK 3 reverse 19:45769938-45769967; As/LbCpf1
ggggatcccgcgcccccctcctcac

SEQ ID NO: 173 - DNA, 18 bp, Artificial Sequence
  Synthetic: DMPK 3 reverse 19:45769939-45769961; As/LbCpf1
cggggatcccgcgccccc

SEQ ID NO: 174 - DNA, 19 bp, Artificial Sequence
  Synthetic: DMPK 3 reverse 19:45769939-45769962; As/LbCpf1
cggggatcccgcgcccccc

SEQ ID NO: 175 - DNA, 20 bp, Artificial Sequence
  Synthetic: DMPK 3 reverse 19:45769939-45769963; As/LbCpf1
cggggatcccgcgcccccct

SEQ ID NO: 176 - DNA, 21 bp, Artificial Sequence
  Synthetic: DMPK 3 reverse 19:45769939-45769964; As/LbCpf1
cggggatcccgcgcccccctc

SEQ ID NO: 177 - DNA, 22 bp, Artificial Sequence
  Synthetic: DMPK 3 reverse 19:45769939-45769965; As/LbCpf1
cggggatcccgcgcccccctcc

SEQ ID NO: 178 - DNA, 23 bp, Artificial Sequence
  Synthetic: DMPK 3 reverse 19:45769939-45769966; As/LbCpf1
cggggatcccgcgcccccctcct

SEQ ID NO: 179 - DNA, 24 bp, Artificial Sequence
  Synthetic: DMPK 3 reverse 19:45769939-45769967; As/LbCpf1
cggggatcccgcgcccccctcctc

SEQ ID NO: 180 - DNA, 25 bp, Artificial Sequence
  Synthetic: DMPK 3 reverse 19:45769939-45769968; As/LbCpf1
cggggatcccgcgcccccctcctca

SEQ ID NO: 181 - DNA, 18 bp, Artificial Sequence
  Synthetic: DMPK 3 reverse 19:45769940-45769962; As/LbCpf1
tcggggatcccgcgcccc

SEQ ID NO: 182 - DNA, 19 bp, Artificial Sequence
  Synthetic: DMPK 3 reverse 19:45769940-45769963; As/LbCpf1
tcggggatcccgcgccccc

SEQ ID NO: 183 - DNA, 20 bp, Artificial Sequence
  Synthetic: DMPK 3 reverse 19:45769940-45769964; As/LbCpf1
tcggggatcccgcgcccccc

SEQ ID NO: 184 - DNA, 21 bp, Artificial Sequence
  Synthetic: DMPK 3 reverse 19:45769940-45769965; As/LbCpf1
tcggggatcccgcgcccccct

SEQ ID NO: 185 - DNA, 22 bp, Artificial Sequence
  Synthetic: DMPK 3 reverse 19:45769940-45769966; As/LbCpf1
tcggggatcccgcgcccccctc

SEQ ID NO: 186 - DNA, 23 bp, Artificial Sequence
  Synthetic: DMPK 3 reverse 19:45769940-45769967; As/LbCpf1
tcggggatcccgcgcccccctcc

SEQ ID NO: 187 - DNA, 24 bp, Artificial Sequence
  Synthetic: DMPK 3 reverse 19:45769940-45769968; As/LbCpf1
tcggggatcccgcgcccccctcct

SEQ ID NO: 188 - DNA, 25 bp, Artificial Sequence
  Synthetic: DMPK 3 reverse 19:45769940-45769969; As/LbCpf1
tcggggatcccgcgcccccctcctc

SEQ ID NO: 189 - DNA, 18 bp, Artificial Sequence
  Synthetic: DMPK 3 reverse 19:45769954-45769976; As/LbCpf1
ccaaacccgctttttcgg

SEQ ID NO: 190 - DNA, 19 bp, Artificial Sequence
  Synthetic: DMPK 3 reverse 19:45769954-45769977; As/LbCpf1
ccaaacccgctttttcggg

SEQ ID NO: 191 - DNA, 20 bp, Artificial Sequence
  Synthetic: DMPK 3 reverse 19:45769954-45769978; As/LbCpf1
ccaaacccgctttttcgggg

SEQ ID NO: 192 - DNA, 21 bp, Artificial Sequence
  Synthetic: DMPK 3 reverse 19:45769954-45769979; As/LbCpf1
ccaaacccgctttttcgggga

SEQ ID NO: 193 - DNA, 22 bp, Artificial Sequence
  Synthetic: DMPK 3 reverse 19:45769954-45769980; As/LbCpf1
ccaaacccgctttttcggggat

SEQ ID NO: 194 - DNA, 23 bp, Artificial Sequence
  Synthetic: DMPK 3 reverse 19:45769954-45769981; As/LbCpf1
ccaaacccgctttttcggggatc

SEQ ID NO: 195 - DNA, 24 bp, Artificial Sequence
  Synthetic: DMPK 3 reverse 19:45769954-45769982; As/LbCpf1
ccaaacccgctttttcggggatcc

SEQ ID NO: 196 - DNA, 25 bp, Artificial Sequence
  Synthetic: DMPK 3 reverse 19:45769954-45769983; As/LbCpf1
ccaaacccgctttttcggggatccc

SEQ ID NO: 197 - DNA, 18 bp, Artificial Sequence
  Synthetic: DMPK 3 reverse 19:45769955-45769977; As/LbCpf1
gccaaacccgctttttcg

SEQ ID NO: 198 - DNA, 19 bp, Artificial Sequence
  Synthetic: DMPK 3 reverse 19:45769955-45769978; As/LbCpf1
gccaaacccgctttttcgg

SEQ ID NO: 199 - DNA, 20 bp, Artificial Sequence
  Synthetic: DMPK 3 reverse 19:45769955-45769979; As/LbCpf1
gccaaacccgctttttcggg

SEQ ID NO: 200 - DNA, 21 bp, Artificial Sequence
  Synthetic: DMPK 3 reverse 19:45769955-45769980; As/LbCpf1
gccaaacccgctttttcgggg

SEQ ID NO: 201 - DNA, 22 bp, Artificial Sequence
  Synthetic: DMPK 3 reverse 19:45769955-45769981; As/LbCpf1
gccaaacccgctttttcgggga

SEQ ID NO: 202 - DNA, 23 bp, Artificial Sequence
  Synthetic: DMPK 3 reverse 19:45769955-45769982; As/LbCpf1
gccaaacccgctttttcggggat

SEQ ID NO: 203 - DNA, 24 bp, Artificial Sequence
  Synthetic: DMPK 3 reverse 19:45769955-45769983; As/LbCpf1
gccaaacccgctttttcggggatc

SEQ ID NO: 204 - DNA, 25 bp, Artificial Sequence
  Synthetic: DMPK 3 reverse 19:45769955-45769984; As/LbCpf1
gccaaacccgctttttcggggatcc

SEQ ID NO: 205 - DNA, 18 bp, Artificial Sequence
  Synthetic: DMPK 3 reverse 19:45769960-45769982; As/LbCpf1
cttttgccaaacccgctt

SEQ ID NO: 206 - DNA, 19 bp, Artificial Sequence
  Synthetic: DMPK 3 reverse 19:45769960-45769983; As/LbCpf1
cttttgccaaacccgcttt

SEQ ID NO: 207 - DNA, 20 bp, Artificial Sequence
  Synthetic: DMPK 3 reverse 19:45769960-45769984; As/LbCpf1
cttttgccaaacccgctttt

SEQ ID NO: 208 - DNA, 21 bp, Artificial Sequence
  Synthetic: DMPK 3 reverse 19:45769960-45769985; As/LbCpf1
cttttgccaaacccgcttttt

SEQ ID NO: 209 - DNA, 22 bp, Artificial Sequence
  Synthetic: DMPK 3 reverse 19:45769960-45769986; As/LbCpf1
cttttgccaaacccgctttttc

SEQ ID NO: 210 - DNA, 23 bp, Artificial Sequence
  Synthetic: DMPK 3 reverse 19:45769960-45769987; As/LbCpf1
cttttgccaaacccgctttttcg

SEQ ID NO: 211 - DNA, 24 bp, Artificial Sequence
  Synthetic: DMPK 3 reverse 19:45769960-45769988; As/LbCpf1
cttttgccaaacccgctttttcgg

SEQ ID NO: 212 - DNA, 25 bp, Artificial Sequence
  Synthetic: DMPK 3 reverse 19:45769960-45769989; As/LbCpf1
cttttgccaaacccgctttttcggg

SEQ ID NO: 213 - DNA, 18 bp, Artificial Sequence
  Synthetic: DMPK 3 forward 19:45769974-45769996; As/LbCpf1
gcaaaagcaaatttcccg

SEQ ID NO: 214 - DNA, 19 bp, Artificial Sequence
  Synthetic: DMPK 3 forward 19:45769974-45769997; As/LbCpf1
gcaaaagcaaatttcccga

SEQ ID NO: 215 - DNA, 20 bp, Artificial Sequence
  Synthetic: DMPK 3 forward 19:45769974-45769998; As/LbCpf1
gcaaaagcaaatttcccgag

SEQ ID NO: 216 - DNA, 21 bp, Artificial Sequence
  Synthetic: DMPK 3 forward 19:45769974-45769999; As/LbCpf1
gcaaaagcaaatttcccgagt

SEQ ID NO: 217 - DNA, 22 bp, Artificial Sequence
  Synthetic: DMPK 3 forward 19:45769974-45770000; As/LbCpf1
gcaaaagcaaatttcccgagta

SEQ ID NO: 218 - DNA, 23 bp, Artificial Sequence
  Synthetic: DMPK 3 forward 19:45769974-45770001; As/LbCpf1
gcaaaagcaaatttcccgagtaa

SEQ ID NO: 219 - DNA, 24 bp, Artificial Sequence
  Synthetic: DMPK 3 forward 19:45769974-45770002; As/LbCpf1
gcaaaagcaaatttcccgagtaag

SEQ ID NO: 220 - DNA, 25 bp, Artificial Sequence
  Synthetic: DMPK 3 forward 19:45769974-45770003; As/LbCpf1
gcaaaagcaaatttcccgagtaagc

SEQ ID NO: 221 - DNA, 18 bp, Artificial Sequence
  Synthetic: DMPK 3 forward 19:45769989-45770011; As/LbCpf1
ccgagtaagcaggcagag

SEQ ID NO: 222 - DNA, 19 bp, Artificial Sequence
  Synthetic: DMPK 3 forward 19:45769989-45770012; As/LbCpf1
ccgagtaagcaggcagaga

SEQ ID NO: 223 - DNA, 20 bp, Artificial Sequence
  Synthetic: DMPK 3 forward 19:45769989-45770013; As/LbCpf1
ccgagtaagcaggcagagat

SEQ ID NO: 224 - DNA, 21 bp, Artificial Sequence
  Synthetic: DMPK 3 forward 19:45769989-45770014; As/LbCpf1
ccgagtaagcaggcagagatc

SEQ ID NO: 225 - DNA, 22 bp, Artificial Sequence
  Synthetic: DMPK 3 forward 19:45769989-45770015; As/LbCpf1
ccgagtaagcaggcagagatcg

SEQ ID NO: 226 - DNA, 23 bp, Artificial Sequence
  Synthetic: DMPK 3 forward 19:45769989-45770016; As/LbCpf1
ccgagtaagcaggcagagatcgc

SEQ ID NO: 227 - DNA, 24 bp, Artificial Sequence
  Synthetic: DMPK 3 forward 19:45769989-45770017; As/LbCpf1
ccgagtaagcaggcagagatcgcg

SEQ ID NO: 228 - DNA, 25 bp, Artificial Sequence
  Synthetic: DMPK 3 forward 19:45769989-45770018; As/LbCpf1
ccgagtaagcaggcagagatcgcgc

SEQ ID NO: 229 - DNA, 18 bp, Artificial Sequence
  Synthetic: DMPK 3 reverse 19:45770026-45770048; As/LbCpf1
ttgtgcatgacgccctgc

SEQ ID NO: 230 - DNA, 19 bp, Artificial Sequence
  Synthetic: DMPK 3 reverse 19:45770026-45770049; As/LbCpf1
ttgtgcatgacgccctgct

SEQ ID NO: 231 - DNA, 20 bp, Artificial Sequence
  Synthetic: DMPK 3 reverse 19:45770026-45770050; As/LbCpf1
ttgtgcatgacgccctgctc

SEQ ID NO: 232 - DNA, 21 bp, Artificial Sequence
  Synthetic: DMPK 3 reverse 19:45770026-45770051; As/LbCpf1
ttgtgcatgacgccctgctct

SEQ ID NO: 233 - DNA, 22 bp, Artificial Sequence
  Synthetic: DMPK 3 reverse 19:45770026-45770052; As/LbCpf1
ttgtgcatgacgccctgctctg

SEQ ID NO: 234 - DNA, 23 bp, Artificial Sequence
  Synthetic: DMPK 3 reverse 19:45770026-45770053; As/LbCpf1
ttgtgcatgacgccctgctctgg

SEQ ID NO: 235 - DNA, 24 bp, Artificial Sequence
  Synthetic: DMPK 3 reverse 19:45770026-45770054; As/LbCpf1
ttgtgcatgacgccctgctctggg

SEQ ID NO: 236 - DNA, 25 bp, Artificial Sequence
  Synthetic: DMPK 3 reverse 19:45770026-45770055; As/LbCpf1
ttgtgcatgacgccctgctctgggg

SEQ ID NO: 237 - DNA, 18 bp, Artificial Sequence
  Synthetic: DMPK 3 forward 19:45770057-45770079; As/LbCpf1
cactttgcgaaccaacga

SEQ ID NO: 238 - DNA, 19 bp, Artificial Sequence
  Synthetic: DMPK 3 forward 19:45770057-45770080; As/LbCpf1
cactttgcgaaccaacgat

SEQ ID NO: 239 - DNA, 20 bp, Artificial Sequence
  Synthetic: DMPK 3 forward 19:45770057-45770081; As/LbCpf1
cactttgcgaaccaacgata

SEQ ID NO: 240 - DNA, 21 bp, Artificial Sequence
  Synthetic: DMPK 3 forward 19:45770057-45770082; As/LbCpf1
cactttgcgaaccaacgatag

SEQ ID NO: 241 - DNA, 22 bp, Artificial Sequence
  Synthetic: DMPK 3 forward 19:45770057-45770083; As/LbCpf1
cactttgcgaaccaacgatagg

SEQ ID NO: 242 - DNA, 23 bp, Artificial Sequence
  Synthetic: DMPK 3 forward 19:45770057-45770084; As/LbCpf1
cactttgcgaaccaacgataggt

SEQ ID NO: 243 - DNA, 24 bp, Artificial Sequence
  Synthetic: DMPK 3 forward 19:45770057-45770085; As/LbCpf1
cactttgcgaaccaacgataggtg

SEQ ID NO: 244 - DNA, 25 bp, Artificial Sequence
  Synthetic: DMPK 3 forward 19:45770057-45770086; As/LbCpf1
cactttgcgaaccaacgataggtgg

SEQ ID NO: 245 - DNA, 18 bp, Artificial Sequence
  Synthetic: DMPK 3 forward 19:45770064-45770086; As/LbCpf1
cgaaccaacgataggtgg

SEQ ID NO: 246 - DNA, 19 bp, Artificial Sequence
  Synthetic: DMPK 3 forward 19:45770064-45770087; As/LbCpf1
cgaaccaacgataggtggg

SEQ ID NO: 247 - DNA, 20 bp, Artificial Sequence
  Synthetic: DMPK 3 forward 19:45770064-45770088; As/LbCpf1
cgaaccaacgataggtgggg

SEQ ID NO: 248 - DNA, 21 bp, Artificial Sequence
  Synthetic: DMPK 3 forward 19:45770064-45770089; As/LbCpf1
cgaaccaacgataggtggggg

SEQ ID NO: 249 - DNA, 22 bp, Artificial Sequence
  Synthetic: DMPK 3 forward 19:45770064-45770090; As/LbCpf1
cgaaccaacgataggtgggggt

SEQ ID NO: 250 - DNA, 23 bp, Artificial Sequence
  Synthetic: DMPK 3 forward 19:45770064-45770091; As/LbCpf1
cgaaccaacgataggtgggggtg

SEQ ID NO: 251 - DNA, 24 bp, Artificial Sequence
  Synthetic: DMPK 3 forward 19:45770064-45770092; As/LbCpf1
cgaaccaacgataggtgggggtgc

SEQ ID NO: 252 - DNA, 25 bp, Artificial Sequence
  Synthetic: DMPK 3 forward 19:45770064-45770093; As/LbCpf1
cgaaccaacgataggtgggggtgcg

SEQ ID NO: 253 - DNA, 18 bp, Artificial Sequence
  Synthetic: DMPK 3 forward 19:45770143-45770165; As/LbCpf1
cccatccacgtcagggcc

SEQ ID NO: 254 - DNA, 19 bp, Artificial Sequence
  Synthetic: DMPK 3 forward 19:45770143-45770166; As/LbCpf1
cccatccacgtcagggcct

SEQ ID NO: 255 - DNA, 20 bp, Artificial Sequence
  Synthetic: DMPK 3 forward 19:45770143-45770167; As/LbCpf1
cccatccacgtcagggcctc

SEQ ID NO: 256 - DNA, 21 bp, Artificial Sequence
  Synthetic: DMPK 3 forward 19:45770143-45770168; As/LbCpf1
cccatccacgtcagggcctca

SEQ ID NO: 257 - DNA, 22 bp, Artificial Sequence
  Synthetic: DMPK 3 forward 19:45770143-45770169; As/LbCpf1
cccatccacgtcagggcctcag

SEQ ID NO: 258 - DNA, 23 bp, Artificial Sequence
  Synthetic: DMPK 3 forward 19:45770143-45770170; As/LbCpf1
cccatccacgtcagggcctcagc

SEQ ID NO: 259 - DNA, 24 bp, Artificial Sequence
  Synthetic: DMPK 3 forward 19:45770143-45770171; As/LbCpf1
cccatccacgtcagggcctcagcc

SEQ ID NO: 260 - DNA, 25 bp, Artificial Sequence
  Synthetic: DMPK 3 forward 19:45770143-45770172; As/LbCpf1
cccatccacgtcagggcctcagcct

SEQ ID NO: 261 - DNA, 18 bp, Artificial Sequence
  Synthetic: DMPK 3 reverse 19:45770151-45770173; As/LbCpf1
ggccaggctgaggccctg

SEQ ID NO: 262 - DNA, 19 bp, Artificial Sequence
  Synthetic: DMPK 3 reverse 19:45770151-45770174; As/LbCpf1
ggccaggctgaggccctga

SEQ ID NO: 263 - DNA, 20 bp, Artificial Sequence
  Synthetic: DMPK 3 reverse 19:45770151-45770175; As/LbCpf1
ggccaggctgaggccctgac

SEQ ID NO: 264 - DNA, 21 bp, Artificial Sequence
  Synthetic: DMPK 3 reverse 19:45770151-45770176; As/LbCpf1
ggccaggctgaggccctgacg

SEQ ID NO: 265 - DNA, 22 bp, Artificial Sequence
  Synthetic: DMPK 3 reverse 19:45770151-45770177; As/LbCpf1
ggccaggctgaggccctgacgt

SEQ ID NO: 266 - DNA, 23 bp, Artificial Sequence
  Synthetic: DMPK 3 reverse 19:45770151-45770178; As/LbCpf1
ggccaggctgaggccctgacgtg

SEQ ID NO: 267 - DNA, 24 bp, Artificial Sequence
  Synthetic: DMPK 3 reverse 19:45770151-45770179; As/LbCpf1
ggccaggctgaggccctgacgtgg

SEQ ID NO: 268 - DNA, 25 bp, Artificial Sequence
  Synthetic: DMPK 3 reverse 19:45770151-45770180; As/LbCpf1
ggccaggctgaggccctgacgtgga

SEQ ID NO: 269 - DNA, 18 bp, Artificial Sequence
  Synthetic: DMPK 3 reverse 19:45770155-45770177; As/LbCpf1
tttcggccaggctgaggc

SEQ ID NO: 270 - DNA, 19 bp, Artificial Sequence
  Synthetic: DMPK 3 reverse 19:45770155-45770178; As/LbCpf1
tttcggccaggctgaggcc

SEQ ID NO: 271 - DNA, 20 bp, Artificial Sequence
  Synthetic: DMPK 3 reverse 19:45770155-45770179; As/LbCpf1
tttcggccaggctgaggccc

SEQ ID NO: 272 - DNA, 21 bp, Artificial Sequence
  Synthetic: DMPK 3 reverse 19:45770155-45770180; As/LbCpf1
tttcggccaggctgaggccct

SEQ ID NO: 273 - DNA, 22 bp, Artificial Sequence
  Synthetic: DMPK 3 reverse 19:45770155-45770181; As/LbCpf1
tttcggccaggctgaggccctg

SEQ ID NO: 274 - DNA, 23 bp, Artificial Sequence
  Synthetic: DMPK 3 reverse 19:45770155-45770182; As/LbCpf1
tttcggccaggctgaggccctga

SEQ ID NO: 275 - DNA, 24 bp, Artificial Sequence
  Synthetic: DMPK 3 reverse 19:45770155-45770183; As/LbCpf1
tttcggccaggctgaggccctgac

SEQ ID NO: 276 - DNA, 25 bp, Artificial Sequence
  Synthetic: DMPK 3 reverse 19:45770155-45770184; As/LbCpf1
tttcggccaggctgaggccctgacg

SEQ ID NO: 277 - DNA, 18 bp, Artificial Sequence
  Synthetic: DMPK 3 reverse 19:45770159-45770181; As/LbCpf1
tttctttcggccaggctg

SEQ ID NO: 278 - DNA, 19 bp, Artificial Sequence
  Synthetic: DMPK 3 reverse 19:45770159-45770182; As/LbCpf1
tttctttcggccaggctga

SEQ ID NO: 279 - DNA, 20 bp, Artificial Sequence
  Synthetic: DMPK 3 reverse 19:45770159-45770183; As/LbCpf1
tttctttcggccaggctgag

SEQ ID NO: 280 - DNA, 21 bp, Artificial Sequence
  Synthetic: DMPK 3 reverse 19:45770159-45770184; As/LbCpf1
tttctttcggccaggctgagg

SEQ ID NO: 281 - DNA, 22 bp, Artificial Sequence
  Synthetic: DMPK 3 reverse 19:45770159-45770185; As/LbCpf1
tttctttcggccaggctgaggc

SEQ ID NO: 282 - DNA, 23 bp, Artificial Sequence
  Synthetic: DMPK 3 reverse 19:45770159-45770186; As/LbCpf1
tttctttcggccaggctgaggcc

SEQ ID NO: 283 - DNA, 24 bp, Artificial Sequence
  Synthetic: DMPK 3 reverse 19:45770159-45770187; As/LbCpf1
tttctttcggccaggctgaggccc

SEQ ID NO: 284 - DNA, 25 bp, Artificial Sequence
  Synthetic: DMPK 3 reverse 19:45770159-45770188; As/LbCpf1
tttctttcggccaggctgaggccct

SEQ ID NO: 285 - DNA, 18 bp, Artificial Sequence
  Synthetic: DMPK 3 forward 19:45769708-45769730; AsCpf1-1
gagctttgggcagatgga

SEQ ID NO: 286 - DNA, 19 bp, Artificial Sequence
  Synthetic: DMPK 3 forward 19:45769708-45769731; AsCpf1-1
gagctttgggcagatggag

SEQ ID NO: 287 - DNA, 20 bp, Artificial Sequence
  Synthetic: DMPK 3 forward 19:45769708-45769732; AsCpf1-1
gagctttgggcagatggagg

SEQ ID NO: 288 - DNA, 21 bp, Artificial Sequence
  Synthetic: DMPK 3 forward 19:45769708-45769733; AsCpf1-1
gagctttgggcagatggaggg

SEQ ID NO: 289 - DNA, 22 bp, Artificial Sequence
  Synthetic: DMPK 3 forward 19:45769708-45769734; AsCpf1-1
gagctttgggcagatggagggc

SEQ ID NO: 290 - DNA, 23 bp, Artificial Sequence
  Synthetic: DMPK 3 forward 19:45769708-45769735; AsCpf1-1
gagctttgggcagatggagggcc

SEQ ID NO: 291 - DNA, 24 bp, Artificial Sequence
  Synthetic: DMPK 3 forward 19:45769708-45769736; AsCpf1-1
gagctttgggcagatggagggcct

SEQ ID NO: 292 - DNA, 25 bp, Artificial Sequence
  Synthetic: DMPK 3 forward 19:45769708-45769737; AsCpf1-1
gagctttgggcagatggagggcctt

SEQ ID NO: 293 - DNA, 18 bp, Artificial Sequence
  Synthetic: DMPK 3 forward 19:45769740-45769762; AsCpf1-1
cgagggtcgggggtgggg

SEQ ID NO: 294 - DNA, 19 bp, Artificial Sequence
  Synthetic: DMPK 3 forward 19:45769740-45769763; AsCpf1-1
cgagggtcgggggtggggg

SEQ ID NO: 295 - DNA, 20 bp, Artificial Sequence
  Synthetic: DMPK 3 forward 19:45769740-45769764; AsCpf1-1
cgagggtcgggggtgggggt

SEQ ID NO: 296 - DNA, 21 bp, Artificial Sequence
  Synthetic: DMPK 3 forward 19:45769740-45769765; AsCpf1-1
cgagggtcgggggtgggggtc

SEQ ID NO: 297 - DNA, 22 bp, Artificial Sequence
  Synthetic: DMPK 3 forward 19:45769740-45769766; AsCpf1-1
cgagggtcgggggtgggggtcc

SEQ ID NO: 298 - DNA, 23 bp, Artificial Sequence
  Synthetic: DMPK 3 forward 19:45769740-45769767; AsCpf1-1
cgagggtcgggggtgggggtcct

SEQ ID NO: 299 - DNA, 24 bp, Artificial Sequence
  Synthetic: DMPK 3 forward 19:45769740-45769768; AsCpf1-1
cgagggtcgggggtgggggtccta

SEQ ID NO: 300 - DNA, 25 bp, Artificial Sequence
  Synthetic: DMPK 3 forward 19:45769740-45769769; AsCpf1-1
cgagggtcgggggtgggggtcctag

SEQ ID NO: 301 - DNA, 18 bp, Artificial Sequence
  Synthetic: DMPK 3 reverse 19:45769747-45769769; AsCpf1-1
cacctaggacccccaccc

SEQ ID NO: 302 - DNA, 19 bp, Artificial Sequence
  Synthetic: DMPK 3 reverse 19:45769747-45769770; AsCpf1-1
cacctaggacccccacccc

SEQ ID NO: 303 - DNA, 20 bp, Artificial Sequence
  Synthetic: DMPK 3 reverse 19:45769747-45769771; AsCpf1-1
cacctaggacccccaccccc

SEQ ID NO: 304 - DNA, 21 bp, Artificial Sequence
  Synthetic: DMPK 3 reverse 19:45769747-45769772; AsCpf1-1
cacctaggacccccacccccg

SEQ ID NO: 305 - DNA, 22 bp, Artificial Sequence
  Synthetic: DMPK 3 reverse 19:45769747-45769773; AsCpf1-1
cacctaggacccccacccccga

SEQ ID NO: 306 - DNA, 23 bp, Artificial Sequence
  Synthetic: DMPK 3 reverse 19:45769747-45769774; AsCpf1-1
cacctaggacccccacccccgac

SEQ ID NO: 307 - DNA, 24 bp, Artificial Sequence
  Synthetic: DMPK 3 reverse 19:45769747-45769775; AsCpf1-1
cacctaggacccccacccccgacc

SEQ ID NO: 308 - DNA, 25 bp, Artificial Sequence
  Synthetic: DMPK 3 reverse 19:45769747-45769776; AsCpf1-1
cacctaggacccccacccccgaccc

SEQ ID NO: 309 - DNA, 18 bp, Artificial Sequence
  Synthetic: DMPK 3 reverse 19:45769768-45769790; AsCpf1-1
tcggtatttattgtctgt

SEQ ID NO: 310 - DNA, 19 bp, Artificial Sequence
  Synthetic: DMPK 3 reverse 19:45769768-45769791; AsCpf1-1
tcggtatttattgtctgtc

SEQ ID NO: 311 - DNA, 20 bp, Artificial Sequence
  Synthetic: DMPK 3 reverse 19:45769768-45769792; AsCpf1-1
tcggtatttattgtctgtcc

SEQ ID NO: 312 - DNA, 21 bp, Artificial Sequence
  Synthetic: DMPK 3 reverse 19:45769768-45769793; AsCpf1-1
tcggtatttattgtctgtccc

SEQ ID NO: 313 - DNA, 22 bp, Artificial Sequence
  Synthetic: DMPK 3 reverse 19:45769768-45769794; AsCpf1-1
tcggtatttattgtctgtcccc

SEQ ID NO: 314 - DNA, 23 bp, Artificial Sequence
  Synthetic: DMPK 3 reverse 19:45769768-45769795; AsCpf1-1
tcggtatttattgtctgtcccca

SEQ ID NO: 315 - DNA, 24 bp, Artificial Sequence
  Synthetic: DMPK 3 reverse 19:45769768-45769796; AsCpf1-1
tcggtatttattgtctgtccccac

SEQ ID NO: 316 - DNA, 25 bp, Artificial Sequence
  Synthetic: DMPK 3 reverse 19:45769768-45769797; AsCpf1-1
tcggtatttattgtctgtccccacc

SEQ ID NO: 317 - DNA, 18 bp, Artificial Sequence
  Synthetic: DMPK 3 reverse 19:45769799-45769821; AsCpf1-1
cgttttggatgcactgag

SEQ ID NO: 318 - DNA, 19 bp, Artificial Sequence
  Synthetic: DMPK 3 reverse 19:45769799-45769822; AsCpf1-1
cgttttggatgcactgaga

SEQ ID NO: 319 - DNA, 20 bp, Artificial Sequence
  Synthetic: DMPK 3 reverse 19:45769799-45769823; AsCpf1-1
cgttttggatgcactgagac

SEQ ID NO: 320 - DNA, 21 bp, Artificial Sequence
  Synthetic: DMPK 3 reverse 19:45769799-45769824; AsCpf1-1
cgttttggatgcactgagacc

SEQ ID NO: 321 - DNA, 22 bp, Artificial Sequence
  Synthetic: DMPK 3 reverse 19:45769799-45769825; AsCpf1-1
cgttttggatgcactgagaccc

SEQ ID NO: 322 - DNA, 23 bp, Artificial Sequence
  Synthetic: DMPK 3 reverse 19:45769799-45769826; AsCpf1-1
cgttttggatgcactgagacccc

SEQ ID NO: 323 - DNA, 24 bp, Artificial Sequence
  Synthetic: DMPK 3 reverse 19:45769799-45769827; AsCpf1-1
cgttttggatgcactgagaccccg

SEQ ID NO: 324 - DNA, 25 bp, Artificial Sequence
  Synthetic: DMPK 3 reverse 19:45769799-45769828; AsCpf1-1
cgttttggatgcactgagaccccga

SEQ ID NO: 325 - DNA, 18 bp, Artificial Sequence
  Synthetic: DMPK 3 forward 19:45769815-45769837; AsCpf1-1
aaacgtggattggggttg

SEQ ID NO: 326 - DNA, 19 bp, Artificial Sequence
  Synthetic: DMPK 3 forward 19:45769815-45769838; AsCpf1-1
aaacgtggattggggttgt

SEQ ID NO: 327 - DNA, 20 bp, Artificial Sequence
  Synthetic: DMPK 3 forward 19:45769815-45769839; AsCpf1-1
aaacgtggattggggttgtt

SEQ ID NO: 328 - DNA, 21 bp, Artificial Sequence
  Synthetic: DMPK 3 forward 19:45769815-45769840; AsCpf1-1
aaacgtggattggggttgttg

SEQ ID NO: 329 - DNA, 22 bp, Artificial Sequence
  Synthetic: DMPK 3 forward 19:45769815-45769841; AsCpf1-1
aaacgtggattggggttgttgg

SEQ ID NO: 330 - DNA, 23 bp, Artificial Sequence
  Synthetic: DMPK 3 forward 19:45769815-45769842; AsCpf1-1
aaacgtggattggggttgttggg

SEQ ID NO: 331 - DNA, 24 bp, Artificial Sequence
  Synthetic: DMPK 3 forward 19:45769815-45769843; AsCpf1-1
aaacgtggattggggttgttgggg

SEQ ID NO: 332 - DNA, 25 bp, Artificial Sequence
  Synthetic: DMPK 3 forward 19:45769815-45769844; AsCpf1-1
aaacgtggattggggttgttggggg

SEQ ID NO: 333 - DNA, 18 bp, Artificial Sequence
  Synthetic: DMPK 3 reverse 19:45769840-45769862; AsCpf1-1
actcgctgacaggctaca

SEQ ID NO: 334 - DNA, 19 bp, Artificial Sequence
  Synthetic: DMPK 3 reverse 19:45769840-45769863; AsCpf1-1
actcgctgacaggctacag

SEQ ID NO: 335 - DNA, 20 bp, Artificial Sequence
  Synthetic: DMPK 3 reverse 19:45769840-45769864; AsCpf1-1
actcgctgacaggctacagg

SEQ ID NO: 336 - DNA, 21 bp, Artificial Sequence
  Synthetic: DMPK 3 reverse 19:45769840-45769865; AsCpf1-1
actcgctgacaggctacagga

SEQ ID NO: 337 - DNA, 22 bp, Artificial Sequence
  Synthetic: DMPK 3 reverse 19:45769840-45769866; AsCpf1-1
actcgctgacaggctacaggac

SEQ ID NO: 338 - DNA, 23 bp, Artificial Sequence
  Synthetic: DMPK 3 reverse 19:45769840-45769867; AsCpf1-1
actcgctgacaggctacaggacc

SEQ ID NO: 339 - DNA, 24 bp, Artificial Sequence
  Synthetic: DMPK 3 reverse 19:45769840-45769868; AsCpf1-1
actcgctgacaggctacaggaccc

SEQ ID NO: 340 - DNA, 25 bp, Artificial Sequence
  Synthetic: DMPK 3 reverse 19:45769840-45769869; AsCpf1-1
actcgctgacaggctacaggacccc

SEQ ID NO: 341 - DNA, 18 bp, Artificial Sequence
  Synthetic: DMPK 3 reverse 19:45769872-45769894; AsCpf1-1
gcggtttggatatttatt

SEQ ID NO: 342 - DNA, 19 bp, Artificial Sequence
  Synthetic: DMPK 3 reverse 19:45769872-45769895; AsCpf1-1
gcggtttggatatttattg

SEQ ID NO: 343 - DNA, 20 bp, Artificial Sequence
  Synthetic: DMPK 3 reverse 19:45769872-45769896; AsCpf1-1
gcggtttggatatttattga

SEQ ID NO: 344 - DNA, 21 bp, Artificial Sequence
  Synthetic: DMPK 3 reverse 19:45769872-45769897; AsCpf1-1
gcggtttggatatttattgac

SEQ ID NO: 345 - DNA, 22 bp, Artificial Sequence
  Synthetic: DMPK 3 reverse 19:45769872-45769898; AsCpf1-1
gcggtttggatatttattgacc

SEQ ID NO: 346 - DNA, 23 bp, Artificial Sequence
  Synthetic: DMPK 3 reverse 19:45769872-45769899; AsCpf1-1
gcggtttggatatttattgacct

SEQ ID NO: 347 - DNA, 24 bp, Artificial Sequence
  Synthetic: DMPK 3 reverse 19:45769872-45769900; AsCpf1-1
gcggtttggatatttattgacctc

SEQ ID NO: 348 - DNA, 25 bp, Artificial Sequence
  Synthetic: DMPK 3 reverse 19:45769872-45769901; AsCpf1-1
gcggtttggatatttattgacctcg

SEQ ID NO: 349 - DNA, 18 bp, Artificial Sequence
  Synthetic: DMPK 3 reverse 19:45769881-45769903; AsCpf1-1
cccgcttcggcggtttgg

SEQ ID NO: 350 - DNA, 19 bp, Artificial Sequence
  Synthetic: DMPK 3 reverse 19:45769881-45769904; AsCpf1-1
cccgcttcggcggtttgga

SEQ ID NO: 351 - DNA, 20 bp, Artificial Sequence
  Synthetic: DMPK 3 reverse 19:45769881-45769905; AsCpf1-1
cccgcttcggcggtttggat

SEQ ID NO: 352 - DNA, 21 bp, Artificial Sequence
  Synthetic: DMPK 3 reverse 19:45769881-45769906; AsCpf1-1
cccgcttcggcggtttggata

SEQ ID NO: 353 - DNA, 22 bp, Artificial Sequence
  Synthetic: DMPK 3 reverse 19:45769881-45769907; AsCpf1-1
cccgcttcggcggtttggatat

SEQ ID NO: 354 - DNA, 23 bp, Artificial Sequence
  Synthetic: DMPK 3 reverse 19:45769881-45769908; AsCpf1-1
cccgcttcggcggtttggatatt

SEQ ID NO: 355 - DNA, 24 bp, Artificial Sequence
  Synthetic: DMPK 3 reverse 19:45769881-45769909; AsCpf1-1
cccgcttcggcggtttggatattt

SEQ ID NO: 356 - DNA, 25 bp, Artificial Sequence
  Synthetic: DMPK 3 reverse 19:45769881-45769910; AsCpf1-1
cccgcttcggcggtttggatattta

SEQ ID NO: 357 - DNA, 18 bp, Artificial Sequence
  Synthetic: DMPK 3 forward 19:45769887-45769909; AsCpf1-1
aaccgccgaagcgggcgg

SEQ ID NO: 358 - DNA, 19 bp, Artificial Sequence
  Synthetic: DMPK 3 forward 19:45769887-45769910; AsCpf1-1
aaccgccgaagcgggcgga

SEQ ID NO: 359 - DNA, 20 bp, Artificial Sequence
  Synthetic: DMPK 3 forward 19:45769887-45769911; AsCpf1-1
aaccgccgaagcgggcggag

SEQ ID NO: 360 - DNA, 21 bp, Artificial Sequence
  Synthetic: DMPK 3 forward 19:45769887-45769912; AsCpf1-1
aaccgccgaagcgggcggagc

SEQ ID NO: 361 - DNA, 22 bp, Artificial Sequence
  Synthetic: DMPK 3 forward 19:45769887-45769913; AsCpf1-1
aaccgccgaagcgggcggagcc

SEQ ID NO: 362 - DNA, 23 bp, Artificial Sequence
  Synthetic: DMPK 3 forward 19:45769887-45769914; AsCpf1-1
aaccgccgaagcgggcggagccg

SEQ ID NO: 363 - DNA, 24 bp, Artificial Sequence
  Synthetic: DMPK 3 forward 19:45769887-45769915; AsCpf1-1
aaccgccgaagcgggcggagccgg

SEQ ID NO: 364 - DNA, 25 bp, Artificial Sequence
  Synthetic: DMPK 3 forward 19:45769887-45769916; AsCpf1-1
aaccgccgaagcgggcggagccggc

SEQ ID NO: 365 - DNA, 18 bp, Artificial Sequence
  Synthetic: DMPK 3 forward 19:45769922-45769944; AsCpf1-1
agagcagcgcaagtgagg

SEQ ID NO: 366 - DNA, 19 bp, Artificial Sequence
  Synthetic: DMPK 3 forward 19:45769922-45769945; AsCpf1-1
agagcagcgcaagtgagga

SEQ ID NO: 367 - DNA, 20 bp, Artificial Sequence
  Synthetic: DMPK 3 forward 19:45769922-45769946; AsCpf1-1
agagcagcgcaagtgaggag

SEQ ID NO: 368 - DNA, 21 bp, Artificial Sequence
  Synthetic: DMPK 3 forward 19:45769922-45769947; AsCpf1-1
agagcagcgcaagtgaggagg

SEQ ID NO: 369 - DNA, 22 bp, Artificial Sequence
  Synthetic: DMPK 3 forward 19:45769922-45769948; AsCpf1-1
agagcagcgcaagtgaggaggg

SEQ ID NO: 370 - DNA, 23 bp, Artificial Sequence
  Synthetic: DMPK 3 forward 19:45769922-45769949; AsCpf1-1
agagcagcgcaagtgaggagggg

SEQ ID NO: 371 - DNA, 24 bp, Artificial Sequence
  Synthetic: DMPK 3 forward 19:45769922-45769950; AsCpf1-1
agagcagcgcaagtgaggaggggg

SEQ ID NO: 372 - DNA, 25 bp, Artificial Sequence
  Synthetic: DMPK 3 forward 19:45769922-45769951; AsCpf1-1
agagcagcgcaagtgaggagggggg

SEQ ID NO: 373 - DNA, 18 bp, Artificial Sequence
  Synthetic: DMPK 3 reverse 19:45769929-45769951; AsCpf1-1
gcgcccccctcctcactt

SEQ ID NO: 374 - DNA, 19 bp, Artificial Sequence
  Synthetic: DMPK 3 reverse 19:45769929-45769952; AsCpf1-1
gcgcccccctcctcacttg

SEQ ID NO: 375 - DNA, 20 bp, Artificial Sequence
  Synthetic: DMPK 3 reverse 19:45769929-45769953; AsCpf1-1
gcgcccccctcctcacttgc

SEQ ID NO: 376 - DNA, 21 bp, Artificial Sequence
  Synthetic: DMPK 3 reverse 19:45769929-45769954; AsCpf1-1
gcgcccccctcctcacttgcg

SEQ ID NO: 377 - DNA, 22 bp, Artificial Sequence
  Synthetic: DMPK 3 reverse 19:45769929-45769955; AsCpf1-1
gcgcccccctcctcacttgcgc

SEQ ID NO: 378 - DNA, 23 bp, Artificial Sequence
  Synthetic: DMPK 3 reverse 19:45769929-45769956; AsCpf1-1
gcgcccccctcctcacttgcgct

SEQ ID NO: 379 - DNA, 24 bp, Artificial Sequence
  Synthetic: DMPK 3 reverse 19:45769929-45769957; AsCpf1-1
gcgcccccctcctcacttgcgctg

SEQ ID NO: 380 - DNA, 25 bp, Artificial Sequence
  Synthetic: DMPK 3 reverse 19:45769929-45769958; AsCpf1-1
gcgcccccctcctcacttgcgctgc

SEQ ID NO: 381 - DNA, 18 bp, Artificial Sequence
  Synthetic: DMPK 3 reverse 19:45769937-45769959; AsCpf1-1
gggatcccgcgcccccct

SEQ ID NO: 382 - DNA, 19 bp, Artificial Sequence
  Synthetic: DMPK 3 reverse 19:45769937-45769960; AsCpf1-1
gggatcccgcgcccccctc

SEQ ID NO: 383 - DNA, 20 bp, Artificial Sequence
  Synthetic: DMPK 3 reverse 19:45769937-45769961; AsCpf1-1
gggatcccgcgcccccctcc

SEQ ID NO: 384 - DNA, 21 bp, Artificial Sequence
  Synthetic: DMPK 3 reverse 19:45769937-45769962; AsCpf1-1
gggatcccgcgcccccctcct

SEQ ID NO: 385 - DNA, 22 bp, Artificial Sequence
  Synthetic: DMPK 3 reverse 19:45769937-45769963; AsCpf1-1
gggatcccgcgcccccctcctc

SEQ ID NO: 386 - DNA, 23 bp, Artificial Sequence
  Synthetic: DMPK 3 reverse 19:45769937-45769964; AsCpf1-1
gggatcccgcgcccccctcctca

SEQ ID NO: 387 - DNA, 24 bp, Artificial Sequence
  Synthetic: DMPK 3 reverse 19:45769937-45769965; AsCpf1-1
gggatcccgcgcccccctcctcac

SEQ ID NO: 388 - DNA, 25 bp, Artificial Sequence
  Synthetic: DMPK 3 reverse 19:45769937-45769966; AsCpf1-1
gggatcccgcgcccccctcctcact

SEQ ID NO: 389 - DNA, 18 bp, Artificial Sequence
  Synthetic: DMPK 3 forward 19:45769958-45769980; AsCpf1-1
cgaaaaagcgggtttggc

SEQ ID NO: 390 - DNA, 19 bp, Artificial Sequence
  Synthetic: DMPK 3 forward 19:45769958-45769981; AsCpf1-1
cgaaaaagcgggtttggca

SEQ ID NO: 391 - DNA, 20 bp, Artificial Sequence
  Synthetic: DMPK 3 forward 19:45769958-45769982; AsCpf1-1
cgaaaaagcgggtttggcaa

SEQ ID NO: 392 - DNA, 21 bp, Artificial Sequence
  Synthetic: DMPK 3 forward 19:45769958-45769983; AsCpf1-1
cgaaaaagcgggtttggcaaa

SEQ ID NO: 393 - DNA, 22 bp, Artificial Sequence
  Synthetic: DMPK 3 forward 19:45769958-45769984; AsCpf1-1
cgaaaaagcgggtttggcaaaa

SEQ ID NO: 394 - DNA, 23 bp, Artificial Sequence
  Synthetic: DMPK 3 forward 19:45769958-45769985; AsCpf1-1
cgaaaaagcgggtttggcaaaag

SEQ ID NO: 395 - DNA, 24 bp, Artificial Sequence
  Synthetic: DMPK 3 forward 19:45769958-45769986; AsCpf1-1
cgaaaaagcgggtttggcaaaagc

SEQ ID NO: 396 - DNA, 25 bp, Artificial Sequence
  Synthetic: DMPK 3 forward 19:45769958-45769987; AsCpf1-1
cgaaaaagcgggtttggcaaaagca

SEQ ID NO: 397 - DNA, 18 bp, Artificial Sequence
  Synthetic: DMPK 3 forward 19:45769990-45770012; AsCpf1-1
cgagtaagcaggcagaga

SEQ ID NO: 398 - DNA, 19 bp, Artificial Sequence
  Synthetic: DMPK 3 forward 19:45769990-45770013; AsCpf1-1
cgagtaagcaggcagagat

SEQ ID NO: 399 - DNA, 20 bp, Artificial Sequence
  Synthetic: DMPK 3 forward 19:45769990-45770014; AsCpf1-1
cgagtaagcaggcagagatc

SEQ ID NO: 400 - DNA, 21 bp, Artificial Sequence
  Synthetic: DMPK 3 forward 19:45769990-45770015; AsCpf1-1
cgagtaagcaggcagagatcg

SEQ ID NO: 401 - DNA, 22 bp, Artificial Sequence
  Synthetic: DMPK 3 forward 19:45769990-45770016; AsCpf1-1
cgagtaagcaggcagagatcgc

SEQ ID NO: 402 - DNA, 23 bp, Artificial Sequence
  Synthetic: DMPK 3 forward 19:45769990-45770017; AsCpf1-1
cgagtaagcaggcagagatcgcg

SEQ ID NO: 403 - DNA, 24 bp, Artificial Sequence
  Synthetic: DMPK 3 forward 19:45769990-45770018; AsCpf1-1
cgagtaagcaggcagagatcgcgc

SEQ ID NO: 404 - DNA, 25 bp, Artificial Sequence
  Synthetic: DMPK 3 forward 19:45769990-45770019; AsCpf1-1
cgagtaagcaggcagagatcgcgcc

SEQ ID NO: 405 - DNA, 18 bp, Artificial Sequence
  Synthetic: DMPK 3 forward 19:45769991-45770013; AsCpf1-1
gagtaagcaggcagagat

SEQ ID NO: 406 - DNA, 19 bp, Artificial Sequence
  Synthetic: DMPK 3 forward 19:45769991-45770014; AsCpf1-1
gagtaagcaggcagagatc

SEQ ID NO: 407 - DNA, 20 bp, Artificial Sequence
  Synthetic: DMPK 3 forward 19:45769991-45770015; AsCpf1-1
gagtaagcaggcagagatcg

SEQ ID NO: 408 - DNA, 21 bp, Artificial Sequence
  Synthetic: DMPK 3 forward 19:45769991-45770016; AsCpf1-1
gagtaagcaggcagagatcgc

SEQ ID NO: 409 - DNA, 22 bp, Artificial Sequence
  Synthetic: DMPK 3 forward 19:45769991-45770017; AsCpf1-1
gagtaagcaggcagagatcgcg

SEQ ID NO: 410 - DNA, 23 bp, Artificial Sequence
  Synthetic: DMPK 3 forward 19:45769991-45770018; AsCpf1-1
gagtaagcaggcagagatcgcgc

SEQ ID NO: 411 - DNA, 24 bp, Artificial Sequence
  Synthetic: DMPK 3 forward 19:45769991-45770019; AsCpf1-1
gagtaagcaggcagagatcgcgcc

SEQ ID NO: 412 - DNA, 25 bp, Artificial Sequence
  Synthetic: DMPK 3 forward 19:45769991-45770020; AsCpf1-1
gagtaagcaggcagagatcgcgcca

SEQ ID NO: 413 - DNA, 18 bp, Artificial Sequence
  Synthetic: DMPK 3 forward 19:45770025-45770047; AsCpf1-1
cagagcagggcgtcatgc

SEQ ID NO: 414 - DNA, 19 bp, Artificial Sequence
  Synthetic: DMPK 3 forward 19:45770025-45770048; AsCpf1-1
cagagcagggcgtcatgca

SEQ ID NO: 415 - DNA, 20 bp, Artificial Sequence
  Synthetic: DMPK 3 forward 19:45770025-45770049; AsCpf1-1
cagagcagggcgtcatgcac

SEQ ID NO: 416 - DNA, 21 bp, Artificial Sequence
  Synthetic: DMPK 3 forward 19:45770025-45770050; AsCpf1-1
cagagcagggcgtcatgcaca

SEQ ID NO: 417 - DNA, 22 bp, Artificial Sequence
  Synthetic: DMPK 3 forward 19:45770025-45770051; AsCpf1-1
cagagcagggcgtcatgcacaa

SEQ ID NO: 418 - DNA, 23 bp, Artificial Sequence
  Synthetic: DMPK 3 forward 19:45770025-45770052; AsCpf1-1
cagagcagggcgtcatgcacaag

SEQ ID NO: 419 - DNA, 24 bp, Artificial Sequence
  Synthetic: DMPK 3 forward 19:45770025-45770053; AsCpf1-1
cagagcagggcgtcatgcacaaga

SEQ ID NO: 420 - DNA, 25 bp, Artificial Sequence
  Synthetic: DMPK 3 forward 19:45770025-45770054; AsCpf1-1
cagagcagggcgtcatgcacaagaa

SEQ ID NO: 421 - DNA, 18 bp, Artificial Sequence
  Synthetic: DMPK 3 reverse 19:45770043-45770065; AsCpf1-1
caaagtgcaaagctttct

SEQ ID NO: 422 - DNA, 19 bp, Artificial Sequence
  Synthetic: DMPK 3 reverse 19:45770043-45770066; AsCpf1-1
caaagtgcaaagctttctt

SEQ ID NO: 423 - DNA, 20 bp, Artificial Sequence
  Synthetic: DMPK 3 reverse 19:45770043-45770067; AsCpf1-1
caaagtgcaaagctttcttg

SEQ ID NO: 424 - DNA, 21 bp, Artificial Sequence
  Synthetic: DMPK 3 reverse 19:45770043-45770068; AsCpf1-1
caaagtgcaaagctttcttgt

SEQ ID NO: 425 - DNA, 22 bp, Artificial Sequence
  Synthetic: DMPK 3 reverse 19:45770043-45770069; AsCpf1-1
caaagtgcaaagctttcttgtg

SEQ ID NO: 426 - DNA, 23 bp, Artificial Sequence
  Synthetic: DMPK 3 reverse 19:45770043-45770070; AsCpf1-1
caaagtgcaaagctttcttgtgc

SEQ ID NO: 427 - DNA, 24 bp, Artificial Sequence
  Synthetic: DMPK 3 reverse 19:45770043-45770071; AsCpf1-1
caaagtgcaaagctttcttgtgca

SEQ ID NO: 428 - DNA, 25 bp, Artificial Sequence
  Synthetic: DMPK 3 reverse 19:45770043-45770072; AsCpf1-1
caaagtgcaaagctttcttgtgcat

SEQ ID NO: 429 - DNA, 18 bp, Artificial Sequence
  Synthetic: DMPK 3 reverse 19:45770068-45770090; AsCpf1-1
cgcacccccacctatcgt

SEQ ID NO: 430 - DNA, 19 bp, Artificial Sequence
  Synthetic: DMPK 3 reverse 19:45770068-45770091; AsCpf1-1
cgcacccccacctatcgtt

SEQ ID NO: 431 - DNA, 20 bp, Artificial Sequence
  Synthetic: DMPK 3 reverse 19:45770068-45770092; AsCpf1-1
cgcacccccacctatcgttg

SEQ ID NO: 432 - DNA, 21 bp, Artificial Sequence
  Synthetic: DMPK 3 reverse 19:45770068-45770093; AsCpf1-1
cgcacccccacctatcgttgg

SEQ ID NO: 433 - DNA, 22 bp, Artificial Sequence
  Synthetic: DMPK 3 reverse 19:45770068-45770094; AsCpf1-1
cgcacccccacctatcgttggt

SEQ ID NO: 434 - DNA, 23 bp, Artificial Sequence
  Synthetic: DMPK 3 reverse 19:45770068-45770095; AsCpf1-1
cgcacccccacctatcgttggtt

SEQ ID NO: 435 - DNA, 24 bp, Artificial Sequence
  Synthetic: DMPK 3 reverse 19:45770068-45770096; AsCpf1-1
cgcacccccacctatcgttggttc

SEQ ID NO: 436 - DNA, 25 bp, Artificial Sequence
  Synthetic: DMPK 3 reverse 19:45770068-45770097; AsCpf1-1
cgcacccccacctatcgttggttcg

SEQ ID NO: 437 - DNA, 18 bp, Artificial Sequence
  Synthetic: DMPK 3 reverse 19:45770075-45770097; AsCpf1-1
tcctccacgcacccccac

SEQ ID NO: 438 - DNA, 19 bp, Artificial Sequence
  Synthetic: DMPK 3 reverse 19:45770075-45770098; AsCpf1-1
tcctccacgcacccccacc

SEQ ID NO: 439 - DNA, 20 bp, Artificial Sequence
  Synthetic: DMPK 3 reverse 19:45770075-45770099; AsCpf1-1
tcctccacgcacccccacct

SEQ ID NO: 440 - DNA, 21 bp, Artificial Sequence
  Synthetic: DMPK 3 reverse 19:45770075-45770100; AsCpf1-1
tcctccacgcacccccaccta

SEQ ID NO: 441 - DNA, 22 bp, Artificial Sequence
  Synthetic: DMPK 3 reverse 19:45770075-45770101; AsCpf1-1
tcctccacgcacccccacctat

SEQ ID NO: 442 - DNA, 23 bp, Artificial Sequence
  Synthetic: DMPK 3 reverse 19:45770075-45770102; AsCpf1-1
tcctccacgcacccccacctatc

SEQ ID NO: 443 - DNA, 24 bp, Artificial Sequence
  Synthetic: DMPK 3 reverse 19:45770075-45770103; AsCpf1-1
tcctccacgcacccccacctatcg

SEQ ID NO: 444 - DNA, 25 bp, Artificial Sequence
  Synthetic: DMPK 3 reverse 19:45770075-45770104; AsCpf1-1
tcctccacgcacccccacctatcgt

SEQ ID NO: 445 - DNA, 18 bp, Artificial Sequence
  Synthetic: DMPK 3 reverse 19:45770076-45770098; AsCpf1-1
atcctccacgcaccccca

SEQ ID NO: 446 - DNA, 19 bp, Artificial Sequence
  Synthetic: DMPK 3 reverse 19:45770076-45770099; AsCpf1-1
atcctccacgcacccccac

SEQ ID NO: 447 - DNA, 20 bp, Artificial Sequence
  Synthetic: DMPK 3 reverse 19:45770076-45770100; AsCpf1-1
atcctccacgcacccccacc

SEQ ID NO: 448 - DNA, 21 bp, Artificial Sequence
  Synthetic: DMPK 3 reverse 19:45770076-45770101; AsCpf1-1
atcctccacgcacccccacct

SEQ ID NO: 449 - DNA, 22 bp, Artificial Sequence
  Synthetic: DMPK 3 reverse 19:45770076-45770102; AsCpf1-1
atcctccacgcacccccaccta

SEQ ID NO: 450 - DNA, 23 bp, Artificial Sequence
  Synthetic: DMPK 3 reverse 19:45770076-45770103; AsCpf1-1
atcctccacgcacccccacctat

SEQ ID NO: 451 - DNA, 24 bp, Artificial Sequence
  Synthetic: DMPK 3 reverse 19:45770076-45770104; AsCpf1-1
atcctccacgcacccccacctatc

SEQ ID NO: 452 - DNA, 25 bp, Artificial Sequence
  Synthetic: DMPK 3 reverse 19:45770076-45770105; AsCpf1-1
atcctccacgcacccccacctatcg

SEQ ID NO: 453 - DNA, 18 bp, Artificial Sequence
  Synthetic: DMPK 3 reverse 19:45770082-45770104; AsCpf1-1
tgttccatcctccacgca

SEQ ID NO: 454 - DNA, 19 bp, Artificial Sequence
  Synthetic: DMPK 3 reverse 19:45770082-45770105; AsCpf1-1
tgttccatcctccacgcac

SEQ ID NO: 455 - DNA, 20 bp, Artificial Sequence
  Synthetic: DMPK 3 reverse 19:45770082-45770106; AsCpf1-1
tgttccatcctccacgcacc

SEQ ID NO: 456 - DNA, 21 bp, Artificial Sequence
  Synthetic: DMPK 3 reverse 19:45770082-45770107; AsCpf1-1
tgttccatcctccacgcaccc

SEQ ID NO: 457 - DNA, 22 bp, Artificial Sequence
  Synthetic: DMPK 3 reverse 19:45770082-45770108; AsCpf1-1
tgttccatcctccacgcacccc

SEQ ID NO: 458 - DNA, 23 bp, Artificial Sequence
  Synthetic: DMPK 3 reverse 19:45770082-45770109; AsCpf1-1
tgttccatcctccacgcaccccc

SEQ ID NO: 459 - DNA, 24 bp, Artificial Sequence
  Synthetic: DMPK 3 reverse 19:45770082-45770110; AsCpf1-1
tgttccatcctccacgcaccccca

SEQ ID NO: 460 - DNA, 25 bp, Artificial Sequence
  Synthetic: DMPK 3 reverse 19:45770082-45770111; AsCpf1-1
tgttccatcctccacgcacccccac

SEQ ID NO: 461 - DNA, 18 bp, Artificial Sequence
  Synthetic: DMPK 3 forward 19:45770128-45770150; AsCpf1-1
caggcctgcagtttgccc

SEQ ID NO: 462 - DNA, 19 bp, Artificial Sequence
  Synthetic: DMPK 3 forward 19:45770128-45770151; AsCpf1-1
caggcctgcagtttgccca

SEQ ID NO: 463 - DNA, 20 bp, Artificial Sequence
  Synthetic: DMPK 3 forward 19:45770128-45770152; AsCpf1-1
caggcctgcagtttgcccat

SEQ ID NO: 464 - DNA, 21 bp, Artificial Sequence
  Synthetic: DMPK 3 forward 19:45770128-45770153; AsCpf1-1
caggcctgcagtttgcccatc

SEQ ID NO: 465 - DNA, 22 bp, Artificial Sequence
  Synthetic: DMPK 3 forward 19:45770128-45770154; AsCpf1-1
caggcctgcagtttgcccatcc

SEQ ID NO: 466 - DNA, 23 bp, Artificial Sequence
  Synthetic: DMPK 3 forward 19:45770128-45770155; AsCpf1-1
caggcctgcagtttgcccatcca

SEQ ID NO: 467 - DNA, 24 bp, Artificial Sequence
  Synthetic: DMPK 3 forward 19:45770128-45770156; AsCpf1-1
caggcctgcagtttgcccatccac

SEQ ID NO: 468 - DNA, 25 bp, Artificial Sequence
  Synthetic: DMPK 3 forward 19:45770128-45770157; AsCpf1-1
caggcctgcagtttgcccatccacg

SEQ ID NO: 469 - DNA, 18 bp, Artificial Sequence
  Synthetic: DMPK 3 forward 19:45770129-45770151; AsCpf1-1
aggcctgcagtttgccca

SEQ ID NO: 470 - DNA, 19 bp, Artificial Sequence
  Synthetic: DMPK 3 forward 19:45770129-45770152; AsCpf1-1
aggcctgcagtttgcccat

SEQ ID NO: 471 - DNA, 20 bp, Artificial Sequence
  Synthetic: DMPK 3 forward 19:45770129-45770153; AsCpf1-1
aggcctgcagtttgcccatc

SEQ ID NO: 472 - DNA, 21 bp, Artificial Sequence
  Synthetic: DMPK 3 forward 19:45770129-45770154; AsCpf1-1
aggcctgcagtttgcccatcc

SEQ ID NO: 473 - DNA, 22 bp, Artificial Sequence
  Synthetic: DMPK 3 forward 19:45770129-45770155; AsCpf1-1
aggcctgcagtttgcccatcca

SEQ ID NO: 474 - DNA, 23 bp, Artificial Sequence
  Synthetic: DMPK 3 forward 19:45770129-45770156; AsCpf1-1
aggcctgcagtttgcccatccac

SEQ ID NO: 475 - DNA, 24 bp, Artificial Sequence
  Synthetic: DMPK 3 forward 19:45770129-45770157; AsCpf1-1
aggcctgcagtttgcccatccacg

SEQ ID NO: 476 - DNA, 25 bp, Artificial Sequence
  Synthetic: DMPK 3 forward 19:45770129-45770158; AsCpf1-1
aggcctgcagtttgcccatccacgt

SEQ ID NO: 477 - DNA, 18 bp, Artificial Sequence
  Synthetic: DMPK 3 reverse 19:45770150-45770172; AsCpf1-1
gccaggctgaggccctga

SEQ ID NO: 478 - DNA, 19 bp, Artificial Sequence
  Synthetic: DMPK 3 reverse 19:45770150-45770173; AsCpf1-1
gccaggctgaggccctgac

SEQ ID NO: 479 - DNA, 20 bp, Artificial Sequence
  Synthetic: DMPK 3 reverse 19:45770150-45770174; AsCpf1-1
gccaggctgaggccctgacg

SEQ ID NO: 480 - DNA, 21 bp, Artificial Sequence
  Synthetic: DMPK 3 reverse 19:45770150-45770175; AsCpf1-1
gccaggctgaggccctgacgt

SEQ ID NO: 481 - DNA, 22 bp, Artificial Sequence
  Synthetic: DMPK 3 reverse 19:45770150-45770176; AsCpf1-1
gccaggctgaggccctgacgtg

SEQ ID NO: 482 - DNA, 23 bp, Artificial Sequence
  Synthetic: DMPK 3 reverse 19:45770150-45770177; AsCpf1-1
gccaggctgaggccctgacgtgg

SEQ ID NO: 483 - DNA, 24 bp, Artificial Sequence
  Synthetic: DMPK 3 reverse 19:45770150-45770178; AsCpf1-1
gccaggctgaggccctgacgtgga

SEQ ID NO: 484 - DNA, 25 bp, Artificial Sequence
  Synthetic: DMPK 3 reverse 19:45770150-45770179; AsCpf1-1
gccaggctgaggccctgacgtggat

SEQ ID NO: 485 - DNA, 18 bp, Artificial Sequence
  Synthetic: DMPK 3 forward 19:45770151-45770173; AsCpf1-1
cgtcagggcctcagcctg

SEQ ID NO: 486 - DNA, 19 bp, Artificial Sequence
  Synthetic: DMPK 3 forward 19:45770151-45770174; AsCpf1-1
cgtcagggcctcagcctgg

SEQ ID NO: 487 - DNA, 20 bp, Artificial Sequence
  Synthetic: DMPK 3 forward 19:45770151-45770175; AsCpf1-1
cgtcagggcctcagcctggc

SEQ ID NO: 488 - DNA, 21 bp, Artificial Sequence
  Synthetic: DMPK 3 forward 19:45770151-45770176; AsCpf1-1
cgtcagggcctcagcctggcc

SEQ ID NO: 489 - DNA, 22 bp, Artificial Sequence
  Synthetic: DMPK 3 forward 19:45770151-45770177; AsCpf1-1
cgtcagggcctcagcctggccg

SEQ ID NO: 490 - DNA, 23 bp, Artificial Sequence
  Synthetic: DMPK 3 forward 19:45770151-45770178; AsCpf1-1
cgtcagggcctcagcctggccga

SEQ ID NO: 491 - DNA, 24 bp, Artificial Sequence
  Synthetic: DMPK 3 forward 19:45770151-45770179; AsCpf1-1
cgtcagggcctcagcctggccgaa

SEQ ID NO: 492 - DNA, 25 bp, Artificial Sequence
  Synthetic: DMPK 3 forward 19:45770151-45770180; AsCpf1-1
cgtcagggcctcagcctggccgaaa

SEQ ID NO: 493 - DNA, 18 bp, Artificial Sequence
  Synthetic: DMPK 3 forward 19:45770198-45770220; AsCpf1-1
cccagcagcagcagcagc

SEQ ID NO: 494 - DNA, 19 bp, Artificial Sequence
  Synthetic: DMPK 3 forward 19:45770198-45770221; AsCpf1-1
cccagcagcagcagcagca

SEQ ID NO: 495 - DNA, 20 bp, Artificial Sequence
  Synthetic: DMPK 3 forward 19:45770198-45770222; AsCpf1-1
cccagcagcagcagcagcag

SEQ ID NO: 496 - DNA, 21 bp, Artificial Sequence
  Synthetic: DMPK 3 forward 19:45770198-45770223; AsCpf1-1
cccagcagcagcagcagcagc

SEQ ID NO: 497 - DNA, 22 bp, Artificial Sequence
  Synthetic: DMPK 3 forward 19:45770198-45770224; AsCpf1-1
cccagcagcagcagcagcagca

SEQ ID NO: 498 - DNA, 23 bp, Artificial Sequence
  Synthetic: DMPK 3 forward 19:45770198-45770225; AsCpf1-1
cccagcagcagcagcagcagcag

SEQ ID NO: 499 - DNA, 24 bp, Artificial Sequence
  Synthetic: DMPK 3 forward 19:45770198-45770226; AsCpf1-1
cccagcagcagcagcagcagcagc

SEQ ID NO: 500 - DNA, 25 bp, Artificial Sequence
  Synthetic: DMPK 3 forward 19:45770198-45770227; AsCpf1-1
cccagcagcagcagcagcagcagca

SEQ ID NO: 501 - DNA, 18 bp, Artificial Sequence
  Synthetic: DMPK 3 forward 19:45769885-45769907; AsCpf1-2
caaaccgccgaagcgggc

SEQ ID NO: 502 - DNA, 19 bp, Artificial Sequence
  Synthetic: DMPK 3 forward 19:45769885-45769908; AsCpf1-2
caaaccgccgaagcgggcg

SEQ ID NO: 503 - DNA, 20 bp, Artificial Sequence
  Synthetic: DMPK 3 forward 19:45769885-45769909; AsCpf1-2
caaaccgccgaagcgggcgg

SEQ ID NO: 504 - DNA, 21 bp, Artificial Sequence
  Synthetic: DMPK 3 forward 19:45769885-45769910; AsCpf1-2
caaaccgccgaagcgggcgga

SEQ ID NO: 505 - DNA, 22 bp, Artificial Sequence
  Synthetic: DMPK 3 forward 19:45769885-45769911; AsCpf1-2
caaaccgccgaagcgggcggag

SEQ ID NO: 506 - DNA, 23 bp, Artificial Sequence
  Synthetic: DMPK 3 forward 19:45769885-45769912; AsCpf1-2
caaaccgccgaagcgggcggagc

SEQ ID NO: 507 - DNA, 24 bp, Artificial Sequence
  Synthetic: DMPK 3 forward 19:45769885-45769913; AsCpf1-2
caaaccgccgaagcgggcggagcc

SEQ ID NO: 508 - DNA, 25 bp, Artificial Sequence
  Synthetic: DMPK 3 forward 19:45769885-45769914; AsCpf1-2
caaaccgccgaagcgggcggagccg

SEQ ID NO: 509 - DNA, 18 bp, Artificial Sequence
  Synthetic: DMPK 3 reverse 19:45770052-45770074; AsCpf1-2
gttggttcgcaaagtgca

SEQ ID NO: 510 - DNA, 19 bp, Artificial Sequence
  Synthetic: DMPK 3 reverse 19:45770052-45770075; AsCpf1-2
gttggttcgcaaagtgcaa

SEQ ID NO: 511 - DNA, 20 bp, Artificial Sequence
  Synthetic: DMPK 3 reverse 19:45770052-45770076; AsCpf1-2
gttggttcgcaaagtgcaaa

SEQ ID NO: 512 - DNA, 21 bp, Artificial Sequence
  Synthetic: DMPK 3 reverse 19:45770052-45770077; AsCpf1-2
gttggttcgcaaagtgcaaag

SEQ ID NO: 513 - DNA, 22 bp, Artificial Sequence
  Synthetic: DMPK 3 reverse 19:45770052-45770078; AsCpf1-2
gttggttcgcaaagtgcaaagc

SEQ ID NO: 514 - DNA, 23 bp, Artificial Sequence
  Synthetic: DMPK 3 reverse 19:45770052-45770079; AsCpf1-2
gttggttcgcaaagtgcaaagct

SEQ ID NO: 515 - DNA, 24 bp, Artificial Sequence
  Synthetic: DMPK 3 reverse 19:45770052-45770080; AsCpf1-2
gttggttcgcaaagtgcaaagctt

SEQ ID NO: 516 - DNA, 25 bp, Artificial Sequence
  Synthetic: DMPK 3 reverse 19:45770052-45770081; AsCpf1-2
gttggttcgcaaagtgcaaagcttt

SEQ ID NO: 517 - DNA, 25 bp, Artificial Sequence
  Synthetic: DMPK 3 forward 19:45769700-45769731; SaCas9
ctgtggagtccagagctttgggcag

SEQ ID NO: 518 - DNA, 24 bp, Artificial Sequence
  Synthetic: DMPK 3 forward 19:45769701-45769731; SaCas9
tgtggagtccagagctttgggcag

SEQ ID NO: 519 - DNA, 23 bp, Artificial Sequence
  Synthetic: DMPK 3 forward 19:45769702-45769731; SaCas9
gtggagtccagagctttgggcag

SEQ ID NO: 520 - DNA, 22 bp, Artificial Sequence
  Synthetic: DMPK 3 forward 19:45769703-45769731; SaCas9
tggagtccagagctttgggcag

SEQ ID NO: 521 - DNA, 21 bp, Artificial Sequence
  Synthetic: DMPK 3 forward 19:45769704-45769731; SaCas9
ggagtccagagctttgggcag

SEQ ID NO: 522 - DNA, 20 bp, Artificial Sequence
  Synthetic: DMPK 3 forward 19:45769705-45769731; SaCas9
gagtccagagctttgggcag

SEQ ID NO: 523 - DNA, 19 bp, Artificial Sequence
  Synthetic: DMPK 3 forward 19:45769706-45769731; SaCas9
agtccagagctttgggcag

SEQ ID NO: 524 - DNA, 18 bp, Artificial Sequence
  Synthetic: DMPK 3 forward 19:45769707-45769731; SaCas9
gtccagagctttgggcag

SEQ ID NO: 525 - DNA, 25 bp, Artificial Sequence
  Synthetic: DMPK 3 forward 19:45769701-45769732; SaCas9
tgtggagtccagagctttgggcaga

SEQ ID NO: 526 - DNA, 24 bp, Artificial Sequence
  Synthetic: DMPK 3 forward 19:45769702-45769732; SaCas9
gtggagtccagagctttgggcaga

SEQ ID NO: 527 - DNA, 23 bp, Artificial Sequence
  Synthetic: DMPK 3 forward 19:45769703-45769732; SaCas9
tggagtccagagctttgggcaga

SEQ ID NO: 528 - DNA, 22 bp, Artificial Sequence
  Synthetic: DMPK 3 forward 19:45769704-45769732; SaCas9
ggagtccagagctttgggcaga

SEQ ID NO: 529 - DNA, 21 bp, Artificial Sequence
  Synthetic: DMPK 3 forward 19:45769705-45769732; SaCas9
gagtccagagctttgggcaga

SEQ ID NO: 530 - DNA, 20 bp, Artificial Sequence
  Synthetic: DMPK 3 forward 19:45769706-45769732; SaCas9
agtccagagctttgggcaga

SEQ ID NO: 531 - DNA, 19 bp, Artificial Sequence
  Synthetic: DMPK 3 forward 19:45769707-45769732; SaCas9
gtccagagctttgggcaga

SEQ ID NO: 532 - DNA, 18 bp, Artificial Sequence
  Synthetic: DMPK 3 forward 19:45769708-45769732; SaCas9
tccagagctttgggcaga

SEQ ID NO: 533 - DNA, 25 bp, Artificial Sequence
  Synthetic: DMPK 3 forward 19:45769703-45769734; SaCas9
tggagtccagagctttgggcagatg

SEQ ID NO: 534 - DNA, 24 bp, Artificial Sequence
  Synthetic: DMPK 3 forward 19:45769704-45769734; SaCas9
ggagtccagagctttgggcagatg

SEQ ID NO: 535 - DNA, 23 bp, Artificial Sequence
  Synthetic: DMPK 3 forward 19:45769705-45769734; SaCas9
gagtccagagctttgggcagatg

SEQ ID NO: 536 - DNA, 22 bp, Artificial Sequence
  Synthetic: DMPK 3 forward 19:45769706-45769734; SaCas9
agtccagagctttgggcagatg

SEQ ID NO: 537 - DNA, 21 bp, Artificial Sequence
  Synthetic: DMPK 3 forward 19:45769707-45769734; SaCas9
gtccagagctttgggcagatg

SEQ ID NO: 538 - DNA, 20 bp, Artificial Sequence
  Synthetic: DMPK 3 forward 19:45769708-45769734; SaCas9
tccagagctttgggcagatg

SEQ ID NO: 539 - DNA, 19 bp, Artificial Sequence
  Synthetic: DMPK 3 forward 19:45769709-45769734; SaCas9
ccagagctttgggcagatg

SEQ ID NO: 540 - DNA, 18 bp, Artificial Sequence
  Synthetic: DMPK 3 forward 19:45769710-45769734; SaCas9
cagagctttgggcagatg

SEQ ID NO: 541 - DNA, 25 bp, Artificial Sequence
  Synthetic: DMPK 3 reverse 19:45769707-45769738; SaCas9
aaaggccctccatctgcccaaagct

SEQ ID NO: 542 - DNA, 24 bp, Artificial Sequence
  Synthetic: DMPK 3 reverse 19:45769708-45769738; SaCas9
aaggccctccatctgcccaaagct

SEQ ID NO: 543 - DNA, 23 bp, Artificial Sequence
  Synthetic: DMPK 3 reverse 19:45769709-45769738; SaCas9
aggccctccatctgcccaaagct

SEQ ID NO: 544 - DNA, 22 bp, Artificial Sequence
  Synthetic: DMPK 3 reverse 19:45769710-45769738; SaCas9
ggccctccatctgcccaaagct

SEQ ID NO: 545 - DNA, 21 bp, Artificial Sequence
  Synthetic: DMPK 3 reverse 19:45769711-45769738; SaCas9
gccctccatctgcccaaagct

SEQ ID NO: 546 - DNA, 20 bp, Artificial Sequence
  Synthetic: DMPK 3 reverse 19:45769712-45769738; SaCas9
ccctccatctgcccaaagct

SEQ ID NO: 547 - DNA, 19 bp, Artificial Sequence
  Synthetic: DMPK 3 reverse 19:45769713-45769738; SaCas9
cctccatctgcccaaagct

SEQ ID NO: 548 - DNA, 18 bp, Artificial Sequence
  Synthetic: DMPK 3 reverse 19:45769714-45769738; SaCas9
ctccatctgcccaaagct

SEQ ID NO: 549 - DNA, 25 bp, Artificial Sequence
  Synthetic: DMPK 3 forward 19:45769718-45769749; SaCas9
tgggcagatggagggccttttattc

SEQ ID NO: 550 - DNA, 24 bp, Artificial Sequence
  Synthetic: DMPK 3 forward 19:45769719-45769749; SaCas9
gggcagatggagggccttttattc

SEQ ID NO: 551 - DNA, 23 bp, Artificial Sequence
  Synthetic: DMPK 3 forward 19:45769720-45769749; SaCas9
ggcagatggagggccttttattc

SEQ ID NO: 552 - DNA, 22 bp, Artificial Sequence
  Synthetic: DMPK 3 forward 19:45769721-45769749; SaCas9
gcagatggagggccttttattc

SEQ ID NO: 553 - DNA, 21 bp, Artificial Sequence
  Synthetic: DMPK 3 forward 19:45769722-45769749; SaCas9
cagatggagggccttttattc

SEQ ID NO: 554 - DNA, 20 bp, Artificial Sequence
  Synthetic: DMPK 3 forward 19:45769723-45769749; SaCas9
agatggagggccttttattc

SEQ ID NO: 555 - DNA, 19 bp, Artificial Sequence
  Synthetic: DMPK 3 forward 19:45769724-45769749; SaCas9
gatggagggccttttattc

SEQ ID NO: 556 - DNA, 18 bp, Artificial Sequence
  Synthetic: DMPK 3 forward 19:45769725-45769749; SaCas9
atggagggccttttattc

SEQ ID NO: 557 - DNA, 25 bp, Artificial Sequence
  Synthetic: DMPK 3 forward 19:45769720-45769751; SaCas9
ggcagatggagggccttttattcgc

SEQ ID NO: 558 - DNA, 24 bp, Artificial Sequence
  Synthetic: DMPK 3 forward 19:45769721-45769751; SaCas9
gcagatggagggccttttattcgc

SEQ ID NO: 559 - DNA, 23 bp, Artificial Sequence
  Synthetic: DMPK 3 forward 19:45769722-45769751; SaCas9
cagatggagggccttttattcgc

SEQ ID NO: 560 - DNA, 22 bp, Artificial Sequence
  Synthetic: DMPK 3 forward 19:45769723-45769751; SaCas9
agatggagggccttttattcgc

SEQ ID NO: 561 - DNA, 21 bp, Artificial Sequence
  Synthetic: DMPK 3 forward 19:45769724-45769751; SaCas9
gatggagggccttttattcgc

SEQ ID NO: 562 - DNA, 20 bp, Artificial Sequence
  Synthetic: DMPK 3 forward 19:45769725-45769751; SaCas9
atggagggccttttattcgc

SEQ ID NO: 563 - DNA, 19 bp, Artificial Sequence
  Synthetic: DMPK 3 forward 19:45769726-45769751; SaCas9
tggagggccttttattcgc

SEQ ID NO: 564 - DNA, 18 bp, Artificial Sequence
  Synthetic: DMPK 3 forward 19:45769727-45769751; SaCas9
ggagggccttttattcgc

SEQ ID NO: 565 - DNA, 25 bp, Artificial Sequence
  Synthetic: DMPK 3 forward 19:45769725-45769756; SaCas9
atggagggccttttattcgcgaggg

SEQ ID NO: 566 - DNA, 24 bp, Artificial Sequence
  Synthetic: DMPK 3 forward 19:45769726-45769756; SaCas9
tggagggccttttattcgcgaggg

SEQ ID NO: 567 - DNA, 23 bp, Artificial Sequence
  Synthetic: DMPK 3 forward 19:45769727-45769756; SaCas9
ggagggccttttattcgcgaggg

SEQ ID NO: 568 - DNA, 22 bp, Artificial Sequence
  Synthetic: DMPK 3 forward 19:45769728-45769756; SaCas9
gagggccttttattcgcgaggg

SEQ ID NO: 569 - DNA, 21 bp, Artificial Sequence
  Synthetic: DMPK 3 forward 19:45769729-45769756; SaCas9
agggccttttattcgcgaggg

SEQ ID NO: 570 - DNA, 20 bp, Artificial Sequence
  Synthetic: DMPK 3 forward 19:45769730-45769756; SaCas9
gggccttttattcgcgaggg

SEQ ID NO: 571 - DNA, 19 bp, Artificial Sequence
  Synthetic: DMPK 3 forward 19:45769731-45769756; SaCas9
ggccttttattcgcgaggg

SEQ ID NO: 572 - DNA, 18 bp, Artificial Sequence
  Synthetic: DMPK 3 forward 19:45769732-45769756; SaCas9
gccttttattcgcgaggg

SEQ ID NO: 573 - DNA, 25 bp, Artificial Sequence
  Synthetic: DMPK 3 forward 19:45769726-45769757; SaCas9
tggagggccttttattcgcgagggt

SEQ ID NO: 574 - DNA, 24 bp, Artificial Sequence
  Synthetic: DMPK 3 forward 19:45769727-45769757; SaCas9
ggagggccttttattcgcgagggt

SEQ ID NO: 575 - DNA, 23 bp, Artificial Sequence
  Synthetic: DMPK 3 forward 19:45769728-45769757; SaCas9
gagggccttttattcgcgagggt

SEQ ID NO: 576 - DNA, 22 bp, Artificial Sequence
  Synthetic: DMPK 3 forward 19:45769729-45769757; SaCas9
agggccttttattcgcgagggt

SEQ ID NO: 577 - DNA, 21 bp, Artificial Sequence
  Synthetic: DMPK 3 forward 19:45769730-45769757; SaCas9
gggccttttattcgcgagggt

SEQ ID NO: 578 - DNA, 20 bp, Artificial Sequence
  Synthetic: DMPK 3 forward 19:45769731-45769757; SaCas9
ggccttttattcgcgagggt

SEQ ID NO: 579 - DNA, 19 bp, Artificial Sequence
  Synthetic: DMPK 3 forward 19:45769732-45769757; SaCas9
gccttttattcgcgagggt

SEQ ID NO: 580 - DNA, 18 bp, Artificial Sequence
  Synthetic: DMPK 3 forward 19:45769733-45769757; SaCas9
ccttttattcgcgagggt

SEQ ID NO: 581 - DNA, 25 bp, Artificial Sequence
  Synthetic: DMPK 3 forward 19:45769727-45769758; SaCas9
ggagggccttttattcgcgagggtc

SEQ ID NO: 582 - DNA, 24 bp, Artificial Sequence
  Synthetic: DMPK 3 forward 19:45769728-45769758; SaCas9
gagggccttttattcgcgagggtc

SEQ ID NO: 583 - DNA, 23 bp, Artificial Sequence
  Synthetic: DMPK 3 forward 19:45769729-45769758; SaCas9
agggccttttattcgcgagggtc

SEQ ID NO: 584 - DNA, 22 bp, Artificial Sequence
  Synthetic: DMPK 3 forward 19:45769730-45769758; SaCas9
gggccttttattcgcgagggtc

SEQ ID NO: 585 - DNA, 21 bp, Artificial Sequence
  Synthetic: DMPK 3 forward 19:45769731-45769758; SaCas9
ggccttttattcgcgagggtc

SEQ ID NO: 586 - DNA, 20 bp, Artificial Sequence
  Synthetic: DMPK 3 forward 19:45769732-45769758; SaCas9
gccttttattcgcgagggtc

SEQ ID NO: 587 - DNA, 19 bp, Artificial Sequence
  Synthetic: DMPK 3 forward 19:45769733-45769758; SaCas9
ccttttattcgcgagggtc

SEQ ID NO: 588 - DNA, 18 bp, Artificial Sequence
  Synthetic: DMPK 3 forward 19:45769734-45769758; SaCas9
cttttattcgcgagggtc

SEQ ID NO: 589 - DNA, 25 bp, Artificial Sequence
  Synthetic: DMPK 3 forward 19:45769731-45769762; SaCas9
ggccttttattcgcgagggtcgggg

SEQ ID NO: 590 - DNA, 24 bp, Artificial Sequence
  Synthetic: DMPK 3 forward 19:45769732-45769762; SaCas9
gccttttattcgcgagggtcgggg

SEQ ID NO: 591 - DNA, 23 bp, Artificial Sequence
  Synthetic: DMPK 3 forward 19:45769733-45769762; SaCas9
ccttttattcgcgagggtcgggg

SEQ ID NO: 592 - DNA, 22 bp, Artificial Sequence
  Synthetic: DMPK 3 forward 19:45769734-45769762; SaCas9
cttttattcgcgagggtcgggg

SEQ ID NO: 593 - DNA, 21 bp, Artificial Sequence
  Synthetic: DMPK 3 forward 19:45769735-45769762; SaCas9
ttttattcgcgagggtcgggg

SEQ ID NO: 594 - DNA, 20 bp, Artificial Sequence
  Synthetic: DMPK 3 forward 19:45769736-45769762; SaCas9
tttattcgcgagggtcgggg

SEQ ID NO: 595 - DNA, 19 bp, Artificial Sequence
  Synthetic: DMPK 3 forward 19:45769737-45769762; SaCas9
ttattcgcgagggtcgggg

SEQ ID NO: 596 - DNA, 18 bp, Artificial Sequence
  Synthetic: DMPK 3 forward 19:45769738-45769762; SaCas9
tattcgcgagggtcgggg

SEQ ID NO: 597 - DNA, 25 bp, Artificial Sequence
  Synthetic: DMPK 3 forward 19:45769732-45769763; SaCas9
gccttttattcgcgagggtcggggg

SEQ ID NO: 598 - DNA, 24 bp, Artificial Sequence
  Synthetic: DMPK 3 forward 19:45769733-45769763; SaCas9
ccttttattcgcgagggtcggggg

SEQ ID NO: 599 - DNA, 23 bp, Artificial Sequence
  Synthetic: DMPK 3 forward 19:45769734-45769763; SaCas9
cttttattcgcgagggtcggggg

SEQ ID NO: 600 - DNA, 22 bp, Artificial Sequence
  Synthetic: DMPK 3 forward 19:45769735-45769763; SaCas9
ttttattcgcgagggtcggggg

SEQ ID NO: 601 - DNA, 21 bp, Artificial Sequence
  Synthetic: DMPK 3 forward 19:45769736-45769763; SaCas9
tttattcgcgagggtcggggg

SEQ ID NO: 602 - DNA, 20 bp, Artificial Sequence
  Synthetic: DMPK 3 forward 19:45769737-45769763; SaCas9
ttattcgcgagggtcggggg

SEQ ID NO: 603 - DNA, 19 bp, Artificial Sequence
  Synthetic: DMPK 3 forward 19:45769738-45769763; SaCas9
tattcgcgagggtcggggg

SEQ ID NO: 604 - DNA, 18 bp, Artificial Sequence
  Synthetic: DMPK 3 forward 19:45769739-45769763; SaCas9
attcgcgagggtcggggg

SEQ ID NO: 605 - DNA, 25 bp, Artificial Sequence
  Synthetic: DMPK 3 forward 19:45769733-45769764; SaCas9
ccttttattcgcgagggtcgggggt

SEQ ID NO: 606 - DNA, 24 bp, Artificial Sequence
  Synthetic: DMPK 3 forward 19:45769734-45769764; SaCas9
cttttattcgcgagggtcgggggt

SEQ ID NO: 607 - DNA, 23 bp, Artificial Sequence
  Synthetic: DMPK 3 forward 19:45769735-45769764; SaCas9
ttttattcgcgagggtcgggggt

SEQ ID NO: 608 - DNA, 22 bp, Artificial Sequence
  Synthetic: DMPK 3 forward 19:45769736-45769764; SaCas9
tttattcgcgagggtcgggggt

SEQ ID NO: 609 - DNA, 21 bp, Artificial Sequence
  Synthetic: DMPK 3 forward 19:45769737-45769764; SaCas9
ttattcgcgagggtcgggggt

SEQ ID NO: 610 - DNA, 20 bp, Artificial Sequence
  Synthetic: DMPK 3 forward 19:45769738-45769764; SaCas9
tattcgcgagggtcgggggt

SEQ ID NO: 611 - DNA, 19 bp, Artificial Sequence
  Synthetic: DMPK 3 forward 19:45769739-45769764; SaCas9
attcgcgagggtcgggggt

SEQ ID NO: 612 - DNA, 18 bp, Artificial Sequence
  Synthetic: DMPK 3 forward 19:45769740-45769764; SaCas9
ttcgcgagggtcgggggt

SEQ ID NO: 613 - DNA, 25 bp, Artificial Sequence
  Synthetic: DMPK 3 reverse 19:45769739-45769770; SaCas9
cctaggacccccacccccgaccctc

SEQ ID NO: 614 - DNA, 24 bp, Artificial Sequence
  Synthetic: DMPK 3 reverse 19:45769740-45769770; SaCas9
ctaggacccccacccccgaccctc

SEQ ID NO: 615 - DNA, 23 bp, Artificial Sequence
  Synthetic: DMPK 3 reverse 19:45769741-45769770; SaCas9
taggacccccacccccgaccctc

SEQ ID NO: 616 - DNA, 22 bp, Artificial Sequence
  Synthetic: DMPK 3 reverse 19:45769742-45769770; SaCas9
aggacccccacccccgaccctc

SEQ ID NO: 617 - DNA, 21 bp, Artificial Sequence
  Synthetic: DMPK 3 reverse 19:45769743-45769770; SaCas9
ggacccccacccccgaccctc

SEQ ID NO: 618 - DNA, 20 bp, Artificial Sequence
  Synthetic: DMPK 3 reverse 19:45769744-45769770; SaCas9
gacccccacccccgaccctc

SEQ ID NO: 619 - DNA, 19 bp, Artificial Sequence
  Synthetic: DMPK 3 reverse 19:45769745-45769770; SaCas9
acccccacccccgaccctc

SEQ ID NO: 620 - DNA, 18 bp, Artificial Sequence
  Synthetic: DMPK 3 reverse 19:45769746-45769770; SaCas9
cccccacccccgaccctc

SEQ ID NO: 621 - DNA, 25 bp, Artificial Sequence
  Synthetic: DMPK 3 forward 19:45769744-45769775; SaCas9
cgagggtcgggggtgggggtcctag

SEQ ID NO: 622 - DNA, 24 bp, Artificial Sequence
  Synthetic: DMPK 3 forward 19:45769745-45769775; SaCas9
gagggtcgggggtgggggtcctag

SEQ ID NO: 623 - DNA, 23 bp, Artificial Sequence
  Synthetic: DMPK 3 forward 19:45769746-45769775; SaCas9
agggtcgggggtgggggtcctag

SEQ ID NO: 624 - DNA, 22 bp, Artificial Sequence
  Synthetic: DMPK 3 forward 19:45769747-45769775; SaCas9
gggtcgggggtgggggtcctag

SEQ ID NO: 625 - DNA, 21 bp, Artificial Sequence
  Synthetic: DMPK 3 forward 19:45769748-45769775; SaCas9
ggtcgggggtgggggtcctag

SEQ ID NO: 626 - DNA, 20 bp, Artificial Sequence
  Synthetic: DMPK 3 forward 19:45769749-45769775; SaCas9
gtcgggggtgggggtcctag

SEQ ID NO: 627 - DNA, 19 bp, Artificial Sequence
  Synthetic: DMPK 3 forward 19:45769750-45769775; SaCas9
tcgggggtgggggtcctag

SEQ ID NO: 628 - DNA, 18 bp, Artificial Sequence
  Synthetic: DMPK 3 forward 19:45769751-45769775; SaCas9
cgggggtgggggtcctag

SEQ ID NO: 629 - DNA, 25 bp, Artificial Sequence
  Synthetic: DMPK 3 forward 19:45769745-45769776; SaCas9
gagggtcgggggtgggggtcctagg

SEQ ID NO: 630 - DNA, 24 bp, Artificial Sequence
  Synthetic: DMPK 3 forward 19:45769746-45769776; SaCas9
agggtcgggggtgggggtcctagg

SEQ ID NO: 631 - DNA, 23 bp, Artificial Sequence
  Synthetic: DMPK 3 forward 19:45769747-45769776; SaCas9
gggtcgggggtgggggtcctagg

SEQ ID NO: 632 - DNA, 22 bp, Artificial Sequence
  Synthetic: DMPK 3 forward 19:45769748-45769776; SaCas9
ggtcgggggtgggggtcctagg

SEQ ID NO: 633 - DNA, 21 bp, Artificial Sequence
  Synthetic: DMPK 3 forward 19:45769749-45769776; SaCas9
gtcgggggtgggggtcctagg

SEQ ID NO: 634 - DNA, 20 bp, Artificial Sequence
  Synthetic: DMPK 3 forward 19:45769750-45769776; SaCas9
tcgggggtgggggtcctagg

SEQ ID NO: 635 - DNA, 19 bp, Artificial Sequence
  Synthetic: DMPK 3 forward 19:45769751-45769776; SaCas9
cgggggtgggggtcctagg

SEQ ID NO: 636 - DNA, 18 bp, Artificial Sequence
  Synthetic: DMPK 3 forward 19:45769752-45769776; SaCas9
gggggtgggggtcctagg

SEQ ID NO: 637 - DNA, 25 bp, Artificial Sequence
  Synthetic: DMPK 3 forward 19:45769746-45769777; SaCas9
agggtcgggggtgggggtcctaggt

SEQ ID NO: 638 - DNA, 24 bp, Artificial Sequence
  Synthetic: DMPK 3 forward 19:45769747-45769777; SaCas9
gggtcgggggtgggggtcctaggt

SEQ ID NO: 639 - DNA, 23 bp, Artificial Sequence
  Synthetic: DMPK 3 forward 19:45769748-45769777; SaCas9
ggtcgggggtgggggtcctaggt

SEQ ID NO: 640 - DNA, 22 bp, Artificial Sequence
  Synthetic: DMPK 3 forward 19:45769749-45769777; SaCas9
gtcgggggtgggggtcctaggt

SEQ ID NO: 641 - DNA, 21 bp, Artificial Sequence
  Synthetic: DMPK 3 forward 19:45769750-45769777; SaCas9
tcgggggtgggggtcctaggt

SEQ ID NO: 642 - DNA, 20 bp, Artificial Sequence
  Synthetic: DMPK 3 forward 19:45769751-45769777; SaCas9
cgggggtgggggtcctaggt

SEQ ID NO: 643 - DNA, 19 bp, Artificial Sequence
  Synthetic: DMPK 3 forward 19:45769752-45769777; SaCas9
gggggtgggggtcctaggt

SEQ ID NO: 644 - DNA, 18 bp, Artificial Sequence
  Synthetic: DMPK 3 forward 19:45769753-45769777; SaCas9
ggggtgggggtcctaggt

SEQ ID NO: 645 - DNA, 25 bp, Artificial Sequence
  Synthetic: DMPK 3 reverse 19:45769762-45769793; SaCas9
tcggtatttattgtctgtccccacc

SEQ ID NO: 646 - DNA, 24 bp, Artificial Sequence
  Synthetic: DMPK 3 reverse 19:45769763-45769793; SaCas9
cggtatttattgtctgtccccacc

SEQ ID NO: 647 - DNA, 23 bp, Artificial Sequence
  Synthetic: DMPK 3 reverse 19:45769764-45769793; SaCas9
ggtatttattgtctgtccccacc

SEQ ID NO: 648 - DNA, 22 bp, Artificial Sequence
  Synthetic: DMPK 3 reverse 19:45769765-45769793; SaCas9
gtatttattgtctgtccccacc

SEQ ID NO: 649 - DNA, 21 bp, Artificial Sequence
  Synthetic: DMPK 3 reverse 19:45769766-45769793; SaCas9
tatttattgtctgtccccacc

SEQ ID NO: 650 - DNA, 20 bp, Artificial Sequence
  Synthetic: DMPK 3 reverse 19:45769767-45769793; SaCas9
atttattgtctgtccccacc

SEQ ID NO: 651 - DNA, 19 bp, Artificial Sequence
  Synthetic: DMPK 3 reverse 19:45769768-45769793; SaCas9
tttattgtctgtccccacc

SEQ ID NO: 652 - DNA, 18 bp, Artificial Sequence
  Synthetic: DMPK 3 reverse 19:45769769-45769793; SaCas9
ttattgtctgtccccacc

SEQ ID NO: 653 - DNA, 25 bp, Artificial Sequence
  Synthetic: DMPK 3 forward 19:45769764-45769795; SaCas9
cctaggtggggacagacaataaata

SEQ ID NO: 654 - DNA, 24 bp, Artificial Sequence
  Synthetic: DMPK 3 forward 19:45769765-45769795; SaCas9
ctaggtggggacagacaataaata

SEQ ID NO: 655 - DNA, 23 bp, Artificial Sequence
  Synthetic: DMPK 3 forward 19:45769766-45769795; SaCas9
taggtggggacagacaataaata

SEQ ID NO: 656 - DNA, 22 bp, Artificial Sequence
  Synthetic: DMPK 3 forward 19:45769767-45769795; SaCas9
aggtggggacagacaataaata

SEQ ID NO: 657 - DNA, 21 bp, Artificial Sequence
  Synthetic: DMPK 3 forward 19:45769768-45769795; SaCas9
ggtggggacagacaataaata

SEQ ID NO: 658 - DNA, 20 bp, Artificial Sequence
  Synthetic: DMPK 3 forward 19:45769769-45769795; SaCas9
gtggggacagacaataaata

SEQ ID NO: 659 - DNA, 19 bp, Artificial Sequence
  Synthetic: DMPK 3 forward 19:45769770-45769795; SaCas9
tggggacagacaataaata

SEQ ID NO: 660 - DNA, 18 bp, Artificial Sequence
  Synthetic: DMPK 3 forward 19:45769771-45769795; SaCas9
ggggacagacaataaata

SEQ ID NO: 661 - DNA, 25 bp, Artificial Sequence
  Synthetic: DMPK 3 forward 19:45769766-45769797; SaCas9
taggtggggacagacaataaatacc

SEQ ID NO: 662 - DNA, 24 bp, Artificial Sequence
  Synthetic: DMPK 3 forward 19:45769767-45769797; SaCas9
aggtggggacagacaataaatacc

SEQ ID NO: 663 - DNA, 23 bp, Artificial Sequence
  Synthetic: DMPK 3 forward 19:45769768-45769797; SaCas9
ggtggggacagacaataaatacc

SEQ ID NO: 664 - DNA, 22 bp, Artificial Sequence
  Synthetic: DMPK 3 forward 19:45769769-45769797; SaCas9
gtggggacagacaataaatacc

SEQ ID NO: 665 - DNA, 21 bp, Artificial Sequence
  Synthetic: DMPK 3 forward 19:45769770-45769797; SaCas9
tggggacagacaataaatacc

SEQ ID NO: 666 - DNA, 20 bp, Artificial Sequence
  Synthetic: DMPK 3 forward 19:45769771-45769797; SaCas9
ggggacagacaataaatacc

SEQ ID NO: 667 - DNA, 19 bp, Artificial Sequence
  Synthetic: DMPK 3 forward 19:45769772-45769797; SaCas9
gggacagacaataaatacc

SEQ ID NO: 668 - DNA, 18 bp, Artificial Sequence
  Synthetic: DMPK 3 forward 19:45769773-45769797; SaCas9
ggacagacaataaatacc

SEQ ID NO: 669 - DNA, 25 bp, Artificial Sequence
  Synthetic: DMPK 3 forward 19:45769767-45769798; SaCas9
aggtggggacagacaataaataccg

SEQ ID NO: 670 - DNA, 24 bp, Artificial Sequence
  Synthetic: DMPK 3 forward 19:45769768-45769798; SaCas9
ggtggggacagacaataaataccg

SEQ ID NO: 671 - DNA, 23 bp, Artificial Sequence
  Synthetic: DMPK 3 forward 19:45769769-45769798; SaCas9
gtggggacagacaataaataccg

SEQ ID NO: 672 - DNA, 22 bp, Artificial Sequence
  Synthetic: DMPK 3 forward 19:45769770-45769798; SaCas9
tggggacagacaataaataccg

SEQ ID NO: 673 - DNA, 21 bp, Artificial Sequence
  Synthetic: DMPK 3 forward 19:45769771-45769798; SaCas9
ggggacagacaataaataccg

SEQ ID NO: 674 - DNA, 20 bp, Artificial Sequence
  Synthetic: DMPK 3 forward 19:45769772-45769798; SaCas9
gggacagacaataaataccg

SEQ ID NO: 675 - DNA, 19 bp, Artificial Sequence
  Synthetic: DMPK 3 forward 19:45769773-45769798; SaCas9
ggacagacaataaataccg

SEQ ID NO: 676 - DNA, 18 bp, Artificial Sequence
  Synthetic: DMPK 3 forward 19:45769774-45769798; SaCas9
gacagacaataaataccg

SEQ ID NO: 677 - DNA, 25 bp, Artificial Sequence
  Synthetic: DMPK 3 forward 19:45769774-45769805; SaCas9
gacagacaataaataccgaggaatg

SEQ ID NO: 678 - DNA, 24 bp, Artificial Sequence
  Synthetic: DMPK 3 forward 19:45769775-45769805; SaCas9
acagacaataaataccgaggaatg

SEQ ID NO: 679 - DNA, 23 bp, Artificial Sequence
  Synthetic: DMPK 3 forward 19:45769776-45769805; SaCas9
cagacaataaataccgaggaatg

SEQ ID NO: 680 - DNA, 22 bp, Artificial Sequence
  Synthetic: DMPK 3 forward 19:45769777-45769805; SaCas9
agacaataaataccgaggaatg

SEQ ID NO: 681 - DNA, 21 bp, Artificial Sequence
  Synthetic: DMPK 3 forward 19:45769778-45769805; SaCas9
gacaataaataccgaggaatg

SEQ ID NO: 682 - DNA, 20 bp, Artificial Sequence
  Synthetic: DMPK 3 forward 19:45769779-45769805; SaCas9
acaataaataccgaggaatg

SEQ ID NO: 683 - DNA, 19 bp, Artificial Sequence
  Synthetic: DMPK 3 forward 19:45769780-45769805; SaCas9
caataaataccgaggaatg

SEQ ID NO: 684 - DNA, 18 bp, Artificial Sequence
  Synthetic: DMPK 3 forward 19:45769781-45769805; SaCas9
aataaataccgaggaatg

SEQ ID NO: 685 - DNA, 25 bp, Artificial Sequence
  Synthetic: DMPK 3 forward 19:45769775-45769806; SaCas9
acagacaataaataccgaggaatgt

SEQ ID NO: 686 - DNA, 24 bp, Artificial Sequence
  Synthetic: DMPK 3 forward 19:45769776-45769806; SaCas9
cagacaataaataccgaggaatgt

SEQ ID NO: 687 - DNA, 23 bp, Artificial Sequence
  Synthetic: DMPK 3 forward 19:45769777-45769806; SaCas9
agacaataaataccgaggaatgt

SEQ ID NO: 688 - DNA, 22 bp, Artificial Sequence
  Synthetic: DMPK 3 forward 19:45769778-45769806; SaCas9
gacaataaataccgaggaatgt

SEQ ID NO: 689 - DNA, 21 bp, Artificial Sequence
  Synthetic: DMPK 3 forward 19:45769779-45769806; SaCas9
acaataaataccgaggaatgt

SEQ ID NO: 690 - DNA, 20 bp, Artificial Sequence
  Synthetic: DMPK 3 forward 19:45769780-45769806; SaCas9
caataaataccgaggaatgt

SEQ ID NO: 691 - DNA, 19 bp, Artificial Sequence
  Synthetic: DMPK 3 forward 19:45769781-45769806; SaCas9
aataaataccgaggaatgt

SEQ ID NO: 692 - DNA, 18 bp, Artificial Sequence
  Synthetic: DMPK 3 forward 19:45769782-45769806; SaCas9
ataaataccgaggaatgt

SEQ ID NO: 693 - DNA, 25 bp, Artificial Sequence
  Synthetic: DMPK 3 forward 19:45769798-45769829; SaCas9
gtcggggtctcagtgcatccaaaac

SEQ ID NO: 694 - DNA, 24 bp, Artificial Sequence
  Synthetic: DMPK 3 forward 19:45769799-45769829; SaCas9
tcggggtctcagtgcatccaaaac

SEQ ID NO: 695 - DNA, 23 bp, Artificial Sequence
  Synthetic: DMPK 3 forward 19:45769800-45769829; SaCas9
cggggtctcagtgcatccaaaac

SEQ ID NO: 696 - DNA, 22 bp, Artificial Sequence
  Synthetic: DMPK 3 forward 19:45769801-45769829; SaCas9
ggggtctcagtgcatccaaaac

SEQ ID NO: 697 - DNA, 21 bp, Artificial Sequence
  Synthetic: DMPK 3 forward 19:45769802-45769829; SaCas9
gggtctcagtgcatccaaaac

SEQ ID NO: 698 - DNA, 20 bp, Artificial Sequence
  Synthetic: DMPK 3 forward 19:45769803-45769829; SaCas9
ggtctcagtgcatccaaaac

SEQ ID NO: 699 - DNA, 19 bp, Artificial Sequence
  Synthetic: DMPK 3 forward 19:45769804-45769829; SaCas9
gtctcagtgcatccaaaac

SEQ ID NO: 700 - DNA, 18 bp, Artificial Sequence
  Synthetic: DMPK 3 forward 19:45769805-45769829; SaCas9
tctcagtgcatccaaaac

SEQ ID NO: 701 - DNA, 25 bp, Artificial Sequence
  Synthetic: DMPK 3 forward 19:45769803-45769834; SaCas9
ggtctcagtgcatccaaaacgtgga

SEQ ID NO: 702 - DNA, 24 bp, Artificial Sequence
  Synthetic: DMPK 3 forward 19:45769804-45769834; SaCas9
gtctcagtgcatccaaaacgtgga

SEQ ID NO: 703 - DNA, 23 bp, Artificial Sequence
  Synthetic: DMPK 3 forward 19:45769805-45769834; SaCas9
tctcagtgcatccaaaacgtgga

SEQ ID NO: 704 - DNA, 22 bp, Artificial Sequence
  Synthetic: DMPK 3 forward 19:45769806-45769834; SaCas9
ctcagtgcatccaaaacgtgga

SEQ ID NO: 705 - DNA, 21 bp, Artificial Sequence
  Synthetic: DMPK 3 forward 19:45769807-45769834; SaCas9
tcagtgcatccaaaacgtgga

SEQ ID NO: 706 - DNA, 20 bp, Artificial Sequence
  Synthetic: DMPK 3 forward 19:45769808-45769834; SaCas9
cagtgcatccaaaacgtgga

SEQ ID NO: 707 - DNA, 19 bp, Artificial Sequence
  Synthetic: DMPK 3 forward 19:45769809-45769834; SaCas9
agtgcatccaaaacgtgga

SEQ ID NO: 708 - DNA, 18 bp, Artificial Sequence
  Synthetic: DMPK 3 forward 19:45769810-45769834; SaCas9
gtgcatccaaaacgtgga

SEQ ID NO: 709 - DNA, 25 bp, Artificial Sequence
  Synthetic: DMPK 3 forward 19:45769804-45769835; SaCas9
gtctcagtgcatccaaaacgtggat

SEQ ID NO: 710 - DNA, 24 bp, Artificial Sequence
  Synthetic: DMPK 3 forward 19:45769805-45769835; SaCas9
tctcagtgcatccaaaacgtggat

SEQ ID NO: 711 - DNA, 23 bp, Artificial Sequence
  Synthetic: DMPK 3 forward 19:45769806-45769835; SaCas9
ctcagtgcatccaaaacgtggat

SEQ ID NO: 712 - DNA, 22 bp, Artificial Sequence
  Synthetic: DMPK 3 forward 19:45769807-45769835; SaCas9
tcagtgcatccaaaacgtggat

SEQ ID NO: 713 - DNA, 21 bp, Artificial Sequence
  Synthetic: DMPK 3 forward 19:45769808-45769835; SaCas9
cagtgcatccaaaacgtggat

SEQ ID NO: 714 - DNA, 20 bp, Artificial Sequence
  Synthetic: DMPK 3 forward 19:45769809-45769835; SaCas9
agtgcatccaaaacgtggat

SEQ ID NO: 715 - DNA, 19 bp, Artificial Sequence
  Synthetic: DMPK 3 forward 19:45769810-45769835; SaCas9
gtgcatccaaaacgtggat

SEQ ID NO: 716 - DNA, 18 bp, Artificial Sequence
  Synthetic: DMPK 3 forward 19:45769811-45769835; SaCas9
tgcatccaaaacgtggat

SEQ ID NO: 717 - DNA, 25 bp, Artificial Sequence
  Synthetic: DMPK 3 reverse 19:45769805-45769836; SaCas9
aaccccaatccacgttttggatgca

SEQ ID NO: 718 - DNA, 24 bp, Artificial Sequence
  Synthetic: DMPK 3 reverse 19:45769806-45769836; SaCas9
accccaatccacgttttggatgca

SEQ ID NO: 719 - DNA, 23 bp, Artificial Sequence
  Synthetic: DMPK 3 reverse 19:45769807-45769836; SaCas9
ccccaatccacgttttggatgca

SEQ ID NO: 720 - DNA, 22 bp, Artificial Sequence
  Synthetic: DMPK 3 reverse 19:45769808-45769836; SaCas9
cccaatccacgttttggatgca

SEQ ID NO: 721 - DNA, 21 bp, Artificial Sequence
  Synthetic: DMPK 3 reverse 19:45769809-45769836; SaCas9
ccaatccacgttttggatgca

SEQ ID NO: 722 - DNA, 20 bp, Artificial Sequence
  Synthetic: DMPK 3 reverse 19:45769810-45769836; SaCas9
caatccacgttttggatgca

SEQ ID NO: 723 - DNA, 19 bp, Artificial Sequence
  Synthetic: DMPK 3 reverse 19:45769811-45769836; SaCas9
aatccacgttttggatgca

SEQ ID NO: 724 - DNA, 18 bp, Artificial Sequence
  Synthetic: DMPK 3 reverse 19:45769812-45769836; SaCas9
atccacgttttggatgca

SEQ ID NO: 725 - DNA, 25 bp, Artificial Sequence
  Synthetic: DMPK 3 forward 19:45769812-45769843; SaCas9
gcatccaaaacgtggattggggttg

SEQ ID NO: 726 - DNA, 24 bp, Artificial Sequence
  Synthetic: DMPK 3 forward 19:45769813-45769843; SaCas9
catccaaaacgtggattggggttg

SEQ ID NO: 727 - DNA, 23 bp, Artificial Sequence
  Synthetic: DMPK 3 forward 19:45769814-45769843; SaCas9
atccaaaacgtggattggggttg

SEQ ID NO: 728 - DNA, 22 bp, Artificial Sequence
  Synthetic: DMPK 3 forward 19:45769815-45769843; SaCas9
tccaaaacgtggattggggttg

SEQ ID NO: 729 - DNA, 21 bp, Artificial Sequence
  Synthetic: DMPK 3 forward 19:45769816-45769843; SaCas9
ccaaaacgtggattggggttg

SEQ ID NO: 730 - DNA, 20 bp, Artificial Sequence
  Synthetic: DMPK 3 forward 19:45769817-45769843; SaCas9
caaaacgtggattggggttg

SEQ ID NO: 731 - DNA, 19 bp, Artificial Sequence
  Synthetic: DMPK 3 forward 19:45769818-45769843; SaCas9
aaaacgtggattggggttg

SEQ ID NO: 732 - DNA, 18 bp, Artificial Sequence
  Synthetic: DMPK 3 forward 19:45769819-45769843; SaCas9
aaacgtggattggggttg

SEQ ID NO: 733 - DNA, 25 bp, Artificial Sequence
  Synthetic: DMPK 3 forward 19:45769813-45769844; SaCas9
catccaaaacgtggattggggttgt

SEQ ID NO: 734 - DNA, 24 bp, Artificial Sequence
  Synthetic: DMPK 3 forward 19:45769814-45769844; SaCas9
atccaaaacgtggattggggttgt

SEQ ID NO: 735 - DNA, 23 bp, Artificial Sequence
  Synthetic: DMPK 3 forward 19:45769815-45769844; SaCas9
tccaaaacgtggattggggttgt

SEQ ID NO: 736 - DNA, 22 bp, Artificial Sequence
  Synthetic: DMPK 3 forward 19:45769816-45769844; SaCas9
ccaaaacgtggattggggttgt

SEQ ID NO: 737 - DNA, 21 bp, Artificial Sequence
  Synthetic: DMPK 3 forward 19:45769817-45769844; SaCas9
caaaacgtggattggggttgt

SEQ ID NO: 738 - DNA, 20 bp, Artificial Sequence
  Synthetic: DMPK 3 forward 19:45769818-45769844; SaCas9
aaaacgtggattggggttgt

SEQ ID NO: 739 - DNA, 19 bp, Artificial Sequence
  Synthetic: DMPK 3 forward 19:45769819-45769844; SaCas9
aaacgtggattggggttgt

SEQ ID NO: 740 - DNA, 18 bp, Artificial Sequence
  Synthetic: DMPK 3 forward 19:45769820-45769844; SaCas9
aacgtggattggggttgt

SEQ ID NO: 741 - DNA, 25 bp, Artificial Sequence
  Synthetic: DMPK 3 forward 19:45769814-45769845; SaCas9
atccaaaacgtggattggggttgtt

SEQ ID NO: 742 - DNA, 24 bp, Artificial Sequence
  Synthetic: DMPK 3 forward 19:45769815-45769845; SaCas9
tccaaaacgtggattggggttgtt

SEQ ID NO: 743 - DNA, 23 bp, Artificial Sequence
  Synthetic: DMPK 3 forward 19:45769816-45769845; SaCas9
ccaaaacgtggattggggttgtt

SEQ ID NO: 744 - DNA, 22 bp, Artificial Sequence
  Synthetic: DMPK 3 forward 19:45769817-45769845; SaCas9
caaaacgtggattggggttgtt

SEQ ID NO: 745 - DNA, 21 bp, Artificial Sequence
  Synthetic: DMPK 3 forward 19:45769818-45769845; SaCas9
aaaacgtggattggggttgtt

SEQ ID NO: 746 - DNA, 20 bp, Artificial Sequence
  Synthetic: DMPK 3 forward 19:45769819-45769845; SaCas9
aaacgtggattggggttgtt

SEQ ID NO: 747 - DNA, 19 bp, Artificial Sequence
  Synthetic: DMPK 3 forward 19:45769820-45769845; SaCas9
aacgtggattggggttgtt

SEQ ID NO: 748 - DNA, 18 bp, Artificial Sequence
  Synthetic: DMPK 3 forward 19:45769821-45769845; SaCas9
acgtggattggggttgtt

SEQ ID NO: 749 - DNA, 25 bp, Artificial Sequence
  Synthetic: DMPK 3 reverse 19:45769814-45769845; SaCas9
acccccaacaaccccaatccacgtt

SEQ ID NO: 750 - DNA, 24 bp, Artificial Sequence
  Synthetic: DMPK 3 reverse 19:45769815-45769845; SaCas9
cccccaacaaccccaatccacgtt

SEQ ID NO: 751 - DNA, 23 bp, Artificial Sequence
  Synthetic: DMPK 3 reverse 19:45769816-45769845; SaCas9
ccccaacaaccccaatccacgtt

SEQ ID NO: 752 - DNA, 22 bp, Artificial Sequence
  Synthetic: DMPK 3 reverse 19:45769817-45769845; SaCas9
cccaacaaccccaatccacgtt

SEQ ID NO: 753 - DNA, 21 bp, Artificial Sequence
  Synthetic: DMPK 3 reverse 19:45769818-45769845; SaCas9
ccaacaaccccaatccacgtt

SEQ ID NO: 754 - DNA, 20 bp, Artificial Sequence
  Synthetic: DMPK 3 reverse 19:45769819-45769845; SaCas9
caacaaccccaatccacgtt

SEQ ID NO: 755 - DNA, 19 bp, Artificial Sequence
  Synthetic: DMPK 3 reverse 19:45769820-45769845; SaCas9
aacaaccccaatccacgtt

SEQ ID NO: 756 - DNA, 18 bp, Artificial Sequence
  Synthetic: DMPK 3 reverse 19:45769821-45769845; SaCas9
acaaccccaatccacgtt

SEQ ID NO: 757 - DNA, 25 bp, Artificial Sequence
  Synthetic: DMPK 3 forward 19:45769834-45769865; SaCas9
ttgttgggggtcctgtagcctgtca

SEQ ID NO: 758 - DNA, 24 bp, Artificial Sequence
  Synthetic: DMPK 3 forward 19:45769835-45769865; SaCas9
tgttgggggtcctgtagcctgtca

SEQ ID NO: 759 - DNA, 23 bp, Artificial Sequence
  Synthetic: DMPK 3 forward 19:45769836-45769865; SaCas9
gttgggggtcctgtagcctgtca

SEQ ID NO: 760 - DNA, 22 bp, Artificial Sequence
  Synthetic: DMPK 3 forward 19:45769837-45769865; SaCas9
ttgggggtcctgtagcctgtca

SEQ ID NO: 761 - DNA, 21 bp, Artificial Sequence
  Synthetic: DMPK 3 forward 19:45769838-45769865; SaCas9
tgggggtcctgtagcctgtca

SEQ ID NO: 762 - DNA, 20 bp, Artificial Sequence
  Synthetic: DMPK 3 forward 19:45769839-45769865; SaCas9
gggggtcctgtagcctgtca

SEQ ID NO: 763 - DNA, 19 bp, Artificial Sequence
  Synthetic: DMPK 3 forward 19:45769840-45769865; SaCas9
ggggtcctgtagcctgtca

SEQ ID NO: 764 - DNA, 18 bp, Artificial Sequence
  Synthetic: DMPK 3 forward 19:45769841-45769865; SaCas9
gggtcctgtagcctgtca

SEQ ID NO: 765 - DNA, 25 bp, Artificial Sequence
  Synthetic: DMPK 3 forward 19:45769839-45769870; SaCas9
gggggtcctgtagcctgtcagcgag

SEQ ID NO: 766 - DNA, 24 bp, Artificial Sequence
  Synthetic: DMPK 3 forward 19:45769840-45769870; SaCas9
ggggtcctgtagcctgtcagcgag

SEQ ID NO: 767 - DNA, 23 bp, Artificial Sequence
  Synthetic: DMPK 3 forward 19:45769841-45769870; SaCas9
gggtcctgtagcctgtcagcgag

SEQ ID NO: 768 - DNA, 22 bp, Artificial Sequence
  Synthetic: DMPK 3 forward 19:45769842-45769870; SaCas9
ggtcctgtagcctgtcagcgag

SEQ ID NO: 769 - DNA, 21 bp, Artificial Sequence
  Synthetic: DMPK 3 forward 19:45769843-45769870; SaCas9
gtcctgtagcctgtcagcgag

SEQ ID NO: 770 - DNA, 20 bp, Artificial Sequence
  Synthetic: DMPK 3 forward 19:45769844-45769870; SaCas9
tcctgtagcctgtcagcgag

SEQ ID NO: 771 - DNA, 19 bp, Artificial Sequence
  Synthetic: DMPK 3 forward 19:45769845-45769870; SaCas9
cctgtagcctgtcagcgag

SEQ ID NO: 772 - DNA, 18 bp, Artificial Sequence
  Synthetic: DMPK 3 forward 19:45769846-45769870; SaCas9
ctgtagcctgtcagcgag

SEQ ID NO: 773 - DNA, 25 bp, Artificial Sequence
  Synthetic: DMPK 3 forward 19:45769840-45769871; SaCas9
ggggtcctgtagcctgtcagcgagt

SEQ ID NO: 774 - DNA, 24 bp, Artificial Sequence
  Synthetic: DMPK 3 forward 19:45769841-45769871; SaCas9
gggtcctgtagcctgtcagcgagt

SEQ ID NO: 775 - DNA, 23 bp, Artificial Sequence
  Synthetic: DMPK 3 forward 19:45769842-45769871; SaCas9
ggtcctgtagcctgtcagcgagt

SEQ ID NO: 776 - DNA, 22 bp, Artificial Sequence
  Synthetic: DMPK 3 forward 19:45769843-45769871; SaCas9
gtcctgtagcctgtcagcgagt

SEQ ID NO: 777 - DNA, 21 bp, Artificial Sequence
  Synthetic: DMPK 3 forward 19:45769844-45769871; SaCas9
tcctgtagcctgtcagcgagt

SEQ ID NO: 778 - DNA, 20 bp, Artificial Sequence
  Synthetic: DMPK 3 forward 19:45769845-45769871; SaCas9
cctgtagcctgtcagcgagt

SEQ ID NO: 779 - DNA, 19 bp, Artificial Sequence
  Synthetic: DMPK 3 forward 19:45769846-45769871; SaCas9
ctgtagcctgtcagcgagt

SEQ ID NO: 780 - DNA, 18 bp, Artificial Sequence
  Synthetic: DMPK 3 forward 19:45769847-45769871; SaCas9
tgtagcctgtcagcgagt

SEQ ID NO: 781 - DNA, 25 bp, Artificial Sequence
  Synthetic: DMPK 3 forward 19:45769842-45769873; SaCas9
ggtcctgtagcctgtcagcgagtcg

SEQ ID NO: 782 - DNA, 24 bp, Artificial Sequence
  Synthetic: DMPK 3 forward 19:45769843-45769873; SaCas9
gtcctgtagcctgtcagcgagtcg

SEQ ID NO: 783 - DNA, 23 bp, Artificial Sequence
  Synthetic: DMPK 3 forward 19:45769844-45769873; SaCas9
tcctgtagcctgtcagcgagtcg

SEQ ID NO: 784 - DNA, 22 bp, Artificial Sequence
  Synthetic: DMPK 3 forward 19:45769845-45769873; SaCas9
cctgtagcctgtcagcgagtcg

SEQ ID NO: 785 - DNA, 21 bp, Artificial Sequence
  Synthetic: DMPK 3 forward 19:45769846-45769873; SaCas9
ctgtagcctgtcagcgagtcg

SEQ ID NO: 786 - DNA, 20 bp, Artificial Sequence
  Synthetic: DMPK 3 forward 19:45769847-45769873; SaCas9
tgtagcctgtcagcgagtcg

SEQ ID NO: 787 - DNA, 19 bp, Artificial Sequence
  Synthetic: DMPK 3 forward 19:45769848-45769873; SaCas9
gtagcctgtcagcgagtcg

SEQ ID NO: 788 - DNA, 18 bp, Artificial Sequence
  Synthetic: DMPK 3 forward 19:45769849-45769873; SaCas9
tagcctgtcagcgagtcg

SEQ ID NO: 789 - DNA, 25 bp, Artificial Sequence
  Synthetic: DMPK 3 reverse 19:45769843-45769874; SaCas9
cgtcctccgactcgctgacaggcta

SEQ ID NO: 790 - DNA, 24 bp, Artificial Sequence
  Synthetic: DMPK 3 reverse 19:45769844-45769874; SaCas9
gtcctccgactcgctgacaggcta

SEQ ID NO: 791 - DNA, 23 bp, Artificial Sequence
  Synthetic: DMPK 3 reverse 19:45769845-45769874; SaCas9
tcctccgactcgctgacaggcta

SEQ ID NO: 792 - DNA, 22 bp, Artificial Sequence
  Synthetic: DMPK 3 reverse 19:45769846-45769874; SaCas9
cctccgactcgctgacaggcta

SEQ ID NO: 793 - DNA, 21 bp, Artificial Sequence
  Synthetic: DMPK 3 reverse 19:45769847-45769874; SaCas9
ctccgactcgctgacaggcta

SEQ ID NO: 794 - DNA, 20 bp, Artificial Sequence
  Synthetic: DMPK 3 reverse 19:45769848-45769874; SaCas9
tccgactcgctgacaggcta

SEQ ID NO: 795 - DNA, 19 bp, Artificial Sequence
  Synthetic: DMPK 3 reverse 19:45769849-45769874; SaCas9
ccgactcgctgacaggcta

SEQ ID NO: 796 - DNA, 18 bp, Artificial Sequence
  Synthetic: DMPK 3 reverse 19:45769850-45769874; SaCas9
cgactcgctgacaggcta

SEQ ID NO: 797 - DNA, 25 bp, Artificial Sequence
  Synthetic: DMPK 3 forward 19:45769846-45769877; SaCas9
ctgtagcctgtcagcgagtcggagg

SEQ ID NO: 798 - DNA, 24 bp, Artificial Sequence
  Synthetic: DMPK 3 forward 19:45769847-45769877; SaCas9
tgtagcctgtcagcgagtcggagg

SEQ ID NO: 799 - DNA, 23 bp, Artificial Sequence
  Synthetic: DMPK 3 forward 19:45769848-45769877; SaCas9
gtagcctgtcagcgagtcggagg

SEQ ID NO: 800 - DNA, 22 bp, Artificial Sequence
  Synthetic: DMPK 3 forward 19:45769849-45769877; SaCas9
tagcctgtcagcgagtcggagg

SEQ ID NO: 801 - DNA, 21 bp, Artificial Sequence
  Synthetic: DMPK 3 forward 19:45769850-45769877; SaCas9
agcctgtcagcgagtcggagg

SEQ ID NO: 802 - DNA, 20 bp, Artificial Sequence
  Synthetic: DMPK 3 forward 19:45769851-45769877; SaCas9
gcctgtcagcgagtcggagg

SEQ ID NO: 803 - DNA, 19 bp, Artificial Sequence
  Synthetic: DMPK 3 forward 19:45769852-45769877; SaCas9
cctgtcagcgagtcggagg

SEQ ID NO: 804 - DNA, 18 bp, Artificial Sequence
  Synthetic: DMPK 3 forward 19:45769853-45769877; SaCas9
ctgtcagcgagtcggagg

SEQ ID NO: 805 - DNA, 25 bp, Artificial Sequence
  Synthetic: DMPK 3 forward 19:45769871-45769902; SaCas9
acgaggtcaataaatatccaaaccg

SEQ ID NO: 806 - DNA, 24 bp, Artificial Sequence
  Synthetic: DMPK 3 forward 19:45769872-45769902; SaCas9
cgaggtcaataaatatccaaaccg

SEQ ID NO: 807 - DNA, 23 bp, Artificial Sequence
  Synthetic: DMPK 3 forward 19:45769873-45769902; SaCas9
gaggtcaataaatatccaaaccg

SEQ ID NO: 808 - DNA, 22 bp, Artificial Sequence
  Synthetic: DMPK 3 forward 19:45769874-45769902; SaCas9
aggtcaataaatatccaaaccg

SEQ ID NO: 809 - DNA, 21 bp, Artificial Sequence
  Synthetic: DMPK 3 forward 19:45769875-45769902; SaCas9
ggtcaataaatatccaaaccg

SEQ ID NO: 810 - DNA, 20 bp, Artificial Sequence
  Synthetic: DMPK 3 forward 19:45769876-45769902; SaCas9
gtcaataaatatccaaaccg

SEQ ID NO: 811 - DNA, 19 bp, Artificial Sequence
  Synthetic: DMPK 3 forward 19:45769877-45769902; SaCas9
tcaataaatatccaaaccg

SEQ ID NO: 812 - DNA, 18 bp, Artificial Sequence
  Synthetic: DMPK 3 forward 19:45769878-45769902; SaCas9
caataaatatccaaaccg

SEQ ID NO: 813 - DNA, 25 bp, Artificial Sequence
  Synthetic: DMPK 3 forward 19:45769876-45769907; SaCas9
gtcaataaatatccaaaccgccgaa

SEQ ID NO: 814 - DNA, 24 bp, Artificial Sequence
  Synthetic: DMPK 3 forward 19:45769877-45769907; SaCas9
tcaataaatatccaaaccgccgaa

SEQ ID NO: 815 - DNA, 23 bp, Artificial Sequence
  Synthetic: DMPK 3 forward 19:45769878-45769907; SaCas9
caataaatatccaaaccgccgaa

SEQ ID NO: 816 - DNA, 22 bp, Artificial Sequence
  Synthetic: DMPK 3 forward 19:45769879-45769907; SaCas9
aataaatatccaaaccgccgaa

SEQ ID NO: 817 - DNA, 21 bp, Artificial Sequence
  Synthetic: DMPK 3 forward 19:45769880-45769907; SaCas9
ataaatatccaaaccgccgaa

SEQ ID NO: 818 - DNA, 20 bp, Artificial Sequence
  Synthetic: DMPK 3 forward 19:45769881-45769907; SaCas9
taaatatccaaaccgccgaa

SEQ ID NO: 819 - DNA, 19 bp, Artificial Sequence
  Synthetic: DMPK 3 forward 19:45769882-45769907; SaCas9
aaatatccaaaccgccgaa

SEQ ID NO: 820 - DNA, 18 bp, Artificial Sequence
  Synthetic: DMPK 3 forward 19:45769883-45769907; SaCas9
aatatccaaaccgccgaa

SEQ ID NO: 821 - DNA, 25 bp, Artificial Sequence
  Synthetic: DMPK 3 forward 19:45769880-45769911; SaCas9
ataaatatccaaaccgccgaagcgg

SEQ ID NO: 822 - DNA, 24 bp, Artificial Sequence
  Synthetic: DMPK 3 forward 19:45769881-45769911; SaCas9
taaatatccaaaccgccgaagcgg

SEQ ID NO: 823 - DNA, 23 bp, Artificial Sequence
  Synthetic: DMPK 3 forward 19:45769882-45769911; SaCas9
aaatatccaaaccgccgaagcgg

SEQ ID NO: 824 - DNA, 22 bp, Artificial Sequence
  Synthetic: DMPK 3 forward 19:45769883-45769911; SaCas9
aatatccaaaccgccgaagcgg

SEQ ID NO: 825 - DNA, 21 bp, Artificial Sequence
  Synthetic: DMPK 3 forward 19:45769884-45769911; SaCas9
atatccaaaccgccgaagcgg

SEQ ID NO: 826 - DNA, 20 bp, Artificial Sequence
  Synthetic: DMPK 3 forward 19:45769885-45769911; SaCas9
tatccaaaccgccgaagcgg

SEQ ID NO: 827 - DNA, 19 bp, Artificial Sequence
  Synthetic: DMPK 3 forward 19:45769886-45769911; SaCas9
atccaaaccgccgaagcgg

SEQ ID NO: 828 - DNA, 18 bp, Artificial Sequence
  Synthetic: DMPK 3 forward 19:45769887-45769911; SaCas9
tccaaaccgccgaagcgg

SEQ ID NO: 829 - DNA, 25 bp, Artificial Sequence
  Synthetic: DMPK 3 forward 19:45769881-45769912; SaCas9
taaatatccaaaccgccgaagcggg

SEQ ID NO: 830 - DNA, 24 bp, Artificial Sequence
  Synthetic: DMPK 3 forward 19:45769882-45769912; SaCas9
aaatatccaaaccgccgaagcggg

SEQ ID NO: 831 - DNA, 23 bp, Artificial Sequence
  Synthetic: DMPK 3 forward 19:45769883-45769912; SaCas9
aatatccaaaccgccgaagcggg

SEQ ID NO: 832 - DNA, 22 bp, Artificial Sequence
  Synthetic: DMPK 3 forward 19:45769884-45769912; SaCas9
atatccaaaccgccgaagcggg

SEQ ID NO: 833 - DNA, 21 bp, Artificial Sequence
  Synthetic: DMPK 3 forward 19:45769885-45769912; SaCas9
tatccaaaccgccgaagcggg

SEQ ID NO: 834 - DNA, 20 bp, Artificial Sequence
  Synthetic: DMPK 3 forward 19:45769886-45769912; SaCas9
atccaaaccgccgaagcggg

SEQ ID NO: 835 - DNA, 19 bp, Artificial Sequence
  Synthetic: DMPK 3 forward 19:45769887-45769912; SaCas9
tccaaaccgccgaagcggg

SEQ ID NO: 836 - DNA, 18 bp, Artificial Sequence
  Synthetic: DMPK 3 forward 19:45769888-45769912; SaCas9
ccaaaccgccgaagcggg

SEQ ID NO: 837 - DNA, 25 bp, Artificial Sequence
  Synthetic: DMPK 3 reverse 19:45769886-45769917; SaCas9
agccggctccgcccgcttcggcggt

SEQ ID NO: 838 - DNA, 24 bp, Artificial Sequence
  Synthetic: DMPK 3 reverse 19:45769887-45769917; SaCas9
gccggctccgcccgcttcggcggt

SEQ ID NO: 839 - DNA, 23 bp, Artificial Sequence
  Synthetic: DMPK 3 reverse 19:45769888-45769917; SaCas9
ccggctccgcccgcttcggcggt

SEQ ID NO: 840 - DNA, 22 bp, Artificial Sequence
  Synthetic: DMPK 3 reverse 19:45769889-45769917; SaCas9
cggctccgcccgcttcggcggt

SEQ ID NO: 841 - DNA, 21 bp, Artificial Sequence
  Synthetic: DMPK 3 reverse 19:45769890-45769917; SaCas9
ggctccgcccgcttcggcggt

SEQ ID NO: 842 - DNA, 20 bp, Artificial Sequence
  Synthetic: DMPK 3 reverse 19:45769891-45769917; SaCas9
gctccgcccgcttcggcggt

SEQ ID NO: 843 - DNA, 19 bp, Artificial Sequence
  Synthetic: DMPK 3 reverse 19:45769892-45769917; SaCas9
ctccgcccgcttcggcggt

SEQ ID NO: 844 - DNA, 18 bp, Artificial Sequence
  Synthetic: DMPK 3 reverse 19:45769893-45769917; SaCas9
tccgcccgcttcggcggt

SEQ ID NO: 845 - DNA, 25 bp, Artificial Sequence
  Synthetic: DMPK 3 forward 19:45769890-45769921; SaCas9
aaaccgccgaagcgggcggagccgg

SEQ ID NO: 846 - DNA, 24 bp, Artificial Sequence
  Synthetic: DMPK 3 forward 19:45769891-45769921; SaCas9
aaccgccgaagcgggcggagccgg

SEQ ID NO: 847 - DNA, 23 bp, Artificial Sequence
  Synthetic: DMPK 3 forward 19:45769892-45769921; SaCas9
accgccgaagcgggcggagccgg

SEQ ID NO: 848 - DNA, 22 bp, Artificial Sequence
  Synthetic: DMPK 3 forward 19:45769893-45769921; SaCas9
ccgccgaagcgggcggagccgg

SEQ ID NO: 849 - DNA, 21 bp, Artificial Sequence
  Synthetic: DMPK 3 forward 19:45769894-45769921; SaCas9
cgccgaagcgggcggagccgg

SEQ ID NO: 850 - DNA, 20 bp, Artificial Sequence
  Synthetic: DMPK 3 forward 19:45769895-45769921; SaCas9
gccgaagcgggcggagccgg

SEQ ID NO: 851 - DNA, 19 bp, Artificial Sequence
  Synthetic: DMPK 3 forward 19:45769896-45769921; SaCas9
ccgaagcgggcggagccgg

SEQ ID NO: 852 - DNA, 18 bp, Artificial Sequence
  Synthetic: DMPK 3 forward 19:45769897-45769921; SaCas9
cgaagcgggcggagccgg

SEQ ID NO: 853 - DNA, 25 bp, Artificial Sequence
  Synthetic: DMPK 3 forward 19:45769891-45769922; SaCas9
aaccgccgaagcgggcggagccggc

SEQ ID NO: 854 - DNA, 24 bp, Artificial Sequence
  Synthetic: DMPK 3 forward 19:45769892-45769922; SaCas9
accgccgaagcgggcggagccggc

SEQ ID NO: 855 - DNA, 23 bp, Artificial Sequence
  Synthetic: DMPK 3 forward 19:45769893-45769922; SaCas9
ccgccgaagcgggcggagccggc

SEQ ID NO: 856 - DNA, 22 bp, Artificial Sequence
  Synthetic: DMPK 3 forward 19:45769894-45769922; SaCas9
cgccgaagcgggcggagccggc

SEQ ID NO: 857 - DNA, 21 bp, Artificial Sequence
  Synthetic: DMPK 3 forward 19:45769895-45769922; SaCas9
gccgaagcgggcggagccggc

SEQ ID NO: 858 - DNA, 20 bp, Artificial Sequence
  Synthetic: DMPK 3 forward 19:45769896-45769922; SaCas9
ccgaagcgggcggagccggc

SEQ ID NO: 859 - DNA, 19 bp, Artificial Sequence
  Synthetic: DMPK 3 forward 19:45769897-45769922; SaCas9
cgaagcgggcggagccggc

SEQ ID NO: 860 - DNA, 18 bp, Artificial Sequence
  Synthetic: DMPK 3 forward 19:45769898-45769922; SaCas9
gaagcgggcggagccggc

SEQ ID NO: 861 - DNA, 25 bp, Artificial Sequence
  Synthetic: DMPK 3 forward 19:45769898-45769929; SaCas9
gaagcgggcggagccggctggggct

SEQ ID NO: 862 - DNA, 24 bp, Artificial Sequence
  Synthetic: DMPK 3 forward 19:45769899-45769929; SaCas9
aagcgggcggagccggctggggct

SEQ ID NO: 863 - DNA, 23 bp, Artificial Sequence
  Synthetic: DMPK 3 forward 19:45769900-45769929; SaCas9
agcgggcggagccggctggggct

SEQ ID NO: 864 - DNA, 22 bp, Artificial Sequence
  Synthetic: DMPK 3 forward 19:45769901-45769929; SaCas9
gcgggcggagccggctggggct

SEQ ID NO: 865 - DNA, 21 bp, Artificial Sequence
  Synthetic: DMPK 3 forward 19:45769902-45769929; SaCas9
cgggcggagccggctggggct

SEQ ID NO: 866 - DNA, 20 bp, Artificial Sequence
  Synthetic: DMPK 3 forward 19:45769903-45769929; SaCas9
gggcggagccggctggggct

SEQ ID NO: 867 - DNA, 19 bp, Artificial Sequence
  Synthetic: DMPK 3 forward 19:45769904-45769929; SaCas9
ggcggagccggctggggct

SEQ ID NO: 868 - DNA, 18 bp, Artificial Sequence
  Synthetic: DMPK 3 forward 19:45769905-45769929; SaCas9
gcggagccggctggggct

SEQ ID NO: 869 - DNA, 25 bp, Artificial Sequence
  Synthetic: DMPK 3 forward 19:45769900-45769931; SaCas9
agcgggcggagccggctggggctcc

SEQ ID NO: 870 - DNA, 24 bp, Artificial Sequence
  Synthetic: DMPK 3 forward 19:45769901-45769931; SaCas9
gcgggcggagccggctggggctcc

SEQ ID NO: 871 - DNA, 23 bp, Artificial Sequence
  Synthetic: DMPK 3 forward 19:45769902-45769931; SaCas9
cgggcggagccggctggggctcc

SEQ ID NO: 872 - DNA, 22 bp, Artificial Sequence
  Synthetic: DMPK 3 forward 19:45769903-45769931; SaCas9
gggcggagccggctggggctcc

SEQ ID NO: 873 - DNA, 21 bp, Artificial Sequence
  Synthetic: DMPK 3 forward 19:45769904-45769931; SaCas9
ggcggagccggctggggctcc

SEQ ID NO: 874 - DNA, 20 bp, Artificial Sequence
  Synthetic: DMPK 3 forward 19:45769905-45769931; SaCas9
gcggagccggctggggctcc

SEQ ID NO: 875 - DNA, 19 bp, Artificial Sequence
  Synthetic: DMPK 3 forward 19:45769906-45769931; SaCas9
cggagccggctggggctcc

SEQ ID NO: 876 - DNA, 18 bp, Artificial Sequence
  Synthetic: DMPK 3 forward 19:45769907-45769931; SaCas9
ggagccggctggggctcc

SEQ ID NO: 877 - DNA, 25 bp, Artificial Sequence
  Synthetic: DMPK 3 forward 19:45769913-45769944; SaCas9
ggctggggctccgagagcagcgcaa

SEQ ID NO: 878 - DNA, 24 bp, Artificial Sequence
  Synthetic: DMPK 3 forward 19:45769914-45769944; SaCas9
gctggggctccgagagcagcgcaa

SEQ ID NO: 879 - DNA, 23 bp, Artificial Sequence
  Synthetic: DMPK 3 forward 19:45769915-45769944; SaCas9
ctggggctccgagagcagcgcaa

SEQ ID NO: 880 - DNA, 22 bp, Artificial Sequence
  Synthetic: DMPK 3 forward 19:45769916-45769944; SaCas9
tggggctccgagagcagcgcaa

SEQ ID NO: 881 - DNA, 21 bp, Artificial Sequence
  Synthetic: DMPK 3 forward 19:45769917-45769944; SaCas9
ggggctccgagagcagcgcaa

SEQ ID NO: 882 - DNA, 20 bp, Artificial Sequence
  Synthetic: DMPK 3 forward 19:45769918-45769944; SaCas9
gggctccgagagcagcgcaa

SEQ ID NO: 883 - DNA, 19 bp, Artificial Sequence
  Synthetic: DMPK 3 forward 19:45769919-45769944; SaCas9
ggctccgagagcagcgcaa

SEQ ID NO: 884 - DNA, 18 bp, Artificial Sequence
  Synthetic: DMPK 3 forward 19:45769920-45769944; SaCas9
gctccgagagcagcgcaa

SEQ ID NO: 885 - DNA, 25 bp, Artificial Sequence
  Synthetic: DMPK 3 forward 19:45769915-45769946; SaCas9
ctggggctccgagagcagcgcaagt

SEQ ID NO: 886 - DNA, 24 bp, Artificial Sequence
  Synthetic: DMPK 3 forward 19:45769916-45769946; SaCas9
tggggctccgagagcagcgcaagt

SEQ ID NO: 887 - DNA, 23 bp, Artificial Sequence
  Synthetic: DMPK 3 forward 19:45769917-45769946; SaCas9
ggggctccgagagcagcgcaagt

SEQ ID NO: 888 - DNA, 22 bp, Artificial Sequence
  Synthetic: DMPK 3 forward 19:45769918-45769946; SaCas9
gggctccgagagcagcgcaagt

SEQ ID NO: 889 - DNA, 21 bp, Artificial Sequence
  Synthetic: DMPK 3 forward 19:45769919-45769946; SaCas9
ggctccgagagcagcgcaagt

SEQ ID NO: 890 - DNA, 20 bp, Artificial Sequence
  Synthetic: DMPK 3 forward 19:45769920-45769946; SaCas9
gctccgagagcagcgcaagt

SEQ ID NO: 891 - DNA, 19 bp, Artificial Sequence
  Synthetic: DMPK 3 forward 19:45769921-45769946; SaCas9
ctccgagagcagcgcaagt

SEQ ID NO: 892 - DNA, 18 bp, Artificial Sequence
  Synthetic: DMPK 3 forward 19:45769922-45769946; SaCas9
tccgagagcagcgcaagt

SEQ ID NO: 893 - DNA, 25 bp, Artificial Sequence
  Synthetic: DMPK 3 forward 19:45769916-45769947; SaCas9
tggggctccgagagcagcgcaagtg

SEQ ID NO: 894 - DNA, 24 bp, Artificial Sequence
  Synthetic: DMPK 3 forward 19:45769917-45769947; SaCas9
ggggctccgagagcagcgcaagtg

SEQ ID NO: 895 - DNA, 23 bp, Artificial Sequence
  Synthetic: DMPK 3 forward 19:45769918-45769947; SaCas9
gggctccgagagcagcgcaagtg

SEQ ID NO: 896 - DNA, 22 bp, Artificial Sequence
  Synthetic: DMPK 3 forward 19:45769919-45769947; SaCas9
ggctccgagagcagcgcaagtg

SEQ ID NO: 897 - DNA, 21 bp, Artificial Sequence
  Synthetic: DMPK 3 forward 19:45769920-45769947; SaCas9
gctccgagagcagcgcaagtg

SEQ ID NO: 898 - DNA, 20 bp, Artificial Sequence
  Synthetic: DMPK 3 forward 19:45769921-45769947; SaCas9
ctccgagagcagcgcaagtg

SEQ ID NO: 899 - DNA, 19 bp, Artificial Sequence
  Synthetic: DMPK 3 forward 19:45769922-45769947; SaCas9
tccgagagcagcgcaagtg

SEQ ID NO: 900 - DNA, 18 bp, Artificial Sequence
  Synthetic: DMPK 3 forward 19:45769923-45769947; SaCas9
ccgagagcagcgcaagtg

SEQ ID NO: 901 - DNA, 25 bp, Artificial Sequence
  Synthetic: DMPK 3 forward 19:45769918-45769949; SaCas9
gggctccgagagcagcgcaagtgag

SEQ ID NO: 902 - DNA, 24 bp, Artificial Sequence
  Synthetic: DMPK 3 forward 19:45769919-45769949; SaCas9
ggctccgagagcagcgcaagtgag

SEQ ID NO: 903 - DNA, 23 bp, Artificial Sequence
  Synthetic: DMPK 3 forward 19:45769920-45769949; SaCas9
gctccgagagcagcgcaagtgag

SEQ ID NO: 904 - DNA, 22 bp, Artificial Sequence
  Synthetic: DMPK 3 forward 19:45769921-45769949; SaCas9
ctccgagagcagcgcaagtgag

SEQ ID NO: 905 - DNA, 21 bp, Artificial Sequence
  Synthetic: DMPK 3 forward 19:45769922-45769949; SaCas9
tccgagagcagcgcaagtgag

SEQ ID NO: 906 - DNA, 20 bp, Artificial Sequence
  Synthetic: DMPK 3 forward 19:45769923-45769949; SaCas9
ccgagagcagcgcaagtgag

SEQ ID NO: 907 - DNA, 19 bp, Artificial Sequence
  Synthetic: DMPK 3 forward 19:45769924-45769949; SaCas9
cgagagcagcgcaagtgag

SEQ ID NO: 908 - DNA, 18 bp, Artificial Sequence
  Synthetic: DMPK 3 forward 19:45769925-45769949; SaCas9
gagagcagcgcaagtgag

SEQ ID NO: 909 - DNA, 25 bp, Artificial Sequence
  Synthetic: DMPK 3 forward 19:45769919-45769950; SaCas9
ggctccgagagcagcgcaagtgagg

SEQ ID NO: 910 - DNA, 24 bp, Artificial Sequence
  Synthetic: DMPK 3 forward 19:45769920-45769950; SaCas9
gctccgagagcagcgcaagtgagg

SEQ ID NO: 911 - DNA, 23 bp, Artificial Sequence
  Synthetic: DMPK 3 forward 19:45769921-45769950; SaCas9
ctccgagagcagcgcaagtgagg

SEQ ID NO: 912 - DNA, 22 bp, Artificial Sequence
  Synthetic: DMPK 3 forward 19:45769922-45769950; SaCas9
tccgagagcagcgcaagtgagg

SEQ ID NO: 913 - DNA, 21 bp, Artificial Sequence
  Synthetic: DMPK 3 forward 19:45769923-45769950; SaCas9
ccgagagcagcgcaagtgagg

SEQ ID NO: 914 - DNA, 20 bp, Artificial Sequence
  Synthetic: DMPK 3 forward 19:45769924-45769950; SaCas9
cgagagcagcgcaagtgagg

SEQ ID NO: 915 - DNA, 19 bp, Artificial Sequence
  Synthetic: DMPK 3 forward 19:45769925-45769950; SaCas9
gagagcagcgcaagtgagg

SEQ ID NO: 916 - DNA, 18 bp, Artificial Sequence
  Synthetic: DMPK 3 forward 19:45769926-45769950; SaCas9
agagcagcgcaagtgagg

SEQ ID NO: 917 - DNA, 25 bp, Artificial Sequence
  Synthetic: DMPK 3 forward 19:45769920-45769951; SaCas9
gctccgagagcagcgcaagtgagga

SEQ ID NO: 918 - DNA, 24 bp, Artificial Sequence
  Synthetic: DMPK 3 forward 19:45769921-45769951; SaCas9
ctccgagagcagcgcaagtgagga

SEQ ID NO: 919 - DNA, 23 bp, Artificial Sequence
  Synthetic: DMPK 3 forward 19:45769922-45769951; SaCas9
tccgagagcagcgcaagtgagga

SEQ ID NO: 920 - DNA, 22 bp, Artificial Sequence
  Synthetic: DMPK 3 forward 19:45769923-45769951; SaCas9
ccgagagcagcgcaagtgagga

SEQ ID NO: 921 - DNA, 21 bp, Artificial Sequence
  Synthetic: DMPK 3 forward 19:45769924-45769951; SaCas9
cgagagcagcgcaagtgagga

SEQ ID NO: 922 - DNA, 20 bp, Artificial Sequence
  Synthetic: DMPK 3 forward 19:45769925-45769951; SaCas9
gagagcagcgcaagtgagga

SEQ ID NO: 923 - DNA, 19 bp, Artificial Sequence
  Synthetic: DMPK 3 forward 19:45769926-45769951; SaCas9
agagcagcgcaagtgagga

SEQ ID NO: 924 - DNA, 18 bp, Artificial Sequence
  Synthetic: DMPK 3 forward 19:45769927-45769951; SaCas9
gagcagcgcaagtgagga

SEQ ID NO: 925 - DNA, 25 bp, Artificial Sequence
  Synthetic: DMPK 3 reverse 19:45769920-45769951; SaCas9
cccccctcctcacttgcgctgctct

SEQ ID NO: 926 - DNA, 24 bp, Artificial Sequence
  Synthetic: DMPK 3 reverse 19:45769921-45769951; SaCas9
ccccctcctcacttgcgctgctct

SEQ ID NO: 927 - DNA, 23 bp, Artificial Sequence
  Synthetic: DMPK 3 reverse 19:45769922-45769951; SaCas9
cccctcctcacttgcgctgctct

SEQ ID NO: 928 - DNA, 22 bp, Artificial Sequence
  Synthetic: DMPK 3 reverse 19:45769923-45769951; SaCas9
ccctcctcacttgcgctgctct

SEQ ID NO: 929 - DNA, 21 bp, Artificial Sequence
  Synthetic: DMPK 3 reverse 19:45769924-45769951; SaCas9
cctcctcacttgcgctgctct

SEQ ID NO: 930 - DNA, 20 bp, Artificial Sequence
  Synthetic: DMPK 3 reverse 19:45769925-45769951; SaCas9
ctcctcacttgcgctgctct

SEQ ID NO: 931 - DNA, 19 bp, Artificial Sequence
  Synthetic: DMPK 3 reverse 19:45769926-45769951; SaCas9
tcctcacttgcgctgctct

SEQ ID NO: 932 - DNA, 18 bp, Artificial Sequence
  Synthetic: DMPK 3 reverse 19:45769927-45769951; SaCas9
cctcacttgcgctgctct

SEQ ID NO: 933 - DNA, 25 bp, Artificial Sequence
  Synthetic: DMPK 3 forward 19:45769921-45769952; SaCas9
ctccgagagcagcgcaagtgaggag

SEQ ID NO: 934 - DNA, 24 bp, Artificial Sequence
  Synthetic: DMPK 3 forward 19:45769922-45769952; SaCas9
tccgagagcagcgcaagtgaggag

SEQ ID NO: 935 - DNA, 23 bp, Artificial Sequence
  Synthetic: DMPK 3 forward 19:45769923-45769952; SaCas9
ccgagagcagcgcaagtgaggag

SEQ ID NO: 936 - DNA, 22 bp, Artificial Sequence
  Synthetic: DMPK 3 forward 19:45769924-45769952; SaCas9
cgagagcagcgcaagtgaggag

SEQ ID NO: 937 - DNA, 21 bp, Artificial Sequence
  Synthetic: DMPK 3 forward 19:45769925-45769952; SaCas9
gagagcagcgcaagtgaggag

SEQ ID NO: 938 - DNA, 20 bp, Artificial Sequence
  Synthetic: DMPK 3 forward 19:45769926-45769952; SaCas9
agagcagcgcaagtgaggag

SEQ ID NO: 939 - DNA, 19 bp, Artificial Sequence
  Synthetic: DMPK 3 forward 19:45769927-45769952; SaCas9
gagcagcgcaagtgaggag

SEQ ID NO: 940 - DNA, 18 bp, Artificial Sequence
  Synthetic: DMPK 3 forward 19:45769928-45769952; SaCas9
agcagcgcaagtgaggag

SEQ ID NO: 941 - DNA, 25 bp, Artificial Sequence
  Synthetic: DMPK 3 reverse 19:45769921-45769952; SaCas9
gcccccctcctcacttgcgctgctc

SEQ ID NO: 942 - DNA, 24 bp, Artificial Sequence
  Synthetic: DMPK 3 reverse 19:45769922-45769952; SaCas9
cccccctcctcacttgcgctgctc

SEQ ID NO: 943 - DNA, 23 bp, Artificial Sequence
  Synthetic: DMPK 3 reverse 19:45769923-45769952; SaCas9
ccccctcctcacttgcgctgctc

SEQ ID NO: 944 - DNA, 22 bp, Artificial Sequence
  Synthetic: DMPK 3 reverse 19:45769924-45769952; SaCas9
cccctcctcacttgcgctgctc

SEQ ID NO: 945 - DNA, 21 bp, Artificial Sequence
  Synthetic: DMPK 3 reverse 19:45769925-45769952; SaCas9
ccctcctcacttgcgctgctc

SEQ ID NO: 946 - DNA, 20 bp, Artificial Sequence
  Synthetic: DMPK 3 reverse 19:45769926-45769952; SaCas9
cctcctcacttgcgctgctc

SEQ ID NO: 947 - DNA, 19 bp, Artificial Sequence
  Synthetic: DMPK 3 reverse 19:45769927-45769952; SaCas9
ctcctcacttgcgctgctc

SEQ ID NO: 948 - DNA, 18 bp, Artificial Sequence
  Synthetic: DMPK 3 reverse 19:45769928-45769952; SaCas9
tcctcacttgcgctgctc

SEQ ID NO: 949 - DNA, 25 bp, Artificial Sequence
  Synthetic: DMPK 3 forward 19:45769927-45769958; SaCas9
gagcagcgcaagtgaggaggggggc

SEQ ID NO: 950 - DNA, 24 bp, Artificial Sequence
  Synthetic: DMPK 3 forward 19:45769928-45769958; SaCas9
agcagcgcaagtgaggaggggggc

SEQ ID NO: 951 - DNA, 23 bp, Artificial Sequence
  Synthetic: DMPK 3 forward 19:45769929-45769958; SaCas9
gcagcgcaagtgaggaggggggc

SEQ ID NO: 952 - DNA, 22 bp, Artificial Sequence
  Synthetic: DMPK 3 forward 19:45769930-45769958; SaCas9
cagcgcaagtgaggaggggggc

SEQ ID NO: 953 - DNA, 21 bp, Artificial Sequence
  Synthetic: DMPK 3 forward 19:45769931-45769958; SaCas9
agcgcaagtgaggaggggggc

SEQ ID NO: 954 - DNA, 20 bp, Artificial Sequence
  Synthetic: DMPK 3 forward 19:45769932-45769958; SaCas9
gcgcaagtgaggaggggggc

SEQ ID NO: 955 - DNA, 19 bp, Artificial Sequence
  Synthetic: DMPK 3 forward 19:45769933-45769958; SaCas9
cgcaagtgaggaggggggc

SEQ ID NO: 956 - DNA, 18 bp, Artificial Sequence
  Synthetic: DMPK 3 forward 19:45769934-45769958; SaCas9
gcaagtgaggaggggggc

SEQ ID NO: 957 - DNA, 25 bp, Artificial Sequence
  Synthetic: DMPK 3 forward 19:45769928-45769959; SaCas9
agcagcgcaagtgaggaggggggcg

SEQ ID NO: 958 - DNA, 24 bp, Artificial Sequence
  Synthetic: DMPK 3 forward 19:45769929-45769959; SaCas9
gcagcgcaagtgaggaggggggcg

SEQ ID NO: 959 - DNA, 23 bp, Artificial Sequence
  Synthetic: DMPK 3 forward 19:45769930-45769959; SaCas9
cagcgcaagtgaggaggggggcg

SEQ ID NO: 960 - DNA, 22 bp, Artificial Sequence
  Synthetic: DMPK 3 forward 19:45769931-45769959; SaCas9
agcgcaagtgaggaggggggcg

SEQ ID NO: 961 - DNA, 21 bp, Artificial Sequence
  Synthetic: DMPK 3 forward 19:45769932-45769959; SaCas9
gcgcaagtgaggaggggggcg

SEQ ID NO: 962 - DNA, 20 bp, Artificial Sequence
  Synthetic: DMPK 3 forward 19:45769933-45769959; SaCas9
cgcaagtgaggaggggggcg

SEQ ID NO: 963 - DNA, 19 bp, Artificial Sequence
  Synthetic: DMPK 3 forward 19:45769934-45769959; SaCas9
gcaagtgaggaggggggcg

SEQ ID NO: 964 - DNA, 18 bp, Artificial Sequence
  Synthetic: DMPK 3 forward 19:45769935-45769959; SaCas9
caagtgaggaggggggcg

SEQ ID NO: 965 - DNA, 25 bp, Artificial Sequence
  Synthetic: DMPK 3 forward 19:45769936-45769967; SaCas9
aagtgaggaggggggcgcgggatcc

SEQ ID NO: 966 - DNA, 24 bp, Artificial Sequence
  Synthetic: DMPK 3 forward 19:45769937-45769967; SaCas9
agtgaggaggggggcgcgggatcc

SEQ ID NO: 967 - DNA, 23 bp, Artificial Sequence
  Synthetic: DMPK 3 forward 19:45769938-45769967; SaCas9
gtgaggaggggggcgcgggatcc

SEQ ID NO: 968 - DNA, 22 bp, Artificial Sequence
  Synthetic: DMPK 3 forward 19:45769939-45769967; SaCas9
tgaggaggggggcgcgggatcc

SEQ ID NO: 969 - DNA, 21 bp, Artificial Sequence
  Synthetic: DMPK 3 forward 19:45769940-45769967; SaCas9
gaggaggggggcgcgggatcc

SEQ ID NO: 970 - DNA, 20 bp, Artificial Sequence
  Synthetic: DMPK 3 forward 19:45769941-45769967; SaCas9
aggaggggggcgcgggatcc

SEQ ID NO: 971 - DNA, 19 bp, Artificial Sequence
  Synthetic: DMPK 3 forward 19:45769942-45769967; SaCas9
ggaggggggcgcgggatcc

SEQ ID NO: 972 - DNA, 18 bp, Artificial Sequence
  Synthetic: DMPK 3 forward 19:45769943-45769967; SaCas9
gaggggggcgcgggatcc

SEQ ID NO: 973 - DNA, 25 bp, Artificial Sequence
  Synthetic: DMPK 3 forward 19:45769944-45769975; SaCas9
aggggggcgcgggatccccgaaaaa

SEQ ID NO: 974 - DNA, 24 bp, Artificial Sequence
  Synthetic: DMPK 3 forward 19:45769945-45769975; SaCas9
ggggggcgcgggatccccgaaaaa

SEQ ID NO: 975 - DNA, 23 bp, Artificial Sequence
  Synthetic: DMPK 3 forward 19:45769946-45769975; SaCas9
gggggcgcgggatccccgaaaaa

SEQ ID NO: 976 - DNA, 22 bp, Artificial Sequence
  Synthetic: DMPK 3 forward 19:45769947-45769975; SaCas9
ggggcgcgggatccccgaaaaa

SEQ ID NO: 977 - DNA, 21 bp, Artificial Sequence
  Synthetic: DMPK 3 forward 19:45769948-45769975; SaCas9
gggcgcgggatccccgaaaaa

SEQ ID NO: 978 - DNA, 20 bp, Artificial Sequence
  Synthetic: DMPK 3 forward 19:45769949-45769975; SaCas9
ggcgcgggatccccgaaaaa

SEQ ID NO: 979 - DNA, 19 bp, Artificial Sequence
  Synthetic: DMPK 3 forward 19:45769950-45769975; SaCas9
gcgcgggatccccgaaaaa

SEQ ID NO: 980 - DNA, 18 bp, Artificial Sequence
  Synthetic: DMPK 3 forward 19:45769951-45769975; SaCas9
cgcgggatccccgaaaaa

SEQ ID NO: 981 - DNA, 25 bp, Artificial Sequence
  Synthetic: DMPK 3 reverse 19:45769957-45769988; SaCas9
ttgcttttgccaaacccgctttttc

SEQ ID NO: 982 - DNA, 24 bp, Artificial Sequence
  Synthetic: DMPK 3 reverse 19:45769958-45769988; SaCas9
tgcttttgccaaacccgctttttc

SEQ ID NO: 983 - DNA, 23 bp, Artificial Sequence
  Synthetic: DMPK 3 reverse 19:45769959-45769988; SaCas9
gcttttgccaaacccgctttttc

SEQ ID NO: 984 - DNA, 22 bp, Artificial Sequence
  Synthetic: DMPK 3 reverse 19:45769960-45769988; SaCas9
cttttgccaaacccgctttttc

SEQ ID NO: 985 - DNA, 21 bp, Artificial Sequence
  Synthetic: DMPK 3 reverse 19:45769961-45769988; SaCas9
ttttgccaaacccgctttttc

SEQ ID NO: 986 - DNA, 20 bp, Artificial Sequence
  Synthetic: DMPK 3 reverse 19:45769962-45769988; SaCas9
tttgccaaacccgctttttc

SEQ ID NO: 987 - DNA, 19 bp, Artificial Sequence
  Synthetic: DMPK 3 reverse 19:45769963-45769988; SaCas9
ttgccaaacccgctttttc

SEQ ID NO: 988 - DNA, 18 bp, Artificial Sequence
  Synthetic: DMPK 3 reverse 19:45769964-45769988; SaCas9
tgccaaacccgctttttc

SEQ ID NO: 989 - DNA, 25 bp, Artificial Sequence
  Synthetic: DMPK 3 reverse 19:45769958-45769989; SaCas9
tttgcttttgccaaacccgcttttt

SEQ ID NO: 990 - DNA, 24 bp, Artificial Sequence
  Synthetic: DMPK 3 reverse 19:45769959-45769989; SaCas9
ttgcttttgccaaacccgcttttt

SEQ ID NO: 991 - DNA, 23 bp, Artificial Sequence
  Synthetic: DMPK 3 reverse 19:45769960-45769989; SaCas9
tgcttttgccaaacccgcttttt

SEQ ID NO: 992 - DNA, 22 bp, Artificial Sequence
  Synthetic: DMPK 3 reverse 19:45769961-45769989; SaCas9
gcttttgccaaacccgcttttt

SEQ ID NO: 993 - DNA, 21 bp, Artificial Sequence
  Synthetic: DMPK 3 reverse 19:45769962-45769989; SaCas9
cttttgccaaacccgcttttt

SEQ ID NO: 994 - DNA, 20 bp, Artificial Sequence
  Synthetic: DMPK 3 reverse 19:45769963-45769989; SaCas9
ttttgccaaacccgcttttt

SEQ ID NO: 995 - DNA, 19 bp, Artificial Sequence
  Synthetic: DMPK 3 reverse 19:45769964-45769989; SaCas9
tttgccaaacccgcttttt

SEQ ID NO: 996 - DNA, 18 bp, Artificial Sequence
  Synthetic: DMPK 3 reverse 19:45769965-45769989; SaCas9
ttgccaaacccgcttttt

SEQ ID NO: 997 - DNA, 25 bp, Artificial Sequence
  Synthetic: DMPK 3 reverse 19:45769959-45769990; SaCas9
atttgcttttgccaaacccgctttt

SEQ ID NO: 998 - DNA, 24 bp, Artificial Sequence
  Synthetic: DMPK 3 reverse 19:45769960-45769990; SaCas9
tttgcttttgccaaacccgctttt

SEQ ID NO: 999 - DNA, 23 bp, Artificial Sequence
  Synthetic: DMPK 3 reverse 19:45769961-45769990; SaCas9
ttgcttttgccaaacccgctttt

SEQ ID NO: 1000 - DNA, 22 bp, Artificial Sequence
  Synthetic: DMPK 3 reverse 19:45769962-45769990; SaCas9
tgcttttgccaaacccgctttt

SEQ ID NO: 1001 - DNA, 21 bp, Artificial Sequence
  Synthetic: DMPK 3 reverse 19:45769963-45769990; SaCas9
gcttttgccaaacccgctttt

SEQ ID NO: 1002 - DNA, 20 bp, Artificial Sequence
  Synthetic: DMPK 3 reverse 19:45769964-45769990; SaCas9
cttttgccaaacccgctttt

SEQ ID NO: 1003 - DNA, 19 bp, Artificial Sequence
  Synthetic: DMPK 3 reverse 19:45769965-45769990; SaCas9
ttttgccaaacccgctttt

SEQ ID NO: 1004 - DNA, 18 bp, Artificial Sequence
  Synthetic: DMPK 3 reverse 19:45769966-45769990; SaCas9
tttgccaaacccgctttt

SEQ ID NO: 1005 - DNA, 25 bp, Artificial Sequence
  Synthetic: DMPK 3 forward 19:45769968-45769999; SaCas9
agcgggtttggcaaaagcaaatttc

SEQ ID NO: 1006 - DNA, 24 bp, Artificial Sequence
  Synthetic: DMPK 3 forward 19:45769969-45769999; SaCas9
gcgggtttggcaaaagcaaatttc

SEQ ID NO: 1007 - DNA, 23 bp, Artificial Sequence
  Synthetic: DMPK 3 forward 19:45769970-45769999; SaCas9
cgggtttggcaaaagcaaatttc

SEQ ID NO: 1008 - DNA, 22 bp, Artificial Sequence
  Synthetic: DMPK 3 forward 19:45769971-45769999; SaCas9
gggtttggcaaaagcaaatttc

SEQ ID NO: 1009 - DNA, 21 bp, Artificial Sequence
  Synthetic: DMPK 3 forward 19:45769972-45769999; SaCas9
ggtttggcaaaagcaaatttc

SEQ ID NO: 1010 - DNA, 20 bp, Artificial Sequence
  Synthetic: DMPK 3 forward 19:45769973-45769999; SaCas9
gtttggcaaaagcaaatttc

SEQ ID NO: 1011 - DNA, 19 bp, Artificial Sequence
  Synthetic: DMPK 3 forward 19:45769974-45769999; SaCas9
tttggcaaaagcaaatttc

SEQ ID NO: 1012 - DNA, 18 bp, Artificial Sequence
  Synthetic: DMPK 3 forward 19:45769975-45769999; SaCas9
ttggcaaaagcaaatttc

SEQ ID NO: 1013 - DNA, 25 bp, Artificial Sequence
  Synthetic: DMPK 3 forward 19:45769981-45770012; SaCas9
aaagcaaatttcccgagtaagcagg

SEQ ID NO: 1014 - DNA, 24 bp, Artificial Sequence
  Synthetic: DMPK 3 forward 19:45769982-45770012; SaCas9
aagcaaatttcccgagtaagcagg

SEQ ID NO: 1015 - DNA, 23 bp, Artificial Sequence
  Synthetic: DMPK 3 forward 19:45769983-45770012; SaCas9
agcaaatttcccgagtaagcagg

SEQ ID NO: 1016 - DNA, 22 bp, Artificial Sequence
  Synthetic: DMPK 3 forward 19:45769984-45770012; SaCas9
gcaaatttcccgagtaagcagg

SEQ ID NO: 1017 - DNA, 21 bp, Artificial Sequence
  Synthetic: DMPK 3 forward 19:45769985-45770012; SaCas9
caaatttcccgagtaagcagg

SEQ ID NO: 1018 - DNA, 20 bp, Artificial Sequence
  Synthetic: DMPK 3 forward 19:45769986-45770012; SaCas9
aaatttcccgagtaagcagg

SEQ ID NO: 1019 - DNA, 19 bp, Artificial Sequence
  Synthetic: DMPK 3 forward 19:45769987-45770012; SaCas9
aatttcccgagtaagcagg

SEQ ID NO: 1020 - DNA, 18 bp, Artificial Sequence
  Synthetic: DMPK 3 forward 19:45769988-45770012; SaCas9
atttcccgagtaagcagg

SEQ ID NO: 1021 - DNA, 25 bp, Artificial Sequence
  Synthetic: DMPK 3 reverse 19:45769989-45770020; SaCas9
tggcgcgatctctgcctgcttactc

SEQ ID NO: 1022 - DNA, 24 bp, Artificial Sequence
  Synthetic: DMPK 3 reverse 19:45769990-45770020; SaCas9
ggcgcgatctctgcctgcttactc

SEQ ID NO: 1023 - DNA, 23 bp, Artificial Sequence
  Synthetic: DMPK 3 reverse 19:45769991-45770020; SaCas9
gcgcgatctctgcctgcttactc

SEQ ID NO: 1024 - DNA, 22 bp, Artificial Sequence
  Synthetic: DMPK 3 reverse 19:45769992-45770020; SaCas9
cgcgatctctgcctgcttactc

SEQ ID NO: 1025 - DNA, 21 bp, Artificial Sequence
  Synthetic: DMPK 3 reverse 19:45769993-45770020; SaCas9
gcgatctctgcctgcttactc

SEQ ID NO: 1026 - DNA, 20 bp, Artificial Sequence
  Synthetic: DMPK 3 reverse 19:45769994-45770020; SaCas9
cgatctctgcctgcttactc

SEQ ID NO: 1027 - DNA, 19 bp, Artificial Sequence
  Synthetic: DMPK 3 reverse 19:45769995-45770020; SaCas9
gatctctgcctgcttactc

SEQ ID NO: 1028 - DNA, 18 bp, Artificial Sequence
  Synthetic: DMPK 3 reverse 19:45769996-45770020; SaCas9
atctctgcctgcttactc

SEQ ID NO: 1029 - DNA, 25 bp, Artificial Sequence
  Synthetic: DMPK 3 reverse 19:45769990-45770021; SaCas9
ctggcgcgatctctgcctgcttact

SEQ ID NO: 1030 - DNA, 24 bp, Artificial Sequence
  Synthetic: DMPK 3 reverse 19:45769991-45770021; SaCas9
tggcgcgatctctgcctgcttact

SEQ ID NO: 1031 - DNA, 23 bp, Artificial Sequence
  Synthetic: DMPK 3 reverse 19:45769992-45770021; SaCas9
ggcgcgatctctgcctgcttact

SEQ ID NO: 1032 - DNA, 22 bp, Artificial Sequence
  Synthetic: DMPK 3 reverse 19:45769993-45770021; SaCas9
gcgcgatctctgcctgcttact

SEQ ID NO: 1033 - DNA, 21 bp, Artificial Sequence
  Synthetic: DMPK 3 reverse 19:45769994-45770021; SaCas9
cgcgatctctgcctgcttact

SEQ ID NO: 1034 - DNA, 20 bp, Artificial Sequence
  Synthetic: DMPK 3 reverse 19:45769995-45770021; SaCas9
gcgatctctgcctgcttact

SEQ ID NO: 1035 - DNA, 19 bp, Artificial Sequence
  Synthetic: DMPK 3 reverse 19:45769996-45770021; SaCas9
cgatctctgcctgcttact

SEQ ID NO: 1036 - DNA, 18 bp, Artificial Sequence
  Synthetic: DMPK 3 reverse 19:45769997-45770021; SaCas9
gatctctgcctgcttact

SEQ ID NO: 1037 - DNA, 25 bp, Artificial Sequence
  Synthetic: DMPK 3 reverse 19:45769991-45770022; SaCas9
tctggcgcgatctctgcctgcttac

SEQ ID NO: 1038 - DNA, 24 bp, Artificial Sequence
  Synthetic: DMPK 3 reverse 19:45769992-45770022; SaCas9
ctggcgcgatctctgcctgcttac

SEQ ID NO: 1039 - DNA, 23 bp, Artificial Sequence
  Synthetic: DMPK 3 reverse 19:45769993-45770022; SaCas9
tggcgcgatctctgcctgcttac

SEQ ID NO: 1040 - DNA, 22 bp, Artificial Sequence
  Synthetic: DMPK 3 reverse 19:45769994-45770022; SaCas9
ggcgcgatctctgcctgcttac

SEQ ID NO: 1041 - DNA, 21 bp, Artificial Sequence
  Synthetic: DMPK 3 reverse 19:45769995-45770022; SaCas9
gcgcgatctctgcctgcttac

SEQ ID NO: 1042 - DNA, 20 bp, Artificial Sequence
  Synthetic: DMPK 3 reverse 19:45769996-45770022; SaCas9
cgcgatctctgcctgcttac

SEQ ID NO: 1043 - DNA, 19 bp, Artificial Sequence
  Synthetic: DMPK 3 reverse 19:45769997-45770022; SaCas9
gcgatctctgcctgcttac

SEQ ID NO: 1044 - DNA, 18 bp, Artificial Sequence
  Synthetic: DMPK 3 reverse 19:45769998-45770022; SaCas9
cgatctctgcctgcttac

SEQ ID NO: 1045 - DNA, 25 bp, Artificial Sequence
  Synthetic: DMPK 3 forward 19:45770004-45770035; SaCas9
ggcagagatcgcgccagacgctccc

SEQ ID NO: 1046 - DNA, 24 bp, Artificial Sequence
  Synthetic: DMPK 3 forward 19:45770005-45770035; SaCas9
gcagagatcgcgccagacgctccc

SEQ ID NO: 1047 - DNA, 23 bp, Artificial Sequence
  Synthetic: DMPK 3 forward 19:45770006-45770035; SaCas9
cagagatcgcgccagacgctccc

SEQ ID NO: 1048 - DNA, 22 bp, Artificial Sequence
  Synthetic: DMPK 3 forward 19:45770007-45770035; SaCas9
agagatcgcgccagacgctccc

SEQ ID NO: 1049 - DNA, 21 bp, Artificial Sequence
  Synthetic: DMPK 3 forward 19:45770008-45770035; SaCas9
gagatcgcgccagacgctccc

SEQ ID NO: 1050 - DNA, 20 bp, Artificial Sequence
  Synthetic: DMPK 3 forward 19:45770009-45770035; SaCas9
agatcgcgccagacgctccc

SEQ ID NO: 1051 - DNA, 19 bp, Artificial Sequence
  Synthetic: DMPK 3 forward 19:45770010-45770035; SaCas9
gatcgcgccagacgctccc

SEQ ID NO: 1052 - DNA, 18 bp, Artificial Sequence
  Synthetic: DMPK 3 forward 19:45770011-45770035; SaCas9
atcgcgccagacgctccc

SEQ ID NO: 1053 - DNA, 25 bp, Artificial Sequence
  Synthetic: DMPK 3 forward 19:45770009-45770040; SaCas9
agatcgcgccagacgctccccagag

SEQ ID NO: 1054 - DNA, 24 bp, Artificial Sequence
  Synthetic: DMPK 3 forward 19:45770010-45770040; SaCas9
gatcgcgccagacgctccccagag

SEQ ID NO: 1055 - DNA, 23 bp, Artificial Sequence
  Synthetic: DMPK 3 forward 19:45770011-45770040; SaCas9
atcgcgccagacgctccccagag

SEQ ID NO: 1056 - DNA, 22 bp, Artificial Sequence
  Synthetic: DMPK 3 forward 19:45770012-45770040; SaCas9
tcgcgccagacgctccccagag

SEQ ID NO: 1057 - DNA, 21 bp, Artificial Sequence
  Synthetic: DMPK 3 forward 19:45770013-45770040; SaCas9
cgcgccagacgctccccagag

SEQ ID NO: 1058 - DNA, 20 bp, Artificial Sequence
  Synthetic: DMPK 3 forward 19:45770014-45770040; SaCas9
gcgccagacgctccccagag

SEQ ID NO: 1059 - DNA, 19 bp, Artificial Sequence
  Synthetic: DMPK 3 forward 19:45770015-45770040; SaCas9
cgccagacgctccccagag

SEQ ID NO: 1060 - DNA, 18 bp, Artificial Sequence
  Synthetic: DMPK 3 forward 19:45770016-45770040; SaCas9
gccagacgctccccagag

SEQ ID NO: 1061 - DNA, 25 bp, Artificial Sequence
  Synthetic: DMPK 3 reverse 19:45770023-45770054; SaCas9
ttcttgtgcatgacgccctgctctg

SEQ ID NO: 1062 - DNA, 24 bp, Artificial Sequence
  Synthetic: DMPK 3 reverse 19:45770024-45770054; SaCas9
tcttgtgcatgacgccctgctctg

SEQ ID NO: 1063 - DNA, 23 bp, Artificial Sequence
  Synthetic: DMPK 3 reverse 19:45770025-45770054; SaCas9
cttgtgcatgacgccctgctctg

SEQ ID NO: 1064 - DNA, 22 bp, Artificial Sequence
  Synthetic: DMPK 3 reverse 19:45770026-45770054; SaCas9
ttgtgcatgacgccctgctctg

SEQ ID NO: 1065 - DNA, 21 bp, Artificial Sequence
  Synthetic: DMPK 3 reverse 19:45770027-45770054; SaCas9
tgtgcatgacgccctgctctg

SEQ ID NO: 1066 - DNA, 20 bp, Artificial Sequence
  Synthetic: DMPK 3 reverse 19:45770028-45770054; SaCas9
gtgcatgacgccctgctctg

SEQ ID NO: 1067 - DNA, 19 bp, Artificial Sequence
  Synthetic: DMPK 3 reverse 19:45770029-45770054; SaCas9
tgcatgacgccctgctctg

SEQ ID NO: 1068 - DNA, 18 bp, Artificial Sequence
  Synthetic: DMPK 3 reverse 19:45770030-45770054; SaCas9
gcatgacgccctgctctg

SEQ ID NO: 1069 - DNA, 25 bp, Artificial Sequence
  Synthetic: DMPK 3 forward 19:45770024-45770055; SaCas9
ctccccagagcagggcgtcatgcac

SEQ ID NO: 1070 - DNA, 24 bp, Artificial Sequence
  Synthetic: DMPK 3 forward 19:45770025-45770055; SaCas9
tccccagagcagggcgtcatgcac

SEQ ID NO: 1071 - DNA, 23 bp, Artificial Sequence
  Synthetic: DMPK 3 forward 19:45770026-45770055; SaCas9
ccccagagcagggcgtcatgcac

SEQ ID NO: 1072 - DNA, 22 bp, Artificial Sequence
  Synthetic: DMPK 3 forward 19:45770027-45770055; SaCas9
cccagagcagggcgtcatgcac

SEQ ID NO: 1073 - DNA, 21 bp, Artificial Sequence
  Synthetic: DMPK 3 forward 19:45770028-45770055; SaCas9
ccagagcagggcgtcatgcac

SEQ ID NO: 1074 - DNA, 20 bp, Artificial Sequence
  Synthetic: DMPK 3 forward 19:45770029-45770055; SaCas9
cagagcagggcgtcatgcac

SEQ ID NO: 1075 - DNA, 19 bp, Artificial Sequence
  Synthetic: DMPK 3 forward 19:45770030-45770055; SaCas9
agagcagggcgtcatgcac

SEQ ID NO: 1076 - DNA, 18 bp, Artificial Sequence
  Synthetic: DMPK 3 forward 19:45770031-45770055; SaCas9
gagcagggcgtcatgcac

SEQ ID NO: 1077 - DNA, 25 bp, Artificial Sequence
  Synthetic: DMPK 3 reverse 19:45770024-45770055; SaCas9
tttcttgtgcatgacgccctgctct

SEQ ID NO: 1078 - DNA, 24 bp, Artificial Sequence
  Synthetic: DMPK 3 reverse 19:45770025-45770055; SaCas9
ttcttgtgcatgacgccctgctct

SEQ ID NO: 1079 - DNA, 23 bp, Artificial Sequence
  Synthetic: DMPK 3 reverse 19:45770026-45770055; SaCas9
tcttgtgcatgacgccctgctct

SEQ ID NO: 1080 - DNA, 22 bp, Artificial Sequence
  Synthetic: DMPK 3 reverse 19:45770027-45770055; SaCas9
cttgtgcatgacgccctgctct

SEQ ID NO: 1081 - DNA, 21 bp, Artificial Sequence
  Synthetic: DMPK 3 reverse 19:45770028-45770055; SaCas9
ttgtgcatgacgccctgctct

SEQ ID NO: 1082 - DNA, 20 bp, Artificial Sequence
  Synthetic: DMPK 3 reverse 19:45770029-45770055; SaCas9
tgtgcatgacgccctgctct

SEQ ID NO: 1083 - DNA, 19 bp, Artificial Sequence
  Synthetic: DMPK 3 reverse 19:45770030-45770055; SaCas9
gtgcatgacgccctgctct

SEQ ID NO: 1084 - DNA, 18 bp, Artificial Sequence
  Synthetic: DMPK 3 reverse 19:45770031-45770055; SaCas9
tgcatgacgccctgctct

SEQ ID NO: 1085 - DNA, 25 bp, Artificial Sequence
  Synthetic: DMPK 3 reverse 19:45770025-45770056; SaCas9
ctttcttgtgcatgacgccctgctc

SEQ ID NO: 1086 - DNA, 24 bp, Artificial Sequence
  Synthetic: DMPK 3 reverse 19:45770026-45770056; SaCas9
tttcttgtgcatgacgccctgctc

SEQ ID NO: 1087 - DNA, 23 bp, Artificial Sequence
  Synthetic: DMPK 3 reverse 19:45770027-45770056; SaCas9
ttcttgtgcatgacgccctgctc

SEQ ID NO: 1088 - DNA, 22 bp, Artificial Sequence
  Synthetic: DMPK 3 reverse 19:45770028-45770056; SaCas9
tcttgtgcatgacgccctgctc

SEQ ID NO: 1089 - DNA, 21 bp, Artificial Sequence
  Synthetic: DMPK 3 reverse 19:45770029-45770056; SaCas9
cttgtgcatgacgccctgctc

SEQ ID NO: 1090 - DNA, 20 bp, Artificial Sequence
  Synthetic: DMPK 3 reverse 19:45770030-45770056; SaCas9
ttgtgcatgacgccctgctc

SEQ ID NO: 1091 - DNA, 19 bp, Artificial Sequence
  Synthetic: DMPK 3 reverse 19:45770031-45770056; SaCas9
tgtgcatgacgccctgctc

SEQ ID NO: 1092 - DNA, 18 bp, Artificial Sequence
  Synthetic: DMPK 3 reverse 19:45770032-45770056; SaCas9
gtgcatgacgccctgctc

SEQ ID NO: 1093 - DNA, 25 bp, Artificial Sequence
  Synthetic: DMPK 3 reverse 19:45770026-45770057; SaCas9
gctttcttgtgcatgacgccctgct

SEQ ID NO: 1094 - DNA, 24 bp, Artificial Sequence
  Synthetic: DMPK 3 reverse 19:45770027-45770057; SaCas9
ctttcttgtgcatgacgccctgct

SEQ ID NO: 1095 - DNA, 23 bp, Artificial Sequence
  Synthetic: DMPK 3 reverse 19:45770028-45770057; SaCas9
tttcttgtgcatgacgccctgct

SEQ ID NO: 1096 - DNA, 22 bp, Artificial Sequence
  Synthetic: DMPK 3 reverse 19:45770029-45770057; SaCas9
ttcttgtgcatgacgccctgct

SEQ ID NO: 1097 - DNA, 21 bp, Artificial Sequence
  Synthetic: DMPK 3 reverse 19:45770030-45770057; SaCas9
tcttgtgcatgacgccctgct

SEQ ID NO: 1098 - DNA, 20 bp, Artificial Sequence
  Synthetic: DMPK 3 reverse 19:45770031-45770057; SaCas9
cttgtgcatgacgccctgct

SEQ ID NO: 1099 - DNA, 19 bp, Artificial Sequence
  Synthetic: DMPK 3 reverse 19:45770032-45770057; SaCas9
ttgtgcatgacgccctgct

SEQ ID NO: 1100 - DNA, 18 bp, Artificial Sequence
  Synthetic: DMPK 3 reverse 19:45770033-45770057; SaCas9
tgtgcatgacgccctgct

SEQ ID NO: 1101 - DNA, 25 bp, Artificial Sequence
  Synthetic: DMPK 3 forward 19:45770042-45770073; SaCas9
catgcacaagaaagctttgcacttt

SEQ ID NO: 1102 - DNA, 24 bp, Artificial Sequence
  Synthetic: DMPK 3 forward 19:45770043-45770073; SaCas9
atgcacaagaaagctttgcacttt

SEQ ID NO: 1103 - DNA, 23 bp, Artificial Sequence
  Synthetic: DMPK 3 forward 19:45770044-45770073; SaCas9
tgcacaagaaagctttgcacttt

SEQ ID NO: 1104 - DNA, 22 bp, Artificial Sequence
  Synthetic: DMPK 3 forward 19:45770045-45770073; SaCas9
gcacaagaaagctttgcacttt

SEQ ID NO: 1105 - DNA, 21 bp, Artificial Sequence
  Synthetic: DMPK 3 forward 19:45770046-45770073; SaCas9
cacaagaaagctttgcacttt

SEQ ID NO: 1106 - DNA, 20 bp, Artificial Sequence
  Synthetic: DMPK 3 forward 19:45770047-45770073; SaCas9
acaagaaagctttgcacttt

SEQ ID NO: 1107 - DNA, 19 bp, Artificial Sequence
  Synthetic: DMPK 3 forward 19:45770048-45770073; SaCas9
caagaaagctttgcacttt

SEQ ID NO: 1108 - DNA, 18 bp, Artificial Sequence
  Synthetic: DMPK 3 forward 19:45770049-45770073; SaCas9
aagaaagctttgcacttt

SEQ ID NO: 1109 - DNA, 25 bp, Artificial Sequence
  Synthetic: DMPK 3 forward 19:45770057-45770088; SaCas9
tttgcactttgcgaaccaacgatag

SEQ ID NO: 1110 - DNA, 24 bp, Artificial Sequence
  Synthetic: DMPK 3 forward 19:45770058-45770088; SaCas9
ttgcactttgcgaaccaacgatag

SEQ ID NO: 1111 - DNA, 23 bp, Artificial Sequence
  Synthetic: DMPK 3 forward 19:45770059-45770088; SaCas9
tgcactttgcgaaccaacgatag

SEQ ID NO: 1112 - DNA, 22 bp, Artificial Sequence
  Synthetic: DMPK 3 forward 19:45770060-45770088; SaCas9
gcactttgcgaaccaacgatag

SEQ ID NO: 1113 - DNA, 21 bp, Artificial Sequence
  Synthetic: DMPK 3 forward 19:45770061-45770088; SaCas9
cactttgcgaaccaacgatag

SEQ ID NO: 1114 - DNA, 20 bp, Artificial Sequence
  Synthetic: DMPK 3 forward 19:45770062-45770088; SaCas9
actttgcgaaccaacgatag

SEQ ID NO: 1115 - DNA, 19 bp, Artificial Sequence
  Synthetic: DMPK 3 forward 19:45770063-45770088; SaCas9
ctttgcgaaccaacgatag

SEQ ID NO: 1116 - DNA, 18 bp, Artificial Sequence
  Synthetic: DMPK 3 forward 19:45770064-45770088; SaCas9
tttgcgaaccaacgatag

SEQ ID NO: 1117 - DNA, 25 bp, Artificial Sequence
  Synthetic: DMPK 3 forward 19:45770058-45770089; SaCas9
ttgcactttgcgaaccaacgatagg

SEQ ID NO: 1118 - DNA, 24 bp, Artificial Sequence
  Synthetic: DMPK 3 forward 19:45770059-45770089; SaCas9
tgcactttgcgaaccaacgatagg

SEQ ID NO: 1119 - DNA, 23 bp, Artificial Sequence
  Synthetic: DMPK 3 forward 19:45770060-45770089; SaCas9
gcactttgcgaaccaacgatagg

SEQ ID NO: 1120 - DNA, 22 bp, Artificial Sequence
  Synthetic: DMPK 3 forward 19:45770061-45770089; SaCas9
cactttgcgaaccaacgatagg

SEQ ID NO: 1121 - DNA, 21 bp, Artificial Sequence
  Synthetic: DMPK 3 forward 19:45770062-45770089; SaCas9
actttgcgaaccaacgatagg

SEQ ID NO: 1122 - DNA, 20 bp, Artificial Sequence
  Synthetic: DMPK 3 forward 19:45770063-45770089; SaCas9
ctttgcgaaccaacgatagg

SEQ ID NO: 1123 - DNA, 19 bp, Artificial Sequence
  Synthetic: DMPK 3 forward 19:45770064-45770089; SaCas9
tttgcgaaccaacgatagg

SEQ ID NO: 1124 - DNA, 18 bp, Artificial Sequence
  Synthetic: DMPK 3 forward 19:45770065-45770089; SaCas9
ttgcgaaccaacgatagg

SEQ ID NO: 1125 - DNA, 25 bp, Artificial Sequence
  Synthetic: DMPK 3 forward 19:45770059-45770090; SaCas9
tgcactttgcgaaccaacgataggt

SEQ ID NO: 1126 - DNA, 24 bp, Artificial Sequence
  Synthetic: DMPK 3 forward 19:45770060-45770090; SaCas9
gcactttgcgaaccaacgataggt

SEQ ID NO: 1127 - DNA, 23 bp, Artificial Sequence
  Synthetic: DMPK 3 forward 19:45770061-45770090; SaCas9
cactttgcgaaccaacgataggt

SEQ ID NO: 1128 - DNA, 22 bp, Artificial Sequence
  Synthetic: DMPK 3 forward 19:45770062-45770090; SaCas9
actttgcgaaccaacgataggt

SEQ ID NO: 1129 - DNA, 21 bp, Artificial Sequence
  Synthetic: DMPK 3 forward 19:45770063-45770090; SaCas9
ctttgcgaaccaacgataggt

SEQ ID NO: 1130 - DNA, 20 bp, Artificial Sequence
  Synthetic: DMPK 3 forward 19:45770064-45770090; SaCas9
tttgcgaaccaacgataggt

SEQ ID NO: 1131 - DNA, 19 bp, Artificial Sequence
  Synthetic: DMPK 3 forward 19:45770065-45770090; SaCas9
ttgcgaaccaacgataggt

SEQ ID NO: 1132 - DNA, 18 bp, Artificial Sequence
  Synthetic: DMPK 3 forward 19:45770066-45770090; SaCas9
tgcgaaccaacgataggt

SEQ ID NO: 1133 - DNA, 25 bp, Artificial Sequence
  Synthetic: DMPK 3 forward 19:45770067-45770098; SaCas9
gcgaaccaacgataggtgggggtgc

SEQ ID NO: 1134 - DNA, 24 bp, Artificial Sequence
  Synthetic: DMPK 3 forward 19:45770068-45770098; SaCas9
cgaaccaacgataggtgggggtgc

SEQ ID NO: 1135 - DNA, 23 bp, Artificial Sequence
  Synthetic: DMPK 3 forward 19:45770069-45770098; SaCas9
gaaccaacgataggtgggggtgc

SEQ ID NO: 1136 - DNA, 22 bp, Artificial Sequence
  Synthetic: DMPK 3 forward 19:45770070-45770098; SaCas9
aaccaacgataggtgggggtgc

SEQ ID NO: 1137 - DNA, 21 bp, Artificial Sequence
  Synthetic: DMPK 3 forward 19:45770071-45770098; SaCas9
accaacgataggtgggggtgc

SEQ ID NO: 1138 - DNA, 20 bp, Artificial Sequence
  Synthetic: DMPK 3 forward 19:45770072-45770098; SaCas9
ccaacgataggtgggggtgc

SEQ ID NO: 1139 - DNA, 19 bp, Artificial Sequence
  Synthetic: DMPK 3 forward 19:45770073-45770098; SaCas9
caacgataggtgggggtgc

SEQ ID NO: 1140 - DNA, 18 bp, Artificial Sequence
  Synthetic: DMPK 3 forward 19:45770074-45770098; SaCas9
aacgataggtgggggtgc

SEQ ID NO: 1141 - DNA, 25 bp, Artificial Sequence
  Synthetic: DMPK 3 forward 19:45770068-45770099; SaCas9
cgaaccaacgataggtgggggtgcg

SEQ ID NO: 1142 - DNA, 24 bp, Artificial Sequence
  Synthetic: DMPK 3 forward 19:45770069-45770099; SaCas9
gaaccaacgataggtgggggtgcg

SEQ ID NO: 1143 - DNA, 23 bp, Artificial Sequence
  Synthetic: DMPK 3 forward 19:45770070-45770099; SaCas9
aaccaacgataggtgggggtgcg

SEQ ID NO: 1144 - DNA, 22 bp, Artificial Sequence
  Synthetic: DMPK 3 forward 19:45770071-45770099; SaCas9
accaacgataggtgggggtgcg

SEQ ID NO: 1145 - DNA, 21 bp, Artificial Sequence
  Synthetic: DMPK 3 forward 19:45770072-45770099; SaCas9
ccaacgataggtgggggtgcg

SEQ ID NO: 1146 - DNA, 20 bp, Artificial Sequence
  Synthetic: DMPK 3 forward 19:45770073-45770099; SaCas9
caacgataggtgggggtgcg

SEQ ID NO: 1147 - DNA, 19 bp, Artificial Sequence
  Synthetic: DMPK 3 forward 19:45770074-45770099; SaCas9
aacgataggtgggggtgcg

SEQ ID NO: 1148 - DNA, 18 bp, Artificial Sequence
  Synthetic: DMPK 3 forward 19:45770075-45770099; SaCas9
acgataggtgggggtgcg

SEQ ID NO: 1149 - DNA, 25 bp, Artificial Sequence
  Synthetic: DMPK 3 forward 19:45770070-45770101; SaCas9
aaccaacgataggtgggggtgcgtg

SEQ ID NO: 1150 - DNA, 24 bp, Artificial Sequence
  Synthetic: DMPK 3 forward 19:45770071-45770101; SaCas9
accaacgataggtgggggtgcgtg

SEQ ID NO: 1151 - DNA, 23 bp, Artificial Sequence
  Synthetic: DMPK 3 forward 19:45770072-45770101; SaCas9
ccaacgataggtgggggtgcgtg

SEQ ID NO: 1152 - DNA, 22 bp, Artificial Sequence
  Synthetic: DMPK 3 forward 19:45770073-45770101; SaCas9
caacgataggtgggggtgcgtg

SEQ ID NO: 1153 - DNA, 21 bp, Artificial Sequence
  Synthetic: DMPK 3 forward 19:45770074-45770101; SaCas9
aacgataggtgggggtgcgtg

SEQ ID NO: 1154 - DNA, 20 bp, Artificial Sequence
  Synthetic: DMPK 3 forward 19:45770075-45770101; SaCas9
acgataggtgggggtgcgtg

SEQ ID NO: 1155 - DNA, 19 bp, Artificial Sequence
  Synthetic: DMPK 3 forward 19:45770076-45770101; SaCas9
cgataggtgggggtgcgtg

SEQ ID NO: 1156 - DNA, 18 bp, Artificial Sequence
  Synthetic: DMPK 3 forward 19:45770077-45770101; SaCas9
gataggtgggggtgcgtg

SEQ ID NO: 1157 - DNA, 25 bp, Artificial Sequence
  Synthetic: DMPK 3 forward 19:45770074-45770105; SaCas9
aacgataggtgggggtgcgtggagg

SEQ ID NO: 1158 - DNA, 24 bp, Artificial Sequence
  Synthetic: DMPK 3 forward 19:45770075-45770105; SaCas9
acgataggtgggggtgcgtggagg

SEQ ID NO: 1159 - DNA, 23 bp, Artificial Sequence
  Synthetic: DMPK 3 forward 19:45770076-45770105; SaCas9
cgataggtgggggtgcgtggagg

SEQ ID NO: 1160 - DNA, 22 bp, Artificial Sequence
  Synthetic: DMPK 3 forward 19:45770077-45770105; SaCas9
gataggtgggggtgcgtggagg

SEQ ID NO: 1161 - DNA, 21 bp, Artificial Sequence
  Synthetic: DMPK 3 forward 19:45770078-45770105; SaCas9
ataggtgggggtgcgtggagg

SEQ ID NO: 1162 - DNA, 20 bp, Artificial Sequence
  Synthetic: DMPK 3 forward 19:45770079-45770105; SaCas9
taggtgggggtgcgtggagg

SEQ ID NO: 1163 - DNA, 19 bp, Artificial Sequence
  Synthetic: DMPK 3 forward 19:45770080-45770105; SaCas9
aggtgggggtgcgtggagg

SEQ ID NO: 1164 - DNA, 18 bp, Artificial Sequence
  Synthetic: DMPK 3 forward 19:45770081-45770105; SaCas9
ggtgggggtgcgtggagg

SEQ ID NO: 1165 - DNA, 25 bp, Artificial Sequence
  Synthetic: DMPK 3 forward 19:45770075-45770106; SaCas9
acgataggtgggggtgcgtggagga

SEQ ID NO: 1166 - DNA, 24 bp, Artificial Sequence
  Synthetic: DMPK 3 forward 19:45770076-45770106; SaCas9
cgataggtgggggtgcgtggagga

SEQ ID NO: 1167 - DNA, 23 bp, Artificial Sequence
  Synthetic: DMPK 3 forward 19:45770077-45770106; SaCas9
gataggtgggggtgcgtggagga

SEQ ID NO: 1168 - DNA, 22 bp, Artificial Sequence
  Synthetic: DMPK 3 forward 19:45770078-45770106; SaCas9
ataggtgggggtgcgtggagga

SEQ ID NO: 1169 - DNA, 21 bp, Artificial Sequence
  Synthetic: DMPK 3 forward 19:45770079-45770106; SaCas9
taggtgggggtgcgtggagga

SEQ ID NO: 1170 - DNA, 20 bp, Artificial Sequence
  Synthetic: DMPK 3 forward 19:45770080-45770106; SaCas9
aggtgggggtgcgtggagga

SEQ ID NO: 1171 - DNA, 19 bp, Artificial Sequence
  Synthetic: DMPK 3 forward 19:45770081-45770106; SaCas9
ggtgggggtgcgtggagga

SEQ ID NO: 1172 - DNA, 18 bp, Artificial Sequence
  Synthetic: DMPK 3 forward 19:45770082-45770106; SaCas9
gtgggggtgcgtggagga

SEQ ID NO: 1173 - DNA, 25 bp, Artificial Sequence
  Synthetic: DMPK 3 forward 19:45770081-45770112; SaCas9
ggtgggggtgcgtggaggatggaac

SEQ ID NO: 1174 - DNA, 24 bp, Artificial Sequence
  Synthetic: DMPK 3 forward 19:45770082-45770112; SaCas9
gtgggggtgcgtggaggatggaac

SEQ ID NO: 1175 - DNA, 23 bp, Artificial Sequence
  Synthetic: DMPK 3 forward 19:45770083-45770112; SaCas9
tgggggtgcgtggaggatggaac

SEQ ID NO: 1176 - DNA, 22 bp, Artificial Sequence
  Synthetic: DMPK 3 forward 19:45770084-45770112; SaCas9
gggggtgcgtggaggatggaac

SEQ ID NO: 1177 - DNA, 21 bp, Artificial Sequence
  Synthetic: DMPK 3 forward 19:45770085-45770112; SaCas9
ggggtgcgtggaggatggaac

SEQ ID NO: 1178 - DNA, 20 bp, Artificial Sequence
  Synthetic: DMPK 3 forward 19:45770086-45770112; SaCas9
gggtgcgtggaggatggaac

SEQ ID NO: 1179 - DNA, 19 bp, Artificial Sequence
  Synthetic: DMPK 3 forward 19:45770087-45770112; SaCas9
ggtgcgtggaggatggaac

SEQ ID NO: 1180 - DNA, 18 bp, Artificial Sequence
  Synthetic: DMPK 3 forward 19:45770088-45770112; SaCas9
gtgcgtggaggatggaac

SEQ ID NO: 1181 - DNA, 25 bp, Artificial Sequence
  Synthetic: DMPK 3 reverse 19:45770113-45770144; SaCas9
actgcaggcctgggaaggcagcaag

SEQ ID NO: 1182 - DNA, 24 bp, Artificial Sequence
  Synthetic: DMPK 3 reverse 19:45770114-45770144; SaCas9
ctgcaggcctgggaaggcagcaag

SEQ ID NO: 1183 - DNA, 23 bp, Artificial Sequence
  Synthetic: DMPK 3 reverse 19:45770115-45770144; SaCas9
tgcaggcctgggaaggcagcaag

SEQ ID NO: 1184 - DNA, 22 bp, Artificial Sequence
  Synthetic: DMPK 3 reverse 19:45770116-45770144; SaCas9
gcaggcctgggaaggcagcaag

SEQ ID NO: 1185 - DNA, 21 bp, Artificial Sequence
  Synthetic: DMPK 3 reverse 19:45770117-45770144; SaCas9
caggcctgggaaggcagcaag

SEQ ID NO: 1186 - DNA, 20 bp, Artificial Sequence
  Synthetic: DMPK 3 reverse 19:45770118-45770144; SaCas9
aggcctgggaaggcagcaag

SEQ ID NO: 1187 - DNA, 19 bp, Artificial Sequence
  Synthetic: DMPK 3 reverse 19:45770119-45770144; SaCas9
ggcctgggaaggcagcaag

SEQ ID NO: 1188 - DNA, 18 bp, Artificial Sequence
  Synthetic: DMPK 3 reverse 19:45770120-45770144; SaCas9
gcctgggaaggcagcaag

SEQ ID NO: 1189 - DNA, 25 bp, Artificial Sequence
  Synthetic: DMPK 3 reverse 19:45770127-45770158; SaCas9
acgtggatgggcaaactgcaggcct

SEQ ID NO: 1190 - DNA, 24 bp, Artificial Sequence
  Synthetic: DMPK 3 reverse 19:45770128-45770158; SaCas9
cgtggatgggcaaactgcaggcct

SEQ ID NO: 1191 - DNA, 23 bp, Artificial Sequence
  Synthetic: DMPK 3 reverse 19:45770129-45770158; SaCas9
gtggatgggcaaactgcaggcct

SEQ ID NO: 1192 - DNA, 22 bp, Artificial Sequence
  Synthetic: DMPK 3 reverse 19:45770130-45770158; SaCas9
tggatgggcaaactgcaggcct

SEQ ID NO: 1193 - DNA, 21 bp, Artificial Sequence
  Synthetic: DMPK 3 reverse 19:45770131-45770158; SaCas9
ggatgggcaaactgcaggcct

SEQ ID NO: 1194 - DNA, 20 bp, Artificial Sequence
  Synthetic: DMPK 3 reverse 19:45770132-45770158; SaCas9
gatgggcaaactgcaggcct

SEQ ID NO: 1195 - DNA, 19 bp, Artificial Sequence
  Synthetic: DMPK 3 reverse 19:45770133-45770158; SaCas9
atgggcaaactgcaggcct

SEQ ID NO: 1196 - DNA, 18 bp, Artificial Sequence
  Synthetic: DMPK 3 reverse 19:45770134-45770158; SaCas9
tgggcaaactgcaggcct

SEQ ID NO: 1197 - DNA, 25 bp, Artificial Sequence
  Synthetic: DMPK 3 reverse 19:45770128-45770159; SaCas9
gacgtggatgggcaaactgcaggcc

SEQ ID NO: 1198 - DNA, 24 bp, Artificial Sequence
  Synthetic: DMPK 3 reverse 19:45770129-45770159; SaCas9
acgtggatgggcaaactgcaggcc

SEQ ID NO: 1199 - DNA, 23 bp, Artificial Sequence
  Synthetic: DMPK 3 reverse 19:45770130-45770159; SaCas9
cgtggatgggcaaactgcaggcc

SEQ ID NO: 1200 - DNA, 22 bp, Artificial Sequence
  Synthetic: DMPK 3 reverse 19:45770131-45770159; SaCas9
gtggatgggcaaactgcaggcc

SEQ ID NO: 1201 - DNA, 21 bp, Artificial Sequence
  Synthetic: DMPK 3 reverse 19:45770132-45770159; SaCas9
tggatgggcaaactgcaggcc

SEQ ID NO: 1202 - DNA, 20 bp, Artificial Sequence
  Synthetic: DMPK 3 reverse 19:45770133-45770159; SaCas9
ggatgggcaaactgcaggcc

SEQ ID NO: 1203 - DNA, 19 bp, Artificial Sequence
  Synthetic: DMPK 3 reverse 19:45770134-45770159; SaCas9
gatgggcaaactgcaggcc

SEQ ID NO: 1204 - DNA, 18 bp, Artificial Sequence
  Synthetic: DMPK 3 reverse 19:45770135-45770159; SaCas9
atgggcaaactgcaggcc

SEQ ID NO: 1205 - DNA, 25 bp, Artificial Sequence
  Synthetic: DMPK 3 reverse 19:45770129-45770160; SaCas9
tgacgtggatgggcaaactgcaggc

SEQ ID NO: 1206 - DNA, 24 bp, Artificial Sequence
  Synthetic: DMPK 3 reverse 19:45770130-45770160; SaCas9
gacgtggatgggcaaactgcaggc

SEQ ID NO: 1207 - DNA, 23 bp, Artificial Sequence
  Synthetic: DMPK 3 reverse 19:45770131-45770160; SaCas9
acgtggatgggcaaactgcaggc

SEQ ID NO: 1208 - DNA, 22 bp, Artificial Sequence
  Synthetic: DMPK 3 reverse 19:45770132-45770160; SaCas9
cgtggatgggcaaactgcaggc

SEQ ID NO: 1209 - DNA, 21 bp, Artificial Sequence
  Synthetic: DMPK 3 reverse 19:45770133-45770160; SaCas9
gtggatgggcaaactgcaggc

SEQ ID NO: 1210 - DNA, 20 bp, Artificial Sequence
  Synthetic: DMPK 3 reverse 19:45770134-45770160; SaCas9
tggatgggcaaactgcaggc

SEQ ID NO: 1211 - DNA, 19 bp, Artificial Sequence
  Synthetic: DMPK 3 reverse 19:45770135-45770160; SaCas9
ggatgggcaaactgcaggc

SEQ ID NO: 1212 - DNA, 18 bp, Artificial Sequence
  Synthetic: DMPK 3 reverse 19:45770136-45770160; SaCas9
gatgggcaaactgcaggc

SEQ ID NO: 1213 - DNA, 25 bp, Artificial Sequence
  Synthetic: DMPK 3 forward 19:45770133-45770164; SaCas9
aggcctgcagtttgcccatccacgt

SEQ ID NO: 1214 - DNA, 24 bp, Artificial Sequence
  Synthetic: DMPK 3 forward 19:45770134-45770164; SaCas9
ggcctgcagtttgcccatccacgt

SEQ ID NO: 1215 - DNA, 23 bp, Artificial Sequence
  Synthetic: DMPK 3 forward 19:45770135-45770164; SaCas9
gcctgcagtttgcccatccacgt

SEQ ID NO: 1216 - DNA, 22 bp, Artificial Sequence
  Synthetic: DMPK 3 forward 19:45770136-45770164; SaCas9
cctgcagtttgcccatccacgt

SEQ ID NO: 1217 - DNA, 21 bp, Artificial Sequence
  Synthetic: DMPK 3 forward 19:45770137-45770164; SaCas9
ctgcagtttgcccatccacgt

SEQ ID NO: 1218 - DNA, 20 bp, Artificial Sequence
  Synthetic: DMPK 3 forward 19:45770138-45770164; SaCas9
tgcagtttgcccatccacgt

SEQ ID NO: 1219 - DNA, 19 bp, Artificial Sequence
  Synthetic: DMPK 3 forward 19:45770139-45770164; SaCas9
gcagtttgcccatccacgt

SEQ ID NO: 1220 - DNA, 18 bp, Artificial Sequence
  Synthetic: DMPK 3 forward 19:45770140-45770164; SaCas9
cagtttgcccatccacgt

SEQ ID NO: 1221 - DNA, 25 bp, Artificial Sequence
  Synthetic: DMPK 3 reverse 19:45770146-45770177; SaCas9
cggccaggctgaggccctgacgtgg

SEQ ID NO: 1222 - DNA, 24 bp, Artificial Sequence
  Synthetic: DMPK 3 reverse 19:45770147-45770177; SaCas9
ggccaggctgaggccctgacgtgg

SEQ ID NO: 1223 - DNA, 23 bp, Artificial Sequence
  Synthetic: DMPK 3 reverse 19:45770148-45770177; SaCas9
gccaggctgaggccctgacgtgg

SEQ ID NO: 1224 - DNA, 22 bp, Artificial Sequence
  Synthetic: DMPK 3 reverse 19:45770149-45770177; SaCas9
ccaggctgaggccctgacgtgg

SEQ ID NO: 1225 - DNA, 21 bp, Artificial Sequence
  Synthetic: DMPK 3 reverse 19:45770150-45770177; SaCas9
caggctgaggccctgacgtgg

SEQ ID NO: 1226 - DNA, 20 bp, Artificial Sequence
  Synthetic: DMPK 3 reverse 19:45770151-45770177; SaCas9
aggctgaggccctgacgtgg

SEQ ID NO: 1227 - DNA, 19 bp, Artificial Sequence
  Synthetic: DMPK 3 reverse 19:45770152-45770177; SaCas9
ggctgaggccctgacgtgg

SEQ ID NO: 1228 - DNA, 18 bp, Artificial Sequence
  Synthetic: DMPK 3 reverse 19:45770153-45770177; SaCas9
gctgaggccctgacgtgg

SEQ ID NO: 1229 - DNA, 25 bp, Artificial Sequence
  Synthetic: DMPK 3 forward 19:45770149-45770180; SaCas9
catccacgtcagggcctcagcctgg

SEQ ID NO: 1230 - DNA, 24 bp, Artificial Sequence
  Synthetic: DMPK 3 forward 19:45770150-45770180; SaCas9
atccacgtcagggcctcagcctgg

SEQ ID NO: 1231 - DNA, 23 bp, Artificial Sequence
  Synthetic: DMPK 3 forward 19:45770151-45770180; SaCas9
tccacgtcagggcctcagcctgg

SEQ ID NO: 1232 - DNA, 22 bp, Artificial Sequence
  Synthetic: DMPK 3 forward 19:45770152-45770180; SaCas9
ccacgtcagggcctcagcctgg

SEQ ID NO: 1233 - DNA, 21 bp, Artificial Sequence
  Synthetic: DMPK 3 forward 19:45770153-45770180; SaCas9
cacgtcagggcctcagcctgg

SEQ ID NO: 1234 - DNA, 20 bp, Artificial Sequence
  Synthetic: DMPK 3 forward 19:45770154-45770180; SaCas9
acgtcagggcctcagcctgg

SEQ ID NO: 1235 - DNA, 19 bp, Artificial Sequence
  Synthetic: DMPK 3 forward 19:45770155-45770180; SaCas9
cgtcagggcctcagcctgg

SEQ ID NO: 1236 - DNA, 18 bp, Artificial Sequence
  Synthetic: DMPK 3 forward 19:45770156-45770180; SaCas9
gtcagggcctcagcctgg

SEQ ID NO: 1237 - DNA, 25 bp, Artificial Sequence
  Synthetic: DMPK 3 reverse 19:45770150-45770181; SaCas9
ctttcggccaggctgaggccctgac

SEQ ID NO: 1238 - DNA, 24 bp, Artificial Sequence
  Synthetic: DMPK 3 reverse 19:45770151-45770181; SaCas9
tttcggccaggctgaggccctgac

SEQ ID NO: 1239 - DNA, 23 bp, Artificial Sequence
  Synthetic: DMPK 3 reverse 19:45770152-45770181; SaCas9
ttcggccaggctgaggccctgac

SEQ ID NO: 1240 - DNA, 22 bp, Artificial Sequence
  Synthetic: DMPK 3 reverse 19:45770153-45770181; SaCas9
tcggccaggctgaggccctgac

SEQ ID NO: 1241 - DNA, 21 bp, Artificial Sequence
  Synthetic: DMPK 3 reverse 19:45770154-45770181; SaCas9
cggccaggctgaggccctgac

SEQ ID NO: 1242 - DNA, 20 bp, Artificial Sequence
  Synthetic: DMPK 3 reverse 19:45770155-45770181; SaCas9
ggccaggctgaggccctgac

SEQ ID NO: 1243 - DNA, 19 bp, Artificial Sequence
  Synthetic: DMPK 3 reverse 19:45770156-45770181; SaCas9
gccaggctgaggccctgac

SEQ ID NO: 1244 - DNA, 18 bp, Artificial Sequence
  Synthetic: DMPK 3 reverse 19:45770157-45770181; SaCas9
ccaggctgaggccctgac

SEQ ID NO: 1245 - DNA, 25 bp, Artificial Sequence
  Synthetic: DMPK 3 forward 19:45770153-45770184; SaCas9
cacgtcagggcctcagcctggccga

SEQ ID NO: 1246 - DNA, 24 bp, Artificial Sequence
  Synthetic: DMPK 3 forward 19:45770154-45770184; SaCas9
acgtcagggcctcagcctggccga

SEQ ID NO: 1247 - DNA, 23 bp, Artificial Sequence
  Synthetic: DMPK 3 forward 19:45770155-45770184; SaCas9
cgtcagggcctcagcctggccga

SEQ ID NO: 1248 - DNA, 22 bp, Artificial Sequence
  Synthetic: DMPK 3 forward 19:45770156-45770184; SaCas9
gtcagggcctcagcctggccga

SEQ ID NO: 1249 - DNA, 21 bp, Artificial Sequence
  Synthetic: DMPK 3 forward 19:45770157-45770184; SaCas9
tcagggcctcagcctggccga

SEQ ID NO: 1250 - DNA, 20 bp, Artificial Sequence
  Synthetic: DMPK 3 forward 19:45770158-45770184; SaCas9
cagggcctcagcctggccga

SEQ ID NO: 1251 - DNA, 19 bp, Artificial Sequence
  Synthetic: DMPK 3 forward 19:45770159-45770184; SaCas9
agggcctcagcctggccga

SEQ ID NO: 1252 - DNA, 18 bp, Artificial Sequence
  Synthetic: DMPK 3 forward 19:45770160-45770184; SaCas9
gggcctcagcctggccga

SEQ ID NO: 1253 - DNA, 25 bp, Artificial Sequence
  Synthetic: DMPK 3 forward 19:45770157-45770188; SaCas9
tcagggcctcagcctggccgaaaga

SEQ ID NO: 1254 - DNA, 24 bp, Artificial Sequence
  Synthetic: DMPK 3 forward 19:45770158-45770188; SaCas9
cagggcctcagcctggccgaaaga

SEQ ID NO: 1255 - DNA, 23 bp, Artificial Sequence
  Synthetic: DMPK 3 forward 19:45770159-45770188; SaCas9
agggcctcagcctggccgaaaga

SEQ ID NO: 1256 - DNA, 22 bp, Artificial Sequence
  Synthetic: DMPK 3 forward 19:45770160-45770188; SaCas9
gggcctcagcctggccgaaaga

SEQ ID NO: 1257 - DNA, 21 bp, Artificial Sequence
  Synthetic: DMPK 3 forward 19:45770161-45770188; SaCas9
ggcctcagcctggccgaaaga

SEQ ID NO: 1258 - DNA, 20 bp, Artificial Sequence
  Synthetic: DMPK 3 forward 19:45770162-45770188; SaCas9
gcctcagcctggccgaaaga

SEQ ID NO: 1259 - DNA, 19 bp, Artificial Sequence
  Synthetic: DMPK 3 forward 19:45770163-45770188; SaCas9
cctcagcctggccgaaaga

SEQ ID NO: 1260 - DNA, 18 bp, Artificial Sequence
  Synthetic: DMPK 3 forward 19:45770164-45770188; SaCas9
ctcagcctggccgaaaga

SEQ ID NO: 1261 - DNA, 25 bp, Artificial Sequence
  Synthetic: DMPK 3 reverse 19:45770163-45770194; SaCas9
agaccatttctttctttcggccagg

SEQ ID NO: 1262 - DNA, 24 bp, Artificial Sequence
  Synthetic: DMPK 3 reverse 19:45770164-45770194; SaCas9
gaccatttctttctttcggccagg

SEQ ID NO: 1263 - DNA, 23 bp, Artificial Sequence
  Synthetic: DMPK 3 reverse 19:45770165-45770194; SaCas9
accatttctttctttcggccagg

SEQ ID NO: 1264 - DNA, 22 bp, Artificial Sequence
  Synthetic: DMPK 3 reverse 19:45770166-45770194; SaCas9
ccatttctttctttcggccagg

SEQ ID NO: 1265 - DNA, 21 bp, Artificial Sequence
  Synthetic: DMPK 3 reverse 19:45770167-45770194; SaCas9
catttctttctttcggccagg

SEQ ID NO: 1266 - DNA, 20 bp, Artificial Sequence
  Synthetic: DMPK 3 reverse 19:45770168-45770194; SaCas9
atttctttctttcggccagg

SEQ ID NO: 1267 - DNA, 19 bp, Artificial Sequence
  Synthetic: DMPK 3 reverse 19:45770169-45770194; SaCas9
tttctttctttcggccagg

SEQ ID NO: 1268 - DNA, 18 bp, Artificial Sequence
  Synthetic: DMPK 3 reverse 19:45770170-45770194; SaCas9
ttctttctttcggccagg

SEQ ID NO: 1269 - DNA, 25 bp, Artificial Sequence
  Synthetic: DMPK 3 reverse 19:45770197-45770228; SaCas9
ctgctgctgctgctgctgctgctgg

SEQ ID NO: 1270 - DNA, 24 bp, Artificial Sequence
  Synthetic: DMPK 3 reverse 19:45770198-45770228; SaCas9
tgctgctgctgctgctgctgctgg

SEQ ID NO: 1271 - DNA, 23 bp, Artificial Sequence
  Synthetic: DMPK 3 reverse 19:45770199-45770228; SaCas9
gctgctgctgctgctgctgctgg

SEQ ID NO: 1272 - DNA, 22 bp, Artificial Sequence
  Synthetic: DMPK 3 reverse 19:45770200-45770228; SaCas9
ctgctgctgctgctgctgctgg

SEQ ID NO: 1273 - DNA, 21 bp, Artificial Sequence
  Synthetic: DMPK 3 reverse 19:45770201-45770228; SaCas9
tgctgctgctgctgctgctgg

SEQ ID NO: 1274 - DNA, 20 bp, Artificial Sequence
  Synthetic: DMPK 3 reverse 19:45770202-45770228; SaCas9
gctgctgctgctgctgctgg

SEQ ID NO: 1275 - DNA, 19 bp, Artificial Sequence
  Synthetic: DMPK 3 reverse 19:45770203-45770228; SaCas9
ctgctgctgctgctgctgg

SEQ ID NO: 1276 - DNA, 18 bp, Artificial Sequence
  Synthetic: DMPK 3 reverse 19:45770204-45770228; SaCas9
tgctgctgctgctgctgg

SEQ ID NO: 1277 - DNA, 25 bp, Artificial Sequence
  Synthetic: DMPK 3 reverse 19:45770198-45770229; SaCas9
gctgctgctgctgctgctgctgctg

SEQ ID NO: 1278 - DNA, 24 bp, Artificial Sequence
  Synthetic: DMPK 3 reverse 19:45770199-45770229; SaCas9
ctgctgctgctgctgctgctgctg

SEQ ID NO: 1279 - DNA, 23 bp, Artificial Sequence
  Synthetic: DMPK 3 reverse 19:45770200-45770229; SaCas9
tgctgctgctgctgctgctgctg

SEQ ID NO: 1280 - DNA, 22 bp, Artificial Sequence
  Synthetic: DMPK 3 reverse 19:45770201-45770229; SaCas9
gctgctgctgctgctgctgctg

SEQ ID NO: 1281 - DNA, 21 bp, Artificial Sequence
  Synthetic: DMPK 3 reverse 19:45770202-45770229; SaCas9
ctgctgctgctgctgctgctg

SEQ ID NO: 1282 - DNA, 20 bp, Artificial Sequence
  Synthetic: DMPK 3 reverse 19:45770203-45770229; SaCas9
tgctgctgctgctgctgctg

SEQ ID NO: 1283 - DNA, 19 bp, Artificial Sequence
  Synthetic: DMPK 3 reverse 19:45770204-45770229; SaCas9
gctgctgctgctgctgctg

SEQ ID NO: 1284 - DNA, 18 bp, Artificial Sequence
  Synthetic: DMPK 3 reverse 19:45770205-45770229; SaCas9
ctgctgctgctgctgctg

SEQ ID NO: 1285 - DNA, 25 bp, Artificial Sequence
  Synthetic: DMPK 3 reverse 19:45770199-45770230; SaCas9
tgctgctgctgctgctgctgctgct

SEQ ID NO: 1286 - DNA, 24 bp, Artificial Sequence
  Synthetic: DMPK 3 reverse 19:45770200-45770230; SaCas9
gctgctgctgctgctgctgctgct

SEQ ID NO: 1287 - DNA, 23 bp, Artificial Sequence
  Synthetic: DMPK 3 reverse 19:45770201-45770230; SaCas9
ctgctgctgctgctgctgctgct

SEQ ID NO: 1288 - DNA, 22 bp, Artificial Sequence
  Synthetic: DMPK 3 reverse 19:45770202-45770230; SaCas9
tgctgctgctgctgctgctgct

SEQ ID NO: 1289 - DNA, 21 bp, Artificial Sequence
  Synthetic: DMPK 3 reverse 19:45770203-45770230; SaCas9
gctgctgctgctgctgctgct

SEQ ID NO: 1290 - DNA, 20 bp, Artificial Sequence
  Synthetic: DMPK 3 reverse 19:45770204-45770230; SaCas9
ctgctgctgctgctgctgct

SEQ ID NO: 1291 - DNA, 19 bp, Artificial Sequence
  Synthetic: DMPK 3 reverse 19:45770205-45770230; SaCas9
tgctgctgctgctgctgct

SEQ ID NO: 1292 - DNA, 18 bp, Artificial Sequence
  Synthetic: DMPK 3 reverse 19:45770206-45770230; SaCas9
gctgctgctgctgctgct

SEQ ID NO: 1293 - DNA, 25 bp, Artificial Sequence
  Synthetic: DMPK 3 reverse 19:45770200-45770231; SaCas9
ctgctgctgctgctgctgctgctgc

SEQ ID NO: 1294 - DNA, 24 bp, Artificial Sequence
  Synthetic: DMPK 3 reverse 19:45770201-45770231; SaCas9
tgctgctgctgctgctgctgctgc

SEQ ID NO: 1295 - DNA, 23 bp, Artificial Sequence
  Synthetic: DMPK 3 reverse 19:45770202-45770231; SaCas9
gctgctgctgctgctgctgctgc

SEQ ID NO: 1296 - DNA, 22 bp, Artificial Sequence
  Synthetic: DMPK 3 reverse 19:45770203-45770231; SaCas9
ctgctgctgctgctgctgctgc

SEQ ID NO: 1297 - DNA, 21 bp, Artificial Sequence
  Synthetic: DMPK 3 reverse 19:45770204-45770231; SaCas9
tgctgctgctgctgctgctgc

SEQ ID NO: 1298 - DNA, 20 bp, Artificial Sequence
  Synthetic: DMPK 3 reverse 19:45770205-45770231; SaCas9
gctgctgctgctgctgctgc

SEQ ID NO: 1299 - DNA, 19 bp, Artificial Sequence
  Synthetic: DMPK 3 reverse 19:45770206-45770231; SaCas9
ctgctgctgctgctgctgc

SEQ ID NO: 1300 - DNA, 18 bp, Artificial Sequence
  Synthetic: DMPK 3 reverse 19:45770207-45770231; SaCas9
tgctgctgctgctgctgc

SEQ ID NO: 1301 - DNA, 25 bp, Artificial Sequence
  Synthetic: DMPK 3 reverse 19:45770201-45770232; SaCas9
gctgctgctgctgctgctgctgctg

SEQ ID NO: 1302 - DNA, 24 bp, Artificial Sequence
  Synthetic: DMPK 3 reverse 19:45770202-45770232; SaCas9
ctgctgctgctgctgctgctgctg

SEQ ID NO: 1303 - DNA, 23 bp, Artificial Sequence
  Synthetic: DMPK 3 reverse 19:45770203-45770232; SaCas9
tgctgctgctgctgctgctgctg

SEQ ID NO: 1304 - DNA, 22 bp, Artificial Sequence
  Synthetic: DMPK 3 reverse 19:45770204-45770232; SaCas9
gctgctgctgctgctgctgctg

SEQ ID NO: 1305 - DNA, 21 bp, Artificial Sequence
  Synthetic: DMPK 3 reverse 19:45770205-45770232; SaCas9
ctgctgctgctgctgctgctg

SEQ ID NO: 1306 - DNA, 20 bp, Artificial Sequence
  Synthetic: DMPK 3 reverse 19:45770206-45770232; SaCas9
tgctgctgctgctgctgctg

SEQ ID NO: 1307 - DNA, 19 bp, Artificial Sequence
  Synthetic: DMPK 3 reverse 19:45770207-45770232; SaCas9
gctgctgctgctgctgctg

SEQ ID NO: 1308 - DNA, 18 bp, Artificial Sequence
  Synthetic: DMPK 3 reverse 19:45770208-45770232; SaCas9
ctgctgctgctgctgctg

SEQ ID NO: 1309 - DNA, 25 bp, Artificial Sequence
  Synthetic: DMPK 3 forward 19:45769697-45769725; SpCas9
acactgtggagtccagagctttggg

SEQ ID NO: 1310 - DNA, 24 bp, Artificial Sequence
  Synthetic: DMPK 3 forward 19:45769698-45769725; SpCas9
cactgtggagtccagagctttggg

SEQ ID NO: 1311 - DNA, 23 bp, Artificial Sequence
  Synthetic: DMPK 3 forward 19:45769699-45769725; SpCas9
actgtggagtccagagctttggg

SEQ ID NO: 1312 - DNA, 22 bp, Artificial Sequence
  Synthetic: DMPK 3 forward 19:45769700-45769725; SpCas9
ctgtggagtccagagctttggg

SEQ ID NO: 1313 - DNA, 21 bp, Artificial Sequence
  Synthetic: DMPK 3 forward 19:45769701-45769725; SpCas9
tgtggagtccagagctttggg

SEQ ID NO: 1314 - DNA, 20 bp, Artificial Sequence
  Synthetic: DMPK 3 forward 19:45769702-45769725; SpCas9
gtggagtccagagctttggg

SEQ ID NO: 1315 - DNA, 19 bp, Artificial Sequence
  Synthetic: DMPK 3 forward 19:45769703-45769725; SpCas9
tggagtccagagctttggg

SEQ ID NO: 1316 - DNA, 18 bp, Artificial Sequence
  Synthetic: DMPK 3 forward 19:45769704-45769725; SpCas9
ggagtccagagctttggg

SEQ ID NO: 1317 - DNA, 25 bp, Artificial Sequence
  Synthetic: DMPK 3 forward 19:45769701-45769729; SpCas9
tgtggagtccagagctttgggcaga

SEQ ID NO: 1318 - DNA, 24 bp, Artificial Sequence
  Synthetic: DMPK 3 forward 19:45769702-45769729; SpCas9
gtggagtccagagctttgggcaga

SEQ ID NO: 1319 - DNA, 23 bp, Artificial Sequence
  Synthetic: DMPK 3 forward 19:45769703-45769729; SpCas9
tggagtccagagctttgggcaga

SEQ ID NO: 1320 - DNA, 22 bp, Artificial Sequence
  Synthetic: DMPK 3 forward 19:45769704-45769729; SpCas9
ggagtccagagctttgggcaga

SEQ ID NO: 1321 - DNA, 21 bp, Artificial Sequence
  Synthetic: DMPK 3 forward 19:45769705-45769729; SpCas9
gagtccagagctttgggcaga

SEQ ID NO: 1322 - DNA, 20 bp, Artificial Sequence
  Synthetic: DMPK 3 forward 19:45769706-45769729; SpCas9
agtccagagctttgggcaga

SEQ ID NO: 1323 - DNA, 19 bp, Artificial Sequence
  Synthetic: DMPK 3 forward 19:45769707-45769729; SpCas9
gtccagagctttgggcaga

SEQ ID NO: 1324 - DNA, 18 bp, Artificial Sequence
  Synthetic: DMPK 3 forward 19:45769708-45769729; SpCas9
tccagagctttgggcaga

SEQ ID NO: 1325 - DNA, 25 bp, Artificial Sequence
  Synthetic: DMPK 3 forward 19:45769703-45769731; SpCas9
tggagtccagagctttgggcagatg

SEQ ID NO: 1326 - DNA, 24 bp, Artificial Sequence
  Synthetic: DMPK 3 forward 19:45769704-45769731; SpCas9
ggagtccagagctttgggcagatg

SEQ ID NO: 1327 - DNA, 23 bp, Artificial Sequence
  Synthetic: DMPK 3 forward 19:45769705-45769731; SpCas9
gagtccagagctttgggcagatg

SEQ ID NO: 1328 - DNA, 22 bp, Artificial Sequence
  Synthetic: DMPK 3 forward 19:45769706-45769731; SpCas9
agtccagagctttgggcagatg

SEQ ID NO: 1329 - DNA, 21 bp, Artificial Sequence
  Synthetic: DMPK 3 forward 19:45769707-45769731; SpCas9
gtccagagctttgggcagatg

SEQ ID NO: 1330 - DNA, 20 bp, Artificial Sequence
  Synthetic: DMPK 3 forward 19:45769708-45769731; SpCas9
tccagagctttgggcagatg

SEQ ID NO: 1331 - DNA, 19 bp, Artificial Sequence
  Synthetic: DMPK 3 forward 19:45769709-45769731; SpCas9
ccagagctttgggcagatg

SEQ ID NO: 1332 - DNA, 18 bp, Artificial Sequence
  Synthetic: DMPK 3 forward 19:45769710-45769731; SpCas9
cagagctttgggcagatg

SEQ ID NO: 1333 - DNA, 25 bp, Artificial Sequence
  Synthetic: DMPK 3 forward 19:45769704-45769732; SpCas9
ggagtccagagctttgggcagatgg

SEQ ID NO: 1334 - DNA, 24 bp, Artificial Sequence
  Synthetic: DMPK 3 forward 19:45769705-45769732; SpCas9
gagtccagagctttgggcagatgg

SEQ ID NO: 1335 - DNA, 23 bp, Artificial Sequence
  Synthetic: DMPK 3 forward 19:45769706-45769732; SpCas9
agtccagagctttgggcagatgg

SEQ ID NO: 1336 - DNA, 22 bp, Artificial Sequence
  Synthetic: DMPK 3 forward 19:45769707-45769732; SpCas9
gtccagagctttgggcagatgg

SEQ ID NO: 1337 - DNA, 21 bp, Artificial Sequence
  Synthetic: DMPK 3 forward 19:45769708-45769732; SpCas9
tccagagctttgggcagatgg

SEQ ID NO: 1338 - DNA, 20 bp, Artificial Sequence
  Synthetic: DMPK 3 forward 19:45769709-45769732; SpCas9
ccagagctttgggcagatgg

SEQ ID NO: 1339 - DNA, 19 bp, Artificial Sequence
  Synthetic: DMPK 3 forward 19:45769710-45769732; SpCas9
cagagctttgggcagatgg

SEQ ID NO: 1340 - DNA, 18 bp, Artificial Sequence
  Synthetic: DMPK 3 forward 19:45769711-45769732; SpCas9
agagctttgggcagatgg

SEQ ID NO: 1341 - DNA, 25 bp, Artificial Sequence
  Synthetic: DMPK 3 forward 19:45769705-45769733; SpCas9
gagtccagagctttgggcagatgga

SEQ ID NO: 1342 - DNA, 24 bp, Artificial Sequence
  Synthetic: DMPK 3 forward 19:45769706-45769733; SpCas9
agtccagagctttgggcagatgga

SEQ ID NO: 1343 - DNA, 23 bp, Artificial Sequence
  Synthetic: DMPK 3 forward 19:45769707-45769733; SpCas9
gtccagagctttgggcagatgga

SEQ ID NO: 1344 - DNA, 22 bp, Artificial Sequence
  Synthetic: DMPK 3 forward 19:45769708-45769733; SpCas9
tccagagctttgggcagatgga

SEQ ID NO: 1345 - DNA, 21 bp, Artificial Sequence
  Synthetic: DMPK 3 forward 19:45769709-45769733; SpCas9
ccagagctttgggcagatgga

SEQ ID NO: 1346 - DNA, 20 bp, Artificial Sequence
  Synthetic: DMPK 3 forward 19:45769710-45769733; SpCas9
cagagctttgggcagatgga

SEQ ID NO: 1347 - DNA, 19 bp, Artificial Sequence
  Synthetic: DMPK 3 forward 19:45769711-45769733; SpCas9
agagctttgggcagatgga

SEQ ID NO: 1348 - DNA, 18 bp, Artificial Sequence
  Synthetic: DMPK 3 forward 19:45769712-45769733; SpCas9
gagctttgggcagatgga

SEQ ID NO: 1349 - DNA, 25 bp, Artificial Sequence
  Synthetic: DMPK 3 reverse 19:45769715-45769743; SpCas9
gaataaaaggccctccatctgccca

SEQ ID NO: 1350 - DNA, 24 bp, Artificial Sequence
  Synthetic: DMPK 3 reverse 19:45769716-45769743; SpCas9
aataaaaggccctccatctgccca

SEQ ID NO: 1351 - DNA, 23 bp, Artificial Sequence
  Synthetic: DMPK 3 reverse 19:45769717-45769743; SpCas9
ataaaaggccctccatctgccca

SEQ ID NO: 1352 - DNA, 22 bp, Artificial Sequence
  Synthetic: DMPK 3 reverse 19:45769718-45769743; SpCas9
taaaaggccctccatctgccca

SEQ ID NO: 1353 - DNA, 21 bp, Artificial Sequence
  Synthetic: DMPK 3 reverse 19:45769719-45769743; SpCas9
aaaaggccctccatctgccca

SEQ ID NO: 1354 - DNA, 20 bp, Artificial Sequence
  Synthetic: DMPK 3 reverse 19:45769720-45769743; SpCas9
aaaggccctccatctgccca

SEQ ID NO: 1355 - DNA, 19 bp, Artificial Sequence
  Synthetic: DMPK 3 reverse 19:45769721-45769743; SpCas9
aaggccctccatctgccca

SEQ ID NO: 1356 - DNA, 18 bp, Artificial Sequence
  Synthetic: DMPK 3 reverse 19:45769722-45769743; SpCas9
aggccctccatctgccca

SEQ ID NO: 1357 - DNA, 25 bp, Artificial Sequence
  Synthetic: DMPK 3 forward 19:45769720-45769748; SpCas9
ggcagatggagggccttttattcgc

SEQ ID NO: 1358 - DNA, 24 bp, Artificial Sequence
  Synthetic: DMPK 3 forward 19:45769721-45769748; SpCas9
gcagatggagggccttttattcgc

SEQ ID NO: 1359 - DNA, 23 bp, Artificial Sequence
  Synthetic: DMPK 3 forward 19:45769722-45769748; SpCas9
cagatggagggccttttattcgc

SEQ ID NO: 1360 - DNA, 22 bp, Artificial Sequence
  Synthetic: DMPK 3 forward 19:45769723-45769748; SpCas9
agatggagggccttttattcgc

SEQ ID NO: 1361 - DNA, 21 bp, Artificial Sequence
  Synthetic: DMPK 3 forward 19:45769724-45769748; SpCas9
gatggagggccttttattcgc

SEQ ID NO: 1362 - DNA, 20 bp, Artificial Sequence
  Synthetic: DMPK 3 forward 19:45769725-45769748; SpCas9
atggagggccttttattcgc

SEQ ID NO: 1363 - DNA, 19 bp, Artificial Sequence
  Synthetic: DMPK 3 forward 19:45769726-45769748; SpCas9
tggagggccttttattcgc

SEQ ID NO: 1364 - DNA, 18 bp, Artificial Sequence
  Synthetic: DMPK 3 forward 19:45769727-45769748; SpCas9
ggagggccttttattcgc

SEQ ID NO: 1365 - DNA, 25 bp, Artificial Sequence
  Synthetic: DMPK 3 forward 19:45769721-45769749; SpCas9
gcagatggagggccttttattcgcg

SEQ ID NO: 1366 - DNA, 24 bp, Artificial Sequence
  Synthetic: DMPK 3 forward 19:45769722-45769749; SpCas9
cagatggagggccttttattcgcg

SEQ ID NO: 1367 - DNA, 23 bp, Artificial Sequence
  Synthetic: DMPK 3 forward 19:45769723-45769749; SpCas9
agatggagggccttttattcgcg

SEQ ID NO: 1368 - DNA, 22 bp, Artificial Sequence
  Synthetic: DMPK 3 forward 19:45769724-45769749; SpCas9
gatggagggccttttattcgcg

SEQ ID NO: 1369 - DNA, 21 bp, Artificial Sequence
  Synthetic: DMPK 3 forward 19:45769725-45769749; SpCas9
atggagggccttttattcgcg

SEQ ID NO: 1370 - DNA, 20 bp, Artificial Sequence
  Synthetic: DMPK 3 forward 19:45769726-45769749; SpCas9
tggagggccttttattcgcg

SEQ ID NO: 1371 - DNA, 19 bp, Artificial Sequence
  Synthetic: DMPK 3 forward 19:45769727-45769749; SpCas9
ggagggccttttattcgcg

SEQ ID NO: 1372 - DNA, 18 bp, Artificial Sequence
  Synthetic: DMPK 3 forward 19:45769728-45769749; SpCas9
gagggccttttattcgcg

SEQ ID NO: 1373 - DNA, 25 bp, Artificial Sequence
  Synthetic: DMPK 3 forward 19:45769722-45769750; SpCas9
cagatggagggccttttattcgcga

SEQ ID NO: 1374 - DNA, 24 bp, Artificial Sequence
  Synthetic: DMPK 3 forward 19:45769723-45769750; SpCas9
agatggagggccttttattcgcga

SEQ ID NO: 1375 - DNA, 23 bp, Artificial Sequence
  Synthetic: DMPK 3 forward 19:45769724-45769750; SpCas9
gatggagggccttttattcgcga

SEQ ID NO: 1376 - DNA, 22 bp, Artificial Sequence
  Synthetic: DMPK 3 forward 19:45769725-45769750; SpCas9
atggagggccttttattcgcga

SEQ ID NO: 1377 - DNA, 21 bp, Artificial Sequence
  Synthetic: DMPK 3 forward 19:45769726-45769750; SpCas9
tggagggccttttattcgcga

SEQ ID NO: 1378 - DNA, 20 bp, Artificial Sequence
  Synthetic: DMPK 3 forward 19:45769727-45769750; SpCas9
ggagggccttttattcgcga

SEQ ID NO: 1379 - DNA, 19 bp, Artificial Sequence
  Synthetic: DMPK 3 forward 19:45769728-45769750; SpCas9
gagggccttttattcgcga

SEQ ID NO: 1380 - DNA, 18 bp, Artificial Sequence
  Synthetic: DMPK 3 forward 19:45769729-45769750; SpCas9
agggccttttattcgcga

SEQ ID NO: 1381 - DNA, 25 bp, Artificial Sequence
  Synthetic: DMPK 3 forward 19:45769726-45769754; SpCas9
tggagggccttttattcgcgagggt

SEQ ID NO: 1382 - DNA, 24 bp, Artificial Sequence
  Synthetic: DMPK 3 forward 19:45769727-45769754; SpCas9
ggagggccttttattcgcgagggt

SEQ ID NO: 1383 - DNA, 23 bp, Artificial Sequence
  Synthetic: DMPK 3 forward 19:45769728-45769754; SpCas9
gagggccttttattcgcgagggt

SEQ ID NO: 1384 - DNA, 22 bp, Artificial Sequence
  Synthetic: DMPK 3 forward 19:45769729-45769754; SpCas9
agggccttttattcgcgagggt

SEQ ID NO: 1385 - DNA, 21 bp, Artificial Sequence
  Synthetic: DMPK 3 forward 19:45769730-45769754; SpCas9
gggccttttattcgcgagggt

SEQ ID NO: 1386 - DNA, 20 bp, Artificial Sequence
  Synthetic: DMPK 3 forward 19:45769731-45769754; SpCas9
ggccttttattcgcgagggt

SEQ ID NO: 1387 - DNA, 19 bp, Artificial Sequence
  Synthetic: DMPK 3 forward 19:45769732-45769754; SpCas9
gccttttattcgcgagggt

SEQ ID NO: 1388 - DNA, 18 bp, Artificial Sequence
  Synthetic: DMPK 3 forward 19:45769733-45769754; SpCas9
ccttttattcgcgagggt

SEQ ID NO: 1389 - DNA, 25 bp, Artificial Sequence
  Synthetic: DMPK 3 forward 19:45769727-45769755; SpCas9
ggagggccttttattcgcgagggtc

SEQ ID NO: 1390 - DNA, 24 bp, Artificial Sequence
  Synthetic: DMPK 3 forward 19:45769728-45769755; SpCas9
gagggccttttattcgcgagggtc

SEQ ID NO: 1391 - DNA, 23 bp, Artificial Sequence
  Synthetic: DMPK 3 forward 19:45769729-45769755; SpCas9
agggccttttattcgcgagggtc

SEQ ID NO: 1392 - DNA, 22 bp, Artificial Sequence
  Synthetic: DMPK 3 forward 19:45769730-45769755; SpCas9
gggccttttattcgcgagggtc

SEQ ID NO: 1393 - DNA, 21 bp, Artificial Sequence
  Synthetic: DMPK 3 forward 19:45769731-45769755; SpCas9
ggccttttattcgcgagggtc

SEQ ID NO: 1394 - DNA, 20 bp, Artificial Sequence
  Synthetic: DMPK 3 forward 19:45769732-45769755; SpCas9
gccttttattcgcgagggtc

SEQ ID NO: 1395 - DNA, 19 bp, Artificial Sequence
  Synthetic: DMPK 3 forward 19:45769733-45769755; SpCas9
ccttttattcgcgagggtc

SEQ ID NO: 1396 - DNA, 18 bp, Artificial Sequence
  Synthetic: DMPK 3 forward 19:45769734-45769755; SpCas9
cttttattcgcgagggtc

SEQ ID NO: 1397 - DNA, 25 bp, Artificial Sequence
  Synthetic: DMPK 3 forward 19:45769728-45769756; SpCas9
gagggccttttattcgcgagggtcg

SEQ ID NO: 1398 - DNA, 24 bp, Artificial Sequence
  Synthetic: DMPK 3 forward 19:45769729-45769756; SpCas9
agggccttttattcgcgagggtcg

SEQ ID NO: 1399 - DNA, 23 bp, Artificial Sequence
  Synthetic: DMPK 3 forward 19:45769730-45769756; SpCas9
gggccttttattcgcgagggtcg

SEQ ID NO: 1400 - DNA, 22 bp, Artificial Sequence
  Synthetic: DMPK 3 forward 19:45769731-45769756; SpCas9
ggccttttattcgcgagggtcg

SEQ ID NO: 1401 - DNA, 21 bp, Artificial Sequence
  Synthetic: DMPK 3 forward 19:45769732-45769756; SpCas9
gccttttattcgcgagggtcg

SEQ ID NO: 1402 - DNA, 20 bp, Artificial Sequence
  Synthetic: DMPK 3 forward 19:45769733-45769756; SpCas9
ccttttattcgcgagggtcg

SEQ ID NO: 1403 - DNA, 19 bp, Artificial Sequence
  Synthetic: DMPK 3 forward 19:45769734-45769756; SpCas9
cttttattcgcgagggtcg

SEQ ID NO: 1404 - DNA, 18 bp, Artificial Sequence
  Synthetic: DMPK 3 forward 19:45769735-45769756; SpCas9
ttttattcgcgagggtcg

SEQ ID NO: 1405 - DNA, 25 bp, Artificial Sequence
  Synthetic: DMPK 3 forward 19:45769729-45769757; SpCas9
agggccttttattcgcgagggtcgg

SEQ ID NO: 1406 - DNA, 24 bp, Artificial Sequence
  Synthetic: DMPK 3 forward 19:45769730-45769757; SpCas9
gggccttttattcgcgagggtcgg

SEQ ID NO: 1407 - DNA, 23 bp, Artificial Sequence
  Synthetic: DMPK 3 forward 19:45769731-45769757; SpCas9
ggccttttattcgcgagggtcgg

SEQ ID NO: 1408 - DNA, 22 bp, Artificial Sequence
  Synthetic: DMPK 3 forward 19:45769732-45769757; SpCas9
gccttttattcgcgagggtcgg

SEQ ID NO: 1409 - DNA, 21 bp, Artificial Sequence
  Synthetic: DMPK 3 forward 19:45769733-45769757; SpCas9
ccttttattcgcgagggtcgg

SEQ ID NO: 1410 - DNA, 20 bp, Artificial Sequence
  Synthetic: DMPK 3 forward 19:45769734-45769757; SpCas9
cttttattcgcgagggtcgg

SEQ ID NO: 1411 - DNA, 19 bp, Artificial Sequence
  Synthetic: DMPK 3 forward 19:45769735-45769757; SpCas9
ttttattcgcgagggtcgg

SEQ ID NO: 1412 - DNA, 18 bp, Artificial Sequence
  Synthetic: DMPK 3 forward 19:45769736-45769757; SpCas9
tttattcgcgagggtcgg

SEQ ID NO: 1413 - DNA, 25 bp, Artificial Sequence
  Synthetic: DMPK 3 forward 19:45769732-45769760; SpCas9
gccttttattcgcgagggtcggggg

SEQ ID NO: 1414 - DNA, 24 bp, Artificial Sequence
  Synthetic: DMPK 3 forward 19:45769733-45769760; SpCas9
ccttttattcgcgagggtcggggg

SEQ ID NO: 1415 - DNA, 23 bp, Artificial Sequence
  Synthetic: DMPK 3 forward 19:45769734-45769760; SpCas9
cttttattcgcgagggtcggggg

SEQ ID NO: 1416 - DNA, 22 bp, Artificial Sequence
  Synthetic: DMPK 3 forward 19:45769735-45769760; SpCas9
ttttattcgcgagggtcggggg

SEQ ID NO: 1417 - DNA, 21 bp, Artificial Sequence
  Synthetic: DMPK 3 forward 19:45769736-45769760; SpCas9
tttattcgcgagggtcggggg

SEQ ID NO: 1418 - DNA, 20 bp, Artificial Sequence
  Synthetic: DMPK 3 forward 19:45769737-45769760; SpCas9
ttattcgcgagggtcggggg

SEQ ID NO: 1419 - DNA, 19 bp, Artificial Sequence
  Synthetic: DMPK 3 forward 19:45769738-45769760; SpCas9
tattcgcgagggtcggggg

SEQ ID NO: 1420 - DNA, 18 bp, Artificial Sequence
  Synthetic: DMPK 3 forward 19:45769739-45769760; SpCas9
attcgcgagggtcggggg

SEQ ID NO: 1421 - DNA, 25 bp, Artificial Sequence
  Synthetic: DMPK 3 forward 19:45769733-45769761; SpCas9
ccttttattcgcgagggtcgggggt

SEQ ID NO: 1422 - DNA, 24 bp, Artificial Sequence
  Synthetic: DMPK 3 forward 19:45769734-45769761; SpCas9
cttttattcgcgagggtcgggggt

SEQ ID NO: 1423 - DNA, 23 bp, Artificial Sequence
  Synthetic: DMPK 3 forward 19:45769735-45769761; SpCas9
ttttattcgcgagggtcgggggt

SEQ ID NO: 1424 - DNA, 22 bp, Artificial Sequence
  Synthetic: DMPK 3 forward 19:45769736-45769761; SpCas9
tttattcgcgagggtcgggggt

SEQ ID NO: 1425 - DNA, 21 bp, Artificial Sequence
  Synthetic: DMPK 3 forward 19:45769737-45769761; SpCas9
ttattcgcgagggtcgggggt

SEQ ID NO: 1426 - DNA, 20 bp, Artificial Sequence
  Synthetic: DMPK 3 forward 19:45769738-45769761; SpCas9
tattcgcgagggtcgggggt

SEQ ID NO: 1427 - DNA, 19 bp, Artificial Sequence
  Synthetic: DMPK 3 forward 19:45769739-45769761; SpCas9
attcgcgagggtcgggggt

SEQ ID NO: 1428 - DNA, 18 bp, Artificial Sequence
  Synthetic: DMPK 3 forward 19:45769740-45769761; SpCas9
ttcgcgagggtcgggggt

SEQ ID NO: 1429 - DNA, 25 bp, Artificial Sequence
  Synthetic: DMPK 3 reverse 19:45769733-45769761; SpCas9
cccacccccgaccctcgcgaataaa

SEQ ID NO: 1430 - DNA, 24 bp, Artificial Sequence
  Synthetic: DMPK 3 reverse 19:45769734-45769761; SpCas9
ccacccccgaccctcgcgaataaa

SEQ ID NO: 1431 - DNA, 23 bp, Artificial Sequence
  Synthetic: DMPK 3 reverse 19:45769735-45769761; SpCas9
cacccccgaccctcgcgaataaa

SEQ ID NO: 1432 - DNA, 22 bp, Artificial Sequence
  Synthetic: DMPK 3 reverse 19:45769736-45769761; SpCas9
acccccgaccctcgcgaataaa

SEQ ID NO: 1433 - DNA, 21 bp, Artificial Sequence
  Synthetic: DMPK 3 reverse 19:45769737-45769761; SpCas9
cccccgaccctcgcgaataaa

SEQ ID NO: 1434 - DNA, 20 bp, Artificial Sequence
  Synthetic: DMPK 3 reverse 19:45769738-45769761; SpCas9
ccccgaccctcgcgaataaa

SEQ ID NO: 1435 - DNA, 19 bp, Artificial Sequence
  Synthetic: DMPK 3 reverse 19:45769739-45769761; SpCas9
cccgaccctcgcgaataaa

SEQ ID NO: 1436 - DNA, 18 bp, Artificial Sequence
  Synthetic: DMPK 3 reverse 19:45769740-45769761; SpCas9
ccgaccctcgcgaataaa

SEQ ID NO: 1437 - DNA, 25 bp, Artificial Sequence
  Synthetic: DMPK 3 forward 19:45769734-45769762; SpCas9
cttttattcgcgagggtcgggggtg

SEQ ID NO: 1438 - DNA, 24 bp, Artificial Sequence
  Synthetic: DMPK 3 forward 19:45769735-45769762; SpCas9
ttttattcgcgagggtcgggggtg

SEQ ID NO: 1439 - DNA, 23 bp, Artificial Sequence
  Synthetic: DMPK 3 forward 19:45769736-45769762; SpCas9
tttattcgcgagggtcgggggtg

SEQ ID NO: 1440 - DNA, 22 bp, Artificial Sequence
  Synthetic: DMPK 3 forward 19:45769737-45769762; SpCas9
ttattcgcgagggtcgggggtg

SEQ ID NO: 1441 - DNA, 21 bp, Artificial Sequence
  Synthetic: DMPK 3 forward 19:45769738-45769762; SpCas9
tattcgcgagggtcgggggtg

SEQ ID NO: 1442 - DNA, 20 bp, Artificial Sequence
  Synthetic: DMPK 3 forward 19:45769739-45769762; SpCas9
attcgcgagggtcgggggtg

SEQ ID NO: 1443 - DNA, 19 bp, Artificial Sequence
  Synthetic: DMPK 3 forward 19:45769740-45769762; SpCas9
ttcgcgagggtcgggggtg

SEQ ID NO: 1444 - DNA, 18 bp, Artificial Sequence
  Synthetic: DMPK 3 forward 19:45769741-45769762; SpCas9
tcgcgagggtcgggggtg

SEQ ID NO: 1445 - DNA, 25 bp, Artificial Sequence
  Synthetic: DMPK 3 reverse 19:45769734-45769762; SpCas9
ccccacccccgaccctcgcgaataa

SEQ ID NO: 1446 - DNA, 24 bp, Artificial Sequence
  Synthetic: DMPK 3 reverse 19:45769735-45769762; SpCas9
cccacccccgaccctcgcgaataa

SEQ ID NO: 1447 - DNA, 23 bp, Artificial Sequence
  Synthetic: DMPK 3 reverse 19:45769736-45769762; SpCas9
ccacccccgaccctcgcgaataa

SEQ ID NO: 1448 - DNA, 22 bp, Artificial Sequence
  Synthetic: DMPK 3 reverse 19:45769737-45769762; SpCas9
cacccccgaccctcgcgaataa

SEQ ID NO: 1449 - DNA, 21 bp, Artificial Sequence
  Synthetic: DMPK 3 reverse 19:45769738-45769762; SpCas9
acccccgaccctcgcgaataa

SEQ ID NO: 1450 - DNA, 20 bp, Artificial Sequence
  Synthetic: DMPK 3 reverse 19:45769739-45769762; SpCas9
cccccgaccctcgcgaataa

SEQ ID NO: 1451 - DNA, 19 bp, Artificial Sequence
  Synthetic: DMPK 3 reverse 19:45769740-45769762; SpCas9
ccccgaccctcgcgaataa

SEQ ID NO: 1452 - DNA, 18 bp, Artificial Sequence
  Synthetic: DMPK 3 reverse 19:45769741-45769762; SpCas9
cccgaccctcgcgaataa

SEQ ID NO: 1453 - DNA, 25 bp, Artificial Sequence
  Synthetic: DMPK 3 forward 19:45769735-45769763; SpCas9
ttttattcgcgagggtcgggggtgg

SEQ ID NO: 1454 - DNA, 24 bp, Artificial Sequence
  Synthetic: DMPK 3 forward 19:45769736-45769763; SpCas9
tttattcgcgagggtcgggggtgg

SEQ ID NO: 1455 - DNA, 23 bp, Artificial Sequence
  Synthetic: DMPK 3 forward 19:45769737-45769763; SpCas9
ttattcgcgagggtcgggggtgg

SEQ ID NO: 1456 - DNA, 22 bp, Artificial Sequence
  Synthetic: DMPK 3 forward 19:45769738-45769763; SpCas9
tattcgcgagggtcgggggtgg

SEQ ID NO: 1457 - DNA, 21 bp, Artificial Sequence
  Synthetic: DMPK 3 forward 19:45769739-45769763; SpCas9
attcgcgagggtcgggggtgg

SEQ ID NO: 1458 - DNA, 20 bp, Artificial Sequence
  Synthetic: DMPK 3 forward 19:45769740-45769763; SpCas9
ttcgcgagggtcgggggtgg

SEQ ID NO: 1459 - DNA, 19 bp, Artificial Sequence
  Synthetic: DMPK 3 forward 19:45769741-45769763; SpCas9
tcgcgagggtcgggggtgg

SEQ ID NO: 1460 - DNA, 18 bp, Artificial Sequence
  Synthetic: DMPK 3 forward 19:45769742-45769763; SpCas9
cgcgagggtcgggggtgg

SEQ ID NO: 1461 - DNA, 25 bp, Artificial Sequence
  Synthetic: DMPK 3 forward 19:45769741-45769769; SpCas9
tcgcgagggtcgggggtgggggtcc

SEQ ID NO: 1462 - DNA, 24 bp, Artificial Sequence
  Synthetic: DMPK 3 forward 19:45769742-45769769; SpCas9
cgcgagggtcgggggtgggggtcc

SEQ ID NO: 1463 - DNA, 23 bp, Artificial Sequence
  Synthetic: DMPK 3 forward 19:45769743-45769769; SpCas9
gcgagggtcgggggtgggggtcc

SEQ ID NO: 1464 - DNA, 22 bp, Artificial Sequence
  Synthetic: DMPK 3 forward 19:45769744-45769769; SpCas9
cgagggtcgggggtgggggtcc

SEQ ID NO: 1465 - DNA, 21 bp, Artificial Sequence
  Synthetic: DMPK 3 forward 19:45769745-45769769; SpCas9
gagggtcgggggtgggggtcc

SEQ ID NO: 1466 - DNA, 20 bp, Artificial Sequence
  Synthetic: DMPK 3 forward 19:45769746-45769769; SpCas9
agggtcgggggtgggggtcc

SEQ ID NO: 1467 - DNA, 19 bp, Artificial Sequence
  Synthetic: DMPK 3 forward 19:45769747-45769769; SpCas9
gggtcgggggtgggggtcc

SEQ ID NO: 1468 - DNA, 18 bp, Artificial Sequence
  Synthetic: DMPK 3 forward 19:45769748-45769769; SpCas9
ggtcgggggtgggggtcc

SEQ ID NO: 1469 - DNA, 25 bp, Artificial Sequence
  Synthetic: DMPK 3 forward 19:45769742-45769770; SpCas9
cgcgagggtcgggggtgggggtcct

SEQ ID NO: 1470 - DNA, 24 bp, Artificial Sequence
  Synthetic: DMPK 3 forward 19:45769743-45769770; SpCas9
gcgagggtcgggggtgggggtcct

SEQ ID NO: 1471 - DNA, 23 bp, Artificial Sequence
  Synthetic: DMPK 3 forward 19:45769744-45769770; SpCas9
cgagggtcgggggtgggggtcct

SEQ ID NO: 1472 - DNA, 22 bp, Artificial Sequence
  Synthetic: DMPK 3 forward 19:45769745-45769770; SpCas9
gagggtcgggggtgggggtcct

SEQ ID NO: 1473 - DNA, 21 bp, Artificial Sequence
  Synthetic: DMPK 3 forward 19:45769746-45769770; SpCas9
agggtcgggggtgggggtcct

SEQ ID NO: 1474 - DNA, 20 bp, Artificial Sequence
  Synthetic: DMPK 3 forward 19:45769747-45769770; SpCas9
gggtcgggggtgggggtcct

SEQ ID NO: 1475 - DNA, 19 bp, Artificial Sequence
  Synthetic: DMPK 3 forward 19:45769748-45769770; SpCas9
ggtcgggggtgggggtcct

SEQ ID NO: 1476 - DNA, 18 bp, Artificial Sequence
  Synthetic: DMPK 3 forward 19:45769749-45769770; SpCas9
gtcgggggtgggggtcct

SEQ ID NO: 1477 - DNA, 25 bp, Artificial Sequence
  Synthetic: DMPK 3 forward 19:45769745-45769773; SpCas9
gagggtcgggggtgggggtcctagg

SEQ ID NO: 1478 - DNA, 24 bp, Artificial Sequence
  Synthetic: DMPK 3 forward 19:45769746-45769773; SpCas9
agggtcgggggtgggggtcctagg

SEQ ID NO: 1479 - DNA, 23 bp, Artificial Sequence
  Synthetic: DMPK 3 forward 19:45769747-45769773; SpCas9
gggtcgggggtgggggtcctagg

SEQ ID NO: 1480 - DNA, 22 bp, Artificial Sequence
  Synthetic: DMPK 3 forward 19:45769748-45769773; SpCas9
ggtcgggggtgggggtcctagg

SEQ ID NO: 1481 - DNA, 21 bp, Artificial Sequence
  Synthetic: DMPK 3 forward 19:45769749-45769773; SpCas9
gtcgggggtgggggtcctagg

SEQ ID NO: 1482 - DNA, 20 bp, Artificial Sequence
  Synthetic: DMPK 3 forward 19:45769750-45769773; SpCas9
tcgggggtgggggtcctagg

SEQ ID NO: 1483 - DNA, 19 bp, Artificial Sequence
  Synthetic: DMPK 3 forward 19:45769751-45769773; SpCas9
cgggggtgggggtcctagg

SEQ ID NO: 1484 - DNA, 18 bp, Artificial Sequence
  Synthetic: DMPK 3 forward 19:45769752-45769773; SpCas9
gggggtgggggtcctagg

SEQ ID NO: 1485 - DNA, 25 bp, Artificial Sequence
  Synthetic: DMPK 3 forward 19:45769746-45769774; SpCas9
agggtcgggggtgggggtcctaggt

SEQ ID NO: 1486 - DNA, 24 bp, Artificial Sequence
  Synthetic: DMPK 3 forward 19:45769747-45769774; SpCas9
gggtcgggggtgggggtcctaggt

SEQ ID NO: 1487 - DNA, 23 bp, Artificial Sequence
  Synthetic: DMPK 3 forward 19:45769748-45769774; SpCas9
ggtcgggggtgggggtcctaggt

SEQ ID NO: 1488 - DNA, 22 bp, Artificial Sequence
  Synthetic: DMPK 3 forward 19:45769749-45769774; SpCas9
gtcgggggtgggggtcctaggt

SEQ ID NO: 1489 - DNA, 21 bp, Artificial Sequence
  Synthetic: DMPK 3 forward 19:45769750-45769774; SpCas9
tcgggggtgggggtcctaggt

SEQ ID NO: 1490 - DNA, 20 bp, Artificial Sequence
  Synthetic: DMPK 3 forward 19:45769751-45769774; SpCas9
cgggggtgggggtcctaggt

SEQ ID NO: 1491 - DNA, 19 bp, Artificial Sequence
  Synthetic: DMPK 3 forward 19:45769752-45769774; SpCas9
gggggtgggggtcctaggt

SEQ ID NO: 1492 - DNA, 18 bp, Artificial Sequence
  Synthetic: DMPK 3 forward 19:45769753-45769774; SpCas9
ggggtgggggtcctaggt

SEQ ID NO: 1493 - DNA, 25 bp, Artificial Sequence
  Synthetic: DMPK 3 forward 19:45769747-45769775; SpCas9
gggtcgggggtgggggtcctaggtg

SEQ ID NO: 1494 - DNA, 24 bp, Artificial Sequence
  Synthetic: DMPK 3 forward 19:45769748-45769775; SpCas9
ggtcgggggtgggggtcctaggtg

SEQ ID NO: 1495 - DNA, 23 bp, Artificial Sequence
  Synthetic: DMPK 3 forward 19:45769749-45769775; SpCas9
gtcgggggtgggggtcctaggtg

SEQ ID NO: 1496 - DNA, 22 bp, Artificial Sequence
  Synthetic: DMPK 3 forward 19:45769750-45769775; SpCas9
tcgggggtgggggtcctaggtg

SEQ ID NO: 1497 - DNA, 21 bp, Artificial Sequence
  Synthetic: DMPK 3 forward 19:45769751-45769775; SpCas9
cgggggtgggggtcctaggtg

SEQ ID NO: 1498 - DNA, 20 bp, Artificial Sequence
  Synthetic: DMPK 3 forward 19:45769752-45769775; SpCas9
gggggtgggggtcctaggtg

SEQ ID NO: 1499 - DNA, 19 bp, Artificial Sequence
  Synthetic: DMPK 3 forward 19:45769753-45769775; SpCas9
ggggtgggggtcctaggtg

SEQ ID NO: 1500 - DNA, 18 bp, Artificial Sequence
  Synthetic: DMPK 3 forward 19:45769754-45769775; SpCas9
gggtgggggtcctaggtg

SEQ ID NO: 1501 - DNA, 25 bp, Artificial Sequence
  Synthetic: DMPK 3 forward 19:45769751-45769779; SpCas9
cgggggtgggggtcctaggtgggga

SEQ ID NO: 1502 - DNA, 24 bp, Artificial Sequence
  Synthetic: DMPK 3 forward 19:45769752-45769779; SpCas9
gggggtgggggtcctaggtgggga

SEQ ID NO: 1503 - DNA, 23 bp, Artificial Sequence
  Synthetic: DMPK 3 forward 19:45769753-45769779; SpCas9
ggggtgggggtcctaggtgggga

SEQ ID NO: 1504 - DNA, 22 bp, Artificial Sequence
  Synthetic: DMPK 3 forward 19:45769754-45769779; SpCas9
gggtgggggtcctaggtgggga

SEQ ID NO: 1505 - DNA, 21 bp, Artificial Sequence
  Synthetic: DMPK 3 forward 19:45769755-45769779; SpCas9
ggtgggggtcctaggtgggga

SEQ ID NO: 1506 - DNA, 20 bp, Artificial Sequence
  Synthetic: DMPK 3 forward 19:45769756-45769779; SpCas9
gtgggggtcctaggtgggga

SEQ ID NO: 1507 - DNA, 19 bp, Artificial Sequence
  Synthetic: DMPK 3 forward 19:45769757-45769779; SpCas9
tgggggtcctaggtgggga

SEQ ID NO: 1508 - DNA, 18 bp, Artificial Sequence
  Synthetic: DMPK 3 forward 19:45769758-45769779; SpCas9
gggggtcctaggtgggga

SEQ ID NO: 1509 - DNA, 25 bp, Artificial Sequence
  Synthetic: DMPK 3 reverse 19:45769764-45769792; SpCas9
cggtatttattgtctgtccccacct

SEQ ID NO: 1510 - DNA, 24 bp, Artificial Sequence
  Synthetic: DMPK 3 reverse 19:45769765-45769792; SpCas9
ggtatttattgtctgtccccacct

SEQ ID NO: 1511 - DNA, 23 bp, Artificial Sequence
  Synthetic: DMPK 3 reverse 19:45769766-45769792; SpCas9
gtatttattgtctgtccccacct

SEQ ID NO: 1512 - DNA, 22 bp, Artificial Sequence
  Synthetic: DMPK 3 reverse 19:45769767-45769792; SpCas9
tatttattgtctgtccccacct

SEQ ID NO: 1513 - DNA, 21 bp, Artificial Sequence
  Synthetic: DMPK 3 reverse 19:45769768-45769792; SpCas9
atttattgtctgtccccacct

SEQ ID NO: 1514 - DNA, 20 bp, Artificial Sequence
  Synthetic: DMPK 3 reverse 19:45769769-45769792; SpCas9
tttattgtctgtccccacct

SEQ ID NO: 1515 - DNA, 19 bp, Artificial Sequence
  Synthetic: DMPK 3 reverse 19:45769770-45769792; SpCas9
ttattgtctgtccccacct

SEQ ID NO: 1516 - DNA, 18 bp, Artificial Sequence
  Synthetic: DMPK 3 reverse 19:45769771-45769792; SpCas9
tattgtctgtccccacct

SEQ ID NO: 1517 - DNA, 25 bp, Artificial Sequence
  Synthetic: DMPK 3 reverse 19:45769765-45769793; SpCas9
tcggtatttattgtctgtccccacc

SEQ ID NO: 1518 - DNA, 24 bp, Artificial Sequence
  Synthetic: DMPK 3 reverse 19:45769766-45769793; SpCas9
cggtatttattgtctgtccccacc

SEQ ID NO: 1519 - DNA, 23 bp, Artificial Sequence
  Synthetic: DMPK 3 reverse 19:45769767-45769793; SpCas9
ggtatttattgtctgtccccacc

SEQ ID NO: 1520 - DNA, 22 bp, Artificial Sequence
  Synthetic: DMPK 3 reverse 19:45769768-45769793; SpCas9
gtatttattgtctgtccccacc

SEQ ID NO: 1521 - DNA, 21 bp, Artificial Sequence
  Synthetic: DMPK 3 reverse 19:45769769-45769793; SpCas9
tatttattgtctgtccccacc

SEQ ID NO: 1522 - DNA, 20 bp, Artificial Sequence
  Synthetic: DMPK 3 reverse 19:45769770-45769793; SpCas9
atttattgtctgtccccacc

SEQ ID NO: 1523 - DNA, 19 bp, Artificial Sequence
  Synthetic: DMPK 3 reverse 19:45769771-45769793; SpCas9
tttattgtctgtccccacc

SEQ ID NO: 1524 - DNA, 18 bp, Artificial Sequence
  Synthetic: DMPK 3 reverse 19:45769772-45769793; SpCas9
ttattgtctgtccccacc

SEQ ID NO: 1525 - DNA, 25 bp, Artificial Sequence
  Synthetic: DMPK 3 forward 19:45769766-45769794; SpCas9
taggtggggacagacaataaatacc

SEQ ID NO: 1526 - DNA, 24 bp, Artificial Sequence
  Synthetic: DMPK 3 forward 19:45769767-45769794; SpCas9
aggtggggacagacaataaatacc

SEQ ID NO: 1527 - DNA, 23 bp, Artificial Sequence
  Synthetic: DMPK 3 forward 19:45769768-45769794; SpCas9
ggtggggacagacaataaatacc

SEQ ID NO: 1528 - DNA, 22 bp, Artificial Sequence
  Synthetic: DMPK 3 forward 19:45769769-45769794; SpCas9
gtggggacagacaataaatacc

SEQ ID NO: 1529 - DNA, 21 bp, Artificial Sequence
  Synthetic: DMPK 3 forward 19:45769770-45769794; SpCas9
tggggacagacaataaatacc

SEQ ID NO: 1530 - DNA, 20 bp, Artificial Sequence
  Synthetic: DMPK 3 forward 19:45769771-45769794; SpCas9
ggggacagacaataaatacc

SEQ ID NO: 1531 - DNA, 19 bp, Artificial Sequence
  Synthetic: DMPK 3 forward 19:45769772-45769794; SpCas9
gggacagacaataaatacc

SEQ ID NO: 1532 - DNA, 18 bp, Artificial Sequence
  Synthetic: DMPK 3 forward 19:45769773-45769794; SpCas9
ggacagacaataaatacc

SEQ ID NO: 1533 - DNA, 25 bp, Artificial Sequence
  Synthetic: DMPK 3 forward 19:45769767-45769795; SpCas9
aggtggggacagacaataaataccg

SEQ ID NO: 1534 - DNA, 24 bp, Artificial Sequence
  Synthetic: DMPK 3 forward 19:45769768-45769795; SpCas9
ggtggggacagacaataaataccg

SEQ ID NO: 1535 - DNA, 23 bp, Artificial Sequence
  Synthetic: DMPK 3 forward 19:45769769-45769795; SpCas9
gtggggacagacaataaataccg

SEQ ID NO: 1536 - DNA, 22 bp, Artificial Sequence
  Synthetic: DMPK 3 forward 19:45769770-45769795; SpCas9
tggggacagacaataaataccg

SEQ ID NO: 1537 - DNA, 21 bp, Artificial Sequence
  Synthetic: DMPK 3 forward 19:45769771-45769795; SpCas9
ggggacagacaataaataccg

SEQ ID NO: 1538 - DNA, 20 bp, Artificial Sequence
  Synthetic: DMPK 3 forward 19:45769772-45769795; SpCas9
gggacagacaataaataccg

SEQ ID NO: 1539 - DNA, 19 bp, Artificial Sequence
  Synthetic: DMPK 3 forward 19:45769773-45769795; SpCas9
ggacagacaataaataccg

SEQ ID NO: 1540 - DNA, 18 bp, Artificial Sequence
  Synthetic: DMPK 3 forward 19:45769774-45769795; SpCas9
gacagacaataaataccg

SEQ ID NO: 1541 - DNA, 25 bp, Artificial Sequence
  Synthetic: DMPK 3 forward 19:45769775-45769803; SpCas9
acagacaataaataccgaggaatgt

SEQ ID NO: 1542 - DNA, 24 bp, Artificial Sequence
  Synthetic: DMPK 3 forward 19:45769776-45769803; SpCas9
cagacaataaataccgaggaatgt

SEQ ID NO: 1543 - DNA, 23 bp, Artificial Sequence
  Synthetic: DMPK 3 forward 19:45769777-45769803; SpCas9
agacaataaataccgaggaatgt

SEQ ID NO: 1544 - DNA, 22 bp, Artificial Sequence
  Synthetic: DMPK 3 forward 19:45769778-45769803; SpCas9
gacaataaataccgaggaatgt

SEQ ID NO: 1545 - DNA, 21 bp, Artificial Sequence
  Synthetic: DMPK 3 forward 19:45769779-45769803; SpCas9
acaataaataccgaggaatgt

SEQ ID NO: 1546 - DNA, 20 bp, Artificial Sequence
  Synthetic: DMPK 3 forward 19:45769780-45769803; SpCas9
caataaataccgaggaatgt

SEQ ID NO: 1547 - DNA, 19 bp, Artificial Sequence
  Synthetic: DMPK 3 forward 19:45769781-45769803; SpCas9
aataaataccgaggaatgt

SEQ ID NO: 1548 - DNA, 18 bp, Artificial Sequence
  Synthetic: DMPK 3 forward 19:45769782-45769803; SpCas9
ataaataccgaggaatgt

SEQ ID NO: 1549 - DNA, 25 bp, Artificial Sequence
  Synthetic: DMPK 3 forward 19:45769776-45769804; SpCas9
cagacaataaataccgaggaatgtc

SEQ ID NO: 1550 - DNA, 24 bp, Artificial Sequence
  Synthetic: DMPK 3 forward 19:45769777-45769804; SpCas9
agacaataaataccgaggaatgtc

SEQ ID NO: 1551 - DNA, 23 bp, Artificial Sequence
  Synthetic: DMPK 3 forward 19:45769778-45769804; SpCas9
gacaataaataccgaggaatgtc

SEQ ID NO: 1552 - DNA, 22 bp, Artificial Sequence
  Synthetic: DMPK 3 forward 19:45769779-45769804; SpCas9
acaataaataccgaggaatgtc

SEQ ID NO: 1553 - DNA, 21 bp, Artificial Sequence
  Synthetic: DMPK 3 forward 19:45769780-45769804; SpCas9
caataaataccgaggaatgtc

SEQ ID NO: 1554 - DNA, 20 bp, Artificial Sequence
  Synthetic: DMPK 3 forward 19:45769781-45769804; SpCas9
aataaataccgaggaatgtc

SEQ ID NO: 1555 - DNA, 19 bp, Artificial Sequence
  Synthetic: DMPK 3 forward 19:45769782-45769804; SpCas9
ataaataccgaggaatgtc

SEQ ID NO: 1556 - DNA, 18 bp, Artificial Sequence
  Synthetic: DMPK 3 forward 19:45769783-45769804; SpCas9
taaataccgaggaatgtc

SEQ ID NO: 1557 - DNA, 25 bp, Artificial Sequence
  Synthetic: DMPK 3 forward 19:45769777-45769805; SpCas9
agacaataaataccgaggaatgtcg

SEQ ID NO: 1558 - DNA, 24 bp, Artificial Sequence
  Synthetic: DMPK 3 forward 19:45769778-45769805; SpCas9
gacaataaataccgaggaatgtcg

SEQ ID NO: 1559 - DNA, 23 bp, Artificial Sequence
  Synthetic: DMPK 3 forward 19:45769779-45769805; SpCas9
acaataaataccgaggaatgtcg

SEQ ID NO: 1560 - DNA, 22 bp, Artificial Sequence
  Synthetic: DMPK 3 forward 19:45769780-45769805; SpCas9
caataaataccgaggaatgtcg

SEQ ID NO: 1561 - DNA, 21 bp, Artificial Sequence
  Synthetic: DMPK 3 forward 19:45769781-45769805; SpCas9
aataaataccgaggaatgtcg

SEQ ID NO: 1562 - DNA, 20 bp, Artificial Sequence
  Synthetic: DMPK 3 forward 19:45769782-45769805; SpCas9
ataaataccgaggaatgtcg

SEQ ID NO: 1563 - DNA, 19 bp, Artificial Sequence
  Synthetic: DMPK 3 forward 19:45769783-45769805; SpCas9
taaataccgaggaatgtcg

SEQ ID NO: 1564 - DNA, 18 bp, Artificial Sequence
  Synthetic: DMPK 3 forward 19:45769784-45769805; SpCas9
aaataccgaggaatgtcg

SEQ ID NO: 1565 - DNA, 25 bp, Artificial Sequence
  Synthetic: DMPK 3 forward 19:45769783-45769811; SpCas9
taaataccgaggaatgtcggggtct

SEQ ID NO: 1566 - DNA, 24 bp, Artificial Sequence
  Synthetic: DMPK 3 forward 19:45769784-45769811; SpCas9
aaataccgaggaatgtcggggtct

SEQ ID NO: 1567 - DNA, 23 bp, Artificial Sequence
  Synthetic: DMPK 3 forward 19:45769785-45769811; SpCas9
aataccgaggaatgtcggggtct

SEQ ID NO: 1568 - DNA, 22 bp, Artificial Sequence
  Synthetic: DMPK 3 forward 19:45769786-45769811; SpCas9
ataccgaggaatgtcggggtct

SEQ ID NO: 1569 - DNA, 21 bp, Artificial Sequence
  Synthetic: DMPK 3 forward 19:45769787-45769811; SpCas9
taccgaggaatgtcggggtct

SEQ ID NO: 1570 - DNA, 20 bp, Artificial Sequence
  Synthetic: DMPK 3 forward 19:45769788-45769811; SpCas9
accgaggaatgtcggggtct

SEQ ID NO: 1571 - DNA, 19 bp, Artificial Sequence
  Synthetic: DMPK 3 forward 19:45769789-45769811; SpCas9
ccgaggaatgtcggggtct

SEQ ID NO: 1572 - DNA, 18 bp, Artificial Sequence
  Synthetic: DMPK 3 forward 19:45769790-45769811; SpCas9
cgaggaatgtcggggtct

SEQ ID NO: 1573 - DNA, 25 bp, Artificial Sequence
  Synthetic: DMPK 3 reverse 19:45769789-45769817; SpCas9
gatgcactgagaccccgacattcct

SEQ ID NO: 1574 - DNA, 24 bp, Artificial Sequence
  Synthetic: DMPK 3 reverse 19:45769790-45769817; SpCas9
atgcactgagaccccgacattcct

SEQ ID NO: 1575 - DNA, 23 bp, Artificial Sequence
  Synthetic: DMPK 3 reverse 19:45769791-45769817; SpCas9
tgcactgagaccccgacattcct

SEQ ID NO: 1576 - DNA, 22 bp, Artificial Sequence
  Synthetic: DMPK 3 reverse 19:45769792-45769817; SpCas9
gcactgagaccccgacattcct

SEQ ID NO: 1577 - DNA, 21 bp, Artificial Sequence
  Synthetic: DMPK 3 reverse 19:45769793-45769817; SpCas9
cactgagaccccgacattcct

SEQ ID NO: 1578 - DNA, 20 bp, Artificial Sequence
  Synthetic: DMPK 3 reverse 19:45769794-45769817; SpCas9
actgagaccccgacattcct

SEQ ID NO: 1579 - DNA, 19 bp, Artificial Sequence
  Synthetic: DMPK 3 reverse 19:45769795-45769817; SpCas9
ctgagaccccgacattcct

SEQ ID NO: 1580 - DNA, 18 bp, Artificial Sequence
  Synthetic: DMPK 3 reverse 19:45769796-45769817; SpCas9
tgagaccccgacattcct

SEQ ID NO: 1581 - DNA, 25 bp, Artificial Sequence
  Synthetic: DMPK 3 forward 19:45769799-45769827; SpCas9
tcggggtctcagtgcatccaaaacg

SEQ ID NO: 1582 - DNA, 24 bp, Artificial Sequence
  Synthetic: DMPK 3 forward 19:45769800-45769827; SpCas9
cggggtctcagtgcatccaaaacg

SEQ ID NO: 1583 - DNA, 23 bp, Artificial Sequence
  Synthetic: DMPK 3 forward 19:45769801-45769827; SpCas9
ggggtctcagtgcatccaaaacg

SEQ ID NO: 1584 - DNA, 22 bp, Artificial Sequence
  Synthetic: DMPK 3 forward 19:45769802-45769827; SpCas9
gggtctcagtgcatccaaaacg

SEQ ID NO: 1585 - DNA, 21 bp, Artificial Sequence
  Synthetic: DMPK 3 forward 19:45769803-45769827; SpCas9
ggtctcagtgcatccaaaacg

SEQ ID NO: 1586 - DNA, 20 bp, Artificial Sequence
  Synthetic: DMPK 3 forward 19:45769804-45769827; SpCas9
gtctcagtgcatccaaaacg

SEQ ID NO: 1587 - DNA, 19 bp, Artificial Sequence
  Synthetic: DMPK 3 forward 19:45769805-45769827; SpCas9
tctcagtgcatccaaaacg

SEQ ID NO: 1588 - DNA, 18 bp, Artificial Sequence
  Synthetic: DMPK 3 forward 19:45769806-45769827; SpCas9
ctcagtgcatccaaaacg

SEQ ID NO: 1589 - DNA, 25 bp, Artificial Sequence
  Synthetic: DMPK 3 forward 19:45769804-45769832; SpCas9
gtctcagtgcatccaaaacgtggat

SEQ ID NO: 1590 - DNA, 24 bp, Artificial Sequence
  Synthetic: DMPK 3 forward 19:45769805-45769832; SpCas9
tctcagtgcatccaaaacgtggat

SEQ ID NO: 1591 - DNA, 23 bp, Artificial Sequence
  Synthetic: DMPK 3 forward 19:45769806-45769832; SpCas9
ctcagtgcatccaaaacgtggat

SEQ ID NO: 1592 - DNA, 22 bp, Artificial Sequence
  Synthetic: DMPK 3 forward 19:45769807-45769832; SpCas9
tcagtgcatccaaaacgtggat

SEQ ID NO: 1593 - DNA, 21 bp, Artificial Sequence
  Synthetic: DMPK 3 forward 19:45769808-45769832; SpCas9
cagtgcatccaaaacgtggat

SEQ ID NO: 1594 - DNA, 20 bp, Artificial Sequence
  Synthetic: DMPK 3 forward 19:45769809-45769832; SpCas9
agtgcatccaaaacgtggat

SEQ ID NO: 1595 - DNA, 19 bp, Artificial Sequence
  Synthetic: DMPK 3 forward 19:45769810-45769832; SpCas9
gtgcatccaaaacgtggat

SEQ ID NO: 1596 - DNA, 18 bp, Artificial Sequence
  Synthetic: DMPK 3 forward 19:45769811-45769832; SpCas9
tgcatccaaaacgtggat

SEQ ID NO: 1597 - DNA, 25 bp, Artificial Sequence
  Synthetic: DMPK 3 forward 19:45769805-45769833; SpCas9
tctcagtgcatccaaaacgtggatt

SEQ ID NO: 1598 - DNA, 24 bp, Artificial Sequence
  Synthetic: DMPK 3 forward 19:45769806-45769833; SpCas9
ctcagtgcatccaaaacgtggatt

SEQ ID NO: 1599 - DNA, 23 bp, Artificial Sequence
  Synthetic: DMPK 3 forward 19:45769807-45769833; SpCas9
tcagtgcatccaaaacgtggatt

SEQ ID NO: 1600 - DNA, 22 bp, Artificial Sequence
  Synthetic: DMPK 3 forward 19:45769808-45769833; SpCas9
cagtgcatccaaaacgtggatt

SEQ ID NO: 1601 - DNA, 21 bp, Artificial Sequence
  Synthetic: DMPK 3 forward 19:45769809-45769833; SpCas9
agtgcatccaaaacgtggatt

SEQ ID NO: 1602 - DNA, 20 bp, Artificial Sequence
  Synthetic: DMPK 3 forward 19:45769810-45769833; SpCas9
gtgcatccaaaacgtggatt

SEQ ID NO: 1603 - DNA, 19 bp, Artificial Sequence
  Synthetic: DMPK 3 forward 19:45769811-45769833; SpCas9
tgcatccaaaacgtggatt

SEQ ID NO: 1604 - DNA, 18 bp, Artificial Sequence
  Synthetic: DMPK 3 forward 19:45769812-45769833; SpCas9
gcatccaaaacgtggatt

SEQ ID NO: 1605 - DNA, 25 bp, Artificial Sequence
  Synthetic: DMPK 3 forward 19:45769806-45769834; SpCas9
ctcagtgcatccaaaacgtggattg

SEQ ID NO: 1606 - DNA, 24 bp, Artificial Sequence
  Synthetic: DMPK 3 forward 19:45769807-45769834; SpCas9
tcagtgcatccaaaacgtggattg

SEQ ID NO: 1607 - DNA, 23 bp, Artificial Sequence
  Synthetic: DMPK 3 forward 19:45769808-45769834; SpCas9
cagtgcatccaaaacgtggattg

SEQ ID NO: 1608 - DNA, 22 bp, Artificial Sequence
  Synthetic: DMPK 3 forward 19:45769809-45769834; SpCas9
agtgcatccaaaacgtggattg

SEQ ID NO: 1609 - DNA, 21 bp, Artificial Sequence
  Synthetic: DMPK 3 forward 19:45769810-45769834; SpCas9
gtgcatccaaaacgtggattg

SEQ ID NO: 1610 - DNA, 20 bp, Artificial Sequence
  Synthetic: DMPK 3 forward 19:45769811-45769834; SpCas9
tgcatccaaaacgtggattg

SEQ ID NO: 1611 - DNA, 19 bp, Artificial Sequence
  Synthetic: DMPK 3 forward 19:45769812-45769834; SpCas9
gcatccaaaacgtggattg

SEQ ID NO: 1612 - DNA, 18 bp, Artificial Sequence
  Synthetic: DMPK 3 forward 19:45769813-45769834; SpCas9
catccaaaacgtggattg

SEQ ID NO: 1613 - DNA, 25 bp, Artificial Sequence
  Synthetic: DMPK 3 reverse 19:45769806-45769834; SpCas9
ccccaatccacgttttggatgcact

SEQ ID NO: 1614 - DNA, 24 bp, Artificial Sequence
  Synthetic: DMPK 3 reverse 19:45769807-45769834; SpCas9
cccaatccacgttttggatgcact

SEQ ID NO: 1615 - DNA, 23 bp, Artificial Sequence
  Synthetic: DMPK 3 reverse 19:45769808-45769834; SpCas9
ccaatccacgttttggatgcact

SEQ ID NO: 1616 - DNA, 22 bp, Artificial Sequence
  Synthetic: DMPK 3 reverse 19:45769809-45769834; SpCas9
caatccacgttttggatgcact

SEQ ID NO: 1617 - DNA, 21 bp, Artificial Sequence
  Synthetic: DMPK 3 reverse 19:45769810-45769834; SpCas9
aatccacgttttggatgcact

SEQ ID NO: 1618 - DNA, 20 bp, Artificial Sequence
  Synthetic: DMPK 3 reverse 19:45769811-45769834; SpCas9
atccacgttttggatgcact

SEQ ID NO: 1619 - DNA, 19 bp, Artificial Sequence
  Synthetic: DMPK 3 reverse 19:45769812-45769834; SpCas9
tccacgttttggatgcact

SEQ ID NO: 1620 - DNA, 18 bp, Artificial Sequence
  Synthetic: DMPK 3 reverse 19:45769813-45769834; SpCas9
ccacgttttggatgcact

SEQ ID NO: 1621 - DNA, 25 bp, Artificial Sequence
  Synthetic: DMPK 3 forward 19:45769813-45769841; SpCas9
catccaaaacgtggattggggttgt

SEQ ID NO: 1622 - DNA, 24 bp, Artificial Sequence
  Synthetic: DMPK 3 forward 19:45769814-45769841; SpCas9
atccaaaacgtggattggggttgt

SEQ ID NO: 1623 - DNA, 23 bp, Artificial Sequence
  Synthetic: DMPK 3 forward 19:45769815-45769841; SpCas9
tccaaaacgtggattggggttgt

SEQ ID NO: 1624 - DNA, 22 bp, Artificial Sequence
  Synthetic: DMPK 3 forward 19:45769816-45769841; SpCas9
ccaaaacgtggattggggttgt

SEQ ID NO: 1625 - DNA, 21 bp, Artificial Sequence
  Synthetic: DMPK 3 forward 19:45769817-45769841; SpCas9
caaaacgtggattggggttgt

SEQ ID NO: 1626 - DNA, 20 bp, Artificial Sequence
  Synthetic: DMPK 3 forward 19:45769818-45769841; SpCas9
aaaacgtggattggggttgt

SEQ ID NO: 1627 - DNA, 19 bp, Artificial Sequence
  Synthetic: DMPK 3 forward 19:45769819-45769841; SpCas9
aaacgtggattggggttgt

SEQ ID NO: 1628 - DNA, 18 bp, Artificial Sequence
  Synthetic: DMPK 3 forward 19:45769820-45769841; SpCas9
aacgtggattggggttgt

SEQ ID NO: 1629 - DNA, 25 bp, Artificial Sequence
  Synthetic: DMPK 3 forward 19:45769814-45769842; SpCas9
atccaaaacgtggattggggttgtt

SEQ ID NO: 1630 - DNA, 24 bp, Artificial Sequence
  Synthetic: DMPK 3 forward 19:45769815-45769842; SpCas9
tccaaaacgtggattggggttgtt

SEQ ID NO: 1631 - DNA, 23 bp, Artificial Sequence
  Synthetic: DMPK 3 forward 19:45769816-45769842; SpCas9
ccaaaacgtggattggggttgtt

SEQ ID NO: 1632 - DNA, 22 bp, Artificial Sequence
  Synthetic: DMPK 3 forward 19:45769817-45769842; SpCas9
caaaacgtggattggggttgtt

SEQ ID NO: 1633 - DNA, 21 bp, Artificial Sequence
  Synthetic: DMPK 3 forward 19:45769818-45769842; SpCas9
aaaacgtggattggggttgtt

SEQ ID NO: 1634 - DNA, 20 bp, Artificial Sequence
  Synthetic: DMPK 3 forward 19:45769819-45769842; SpCas9
aaacgtggattggggttgtt

SEQ ID NO: 1635 - DNA, 19 bp, Artificial Sequence
  Synthetic: DMPK 3 forward 19:45769820-45769842; SpCas9
aacgtggattggggttgtt

SEQ ID NO: 1636 - DNA, 18 bp, Artificial Sequence
  Synthetic: DMPK 3 forward 19:45769821-45769842; SpCas9
acgtggattggggttgtt

SEQ ID NO: 1637 - DNA, 25 bp, Artificial Sequence
  Synthetic: DMPK 3 forward 19:45769815-45769843; SpCas9
tccaaaacgtggattggggttgttg

SEQ ID NO: 1638 - DNA, 24 bp, Artificial Sequence
  Synthetic: DMPK 3 forward 19:45769816-45769843; SpCas9
ccaaaacgtggattggggttgttg

SEQ ID NO: 1639 - DNA, 23 bp, Artificial Sequence
  Synthetic: DMPK 3 forward 19:45769817-45769843; SpCas9
caaaacgtggattggggttgttg

SEQ ID NO: 1640 - DNA, 22 bp, Artificial Sequence
  Synthetic: DMPK 3 forward 19:45769818-45769843; SpCas9
aaaacgtggattggggttgttg

SEQ ID NO: 1641 - DNA, 21 bp, Artificial Sequence
  Synthetic: DMPK 3 forward 19:45769819-45769843; SpCas9
aaacgtggattggggttgttg

SEQ ID NO: 1642 - DNA, 20 bp, Artificial Sequence
  Synthetic: DMPK 3 forward 19:45769820-45769843; SpCas9
aacgtggattggggttgttg

SEQ ID NO: 1643 - DNA, 19 bp, Artificial Sequence
  Synthetic: DMPK 3 forward 19:45769821-45769843; SpCas9
acgtggattggggttgttg

SEQ ID NO: 1644 - DNA, 18 bp, Artificial Sequence
  Synthetic: DMPK 3 forward 19:45769822-45769843; SpCas9
cgtggattggggttgttg

SEQ ID NO: 1645 - DNA, 25 bp, Artificial Sequence
  Synthetic: DMPK 3 forward 19:45769816-45769844; SpCas9
ccaaaacgtggattggggttgttgg

SEQ ID NO: 1646 - DNA, 24 bp, Artificial Sequence
  Synthetic: DMPK 3 forward 19:45769817-45769844; SpCas9
caaaacgtggattggggttgttgg

SEQ ID NO: 1647 - DNA, 23 bp, Artificial Sequence
  Synthetic: DMPK 3 forward 19:45769818-45769844; SpCas9
aaaacgtggattggggttgttgg

SEQ ID NO: 1648 - DNA, 22 bp, Artificial Sequence
  Synthetic: DMPK 3 forward 19:45769819-45769844; SpCas9
aaacgtggattggggttgttgg

SEQ ID NO: 1649 - DNA, 21 bp, Artificial Sequence
  Synthetic: DMPK 3 forward 19:45769820-45769844; SpCas9
aacgtggattggggttgttgg

SEQ ID NO: 1650 - DNA, 20 bp, Artificial Sequence
  Synthetic: DMPK 3 forward 19:45769821-45769844; SpCas9
acgtggattggggttgttgg

SEQ ID NO: 1651 - DNA, 19 bp, Artificial Sequence
  Synthetic: DMPK 3 forward 19:45769822-45769844; SpCas9
cgtggattggggttgttgg

SEQ ID NO: 1652 - DNA, 18 bp, Artificial Sequence
  Synthetic: DMPK 3 forward 19:45769823-45769844; SpCas9
gtggattggggttgttgg

SEQ ID NO: 1653 - DNA, 25 bp, Artificial Sequence
  Synthetic: DMPK 3 reverse 19:45769816-45769844; SpCas9
cccccaacaaccccaatccacgttt

SEQ ID NO: 1654 - DNA, 24 bp, Artificial Sequence
  Synthetic: DMPK 3 reverse 19:45769817-45769844; SpCas9
ccccaacaaccccaatccacgttt

SEQ ID NO: 1655 - DNA, 23 bp, Artificial Sequence
  Synthetic: DMPK 3 reverse 19:45769818-45769844; SpCas9
cccaacaaccccaatccacgttt

SEQ ID NO: 1656 - DNA, 22 bp, Artificial Sequence
  Synthetic: DMPK 3 reverse 19:45769819-45769844; SpCas9
ccaacaaccccaatccacgttt

SEQ ID NO: 1657 - DNA, 21 bp, Artificial Sequence
  Synthetic: DMPK 3 reverse 19:45769820-45769844; SpCas9
caacaaccccaatccacgttt

SEQ ID NO: 1658 - DNA, 20 bp, Artificial Sequence
  Synthetic: DMPK 3 reverse 19:45769821-45769844; SpCas9
aacaaccccaatccacgttt

SEQ ID NO: 1659 - DNA, 19 bp, Artificial Sequence
  Synthetic: DMPK 3 reverse 19:45769822-45769844; SpCas9
acaaccccaatccacgttt

SEQ ID NO: 1660 - DNA, 18 bp, Artificial Sequence
  Synthetic: DMPK 3 reverse 19:45769823-45769844; SpCas9
caaccccaatccacgttt

SEQ ID NO: 1661 - DNA, 25 bp, Artificial Sequence
  Synthetic: DMPK 3 forward 19:45769824-45769852; SpCas9
tggattggggttgttgggggtcctg

SEQ ID NO: 1662 - DNA, 24 bp, Artificial Sequence
  Synthetic: DMPK 3 forward 19:45769825-45769852; SpCas9
ggattggggttgttgggggtcctg

SEQ ID NO: 1663 - DNA, 23 bp, Artificial Sequence
  Synthetic: DMPK 3 forward 19:45769826-45769852; SpCas9
gattggggttgttgggggtcctg

SEQ ID NO: 1664 - DNA, 22 bp, Artificial Sequence
  Synthetic: DMPK 3 forward 19:45769827-45769852; SpCas9
attggggttgttgggggtcctg

SEQ ID NO: 1665 - DNA, 21 bp, Artificial Sequence
  Synthetic: DMPK 3 forward 19:45769828-45769852; SpCas9
ttggggttgttgggggtcctg

SEQ ID NO: 1666 - DNA, 20 bp, Artificial Sequence
  Synthetic: DMPK 3 forward 19:45769829-45769852; SpCas9
tggggttgttgggggtcctg

SEQ ID NO: 1667 - DNA, 19 bp, Artificial Sequence
  Synthetic: DMPK 3 forward 19:45769830-45769852; SpCas9
ggggttgttgggggtcctg

SEQ ID NO: 1668 - DNA, 18 bp, Artificial Sequence
  Synthetic: DMPK 3 forward 19:45769831-45769852; SpCas9
gggttgttgggggtcctg

SEQ ID NO: 1669 - DNA, 25 bp, Artificial Sequence
  Synthetic: DMPK 3 forward 19:45769832-45769860; SpCas9
ggttgttgggggtcctgtagcctgt

SEQ ID NO: 1670 - DNA, 24 bp, Artificial Sequence
  Synthetic: DMPK 3 forward 19:45769833-45769860; SpCas9
gttgttgggggtcctgtagcctgt

SEQ ID NO: 1671 - DNA, 23 bp, Artificial Sequence
  Synthetic: DMPK 3 forward 19:45769834-45769860; SpCas9
ttgttgggggtcctgtagcctgt

SEQ ID NO: 1672 - DNA, 22 bp, Artificial Sequence
  Synthetic: DMPK 3 forward 19:45769835-45769860; SpCas9
tgttgggggtcctgtagcctgt

SEQ ID NO: 1673 - DNA, 21 bp, Artificial Sequence
  Synthetic: DMPK 3 forward 19:45769836-45769860; SpCas9
gttgggggtcctgtagcctgt

SEQ ID NO: 1674 - DNA, 20 bp, Artificial Sequence
  Synthetic: DMPK 3 forward 19:45769837-45769860; SpCas9
ttgggggtcctgtagcctgt

SEQ ID NO: 1675 - DNA, 19 bp, Artificial Sequence
  Synthetic: DMPK 3 forward 19:45769838-45769860; SpCas9
tgggggtcctgtagcctgt

SEQ ID NO: 1676 - DNA, 18 bp, Artificial Sequence
  Synthetic: DMPK 3 forward 19:45769839-45769860; SpCas9
gggggtcctgtagcctgt

SEQ ID NO: 1677 - DNA, 25 bp, Artificial Sequence
  Synthetic: DMPK 3 forward 19:45769836-45769864; SpCas9
gttgggggtcctgtagcctgtcagc

SEQ ID NO: 1678 - DNA, 24 bp, Artificial Sequence
  Synthetic: DMPK 3 forward 19:45769837-45769864; SpCas9
ttgggggtcctgtagcctgtcagc

SEQ ID NO: 1679 - DNA, 23 bp, Artificial Sequence
  Synthetic: DMPK 3 forward 19:45769838-45769864; SpCas9
tgggggtcctgtagcctgtcagc

SEQ ID NO: 1680 - DNA, 22 bp, Artificial Sequence
  Synthetic: DMPK 3 forward 19:45769839-45769864; SpCas9
gggggtcctgtagcctgtcagc

SEQ ID NO: 1681 - DNA, 21 bp, Artificial Sequence
  Synthetic: DMPK 3 forward 19:45769840-45769864; SpCas9
ggggtcctgtagcctgtcagc

SEQ ID NO: 1682 - DNA, 20 bp, Artificial Sequence
  Synthetic: DMPK 3 forward 19:45769841-45769864; SpCas9
gggtcctgtagcctgtcagc

SEQ ID NO: 1683 - DNA, 19 bp, Artificial Sequence
  Synthetic: DMPK 3 forward 19:45769842-45769864; SpCas9
ggtcctgtagcctgtcagc

SEQ ID NO: 1684 - DNA, 18 bp, Artificial Sequence
  Synthetic: DMPK 3 forward 19:45769843-45769864; SpCas9
gtcctgtagcctgtcagc

SEQ ID NO: 1685 - DNA, 25 bp, Artificial Sequence
  Synthetic: DMPK 3 forward 19:45769840-45769868; SpCas9
ggggtcctgtagcctgtcagcgagt

SEQ ID NO: 1686 - DNA, 24 bp, Artificial Sequence
  Synthetic: DMPK 3 forward 19:45769841-45769868; SpCas9
gggtcctgtagcctgtcagcgagt

SEQ ID NO: 1687 - DNA, 23 bp, Artificial Sequence
  Synthetic: DMPK 3 forward 19:45769842-45769868; SpCas9
ggtcctgtagcctgtcagcgagt

SEQ ID NO: 1688 - DNA, 22 bp, Artificial Sequence
  Synthetic: DMPK 3 forward 19:45769843-45769868; SpCas9
gtcctgtagcctgtcagcgagt

SEQ ID NO: 1689 - DNA, 21 bp, Artificial Sequence
  Synthetic: DMPK 3 forward 19:45769844-45769868; SpCas9
tcctgtagcctgtcagcgagt

SEQ ID NO: 1690 - DNA, 20 bp, Artificial Sequence
  Synthetic: DMPK 3 forward 19:45769845-45769868; SpCas9
cctgtagcctgtcagcgagt

SEQ ID NO: 1691 - DNA, 19 bp, Artificial Sequence
  Synthetic: DMPK 3 forward 19:45769846-45769868; SpCas9
ctgtagcctgtcagcgagt

SEQ ID NO: 1692 - DNA, 18 bp, Artificial Sequence
  Synthetic: DMPK 3 forward 19:45769847-45769868; SpCas9
tgtagcctgtcagcgagt

SEQ ID NO: 1693 - DNA, 25 bp, Artificial Sequence
  Synthetic: DMPK 3 forward 19:45769842-45769870; SpCas9
ggtcctgtagcctgtcagcgagtcg

SEQ ID NO: 1694 - DNA, 24 bp, Artificial Sequence
  Synthetic: DMPK 3 forward 19:45769843-45769870; SpCas9
gtcctgtagcctgtcagcgagtcg

SEQ ID NO: 1695 - DNA, 23 bp, Artificial Sequence
  Synthetic: DMPK 3 forward 19:45769844-45769870; SpCas9
tcctgtagcctgtcagcgagtcg

SEQ ID NO: 1696 - DNA, 22 bp, Artificial Sequence
  Synthetic: DMPK 3 forward 19:45769845-45769870; SpCas9
cctgtagcctgtcagcgagtcg

SEQ ID NO: 1697 - DNA, 21 bp, Artificial Sequence
  Synthetic: DMPK 3 forward 19:45769846-45769870; SpCas9
ctgtagcctgtcagcgagtcg

SEQ ID NO: 1698 - DNA, 20 bp, Artificial Sequence
  Synthetic: DMPK 3 forward 19:45769847-45769870; SpCas9
tgtagcctgtcagcgagtcg

SEQ ID NO: 1699 - DNA, 19 bp, Artificial Sequence
  Synthetic: DMPK 3 forward 19:45769848-45769870; SpCas9
gtagcctgtcagcgagtcg

SEQ ID NO: 1700 - DNA, 18 bp, Artificial Sequence
  Synthetic: DMPK 3 forward 19:45769849-45769870; SpCas9
tagcctgtcagcgagtcg

SEQ ID NO: 1701 - DNA, 25 bp, Artificial Sequence
  Synthetic: DMPK 3 forward 19:45769843-45769871; SpCas9
gtcctgtagcctgtcagcgagtcgg

SEQ ID NO: 1702 - DNA, 24 bp, Artificial Sequence
  Synthetic: DMPK 3 forward 19:45769844-45769871; SpCas9
tcctgtagcctgtcagcgagtcgg

SEQ ID NO: 1703 - DNA, 23 bp, Artificial Sequence
  Synthetic: DMPK 3 forward 19:45769845-45769871; SpCas9
cctgtagcctgtcagcgagtcgg

SEQ ID NO: 1704 - DNA, 22 bp, Artificial Sequence
  Synthetic: DMPK 3 forward 19:45769846-45769871; SpCas9
ctgtagcctgtcagcgagtcgg

SEQ ID NO: 1705 - DNA, 21 bp, Artificial Sequence
  Synthetic: DMPK 3 forward 19:45769847-45769871; SpCas9
tgtagcctgtcagcgagtcgg

SEQ ID NO: 1706 - DNA, 20 bp, Artificial Sequence
  Synthetic: DMPK 3 forward 19:45769848-45769871; SpCas9
gtagcctgtcagcgagtcgg

SEQ ID NO: 1707 - DNA, 19 bp, Artificial Sequence
  Synthetic: DMPK 3 forward 19:45769849-45769871; SpCas9
tagcctgtcagcgagtcgg

SEQ ID NO: 1708 - DNA, 18 bp, Artificial Sequence
  Synthetic: DMPK 3 forward 19:45769850-45769871; SpCas9
agcctgtcagcgagtcgg

SEQ ID NO: 1709 - DNA, 25 bp, Artificial Sequence
  Synthetic: DMPK 3 reverse 19:45769845-45769873; SpCas9
gtcctccgactcgctgacaggctac

SEQ ID NO: 1710 - DNA, 24 bp, Artificial Sequence
  Synthetic: DMPK 3 reverse 19:45769846-45769873; SpCas9
tcctccgactcgctgacaggctac

SEQ ID NO: 1711 - DNA, 23 bp, Artificial Sequence
  Synthetic: DMPK 3 reverse 19:45769847-45769873; SpCas9
cctccgactcgctgacaggctac

SEQ ID NO: 1712 - DNA, 22 bp, Artificial Sequence
  Synthetic: DMPK 3 reverse 19:45769848-45769873; SpCas9
ctccgactcgctgacaggctac

SEQ ID NO: 1713 - DNA, 21 bp, Artificial Sequence
  Synthetic: DMPK 3 reverse 19:45769849-45769873; SpCas9
tccgactcgctgacaggctac

SEQ ID NO: 1714 - DNA, 20 bp, Artificial Sequence
  Synthetic: DMPK 3 reverse 19:45769850-45769873; SpCas9
ccgactcgctgacaggctac

SEQ ID NO: 1715 - DNA, 19 bp, Artificial Sequence
  Synthetic: DMPK 3 reverse 19:45769851-45769873; SpCas9
cgactcgctgacaggctac

SEQ ID NO: 1716 - DNA, 18 bp, Artificial Sequence
  Synthetic: DMPK 3 reverse 19:45769852-45769873; SpCas9
gactcgctgacaggctac

SEQ ID NO: 1717 - DNA, 25 bp, Artificial Sequence
  Synthetic: DMPK 3 reverse 19:45769846-45769874; SpCas9
cgtcctccgactcgctgacaggcta

SEQ ID NO: 1718 - DNA, 24 bp, Artificial Sequence
  Synthetic: DMPK 3 reverse 19:45769847-45769874; SpCas9
gtcctccgactcgctgacaggcta

SEQ ID NO: 1719 - DNA, 23 bp, Artificial Sequence
  Synthetic: DMPK 3 reverse 19:45769848-45769874; SpCas9
tcctccgactcgctgacaggcta

SEQ ID NO: 1720 - DNA, 22 bp, Artificial Sequence
  Synthetic: DMPK 3 reverse 19:45769849-45769874; SpCas9
cctccgactcgctgacaggcta

SEQ ID NO: 1721 - DNA, 21 bp, Artificial Sequence
  Synthetic: DMPK 3 reverse 19:45769850-45769874; SpCas9
ctccgactcgctgacaggcta

SEQ ID NO: 1722 - DNA, 20 bp, Artificial Sequence
  Synthetic: DMPK 3 reverse 19:45769851-45769874; SpCas9
tccgactcgctgacaggcta

SEQ ID NO: 1723 - DNA, 19 bp, Artificial Sequence
  Synthetic: DMPK 3 reverse 19:45769852-45769874; SpCas9
ccgactcgctgacaggcta

SEQ ID NO: 1724 - DNA, 18 bp, Artificial Sequence
  Synthetic: DMPK 3 reverse 19:45769853-45769874; SpCas9
cgactcgctgacaggcta

SEQ ID NO: 1725 - DNA, 25 bp, Artificial Sequence
  Synthetic: DMPK 3 forward 19:45769848-45769876; SpCas9
gtagcctgtcagcgagtcggaggac

SEQ ID NO: 1726 - DNA, 24 bp, Artificial Sequence
  Synthetic: DMPK 3 forward 19:45769849-45769876; SpCas9
tagcctgtcagcgagtcggaggac

SEQ ID NO: 1727 - DNA, 23 bp, Artificial Sequence
  Synthetic: DMPK 3 forward 19:45769850-45769876; SpCas9
agcctgtcagcgagtcggaggac

SEQ ID NO: 1728 - DNA, 22 bp, Artificial Sequence
  Synthetic: DMPK 3 forward 19:45769851-45769876; SpCas9
gcctgtcagcgagtcggaggac

SEQ ID NO: 1729 - DNA, 21 bp, Artificial Sequence
  Synthetic: DMPK 3 forward 19:45769852-45769876; SpCas9
cctgtcagcgagtcggaggac

SEQ ID NO: 1730 - DNA, 20 bp, Artificial Sequence
  Synthetic: DMPK 3 forward 19:45769853-45769876; SpCas9
ctgtcagcgagtcggaggac

SEQ ID NO: 1731 - DNA, 19 bp, Artificial Sequence
  Synthetic: DMPK 3 forward 19:45769854-45769876; SpCas9
tgtcagcgagtcggaggac

SEQ ID NO: 1732 - DNA, 18 bp, Artificial Sequence
  Synthetic: DMPK 3 forward 19:45769855-45769876; SpCas9
gtcagcgagtcggaggac

SEQ ID NO: 1733 - DNA, 25 bp, Artificial Sequence
  Synthetic: DMPK 3 forward 19:45769849-45769877; SpCas9
tagcctgtcagcgagtcggaggacg

SEQ ID NO: 1734 - DNA, 24 bp, Artificial Sequence
  Synthetic: DMPK 3 forward 19:45769850-45769877; SpCas9
agcctgtcagcgagtcggaggacg

SEQ ID NO: 1735 - DNA, 23 bp, Artificial Sequence
  Synthetic: DMPK 3 forward 19:45769851-45769877; SpCas9
gcctgtcagcgagtcggaggacg

SEQ ID NO: 1736 - DNA, 22 bp, Artificial Sequence
  Synthetic: DMPK 3 forward 19:45769852-45769877; SpCas9
cctgtcagcgagtcggaggacg

SEQ ID NO: 1737 - DNA, 21 bp, Artificial Sequence
  Synthetic: DMPK 3 forward 19:45769853-45769877; SpCas9
ctgtcagcgagtcggaggacg

SEQ ID NO: 1738 - DNA, 20 bp, Artificial Sequence
  Synthetic: DMPK 3 forward 19:45769854-45769877; SpCas9
tgtcagcgagtcggaggacg

SEQ ID NO: 1739 - DNA, 19 bp, Artificial Sequence
  Synthetic: DMPK 3 forward 19:45769855-45769877; SpCas9
gtcagcgagtcggaggacg

SEQ ID NO: 1740 - DNA, 18 bp, Artificial Sequence
  Synthetic: DMPK 3 forward 19:45769856-45769877; SpCas9
tcagcgagtcggaggacg

SEQ ID NO: 1741 - DNA, 25 bp, Artificial Sequence
  Synthetic: DMPK 3 reverse 19:45769852-45769880; SpCas9
tgacctcgtcctccgactcgctgac

SEQ ID NO: 1742 - DNA, 24 bp, Artificial Sequence
  Synthetic: DMPK 3 reverse 19:45769853-45769880; SpCas9
gacctcgtcctccgactcgctgac

SEQ ID NO: 1743 - DNA, 23 bp, Artificial Sequence
  Synthetic: DMPK 3 reverse 19:45769854-45769880; SpCas9
acctcgtcctccgactcgctgac

SEQ ID NO: 1744 - DNA, 22 bp, Artificial Sequence
  Synthetic: DMPK 3 reverse 19:45769855-45769880; SpCas9
cctcgtcctccgactcgctgac

SEQ ID NO: 1745 - DNA, 21 bp, Artificial Sequence
  Synthetic: DMPK 3 reverse 19:45769856-45769880; SpCas9
ctcgtcctccgactcgctgac

SEQ ID NO: 1746 - DNA, 20 bp, Artificial Sequence
  Synthetic: DMPK 3 reverse 19:45769857-45769880; SpCas9
tcgtcctccgactcgctgac

SEQ ID NO: 1747 - DNA, 19 bp, Artificial Sequence
  Synthetic: DMPK 3 reverse 19:45769858-45769880; SpCas9
cgtcctccgactcgctgac

SEQ ID NO: 1748 - DNA, 18 bp, Artificial Sequence
  Synthetic: DMPK 3 reverse 19:45769859-45769880; SpCas9
gtcctccgactcgctgac

SEQ ID NO: 1749 - DNA, 25 bp, Artificial Sequence
  Synthetic: DMPK 3 reverse 19:45769853-45769881; SpCas9
ttgacctcgtcctccgactcgctga

SEQ ID NO: 1750 - DNA, 24 bp, Artificial Sequence
  Synthetic: DMPK 3 reverse 19:45769854-45769881; SpCas9
tgacctcgtcctccgactcgctga

SEQ ID NO: 1751 - DNA, 23 bp, Artificial Sequence
  Synthetic: DMPK 3 reverse 19:45769855-45769881; SpCas9
gacctcgtcctccgactcgctga

SEQ ID NO: 1752 - DNA, 22 bp, Artificial Sequence
  Synthetic: DMPK 3 reverse 19:45769856-45769881; SpCas9
acctcgtcctccgactcgctga

SEQ ID NO: 1753 - DNA, 21 bp, Artificial Sequence
  Synthetic: DMPK 3 reverse 19:45769857-45769881; SpCas9
cctcgtcctccgactcgctga

SEQ ID NO: 1754 - DNA, 20 bp, Artificial Sequence
  Synthetic: DMPK 3 reverse 19:45769858-45769881; SpCas9
ctcgtcctccgactcgctga

SEQ ID NO: 1755 - DNA, 19 bp, Artificial Sequence
  Synthetic: DMPK 3 reverse 19:45769859-45769881; SpCas9
tcgtcctccgactcgctga

SEQ ID NO: 1756 - DNA, 18 bp, Artificial Sequence
  Synthetic: DMPK 3 reverse 19:45769860-45769881; SpCas9
cgtcctccgactcgctga

SEQ ID NO: 1757 - DNA, 25 bp, Artificial Sequence
  Synthetic: DMPK 3 forward 19:45769874-45769902; SpCas9
aggtcaataaatatccaaaccgccg

SEQ ID NO: 1758 - DNA, 24 bp, Artificial Sequence
  Synthetic: DMPK 3 forward 19:45769875-45769902; SpCas9
ggtcaataaatatccaaaccgccg

SEQ ID NO: 1759 - DNA, 23 bp, Artificial Sequence
  Synthetic: DMPK 3 forward 19:45769876-45769902; SpCas9
gtcaataaatatccaaaccgccg

SEQ ID NO: 1760 - DNA, 22 bp, Artificial Sequence
  Synthetic: DMPK 3 forward 19:45769877-45769902; SpCas9
tcaataaatatccaaaccgccg

SEQ ID NO: 1761 - DNA, 21 bp, Artificial Sequence
  Synthetic: DMPK 3 forward 19:45769878-45769902; SpCas9
caataaatatccaaaccgccg

SEQ ID NO: 1762 - DNA, 20 bp, Artificial Sequence
  Synthetic: DMPK 3 forward 19:45769879-45769902; SpCas9
aataaatatccaaaccgccg

SEQ ID NO: 1763 - DNA, 19 bp, Artificial Sequence
  Synthetic: DMPK 3 forward 19:45769880-45769902; SpCas9
ataaatatccaaaccgccg

SEQ ID NO: 1764 - DNA, 18 bp, Artificial Sequence
  Synthetic: DMPK 3 forward 19:45769881-45769902; SpCas9
taaatatccaaaccgccg

SEQ ID NO: 1765 - DNA, 25 bp, Artificial Sequence
  Synthetic: DMPK 3 forward 19:45769877-45769905; SpCas9
tcaataaatatccaaaccgccgaag

SEQ ID NO: 1766 - DNA, 24 bp, Artificial Sequence
  Synthetic: DMPK 3 forward 19:45769878-45769905; SpCas9
caataaatatccaaaccgccgaag

SEQ ID NO: 1767 - DNA, 23 bp, Artificial Sequence
  Synthetic: DMPK 3 forward 19:45769879-45769905; SpCas9
aataaatatccaaaccgccgaag

SEQ ID NO: 1768 - DNA, 22 bp, Artificial Sequence
  Synthetic: DMPK 3 forward 19:45769880-45769905; SpCas9
ataaatatccaaaccgccgaag

SEQ ID NO: 1769 - DNA, 21 bp, Artificial Sequence
  Synthetic: DMPK 3 forward 19:45769881-45769905; SpCas9
taaatatccaaaccgccgaag

SEQ ID NO: 1770 - DNA, 20 bp, Artificial Sequence
  Synthetic: DMPK 3 forward 19:45769882-45769905; SpCas9
aaatatccaaaccgccgaag

SEQ ID NO: 1771 - DNA, 19 bp, Artificial Sequence
  Synthetic: DMPK 3 forward 19:45769883-45769905; SpCas9
aatatccaaaccgccgaag

SEQ ID NO: 1772 - DNA, 18 bp, Artificial Sequence
  Synthetic: DMPK 3 forward 19:45769884-45769905; SpCas9
atatccaaaccgccgaag

SEQ ID NO: 1773 - DNA, 25 bp, Artificial Sequence
  Synthetic: DMPK 3 forward 19:45769878-45769906; SpCas9
caataaatatccaaaccgccgaagc

SEQ ID NO: 1774 - DNA, 24 bp, Artificial Sequence
  Synthetic: DMPK 3 forward 19:45769879-45769906; SpCas9
aataaatatccaaaccgccgaagc

SEQ ID NO: 1775 - DNA, 23 bp, Artificial Sequence
  Synthetic: DMPK 3 forward 19:45769880-45769906; SpCas9
ataaatatccaaaccgccgaagc

SEQ ID NO: 1776 - DNA, 22 bp, Artificial Sequence
  Synthetic: DMPK 3 forward 19:45769881-45769906; SpCas9
taaatatccaaaccgccgaagc

SEQ ID NO: 1777 - DNA, 21 bp, Artificial Sequence
  Synthetic: DMPK 3 forward 19:45769882-45769906; SpCas9
aaatatccaaaccgccgaagc

SEQ ID NO: 1778 - DNA, 20 bp, Artificial Sequence
  Synthetic: DMPK 3 forward 19:45769883-45769906; SpCas9
aatatccaaaccgccgaagc

SEQ ID NO: 1779 - DNA, 19 bp, Artificial Sequence
  Synthetic: DMPK 3 forward 19:45769884-45769906; SpCas9
atatccaaaccgccgaagc

SEQ ID NO: 1780 - DNA, 18 bp, Artificial Sequence
  Synthetic: DMPK 3 forward 19:45769885-45769906; SpCas9
tatccaaaccgccgaagc

SEQ ID NO: 1781 - DNA, 25 bp, Artificial Sequence
  Synthetic: DMPK 3 forward 19:45769881-45769909; SpCas9
taaatatccaaaccgccgaagcggg

SEQ ID NO: 1782 - DNA, 24 bp, Artificial Sequence
  Synthetic: DMPK 3 forward 19:45769882-45769909; SpCas9
aaatatccaaaccgccgaagcggg

SEQ ID NO: 1783 - DNA, 23 bp, Artificial Sequence
  Synthetic: DMPK 3 forward 19:45769883-45769909; SpCas9
aatatccaaaccgccgaagcggg

SEQ ID NO: 1784 - DNA, 22 bp, Artificial Sequence
  Synthetic: DMPK 3 forward 19:45769884-45769909; SpCas9
atatccaaaccgccgaagcggg

SEQ ID NO: 1785 - DNA, 21 bp, Artificial Sequence
  Synthetic: DMPK 3 forward 19:45769885-45769909; SpCas9
tatccaaaccgccgaagcggg

SEQ ID NO: 1786 - DNA, 20 bp, Artificial Sequence
  Synthetic: DMPK 3 forward 19:45769886-45769909; SpCas9
atccaaaccgccgaagcggg

SEQ ID NO: 1787 - DNA, 19 bp, Artificial Sequence
  Synthetic: DMPK 3 forward 19:45769887-45769909; SpCas9
tccaaaccgccgaagcggg

SEQ ID NO: 1788 - DNA, 18 bp, Artificial Sequence
  Synthetic: DMPK 3 forward 19:45769888-45769909; SpCas9
ccaaaccgccgaagcggg

SEQ ID NO: 1789 - DNA, 25 bp, Artificial Sequence
  Synthetic: DMPK 3 forward 19:45769883-45769911; SpCas9
aatatccaaaccgccgaagcgggcg

SEQ ID NO: 1790 - DNA, 24 bp, Artificial Sequence
  Synthetic: DMPK 3 forward 19:45769884-45769911; SpCas9
atatccaaaccgccgaagcgggcg

SEQ ID NO: 1791 - DNA, 23 bp, Artificial Sequence
  Synthetic: DMPK 3 forward 19:45769885-45769911; SpCas9
tatccaaaccgccgaagcgggcg

SEQ ID NO: 1792 - DNA, 22 bp, Artificial Sequence
  Synthetic: DMPK 3 forward 19:45769886-45769911; SpCas9
atccaaaccgccgaagcgggcg

SEQ ID NO: 1793 - DNA, 21 bp, Artificial Sequence
  Synthetic: DMPK 3 forward 19:45769887-45769911; SpCas9
tccaaaccgccgaagcgggcg

SEQ ID NO: 1794 - DNA, 20 bp, Artificial Sequence
  Synthetic: DMPK 3 forward 19:45769888-45769911; SpCas9
ccaaaccgccgaagcgggcg

SEQ ID NO: 1795 - DNA, 19 bp, Artificial Sequence
  Synthetic: DMPK 3 forward 19:45769889-45769911; SpCas9
caaaccgccgaagcgggcg

SEQ ID NO: 1796 - DNA, 18 bp, Artificial Sequence
  Synthetic: DMPK 3 forward 19:45769890-45769911; SpCas9
aaaccgccgaagcgggcg

SEQ ID NO: 1797 - DNA, 25 bp, Artificial Sequence
  Synthetic: DMPK 3 forward 19:45769887-45769915; SpCas9
tccaaaccgccgaagcgggcggagc

SEQ ID NO: 1798 - DNA, 24 bp, Artificial Sequence
  Synthetic: DMPK 3 forward 19:45769888-45769915; SpCas9
ccaaaccgccgaagcgggcggagc

SEQ ID NO: 1799 - DNA, 23 bp, Artificial Sequence
  Synthetic: DMPK 3 forward 19:45769889-45769915; SpCas9
caaaccgccgaagcgggcggagc

SEQ ID NO: 1800 - DNA, 22 bp, Artificial Sequence
  Synthetic: DMPK 3 forward 19:45769890-45769915; SpCas9
aaaccgccgaagcgggcggagc

SEQ ID NO: 1801 - DNA, 21 bp, Artificial Sequence
  Synthetic: DMPK 3 forward 19:45769891-45769915; SpCas9
aaccgccgaagcgggcggagc

SEQ ID NO: 1802 - DNA, 20 bp, Artificial Sequence
  Synthetic: DMPK 3 forward 19:45769892-45769915; SpCas9
accgccgaagcgggcggagc

SEQ ID NO: 1803 - DNA, 19 bp, Artificial Sequence
  Synthetic: DMPK 3 forward 19:45769893-45769915; SpCas9
ccgccgaagcgggcggagc

SEQ ID NO: 1804 - DNA, 18 bp, Artificial Sequence
  Synthetic: DMPK 3 forward 19:45769894-45769915; SpCas9
cgccgaagcgggcggagc

SEQ ID NO: 1805 - DNA, 25 bp, Artificial Sequence
  Synthetic: DMPK 3 reverse 19:45769888-45769916; SpCas9
gccggctccgcccgcttcggcggtt

SEQ ID NO: 1806 - DNA, 24 bp, Artificial Sequence
  Synthetic: DMPK 3 reverse 19:45769889-45769916; SpCas9
ccggctccgcccgcttcggcggtt

SEQ ID NO: 1807 - DNA, 23 bp, Artificial Sequence
  Synthetic: DMPK 3 reverse 19:45769890-45769916; SpCas9
cggctccgcccgcttcggcggtt

SEQ ID NO: 1808 - DNA, 22 bp, Artificial Sequence
  Synthetic: DMPK 3 reverse 19:45769891-45769916; SpCas9
ggctccgcccgcttcggcggtt

SEQ ID NO: 1809 - DNA, 21 bp, Artificial Sequence
  Synthetic: DMPK 3 reverse 19:45769892-45769916; SpCas9
gctccgcccgcttcggcggtt

SEQ ID NO: 1810 - DNA, 20 bp, Artificial Sequence
  Synthetic: DMPK 3 reverse 19:45769893-45769916; SpCas9
ctccgcccgcttcggcggtt

SEQ ID NO: 1811 - DNA, 19 bp, Artificial Sequence
  Synthetic: DMPK 3 reverse 19:45769894-45769916; SpCas9
tccgcccgcttcggcggtt

SEQ ID NO: 1812 - DNA, 18 bp, Artificial Sequence
  Synthetic: DMPK 3 reverse 19:45769895-45769916; SpCas9
ccgcccgcttcggcggtt

SEQ ID NO: 1813 - DNA, 25 bp, Artificial Sequence
  Synthetic: DMPK 3 forward 19:45769891-45769919; SpCas9
aaccgccgaagcgggcggagccggc

SEQ ID NO: 1814 - DNA, 24 bp, Artificial Sequence
  Synthetic: DMPK 3 forward 19:45769892-45769919; SpCas9
accgccgaagcgggcggagccggc

SEQ ID NO: 1815 - DNA, 23 bp, Artificial Sequence
  Synthetic: DMPK 3 forward 19:45769893-45769919; SpCas9
ccgccgaagcgggcggagccggc

SEQ ID NO: 1816 - DNA, 22 bp, Artificial Sequence
  Synthetic: DMPK 3 forward 19:45769894-45769919; SpCas9
cgccgaagcgggcggagccggc

SEQ ID NO: 1817 - DNA, 21 bp, Artificial Sequence
  Synthetic: DMPK 3 forward 19:45769895-45769919; SpCas9
gccgaagcgggcggagccggc

SEQ ID NO: 1818 - DNA, 20 bp, Artificial Sequence
  Synthetic: DMPK 3 forward 19:45769896-45769919; SpCas9
ccgaagcgggcggagccggc

SEQ ID NO: 1819 - DNA, 19 bp, Artificial Sequence
  Synthetic: DMPK 3 forward 19:45769897-45769919; SpCas9
cgaagcgggcggagccggc

SEQ ID NO: 1820 - DNA, 18 bp, Artificial Sequence
  Synthetic: DMPK 3 forward 19:45769898-45769919; SpCas9
gaagcgggcggagccggc

SEQ ID NO: 1821 - DNA, 25 bp, Artificial Sequence
  Synthetic: DMPK 3 forward 19:45769892-45769920; SpCas9
accgccgaagcgggcggagccggct

SEQ ID NO: 1822 - DNA, 24 bp, Artificial Sequence
  Synthetic: DMPK 3 forward 19:45769893-45769920; SpCas9
ccgccgaagcgggcggagccggct

SEQ ID NO: 1823 - DNA, 23 bp, Artificial Sequence
  Synthetic: DMPK 3 forward 19:45769894-45769920; SpCas9
cgccgaagcgggcggagccggct

SEQ ID NO: 1824 - DNA, 22 bp, Artificial Sequence
  Synthetic: DMPK 3 forward 19:45769895-45769920; SpCas9
gccgaagcgggcggagccggct

SEQ ID NO: 1825 - DNA, 21 bp, Artificial Sequence
  Synthetic: DMPK 3 forward 19:45769896-45769920; SpCas9
ccgaagcgggcggagccggct

SEQ ID NO: 1826 - DNA, 20 bp, Artificial Sequence
  Synthetic: DMPK 3 forward 19:45769897-45769920; SpCas9
cgaagcgggcggagccggct

SEQ ID NO: 1827 - DNA, 19 bp, Artificial Sequence
  Synthetic: DMPK 3 forward 19:45769898-45769920; SpCas9
gaagcgggcggagccggct

SEQ ID NO: 1828 - DNA, 18 bp, Artificial Sequence
  Synthetic: DMPK 3 forward 19:45769899-45769920; SpCas9
aagcgggcggagccggct

SEQ ID NO: 1829 - DNA, 25 bp, Artificial Sequence
  Synthetic: DMPK 3 forward 19:45769893-45769921; SpCas9
ccgccgaagcgggcggagccggctg

SEQ ID NO: 1830 - DNA, 24 bp, Artificial Sequence
  Synthetic: DMPK 3 forward 19:45769894-45769921; SpCas9
cgccgaagcgggcggagccggctg

SEQ ID NO: 1831 - DNA, 23 bp, Artificial Sequence
  Synthetic: DMPK 3 forward 19:45769895-45769921; SpCas9
gccgaagcgggcggagccggctg

SEQ ID NO: 1832 - DNA, 22 bp, Artificial Sequence
  Synthetic: DMPK 3 forward 19:45769896-45769921; SpCas9
ccgaagcgggcggagccggctg

SEQ ID NO: 1833 - DNA, 21 bp, Artificial Sequence
  Synthetic: DMPK 3 forward 19:45769897-45769921; SpCas9
cgaagcgggcggagccggctg

SEQ ID NO: 1834 - DNA, 20 bp, Artificial Sequence
  Synthetic: DMPK 3 forward 19:45769898-45769921; SpCas9
gaagcgggcggagccggctg

SEQ ID NO: 1835 - DNA, 19 bp, Artificial Sequence
  Synthetic: DMPK 3 forward 19:45769899-45769921; SpCas9
aagcgggcggagccggctg

SEQ ID NO: 1836 - DNA, 18 bp, Artificial Sequence
  Synthetic: DMPK 3 forward 19:45769900-45769921; SpCas9
agcgggcggagccggctg

SEQ ID NO: 1837 - DNA, 25 bp, Artificial Sequence
  Synthetic: DMPK 3 reverse 19:45769893-45769921; SpCas9
ccccagccggctccgcccgcttcgg

SEQ ID NO: 1838 - DNA, 24 bp, Artificial Sequence
  Synthetic: DMPK 3 reverse 19:45769894-45769921; SpCas9
cccagccggctccgcccgcttcgg

SEQ ID NO: 1839 - DNA, 23 bp, Artificial Sequence
  Synthetic: DMPK 3 reverse 19:45769895-45769921; SpCas9
ccagccggctccgcccgcttcgg

SEQ ID NO: 1840 - DNA, 22 bp, Artificial Sequence
  Synthetic: DMPK 3 reverse 19:45769896-45769921; SpCas9
cagccggctccgcccgcttcgg

SEQ ID NO: 1841 - DNA, 21 bp, Artificial Sequence
  Synthetic: DMPK 3 reverse 19:45769897-45769921; SpCas9
agccggctccgcccgcttcgg

SEQ ID NO: 1842 - DNA, 20 bp, Artificial Sequence
  Synthetic: DMPK 3 reverse 19:45769898-45769921; SpCas9
gccggctccgcccgcttcgg

SEQ ID NO: 1843 - DNA, 19 bp, Artificial Sequence
  Synthetic: DMPK 3 reverse 19:45769899-45769921; SpCas9
ccggctccgcccgcttcgg

SEQ ID NO: 1844 - DNA, 18 bp, Artificial Sequence
  Synthetic: DMPK 3 reverse 19:45769900-45769921; SpCas9
cggctccgcccgcttcgg

SEQ ID NO: 1845 - DNA, 25 bp, Artificial Sequence
  Synthetic: DMPK 3 reverse 19:45769896-45769924; SpCas9
gagccccagccggctccgcccgctt

SEQ ID NO: 1846 - DNA, 24 bp, Artificial Sequence
  Synthetic: DMPK 3 reverse 19:45769897-45769924; SpCas9
agccccagccggctccgcccgctt

SEQ ID NO: 1847 - DNA, 23 bp, Artificial Sequence
  Synthetic: DMPK 3 reverse 19:45769898-45769924; SpCas9
gccccagccggctccgcccgctt

SEQ ID NO: 1848 - DNA, 22 bp, Artificial Sequence
  Synthetic: DMPK 3 reverse 19:45769899-45769924; SpCas9
ccccagccggctccgcccgctt

SEQ ID NO: 1849 - DNA, 21 bp, Artificial Sequence
  Synthetic: DMPK 3 reverse 19:45769900-45769924; SpCas9
cccagccggctccgcccgctt

SEQ ID NO: 1850 - DNA, 20 bp, Artificial Sequence
  Synthetic: DMPK 3 reverse 19:45769901-45769924; SpCas9
ccagccggctccgcccgctt

SEQ ID NO: 1851 - DNA, 19 bp, Artificial Sequence
  Synthetic: DMPK 3 reverse 19:45769902-45769924; SpCas9
cagccggctccgcccgctt

SEQ ID NO: 1852 - DNA, 18 bp, Artificial Sequence
  Synthetic: DMPK 3 reverse 19:45769903-45769924; SpCas9
agccggctccgcccgctt

SEQ ID NO: 1853 - DNA, 25 bp, Artificial Sequence
  Synthetic: DMPK 3 forward 19:45769900-45769928; SpCas9
agcgggcggagccggctggggctcc

SEQ ID NO: 1854 - DNA, 24 bp, Artificial Sequence
  Synthetic: DMPK 3 forward 19:45769901-45769928; SpCas9
gcgggcggagccggctggggctcc

SEQ ID NO: 1855 - DNA, 23 bp, Artificial Sequence
  Synthetic: DMPK 3 forward 19:45769902-45769928; SpCas9
cgggcggagccggctggggctcc

SEQ ID NO: 1856 - DNA, 22 bp, Artificial Sequence
  Synthetic: DMPK 3 forward 19:45769903-45769928; SpCas9
gggcggagccggctggggctcc

SEQ ID NO: 1857 - DNA, 21 bp, Artificial Sequence
  Synthetic: DMPK 3 forward 19:45769904-45769928; SpCas9
ggcggagccggctggggctcc

SEQ ID NO: 1858 - DNA, 20 bp, Artificial Sequence
  Synthetic: DMPK 3 forward 19:45769905-45769928; SpCas9
gcggagccggctggggctcc

SEQ ID NO: 1859 - DNA, 19 bp, Artificial Sequence
  Synthetic: DMPK 3 forward 19:45769906-45769928; SpCas9
cggagccggctggggctcc

SEQ ID NO: 1860 - DNA, 18 bp, Artificial Sequence
  Synthetic: DMPK 3 forward 19:45769907-45769928; SpCas9
ggagccggctggggctcc

SEQ ID NO: 1861 - DNA, 25 bp, Artificial Sequence
  Synthetic: DMPK 3 forward 19:45769902-45769930; SpCas9
cgggcggagccggctggggctccga

SEQ ID NO: 1862 - DNA, 24 bp, Artificial Sequence
  Synthetic: DMPK 3 forward 19:45769903-45769930; SpCas9
gggcggagccggctggggctccga

SEQ ID NO: 1863 - DNA, 23 bp, Artificial Sequence
  Synthetic: DMPK 3 forward 19:45769904-45769930; SpCas9
ggcggagccggctggggctccga

SEQ ID NO: 1864 - DNA, 22 bp, Artificial Sequence
  Synthetic: DMPK 3 forward 19:45769905-45769930; SpCas9
gcggagccggctggggctccga

SEQ ID NO: 1865 - DNA, 21 bp, Artificial Sequence
  Synthetic: DMPK 3 forward 19:45769906-45769930; SpCas9
cggagccggctggggctccga

SEQ ID NO: 1866 - DNA, 20 bp, Artificial Sequence
  Synthetic: DMPK 3 forward 19:45769907-45769930; SpCas9
ggagccggctggggctccga

SEQ ID NO: 1867 - DNA, 19 bp, Artificial Sequence
  Synthetic: DMPK 3 forward 19:45769908-45769930; SpCas9
gagccggctggggctccga

SEQ ID NO: 1868 - DNA, 18 bp, Artificial Sequence
  Synthetic: DMPK 3 forward 19:45769909-45769930; SpCas9
agccggctggggctccga

SEQ ID NO: 1869 - DNA, 25 bp, Artificial Sequence
  Synthetic: DMPK 3 forward 19:45769905-45769933; SpCas9
gcggagccggctggggctccgagag

SEQ ID NO: 1870 - DNA, 24 bp, Artificial Sequence
  Synthetic: DMPK 3 forward 19:45769906-45769933; SpCas9
cggagccggctggggctccgagag

SEQ ID NO: 1871 - DNA, 23 bp, Artificial Sequence
  Synthetic: DMPK 3 forward 19:45769907-45769933; SpCas9
ggagccggctggggctccgagag

SEQ ID NO: 1872 - DNA, 22 bp, Artificial Sequence
  Synthetic: DMPK 3 forward 19:45769908-45769933; SpCas9
gagccggctggggctccgagag

SEQ ID NO: 1873 - DNA, 21 bp, Artificial Sequence
  Synthetic: DMPK 3 forward 19:45769909-45769933; SpCas9
agccggctggggctccgagag

SEQ ID NO: 1874 - DNA, 20 bp, Artificial Sequence
  Synthetic: DMPK 3 forward 19:45769910-45769933; SpCas9
gccggctggggctccgagag

SEQ ID NO: 1875 - DNA, 19 bp, Artificial Sequence
  Synthetic: DMPK 3 forward 19:45769911-45769933; SpCas9
ccggctggggctccgagag

SEQ ID NO: 1876 - DNA, 18 bp, Artificial Sequence
  Synthetic: DMPK 3 forward 19:45769912-45769933; SpCas9
cggctggggctccgagag

SEQ ID NO: 1877 - DNA, 25 bp, Artificial Sequence
  Synthetic: DMPK 3 forward 19:45769911-45769939; SpCas9
ccggctggggctccgagagcagcgc

SEQ ID NO: 1878 - DNA, 24 bp, Artificial Sequence
  Synthetic: DMPK 3 forward 19:45769912-45769939; SpCas9
cggctggggctccgagagcagcgc

SEQ ID NO: 1879 - DNA, 23 bp, Artificial Sequence
  Synthetic: DMPK 3 forward 19:45769913-45769939; SpCas9
ggctggggctccgagagcagcgc

SEQ ID NO: 1880 - DNA, 22 bp, Artificial Sequence
  Synthetic: DMPK 3 forward 19:45769914-45769939; SpCas9
gctggggctccgagagcagcgc

SEQ ID NO: 1881 - DNA, 21 bp, Artificial Sequence
  Synthetic: DMPK 3 forward 19:45769915-45769939; SpCas9
ctggggctccgagagcagcgc

SEQ ID NO: 1882 - DNA, 20 bp, Artificial Sequence
  Synthetic: DMPK 3 forward 19:45769916-45769939; SpCas9
tggggctccgagagcagcgc

SEQ ID NO: 1883 - DNA, 19 bp, Artificial Sequence
  Synthetic: DMPK 3 forward 19:45769917-45769939; SpCas9
ggggctccgagagcagcgc

SEQ ID NO: 1884 - DNA, 18 bp, Artificial Sequence
  Synthetic: DMPK 3 forward 19:45769918-45769939; SpCas9
gggctccgagagcagcgc

SEQ ID NO: 1885 - DNA, 25 bp, Artificial Sequence
  Synthetic: DMPK 3 reverse 19:45769911-45769939; SpCas9
cttgcgctgctctcggagccccagc

SEQ ID NO: 1886 - DNA, 24 bp, Artificial Sequence
  Synthetic: DMPK 3 reverse 19:45769912-45769939; SpCas9
ttgcgctgctctcggagccccagc

SEQ ID NO: 1887 - DNA, 23 bp, Artificial Sequence
  Synthetic: DMPK 3 reverse 19:45769913-45769939; SpCas9
tgcgctgctctcggagccccagc

SEQ ID NO: 1888 - DNA, 22 bp, Artificial Sequence
  Synthetic: DMPK 3 reverse 19:45769914-45769939; SpCas9
gcgctgctctcggagccccagc

SEQ ID NO: 1889 - DNA, 21 bp, Artificial Sequence
  Synthetic: DMPK 3 reverse 19:45769915-45769939; SpCas9
cgctgctctcggagccccagc

SEQ ID NO: 1890 - DNA, 20 bp, Artificial Sequence
  Synthetic: DMPK 3 reverse 19:45769916-45769939; SpCas9
gctgctctcggagccccagc

SEQ ID NO: 1891 - DNA, 19 bp, Artificial Sequence
  Synthetic: DMPK 3 reverse 19:45769917-45769939; SpCas9
ctgctctcggagccccagc

SEQ ID NO: 1892 - DNA, 18 bp, Artificial Sequence
  Synthetic: DMPK 3 reverse 19:45769918-45769939; SpCas9
tgctctcggagccccagc

SEQ ID NO: 1893 - DNA, 25 bp, Artificial Sequence
  Synthetic: DMPK 3 forward 19:45769915-45769943; SpCas9
ctggggctccgagagcagcgcaagt

SEQ ID NO: 1894 - DNA, 24 bp, Artificial Sequence
  Synthetic: DMPK 3 forward 19:45769916-45769943; SpCas9
tggggctccgagagcagcgcaagt

SEQ ID NO: 1895 - DNA, 23 bp, Artificial Sequence
  Synthetic: DMPK 3 forward 19:45769917-45769943; SpCas9
ggggctccgagagcagcgcaagt

SEQ ID NO: 1896 - DNA, 22 bp, Artificial Sequence
  Synthetic: DMPK 3 forward 19:45769918-45769943; SpCas9
gggctccgagagcagcgcaagt

SEQ ID NO: 1897 - DNA, 21 bp, Artificial Sequence
  Synthetic: DMPK 3 forward 19:45769919-45769943; SpCas9
ggctccgagagcagcgcaagt

SEQ ID NO: 1898 - DNA, 20 bp, Artificial Sequence
  Synthetic: DMPK 3 forward 19:45769920-45769943; SpCas9
gctccgagagcagcgcaagt

SEQ ID NO: 1899 - DNA, 19 bp, Artificial Sequence
  Synthetic: DMPK 3 forward 19:45769921-45769943; SpCas9
ctccgagagcagcgcaagt

SEQ ID NO: 1900 - DNA, 18 bp, Artificial Sequence
  Synthetic: DMPK 3 forward 19:45769922-45769943; SpCas9
tccgagagcagcgcaagt

SEQ ID NO: 1901 - DNA, 25 bp, Artificial Sequence
  Synthetic: DMPK 3 reverse 19:45769915-45769943; SpCas9
ctcacttgcgctgctctcggagccc

SEQ ID NO: 1902 - DNA, 24 bp, Artificial Sequence
  Synthetic: DMPK 3 reverse 19:45769916-45769943; SpCas9
tcacttgcgctgctctcggagccc

SEQ ID NO: 1903 - DNA, 23 bp, Artificial Sequence
  Synthetic: DMPK 3 reverse 19:45769917-45769943; SpCas9
cacttgcgctgctctcggagccc

SEQ ID NO: 1904 - DNA, 22 bp, Artificial Sequence
  Synthetic: DMPK 3 reverse 19:45769918-45769943; SpCas9
acttgcgctgctctcggagccc

SEQ ID NO: 1905 - DNA, 21 bp, Artificial Sequence
  Synthetic: DMPK 3 reverse 19:45769919-45769943; SpCas9
cttgcgctgctctcggagccc

SEQ ID NO: 1906 - DNA, 20 bp, Artificial Sequence
  Synthetic: DMPK 3 reverse 19:45769920-45769943; SpCas9
ttgcgctgctctcggagccc

SEQ ID NO: 1907 - DNA, 19 bp, Artificial Sequence
  Synthetic: DMPK 3 reverse 19:45769921-45769943; SpCas9
tgcgctgctctcggagccc

SEQ ID NO: 1908 - DNA, 18 bp, Artificial Sequence
  Synthetic: DMPK 3 reverse 19:45769922-45769943; SpCas9
gcgctgctctcggagccc

SEQ ID NO: 1909 - DNA, 25 bp, Artificial Sequence
  Synthetic: DMPK 3 forward 19:45769916-45769944; SpCas9
tggggctccgagagcagcgcaagtg

SEQ ID NO: 1910 - DNA, 24 bp, Artificial Sequence
  Synthetic: DMPK 3 forward 19:45769917-45769944; SpCas9
ggggctccgagagcagcgcaagtg

SEQ ID NO: 1911 - DNA, 23 bp, Artificial Sequence
  Synthetic: DMPK 3 forward 19:45769918-45769944; SpCas9
gggctccgagagcagcgcaagtg

SEQ ID NO: 1912 - DNA, 22 bp, Artificial Sequence
  Synthetic: DMPK 3 forward 19:45769919-45769944; SpCas9
ggctccgagagcagcgcaagtg

SEQ ID NO: 1913 - DNA, 21 bp, Artificial Sequence
  Synthetic: DMPK 3 forward 19:45769920-45769944; SpCas9
gctccgagagcagcgcaagtg

SEQ ID NO: 1914 - DNA, 20 bp, Artificial Sequence
  Synthetic: DMPK 3 forward 19:45769921-45769944; SpCas9
ctccgagagcagcgcaagtg

SEQ ID NO: 1915 - DNA, 19 bp, Artificial Sequence
  Synthetic: DMPK 3 forward 19:45769922-45769944; SpCas9
tccgagagcagcgcaagtg

SEQ ID NO: 1916 - DNA, 18 bp, Artificial Sequence
  Synthetic: DMPK 3 forward 19:45769923-45769944; SpCas9
ccgagagcagcgcaagtg

SEQ ID NO: 1917 - DNA, 25 bp, Artificial Sequence
  Synthetic: DMPK 3 forward 19:45769918-45769946; SpCas9
gggctccgagagcagcgcaagtgag

SEQ ID NO: 1918 - DNA, 24 bp, Artificial Sequence
  Synthetic: DMPK 3 forward 19:45769919-45769946; SpCas9
ggctccgagagcagcgcaagtgag

SEQ ID NO: 1919 - DNA, 23 bp, Artificial Sequence
  Synthetic: DMPK 3 forward 19:45769920-45769946; SpCas9
gctccgagagcagcgcaagtgag

SEQ ID NO: 1920 - DNA, 22 bp, Artificial Sequence
  Synthetic: DMPK 3 forward 19:45769921-45769946; SpCas9
ctccgagagcagcgcaagtgag

SEQ ID NO: 1921 - DNA, 21 bp, Artificial Sequence
  Synthetic: DMPK 3 forward 19:45769922-45769946; SpCas9
tccgagagcagcgcaagtgag

SEQ ID NO: 1922 - DNA, 20 bp, Artificial Sequence
  Synthetic: DMPK 3 forward 19:45769923-45769946; SpCas9
ccgagagcagcgcaagtgag

SEQ ID NO: 1923 - DNA, 19 bp, Artificial Sequence
  Synthetic: DMPK 3 forward 19:45769924-45769946; SpCas9
cgagagcagcgcaagtgag

SEQ ID NO: 1924 - DNA, 18 bp, Artificial Sequence
  Synthetic: DMPK 3 forward 19:45769925-45769946; SpCas9
gagagcagcgcaagtgag

SEQ ID NO: 1925 - DNA, 25 bp, Artificial Sequence
  Synthetic: DMPK 3 forward 19:45769919-45769947; SpCas9
ggctccgagagcagcgcaagtgagg

SEQ ID NO: 1926 - DNA, 24 bp, Artificial Sequence
  Synthetic: DMPK 3 forward 19:45769920-45769947; SpCas9
gctccgagagcagcgcaagtgagg

SEQ ID NO: 1927 - DNA, 23 bp, Artificial Sequence
  Synthetic: DMPK 3 forward 19:45769921-45769947; SpCas9
ctccgagagcagcgcaagtgagg

SEQ ID NO: 1928 - DNA, 22 bp, Artificial Sequence
  Synthetic: DMPK 3 forward 19:45769922-45769947; SpCas9
tccgagagcagcgcaagtgagg

SEQ ID NO: 1929 - DNA, 21 bp, Artificial Sequence
  Synthetic: DMPK 3 forward 19:45769923-45769947; SpCas9
ccgagagcagcgcaagtgagg

SEQ ID NO: 1930 - DNA, 20 bp, Artificial Sequence
  Synthetic: DMPK 3 forward 19:45769924-45769947; SpCas9
cgagagcagcgcaagtgagg

SEQ ID NO: 1931 - DNA, 19 bp, Artificial Sequence
  Synthetic: DMPK 3 forward 19:45769925-45769947; SpCas9
gagagcagcgcaagtgagg

SEQ ID NO: 1932 - DNA, 18 bp, Artificial Sequence
  Synthetic: DMPK 3 forward 19:45769926-45769947; SpCas9
agagcagcgcaagtgagg

SEQ ID NO: 1933 - DNA, 25 bp, Artificial Sequence
  Synthetic: DMPK 3 forward 19:45769920-45769948; SpCas9
gctccgagagcagcgcaagtgagga

SEQ ID NO: 1934 - DNA, 24 bp, Artificial Sequence
  Synthetic: DMPK 3 forward 19:45769921-45769948; SpCas9
ctccgagagcagcgcaagtgagga

SEQ ID NO: 1935 - DNA, 23 bp, Artificial Sequence
  Synthetic: DMPK 3 forward 19:45769922-45769948; SpCas9
tccgagagcagcgcaagtgagga

SEQ ID NO: 1936 - DNA, 22 bp, Artificial Sequence
  Synthetic: DMPK 3 forward 19:45769923-45769948; SpCas9
ccgagagcagcgcaagtgagga

SEQ ID NO: 1937 - DNA, 21 bp, Artificial Sequence
  Synthetic: DMPK 3 forward 19:45769924-45769948; SpCas9
cgagagcagcgcaagtgagga

SEQ ID NO: 1938 - DNA, 20 bp, Artificial Sequence
  Synthetic: DMPK 3 forward 19:45769925-45769948; SpCas9
gagagcagcgcaagtgagga

SEQ ID NO: 1939 - DNA, 19 bp, Artificial Sequence
  Synthetic: DMPK 3 forward 19:45769926-45769948; SpCas9
agagcagcgcaagtgagga

SEQ ID NO: 1940 - DNA, 18 bp, Artificial Sequence
  Synthetic: DMPK 3 forward 19:45769927-45769948; SpCas9
gagcagcgcaagtgagga

SEQ ID NO: 1941 - DNA, 25 bp, Artificial Sequence
  Synthetic: DMPK 3 forward 19:45769921-45769949; SpCas9
ctccgagagcagcgcaagtgaggag

SEQ ID NO: 1942 - DNA, 24 bp, Artificial Sequence
  Synthetic: DMPK 3 forward 19:45769922-45769949; SpCas9
tccgagagcagcgcaagtgaggag

SEQ ID NO: 1943 - DNA, 23 bp, Artificial Sequence
  Synthetic: DMPK 3 forward 19:45769923-45769949; SpCas9
ccgagagcagcgcaagtgaggag

SEQ ID NO: 1944 - DNA, 22 bp, Artificial Sequence
  Synthetic: DMPK 3 forward 19:45769924-45769949; SpCas9
cgagagcagcgcaagtgaggag

SEQ ID NO: 1945 - DNA, 21 bp, Artificial Sequence
  Synthetic: DMPK 3 forward 19:45769925-45769949; SpCas9
gagagcagcgcaagtgaggag

SEQ ID NO: 1946 - DNA, 20 bp, Artificial Sequence
  Synthetic: DMPK 3 forward 19:45769926-45769949; SpCas9
agagcagcgcaagtgaggag

SEQ ID NO: 1947 - DNA, 19 bp, Artificial Sequence
  Synthetic: DMPK 3 forward 19:45769927-45769949; SpCas9
gagcagcgcaagtgaggag

SEQ ID NO: 1948 - DNA, 18 bp, Artificial Sequence
  Synthetic: DMPK 3 forward 19:45769928-45769949; SpCas9
agcagcgcaagtgaggag

SEQ ID NO: 1949 - DNA, 25 bp, Artificial Sequence
  Synthetic: DMPK 3 reverse 19:45769921-45769949; SpCas9
cccctcctcacttgcgctgctctcg

SEQ ID NO: 1950 - DNA, 24 bp, Artificial Sequence
  Synthetic: DMPK 3 reverse 19:45769922-45769949; SpCas9
ccctcctcacttgcgctgctctcg

SEQ ID NO: 1951 - DNA, 23 bp, Artificial Sequence
  Synthetic: DMPK 3 reverse 19:45769923-45769949; SpCas9
cctcctcacttgcgctgctctcg

SEQ ID NO: 1952 - DNA, 22 bp, Artificial Sequence
  Synthetic: DMPK 3 reverse 19:45769924-45769949; SpCas9
ctcctcacttgcgctgctctcg

SEQ ID NO: 1953 - DNA, 21 bp, Artificial Sequence
  Synthetic: DMPK 3 reverse 19:45769925-45769949; SpCas9
tcctcacttgcgctgctctcg

SEQ ID NO: 1954 - DNA, 20 bp, Artificial Sequence
  Synthetic: DMPK 3 reverse 19:45769926-45769949; SpCas9
cctcacttgcgctgctctcg

SEQ ID NO: 1955 - DNA, 19 bp, Artificial Sequence
  Synthetic: DMPK 3 reverse 19:45769927-45769949; SpCas9
ctcacttgcgctgctctcg

SEQ ID NO: 1956 - DNA, 18 bp, Artificial Sequence
  Synthetic: DMPK 3 reverse 19:45769928-45769949; SpCas9
tcacttgcgctgctctcg

SEQ ID NO: 1957 - DNA, 25 bp, Artificial Sequence
  Synthetic: DMPK 3 forward 19:45769922-45769950; SpCas9
tccgagagcagcgcaagtgaggagg

SEQ ID NO: 1958 - DNA, 24 bp, Artificial Sequence
  Synthetic: DMPK 3 forward 19:45769923-45769950; SpCas9
ccgagagcagcgcaagtgaggagg

SEQ ID NO: 1959 - DNA, 23 bp, Artificial Sequence
  Synthetic: DMPK 3 forward 19:45769924-45769950; SpCas9
cgagagcagcgcaagtgaggagg

SEQ ID NO: 1960 - DNA, 22 bp, Artificial Sequence
  Synthetic: DMPK 3 forward 19:45769925-45769950; SpCas9
gagagcagcgcaagtgaggagg

SEQ ID NO: 1961 - DNA, 21 bp, Artificial Sequence
  Synthetic: DMPK 3 forward 19:45769926-45769950; SpCas9
agagcagcgcaagtgaggagg

SEQ ID NO: 1962 - DNA, 20 bp, Artificial Sequence
  Synthetic: DMPK 3 forward 19:45769927-45769950; SpCas9
gagcagcgcaagtgaggagg

SEQ ID NO: 1963 - DNA, 19 bp, Artificial Sequence
  Synthetic: DMPK 3 forward 19:45769928-45769950; SpCas9
agcagcgcaagtgaggagg

SEQ ID NO: 1964 - DNA, 18 bp, Artificial Sequence
  Synthetic: DMPK 3 forward 19:45769929-45769950; SpCas9
gcagcgcaagtgaggagg

SEQ ID NO: 1965 - DNA, 25 bp, Artificial Sequence
  Synthetic: DMPK 3 forward 19:45769923-45769951; SpCas9
ccgagagcagcgcaagtgaggaggg

SEQ ID NO: 1966 - DNA, 24 bp, Artificial Sequence
  Synthetic: DMPK 3 forward 19:45769924-45769951; SpCas9
cgagagcagcgcaagtgaggaggg

SEQ ID NO: 1967 - DNA, 23 bp, Artificial Sequence
  Synthetic: DMPK 3 forward 19:45769925-45769951; SpCas9
gagagcagcgcaagtgaggaggg

SEQ ID NO: 1968 - DNA, 22 bp, Artificial Sequence
  Synthetic: DMPK 3 forward 19:45769926-45769951; SpCas9
agagcagcgcaagtgaggaggg

SEQ ID NO: 1969 - DNA, 21 bp, Artificial Sequence
  Synthetic: DMPK 3 forward 19:45769927-45769951; SpCas9
gagcagcgcaagtgaggaggg

SEQ ID NO: 1970 - DNA, 20 bp, Artificial Sequence
  Synthetic: DMPK 3 forward 19:45769928-45769951; SpCas9
agcagcgcaagtgaggaggg

SEQ ID NO: 1971 - DNA, 19 bp, Artificial Sequence
  Synthetic: DMPK 3 forward 19:45769929-45769951; SpCas9
gcagcgcaagtgaggaggg

SEQ ID NO: 1972 - DNA, 18 bp, Artificial Sequence
  Synthetic: DMPK 3 forward 19:45769930-45769951; SpCas9
cagcgcaagtgaggaggg

SEQ ID NO: 1973 - DNA, 25 bp, Artificial Sequence
  Synthetic: DMPK 3 reverse 19:45769923-45769951; SpCas9
cccccctcctcacttgcgctgctct

SEQ ID NO: 1974 - DNA, 24 bp, Artificial Sequence
  Synthetic: DMPK 3 reverse 19:45769924-45769951; SpCas9
ccccctcctcacttgcgctgctct

SEQ ID NO: 1975 - DNA, 23 bp, Artificial Sequence
  Synthetic: DMPK 3 reverse 19:45769925-45769951; SpCas9
cccctcctcacttgcgctgctct

SEQ ID NO: 1976 - DNA, 22 bp, Artificial Sequence
  Synthetic: DMPK 3 reverse 19:45769926-45769951; SpCas9
ccctcctcacttgcgctgctct

SEQ ID NO: 1977 - DNA, 21 bp, Artificial Sequence
  Synthetic: DMPK 3 reverse 19:45769927-45769951; SpCas9
cctcctcacttgcgctgctct

SEQ ID NO: 1978 - DNA, 20 bp, Artificial Sequence
  Synthetic: DMPK 3 reverse 19:45769928-45769951; SpCas9
ctcctcacttgcgctgctct

SEQ ID NO: 1979 - DNA, 19 bp, Artificial Sequence
  Synthetic: DMPK 3 reverse 19:45769929-45769951; SpCas9
tcctcacttgcgctgctct

SEQ ID NO: 1980 - DNA, 18 bp, Artificial Sequence
  Synthetic: DMPK 3 reverse 19:45769930-45769951; SpCas9
cctcacttgcgctgctct

SEQ ID NO: 1981 - DNA, 25 bp, Artificial Sequence
  Synthetic: DMPK 3 forward 19:45769928-45769956; SpCas9
agcagcgcaagtgaggaggggggcg

SEQ ID NO: 1982 - DNA, 24 bp, Artificial Sequence
  Synthetic: DMPK 3 forward 19:45769929-45769956; SpCas9
gcagcgcaagtgaggaggggggcg

SEQ ID NO: 1983 - DNA, 23 bp, Artificial Sequence
  Synthetic: DMPK 3 forward 19:45769930-45769956; SpCas9
cagcgcaagtgaggaggggggcg

SEQ ID NO: 1984 - DNA, 22 bp, Artificial Sequence
  Synthetic: DMPK 3 forward 19:45769931-45769956; SpCas9
agcgcaagtgaggaggggggcg

SEQ ID NO: 1985 - DNA, 21 bp, Artificial Sequence
  Synthetic: DMPK 3 forward 19:45769932-45769956; SpCas9
gcgcaagtgaggaggggggcg

SEQ ID NO: 1986 - DNA, 20 bp, Artificial Sequence
  Synthetic: DMPK 3 forward 19:45769933-45769956; SpCas9
cgcaagtgaggaggggggcg

SEQ ID NO: 1987 - DNA, 19 bp, Artificial Sequence
  Synthetic: DMPK 3 forward 19:45769934-45769956; SpCas9
gcaagtgaggaggggggcg

SEQ ID NO: 1988 - DNA, 18 bp, Artificial Sequence
  Synthetic: DMPK 3 forward 19:45769935-45769956; SpCas9
caagtgaggaggggggcg

SEQ ID NO: 1989 - DNA, 25 bp, Artificial Sequence
  Synthetic: DMPK 3 forward 19:45769929-45769957; SpCas9
gcagcgcaagtgaggaggggggcgc

SEQ ID NO: 1990 - DNA, 24 bp, Artificial Sequence
  Synthetic: DMPK 3 forward 19:45769930-45769957; SpCas9
cagcgcaagtgaggaggggggcgc

SEQ ID NO: 1991 - DNA, 23 bp, Artificial Sequence
  Synthetic: DMPK 3 forward 19:45769931-45769957; SpCas9
agcgcaagtgaggaggggggcgc

SEQ ID NO: 1992 - DNA, 22 bp, Artificial Sequence
  Synthetic: DMPK 3 forward 19:45769932-45769957; SpCas9
gcgcaagtgaggaggggggcgc

SEQ ID NO: 1993 - DNA, 21 bp, Artificial Sequence
  Synthetic: DMPK 3 forward 19:45769933-45769957; SpCas9
cgcaagtgaggaggggggcgc

SEQ ID NO: 1994 - DNA, 20 bp, Artificial Sequence
  Synthetic: DMPK 3 forward 19:45769934-45769957; SpCas9
gcaagtgaggaggggggcgc

SEQ ID NO: 1995 - DNA, 19 bp, Artificial Sequence
  Synthetic: DMPK 3 forward 19:45769935-45769957; SpCas9
caagtgaggaggggggcgc

SEQ ID NO: 1996 - DNA, 18 bp, Artificial Sequence
  Synthetic: DMPK 3 forward 19:45769936-45769957; SpCas9
aagtgaggaggggggcgc

SEQ ID NO: 1997 - DNA, 25 bp, Artificial Sequence
  Synthetic: DMPK 3 forward 19:45769942-45769970; SpCas9
ggaggggggcgcgggatccccgaaa

SEQ ID NO: 1998 - DNA, 24 bp, Artificial Sequence
  Synthetic: DMPK 3 forward 19:45769943-45769970; SpCas9
gaggggggcgcgggatccccgaaa

SEQ ID NO: 1999 - DNA, 23 bp, Artificial Sequence
  Synthetic: DMPK 3 forward 19:45769944-45769970; SpCas9
aggggggcgcgggatccccgaaa

SEQ ID NO: 2000 - DNA, 22 bp, Artificial Sequence
  Synthetic: DMPK 3 forward 19:45769945-45769970; SpCas9
ggggggcgcgggatccccgaaa

SEQ ID NO: 2001 - DNA, 21 bp, Artificial Sequence
  Synthetic: DMPK 3 forward 19:45769946-45769970; SpCas9
gggggcgcgggatccccgaaa

SEQ ID NO: 2002 - DNA, 20 bp, Artificial Sequence
  Synthetic: DMPK 3 forward 19:45769947-45769970; SpCas9
ggggcgcgggatccccgaaa

SEQ ID NO: 2003 - DNA, 19 bp, Artificial Sequence
  Synthetic: DMPK 3 forward 19:45769948-45769970; SpCas9
gggcgcgggatccccgaaa

SEQ ID NO: 2004 - DNA, 18 bp, Artificial Sequence
  Synthetic: DMPK 3 forward 19:45769949-45769970; SpCas9
ggcgcgggatccccgaaa

SEQ ID NO: 2005 - DNA, 25 bp, Artificial Sequence
  Synthetic: DMPK 3 forward 19:45769945-45769973; SpCas9
ggggggcgcgggatccccgaaaaag

SEQ ID NO: 2006 - DNA, 24 bp, Artificial Sequence
  Synthetic: DMPK 3 forward 19:45769946-45769973; SpCas9
gggggcgcgggatccccgaaaaag

SEQ ID NO: 2007 - DNA, 23 bp, Artificial Sequence
  Synthetic: DMPK 3 forward 19:45769947-45769973; SpCas9
ggggcgcgggatccccgaaaaag

SEQ ID NO: 2008 - DNA, 22 bp, Artificial Sequence
  Synthetic: DMPK 3 forward 19:45769948-45769973; SpCas9
gggcgcgggatccccgaaaaag

SEQ ID NO: 2009 - DNA, 21 bp, Artificial Sequence
  Synthetic: DMPK 3 forward 19:45769949-45769973; SpCas9
ggcgcgggatccccgaaaaag

SEQ ID NO: 2010 - DNA, 20 bp, Artificial Sequence
  Synthetic: DMPK 3 forward 19:45769950-45769973; SpCas9
gcgcgggatccccgaaaaag

SEQ ID NO: 2011 - DNA, 19 bp, Artificial Sequence
  Synthetic: DMPK 3 forward 19:45769951-45769973; SpCas9
cgcgggatccccgaaaaag

SEQ ID NO: 2012 - DNA, 18 bp, Artificial Sequence
  Synthetic: DMPK 3 forward 19:45769952-45769973; SpCas9
gcgggatccccgaaaaag

SEQ ID NO: 2013 - DNA, 25 bp, Artificial Sequence
  Synthetic: DMPK 3 forward 19:45769946-45769974; SpCas9
gggggcgcgggatccccgaaaaagc

SEQ ID NO: 2014 - DNA, 24 bp, Artificial Sequence
  Synthetic: DMPK 3 forward 19:45769947-45769974; SpCas9
ggggcgcgggatccccgaaaaagc

SEQ ID NO: 2015 - DNA, 23 bp, Artificial Sequence
  Synthetic: DMPK 3 forward 19:45769948-45769974; SpCas9
gggcgcgggatccccgaaaaagc

SEQ ID NO: 2016 - DNA, 22 bp, Artificial Sequence
  Synthetic: DMPK 3 forward 19:45769949-45769974; SpCas9
ggcgcgggatccccgaaaaagc

SEQ ID NO: 2017 - DNA, 21 bp, Artificial Sequence
  Synthetic: DMPK 3 forward 19:45769950-45769974; SpCas9
gcgcgggatccccgaaaaagc

SEQ ID NO: 2018 - DNA, 20 bp, Artificial Sequence
  Synthetic: DMPK 3 forward 19:45769951-45769974; SpCas9
cgcgggatccccgaaaaagc

SEQ ID NO: 2019 - DNA, 19 bp, Artificial Sequence
  Synthetic: DMPK 3 forward 19:45769952-45769974; SpCas9
gcgggatccccgaaaaagc

SEQ ID NO: 2020 - DNA, 18 bp, Artificial Sequence
  Synthetic: DMPK 3 forward 19:45769953-45769974; SpCas9
cgggatccccgaaaaagc

SEQ ID NO: 2021 - DNA, 25 bp, Artificial Sequence
  Synthetic: DMPK 3 forward 19:45769951-45769979; SpCas9
cgcgggatccccgaaaaagcgggtt

SEQ ID NO: 2022 - DNA, 24 bp, Artificial Sequence
  Synthetic: DMPK 3 forward 19:45769952-45769979; SpCas9
gcgggatccccgaaaaagcgggtt

SEQ ID NO: 2023 - DNA, 23 bp, Artificial Sequence
  Synthetic: DMPK 3 forward 19:45769953-45769979; SpCas9
cgggatccccgaaaaagcgggtt

SEQ ID NO: 2024 - DNA, 22 bp, Artificial Sequence
  Synthetic: DMPK 3 forward 19:45769954-45769979; SpCas9
gggatccccgaaaaagcgggtt

SEQ ID NO: 2025 - DNA, 21 bp, Artificial Sequence
  Synthetic: DMPK 3 forward 19:45769955-45769979; SpCas9
ggatccccgaaaaagcgggtt

SEQ ID NO: 2026 - DNA, 20 bp, Artificial Sequence
  Synthetic: DMPK 3 forward 19:45769956-45769979; SpCas9
gatccccgaaaaagcgggtt

SEQ ID NO: 2027 - DNA, 19 bp, Artificial Sequence
  Synthetic: DMPK 3 forward 19:45769957-45769979; SpCas9
atccccgaaaaagcgggtt

SEQ ID NO: 2028 - DNA, 18 bp, Artificial Sequence
  Synthetic: DMPK 3 forward 19:45769958-45769979; SpCas9
tccccgaaaaagcgggtt

SEQ ID NO: 2029 - DNA, 25 bp, Artificial Sequence
  Synthetic: DMPK 3 forward 19:45769957-45769985; SpCas9
atccccgaaaaagcgggtttggcaa

SEQ ID NO: 2030 - DNA, 24 bp, Artificial Sequence
  Synthetic: DMPK 3 forward 19:45769958-45769985; SpCas9
tccccgaaaaagcgggtttggcaa

SEQ ID NO: 2031 - DNA, 23 bp, Artificial Sequence
  Synthetic: DMPK 3 forward 19:45769959-45769985; SpCas9
ccccgaaaaagcgggtttggcaa

SEQ ID NO: 2032 - DNA, 22 bp, Artificial Sequence
  Synthetic: DMPK 3 forward 19:45769960-45769985; SpCas9
cccgaaaaagcgggtttggcaa

SEQ ID NO: 2033 - DNA, 21 bp, Artificial Sequence
  Synthetic: DMPK 3 forward 19:45769961-45769985; SpCas9
ccgaaaaagcgggtttggcaa

SEQ ID NO: 2034 - DNA, 20 bp, Artificial Sequence
  Synthetic: DMPK 3 forward 19:45769962-45769985; SpCas9
cgaaaaagcgggtttggcaa

SEQ ID NO: 2035 - DNA, 19 bp, Artificial Sequence
  Synthetic: DMPK 3 forward 19:45769963-45769985; SpCas9
gaaaaagcgggtttggcaa

SEQ ID NO: 2036 - DNA, 18 bp, Artificial Sequence
  Synthetic: DMPK 3 forward 19:45769964-45769985; SpCas9
aaaaagcgggtttggcaa

SEQ ID NO: 2037 - DNA, 25 bp, Artificial Sequence
  Synthetic: DMPK 3 reverse 19:45769959-45769987; SpCas9
tgcttttgccaaacccgctttttcg

SEQ ID NO: 2038 - DNA, 24 bp, Artificial Sequence
  Synthetic: DMPK 3 reverse 19:45769960-45769987; SpCas9
gcttttgccaaacccgctttttcg

SEQ ID NO: 2039 - DNA, 23 bp, Artificial Sequence
  Synthetic: DMPK 3 reverse 19:45769961-45769987; SpCas9
cttttgccaaacccgctttttcg

SEQ ID NO: 2040 - DNA, 22 bp, Artificial Sequence
  Synthetic: DMPK 3 reverse 19:45769962-45769987; SpCas9
ttttgccaaacccgctttttcg

SEQ ID NO: 2041 - DNA, 21 bp, Artificial Sequence
  Synthetic: DMPK 3 reverse 19:45769963-45769987; SpCas9
tttgccaaacccgctttttcg

SEQ ID NO: 2042 - DNA, 20 bp, Artificial Sequence
  Synthetic: DMPK 3 reverse 19:45769964-45769987; SpCas9
ttgccaaacccgctttttcg

SEQ ID NO: 2043 - DNA, 19 bp, Artificial Sequence
  Synthetic: DMPK 3 reverse 19:45769965-45769987; SpCas9
tgccaaacccgctttttcg

SEQ ID NO: 2044 - DNA, 18 bp, Artificial Sequence
  Synthetic: DMPK 3 reverse 19:45769966-45769987; SpCas9
gccaaacccgctttttcg

SEQ ID NO: 2045 - DNA, 25 bp, Artificial Sequence
  Synthetic: DMPK 3 reverse 19:45769960-45769988; SpCas9
ttgcttttgccaaacccgctttttc

SEQ ID NO: 2046 - DNA, 24 bp, Artificial Sequence
  Synthetic: DMPK 3 reverse 19:45769961-45769988; SpCas9
tgcttttgccaaacccgctttttc

SEQ ID NO: 2047 - DNA, 23 bp, Artificial Sequence
  Synthetic: DMPK 3 reverse 19:45769962-45769988; SpCas9
gcttttgccaaacccgctttttc

SEQ ID NO: 2048 - DNA, 22 bp, Artificial Sequence
  Synthetic: DMPK 3 reverse 19:45769963-45769988; SpCas9
cttttgccaaacccgctttttc

SEQ ID NO: 2049 - DNA, 21 bp, Artificial Sequence
  Synthetic: DMPK 3 reverse 19:45769964-45769988; SpCas9
ttttgccaaacccgctttttc

SEQ ID NO: 2050 - DNA, 20 bp, Artificial Sequence
  Synthetic: DMPK 3 reverse 19:45769965-45769988; SpCas9
tttgccaaacccgctttttc

SEQ ID NO: 2051 - DNA, 19 bp, Artificial Sequence
  Synthetic: DMPK 3 reverse 19:45769966-45769988; SpCas9
ttgccaaacccgctttttc

SEQ ID NO: 2052 - DNA, 18 bp, Artificial Sequence
  Synthetic: DMPK 3 reverse 19:45769967-45769988; SpCas9
tgccaaacccgctttttc

SEQ ID NO: 2053 - DNA, 25 bp, Artificial Sequence
  Synthetic: DMPK 3 reverse 19:45769961-45769989; SpCas9
tttgcttttgccaaacccgcttttt

SEQ ID NO: 2054 - DNA, 24 bp, Artificial Sequence
  Synthetic: DMPK 3 reverse 19:45769962-45769989; SpCas9
ttgcttttgccaaacccgcttttt

SEQ ID NO: 2055 - DNA, 23 bp, Artificial Sequence
  Synthetic: DMPK 3 reverse 19:45769963-45769989; SpCas9
tgcttttgccaaacccgcttttt

SEQ ID NO: 2056 - DNA, 22 bp, Artificial Sequence
  Synthetic: DMPK 3 reverse 19:45769964-45769989; SpCas9
gcttttgccaaacccgcttttt

SEQ ID NO: 2057 - DNA, 21 bp, Artificial Sequence
  Synthetic: DMPK 3 reverse 19:45769965-45769989; SpCas9
cttttgccaaacccgcttttt

SEQ ID NO: 2058 - DNA, 20 bp, Artificial Sequence
  Synthetic: DMPK 3 reverse 19:45769966-45769989; SpCas9
ttttgccaaacccgcttttt

SEQ ID NO: 2059 - DNA, 19 bp, Artificial Sequence
  Synthetic: DMPK 3 reverse 19:45769967-45769989; SpCas9
tttgccaaacccgcttttt

SEQ ID NO: 2060 - DNA, 18 bp, Artificial Sequence
  Synthetic: DMPK 3 reverse 19:45769968-45769989; SpCas9
ttgccaaacccgcttttt

SEQ ID NO: 2061 - DNA, 25 bp, Artificial Sequence
  Synthetic: DMPK 3 forward 19:45769970-45769998; SpCas9
cgggtttggcaaaagcaaatttccc

SEQ ID NO: 2062 - DNA, 24 bp, Artificial Sequence
  Synthetic: DMPK 3 forward 19:45769971-45769998; SpCas9
gggtttggcaaaagcaaatttccc

SEQ ID NO: 2063 - DNA, 23 bp, Artificial Sequence
  Synthetic: DMPK 3 forward 19:45769972-45769998; SpCas9
ggtttggcaaaagcaaatttccc

SEQ ID NO: 2064 - DNA, 22 bp, Artificial Sequence
  Synthetic: DMPK 3 forward 19:45769973-45769998; SpCas9
gtttggcaaaagcaaatttccc

SEQ ID NO: 2065 - DNA, 21 bp, Artificial Sequence
  Synthetic: DMPK 3 forward 19:45769974-45769998; SpCas9
tttggcaaaagcaaatttccc

SEQ ID NO: 2066 - DNA, 20 bp, Artificial Sequence
  Synthetic: DMPK 3 forward 19:45769975-45769998; SpCas9
ttggcaaaagcaaatttccc

SEQ ID NO: 2067 - DNA, 19 bp, Artificial Sequence
  Synthetic: DMPK 3 forward 19:45769976-45769998; SpCas9
tggcaaaagcaaatttccc

SEQ ID NO: 2068 - DNA, 18 bp, Artificial Sequence
  Synthetic: DMPK 3 forward 19:45769977-45769998; SpCas9
ggcaaaagcaaatttccc

SEQ ID NO: 2069 - DNA, 25 bp, Artificial Sequence
  Synthetic: DMPK 3 forward 19:45769974-45770002; SpCas9
tttggcaaaagcaaatttcccgagt

SEQ ID NO: 2070 - DNA, 24 bp, Artificial Sequence
  Synthetic: DMPK 3 forward 19:45769975-45770002; SpCas9
ttggcaaaagcaaatttcccgagt

SEQ ID NO: 2071 - DNA, 23 bp, Artificial Sequence
  Synthetic: DMPK 3 forward 19:45769976-45770002; SpCas9
tggcaaaagcaaatttcccgagt

SEQ ID NO: 2072 - DNA, 22 bp, Artificial Sequence
  Synthetic: DMPK 3 forward 19:45769977-45770002; SpCas9
ggcaaaagcaaatttcccgagt

SEQ ID NO: 2073 - DNA, 21 bp, Artificial Sequence
  Synthetic: DMPK 3 forward 19:45769978-45770002; SpCas9
gcaaaagcaaatttcccgagt

SEQ ID NO: 2074 - DNA, 20 bp, Artificial Sequence
  Synthetic: DMPK 3 forward 19:45769979-45770002; SpCas9
caaaagcaaatttcccgagt

SEQ ID NO: 2075 - DNA, 19 bp, Artificial Sequence
  Synthetic: DMPK 3 forward 19:45769980-45770002; SpCas9
aaaagcaaatttcccgagt

SEQ ID NO: 2076 - DNA, 18 bp, Artificial Sequence
  Synthetic: DMPK 3 forward 19:45769981-45770002; SpCas9
aaagcaaatttcccgagt

SEQ ID NO: 2077 - DNA, 25 bp, Artificial Sequence
  Synthetic: DMPK 3 forward 19:45769977-45770005; SpCas9
ggcaaaagcaaatttcccgagtaag

SEQ ID NO: 2078 - DNA, 24 bp, Artificial Sequence
  Synthetic: DMPK 3 forward 19:45769978-45770005; SpCas9
gcaaaagcaaatttcccgagtaag

SEQ ID NO: 2079 - DNA, 23 bp, Artificial Sequence
  Synthetic: DMPK 3 forward 19:45769979-45770005; SpCas9
caaaagcaaatttcccgagtaag

SEQ ID NO: 2080 - DNA, 22 bp, Artificial Sequence
  Synthetic: DMPK 3 forward 19:45769980-45770005; SpCas9
aaaagcaaatttcccgagtaag

SEQ ID NO: 2081 - DNA, 21 bp, Artificial Sequence
  Synthetic: DMPK 3 forward 19:45769981-45770005; SpCas9
aaagcaaatttcccgagtaag

SEQ ID NO: 2082 - DNA, 20 bp, Artificial Sequence
  Synthetic: DMPK 3 forward 19:45769982-45770005; SpCas9
aagcaaatttcccgagtaag

SEQ ID NO: 2083 - DNA, 19 bp, Artificial Sequence
  Synthetic: DMPK 3 forward 19:45769983-45770005; SpCas9
agcaaatttcccgagtaag

SEQ ID NO: 2084 - DNA, 18 bp, Artificial Sequence
  Synthetic: DMPK 3 forward 19:45769984-45770005; SpCas9
gcaaatttcccgagtaag

SEQ ID NO: 2085 - DNA, 25 bp, Artificial Sequence
  Synthetic: DMPK 3 forward 19:45769978-45770006; SpCas9
gcaaaagcaaatttcccgagtaagc

SEQ ID NO: 2086 - DNA, 24 bp, Artificial Sequence
  Synthetic: DMPK 3 forward 19:45769979-45770006; SpCas9
caaaagcaaatttcccgagtaagc

SEQ ID NO: 2087 - DNA, 23 bp, Artificial Sequence
  Synthetic: DMPK 3 forward 19:45769980-45770006; SpCas9
aaaagcaaatttcccgagtaagc

SEQ ID NO: 2088 - DNA, 22 bp, Artificial Sequence
  Synthetic: DMPK 3 forward 19:45769981-45770006; SpCas9
aaagcaaatttcccgagtaagc

SEQ ID NO: 2089 - DNA, 21 bp, Artificial Sequence
  Synthetic: DMPK 3 forward 19:45769982-45770006; SpCas9
aagcaaatttcccgagtaagc

SEQ ID NO: 2090 - DNA, 20 bp, Artificial Sequence
  Synthetic: DMPK 3 forward 19:45769983-45770006; SpCas9
agcaaatttcccgagtaagc

SEQ ID NO: 2091 - DNA, 19 bp, Artificial Sequence
  Synthetic: DMPK 3 forward 19:45769984-45770006; SpCas9
gcaaatttcccgagtaagc

SEQ ID NO: 2092 - DNA, 18 bp, Artificial Sequence
  Synthetic: DMPK 3 forward 19:45769985-45770006; SpCas9
caaatttcccgagtaagc

SEQ ID NO: 2093 - DNA, 25 bp, Artificial Sequence
  Synthetic: DMPK 3 forward 19:45769981-45770009; SpCas9
aaagcaaatttcccgagtaagcagg

SEQ ID NO: 2094 - DNA, 24 bp, Artificial Sequence
  Synthetic: DMPK 3 forward 19:45769982-45770009; SpCas9
aagcaaatttcccgagtaagcagg

SEQ ID NO: 2095 - DNA, 23 bp, Artificial Sequence
  Synthetic: DMPK 3 forward 19:45769983-45770009; SpCas9
agcaaatttcccgagtaagcagg

SEQ ID NO: 2096 - DNA, 22 bp, Artificial Sequence
  Synthetic: DMPK 3 forward 19:45769984-45770009; SpCas9
gcaaatttcccgagtaagcagg

SEQ ID NO: 2097 - DNA, 21 bp, Artificial Sequence
  Synthetic: DMPK 3 forward 19:45769985-45770009; SpCas9
caaatttcccgagtaagcagg

SEQ ID NO: 2098 - DNA, 20 bp, Artificial Sequence
  Synthetic: DMPK 3 forward 19:45769986-45770009; SpCas9
aaatttcccgagtaagcagg

SEQ ID NO: 2099 - DNA, 19 bp, Artificial Sequence
  Synthetic: DMPK 3 forward 19:45769987-45770009; SpCas9
aatttcccgagtaagcagg

SEQ ID NO: 2100 - DNA, 18 bp, Artificial Sequence
  Synthetic: DMPK 3 forward 19:45769988-45770009; SpCas9
atttcccgagtaagcagg

SEQ ID NO: 2101 - DNA, 25 bp, Artificial Sequence
  Synthetic: DMPK 3 forward 19:45769983-45770011; SpCas9
agcaaatttcccgagtaagcaggca

SEQ ID NO: 2102 - DNA, 24 bp, Artificial Sequence
  Synthetic: DMPK 3 forward 19:45769984-45770011; SpCas9
gcaaatttcccgagtaagcaggca

SEQ ID NO: 2103 - DNA, 23 bp, Artificial Sequence
  Synthetic: DMPK 3 forward 19:45769985-45770011; SpCas9
caaatttcccgagtaagcaggca

SEQ ID NO: 2104 - DNA, 22 bp, Artificial Sequence
  Synthetic: DMPK 3 forward 19:45769986-45770011; SpCas9
aaatttcccgagtaagcaggca

SEQ ID NO: 2105 - DNA, 21 bp, Artificial Sequence
  Synthetic: DMPK 3 forward 19:45769987-45770011; SpCas9
aatttcccgagtaagcaggca

SEQ ID NO: 2106 - DNA, 20 bp, Artificial Sequence
  Synthetic: DMPK 3 forward 19:45769988-45770011; SpCas9
atttcccgagtaagcaggca

SEQ ID NO: 2107 - DNA, 19 bp, Artificial Sequence
  Synthetic: DMPK 3 forward 19:45769989-45770011; SpCas9
tttcccgagtaagcaggca

SEQ ID NO: 2108 - DNA, 18 bp, Artificial Sequence
  Synthetic: DMPK 3 forward 19:45769990-45770011; SpCas9
ttcccgagtaagcaggca

SEQ ID NO: 2109 - DNA, 25 bp, Artificial Sequence
  Synthetic: DMPK 3 reverse 19:45769992-45770020; SpCas9
tggcgcgatctctgcctgcttactc

SEQ ID NO: 2110 - DNA, 24 bp, Artificial Sequence
  Synthetic: DMPK 3 reverse 19:45769993-45770020; SpCas9
ggcgcgatctctgcctgcttactc

SEQ ID NO: 2111 - DNA, 23 bp, Artificial Sequence
  Synthetic: DMPK 3 reverse 19:45769994-45770020; SpCas9
gcgcgatctctgcctgcttactc

SEQ ID NO: 2112 - DNA, 22 bp, Artificial Sequence
  Synthetic: DMPK 3 reverse 19:45769995-45770020; SpCas9
cgcgatctctgcctgcttactc

SEQ ID NO: 2113 - DNA, 21 bp, Artificial Sequence
  Synthetic: DMPK 3 reverse 19:45769996-45770020; SpCas9
gcgatctctgcctgcttactc

SEQ ID NO: 2114 - DNA, 20 bp, Artificial Sequence
  Synthetic: DMPK 3 reverse 19:45769997-45770020; SpCas9
cgatctctgcctgcttactc

SEQ ID NO: 2115 - DNA, 19 bp, Artificial Sequence
  Synthetic: DMPK 3 reverse 19:45769998-45770020; SpCas9
gatctctgcctgcttactc

SEQ ID NO: 2116 - DNA, 18 bp, Artificial Sequence
  Synthetic: DMPK 3 reverse 19:45769999-45770020; SpCas9
atctctgcctgcttactc

SEQ ID NO: 2117 - DNA, 25 bp, Artificial Sequence
  Synthetic: DMPK 3 forward 19:45769993-45770021; SpCas9
ccgagtaagcaggcagagatcgcgc

SEQ ID NO: 2118 - DNA, 24 bp, Artificial Sequence
  Synthetic: DMPK 3 forward 19:45769994-45770021; SpCas9
cgagtaagcaggcagagatcgcgc

SEQ ID NO: 2119 - DNA, 23 bp, Artificial Sequence
  Synthetic: DMPK 3 forward 19:45769995-45770021; SpCas9
gagtaagcaggcagagatcgcgc

SEQ ID NO: 2120 - DNA, 22 bp, Artificial Sequence
  Synthetic: DMPK 3 forward 19:45769996-45770021; SpCas9
agtaagcaggcagagatcgcgc

SEQ ID NO: 2121 - DNA, 21 bp, Artificial Sequence
  Synthetic: DMPK 3 forward 19:45769997-45770021; SpCas9
gtaagcaggcagagatcgcgc

SEQ ID NO: 2122 - DNA, 20 bp, Artificial Sequence
  Synthetic: DMPK 3 forward 19:45769998-45770021; SpCas9
taagcaggcagagatcgcgc

SEQ ID NO: 2123 - DNA, 19 bp, Artificial Sequence
  Synthetic: DMPK 3 forward 19:45769999-45770021; SpCas9
aagcaggcagagatcgcgc

SEQ ID NO: 2124 - DNA, 18 bp, Artificial Sequence
  Synthetic: DMPK 3 forward 19:45770000-45770021; SpCas9
agcaggcagagatcgcgc

SEQ ID NO: 2125 - DNA, 25 bp, Artificial Sequence
  Synthetic: DMPK 3 reverse 19:45769993-45770021; SpCas9
ctggcgcgatctctgcctgcttact

SEQ ID NO: 2126 - DNA, 24 bp, Artificial Sequence
  Synthetic: DMPK 3 reverse 19:45769994-45770021; SpCas9
tggcgcgatctctgcctgcttact

SEQ ID NO: 2127 - DNA, 23 bp, Artificial Sequence
  Synthetic: DMPK 3 reverse 19:45769995-45770021; SpCas9
ggcgcgatctctgcctgcttact

SEQ ID NO: 2128 - DNA, 22 bp, Artificial Sequence
  Synthetic: DMPK 3 reverse 19:45769996-45770021; SpCas9
gcgcgatctctgcctgcttact

SEQ ID NO: 2129 - DNA, 21 bp, Artificial Sequence
  Synthetic: DMPK 3 reverse 19:45769997-45770021; SpCas9
cgcgatctctgcctgcttact

SEQ ID NO: 2130 - DNA, 20 bp, Artificial Sequence
  Synthetic: DMPK 3 reverse 19:45769998-45770021; SpCas9
gcgatctctgcctgcttact

SEQ ID NO: 2131 - DNA, 19 bp, Artificial Sequence
  Synthetic: DMPK 3 reverse 19:45769999-45770021; SpCas9
cgatctctgcctgcttact

SEQ ID NO: 2132 - DNA, 18 bp, Artificial Sequence
  Synthetic: DMPK 3 reverse 19:45770000-45770021; SpCas9
gatctctgcctgcttact

SEQ ID NO: 2133 - DNA, 25 bp, Artificial Sequence
  Synthetic: DMPK 3 forward 19:45770004-45770032; SpCas9
ggcagagatcgcgccagacgctccc

SEQ ID NO: 2134 - DNA, 24 bp, Artificial Sequence
  Synthetic: DMPK 3 forward 19:45770005-45770032; SpCas9
gcagagatcgcgccagacgctccc

SEQ ID NO: 2135 - DNA, 23 bp, Artificial Sequence
  Synthetic: DMPK 3 forward 19:45770006-45770032; SpCas9
cagagatcgcgccagacgctccc

SEQ ID NO: 2136 - DNA, 22 bp, Artificial Sequence
  Synthetic: DMPK 3 forward 19:45770007-45770032; SpCas9
agagatcgcgccagacgctccc

SEQ ID NO: 2137 - DNA, 21 bp, Artificial Sequence
  Synthetic: DMPK 3 forward 19:45770008-45770032; SpCas9
gagatcgcgccagacgctccc

SEQ ID NO: 2138 - DNA, 20 bp, Artificial Sequence
  Synthetic: DMPK 3 forward 19:45770009-45770032; SpCas9
agatcgcgccagacgctccc

SEQ ID NO: 2139 - DNA, 19 bp, Artificial Sequence
  Synthetic: DMPK 3 forward 19:45770010-45770032; SpCas9
gatcgcgccagacgctccc

SEQ ID NO: 2140 - DNA, 18 bp, Artificial Sequence
  Synthetic: DMPK 3 forward 19:45770011-45770032; SpCas9
atcgcgccagacgctccc

SEQ ID NO: 2141 - DNA, 25 bp, Artificial Sequence
  Synthetic: DMPK 3 forward 19:45770006-45770034; SpCas9
cagagatcgcgccagacgctcccca

SEQ ID NO: 2142 - DNA, 24 bp, Artificial Sequence
  Synthetic: DMPK 3 forward 19:45770007-45770034; SpCas9
agagatcgcgccagacgctcccca

SEQ ID NO: 2143 - DNA, 23 bp, Artificial Sequence
  Synthetic: DMPK 3 forward 19:45770008-45770034; SpCas9
gagatcgcgccagacgctcccca

SEQ ID NO: 2144 - DNA, 22 bp, Artificial Sequence
  Synthetic: DMPK 3 forward 19:45770009-45770034; SpCas9
agatcgcgccagacgctcccca

SEQ ID NO: 2145 - DNA, 21 bp, Artificial Sequence
  Synthetic: DMPK 3 forward 19:45770010-45770034; SpCas9
gatcgcgccagacgctcccca

SEQ ID NO: 2146 - DNA, 20 bp, Artificial Sequence
  Synthetic: DMPK 3 forward 19:45770011-45770034; SpCas9
atcgcgccagacgctcccca

SEQ ID NO: 2147 - DNA, 19 bp, Artificial Sequence
  Synthetic: DMPK 3 forward 19:45770012-45770034; SpCas9
tcgcgccagacgctcccca

SEQ ID NO: 2148 - DNA, 18 bp, Artificial Sequence
  Synthetic: DMPK 3 forward 19:45770013-45770034; SpCas9
cgcgccagacgctcccca

SEQ ID NO: 2149 - DNA, 25 bp, Artificial Sequence
  Synthetic: DMPK 3 forward 19:45770009-45770037; SpCas9
agatcgcgccagacgctccccagag

SEQ ID NO: 2150 - DNA, 24 bp, Artificial Sequence
  Synthetic: DMPK 3 forward 19:45770010-45770037; SpCas9
gatcgcgccagacgctccccagag

SEQ ID NO: 2151 - DNA, 23 bp, Artificial Sequence
  Synthetic: DMPK 3 forward 19:45770011-45770037; SpCas9
atcgcgccagacgctccccagag

SEQ ID NO: 2152 - DNA, 22 bp, Artificial Sequence
  Synthetic: DMPK 3 forward 19:45770012-45770037; SpCas9
tcgcgccagacgctccccagag

SEQ ID NO: 2153 - DNA, 21 bp, Artificial Sequence
  Synthetic: DMPK 3 forward 19:45770013-45770037; SpCas9
cgcgccagacgctccccagag

SEQ ID NO: 2154 - DNA, 20 bp, Artificial Sequence
  Synthetic: DMPK 3 forward 19:45770014-45770037; SpCas9
gcgccagacgctccccagag

SEQ ID NO: 2155 - DNA, 19 bp, Artificial Sequence
  Synthetic: DMPK 3 forward 19:45770015-45770037; SpCas9
cgccagacgctccccagag

SEQ ID NO: 2156 - DNA, 18 bp, Artificial Sequence
  Synthetic: DMPK 3 forward 19:45770016-45770037; SpCas9
gccagacgctccccagag

SEQ ID NO: 2157 - DNA, 25 bp, Artificial Sequence
  Synthetic: DMPK 3 forward 19:45770010-45770038; SpCas9
gatcgcgccagacgctccccagagc

SEQ ID NO: 2158 - DNA, 24 bp, Artificial Sequence
  Synthetic: DMPK 3 forward 19:45770011-45770038; SpCas9
atcgcgccagacgctccccagagc

SEQ ID NO: 2159 - DNA, 23 bp, Artificial Sequence
  Synthetic: DMPK 3 forward 19:45770012-45770038; SpCas9
tcgcgccagacgctccccagagc

SEQ ID NO: 2160 - DNA, 22 bp, Artificial Sequence
  Synthetic: DMPK 3 forward 19:45770013-45770038; SpCas9
cgcgccagacgctccccagagc

SEQ ID NO: 2161 - DNA, 21 bp, Artificial Sequence
  Synthetic: DMPK 3 forward 19:45770014-45770038; SpCas9
gcgccagacgctccccagagc

SEQ ID NO: 2162 - DNA, 20 bp, Artificial Sequence
  Synthetic: DMPK 3 forward 19:45770015-45770038; SpCas9
cgccagacgctccccagagc

SEQ ID NO: 2163 - DNA, 19 bp, Artificial Sequence
  Synthetic: DMPK 3 forward 19:45770016-45770038; SpCas9
gccagacgctccccagagc

SEQ ID NO: 2164 - DNA, 18 bp, Artificial Sequence
  Synthetic: DMPK 3 forward 19:45770017-45770038; SpCas9
ccagacgctccccagagc

SEQ ID NO: 2165 - DNA, 25 bp, Artificial Sequence
  Synthetic: DMPK 3 forward 19:45770011-45770039; SpCas9
atcgcgccagacgctccccagagca

SEQ ID NO: 2166 - DNA, 24 bp, Artificial Sequence
  Synthetic: DMPK 3 forward 19:45770012-45770039; SpCas9
tcgcgccagacgctccccagagca

SEQ ID NO: 2167 - DNA, 23 bp, Artificial Sequence
  Synthetic: DMPK 3 forward 19:45770013-45770039; SpCas9
cgcgccagacgctccccagagca

SEQ ID NO: 2168 - DNA, 22 bp, Artificial Sequence
  Synthetic: DMPK 3 forward 19:45770014-45770039; SpCas9
gcgccagacgctccccagagca

SEQ ID NO: 2169 - DNA, 21 bp, Artificial Sequence
  Synthetic: DMPK 3 forward 19:45770015-45770039; SpCas9
cgccagacgctccccagagca

SEQ ID NO: 2170 - DNA, 20 bp, Artificial Sequence
  Synthetic: DMPK 3 forward 19:45770016-45770039; SpCas9
gccagacgctccccagagca

SEQ ID NO: 2171 - DNA, 19 bp, Artificial Sequence
  Synthetic: DMPK 3 forward 19:45770017-45770039; SpCas9
ccagacgctccccagagca

SEQ ID NO: 2172 - DNA, 18 bp, Artificial Sequence
  Synthetic: DMPK 3 forward 19:45770018-45770039; SpCas9
cagacgctccccagagca

SEQ ID NO: 2173 - DNA, 25 bp, Artificial Sequence
  Synthetic: DMPK 3 reverse 19:45770017-45770045; SpCas9
atgacgccctgctctggggagcgtc

SEQ ID NO: 2174 - DNA, 24 bp, Artificial Sequence
  Synthetic: DMPK 3 reverse 19:45770018-45770045; SpCas9
tgacgccctgctctggggagcgtc

SEQ ID NO: 2175 - DNA, 23 bp, Artificial Sequence
  Synthetic: DMPK 3 reverse 19:45770019-45770045; SpCas9
gacgccctgctctggggagcgtc

SEQ ID NO: 2176 - DNA, 22 bp, Artificial Sequence
  Synthetic: DMPK 3 reverse 19:45770020-45770045; SpCas9
acgccctgctctggggagcgtc

SEQ ID NO: 2177 - DNA, 21 bp, Artificial Sequence
  Synthetic: DMPK 3 reverse 19:45770021-45770045; SpCas9
cgccctgctctggggagcgtc

SEQ ID NO: 2178 - DNA, 20 bp, Artificial Sequence
  Synthetic: DMPK 3 reverse 19:45770022-45770045; SpCas9
gccctgctctggggagcgtc

SEQ ID NO: 2179 - DNA, 19 bp, Artificial Sequence
  Synthetic: DMPK 3 reverse 19:45770023-45770045; SpCas9
ccctgctctggggagcgtc

SEQ ID NO: 2180 - DNA, 18 bp, Artificial Sequence
  Synthetic: DMPK 3 reverse 19:45770024-45770045; SpCas9
cctgctctggggagcgtc

SEQ ID NO: 2181 - DNA, 25 bp, Artificial Sequence
  Synthetic: DMPK 3 forward 19:45770024-45770052; SpCas9
ctccccagagcagggcgtcatgcac

SEQ ID NO: 2182 - DNA, 24 bp, Artificial Sequence
  Synthetic: DMPK 3 forward 19:45770025-45770052; SpCas9
tccccagagcagggcgtcatgcac

SEQ ID NO: 2183 - DNA, 23 bp, Artificial Sequence
  Synthetic: DMPK 3 forward 19:45770026-45770052; SpCas9
ccccagagcagggcgtcatgcac

SEQ ID NO: 2184 - DNA, 22 bp, Artificial Sequence
  Synthetic: DMPK 3 forward 19:45770027-45770052; SpCas9
cccagagcagggcgtcatgcac

SEQ ID NO: 2185 - DNA, 21 bp, Artificial Sequence
  Synthetic: DMPK 3 forward 19:45770028-45770052; SpCas9
ccagagcagggcgtcatgcac

SEQ ID NO: 2186 - DNA, 20 bp, Artificial Sequence
  Synthetic: DMPK 3 forward 19:45770029-45770052; SpCas9
cagagcagggcgtcatgcac

SEQ ID NO: 2187 - DNA, 19 bp, Artificial Sequence
  Synthetic: DMPK 3 forward 19:45770030-45770052; SpCas9
agagcagggcgtcatgcac

SEQ ID NO: 2188 - DNA, 18 bp, Artificial Sequence
  Synthetic: DMPK 3 forward 19:45770031-45770052; SpCas9
gagcagggcgtcatgcac

SEQ ID NO: 2189 - DNA, 25 bp, Artificial Sequence
  Synthetic: DMPK 3 reverse 19:45770024-45770052; SpCas9
cttgtgcatgacgccctgctctggg

SEQ ID NO: 2190 - DNA, 24 bp, Artificial Sequence
  Synthetic: DMPK 3 reverse 19:45770025-45770052; SpCas9
ttgtgcatgacgccctgctctggg

SEQ ID NO: 2191 - DNA, 23 bp, Artificial Sequence
  Synthetic: DMPK 3 reverse 19:45770026-45770052; SpCas9
tgtgcatgacgccctgctctggg

SEQ ID NO: 2192 - DNA, 22 bp, Artificial Sequence
  Synthetic: DMPK 3 reverse 19:45770027-45770052; SpCas9
gtgcatgacgccctgctctggg

SEQ ID NO: 2193 - DNA, 21 bp, Artificial Sequence
  Synthetic: DMPK 3 reverse 19:45770028-45770052; SpCas9
tgcatgacgccctgctctggg

SEQ ID NO: 2194 - DNA, 20 bp, Artificial Sequence
  Synthetic: DMPK 3 reverse 19:45770029-45770052; SpCas9
gcatgacgccctgctctggg

SEQ ID NO: 2195 - DNA, 19 bp, Artificial Sequence
  Synthetic: DMPK 3 reverse 19:45770030-45770052; SpCas9
catgacgccctgctctggg

SEQ ID NO: 2196 - DNA, 18 bp, Artificial Sequence
  Synthetic: DMPK 3 reverse 19:45770031-45770052; SpCas9
atgacgccctgctctggg

SEQ ID NO: 2197 - DNA, 25 bp, Artificial Sequence
  Synthetic: DMPK 3 reverse 19:45770026-45770054; SpCas9
ttcttgtgcatgacgccctgctctg

SEQ ID NO: 2198 - DNA, 24 bp, Artificial Sequence
  Synthetic: DMPK 3 reverse 19:45770027-45770054; SpCas9
tcttgtgcatgacgccctgctctg

SEQ ID NO: 2199 - DNA, 23 bp, Artificial Sequence
  Synthetic: DMPK 3 reverse 19:45770028-45770054; SpCas9
cttgtgcatgacgccctgctctg

SEQ ID NO: 2200 - DNA, 22 bp, Artificial Sequence
  Synthetic: DMPK 3 reverse 19:45770029-45770054; SpCas9
ttgtgcatgacgccctgctctg

SEQ ID NO: 2201 - DNA, 21 bp, Artificial Sequence
  Synthetic: DMPK 3 reverse 19:45770030-45770054; SpCas9
tgtgcatgacgccctgctctg

SEQ ID NO: 2202 - DNA, 20 bp, Artificial Sequence
  Synthetic: DMPK 3 reverse 19:45770031-45770054; SpCas9
gtgcatgacgccctgctctg

SEQ ID NO: 2203 - DNA, 19 bp, Artificial Sequence
  Synthetic: DMPK 3 reverse 19:45770032-45770054; SpCas9
tgcatgacgccctgctctg

SEQ ID NO: 2204 - DNA, 18 bp, Artificial Sequence
  Synthetic: DMPK 3 reverse 19:45770033-45770054; SpCas9
gcatgacgccctgctctg

SEQ ID NO: 2205 - DNA, 25 bp, Artificial Sequence
  Synthetic: DMPK 3 reverse 19:45770027-45770055; SpCas9
tttcttgtgcatgacgccctgctct

SEQ ID NO: 2206 - DNA, 24 bp, Artificial Sequence
  Synthetic: DMPK 3 reverse 19:45770028-45770055; SpCas9
ttcttgtgcatgacgccctgctct

SEQ ID NO: 2207 - DNA, 23 bp, Artificial Sequence
  Synthetic: DMPK 3 reverse 19:45770029-45770055; SpCas9
tcttgtgcatgacgccctgctct

SEQ ID NO: 2208 - DNA, 22 bp, Artificial Sequence
  Synthetic: DMPK 3 reverse 19:45770030-45770055; SpCas9
cttgtgcatgacgccctgctct

SEQ ID NO: 2209 - DNA, 21 bp, Artificial Sequence
  Synthetic: DMPK 3 reverse 19:45770031-45770055; SpCas9
ttgtgcatgacgccctgctct

SEQ ID NO: 2210 - DNA, 20 bp, Artificial Sequence
  Synthetic: DMPK 3 reverse 19:45770032-45770055; SpCas9
tgtgcatgacgccctgctct

SEQ ID NO: 2211 - DNA, 19 bp, Artificial Sequence
  Synthetic: DMPK 3 reverse 19:45770033-45770055; SpCas9
gtgcatgacgccctgctct

SEQ ID NO: 2212 - DNA, 18 bp, Artificial Sequence
  Synthetic: DMPK 3 reverse 19:45770034-45770055; SpCas9
tgcatgacgccctgctct

SEQ ID NO: 2213 - DNA, 25 bp, Artificial Sequence
  Synthetic: DMPK 3 forward 19:45770028-45770056; SpCas9
ccagagcagggcgtcatgcacaaga

SEQ ID NO: 2214 - DNA, 24 bp, Artificial Sequence
  Synthetic: DMPK 3 forward 19:45770029-45770056; SpCas9
cagagcagggcgtcatgcacaaga

SEQ ID NO: 2215 - DNA, 23 bp, Artificial Sequence
  Synthetic: DMPK 3 forward 19:45770030-45770056; SpCas9
agagcagggcgtcatgcacaaga

SEQ ID NO: 2216 - DNA, 22 bp, Artificial Sequence
  Synthetic: DMPK 3 forward 19:45770031-45770056; SpCas9
gagcagggcgtcatgcacaaga

SEQ ID NO: 2217 - DNA, 21 bp, Artificial Sequence
  Synthetic: DMPK 3 forward 19:45770032-45770056; SpCas9
agcagggcgtcatgcacaaga

SEQ ID NO: 2218 - DNA, 20 bp, Artificial Sequence
  Synthetic: DMPK 3 forward 19:45770033-45770056; SpCas9
gcagggcgtcatgcacaaga

SEQ ID NO: 2219 - DNA, 19 bp, Artificial Sequence
  Synthetic: DMPK 3 forward 19:45770034-45770056; SpCas9
cagggcgtcatgcacaaga

SEQ ID NO: 2220 - DNA, 18 bp, Artificial Sequence
  Synthetic: DMPK 3 forward 19:45770035-45770056; SpCas9
agggcgtcatgcacaaga

SEQ ID NO: 2221 - DNA, 25 bp, Artificial Sequence
  Synthetic: DMPK 3 reverse 19:45770028-45770056; SpCas9
ctttcttgtgcatgacgccctgctc

SEQ ID NO: 2222 - DNA, 24 bp, Artificial Sequence
  Synthetic: DMPK 3 reverse 19:45770029-45770056; SpCas9
tttcttgtgcatgacgccctgctc

SEQ ID NO: 2223 - DNA, 23 bp, Artificial Sequence
  Synthetic: DMPK 3 reverse 19:45770030-45770056; SpCas9
ttcttgtgcatgacgccctgctc

SEQ ID NO: 2224 - DNA, 22 bp, Artificial Sequence
  Synthetic: DMPK 3 reverse 19:45770031-45770056; SpCas9
tcttgtgcatgacgccctgctc

SEQ ID NO: 2225 - DNA, 21 bp, Artificial Sequence
  Synthetic: DMPK 3 reverse 19:45770032-45770056; SpCas9
cttgtgcatgacgccctgctc

SEQ ID NO: 2226 - DNA, 20 bp, Artificial Sequence
  Synthetic: DMPK 3 reverse 19:45770033-45770056; SpCas9
ttgtgcatgacgccctgctc

SEQ ID NO: 2227 - DNA, 19 bp, Artificial Sequence
  Synthetic: DMPK 3 reverse 19:45770034-45770056; SpCas9
tgtgcatgacgccctgctc

SEQ ID NO: 2228 - DNA, 18 bp, Artificial Sequence
  Synthetic: DMPK 3 reverse 19:45770035-45770056; SpCas9
gtgcatgacgccctgctc

SEQ ID NO: 2229 - DNA, 25 bp, Artificial Sequence
  Synthetic: DMPK 3 forward 19:45770054-45770082; SpCas9
agctttgcactttgcgaaccaacga

SEQ ID NO: 2230 - DNA, 24 bp, Artificial Sequence
  Synthetic: DMPK 3 forward 19:45770055-45770082; SpCas9
gctttgcactttgcgaaccaacga

SEQ ID NO: 2231 - DNA, 23 bp, Artificial Sequence
  Synthetic: DMPK 3 forward 19:45770056-45770082; SpCas9
ctttgcactttgcgaaccaacga

SEQ ID NO: 2232 - DNA, 22 bp, Artificial Sequence
  Synthetic: DMPK 3 forward 19:45770057-45770082; SpCas9
tttgcactttgcgaaccaacga

SEQ ID NO: 2233 - DNA, 21 bp, Artificial Sequence
  Synthetic: DMPK 3 forward 19:45770058-45770082; SpCas9
ttgcactttgcgaaccaacga

SEQ ID NO: 2234 - DNA, 20 bp, Artificial Sequence
  Synthetic: DMPK 3 forward 19:45770059-45770082; SpCas9
tgcactttgcgaaccaacga

SEQ ID NO: 2235 - DNA, 19 bp, Artificial Sequence
  Synthetic: DMPK 3 forward 19:45770060-45770082; SpCas9
gcactttgcgaaccaacga

SEQ ID NO: 2236 - DNA, 18 bp, Artificial Sequence
  Synthetic: DMPK 3 forward 19:45770061-45770082; SpCas9
cactttgcgaaccaacga

SEQ ID NO: 2237 - DNA, 25 bp, Artificial Sequence
  Synthetic: DMPK 3 forward 19:45770055-45770083; SpCas9
gctttgcactttgcgaaccaacgat

SEQ ID NO: 2238 - DNA, 24 bp, Artificial Sequence
  Synthetic: DMPK 3 forward 19:45770056-45770083; SpCas9
ctttgcactttgcgaaccaacgat

SEQ ID NO: 2239 - DNA, 23 bp, Artificial Sequence
  Synthetic: DMPK 3 forward 19:45770057-45770083; SpCas9
tttgcactttgcgaaccaacgat

SEQ ID NO: 2240 - DNA, 22 bp, Artificial Sequence
  Synthetic: DMPK 3 forward 19:45770058-45770083; SpCas9
ttgcactttgcgaaccaacgat

SEQ ID NO: 2241 - DNA, 21 bp, Artificial Sequence
  Synthetic: DMPK 3 forward 19:45770059-45770083; SpCas9
tgcactttgcgaaccaacgat

SEQ ID NO: 2242 - DNA, 20 bp, Artificial Sequence
  Synthetic: DMPK 3 forward 19:45770060-45770083; SpCas9
gcactttgcgaaccaacgat

SEQ ID NO: 2243 - DNA, 19 bp, Artificial Sequence
  Synthetic: DMPK 3 forward 19:45770061-45770083; SpCas9
cactttgcgaaccaacgat

SEQ ID NO: 2244 - DNA, 18 bp, Artificial Sequence
  Synthetic: DMPK 3 forward 19:45770062-45770083; SpCas9
actttgcgaaccaacgat

SEQ ID NO: 2245 - DNA, 25 bp, Artificial Sequence
  Synthetic: DMPK 3 reverse 19:45770056-45770084; SpCas9
acctatcgttggttcgcaaagtgca

SEQ ID NO: 2246 - DNA, 24 bp, Artificial Sequence
  Synthetic: DMPK 3 reverse 19:45770057-45770084; SpCas9
cctatcgttggttcgcaaagtgca

SEQ ID NO: 2247 - DNA, 23 bp, Artificial Sequence
  Synthetic: DMPK 3 reverse 19:45770058-45770084; SpCas9
ctatcgttggttcgcaaagtgca

SEQ ID NO: 2248 - DNA, 22 bp, Artificial Sequence
  Synthetic: DMPK 3 reverse 19:45770059-45770084; SpCas9
tatcgttggttcgcaaagtgca

SEQ ID NO: 2249 - DNA, 21 bp, Artificial Sequence
  Synthetic: DMPK 3 reverse 19:45770060-45770084; SpCas9
atcgttggttcgcaaagtgca

SEQ ID NO: 2250 - DNA, 20 bp, Artificial Sequence
  Synthetic: DMPK 3 reverse 19:45770061-45770084; SpCas9
tcgttggttcgcaaagtgca

SEQ ID NO: 2251 - DNA, 19 bp, Artificial Sequence
  Synthetic: DMPK 3 reverse 19:45770062-45770084; SpCas9
cgttggttcgcaaagtgca

SEQ ID NO: 2252 - DNA, 18 bp, Artificial Sequence
  Synthetic: DMPK 3 reverse 19:45770063-45770084; SpCas9
gttggttcgcaaagtgca

SEQ ID NO: 2253 - DNA, 25 bp, Artificial Sequence
  Synthetic: DMPK 3 forward 19:45770058-45770086; SpCas9
ttgcactttgcgaaccaacgatagg

SEQ ID NO: 2254 - DNA, 24 bp, Artificial Sequence
  Synthetic: DMPK 3 forward 19:45770059-45770086; SpCas9
tgcactttgcgaaccaacgatagg

SEQ ID NO: 2255 - DNA, 23 bp, Artificial Sequence
  Synthetic: DMPK 3 forward 19:45770060-45770086; SpCas9
gcactttgcgaaccaacgatagg

SEQ ID NO: 2256 - DNA, 22 bp, Artificial Sequence
  Synthetic: DMPK 3 forward 19:45770061-45770086; SpCas9
cactttgcgaaccaacgatagg

SEQ ID NO: 2257 - DNA, 21 bp, Artificial Sequence
  Synthetic: DMPK 3 forward 19:45770062-45770086; SpCas9
actttgcgaaccaacgatagg

SEQ ID NO: 2258 - DNA, 20 bp, Artificial Sequence
  Synthetic: DMPK 3 forward 19:45770063-45770086; SpCas9
ctttgcgaaccaacgatagg

SEQ ID NO: 2259 - DNA, 19 bp, Artificial Sequence
  Synthetic: DMPK 3 forward 19:45770064-45770086; SpCas9
tttgcgaaccaacgatagg

SEQ ID NO: 2260 - DNA, 18 bp, Artificial Sequence
  Synthetic: DMPK 3 forward 19:45770065-45770086; SpCas9
ttgcgaaccaacgatagg

SEQ ID NO: 2261 - DNA, 25 bp, Artificial Sequence
  Synthetic: DMPK 3 forward 19:45770059-45770087; SpCas9
tgcactttgcgaaccaacgataggt

SEQ ID NO: 2262 - DNA, 24 bp, Artificial Sequence
  Synthetic: DMPK 3 forward 19:45770060-45770087; SpCas9
gcactttgcgaaccaacgataggt

SEQ ID NO: 2263 - DNA, 23 bp, Artificial Sequence
  Synthetic: DMPK 3 forward 19:45770061-45770087; SpCas9
cactttgcgaaccaacgataggt

SEQ ID NO: 2264 - DNA, 22 bp, Artificial Sequence
  Synthetic: DMPK 3 forward 19:45770062-45770087; SpCas9
actttgcgaaccaacgataggt

SEQ ID NO: 2265 - DNA, 21 bp, Artificial Sequence
  Synthetic: DMPK 3 forward 19:45770063-45770087; SpCas9
ctttgcgaaccaacgataggt

SEQ ID NO: 2266 - DNA, 20 bp, Artificial Sequence
  Synthetic: DMPK 3 forward 19:45770064-45770087; SpCas9
tttgcgaaccaacgataggt

SEQ ID NO: 2267 - DNA, 19 bp, Artificial Sequence
  Synthetic: DMPK 3 forward 19:45770065-45770087; SpCas9
ttgcgaaccaacgataggt

SEQ ID NO: 2268 - DNA, 18 bp, Artificial Sequence
  Synthetic: DMPK 3 forward 19:45770066-45770087; SpCas9
tgcgaaccaacgataggt

SEQ ID NO: 2269 - DNA, 25 bp, Artificial Sequence
  Synthetic: DMPK 3 forward 19:45770060-45770088; SpCas9
gcactttgcgaaccaacgataggtg

SEQ ID NO: 2270 - DNA, 24 bp, Artificial Sequence
  Synthetic: DMPK 3 forward 19:45770061-45770088; SpCas9
cactttgcgaaccaacgataggtg

SEQ ID NO: 2271 - DNA, 23 bp, Artificial Sequence
  Synthetic: DMPK 3 forward 19:45770062-45770088; SpCas9
actttgcgaaccaacgataggtg

SEQ ID NO: 2272 - DNA, 22 bp, Artificial Sequence
  Synthetic: DMPK 3 forward 19:45770063-45770088; SpCas9
ctttgcgaaccaacgataggtg

SEQ ID NO: 2273 - DNA, 21 bp, Artificial Sequence
  Synthetic: DMPK 3 forward 19:45770064-45770088; SpCas9
tttgcgaaccaacgataggtg

SEQ ID NO: 2274 - DNA, 20 bp, Artificial Sequence
  Synthetic: DMPK 3 forward 19:45770065-45770088; SpCas9
ttgcgaaccaacgataggtg

SEQ ID NO: 2275 - DNA, 19 bp, Artificial Sequence
  Synthetic: DMPK 3 forward 19:45770066-45770088; SpCas9
tgcgaaccaacgataggtg

SEQ ID NO: 2276 - DNA, 18 bp, Artificial Sequence
  Synthetic: DMPK 3 forward 19:45770067-45770088; SpCas9
gcgaaccaacgataggtg

SEQ ID NO: 2277 - DNA, 25 bp, Artificial Sequence
  Synthetic: DMPK 3 forward 19:45770061-45770089; SpCas9
cactttgcgaaccaacgataggtgg

SEQ ID NO: 2278 - DNA, 24 bp, Artificial Sequence
  Synthetic: DMPK 3 forward 19:45770062-45770089; SpCas9
actttgcgaaccaacgataggtgg

SEQ ID NO: 2279 - DNA, 23 bp, Artificial Sequence
  Synthetic: DMPK 3 forward 19:45770063-45770089; SpCas9
ctttgcgaaccaacgataggtgg

SEQ ID NO: 2280 - DNA, 22 bp, Artificial Sequence
  Synthetic: DMPK 3 forward 19:45770064-45770089; SpCas9
tttgcgaaccaacgataggtgg

SEQ ID NO: 2281 - DNA, 21 bp, Artificial Sequence
  Synthetic: DMPK 3 forward 19:45770065-45770089; SpCas9
ttgcgaaccaacgataggtgg

SEQ ID NO: 2282 - DNA, 20 bp, Artificial Sequence
  Synthetic: DMPK 3 forward 19:45770066-45770089; SpCas9
tgcgaaccaacgataggtgg

SEQ ID NO: 2283 - DNA, 19 bp, Artificial Sequence
  Synthetic: DMPK 3 forward 19:45770067-45770089; SpCas9
gcgaaccaacgataggtgg

SEQ ID NO: 2284 - DNA, 18 bp, Artificial Sequence
  Synthetic: DMPK 3 forward 19:45770068-45770089; SpCas9
cgaaccaacgataggtgg

SEQ ID NO: 2285 - DNA, 25 bp, Artificial Sequence
  Synthetic: DMPK 3 reverse 19:45770063-45770091; SpCas9
cacccccacctatcgttggttcgca

SEQ ID NO: 2286 - DNA, 24 bp, Artificial Sequence
  Synthetic: DMPK 3 reverse 19:45770064-45770091; SpCas9
acccccacctatcgttggttcgca

SEQ ID NO: 2287 - DNA, 23 bp, Artificial Sequence
  Synthetic: DMPK 3 reverse 19:45770065-45770091; SpCas9
cccccacctatcgttggttcgca

SEQ ID NO: 2288 - DNA, 22 bp, Artificial Sequence
  Synthetic: DMPK 3 reverse 19:45770066-45770091; SpCas9
ccccacctatcgttggttcgca

SEQ ID NO: 2289 - DNA, 21 bp, Artificial Sequence
  Synthetic: DMPK 3 reverse 19:45770067-45770091; SpCas9
cccacctatcgttggttcgca

SEQ ID NO: 2290 - DNA, 20 bp, Artificial Sequence
  Synthetic: DMPK 3 reverse 19:45770068-45770091; SpCas9
ccacctatcgttggttcgca

SEQ ID NO: 2291 - DNA, 19 bp, Artificial Sequence
  Synthetic: DMPK 3 reverse 19:45770069-45770091; SpCas9
cacctatcgttggttcgca

SEQ ID NO: 2292 - DNA, 18 bp, Artificial Sequence
  Synthetic: DMPK 3 reverse 19:45770070-45770091; SpCas9
acctatcgttggttcgca

SEQ ID NO: 2293 - DNA, 25 bp, Artificial Sequence
  Synthetic: DMPK 3 forward 19:45770068-45770096; SpCas9
cgaaccaacgataggtgggggtgcg

SEQ ID NO: 2294 - DNA, 24 bp, Artificial Sequence
  Synthetic: DMPK 3 forward 19:45770069-45770096; SpCas9
gaaccaacgataggtgggggtgcg

SEQ ID NO: 2295 - DNA, 23 bp, Artificial Sequence
  Synthetic: DMPK 3 forward 19:45770070-45770096; SpCas9
aaccaacgataggtgggggtgcg

SEQ ID NO: 2296 - DNA, 22 bp, Artificial Sequence
  Synthetic: DMPK 3 forward 19:45770071-45770096; SpCas9
accaacgataggtgggggtgcg

SEQ ID NO: 2297 - DNA, 21 bp, Artificial Sequence
  Synthetic: DMPK 3 forward 19:45770072-45770096; SpCas9
ccaacgataggtgggggtgcg

SEQ ID NO: 2298 - DNA, 20 bp, Artificial Sequence
  Synthetic: DMPK 3 forward 19:45770073-45770096; SpCas9
caacgataggtgggggtgcg

SEQ ID NO: 2299 - DNA, 19 bp, Artificial Sequence
  Synthetic: DMPK 3 forward 19:45770074-45770096; SpCas9
aacgataggtgggggtgcg

SEQ ID NO: 2300 - DNA, 18 bp, Artificial Sequence
  Synthetic: DMPK 3 forward 19:45770075-45770096; SpCas9
acgataggtgggggtgcg

SEQ ID NO: 2301 - DNA, 25 bp, Artificial Sequence
  Synthetic: DMPK 3 forward 19:45770070-45770098; SpCas9
aaccaacgataggtgggggtgcgtg

SEQ ID NO: 2302 - DNA, 24 bp, Artificial Sequence
  Synthetic: DMPK 3 forward 19:45770071-45770098; SpCas9
accaacgataggtgggggtgcgtg

SEQ ID NO: 2303 - DNA, 23 bp, Artificial Sequence
  Synthetic: DMPK 3 forward 19:45770072-45770098; SpCas9
ccaacgataggtgggggtgcgtg

SEQ ID NO: 2304 - DNA, 22 bp, Artificial Sequence
  Synthetic: DMPK 3 forward 19:45770073-45770098; SpCas9
caacgataggtgggggtgcgtg

SEQ ID NO: 2305 - DNA, 21 bp, Artificial Sequence
  Synthetic: DMPK 3 forward 19:45770074-45770098; SpCas9
aacgataggtgggggtgcgtg

SEQ ID NO: 2306 - DNA, 20 bp, Artificial Sequence
  Synthetic: DMPK 3 forward 19:45770075-45770098; SpCas9
acgataggtgggggtgcgtg

SEQ ID NO: 2307 - DNA, 19 bp, Artificial Sequence
  Synthetic: DMPK 3 forward 19:45770076-45770098; SpCas9
cgataggtgggggtgcgtg

SEQ ID NO: 2308 - DNA, 18 bp, Artificial Sequence
  Synthetic: DMPK 3 forward 19:45770077-45770098; SpCas9
gataggtgggggtgcgtg

SEQ ID NO: 2309 - DNA, 25 bp, Artificial Sequence
  Synthetic: DMPK 3 forward 19:45770071-45770099; SpCas9
accaacgataggtgggggtgcgtgg

SEQ ID NO: 2310 - DNA, 24 bp, Artificial Sequence
  Synthetic: DMPK 3 forward 19:45770072-45770099; SpCas9
ccaacgataggtgggggtgcgtgg

SEQ ID NO: 2311 - DNA, 23 bp, Artificial Sequence
  Synthetic: DMPK 3 forward 19:45770073-45770099; SpCas9
caacgataggtgggggtgcgtgg

SEQ ID NO: 2312 - DNA, 22 bp, Artificial Sequence
  Synthetic: DMPK 3 forward 19:45770074-45770099; SpCas9
aacgataggtgggggtgcgtgg

SEQ ID NO: 2313 - DNA, 21 bp, Artificial Sequence
  Synthetic: DMPK 3 forward 19:45770075-45770099; SpCas9
acgataggtgggggtgcgtgg

SEQ ID NO: 2314 - DNA, 20 bp, Artificial Sequence
  Synthetic: DMPK 3 forward 19:45770076-45770099; SpCas9
cgataggtgggggtgcgtgg

SEQ ID NO: 2315 - DNA, 19 bp, Artificial Sequence
  Synthetic: DMPK 3 forward 19:45770077-45770099; SpCas9
gataggtgggggtgcgtgg

SEQ ID NO: 2316 - DNA, 18 bp, Artificial Sequence
  Synthetic: DMPK 3 forward 19:45770078-45770099; SpCas9
ataggtgggggtgcgtgg

SEQ ID NO: 2317 - DNA, 25 bp, Artificial Sequence
  Synthetic: DMPK 3 reverse 19:45770072-45770100; SpCas9
tcctccacgcacccccacctatcgt

SEQ ID NO: 2318 - DNA, 24 bp, Artificial Sequence
  Synthetic: DMPK 3 reverse 19:45770073-45770100; SpCas9
cctccacgcacccccacctatcgt

SEQ ID NO: 2319 - DNA, 23 bp, Artificial Sequence
  Synthetic: DMPK 3 reverse 19:45770074-45770100; SpCas9
ctccacgcacccccacctatcgt

SEQ ID NO: 2320 - DNA, 22 bp, Artificial Sequence
  Synthetic: DMPK 3 reverse 19:45770075-45770100; SpCas9
tccacgcacccccacctatcgt

SEQ ID NO: 2321 - DNA, 21 bp, Artificial Sequence
  Synthetic: DMPK 3 reverse 19:45770076-45770100; SpCas9
ccacgcacccccacctatcgt

SEQ ID NO: 2322 - DNA, 20 bp, Artificial Sequence
  Synthetic: DMPK 3 reverse 19:45770077-45770100; SpCas9
cacgcacccccacctatcgt

SEQ ID NO: 2323 - DNA, 19 bp, Artificial Sequence
  Synthetic: DMPK 3 reverse 19:45770078-45770100; SpCas9
acgcacccccacctatcgt

SEQ ID NO: 2324 - DNA, 18 bp, Artificial Sequence
  Synthetic: DMPK 3 reverse 19:45770079-45770100; SpCas9
cgcacccccacctatcgt

SEQ ID NO: 2325 - DNA, 25 bp, Artificial Sequence
  Synthetic: DMPK 3 forward 19:45770075-45770103; SpCas9
acgataggtgggggtgcgtggagga

SEQ ID NO: 2326 - DNA, 24 bp, Artificial Sequence
  Synthetic: DMPK 3 forward 19:45770076-45770103; SpCas9
cgataggtgggggtgcgtggagga

SEQ ID NO: 2327 - DNA, 23 bp, Artificial Sequence
  Synthetic: DMPK 3 forward 19:45770077-45770103; SpCas9
gataggtgggggtgcgtggagga

SEQ ID NO: 2328 - DNA, 22 bp, Artificial Sequence
  Synthetic: DMPK 3 forward 19:45770078-45770103; SpCas9
ataggtgggggtgcgtggagga

SEQ ID NO: 2329 - DNA, 21 bp, Artificial Sequence
  Synthetic: DMPK 3 forward 19:45770079-45770103; SpCas9
taggtgggggtgcgtggagga

SEQ ID NO: 2330 - DNA, 20 bp, Artificial Sequence
  Synthetic: DMPK 3 forward 19:45770080-45770103; SpCas9
aggtgggggtgcgtggagga

SEQ ID NO: 2331 - DNA, 19 bp, Artificial Sequence
  Synthetic: DMPK 3 forward 19:45770081-45770103; SpCas9
ggtgggggtgcgtggagga

SEQ ID NO: 2332 - DNA, 18 bp, Artificial Sequence
  Synthetic: DMPK 3 forward 19:45770082-45770103; SpCas9
gtgggggtgcgtggagga

SEQ ID NO: 2333 - DNA, 25 bp, Artificial Sequence
  Synthetic: DMPK 3 forward 19:45770082-45770110; SpCas9
gtgggggtgcgtggaggatggaaca

SEQ ID NO: 2334 - DNA, 24 bp, Artificial Sequence
  Synthetic: DMPK 3 forward 19:45770083-45770110; SpCas9
tgggggtgcgtggaggatggaaca

SEQ ID NO: 2335 - DNA, 23 bp, Artificial Sequence
  Synthetic: DMPK 3 forward 19:45770084-45770110; SpCas9
gggggtgcgtggaggatggaaca

SEQ ID NO: 2336 - DNA, 22 bp, Artificial Sequence
  Synthetic: DMPK 3 forward 19:45770085-45770110; SpCas9
ggggtgcgtggaggatggaaca

SEQ ID NO: 2337 - DNA, 21 bp, Artificial Sequence
  Synthetic: DMPK 3 forward 19:45770086-45770110; SpCas9
gggtgcgtggaggatggaaca

SEQ ID NO: 2338 - DNA, 20 bp, Artificial Sequence
  Synthetic: DMPK 3 forward 19:45770087-45770110; SpCas9
ggtgcgtggaggatggaaca

SEQ ID NO: 2339 - DNA, 19 bp, Artificial Sequence
  Synthetic: DMPK 3 forward 19:45770088-45770110; SpCas9
gtgcgtggaggatggaaca

SEQ ID NO: 2340 - DNA, 18 bp, Artificial Sequence
  Synthetic: DMPK 3 forward 19:45770089-45770110; SpCas9
tgcgtggaggatggaaca

SEQ ID NO: 2341 - DNA, 25 bp, Artificial Sequence
  Synthetic: DMPK 3 forward 19:45770086-45770114; SpCas9
gggtgcgtggaggatggaacacgga

SEQ ID NO: 2342 - DNA, 24 bp, Artificial Sequence
  Synthetic: DMPK 3 forward 19:45770087-45770114; SpCas9
ggtgcgtggaggatggaacacgga

SEQ ID NO: 2343 - DNA, 23 bp, Artificial Sequence
  Synthetic: DMPK 3 forward 19:45770088-45770114; SpCas9
gtgcgtggaggatggaacacgga

SEQ ID NO: 2344 - DNA, 22 bp, Artificial Sequence
  Synthetic: DMPK 3 forward 19:45770089-45770114; SpCas9
tgcgtggaggatggaacacgga

SEQ ID NO: 2345 - DNA, 21 bp, Artificial Sequence
  Synthetic: DMPK 3 forward 19:45770090-45770114; SpCas9
gcgtggaggatggaacacgga

SEQ ID NO: 2346 - DNA, 20 bp, Artificial Sequence
  Synthetic: DMPK 3 forward 19:45770091-45770114; SpCas9
cgtggaggatggaacacgga

SEQ ID NO: 2347 - DNA, 19 bp, Artificial Sequence
  Synthetic: DMPK 3 forward 19:45770092-45770114; SpCas9
gtggaggatggaacacgga

SEQ ID NO: 2348 - DNA, 18 bp, Artificial Sequence
  Synthetic: DMPK 3 forward 19:45770093-45770114; SpCas9
tggaggatggaacacgga

SEQ ID NO: 2349 - DNA, 25 bp, Artificial Sequence
  Synthetic: DMPK 3 forward 19:45770091-45770119; SpCas9
cgtggaggatggaacacggacggcc

SEQ ID NO: 2350 - DNA, 24 bp, Artificial Sequence
  Synthetic: DMPK 3 forward 19:45770092-45770119; SpCas9
gtggaggatggaacacggacggcc

SEQ ID NO: 2351 - DNA, 23 bp, Artificial Sequence
  Synthetic: DMPK 3 forward 19:45770093-45770119; SpCas9
tggaggatggaacacggacggcc

SEQ ID NO: 2352 - DNA, 22 bp, Artificial Sequence
  Synthetic: DMPK 3 forward 19:45770094-45770119; SpCas9
ggaggatggaacacggacggcc

SEQ ID NO: 2353 - DNA, 21 bp, Artificial Sequence
  Synthetic: DMPK 3 forward 19:45770095-45770119; SpCas9
gaggatggaacacggacggcc

SEQ ID NO: 2354 - DNA, 20 bp, Artificial Sequence
  Synthetic: DMPK 3 forward 19:45770096-45770119; SpCas9
aggatggaacacggacggcc

SEQ ID NO: 2355 - DNA, 19 bp, Artificial Sequence
  Synthetic: DMPK 3 forward 19:45770097-45770119; SpCas9
ggatggaacacggacggcc

SEQ ID NO: 2356 - DNA, 18 bp, Artificial Sequence
  Synthetic: DMPK 3 forward 19:45770098-45770119; SpCas9
gatggaacacggacggcc

SEQ ID NO: 2357 - DNA, 25 bp, Artificial Sequence
  Synthetic: DMPK 3 forward 19:45770107-45770135; SpCas9
cggacggcccggcttgctgccttcc

SEQ ID NO: 2358 - DNA, 24 bp, Artificial Sequence
  Synthetic: DMPK 3 forward 19:45770108-45770135; SpCas9
ggacggcccggcttgctgccttcc

SEQ ID NO: 2359 - DNA, 23 bp, Artificial Sequence
  Synthetic: DMPK 3 forward 19:45770109-45770135; SpCas9
gacggcccggcttgctgccttcc

SEQ ID NO: 2360 - DNA, 22 bp, Artificial Sequence
  Synthetic: DMPK 3 forward 19:45770110-45770135; SpCas9
acggcccggcttgctgccttcc

SEQ ID NO: 2361 - DNA, 21 bp, Artificial Sequence
  Synthetic: DMPK 3 forward 19:45770111-45770135; SpCas9
cggcccggcttgctgccttcc

SEQ ID NO: 2362 - DNA, 20 bp, Artificial Sequence
  Synthetic: DMPK 3 forward 19:45770112-45770135; SpCas9
ggcccggcttgctgccttcc

SEQ ID NO: 2363 - DNA, 19 bp, Artificial Sequence
  Synthetic: DMPK 3 forward 19:45770113-45770135; SpCas9
gcccggcttgctgccttcc

SEQ ID NO: 2364 - DNA, 18 bp, Artificial Sequence
  Synthetic: DMPK 3 forward 19:45770114-45770135; SpCas9
cccggcttgctgccttcc

SEQ ID NO: 2365 - DNA, 25 bp, Artificial Sequence
  Synthetic: DMPK 3 forward 19:45770108-45770136; SpCas9
ggacggcccggcttgctgccttccc

SEQ ID NO: 2366 - DNA, 24 bp, Artificial Sequence
  Synthetic: DMPK 3 forward 19:45770109-45770136; SpCas9
gacggcccggcttgctgccttccc

SEQ ID NO: 2367 - DNA, 23 bp, Artificial Sequence
  Synthetic: DMPK 3 forward 19:45770110-45770136; SpCas9
acggcccggcttgctgccttccc

SEQ ID NO: 2368 - DNA, 22 bp, Artificial Sequence
  Synthetic: DMPK 3 forward 19:45770111-45770136; SpCas9
cggcccggcttgctgccttccc

SEQ ID NO: 2369 - DNA, 21 bp, Artificial Sequence
  Synthetic: DMPK 3 forward 19:45770112-45770136; SpCas9
ggcccggcttgctgccttccc

SEQ ID NO: 2370 - DNA, 20 bp, Artificial Sequence
  Synthetic: DMPK 3 forward 19:45770113-45770136; SpCas9
gcccggcttgctgccttccc

SEQ ID NO: 2371 - DNA, 19 bp, Artificial Sequence
  Synthetic: DMPK 3 forward 19:45770114-45770136; SpCas9
cccggcttgctgccttccc

SEQ ID NO: 2372 - DNA, 18 bp, Artificial Sequence
  Synthetic: DMPK 3 forward 19:45770115-45770136; SpCas9
ccggcttgctgccttccc

SEQ ID NO: 2373 - DNA, 25 bp, Artificial Sequence
  Synthetic: DMPK 3 reverse 19:45770114-45770142; SpCas9
tgcaggcctgggaaggcagcaagcc

SEQ ID NO: 2374 - DNA, 24 bp, Artificial Sequence
  Synthetic: DMPK 3 reverse 19:45770115-45770142; SpCas9
gcaggcctgggaaggcagcaagcc

SEQ ID NO: 2375 - DNA, 23 bp, Artificial Sequence
  Synthetic: DMPK 3 reverse 19:45770116-45770142; SpCas9
caggcctgggaaggcagcaagcc

SEQ ID NO: 2376 - DNA, 22 bp, Artificial Sequence
  Synthetic: DMPK 3 reverse 19:45770117-45770142; SpCas9
aggcctgggaaggcagcaagcc

SEQ ID NO: 2377 - DNA, 21 bp, Artificial Sequence
  Synthetic: DMPK 3 reverse 19:45770118-45770142; SpCas9
ggcctgggaaggcagcaagcc

SEQ ID NO: 2378 - DNA, 20 bp, Artificial Sequence
  Synthetic: DMPK 3 reverse 19:45770119-45770142; SpCas9
gcctgggaaggcagcaagcc

SEQ ID NO: 2379 - DNA, 19 bp, Artificial Sequence
  Synthetic: DMPK 3 reverse 19:45770120-45770142; SpCas9
cctgggaaggcagcaagcc

SEQ ID NO: 2380 - DNA, 18 bp, Artificial Sequence
  Synthetic: DMPK 3 reverse 19:45770121-45770142; SpCas9
ctgggaaggcagcaagcc

SEQ ID NO: 2381 - DNA, 25 bp, Artificial Sequence
  Synthetic: DMPK 3 forward 19:45770115-45770143; SpCas9
ccggcttgctgccttcccaggcctg

SEQ ID NO: 2382 - DNA, 24 bp, Artificial Sequence
  Synthetic: DMPK 3 forward 19:45770116-45770143; SpCas9
cggcttgctgccttcccaggcctg

SEQ ID NO: 2383 - DNA, 23 bp, Artificial Sequence
  Synthetic: DMPK 3 forward 19:45770117-45770143; SpCas9
ggcttgctgccttcccaggcctg

SEQ ID NO: 2384 - DNA, 22 bp, Artificial Sequence
  Synthetic: DMPK 3 forward 19:45770118-45770143; SpCas9
gcttgctgccttcccaggcctg

SEQ ID NO: 2385 - DNA, 21 bp, Artificial Sequence
  Synthetic: DMPK 3 forward 19:45770119-45770143; SpCas9
cttgctgccttcccaggcctg

SEQ ID NO: 2386 - DNA, 20 bp, Artificial Sequence
  Synthetic: DMPK 3 forward 19:45770120-45770143; SpCas9
ttgctgccttcccaggcctg

SEQ ID NO: 2387 - DNA, 19 bp, Artificial Sequence
  Synthetic: DMPK 3 forward 19:45770121-45770143; SpCas9
tgctgccttcccaggcctg

SEQ ID NO: 2388 - DNA, 18 bp, Artificial Sequence
  Synthetic: DMPK 3 forward 19:45770122-45770143; SpCas9
gctgccttcccaggcctg

SEQ ID NO: 2389 - DNA, 25 bp, Artificial Sequence
  Synthetic: DMPK 3 reverse 19:45770115-45770143; SpCas9
ctgcaggcctgggaaggcagcaagc

SEQ ID NO: 2390 - DNA, 24 bp, Artificial Sequence
  Synthetic: DMPK 3 reverse 19:45770116-45770143; SpCas9
tgcaggcctgggaaggcagcaagc

SEQ ID NO: 2391 - DNA, 23 bp, Artificial Sequence
  Synthetic: DMPK 3 reverse 19:45770117-45770143; SpCas9
gcaggcctgggaaggcagcaagc

SEQ ID NO: 2392 - DNA, 22 bp, Artificial Sequence
  Synthetic: DMPK 3 reverse 19:45770118-45770143; SpCas9
caggcctgggaaggcagcaagc

SEQ ID NO: 2393 - DNA, 21 bp, Artificial Sequence
  Synthetic: DMPK 3 reverse 19:45770119-45770143; SpCas9
aggcctgggaaggcagcaagc

SEQ ID NO: 2394 - DNA, 20 bp, Artificial Sequence
  Synthetic: DMPK 3 reverse 19:45770120-45770143; SpCas9
ggcctgggaaggcagcaagc

SEQ ID NO: 2395 - DNA, 19 bp, Artificial Sequence
  Synthetic: DMPK 3 reverse 19:45770121-45770143; SpCas9
gcctgggaaggcagcaagc

SEQ ID NO: 2396 - DNA, 18 bp, Artificial Sequence
  Synthetic: DMPK 3 reverse 19:45770122-45770143; SpCas9
cctgggaaggcagcaagc

SEQ ID NO: 2397 - DNA, 25 bp, Artificial Sequence
  Synthetic: DMPK 3 reverse 19:45770119-45770147; SpCas9
caaactgcaggcctgggaaggcagc

SEQ ID NO: 2398 - DNA, 24 bp, Artificial Sequence
  Synthetic: DMPK 3 reverse 19:45770120-45770147; SpCas9
aaactgcaggcctgggaaggcagc

SEQ ID NO: 2399 - DNA, 23 bp, Artificial Sequence
  Synthetic: DMPK 3 reverse 19:45770121-45770147; SpCas9
aactgcaggcctgggaaggcagc

SEQ ID NO: 2400 - DNA, 22 bp, Artificial Sequence
  Synthetic: DMPK 3 reverse 19:45770122-45770147; SpCas9
actgcaggcctgggaaggcagc

SEQ ID NO: 2401 - DNA, 21 bp, Artificial Sequence
  Synthetic: DMPK 3 reverse 19:45770123-45770147; SpCas9
ctgcaggcctgggaaggcagc

SEQ ID NO: 2402 - DNA, 20 bp, Artificial Sequence
  Synthetic: DMPK 3 reverse 19:45770124-45770147; SpCas9
tgcaggcctgggaaggcagc

SEQ ID NO: 2403 - DNA, 19 bp, Artificial Sequence
  Synthetic: DMPK 3 reverse 19:45770125-45770147; SpCas9
gcaggcctgggaaggcagc

SEQ ID NO: 2404 - DNA, 18 bp, Artificial Sequence
  Synthetic: DMPK 3 reverse 19:45770126-45770147; SpCas9
caggcctgggaaggcagc

SEQ ID NO: 2405 - DNA, 25 bp, Artificial Sequence
  Synthetic: DMPK 3 reverse 19:45770123-45770151; SpCas9
tgggcaaactgcaggcctgggaagg

SEQ ID NO: 2406 - DNA, 24 bp, Artificial Sequence
  Synthetic: DMPK 3 reverse 19:45770124-45770151; SpCas9
gggcaaactgcaggcctgggaagg

SEQ ID NO: 2407 - DNA, 23 bp, Artificial Sequence
  Synthetic: DMPK 3 reverse 19:45770125-45770151; SpCas9
ggcaaactgcaggcctgggaagg

SEQ ID NO: 2408 - DNA, 22 bp, Artificial Sequence
  Synthetic: DMPK 3 reverse 19:45770126-45770151; SpCas9
gcaaactgcaggcctgggaagg

SEQ ID NO: 2409 - DNA, 21 bp, Artificial Sequence
  Synthetic: DMPK 3 reverse 19:45770127-45770151; SpCas9
caaactgcaggcctgggaagg

SEQ ID NO: 2410 - DNA, 20 bp, Artificial Sequence
  Synthetic: DMPK 3 reverse 19:45770128-45770151; SpCas9
aaactgcaggcctgggaagg

SEQ ID NO: 2411 - DNA, 19 bp, Artificial Sequence
  Synthetic: DMPK 3 reverse 19:45770129-45770151; SpCas9
aactgcaggcctgggaagg

SEQ ID NO: 2412 - DNA, 18 bp, Artificial Sequence
  Synthetic: DMPK 3 reverse 19:45770130-45770151; SpCas9
actgcaggcctgggaagg

SEQ ID NO: 2413 - DNA, 25 bp, Artificial Sequence
  Synthetic: DMPK 3 reverse 19:45770126-45770154; SpCas9
ggatgggcaaactgcaggcctggga

SEQ ID NO: 2414 - DNA, 24 bp, Artificial Sequence
  Synthetic: DMPK 3 reverse 19:45770127-45770154; SpCas9
gatgggcaaactgcaggcctggga

SEQ ID NO: 2415 - DNA, 23 bp, Artificial Sequence
  Synthetic: DMPK 3 reverse 19:45770128-45770154; SpCas9
atgggcaaactgcaggcctggga

SEQ ID NO: 2416 - DNA, 22 bp, Artificial Sequence
  Synthetic: DMPK 3 reverse 19:45770129-45770154; SpCas9
tgggcaaactgcaggcctggga

SEQ ID NO: 2417 - DNA, 21 bp, Artificial Sequence
  Synthetic: DMPK 3 reverse 19:45770130-45770154; SpCas9
gggcaaactgcaggcctggga

SEQ ID NO: 2418 - DNA, 20 bp, Artificial Sequence
  Synthetic: DMPK 3 reverse 19:45770131-45770154; SpCas9
ggcaaactgcaggcctggga

SEQ ID NO: 2419 - DNA, 19 bp, Artificial Sequence
  Synthetic: DMPK 3 reverse 19:45770132-45770154; SpCas9
gcaaactgcaggcctggga

SEQ ID NO: 2420 - DNA, 18 bp, Artificial Sequence
  Synthetic: DMPK 3 reverse 19:45770133-45770154; SpCas9
caaactgcaggcctggga

SEQ ID NO: 2421 - DNA, 25 bp, Artificial Sequence
  Synthetic: DMPK 3 reverse 19:45770127-45770155; SpCas9
tggatgggcaaactgcaggcctggg

SEQ ID NO: 2422 - DNA, 24 bp, Artificial Sequence
  Synthetic: DMPK 3 reverse 19:45770128-45770155; SpCas9
ggatgggcaaactgcaggcctggg

SEQ ID NO: 2423 - DNA, 23 bp, Artificial Sequence
  Synthetic: DMPK 3 reverse 19:45770129-45770155; SpCas9
gatgggcaaactgcaggcctggg

SEQ ID NO: 2424 - DNA, 22 bp, Artificial Sequence
  Synthetic: DMPK 3 reverse 19:45770130-45770155; SpCas9
atgggcaaactgcaggcctggg

SEQ ID NO: 2425 - DNA, 21 bp, Artificial Sequence
  Synthetic: DMPK 3 reverse 19:45770131-45770155; SpCas9
tgggcaaactgcaggcctggg

SEQ ID NO: 2426 - DNA, 20 bp, Artificial Sequence
  Synthetic: DMPK 3 reverse 19:45770132-45770155; SpCas9
gggcaaactgcaggcctggg

SEQ ID NO: 2427 - DNA, 19 bp, Artificial Sequence
  Synthetic: DMPK 3 reverse 19:45770133-45770155; SpCas9
ggcaaactgcaggcctggg

SEQ ID NO: 2428 - DNA, 18 bp, Artificial Sequence
  Synthetic: DMPK 3 reverse 19:45770134-45770155; SpCas9
gcaaactgcaggcctggg

SEQ ID NO: 2429 - DNA, 25 bp, Artificial Sequence
  Synthetic: DMPK 3 reverse 19:45770130-45770158; SpCas9
acgtggatgggcaaactgcaggcct

SEQ ID NO: 2430 - DNA, 24 bp, Artificial Sequence
  Synthetic: DMPK 3 reverse 19:45770131-45770158; SpCas9
cgtggatgggcaaactgcaggcct

SEQ ID NO: 2431 - DNA, 23 bp, Artificial Sequence
  Synthetic: DMPK 3 reverse 19:45770132-45770158; SpCas9
gtggatgggcaaactgcaggcct

SEQ ID NO: 2432 - DNA, 22 bp, Artificial Sequence
  Synthetic: DMPK 3 reverse 19:45770133-45770158; SpCas9
tggatgggcaaactgcaggcct

SEQ ID NO: 2433 - DNA, 21 bp, Artificial Sequence
  Synthetic: DMPK 3 reverse 19:45770134-45770158; SpCas9
ggatgggcaaactgcaggcct

SEQ ID NO: 2434 - DNA, 20 bp, Artificial Sequence
  Synthetic: DMPK 3 reverse 19:45770135-45770158; SpCas9
gatgggcaaactgcaggcct

SEQ ID NO: 2435 - DNA, 19 bp, Artificial Sequence
  Synthetic: DMPK 3 reverse 19:45770136-45770158; SpCas9
atgggcaaactgcaggcct

SEQ ID NO: 2436 - DNA, 18 bp, Artificial Sequence
  Synthetic: DMPK 3 reverse 19:45770137-45770158; SpCas9
tgggcaaactgcaggcct

SEQ ID NO: 2437 - DNA, 25 bp, Artificial Sequence
  Synthetic: DMPK 3 reverse 19:45770131-45770159; SpCas9
gacgtggatgggcaaactgcaggcc

SEQ ID NO: 2438 - DNA, 24 bp, Artificial Sequence
  Synthetic: DMPK 3 reverse 19:45770132-45770159; SpCas9
acgtggatgggcaaactgcaggcc

SEQ ID NO: 2439 - DNA, 23 bp, Artificial Sequence
  Synthetic: DMPK 3 reverse 19:45770133-45770159; SpCas9
cgtggatgggcaaactgcaggcc

SEQ ID NO: 2440 - DNA, 22 bp, Artificial Sequence
  Synthetic: DMPK 3 reverse 19:45770134-45770159; SpCas9
gtggatgggcaaactgcaggcc

SEQ ID NO: 2441 - DNA, 21 bp, Artificial Sequence
  Synthetic: DMPK 3 reverse 19:45770135-45770159; SpCas9
tggatgggcaaactgcaggcc

SEQ ID NO: 2442 - DNA, 20 bp, Artificial Sequence
  Synthetic: DMPK 3 reverse 19:45770136-45770159; SpCas9
ggatgggcaaactgcaggcc

SEQ ID NO: 2443 - DNA, 19 bp, Artificial Sequence
  Synthetic: DMPK 3 reverse 19:45770137-45770159; SpCas9
gatgggcaaactgcaggcc

SEQ ID NO: 2444 - DNA, 18 bp, Artificial Sequence
  Synthetic: DMPK 3 reverse 19:45770138-45770159; SpCas9
atgggcaaactgcaggcc

SEQ ID NO: 2445 - DNA, 25 bp, Artificial Sequence
  Synthetic: DMPK 3 forward 19:45770133-45770161; SpCas9
aggcctgcagtttgcccatccacgt

SEQ ID NO: 2446 - DNA, 24 bp, Artificial Sequence
  Synthetic: DMPK 3 forward 19:45770134-45770161; SpCas9
ggcctgcagtttgcccatccacgt

SEQ ID NO: 2447 - DNA, 23 bp, Artificial Sequence
  Synthetic: DMPK 3 forward 19:45770135-45770161; SpCas9
gcctgcagtttgcccatccacgt

SEQ ID NO: 2448 - DNA, 22 bp, Artificial Sequence
  Synthetic: DMPK 3 forward 19:45770136-45770161; SpCas9
cctgcagtttgcccatccacgt

SEQ ID NO: 2449 - DNA, 21 bp, Artificial Sequence
  Synthetic: DMPK 3 forward 19:45770137-45770161; SpCas9
ctgcagtttgcccatccacgt

SEQ ID NO: 2450 - DNA, 20 bp, Artificial Sequence
  Synthetic: DMPK 3 forward 19:45770138-45770161; SpCas9
tgcagtttgcccatccacgt

SEQ ID NO: 2451 - DNA, 19 bp, Artificial Sequence
  Synthetic: DMPK 3 forward 19:45770139-45770161; SpCas9
gcagtttgcccatccacgt

SEQ ID NO: 2452 - DNA, 18 bp, Artificial Sequence
  Synthetic: DMPK 3 forward 19:45770140-45770161; SpCas9
cagtttgcccatccacgt

SEQ ID NO: 2453 - DNA, 25 bp, Artificial Sequence
  Synthetic: DMPK 3 forward 19:45770134-45770162; SpCas9
ggcctgcagtttgcccatccacgtc

SEQ ID NO: 2454 - DNA, 24 bp, Artificial Sequence
  Synthetic: DMPK 3 forward 19:45770135-45770162; SpCas9
gcctgcagtttgcccatccacgtc

SEQ ID NO: 2455 - DNA, 23 bp, Artificial Sequence
  Synthetic: DMPK 3 forward 19:45770136-45770162; SpCas9
cctgcagtttgcccatccacgtc

SEQ ID NO: 2456 - DNA, 22 bp, Artificial Sequence
  Synthetic: DMPK 3 forward 19:45770137-45770162; SpCas9
ctgcagtttgcccatccacgtc

SEQ ID NO: 2457 - DNA, 21 bp, Artificial Sequence
  Synthetic: DMPK 3 forward 19:45770138-45770162; SpCas9
tgcagtttgcccatccacgtc

SEQ ID NO: 2458 - DNA, 20 bp, Artificial Sequence
  Synthetic: DMPK 3 forward 19:45770139-45770162; SpCas9
gcagtttgcccatccacgtc

SEQ ID NO: 2459 - DNA, 19 bp, Artificial Sequence
  Synthetic: DMPK 3 forward 19:45770140-45770162; SpCas9
cagtttgcccatccacgtc

SEQ ID NO: 2460 - DNA, 18 bp, Artificial Sequence
  Synthetic: DMPK 3 forward 19:45770141-45770162; SpCas9
agtttgcccatccacgtc

SEQ ID NO: 2461 - DNA, 25 bp, Artificial Sequence
  Synthetic: DMPK 3 forward 19:45770135-45770163; SpCas9
gcctgcagtttgcccatccacgtca

SEQ ID NO: 2462 - DNA, 24 bp, Artificial Sequence
  Synthetic: DMPK 3 forward 19:45770136-45770163; SpCas9
cctgcagtttgcccatccacgtca

SEQ ID NO: 2463 - DNA, 23 bp, Artificial Sequence
  Synthetic: DMPK 3 forward 19:45770137-45770163; SpCas9
ctgcagtttgcccatccacgtca

SEQ ID NO: 2464 - DNA, 22 bp, Artificial Sequence
  Synthetic: DMPK 3 forward 19:45770138-45770163; SpCas9
tgcagtttgcccatccacgtca

SEQ ID NO: 2465 - DNA, 21 bp, Artificial Sequence
  Synthetic: DMPK 3 forward 19:45770139-45770163; SpCas9
gcagtttgcccatccacgtca

SEQ ID NO: 2466 - DNA, 20 bp, Artificial Sequence
  Synthetic: DMPK 3 forward 19:45770140-45770163; SpCas9
cagtttgcccatccacgtca

SEQ ID NO: 2467 - DNA, 19 bp, Artificial Sequence
  Synthetic: DMPK 3 forward 19:45770141-45770163; SpCas9
agtttgcccatccacgtca

SEQ ID NO: 2468 - DNA, 18 bp, Artificial Sequence
  Synthetic: DMPK 3 forward 19:45770142-45770163; SpCas9
gtttgcccatccacgtca

SEQ ID NO: 2469 - DNA, 25 bp, Artificial Sequence
  Synthetic: DMPK 3 reverse 19:45770136-45770164; SpCas9
gccctgacgtggatgggcaaactgc

SEQ ID NO: 2470 - DNA, 24 bp, Artificial Sequence
  Synthetic: DMPK 3 reverse 19:45770137-45770164; SpCas9
ccctgacgtggatgggcaaactgc

SEQ ID NO: 2471 - DNA, 23 bp, Artificial Sequence
  Synthetic: DMPK 3 reverse 19:45770138-45770164; SpCas9
cctgacgtggatgggcaaactgc

SEQ ID NO: 2472 - DNA, 22 bp, Artificial Sequence
  Synthetic: DMPK 3 reverse 19:45770139-45770164; SpCas9
ctgacgtggatgggcaaactgc

SEQ ID NO: 2473 - DNA, 21 bp, Artificial Sequence
  Synthetic: DMPK 3 reverse 19:45770140-45770164; SpCas9
tgacgtggatgggcaaactgc

SEQ ID NO: 2474 - DNA, 20 bp, Artificial Sequence
  Synthetic: DMPK 3 reverse 19:45770141-45770164; SpCas9
gacgtggatgggcaaactgc

SEQ ID NO: 2475 - DNA, 19 bp, Artificial Sequence
  Synthetic: DMPK 3 reverse 19:45770142-45770164; SpCas9
acgtggatgggcaaactgc

SEQ ID NO: 2476 - DNA, 18 bp, Artificial Sequence
  Synthetic: DMPK 3 reverse 19:45770143-45770164; SpCas9
cgtggatgggcaaactgc

SEQ ID NO: 2477 - DNA, 25 bp, Artificial Sequence
  Synthetic: DMPK 3 reverse 19:45770137-45770165; SpCas9
ggccctgacgtggatgggcaaactg

SEQ ID NO: 2478 - DNA, 24 bp, Artificial Sequence
  Synthetic: DMPK 3 reverse 19:45770138-45770165; SpCas9
gccctgacgtggatgggcaaactg

SEQ ID NO: 2479 - DNA, 23 bp, Artificial Sequence
  Synthetic: DMPK 3 reverse 19:45770139-45770165; SpCas9
ccctgacgtggatgggcaaactg

SEQ ID NO: 2480 - DNA, 22 bp, Artificial Sequence
  Synthetic: DMPK 3 reverse 19:45770140-45770165; SpCas9
cctgacgtggatgggcaaactg

SEQ ID NO: 2481 - DNA, 21 bp, Artificial Sequence
  Synthetic: DMPK 3 reverse 19:45770141-45770165; SpCas9
ctgacgtggatgggcaaactg

SEQ ID NO: 2482 - DNA, 20 bp, Artificial Sequence
  Synthetic: DMPK 3 reverse 19:45770142-45770165; SpCas9
tgacgtggatgggcaaactg

SEQ ID NO: 2483 - DNA, 19 bp, Artificial Sequence
  Synthetic: DMPK 3 reverse 19:45770143-45770165; SpCas9
gacgtggatgggcaaactg

SEQ ID NO: 2484 - DNA, 18 bp, Artificial Sequence
  Synthetic: DMPK 3 reverse 19:45770144-45770165; SpCas9
acgtggatgggcaaactg

SEQ ID NO: 2485 - DNA, 25 bp, Artificial Sequence
  Synthetic: DMPK 3 forward 19:45770141-45770169; SpCas9
agtttgcccatccacgtcagggcct

SEQ ID NO: 2486 - DNA, 24 bp, Artificial Sequence
  Synthetic: DMPK 3 forward 19:45770142-45770169; SpCas9
gtttgcccatccacgtcagggcct

SEQ ID NO: 2487 - DNA, 23 bp, Artificial Sequence
  Synthetic: DMPK 3 forward 19:45770143-45770169; SpCas9
tttgcccatccacgtcagggcct

SEQ ID NO: 2488 - DNA, 22 bp, Artificial Sequence
  Synthetic: DMPK 3 forward 19:45770144-45770169; SpCas9
ttgcccatccacgtcagggcct

SEQ ID NO: 2489 - DNA, 21 bp, Artificial Sequence
  Synthetic: DMPK 3 forward 19:45770145-45770169; SpCas9
tgcccatccacgtcagggcct

SEQ ID NO: 2490 - DNA, 20 bp, Artificial Sequence
  Synthetic: DMPK 3 forward 19:45770146-45770169; SpCas9
gcccatccacgtcagggcct

SEQ ID NO: 2491 - DNA, 19 bp, Artificial Sequence
  Synthetic: DMPK 3 forward 19:45770147-45770169; SpCas9
cccatccacgtcagggcct

SEQ ID NO: 2492 - DNA, 18 bp, Artificial Sequence
  Synthetic: DMPK 3 forward 19:45770148-45770169; SpCas9
ccatccacgtcagggcct

SEQ ID NO: 2493 - DNA, 25 bp, Artificial Sequence
  Synthetic: DMPK 3 forward 19:45770146-45770174; SpCas9
gcccatccacgtcagggcctcagcc

SEQ ID NO: 2494 - DNA, 24 bp, Artificial Sequence
  Synthetic: DMPK 3 forward 19:45770147-45770174; SpCas9
cccatccacgtcagggcctcagcc

SEQ ID NO: 2495 - DNA, 23 bp, Artificial Sequence
  Synthetic: DMPK 3 forward 19:45770148-45770174; SpCas9
ccatccacgtcagggcctcagcc

SEQ ID NO: 2496 - DNA, 22 bp, Artificial Sequence
  Synthetic: DMPK 3 forward 19:45770149-45770174; SpCas9
catccacgtcagggcctcagcc

SEQ ID NO: 2497 - DNA, 21 bp, Artificial Sequence
  Synthetic: DMPK 3 forward 19:45770150-45770174; SpCas9
atccacgtcagggcctcagcc

SEQ ID NO: 2498 - DNA, 20 bp, Artificial Sequence
  Synthetic: DMPK 3 forward 19:45770151-45770174; SpCas9
tccacgtcagggcctcagcc

SEQ ID NO: 2499 - DNA, 19 bp, Artificial Sequence
  Synthetic: DMPK 3 forward 19:45770152-45770174; SpCas9
ccacgtcagggcctcagcc

SEQ ID NO: 2500 - DNA, 18 bp, Artificial Sequence
  Synthetic: DMPK 3 forward 19:45770153-45770174; SpCas9
cacgtcagggcctcagcc

SEQ ID NO: 2501 - DNA, 25 bp, Artificial Sequence
  Synthetic: DMPK 3 reverse 19:45770147-45770175; SpCas9
gccaggctgaggccctgacgtggat

SEQ ID NO: 2502 - DNA, 24 bp, Artificial Sequence
  Synthetic: DMPK 3 reverse 19:45770148-45770175; SpCas9
ccaggctgaggccctgacgtggat

SEQ ID NO: 2503 - DNA, 23 bp, Artificial Sequence
  Synthetic: DMPK 3 reverse 19:45770149-45770175; SpCas9
caggctgaggccctgacgtggat

SEQ ID NO: 2504 - DNA, 22 bp, Artificial Sequence
  Synthetic: DMPK 3 reverse 19:45770150-45770175; SpCas9
aggctgaggccctgacgtggat

SEQ ID NO: 2505 - DNA, 21 bp, Artificial Sequence
  Synthetic: DMPK 3 reverse 19:45770151-45770175; SpCas9
ggctgaggccctgacgtggat

SEQ ID NO: 2506 - DNA, 20 bp, Artificial Sequence
  Synthetic: DMPK 3 reverse 19:45770152-45770175; SpCas9
gctgaggccctgacgtggat

SEQ ID NO: 2507 - DNA, 19 bp, Artificial Sequence
  Synthetic: DMPK 3 reverse 19:45770153-45770175; SpCas9
ctgaggccctgacgtggat

SEQ ID NO: 2508 - DNA, 18 bp, Artificial Sequence
  Synthetic: DMPK 3 reverse 19:45770154-45770175; SpCas9
tgaggccctgacgtggat

SEQ ID NO: 2509 - DNA, 25 bp, Artificial Sequence
  Synthetic: DMPK 3 reverse 19:45770148-45770176; SpCas9
ggccaggctgaggccctgacgtgga

SEQ ID NO: 2510 - DNA, 24 bp, Artificial Sequence
  Synthetic: DMPK 3 reverse 19:45770149-45770176; SpCas9
gccaggctgaggccctgacgtgga

SEQ ID NO: 2511 - DNA, 23 bp, Artificial Sequence
  Synthetic: DMPK 3 reverse 19:45770150-45770176; SpCas9
ccaggctgaggccctgacgtgga

SEQ ID NO: 2512 - DNA, 22 bp, Artificial Sequence
  Synthetic: DMPK 3 reverse 19:45770151-45770176; SpCas9
caggctgaggccctgacgtgga

SEQ ID NO: 2513 - DNA, 21 bp, Artificial Sequence
  Synthetic: DMPK 3 reverse 19:45770152-45770176; SpCas9
aggctgaggccctgacgtgga

SEQ ID NO: 2514 - DNA, 20 bp, Artificial Sequence
  Synthetic: DMPK 3 reverse 19:45770153-45770176; SpCas9
ggctgaggccctgacgtgga

SEQ ID NO: 2515 - DNA, 19 bp, Artificial Sequence
  Synthetic: DMPK 3 reverse 19:45770154-45770176; SpCas9
gctgaggccctgacgtgga

SEQ ID NO: 2516 - DNA, 18 bp, Artificial Sequence
  Synthetic: DMPK 3 reverse 19:45770155-45770176; SpCas9
ctgaggccctgacgtgga

SEQ ID NO: 2517 - DNA, 25 bp, Artificial Sequence
  Synthetic: DMPK 3 reverse 19:45770152-45770180; SpCas9
tttcggccaggctgaggccctgacg

SEQ ID NO: 2518 - DNA, 24 bp, Artificial Sequence
  Synthetic: DMPK 3 reverse 19:45770153-45770180; SpCas9
ttcggccaggctgaggccctgacg

SEQ ID NO: 2519 - DNA, 23 bp, Artificial Sequence
  Synthetic: DMPK 3 reverse 19:45770154-45770180; SpCas9
tcggccaggctgaggccctgacg

SEQ ID NO: 2520 - DNA, 22 bp, Artificial Sequence
  Synthetic: DMPK 3 reverse 19:45770155-45770180; SpCas9
cggccaggctgaggccctgacg

SEQ ID NO: 2521 - DNA, 21 bp, Artificial Sequence
  Synthetic: DMPK 3 reverse 19:45770156-45770180; SpCas9
ggccaggctgaggccctgacg

SEQ ID NO: 2522 - DNA, 20 bp, Artificial Sequence
  Synthetic: DMPK 3 reverse 19:45770157-45770180; SpCas9
gccaggctgaggccctgacg

SEQ ID NO: 2523 - DNA, 19 bp, Artificial Sequence
  Synthetic: DMPK 3 reverse 19:45770158-45770180; SpCas9
ccaggctgaggccctgacg

SEQ ID NO: 2524 - DNA, 18 bp, Artificial Sequence
  Synthetic: DMPK 3 reverse 19:45770159-45770180; SpCas9
caggctgaggccctgacg

SEQ ID NO: 2525 - DNA, 25 bp, Artificial Sequence
  Synthetic: DMPK 3 forward 19:45770153-45770181; SpCas9
cacgtcagggcctcagcctggccga

SEQ ID NO: 2526 - DNA, 24 bp, Artificial Sequence
  Synthetic: DMPK 3 forward 19:45770154-45770181; SpCas9
acgtcagggcctcagcctggccga

SEQ ID NO: 2527 - DNA, 23 bp, Artificial Sequence
  Synthetic: DMPK 3 forward 19:45770155-45770181; SpCas9
cgtcagggcctcagcctggccga

SEQ ID NO: 2528 - DNA, 22 bp, Artificial Sequence
  Synthetic: DMPK 3 forward 19:45770156-45770181; SpCas9
gtcagggcctcagcctggccga

SEQ ID NO: 2529 - DNA, 21 bp, Artificial Sequence
  Synthetic: DMPK 3 forward 19:45770157-45770181; SpCas9
tcagggcctcagcctggccga

SEQ ID NO: 2530 - DNA, 20 bp, Artificial Sequence
  Synthetic: DMPK 3 forward 19:45770158-45770181; SpCas9
cagggcctcagcctggccga

SEQ ID NO: 2531 - DNA, 19 bp, Artificial Sequence
  Synthetic: DMPK 3 forward 19:45770159-45770181; SpCas9
agggcctcagcctggccga

SEQ ID NO: 2532 - DNA, 18 bp, Artificial Sequence
  Synthetic: DMPK 3 forward 19:45770160-45770181; SpCas9
gggcctcagcctggccga

SEQ ID NO: 2533 - DNA, 25 bp, Artificial Sequence
  Synthetic: DMPK 3 forward 19:45770157-45770185; SpCas9
tcagggcctcagcctggccgaaaga

SEQ ID NO: 2534 - DNA, 24 bp, Artificial Sequence
  Synthetic: DMPK 3 forward 19:45770158-45770185; SpCas9
cagggcctcagcctggccgaaaga

SEQ ID NO: 2535 - DNA, 23 bp, Artificial Sequence
  Synthetic: DMPK 3 forward 19:45770159-45770185; SpCas9
agggcctcagcctggccgaaaga

SEQ ID NO: 2536 - DNA, 22 bp, Artificial Sequence
  Synthetic: DMPK 3 forward 19:45770160-45770185; SpCas9
gggcctcagcctggccgaaaga

SEQ ID NO: 2537 - DNA, 21 bp, Artificial Sequence
  Synthetic: DMPK 3 forward 19:45770161-45770185; SpCas9
ggcctcagcctggccgaaaga

SEQ ID NO: 2538 - DNA, 20 bp, Artificial Sequence
  Synthetic: DMPK 3 forward 19:45770162-45770185; SpCas9
gcctcagcctggccgaaaga

SEQ ID NO: 2539 - DNA, 19 bp, Artificial Sequence
  Synthetic: DMPK 3 forward 19:45770163-45770185; SpCas9
cctcagcctggccgaaaga

SEQ ID NO: 2540 - DNA, 18 bp, Artificial Sequence
  Synthetic: DMPK 3 forward 19:45770164-45770185; SpCas9
ctcagcctggccgaaaga

SEQ ID NO: 2541 - DNA, 25 bp, Artificial Sequence
  Synthetic: DMPK 3 forward 19:45770163-45770191; SpCas9
cctcagcctggccgaaagaaagaaa

SEQ ID NO: 2542 - DNA, 24 bp, Artificial Sequence
  Synthetic: DMPK 3 forward 19:45770164-45770191; SpCas9
ctcagcctggccgaaagaaagaaa

SEQ ID NO: 2543 - DNA, 23 bp, Artificial Sequence
  Synthetic: DMPK 3 forward 19:45770165-45770191; SpCas9
tcagcctggccgaaagaaagaaa

SEQ ID NO: 2544 - DNA, 22 bp, Artificial Sequence
  Synthetic: DMPK 3 forward 19:45770166-45770191; SpCas9
cagcctggccgaaagaaagaaa

SEQ ID NO: 2545 - DNA, 21 bp, Artificial Sequence
  Synthetic: DMPK 3 forward 19:45770167-45770191; SpCas9
agcctggccgaaagaaagaaa

SEQ ID NO: 2546 - DNA, 20 bp, Artificial Sequence
  Synthetic: DMPK 3 forward 19:45770168-45770191; SpCas9
gcctggccgaaagaaagaaa

SEQ ID NO: 2547 - DNA, 19 bp, Artificial Sequence
  Synthetic: DMPK 3 forward 19:45770169-45770191; SpCas9
cctggccgaaagaaagaaa

SEQ ID NO: 2548 - DNA, 18 bp, Artificial Sequence
  Synthetic: DMPK 3 forward 19:45770170-45770191; SpCas9
ctggccgaaagaaagaaa

SEQ ID NO: 2549 - DNA, 25 bp, Artificial Sequence
  Synthetic: DMPK 3 reverse 19:45770163-45770191; SpCas9
ccatttctttctttcggccaggctg

SEQ ID NO: 2550 - DNA, 24 bp, Artificial Sequence
  Synthetic: DMPK 3 reverse 19:45770164-45770191; SpCas9
catttctttctttcggccaggctg

SEQ ID NO: 2551 - DNA, 23 bp, Artificial Sequence
  Synthetic: DMPK 3 reverse 19:45770165-45770191; SpCas9
atttctttctttcggccaggctg

SEQ ID NO: 2552 - DNA, 22 bp, Artificial Sequence
  Synthetic: DMPK 3 reverse 19:45770166-45770191; SpCas9
tttctttctttcggccaggctg

SEQ ID NO: 2553 - DNA, 21 bp, Artificial Sequence
  Synthetic: DMPK 3 reverse 19:45770167-45770191; SpCas9
ttctttctttcggccaggctg

SEQ ID NO: 2554 - DNA, 20 bp, Artificial Sequence
  Synthetic: DMPK 3 reverse 19:45770168-45770191; SpCas9
tctttctttcggccaggctg

SEQ ID NO: 2555 - DNA, 19 bp, Artificial Sequence
  Synthetic: DMPK 3 reverse 19:45770169-45770191; SpCas9
ctttctttcggccaggctg

SEQ ID NO: 2556 - DNA, 18 bp, Artificial Sequence
  Synthetic: DMPK 3 reverse 19:45770170-45770191; SpCas9
tttctttcggccaggctg

SEQ ID NO: 2557 - DNA, 25 bp, Artificial Sequence
  Synthetic: DMPK 3 reverse 19:45770164-45770192; SpCas9
accatttctttctttcggccaggct

SEQ ID NO: 2558 - DNA, 24 bp, Artificial Sequence
  Synthetic: DMPK 3 reverse 19:45770165-45770192; SpCas9
ccatttctttctttcggccaggct

SEQ ID NO: 2559 - DNA, 23 bp, Artificial Sequence
  Synthetic: DMPK 3 reverse 19:45770166-45770192; SpCas9
catttctttctttcggccaggct

SEQ ID NO: 2560 - DNA, 22 bp, Artificial Sequence
  Synthetic: DMPK 3 reverse 19:45770167-45770192; SpCas9
atttctttctttcggccaggct

SEQ ID NO: 2561 - DNA, 21 bp, Artificial Sequence
  Synthetic: DMPK 3 reverse 19:45770168-45770192; SpCas9
tttctttctttcggccaggct

SEQ ID NO: 2562 - DNA, 20 bp, Artificial Sequence
  Synthetic: DMPK 3 reverse 19:45770169-45770192; SpCas9
ttctttctttcggccaggct

SEQ ID NO: 2563 - DNA, 19 bp, Artificial Sequence
  Synthetic: DMPK 3 reverse 19:45770170-45770192; SpCas9
tctttctttcggccaggct

SEQ ID NO: 2564 - DNA, 18 bp, Artificial Sequence
  Synthetic: DMPK 3 reverse 19:45770171-45770192; SpCas9
ctttctttcggccaggct

SEQ ID NO: 2565 - DNA, 25 bp, Artificial Sequence
  Synthetic: DMPK 3 reverse 19:45770169-45770197; SpCas9
cacagaccatttctttctttcggcc

SEQ ID NO: 2566 - DNA, 24 bp, Artificial Sequence
  Synthetic: DMPK 3 reverse 19:45770170-45770197; SpCas9
acagaccatttctttctttcggcc

SEQ ID NO: 2567 - DNA, 23 bp, Artificial Sequence
  Synthetic: DMPK 3 reverse 19:45770171-45770197; SpCas9
cagaccatttctttctttcggcc

SEQ ID NO: 2568 - DNA, 22 bp, Artificial Sequence
  Synthetic: DMPK 3 reverse 19:45770172-45770197; SpCas9
agaccatttctttctttcggcc

SEQ ID NO: 2569 - DNA, 21 bp, Artificial Sequence
  Synthetic: DMPK 3 reverse 19:45770173-45770197; SpCas9
gaccatttctttctttcggcc

SEQ ID NO: 2570 - DNA, 20 bp, Artificial Sequence
  Synthetic: DMPK 3 reverse 19:45770174-45770197; SpCas9
accatttctttctttcggcc

SEQ ID NO: 2571 - DNA, 19 bp, Artificial Sequence
  Synthetic: DMPK 3 reverse 19:45770175-45770197; SpCas9
ccatttctttctttcggcc

SEQ ID NO: 2572 - DNA, 18 bp, Artificial Sequence
  Synthetic: DMPK 3 reverse 19:45770176-45770197; SpCas9
catttctttctttcggcc

SEQ ID NO: 2573 - DNA, 25 bp, Artificial Sequence
  Synthetic: DMPK 3 reverse 19:45770170-45770198; SpCas9
tcacagaccatttctttctttcggc

SEQ ID NO: 2574 - DNA, 24 bp, Artificial Sequence
  Synthetic: DMPK 3 reverse 19:45770171-45770198; SpCas9
cacagaccatttctttctttcggc

SEQ ID NO: 2575 - DNA, 23 bp, Artificial Sequence
  Synthetic: DMPK 3 reverse 19:45770172-45770198; SpCas9
acagaccatttctttctttcggc

SEQ ID NO: 2576 - DNA, 22 bp, Artificial Sequence
  Synthetic: DMPK 3 reverse 19:45770173-45770198; SpCas9
cagaccatttctttctttcggc

SEQ ID NO: 2577 - DNA, 21 bp, Artificial Sequence
  Synthetic: DMPK 3 reverse 19:45770174-45770198; SpCas9
agaccatttctttctttcggc

SEQ ID NO: 2578 - DNA, 20 bp, Artificial Sequence
  Synthetic: DMPK 3 reverse 19:45770175-45770198; SpCas9
gaccatttctttctttcggc

SEQ ID NO: 2579 - DNA, 19 bp, Artificial Sequence
  Synthetic: DMPK 3 reverse 19:45770176-45770198; SpCas9
accatttctttctttcggc

SEQ ID NO: 2580 - DNA, 18 bp, Artificial Sequence
  Synthetic: DMPK 3 reverse 19:45770177-45770198; SpCas9
ccatttctttctttcggc

SEQ ID NO: 2581 - DNA, 25 bp, Artificial Sequence
  Synthetic: DMPK 3 reverse 19:45770174-45770202; SpCas9
gggatcacagaccatttctttcttt

SEQ ID NO: 2582 - DNA, 24 bp, Artificial Sequence
  Synthetic: DMPK 3 reverse 19:45770175-45770202; SpCas9
ggatcacagaccatttctttcttt

SEQ ID NO: 2583 - DNA, 23 bp, Artificial Sequence
  Synthetic: DMPK 3 reverse 19:45770176-45770202; SpCas9
gatcacagaccatttctttcttt

SEQ ID NO: 2584 - DNA, 22 bp, Artificial Sequence
  Synthetic: DMPK 3 reverse 19:45770177-45770202; SpCas9
atcacagaccatttctttcttt

SEQ ID NO: 2585 - DNA, 21 bp, Artificial Sequence
  Synthetic: DMPK 3 reverse 19:45770178-45770202; SpCas9
tcacagaccatttctttcttt

SEQ ID NO: 2586 - DNA, 20 bp, Artificial Sequence
  Synthetic: DMPK 3 reverse 19:45770179-45770202; SpCas9
cacagaccatttctttcttt

SEQ ID NO: 2587 - DNA, 19 bp, Artificial Sequence
  Synthetic: DMPK 3 reverse 19:45770180-45770202; SpCas9
acagaccatttctttcttt

SEQ ID NO: 2588 - DNA, 18 bp, Artificial Sequence
  Synthetic: DMPK 3 reverse 19:45770181-45770202; SpCas9
cagaccatttctttcttt

SEQ ID NO: 2589 - DNA, 25 bp, Artificial Sequence
  Synthetic: DMPK 3 forward 19:45770179-45770207; SpCas9
agaaagaaatggtctgtgatccccc

SEQ ID NO: 2590 - DNA, 24 bp, Artificial Sequence
  Synthetic: DMPK 3 forward 19:45770180-45770207; SpCas9
gaaagaaatggtctgtgatccccc

SEQ ID NO: 2591 - DNA, 23 bp, Artificial Sequence
  Synthetic: DMPK 3 forward 19:45770181-45770207; SpCas9
aaagaaatggtctgtgatccccc

SEQ ID NO: 2592 - DNA, 22 bp, Artificial Sequence
  Synthetic: DMPK 3 forward 19:45770182-45770207; SpCas9
aagaaatggtctgtgatccccc

SEQ ID NO: 2593 - DNA, 21 bp, Artificial Sequence
  Synthetic: DMPK 3 forward 19:45770183-45770207; SpCas9
agaaatggtctgtgatccccc

SEQ ID NO: 2594 - DNA, 20 bp, Artificial Sequence
  Synthetic: DMPK 3 forward 19:45770184-45770207; SpCas9
gaaatggtctgtgatccccc

SEQ ID NO: 2595 - DNA, 19 bp, Artificial Sequence
  Synthetic: DMPK 3 forward 19:45770185-45770207; SpCas9
aaatggtctgtgatccccc

SEQ ID NO: 2596 - DNA, 18 bp, Artificial Sequence
  Synthetic: DMPK 3 forward 19:45770186-45770207; SpCas9
aatggtctgtgatccccc

SEQ ID NO: 2597 - DNA, 25 bp, Artificial Sequence
  Synthetic: DMPK 3 forward 19:45770182-45770210; SpCas9
aagaaatggtctgtgatccccccag

SEQ ID NO: 2598 - DNA, 24 bp, Artificial Sequence
  Synthetic: DMPK 3 forward 19:45770183-45770210; SpCas9
agaaatggtctgtgatccccccag

SEQ ID NO: 2599 - DNA, 23 bp, Artificial Sequence
  Synthetic: DMPK 3 forward 19:45770184-45770210; SpCas9
gaaatggtctgtgatccccccag

SEQ ID NO: 2600 - DNA, 22 bp, Artificial Sequence
  Synthetic: DMPK 3 forward 19:45770185-45770210; SpCas9
aaatggtctgtgatccccccag

SEQ ID NO: 2601 - DNA, 21 bp, Artificial Sequence
  Synthetic: DMPK 3 forward 19:45770186-45770210; SpCas9
aatggtctgtgatccccccag

SEQ ID NO: 2602 - DNA, 20 bp, Artificial Sequence
  Synthetic: DMPK 3 forward 19:45770187-45770210; SpCas9
atggtctgtgatccccccag

SEQ ID NO: 2603 - DNA, 19 bp, Artificial Sequence
  Synthetic: DMPK 3 forward 19:45770188-45770210; SpCas9
tggtctgtgatccccccag

SEQ ID NO: 2604 - DNA, 18 bp, Artificial Sequence
  Synthetic: DMPK 3 forward 19:45770189-45770210; SpCas9
ggtctgtgatccccccag

SEQ ID NO: 2605 - DNA, 25 bp, Artificial Sequence
  Synthetic: DMPK 3 forward 19:45770185-45770213; SpCas9
aaatggtctgtgatccccccagcag

SEQ ID NO: 2606 - DNA, 24 bp, Artificial Sequence
  Synthetic: DMPK 3 forward 19:45770186-45770213; SpCas9
aatggtctgtgatccccccagcag

SEQ ID NO: 2607 - DNA, 23 bp, Artificial Sequence
  Synthetic: DMPK 3 forward 19:45770187-45770213; SpCas9
atggtctgtgatccccccagcag

SEQ ID NO: 2608 - DNA, 22 bp, Artificial Sequence
  Synthetic: DMPK 3 forward 19:45770188-45770213; SpCas9
tggtctgtgatccccccagcag

SEQ ID NO: 2609 - DNA, 21 bp, Artificial Sequence
  Synthetic: DMPK 3 forward 19:45770189-45770213; SpCas9
ggtctgtgatccccccagcag

SEQ ID NO: 2610 - DNA, 20 bp, Artificial Sequence
  Synthetic: DMPK 3 forward 19:45770190-45770213; SpCas9
gtctgtgatccccccagcag

SEQ ID NO: 2611 - DNA, 19 bp, Artificial Sequence
  Synthetic: DMPK 3 forward 19:45770191-45770213; SpCas9
tctgtgatccccccagcag

SEQ ID NO: 2612 - DNA, 18 bp, Artificial Sequence
  Synthetic: DMPK 3 forward 19:45770192-45770213; SpCas9
ctgtgatccccccagcag

SEQ ID NO: 2613 - DNA, 25 bp, Artificial Sequence
  Synthetic: DMPK 3 forward 19:45770188-45770216; SpCas9
tggtctgtgatccccccagcagcag

SEQ ID NO: 2614 - DNA, 24 bp, Artificial Sequence
  Synthetic: DMPK 3 forward 19:45770189-45770216; SpCas9
ggtctgtgatccccccagcagcag

SEQ ID NO: 2615 - DNA, 23 bp, Artificial Sequence
  Synthetic: DMPK 3 forward 19:45770190-45770216; SpCas9
gtctgtgatccccccagcagcag

SEQ ID NO: 2616 - DNA, 22 bp, Artificial Sequence
  Synthetic: DMPK 3 forward 19:45770191-45770216; SpCas9
tctgtgatccccccagcagcag

SEQ ID NO: 2617 - DNA, 21 bp, Artificial Sequence
  Synthetic: DMPK 3 forward 19:45770192-45770216; SpCas9
ctgtgatccccccagcagcag

SEQ ID NO: 2618 - DNA, 20 bp, Artificial Sequence
  Synthetic: DMPK 3 forward 19:45770193-45770216; SpCas9
tgtgatccccccagcagcag

SEQ ID NO: 2619 - DNA, 19 bp, Artificial Sequence
  Synthetic: DMPK 3 forward 19:45770194-45770216; SpCas9
gtgatccccccagcagcag

SEQ ID NO: 2620 - DNA, 18 bp, Artificial Sequence
  Synthetic: DMPK 3 forward 19:45770195-45770216; SpCas9
tgatccccccagcagcag

SEQ ID NO: 2621 - DNA, 25 bp, Artificial Sequence
  Synthetic: DMPK 3 forward 19:45770191-45770219; SpCas9
tctgtgatccccccagcagcagcag

SEQ ID NO: 2622 - DNA, 24 bp, Artificial Sequence
  Synthetic: DMPK 3 forward 19:45770192-45770219; SpCas9
ctgtgatccccccagcagcagcag

SEQ ID NO: 2623 - DNA, 23 bp, Artificial Sequence
  Synthetic: DMPK 3 forward 19:45770193-45770219; SpCas9
tgtgatccccccagcagcagcag

SEQ ID NO: 2624 - DNA, 22 bp, Artificial Sequence
  Synthetic: DMPK 3 forward 19:45770194-45770219; SpCas9
gtgatccccccagcagcagcag

SEQ ID NO: 2625 - DNA, 21 bp, Artificial Sequence
  Synthetic: DMPK 3 forward 19:45770195-45770219; SpCas9
tgatccccccagcagcagcag

SEQ ID NO: 2626 - DNA, 20 bp, Artificial Sequence
  Synthetic: DMPK 3 forward 19:45770196-45770219; SpCas9
gatccccccagcagcagcag

SEQ ID NO: 2627 - DNA, 19 bp, Artificial Sequence
  Synthetic: DMPK 3 forward 19:45770197-45770219; SpCas9
atccccccagcagcagcag

SEQ ID NO: 2628 - DNA, 18 bp, Artificial Sequence
  Synthetic: DMPK 3 forward 19:45770198-45770219; SpCas9
tccccccagcagcagcag

SEQ ID NO: 2629 - DNA, 25 bp, Artificial Sequence
  Synthetic: DMPK 3 reverse 19:45770192-45770220; SpCas9
gctgctgctgctgctggggggatca

SEQ ID NO: 2630 - DNA, 24 bp, Artificial Sequence
  Synthetic: DMPK 3 reverse 19:45770193-45770220; SpCas9
ctgctgctgctgctggggggatca

SEQ ID NO: 2631 - DNA, 23 bp, Artificial Sequence
  Synthetic: DMPK 3 reverse 19:45770194-45770220; SpCas9
tgctgctgctgctggggggatca

SEQ ID NO: 2632 - DNA, 22 bp, Artificial Sequence
  Synthetic: DMPK 3 reverse 19:45770195-45770220; SpCas9
gctgctgctgctggggggatca

SEQ ID NO: 2633 - DNA, 21 bp, Artificial Sequence
  Synthetic: DMPK 3 reverse 19:45770196-45770220; SpCas9
ctgctgctgctggggggatca

SEQ ID NO: 2634 - DNA, 20 bp, Artificial Sequence
  Synthetic: DMPK 3 reverse 19:45770197-45770220; SpCas9
tgctgctgctggggggatca

SEQ ID NO: 2635 - DNA, 19 bp, Artificial Sequence
  Synthetic: DMPK 3 reverse 19:45770198-45770220; SpCas9
gctgctgctggggggatca

SEQ ID NO: 2636 - DNA, 18 bp, Artificial Sequence
  Synthetic: DMPK 3 reverse 19:45770199-45770220; SpCas9
ctgctgctggggggatca

SEQ ID NO: 2637 - DNA, 25 bp, Artificial Sequence
  Synthetic: DMPK 3 forward 19:45770194-45770222; SpCas9
gtgatccccccagcagcagcagcag

SEQ ID NO: 2638 - DNA, 24 bp, Artificial Sequence
  Synthetic: DMPK 3 forward 19:45770195-45770222; SpCas9
tgatccccccagcagcagcagcag

SEQ ID NO: 2639 - DNA, 23 bp, Artificial Sequence
  Synthetic: DMPK 3 forward 19:45770196-45770222; SpCas9
gatccccccagcagcagcagcag

SEQ ID NO: 2640 - DNA, 22 bp, Artificial Sequence
  Synthetic: DMPK 3 forward 19:45770197-45770222; SpCas9
atccccccagcagcagcagcag

SEQ ID NO: 2641 - DNA, 21 bp, Artificial Sequence
  Synthetic: DMPK 3 forward 19:45770198-45770222; SpCas9
tccccccagcagcagcagcag

SEQ ID NO: 2642 - DNA, 20 bp, Artificial Sequence
  Synthetic: DMPK 3 forward 19:45770199-45770222; SpCas9
ccccccagcagcagcagcag

SEQ ID NO: 2643 - DNA, 19 bp, Artificial Sequence
  Synthetic: DMPK 3 forward 19:45770200-45770222; SpCas9
cccccagcagcagcagcag

SEQ ID NO: 2644 - DNA, 18 bp, Artificial Sequence
  Synthetic: DMPK 3 forward 19:45770201-45770222; SpCas9
ccccagcagcagcagcag

SEQ ID NO: 2645 - DNA, 25 bp, Artificial Sequence
  Synthetic: DMPK 3 forward 19:45770197-45770225; SpCas9
atccccccagcagcagcagcagcag

SEQ ID NO: 2646 - DNA, 24 bp, Artificial Sequence
  Synthetic: DMPK 3 forward 19:45770198-45770225; SpCas9
tccccccagcagcagcagcagcag

SEQ ID NO: 2647 - DNA, 23 bp, Artificial Sequence
  Synthetic: DMPK 3 forward 19:45770199-45770225; SpCas9
ccccccagcagcagcagcagcag

SEQ ID NO: 2648 - DNA, 22 bp, Artificial Sequence
  Synthetic: DMPK 3 forward 19:45770200-45770225; SpCas9
cccccagcagcagcagcagcag

SEQ ID NO: 2649 - DNA, 21 bp, Artificial Sequence
  Synthetic: DMPK 3 forward 19:45770201-45770225; SpCas9
ccccagcagcagcagcagcag

SEQ ID NO: 2650 - DNA, 20 bp, Artificial Sequence
  Synthetic: DMPK 3 forward 19:45770202-45770225; SpCas9
cccagcagcagcagcagcag

SEQ ID NO: 2651 - DNA, 19 bp, Artificial Sequence
  Synthetic: DMPK 3 forward 19:45770203-45770225; SpCas9
ccagcagcagcagcagcag

SEQ ID NO: 2652 - DNA, 18 bp, Artificial Sequence
  Synthetic: DMPK 3 forward 19:45770204-45770225; SpCas9
cagcagcagcagcagcag

SEQ ID NO: 2653 - DNA, 25 bp, Artificial Sequence
  Synthetic: DMPK 3 reverse 19:45770199-45770227; SpCas9
tgctgctgctgctgctgctgctggg

SEQ ID NO: 2654 - DNA, 24 bp, Artificial Sequence
  Synthetic: DMPK 3 reverse 19:45770200-45770227; SpCas9
gctgctgctgctgctgctgctggg

SEQ ID NO: 2655 - DNA, 23 bp, Artificial Sequence
  Synthetic: DMPK 3 reverse 19:45770201-45770227; SpCas9
ctgctgctgctgctgctgctggg

SEQ ID NO: 2656 - DNA, 22 bp, Artificial Sequence
  Synthetic: DMPK 3 reverse 19:45770202-45770227; SpCas9
tgctgctgctgctgctgctggg

SEQ ID NO: 2657 - DNA, 21 bp, Artificial Sequence
  Synthetic: DMPK 3 reverse 19:45770203-45770227; SpCas9
gctgctgctgctgctgctggg

SEQ ID NO: 2658 - DNA, 20 bp, Artificial Sequence
  Synthetic: DMPK 3 reverse 19:45770204-45770227; SpCas9
ctgctgctgctgctgctggg

SEQ ID NO: 2659 - DNA, 19 bp, Artificial Sequence
  Synthetic: DMPK 3 reverse 19:45770205-45770227; SpCas9
tgctgctgctgctgctggg

SEQ ID NO: 2660 - DNA, 18 bp, Artificial Sequence
  Synthetic: DMPK 3 reverse 19:45770206-45770227; SpCas9
gctgctgctgctgctggg

SEQ ID NO: 2661 - DNA, 25 bp, Artificial Sequence
  Synthetic: DMPK 3 forward 19:45770200-45770228; SpCas9
cccccagcagcagcagcagcagcag

SEQ ID NO: 2662 - DNA, 24 bp, Artificial Sequence
  Synthetic: DMPK 3 forward 19:45770201-45770228; SpCas9
ccccagcagcagcagcagcagcag

SEQ ID NO: 2663 - DNA, 23 bp, Artificial Sequence
  Synthetic: DMPK 3 forward 19:45770202-45770228; SpCas9
cccagcagcagcagcagcagcag

SEQ ID NO: 2664 - DNA, 22 bp, Artificial Sequence
  Synthetic: DMPK 3 forward 19:45770203-45770228; SpCas9
ccagcagcagcagcagcagcag

SEQ ID NO: 2665 - DNA, 21 bp, Artificial Sequence
  Synthetic: DMPK 3 forward 19:45770204-45770228; SpCas9
cagcagcagcagcagcagcag

SEQ ID NO: 2666 - DNA, 20 bp, Artificial Sequence
  Synthetic: DMPK 3 forward 19:45770205-45770228; SpCas9
agcagcagcagcagcagcag

SEQ ID NO: 2667 - DNA, 19 bp, Artificial Sequence
  Synthetic: DMPK 3 forward 19:45770206-45770228; SpCas9
gcagcagcagcagcagcag

SEQ ID NO: 2668 - DNA, 18 bp, Artificial Sequence
  Synthetic: DMPK 3 forward 19:45770207-45770228; SpCas9
cagcagcagcagcagcag

SEQ ID NO: 2669 - DNA, 25 bp, Artificial Sequence
  Synthetic: DMPK 3 reverse 19:45770200-45770228; SpCas9
ctgctgctgctgctgctgctgctgg

SEQ ID NO: 2670 - DNA, 24 bp, Artificial Sequence
  Synthetic: DMPK 3 reverse 19:45770201-45770228; SpCas9
tgctgctgctgctgctgctgctgg

SEQ ID NO: 2671 - DNA, 23 bp, Artificial Sequence
  Synthetic: DMPK 3 reverse 19:45770202-45770228; SpCas9
gctgctgctgctgctgctgctgg

SEQ ID NO: 2672 - DNA, 22 bp, Artificial Sequence
  Synthetic: DMPK 3 reverse 19:45770203-45770228; SpCas9
ctgctgctgctgctgctgctgg

SEQ ID NO: 2673 - DNA, 21 bp, Artificial Sequence
  Synthetic: DMPK 3 reverse 19:45770204-45770228; SpCas9
tgctgctgctgctgctgctgg

SEQ ID NO: 2674 - DNA, 20 bp, Artificial Sequence
  Synthetic: DMPK 3 reverse 19:45770205-45770228; SpCas9
gctgctgctgctgctgctgg

SEQ ID NO: 2675 - DNA, 19 bp, Artificial Sequence
  Synthetic: DMPK 3 reverse 19:45770206-45770228; SpCas9
ctgctgctgctgctgctgg

SEQ ID NO: 2676 - DNA, 18 bp, Artificial Sequence
  Synthetic: DMPK 3 reverse 19:45770207-45770228; SpCas9
tgctgctgctgctgctgg

SEQ ID NO: 2677 - DNA, 25 bp, Artificial Sequence
  Synthetic: DMPK 3 reverse 19:45770201-45770229; SpCas9
gctgctgctgctgctgctgctgctg

SEQ ID NO: 2678 - DNA, 24 bp, Artificial Sequence
  Synthetic: DMPK 3 reverse 19:45770202-45770229; SpCas9
ctgctgctgctgctgctgctgctg

SEQ ID NO: 2679 - DNA, 23 bp, Artificial Sequence
  Synthetic: DMPK 3 reverse 19:45770203-45770229; SpCas9
tgctgctgctgctgctgctgctg

SEQ ID NO: 2680 - DNA, 22 bp, Artificial Sequence
  Synthetic: DMPK 3 reverse 19:45770204-45770229; SpCas9
gctgctgctgctgctgctgctg

SEQ ID NO: 2681 - DNA, 21 bp, Artificial Sequence
  Synthetic: DMPK 3 reverse 19:45770205-45770229; SpCas9
ctgctgctgctgctgctgctg

SEQ ID NO: 2682 - DNA, 20 bp, Artificial Sequence
  Synthetic: DMPK 3 reverse 19:45770206-45770229; SpCas9
tgctgctgctgctgctgctg

SEQ ID NO: 2683 - DNA, 19 bp, Artificial Sequence
  Synthetic: DMPK 3 reverse 19:45770207-45770229; SpCas9
gctgctgctgctgctgctg

SEQ ID NO: 2684 - DNA, 18 bp, Artificial Sequence
  Synthetic: DMPK 3 reverse 19:45770208-45770229; SpCas9
ctgctgctgctgctgctg

SEQ ID NO: 2685 - DNA, 25 bp, Artificial Sequence
  Synthetic: DMPK 3 reverse 19:45770202-45770230; SpCas9
tgctgctgctgctgctgctgctgct

SEQ ID NO: 2686 - DNA, 24 bp, Artificial Sequence
  Synthetic: DMPK 3 reverse 19:45770203-45770230; SpCas9
gctgctgctgctgctgctgctgct

SEQ ID NO: 2687 - DNA, 23 bp, Artificial Sequence
  Synthetic: DMPK 3 reverse 19:45770204-45770230; SpCas9
ctgctgctgctgctgctgctgct

SEQ ID NO: 2688 - DNA, 22 bp, Artificial Sequence
  Synthetic: DMPK 3 reverse 19:45770205-45770230; SpCas9
tgctgctgctgctgctgctgct

SEQ ID NO: 2689 - DNA, 21 bp, Artificial Sequence
  Synthetic: DMPK 3 reverse 19:45770206-45770230; SpCas9
gctgctgctgctgctgctgct

SEQ ID NO: 2690 - DNA, 20 bp, Artificial Sequence
  Synthetic: DMPK 3 reverse 19:45770207-45770230; SpCas9
ctgctgctgctgctgctgct

SEQ ID NO: 2691 - DNA, 19 bp, Artificial Sequence
  Synthetic: DMPK 3 reverse 19:45770208-45770230; SpCas9
tgctgctgctgctgctgct

SEQ ID NO: 2692 - DNA, 18 bp, Artificial Sequence
  Synthetic: DMPK 3 reverse 19:45770209-45770230; SpCas9
gctgctgctgctgctgct

SEQ ID NO: 2693 - DNA, 25 bp, Artificial Sequence
  Synthetic: DMPK 3 forward 19:45770203-45770231; SpCas9
ccagcagcagcagcagcagcagcag

SEQ ID NO: 2694 - DNA, 24 bp, Artificial Sequence
  Synthetic: DMPK 3 forward 19:45770204-45770231; SpCas9
cagcagcagcagcagcagcagcag

SEQ ID NO: 2695 - DNA, 23 bp, Artificial Sequence
  Synthetic: DMPK 3 forward 19:45770205-45770231; SpCas9
agcagcagcagcagcagcagcag

SEQ ID NO: 2696 - DNA, 22 bp, Artificial Sequence
  Synthetic: DMPK 3 forward 19:45770206-45770231; SpCas9
gcagcagcagcagcagcagcag

SEQ ID NO: 2697 - DNA, 21 bp, Artificial Sequence
  Synthetic: DMPK 3 forward 19:45770207-45770231; SpCas9
cagcagcagcagcagcagcag

SEQ ID NO: 2698 - DNA, 20 bp, Artificial Sequence
  Synthetic: DMPK 3 forward 19:45770208-45770231; SpCas9
agcagcagcagcagcagcag

SEQ ID NO: 2699 - DNA, 19 bp, Artificial Sequence
  Synthetic: DMPK 3 forward 19:45770209-45770231; SpCas9
gcagcagcagcagcagcag

SEQ ID NO: 2700 - DNA, 18 bp, Artificial Sequence
  Synthetic: DMPK 3 forward 19:45770210-45770231; SpCas9
cagcagcagcagcagcag

SEQ ID NO: 2701 - DNA, 25 bp, Artificial Sequence
  Synthetic: DMPK 3 reverse 19:45770203-45770231; SpCas9
ctgctgctgctgctgctgctgctgc

SEQ ID NO: 2702 - DNA, 24 bp, Artificial Sequence
  Synthetic: DMPK 3 reverse 19:45770204-45770231; SpCas9
tgctgctgctgctgctgctgctgc

SEQ ID NO: 2703 - DNA, 23 bp, Artificial Sequence
  Synthetic: DMPK 3 reverse 19:45770205-45770231; SpCas9
gctgctgctgctgctgctgctgc

SEQ ID NO: 2704 - DNA, 22 bp, Artificial Sequence
  Synthetic: DMPK 3 reverse 19:45770206-45770231; SpCas9
ctgctgctgctgctgctgctgc

SEQ ID NO: 2705 - DNA, 21 bp, Artificial Sequence
  Synthetic: DMPK 3 reverse 19:45770207-45770231; SpCas9
tgctgctgctgctgctgctgc

SEQ ID NO: 2706 - DNA, 20 bp, Artificial Sequence
  Synthetic: DMPK 3 reverse 19:45770208-45770231; SpCas9
gctgctgctgctgctgctgc

SEQ ID NO: 2707 - DNA, 19 bp, Artificial Sequence
  Synthetic: DMPK 3 reverse 19:45770209-45770231; SpCas9
ctgctgctgctgctgctgc

SEQ ID NO: 2708 - DNA, 18 bp, Artificial Sequence
  Synthetic: DMPK 3 reverse 19:45770210-45770231; SpCas9
tgctgctgctgctgctgc

SEQ ID NO: 2709 - DNA, 18 bp, Artificial Sequence
  Synthetic: DMPK 5 forward 19:45770266-45770288; AsCpf1-1
cggctacaaggacccttc

SEQ ID NO: 2710 - DNA, 19 bp, Artificial Sequence
  Synthetic: DMPK 5 forward 19:45770266-45770289; AsCpf1-1
cggctacaaggacccttcg

SEQ ID NO: 2711 - DNA, 20 bp, Artificial Sequence
  Synthetic: DMPK 5 forward 19:45770266-45770290; AsCpf1-1
cggctacaaggacccttcga

SEQ ID NO: 2712 - DNA, 21 bp, Artificial Sequence
  Synthetic: DMPK 5 forward 19:45770266-45770291; AsCpf1-1
cggctacaaggacccttcgag

SEQ ID NO: 2713 - DNA, 22 bp, Artificial Sequence
  Synthetic: DMPK 5 forward 19:45770266-45770292; AsCpf1-1
cggctacaaggacccttcgagc

SEQ ID NO: 2714 - DNA, 23 bp, Artificial Sequence
  Synthetic: DMPK 5 forward 19:45770266-45770293; AsCpf1-1
cggctacaaggacccttcgagcc

SEQ ID NO: 2715 - DNA, 24 bp, Artificial Sequence
  Synthetic: DMPK 5 forward 19:45770266-45770294; AsCpf1-1
cggctacaaggacccttcgagccc

SEQ ID NO: 2716 - DNA, 25 bp, Artificial Sequence
  Synthetic: DMPK 5 forward 19:45770266-45770295; AsCpf1-1
cggctacaaggacccttcgagcccc

SEQ ID NO: 2717 - DNA, 18 bp, Artificial Sequence
  Synthetic: DMPK 5 forward 19:45770267-45770289; AsCpf1-1
ggctacaaggacccttcg

SEQ ID NO: 2718 - DNA, 19 bp, Artificial Sequence
  Synthetic: DMPK 5 forward 19:45770267-45770290; AsCpf1-1
ggctacaaggacccttcga

SEQ ID NO: 2719 - DNA, 20 bp, Artificial Sequence
  Synthetic: DMPK 5 forward 19:45770267-45770291; AsCpf1-1
ggctacaaggacccttcgag

SEQ ID NO: 2720 - DNA, 21 bp, Artificial Sequence
  Synthetic: DMPK 5 forward 19:45770267-45770292; AsCpf1-1
ggctacaaggacccttcgagc

SEQ ID NO: 2721 - DNA, 22 bp, Artificial Sequence
  Synthetic: DMPK 5 forward 19:45770267-45770293; AsCpf1-1
ggctacaaggacccttcgagcc

SEQ ID NO: 2722 - DNA, 23 bp, Artificial Sequence
  Synthetic: DMPK 5 forward 19:45770267-45770294; AsCpf1-1
ggctacaaggacccttcgagccc

SEQ ID NO: 2723 - DNA, 24 bp, Artificial Sequence
  Synthetic: DMPK 5 forward 19:45770267-45770295; AsCpf1-1
ggctacaaggacccttcgagcccc

SEQ ID NO: 2724 - DNA, 25 bp, Artificial Sequence
  Synthetic: DMPK 5 forward 19:45770267-45770296; AsCpf1-1
ggctacaaggacccttcgagccccg

SEQ ID NO: 2725 - DNA, 18 bp, Artificial Sequence
  Synthetic: DMPK 5 reverse 19:45770282-45770304; AsCpf1-1
cggccggcgaacggggct

SEQ ID NO: 2726 - DNA, 19 bp, Artificial Sequence
  Synthetic: DMPK 5 reverse 19:45770282-45770305; AsCpf1-1
cggccggcgaacggggctc

SEQ ID NO: 2727 - DNA, 20 bp, Artificial Sequence
  Synthetic: DMPK 5 reverse 19:45770282-45770306; AsCpf1-1
cggccggcgaacggggctcg

SEQ ID NO: 2728 - DNA, 21 bp, Artificial Sequence
  Synthetic: DMPK 5 reverse 19:45770282-45770307; AsCpf1-1
cggccggcgaacggggctcga

SEQ ID NO: 2729 - DNA, 22 bp, Artificial Sequence
  Synthetic: DMPK 5 reverse 19:45770282-45770308; AsCpf1-1
cggccggcgaacggggctcgaa

SEQ ID NO: 2730 - DNA, 23 bp, Artificial Sequence
  Synthetic: DMPK 5 reverse 19:45770282-45770309; AsCpf1-1
cggccggcgaacggggctcgaag

SEQ ID NO: 2731 - DNA, 24 bp, Artificial Sequence
  Synthetic: DMPK 5 reverse 19:45770282-45770310; AsCpf1-1
cggccggcgaacggggctcgaagg

SEQ ID NO: 2732 - DNA, 25 bp, Artificial Sequence
  Synthetic: DMPK 5 reverse 19:45770282-45770311; AsCpf1-1
cggccggcgaacggggctcgaaggg

SEQ ID NO: 2733 - DNA, 18 bp, Artificial Sequence
  Synthetic: DMPK 5 forward 19:45770285-45770307; AsCpf1-1
agccccgttcgccggccg

SEQ ID NO: 2734 - DNA, 19 bp, Artificial Sequence
  Synthetic: DMPK 5 forward 19:45770285-45770308; AsCpf1-1
agccccgttcgccggccgc

SEQ ID NO: 2735 - DNA, 20 bp, Artificial Sequence
  Synthetic: DMPK 5 forward 19:45770285-45770309; AsCpf1-1
agccccgttcgccggccgcg

SEQ ID NO: 2736 - DNA, 21 bp, Artificial Sequence
  Synthetic: DMPK 5 forward 19:45770285-45770310; AsCpf1-1
agccccgttcgccggccgcgg

SEQ ID NO: 2737 - DNA, 22 bp, Artificial Sequence
  Synthetic: DMPK 5 forward 19:45770285-45770311; AsCpf1-1
agccccgttcgccggccgcgga

SEQ ID NO: 2738 - DNA, 23 bp, Artificial Sequence
  Synthetic: DMPK 5 forward 19:45770285-45770312; AsCpf1-1
agccccgttcgccggccgcggac

SEQ ID NO: 2739 - DNA, 24 bp, Artificial Sequence
  Synthetic: DMPK 5 forward 19:45770285-45770313; AsCpf1-1
agccccgttcgccggccgcggacc

SEQ ID NO: 2740 - DNA, 25 bp, Artificial Sequence
  Synthetic: DMPK 5 forward 19:45770285-45770314; AsCpf1-1
agccccgttcgccggccgcggaccc

SEQ ID NO: 2741 - DNA, 18 bp, Artificial Sequence
  Synthetic: DMPK 5 forward 19:45770296-45770318; AsCpf1-1
ccggccgcggacccggcc

SEQ ID NO: 2742 - DNA, 19 bp, Artificial Sequence
  Synthetic: DMPK 5 forward 19:45770296-45770319; AsCpf1-1
ccggccgcggacccggccc

SEQ ID NO: 2743 - DNA, 20 bp, Artificial Sequence
  Synthetic: DMPK 5 forward 19:45770296-45770320; AsCpf1-1
ccggccgcggacccggcccc

SEQ ID NO: 2744 - DNA, 21 bp, Artificial Sequence
  Synthetic: DMPK 5 forward 19:45770296-45770321; AsCpf1-1
ccggccgcggacccggcccct

SEQ ID NO: 2745 - DNA, 22 bp, Artificial Sequence
  Synthetic: DMPK 5 forward 19:45770296-45770322; AsCpf1-1
ccggccgcggacccggcccctc

SEQ ID NO: 2746 - DNA, 23 bp, Artificial Sequence
  Synthetic: DMPK 5 forward 19:45770296-45770323; AsCpf1-1
ccggccgcggacccggcccctcc

SEQ ID NO: 2747 - DNA, 24 bp, Artificial Sequence
  Synthetic: DMPK 5 forward 19:45770296-45770324; AsCpf1-1
ccggccgcggacccggcccctccc

SEQ ID NO: 2748 - DNA, 25 bp, Artificial Sequence
  Synthetic: DMPK 5 forward 19:45770296-45770325; AsCpf1-1
ccggccgcggacccggcccctccct

SEQ ID NO: 2749 - DNA, 18 bp, Artificial Sequence
  Synthetic: DMPK 5 forward 19:45770320-45770342; AsCpf1-1
tccccggccgctaggggg

SEQ ID NO: 2750 - DNA, 19 bp, Artificial Sequence
  Synthetic: DMPK 5 forward 19:45770320-45770343; AsCpf1-1
tccccggccgctagggggc

SEQ ID NO: 2751 - DNA, 20 bp, Artificial Sequence
  Synthetic: DMPK 5 forward 19:45770320-45770344; AsCpf1-1
tccccggccgctagggggcg

SEQ ID NO: 2752 - DNA, 21 bp, Artificial Sequence
  Synthetic: DMPK 5 forward 19:45770320-45770345; AsCpf1-1
tccccggccgctagggggcgg

SEQ ID NO: 2753 - DNA, 22 bp, Artificial Sequence
  Synthetic: DMPK 5 forward 19:45770320-45770346; AsCpf1-1
tccccggccgctagggggcggg

SEQ ID NO: 2754 - DNA, 23 bp, Artificial Sequence
  Synthetic: DMPK 5 forward 19:45770320-45770347; AsCpf1-1
tccccggccgctagggggcgggc

SEQ ID NO: 2755 - DNA, 24 bp, Artificial Sequence
  Synthetic: DMPK 5 forward 19:45770320-45770348; AsCpf1-1
tccccggccgctagggggcgggcc

SEQ ID NO: 2756 - DNA, 25 bp, Artificial Sequence
  Synthetic: DMPK 5 forward 19:45770320-45770349; AsCpf1-1
tccccggccgctagggggcgggccc

SEQ ID NO: 2757 - DNA, 18 bp, Artificial Sequence
  Synthetic: DMPK 5 reverse 19:45770323-45770345; AsCpf1-1
ggcccgccccctagcggc

SEQ ID NO: 2758 - DNA, 19 bp, Artificial Sequence
  Synthetic: DMPK 5 reverse 19:45770323-45770346; AsCpf1-1
ggcccgccccctagcggcc

SEQ ID NO: 2759 - DNA, 20 bp, Artificial Sequence
  Synthetic: DMPK 5 reverse 19:45770323-45770347; AsCpf1-1
ggcccgccccctagcggccg

SEQ ID NO: 2760 - DNA, 21 bp, Artificial Sequence
  Synthetic: DMPK 5 reverse 19:45770323-45770348; AsCpf1-1
ggcccgccccctagcggccgg

SEQ ID NO: 2761 - DNA, 22 bp, Artificial Sequence
  Synthetic: DMPK 5 reverse 19:45770323-45770349; AsCpf1-1
ggcccgccccctagcggccggg

SEQ ID NO: 2762 - DNA, 23 bp, Artificial Sequence
  Synthetic: DMPK 5 reverse 19:45770323-45770350; AsCpf1-1
ggcccgccccctagcggccgggg

SEQ ID NO: 2763 - DNA, 24 bp, Artificial Sequence
  Synthetic: DMPK 5 reverse 19:45770323-45770351; AsCpf1-1
ggcccgccccctagcggccgggga

SEQ ID NO: 2764 - DNA, 25 bp, Artificial Sequence
  Synthetic: DMPK 5 reverse 19:45770323-45770352; AsCpf1-1
ggcccgccccctagcggccggggag

SEQ ID NO: 2765 - DNA, 18 bp, Artificial Sequence
  Synthetic: DMPK 5 forward 19:45770324-45770346; AsCpf1-1
cggccgctagggggcggg

SEQ ID NO: 2766 - DNA, 19 bp, Artificial Sequence
  Synthetic: DMPK 5 forward 19:45770324-45770347; AsCpf1-1
cggccgctagggggcgggc

SEQ ID NO: 2767 - DNA, 20 bp, Artificial Sequence
  Synthetic: DMPK 5 forward 19:45770324-45770348; AsCpf1-1
cggccgctagggggcgggcc

SEQ ID NO: 2768 - DNA, 21 bp, Artificial Sequence
  Synthetic: DMPK 5 forward 19:45770324-45770349; AsCpf1-1
cggccgctagggggcgggccc

SEQ ID NO: 2769 - DNA, 22 bp, Artificial Sequence
  Synthetic: DMPK 5 forward 19:45770324-45770350; AsCpf1-1
cggccgctagggggcgggcccg

SEQ ID NO: 2770 - DNA, 23 bp, Artificial Sequence
  Synthetic: DMPK 5 forward 19:45770324-45770351; AsCpf1-1
cggccgctagggggcgggcccgg

SEQ ID NO: 2771 - DNA, 24 bp, Artificial Sequence
  Synthetic: DMPK 5 forward 19:45770324-45770352; AsCpf1-1
cggccgctagggggcgggcccgga

SEQ ID NO: 2772 - DNA, 25 bp, Artificial Sequence
  Synthetic: DMPK 5 forward 19:45770324-45770353; AsCpf1-1
cggccgctagggggcgggcccggat

SEQ ID NO: 2773 - DNA, 18 bp, Artificial Sequence
  Synthetic: DMPK 5 reverse 19:45770336-45770358; AsCpf1-1
gtcctgtgatccgggccc

SEQ ID NO: 2774 - DNA, 19 bp, Artificial Sequence
  Synthetic: DMPK 5 reverse 19:45770336-45770359; AsCpf1-1
gtcctgtgatccgggcccg

SEQ ID NO: 2775 - DNA, 20 bp, Artificial Sequence
  Synthetic: DMPK 5 reverse 19:45770336-45770360; AsCpf1-1
gtcctgtgatccgggcccgc

SEQ ID NO: 2776 - DNA, 21 bp, Artificial Sequence
  Synthetic: DMPK 5 reverse 19:45770336-45770361; AsCpf1-1
gtcctgtgatccgggcccgcc

SEQ ID NO: 2777 - DNA, 22 bp, Artificial Sequence
  Synthetic: DMPK 5 reverse 19:45770336-45770362; AsCpf1-1
gtcctgtgatccgggcccgccc

SEQ ID NO: 2778 - DNA, 23 bp, Artificial Sequence
  Synthetic: DMPK 5 reverse 19:45770336-45770363; AsCpf1-1
gtcctgtgatccgggcccgcccc

SEQ ID NO: 2779 - DNA, 24 bp, Artificial Sequence
  Synthetic: DMPK 5 reverse 19:45770336-45770364; AsCpf1-1
gtcctgtgatccgggcccgccccc

SEQ ID NO: 2780 - DNA, 25 bp, Artificial Sequence
  Synthetic: DMPK 5 reverse 19:45770336-45770365; AsCpf1-1
gtcctgtgatccgggcccgccccct

SEQ ID NO: 2781 - DNA, 18 bp, Artificial Sequence
  Synthetic: DMPK 5 reverse 19:45770346-45770368; AsCpf1-1
cccagctccagtcctgtg

SEQ ID NO: 2782 - DNA, 19 bp, Artificial Sequence
  Synthetic: DMPK 5 reverse 19:45770346-45770369; AsCpf1-1
cccagctccagtcctgtga

SEQ ID NO: 2783 - DNA, 20 bp, Artificial Sequence
  Synthetic: DMPK 5 reverse 19:45770346-45770370; AsCpf1-1
cccagctccagtcctgtgat

SEQ ID NO: 2784 - DNA, 21 bp, Artificial Sequence
  Synthetic: DMPK 5 reverse 19:45770346-45770371; AsCpf1-1
cccagctccagtcctgtgatc

SEQ ID NO: 2785 - DNA, 22 bp, Artificial Sequence
  Synthetic: DMPK 5 reverse 19:45770346-45770372; AsCpf1-1
cccagctccagtcctgtgatcc

SEQ ID NO: 2786 - DNA, 23 bp, Artificial Sequence
  Synthetic: DMPK 5 reverse 19:45770346-45770373; AsCpf1-1
cccagctccagtcctgtgatccg

SEQ ID NO: 2787 - DNA, 24 bp, Artificial Sequence
  Synthetic: DMPK 5 reverse 19:45770346-45770374; AsCpf1-1
cccagctccagtcctgtgatccgg

SEQ ID NO: 2788 - DNA, 25 bp, Artificial Sequence
  Synthetic: DMPK 5 reverse 19:45770346-45770375; AsCpf1-1
cccagctccagtcctgtgatccggg

SEQ ID NO: 2789 - DNA, 18 bp, Artificial Sequence
  Synthetic: DMPK 5 reverse 19:45770360-45770382; AsCpf1-1
agcgtgggtctccgccca

SEQ ID NO: 2790 - DNA, 19 bp, Artificial Sequence
  Synthetic: DMPK 5 reverse 19:45770360-45770383; AsCpf1-1
agcgtgggtctccgcccag

SEQ ID NO: 2791 - DNA, 20 bp, Artificial Sequence
  Synthetic: DMPK 5 reverse 19:45770360-45770384; AsCpf1-1
agcgtgggtctccgcccagc

SEQ ID NO: 2792 - DNA, 21 bp, Artificial Sequence
  Synthetic: DMPK 5 reverse 19:45770360-45770385; AsCpf1-1
agcgtgggtctccgcccagct

SEQ ID NO: 2793 - DNA, 22 bp, Artificial Sequence
  Synthetic: DMPK 5 reverse 19:45770360-45770386; AsCpf1-1
agcgtgggtctccgcccagctc

SEQ ID NO: 2794 - DNA, 23 bp, Artificial Sequence
  Synthetic: DMPK 5 reverse 19:45770360-45770387; AsCpf1-1
agcgtgggtctccgcccagctcc

SEQ ID NO: 2795 - DNA, 24 bp, Artificial Sequence
  Synthetic: DMPK 5 reverse 19:45770360-45770388; AsCpf1-1
agcgtgggtctccgcccagctcca

SEQ ID NO: 2796 - DNA, 25 bp, Artificial Sequence
  Synthetic: DMPK 5 reverse 19:45770360-45770389; AsCpf1-1
agcgtgggtctccgcccagctccag

SEQ ID NO: 2797 - DNA, 18 bp, Artificial Sequence
  Synthetic: DMPK 5 reverse 19:45770371-45770393; AsCpf1-1
caaccgctccgagcgtgg

SEQ ID NO: 2798 - DNA, 19 bp, Artificial Sequence
  Synthetic: DMPK 5 reverse 19:45770371-45770394; AsCpf1-1
caaccgctccgagcgtggg

SEQ ID NO: 2799 - DNA, 20 bp, Artificial Sequence
  Synthetic: DMPK 5 reverse 19:45770371-45770395; AsCpf1-1
caaccgctccgagcgtgggt

SEQ ID NO: 2800 - DNA, 21 bp, Artificial Sequence
  Synthetic: DMPK 5 reverse 19:45770371-45770396; AsCpf1-1
caaccgctccgagcgtgggtc

SEQ ID NO: 2801 - DNA, 22 bp, Artificial Sequence
  Synthetic: DMPK 5 reverse 19:45770371-45770397; AsCpf1-1
caaccgctccgagcgtgggtct

SEQ ID NO: 2802 - DNA, 23 bp, Artificial Sequence
  Synthetic: DMPK 5 reverse 19:45770371-45770398; AsCpf1-1
caaccgctccgagcgtgggtctc

SEQ ID NO: 2803 - DNA, 24 bp, Artificial Sequence
  Synthetic: DMPK 5 reverse 19:45770371-45770399; AsCpf1-1
caaccgctccgagcgtgggtctcc

SEQ ID NO: 2804 - DNA, 25 bp, Artificial Sequence
  Synthetic: DMPK 5 reverse 19:45770371-45770400; AsCpf1-1
caaccgctccgagcgtgggtctccg

SEQ ID NO: 2805 - DNA, 18 bp, Artificial Sequence
  Synthetic: DMPK 5 reverse 19:45770438-45770460; AsCpf1-1
gggccccgttggaagact

SEQ ID NO: 2806 - DNA, 19 bp, Artificial Sequence
  Synthetic: DMPK 5 reverse 19:45770438-45770461; AsCpf1-1
gggccccgttggaagactg

SEQ ID NO: 2807 - DNA, 20 bp, Artificial Sequence
  Synthetic: DMPK 5 reverse 19:45770438-45770462; AsCpf1-1
gggccccgttggaagactga

SEQ ID NO: 2808 - DNA, 21 bp, Artificial Sequence
  Synthetic: DMPK 5 reverse 19:45770438-45770463; AsCpf1-1
gggccccgttggaagactgag

SEQ ID NO: 2809 - DNA, 22 bp, Artificial Sequence
  Synthetic: DMPK 5 reverse 19:45770438-45770464; AsCpf1-1
gggccccgttggaagactgagt

SEQ ID NO: 2810 - DNA, 23 bp, Artificial Sequence
  Synthetic: DMPK 5 reverse 19:45770438-45770465; AsCpf1-1
gggccccgttggaagactgagtg

SEQ ID NO: 2811 - DNA, 24 bp, Artificial Sequence
  Synthetic: DMPK 5 reverse 19:45770438-45770466; AsCpf1-1
gggccccgttggaagactgagtgc

SEQ ID NO: 2812 - DNA, 25 bp, Artificial Sequence
  Synthetic: DMPK 5 reverse 19:45770438-45770467; AsCpf1-1
gggccccgttggaagactgagtgcc

SEQ ID NO: 2813 - DNA, 18 bp, Artificial Sequence
  Synthetic: DMPK 5 reverse 19:45770444-45770466; AsCpf1-1
actccggggccccgttgg

SEQ ID NO: 2814 - DNA, 19 bp, Artificial Sequence
  Synthetic: DMPK 5 reverse 19:45770444-45770467; AsCpf1-1
actccggggccccgttgga

SEQ ID NO: 2815 - DNA, 20 bp, Artificial Sequence
  Synthetic: DMPK 5 reverse 19:45770444-45770468; AsCpf1-1
actccggggccccgttggaa

SEQ ID NO: 2816 - DNA, 21 bp, Artificial Sequence
  Synthetic: DMPK 5 reverse 19:45770444-45770469; AsCpf1-1
actccggggccccgttggaag

SEQ ID NO: 2817 - DNA, 22 bp, Artificial Sequence
  Synthetic: DMPK 5 reverse 19:45770444-45770470; AsCpf1-1
actccggggccccgttggaaga

SEQ ID NO: 2818 - DNA, 23 bp, Artificial Sequence
  Synthetic: DMPK 5 reverse 19:45770444-45770471; AsCpf1-1
actccggggccccgttggaagac

SEQ ID NO: 2819 - DNA, 24 bp, Artificial Sequence
  Synthetic: DMPK 5 reverse 19:45770444-45770472; AsCpf1-1
actccggggccccgttggaagact

SEQ ID NO: 2820 - DNA, 25 bp, Artificial Sequence
  Synthetic: DMPK 5 reverse 19:45770444-45770473; AsCpf1-1
actccggggccccgttggaagactg

SEQ ID NO: 2821 - DNA, 18 bp, Artificial Sequence
  Synthetic: DMPK 5 forward 19:45770449-45770471; AsCpf1-1
aacggggccccggagtcg

SEQ ID NO: 2822 - DNA, 19 bp, Artificial Sequence
  Synthetic: DMPK 5 forward 19:45770449-45770472; AsCpf1-1
aacggggccccggagtcga

SEQ ID NO: 2823 - DNA, 20 bp, Artificial Sequence
  Synthetic: DMPK 5 forward 19:45770449-45770473; AsCpf1-1
aacggggccccggagtcgaa

SEQ ID NO: 2824 - DNA, 21 bp, Artificial Sequence
  Synthetic: DMPK 5 forward 19:45770449-45770474; AsCpf1-1
aacggggccccggagtcgaag

SEQ ID NO: 2825 - DNA, 22 bp, Artificial Sequence
  Synthetic: DMPK 5 forward 19:45770449-45770475; AsCpf1-1
aacggggccccggagtcgaaga

SEQ ID NO: 2826 - DNA, 23 bp, Artificial Sequence
  Synthetic: DMPK 5 forward 19:45770449-45770476; AsCpf1-1
aacggggccccggagtcgaagac

SEQ ID NO: 2827 - DNA, 24 bp, Artificial Sequence
  Synthetic: DMPK 5 forward 19:45770449-45770477; AsCpf1-1
aacggggccccggagtcgaagaca

SEQ ID NO: 2828 - DNA, 25 bp, Artificial Sequence
  Synthetic: DMPK 5 forward 19:45770449-45770478; AsCpf1-1
aacggggccccggagtcgaagacag

SEQ ID NO: 2829 - DNA, 18 bp, Artificial Sequence
  Synthetic: DMPK 5 forward 19:45770450-45770472; AsCpf1-1
acggggccccggagtcga

SEQ ID NO: 2830 - DNA, 19 bp, Artificial Sequence
  Synthetic: DMPK 5 forward 19:45770450-45770473; AsCpf1-1
acggggccccggagtcgaa

SEQ ID NO: 2831 - DNA, 20 bp, Artificial Sequence
  Synthetic: DMPK 5 forward 19:45770450-45770474; AsCpf1-1
acggggccccggagtcgaag

SEQ ID NO: 2832 - DNA, 21 bp, Artificial Sequence
  Synthetic: DMPK 5 forward 19:45770450-45770475; AsCpf1-1
acggggccccggagtcgaaga

SEQ ID NO: 2833 - DNA, 22 bp, Artificial Sequence
  Synthetic: DMPK 5 forward 19:45770450-45770476; AsCpf1-1
acggggccccggagtcgaagac

SEQ ID NO: 2834 - DNA, 23 bp, Artificial Sequence
  Synthetic: DMPK 5 forward 19:45770450-45770477; AsCpf1-1
acggggccccggagtcgaagaca

SEQ ID NO: 2835 - DNA, 24 bp, Artificial Sequence
  Synthetic: DMPK 5 forward 19:45770450-45770478; AsCpf1-1
acggggccccggagtcgaagacag

SEQ ID NO: 2836 - DNA, 25 bp, Artificial Sequence
  Synthetic: DMPK 5 forward 19:45770450-45770479; AsCpf1-1
acggggccccggagtcgaagacagt

SEQ ID NO: 2837 - DNA, 18 bp, Artificial Sequence
  Synthetic: DMPK 5 reverse 19:45770465-45770487; AsCpf1-1
tgaaccctagaactgtct

SEQ ID NO: 2838 - DNA, 19 bp, Artificial Sequence
  Synthetic: DMPK 5 reverse 19:45770465-45770488; AsCpf1-1
tgaaccctagaactgtctt

SEQ ID NO: 2839 - DNA, 20 bp, Artificial Sequence
  Synthetic: DMPK 5 reverse 19:45770465-45770489; AsCpf1-1
tgaaccctagaactgtcttc

SEQ ID NO: 2840 - DNA, 21 bp, Artificial Sequence
  Synthetic: DMPK 5 reverse 19:45770465-45770490; AsCpf1-1
tgaaccctagaactgtcttcg

SEQ ID NO: 2841 - DNA, 22 bp, Artificial Sequence
  Synthetic: DMPK 5 reverse 19:45770465-45770491; AsCpf1-1
tgaaccctagaactgtcttcga

SEQ ID NO: 2842 - DNA, 23 bp, Artificial Sequence
  Synthetic: DMPK 5 reverse 19:45770465-45770492; AsCpf1-1
tgaaccctagaactgtcttcgac

SEQ ID NO: 2843 - DNA, 24 bp, Artificial Sequence
  Synthetic: DMPK 5 reverse 19:45770465-45770493; AsCpf1-1
tgaaccctagaactgtcttcgact

SEQ ID NO: 2844 - DNA, 25 bp, Artificial Sequence
  Synthetic: DMPK 5 reverse 19:45770465-45770494; AsCpf1-1
tgaaccctagaactgtcttcgactc

SEQ ID NO: 2845 - DNA, 25 bp, Artificial Sequence
  Synthetic: DMPK 5 forward 19:45770252-45770283; SaCas9
cagcagcagcagcattcccggctac

SEQ ID NO: 2846 - DNA, 24 bp, Artificial Sequence
  Synthetic: DMPK 5 forward 19:45770253-45770283; SaCas9
agcagcagcagcattcccggctac

SEQ ID NO: 2847 - DNA, 23 bp, Artificial Sequence
  Synthetic: DMPK 5 forward 19:45770254-45770283; SaCas9
gcagcagcagcattcccggctac

SEQ ID NO: 2848 - DNA, 22 bp, Artificial Sequence
  Synthetic: DMPK 5 forward 19:45770255-45770283; SaCas9
cagcagcagcattcccggctac

SEQ ID NO: 2849 - DNA, 21 bp, Artificial Sequence
  Synthetic: DMPK 5 forward 19:45770256-45770283; SaCas9
agcagcagcattcccggctac

SEQ ID NO: 2850 - DNA, 20 bp, Artificial Sequence
  Synthetic: DMPK 5 forward 19:45770257-45770283; SaCas9
gcagcagcattcccggctac

SEQ ID NO: 2851 - DNA, 19 bp, Artificial Sequence
  Synthetic: DMPK 5 forward 19:45770258-45770283; SaCas9
cagcagcattcccggctac

SEQ ID NO: 2852 - DNA, 18 bp, Artificial Sequence
  Synthetic: DMPK 5 forward 19:45770259-45770283; SaCas9
agcagcattcccggctac

SEQ ID NO: 2853 - DNA, 25 bp, Artificial Sequence
  Synthetic: DMPK 5 forward 19:45770261-45770292; SaCas9
cagcattcccggctacaaggaccct

SEQ ID NO: 2854 - DNA, 24 bp, Artificial Sequence
  Synthetic: DMPK 5 forward 19:45770262-45770292; SaCas9
agcattcccggctacaaggaccct

SEQ ID NO: 2855 - DNA, 23 bp, Artificial Sequence
  Synthetic: DMPK 5 forward 19:45770263-45770292; SaCas9
gcattcccggctacaaggaccct

SEQ ID NO: 2856 - DNA, 22 bp, Artificial Sequence
  Synthetic: DMPK 5 forward 19:45770264-45770292; SaCas9
cattcccggctacaaggaccct

SEQ ID NO: 2857 - DNA, 21 bp, Artificial Sequence
  Synthetic: DMPK 5 forward 19:45770265-45770292; SaCas9
attcccggctacaaggaccct

SEQ ID NO: 2858 - DNA, 20 bp, Artificial Sequence
  Synthetic: DMPK 5 forward 19:45770266-45770292; SaCas9
ttcccggctacaaggaccct

SEQ ID NO: 2859 - DNA, 19 bp, Artificial Sequence
  Synthetic: DMPK 5 forward 19:45770267-45770292; SaCas9
tcccggctacaaggaccct

SEQ ID NO: 2860 - DNA, 18 bp, Artificial Sequence
  Synthetic: DMPK 5 forward 19:45770268-45770292; SaCas9
cccggctacaaggaccct

SEQ ID NO: 2861 - DNA, 25 bp, Artificial Sequence
  Synthetic: DMPK 5 reverse 19:45770265-45770296; SaCas9
cggggctcgaagggtccttgtagcc

SEQ ID NO: 2862 - DNA, 24 bp, Artificial Sequence
  Synthetic: DMPK 5 reverse 19:45770266-45770296; SaCas9
ggggctcgaagggtccttgtagcc

SEQ ID NO: 2863 - DNA, 23 bp, Artificial Sequence
  Synthetic: DMPK 5 reverse 19:45770267-45770296; SaCas9
gggctcgaagggtccttgtagcc

SEQ ID NO: 2864 - DNA, 22 bp, Artificial Sequence
  Synthetic: DMPK 5 reverse 19:45770268-45770296; SaCas9
ggctcgaagggtccttgtagcc

SEQ ID NO: 2865 - DNA, 21 bp, Artificial Sequence
  Synthetic: DMPK 5 reverse 19:45770269-45770296; SaCas9
gctcgaagggtccttgtagcc

SEQ ID NO: 2866 - DNA, 20 bp, Artificial Sequence
  Synthetic: DMPK 5 reverse 19:45770270-45770296; SaCas9
ctcgaagggtccttgtagcc

SEQ ID NO: 2867 - DNA, 19 bp, Artificial Sequence
  Synthetic: DMPK 5 reverse 19:45770271-45770296; SaCas9
tcgaagggtccttgtagcc

SEQ ID NO: 2868 - DNA, 18 bp, Artificial Sequence
  Synthetic: DMPK 5 reverse 19:45770272-45770296; SaCas9
cgaagggtccttgtagcc

SEQ ID NO: 2869 - DNA, 25 bp, Artificial Sequence
  Synthetic: DMPK 5 reverse 19:45770266-45770297; SaCas9
acggggctcgaagggtccttgtagc

SEQ ID NO: 2870 - DNA, 24 bp, Artificial Sequence
  Synthetic: DMPK 5 reverse 19:45770267-45770297; SaCas9
cggggctcgaagggtccttgtagc

SEQ ID NO: 2871 - DNA, 23 bp, Artificial Sequence
  Synthetic: DMPK 5 reverse 19:45770268-45770297; SaCas9
ggggctcgaagggtccttgtagc

SEQ ID NO: 2872 - DNA, 22 bp, Artificial Sequence
  Synthetic: DMPK 5 reverse 19:45770269-45770297; SaCas9
gggctcgaagggtccttgtagc

SEQ ID NO: 2873 - DNA, 21 bp, Artificial Sequence
  Synthetic: DMPK 5 reverse 19:45770270-45770297; SaCas9
ggctcgaagggtccttgtagc

SEQ ID NO: 2874 - DNA, 20 bp, Artificial Sequence
  Synthetic: DMPK 5 reverse 19:45770271-45770297; SaCas9
gctcgaagggtccttgtagc

SEQ ID NO: 2875 - DNA, 19 bp, Artificial Sequence
  Synthetic: DMPK 5 reverse 19:45770272-45770297; SaCas9
ctcgaagggtccttgtagc

SEQ ID NO: 2876 - DNA, 18 bp, Artificial Sequence
  Synthetic: DMPK 5 reverse 19:45770273-45770297; SaCas9
tcgaagggtccttgtagc

SEQ ID NO: 2877 - DNA, 25 bp, Artificial Sequence
  Synthetic: DMPK 5 reverse 19:45770267-45770298; SaCas9
aacggggctcgaagggtccttgtag

SEQ ID NO: 2878 - DNA, 24 bp, Artificial Sequence
  Synthetic: DMPK 5 reverse 19:45770268-45770298; SaCas9
acggggctcgaagggtccttgtag

SEQ ID NO: 2879 - DNA, 23 bp, Artificial Sequence
  Synthetic: DMPK 5 reverse 19:45770269-45770298; SaCas9
cggggctcgaagggtccttgtag

SEQ ID NO: 2880 - DNA, 22 bp, Artificial Sequence
  Synthetic: DMPK 5 reverse 19:45770270-45770298; SaCas9
ggggctcgaagggtccttgtag

SEQ ID NO: 2881 - DNA, 21 bp, Artificial Sequence
  Synthetic: DMPK 5 reverse 19:45770271-45770298; SaCas9
gggctcgaagggtccttgtag

SEQ ID NO: 2882 - DNA, 20 bp, Artificial Sequence
  Synthetic: DMPK 5 reverse 19:45770272-45770298; SaCas9
ggctcgaagggtccttgtag

SEQ ID NO: 2883 - DNA, 19 bp, Artificial Sequence
  Synthetic: DMPK 5 reverse 19:45770273-45770298; SaCas9
gctcgaagggtccttgtag

SEQ ID NO: 2884 - DNA, 18 bp, Artificial Sequence
  Synthetic: DMPK 5 reverse 19:45770274-45770298; SaCas9
ctcgaagggtccttgtag

SEQ ID NO: 2885 - DNA, 25 bp, Artificial Sequence
  Synthetic: DMPK 5 forward 19:45770281-45770312; SaCas9
acccttcgagccccgttcgccggcc

SEQ ID NO: 2886 - DNA, 24 bp, Artificial Sequence
  Synthetic: DMPK 5 forward 19:45770282-45770312; SaCas9
cccttcgagccccgttcgccggcc

SEQ ID NO: 2887 - DNA, 23 bp, Artificial Sequence
  Synthetic: DMPK 5 forward 19:45770283-45770312; SaCas9
ccttcgagccccgttcgccggcc

SEQ ID NO: 2888 - DNA, 22 bp, Artificial Sequence
  Synthetic: DMPK 5 forward 19:45770284-45770312; SaCas9
cttcgagccccgttcgccggcc

SEQ ID NO: 2889 - DNA, 21 bp, Artificial Sequence
  Synthetic: DMPK 5 forward 19:45770285-45770312; SaCas9
ttcgagccccgttcgccggcc

SEQ ID NO: 2890 - DNA, 20 bp, Artificial Sequence
  Synthetic: DMPK 5 forward 19:45770286-45770312; SaCas9
tcgagccccgttcgccggcc

SEQ ID NO: 2891 - DNA, 19 bp, Artificial Sequence
  Synthetic: DMPK 5 forward 19:45770287-45770312; SaCas9
cgagccccgttcgccggcc

SEQ ID NO: 2892 - DNA, 18 bp, Artificial Sequence
  Synthetic: DMPK 5 forward 19:45770288-45770312; SaCas9
gagccccgttcgccggcc

SEQ ID NO: 2893 - DNA, 25 bp, Artificial Sequence
  Synthetic: DMPK 5 reverse 19:45770281-45770312; SaCas9
gtccgcggccggcgaacggggctcg

SEQ ID NO: 2894 - DNA, 24 bp, Artificial Sequence
  Synthetic: DMPK 5 reverse 19:45770282-45770312; SaCas9
tccgcggccggcgaacggggctcg

SEQ ID NO: 2895 - DNA, 23 bp, Artificial Sequence
  Synthetic: DMPK 5 reverse 19:45770283-45770312; SaCas9
ccgcggccggcgaacggggctcg

SEQ ID NO: 2896 - DNA, 22 bp, Artificial Sequence
  Synthetic: DMPK 5 reverse 19:45770284-45770312; SaCas9
cgcggccggcgaacggggctcg

SEQ ID NO: 2897 - DNA, 21 bp, Artificial Sequence
  Synthetic: DMPK 5 reverse 19:45770285-45770312; SaCas9
gcggccggcgaacggggctcg

SEQ ID NO: 2898 - DNA, 20 bp, Artificial Sequence
  Synthetic: DMPK 5 reverse 19:45770286-45770312; SaCas9
cggccggcgaacggggctcg

SEQ ID NO: 2899 - DNA, 19 bp, Artificial Sequence
  Synthetic: DMPK 5 reverse 19:45770287-45770312; SaCas9
ggccggcgaacggggctcg

SEQ ID NO: 2900 - DNA, 18 bp, Artificial Sequence
  Synthetic: DMPK 5 reverse 19:45770288-45770312; SaCas9
gccggcgaacggggctcg

SEQ ID NO: 2901 - DNA, 25 bp, Artificial Sequence
  Synthetic: DMPK 5 reverse 19:45770284-45770315; SaCas9
cgggtccgcggccggcgaacggggc

SEQ ID NO: 2902 - DNA, 24 bp, Artificial Sequence
  Synthetic: DMPK 5 reverse 19:45770285-45770315; SaCas9
gggtccgcggccggcgaacggggc

SEQ ID NO: 2903 - DNA, 23 bp, Artificial Sequence
  Synthetic: DMPK 5 reverse 19:45770286-45770315; SaCas9
ggtccgcggccggcgaacggggc

SEQ ID NO: 2904 - DNA, 22 bp, Artificial Sequence
  Synthetic: DMPK 5 reverse 19:45770287-45770315; SaCas9
gtccgcggccggcgaacggggc

SEQ ID NO: 2905 - DNA, 21 bp, Artificial Sequence
  Synthetic: DMPK 5 reverse 19:45770288-45770315; SaCas9
tccgcggccggcgaacggggc

SEQ ID NO: 2906 - DNA, 20 bp, Artificial Sequence
  Synthetic: DMPK 5 reverse 19:45770289-45770315; SaCas9
ccgcggccggcgaacggggc

SEQ ID NO: 2907 - DNA, 19 bp, Artificial Sequence
  Synthetic: DMPK 5 reverse 19:45770290-45770315; SaCas9
cgcggccggcgaacggggc

SEQ ID NO: 2908 - DNA, 18 bp, Artificial Sequence
  Synthetic: DMPK 5 reverse 19:45770291-45770315; SaCas9
gcggccggcgaacggggc

SEQ ID NO: 2909 - DNA, 25 bp, Artificial Sequence
  Synthetic: DMPK 5 reverse 19:45770290-45770321; SaCas9
aggggccgggtccgcggccggcgaa

SEQ ID NO: 2910 - DNA, 24 bp, Artificial Sequence
  Synthetic: DMPK 5 reverse 19:45770291-45770321; SaCas9
ggggccgggtccgcggccggcgaa

SEQ ID NO: 2911 - DNA, 23 bp, Artificial Sequence
  Synthetic: DMPK 5 reverse 19:45770292-45770321; SaCas9
gggccgggtccgcggccggcgaa

SEQ ID NO: 2912 - DNA, 22 bp, Artificial Sequence
  Synthetic: DMPK 5 reverse 19:45770293-45770321; SaCas9
ggccgggtccgcggccggcgaa

SEQ ID NO: 2913 - DNA, 21 bp, Artificial Sequence
  Synthetic: DMPK 5 reverse 19:45770294-45770321; SaCas9
gccgggtccgcggccggcgaa

SEQ ID NO: 2914 - DNA, 20 bp, Artificial Sequence
  Synthetic: DMPK 5 reverse 19:45770295-45770321; SaCas9
ccgggtccgcggccggcgaa

SEQ ID NO: 2915 - DNA, 19 bp, Artificial Sequence
  Synthetic: DMPK 5 reverse 19:45770296-45770321; SaCas9
cgggtccgcggccggcgaa

SEQ ID NO: 2916 - DNA, 18 bp, Artificial Sequence
  Synthetic: DMPK 5 reverse 19:45770297-45770321; SaCas9
gggtccgcggccggcgaa

SEQ ID NO: 2917 - DNA, 25 bp, Artificial Sequence
  Synthetic: DMPK 5 reverse 19:45770291-45770322; SaCas9
gaggggccgggtccgcggccggcga

SEQ ID NO: 2918 - DNA, 24 bp, Artificial Sequence
  Synthetic: DMPK 5 reverse 19:45770292-45770322; SaCas9
aggggccgggtccgcggccggcga

SEQ ID NO: 2919 - DNA, 23 bp, Artificial Sequence
  Synthetic: DMPK 5 reverse 19:45770293-45770322; SaCas9
ggggccgggtccgcggccggcga

SEQ ID NO: 2920 - DNA, 22 bp, Artificial Sequence
  Synthetic: DMPK 5 reverse 19:45770294-45770322; SaCas9
gggccgggtccgcggccggcga

SEQ ID NO: 2921 - DNA, 21 bp, Artificial Sequence
  Synthetic: DMPK 5 reverse 19:45770295-45770322; SaCas9
ggccgggtccgcggccggcga

SEQ ID NO: 2922 - DNA, 20 bp, Artificial Sequence
  Synthetic: DMPK 5 reverse 19:45770296-45770322; SaCas9
gccgggtccgcggccggcga

SEQ ID NO: 2923 - DNA, 19 bp, Artificial Sequence
  Synthetic: DMPK 5 reverse 19:45770297-45770322; SaCas9
ccgggtccgcggccggcga

SEQ ID NO: 2924 - DNA, 18 bp, Artificial Sequence
  Synthetic: DMPK 5 reverse 19:45770298-45770322; SaCas9
cgggtccgcggccggcga

SEQ ID NO: 2925 - DNA, 25 bp, Artificial Sequence
  Synthetic: DMPK 5 reverse 19:45770295-45770326; SaCas9
gagggaggggccgggtccgcggccg

SEQ ID NO: 2926 - DNA, 24 bp, Artificial Sequence
  Synthetic: DMPK 5 reverse 19:45770296-45770326; SaCas9
agggaggggccgggtccgcggccg

SEQ ID NO: 2927 - DNA, 23 bp, Artificial Sequence
  Synthetic: DMPK 5 reverse 19:45770297-45770326; SaCas9
gggaggggccgggtccgcggccg

SEQ ID NO: 2928 - DNA, 22 bp, Artificial Sequence
  Synthetic: DMPK 5 reverse 19:45770298-45770326; SaCas9
ggaggggccgggtccgcggccg

SEQ ID NO: 2929 - DNA, 21 bp, Artificial Sequence
  Synthetic: DMPK 5 reverse 19:45770299-45770326; SaCas9
gaggggccgggtccgcggccg

SEQ ID NO: 2930 - DNA, 20 bp, Artificial Sequence
  Synthetic: DMPK 5 reverse 19:45770300-45770326; SaCas9
aggggccgggtccgcggccg

SEQ ID NO: 2931 - DNA, 19 bp, Artificial Sequence
  Synthetic: DMPK 5 reverse 19:45770301-45770326; SaCas9
ggggccgggtccgcggccg

SEQ ID NO: 2932 - DNA, 18 bp, Artificial Sequence
  Synthetic: DMPK 5 reverse 19:45770302-45770326; SaCas9
gggccgggtccgcggccg

SEQ ID NO: 2933 - DNA, 25 bp, Artificial Sequence
  Synthetic: DMPK 5 forward 19:45770310-45770341; SaCas9
acccggcccctccctccccggccgc

SEQ ID NO: 2934 - DNA, 24 bp, Artificial Sequence
  Synthetic: DMPK 5 forward 19:45770311-45770341; SaCas9
cccggcccctccctccccggccgc

SEQ ID NO: 2935 - DNA, 23 bp, Artificial Sequence
  Synthetic: DMPK 5 forward 19:45770312-45770341; SaCas9
ccggcccctccctccccggccgc

SEQ ID NO: 2936 - DNA, 22 bp, Artificial Sequence
  Synthetic: DMPK 5 forward 19:45770313-45770341; SaCas9
cggcccctccctccccggccgc

SEQ ID NO: 2937 - DNA, 21 bp, Artificial Sequence
  Synthetic: DMPK 5 forward 19:45770314-45770341; SaCas9
ggcccctccctccccggccgc

SEQ ID NO: 2938 - DNA, 20 bp, Artificial Sequence
  Synthetic: DMPK 5 forward 19:45770315-45770341; SaCas9
gcccctccctccccggccgc

SEQ ID NO: 2939 - DNA, 19 bp, Artificial Sequence
  Synthetic: DMPK 5 forward 19:45770316-45770341; SaCas9
cccctccctccccggccgc

SEQ ID NO: 2940 - DNA, 18 bp, Artificial Sequence
  Synthetic: DMPK 5 forward 19:45770317-45770341; SaCas9
ccctccctccccggccgc

SEQ ID NO: 2941 - DNA, 25 bp, Artificial Sequence
  Synthetic: DMPK 5 reverse 19:45770310-45770341; SaCas9
cccctagcggccggggagggagggg

SEQ ID NO: 2942 - DNA, 24 bp, Artificial Sequence
  Synthetic: DMPK 5 reverse 19:45770311-45770341; SaCas9
ccctagcggccggggagggagggg

SEQ ID NO: 2943 - DNA, 23 bp, Artificial Sequence
  Synthetic: DMPK 5 reverse 19:45770312-45770341; SaCas9
cctagcggccggggagggagggg

SEQ ID NO: 2944 - DNA, 22 bp, Artificial Sequence
  Synthetic: DMPK 5 reverse 19:45770313-45770341; SaCas9
ctagcggccggggagggagggg

SEQ ID NO: 2945 - DNA, 21 bp, Artificial Sequence
  Synthetic: DMPK 5 reverse 19:45770314-45770341; SaCas9
tagcggccggggagggagggg

SEQ ID NO: 2946 - DNA, 20 bp, Artificial Sequence
  Synthetic: DMPK 5 reverse 19:45770315-45770341; SaCas9
agcggccggggagggagggg

SEQ ID NO: 2947 - DNA, 19 bp, Artificial Sequence
  Synthetic: DMPK 5 reverse 19:45770316-45770341; SaCas9
gcggccggggagggagggg

SEQ ID NO: 2948 - DNA, 18 bp, Artificial Sequence
  Synthetic: DMPK 5 reverse 19:45770317-45770341; SaCas9
cggccggggagggagggg

SEQ ID NO: 2949 - DNA, 25 bp, Artificial Sequence
  Synthetic: DMPK 5 forward 19:45770311-45770342; SaCas9
cccggcccctccctccccggccgct

SEQ ID NO: 2950 - DNA, 24 bp, Artificial Sequence
  Synthetic: DMPK 5 forward 19:45770312-45770342; SaCas9
ccggcccctccctccccggccgct

SEQ ID NO: 2951 - DNA, 23 bp, Artificial Sequence
  Synthetic: DMPK 5 forward 19:45770313-45770342; SaCas9
cggcccctccctccccggccgct

SEQ ID NO: 2952 - DNA, 22 bp, Artificial Sequence
  Synthetic: DMPK 5 forward 19:45770314-45770342; SaCas9
ggcccctccctccccggccgct

SEQ ID NO: 2953 - DNA, 21 bp, Artificial Sequence
  Synthetic: DMPK 5 forward 19:45770315-45770342; SaCas9
gcccctccctccccggccgct

SEQ ID NO: 2954 - DNA, 20 bp, Artificial Sequence
  Synthetic: DMPK 5 forward 19:45770316-45770342; SaCas9
cccctccctccccggccgct

SEQ ID NO: 2955 - DNA, 19 bp, Artificial Sequence
  Synthetic: DMPK 5 forward 19:45770317-45770342; SaCas9
ccctccctccccggccgct

SEQ ID NO: 2956 - DNA, 18 bp, Artificial Sequence
  Synthetic: DMPK 5 forward 19:45770318-45770342; SaCas9
cctccctccccggccgct

SEQ ID NO: 2957 - DNA, 25 bp, Artificial Sequence
  Synthetic: DMPK 5 forward 19:45770312-45770343; SaCas9
ccggcccctccctccccggccgcta

SEQ ID NO: 2958 - DNA, 24 bp, Artificial Sequence
  Synthetic: DMPK 5 forward 19:45770313-45770343; SaCas9
cggcccctccctccccggccgcta

SEQ ID NO: 2959 - DNA, 23 bp, Artificial Sequence
  Synthetic: DMPK 5 forward 19:45770314-45770343; SaCas9
ggcccctccctccccggccgcta

SEQ ID NO: 2960 - DNA, 22 bp, Artificial Sequence
  Synthetic: DMPK 5 forward 19:45770315-45770343; SaCas9
gcccctccctccccggccgcta

SEQ ID NO: 2961 - DNA, 21 bp, Artificial Sequence
  Synthetic: DMPK 5 forward 19:45770316-45770343; SaCas9
cccctccctccccggccgcta

SEQ ID NO: 2962 - DNA, 20 bp, Artificial Sequence
  Synthetic: DMPK 5 forward 19:45770317-45770343; SaCas9
ccctccctccccggccgcta

SEQ ID NO: 2963 - DNA, 19 bp, Artificial Sequence
  Synthetic: DMPK 5 forward 19:45770318-45770343; SaCas9
cctccctccccggccgcta

SEQ ID NO: 2964 - DNA, 18 bp, Artificial Sequence
  Synthetic: DMPK 5 forward 19:45770319-45770343; SaCas9
ctccctccccggccgcta

SEQ ID NO: 2965 - DNA, 25 bp, Artificial Sequence
  Synthetic: DMPK 5 reverse 19:45770315-45770346; SaCas9
cccgccccctagcggccggggaggg

SEQ ID NO: 2966 - DNA, 24 bp, Artificial Sequence
  Synthetic: DMPK 5 reverse 19:45770316-45770346; SaCas9
ccgccccctagcggccggggaggg

SEQ ID NO: 2967 - DNA, 23 bp, Artificial Sequence
  Synthetic: DMPK 5 reverse 19:45770317-45770346; SaCas9
cgccccctagcggccggggaggg

SEQ ID NO: 2968 - DNA, 22 bp, Artificial Sequence
  Synthetic: DMPK 5 reverse 19:45770318-45770346; SaCas9
gccccctagcggccggggaggg

SEQ ID NO: 2969 - DNA, 21 bp, Artificial Sequence
  Synthetic: DMPK 5 reverse 19:45770319-45770346; SaCas9
ccccctagcggccggggaggg

SEQ ID NO: 2970 - DNA, 20 bp, Artificial Sequence
  Synthetic: DMPK 5 reverse 19:45770320-45770346; SaCas9
cccctagcggccggggaggg

SEQ ID NO: 2971 - DNA, 19 bp, Artificial Sequence
  Synthetic: DMPK 5 reverse 19:45770321-45770346; SaCas9
ccctagcggccggggaggg

SEQ ID NO: 2972 - DNA, 18 bp, Artificial Sequence
  Synthetic: DMPK 5 reverse 19:45770322-45770346; SaCas9
cctagcggccggggaggg

SEQ ID NO: 2973 - DNA, 25 bp, Artificial Sequence
  Synthetic: DMPK 5 forward 19:45770316-45770347; SaCas9
cccctccctccccggccgctagggg

SEQ ID NO: 2974 - DNA, 24 bp, Artificial Sequence
  Synthetic: DMPK 5 forward 19:45770317-45770347; SaCas9
ccctccctccccggccgctagggg

SEQ ID NO: 2975 - DNA, 23 bp, Artificial Sequence
  Synthetic: DMPK 5 forward 19:45770318-45770347; SaCas9
cctccctccccggccgctagggg

SEQ ID NO: 2976 - DNA, 22 bp, Artificial Sequence
  Synthetic: DMPK 5 forward 19:45770319-45770347; SaCas9
ctccctccccggccgctagggg

SEQ ID NO: 2977 - DNA, 21 bp, Artificial Sequence
  Synthetic: DMPK 5 forward 19:45770320-45770347; SaCas9
tccctccccggccgctagggg

SEQ ID NO: 2978 - DNA, 20 bp, Artificial Sequence
  Synthetic: DMPK 5 forward 19:45770321-45770347; SaCas9
ccctccccggccgctagggg

SEQ ID NO: 2979 - DNA, 19 bp, Artificial Sequence
  Synthetic: DMPK 5 forward 19:45770322-45770347; SaCas9
cctccccggccgctagggg

SEQ ID NO: 2980 - DNA, 18 bp, Artificial Sequence
  Synthetic: DMPK 5 forward 19:45770323-45770347; SaCas9
ctccccggccgctagggg

SEQ ID NO: 2981 - DNA, 25 bp, Artificial Sequence
  Synthetic: DMPK 5 reverse 19:45770316-45770347; SaCas9
gcccgccccctagcggccggggagg

SEQ ID NO: 2982 - DNA, 24 bp, Artificial Sequence
  Synthetic: DMPK 5 reverse 19:45770317-45770347; SaCas9
cccgccccctagcggccggggagg

SEQ ID NO: 2983 - DNA, 23 bp, Artificial Sequence
  Synthetic: DMPK 5 reverse 19:45770318-45770347; SaCas9
ccgccccctagcggccggggagg

SEQ ID NO: 2984 - DNA, 22 bp, Artificial Sequence
  Synthetic: DMPK 5 reverse 19:45770319-45770347; SaCas9
cgccccctagcggccggggagg

SEQ ID NO: 2985 - DNA, 21 bp, Artificial Sequence
  Synthetic: DMPK 5 reverse 19:45770320-45770347; SaCas9
gccccctagcggccggggagg

SEQ ID NO: 2986 - DNA, 20 bp, Artificial Sequence
  Synthetic: DMPK 5 reverse 19:45770321-45770347; SaCas9
ccccctagcggccggggagg

SEQ ID NO: 2987 - DNA, 19 bp, Artificial Sequence
  Synthetic: DMPK 5 reverse 19:45770322-45770347; SaCas9
cccctagcggccggggagg

SEQ ID NO: 2988 - DNA, 18 bp, Artificial Sequence
  Synthetic: DMPK 5 reverse 19:45770323-45770347; SaCas9
ccctagcggccggggagg

SEQ ID NO: 2989 - DNA, 25 bp, Artificial Sequence
  Synthetic: DMPK 5 reverse 19:45770318-45770349; SaCas9
gggcccgccccctagcggccgggga

SEQ ID NO: 2990 - DNA, 24 bp, Artificial Sequence
  Synthetic: DMPK 5 reverse 19:45770319-45770349; SaCas9
ggcccgccccctagcggccgggga

SEQ ID NO: 2991 - DNA, 23 bp, Artificial Sequence
  Synthetic: DMPK 5 reverse 19:45770320-45770349; SaCas9
gcccgccccctagcggccgggga

SEQ ID NO: 2992 - DNA, 22 bp, Artificial Sequence
  Synthetic: DMPK 5 reverse 19:45770321-45770349; SaCas9
cccgccccctagcggccgggga

SEQ ID NO: 2993 - DNA, 21 bp, Artificial Sequence
  Synthetic: DMPK 5 reverse 19:45770322-45770349; SaCas9
ccgccccctagcggccgggga

SEQ ID NO: 2994 - DNA, 20 bp, Artificial Sequence
  Synthetic: DMPK 5 reverse 19:45770323-45770349; SaCas9
cgccccctagcggccgggga

SEQ ID NO: 2995 - DNA, 19 bp, Artificial Sequence
  Synthetic: DMPK 5 reverse 19:45770324-45770349; SaCas9
gccccctagcggccgggga

SEQ ID NO: 2996 - DNA, 18 bp, Artificial Sequence
  Synthetic: DMPK 5 reverse 19:45770325-45770349; SaCas9
ccccctagcggccgggga

SEQ ID NO: 2997 - DNA, 25 bp, Artificial Sequence
  Synthetic: DMPK 5 reverse 19:45770319-45770350; SaCas9
cgggcccgccccctagcggccgggg

SEQ ID NO: 2998 - DNA, 24 bp, Artificial Sequence
  Synthetic: DMPK 5 reverse 19:45770320-45770350; SaCas9
gggcccgccccctagcggccgggg

SEQ ID NO: 2999 - DNA, 23 bp, Artificial Sequence
  Synthetic: DMPK 5 reverse 19:45770321-45770350; SaCas9
ggcccgccccctagcggccgggg

SEQ ID NO: 3000 - DNA, 22 bp, Artificial Sequence
  Synthetic: DMPK 5 reverse 19:45770322-45770350; SaCas9
gcccgccccctagcggccgggg

SEQ ID NO: 3001 - DNA, 21 bp, Artificial Sequence
  Synthetic: DMPK 5 reverse 19:45770323-45770350; SaCas9
cccgccccctagcggccgggg

SEQ ID NO: 3002 - DNA, 20 bp, Artificial Sequence
  Synthetic: DMPK 5 reverse 19:45770324-45770350; SaCas9
ccgccccctagcggccgggg

SEQ ID NO: 3003 - DNA, 19 bp, Artificial Sequence
  Synthetic: DMPK 5 reverse 19:45770325-45770350; SaCas9
cgccccctagcggccgggg

SEQ ID NO: 3004 - DNA, 18 bp, Artificial Sequence
  Synthetic: DMPK 5 reverse 19:45770326-45770350; SaCas9
gccccctagcggccgggg

SEQ ID NO: 3005 - DNA, 25 bp, Artificial Sequence
  Synthetic: DMPK 5 reverse 19:45770320-45770351; SaCas9
ccgggcccgccccctagcggccggg

SEQ ID NO: 3006 - DNA, 24 bp, Artificial Sequence
  Synthetic: DMPK 5 reverse 19:45770321-45770351; SaCas9
cgggcccgccccctagcggccggg

SEQ ID NO: 3007 - DNA, 23 bp, Artificial Sequence
  Synthetic: DMPK 5 reverse 19:45770322-45770351; SaCas9
gggcccgccccctagcggccggg

SEQ ID NO: 3008 - DNA, 22 bp, Artificial Sequence
  Synthetic: DMPK 5 reverse 19:45770323-45770351; SaCas9
ggcccgccccctagcggccggg

SEQ ID NO: 3009 - DNA, 21 bp, Artificial Sequence
  Synthetic: DMPK 5 reverse 19:45770324-45770351; SaCas9
gcccgccccctagcggccggg

SEQ ID NO: 3010 - DNA, 20 bp, Artificial Sequence
  Synthetic: DMPK 5 reverse 19:45770325-45770351; SaCas9
cccgccccctagcggccggg

SEQ ID NO: 3011 - DNA, 19 bp, Artificial Sequence
  Synthetic: DMPK 5 reverse 19:45770326-45770351; SaCas9
ccgccccctagcggccggg

SEQ ID NO: 3012 - DNA, 18 bp, Artificial Sequence
  Synthetic: DMPK 5 reverse 19:45770327-45770351; SaCas9
cgccccctagcggccggg

SEQ ID NO: 3013 - DNA, 25 bp, Artificial Sequence
  Synthetic: DMPK 5 forward 19:45770322-45770353; SaCas9
cctccccggccgctagggggcgggc

SEQ ID NO: 3014 - DNA, 24 bp, Artificial Sequence
  Synthetic: DMPK 5 forward 19:45770323-45770353; SaCas9
ctccccggccgctagggggcgggc

SEQ ID NO: 3015 - DNA, 23 bp, Artificial Sequence
  Synthetic: DMPK 5 forward 19:45770324-45770353; SaCas9
tccccggccgctagggggcgggc

SEQ ID NO: 3016 - DNA, 22 bp, Artificial Sequence
  Synthetic: DMPK 5 forward 19:45770325-45770353; SaCas9
ccccggccgctagggggcgggc

SEQ ID NO: 3017 - DNA, 21 bp, Artificial Sequence
  Synthetic: DMPK 5 forward 19:45770326-45770353; SaCas9
cccggccgctagggggcgggc

SEQ ID NO: 3018 - DNA, 20 bp, Artificial Sequence
  Synthetic: DMPK 5 forward 19:45770327-45770353; SaCas9
ccggccgctagggggcgggc

SEQ ID NO: 3019 - DNA, 19 bp, Artificial Sequence
  Synthetic: DMPK 5 forward 19:45770328-45770353; SaCas9
cggccgctagggggcgggc

SEQ ID NO: 3020 - DNA, 18 bp, Artificial Sequence
  Synthetic: DMPK 5 forward 19:45770329-45770353; SaCas9
ggccgctagggggcgggc

SEQ ID NO: 3021 - DNA, 25 bp, Artificial Sequence
  Synthetic: DMPK 5 reverse 19:45770322-45770353; SaCas9
atccgggcccgccccctagcggccg

SEQ ID NO: 3022 - DNA, 24 bp, Artificial Sequence
  Synthetic: DMPK 5 reverse 19:45770323-45770353; SaCas9
tccgggcccgccccctagcggccg

SEQ ID NO: 3023 - DNA, 23 bp, Artificial Sequence
  Synthetic: DMPK 5 reverse 19:45770324-45770353; SaCas9
ccgggcccgccccctagcggccg

SEQ ID NO: 3024 - DNA, 22 bp, Artificial Sequence
  Synthetic: DMPK 5 reverse 19:45770325-45770353; SaCas9
cgggcccgccccctagcggccg

SEQ ID NO: 3025 - DNA, 21 bp, Artificial Sequence
  Synthetic: DMPK 5 reverse 19:45770326-45770353; SaCas9
gggcccgccccctagcggccg

SEQ ID NO: 3026 - DNA, 20 bp, Artificial Sequence
  Synthetic: DMPK 5 reverse 19:45770327-45770353; SaCas9
ggcccgccccctagcggccg

SEQ ID NO: 3027 - DNA, 19 bp, Artificial Sequence
  Synthetic: DMPK 5 reverse 19:45770328-45770353; SaCas9
gcccgccccctagcggccg

SEQ ID NO: 3028 - DNA, 18 bp, Artificial Sequence
  Synthetic: DMPK 5 reverse 19:45770329-45770353; SaCas9
cccgccccctagcggccg

SEQ ID NO: 3029 - DNA, 25 bp, Artificial Sequence
  Synthetic: DMPK 5 reverse 19:45770323-45770354; SaCas9
gatccgggcccgccccctagcggcc

SEQ ID NO: 3030 - DNA, 24 bp, Artificial Sequence
  Synthetic: DMPK 5 reverse 19:45770324-45770354; SaCas9
atccgggcccgccccctagcggcc

SEQ ID NO: 3031 - DNA, 23 bp, Artificial Sequence
  Synthetic: DMPK 5 reverse 19:45770325-45770354; SaCas9
tccgggcccgccccctagcggcc

SEQ ID NO: 3032 - DNA, 22 bp, Artificial Sequence
  Synthetic: DMPK 5 reverse 19:45770326-45770354; SaCas9
ccgggcccgccccctagcggcc

SEQ ID NO: 3033 - DNA, 21 bp, Artificial Sequence
  Synthetic: DMPK 5 reverse 19:45770327-45770354; SaCas9
cgggcccgccccctagcggcc

SEQ ID NO: 3034 - DNA, 20 bp, Artificial Sequence
  Synthetic: DMPK 5 reverse 19:45770328-45770354; SaCas9
gggcccgccccctagcggcc

SEQ ID NO: 3035 - DNA, 19 bp, Artificial Sequence
  Synthetic: DMPK 5 reverse 19:45770329-45770354; SaCas9
ggcccgccccctagcggcc

SEQ ID NO: 3036 - DNA, 18 bp, Artificial Sequence
  Synthetic: DMPK 5 reverse 19:45770330-45770354; SaCas9
gcccgccccctagcggcc

SEQ ID NO: 3037 - DNA, 25 bp, Artificial Sequence
  Synthetic: DMPK 5 reverse 19:45770324-45770355; SaCas9
tgatccgggcccgccccctagcggc

SEQ ID NO: 3038 - DNA, 24 bp, Artificial Sequence
  Synthetic: DMPK 5 reverse 19:45770325-45770355; SaCas9
gatccgggcccgccccctagcggc

SEQ ID NO: 3039 - DNA, 23 bp, Artificial Sequence
  Synthetic: DMPK 5 reverse 19:45770326-45770355; SaCas9
atccgggcccgccccctagcggc

SEQ ID NO: 3040 - DNA, 22 bp, Artificial Sequence
  Synthetic: DMPK 5 reverse 19:45770327-45770355; SaCas9
tccgggcccgccccctagcggc

SEQ ID NO: 3041 - DNA, 21 bp, Artificial Sequence
  Synthetic: DMPK 5 reverse 19:45770328-45770355; SaCas9
ccgggcccgccccctagcggc

SEQ ID NO: 3042 - DNA, 20 bp, Artificial Sequence
  Synthetic: DMPK 5 reverse 19:45770329-45770355; SaCas9
cgggcccgccccctagcggc

SEQ ID NO: 3043 - DNA, 19 bp, Artificial Sequence
  Synthetic: DMPK 5 reverse 19:45770330-45770355; SaCas9
gggcccgccccctagcggc

SEQ ID NO: 3044 - DNA, 18 bp, Artificial Sequence
  Synthetic: DMPK 5 reverse 19:45770331-45770355; SaCas9
ggcccgccccctagcggc

SEQ ID NO: 3045 - DNA, 25 bp, Artificial Sequence
  Synthetic: DMPK 5 reverse 19:45770325-45770356; SaCas9
gtgatccgggcccgccccctagcgg

SEQ ID NO: 3046 - DNA, 24 bp, Artificial Sequence
  Synthetic: DMPK 5 reverse 19:45770326-45770356; SaCas9
tgatccgggcccgccccctagcgg

SEQ ID NO: 3047 - DNA, 23 bp, Artificial Sequence
  Synthetic: DMPK 5 reverse 19:45770327-45770356; SaCas9
gatccgggcccgccccctagcgg

SEQ ID NO: 3048 - DNA, 22 bp, Artificial Sequence
  Synthetic: DMPK 5 reverse 19:45770328-45770356; SaCas9
atccgggcccgccccctagcgg

SEQ ID NO: 3049 - DNA, 21 bp, Artificial Sequence
  Synthetic: DMPK 5 reverse 19:45770329-45770356; SaCas9
tccgggcccgccccctagcgg

SEQ ID NO: 3050 - DNA, 20 bp, Artificial Sequence
  Synthetic: DMPK 5 reverse 19:45770330-45770356; SaCas9
ccgggcccgccccctagcgg

SEQ ID NO: 3051 - DNA, 19 bp, Artificial Sequence
  Synthetic: DMPK 5 reverse 19:45770331-45770356; SaCas9
cgggcccgccccctagcgg

SEQ ID NO: 3052 - DNA, 18 bp, Artificial Sequence
  Synthetic: DMPK 5 reverse 19:45770332-45770356; SaCas9
gggcccgccccctagcgg

SEQ ID NO: 3053 - DNA, 25 bp, Artificial Sequence
  Synthetic: DMPK 5 forward 19:45770330-45770361; SaCas9
gccgctagggggcgggcccggatca

SEQ ID NO: 3054 - DNA, 24 bp, Artificial Sequence
  Synthetic: DMPK 5 forward 19:45770331-45770361; SaCas9
ccgctagggggcgggcccggatca

SEQ ID NO: 3055 - DNA, 23 bp, Artificial Sequence
  Synthetic: DMPK 5 forward 19:45770332-45770361; SaCas9
cgctagggggcgggcccggatca

SEQ ID NO: 3056 - DNA, 22 bp, Artificial Sequence
  Synthetic: DMPK 5 forward 19:45770333-45770361; SaCas9
gctagggggcgggcccggatca

SEQ ID NO: 3057 - DNA, 21 bp, Artificial Sequence
  Synthetic: DMPK 5 forward 19:45770334-45770361; SaCas9
ctagggggcgggcccggatca

SEQ ID NO: 3058 - DNA, 20 bp, Artificial Sequence
  Synthetic: DMPK 5 forward 19:45770335-45770361; SaCas9
tagggggcgggcccggatca

SEQ ID NO: 3059 - DNA, 19 bp, Artificial Sequence
  Synthetic: DMPK 5 forward 19:45770336-45770361; SaCas9
agggggcgggcccggatca

SEQ ID NO: 3060 - DNA, 18 bp, Artificial Sequence
  Synthetic: DMPK 5 forward 19:45770337-45770361; SaCas9
gggggcgggcccggatca

SEQ ID NO: 3061 - DNA, 25 bp, Artificial Sequence
  Synthetic: DMPK 5 forward 19:45770335-45770366; SaCas9
tagggggcgggcccggatcacagga

SEQ ID NO: 3062 - DNA, 24 bp, Artificial Sequence
  Synthetic: DMPK 5 forward 19:45770336-45770366; SaCas9
agggggcgggcccggatcacagga

SEQ ID NO: 3063 - DNA, 23 bp, Artificial Sequence
  Synthetic: DMPK 5 forward 19:45770337-45770366; SaCas9
gggggcgggcccggatcacagga

SEQ ID NO: 3064 - DNA, 22 bp, Artificial Sequence
  Synthetic: DMPK 5 forward 19:45770338-45770366; SaCas9
ggggcgggcccggatcacagga

SEQ ID NO: 3065 - DNA, 21 bp, Artificial Sequence
  Synthetic: DMPK 5 forward 19:45770339-45770366; SaCas9
gggcgggcccggatcacagga

SEQ ID NO: 3066 - DNA, 20 bp, Artificial Sequence
  Synthetic: DMPK 5 forward 19:45770340-45770366; SaCas9
ggcgggcccggatcacagga

SEQ ID NO: 3067 - DNA, 19 bp, Artificial Sequence
  Synthetic: DMPK 5 forward 19:45770341-45770366; SaCas9
gcgggcccggatcacagga

SEQ ID NO: 3068 - DNA, 18 bp, Artificial Sequence
  Synthetic: DMPK 5 forward 19:45770342-45770366; SaCas9
cgggcccggatcacagga

SEQ ID NO: 3069 - DNA, 25 bp, Artificial Sequence
  Synthetic: DMPK 5 forward 19:45770336-45770367; SaCas9
agggggcgggcccggatcacaggac

SEQ ID NO: 3070 - DNA, 24 bp, Artificial Sequence
  Synthetic: DMPK 5 forward 19:45770337-45770367; SaCas9
gggggcgggcccggatcacaggac

SEQ ID NO: 3071 - DNA, 23 bp, Artificial Sequence
  Synthetic: DMPK 5 forward 19:45770338-45770367; SaCas9
ggggcgggcccggatcacaggac

SEQ ID NO: 3072 - DNA, 22 bp, Artificial Sequence
  Synthetic: DMPK 5 forward 19:45770339-45770367; SaCas9
gggcgggcccggatcacaggac

SEQ ID NO: 3073 - DNA, 21 bp, Artificial Sequence
  Synthetic: DMPK 5 forward 19:45770340-45770367; SaCas9
ggcgggcccggatcacaggac

SEQ ID NO: 3074 - DNA, 20 bp, Artificial Sequence
  Synthetic: DMPK 5 forward 19:45770341-45770367; SaCas9
gcgggcccggatcacaggac

SEQ ID NO: 3075 - DNA, 19 bp, Artificial Sequence
  Synthetic: DMPK 5 forward 19:45770342-45770367; SaCas9
cgggcccggatcacaggac

SEQ ID NO: 3076 - DNA, 18 bp, Artificial Sequence
  Synthetic: DMPK 5 forward 19:45770343-45770367; SaCas9
gggcccggatcacaggac

SEQ ID NO: 3077 - DNA, 25 bp, Artificial Sequence
  Synthetic: DMPK 5 forward 19:45770341-45770372; SaCas9
gcgggcccggatcacaggactggag

SEQ ID NO: 3078 - DNA, 24 bp, Artificial Sequence
  Synthetic: DMPK 5 forward 19:45770342-45770372; SaCas9
cgggcccggatcacaggactggag

SEQ ID NO: 3079 - DNA, 23 bp, Artificial Sequence
  Synthetic: DMPK 5 forward 19:45770343-45770372; SaCas9
gggcccggatcacaggactggag

SEQ ID NO: 3080 - DNA, 22 bp, Artificial Sequence
  Synthetic: DMPK 5 forward 19:45770344-45770372; SaCas9
ggcccggatcacaggactggag

SEQ ID NO: 3081 - DNA, 21 bp, Artificial Sequence
  Synthetic: DMPK 5 forward 19:45770345-45770372; SaCas9
gcccggatcacaggactggag

SEQ ID NO: 3082 - DNA, 20 bp, Artificial Sequence
  Synthetic: DMPK 5 forward 19:45770346-45770372; SaCas9
cccggatcacaggactggag

SEQ ID NO: 3083 - DNA, 19 bp, Artificial Sequence
  Synthetic: DMPK 5 forward 19:45770347-45770372; SaCas9
ccggatcacaggactggag

SEQ ID NO: 3084 - DNA, 18 bp, Artificial Sequence
  Synthetic: DMPK 5 forward 19:45770348-45770372; SaCas9
cggatcacaggactggag

SEQ ID NO: 3085 - DNA, 25 bp, Artificial Sequence
  Synthetic: DMPK 5 forward 19:45770345-45770376; SaCas9
gcccggatcacaggactggagctgg

SEQ ID NO: 3086 - DNA, 24 bp, Artificial Sequence
  Synthetic: DMPK 5 forward 19:45770346-45770376; SaCas9
cccggatcacaggactggagctgg

SEQ ID NO: 3087 - DNA, 23 bp, Artificial Sequence
  Synthetic: DMPK 5 forward 19:45770347-45770376; SaCas9
ccggatcacaggactggagctgg

SEQ ID NO: 3088 - DNA, 22 bp, Artificial Sequence
  Synthetic: DMPK 5 forward 19:45770348-45770376; SaCas9
cggatcacaggactggagctgg

SEQ ID NO: 3089 - DNA, 21 bp, Artificial Sequence
  Synthetic: DMPK 5 forward 19:45770349-45770376; SaCas9
ggatcacaggactggagctgg

SEQ ID NO: 3090 - DNA, 20 bp, Artificial Sequence
  Synthetic: DMPK 5 forward 19:45770350-45770376; SaCas9
gatcacaggactggagctgg

SEQ ID NO: 3091 - DNA, 19 bp, Artificial Sequence
  Synthetic: DMPK 5 forward 19:45770351-45770376; SaCas9
atcacaggactggagctgg

SEQ ID NO: 3092 - DNA, 18 bp, Artificial Sequence
  Synthetic: DMPK 5 forward 19:45770352-45770376; SaCas9
tcacaggactggagctgg

SEQ ID NO: 3093 - DNA, 25 bp, Artificial Sequence
  Synthetic: DMPK 5 reverse 19:45770345-45770376; SaCas9
ctccgcccagctccagtcctgtgat

SEQ ID NO: 3094 - DNA, 24 bp, Artificial Sequence
  Synthetic: DMPK 5 reverse 19:45770346-45770376; SaCas9
tccgcccagctccagtcctgtgat

SEQ ID NO: 3095 - DNA, 23 bp, Artificial Sequence
  Synthetic: DMPK 5 reverse 19:45770347-45770376; SaCas9
ccgcccagctccagtcctgtgat

SEQ ID NO: 3096 - DNA, 22 bp, Artificial Sequence
  Synthetic: DMPK 5 reverse 19:45770348-45770376; SaCas9
cgcccagctccagtcctgtgat

SEQ ID NO: 3097 - DNA, 21 bp, Artificial Sequence
  Synthetic: DMPK 5 reverse 19:45770349-45770376; SaCas9
gcccagctccagtcctgtgat

SEQ ID NO: 3098 - DNA, 20 bp, Artificial Sequence
  Synthetic: DMPK 5 reverse 19:45770350-45770376; SaCas9
cccagctccagtcctgtgat

SEQ ID NO: 3099 - DNA, 19 bp, Artificial Sequence
  Synthetic: DMPK 5 reverse 19:45770351-45770376; SaCas9
ccagctccagtcctgtgat

SEQ ID NO: 3100 - DNA, 18 bp, Artificial Sequence
  Synthetic: DMPK 5 reverse 19:45770352-45770376; SaCas9
cagctccagtcctgtgat

SEQ ID NO: 3101 - DNA, 25 bp, Artificial Sequence
  Synthetic: DMPK 5 forward 19:45770346-45770377; SaCas9
cccggatcacaggactggagctggg

SEQ ID NO: 3102 - DNA, 24 bp, Artificial Sequence
  Synthetic: DMPK 5 forward 19:45770347-45770377; SaCas9
ccggatcacaggactggagctggg

SEQ ID NO: 3103 - DNA, 23 bp, Artificial Sequence
  Synthetic: DMPK 5 forward 19:45770348-45770377; SaCas9
cggatcacaggactggagctggg

SEQ ID NO: 3104 - DNA, 22 bp, Artificial Sequence
  Synthetic: DMPK 5 forward 19:45770349-45770377; SaCas9
ggatcacaggactggagctggg

SEQ ID NO: 3105 - DNA, 21 bp, Artificial Sequence
  Synthetic: DMPK 5 forward 19:45770350-45770377; SaCas9
gatcacaggactggagctggg

SEQ ID NO: 3106 - DNA, 20 bp, Artificial Sequence
  Synthetic: DMPK 5 forward 19:45770351-45770377; SaCas9
atcacaggactggagctggg

SEQ ID NO: 3107 - DNA, 19 bp, Artificial Sequence
  Synthetic: DMPK 5 forward 19:45770352-45770377; SaCas9
tcacaggactggagctggg

SEQ ID NO: 3108 - DNA, 18 bp, Artificial Sequence
  Synthetic: DMPK 5 forward 19:45770353-45770377; SaCas9
cacaggactggagctggg

SEQ ID NO: 3109 - DNA, 25 bp, Artificial Sequence
  Synthetic: DMPK 5 forward 19:45770359-45770390; SaCas9
actggagctgggcggagacccacgc

SEQ ID NO: 3110 - DNA, 24 bp, Artificial Sequence
  Synthetic: DMPK 5 forward 19:45770360-45770390; SaCas9
ctggagctgggcggagacccacgc

SEQ ID NO: 3111 - DNA, 23 bp, Artificial Sequence
  Synthetic: DMPK 5 forward 19:45770361-45770390; SaCas9
tggagctgggcggagacccacgc

SEQ ID NO: 3112 - DNA, 22 bp, Artificial Sequence
  Synthetic: DMPK 5 forward 19:45770362-45770390; SaCas9
ggagctgggcggagacccacgc

SEQ ID NO: 3113 - DNA, 21 bp, Artificial Sequence
  Synthetic: DMPK 5 forward 19:45770363-45770390; SaCas9
gagctgggcggagacccacgc

SEQ ID NO: 3114 - DNA, 20 bp, Artificial Sequence
  Synthetic: DMPK 5 forward 19:45770364-45770390; SaCas9
agctgggcggagacccacgc

SEQ ID NO: 3115 - DNA, 19 bp, Artificial Sequence
  Synthetic: DMPK 5 forward 19:45770365-45770390; SaCas9
gctgggcggagacccacgc

SEQ ID NO: 3116 - DNA, 18 bp, Artificial Sequence
  Synthetic: DMPK 5 forward 19:45770366-45770390; SaCas9
ctgggcggagacccacgc

SEQ ID NO: 3117 - DNA, 25 bp, Artificial Sequence
  Synthetic: DMPK 5 forward 19:45770360-45770391; SaCas9
ctggagctgggcggagacccacgct

SEQ ID NO: 3118 - DNA, 24 bp, Artificial Sequence
  Synthetic: DMPK 5 forward 19:45770361-45770391; SaCas9
tggagctgggcggagacccacgct

SEQ ID NO: 3119 - DNA, 23 bp, Artificial Sequence
  Synthetic: DMPK 5 forward 19:45770362-45770391; SaCas9
ggagctgggcggagacccacgct

SEQ ID NO: 3120 - DNA, 22 bp, Artificial Sequence
  Synthetic: DMPK 5 forward 19:45770363-45770391; SaCas9
gagctgggcggagacccacgct

SEQ ID NO: 3121 - DNA, 21 bp, Artificial Sequence
  Synthetic: DMPK 5 forward 19:45770364-45770391; SaCas9
agctgggcggagacccacgct

SEQ ID NO: 3122 - DNA, 20 bp, Artificial Sequence
  Synthetic: DMPK 5 forward 19:45770365-45770391; SaCas9
gctgggcggagacccacgct

SEQ ID NO: 3123 - DNA, 19 bp, Artificial Sequence
  Synthetic: DMPK 5 forward 19:45770366-45770391; SaCas9
ctgggcggagacccacgct

SEQ ID NO: 3124 - DNA, 18 bp, Artificial Sequence
  Synthetic: DMPK 5 forward 19:45770367-45770391; SaCas9
tgggcggagacccacgct

SEQ ID NO: 3125 - DNA, 25 bp, Artificial Sequence
  Synthetic: DMPK 5 forward 19:45770370-45770401; SaCas9
gcggagacccacgctcggagcggtt

SEQ ID NO: 3126 - DNA, 24 bp, Artificial Sequence
  Synthetic: DMPK 5 forward 19:45770371-45770401; SaCas9
cggagacccacgctcggagcggtt

SEQ ID NO: 3127 - DNA, 23 bp, Artificial Sequence
  Synthetic: DMPK 5 forward 19:45770372-45770401; SaCas9
ggagacccacgctcggagcggtt

SEQ ID NO: 3128 - DNA, 22 bp, Artificial Sequence
  Synthetic: DMPK 5 forward 19:45770373-45770401; SaCas9
gagacccacgctcggagcggtt

SEQ ID NO: 3129 - DNA, 21 bp, Artificial Sequence
  Synthetic: DMPK 5 forward 19:45770374-45770401; SaCas9
agacccacgctcggagcggtt

SEQ ID NO: 3130 - DNA, 20 bp, Artificial Sequence
  Synthetic: DMPK 5 forward 19:45770375-45770401; SaCas9
gacccacgctcggagcggtt

SEQ ID NO: 3131 - DNA, 19 bp, Artificial Sequence
  Synthetic: DMPK 5 forward 19:45770376-45770401; SaCas9
acccacgctcggagcggtt

SEQ ID NO: 3132 - DNA, 18 bp, Artificial Sequence
  Synthetic: DMPK 5 forward 19:45770377-45770401; SaCas9
cccacgctcggagcggtt

SEQ ID NO: 3133 - DNA, 25 bp, Artificial Sequence
  Synthetic: DMPK 5 reverse 19:45770376-45770407; SaCas9
ctgccagttcacaaccgctccgagc

SEQ ID NO: 3134 - DNA, 24 bp, Artificial Sequence
  Synthetic: DMPK 5 reverse 19:45770377-45770407; SaCas9
tgccagttcacaaccgctccgagc

SEQ ID NO: 3135 - DNA, 23 bp, Artificial Sequence
  Synthetic: DMPK 5 reverse 19:45770378-45770407; SaCas9
gccagttcacaaccgctccgagc

SEQ ID NO: 3136 - DNA, 22 bp, Artificial Sequence
  Synthetic: DMPK 5 reverse 19:45770379-45770407; SaCas9
ccagttcacaaccgctccgagc

SEQ ID NO: 3137 - DNA, 21 bp, Artificial Sequence
  Synthetic: DMPK 5 reverse 19:45770380-45770407; SaCas9
cagttcacaaccgctccgagc

SEQ ID NO: 3138 - DNA, 20 bp, Artificial Sequence
  Synthetic: DMPK 5 reverse 19:45770381-45770407; SaCas9
agttcacaaccgctccgagc

SEQ ID NO: 3139 - DNA, 19 bp, Artificial Sequence
  Synthetic: DMPK 5 reverse 19:45770382-45770407; SaCas9
gttcacaaccgctccgagc

SEQ ID NO: 3140 - DNA, 18 bp, Artificial Sequence
  Synthetic: DMPK 5 reverse 19:45770383-45770407; SaCas9
ttcacaaccgctccgagc

SEQ ID NO: 3141 - DNA, 25 bp, Artificial Sequence
  Synthetic: DMPK 5 reverse 19:45770382-45770413; SaCas9
caccgcctgccagttcacaaccgct

SEQ ID NO: 3142 - DNA, 24 bp, Artificial Sequence
  Synthetic: DMPK 5 reverse 19:45770383-45770413; SaCas9
accgcctgccagttcacaaccgct

SEQ ID NO: 3143 - DNA, 23 bp, Artificial Sequence
  Synthetic: DMPK 5 reverse 19:45770384-45770413; SaCas9
ccgcctgccagttcacaaccgct

SEQ ID NO: 3144 - DNA, 22 bp, Artificial Sequence
  Synthetic: DMPK 5 reverse 19:45770385-45770413; SaCas9
cgcctgccagttcacaaccgct

SEQ ID NO: 3145 - DNA, 21 bp, Artificial Sequence
  Synthetic: DMPK 5 reverse 19:45770386-45770413; SaCas9
gcctgccagttcacaaccgct

SEQ ID NO: 3146 - DNA, 20 bp, Artificial Sequence
  Synthetic: DMPK 5 reverse 19:45770387-45770413; SaCas9
cctgccagttcacaaccgct

SEQ ID NO: 3147 - DNA, 19 bp, Artificial Sequence
  Synthetic: DMPK 5 reverse 19:45770388-45770413; SaCas9
ctgccagttcacaaccgct

SEQ ID NO: 3148 - DNA, 18 bp, Artificial Sequence
  Synthetic: DMPK 5 reverse 19:45770389-45770413; SaCas9
tgccagttcacaaccgct

SEQ ID NO: 3149 - DNA, 25 bp, Artificial Sequence
  Synthetic: DMPK 5 forward 19:45770385-45770416; SaCas9
cggagcggttgtgaactggcaggcg

SEQ ID NO: 3150 - DNA, 24 bp, Artificial Sequence
  Synthetic: DMPK 5 forward 19:45770386-45770416; SaCas9
ggagcggttgtgaactggcaggcg

SEQ ID NO: 3151 - DNA, 23 bp, Artificial Sequence
  Synthetic: DMPK 5 forward 19:45770387-45770416; SaCas9
gagcggttgtgaactggcaggcg

SEQ ID NO: 3152 - DNA, 22 bp, Artificial Sequence
  Synthetic: DMPK 5 forward 19:45770388-45770416; SaCas9
agcggttgtgaactggcaggcg

SEQ ID NO: 3153 - DNA, 21 bp, Artificial Sequence
  Synthetic: DMPK 5 forward 19:45770389-45770416; SaCas9
gcggttgtgaactggcaggcg

SEQ ID NO: 3154 - DNA, 20 bp, Artificial Sequence
  Synthetic: DMPK 5 forward 19:45770390-45770416; SaCas9
cggttgtgaactggcaggcg

SEQ ID NO: 3155 - DNA, 19 bp, Artificial Sequence
  Synthetic: DMPK 5 forward 19:45770391-45770416; SaCas9
ggttgtgaactggcaggcg

SEQ ID NO: 3156 - DNA, 18 bp, Artificial Sequence
  Synthetic: DMPK 5 forward 19:45770392-45770416; SaCas9
gttgtgaactggcaggcg

SEQ ID NO: 3157 - DNA, 25 bp, Artificial Sequence
  Synthetic: DMPK 5 forward 19:45770410-45770441; SaCas9
gtgggcgcggcttctgtgccgtgcc

SEQ ID NO: 3158 - DNA, 24 bp, Artificial Sequence
  Synthetic: DMPK 5 forward 19:45770411-45770441; SaCas9
tgggcgcggcttctgtgccgtgcc

SEQ ID NO: 3159 - DNA, 23 bp, Artificial Sequence
  Synthetic: DMPK 5 forward 19:45770412-45770441; SaCas9
gggcgcggcttctgtgccgtgcc

SEQ ID NO: 3160 - DNA, 22 bp, Artificial Sequence
  Synthetic: DMPK 5 forward 19:45770413-45770441; SaCas9
ggcgcggcttctgtgccgtgcc

SEQ ID NO: 3161 - DNA, 21 bp, Artificial Sequence
  Synthetic: DMPK 5 forward 19:45770414-45770441; SaCas9
gcgcggcttctgtgccgtgcc

SEQ ID NO: 3162 - DNA, 20 bp, Artificial Sequence
  Synthetic: DMPK 5 forward 19:45770415-45770441; SaCas9
cgcggcttctgtgccgtgcc

SEQ ID NO: 3163 - DNA, 19 bp, Artificial Sequence
  Synthetic: DMPK 5 forward 19:45770416-45770441; SaCas9
gcggcttctgtgccgtgcc

SEQ ID NO: 3164 - DNA, 18 bp, Artificial Sequence
  Synthetic: DMPK 5 forward 19:45770417-45770441; SaCas9
cggcttctgtgccgtgcc

SEQ ID NO: 3165 - DNA, 25 bp, Artificial Sequence
  Synthetic: DMPK 5 reverse 19:45770420-45770451; SaCas9
aagactgagtgcccggggcacggca

SEQ ID NO: 3166 - DNA, 24 bp, Artificial Sequence
  Synthetic: DMPK 5 reverse 19:45770421-45770451; SaCas9
agactgagtgcccggggcacggca

SEQ ID NO: 3167 - DNA, 23 bp, Artificial Sequence
  Synthetic: DMPK 5 reverse 19:45770422-45770451; SaCas9
gactgagtgcccggggcacggca

SEQ ID NO: 3168 - DNA, 22 bp, Artificial Sequence
  Synthetic: DMPK 5 reverse 19:45770423-45770451; SaCas9
actgagtgcccggggcacggca

SEQ ID NO: 3169 - DNA, 21 bp, Artificial Sequence
  Synthetic: DMPK 5 reverse 19:45770424-45770451; SaCas9
ctgagtgcccggggcacggca

SEQ ID NO: 3170 - DNA, 20 bp, Artificial Sequence
  Synthetic: DMPK 5 reverse 19:45770425-45770451; SaCas9
tgagtgcccggggcacggca

SEQ ID NO: 3171 - DNA, 19 bp, Artificial Sequence
  Synthetic: DMPK 5 reverse 19:45770426-45770451; SaCas9
gagtgcccggggcacggca

SEQ ID NO: 3172 - DNA, 18 bp, Artificial Sequence
  Synthetic: DMPK 5 reverse 19:45770427-45770451; SaCas9
agtgcccggggcacggca

SEQ ID NO: 3173 - DNA, 25 bp, Artificial Sequence
  Synthetic: DMPK 5 forward 19:45770429-45770460; SaCas9
cgtgccccgggcactcagtcttcca

SEQ ID NO: 3174 - DNA, 24 bp, Artificial Sequence
  Synthetic: DMPK 5 forward 19:45770430-45770460; SaCas9
gtgccccgggcactcagtcttcca

SEQ ID NO: 3175 - DNA, 23 bp, Artificial Sequence
  Synthetic: DMPK 5 forward 19:45770431-45770460; SaCas9
tgccccgggcactcagtcttcca

SEQ ID NO: 3176 - DNA, 22 bp, Artificial Sequence
  Synthetic: DMPK 5 forward 19:45770432-45770460; SaCas9
gccccgggcactcagtcttcca

SEQ ID NO: 3177 - DNA, 21 bp, Artificial Sequence
  Synthetic: DMPK 5 forward 19:45770433-45770460; SaCas9
ccccgggcactcagtcttcca

SEQ ID NO: 3178 - DNA, 20 bp, Artificial Sequence
  Synthetic: DMPK 5 forward 19:45770434-45770460; SaCas9
cccgggcactcagtcttcca

SEQ ID NO: 3179 - DNA, 19 bp, Artificial Sequence
  Synthetic: DMPK 5 forward 19:45770435-45770460; SaCas9
ccgggcactcagtcttcca

SEQ ID NO: 3180 - DNA, 18 bp, Artificial Sequence
  Synthetic: DMPK 5 forward 19:45770436-45770460; SaCas9
cgggcactcagtcttcca

SEQ ID NO: 3181 - DNA, 25 bp, Artificial Sequence
  Synthetic: DMPK 5 forward 19:45770430-45770461; SaCas9
gtgccccgggcactcagtcttccaa

SEQ ID NO: 3182 - DNA, 24 bp, Artificial Sequence
  Synthetic: DMPK 5 forward 19:45770431-45770461; SaCas9
tgccccgggcactcagtcttccaa

SEQ ID NO: 3183 - DNA, 23 bp, Artificial Sequence
  Synthetic: DMPK 5 forward 19:45770432-45770461; SaCas9
gccccgggcactcagtcttccaa

SEQ ID NO: 3184 - DNA, 22 bp, Artificial Sequence
  Synthetic: DMPK 5 forward 19:45770433-45770461; SaCas9
ccccgggcactcagtcttccaa

SEQ ID NO: 3185 - DNA, 21 bp, Artificial Sequence
  Synthetic: DMPK 5 forward 19:45770434-45770461; SaCas9
cccgggcactcagtcttccaa

SEQ ID NO: 3186 - DNA, 20 bp, Artificial Sequence
  Synthetic: DMPK 5 forward 19:45770435-45770461; SaCas9
ccgggcactcagtcttccaa

SEQ ID NO: 3187 - DNA, 19 bp, Artificial Sequence
  Synthetic: DMPK 5 forward 19:45770436-45770461; SaCas9
cgggcactcagtcttccaa

SEQ ID NO: 3188 - DNA, 18 bp, Artificial Sequence
  Synthetic: DMPK 5 forward 19:45770437-45770461; SaCas9
gggcactcagtcttccaa

SEQ ID NO: 3189 - DNA, 25 bp, Artificial Sequence
  Synthetic: DMPK 5 reverse 19:45770432-45770463; SaCas9
gggccccgttggaagactgagtgcc

SEQ ID NO: 3190 - DNA, 24 bp, Artificial Sequence
  Synthetic: DMPK 5 reverse 19:45770433-45770463; SaCas9
ggccccgttggaagactgagtgcc

SEQ ID NO: 3191 - DNA, 23 bp, Artificial Sequence
  Synthetic: DMPK 5 reverse 19:45770434-45770463; SaCas9
gccccgttggaagactgagtgcc

SEQ ID NO: 3192 - DNA, 22 bp, Artificial Sequence
  Synthetic: DMPK 5 reverse 19:45770435-45770463; SaCas9
ccccgttggaagactgagtgcc

SEQ ID NO: 3193 - DNA, 21 bp, Artificial Sequence
  Synthetic: DMPK 5 reverse 19:45770436-45770463; SaCas9
cccgttggaagactgagtgcc

SEQ ID NO: 3194 - DNA, 20 bp, Artificial Sequence
  Synthetic: DMPK 5 reverse 19:45770437-45770463; SaCas9
ccgttggaagactgagtgcc

SEQ ID NO: 3195 - DNA, 19 bp, Artificial Sequence
  Synthetic: DMPK 5 reverse 19:45770438-45770463; SaCas9
cgttggaagactgagtgcc

SEQ ID NO: 3196 - DNA, 18 bp, Artificial Sequence
  Synthetic: DMPK 5 reverse 19:45770439-45770463; SaCas9
gttggaagactgagtgcc

SEQ ID NO: 3197 - DNA, 25 bp, Artificial Sequence
  Synthetic: DMPK 5 reverse 19:45770433-45770464; SaCas9
ggggccccgttggaagactgagtgc

SEQ ID NO: 3198 - DNA, 24 bp, Artificial Sequence
  Synthetic: DMPK 5 reverse 19:45770434-45770464; SaCas9
gggccccgttggaagactgagtgc

SEQ ID NO: 3199 - DNA, 23 bp, Artificial Sequence
  Synthetic: DMPK 5 reverse 19:45770435-45770464; SaCas9
ggccccgttggaagactgagtgc

SEQ ID NO: 3200 - DNA, 22 bp, Artificial Sequence
  Synthetic: DMPK 5 reverse 19:45770436-45770464; SaCas9
gccccgttggaagactgagtgc

SEQ ID NO: 3201 - DNA, 21 bp, Artificial Sequence
  Synthetic: DMPK 5 reverse 19:45770437-45770464; SaCas9
ccccgttggaagactgagtgc

SEQ ID NO: 3202 - DNA, 20 bp, Artificial Sequence
  Synthetic: DMPK 5 reverse 19:45770438-45770464; SaCas9
cccgttggaagactgagtgc

SEQ ID NO: 3203 - DNA, 19 bp, Artificial Sequence
  Synthetic: DMPK 5 reverse 19:45770439-45770464; SaCas9
ccgttggaagactgagtgc

SEQ ID NO: 3204 - DNA, 18 bp, Artificial Sequence
  Synthetic: DMPK 5 reverse 19:45770440-45770464; SaCas9
cgttggaagactgagtgc

SEQ ID NO: 3205 - DNA, 25 bp, Artificial Sequence
  Synthetic: DMPK 5 forward 19:45770437-45770468; SaCas9
gggcactcagtcttccaacggggcc

SEQ ID NO: 3206 - DNA, 24 bp, Artificial Sequence
  Synthetic: DMPK 5 forward 19:45770438-45770468; SaCas9
ggcactcagtcttccaacggggcc

SEQ ID NO: 3207 - DNA, 23 bp, Artificial Sequence
  Synthetic: DMPK 5 forward 19:45770439-45770468; SaCas9
gcactcagtcttccaacggggcc

SEQ ID NO: 3208 - DNA, 22 bp, Artificial Sequence
  Synthetic: DMPK 5 forward 19:45770440-45770468; SaCas9
cactcagtcttccaacggggcc

SEQ ID NO: 3209 - DNA, 21 bp, Artificial Sequence
  Synthetic: DMPK 5 forward 19:45770441-45770468; SaCas9
actcagtcttccaacggggcc

SEQ ID NO: 3210 - DNA, 20 bp, Artificial Sequence
  Synthetic: DMPK 5 forward 19:45770442-45770468; SaCas9
ctcagtcttccaacggggcc

SEQ ID NO: 3211 - DNA, 19 bp, Artificial Sequence
  Synthetic: DMPK 5 forward 19:45770443-45770468; SaCas9
tcagtcttccaacggggcc

SEQ ID NO: 3212 - DNA, 18 bp, Artificial Sequence
  Synthetic: DMPK 5 forward 19:45770444-45770468; SaCas9
cagtcttccaacggggcc

SEQ ID NO: 3213 - DNA, 25 bp, Artificial Sequence
  Synthetic: DMPK 5 forward 19:45770438-45770469; SaCas9
ggcactcagtcttccaacggggccc

SEQ ID NO: 3214 - DNA, 24 bp, Artificial Sequence
  Synthetic: DMPK 5 forward 19:45770439-45770469; SaCas9
gcactcagtcttccaacggggccc

SEQ ID NO: 3215 - DNA, 23 bp, Artificial Sequence
  Synthetic: DMPK 5 forward 19:45770440-45770469; SaCas9
cactcagtcttccaacggggccc

SEQ ID NO: 3216 - DNA, 22 bp, Artificial Sequence
  Synthetic: DMPK 5 forward 19:45770441-45770469; SaCas9
actcagtcttccaacggggccc

SEQ ID NO: 3217 - DNA, 21 bp, Artificial Sequence
  Synthetic: DMPK 5 forward 19:45770442-45770469; SaCas9
ctcagtcttccaacggggccc

SEQ ID NO: 3218 - DNA, 20 bp, Artificial Sequence
  Synthetic: DMPK 5 forward 19:45770443-45770469; SaCas9
tcagtcttccaacggggccc

SEQ ID NO: 3219 - DNA, 19 bp, Artificial Sequence
  Synthetic: DMPK 5 forward 19:45770444-45770469; SaCas9
cagtcttccaacggggccc

SEQ ID NO: 3220 - DNA, 18 bp, Artificial Sequence
  Synthetic: DMPK 5 forward 19:45770445-45770469; SaCas9
agtcttccaacggggccc

SEQ ID NO: 3221 - DNA, 25 bp, Artificial Sequence
  Synthetic: DMPK 5 reverse 19:45770441-45770472; SaCas9
tcgactccggggccccgttggaaga

SEQ ID NO: 3222 - DNA, 24 bp, Artificial Sequence
  Synthetic: DMPK 5 reverse 19:45770442-45770472; SaCas9
cgactccggggccccgttggaaga

SEQ ID NO: 3223 - DNA, 23 bp, Artificial Sequence
  Synthetic: DMPK 5 reverse 19:45770443-45770472; SaCas9
gactccggggccccgttggaaga

SEQ ID NO: 3224 - DNA, 22 bp, Artificial Sequence
  Synthetic: DMPK 5 reverse 19:45770444-45770472; SaCas9
actccggggccccgttggaaga

SEQ ID NO: 3225 - DNA, 21 bp, Artificial Sequence
  Synthetic: DMPK 5 reverse 19:45770445-45770472; SaCas9
ctccggggccccgttggaaga

SEQ ID NO: 3226 - DNA, 20 bp, Artificial Sequence
  Synthetic: DMPK 5 reverse 19:45770446-45770472; SaCas9
tccggggccccgttggaaga

SEQ ID NO: 3227 - DNA, 19 bp, Artificial Sequence
  Synthetic: DMPK 5 reverse 19:45770447-45770472; SaCas9
ccggggccccgttggaaga

SEQ ID NO: 3228 - DNA, 18 bp, Artificial Sequence
  Synthetic: DMPK 5 reverse 19:45770448-45770472; SaCas9
cggggccccgttggaaga

SEQ ID NO: 3229 - DNA, 25 bp, Artificial Sequence
  Synthetic: DMPK 5 forward 19:45770443-45770474; SaCas9
tcagtcttccaacggggccccggag

SEQ ID NO: 3230 - DNA, 24 bp, Artificial Sequence
  Synthetic: DMPK 5 forward 19:45770444-45770474; SaCas9
cagtcttccaacggggccccggag

SEQ ID NO: 3231 - DNA, 23 bp, Artificial Sequence
  Synthetic: DMPK 5 forward 19:45770445-45770474; SaCas9
agtcttccaacggggccccggag

SEQ ID NO: 3232 - DNA, 22 bp, Artificial Sequence
  Synthetic: DMPK 5 forward 19:45770446-45770474; SaCas9
gtcttccaacggggccccggag

SEQ ID NO: 3233 - DNA, 21 bp, Artificial Sequence
  Synthetic: DMPK 5 forward 19:45770447-45770474; SaCas9
tcttccaacggggccccggag

SEQ ID NO: 3234 - DNA, 20 bp, Artificial Sequence
  Synthetic: DMPK 5 forward 19:45770448-45770474; SaCas9
cttccaacggggccccggag

SEQ ID NO: 3235 - DNA, 19 bp, Artificial Sequence
  Synthetic: DMPK 5 forward 19:45770449-45770474; SaCas9
ttccaacggggccccggag

SEQ ID NO: 3236 - DNA, 18 bp, Artificial Sequence
  Synthetic: DMPK 5 forward 19:45770450-45770474; SaCas9
tccaacggggccccggag

SEQ ID NO: 3237 - DNA, 25 bp, Artificial Sequence
  Synthetic: DMPK 5 reverse 19:45770448-45770479; SaCas9
actgtcttcgactccggggccccgt

SEQ ID NO: 3238 - DNA, 24 bp, Artificial Sequence
  Synthetic: DMPK 5 reverse 19:45770449-45770479; SaCas9
ctgtcttcgactccggggccccgt

SEQ ID NO: 3239 - DNA, 23 bp, Artificial Sequence
  Synthetic: DMPK 5 reverse 19:45770450-45770479; SaCas9
tgtcttcgactccggggccccgt

SEQ ID NO: 3240 - DNA, 22 bp, Artificial Sequence
  Synthetic: DMPK 5 reverse 19:45770451-45770479; SaCas9
gtcttcgactccggggccccgt

SEQ ID NO: 3241 - DNA, 21 bp, Artificial Sequence
  Synthetic: DMPK 5 reverse 19:45770452-45770479; SaCas9
tcttcgactccggggccccgt

SEQ ID NO: 3242 - DNA, 20 bp, Artificial Sequence
  Synthetic: DMPK 5 reverse 19:45770453-45770479; SaCas9
cttcgactccggggccccgt

SEQ ID NO: 3243 - DNA, 19 bp, Artificial Sequence
  Synthetic: DMPK 5 reverse 19:45770454-45770479; SaCas9
ttcgactccggggccccgt

SEQ ID NO: 3244 - DNA, 18 bp, Artificial Sequence
  Synthetic: DMPK 5 reverse 19:45770455-45770479; SaCas9
tcgactccggggccccgt

SEQ ID NO: 3245 - DNA, 25 bp, Artificial Sequence
  Synthetic: DMPK 5 reverse 19:45770449-45770480; SaCas9
aactgtcttcgactccggggccccg

SEQ ID NO: 3246 - DNA, 24 bp, Artificial Sequence
  Synthetic: DMPK 5 reverse 19:45770450-45770480; SaCas9
actgtcttcgactccggggccccg

SEQ ID NO: 3247 - DNA, 23 bp, Artificial Sequence
  Synthetic: DMPK 5 reverse 19:45770451-45770480; SaCas9
ctgtcttcgactccggggccccg

SEQ ID NO: 3248 - DNA, 22 bp, Artificial Sequence
  Synthetic: DMPK 5 reverse 19:45770452-45770480; SaCas9
tgtcttcgactccggggccccg

SEQ ID NO: 3249 - DNA, 21 bp, Artificial Sequence
  Synthetic: DMPK 5 reverse 19:45770453-45770480; SaCas9
gtcttcgactccggggccccg

SEQ ID NO: 3250 - DNA, 20 bp, Artificial Sequence
  Synthetic: DMPK 5 reverse 19:45770454-45770480; SaCas9
tcttcgactccggggccccg

SEQ ID NO: 3251 - DNA, 19 bp, Artificial Sequence
  Synthetic: DMPK 5 reverse 19:45770455-45770480; SaCas9
cttcgactccggggccccg

SEQ ID NO: 3252 - DNA, 18 bp, Artificial Sequence
  Synthetic: DMPK 5 reverse 19:45770456-45770480; SaCas9
ttcgactccggggccccg

SEQ ID NO: 3253 - DNA, 25 bp, Artificial Sequence
  Synthetic: DMPK 5 forward 19:45770456-45770487; SaCas9
ggggccccggagtcgaagacagttc

SEQ ID NO: 3254 - DNA, 24 bp, Artificial Sequence
  Synthetic: DMPK 5 forward 19:45770457-45770487; SaCas9
gggccccggagtcgaagacagttc

SEQ ID NO: 3255 - DNA, 23 bp, Artificial Sequence
  Synthetic: DMPK 5 forward 19:45770458-45770487; SaCas9
ggccccggagtcgaagacagttc

SEQ ID NO: 3256 - DNA, 22 bp, Artificial Sequence
  Synthetic: DMPK 5 forward 19:45770459-45770487; SaCas9
gccccggagtcgaagacagttc

SEQ ID NO: 3257 - DNA, 21 bp, Artificial Sequence
  Synthetic: DMPK 5 forward 19:45770460-45770487; SaCas9
ccccggagtcgaagacagttc

SEQ ID NO: 3258 - DNA, 20 bp, Artificial Sequence
  Synthetic: DMPK 5 forward 19:45770461-45770487; SaCas9
cccggagtcgaagacagttc

SEQ ID NO: 3259 - DNA, 19 bp, Artificial Sequence
  Synthetic: DMPK 5 forward 19:45770462-45770487; SaCas9
ccggagtcgaagacagttc

SEQ ID NO: 3260 - DNA, 18 bp, Artificial Sequence
  Synthetic: DMPK 5 forward 19:45770463-45770487; SaCas9
cggagtcgaagacagttc

SEQ ID NO: 3261 - DNA, 25 bp, Artificial Sequence
  Synthetic: DMPK 5 reverse 19:45770459-45770490; SaCas9
tgaaccctagaactgtcttcgactc

SEQ ID NO: 3262 - DNA, 24 bp, Artificial Sequence
  Synthetic: DMPK 5 reverse 19:45770460-45770490; SaCas9
gaaccctagaactgtcttcgactc

SEQ ID NO: 3263 - DNA, 23 bp, Artificial Sequence
  Synthetic: DMPK 5 reverse 19:45770461-45770490; SaCas9
aaccctagaactgtcttcgactc

SEQ ID NO: 3264 - DNA, 22 bp, Artificial Sequence
  Synthetic: DMPK 5 reverse 19:45770462-45770490; SaCas9
accctagaactgtcttcgactc

SEQ ID NO: 3265 - DNA, 21 bp, Artificial Sequence
  Synthetic: DMPK 5 reverse 19:45770463-45770490; SaCas9
ccctagaactgtcttcgactc

SEQ ID NO: 3266 - DNA, 20 bp, Artificial Sequence
  Synthetic: DMPK 5 reverse 19:45770464-45770490; SaCas9
cctagaactgtcttcgactc

SEQ ID NO: 3267 - DNA, 19 bp, Artificial Sequence
  Synthetic: DMPK 5 reverse 19:45770465-45770490; SaCas9
ctagaactgtcttcgactc

SEQ ID NO: 3268 - DNA, 18 bp, Artificial Sequence
  Synthetic: DMPK 5 reverse 19:45770466-45770490; SaCas9
tagaactgtcttcgactc

SEQ ID NO: 3269 - DNA, 25 bp, Artificial Sequence
  Synthetic: DMPK 5 reverse 19:45770460-45770491; SaCas9
ctgaaccctagaactgtcttcgact

SEQ ID NO: 3270 - DNA, 24 bp, Artificial Sequence
  Synthetic: DMPK 5 reverse 19:45770461-45770491; SaCas9
tgaaccctagaactgtcttcgact

SEQ ID NO: 3271 - DNA, 23 bp, Artificial Sequence
  Synthetic: DMPK 5 reverse 19:45770462-45770491; SaCas9
gaaccctagaactgtcttcgact

SEQ ID NO: 3272 - DNA, 22 bp, Artificial Sequence
  Synthetic: DMPK 5 reverse 19:45770463-45770491; SaCas9
aaccctagaactgtcttcgact

SEQ ID NO: 3273 - DNA, 21 bp, Artificial Sequence
  Synthetic: DMPK 5 reverse 19:45770464-45770491; SaCas9
accctagaactgtcttcgact

SEQ ID NO: 3274 - DNA, 20 bp, Artificial Sequence
  Synthetic: DMPK 5 reverse 19:45770465-45770491; SaCas9
ccctagaactgtcttcgact

SEQ ID NO: 3275 - DNA, 19 bp, Artificial Sequence
  Synthetic: DMPK 5 reverse 19:45770466-45770491; SaCas9
cctagaactgtcttcgact

SEQ ID NO: 3276 - DNA, 18 bp, Artificial Sequence
  Synthetic: DMPK 5 reverse 19:45770467-45770491; SaCas9
ctagaactgtcttcgact

SEQ ID NO: 3277 - DNA, 25 bp, Artificial Sequence
  Synthetic: DMPK 5 forward 19:45770463-45770494; SaCas9
cggagtcgaagacagttctagggtt

SEQ ID NO: 3278 - DNA, 24 bp, Artificial Sequence
  Synthetic: DMPK 5 forward 19:45770464-45770494; SaCas9
ggagtcgaagacagttctagggtt

SEQ ID NO: 3279 - DNA, 23 bp, Artificial Sequence
  Synthetic: DMPK 5 forward 19:45770465-45770494; SaCas9
gagtcgaagacagttctagggtt

SEQ ID NO: 3280 - DNA, 22 bp, Artificial Sequence
  Synthetic: DMPK 5 forward 19:45770466-45770494; SaCas9
agtcgaagacagttctagggtt

SEQ ID NO: 3281 - DNA, 21 bp, Artificial Sequence
  Synthetic: DMPK 5 forward 19:45770467-45770494; SaCas9
gtcgaagacagttctagggtt

SEQ ID NO: 3282 - DNA, 20 bp, Artificial Sequence
  Synthetic: DMPK 5 forward 19:45770468-45770494; SaCas9
tcgaagacagttctagggtt

SEQ ID NO: 3283 - DNA, 19 bp, Artificial Sequence
  Synthetic: DMPK 5 forward 19:45770469-45770494; SaCas9
cgaagacagttctagggtt

SEQ ID NO: 3284 - DNA, 18 bp, Artificial Sequence
  Synthetic: DMPK 5 forward 19:45770470-45770494; SaCas9
gaagacagttctagggtt

SEQ ID NO: 3285 - DNA, 25 bp, Artificial Sequence
  Synthetic: DMPK 5 forward 19:45770464-45770495; SaCas9
ggagtcgaagacagttctagggttc

SEQ ID NO: 3286 - DNA, 24 bp, Artificial Sequence
  Synthetic: DMPK 5 forward 19:45770465-45770495; SaCas9
gagtcgaagacagttctagggttc

SEQ ID NO: 3287 - DNA, 23 bp, Artificial Sequence
  Synthetic: DMPK 5 forward 19:45770466-45770495; SaCas9
agtcgaagacagttctagggttc

SEQ ID NO: 3288 - DNA, 22 bp, Artificial Sequence
  Synthetic: DMPK 5 forward 19:45770467-45770495; SaCas9
gtcgaagacagttctagggttc

SEQ ID NO: 3289 - DNA, 21 bp, Artificial Sequence
  Synthetic: DMPK 5 forward 19:45770468-45770495; SaCas9
tcgaagacagttctagggttc

SEQ ID NO: 3290 - DNA, 20 bp, Artificial Sequence
  Synthetic: DMPK 5 forward 19:45770469-45770495; SaCas9
cgaagacagttctagggttc

SEQ ID NO: 3291 - DNA, 19 bp, Artificial Sequence
  Synthetic: DMPK 5 forward 19:45770470-45770495; SaCas9
gaagacagttctagggttc

SEQ ID NO: 3292 - DNA, 18 bp, Artificial Sequence
  Synthetic: DMPK 5 forward 19:45770471-45770495; SaCas9
aagacagttctagggttc

SEQ ID NO: 3293 - DNA, 25 bp, Artificial Sequence
  Synthetic: DMPK 5 forward 19:45770465-45770496; SaCas9
gagtcgaagacagttctagggttca

SEQ ID NO: 3294 - DNA, 24 bp, Artificial Sequence
  Synthetic: DMPK 5 forward 19:45770466-45770496; SaCas9
agtcgaagacagttctagggttca

SEQ ID NO: 3295 - DNA, 23 bp, Artificial Sequence
  Synthetic: DMPK 5 forward 19:45770467-45770496; SaCas9
gtcgaagacagttctagggttca

SEQ ID NO: 3296 - DNA, 22 bp, Artificial Sequence
  Synthetic: DMPK 5 forward 19:45770468-45770496; SaCas9
tcgaagacagttctagggttca

SEQ ID NO: 3297 - DNA, 21 bp, Artificial Sequence
  Synthetic: DMPK 5 forward 19:45770469-45770496; SaCas9
cgaagacagttctagggttca

SEQ ID NO: 3298 - DNA, 20 bp, Artificial Sequence
  Synthetic: DMPK 5 forward 19:45770470-45770496; SaCas9
gaagacagttctagggttca

SEQ ID NO: 3299 - DNA, 19 bp, Artificial Sequence
  Synthetic: DMPK 5 forward 19:45770471-45770496; SaCas9
aagacagttctagggttca

SEQ ID NO: 3300 - DNA, 18 bp, Artificial Sequence
  Synthetic: DMPK 5 forward 19:45770472-45770496; SaCas9
agacagttctagggttca

SEQ ID NO: 3301 - DNA, 25 bp, Artificial Sequence
  Synthetic: DMPK 5 reverse 19:45770477-45770508; SaCas9
ggagccgcccgcgctccctgaaccc

SEQ ID NO: 3302 - DNA, 24 bp, Artificial Sequence
  Synthetic: DMPK 5 reverse 19:45770478-45770508; SaCas9
gagccgcccgcgctccctgaaccc

SEQ ID NO: 3303 - DNA, 23 bp, Artificial Sequence
  Synthetic: DMPK 5 reverse 19:45770479-45770508; SaCas9
agccgcccgcgctccctgaaccc

SEQ ID NO: 3304 - DNA, 22 bp, Artificial Sequence
  Synthetic: DMPK 5 reverse 19:45770480-45770508; SaCas9
gccgcccgcgctccctgaaccc

SEQ ID NO: 3305 - DNA, 21 bp, Artificial Sequence
  Synthetic: DMPK 5 reverse 19:45770481-45770508; SaCas9
ccgcccgcgctccctgaaccc

SEQ ID NO: 3306 - DNA, 20 bp, Artificial Sequence
  Synthetic: DMPK 5 reverse 19:45770482-45770508; SaCas9
cgcccgcgctccctgaaccc

SEQ ID NO: 3307 - DNA, 19 bp, Artificial Sequence
  Synthetic: DMPK 5 reverse 19:45770483-45770508; SaCas9
gcccgcgctccctgaaccc

SEQ ID NO: 3308 - DNA, 18 bp, Artificial Sequence
  Synthetic: DMPK 5 reverse 19:45770484-45770508; SaCas9
cccgcgctccctgaaccc

SEQ ID NO: 3309 - DNA, 25 bp, Artificial Sequence
  Synthetic: DMPK 5 forward 19:45770245-45770273; SpCas9
gcagcagcagcagcagcagcattcc

SEQ ID NO: 3310 - DNA, 24 bp, Artificial Sequence
  Synthetic: DMPK 5 forward 19:45770246-45770273; SpCas9
cagcagcagcagcagcagcattcc

SEQ ID NO: 3311 - DNA, 23 bp, Artificial Sequence
  Synthetic: DMPK 5 forward 19:45770247-45770273; SpCas9
agcagcagcagcagcagcattcc

SEQ ID NO: 3312 - DNA, 22 bp, Artificial Sequence
  Synthetic: DMPK 5 forward 19:45770248-45770273; SpCas9
gcagcagcagcagcagcattcc

SEQ ID NO: 3313 - DNA, 21 bp, Artificial Sequence
  Synthetic: DMPK 5 forward 19:45770249-45770273; SpCas9
cagcagcagcagcagcattcc

SEQ ID NO: 3314 - DNA, 20 bp, Artificial Sequence
  Synthetic: DMPK 5 forward 19:45770250-45770273; SpCas9
agcagcagcagcagcattcc

SEQ ID NO: 3315 - DNA, 19 bp, Artificial Sequence
  Synthetic: DMPK 5 forward 19:45770251-45770273; SpCas9
gcagcagcagcagcattcc

SEQ ID NO: 3316 - DNA, 18 bp, Artificial Sequence
  Synthetic: DMPK 5 forward 19:45770252-45770273; SpCas9
cagcagcagcagcattcc

SEQ ID NO: 3317 - DNA, 25 bp, Artificial Sequence
  Synthetic: DMPK 5 forward 19:45770252-45770280; SpCas9
cagcagcagcagcattcccggctac

SEQ ID NO: 3318 - DNA, 24 bp, Artificial Sequence
  Synthetic: DMPK 5 forward 19:45770253-45770280; SpCas9
agcagcagcagcattcccggctac

SEQ ID NO: 3319 - DNA, 23 bp, Artificial Sequence
  Synthetic: DMPK 5 forward 19:45770254-45770280; SpCas9
gcagcagcagcattcccggctac

SEQ ID NO: 3320 - DNA, 22 bp, Artificial Sequence
  Synthetic: DMPK 5 forward 19:45770255-45770280; SpCas9
cagcagcagcattcccggctac

SEQ ID NO: 3321 - DNA, 21 bp, Artificial Sequence
  Synthetic: DMPK 5 forward 19:45770256-45770280; SpCas9
agcagcagcattcccggctac

SEQ ID NO: 3322 - DNA, 20 bp, Artificial Sequence
  Synthetic: DMPK 5 forward 19:45770257-45770280; SpCas9
gcagcagcattcccggctac

SEQ ID NO: 3323 - DNA, 19 bp, Artificial Sequence
  Synthetic: DMPK 5 forward 19:45770258-45770280; SpCas9
cagcagcattcccggctac

SEQ ID NO: 3324 - DNA, 18 bp, Artificial Sequence
  Synthetic: DMPK 5 forward 19:45770259-45770280; SpCas9
agcagcattcccggctac

SEQ ID NO: 3325 - DNA, 25 bp, Artificial Sequence
  Synthetic: DMPK 5 forward 19:45770253-45770281; SpCas9
agcagcagcagcattcccggctaca

SEQ ID NO: 3326 - DNA, 24 bp, Artificial Sequence
  Synthetic: DMPK 5 forward 19:45770254-45770281; SpCas9
gcagcagcagcattcccggctaca

SEQ ID NO: 3327 - DNA, 23 bp, Artificial Sequence
  Synthetic: DMPK 5 forward 19:45770255-45770281; SpCas9
cagcagcagcattcccggctaca

SEQ ID NO: 3328 - DNA, 22 bp, Artificial Sequence
  Synthetic: DMPK 5 forward 19:45770256-45770281; SpCas9
agcagcagcattcccggctaca

SEQ ID NO: 3329 - DNA, 21 bp, Artificial Sequence
  Synthetic: DMPK 5 forward 19:45770257-45770281; SpCas9
gcagcagcattcccggctaca

SEQ ID NO: 3330 - DNA, 20 bp, Artificial Sequence
  Synthetic: DMPK 5 forward 19:45770258-45770281; SpCas9
cagcagcattcccggctaca

SEQ ID NO: 3331 - DNA, 19 bp, Artificial Sequence
  Synthetic: DMPK 5 forward 19:45770259-45770281; SpCas9
agcagcattcccggctaca

SEQ ID NO: 3332 - DNA, 18 bp, Artificial Sequence
  Synthetic: DMPK 5 forward 19:45770260-45770281; SpCas9
gcagcattcccggctaca

SEQ ID NO: 3333 - DNA, 25 bp, Artificial Sequence
  Synthetic: DMPK 5 forward 19:45770263-45770291; SpCas9
gcattcccggctacaaggacccttc

SEQ ID NO: 3334 - DNA, 24 bp, Artificial Sequence
  Synthetic: DMPK 5 forward 19:45770264-45770291; SpCas9
cattcccggctacaaggacccttc

SEQ ID NO: 3335 - DNA, 23 bp, Artificial Sequence
  Synthetic: DMPK 5 forward 19:45770265-45770291; SpCas9
attcccggctacaaggacccttc

SEQ ID NO: 3336 - DNA, 22 bp, Artificial Sequence
  Synthetic: DMPK 5 forward 19:45770266-45770291; SpCas9
ttcccggctacaaggacccttc

SEQ ID NO: 3337 - DNA, 21 bp, Artificial Sequence
  Synthetic: DMPK 5 forward 19:45770267-45770291; SpCas9
tcccggctacaaggacccttc

SEQ ID NO: 3338 - DNA, 20 bp, Artificial Sequence
  Synthetic: DMPK 5 forward 19:45770268-45770291; SpCas9
cccggctacaaggacccttc

SEQ ID NO: 3339 - DNA, 19 bp, Artificial Sequence
  Synthetic: DMPK 5 forward 19:45770269-45770291; SpCas9
ccggctacaaggacccttc

SEQ ID NO: 3340 - DNA, 18 bp, Artificial Sequence
  Synthetic: DMPK 5 forward 19:45770270-45770291; SpCas9
cggctacaaggacccttc

SEQ ID NO: 3341 - DNA, 25 bp, Artificial Sequence
  Synthetic: DMPK 5 reverse 19:45770268-45770296; SpCas9
cggggctcgaagggtccttgtagcc

SEQ ID NO: 3342 - DNA, 24 bp, Artificial Sequence
  Synthetic: DMPK 5 reverse 19:45770269-45770296; SpCas9
ggggctcgaagggtccttgtagcc

SEQ ID NO: 3343 - DNA, 23 bp, Artificial Sequence
  Synthetic: DMPK 5 reverse 19:45770270-45770296; SpCas9
gggctcgaagggtccttgtagcc

SEQ ID NO: 3344 - DNA, 22 bp, Artificial Sequence
  Synthetic: DMPK 5 reverse 19:45770271-45770296; SpCas9
ggctcgaagggtccttgtagcc

SEQ ID NO: 3345 - DNA, 21 bp, Artificial Sequence
  Synthetic: DMPK 5 reverse 19:45770272-45770296; SpCas9
gctcgaagggtccttgtagcc

SEQ ID NO: 3346 - DNA, 20 bp, Artificial Sequence
  Synthetic: DMPK 5 reverse 19:45770273-45770296; SpCas9
ctcgaagggtccttgtagcc

SEQ ID NO: 3347 - DNA, 19 bp, Artificial Sequence
  Synthetic: DMPK 5 reverse 19:45770274-45770296; SpCas9
tcgaagggtccttgtagcc

SEQ ID NO: 3348 - DNA, 18 bp, Artificial Sequence
  Synthetic: DMPK 5 reverse 19:45770275-45770296; SpCas9
cgaagggtccttgtagcc

SEQ ID NO: 3349 - DNA, 25 bp, Artificial Sequence
  Synthetic: DMPK 5 reverse 19:45770269-45770297; SpCas9
acggggctcgaagggtccttgtagc

SEQ ID NO: 3350 - DNA, 24 bp, Artificial Sequence
  Synthetic: DMPK 5 reverse 19:45770270-45770297; SpCas9
cggggctcgaagggtccttgtagc

SEQ ID NO: 3351 - DNA, 23 bp, Artificial Sequence
  Synthetic: DMPK 5 reverse 19:45770271-45770297; SpCas9
ggggctcgaagggtccttgtagc

SEQ ID NO: 3352 - DNA, 22 bp, Artificial Sequence
  Synthetic: DMPK 5 reverse 19:45770272-45770297; SpCas9
gggctcgaagggtccttgtagc

SEQ ID NO: 3353 - DNA, 21 bp, Artificial Sequence
  Synthetic: DMPK 5 reverse 19:45770273-45770297; SpCas9
ggctcgaagggtccttgtagc

SEQ ID NO: 3354 - DNA, 20 bp, Artificial Sequence
  Synthetic: DMPK 5 reverse 19:45770274-45770297; SpCas9
gctcgaagggtccttgtagc

SEQ ID NO: 3355 - DNA, 19 bp, Artificial Sequence
  Synthetic: DMPK 5 reverse 19:45770275-45770297; SpCas9
ctcgaagggtccttgtagc

SEQ ID NO: 3356 - DNA, 18 bp, Artificial Sequence
  Synthetic: DMPK 5 reverse 19:45770276-45770297; SpCas9
tcgaagggtccttgtagc

SEQ ID NO: 3357 - DNA, 25 bp, Artificial Sequence
  Synthetic: DMPK 5 reverse 19:45770273-45770301; SpCas9
gcgaacggggctcgaagggtccttg

SEQ ID NO: 3358 - DNA, 24 bp, Artificial Sequence
  Synthetic: DMPK 5 reverse 19:45770274-45770301; SpCas9
cgaacggggctcgaagggtccttg

SEQ ID NO: 3359 - DNA, 23 bp, Artificial Sequence
  Synthetic: DMPK 5 reverse 19:45770275-45770301; SpCas9
gaacggggctcgaagggtccttg

SEQ ID NO: 3360 - DNA, 22 bp, Artificial Sequence
  Synthetic: DMPK 5 reverse 19:45770276-45770301; SpCas9
aacggggctcgaagggtccttg

SEQ ID NO: 3361 - DNA, 21 bp, Artificial Sequence
  Synthetic: DMPK 5 reverse 19:45770277-45770301; SpCas9
acggggctcgaagggtccttg

SEQ ID NO: 3362 - DNA, 20 bp, Artificial Sequence
  Synthetic: DMPK 5 reverse 19:45770278-45770301; SpCas9
cggggctcgaagggtccttg

SEQ ID NO: 3363 - DNA, 19 bp, Artificial Sequence
  Synthetic: DMPK 5 reverse 19:45770279-45770301; SpCas9
ggggctcgaagggtccttg

SEQ ID NO: 3364 - DNA, 18 bp, Artificial Sequence
  Synthetic: DMPK 5 reverse 19:45770280-45770301; SpCas9
gggctcgaagggtccttg

SEQ ID NO: 3365 - DNA, 25 bp, Artificial Sequence
  Synthetic: DMPK 5 forward 19:45770276-45770304; SpCas9
caaggacccttcgagccccgttcgc

SEQ ID NO: 3366 - DNA, 24 bp, Artificial Sequence
  Synthetic: DMPK 5 forward 19:45770277-45770304; SpCas9
aaggacccttcgagccccgttcgc

SEQ ID NO: 3367 - DNA, 23 bp, Artificial Sequence
  Synthetic: DMPK 5 forward 19:45770278-45770304; SpCas9
aggacccttcgagccccgttcgc

SEQ ID NO: 3368 - DNA, 22 bp, Artificial Sequence
  Synthetic: DMPK 5 forward 19:45770279-45770304; SpCas9
ggacccttcgagccccgttcgc

SEQ ID NO: 3369 - DNA, 21 bp, Artificial Sequence
  Synthetic: DMPK 5 forward 19:45770280-45770304; SpCas9
gacccttcgagccccgttcgc

SEQ ID NO: 3370 - DNA, 20 bp, Artificial Sequence
  Synthetic: DMPK 5 forward 19:45770281-45770304; SpCas9
acccttcgagccccgttcgc

SEQ ID NO: 3371 - DNA, 19 bp, Artificial Sequence
  Synthetic: DMPK 5 forward 19:45770282-45770304; SpCas9
cccttcgagccccgttcgc

SEQ ID NO: 3372 - DNA, 18 bp, Artificial Sequence
  Synthetic: DMPK 5 forward 19:45770283-45770304; SpCas9
ccttcgagccccgttcgc

SEQ ID NO: 3373 - DNA, 25 bp, Artificial Sequence
  Synthetic: DMPK 5 forward 19:45770282-45770310; SpCas9
cccttcgagccccgttcgccggccg

SEQ ID NO: 3374 - DNA, 24 bp, Artificial Sequence
  Synthetic: DMPK 5 forward 19:45770283-45770310; SpCas9
ccttcgagccccgttcgccggccg

SEQ ID NO: 3375 - DNA, 23 bp, Artificial Sequence
  Synthetic: DMPK 5 forward 19:45770284-45770310; SpCas9
cttcgagccccgttcgccggccg

SEQ ID NO: 3376 - DNA, 22 bp, Artificial Sequence
  Synthetic: DMPK 5 forward 19:45770285-45770310; SpCas9
ttcgagccccgttcgccggccg

SEQ ID NO: 3377 - DNA, 21 bp, Artificial Sequence
  Synthetic: DMPK 5 forward 19:45770286-45770310; SpCas9
tcgagccccgttcgccggccg

SEQ ID NO: 3378 - DNA, 20 bp, Artificial Sequence
  Synthetic: DMPK 5 forward 19:45770287-45770310; SpCas9
cgagccccgttcgccggccg

SEQ ID NO: 3379 - DNA, 19 bp, Artificial Sequence
  Synthetic: DMPK 5 forward 19:45770288-45770310; SpCas9
gagccccgttcgccggccg

SEQ ID NO: 3380 - DNA, 18 bp, Artificial Sequence
  Synthetic: DMPK 5 forward 19:45770289-45770310; SpCas9
agccccgttcgccggccg

SEQ ID NO: 3381 - DNA, 25 bp, Artificial Sequence
  Synthetic: DMPK 5 reverse 19:45770282-45770310; SpCas9
ccgcggccggcgaacggggctcgaa

SEQ ID NO: 3382 - DNA, 24 bp, Artificial Sequence
  Synthetic: DMPK 5 reverse 19:45770283-45770310; SpCas9
cgcggccggcgaacggggctcgaa

SEQ ID NO: 3383 - DNA, 23 bp, Artificial Sequence
  Synthetic: DMPK 5 reverse 19:45770284-45770310; SpCas9
gcggccggcgaacggggctcgaa

SEQ ID NO: 3384 - DNA, 22 bp, Artificial Sequence
  Synthetic: DMPK 5 reverse 19:45770285-45770310; SpCas9
cggccggcgaacggggctcgaa

SEQ ID NO: 3385 - DNA, 21 bp, Artificial Sequence
  Synthetic: DMPK 5 reverse 19:45770286-45770310; SpCas9
ggccggcgaacggggctcgaa

SEQ ID NO: 3386 - DNA, 20 bp, Artificial Sequence
  Synthetic: DMPK 5 reverse 19:45770287-45770310; SpCas9
gccggcgaacggggctcgaa

SEQ ID NO: 3387 - DNA, 19 bp, Artificial Sequence
  Synthetic: DMPK 5 reverse 19:45770288-45770310; SpCas9
ccggcgaacggggctcgaa

SEQ ID NO: 3388 - DNA, 18 bp, Artificial Sequence
  Synthetic: DMPK 5 reverse 19:45770289-45770310; SpCas9
cggcgaacggggctcgaa

SEQ ID NO: 3389 - DNA, 25 bp, Artificial Sequence
  Synthetic: DMPK 5 reverse 19:45770283-45770311; SpCas9
tccgcggccggcgaacggggctcga

SEQ ID NO: 3390 - DNA, 24 bp, Artificial Sequence
  Synthetic: DMPK 5 reverse 19:45770284-45770311; SpCas9
ccgcggccggcgaacggggctcga

SEQ ID NO: 3391 - DNA, 23 bp, Artificial Sequence
  Synthetic: DMPK 5 reverse 19:45770285-45770311; SpCas9
cgcggccggcgaacggggctcga

SEQ ID NO: 3392 - DNA, 22 bp, Artificial Sequence
  Synthetic: DMPK 5 reverse 19:45770286-45770311; SpCas9
gcggccggcgaacggggctcga

SEQ ID NO: 3393 - DNA, 21 bp, Artificial Sequence
  Synthetic: DMPK 5 reverse 19:45770287-45770311; SpCas9
cggccggcgaacggggctcga

SEQ ID NO: 3394 - DNA, 20 bp, Artificial Sequence
  Synthetic: DMPK 5 reverse 19:45770288-45770311; SpCas9
ggccggcgaacggggctcga

SEQ ID NO: 3395 - DNA, 19 bp, Artificial Sequence
  Synthetic: DMPK 5 reverse 19:45770289-45770311; SpCas9
gccggcgaacggggctcga

SEQ ID NO: 3396 - DNA, 18 bp, Artificial Sequence
  Synthetic: DMPK 5 reverse 19:45770290-45770311; SpCas9
ccggcgaacggggctcga

SEQ ID NO: 3397 - DNA, 25 bp, Artificial Sequence
  Synthetic: DMPK 5 reverse 19:45770284-45770312; SpCas9
gtccgcggccggcgaacggggctcg

SEQ ID NO: 3398 - DNA, 24 bp, Artificial Sequence
  Synthetic: DMPK 5 reverse 19:45770285-45770312; SpCas9
tccgcggccggcgaacggggctcg

SEQ ID NO: 3399 - DNA, 23 bp, Artificial Sequence
  Synthetic: DMPK 5 reverse 19:45770286-45770312; SpCas9
ccgcggccggcgaacggggctcg

SEQ ID NO: 3400 - DNA, 22 bp, Artificial Sequence
  Synthetic: DMPK 5 reverse 19:45770287-45770312; SpCas9
cgcggccggcgaacggggctcg

SEQ ID NO: 3401 - DNA, 21 bp, Artificial Sequence
  Synthetic: DMPK 5 reverse 19:45770288-45770312; SpCas9
gcggccggcgaacggggctcg

SEQ ID NO: 3402 - DNA, 20 bp, Artificial Sequence
  Synthetic: DMPK 5 reverse 19:45770289-45770312; SpCas9
cggccggcgaacggggctcg

SEQ ID NO: 3403 - DNA, 19 bp, Artificial Sequence
  Synthetic: DMPK 5 reverse 19:45770290-45770312; SpCas9
ggccggcgaacggggctcg

SEQ ID NO: 3404 - DNA, 18 bp, Artificial Sequence
  Synthetic: DMPK 5 reverse 19:45770291-45770312; SpCas9
gccggcgaacggggctcg

SEQ ID NO: 3405 - DNA, 25 bp, Artificial Sequence
  Synthetic: DMPK 5 forward 19:45770288-45770316; SpCas9
gagccccgttcgccggccgcggacc

SEQ ID NO: 3406 - DNA, 24 bp, Artificial Sequence
  Synthetic: DMPK 5 forward 19:45770289-45770316; SpCas9
agccccgttcgccggccgcggacc

SEQ ID NO: 3407 - DNA, 23 bp, Artificial Sequence
  Synthetic: DMPK 5 forward 19:45770290-45770316; SpCas9
gccccgttcgccggccgcggacc

SEQ ID NO: 3408 - DNA, 22 bp, Artificial Sequence
  Synthetic: DMPK 5 forward 19:45770291-45770316; SpCas9
ccccgttcgccggccgcggacc

SEQ ID NO: 3409 - DNA, 21 bp, Artificial Sequence
  Synthetic: DMPK 5 forward 19:45770292-45770316; SpCas9
cccgttcgccggccgcggacc

SEQ ID NO: 3410 - DNA, 20 bp, Artificial Sequence
  Synthetic: DMPK 5 forward 19:45770293-45770316; SpCas9
ccgttcgccggccgcggacc

SEQ ID NO: 3411 - DNA, 19 bp, Artificial Sequence
  Synthetic: DMPK 5 forward 19:45770294-45770316; SpCas9
cgttcgccggccgcggacc

SEQ ID NO: 3412 - DNA, 18 bp, Artificial Sequence
  Synthetic: DMPK 5 forward 19:45770295-45770316; SpCas9
gttcgccggccgcggacc

SEQ ID NO: 3413 - DNA, 25 bp, Artificial Sequence
  Synthetic: DMPK 5 reverse 19:45770291-45770319; SpCas9
gggccgggtccgcggccggcgaacg

SEQ ID NO: 3414 - DNA, 24 bp, Artificial Sequence
  Synthetic: DMPK 5 reverse 19:45770292-45770319; SpCas9
ggccgggtccgcggccggcgaacg

SEQ ID NO: 3415 - DNA, 23 bp, Artificial Sequence
  Synthetic: DMPK 5 reverse 19:45770293-45770319; SpCas9
gccgggtccgcggccggcgaacg

SEQ ID NO: 3416 - DNA, 22 bp, Artificial Sequence
  Synthetic: DMPK 5 reverse 19:45770294-45770319; SpCas9
ccgggtccgcggccggcgaacg

SEQ ID NO: 3417 - DNA, 21 bp, Artificial Sequence
  Synthetic: DMPK 5 reverse 19:45770295-45770319; SpCas9
cgggtccgcggccggcgaacg

SEQ ID NO: 3418 - DNA, 20 bp, Artificial Sequence
  Synthetic: DMPK 5 reverse 19:45770296-45770319; SpCas9
gggtccgcggccggcgaacg

SEQ ID NO: 3419 - DNA, 19 bp, Artificial Sequence
  Synthetic: DMPK 5 reverse 19:45770297-45770319; SpCas9
ggtccgcggccggcgaacg

SEQ ID NO: 3420 - DNA, 18 bp, Artificial Sequence
  Synthetic: DMPK 5 reverse 19:45770298-45770319; SpCas9
gtccgcggccggcgaacg

SEQ ID NO: 3421 - DNA, 25 bp, Artificial Sequence
  Synthetic: DMPK 5 reverse 19:45770292-45770320; SpCas9
ggggccgggtccgcggccggcgaac

SEQ ID NO: 3422 - DNA, 24 bp, Artificial Sequence
  Synthetic: DMPK 5 reverse 19:45770293-45770320; SpCas9
gggccgggtccgcggccggcgaac

SEQ ID NO: 3423 - DNA, 23 bp, Artificial Sequence
  Synthetic: DMPK 5 reverse 19:45770294-45770320; SpCas9
ggccgggtccgcggccggcgaac

SEQ ID NO: 3424 - DNA, 22 bp, Artificial Sequence
  Synthetic: DMPK 5 reverse 19:45770295-45770320; SpCas9
gccgggtccgcggccggcgaac

SEQ ID NO: 3425 - DNA, 21 bp, Artificial Sequence
  Synthetic: DMPK 5 reverse 19:45770296-45770320; SpCas9
ccgggtccgcggccggcgaac

SEQ ID NO: 3426 - DNA, 20 bp, Artificial Sequence
  Synthetic: DMPK 5 reverse 19:45770297-45770320; SpCas9
cgggtccgcggccggcgaac

SEQ ID NO: 3427 - DNA, 19 bp, Artificial Sequence
  Synthetic: DMPK 5 reverse 19:45770298-45770320; SpCas9
gggtccgcggccggcgaac

SEQ ID NO: 3428 - DNA, 18 bp, Artificial Sequence
  Synthetic: DMPK 5 reverse 19:45770299-45770320; SpCas9
ggtccgcggccggcgaac

SEQ ID NO: 3429 - DNA, 25 bp, Artificial Sequence
  Synthetic: DMPK 5 reverse 19:45770293-45770321; SpCas9
aggggccgggtccgcggccggcgaa

SEQ ID NO: 3430 - DNA, 24 bp, Artificial Sequence
  Synthetic: DMPK 5 reverse 19:45770294-45770321; SpCas9
ggggccgggtccgcggccggcgaa

SEQ ID NO: 3431 - DNA, 23 bp, Artificial Sequence
  Synthetic: DMPK 5 reverse 19:45770295-45770321; SpCas9
gggccgggtccgcggccggcgaa

SEQ ID NO: 3432 - DNA, 22 bp, Artificial Sequence
  Synthetic: DMPK 5 reverse 19:45770296-45770321; SpCas9
ggccgggtccgcggccggcgaa

SEQ ID NO: 3433 - DNA, 21 bp, Artificial Sequence
  Synthetic: DMPK 5 reverse 19:45770297-45770321; SpCas9
gccgggtccgcggccggcgaa

SEQ ID NO: 3434 - DNA, 20 bp, Artificial Sequence
  Synthetic: DMPK 5 reverse 19:45770298-45770321; SpCas9
ccgggtccgcggccggcgaa

SEQ ID NO: 3435 - DNA, 19 bp, Artificial Sequence
  Synthetic: DMPK 5 reverse 19:45770299-45770321; SpCas9
cgggtccgcggccggcgaa

SEQ ID NO: 3436 - DNA, 18 bp, Artificial Sequence
  Synthetic: DMPK 5 reverse 19:45770300-45770321; SpCas9
gggtccgcggccggcgaa

SEQ ID NO: 3437 - DNA, 25 bp, Artificial Sequence
  Synthetic: DMPK 5 reverse 19:45770300-45770328; SpCas9
gggagggaggggccgggtccgcggc

SEQ ID NO: 3438 - DNA, 24 bp, Artificial Sequence
  Synthetic: DMPK 5 reverse 19:45770301-45770328; SpCas9
ggagggaggggccgggtccgcggc

SEQ ID NO: 3439 - DNA, 23 bp, Artificial Sequence
  Synthetic: DMPK 5 reverse 19:45770302-45770328; SpCas9
gagggaggggccgggtccgcggc

SEQ ID NO: 3440 - DNA, 22 bp, Artificial Sequence
  Synthetic: DMPK 5 reverse 19:45770303-45770328; SpCas9
agggaggggccgggtccgcggc

SEQ ID NO: 3441 - DNA, 21 bp, Artificial Sequence
  Synthetic: DMPK 5 reverse 19:45770304-45770328; SpCas9
gggaggggccgggtccgcggc

SEQ ID NO: 3442 - DNA, 20 bp, Artificial Sequence
  Synthetic: DMPK 5 reverse 19:45770305-45770328; SpCas9
ggaggggccgggtccgcggc

SEQ ID NO: 3443 - DNA, 19 bp, Artificial Sequence
  Synthetic: DMPK 5 reverse 19:45770306-45770328; SpCas9
gaggggccgggtccgcggc

SEQ ID NO: 3444 - DNA, 18 bp, Artificial Sequence
  Synthetic: DMPK 5 reverse 19:45770307-45770328; SpCas9
aggggccgggtccgcggc

SEQ ID NO: 3445 - DNA, 25 bp, Artificial Sequence
  Synthetic: DMPK 5 forward 19:45770303-45770331; SpCas9
gccgcggacccggcccctccctccc

SEQ ID NO: 3446 - DNA, 24 bp, Artificial Sequence
  Synthetic: DMPK 5 forward 19:45770304-45770331; SpCas9
ccgcggacccggcccctccctccc

SEQ ID NO: 3447 - DNA, 23 bp, Artificial Sequence
  Synthetic: DMPK 5 forward 19:45770305-45770331; SpCas9
cgcggacccggcccctccctccc

SEQ ID NO: 3448 - DNA, 22 bp, Artificial Sequence
  Synthetic: DMPK 5 forward 19:45770306-45770331; SpCas9
gcggacccggcccctccctccc

SEQ ID NO: 3449 - DNA, 21 bp, Artificial Sequence
  Synthetic: DMPK 5 forward 19:45770307-45770331; SpCas9
cggacccggcccctccctccc

SEQ ID NO: 3450 - DNA, 20 bp, Artificial Sequence
  Synthetic: DMPK 5 forward 19:45770308-45770331; SpCas9
ggacccggcccctccctccc

SEQ ID NO: 3451 - DNA, 19 bp, Artificial Sequence
  Synthetic: DMPK 5 forward 19:45770309-45770331; SpCas9
gacccggcccctccctccc

SEQ ID NO: 3452 - DNA, 18 bp, Artificial Sequence
  Synthetic: DMPK 5 forward 19:45770310-45770331; SpCas9
acccggcccctccctccc

SEQ ID NO: 3453 - DNA, 25 bp, Artificial Sequence
  Synthetic: DMPK 5 reverse 19:45770304-45770332; SpCas9
gccggggagggaggggccgggtccg

SEQ ID NO: 3454 - DNA, 24 bp, Artificial Sequence
  Synthetic: DMPK 5 reverse 19:45770305-45770332; SpCas9
ccggggagggaggggccgggtccg

SEQ ID NO: 3455 - DNA, 23 bp, Artificial Sequence
  Synthetic: DMPK 5 reverse 19:45770306-45770332; SpCas9
cggggagggaggggccgggtccg

SEQ ID NO: 3456 - DNA, 22 bp, Artificial Sequence
  Synthetic: DMPK 5 reverse 19:45770307-45770332; SpCas9
ggggagggaggggccgggtccg

SEQ ID NO: 3457 - DNA, 21 bp, Artificial Sequence
  Synthetic: DMPK 5 reverse 19:45770308-45770332; SpCas9
gggagggaggggccgggtccg

SEQ ID NO: 3458 - DNA, 20 bp, Artificial Sequence
  Synthetic: DMPK 5 reverse 19:45770309-45770332; SpCas9
ggagggaggggccgggtccg

SEQ ID NO: 3459 - DNA, 19 bp, Artificial Sequence
  Synthetic: DMPK 5 reverse 19:45770310-45770332; SpCas9
gagggaggggccgggtccg

SEQ ID NO: 3460 - DNA, 18 bp, Artificial Sequence
  Synthetic: DMPK 5 reverse 19:45770311-45770332; SpCas9
agggaggggccgggtccg

SEQ ID NO: 3461 - DNA, 25 bp, Artificial Sequence
  Synthetic: DMPK 5 forward 19:45770310-45770338; SpCas9
acccggcccctccctccccggccgc

SEQ ID NO: 3462 - DNA, 24 bp, Artificial Sequence
  Synthetic: DMPK 5 forward 19:45770311-45770338; SpCas9
cccggcccctccctccccggccgc

SEQ ID NO: 3463 - DNA, 23 bp, Artificial Sequence
  Synthetic: DMPK 5 forward 19:45770312-45770338; SpCas9
ccggcccctccctccccggccgc

SEQ ID NO: 3464 - DNA, 22 bp, Artificial Sequence
  Synthetic: DMPK 5 forward 19:45770313-45770338; SpCas9
cggcccctccctccccggccgc

SEQ ID NO: 3465 - DNA, 21 bp, Artificial Sequence
  Synthetic: DMPK 5 forward 19:45770314-45770338; SpCas9
ggcccctccctccccggccgc

SEQ ID NO: 3466 - DNA, 20 bp, Artificial Sequence
  Synthetic: DMPK 5 forward 19:45770315-45770338; SpCas9
gcccctccctccccggccgc

SEQ ID NO: 3467 - DNA, 19 bp, Artificial Sequence
  Synthetic: DMPK 5 forward 19:45770316-45770338; SpCas9
cccctccctccccggccgc

SEQ ID NO: 3468 - DNA, 18 bp, Artificial Sequence
  Synthetic: DMPK 5 forward 19:45770317-45770338; SpCas9
ccctccctccccggccgc

SEQ ID NO: 3469 - DNA, 25 bp, Artificial Sequence
  Synthetic: DMPK 5 forward 19:45770311-45770339; SpCas9
cccggcccctccctccccggccgct

SEQ ID NO: 3470 - DNA, 24 bp, Artificial Sequence
  Synthetic: DMPK 5 forward 19:45770312-45770339; SpCas9
ccggcccctccctccccggccgct

SEQ ID NO: 3471 - DNA, 23 bp, Artificial Sequence
  Synthetic: DMPK 5 forward 19:45770313-45770339; SpCas9
cggcccctccctccccggccgct

SEQ ID NO: 3472 - DNA, 22 bp, Artificial Sequence
  Synthetic: DMPK 5 forward 19:45770314-45770339; SpCas9
ggcccctccctccccggccgct

SEQ ID NO: 3473 - DNA, 21 bp, Artificial Sequence
  Synthetic: DMPK 5 forward 19:45770315-45770339; SpCas9
gcccctccctccccggccgct

SEQ ID NO: 3474 - DNA, 20 bp, Artificial Sequence
  Synthetic: DMPK 5 forward 19:45770316-45770339; SpCas9
cccctccctccccggccgct

SEQ ID NO: 3475 - DNA, 19 bp, Artificial Sequence
  Synthetic: DMPK 5 forward 19:45770317-45770339; SpCas9
ccctccctccccggccgct

SEQ ID NO: 3476 - DNA, 18 bp, Artificial Sequence
  Synthetic: DMPK 5 forward 19:45770318-45770339; SpCas9
cctccctccccggccgct

SEQ ID NO: 3477 - DNA, 25 bp, Artificial Sequence
  Synthetic: DMPK 5 reverse 19:45770311-45770339; SpCas9
cctagcggccggggagggaggggcc

SEQ ID NO: 3478 - DNA, 24 bp, Artificial Sequence
  Synthetic: DMPK 5 reverse 19:45770312-45770339; SpCas9
ctagcggccggggagggaggggcc

SEQ ID NO: 3479 - DNA, 23 bp, Artificial Sequence
  Synthetic: DMPK 5 reverse 19:45770313-45770339; SpCas9
tagcggccggggagggaggggcc

SEQ ID NO: 3480 - DNA, 22 bp, Artificial Sequence
  Synthetic: DMPK 5 reverse 19:45770314-45770339; SpCas9
agcggccggggagggaggggcc

SEQ ID NO: 3481 - DNA, 21 bp, Artificial Sequence
  Synthetic: DMPK 5 reverse 19:45770315-45770339; SpCas9
gcggccggggagggaggggcc

SEQ ID NO: 3482 - DNA, 20 bp, Artificial Sequence
  Synthetic: DMPK 5 reverse 19:45770316-45770339; SpCas9
cggccggggagggaggggcc

SEQ ID NO: 3483 - DNA, 19 bp, Artificial Sequence
  Synthetic: DMPK 5 reverse 19:45770317-45770339; SpCas9
ggccggggagggaggggcc

SEQ ID NO: 3484 - DNA, 18 bp, Artificial Sequence
  Synthetic: DMPK 5 reverse 19:45770318-45770339; SpCas9
gccggggagggaggggcc

SEQ ID NO: 3485 - DNA, 25 bp, Artificial Sequence
  Synthetic: DMPK 5 forward 19:45770312-45770340; SpCas9
ccggcccctccctccccggccgcta

SEQ ID NO: 3486 - DNA, 24 bp, Artificial Sequence
  Synthetic: DMPK 5 forward 19:45770313-45770340; SpCas9
cggcccctccctccccggccgcta

SEQ ID NO: 3487 - DNA, 23 bp, Artificial Sequence
  Synthetic: DMPK 5 forward 19:45770314-45770340; SpCas9
ggcccctccctccccggccgcta

SEQ ID NO: 3488 - DNA, 22 bp, Artificial Sequence
  Synthetic: DMPK 5 forward 19:45770315-45770340; SpCas9
gcccctccctccccggccgcta

SEQ ID NO: 3489 - DNA, 21 bp, Artificial Sequence
  Synthetic: DMPK 5 forward 19:45770316-45770340; SpCas9
cccctccctccccggccgcta

SEQ ID NO: 3490 - DNA, 20 bp, Artificial Sequence
  Synthetic: DMPK 5 forward 19:45770317-45770340; SpCas9
ccctccctccccggccgcta

SEQ ID NO: 3491 - DNA, 19 bp, Artificial Sequence
  Synthetic: DMPK 5 forward 19:45770318-45770340; SpCas9
cctccctccccggccgcta

SEQ ID NO: 3492 - DNA, 18 bp, Artificial Sequence
  Synthetic: DMPK 5 forward 19:45770319-45770340; SpCas9
ctccctccccggccgcta

SEQ ID NO: 3493 - DNA, 25 bp, Artificial Sequence
  Synthetic: DMPK 5 reverse 19:45770312-45770340; SpCas9
ccctagcggccggggagggaggggc

SEQ ID NO: 3494 - DNA, 24 bp, Artificial Sequence
  Synthetic: DMPK 5 reverse 19:45770313-45770340; SpCas9
cctagcggccggggagggaggggc

SEQ ID NO: 3495 - DNA, 23 bp, Artificial Sequence
  Synthetic: DMPK 5 reverse 19:45770314-45770340; SpCas9
ctagcggccggggagggaggggc

SEQ ID NO: 3496 - DNA, 22 bp, Artificial Sequence
  Synthetic: DMPK 5 reverse 19:45770315-45770340; SpCas9
tagcggccggggagggaggggc

SEQ ID NO: 3497 - DNA, 21 bp, Artificial Sequence
  Synthetic: DMPK 5 reverse 19:45770316-45770340; SpCas9
agcggccggggagggaggggc

SEQ ID NO: 3498 - DNA, 20 bp, Artificial Sequence
  Synthetic: DMPK 5 reverse 19:45770317-45770340; SpCas9
gcggccggggagggaggggc

SEQ ID NO: 3499 - DNA, 19 bp, Artificial Sequence
  Synthetic: DMPK 5 reverse 19:45770318-45770340; SpCas9
cggccggggagggaggggc

SEQ ID NO: 3500 - DNA, 18 bp, Artificial Sequence
  Synthetic: DMPK 5 reverse 19:45770319-45770340; SpCas9
ggccggggagggaggggc

SEQ ID NO: 3501 - DNA, 25 bp, Artificial Sequence
  Synthetic: : DMPK 5 forward 19:45770313-45770341; SpCas9
cggcccctccctccccggccgctag

SEQ ID NO: 3502 - DNA, 24 bp, Artificial Sequence
  Synthetic: DMPK 5 forward 19:45770314-45770341; SpCas9
ggcccctccctccccggccgctag

SEQ ID NO: 3503 - DNA, 23 bp, Artificial Sequence
  Synthetic: DMPK 5 forward 19:45770315-45770341; SpCas9
gcccctccctccccggccgctag

SEQ ID NO: 3504 - DNA, 22 bp, Artificial Sequence
  Synthetic: DMPK 5 forward 19:45770316-45770341; SpCas9
cccctccctccccggccgctag

SEQ ID NO: 3505 - DNA, 21 bp, Artificial Sequence
  Synthetic: DMPK 5 forward 19:45770317-45770341; SpCas9
ccctccctccccggccgctag

SEQ ID NO: 3506 - DNA, 20 bp, Artificial Sequence
  Synthetic: DMPK 5 forward 19:45770318-45770341; SpCas9
cctccctccccggccgctag

SEQ ID NO: 3507 - DNA, 19 bp, Artificial Sequence
  Synthetic: DMPK 5 forward 19:45770319-45770341; SpCas9
ctccctccccggccgctag

SEQ ID NO: 3508 - DNA, 18 bp, Artificial Sequence
  Synthetic: DMPK 5 forward 19:45770320-45770341; SpCas9
tccctccccggccgctag

SEQ ID NO: 3509 - DNA, 25 bp, Artificial Sequence
  Synthetic: DMPK 5 forward 19:45770314-45770342; SpCas9
ggcccctccctccccggccgctagg

SEQ ID NO: 3510 - DNA, 24 bp, Artificial Sequence
  Synthetic: DMPK 5 forward 19:45770315-45770342; SpCas9
gcccctccctccccggccgctagg

SEQ ID NO: 3511 - DNA, 23 bp, Artificial Sequence
  Synthetic: DMPK 5 forward 19:45770316-45770342; SpCas9
cccctccctccccggccgctagg

SEQ ID NO: 3512 - DNA, 22 bp, Artificial Sequence
  Synthetic: DMPK 5 forward 19:45770317-45770342; SpCas9
ccctccctccccggccgctagg

SEQ ID NO: 3513 - DNA, 21 bp, Artificial Sequence
  Synthetic: DMPK 5 forward 19:45770318-45770342; SpCas9
cctccctccccggccgctagg

SEQ ID NO: 3514 - DNA, 20 bp, Artificial Sequence
  Synthetic: DMPK 5 forward 19:45770319-45770342; SpCas9
ctccctccccggccgctagg

SEQ ID NO: 3515 - DNA, 19 bp, Artificial Sequence
  Synthetic: DMPK 5 forward 19:45770320-45770342; SpCas9
tccctccccggccgctagg

SEQ ID NO: 3516 - DNA, 18 bp, Artificial Sequence
  Synthetic: DMPK 5 forward 19:45770321-45770342; SpCas9
ccctccccggccgctagg

SEQ ID NO: 3517 - DNA, 25 bp, Artificial Sequence
  Synthetic: DMPK 5 reverse 19:45770316-45770344; SpCas9
cgccccctagcggccggggagggag

SEQ ID NO: 3518 - DNA, 24 bp, Artificial Sequence
  Synthetic: DMPK 5 reverse 19:45770317-45770344; SpCas9
gccccctagcggccggggagggag

SEQ ID NO: 3519 - DNA, 23 bp, Artificial Sequence
  Synthetic: DMPK 5 reverse 19:45770318-45770344; SpCas9
ccccctagcggccggggagggag

SEQ ID NO: 3520 - DNA, 22 bp, Artificial Sequence
  Synthetic: DMPK 5 reverse 19:45770319-45770344; SpCas9
cccctagcggccggggagggag

SEQ ID NO: 3521 - DNA, 21 bp, Artificial Sequence
  Synthetic: DMPK 5 reverse 19:45770320-45770344; SpCas9
ccctagcggccggggagggag

SEQ ID NO: 3522 - DNA, 20 bp, Artificial Sequence
  Synthetic: DMPK 5 reverse 19:45770321-45770344; SpCas9
cctagcggccggggagggag

SEQ ID NO: 3523 - DNA, 19 bp, Artificial Sequence
  Synthetic: DMPK 5 reverse 19:45770322-45770344; SpCas9
ctagcggccggggagggag

SEQ ID NO: 3524 - DNA, 18 bp, Artificial Sequence
  Synthetic: DMPK 5 reverse 19:45770323-45770344; SpCas9
tagcggccggggagggag

SEQ ID NO: 3525 - DNA, 25 bp, Artificial Sequence
  Synthetic: DMPK 5 forward 19:45770317-45770345; SpCas9
ccctccctccccggccgctaggggg

SEQ ID NO: 3526 - DNA, 24 bp, Artificial Sequence
  Synthetic: DMPK 5 forward 19:45770318-45770345; SpCas9
cctccctccccggccgctaggggg

SEQ ID NO: 3527 - DNA, 23 bp, Artificial Sequence
  Synthetic: DMPK 5 forward 19:45770319-45770345; SpCas9
ctccctccccggccgctaggggg

SEQ ID NO: 3528 - DNA, 22 bp, Artificial Sequence
  Synthetic: DMPK 5 forward 19:45770320-45770345; SpCas9
tccctccccggccgctaggggg

SEQ ID NO: 3529 - DNA, 21 bp, Artificial Sequence
  Synthetic: DMPK 5 forward 19:45770321-45770345; SpCas9
ccctccccggccgctaggggg

SEQ ID NO: 3530 - DNA, 20 bp, Artificial Sequence
  Synthetic: DMPK 5 forward 19:45770322-45770345; SpCas9
cctccccggccgctaggggg

SEQ ID NO: 3531 - DNA, 19 bp, Artificial Sequence
  Synthetic: DMPK 5 forward 19:45770323-45770345; SpCas9
ctccccggccgctaggggg

SEQ ID NO: 3532 - DNA, 18 bp, Artificial Sequence
  Synthetic: DMPK 5 forward 19:45770324-45770345; SpCas9
tccccggccgctaggggg

SEQ ID NO: 3533 - DNA, 25 bp, Artificial Sequence
  Synthetic: DMPK 5 reverse 19:45770317-45770345; SpCas9
ccgccccctagcggccggggaggga

SEQ ID NO: 3534 - DNA, 24 bp, Artificial Sequence
  Synthetic: DMPK 5 reverse 19:45770318-45770345; SpCas9
cgccccctagcggccggggaggga

SEQ ID NO: 3535 - DNA, 23 bp, Artificial Sequence
  Synthetic: DMPK 5 reverse 19:45770319-45770345; SpCas9
gccccctagcggccggggaggga

SEQ ID NO: 3536 - DNA, 22 bp, Artificial Sequence
  Synthetic: DMPK 5 reverse 19:45770320-45770345; SpCas9
ccccctagcggccggggaggga

SEQ ID NO: 3537 - DNA, 21 bp, Artificial Sequence
  Synthetic: DMPK 5 reverse 19:45770321-45770345; SpCas9
cccctagcggccggggaggga

SEQ ID NO: 3538 - DNA, 20 bp, Artificial Sequence
  Synthetic: DMPK 5 reverse 19:45770322-45770345; SpCas9
ccctagcggccggggaggga

SEQ ID NO: 3539 - DNA, 19 bp, Artificial Sequence
  Synthetic: DMPK 5 reverse 19:45770323-45770345; SpCas9
cctagcggccggggaggga

SEQ ID NO: 3540 - DNA, 18 bp, Artificial Sequence
  Synthetic: DMPK 5 reverse 19:45770324-45770345; SpCas9
ctagcggccggggaggga

SEQ ID NO: 3541 - DNA, 25 bp, Artificial Sequence
  Synthetic: DMPK 5 forward 19:45770318-45770346; SpCas9
cctccctccccggccgctagggggc

SEQ ID NO: 3542 - DNA, 24 bp, Artificial Sequence
  Synthetic: DMPK 5 forward 19:45770319-45770346; SpCas9
ctccctccccggccgctagggggc

SEQ ID NO: 3543 - DNA, 23 bp, Artificial Sequence
  Synthetic: DMPK 5 forward 19:45770320-45770346; SpCas9
tccctccccggccgctagggggc

SEQ ID NO: 3544 - DNA, 22 bp, Artificial Sequence
  Synthetic: DMPK 5 forward 19:45770321-45770346; SpCas9
ccctccccggccgctagggggc

SEQ ID NO: 3545 - DNA, 21 bp, Artificial Sequence
  Synthetic: DMPK 5 forward 19:45770322-45770346; SpCas9
cctccccggccgctagggggc

SEQ ID NO: 3546 - DNA, 20 bp, Artificial Sequence
  Synthetic: DMPK 5 forward 19:45770323-45770346; SpCas9
ctccccggccgctagggggc

SEQ ID NO: 3547 - DNA, 19 bp, Artificial Sequence
  Synthetic: DMPK 5 forward 19:45770324-45770346; SpCas9
tccccggccgctagggggc

SEQ ID NO: 3548 - DNA, 18 bp, Artificial Sequence
  Synthetic: DMPK 5 forward 19:45770325-45770346; SpCas9
ccccggccgctagggggc

SEQ ID NO: 3549 - DNA, 25 bp, Artificial Sequence
  Synthetic: DMPK 5 reverse 19:45770318-45770346; SpCas9
cccgccccctagcggccggggaggg

SEQ ID NO: 3550 - DNA, 24 bp, Artificial Sequence
  Synthetic: DMPK 5 reverse 19:45770319-45770346; SpCas9
ccgccccctagcggccggggaggg

SEQ ID NO: 3551 - DNA, 23 bp, Artificial Sequence
  Synthetic: DMPK 5 reverse 19:45770320-45770346; SpCas9
cgccccctagcggccggggaggg

SEQ ID NO: 3552 - DNA, 22 bp, Artificial Sequence
  Synthetic: DMPK 5 reverse 19:45770321-45770346; SpCas9
gccccctagcggccggggaggg

SEQ ID NO: 3553 - DNA, 21 bp, Artificial Sequence
  Synthetic: DMPK 5 reverse 19:45770322-45770346; SpCas9
ccccctagcggccggggaggg

SEQ ID NO: 3554 - DNA, 20 bp, Artificial Sequence
  Synthetic: DMPK 5 reverse 19:45770323-45770346; SpCas9
cccctagcggccggggaggg

SEQ ID NO: 3555 - DNA, 19 bp, Artificial Sequence
  Synthetic: DMPK 5 reverse 19:45770324-45770346; SpCas9
ccctagcggccggggaggg

SEQ ID NO: 3556 - DNA, 18 bp, Artificial Sequence
  Synthetic: DMPK 5 reverse 19:45770325-45770346; SpCas9
cctagcggccggggaggg

SEQ ID NO: 3557 - DNA, 25 bp, Artificial Sequence
  Synthetic: DMPK 5 reverse 19:45770319-45770347; SpCas9
gcccgccccctagcggccggggagg

SEQ ID NO: 3558 - DNA, 24 bp, Artificial Sequence
  Synthetic: DMPK 5 reverse 19:45770320-45770347; SpCas9
cccgccccctagcggccggggagg

SEQ ID NO: 3559 - DNA, 23 bp, Artificial Sequence
  Synthetic: DMPK 5 reverse 19:45770321-45770347; SpCas9
ccgccccctagcggccggggagg

SEQ ID NO: 3560 - DNA, 22 bp, Artificial Sequence
  Synthetic: DMPK 5 reverse 19:45770322-45770347; SpCas9
cgccccctagcggccggggagg

SEQ ID NO: 3561 - DNA, 21 bp, Artificial Sequence
  Synthetic: DMPK 5 reverse 19:45770323-45770347; SpCas9
gccccctagcggccggggagg

SEQ ID NO: 3562 - DNA, 20 bp, Artificial Sequence
  Synthetic: DMPK 5 reverse 19:45770324-45770347; SpCas9
ccccctagcggccggggagg

SEQ ID NO: 3563 - DNA, 19 bp, Artificial Sequence
  Synthetic: DMPK 5 reverse 19:45770325-45770347; SpCas9
cccctagcggccggggagg

SEQ ID NO: 3564 - DNA, 18 bp, Artificial Sequence
  Synthetic: DMPK 5 reverse 19:45770326-45770347; SpCas9
ccctagcggccggggagg

SEQ ID NO: 3565 - DNA, 25 bp, Artificial Sequence
  Synthetic: DMPK 5 reverse 19:45770321-45770349; SpCas9
gggcccgccccctagcggccgggga

SEQ ID NO: 3566 - DNA, 24 bp, Artificial Sequence
  Synthetic: DMPK 5 reverse 19:45770322-45770349; SpCas9
ggcccgccccctagcggccgggga

SEQ ID NO: 3567 - DNA, 23 bp, Artificial Sequence
  Synthetic: DMPK 5 reverse 19:45770323-45770349; SpCas9
gcccgccccctagcggccgggga

SEQ ID NO: 3568 - DNA, 22 bp, Artificial Sequence
  Synthetic: DMPK 5 reverse 19:45770324-45770349; SpCas9
cccgccccctagcggccgggga

SEQ ID NO: 3569 - DNA, 21 bp, Artificial Sequence
  Synthetic: DMPK 5 reverse 19:45770325-45770349; SpCas9
ccgccccctagcggccgggga

SEQ ID NO: 3570 - DNA, 20 bp, Artificial Sequence
  Synthetic: DMPK 5 reverse 19:45770326-45770349; SpCas9
cgccccctagcggccgggga

SEQ ID NO: 3571 - DNA, 19 bp, Artificial Sequence
  Synthetic: DMPK 5 reverse 19:45770327-45770349; SpCas9
gccccctagcggccgggga

SEQ ID NO: 3572 - DNA, 18 bp, Artificial Sequence
  Synthetic: DMPK 5 reverse 19:45770328-45770349; SpCas9
ccccctagcggccgggga

SEQ ID NO: 3573 - DNA, 25 bp, Artificial Sequence
  Synthetic: DMPK 5 reverse 19:45770322-45770350; SpCas9
cgggcccgccccctagcggccgggg

SEQ ID NO: 3574 - DNA, 24 bp, Artificial Sequence
  Synthetic: DMPK 5 reverse 19:45770323-45770350; SpCas9
gggcccgccccctagcggccgggg

SEQ ID NO: 3575 - DNA, 23 bp, Artificial Sequence
  Synthetic: DMPK 5 reverse 19:45770324-45770350; SpCas9
ggcccgccccctagcggccgggg

SEQ ID NO: 3576 - DNA, 22 bp, Artificial Sequence
  Synthetic: DMPK 5 reverse 19:45770325-45770350; SpCas9
gcccgccccctagcggccgggg

SEQ ID NO: 3577 - DNA, 21 bp, Artificial Sequence
  Synthetic: DMPK 5 reverse 19:45770326-45770350; SpCas9
cccgccccctagcggccgggg

SEQ ID NO: 3578 - DNA, 20 bp, Artificial Sequence
  Synthetic: DMPK 5 reverse 19:45770327-45770350; SpCas9
ccgccccctagcggccgggg

SEQ ID NO: 3579 - DNA, 19 bp, Artificial Sequence
  Synthetic: DMPK 5 reverse 19:45770328-45770350; SpCas9
cgccccctagcggccgggg

SEQ ID NO: 3580 - DNA, 18 bp, Artificial Sequence
  Synthetic: DMPK 5 reverse 19:45770329-45770350; SpCas9
gccccctagcggccgggg

SEQ ID NO: 3581 - DNA, 25 bp, Artificial Sequence
  Synthetic: DMPK 5 forward 19:45770323-45770351; SpCas9
ctccccggccgctagggggcgggcc

SEQ ID NO: 3582 - DNA, 24 bp, Artificial Sequence
  Synthetic: DMPK 5 forward 19:45770324-45770351; SpCas9
tccccggccgctagggggcgggcc

SEQ ID NO: 3583 - DNA, 23 bp, Artificial Sequence
  Synthetic: DMPK 5 forward 19:45770325-45770351; SpCas9
ccccggccgctagggggcgggcc

SEQ ID NO: 3584 - DNA, 22 bp, Artificial Sequence
  Synthetic: DMPK 5 forward 19:45770326-45770351; SpCas9
cccggccgctagggggcgggcc

SEQ ID NO: 3585 - DNA, 21 bp, Artificial Sequence
  Synthetic: DMPK 5 forward 19:45770327-45770351; SpCas9
ccggccgctagggggcgggcc

SEQ ID NO: 3586 - DNA, 20 bp, Artificial Sequence
  Synthetic: DMPK 5 forward 19:45770328-45770351; SpCas9
cggccgctagggggcgggcc

SEQ ID NO: 3587 - DNA, 19 bp, Artificial Sequence
  Synthetic: DMPK 5 forward 19:45770329-45770351; SpCas9
ggccgctagggggcgggcc

SEQ ID NO: 3588 - DNA, 18 bp, Artificial Sequence
  Synthetic: DMPK 5 forward 19:45770330-45770351; SpCas9
gccgctagggggcgggcc

SEQ ID NO: 3589 - DNA, 25 bp, Artificial Sequence
  Synthetic: DMPK 5 reverse 19:45770323-45770351; SpCas9
ccgggcccgccccctagcggccggg

SEQ ID NO: 3590 - DNA, 24 bp, Artificial Sequence
  Synthetic: DMPK 5 reverse 19:45770324-45770351; SpCas9
cgggcccgccccctagcggccggg

SEQ ID NO: 3591 - DNA, 23 bp, Artificial Sequence
  Synthetic: DMPK 5 reverse 19:45770325-45770351; SpCas9
gggcccgccccctagcggccggg

SEQ ID NO: 3592 - DNA, 22 bp, Artificial Sequence
  Synthetic: DMPK 5 reverse 19:45770326-45770351; SpCas9
ggcccgccccctagcggccggg

SEQ ID NO: 3593 - DNA, 21 bp, Artificial Sequence
  Synthetic: DMPK 5 reverse 19:45770327-45770351; SpCas9
gcccgccccctagcggccggg

SEQ ID NO: 3594 - DNA, 20 bp, Artificial Sequence
  Synthetic: DMPK 5 reverse 19:45770328-45770351; SpCas9
cccgccccctagcggccggg

SEQ ID NO: 3595 - DNA, 19 bp, Artificial Sequence
  Synthetic: DMPK 5 reverse 19:45770329-45770351; SpCas9
ccgccccctagcggccggg

SEQ ID NO: 3596 - DNA, 18 bp, Artificial Sequence
  Synthetic: DMPK 5 reverse 19:45770330-45770351; SpCas9
cgccccctagcggccggg

SEQ ID NO: 3597 - DNA, 25 bp, Artificial Sequence
  Synthetic: DMPK 5 reverse 19:45770325-45770353; SpCas9
atccgggcccgccccctagcggccg

SEQ ID NO: 3598 - DNA, 24 bp, Artificial Sequence
  Synthetic: DMPK 5 reverse 19:45770326-45770353; SpCas9
tccgggcccgccccctagcggccg

SEQ ID NO: 3599 - DNA, 23 bp, Artificial Sequence
  Synthetic: DMPK 5 reverse 19:45770327-45770353; SpCas9
ccgggcccgccccctagcggccg

SEQ ID NO: 3600 - DNA, 22 bp, Artificial Sequence
  Synthetic: DMPK 5 reverse 19:45770328-45770353; SpCas9
cgggcccgccccctagcggccg

SEQ ID NO: 3601 - DNA, 21 bp, Artificial Sequence
  Synthetic: DMPK 5 reverse 19:45770329-45770353; SpCas9
gggcccgccccctagcggccg

SEQ ID NO: 3602 - DNA, 20 bp, Artificial Sequence
  Synthetic: DMPK 5 reverse 19:45770330-45770353; SpCas9
ggcccgccccctagcggccg

SEQ ID NO: 3603 - DNA, 19 bp, Artificial Sequence
  Synthetic: DMPK 5 reverse 19:45770331-45770353; SpCas9
gcccgccccctagcggccg

SEQ ID NO: 3604 - DNA, 18 bp, Artificial Sequence
  Synthetic: DMPK 5 reverse 19:45770332-45770353; SpCas9
cccgccccctagcggccg

SEQ ID NO: 3605 - DNA, 25 bp, Artificial Sequence
  Synthetic: DMPK 5 reverse 19:45770326-45770354; SpCas9
gatccgggcccgccccctagcggcc

SEQ ID NO: 3606 - DNA, 24 bp, Artificial Sequence
  Synthetic: DMPK 5 reverse 19:45770327-45770354; SpCas9
atccgggcccgccccctagcggcc

SEQ ID NO: 3607 - DNA, 23 bp, Artificial Sequence
  Synthetic: DMPK 5 reverse 19:45770328-45770354; SpCas9
tccgggcccgccccctagcggcc

SEQ ID NO: 3608 - DNA, 22 bp, Artificial Sequence
  Synthetic: DMPK 5 reverse 19:45770329-45770354; SpCas9
ccgggcccgccccctagcggcc

SEQ ID NO: 3609 - DNA, 21 bp, Artificial Sequence
  Synthetic: DMPK 5 reverse 19:45770330-45770354; SpCas9
cgggcccgccccctagcggcc

SEQ ID NO: 3610 - DNA, 20 bp, Artificial Sequence
  Synthetic: DMPK 5 reverse 19:45770331-45770354; SpCas9
gggcccgccccctagcggcc

SEQ ID NO: 3611 - DNA, 19 bp, Artificial Sequence
  Synthetic: DMPK 5 reverse 19:45770332-45770354; SpCas9
ggcccgccccctagcggcc

SEQ ID NO: 3612 - DNA, 18 bp, Artificial Sequence
  Synthetic: DMPK 5 reverse 19:45770333-45770354; SpCas9
gcccgccccctagcggcc

SEQ ID NO: 3613 - DNA, 25 bp, Artificial Sequence
  Synthetic: DMPK 5 reverse 19:45770327-45770355; SpCas9
tgatccgggcccgccccctagcggc

SEQ ID NO: 3614 - DNA, 24 bp, Artificial Sequence
  Synthetic: DMPK 5 reverse 19:45770328-45770355; SpCas9
gatccgggcccgccccctagcggc

SEQ ID NO: 3615 - DNA, 23 bp, Artificial Sequence
  Synthetic: DMPK 5 reverse 19:45770329-45770355; SpCas9
atccgggcccgccccctagcggc

SEQ ID NO: 3616 - DNA, 22 bp, Artificial Sequence
  Synthetic: DMPK 5 reverse 19:45770330-45770355; SpCas9
tccgggcccgccccctagcggc

SEQ ID NO: 3617 - DNA, 21 bp, Artificial Sequence
  Synthetic: DMPK 5 reverse 19:45770331-45770355; SpCas9
ccgggcccgccccctagcggc

SEQ ID NO: 3618 - DNA, 20 bp, Artificial Sequence
  Synthetic: DMPK 5 reverse 19:45770332-45770355; SpCas9
cgggcccgccccctagcggc

SEQ ID NO: 3619 - DNA, 19 bp, Artificial Sequence
  Synthetic: DMPK 5 reverse 19:45770333-45770355; SpCas9
gggcccgccccctagcggc

SEQ ID NO: 3620 - DNA, 18 bp, Artificial Sequence
  Synthetic: DMPK 5 reverse 19:45770334-45770355; SpCas9
ggcccgccccctagcggc

SEQ ID NO: 3621 - DNA, 25 bp, Artificial Sequence
  Synthetic: DMPK 5 forward 19:45770330-45770358; SpCas9
gccgctagggggcgggcccggatca

SEQ ID NO: 3622 - DNA, 24 bp, Artificial Sequence
  Synthetic: DMPK 5 forward 19:45770331-45770358; SpCas9
ccgctagggggcgggcccggatca

SEQ ID NO: 3623 - DNA, 23 bp, Artificial Sequence
  Synthetic: DMPK 5 forward 19:45770332-45770358; SpCas9
cgctagggggcgggcccggatca

SEQ ID NO: 3624 - DNA, 22 bp, Artificial Sequence
  Synthetic: DMPK 5 forward 19:45770333-45770358; SpCas9
gctagggggcgggcccggatca

SEQ ID NO: 3625 - DNA, 21 bp, Artificial Sequence
  Synthetic: DMPK 5 forward 19:45770334-45770358; SpCas9
ctagggggcgggcccggatca

SEQ ID NO: 3626 - DNA, 20 bp, Artificial Sequence
  Synthetic: DMPK 5 forward 19:45770335-45770358; SpCas9
tagggggcgggcccggatca

SEQ ID NO: 3627 - DNA, 19 bp, Artificial Sequence
  Synthetic: DMPK 5 forward 19:45770336-45770358; SpCas9
agggggcgggcccggatca

SEQ ID NO: 3628 - DNA, 18 bp, Artificial Sequence
  Synthetic: DMPK 5 forward 19:45770337-45770358; SpCas9
gggggcgggcccggatca

SEQ ID NO: 3629 - DNA, 25 bp, Artificial Sequence
  Synthetic: DMPK 5 forward 19:45770331-45770359; SpCas9
ccgctagggggcgggcccggatcac

SEQ ID NO: 3630 - DNA, 24 bp, Artificial Sequence
  Synthetic: DMPK 5 forward 19:45770332-45770359; SpCas9
cgctagggggcgggcccggatcac

SEQ ID NO: 3631 - DNA, 23 bp, Artificial Sequence
  Synthetic: DMPK 5 forward 19:45770333-45770359; SpCas9
gctagggggcgggcccggatcac

SEQ ID NO: 3632 - DNA, 22 bp, Artificial Sequence
  Synthetic: DMPK 5 forward 19:45770334-45770359; SpCas9
ctagggggcgggcccggatcac

SEQ ID NO: 3633 - DNA, 21 bp, Artificial Sequence
  Synthetic: DMPK 5 forward 19:45770335-45770359; SpCas9
tagggggcgggcccggatcac

SEQ ID NO: 3634 - DNA, 20 bp, Artificial Sequence
  Synthetic: DMPK 5 forward 19:45770336-45770359; SpCas9
agggggcgggcccggatcac

SEQ ID NO: 3635 - DNA, 19 bp, Artificial Sequence
  Synthetic: DMPK 5 forward 19:45770337-45770359; SpCas9
gggggcgggcccggatcac

SEQ ID NO: 3636 - DNA, 18 bp, Artificial Sequence
  Synthetic: DMPK 5 forward 19:45770338-45770359; SpCas9
ggggcgggcccggatcac

SEQ ID NO: 3637 - DNA, 25 bp, Artificial Sequence
  Synthetic: DMPK 5 reverse 19:45770331-45770359; SpCas9
cctgtgatccgggcccgccccctag

SEQ ID NO: 3638 - DNA, 24 bp, Artificial Sequence
  Synthetic: DMPK 5 reverse 19:45770332-45770359; SpCas9
ctgtgatccgggcccgccccctag

SEQ ID NO: 3639 - DNA, 23 bp, Artificial Sequence
  Synthetic: DMPK 5 reverse 19:45770333-45770359; SpCas9
tgtgatccgggcccgccccctag

SEQ ID NO: 3640 - DNA, 22 bp, Artificial Sequence
  Synthetic: DMPK 5 reverse 19:45770334-45770359; SpCas9
gtgatccgggcccgccccctag

SEQ ID NO: 3641 - DNA, 21 bp, Artificial Sequence
  Synthetic: DMPK 5 reverse 19:45770335-45770359; SpCas9
tgatccgggcccgccccctag

SEQ ID NO: 3642 - DNA, 20 bp, Artificial Sequence
  Synthetic: DMPK 5 reverse 19:45770336-45770359; SpCas9
gatccgggcccgccccctag

SEQ ID NO: 3643 - DNA, 19 bp, Artificial Sequence
  Synthetic: DMPK 5 reverse 19:45770337-45770359; SpCas9
atccgggcccgccccctag

SEQ ID NO: 3644 - DNA, 18 bp, Artificial Sequence
  Synthetic: DMPK 5 reverse 19:45770338-45770359; SpCas9
tccgggcccgccccctag

SEQ ID NO: 3645 - DNA, 25 bp, Artificial Sequence
  Synthetic: DMPK 5 reverse 19:45770334-45770362; SpCas9
agtcctgtgatccgggcccgccccc

SEQ ID NO: 3646 - DNA, 24 bp, Artificial Sequence
  Synthetic: DMPK 5 reverse 19:45770335-45770362; SpCas9
gtcctgtgatccgggcccgccccc

SEQ ID NO: 3647 - DNA, 23 bp, Artificial Sequence
  Synthetic: DMPK 5 reverse 19:45770336-45770362; SpCas9
tcctgtgatccgggcccgccccc

SEQ ID NO: 3648 - DNA, 22 bp, Artificial Sequence
  Synthetic: DMPK 5 reverse 19:45770337-45770362; SpCas9
cctgtgatccgggcccgccccc

SEQ ID NO: 3649 - DNA, 21 bp, Artificial Sequence
  Synthetic: DMPK 5 reverse 19:45770338-45770362; SpCas9
ctgtgatccgggcccgccccc

SEQ ID NO: 3650 - DNA, 20 bp, Artificial Sequence
  Synthetic: DMPK 5 reverse 19:45770339-45770362; SpCas9
tgtgatccgggcccgccccc

SEQ ID NO: 3651 - DNA, 19 bp, Artificial Sequence
  Synthetic: DMPK 5 reverse 19:45770340-45770362; SpCas9
gtgatccgggcccgccccc

SEQ ID NO: 3652 - DNA, 18 bp, Artificial Sequence
  Synthetic: DMPK 5 reverse 19:45770341-45770362; SpCas9
tgatccgggcccgccccc

SEQ ID NO: 3653 - DNA, 25 bp, Artificial Sequence
  Synthetic: DMPK 5 forward 19:45770336-45770364; SpCas9
agggggcgggcccggatcacaggac

SEQ ID NO: 3654 - DNA, 24 bp, Artificial Sequence
  Synthetic: DMPK 5 forward 19:45770337-45770364; SpCas9
gggggcgggcccggatcacaggac

SEQ ID NO: 3655 - DNA, 23 bp, Artificial Sequence
  Synthetic: DMPK 5 forward 19:45770338-45770364; SpCas9
ggggcgggcccggatcacaggac

SEQ ID NO: 3656 - DNA, 22 bp, Artificial Sequence
  Synthetic: DMPK 5 forward 19:45770339-45770364; SpCas9
gggcgggcccggatcacaggac

SEQ ID NO: 3657 - DNA, 21 bp, Artificial Sequence
  Synthetic: DMPK 5 forward 19:45770340-45770364; SpCas9
ggcgggcccggatcacaggac

SEQ ID NO: 3658 - DNA, 20 bp, Artificial Sequence
  Synthetic: DMPK 5 forward 19:45770341-45770364; SpCas9
gcgggcccggatcacaggac

SEQ ID NO: 3659 - DNA, 19 bp, Artificial Sequence
  Synthetic: DMPK 5 forward 19:45770342-45770364; SpCas9
cgggcccggatcacaggac

SEQ ID NO: 3660 - DNA, 18 bp, Artificial Sequence
  Synthetic: DMPK 5 forward 19:45770343-45770364; SpCas9
gggcccggatcacaggac

SEQ ID NO: 3661 - DNA, 25 bp, Artificial Sequence
  Synthetic: DMPK 5 forward 19:45770338-45770366; SpCas9
ggggcgggcccggatcacaggactg

SEQ ID NO: 3662 - DNA, 24 bp, Artificial Sequence
  Synthetic: DMPK 5 forward 19:45770339-45770366; SpCas9
gggcgggcccggatcacaggactg

SEQ ID NO: 3663 - DNA, 23 bp, Artificial Sequence
  Synthetic: DMPK 5 forward 19:45770340-45770366; SpCas9
ggcgggcccggatcacaggactg

SEQ ID NO: 3664 - DNA, 22 bp, Artificial Sequence
  Synthetic: DMPK 5 forward 19:45770341-45770366; SpCas9
gcgggcccggatcacaggactg

SEQ ID NO: 3665 - DNA, 21 bp, Artificial Sequence
  Synthetic: DMPK 5 forward 19:45770342-45770366; SpCas9
cgggcccggatcacaggactg

SEQ ID NO: 3666 - DNA, 20 bp, Artificial Sequence
  Synthetic: DMPK 5 forward 19:45770343-45770366; SpCas9
gggcccggatcacaggactg

SEQ ID NO: 3667 - DNA, 19 bp, Artificial Sequence
  Synthetic: DMPK 5 forward 19:45770344-45770366; SpCas9
ggcccggatcacaggactg

SEQ ID NO: 3668 - DNA, 18 bp, Artificial Sequence
  Synthetic: DMPK 5 forward 19:45770345-45770366; SpCas9
gcccggatcacaggactg

SEQ ID NO: 3669 - DNA, 25 bp, Artificial Sequence
  Synthetic: DMPK 5 forward 19:45770342-45770370; SpCas9
cgggcccggatcacaggactggagc

SEQ ID NO: 3670 - DNA, 24 bp, Artificial Sequence
  Synthetic: DMPK 5 forward 19:45770343-45770370; SpCas9
gggcccggatcacaggactggagc

SEQ ID NO: 3671 - DNA, 23 bp, Artificial Sequence
  Synthetic: DMPK 5 forward 19:45770344-45770370; SpCas9
ggcccggatcacaggactggagc

SEQ ID NO: 3672 - DNA, 22 bp, Artificial Sequence
  Synthetic: DMPK 5 forward 19:45770345-45770370; SpCas9
gcccggatcacaggactggagc

SEQ ID NO: 3673 - DNA, 21 bp, Artificial Sequence
  Synthetic: DMPK 5 forward 19:45770346-45770370; SpCas9
cccggatcacaggactggagc

SEQ ID NO: 3674 - DNA, 20 bp, Artificial Sequence
  Synthetic: DMPK 5 forward 19:45770347-45770370; SpCas9
ccggatcacaggactggagc

SEQ ID NO: 3675 - DNA, 19 bp, Artificial Sequence
  Synthetic: DMPK 5 forward 19:45770348-45770370; SpCas9
cggatcacaggactggagc

SEQ ID NO: 3676 - DNA, 18 bp, Artificial Sequence
  Synthetic: DMPK 5 forward 19:45770349-45770370; SpCas9
ggatcacaggactggagc

SEQ ID NO: 3677 - DNA, 25 bp, Artificial Sequence
  Synthetic: DMPK 5 forward 19:45770343-45770371; SpCas9
gggcccggatcacaggactggagct

SEQ ID NO: 3678 - DNA, 24 bp, Artificial Sequence
  Synthetic: DMPK 5 forward 19:45770344-45770371; SpCas9
ggcccggatcacaggactggagct

SEQ ID NO: 3679 - DNA, 23 bp, Artificial Sequence
  Synthetic: DMPK 5 forward 19:45770345-45770371; SpCas9
gcccggatcacaggactggagct

SEQ ID NO: 3680 - DNA, 22 bp, Artificial Sequence
  Synthetic: DMPK 5 forward 19:45770346-45770371; SpCas9
cccggatcacaggactggagct

SEQ ID NO: 3681 - DNA, 21 bp, Artificial Sequence
  Synthetic: DMPK 5 forward 19:45770347-45770371; SpCas9
ccggatcacaggactggagct

SEQ ID NO: 3682 - DNA, 20 bp, Artificial Sequence
  Synthetic: DMPK 5 forward 19:45770348-45770371; SpCas9
cggatcacaggactggagct

SEQ ID NO: 3683 - DNA, 19 bp, Artificial Sequence
  Synthetic: DMPK 5 forward 19:45770349-45770371; SpCas9
ggatcacaggactggagct

SEQ ID NO: 3684 - DNA, 18 bp, Artificial Sequence
  Synthetic: DMPK 5 forward 19:45770350-45770371; SpCas9
gatcacaggactggagct

SEQ ID NO: 3685 - DNA, 25 bp, Artificial Sequence
  Synthetic: DMPK 5 forward 19:45770346-45770374; SpCas9
cccggatcacaggactggagctggg

SEQ ID NO: 3686 - DNA, 24 bp, Artificial Sequence
  Synthetic: DMPK 5 forward 19:45770347-45770374; SpCas9
ccggatcacaggactggagctggg

SEQ ID NO: 3687 - DNA, 23 bp, Artificial Sequence
  Synthetic: DMPK 5 forward 19:45770348-45770374; SpCas9
cggatcacaggactggagctggg

SEQ ID NO: 3688 - DNA, 22 bp, Artificial Sequence
  Synthetic: DMPK 5 forward 19:45770349-45770374; SpCas9
ggatcacaggactggagctggg

SEQ ID NO: 3689 - DNA, 21 bp, Artificial Sequence
  Synthetic: DMPK 5 forward 19:45770350-45770374; SpCas9
gatcacaggactggagctggg

SEQ ID NO: 3690 - DNA, 20 bp, Artificial Sequence
  Synthetic: DMPK 5 forward 19:45770351-45770374; SpCas9
atcacaggactggagctggg

SEQ ID NO: 3691 - DNA, 19 bp, Artificial Sequence
  Synthetic: DMPK 5 forward 19:45770352-45770374; SpCas9
tcacaggactggagctggg

SEQ ID NO: 3692 - DNA, 18 bp, Artificial Sequence
  Synthetic: DMPK 5 forward 19:45770353-45770374; SpCas9
cacaggactggagctggg

SEQ ID NO: 3693 - DNA, 25 bp, Artificial Sequence
  Synthetic: DMPK 5 reverse 19:45770346-45770374; SpCas9
ccgcccagctccagtcctgtgatcc

SEQ ID NO: 3694 - DNA, 24 bp, Artificial Sequence
  Synthetic: DMPK 5 reverse 19:45770347-45770374; SpCas9
cgcccagctccagtcctgtgatcc

SEQ ID NO: 3695 - DNA, 23 bp, Artificial Sequence
  Synthetic: DMPK 5 reverse 19:45770348-45770374; SpCas9
gcccagctccagtcctgtgatcc

SEQ ID NO: 3696 - DNA, 22 bp, Artificial Sequence
  Synthetic: DMPK 5 reverse 19:45770349-45770374; SpCas9
cccagctccagtcctgtgatcc

SEQ ID NO: 3697 - DNA, 21 bp, Artificial Sequence
  Synthetic: DMPK 5 reverse 19:45770350-45770374; SpCas9
ccagctccagtcctgtgatcc

SEQ ID NO: 3698 - DNA, 20 bp, Artificial Sequence
  Synthetic: DMPK 5 reverse 19:45770351-45770374; SpCas9
cagctccagtcctgtgatcc

SEQ ID NO: 3699 - DNA, 19 bp, Artificial Sequence
  Synthetic: DMPK 5 reverse 19:45770352-45770374; SpCas9
agctccagtcctgtgatcc

SEQ ID NO: 3700 - DNA, 18 bp, Artificial Sequence
  Synthetic: DMPK 5 reverse 19:45770353-45770374; SpCas9
gctccagtcctgtgatcc

SEQ ID NO: 3701 - DNA, 25 bp, Artificial Sequence
  Synthetic: DMPK 5 reverse 19:45770347-45770375; SpCas9
tccgcccagctccagtcctgtgatc

SEQ ID NO: 3702 - DNA, 24 bp, Artificial Sequence
  Synthetic: DMPK 5 reverse 19:45770348-45770375; SpCas9
ccgcccagctccagtcctgtgatc

SEQ ID NO: 3703 - DNA, 23 bp, Artificial Sequence
  Synthetic: DMPK 5 reverse 19:45770349-45770375; SpCas9
cgcccagctccagtcctgtgatc

SEQ ID NO: 3704 - DNA, 22 bp, Artificial Sequence
  Synthetic: DMPK 5 reverse 19:45770350-45770375; SpCas9
gcccagctccagtcctgtgatc

SEQ ID NO: 3705 - DNA, 21 bp, Artificial Sequence
  Synthetic: DMPK 5 reverse 19:45770351-45770375; SpCas9
cccagctccagtcctgtgatc

SEQ ID NO: 3706 - DNA, 20 bp, Artificial Sequence
  Synthetic: DMPK 5 reverse 19:45770352-45770375; SpCas9
ccagctccagtcctgtgatc

SEQ ID NO: 3707 - DNA, 19 bp, Artificial Sequence
  Synthetic: DMPK 5 reverse 19:45770353-45770375; SpCas9
cagctccagtcctgtgatc

SEQ ID NO: 3708 - DNA, 18 bp, Artificial Sequence
  Synthetic: DMPK 5 reverse 19:45770354-45770375; SpCas9
agctccagtcctgtgatc

SEQ ID NO: 3709 - DNA, 25 bp, Artificial Sequence
  Synthetic: DMPK 5 forward 19:45770348-45770376; SpCas9
cggatcacaggactggagctgggcg

SEQ ID NO: 3710 - DNA, 24 bp, Artificial Sequence
  Synthetic: DMPK 5 forward 19:45770349-45770376; SpCas9
ggatcacaggactggagctgggcg

SEQ ID NO: 3711 - DNA, 23 bp, Artificial Sequence
  Synthetic: DMPK 5 forward 19:45770350-45770376; SpCas9
gatcacaggactggagctgggcg

SEQ ID NO: 3712 - DNA, 22 bp, Artificial Sequence
  Synthetic: DMPK 5 forward 19:45770351-45770376; SpCas9
atcacaggactggagctgggcg

SEQ ID NO: 3713 - DNA, 21 bp, Artificial Sequence
  Synthetic: DMPK 5 forward 19:45770352-45770376; SpCas9
tcacaggactggagctgggcg

SEQ ID NO: 3714 - DNA, 20 bp, Artificial Sequence
  Synthetic: DMPK 5 forward 19:45770353-45770376; SpCas9
cacaggactggagctgggcg

SEQ ID NO: 3715 - DNA, 19 bp, Artificial Sequence
  Synthetic: DMPK 5 forward 19:45770354-45770376; SpCas9
acaggactggagctgggcg

SEQ ID NO: 3716 - DNA, 18 bp, Artificial Sequence
  Synthetic: DMPK 5 forward 19:45770355-45770376; SpCas9
caggactggagctgggcg

SEQ ID NO: 3717 - DNA, 25 bp, Artificial Sequence
  Synthetic: DMPK 5 forward 19:45770360-45770388; SpCas9
ctggagctgggcggagacccacgct

SEQ ID NO: 3718 - DNA, 24 bp, Artificial Sequence
  Synthetic: DMPK 5 forward 19:45770361-45770388; SpCas9
tggagctgggcggagacccacgct

SEQ ID NO: 3719 - DNA, 23 bp, Artificial Sequence
  Synthetic: DMPK 5 forward 19:45770362-45770388; SpCas9
ggagctgggcggagacccacgct

SEQ ID NO: 3720 - DNA, 22 bp, Artificial Sequence
  Synthetic: DMPK 5 forward 19:45770363-45770388; SpCas9
gagctgggcggagacccacgct

SEQ ID NO: 3721 - DNA, 21 bp, Artificial Sequence
  Synthetic: DMPK 5 forward 19:45770364-45770388; SpCas9
agctgggcggagacccacgct

SEQ ID NO: 3722 - DNA, 20 bp, Artificial Sequence
  Synthetic: DMPK 5 forward 19:45770365-45770388; SpCas9
gctgggcggagacccacgct

SEQ ID NO: 3723 - DNA, 19 bp, Artificial Sequence
  Synthetic: DMPK 5 forward 19:45770366-45770388; SpCas9
ctgggcggagacccacgct

SEQ ID NO: 3724 - DNA, 18 bp, Artificial Sequence
  Synthetic: DMPK 5 forward 19:45770367-45770388; SpCas9
tgggcggagacccacgct

SEQ ID NO: 3725 - DNA, 25 bp, Artificial Sequence
  Synthetic: DMPK 5 reverse 19:45770360-45770388; SpCas9
ccgagcgtgggtctccgcccagctc

SEQ ID NO: 3726 - DNA, 24 bp, Artificial Sequence
  Synthetic: DMPK 5 reverse 19:45770361-45770388; SpCas9
cgagcgtgggtctccgcccagctc

SEQ ID NO: 3727 - DNA, 23 bp, Artificial Sequence
  Synthetic: DMPK 5 reverse 19:45770362-45770388; SpCas9
gagcgtgggtctccgcccagctc

SEQ ID NO: 3728 - DNA, 22 bp, Artificial Sequence
  Synthetic: DMPK 5 reverse 19:45770363-45770388; SpCas9
agcgtgggtctccgcccagctc

SEQ ID NO: 3729 - DNA, 21 bp, Artificial Sequence
  Synthetic: DMPK 5 reverse 19:45770364-45770388; SpCas9
gcgtgggtctccgcccagctc

SEQ ID NO: 3730 - DNA, 20 bp, Artificial Sequence
  Synthetic: DMPK 5 reverse 19:45770365-45770388; SpCas9
cgtgggtctccgcccagctc

SEQ ID NO: 3731 - DNA, 19 bp, Artificial Sequence
  Synthetic: DMPK 5 reverse 19:45770366-45770388; SpCas9
gtgggtctccgcccagctc

SEQ ID NO: 3732 - DNA, 18 bp, Artificial Sequence
  Synthetic: DMPK 5 reverse 19:45770367-45770388; SpCas9
tgggtctccgcccagctc

SEQ ID NO: 3733 - DNA, 25 bp, Artificial Sequence
  Synthetic: DMPK 5 forward 19:45770362-45770390; SpCas9
ggagctgggcggagacccacgctcg

SEQ ID NO: 3734 - DNA, 24 bp, Artificial Sequence
  Synthetic: DMPK 5 forward 19:45770363-45770390; SpCas9
gagctgggcggagacccacgctcg

SEQ ID NO: 3735 - DNA, 23 bp, Artificial Sequence
  Synthetic: DMPK 5 forward 19:45770364-45770390; SpCas9
agctgggcggagacccacgctcg

SEQ ID NO: 3736 - DNA, 22 bp, Artificial Sequence
  Synthetic: DMPK 5 forward 19:45770365-45770390; SpCas9
gctgggcggagacccacgctcg

SEQ ID NO: 3737 - DNA, 21 bp, Artificial Sequence
  Synthetic: DMPK 5 forward 19:45770366-45770390; SpCas9
ctgggcggagacccacgctcg

SEQ ID NO: 3738 - DNA, 20 bp, Artificial Sequence
  Synthetic: DMPK 5 forward 19:45770367-45770390; SpCas9
tgggcggagacccacgctcg

SEQ ID NO: 3739 - DNA, 19 bp, Artificial Sequence
  Synthetic: DMPK 5 forward 19:45770368-45770390; SpCas9
gggcggagacccacgctcg

SEQ ID NO: 3740 - DNA, 18 bp, Artificial Sequence
  Synthetic: DMPK 5 forward 19:45770369-45770390; SpCas9
ggcggagacccacgctcg

SEQ ID NO: 3741 - DNA, 25 bp, Artificial Sequence
  Synthetic: DMPK 5 forward 19:45770365-45770393; SpCas9
gctgggcggagacccacgctcggag

SEQ ID NO: 3742 - DNA, 24 bp, Artificial Sequence
  Synthetic: DMPK 5 forward 19:45770366-45770393; SpCas9
ctgggcggagacccacgctcggag

SEQ ID NO: 3743 - DNA, 23 bp, Artificial Sequence
  Synthetic: DMPK 5 forward 19:45770367-45770393; SpCas9
tgggcggagacccacgctcggag

SEQ ID NO: 3744 - DNA, 22 bp, Artificial Sequence
  Synthetic: DMPK 5 forward 19:45770368-45770393; SpCas9
gggcggagacccacgctcggag

SEQ ID NO: 3745 - DNA, 21 bp, Artificial Sequence
  Synthetic: DMPK 5 forward 19:45770369-45770393; SpCas9
ggcggagacccacgctcggag

SEQ ID NO: 3746 - DNA, 20 bp, Artificial Sequence
  Synthetic: DMPK 5 forward 19:45770370-45770393; SpCas9
gcggagacccacgctcggag

SEQ ID NO: 3747 - DNA, 19 bp, Artificial Sequence
  Synthetic: DMPK 5 forward 19:45770371-45770393; SpCas9
cggagacccacgctcggag

SEQ ID NO: 3748 - DNA, 18 bp, Artificial Sequence
  Synthetic: DMPK 5 forward 19:45770372-45770393; SpCas9
ggagacccacgctcggag

SEQ ID NO: 3749 - DNA, 25 bp, Artificial Sequence
  Synthetic: DMPK 5 reverse 19:45770366-45770394; SpCas9
accgctccgagcgtgggtctccgcc

SEQ ID NO: 3750 - DNA, 24 bp, Artificial Sequence
  Synthetic: DMPK 5 reverse 19:45770367-45770394; SpCas9
ccgctccgagcgtgggtctccgcc

SEQ ID NO: 3751 - DNA, 23 bp, Artificial Sequence
  Synthetic: DMPK 5 reverse 19:45770368-45770394; SpCas9
cgctccgagcgtgggtctccgcc

SEQ ID NO: 3752 - DNA, 22 bp, Artificial Sequence
  Synthetic: DMPK 5 reverse 19:45770369-45770394; SpCas9
gctccgagcgtgggtctccgcc

SEQ ID NO: 3753 - DNA, 21 bp, Artificial Sequence
  Synthetic: DMPK 5 reverse 19:45770370-45770394; SpCas9
ctccgagcgtgggtctccgcc

SEQ ID NO: 3754 - DNA, 20 bp, Artificial Sequence
  Synthetic: DMPK 5 reverse 19:45770371-45770394; SpCas9
tccgagcgtgggtctccgcc

SEQ ID NO: 3755 - DNA, 19 bp, Artificial Sequence
  Synthetic: DMPK 5 reverse 19:45770372-45770394; SpCas9
ccgagcgtgggtctccgcc

SEQ ID NO: 3756 - DNA, 18 bp, Artificial Sequence
  Synthetic: DMPK 5 reverse 19:45770373-45770394; SpCas9
cgagcgtgggtctccgcc

SEQ ID NO: 3757 - DNA, 25 bp, Artificial Sequence
  Synthetic: DMPK 5 forward 19:45770376-45770404; SpCas9
acccacgctcggagcggttgtgaac

SEQ ID NO: 3758 - DNA, 24 bp, Artificial Sequence
  Synthetic: DMPK 5 forward 19:45770377-45770404; SpCas9
cccacgctcggagcggttgtgaac

SEQ ID NO: 3759 - DNA, 23 bp, Artificial Sequence
  Synthetic: DMPK 5 forward 19:45770378-45770404; SpCas9
ccacgctcggagcggttgtgaac

SEQ ID NO: 3760 - DNA, 22 bp, Artificial Sequence
  Synthetic: DMPK 5 forward 19:45770379-45770404; SpCas9
cacgctcggagcggttgtgaac

SEQ ID NO: 3761 - DNA, 21 bp, Artificial Sequence
  Synthetic: DMPK 5 forward 19:45770380-45770404; SpCas9
acgctcggagcggttgtgaac

SEQ ID NO: 3762 - DNA, 20 bp, Artificial Sequence
  Synthetic: DMPK 5 forward 19:45770381-45770404; SpCas9
cgctcggagcggttgtgaac

SEQ ID NO: 3763 - DNA, 19 bp, Artificial Sequence
  Synthetic: DMPK 5 forward 19:45770382-45770404; SpCas9
gctcggagcggttgtgaac

SEQ ID NO: 3764 - DNA, 18 bp, Artificial Sequence
  Synthetic: DMPK 5 forward 19:45770383-45770404; SpCas9
ctcggagcggttgtgaac

SEQ ID NO: 3765 - DNA, 25 bp, Artificial Sequence
  Synthetic: DMPK 5 reverse 19:45770377-45770405; SpCas9
gccagttcacaaccgctccgagcgt

SEQ ID NO: 3766 - DNA, 24 bp, Artificial Sequence
  Synthetic: DMPK 5 reverse 19:45770378-45770405; SpCas9
ccagttcacaaccgctccgagcgt

SEQ ID NO: 3767 - DNA, 23 bp, Artificial Sequence
  Synthetic: DMPK 5 reverse 19:45770379-45770405; SpCas9
cagttcacaaccgctccgagcgt

SEQ ID NO: 3768 - DNA, 22 bp, Artificial Sequence
  Synthetic: DMPK 5 reverse 19:45770380-45770405; SpCas9
agttcacaaccgctccgagcgt

SEQ ID NO: 3769 - DNA, 21 bp, Artificial Sequence
  Synthetic: DMPK 5 reverse 19:45770381-45770405; SpCas9
gttcacaaccgctccgagcgt

SEQ ID NO: 3770 - DNA, 20 bp, Artificial Sequence
  Synthetic: DMPK 5 reverse 19:45770382-45770405; SpCas9
ttcacaaccgctccgagcgt

SEQ ID NO: 3771 - DNA, 19 bp, Artificial Sequence
  Synthetic: DMPK 5 reverse 19:45770383-45770405; SpCas9
tcacaaccgctccgagcgt

SEQ ID NO: 3772 - DNA, 18 bp, Artificial Sequence
  Synthetic: DMPK 5 reverse 19:45770384-45770405; SpCas9
cacaaccgctccgagcgt

SEQ ID NO: 3773 - DNA, 25 bp, Artificial Sequence
  Synthetic: DMPK 5 reverse 19:45770378-45770406; SpCas9
tgccagttcacaaccgctccgagcg

SEQ ID NO: 3774 - DNA, 24 bp, Artificial Sequence
  Synthetic: DMPK 5 reverse 19:45770379-45770406; SpCas9
gccagttcacaaccgctccgagcg

SEQ ID NO: 3775 - DNA, 23 bp, Artificial Sequence
  Synthetic: DMPK 5 reverse 19:45770380-45770406; SpCas9
ccagttcacaaccgctccgagcg

SEQ ID NO: 3776 - DNA, 22 bp, Artificial Sequence
  Synthetic: DMPK 5 reverse 19:45770381-45770406; SpCas9
cagttcacaaccgctccgagcg

SEQ ID NO: 3777 - DNA, 21 bp, Artificial Sequence
  Synthetic: DMPK 5 reverse 19:45770382-45770406; SpCas9
agttcacaaccgctccgagcg

SEQ ID NO: 3778 - DNA, 20 bp, Artificial Sequence
  Synthetic: DMPK 5 reverse 19:45770383-45770406; SpCas9
gttcacaaccgctccgagcg

SEQ ID NO: 3779 - DNA, 19 bp, Artificial Sequence
  Synthetic: DMPK 5 reverse 19:45770384-45770406; SpCas9
ttcacaaccgctccgagcg

SEQ ID NO: 3780 - DNA, 18 bp, Artificial Sequence
  Synthetic: DMPK 5 reverse 19:45770385-45770406; SpCas9
tcacaaccgctccgagcg

SEQ ID NO: 3781 - DNA, 25 bp, Artificial Sequence
  Synthetic: DMPK 5 forward 19:45770379-45770407; SpCas9
cacgctcggagcggttgtgaactgg

SEQ ID NO: 3782 - DNA, 24 bp, Artificial Sequence
  Synthetic: DMPK 5 forward 19:45770380-45770407; SpCas9
acgctcggagcggttgtgaactgg

SEQ ID NO: 3783 - DNA, 23 bp, Artificial Sequence
  Synthetic: DMPK 5 forward 19:45770381-45770407; SpCas9
cgctcggagcggttgtgaactgg

SEQ ID NO: 3784 - DNA, 22 bp, Artificial Sequence
  Synthetic: DMPK 5 forward 19:45770382-45770407; SpCas9
gctcggagcggttgtgaactgg

SEQ ID NO: 3785 - DNA, 21 bp, Artificial Sequence
  Synthetic: DMPK 5 forward 19:45770383-45770407; SpCas9
ctcggagcggttgtgaactgg

SEQ ID NO: 3786 - DNA, 20 bp, Artificial Sequence
  Synthetic: DMPK 5 forward 19:45770384-45770407; SpCas9
tcggagcggttgtgaactgg

SEQ ID NO: 3787 - DNA, 19 bp, Artificial Sequence
  Synthetic: DMPK 5 forward 19:45770385-45770407; SpCas9
cggagcggttgtgaactgg

SEQ ID NO: 3788 - DNA, 18 bp, Artificial Sequence
  Synthetic: DMPK 5 forward 19:45770386-45770407; SpCas9
ggagcggttgtgaactgg

SEQ ID NO: 3789 - DNA, 25 bp, Artificial Sequence
  Synthetic: DMPK 5 forward 19:45770380-45770408; SpCas9
acgctcggagcggttgtgaactggc

SEQ ID NO: 3790 - DNA, 24 bp, Artificial Sequence
  Synthetic: DMPK 5 forward 19:45770381-45770408; SpCas9
cgctcggagcggttgtgaactggc

SEQ ID NO: 3791 - DNA, 23 bp, Artificial Sequence
  Synthetic: DMPK 5 forward 19:45770382-45770408; SpCas9
gctcggagcggttgtgaactggc

SEQ ID NO: 3792 - DNA, 22 bp, Artificial Sequence
  Synthetic: DMPK 5 forward 19:45770383-45770408; SpCas9
ctcggagcggttgtgaactggc

SEQ ID NO: 3793 - DNA, 21 bp, Artificial Sequence
  Synthetic: DMPK 5 forward 19:45770384-45770408; SpCas9
tcggagcggttgtgaactggc

SEQ ID NO: 3794 - DNA, 20 bp, Artificial Sequence
  Synthetic: DMPK 5 forward 19:45770385-45770408; SpCas9
cggagcggttgtgaactggc

SEQ ID NO: 3795 - DNA, 19 bp, Artificial Sequence
  Synthetic: DMPK 5 forward 19:45770386-45770408; SpCas9
ggagcggttgtgaactggc

SEQ ID NO: 3796 - DNA, 18 bp, Artificial Sequence
  Synthetic: DMPK 5 forward 19:45770387-45770408; SpCas9
gagcggttgtgaactggc

SEQ ID NO: 3797 - DNA, 25 bp, Artificial Sequence
  Synthetic: DMPK 5 forward 19:45770383-45770411; SpCas9
ctcggagcggttgtgaactggcagg

SEQ ID NO: 3798 - DNA, 24 bp, Artificial Sequence
  Synthetic: DMPK 5 forward 19:45770384-45770411; SpCas9
tcggagcggttgtgaactggcagg

SEQ ID NO: 3799 - DNA, 23 bp, Artificial Sequence
  Synthetic: DMPK 5 forward 19:45770385-45770411; SpCas9
cggagcggttgtgaactggcagg

SEQ ID NO: 3800 - DNA, 22 bp, Artificial Sequence
  Synthetic: DMPK 5 forward 19:45770386-45770411; SpCas9
ggagcggttgtgaactggcagg

SEQ ID NO: 3801 - DNA, 21 bp, Artificial Sequence
  Synthetic: DMPK 5 forward 19:45770387-45770411; SpCas9
gagcggttgtgaactggcagg

SEQ ID NO: 3802 - DNA, 20 bp, Artificial Sequence
  Synthetic: DMPK 5 forward 19:45770388-45770411; SpCas9
agcggttgtgaactggcagg

SEQ ID NO: 3803 - DNA, 19 bp, Artificial Sequence
  Synthetic: DMPK 5 forward 19:45770389-45770411; SpCas9
gcggttgtgaactggcagg

SEQ ID NO: 3804 - DNA, 18 bp, Artificial Sequence
  Synthetic: DMPK 5 forward 19:45770390-45770411; SpCas9
cggttgtgaactggcagg

SEQ ID NO: 3805 - DNA, 25 bp, Artificial Sequence
  Synthetic: DMPK 5 reverse 19:45770383-45770411; SpCas9
ccgcctgccagttcacaaccgctcc

SEQ ID NO: 3806 - DNA, 24 bp, Artificial Sequence
  Synthetic: DMPK 5 reverse 19:45770384-45770411; SpCas9
cgcctgccagttcacaaccgctcc

SEQ ID NO: 3807 - DNA, 23 bp, Artificial Sequence
  Synthetic: DMPK 5 reverse 19:45770385-45770411; SpCas9
gcctgccagttcacaaccgctcc

SEQ ID NO: 3808 - DNA, 22 bp, Artificial Sequence
  Synthetic: DMPK 5 reverse 19:45770386-45770411; SpCas9
cctgccagttcacaaccgctcc

SEQ ID NO: 3809 - DNA, 21 bp, Artificial Sequence
  Synthetic: DMPK 5 reverse 19:45770387-45770411; SpCas9
ctgccagttcacaaccgctcc

SEQ ID NO: 3810 - DNA, 20 bp, Artificial Sequence
  Synthetic: DMPK 5 reverse 19:45770388-45770411; SpCas9
tgccagttcacaaccgctcc

SEQ ID NO: 3811 - DNA, 19 bp, Artificial Sequence
  Synthetic: DMPK 5 reverse 19:45770389-45770411; SpCas9
gccagttcacaaccgctcc

SEQ ID NO: 3812 - DNA, 18 bp, Artificial Sequence
  Synthetic: DMPK 5 reverse 19:45770390-45770411; SpCas9
ccagttcacaaccgctcc

SEQ ID NO: 3813 - DNA, 25 bp, Artificial Sequence
  Synthetic: DMPK 5 forward 19:45770386-45770414; SpCas9
ggagcggttgtgaactggcaggcgg

SEQ ID NO: 3814 - DNA, 24 bp, Artificial Sequence
  Synthetic: DMPK 5 forward 19:45770387-45770414; SpCas9
gagcggttgtgaactggcaggcgg

SEQ ID NO: 3815 - DNA, 23 bp, Artificial Sequence
  Synthetic: DMPK 5 forward 19:45770388-45770414; SpCas9
agcggttgtgaactggcaggcgg

SEQ ID NO: 3816 - DNA, 22 bp, Artificial Sequence
  Synthetic: DMPK 5 forward 19:45770389-45770414; SpCas9
gcggttgtgaactggcaggcgg

SEQ ID NO: 3817 - DNA, 21 bp, Artificial Sequence
  Synthetic: DMPK 5 forward 19:45770390-45770414; SpCas9
cggttgtgaactggcaggcgg

SEQ ID NO: 3818 - DNA, 20 bp, Artificial Sequence
  Synthetic: DMPK 5 forward 19:45770391-45770414; SpCas9
ggttgtgaactggcaggcgg

SEQ ID NO: 3819 - DNA, 19 bp, Artificial Sequence
  Synthetic: DMPK 5 forward 19:45770392-45770414; SpCas9
gttgtgaactggcaggcgg

SEQ ID NO: 3820 - DNA, 18 bp, Artificial Sequence
  Synthetic: DMPK 5 forward 19:45770393-45770414; SpCas9
ttgtgaactggcaggcgg

SEQ ID NO: 3821 - DNA, 25 bp, Artificial Sequence
  Synthetic: DMPK 5 forward 19:45770387-45770415; SpCas9
gagcggttgtgaactggcaggcggt

SEQ ID NO: 3822 - DNA, 24 bp, Artificial Sequence
  Synthetic: DMPK 5 forward 19:45770388-45770415; SpCas9
agcggttgtgaactggcaggcggt

SEQ ID NO: 3823 - DNA, 23 bp, Artificial Sequence
  Synthetic: DMPK 5 forward 19:45770389-45770415; SpCas9
gcggttgtgaactggcaggcggt

SEQ ID NO: 3824 - DNA, 22 bp, Artificial Sequence
  Synthetic: DMPK 5 forward 19:45770390-45770415; SpCas9
cggttgtgaactggcaggcggt

SEQ ID NO: 3825 - DNA, 21 bp, Artificial Sequence
  Synthetic: DMPK 5 forward 19:45770391-45770415; SpCas9
ggttgtgaactggcaggcggt

SEQ ID NO: 3826 - DNA, 20 bp, Artificial Sequence
  Synthetic: DMPK 5 forward 19:45770392-45770415; SpCas9
gttgtgaactggcaggcggt

SEQ ID NO: 3827 - DNA, 19 bp, Artificial Sequence
  Synthetic: DMPK 5 forward 19:45770393-45770415; SpCas9
ttgtgaactggcaggcggt

SEQ ID NO: 3828 - DNA, 18 bp, Artificial Sequence
  Synthetic: DMPK 5 forward 19:45770394-45770415; SpCas9
tgtgaactggcaggcggt

SEQ ID NO: 3829 - DNA, 25 bp, Artificial Sequence
  Synthetic: DMPK 5 forward 19:45770392-45770420; SpCas9
gttgtgaactggcaggcggtgggcg

SEQ ID NO: 3830 - DNA, 24 bp, Artificial Sequence
  Synthetic: DMPK 5 forward 19:45770393-45770420; SpCas9
ttgtgaactggcaggcggtgggcg

SEQ ID NO: 3831 - DNA, 23 bp, Artificial Sequence
  Synthetic: DMPK 5 forward 19:45770394-45770420; SpCas9
tgtgaactggcaggcggtgggcg

SEQ ID NO: 3832 - DNA, 22 bp, Artificial Sequence
  Synthetic: DMPK 5 forward 19:45770395-45770420; SpCas9
gtgaactggcaggcggtgggcg

SEQ ID NO: 3833 - DNA, 21 bp, Artificial Sequence
  Synthetic: DMPK 5 forward 19:45770396-45770420; SpCas9
tgaactggcaggcggtgggcg

SEQ ID NO: 3834 - DNA, 20 bp, Artificial Sequence
  Synthetic: DMPK 5 forward 19:45770397-45770420; SpCas9
gaactggcaggcggtgggcg

SEQ ID NO: 3835 - DNA, 19 bp, Artificial Sequence
  Synthetic: DMPK 5 forward 19:45770398-45770420; SpCas9
aactggcaggcggtgggcg

SEQ ID NO: 3836 - DNA, 18 bp, Artificial Sequence
  Synthetic: DMPK 5 forward 19:45770399-45770420; SpCas9
actggcaggcggtgggcg

SEQ ID NO: 3837 - DNA, 25 bp, Artificial Sequence
  Synthetic: DMPK 5 reverse 19:45770400-45770428; SpCas9
cacagaagccgcgcccaccgcctgc

SEQ ID NO: 3838 - DNA, 24 bp, Artificial Sequence
  Synthetic: DMPK 5 reverse 19:45770401-45770428; SpCas9
acagaagccgcgcccaccgcctgc

SEQ ID NO: 3839 - DNA, 23 bp, Artificial Sequence
  Synthetic: DMPK 5 reverse 19:45770402-45770428; SpCas9
cagaagccgcgcccaccgcctgc

SEQ ID NO: 3840 - DNA, 22 bp, Artificial Sequence
  Synthetic: DMPK 5 reverse 19:45770403-45770428; SpCas9
agaagccgcgcccaccgcctgc

SEQ ID NO: 3841 - DNA, 21 bp, Artificial Sequence
  Synthetic: DMPK 5 reverse 19:45770404-45770428; SpCas9
gaagccgcgcccaccgcctgc

SEQ ID NO: 3842 - DNA, 20 bp, Artificial Sequence
  Synthetic: DMPK 5 reverse 19:45770405-45770428; SpCas9
aagccgcgcccaccgcctgc

SEQ ID NO: 3843 - DNA, 19 bp, Artificial Sequence
  Synthetic: DMPK 5 reverse 19:45770406-45770428; SpCas9
agccgcgcccaccgcctgc

SEQ ID NO: 3844 - DNA, 18 bp, Artificial Sequence
  Synthetic: DMPK 5 reverse 19:45770407-45770428; SpCas9
gccgcgcccaccgcctgc

SEQ ID NO: 3845 - DNA, 25 bp, Artificial Sequence
  Synthetic: DMPK 5 forward 19:45770411-45770439; SpCas9
tgggcgcggcttctgtgccgtgccc

SEQ ID NO: 3846 - DNA, 24 bp, Artificial Sequence
  Synthetic: DMPK 5 forward 19:45770412-45770439; SpCas9
gggcgcggcttctgtgccgtgccc

SEQ ID NO: 3847 - DNA, 23 bp, Artificial Sequence
  Synthetic: DMPK 5 forward 19:45770413-45770439; SpCas9
ggcgcggcttctgtgccgtgccc

SEQ ID NO: 3848 - DNA, 22 bp, Artificial Sequence
  Synthetic: DMPK 5 forward 19:45770414-45770439; SpCas9
gcgcggcttctgtgccgtgccc

SEQ ID NO: 3849 - DNA, 21 bp, Artificial Sequence
  Synthetic: DMPK 5 forward 19:45770415-45770439; SpCas9
cgcggcttctgtgccgtgccc

SEQ ID NO: 3850 - DNA, 20 bp, Artificial Sequence
  Synthetic: DMPK 5 forward 19:45770416-45770439; SpCas9
gcggcttctgtgccgtgccc

SEQ ID NO: 3851 - DNA, 19 bp, Artificial Sequence
  Synthetic: DMPK 5 forward 19:45770417-45770439; SpCas9
cggcttctgtgccgtgccc

SEQ ID NO: 3852 - DNA, 18 bp, Artificial Sequence
  Synthetic: DMPK 5 forward 19:45770418-45770439; SpCas9
ggcttctgtgccgtgccc

SEQ ID NO: 3853 - DNA, 25 bp, Artificial Sequence
  Synthetic: DMPK 5 forward 19:45770412-45770440; SpCas9
gggcgcggcttctgtgccgtgcccc

SEQ ID NO: 3854 - DNA, 24 bp, Artificial Sequence
  Synthetic: DMPK 5 forward 19:45770413-45770440; SpCas9
ggcgcggcttctgtgccgtgcccc

SEQ ID NO: 3855 - DNA, 23 bp, Artificial Sequence
  Synthetic: DMPK 5 forward 19:45770414-45770440; SpCas9
gcgcggcttctgtgccgtgcccc

SEQ ID NO: 3856 - DNA, 22 bp, Artificial Sequence
  Synthetic: DMPK 5 forward 19:45770415-45770440; SpCas9
cgcggcttctgtgccgtgcccc

SEQ ID NO: 3857 - DNA, 21 bp, Artificial Sequence
  Synthetic: DMPK 5 forward 19:45770416-45770440; SpCas9
gcggcttctgtgccgtgcccc

SEQ ID NO: 3858 - DNA, 20 bp, Artificial Sequence
  Synthetic: DMPK 5 forward 19:45770417-45770440; SpCas9
cggcttctgtgccgtgcccc

SEQ ID NO: 3859 - DNA, 19 bp, Artificial Sequence
  Synthetic: DMPK 5 forward 19:45770418-45770440; SpCas9
ggcttctgtgccgtgcccc

SEQ ID NO: 3860 - DNA, 18 bp, Artificial Sequence
  Synthetic: DMPK 5 forward 19:45770419-45770440; SpCas9
gcttctgtgccgtgcccc

SEQ ID NO: 3861 - DNA, 25 bp, Artificial Sequence
  Synthetic: DMPK 5 forward 19:45770419-45770447; SpCas9
gcttctgtgccgtgccccgggcact

SEQ ID NO: 3862 - DNA, 24 bp, Artificial Sequence
  Synthetic: DMPK 5 forward 19:45770420-45770447; SpCas9
cttctgtgccgtgccccgggcact

SEQ ID NO: 3863 - DNA, 23 bp, Artificial Sequence
  Synthetic: DMPK 5 forward 19:45770421-45770447; SpCas9
ttctgtgccgtgccccgggcact

SEQ ID NO: 3864 - DNA, 22 bp, Artificial Sequence
  Synthetic: DMPK 5 forward 19:45770422-45770447; SpCas9
tctgtgccgtgccccgggcact

SEQ ID NO: 3865 - DNA, 21 bp, Artificial Sequence
  Synthetic: DMPK 5 forward 19:45770423-45770447; SpCas9
ctgtgccgtgccccgggcact

SEQ ID NO: 3866 - DNA, 20 bp, Artificial Sequence
  Synthetic: DMPK 5 forward 19:45770424-45770447; SpCas9
tgtgccgtgccccgggcact

SEQ ID NO: 3867 - DNA, 19 bp, Artificial Sequence
  Synthetic: DMPK 5 forward 19:45770425-45770447; SpCas9
gtgccgtgccccgggcact

SEQ ID NO: 3868 - DNA, 18 bp, Artificial Sequence
  Synthetic: DMPK 5 forward 19:45770426-45770447; SpCas9
tgccgtgccccgggcact

SEQ ID NO: 3869 - DNA, 25 bp, Artificial Sequence
  Synthetic: DMPK 5 reverse 19:45770420-45770448; SpCas9
actgagtgcccggggcacggcacag

SEQ ID NO: 3870 - DNA, 24 bp, Artificial Sequence
  Synthetic: DMPK 5 reverse 19:45770421-45770448; SpCas9
ctgagtgcccggggcacggcacag

SEQ ID NO: 3871 - DNA, 23 bp, Artificial Sequence
  Synthetic: DMPK 5 reverse 19:45770422-45770448; SpCas9
tgagtgcccggggcacggcacag

SEQ ID NO: 3872 - DNA, 22 bp, Artificial Sequence
  Synthetic: DMPK 5 reverse 19:45770423-45770448; SpCas9
gagtgcccggggcacggcacag

SEQ ID NO: 3873 - DNA, 21 bp, Artificial Sequence
  Synthetic: DMPK 5 reverse 19:45770424-45770448; SpCas9
agtgcccggggcacggcacag

SEQ ID NO: 3874 - DNA, 20 bp, Artificial Sequence
  Synthetic: DMPK 5 reverse 19:45770425-45770448; SpCas9
gtgcccggggcacggcacag

SEQ ID NO: 3875 - DNA, 19 bp, Artificial Sequence
  Synthetic: DMPK 5 reverse 19:45770426-45770448; SpCas9
tgcccggggcacggcacag

SEQ ID NO: 3876 - DNA, 18 bp, Artificial Sequence
  Synthetic: DMPK 5 reverse 19:45770427-45770448; SpCas9
gcccggggcacggcacag

SEQ ID NO: 3877 - DNA, 25 bp, Artificial Sequence
  Synthetic: DMPK 5 reverse 19:45770423-45770451; SpCas9
aagactgagtgcccggggcacggca

SEQ ID NO: 3878 - DNA, 24 bp, Artificial Sequence
  Synthetic: DMPK 5 reverse 19:45770424-45770451; SpCas9
agactgagtgcccggggcacggca

SEQ ID NO: 3879 - DNA, 23 bp, Artificial Sequence
  Synthetic: DMPK 5 reverse 19:45770425-45770451; SpCas9
gactgagtgcccggggcacggca

SEQ ID NO: 3880 - DNA, 22 bp, Artificial Sequence
  Synthetic: DMPK 5 reverse 19:45770426-45770451; SpCas9
actgagtgcccggggcacggca

SEQ ID NO: 3881 - DNA, 21 bp, Artificial Sequence
  Synthetic: DMPK 5 reverse 19:45770427-45770451; SpCas9
ctgagtgcccggggcacggca

SEQ ID NO: 3882 - DNA, 20 bp, Artificial Sequence
  Synthetic: DMPK 5 reverse 19:45770428-45770451; SpCas9
tgagtgcccggggcacggca

SEQ ID NO: 3883 - DNA, 19 bp, Artificial Sequence
  Synthetic: DMPK 5 reverse 19:45770429-45770451; SpCas9
gagtgcccggggcacggca

SEQ ID NO: 3884 - DNA, 18 bp, Artificial Sequence
  Synthetic: DMPK 5 reverse 19:45770430-45770451; SpCas9
agtgcccggggcacggca

SEQ ID NO: 3885 - DNA, 25 bp, Artificial Sequence
  Synthetic: DMPK 5 reverse 19:45770428-45770456; SpCas9
gttggaagactgagtgcccggggca

SEQ ID NO: 3886 - DNA, 24 bp, Artificial Sequence
  Synthetic: DMPK 5 reverse 19:45770429-45770456; SpCas9
ttggaagactgagtgcccggggca

SEQ ID NO: 3887 - DNA, 23 bp, Artificial Sequence
  Synthetic: DMPK 5 reverse 19:45770430-45770456; SpCas9
tggaagactgagtgcccggggca

SEQ ID NO: 3888 - DNA, 22 bp, Artificial Sequence
  Synthetic: DMPK 5 reverse 19:45770431-45770456; SpCas9
ggaagactgagtgcccggggca

SEQ ID NO: 3889 - DNA, 21 bp, Artificial Sequence
  Synthetic: DMPK 5 reverse 19:45770432-45770456; SpCas9
gaagactgagtgcccggggca

SEQ ID NO: 3890 - DNA, 20 bp, Artificial Sequence
  Synthetic: DMPK 5 reverse 19:45770433-45770456; SpCas9
aagactgagtgcccggggca

SEQ ID NO: 3891 - DNA, 19 bp, Artificial Sequence
  Synthetic: DMPK 5 reverse 19:45770434-45770456; SpCas9
agactgagtgcccggggca

SEQ ID NO: 3892 - DNA, 18 bp, Artificial Sequence
  Synthetic: DMPK 5 reverse 19:45770435-45770456; SpCas9
gactgagtgcccggggca

SEQ ID NO: 3893 - DNA, 25 bp, Artificial Sequence
  Synthetic: DMPK 5 forward 19:45770430-45770458; SpCas9
gtgccccgggcactcagtcttccaa

SEQ ID NO: 3894 - DNA, 24 bp, Artificial Sequence
  Synthetic: DMPK 5 forward 19:45770431-45770458; SpCas9
tgccccgggcactcagtcttccaa

SEQ ID NO: 3895 - DNA, 23 bp, Artificial Sequence
  Synthetic: DMPK 5 forward 19:45770432-45770458; SpCas9
gccccgggcactcagtcttccaa

SEQ ID NO: 3896 - DNA, 22 bp, Artificial Sequence
  Synthetic: DMPK 5 forward 19:45770433-45770458; SpCas9
ccccgggcactcagtcttccaa

SEQ ID NO: 3897 - DNA, 21 bp, Artificial Sequence
  Synthetic: DMPK 5 forward 19:45770434-45770458; SpCas9
cccgggcactcagtcttccaa

SEQ ID NO: 3898 - DNA, 20 bp, Artificial Sequence
  Synthetic: DMPK 5 forward 19:45770435-45770458; SpCas9
ccgggcactcagtcttccaa

SEQ ID NO: 3899 - DNA, 19 bp, Artificial Sequence
  Synthetic: DMPK 5 forward 19:45770436-45770458; SpCas9
cgggcactcagtcttccaa

SEQ ID NO: 3900 - DNA, 18 bp, Artificial Sequence
  Synthetic: DMPK 5 forward 19:45770437-45770458; SpCas9
gggcactcagtcttccaa

SEQ ID NO: 3901 - DNA, 25 bp, Artificial Sequence
  Synthetic: DMPK 5 forward 19:45770431-45770459; SpCas9
tgccccgggcactcagtcttccaac

SEQ ID NO: 3902 - DNA, 24 bp, Artificial Sequence
  Synthetic: DMPK 5 forward 19:45770432-45770459; SpCas9
gccccgggcactcagtcttccaac

SEQ ID NO: 3903 - DNA, 23 bp, Artificial Sequence
  Synthetic: DMPK 5 forward 19:45770433-45770459; SpCas9
ccccgggcactcagtcttccaac

SEQ ID NO: 3904 - DNA, 22 bp, Artificial Sequence
  Synthetic: DMPK 5 forward 19:45770434-45770459; SpCas9
cccgggcactcagtcttccaac

SEQ ID NO: 3905 - DNA, 21 bp, Artificial Sequence
  Synthetic: DMPK 5 forward 19:45770435-45770459; SpCas9
ccgggcactcagtcttccaac

SEQ ID NO: 3906 - DNA, 20 bp, Artificial Sequence
  Synthetic: DMPK 5 forward 19:45770436-45770459; SpCas9
cgggcactcagtcttccaac

SEQ ID NO: 3907 - DNA, 19 bp, Artificial Sequence
  Synthetic: DMPK 5 forward 19:45770437-45770459; SpCas9
gggcactcagtcttccaac

SEQ ID NO: 3908 - DNA, 18 bp, Artificial Sequence
  Synthetic: DMPK 5 forward 19:45770438-45770459; SpCas9
ggcactcagtcttccaac

SEQ ID NO: 3909 - DNA, 25 bp, Artificial Sequence
  Synthetic: DMPK 5 forward 19:45770432-45770460; SpCas9
gccccgggcactcagtcttccaacg

SEQ ID NO: 3910 - DNA, 24 bp, Artificial Sequence
  Synthetic: DMPK 5 forward 19:45770433-45770460; SpCas9
ccccgggcactcagtcttccaacg

SEQ ID NO: 3911 - DNA, 23 bp, Artificial Sequence
  Synthetic: DMPK 5 forward 19:45770434-45770460; SpCas9
cccgggcactcagtcttccaacg

SEQ ID NO: 3912 - DNA, 22 bp, Artificial Sequence
  Synthetic: DMPK 5 forward 19:45770435-45770460; SpCas9
ccgggcactcagtcttccaacg

SEQ ID NO: 3913 - DNA, 21 bp, Artificial Sequence
  Synthetic: DMPK 5 forward 19:45770436-45770460; SpCas9
cgggcactcagtcttccaacg

SEQ ID NO: 3914 - DNA, 20 bp, Artificial Sequence
  Synthetic: DMPK 5 forward 19:45770437-45770460; SpCas9
gggcactcagtcttccaacg

SEQ ID NO: 3915 - DNA, 19 bp, Artificial Sequence
  Synthetic: DMPK 5 forward 19:45770438-45770460; SpCas9
ggcactcagtcttccaacg

SEQ ID NO: 3916 - DNA, 18 bp, Artificial Sequence
  Synthetic: DMPK 5 forward 19:45770439-45770460; SpCas9
gcactcagtcttccaacg

SEQ ID NO: 3917 - DNA, 25 bp, Artificial Sequence
  Synthetic: DMPK 5 reverse 19:45770433-45770461; SpCas9
gccccgttggaagactgagtgcccg

SEQ ID NO: 3918 - DNA, 24 bp, Artificial Sequence
  Synthetic: DMPK 5 reverse 19:45770434-45770461; SpCas9
ccccgttggaagactgagtgcccg

SEQ ID NO: 3919 - DNA, 23 bp, Artificial Sequence
  Synthetic: DMPK 5 reverse 19:45770435-45770461; SpCas9
cccgttggaagactgagtgcccg

SEQ ID NO: 3920 - DNA, 22 bp, Artificial Sequence
  Synthetic: DMPK 5 reverse 19:45770436-45770461; SpCas9
ccgttggaagactgagtgcccg

SEQ ID NO: 3921 - DNA, 21 bp, Artificial Sequence
  Synthetic: DMPK 5 reverse 19:45770437-45770461; SpCas9
cgttggaagactgagtgcccg

SEQ ID NO: 3922 - DNA, 20 bp, Artificial Sequence
  Synthetic: DMPK 5 reverse 19:45770438-45770461; SpCas9
gttggaagactgagtgcccg

SEQ ID NO: 3923 - DNA, 19 bp, Artificial Sequence
  Synthetic: DMPK 5 reverse 19:45770439-45770461; SpCas9
ttggaagactgagtgcccg

SEQ ID NO: 3924 - DNA, 18 bp, Artificial Sequence
  Synthetic: DMPK 5 reverse 19:45770440-45770461; SpCas9
tggaagactgagtgcccg

SEQ ID NO: 3925 - DNA, 25 bp, Artificial Sequence
  Synthetic: DMPK 5 reverse 19:45770434-45770462; SpCas9
ggccccgttggaagactgagtgccc

SEQ ID NO: 3926 - DNA, 24 bp, Artificial Sequence
  Synthetic: DMPK 5 reverse 19:45770435-45770462; SpCas9
gccccgttggaagactgagtgccc

SEQ ID NO: 3927 - DNA, 23 bp, Artificial Sequence
  Synthetic: DMPK 5 reverse 19:45770436-45770462; SpCas9
ccccgttggaagactgagtgccc

SEQ ID NO: 3928 - DNA, 22 bp, Artificial Sequence
  Synthetic: DMPK 5 reverse 19:45770437-45770462; SpCas9
cccgttggaagactgagtgccc

SEQ ID NO: 3929 - DNA, 21 bp, Artificial Sequence
  Synthetic: DMPK 5 reverse 19:45770438-45770462; SpCas9
ccgttggaagactgagtgccc

SEQ ID NO: 3930 - DNA, 20 bp, Artificial Sequence
  Synthetic: DMPK 5 reverse 19:45770439-45770462; SpCas9
cgttggaagactgagtgccc

SEQ ID NO: 3931 - DNA, 19 bp, Artificial Sequence
  Synthetic: DMPK 5 reverse 19:45770440-45770462; SpCas9
gttggaagactgagtgccc

SEQ ID NO: 3932 - DNA, 18 bp, Artificial Sequence
  Synthetic: DMPK 5 reverse 19:45770441-45770462; SpCas9
ttggaagactgagtgccc

SEQ ID NO: 3933 - DNA, 25 bp, Artificial Sequence
  Synthetic: DMPK 5 reverse 19:45770435-45770463; SpCas9
gggccccgttggaagactgagtgcc

SEQ ID NO: 3934 - DNA, 24 bp, Artificial Sequence
  Synthetic: DMPK 5 reverse 19:45770436-45770463; SpCas9
ggccccgttggaagactgagtgcc

SEQ ID NO: 3935 - DNA, 23 bp, Artificial Sequence
  Synthetic: DMPK 5 reverse 19:45770437-45770463; SpCas9
gccccgttggaagactgagtgcc

SEQ ID NO: 3936 - DNA, 22 bp, Artificial Sequence
  Synthetic: DMPK 5 reverse 19:45770438-45770463; SpCas9
ccccgttggaagactgagtgcc

SEQ ID NO: 3937 - DNA, 21 bp, Artificial Sequence
  Synthetic: DMPK 5 reverse 19:45770439-45770463; SpCas9
cccgttggaagactgagtgcc

SEQ ID NO: 3938 - DNA, 20 bp, Artificial Sequence
  Synthetic: DMPK 5 reverse 19:45770440-45770463; SpCas9
ccgttggaagactgagtgcc

SEQ ID NO: 3939 - DNA, 19 bp, Artificial Sequence
  Synthetic: DMPK 5 reverse 19:45770441-45770463; SpCas9
cgttggaagactgagtgcc

SEQ ID NO: 3940 - DNA, 18 bp, Artificial Sequence
  Synthetic: DMPK 5 reverse 19:45770442-45770463; SpCas9
gttggaagactgagtgcc

SEQ ID NO: 3941 - DNA, 25 bp, Artificial Sequence
  Synthetic: DMPK 5 forward 19:45770438-45770466; SpCas9
ggcactcagtcttccaacggggccc

SEQ ID NO: 3942 - DNA, 24 bp, Artificial Sequence
  Synthetic: DMPK 5 forward 19:45770439-45770466; SpCas9
gcactcagtcttccaacggggccc

SEQ ID NO: 3943 - DNA, 23 bp, Artificial Sequence
  Synthetic: DMPK 5 forward 19:45770440-45770466; SpCas9
cactcagtcttccaacggggccc

SEQ ID NO: 3944 - DNA, 22 bp, Artificial Sequence
  Synthetic: DMPK 5 forward 19:45770441-45770466; SpCas9
actcagtcttccaacggggccc

SEQ ID NO: 3945 - DNA, 21 bp, Artificial Sequence
  Synthetic: DMPK 5 forward 19:45770442-45770466; SpCas9
ctcagtcttccaacggggccc

SEQ ID NO: 3946 - DNA, 20 bp, Artificial Sequence
  Synthetic: DMPK 5 forward 19:45770443-45770466; SpCas9
tcagtcttccaacggggccc

SEQ ID NO: 3947 - DNA, 19 bp, Artificial Sequence
  Synthetic: DMPK 5 forward 19:45770444-45770466; SpCas9
cagtcttccaacggggccc

SEQ ID NO: 3948 - DNA, 18 bp, Artificial Sequence
  Synthetic: DMPK 5 forward 19:45770445-45770466; SpCas9
agtcttccaacggggccc

SEQ ID NO: 3949 - DNA, 25 bp, Artificial Sequence
  Synthetic: DMPK 5 forward 19:45770440-45770468; SpCas9
cactcagtcttccaacggggccccg

SEQ ID NO: 3950 - DNA, 24 bp, Artificial Sequence
  Synthetic: DMPK 5 forward 19:45770441-45770468; SpCas9
actcagtcttccaacggggccccg

SEQ ID NO: 3951 - DNA, 23 bp, Artificial Sequence
  Synthetic: DMPK 5 forward 19:45770442-45770468; SpCas9
ctcagtcttccaacggggccccg

SEQ ID NO: 3952 - DNA, 22 bp, Artificial Sequence
  Synthetic: DMPK 5 forward 19:45770443-45770468; SpCas9
tcagtcttccaacggggccccg

SEQ ID NO: 3953 - DNA, 21 bp, Artificial Sequence
  Synthetic: DMPK 5 forward 19:45770444-45770468; SpCas9
cagtcttccaacggggccccg

SEQ ID NO: 3954 - DNA, 20 bp, Artificial Sequence
  Synthetic: DMPK 5 forward 19:45770445-45770468; SpCas9
agtcttccaacggggccccg

SEQ ID NO: 3955 - DNA, 19 bp, Artificial Sequence
  Synthetic: DMPK 5 forward 19:45770446-45770468; SpCas9
gtcttccaacggggccccg

SEQ ID NO: 3956 - DNA, 18 bp, Artificial Sequence
  Synthetic: DMPK 5 forward 19:45770447-45770468; SpCas9
tcttccaacggggccccg

SEQ ID NO: 3957 - DNA, 25 bp, Artificial Sequence
  Synthetic: DMPK 5 reverse 19:45770442-45770470; SpCas9
gactccggggccccgttggaagact

SEQ ID NO: 3958 - DNA, 24 bp, Artificial Sequence
  Synthetic: DMPK 5 reverse 19:45770443-45770470; SpCas9
actccggggccccgttggaagact

SEQ ID NO: 3959 - DNA, 23 bp, Artificial Sequence
  Synthetic: DMPK 5 reverse 19:45770444-45770470; SpCas9
ctccggggccccgttggaagact

SEQ ID NO: 3960 - DNA, 22 bp, Artificial Sequence
  Synthetic: DMPK 5 reverse 19:45770445-45770470; SpCas9
tccggggccccgttggaagact

SEQ ID NO: 3961 - DNA, 21 bp, Artificial Sequence
  Synthetic: DMPK 5 reverse 19:45770446-45770470; SpCas9
ccggggccccgttggaagact

SEQ ID NO: 3962 - DNA, 20 bp, Artificial Sequence
  Synthetic: DMPK 5 reverse 19:45770447-45770470; SpCas9
cggggccccgttggaagact

SEQ ID NO: 3963 - DNA, 19 bp, Artificial Sequence
  Synthetic: DMPK 5 reverse 19:45770448-45770470; SpCas9
ggggccccgttggaagact

SEQ ID NO: 3964 - DNA, 18 bp, Artificial Sequence
  Synthetic: DMPK 5 reverse 19:45770449-45770470; SpCas9
gggccccgttggaagact

SEQ ID NO: 3965 - DNA, 25 bp, Artificial Sequence
  Synthetic: DMPK 5 forward 19:45770446-45770474; SpCas9
gtcttccaacggggccccggagtcg

SEQ ID NO: 3966 - DNA, 24 bp, Artificial Sequence
  Synthetic: DMPK 5 forward 19:45770447-45770474; SpCas9
tcttccaacggggccccggagtcg

SEQ ID NO: 3967 - DNA, 23 bp, Artificial Sequence
  Synthetic: DMPK 5 forward 19:45770448-45770474; SpCas9
cttccaacggggccccggagtcg

SEQ ID NO: 3968 - DNA, 22 bp, Artificial Sequence
  Synthetic: DMPK 5 forward 19:45770449-45770474; SpCas9
ttccaacggggccccggagtcg

SEQ ID NO: 3969 - DNA, 21 bp, Artificial Sequence
  Synthetic: DMPK 5 forward 19:45770450-45770474; SpCas9
tccaacggggccccggagtcg

SEQ ID NO: 3970 - DNA, 20 bp, Artificial Sequence
  Synthetic: DMPK 5 forward 19:45770451-45770474; SpCas9
ccaacggggccccggagtcg

SEQ ID NO: 3971 - DNA, 19 bp, Artificial Sequence
  Synthetic: DMPK 5 forward 19:45770452-45770474; SpCas9
caacggggccccggagtcg

SEQ ID NO: 3972 - DNA, 18 bp, Artificial Sequence
  Synthetic: DMPK 5 forward 19:45770453-45770474; SpCas9
aacggggccccggagtcg

SEQ ID NO: 3973 - DNA, 25 bp, Artificial Sequence
  Synthetic: DMPK 5 reverse 19:45770448-45770476; SpCas9
gtcttcgactccggggccccgttgg

SEQ ID NO: 3974 - DNA, 24 bp, Artificial Sequence
  Synthetic: DMPK 5 reverse 19:45770449-45770476; SpCas9
tcttcgactccggggccccgttgg

SEQ ID NO: 3975 - DNA, 23 bp, Artificial Sequence
  Synthetic: DMPK 5 reverse 19:45770450-45770476; SpCas9
cttcgactccggggccccgttgg

SEQ ID NO: 3976 - DNA, 22 bp, Artificial Sequence
  Synthetic: DMPK 5 reverse 19:45770451-45770476; SpCas9
ttcgactccggggccccgttgg

SEQ ID NO: 3977 - DNA, 21 bp, Artificial Sequence
  Synthetic: DMPK 5 reverse 19:45770452-45770476; SpCas9
tcgactccggggccccgttgg

SEQ ID NO: 3978 - DNA, 20 bp, Artificial Sequence
  Synthetic: DMPK 5 reverse 19:45770453-45770476; SpCas9
cgactccggggccccgttgg

SEQ ID NO: 3979 - DNA, 19 bp, Artificial Sequence
  Synthetic: DMPK 5 reverse 19:45770454-45770476; SpCas9
gactccggggccccgttgg

SEQ ID NO: 3980 - DNA, 18 bp, Artificial Sequence
  Synthetic: DMPK 5 reverse 19:45770455-45770476; SpCas9
actccggggccccgttgg

SEQ ID NO: 3981 - DNA, 25 bp, Artificial Sequence
  Synthetic: DMPK 5 forward 19:45770450-45770478; SpCas9
tccaacggggccccggagtcgaaga

SEQ ID NO: 3982 - DNA, 24 bp, Artificial Sequence
  Synthetic: DMPK 5 forward 19:45770451-45770478; SpCas9
ccaacggggccccggagtcgaaga

SEQ ID NO: 3983 - DNA, 23 bp, Artificial Sequence
  Synthetic: DMPK 5 forward 19:45770452-45770478; SpCas9
caacggggccccggagtcgaaga

SEQ ID NO: 3984 - DNA, 22 bp, Artificial Sequence
  Synthetic: DMPK 5 forward 19:45770453-45770478; SpCas9
aacggggccccggagtcgaaga

SEQ ID NO: 3985 - DNA, 21 bp, Artificial Sequence
  Synthetic: DMPK 5 forward 19:45770454-45770478; SpCas9
acggggccccggagtcgaaga

SEQ ID NO: 3986 - DNA, 20 bp, Artificial Sequence
  Synthetic: DMPK 5 forward 19:45770455-45770478; SpCas9
cggggccccggagtcgaaga

SEQ ID NO: 3987 - DNA, 19 bp, Artificial Sequence
  Synthetic: DMPK 5 forward 19:45770456-45770478; SpCas9
ggggccccggagtcgaaga

SEQ ID NO: 3988 - DNA, 18 bp, Artificial Sequence
  Synthetic: DMPK 5 forward 19:45770457-45770478; SpCas9
gggccccggagtcgaaga

SEQ ID NO: 3989 - DNA, 25 bp, Artificial Sequence
  Synthetic: DMPK 5 reverse 19:45770451-45770479; SpCas9
actgtcttcgactccggggccccgt

SEQ ID NO: 3990 - DNA, 24 bp, Artificial Sequence
  Synthetic: DMPK 5 reverse 19:45770452-45770479; SpCas9
ctgtcttcgactccggggccccgt

SEQ ID NO: 3991 - DNA, 23 bp, Artificial Sequence
  Synthetic: DMPK 5 reverse 19:45770453-45770479; SpCas9
tgtcttcgactccggggccccgt

SEQ ID NO: 3992 - DNA, 22 bp, Artificial Sequence
  Synthetic: DMPK 5 reverse 19:45770454-45770479; SpCas9
gtcttcgactccggggccccgt

SEQ ID NO: 3993 - DNA, 21 bp, Artificial Sequence
  Synthetic: DMPK 5 reverse 19:45770455-45770479; SpCas9
tcttcgactccggggccccgt

SEQ ID NO: 3994 - DNA, 20 bp, Artificial Sequence
  Synthetic: DMPK 5 reverse 19:45770456-45770479; SpCas9
cttcgactccggggccccgt

SEQ ID NO: 3995 - DNA, 19 bp, Artificial Sequence
  Synthetic: DMPK 5 reverse 19:45770457-45770479; SpCas9
ttcgactccggggccccgt

SEQ ID NO: 3996 - DNA, 18 bp, Artificial Sequence
  Synthetic: DMPK 5 reverse 19:45770458-45770479; SpCas9
tcgactccggggccccgt

SEQ ID NO: 3997 - DNA, 25 bp, Artificial Sequence
  Synthetic: DMPK 5 forward 19:45770456-45770484; SpCas9
ggggccccggagtcgaagacagttc

SEQ ID NO: 3998 - DNA, 24 bp, Artificial Sequence
  Synthetic: DMPK 5 forward 19:45770457-45770484; SpCas9
gggccccggagtcgaagacagttc

SEQ ID NO: 3999 - DNA, 23 bp, Artificial Sequence
  Synthetic: DMPK 5 forward 19:45770458-45770484; SpCas9
ggccccggagtcgaagacagttc

SEQ ID NO: 4000 - DNA, 22 bp, Artificial Sequence
  Synthetic: DMPK 5 forward 19:45770459-45770484; SpCas9
gccccggagtcgaagacagttc

SEQ ID NO: 4001 - DNA, 21 bp, Artificial Sequence
  Synthetic: DMPK 5 forward 19:45770460-45770484; SpCas9
ccccggagtcgaagacagttc

SEQ ID NO: 4002 - DNA, 20 bp, Artificial Sequence
  Synthetic: DMPK 5 forward 19:45770461-45770484; SpCas9
cccggagtcgaagacagttc

SEQ ID NO: 4003 - DNA, 19 bp, Artificial Sequence
  Synthetic: DMPK 5 forward 19:45770462-45770484; SpCas9
ccggagtcgaagacagttc

SEQ ID NO: 4004 - DNA, 18 bp, Artificial Sequence
  Synthetic: DMPK 5 forward 19:45770463-45770484; SpCas9
cggagtcgaagacagttc

SEQ ID NO: 4005 - DNA, 25 bp, Artificial Sequence
  Synthetic: DMPK 5 forward 19:45770457-45770485; SpCas9
gggccccggagtcgaagacagttct

SEQ ID NO: 4006 - DNA, 24 bp, Artificial Sequence
  Synthetic: DMPK 5 forward 19:45770458-45770485; SpCas9
ggccccggagtcgaagacagttct

SEQ ID NO: 4007 - DNA, 23 bp, Artificial Sequence
  Synthetic: DMPK 5 forward 19:45770459-45770485; SpCas9
gccccggagtcgaagacagttct

SEQ ID NO: 4008 - DNA, 22 bp, Artificial Sequence
  Synthetic: DMPK 5 forward 19:45770460-45770485; SpCas9
ccccggagtcgaagacagttct

SEQ ID NO: 4009 - DNA, 21 bp, Artificial Sequence
  Synthetic: DMPK 5 forward 19:45770461-45770485; SpCas9
cccggagtcgaagacagttct

SEQ ID NO: 4010 - DNA, 20 bp, Artificial Sequence
  Synthetic: DMPK 5 forward 19:45770462-45770485; SpCas9
ccggagtcgaagacagttct

SEQ ID NO: 4011 - DNA, 19 bp, Artificial Sequence
  Synthetic: DMPK 5 forward 19:45770463-45770485; SpCas9
cggagtcgaagacagttct

SEQ ID NO: 4012 - DNA, 18 bp, Artificial Sequence
  Synthetic: DMPK 5 forward 19:45770464-45770485; SpCas9
ggagtcgaagacagttct

SEQ ID NO: 4013 - DNA, 25 bp, Artificial Sequence
  Synthetic: DMPK 5 forward 19:45770458-45770486; SpCas9
ggccccggagtcgaagacagttcta

SEQ ID NO: 4014 - DNA, 24 bp, Artificial Sequence
  Synthetic: DMPK 5 forward 19:45770459-45770486; SpCas9
gccccggagtcgaagacagttcta

SEQ ID NO: 4015 - DNA, 23 bp, Artificial Sequence
  Synthetic: DMPK 5 forward 19:45770460-45770486; SpCas9
ccccggagtcgaagacagttcta

SEQ ID NO: 4016 - DNA, 22 bp, Artificial Sequence
  Synthetic: DMPK 5 forward 19:45770461-45770486; SpCas9
cccggagtcgaagacagttcta

SEQ ID NO: 4017 - DNA, 21 bp, Artificial Sequence
  Synthetic: DMPK 5 forward 19:45770462-45770486; SpCas9
ccggagtcgaagacagttcta

SEQ ID NO: 4018 - DNA, 20 bp, Artificial Sequence
  Synthetic: DMPK 5 forward 19:45770463-45770486; SpCas9
cggagtcgaagacagttcta

SEQ ID NO: 4019 - DNA, 19 bp, Artificial Sequence
  Synthetic: DMPK 5 forward 19:45770464-45770486; SpCas9
ggagtcgaagacagttcta

SEQ ID NO: 4020 - DNA, 18 bp, Artificial Sequence
  Synthetic: DMPK 5 forward 19:45770465-45770486; SpCas9
gagtcgaagacagttcta

SEQ ID NO: 4021 - DNA, 25 bp, Artificial Sequence
  Synthetic: DMPK 5 reverse 19:45770460-45770488; SpCas9
aaccctagaactgtcttcgactccg

SEQ ID NO: 4022 - DNA, 24 bp, Artificial Sequence
  Synthetic: DMPK 5 reverse 19:45770461-45770488; SpCas9
accctagaactgtcttcgactccg

SEQ ID NO: 4023 - DNA, 23 bp, Artificial Sequence
  Synthetic: DMPK 5 reverse 19:45770462-45770488; SpCas9
ccctagaactgtcttcgactccg

SEQ ID NO: 4024 - DNA, 22 bp, Artificial Sequence
  Synthetic: DMPK 5 reverse 19:45770463-45770488; SpCas9
cctagaactgtcttcgactccg

SEQ ID NO: 4025 - DNA, 21 bp, Artificial Sequence
  Synthetic: DMPK 5 reverse 19:45770464-45770488; SpCas9
ctagaactgtcttcgactccg

SEQ ID NO: 4026 - DNA, 20 bp, Artificial Sequence
  Synthetic: DMPK 5 reverse 19:45770465-45770488; SpCas9
tagaactgtcttcgactccg

SEQ ID NO: 4027 - DNA, 19 bp, Artificial Sequence
  Synthetic: DMPK 5 reverse 19:45770466-45770488; SpCas9
agaactgtcttcgactccg

SEQ ID NO: 4028 - DNA, 18 bp, Artificial Sequence
  Synthetic: DMPK 5 reverse 19:45770467-45770488; SpCas9
gaactgtcttcgactccg

SEQ ID NO: 4029 - DNA, 25 bp, Artificial Sequence
  Synthetic: DMPK 5 reverse 19:45770461-45770489; SpCas9
gaaccctagaactgtcttcgactcc

SEQ ID NO: 4030 - DNA, 24 bp, Artificial Sequence
  Synthetic: DMPK 5 reverse 19:45770462-45770489; SpCas9
aaccctagaactgtcttcgactcc

SEQ ID NO: 4031 - DNA, 23 bp, Artificial Sequence
  Synthetic: DMPK 5 reverse 19:45770463-45770489; SpCas9
accctagaactgtcttcgactcc

SEQ ID NO: 4032 - DNA, 22 bp, Artificial Sequence
  Synthetic: DMPK 5 reverse 19:45770464-45770489; SpCas9
ccctagaactgtcttcgactcc

SEQ ID NO: 4033 - DNA, 21 bp, Artificial Sequence
  Synthetic: DMPK 5 reverse 19:45770465-45770489; SpCas9
cctagaactgtcttcgactcc

SEQ ID NO: 4034 - DNA, 20 bp, Artificial Sequence
  Synthetic: DMPK 5 reverse 19:45770466-45770489; SpCas9
ctagaactgtcttcgactcc

SEQ ID NO: 4035 - DNA, 19 bp, Artificial Sequence
  Synthetic: DMPK 5 reverse 19:45770467-45770489; SpCas9
tagaactgtcttcgactcc

SEQ ID NO: 4036 - DNA, 18 bp, Artificial Sequence
  Synthetic: DMPK 5 reverse 19:45770468-45770489; SpCas9
agaactgtcttcgactcc

SEQ ID NO: 4037 - DNA, 25 bp, Artificial Sequence
  Synthetic: DMPK 5 reverse 19:45770462-45770490; SpCas9
tgaaccctagaactgtcttcgactc

SEQ ID NO: 4038 - DNA, 24 bp, Artificial Sequence
  Synthetic: DMPK 5 reverse 19:45770463-45770490; SpCas9
gaaccctagaactgtcttcgactc

SEQ ID NO: 4039 - DNA, 23 bp, Artificial Sequence
  Synthetic: DMPK 5 reverse 19:45770464-45770490; SpCas9
aaccctagaactgtcttcgactc

SEQ ID NO: 4040 - DNA, 22 bp, Artificial Sequence
  Synthetic: DMPK 5 reverse 19:45770465-45770490; SpCas9
accctagaactgtcttcgactc

SEQ ID NO: 4041 - DNA, 21 bp, Artificial Sequence
  Synthetic: DMPK 5 reverse 19:45770466-45770490; SpCas9
ccctagaactgtcttcgactc

SEQ ID NO: 4042 - DNA, 20 bp, Artificial Sequence
  Synthetic: DMPK 5 reverse 19:45770467-45770490; SpCas9
cctagaactgtcttcgactc

SEQ ID NO: 4043 - DNA, 19 bp, Artificial Sequence
  Synthetic: DMPK 5 reverse 19:45770468-45770490; SpCas9
ctagaactgtcttcgactc

SEQ ID NO: 4044 - DNA, 18 bp, Artificial Sequence
  Synthetic: DMPK 5 reverse 19:45770469-45770490; SpCas9
tagaactgtcttcgactc

SEQ ID NO: 4045 - DNA, 25 bp, Artificial Sequence
  Synthetic: DMPK 5 forward 19:45770463-45770491; SpCas9
cggagtcgaagacagttctagggtt

SEQ ID NO: 4046 - DNA, 24 bp, Artificial Sequence
  Synthetic: DMPK 5 forward 19:45770464-45770491; SpCas9
ggagtcgaagacagttctagggtt

SEQ ID NO: 4047 - DNA, 23 bp, Artificial Sequence
  Synthetic: DMPK 5 forward 19:45770465-45770491; SpCas9
gagtcgaagacagttctagggtt

SEQ ID NO: 4048 - DNA, 22 bp, Artificial Sequence
  Synthetic: DMPK 5 forward 19:45770466-45770491; SpCas9
agtcgaagacagttctagggtt

SEQ ID NO: 4049 - DNA, 21 bp, Artificial Sequence
  Synthetic: DMPK 5 forward 19:45770467-45770491; SpCas9
gtcgaagacagttctagggtt

SEQ ID NO: 4050 - DNA, 20 bp, Artificial Sequence
  Synthetic: DMPK 5 forward 19:45770468-45770491; SpCas9
tcgaagacagttctagggtt

SEQ ID NO: 4051 - DNA, 19 bp, Artificial Sequence
  Synthetic: DMPK 5 forward 19:45770469-45770491; SpCas9
cgaagacagttctagggtt

SEQ ID NO: 4052 - DNA, 18 bp, Artificial Sequence
  Synthetic: DMPK 5 forward 19:45770470-45770491; SpCas9
gaagacagttctagggtt

SEQ ID NO: 4053 - DNA, 25 bp, Artificial Sequence
  Synthetic: DMPK 5 forward 19:45770464-45770492; SpCas9
ggagtcgaagacagttctagggttc

SEQ ID NO: 4054 - DNA, 24 bp, Artificial Sequence
  Synthetic: DMPK 5 forward 19:45770465-45770492; SpCas9
gagtcgaagacagttctagggttc

SEQ ID NO: 4055 - DNA, 23 bp, Artificial Sequence
  Synthetic: DMPK 5 forward 19:45770466-45770492; SpCas9
agtcgaagacagttctagggttc

SEQ ID NO: 4056 - DNA, 22 bp, Artificial Sequence
  Synthetic: DMPK 5 forward 19:45770467-45770492; SpCas9
gtcgaagacagttctagggttc

SEQ ID NO: 4057 - DNA, 21 bp, Artificial Sequence
  Synthetic: DMPK 5 forward 19:45770468-45770492; SpCas9
tcgaagacagttctagggttc

SEQ ID NO: 4058 - DNA, 20 bp, Artificial Sequence
  Synthetic: DMPK 5 forward 19:45770469-45770492; SpCas9
cgaagacagttctagggttc

SEQ ID NO: 4059 - DNA, 19 bp, Artificial Sequence
  Synthetic: DMPK 5 forward 19:45770470-45770492; SpCas9
gaagacagttctagggttc

SEQ ID NO: 4060 - DNA, 18 bp, Artificial Sequence
  Synthetic: DMPK 5 forward 19:45770471-45770492; SpCas9
aagacagttctagggttc

SEQ ID NO: 4061 - DNA, 25 bp, Artificial Sequence
  Synthetic: DMPK 5 forward 19:45770465-45770493; SpCas9
gagtcgaagacagttctagggttca

SEQ ID NO: 4062 - DNA, 24 bp, Artificial Sequence
  Synthetic: DMPK 5 forward 19:45770466-45770493; SpCas9
agtcgaagacagttctagggttca

SEQ ID NO: 4063 - DNA, 23 bp, Artificial Sequence
  Synthetic: DMPK 5 forward 19:45770467-45770493; SpCas9
gtcgaagacagttctagggttca

SEQ ID NO: 4064 - DNA, 22 bp, Artificial Sequence
  Synthetic: DMPK 5 forward 19:45770468-45770493; SpCas9
tcgaagacagttctagggttca

SEQ ID NO: 4065 - DNA, 21 bp, Artificial Sequence
  Synthetic: DMPK 5 forward 19:45770469-45770493; SpCas9
cgaagacagttctagggttca

SEQ ID NO: 4066 - DNA, 20 bp, Artificial Sequence
  Synthetic: DMPK 5 forward 19:45770470-45770493; SpCas9
gaagacagttctagggttca

SEQ ID NO: 4067 - DNA, 19 bp, Artificial Sequence
  Synthetic: DMPK 5 forward 19:45770471-45770493; SpCas9
aagacagttctagggttca

SEQ ID NO: 4068 - DNA, 18 bp, Artificial Sequence
  Synthetic: DMPK 5 forward 19:45770472-45770493; SpCas9
agacagttctagggttca

SEQ ID NO: 4069 - DNA, 25 bp, Artificial Sequence
  Synthetic: DMPK 5 reverse 19:45770480-45770508; SpCas9
ggagccgcccgcgctccctgaaccc

SEQ ID NO: 4070 - DNA, 24 bp, Artificial Sequence
  Synthetic: DMPK 5 reverse 19:45770481-45770508; SpCas9
gagccgcccgcgctccctgaaccc

SEQ ID NO: 4071 - DNA, 23 bp, Artificial Sequence
  Synthetic: DMPK 5 reverse 19:45770482-45770508; SpCas9
agccgcccgcgctccctgaaccc

SEQ ID NO: 4072 - DNA, 22 bp, Artificial Sequence
  Synthetic: DMPK 5 reverse 19:45770483-45770508; SpCas9
gccgcccgcgctccctgaaccc

SEQ ID NO: 4073 - DNA, 21 bp, Artificial Sequence
  Synthetic: DMPK 5 reverse 19:45770484-45770508; SpCas9
ccgcccgcgctccctgaaccc

SEQ ID NO: 4074 - DNA, 20 bp, Artificial Sequence
  Synthetic: DMPK 5 reverse 19:45770485-45770508; SpCas9
cgcccgcgctccctgaaccc

SEQ ID NO: 4075 - DNA, 19 bp, Artificial Sequence
  Synthetic: DMPK 5 reverse 19:45770486-45770508; SpCas9
gcccgcgctccctgaaccc

SEQ ID NO: 4076 - DNA, 18 bp, Artificial Sequence
  Synthetic: DMPK 5 reverse 19:45770487-45770508; SpCas9
cccgcgctccctgaaccc

SEQ ID NO: 4077 - DNA, 18 bp, Artificial Sequence
  Synthetic: DMPK O reverse 19:45770583-45770605; As/LbCpf1
cctgctcctgttcgccgt

SEQ ID NO: 4078 - DNA, 19 bp, Artificial Sequence
  Synthetic: DMPK O reverse 19:45770583-45770606; As/LbCpf1
cctgctcctgttcgccgtt

SEQ ID NO: 4079 - DNA, 20 bp, Artificial Sequence
  Synthetic: DMPK O reverse 19:45770583-45770607; As/LbCpf1
cctgctcctgttcgccgttg

SEQ ID NO: 4080 - DNA, 21 bp, Artificial Sequence
  Synthetic: DMPK O reverse 19:45770583-45770608; As/LbCpf1
cctgctcctgttcgccgttgt

SEQ ID NO: 4081 - DNA, 22 bp, Artificial Sequence
  Synthetic: DMPK O reverse 19:45770583-45770609; As/LbCpf1
cctgctcctgttcgccgttgtt

SEQ ID NO: 4082 - DNA, 23 bp, Artificial Sequence
  Synthetic: DMPK O reverse 19:45770583-45770610; As/LbCpf1
cctgctcctgttcgccgttgttc

SEQ ID NO: 4083 - DNA, 24 bp, Artificial Sequence
  Synthetic: DMPK O reverse 19:45770583-45770611; As/LbCpf1
cctgctcctgttcgccgttgttct

SEQ ID NO: 4084 - DNA, 25 bp, Artificial Sequence
  Synthetic: DMPK O reverse 19:45770583-45770612; As/LbCpf1
cctgctcctgttcgccgttgttctg

SEQ ID NO: 4085 - DNA, 18 bp, Artificial Sequence
  Synthetic: DMPK O reverse 19:45769669-45769691; AsCpf1-1
cggtttgcgttgtgggcc

SEQ ID NO: 4086 - DNA, 19 bp, Artificial Sequence
  Synthetic: DMPK O reverse 19:45769669-45769692; AsCpf1-1
cggtttgcgttgtgggccg

SEQ ID NO: 4087 - DNA, 20 bp, Artificial Sequence
  Synthetic: DMPK O reverse 19:45769669-45769693; AsCpf1-1
cggtttgcgttgtgggccgg

SEQ ID NO: 4088 - DNA, 21 bp, Artificial Sequence
  Synthetic: DMPK O reverse 19:45769669-45769694; AsCpf1-1
cggtttgcgttgtgggccgga

SEQ ID NO: 4089 - DNA, 22 bp, Artificial Sequence
  Synthetic: DMPK O reverse 19:45769669-45769695; AsCpf1-1
cggtttgcgttgtgggccggag

SEQ ID NO: 4090 - DNA, 23 bp, Artificial Sequence
  Synthetic: DMPK O reverse 19:45769669-45769696; AsCpf1-1
cggtttgcgttgtgggccggagg

SEQ ID NO: 4091 - DNA, 24 bp, Artificial Sequence
  Synthetic: DMPK O reverse 19:45769669-45769697; AsCpf1-1
cggtttgcgttgtgggccggaggc

SEQ ID NO: 4092 - DNA, 25 bp, Artificial Sequence
  Synthetic: DMPK O reverse 19:45769669-45769698; AsCpf1-1
cggtttgcgttgtgggccggaggct

SEQ ID NO: 4093 - DNA, 18 bp, Artificial Sequence
  Synthetic: DMPK O forward 19:45769673-45769695; AsCpf1-1
gcccacaacgcaaaccgc

SEQ ID NO: 4094 - DNA, 19 bp, Artificial Sequence
  Synthetic: DMPK O forward 19:45769673-45769696; AsCpf1-1
gcccacaacgcaaaccgcg

SEQ ID NO: 4095 - DNA, 20 bp, Artificial Sequence
  Synthetic: DMPK O forward 19:45769673-45769697; AsCpf1-1
gcccacaacgcaaaccgcgg

SEQ ID NO: 4096 - DNA, 21 bp, Artificial Sequence
  Synthetic: DMPK O forward 19:45769673-45769698; AsCpf1-1
gcccacaacgcaaaccgcgga

SEQ ID NO: 4097 - DNA, 22 bp, Artificial Sequence
  Synthetic: DMPK O forward 19:45769673-45769699; AsCpf1-1
gcccacaacgcaaaccgcggac

SEQ ID NO: 4098 - DNA, 23 bp, Artificial Sequence
  Synthetic: DMPK O forward 19:45769673-45769700; AsCpf1-1
gcccacaacgcaaaccgcggaca

SEQ ID NO: 4099 - DNA, 24 bp, Artificial Sequence
  Synthetic: DMPK O forward 19:45769673-45769701; AsCpf1-1
gcccacaacgcaaaccgcggacac

SEQ ID NO: 4100 - DNA, 25 bp, Artificial Sequence
  Synthetic: DMPK O forward 19:45769673-45769702; AsCpf1-1
gcccacaacgcaaaccgcggacact

SEQ ID NO: 4101 - DNA, 18 bp, Artificial Sequence
  Synthetic: DMPK O reverse 19:45769678-45769700; AsCpf1-1
cagtgtccgcggtttgcg

SEQ ID NO: 4102 - DNA, 19 bp, Artificial Sequence
  Synthetic: DMPK O reverse 19:45769678-45769701; AsCpf1-1
cagtgtccgcggtttgcgt

SEQ ID NO: 4103 - DNA, 20 bp, Artificial Sequence
  Synthetic: DMPK O reverse 19:45769678-45769702; AsCpf1-1
cagtgtccgcggtttgcgtt

SEQ ID NO: 4104 - DNA, 21 bp, Artificial Sequence
  Synthetic: DMPK O reverse 19:45769678-45769703; AsCpf1-1
cagtgtccgcggtttgcgttg

SEQ ID NO: 4105 - DNA, 22 bp, Artificial Sequence
  Synthetic: DMPK O reverse 19:45769678-45769704; AsCpf1-1
cagtgtccgcggtttgcgttgt

SEQ ID NO: 4106 - DNA, 23 bp, Artificial Sequence
  Synthetic: DMPK O reverse 19:45769678-45769705; AsCpf1-1
cagtgtccgcggtttgcgttgtg

SEQ ID NO: 4107 - DNA, 24 bp, Artificial Sequence
  Synthetic: DMPK O reverse 19:45769678-45769706; AsCpf1-1
cagtgtccgcggtttgcgttgtgg

SEQ ID NO: 4108 - DNA, 25 bp, Artificial Sequence
  Synthetic: DMPK O reverse 19:45769678-45769707; AsCpf1-1
cagtgtccgcggtttgcgttgtggg

SEQ ID NO: 4109 - DNA, 18 bp, Artificial Sequence
  Synthetic: DMPK O reverse 19:45769701-45769723; AsCpf1-1
tctgcccaaagctctgga

SEQ ID NO: 4110 - DNA, 19 bp, Artificial Sequence
  Synthetic: DMPK O reverse 19:45769701-45769724; AsCpf1-1
tctgcccaaagctctggac

SEQ ID NO: 4111 - DNA, 20 bp, Artificial Sequence
  Synthetic: DMPK O reverse 19:45769701-45769725; AsCpf1-1
tctgcccaaagctctggact

SEQ ID NO: 4112 - DNA, 21 bp, Artificial Sequence
  Synthetic: DMPK O reverse 19:45769701-45769726; AsCpf1-1
tctgcccaaagctctggactc

SEQ ID NO: 4113 - DNA, 22 bp, Artificial Sequence
  Synthetic: DMPK O reverse 19:45769701-45769727; AsCpf1-1
tctgcccaaagctctggactcc

SEQ ID NO: 4114 - DNA, 23 bp, Artificial Sequence
  Synthetic: DMPK O reverse 19:45769701-45769728; AsCpf1-1
tctgcccaaagctctggactcca

SEQ ID NO: 4115 - DNA, 24 bp, Artificial Sequence
  Synthetic: DMPK O reverse 19:45769701-45769729; AsCpf1-1
tctgcccaaagctctggactccac

SEQ ID NO: 4116 - DNA, 25 bp, Artificial Sequence
  Synthetic: DMPK O reverse 19:45769701-45769730; AsCpf1-1
tctgcccaaagctctggactccaca

SEQ ID NO: 4117 - DNA, 18 bp, Artificial Sequence
  Synthetic: DMPK O forward 19:45770486-45770508; AsCpf1-1
gggagcgcgggcggctcc

SEQ ID NO: 4118 - DNA, 19 bp, Artificial Sequence
  Synthetic: DMPK O forward 19:45770486-45770509; AsCpf1-1
gggagcgcgggcggctcct

SEQ ID NO: 4119 - DNA, 20 bp, Artificial Sequence
  Synthetic: DMPK O forward 19:45770486-45770510; AsCpf1-1
gggagcgcgggcggctcctg

SEQ ID NO: 4120 - DNA, 21 bp, Artificial Sequence
  Synthetic: DMPK O forward 19:45770486-45770511; AsCpf1-1
gggagcgcgggcggctcctgg

SEQ ID NO: 4121 - DNA, 22 bp, Artificial Sequence
  Synthetic: DMPK O forward 19:45770486-45770512; AsCpf1-1
gggagcgcgggcggctcctggg

SEQ ID NO: 4122 - DNA, 23 bp, Artificial Sequence
  Synthetic: DMPK O forward 19:45770486-45770513; AsCpf1-1
gggagcgcgggcggctcctgggc

SEQ ID NO: 4123 - DNA, 24 bp, Artificial Sequence
  Synthetic: DMPK O forward 19:45770486-45770514; AsCpf1-1
gggagcgcgggcggctcctgggcg

SEQ ID NO: 4124 - DNA, 25 bp, Artificial Sequence
  Synthetic: DMPK O forward 19:45770486-45770515; AsCpf1-1
gggagcgcgggcggctcctgggcgg

SEQ ID NO: 4125 - DNA, 18 bp, Artificial Sequence
  Synthetic: DMPK O reverse 19:45770569-45770591; AsCpf1-1
ccgttgttctgtctcgtg

SEQ ID NO: 4126 - DNA, 19 bp, Artificial Sequence
  Synthetic: DMPK O reverse 19:45770569-45770592; AsCpf1-1
ccgttgttctgtctcgtgc

SEQ ID NO: 4127 - DNA, 20 bp, Artificial Sequence
  Synthetic: DMPK O reverse 19:45770569-45770593; AsCpf1-1
ccgttgttctgtctcgtgcc

SEQ ID NO: 4128 - DNA, 21 bp, Artificial Sequence
  Synthetic: DMPK O reverse 19:45770569-45770594; AsCpf1-1
ccgttgttctgtctcgtgccg

SEQ ID NO: 4129 - DNA, 22 bp, Artificial Sequence
  Synthetic: DMPK O reverse 19:45770569-45770595; AsCpf1-1
ccgttgttctgtctcgtgccgc

SEQ ID NO: 4130 - DNA, 23 bp, Artificial Sequence
  Synthetic: DMPK O reverse 19:45770569-45770596; AsCpf1-1
ccgttgttctgtctcgtgccgcc

SEQ ID NO: 4131 - DNA, 24 bp, Artificial Sequence
  Synthetic: DMPK O reverse 19:45770569-45770597; AsCpf1-1
ccgttgttctgtctcgtgccgccg

SEQ ID NO: 4132 - DNA, 25 bp, Artificial Sequence
  Synthetic: DMPK O reverse 19:45770569-45770598; AsCpf1-1
ccgttgttctgtctcgtgccgccgc

SEQ ID NO: 4133 - DNA, 18 bp, Artificial Sequence
  Synthetic: DMPK O reverse 19:45770581-45770603; AsCpf1-1
tgctcctgttcgccgttg

SEQ ID NO: 4134 - DNA, 19 bp, Artificial Sequence
  Synthetic: DMPK O reverse 19:45770581-45770604; AsCpf1-1
tgctcctgttcgccgttgt

SEQ ID NO: 4135 - DNA, 20 bp, Artificial Sequence
  Synthetic: DMPK O reverse 19:45770581-45770605; AsCpf1-1
tgctcctgttcgccgttgtt

SEQ ID NO: 4136 - DNA, 21 bp, Artificial Sequence
  Synthetic: DMPK O reverse 19:45770581-45770606; AsCpf1-1
tgctcctgttcgccgttgttc

SEQ ID NO: 4137 - DNA, 22 bp, Artificial Sequence
  Synthetic: DMPK O reverse 19:45770581-45770607; AsCpf1-1
tgctcctgttcgccgttgttct

SEQ ID NO: 4138 - DNA, 23 bp, Artificial Sequence
  Synthetic: DMPK O reverse 19:45770581-45770608; AsCpf1-1
tgctcctgttcgccgttgttctg

SEQ ID NO: 4139 - DNA, 24 bp, Artificial Sequence
  Synthetic: DMPK O reverse 19:45770581-45770609; AsCpf1-1
tgctcctgttcgccgttgttctgt

SEQ ID NO: 4140 - DNA, 25 bp, Artificial Sequence
  Synthetic: DMPK O reverse 19:45770581-45770610; AsCpf1-1
tgctcctgttcgccgttgttctgtc

SEQ ID NO: 4141 - DNA, 18 bp, Artificial Sequence
  Synthetic: DMPK O reverse 19:45770582-45770604; AsCpf1-1
ctgctcctgttcgccgtt

SEQ ID NO: 4142 - DNA, 19 bp, Artificial Sequence
  Synthetic: DMPK O reverse 19:45770582-45770605; AsCpf1-1
ctgctcctgttcgccgttg

SEQ ID NO: 4143 - DNA, 20 bp, Artificial Sequence
  Synthetic: DMPK O reverse 19:45770582-45770606; AsCpf1-1
ctgctcctgttcgccgttgt

SEQ ID NO: 4144 - DNA, 21 bp, Artificial Sequence
  Synthetic: DMPK O reverse 19:45770582-45770607; AsCpf1-1
ctgctcctgttcgccgttgtt

SEQ ID NO: 4145 - DNA, 22 bp, Artificial Sequence
  Synthetic: DMPK O reverse 19:45770582-45770608; AsCpf1-1
ctgctcctgttcgccgttgttc

SEQ ID NO: 4146 - DNA, 23 bp, Artificial Sequence
  Synthetic: DMPK O reverse 19:45770582-45770609; AsCpf1-1
ctgctcctgttcgccgttgttct

SEQ ID NO: 4147 - DNA, 24 bp, Artificial Sequence
  Synthetic: DMPK O reverse 19:45770582-45770610; AsCpf1-1
ctgctcctgttcgccgttgttctg

SEQ ID NO: 4148 - DNA, 25 bp, Artificial Sequence
  Synthetic: DMPK O reverse 19:45770582-45770611; AsCpf1-1
ctgctcctgttcgccgttgttctgt

SEQ ID NO: 4149 - DNA, 18 bp, Artificial Sequence
  Synthetic: DMPK O reverse 19:45770610-45770632; AsCpf1-1
taggcctggcctatcgga

SEQ ID NO: 4150 - DNA, 19 bp, Artificial Sequence
  Synthetic: DMPK O reverse 19:45770610-45770633; AsCpf1-1
taggcctggcctatcggag

SEQ ID NO: 4151 - DNA, 20 bp, Artificial Sequence
  Synthetic: DMPK O reverse 19:45770610-45770634; AsCpf1-1
taggcctggcctatcggagg

SEQ ID NO: 4152 - DNA, 21 bp, Artificial Sequence
  Synthetic: DMPK O reverse 19:45770610-45770635; AsCpf1-1
taggcctggcctatcggaggc

SEQ ID NO: 4153 - DNA, 22 bp, Artificial Sequence
  Synthetic: DMPK O reverse 19:45770610-45770636; AsCpf1-1
taggcctggcctatcggaggcg

SEQ ID NO: 4154 - DNA, 23 bp, Artificial Sequence
  Synthetic: DMPK O reverse 19:45770610-45770637; AsCpf1-1
taggcctggcctatcggaggcgc

SEQ ID NO: 4155 - DNA, 24 bp, Artificial Sequence
  Synthetic: DMPK O reverse 19:45770610-45770638; AsCpf1-1
taggcctggcctatcggaggcgct

SEQ ID NO: 4156 - DNA, 25 bp, Artificial Sequence
  Synthetic: DMPK O reverse 19:45770610-45770639; AsCpf1-1
taggcctggcctatcggaggcgctt

SEQ ID NO: 4157 - DNA, 18 bp, Artificial Sequence
  Synthetic: DMPK O reverse 19:45770595-45770617; AsCpf1-2
ggaggcgctttccctgct

SEQ ID NO: 4158 - DNA, 19 bp, Artificial Sequence
  Synthetic: DMPK O reverse 19:45770595-45770618; AsCpf1-2
ggaggcgctttccctgctc

SEQ ID NO: 4159 - DNA, 20 bp, Artificial Sequence
  Synthetic: DMPK O reverse 19:45770595-45770619; AsCpf1-2
ggaggcgctttccctgctcc

SEQ ID NO: 4160 - DNA, 21 bp, Artificial Sequence
  Synthetic: DMPK O reverse 19:45770595-45770620; AsCpf1-2
ggaggcgctttccctgctcct

SEQ ID NO: 4161 - DNA, 22 bp, Artificial Sequence
  Synthetic: DMPK O reverse 19:45770595-45770621; AsCpf1-2
ggaggcgctttccctgctcctg

SEQ ID NO: 4162 - DNA, 23 bp, Artificial Sequence
  Synthetic: DMPK O reverse 19:45770595-45770622; AsCpf1-2
ggaggcgctttccctgctcctgt

SEQ ID NO: 4163 - DNA, 24 bp, Artificial Sequence
  Synthetic: DMPK O reverse 19:45770595-45770623; AsCpf1-2
ggaggcgctttccctgctcctgtt

SEQ ID NO: 4164 - DNA, 25 bp, Artificial Sequence
  Synthetic: DMPK O reverse 19:45770595-45770624; AsCpf1-2
ggaggcgctttccctgctcctgttc

SEQ ID NO: 4165 - DNA, 25 bp, Artificial Sequence
  Synthetic: DMPK O forward 19:45769668-45769699; SaCas9
gagcctccggcccacaacgcaaacc

SEQ ID NO: 4166 - DNA, 24 bp, Artificial Sequence
  Synthetic: DMPK O forward 19:45769669-45769699; SaCas9
agcctccggcccacaacgcaaacc

SEQ ID NO: 4167 - DNA, 23 bp, Artificial Sequence
  Synthetic: DMPK O forward 19:45769670-45769699; SaCas9
gcctccggcccacaacgcaaacc

SEQ ID NO: 4168 - DNA, 22 bp, Artificial Sequence
  Synthetic: DMPK O forward 19:45769671-45769699; SaCas9
cctccggcccacaacgcaaacc

SEQ ID NO: 4169 - DNA, 21 bp, Artificial Sequence
  Synthetic: DMPK O forward 19:45769672-45769699; SaCas9
ctccggcccacaacgcaaacc

SEQ ID NO: 4170 - DNA, 20 bp, Artificial Sequence
  Synthetic: DMPK O forward 19:45769673-45769699; SaCas9
tccggcccacaacgcaaacc

SEQ ID NO: 4171 - DNA, 19 bp, Artificial Sequence
  Synthetic: DMPK O forward 19:45769674-45769699; SaCas9
ccggcccacaacgcaaacc

SEQ ID NO: 4172 - DNA, 18 bp, Artificial Sequence
  Synthetic: DMPK O forward 19:45769675-45769699; SaCas9
cggcccacaacgcaaacc

SEQ ID NO: 4173 - DNA, 25 bp, Artificial Sequence
  Synthetic: DMPK O reverse 19:45769671-45769702; SaCas9
agtgtccgcggtttgcgttgtgggc

SEQ ID NO: 4174 - DNA, 24 bp, Artificial Sequence
  Synthetic: DMPK O reverse 19:45769672-45769702; SaCas9
gtgtccgcggtttgcgttgtgggc

SEQ ID NO: 4175 - DNA, 23 bp, Artificial Sequence
  Synthetic: DMPK O reverse 19:45769673-45769702; SaCas9
tgtccgcggtttgcgttgtgggc

SEQ ID NO: 4176 - DNA, 22 bp, Artificial Sequence
  Synthetic: DMPK O reverse 19:45769674-45769702; SaCas9
gtccgcggtttgcgttgtgggc

SEQ ID NO: 4177 - DNA, 21 bp, Artificial Sequence
  Synthetic: DMPK O reverse 19:45769675-45769702; SaCas9
tccgcggtttgcgttgtgggc

SEQ ID NO: 4178 - DNA, 20 bp, Artificial Sequence
  Synthetic: DMPK O reverse 19:45769676-45769702; SaCas9
ccgcggtttgcgttgtgggc

SEQ ID NO: 4179 - DNA, 19 bp, Artificial Sequence
  Synthetic: DMPK O reverse 19:45769677-45769702; SaCas9
cgcggtttgcgttgtgggc

SEQ ID NO: 4180 - DNA, 18 bp, Artificial Sequence
  Synthetic: DMPK O reverse 19:45769678-45769702; SaCas9
gcggtttgcgttgtgggc

SEQ ID NO: 4181 - DNA, 25 bp, Artificial Sequence
  Synthetic: DMPK O reverse 19:45769672-45769703; SaCas9
cagtgtccgcggtttgcgttgtggg

SEQ ID NO: 4182 - DNA, 24 bp, Artificial Sequence
  Synthetic: DMPK O reverse 19:45769673-45769703; SaCas9
agtgtccgcggtttgcgttgtggg

SEQ ID NO: 4183 - DNA, 23 bp, Artificial Sequence
  Synthetic: DMPK O reverse 19:45769674-45769703; SaCas9
gtgtccgcggtttgcgttgtggg

SEQ ID NO: 4184 - DNA, 22 bp, Artificial Sequence
  Synthetic: DMPK O reverse 19:45769675-45769703; SaCas9
tgtccgcggtttgcgttgtggg

SEQ ID NO: 4185 - DNA, 21 bp, Artificial Sequence
  Synthetic: DMPK O reverse 19:45769676-45769703; SaCas9
gtccgcggtttgcgttgtggg

SEQ ID NO: 4186 - DNA, 20 bp, Artificial Sequence
  Synthetic: DMPK O reverse 19:45769677-45769703; SaCas9
tccgcggtttgcgttgtggg

SEQ ID NO: 4187 - DNA, 19 bp, Artificial Sequence
  Synthetic: DMPK O reverse 19:45769678-45769703; SaCas9
ccgcggtttgcgttgtggg

SEQ ID NO: 4188 - DNA, 18 bp, Artificial Sequence
  Synthetic: DMPK O reverse 19:45769679-45769703; SaCas9
cgcggtttgcgttgtggg

SEQ ID NO: 4189 - DNA, 25 bp, Artificial Sequence
  Synthetic: DMPK O forward 19:45769677-45769708; SaCas9
gcccacaacgcaaaccgcggacact

SEQ ID NO: 4190 - DNA, 24 bp, Artificial Sequence
  Synthetic: DMPK O forward 19:45769678-45769708; SaCas9
cccacaacgcaaaccgcggacact

SEQ ID NO: 4191 - DNA, 23 bp, Artificial Sequence
  Synthetic: DMPK O forward 19:45769679-45769708; SaCas9
ccacaacgcaaaccgcggacact

SEQ ID NO: 4192 - DNA, 22 bp, Artificial Sequence
  Synthetic: DMPK O forward 19:45769680-45769708; SaCas9
cacaacgcaaaccgcggacact

SEQ ID NO: 4193 - DNA, 21 bp, Artificial Sequence
  Synthetic: DMPK O forward 19:45769681-45769708; SaCas9
acaacgcaaaccgcggacact

SEQ ID NO: 4194 - DNA, 20 bp, Artificial Sequence
  Synthetic: DMPK O forward 19:45769682-45769708; SaCas9
caacgcaaaccgcggacact

SEQ ID NO: 4195 - DNA, 19 bp, Artificial Sequence
  Synthetic: DMPK O forward 19:45769683-45769708; SaCas9
aacgcaaaccgcggacact

SEQ ID NO: 4196 - DNA, 18 bp, Artificial Sequence
  Synthetic: DMPK O forward 19:45769684-45769708; SaCas9
acgcaaaccgcggacact

SEQ ID NO: 4197 - DNA, 25 bp, Artificial Sequence
  Synthetic: DMPK O reverse 19:45769677-45769708; SaCas9
ctccacagtgtccgcggtttgcgtt

SEQ ID NO: 4198 - DNA, 24 bp, Artificial Sequence
  Synthetic: DMPK O reverse 19:45769678-45769708; SaCas9
tccacagtgtccgcggtttgcgtt

SEQ ID NO: 4199 - DNA, 23 bp, Artificial Sequence
  Synthetic: DMPK O reverse 19:45769679-45769708; SaCas9
ccacagtgtccgcggtttgcgtt

SEQ ID NO: 4200 - DNA, 22 bp, Artificial Sequence
  Synthetic: DMPK O reverse 19:45769680-45769708; SaCas9
cacagtgtccgcggtttgcgtt

SEQ ID NO: 4201 - DNA, 21 bp, Artificial Sequence
  Synthetic: DMPK O reverse 19:45769681-45769708; SaCas9
acagtgtccgcggtttgcgtt

SEQ ID NO: 4202 - DNA, 20 bp, Artificial Sequence
  Synthetic: DMPK O reverse 19:45769682-45769708; SaCas9
cagtgtccgcggtttgcgtt

SEQ ID NO: 4203 - DNA, 19 bp, Artificial Sequence
  Synthetic: DMPK O reverse 19:45769683-45769708; SaCas9
agtgtccgcggtttgcgtt

SEQ ID NO: 4204 - DNA, 18 bp, Artificial Sequence
  Synthetic: DMPK O reverse 19:45769684-45769708; SaCas9
gtgtccgcggtttgcgtt

SEQ ID NO: 4205 - DNA, 25 bp, Artificial Sequence
  Synthetic: DMPK O forward 19:45769678-45769709; SaCas9
cccacaacgcaaaccgcggacactg

SEQ ID NO: 4206 - DNA, 24 bp, Artificial Sequence
  Synthetic: DMPK O forward 19:45769679-45769709; SaCas9
ccacaacgcaaaccgcggacactg

SEQ ID NO: 4207 - DNA, 23 bp, Artificial Sequence
  Synthetic: DMPK O forward 19:45769680-45769709; SaCas9
cacaacgcaaaccgcggacactg

SEQ ID NO: 4208 - DNA, 22 bp, Artificial Sequence
  Synthetic: DMPK O forward 19:45769681-45769709; SaCas9
acaacgcaaaccgcggacactg

SEQ ID NO: 4209 - DNA, 21 bp, Artificial Sequence
  Synthetic: DMPK O forward 19:45769682-45769709; SaCas9
caacgcaaaccgcggacactg

SEQ ID NO: 4210 - DNA, 20 bp, Artificial Sequence
  Synthetic: DMPK O forward 19:45769683-45769709; SaCas9
aacgcaaaccgcggacactg

SEQ ID NO: 4211 - DNA, 19 bp, Artificial Sequence
  Synthetic: DMPK O forward 19:45769684-45769709; SaCas9
acgcaaaccgcggacactg

SEQ ID NO: 4212 - DNA, 18 bp, Artificial Sequence
  Synthetic: DMPK O forward 19:45769685-45769709; SaCas9
cgcaaaccgcggacactg

SEQ ID NO: 4213 - DNA, 25 bp, Artificial Sequence
  Synthetic: DMPK O forward 19:45769685-45769716; SaCas9
cgcaaaccgcggacactgtggagtc

SEQ ID NO: 4214 - DNA, 24 bp, Artificial Sequence
  Synthetic: DMPK O forward 19:45769686-45769716; SaCas9
gcaaaccgcggacactgtggagtc

SEQ ID NO: 4215 - DNA, 23 bp, Artificial Sequence
  Synthetic: DMPK O forward 19:45769687-45769716; SaCas9
caaaccgcggacactgtggagtc

SEQ ID NO: 4216 - DNA, 22 bp, Artificial Sequence
  Synthetic: DMPK O forward 19:45769688-45769716; SaCas9
aaaccgcggacactgtggagtc

SEQ ID NO: 4217 - DNA, 21 bp, Artificial Sequence
  Synthetic: DMPK O forward 19:45769689-45769716; SaCas9
aaccgcggacactgtggagtc

SEQ ID NO: 4218 - DNA, 20 bp, Artificial Sequence
  Synthetic: DMPK O forward 19:45769690-45769716; SaCas9
accgcggacactgtggagtc

SEQ ID NO: 4219 - DNA, 19 bp, Artificial Sequence
  Synthetic: DMPK O forward 19:45769691-45769716; SaCas9
ccgcggacactgtggagtc

SEQ ID NO: 4220 - DNA, 18 bp, Artificial Sequence
  Synthetic: DMPK O forward 19:45769692-45769716; SaCas9
cgcggacactgtggagtc

SEQ ID NO: 4221 - DNA, 25 bp, Artificial Sequence
  Synthetic: DMPK O forward 19:45769692-45769723; SaCas9
cgcggacactgtggagtccagagct

SEQ ID NO: 4222 - DNA, 24 bp, Artificial Sequence
  Synthetic: DMPK O forward 19:45769693-45769723; SaCas9
gcggacactgtggagtccagagct

SEQ ID NO: 4223 - DNA, 23 bp, Artificial Sequence
  Synthetic: DMPK O forward 19:45769694-45769723; SaCas9
cggacactgtggagtccagagct

SEQ ID NO: 4224 - DNA, 22 bp, Artificial Sequence
  Synthetic: DMPK O forward 19:45769695-45769723; SaCas9
ggacactgtggagtccagagct

SEQ ID NO: 4225 - DNA, 21 bp, Artificial Sequence
  Synthetic: DMPK O forward 19:45769696-45769723; SaCas9
gacactgtggagtccagagct

SEQ ID NO: 4226 - DNA, 20 bp, Artificial Sequence
  Synthetic: DMPK O forward 19:45769697-45769723; SaCas9
acactgtggagtccagagct

SEQ ID NO: 4227 - DNA, 19 bp, Artificial Sequence
  Synthetic: DMPK O forward 19:45769698-45769723; SaCas9
cactgtggagtccagagct

SEQ ID NO: 4228 - DNA, 18 bp, Artificial Sequence
  Synthetic: DMPK O forward 19:45769699-45769723; SaCas9
actgtggagtccagagct

SEQ ID NO: 4229 - DNA, 25 bp, Artificial Sequence
  Synthetic: DMPK O forward 19:45770471-45770502; SaCas9
aagacagttctagggttcagggagc

SEQ ID NO: 4230 - DNA, 24 bp, Artificial Sequence
  Synthetic: DMPK O forward 19:45770472-45770502; SaCas9
agacagttctagggttcagggagc

SEQ ID NO: 4231 - DNA, 23 bp, Artificial Sequence
  Synthetic: DMPK O forward 19:45770473-45770502; SaCas9
gacagttctagggttcagggagc

SEQ ID NO: 4232 - DNA, 22 bp, Artificial Sequence
  Synthetic: DMPK O forward 19:45770474-45770502; SaCas9
acagttctagggttcagggagc

SEQ ID NO: 4233 - DNA, 21 bp, Artificial Sequence
  Synthetic: DMPK O forward 19:45770475-45770502; SaCas9
cagttctagggttcagggagc

SEQ ID NO: 4234 - DNA, 20 bp, Artificial Sequence
  Synthetic: DMPK O forward 19:45770476-45770502; SaCas9
agttctagggttcagggagc

SEQ ID NO: 4235 - DNA, 19 bp, Artificial Sequence
  Synthetic: DMPK O forward 19:45770477-45770502; SaCas9
gttctagggttcagggagc

SEQ ID NO: 4236 - DNA, 18 bp, Artificial Sequence
  Synthetic: DMPK O forward 19:45770478-45770502; SaCas9
ttctagggttcagggagc

SEQ ID NO: 4237 - DNA, 25 bp, Artificial Sequence
  Synthetic: DMPK O forward 19:45770482-45770513; SaCas9
agggttcagggagcgcgggcggctc

SEQ ID NO: 4238 - DNA, 24 bp, Artificial Sequence
  Synthetic: DMPK O forward 19:45770483-45770513; SaCas9
gggttcagggagcgcgggcggctc

SEQ ID NO: 4239 - DNA, 23 bp, Artificial Sequence
  Synthetic: DMPK O forward 19:45770484-45770513; SaCas9
ggttcagggagcgcgggcggctc

SEQ ID NO: 4240 - DNA, 22 bp, Artificial Sequence
  Synthetic: DMPK O forward 19:45770485-45770513; SaCas9
gttcagggagcgcgggcggctc

SEQ ID NO: 4241 - DNA, 21 bp, Artificial Sequence
  Synthetic: DMPK O forward 19:45770486-45770513; SaCas9
ttcagggagcgcgggcggctc

SEQ ID NO: 4242 - DNA, 20 bp, Artificial Sequence
  Synthetic: DMPK O forward 19:45770487-45770513; SaCas9
tcagggagcgcgggcggctc

SEQ ID NO: 4243 - DNA, 19 bp, Artificial Sequence
  Synthetic: DMPK O forward 19:45770488-45770513; SaCas9
cagggagcgcgggcggctc

SEQ ID NO: 4244 - DNA, 18 bp, Artificial Sequence
  Synthetic: DMPK O forward 19:45770489-45770513; SaCas9
agggagcgcgggcggctc

SEQ ID NO: 4245 - DNA, 25 bp, Artificial Sequence
  Synthetic: DMPK O reverse 19:45770485-45770516; SaCas9
gccgcccaggagccgcccgcgctcc

SEQ ID NO: 4246 - DNA, 24 bp, Artificial Sequence
  Synthetic: DMPK O reverse 19:45770486-45770516; SaCas9
ccgcccaggagccgcccgcgctcc

SEQ ID NO: 4247 - DNA, 23 bp, Artificial Sequence
  Synthetic: DMPK O reverse 19:45770487-45770516; SaCas9
cgcccaggagccgcccgcgctcc

SEQ ID NO: 4248 - DNA, 22 bp, Artificial Sequence
  Synthetic: DMPK O reverse 19:45770488-45770516; SaCas9
gcccaggagccgcccgcgctcc

SEQ ID NO: 4249 - DNA, 21 bp, Artificial Sequence
  Synthetic: DMPK O reverse 19:45770489-45770516; SaCas9
cccaggagccgcccgcgctcc

SEQ ID NO: 4250 - DNA, 20 bp, Artificial Sequence
  Synthetic: DMPK O reverse 19:45770490-45770516; SaCas9
ccaggagccgcccgcgctcc

SEQ ID NO: 4251 - DNA, 19 bp, Artificial Sequence
  Synthetic: DMPK O reverse 19:45770491-45770516; SaCas9
caggagccgcccgcgctcc

SEQ ID NO: 4252 - DNA, 18 bp, Artificial Sequence
  Synthetic: DMPK O reverse 19:45770492-45770516; SaCas9
aggagccgcccgcgctcc

SEQ ID NO: 4253 - DNA, 25 bp, Artificial Sequence
  Synthetic: DMPK O forward 19:45770502-45770533; SaCas9
ggctcctgggcggcgccagactgcg

SEQ ID NO: 4254 - DNA, 24 bp, Artificial Sequence
  Synthetic: DMPK O forward 19:45770503-45770533; SaCas9
gctcctgggcggcgccagactgcg

SEQ ID NO: 4255 - DNA, 23 bp, Artificial Sequence
  Synthetic: DMPK O forward 19:45770504-45770533; SaCas9
ctcctgggcggcgccagactgcg

SEQ ID NO: 4256 - DNA, 22 bp, Artificial Sequence
  Synthetic: DMPK O forward 19:45770505-45770533; SaCas9
tcctgggcggcgccagactgcg

SEQ ID NO: 4257 - DNA, 21 bp, Artificial Sequence
  Synthetic: DMPK O forward 19:45770506-45770533; SaCas9
cctgggcggcgccagactgcg

SEQ ID NO: 4258 - DNA, 20 bp, Artificial Sequence
  Synthetic: DMPK O forward 19:45770507-45770533; SaCas9
ctgggcggcgccagactgcg

SEQ ID NO: 4259 - DNA, 19 bp, Artificial Sequence
  Synthetic: DMPK O forward 19:45770508-45770533; SaCas9
tgggcggcgccagactgcg

SEQ ID NO: 4260 - DNA, 18 bp, Artificial Sequence
  Synthetic: DMPK O forward 19:45770509-45770533; SaCas9
gggcggcgccagactgcg

SEQ ID NO: 4261 - DNA, 25 bp, Artificial Sequence
  Synthetic: DMPK O reverse 19:45770503-45770534; SaCas9
aactcaccgcagtctggcgccgccc

SEQ ID NO: 4262 - DNA, 24 bp, Artificial Sequence
  Synthetic: DMPK O reverse 19:45770504-45770534; SaCas9
actcaccgcagtctggcgccgccc

SEQ ID NO: 4263 - DNA, 23 bp, Artificial Sequence
  Synthetic: DMPK O reverse 19:45770505-45770534; SaCas9
ctcaccgcagtctggcgccgccc

SEQ ID NO: 4264 - DNA, 22 bp, Artificial Sequence
  Synthetic: DMPK O reverse 19:45770506-45770534; SaCas9
tcaccgcagtctggcgccgccc

SEQ ID NO: 4265 - DNA, 21 bp, Artificial Sequence
  Synthetic: DMPK O reverse 19:45770507-45770534; SaCas9
caccgcagtctggcgccgccc

SEQ ID NO: 4266 - DNA, 20 bp, Artificial Sequence
  Synthetic: DMPK O reverse 19:45770508-45770534; SaCas9
accgcagtctggcgccgccc

SEQ ID NO: 4267 - DNA, 19 bp, Artificial Sequence
  Synthetic: DMPK O reverse 19:45770509-45770534; SaCas9
ccgcagtctggcgccgccc

SEQ ID NO: 4268 - DNA, 18 bp, Artificial Sequence
  Synthetic: DMPK O reverse 19:45770510-45770534; SaCas9
cgcagtctggcgccgccc

SEQ ID NO: 4269 - DNA, 25 bp, Artificial Sequence
  Synthetic: DMPK O reverse 19:45770504-45770535; SaCas9
caactcaccgcagtctggcgccgcc

SEQ ID NO: 4270 - DNA, 24 bp, Artificial Sequence
  Synthetic: DMPK O reverse 19:45770505-45770535; SaCas9
aactcaccgcagtctggcgccgcc

SEQ ID NO: 4271 - DNA, 23 bp, Artificial Sequence
  Synthetic: DMPK O reverse 19:45770506-45770535; SaCas9
actcaccgcagtctggcgccgcc

SEQ ID NO: 4272 - DNA, 22 bp, Artificial Sequence
  Synthetic: DMPK O reverse 19:45770507-45770535; SaCas9
ctcaccgcagtctggcgccgcc

SEQ ID NO: 4273 - DNA, 21 bp, Artificial Sequence
  Synthetic: DMPK O reverse 19:45770508-45770535; SaCas9
tcaccgcagtctggcgccgcc

SEQ ID NO: 4274 - DNA, 20 bp, Artificial Sequence
  Synthetic: DMPK O reverse 19:45770509-45770535; SaCas9
caccgcagtctggcgccgcc

SEQ ID NO: 4275 - DNA, 19 bp, Artificial Sequence
  Synthetic: DMPK O reverse 19:45770510-45770535; SaCas9
accgcagtctggcgccgcc

SEQ ID NO: 4276 - DNA, 18 bp, Artificial Sequence
  Synthetic: DMPK O reverse 19:45770511-45770535; SaCas9
ccgcagtctggcgccgcc

SEQ ID NO: 4277 - DNA, 25 bp, Artificial Sequence
  Synthetic: DMPK O forward 19:45770516-45770547; SaCas9
gccagactgcggtgagttggccggc

SEQ ID NO: 4278 - DNA, 24 bp, Artificial Sequence
  Synthetic: DMPK O forward 19:45770517-45770547; SaCas9
ccagactgcggtgagttggccggc

SEQ ID NO: 4279 - DNA, 23 bp, Artificial Sequence
  Synthetic: DMPK O forward 19:45770518-45770547; SaCas9
cagactgcggtgagttggccggc

SEQ ID NO: 4280 - DNA, 22 bp, Artificial Sequence
  Synthetic: DMPK O forward 19:45770519-45770547; SaCas9
agactgcggtgagttggccggc

SEQ ID NO: 4281 - DNA, 21 bp, Artificial Sequence
  Synthetic: DMPK O forward 19:45770520-45770547; SaCas9
gactgcggtgagttggccggc

SEQ ID NO: 4282 - DNA, 20 bp, Artificial Sequence
  Synthetic: DMPK O forward 19:45770521-45770547; SaCas9
actgcggtgagttggccggc

SEQ ID NO: 4283 - DNA, 19 bp, Artificial Sequence
  Synthetic: DMPK O forward 19:45770522-45770547; SaCas9
ctgcggtgagttggccggc

SEQ ID NO: 4284 - DNA, 18 bp, Artificial Sequence
  Synthetic: DMPK O forward 19:45770523-45770547; SaCas9
tgcggtgagttggccggc

SEQ ID NO: 4285 - DNA, 25 bp, Artificial Sequence
  Synthetic: DMPK O forward 19:45770540-45770571; SaCas9
cgtgggccaccaacccaatgcagcc

SEQ ID NO: 4286 - DNA, 24 bp, Artificial Sequence
  Synthetic: DMPK O forward 19:45770541-45770571; SaCas9
gtgggccaccaacccaatgcagcc

SEQ ID NO: 4287 - DNA, 23 bp, Artificial Sequence
  Synthetic: DMPK O forward 19:45770542-45770571; SaCas9
tgggccaccaacccaatgcagcc

SEQ ID NO: 4288 - DNA, 22 bp, Artificial Sequence
  Synthetic: DMPK O forward 19:45770543-45770571; SaCas9
gggccaccaacccaatgcagcc

SEQ ID NO: 4289 - DNA, 21 bp, Artificial Sequence
  Synthetic: DMPK O forward 19:45770544-45770571; SaCas9
ggccaccaacccaatgcagcc

SEQ ID NO: 4290 - DNA, 20 bp, Artificial Sequence
  Synthetic: DMPK O forward 19:45770545-45770571; SaCas9
gccaccaacccaatgcagcc

SEQ ID NO: 4291 - DNA, 19 bp, Artificial Sequence
  Synthetic: DMPK O forward 19:45770546-45770571; SaCas9
ccaccaacccaatgcagcc

SEQ ID NO: 4292 - DNA, 18 bp, Artificial Sequence
  Synthetic: DMPK O forward 19:45770547-45770571; SaCas9
caccaacccaatgcagcc

SEQ ID NO: 4293 - DNA, 25 bp, Artificial Sequence
  Synthetic: DMPK O forward 19:45770552-45770583; SaCas9
acccaatgcagcccagggcggcggc

SEQ ID NO: 4294 - DNA, 24 bp, Artificial Sequence
  Synthetic: DMPK O forward 19:45770553-45770583; SaCas9
cccaatgcagcccagggcggcggc

SEQ ID NO: 4295 - DNA, 23 bp, Artificial Sequence
  Synthetic: DMPK O forward 19:45770554-45770583; SaCas9
ccaatgcagcccagggcggcggc

SEQ ID NO: 4296 - DNA, 22 bp, Artificial Sequence
  Synthetic: DMPK O forward 19:45770555-45770583; SaCas9
caatgcagcccagggcggcggc

SEQ ID NO: 4297 - DNA, 21 bp, Artificial Sequence
  Synthetic: DMPK O forward 19:45770556-45770583; SaCas9
aatgcagcccagggcggcggc

SEQ ID NO: 4298 - DNA, 20 bp, Artificial Sequence
  Synthetic: DMPK O forward 19:45770557-45770583; SaCas9
atgcagcccagggcggcggc

SEQ ID NO: 4299 - DNA, 19 bp, Artificial Sequence
  Synthetic: DMPK O forward 19:45770558-45770583; SaCas9
tgcagcccagggcggcggc

SEQ ID NO: 4300 - DNA, 18 bp, Artificial Sequence
  Synthetic: DMPK O forward 19:45770559-45770583; SaCas9
gcagcccagggcggcggc

SEQ ID NO: 4301 - DNA, 25 bp, Artificial Sequence
  Synthetic: DMPK O reverse 19:45770552-45770583; SaCas9
tctcgtgccgccgccctgggctgca

SEQ ID NO: 4302 - DNA, 24 bp, Artificial Sequence
  Synthetic: DMPK O reverse 19:45770553-45770583; SaCas9
ctcgtgccgccgccctgggctgca

SEQ ID NO: 4303 - DNA, 23 bp, Artificial Sequence
  Synthetic: DMPK O reverse 19:45770554-45770583; SaCas9
tcgtgccgccgccctgggctgca

SEQ ID NO: 4304 - DNA, 22 bp, Artificial Sequence
  Synthetic: DMPK O reverse 19:45770555-45770583; SaCas9
cgtgccgccgccctgggctgca

SEQ ID NO: 4305 - DNA, 21 bp, Artificial Sequence
  Synthetic: DMPK O reverse 19:45770556-45770583; SaCas9
gtgccgccgccctgggctgca

SEQ ID NO: 4306 - DNA, 20 bp, Artificial Sequence
  Synthetic: DMPK O reverse 19:45770557-45770583; SaCas9
tgccgccgccctgggctgca

SEQ ID NO: 4307 - DNA, 19 bp, Artificial Sequence
  Synthetic: DMPK O reverse 19:45770558-45770583; SaCas9
gccgccgccctgggctgca

SEQ ID NO: 4308 - DNA, 18 bp, Artificial Sequence
  Synthetic: DMPK O reverse 19:45770559-45770583; SaCas9
ccgccgccctgggctgca

SEQ ID NO: 4309 - DNA, 25 bp, Artificial Sequence
  Synthetic: DMPK O forward 19:45770558-45770589; SaCas9
tgcagcccagggcggcggcacgaga

SEQ ID NO: 4310 - DNA, 24 bp, Artificial Sequence
  Synthetic: DMPK O forward 19:45770559-45770589; SaCas9
gcagcccagggcggcggcacgaga

SEQ ID NO: 4311 - DNA, 23 bp, Artificial Sequence
  Synthetic: DMPK O forward 19:45770560-45770589; SaCas9
cagcccagggcggcggcacgaga

SEQ ID NO: 4312 - DNA, 22 bp, Artificial Sequence
  Synthetic: DMPK O forward 19:45770561-45770589; SaCas9
agcccagggcggcggcacgaga

SEQ ID NO: 4313 - DNA, 21 bp, Artificial Sequence
  Synthetic: DMPK O forward 19:45770562-45770589; SaCas9
gcccagggcggcggcacgaga

SEQ ID NO: 4314 - DNA, 20 bp, Artificial Sequence
  Synthetic: DMPK O forward 19:45770563-45770589; SaCas9
cccagggcggcggcacgaga

SEQ ID NO: 4315 - DNA, 19 bp, Artificial Sequence
  Synthetic: DMPK O forward 19:45770564-45770589; SaCas9
ccagggcggcggcacgaga

SEQ ID NO: 4316 - DNA, 18 bp, Artificial Sequence
  Synthetic: DMPK O forward 19:45770565-45770589; SaCas9
cagggcggcggcacgaga

SEQ ID NO: 4317 - DNA, 25 bp, Artificial Sequence
  Synthetic: DMPK O reverse 19:45770562-45770593; SaCas9
cgttgttctgtctcgtgccgccgcc

SEQ ID NO: 4318 - DNA, 24 bp, Artificial Sequence
  Synthetic: DMPK O reverse 19:45770563-45770593; SaCas9
gttgttctgtctcgtgccgccgcc

SEQ ID NO: 4319 - DNA, 23 bp, Artificial Sequence
  Synthetic: DMPK O reverse 19:45770564-45770593; SaCas9
ttgttctgtctcgtgccgccgcc

SEQ ID NO: 4320 - DNA, 22 bp, Artificial Sequence
  Synthetic: DMPK O reverse 19:45770565-45770593; SaCas9
tgttctgtctcgtgccgccgcc

SEQ ID NO: 4321 - DNA, 21 bp, Artificial Sequence
  Synthetic: DMPK O reverse 19:45770566-45770593; SaCas9
gttctgtctcgtgccgccgcc

SEQ ID NO: 4322 - DNA, 20 bp, Artificial Sequence
  Synthetic: DMPK O reverse 19:45770567-45770593; SaCas9
ttctgtctcgtgccgccgcc

SEQ ID NO: 4323 - DNA, 19 bp, Artificial Sequence
  Synthetic: DMPK O reverse 19:45770568-45770593; SaCas9
tctgtctcgtgccgccgcc

SEQ ID NO: 4324 - DNA, 18 bp, Artificial Sequence
  Synthetic: DMPK O reverse 19:45770569-45770593; SaCas9
ctgtctcgtgccgccgcc

SEQ ID NO: 4325 - DNA, 25 bp, Artificial Sequence
  Synthetic: DMPK O forward 19:45770568-45770599; SaCas9
ggcggcggcacgagacagaacaacg

SEQ ID NO: 4326 - DNA, 24 bp, Artificial Sequence
  Synthetic: DMPK O forward 19:45770569-45770599; SaCas9
gcggcggcacgagacagaacaacg

SEQ ID NO: 4327 - DNA, 23 bp, Artificial Sequence
  Synthetic: DMPK O forward 19:45770570-45770599; SaCas9
cggcggcacgagacagaacaacg

SEQ ID NO: 4328 - DNA, 22 bp, Artificial Sequence
  Synthetic: DMPK O forward 19:45770571-45770599; SaCas9
ggcggcacgagacagaacaacg

SEQ ID NO: 4329 - DNA, 21 bp, Artificial Sequence
  Synthetic: DMPK O forward 19:45770572-45770599; SaCas9
gcggcacgagacagaacaacg

SEQ ID NO: 4330 - DNA, 20 bp, Artificial Sequence
  Synthetic: DMPK O forward 19:45770573-45770599; SaCas9
cggcacgagacagaacaacg

SEQ ID NO: 4331 - DNA, 19 bp, Artificial Sequence
  Synthetic: DMPK O forward 19:45770574-45770599; SaCas9
ggcacgagacagaacaacg

SEQ ID NO: 4332 - DNA, 18 bp, Artificial Sequence
  Synthetic: DMPK O forward 19:45770575-45770599; SaCas9
gcacgagacagaacaacg

SEQ ID NO: 4333 - DNA, 25 bp, Artificial Sequence
  Synthetic: DMPK O forward 19:45770573-45770604; SaCas9
cggcacgagacagaacaacggcgaa

SEQ ID NO: 4334 - DNA, 24 bp, Artificial Sequence
  Synthetic: DMPK O forward 19:45770574-45770604; SaCas9
ggcacgagacagaacaacggcgaa

SEQ ID NO: 4335 - DNA, 23 bp, Artificial Sequence
  Synthetic: DMPK O forward 19:45770575-45770604; SaCas9
gcacgagacagaacaacggcgaa

SEQ ID NO: 4336 - DNA, 22 bp, Artificial Sequence
  Synthetic: DMPK O forward 19:45770576-45770604; SaCas9
cacgagacagaacaacggcgaa

SEQ ID NO: 4337 - DNA, 21 bp, Artificial Sequence
  Synthetic: DMPK O forward 19:45770577-45770604; SaCas9
acgagacagaacaacggcgaa

SEQ ID NO: 4338 - DNA, 20 bp, Artificial Sequence
  Synthetic: DMPK O forward 19:45770578-45770604; SaCas9
cgagacagaacaacggcgaa

SEQ ID NO: 4339 - DNA, 19 bp, Artificial Sequence
  Synthetic: DMPK O forward 19:45770579-45770604; SaCas9
gagacagaacaacggcgaa

SEQ ID NO: 4340 - DNA, 18 bp, Artificial Sequence
  Synthetic: DMPK O forward 19:45770580-45770604; SaCas9
agacagaacaacggcgaa

SEQ ID NO: 4341 - DNA, 25 bp, Artificial Sequence
  Synthetic: DMPK O forward 19:45770574-45770605; SaCas9
ggcacgagacagaacaacggcgaac

SEQ ID NO: 4342 - DNA, 24 bp, Artificial Sequence
  Synthetic: DMPK O forward 19:45770575-45770605; SaCas9
gcacgagacagaacaacggcgaac

SEQ ID NO: 4343 - DNA, 23 bp, Artificial Sequence
  Synthetic: DMPK O forward 19:45770576-45770605; SaCas9
cacgagacagaacaacggcgaac

SEQ ID NO: 4344 - DNA, 22 bp, Artificial Sequence
  Synthetic: DMPK O forward 19:45770577-45770605; SaCas9
acgagacagaacaacggcgaac

SEQ ID NO: 4345 - DNA, 21 bp, Artificial Sequence
  Synthetic: DMPK O forward 19:45770578-45770605; SaCas9
cgagacagaacaacggcgaac

SEQ ID NO: 4346 - DNA, 20 bp, Artificial Sequence
  Synthetic: DMPK O forward 19:45770579-45770605; SaCas9
gagacagaacaacggcgaac

SEQ ID NO: 4347 - DNA, 19 bp, Artificial Sequence
  Synthetic: DMPK O forward 19:45770580-45770605; SaCas9
agacagaacaacggcgaac

SEQ ID NO: 4348 - DNA, 18 bp, Artificial Sequence
  Synthetic: DMPK O forward 19:45770581-45770605; SaCas9
gacagaacaacggcgaac

SEQ ID NO: 4349 - DNA, 25 bp, Artificial Sequence
  Synthetic: DMPK O forward 19:45770579-45770610; SaCas9
gagacagaacaacggcgaacaggag

SEQ ID NO: 4350 - DNA, 24 bp, Artificial Sequence
  Synthetic: DMPK O forward 19:45770580-45770610; SaCas9
agacagaacaacggcgaacaggag

SEQ ID NO: 4351 - DNA, 23 bp, Artificial Sequence
  Synthetic: DMPK O forward 19:45770581-45770610; SaCas9
gacagaacaacggcgaacaggag

SEQ ID NO: 4352 - DNA, 22 bp, Artificial Sequence
  Synthetic: DMPK O forward 19:45770582-45770610; SaCas9
acagaacaacggcgaacaggag

SEQ ID NO: 4353 - DNA, 21 bp, Artificial Sequence
  Synthetic: DMPK O forward 19:45770583-45770610; SaCas9
cagaacaacggcgaacaggag

SEQ ID NO: 4354 - DNA, 20 bp, Artificial Sequence
  Synthetic: DMPK O forward 19:45770584-45770610; SaCas9
agaacaacggcgaacaggag

SEQ ID NO: 4355 - DNA, 19 bp, Artificial Sequence
  Synthetic: DMPK O forward 19:45770585-45770610; SaCas9
gaacaacggcgaacaggag

SEQ ID NO: 4356 - DNA, 18 bp, Artificial Sequence
  Synthetic: DMPK O forward 19:45770586-45770610; SaCas9
aacaacggcgaacaggag

SEQ ID NO: 4357 - DNA, 25 bp, Artificial Sequence
  Synthetic: DMPK O forward 19:45770580-45770611; SaCas9
agacagaacaacggcgaacaggagc

SEQ ID NO: 4358 - DNA, 24 bp, Artificial Sequence
  Synthetic: DMPK O forward 19:45770581-45770611; SaCas9
gacagaacaacggcgaacaggagc

SEQ ID NO: 4359 - DNA, 23 bp, Artificial Sequence
  Synthetic: DMPK O forward 19:45770582-45770611; SaCas9
acagaacaacggcgaacaggagc

SEQ ID NO: 4360 - DNA, 22 bp, Artificial Sequence
  Synthetic: DMPK O forward 19:45770583-45770611; SaCas9
cagaacaacggcgaacaggagc

SEQ ID NO: 4361 - DNA, 21 bp, Artificial Sequence
  Synthetic: DMPK O forward 19:45770584-45770611; SaCas9
agaacaacggcgaacaggagc

SEQ ID NO: 4362 - DNA, 20 bp, Artificial Sequence
  Synthetic: DMPK O forward 19:45770585-45770611; SaCas9
gaacaacggcgaacaggagc

SEQ ID NO: 4363 - DNA, 19 bp, Artificial Sequence
  Synthetic: DMPK O forward 19:45770586-45770611; SaCas9
aacaacggcgaacaggagc

SEQ ID NO: 4364 - DNA, 18 bp, Artificial Sequence
  Synthetic: DMPK O forward 19:45770587-45770611; SaCas9
acaacggcgaacaggagc

SEQ ID NO: 4365 - DNA, 25 bp, Artificial Sequence
  Synthetic: DMPK O forward 19:45770581-45770612; SaCas9
gacagaacaacggcgaacaggagca

SEQ ID NO: 4366 - DNA, 24 bp, Artificial Sequence
  Synthetic: DMPK O forward 19:45770582-45770612; SaCas9
acagaacaacggcgaacaggagca

SEQ ID NO: 4367 - DNA, 23 bp, Artificial Sequence
  Synthetic: DMPK O forward 19:45770583-45770612; SaCas9
cagaacaacggcgaacaggagca

SEQ ID NO: 4368 - DNA, 22 bp, Artificial Sequence
  Synthetic: DMPK O forward 19:45770584-45770612; SaCas9
agaacaacggcgaacaggagca

SEQ ID NO: 4369 - DNA, 21 bp, Artificial Sequence
  Synthetic: DMPK O forward 19:45770585-45770612; SaCas9
gaacaacggcgaacaggagca

SEQ ID NO: 4370 - DNA, 20 bp, Artificial Sequence
  Synthetic: DMPK O forward 19:45770586-45770612; SaCas9
aacaacggcgaacaggagca

SEQ ID NO: 4371 - DNA, 19 bp, Artificial Sequence
  Synthetic: DMPK O forward 19:45770587-45770612; SaCas9
acaacggcgaacaggagca

SEQ ID NO: 4372 - DNA, 18 bp, Artificial Sequence
  Synthetic: DMPK O forward 19:45770588-45770612; SaCas9
caacggcgaacaggagca

SEQ ID NO: 4373 - DNA, 25 bp, Artificial Sequence
  Synthetic: DMPK O forward 19:45770608-45770639; SaCas9
gaaagcgcctccgataggccaggcc

SEQ ID NO: 4374 - DNA, 24 bp, Artificial Sequence
  Synthetic: DMPK O forward 19:45770609-45770639; SaCas9
aaagcgcctccgataggccaggcc

SEQ ID NO: 4375 - DNA, 23 bp, Artificial Sequence
  Synthetic: DMPK O forward 19:45770610-45770639; SaCas9
aagcgcctccgataggccaggcc

SEQ ID NO: 4376 - DNA, 22 bp, Artificial Sequence
  Synthetic: DMPK O forward 19:45770611-45770639; SaCas9
agcgcctccgataggccaggcc

SEQ ID NO: 4377 - DNA, 21 bp, Artificial Sequence
  Synthetic: DMPK O forward 19:45770612-45770639; SaCas9
gcgcctccgataggccaggcc

SEQ ID NO: 4378 - DNA, 20 bp, Artificial Sequence
  Synthetic: DMPK O forward 19:45770613-45770639; SaCas9
cgcctccgataggccaggcc

SEQ ID NO: 4379 - DNA, 19 bp, Artificial Sequence
  Synthetic: DMPK O forward 19:45770614-45770639; SaCas9
gcctccgataggccaggcc

SEQ ID NO: 4380 - DNA, 18 bp, Artificial Sequence
  Synthetic: DMPK O forward 19:45770615-45770639; SaCas9
cctccgataggccaggcc

SEQ ID NO: 4381 - DNA, 25 bp, Artificial Sequence
  Synthetic: DMPK O forward 19:45770609-45770640; SaCas9
aaagcgcctccgataggccaggcct

SEQ ID NO: 4382 - DNA, 24 bp, Artificial Sequence
  Synthetic: DMPK O forward 19:45770610-45770640; SaCas9
aagcgcctccgataggccaggcct

SEQ ID NO: 4383 - DNA, 23 bp, Artificial Sequence
  Synthetic: DMPK O forward 19:45770611-45770640; SaCas9
agcgcctccgataggccaggcct

SEQ ID NO: 4384 - DNA, 22 bp, Artificial Sequence
  Synthetic: DMPK O forward 19:45770612-45770640; SaCas9
gcgcctccgataggccaggcct

SEQ ID NO: 4385 - DNA, 21 bp, Artificial Sequence
  Synthetic: DMPK O forward 19:45770613-45770640; SaCas9
cgcctccgataggccaggcct

SEQ ID NO: 4386 - DNA, 20 bp, Artificial Sequence
  Synthetic: DMPK O forward 19:45770614-45770640; SaCas9
gcctccgataggccaggcct

SEQ ID NO: 4387 - DNA, 19 bp, Artificial Sequence
  Synthetic: DMPK O forward 19:45770615-45770640; SaCas9
cctccgataggccaggcct

SEQ ID NO: 4388 - DNA, 18 bp, Artificial Sequence
  Synthetic: DMPK O forward 19:45770616-45770640; SaCas9
ctccgataggccaggcct

SEQ ID NO: 4389 - DNA, 25 bp, Artificial Sequence
  Synthetic: DMPK O forward 19:45769669-45769697; SpCas9
agcctccggcccacaacgcaaaccg

SEQ ID NO: 4390 - DNA, 24 bp, Artificial Sequence
  Synthetic: DMPK O forward 19:45769670-45769697; SpCas9
gcctccggcccacaacgcaaaccg

SEQ ID NO: 4391 - DNA, 23 bp, Artificial Sequence
  Synthetic: DMPK O forward 19:45769671-45769697; SpCas9
cctccggcccacaacgcaaaccg

SEQ ID NO: 4392 - DNA, 22 bp, Artificial Sequence
  Synthetic: DMPK O forward 19:45769672-45769697; SpCas9
ctccggcccacaacgcaaaccg

SEQ ID NO: 4393 - DNA, 21 bp, Artificial Sequence
  Synthetic: DMPK O forward 19:45769673-45769697; SpCas9
tccggcccacaacgcaaaccg

SEQ ID NO: 4394 - DNA, 20 bp, Artificial Sequence
  Synthetic: DMPK O forward 19:45769674-45769697; SpCas9
ccggcccacaacgcaaaccg

SEQ ID NO: 4395 - DNA, 19 bp, Artificial Sequence
  Synthetic: DMPK O forward 19:45769675-45769697; SpCas9
cggcccacaacgcaaaccg

SEQ ID NO: 4396 - DNA, 18 bp, Artificial Sequence
  Synthetic: DMPK O forward 19:45769676-45769697; SpCas9
ggcccacaacgcaaaccg

SEQ ID NO: 4397 - DNA, 25 bp, Artificial Sequence
  Synthetic: DMPK O reverse 19:45769671-45769699; SpCas9
gtccgcggtttgcgttgtgggccgg

SEQ ID NO: 4398 - DNA, 24 bp, Artificial Sequence
  Synthetic: DMPK O reverse 19:45769672-45769699; SpCas9
tccgcggtttgcgttgtgggccgg

SEQ ID NO: 4399 - DNA, 23 bp, Artificial Sequence
  Synthetic: DMPK O reverse 19:45769673-45769699; SpCas9
ccgcggtttgcgttgtgggccgg

SEQ ID NO: 4400 - DNA, 22 bp, Artificial Sequence
  Synthetic: DMPK O reverse 19:45769674-45769699; SpCas9
cgcggtttgcgttgtgggccgg

SEQ ID NO: 4401 - DNA, 21 bp, Artificial Sequence
  Synthetic: DMPK O reverse 19:45769675-45769699; SpCas9
gcggtttgcgttgtgggccgg

SEQ ID NO: 4402 - DNA, 20 bp, Artificial Sequence
  Synthetic: DMPK O reverse 19:45769676-45769699; SpCas9
cggtttgcgttgtgggccgg

SEQ ID NO: 4403 - DNA, 19 bp, Artificial Sequence
  Synthetic: DMPK O reverse 19:45769677-45769699; SpCas9
ggtttgcgttgtgggccgg

SEQ ID NO: 4404 - DNA, 18 bp, Artificial Sequence
  Synthetic: DMPK O reverse 19:45769678-45769699; SpCas9
gtttgcgttgtgggccgg

SEQ ID NO: 4405 - DNA, 25 bp, Artificial Sequence
  Synthetic: DMPK O reverse 19:45769672-45769700; SpCas9
tgtccgcggtttgcgttgtgggccg

SEQ ID NO: 4406 - DNA, 24 bp, Artificial Sequence
  Synthetic: DMPK O reverse 19:45769673-45769700; SpCas9
gtccgcggtttgcgttgtgggccg

SEQ ID NO: 4407 - DNA, 23 bp, Artificial Sequence
  Synthetic: DMPK O reverse 19:45769674-45769700; SpCas9
tccgcggtttgcgttgtgggccg

SEQ ID NO: 4408 - DNA, 22 bp, Artificial Sequence
  Synthetic: DMPK O reverse 19:45769675-45769700; SpCas9
ccgcggtttgcgttgtgggccg

SEQ ID NO: 4409 - DNA, 21 bp, Artificial Sequence
  Synthetic: DMPK O reverse 19:45769676-45769700; SpCas9
cgcggtttgcgttgtgggccg

SEQ ID NO: 4410 - DNA, 20 bp, Artificial Sequence
  Synthetic: DMPK O reverse 19:45769677-45769700; SpCas9
gcggtttgcgttgtgggccg

SEQ ID NO: 4411 - DNA, 19 bp, Artificial Sequence
  Synthetic: DMPK O reverse 19:45769678-45769700; SpCas9
cggtttgcgttgtgggccg

SEQ ID NO: 4412 - DNA, 18 bp, Artificial Sequence
  Synthetic: DMPK O reverse 19:45769679-45769700; SpCas9
ggtttgcgttgtgggccg

SEQ ID NO: 4413 - DNA, 25 bp, Artificial Sequence
  Synthetic: DMPK O reverse 19:45769674-45769702; SpCas9
agtgtccgcggtttgcgttgtgggc

SEQ ID NO: 4414 - DNA, 24 bp, Artificial Sequence
  Synthetic: DMPK O reverse 19:45769675-45769702; SpCas9
gtgtccgcggtttgcgttgtgggc

SEQ ID NO: 4415 - DNA, 23 bp, Artificial Sequence
  Synthetic: DMPK O reverse 19:45769676-45769702; SpCas9
tgtccgcggtttgcgttgtgggc

SEQ ID NO: 4416 - DNA, 22 bp, Artificial Sequence
  Synthetic: DMPK O reverse 19:45769677-45769702; SpCas9
gtccgcggtttgcgttgtgggc

SEQ ID NO: 4417 - DNA, 21 bp, Artificial Sequence
  Synthetic: DMPK O reverse 19:45769678-45769702; SpCas9
tccgcggtttgcgttgtgggc

SEQ ID NO: 4418 - DNA, 20 bp, Artificial Sequence
  Synthetic: DMPK O reverse 19:45769679-45769702; SpCas9
ccgcggtttgcgttgtgggc

SEQ ID NO: 4419 - DNA, 19 bp, Artificial Sequence
  Synthetic: DMPK O reverse 19:45769680-45769702; SpCas9
cgcggtttgcgttgtgggc

SEQ ID NO: 4420 - DNA, 18 bp, Artificial Sequence
  Synthetic: DMPK O reverse 19:45769681-45769702; SpCas9
gcggtttgcgttgtgggc

SEQ ID NO: 4421 - DNA, 25 bp, Artificial Sequence
  Synthetic: DMPK O forward 19:45769678-45769706; SpCas9
cccacaacgcaaaccgcggacactg

SEQ ID NO: 4422 - DNA, 24 bp, Artificial Sequence
  Synthetic: DMPK O forward 19:45769679-45769706; SpCas9
ccacaacgcaaaccgcggacactg

SEQ ID NO: 4423 - DNA, 23 bp, Artificial Sequence
  Synthetic: DMPK O forward 19:45769680-45769706; SpCas9
cacaacgcaaaccgcggacactg

SEQ ID NO: 4424 - DNA, 22 bp, Artificial Sequence
  Synthetic: DMPK O forward 19:45769681-45769706; SpCas9
acaacgcaaaccgcggacactg

SEQ ID NO: 4425 - DNA, 21 bp, Artificial Sequence
  Synthetic: DMPK O forward 19:45769682-45769706; SpCas9
caacgcaaaccgcggacactg

SEQ ID NO: 4426 - DNA, 20 bp, Artificial Sequence
  Synthetic: DMPK O forward 19:45769683-45769706; SpCas9
aacgcaaaccgcggacactg

SEQ ID NO: 4427 - DNA, 19 bp, Artificial Sequence
  Synthetic: DMPK O forward 19:45769684-45769706; SpCas9
acgcaaaccgcggacactg

SEQ ID NO: 4428 - DNA, 18 bp, Artificial Sequence
  Synthetic: DMPK O forward 19:45769685-45769706; SpCas9
cgcaaaccgcggacactg

SEQ ID NO: 4429 - DNA, 25 bp, Artificial Sequence
  Synthetic: DMPK O reverse 19:45769678-45769706; SpCas9
ccacagtgtccgcggtttgcgttgt

SEQ ID NO: 4430 - DNA, 24 bp, Artificial Sequence
  Synthetic: DMPK O reverse 19:45769679-45769706; SpCas9
cacagtgtccgcggtttgcgttgt

SEQ ID NO: 4431 - DNA, 23 bp, Artificial Sequence
  Synthetic: DMPK O reverse 19:45769680-45769706; SpCas9
acagtgtccgcggtttgcgttgt

SEQ ID NO: 4432 - DNA, 22 bp, Artificial Sequence
  Synthetic: DMPK O reverse 19:45769681-45769706; SpCas9
cagtgtccgcggtttgcgttgt

SEQ ID NO: 4433 - DNA, 21 bp, Artificial Sequence
  Synthetic: DMPK O reverse 19:45769682-45769706; SpCas9
agtgtccgcggtttgcgttgt

SEQ ID NO: 4434 - DNA, 20 bp, Artificial Sequence
  Synthetic: DMPK O reverse 19:45769683-45769706; SpCas9
gtgtccgcggtttgcgttgt

SEQ ID NO: 4435 - DNA, 19 bp, Artificial Sequence
  Synthetic: DMPK O reverse 19:45769684-45769706; SpCas9
tgtccgcggtttgcgttgt

SEQ ID NO: 4436 - DNA, 18 bp, Artificial Sequence
  Synthetic: DMPK O reverse 19:45769685-45769706; SpCas9
gtccgcggtttgcgttgt

SEQ ID NO: 4437 - DNA, 25 bp, Artificial Sequence
  Synthetic: DMPK O reverse 19:45769679-45769707; SpCas9
tccacagtgtccgcggtttgcgttg

SEQ ID NO: 4438 - DNA, 24 bp, Artificial Sequence
  Synthetic: DMPK O reverse 19:45769680-45769707; SpCas9
ccacagtgtccgcggtttgcgttg

SEQ ID NO: 4439 - DNA, 23 bp, Artificial Sequence
  Synthetic: DMPK O reverse 19:45769681-45769707; SpCas9
cacagtgtccgcggtttgcgttg

SEQ ID NO: 4440 - DNA, 22 bp, Artificial Sequence
  Synthetic: DMPK O reverse 19:45769682-45769707; SpCas9
acagtgtccgcggtttgcgttg

SEQ ID NO: 4441 - DNA, 21 bp, Artificial Sequence
  Synthetic: DMPK O reverse 19:45769683-45769707; SpCas9
cagtgtccgcggtttgcgttg

SEQ ID NO: 4442 - DNA, 20 bp, Artificial Sequence
  Synthetic: DMPK O reverse 19:45769684-45769707; SpCas9
agtgtccgcggtttgcgttg

SEQ ID NO: 4443 - DNA, 19 bp, Artificial Sequence
  Synthetic: DMPK O reverse 19:45769685-45769707; SpCas9
gtgtccgcggtttgcgttg

SEQ ID NO: 4444 - DNA, 18 bp, Artificial Sequence
  Synthetic: DMPK O reverse 19:45769686-45769707; SpCas9
tgtccgcggtttgcgttg

SEQ ID NO: 4445 - DNA, 25 bp, Artificial Sequence
  Synthetic: DMPK O forward 19:45769680-45769708; SpCas9
cacaacgcaaaccgcggacactgtg

SEQ ID NO: 4446 - DNA, 24 bp, Artificial Sequence
  Synthetic: DMPK O forward 19:45769681-45769708; SpCas9
acaacgcaaaccgcggacactgtg

SEQ ID NO: 4447 - DNA, 23 bp, Artificial Sequence
  Synthetic: DMPK O forward 19:45769682-45769708; SpCas9
caacgcaaaccgcggacactgtg

SEQ ID NO: 4448 - DNA, 22 bp, Artificial Sequence
  Synthetic: DMPK O forward 19:45769683-45769708; SpCas9
aacgcaaaccgcggacactgtg

SEQ ID NO: 4449 - DNA, 21 bp, Artificial Sequence
  Synthetic: DMPK O forward 19:45769684-45769708; SpCas9
acgcaaaccgcggacactgtg

SEQ ID NO: 4450 - DNA, 20 bp, Artificial Sequence
  Synthetic: DMPK O forward 19:45769685-45769708; SpCas9
cgcaaaccgcggacactgtg

SEQ ID NO: 4451 - DNA, 19 bp, Artificial Sequence
  Synthetic: DMPK O forward 19:45769686-45769708; SpCas9
gcaaaccgcggacactgtg

SEQ ID NO: 4452 - DNA, 18 bp, Artificial Sequence
  Synthetic: DMPK O forward 19:45769687-45769708; SpCas9
caaaccgcggacactgtg

SEQ ID NO: 4453 - DNA, 25 bp, Artificial Sequence
  Synthetic: DMPK O forward 19:45769685-45769713; SpCas9
cgcaaaccgcggacactgtggagtc

SEQ ID NO: 4454 - DNA, 24 bp, Artificial Sequence
  Synthetic: DMPK O forward 19:45769686-45769713; SpCas9
gcaaaccgcggacactgtggagtc

SEQ ID NO: 4455 - DNA, 23 bp, Artificial Sequence
  Synthetic: DMPK O forward 19:45769687-45769713; SpCas9
caaaccgcggacactgtggagtc

SEQ ID NO: 4456 - DNA, 22 bp, Artificial Sequence
  Synthetic: DMPK O forward 19:45769688-45769713; SpCas9
aaaccgcggacactgtggagtc

SEQ ID NO: 4457 - DNA, 21 bp, Artificial Sequence
  Synthetic: DMPK O forward 19:45769689-45769713; SpCas9
aaccgcggacactgtggagtc

SEQ ID NO: 4458 - DNA, 20 bp, Artificial Sequence
  Synthetic: DMPK O forward 19:45769690-45769713; SpCas9
accgcggacactgtggagtc

SEQ ID NO: 4459 - DNA, 19 bp, Artificial Sequence
  Synthetic: DMPK O forward 19:45769691-45769713; SpCas9
ccgcggacactgtggagtc

SEQ ID NO: 4460 - DNA, 18 bp, Artificial Sequence
  Synthetic: DMPK O forward 19:45769692-45769713; SpCas9
cgcggacactgtggagtc

SEQ ID NO: 4461 - DNA, 25 bp, Artificial Sequence
  Synthetic: DMPK O forward 19:45769687-45769715; SpCas9
caaaccgcggacactgtggagtcca

SEQ ID NO: 4462 - DNA, 24 bp, Artificial Sequence
  Synthetic: DMPK O forward 19:45769688-45769715; SpCas9
aaaccgcggacactgtggagtcca

SEQ ID NO: 4463 - DNA, 23 bp, Artificial Sequence
  Synthetic: DMPK O forward 19:45769689-45769715; SpCas9
aaccgcggacactgtggagtcca

SEQ ID NO: 4464 - DNA, 22 bp, Artificial Sequence
  Synthetic: DMPK O forward 19:45769690-45769715; SpCas9
accgcggacactgtggagtcca

SEQ ID NO: 4465 - DNA, 21 bp, Artificial Sequence
  Synthetic: DMPK O forward 19:45769691-45769715; SpCas9
ccgcggacactgtggagtcca

SEQ ID NO: 4466 - DNA, 20 bp, Artificial Sequence
  Synthetic: DMPK O forward 19:45769692-45769715; SpCas9
cgcggacactgtggagtcca

SEQ ID NO: 4467 - DNA, 19 bp, Artificial Sequence
  Synthetic: DMPK O forward 19:45769693-45769715; SpCas9
gcggacactgtggagtcca

SEQ ID NO: 4468 - DNA, 18 bp, Artificial Sequence
  Synthetic: DMPK O forward 19:45769694-45769715; SpCas9
cggacactgtggagtcca

SEQ ID NO: 4469 - DNA, 25 bp, Artificial Sequence
  Synthetic: DMPK O reverse 19:45769691-45769719; SpCas9
aaagctctggactccacagtgtccg

SEQ ID NO: 4470 - DNA, 24 bp, Artificial Sequence
  Synthetic: DMPK O reverse 19:45769692-45769719; SpCas9
aagctctggactccacagtgtccg

SEQ ID NO: 4471 - DNA, 23 bp, Artificial Sequence
  Synthetic: DMPK O reverse 19:45769693-45769719; SpCas9
agctctggactccacagtgtccg

SEQ ID NO: 4472 - DNA, 22 bp, Artificial Sequence
  Synthetic: DMPK O reverse 19:45769694-45769719; SpCas9
gctctggactccacagtgtccg

SEQ ID NO: 4473 - DNA, 21 bp, Artificial Sequence
  Synthetic: DMPK O reverse 19:45769695-45769719; SpCas9
ctctggactccacagtgtccg

SEQ ID NO: 4474 - DNA, 20 bp, Artificial Sequence
  Synthetic: DMPK O reverse 19:45769696-45769719; SpCas9
tctggactccacagtgtccg

SEQ ID NO: 4475 - DNA, 19 bp, Artificial Sequence
  Synthetic: DMPK O reverse 19:45769697-45769719; SpCas9
ctggactccacagtgtccg

SEQ ID NO: 4476 - DNA, 18 bp, Artificial Sequence
  Synthetic: DMPK O reverse 19:45769698-45769719; SpCas9
tggactccacagtgtccg

SEQ ID NO: 4477 - DNA, 25 bp, Artificial Sequence
  Synthetic: DMPK O forward 19:45769693-45769721; SpCas9
gcggacactgtggagtccagagctt

SEQ ID NO: 4478 - DNA, 24 bp, Artificial Sequence
  Synthetic: DMPK O forward 19:45769694-45769721; SpCas9
cggacactgtggagtccagagctt

SEQ ID NO: 4479 - DNA, 23 bp, Artificial Sequence
  Synthetic: DMPK O forward 19:45769695-45769721; SpCas9
ggacactgtggagtccagagctt

SEQ ID NO: 4480 - DNA, 22 bp, Artificial Sequence
  Synthetic: DMPK O forward 19:45769696-45769721; SpCas9
gacactgtggagtccagagctt

SEQ ID NO: 4481 - DNA, 21 bp, Artificial Sequence
  Synthetic: DMPK O forward 19:45769697-45769721; SpCas9
acactgtggagtccagagctt

SEQ ID NO: 4482 - DNA, 20 bp, Artificial Sequence
  Synthetic: DMPK O forward 19:45769698-45769721; SpCas9
cactgtggagtccagagctt

SEQ ID NO: 4483 - DNA, 19 bp, Artificial Sequence
  Synthetic: DMPK O forward 19:45769699-45769721; SpCas9
actgtggagtccagagctt

SEQ ID NO: 4484 - DNA, 18 bp, Artificial Sequence
  Synthetic: DMPK O forward 19:45769700-45769721; SpCas9
ctgtggagtccagagctt

SEQ ID NO: 4485 - DNA, 25 bp, Artificial Sequence
  Synthetic: DMPK O forward 19:45769694-45769722; SpCas9
cggacactgtggagtccagagcttt

SEQ ID NO: 4486 - DNA, 24 bp, Artificial Sequence
  Synthetic: DMPK O forward 19:45769695-45769722; SpCas9
ggacactgtggagtccagagcttt

SEQ ID NO: 4487 - DNA, 23 bp, Artificial Sequence
  Synthetic: DMPK O forward 19:45769696-45769722; SpCas9
gacactgtggagtccagagcttt

SEQ ID NO: 4488 - DNA, 22 bp, Artificial Sequence
  Synthetic: DMPK O forward 19:45769697-45769722; SpCas9
acactgtggagtccagagcttt

SEQ ID NO: 4489 - DNA, 21 bp, Artificial Sequence
  Synthetic: DMPK O forward 19:45769698-45769722; SpCas9
cactgtggagtccagagcttt

SEQ ID NO: 4490 - DNA, 20 bp, Artificial Sequence
  Synthetic: DMPK O forward 19:45769699-45769722; SpCas9
actgtggagtccagagcttt

SEQ ID NO: 4491 - DNA, 19 bp, Artificial Sequence
  Synthetic: DMPK O forward 19:45769700-45769722; SpCas9
ctgtggagtccagagcttt

SEQ ID NO: 4492 - DNA, 18 bp, Artificial Sequence
  Synthetic: DMPK O forward 19:45769701-45769722; SpCas9
tgtggagtccagagcttt

SEQ ID NO: 4493 - DNA, 25 bp, Artificial Sequence
  Synthetic: DMPK O reverse 19:45769700-45769728; SpCas9
catctgcccaaagctctggactcca

SEQ ID NO: 4494 - DNA, 24 bp, Artificial Sequence
  Synthetic: DMPK O reverse 19:45769701-45769728; SpCas9
atctgcccaaagctctggactcca

SEQ ID NO: 4495 - DNA, 23 bp, Artificial Sequence
  Synthetic: DMPK O reverse 19:45769702-45769728; SpCas9
tctgcccaaagctctggactcca

SEQ ID NO: 4496 - DNA, 22 bp, Artificial Sequence
  Synthetic: DMPK O reverse 19:45769703-45769728; SpCas9
ctgcccaaagctctggactcca

SEQ ID NO: 4497 - DNA, 21 bp, Artificial Sequence
  Synthetic: DMPK O reverse 19:45769704-45769728; SpCas9
tgcccaaagctctggactcca

SEQ ID NO: 4498 - DNA, 20 bp, Artificial Sequence
  Synthetic: DMPK O reverse 19:45769705-45769728; SpCas9
gcccaaagctctggactcca

SEQ ID NO: 4499 - DNA, 19 bp, Artificial Sequence
  Synthetic: DMPK O reverse 19:45769706-45769728; SpCas9
cccaaagctctggactcca

SEQ ID NO: 4500 - DNA, 18 bp, Artificial Sequence
  Synthetic: DMPK O reverse 19:45769707-45769728; SpCas9
ccaaagctctggactcca

SEQ ID NO: 4501 - DNA, 25 bp, Artificial Sequence
  Synthetic: DMPK O reverse 19:45769709-45769737; SpCas9
aaggccctccatctgcccaaagctc

SEQ ID NO: 4502 - DNA, 24 bp, Artificial Sequence
  Synthetic: DMPK O reverse 19:45769710-45769737; SpCas9
aggccctccatctgcccaaagctc

SEQ ID NO: 4503 - DNA, 23 bp, Artificial Sequence
  Synthetic: DMPK O reverse 19:45769711-45769737; SpCas9
ggccctccatctgcccaaagctc

SEQ ID NO: 4504 - DNA, 22 bp, Artificial Sequence
  Synthetic: DMPK O reverse 19:45769712-45769737; SpCas9
gccctccatctgcccaaagctc

SEQ ID NO: 4505 - DNA, 21 bp, Artificial Sequence
  Synthetic: DMPK O reverse 19:45769713-45769737; SpCas9
ccctccatctgcccaaagctc

SEQ ID NO: 4506 - DNA, 20 bp, Artificial Sequence
  Synthetic: DMPK O reverse 19:45769714-45769737; SpCas9
cctccatctgcccaaagctc

SEQ ID NO: 4507 - DNA, 19 bp, Artificial Sequence
  Synthetic: DMPK O reverse 19:45769715-45769737; SpCas9
ctccatctgcccaaagctc

SEQ ID NO: 4508 - DNA, 18 bp, Artificial Sequence
  Synthetic: DMPK O reverse 19:45769716-45769737; SpCas9
tccatctgcccaaagctc

SEQ ID NO: 4509 - DNA, 25 bp, Artificial Sequence
  Synthetic: DMPK O forward 19:45770206-45770234; SpCas9
gcagcagcagcagcagcagcagcag

SEQ ID NO: 4510 - DNA, 24 bp, Artificial Sequence
  Synthetic: DMPK O forward 19:45770207-45770234; SpCas9
cagcagcagcagcagcagcagcag

SEQ ID NO: 4511 - DNA, 23 bp, Artificial Sequence
  Synthetic: DMPK O forward 19:45770208-45770234; SpCas9
agcagcagcagcagcagcagcag

SEQ ID NO: 4512 - DNA, 22 bp, Artificial Sequence
  Synthetic: DMPK O forward 19:45770209-45770234; SpCas9
gcagcagcagcagcagcagcag

SEQ ID NO: 4513 - DNA, 21 bp, Artificial Sequence
  Synthetic: DMPK O forward 19:45770210-45770234; SpCas9
cagcagcagcagcagcagcag

SEQ ID NO: 4514 - DNA, 20 bp, Artificial Sequence
  Synthetic: DMPK O forward 19:45770211-45770234; SpCas9
agcagcagcagcagcagcag

SEQ ID NO: 4515 - DNA, 19 bp, Artificial Sequence
  Synthetic: DMPK O forward 19:45770212-45770234; SpCas9
gcagcagcagcagcagcag

SEQ ID NO: 4516 - DNA, 18 bp, Artificial Sequence
  Synthetic: DMPK O forward 19:45770213-45770234; SpCas9
cagcagcagcagcagcag

SEQ ID NO: 4517 - DNA, 25 bp, Artificial Sequence
  Synthetic: DMPK O forward 19:45770209-45770237; SpCas9
gcagcagcagcagcagcagcagcag

SEQ ID NO: 4518 - DNA, 24 bp, Artificial Sequence
  Synthetic: DMPK O forward 19:45770210-45770237; SpCas9
cagcagcagcagcagcagcagcag

SEQ ID NO: 4519 - DNA, 23 bp, Artificial Sequence
  Synthetic: DMPK O forward 19:45770211-45770237; SpCas9
agcagcagcagcagcagcagcag

SEQ ID NO: 4520 - DNA, 22 bp, Artificial Sequence
  Synthetic: DMPK O forward 19:45770212-45770237; SpCas9
gcagcagcagcagcagcagcag

SEQ ID NO: 4521 - DNA, 21 bp, Artificial Sequence
  Synthetic: DMPK O forward 19:45770213-45770237; SpCas9
cagcagcagcagcagcagcag

SEQ ID NO: 4522 - DNA, 20 bp, Artificial Sequence
  Synthetic: DMPK O forward 19:45770214-45770237; SpCas9
agcagcagcagcagcagcag

SEQ ID NO: 4523 - DNA, 19 bp, Artificial Sequence
  Synthetic: DMPK O forward 19:45770215-45770237; SpCas9
gcagcagcagcagcagcag

SEQ ID NO: 4524 - DNA, 18 bp, Artificial Sequence
  Synthetic: DMPK O forward 19:45770216-45770237; SpCas9
cagcagcagcagcagcag

SEQ ID NO: 4525 - DNA, 25 bp, Artificial Sequence
  Synthetic: DMPK O forward 19:45770212-45770240; SpCas9
gcagcagcagcagcagcagcagcag

SEQ ID NO: 4526 - DNA, 24 bp, Artificial Sequence
  Synthetic: DMPK O forward 19:45770213-45770240; SpCas9
cagcagcagcagcagcagcagcag

SEQ ID NO: 4527 - DNA, 23 bp, Artificial Sequence
  Synthetic: DMPK O forward 19:45770214-45770240; SpCas9
agcagcagcagcagcagcagcag

SEQ ID NO: 4528 - DNA, 22 bp, Artificial Sequence
  Synthetic: DMPK O forward 19:45770215-45770240; SpCas9
gcagcagcagcagcagcagcag

SEQ ID NO: 4529 - DNA, 21 bp, Artificial Sequence
  Synthetic: DMPK O forward 19:45770216-45770240; SpCas9
cagcagcagcagcagcagcag

SEQ ID NO: 4530 - DNA, 20 bp, Artificial Sequence
  Synthetic: DMPK O forward 19:45770217-45770240; SpCas9
agcagcagcagcagcagcag

SEQ ID NO: 4531 - DNA, 19 bp, Artificial Sequence
  Synthetic: DMPK O forward 19:45770218-45770240; SpCas9
gcagcagcagcagcagcag

SEQ ID NO: 4532 - DNA, 18 bp, Artificial Sequence
  Synthetic: DMPK O forward 19:45770219-45770240; SpCas9
cagcagcagcagcagcag

SEQ ID NO: 4533 - DNA, 25 bp, Artificial Sequence
  Synthetic: DMPK O forward 19:45770215-45770243; SpCas9
gcagcagcagcagcagcagcagcag

SEQ ID NO: 4534 - DNA, 24 bp, Artificial Sequence
  Synthetic: DMPK O forward 19:45770216-45770243; SpCas9
cagcagcagcagcagcagcagcag

SEQ ID NO: 4535 - DNA, 23 bp, Artificial Sequence
  Synthetic: DMPK O forward 19:45770217-45770243; SpCas9
agcagcagcagcagcagcagcag

SEQ ID NO: 4536 - DNA, 22 bp, Artificial Sequence
  Synthetic: DMPK O forward 19:45770218-45770243; SpCas9
gcagcagcagcagcagcagcag

SEQ ID NO: 4537 - DNA, 21 bp, Artificial Sequence
  Synthetic: DMPK O forward 19:45770219-45770243; SpCas9
cagcagcagcagcagcagcag

SEQ ID NO: 4538 - DNA, 20 bp, Artificial Sequence
  Synthetic: DMPK O forward 19:45770220-45770243; SpCas9
agcagcagcagcagcagcag

SEQ ID NO: 4539 - DNA, 19 bp, Artificial Sequence
  Synthetic: DMPK O forward 19:45770221-45770243; SpCas9
gcagcagcagcagcagcag

SEQ ID NO: 4540 - DNA, 18 bp, Artificial Sequence
  Synthetic: DMPK O forward 19:45770222-45770243; SpCas9
cagcagcagcagcagcag

SEQ ID NO: 4541 - DNA, 25 bp, Artificial Sequence
  Synthetic: DMPK O forward 19:45770218-45770246; SpCas9
gcagcagcagcagcagcagcagcag

SEQ ID NO: 4542 - DNA, 24 bp, Artificial Sequence
  Synthetic: DMPK O forward 19:45770219-45770246; SpCas9
cagcagcagcagcagcagcagcag

SEQ ID NO: 4543 - DNA, 23 bp, Artificial Sequence
  Synthetic: DMPK O forward 19:45770220-45770246; SpCas9
agcagcagcagcagcagcagcag

SEQ ID NO: 4544 - DNA, 22 bp, Artificial Sequence
  Synthetic: DMPK O forward 19:45770221-45770246; SpCas9
gcagcagcagcagcagcagcag

SEQ ID NO: 4545 - DNA, 21 bp, Artificial Sequence
  Synthetic: DMPK O forward 19:45770222-45770246; SpCas9
cagcagcagcagcagcagcag

SEQ ID NO: 4546 - DNA, 20 bp, Artificial Sequence
  Synthetic: DMPK O forward 19:45770223-45770246; SpCas9
agcagcagcagcagcagcag

SEQ ID NO: 4547 - DNA, 19 bp, Artificial Sequence
  Synthetic: DMPK O forward 19:45770224-45770246; SpCas9
gcagcagcagcagcagcag

SEQ ID NO: 4548 - DNA, 18 bp, Artificial Sequence
  Synthetic: DMPK O forward 19:45770225-45770246; SpCas9
cagcagcagcagcagcag

SEQ ID NO: 4549 - DNA, 25 bp, Artificial Sequence
  Synthetic: DMPK O forward 19:45770221-45770249; SpCas9
gcagcagcagcagcagcagcagcag

SEQ ID NO: 4550 - DNA, 24 bp, Artificial Sequence
  Synthetic: DMPK O forward 19:45770222-45770249; SpCas9
cagcagcagcagcagcagcagcag

SEQ ID NO: 4551 - DNA, 23 bp, Artificial Sequence
  Synthetic: DMPK O forward 19:45770223-45770249; SpCas9
agcagcagcagcagcagcagcag

SEQ ID NO: 4552 - DNA, 22 bp, Artificial Sequence
  Synthetic: DMPK O forward 19:45770224-45770249; SpCas9
gcagcagcagcagcagcagcag

SEQ ID NO: 4553 - DNA, 21 bp, Artificial Sequence
  Synthetic: DMPK O forward 19:45770225-45770249; SpCas9
cagcagcagcagcagcagcag

SEQ ID NO: 4554 - DNA, 20 bp, Artificial Sequence
  Synthetic: DMPK O forward 19:45770226-45770249; SpCas9
agcagcagcagcagcagcag

SEQ ID NO: 4555 - DNA, 19 bp, Artificial Sequence
  Synthetic: DMPK O forward 19:45770227-45770249; SpCas9
gcagcagcagcagcagcag

SEQ ID NO: 4556 - DNA, 18 bp, Artificial Sequence
  Synthetic: DMPK O forward 19:45770228-45770249; SpCas9
cagcagcagcagcagcag

SEQ ID NO: 4557 - DNA, 25 bp, Artificial Sequence
  Synthetic: DMPK O forward 19:45770224-45770252; SpCas9
gcagcagcagcagcagcagcagcag

SEQ ID NO: 4558 - DNA, 24 bp, Artificial Sequence
  Synthetic: DMPK O forward 19:45770225-45770252; SpCas9
cagcagcagcagcagcagcagcag

SEQ ID NO: 4559 - DNA, 23 bp, Artificial Sequence
  Synthetic: DMPK O forward 19:45770226-45770252; SpCas9
agcagcagcagcagcagcagcag

SEQ ID NO: 4560 - DNA, 22 bp, Artificial Sequence
  Synthetic: DMPK O forward 19:45770227-45770252; SpCas9
gcagcagcagcagcagcagcag

SEQ ID NO: 4561 - DNA, 21 bp, Artificial Sequence
  Synthetic: DMPK O forward 19:45770228-45770252; SpCas9
cagcagcagcagcagcagcag

SEQ ID NO: 4562 - DNA, 20 bp, Artificial Sequence
  Synthetic: DMPK O forward 19:45770229-45770252; SpCas9
agcagcagcagcagcagcag

SEQ ID NO: 4563 - DNA, 19 bp, Artificial Sequence
  Synthetic: DMPK O forward 19:45770230-45770252; SpCas9
gcagcagcagcagcagcag

SEQ ID NO: 4564 - DNA, 18 bp, Artificial Sequence
  Synthetic: DMPK O forward 19:45770231-45770252; SpCas9
cagcagcagcagcagcag

SEQ ID NO: 4565 - DNA, 25 bp, Artificial Sequence
  Synthetic: DMPK O forward 19:45770227-45770255; SpCas9
gcagcagcagcagcagcagcagcag

SEQ ID NO: 4566 - DNA, 24 bp, Artificial Sequence
  Synthetic: DMPK O forward 19:45770228-45770255; SpCas9
cagcagcagcagcagcagcagcag

SEQ ID NO: 4567 - DNA, 23 bp, Artificial Sequence
  Synthetic: DMPK O forward 19:45770229-45770255; SpCas9
agcagcagcagcagcagcagcag

SEQ ID NO: 4568 - DNA, 22 bp, Artificial Sequence
  Synthetic: DMPK O forward 19:45770230-45770255; SpCas9
gcagcagcagcagcagcagcag

SEQ ID NO: 4569 - DNA, 21 bp, Artificial Sequence
  Synthetic: DMPK O forward 19:45770231-45770255; SpCas9
cagcagcagcagcagcagcag

SEQ ID NO: 4570 - DNA, 20 bp, Artificial Sequence
  Synthetic: DMPK O forward 19:45770232-45770255; SpCas9
agcagcagcagcagcagcag

SEQ ID NO: 4571 - DNA, 19 bp, Artificial Sequence
  Synthetic: DMPK O forward 19:45770233-45770255; SpCas9
gcagcagcagcagcagcag

SEQ ID NO: 4572 - DNA, 18 bp, Artificial Sequence
  Synthetic: DMPK O forward 19:45770234-45770255; SpCas9
cagcagcagcagcagcag

SEQ ID NO: 4573 - DNA, 25 bp, Artificial Sequence
  Synthetic: DMPK O forward 19:45770230-45770258; SpCas9
gcagcagcagcagcagcagcagcag

SEQ ID NO: 4574 - DNA, 24 bp, Artificial Sequence
  Synthetic: DMPK O forward 19:45770231-45770258; SpCas9
cagcagcagcagcagcagcagcag

SEQ ID NO: 4575 - DNA, 23 bp, Artificial Sequence
  Synthetic: DMPK O forward 19:45770232-45770258; SpCas9
agcagcagcagcagcagcagcag

SEQ ID NO: 4576 - DNA, 22 bp, Artificial Sequence
  Synthetic: DMPK O forward 19:45770233-45770258; SpCas9
gcagcagcagcagcagcagcag

SEQ ID NO: 4577 - DNA, 21 bp, Artificial Sequence
  Synthetic: DMPK O forward 19:45770234-45770258; SpCas9
cagcagcagcagcagcagcag

SEQ ID NO: 4578 - DNA, 20 bp, Artificial Sequence
  Synthetic: DMPK O forward 19:45770235-45770258; SpCas9
agcagcagcagcagcagcag

SEQ ID NO: 4579 - DNA, 19 bp, Artificial Sequence
  Synthetic: DMPK O forward 19:45770236-45770258; SpCas9
gcagcagcagcagcagcag

SEQ ID NO: 4580 - DNA, 18 bp, Artificial Sequence
  Synthetic: DMPK O forward 19:45770237-45770258; SpCas9
cagcagcagcagcagcag

SEQ ID NO: 4581 - DNA, 25 bp, Artificial Sequence
  Synthetic: DMPK O forward 19:45770233-45770261; SpCas9
gcagcagcagcagcagcagcagcag

SEQ ID NO: 4582 - DNA, 24 bp, Artificial Sequence
  Synthetic: DMPK O forward 19:45770234-45770261; SpCas9
cagcagcagcagcagcagcagcag

SEQ ID NO: 4583 - DNA, 23 bp, Artificial Sequence
  Synthetic: DMPK O forward 19:45770235-45770261; SpCas9
agcagcagcagcagcagcagcag

SEQ ID NO: 4584 - DNA, 22 bp, Artificial Sequence
  Synthetic: DMPK O forward 19:45770236-45770261; SpCas9
gcagcagcagcagcagcagcag

SEQ ID NO: 4585 - DNA, 21 bp, Artificial Sequence
  Synthetic: DMPK O forward 19:45770237-45770261; SpCas9
cagcagcagcagcagcagcag

SEQ ID NO: 4586 - DNA, 20 bp, Artificial Sequence
  Synthetic: DMPK O forward 19:45770238-45770261; SpCas9
agcagcagcagcagcagcag

SEQ ID NO: 4587 - DNA, 19 bp, Artificial Sequence
  Synthetic: DMPK O forward 19:45770239-45770261; SpCas9
gcagcagcagcagcagcag

SEQ ID NO: 4588 - DNA, 18 bp, Artificial Sequence
  Synthetic: DMPK O forward 19:45770240-45770261; SpCas9
cagcagcagcagcagcag

SEQ ID NO: 4589 - DNA, 25 bp, Artificial Sequence
  Synthetic: DMPK O forward 19:45770236-45770264; SpCas9
gcagcagcagcagcagcagcagcag

SEQ ID NO: 4590 - DNA, 24 bp, Artificial Sequence
  Synthetic: DMPK O forward 19:45770237-45770264; SpCas9
cagcagcagcagcagcagcagcag

SEQ ID NO: 4591 - DNA, 23 bp, Artificial Sequence
  Synthetic: DMPK O forward 19:45770238-45770264; SpCas9
agcagcagcagcagcagcagcag

SEQ ID NO: 4592 - DNA, 22 bp, Artificial Sequence
  Synthetic: DMPK O forward 19:45770239-45770264; SpCas9
gcagcagcagcagcagcagcag

SEQ ID NO: 4593 - DNA, 21 bp, Artificial Sequence
  Synthetic: DMPK O forward 19:45770240-45770264; SpCas9
cagcagcagcagcagcagcag

SEQ ID NO: 4594 - DNA, 20 bp, Artificial Sequence
  Synthetic: DMPK O forward 19:45770241-45770264; SpCas9
agcagcagcagcagcagcag

SEQ ID NO: 4595 - DNA, 19 bp, Artificial Sequence
  Synthetic: DMPK O forward 19:45770242-45770264; SpCas9
gcagcagcagcagcagcag

SEQ ID NO: 4596 - DNA, 18 bp, Artificial Sequence
  Synthetic: DMPK O forward 19:45770243-45770264; SpCas9
cagcagcagcagcagcag

SEQ ID NO: 4597 - DNA, 25 bp, Artificial Sequence
  Synthetic: DMPK O forward 19:45770467-45770495; SpCas9
gtcgaagacagttctagggttcagg

SEQ ID NO: 4598 - DNA, 24 bp, Artificial Sequence
  Synthetic: DMPK O forward 19:45770468-45770495; SpCas9
tcgaagacagttctagggttcagg

SEQ ID NO: 4599 - DNA, 23 bp, Artificial Sequence
  Synthetic: DMPK O forward 19:45770469-45770495; SpCas9
cgaagacagttctagggttcagg

SEQ ID NO: 4600 - DNA, 22 bp, Artificial Sequence
  Synthetic: DMPK O forward 19:45770470-45770495; SpCas9
gaagacagttctagggttcagg

SEQ ID NO: 4601 - DNA, 21 bp, Artificial Sequence
  Synthetic: DMPK O forward 19:45770471-45770495; SpCas9
aagacagttctagggttcagg

SEQ ID NO: 4602 - DNA, 20 bp, Artificial Sequence
  Synthetic: DMPK O forward 19:45770472-45770495; SpCas9
agacagttctagggttcagg

SEQ ID NO: 4603 - DNA, 19 bp, Artificial Sequence
  Synthetic: DMPK O forward 19:45770473-45770495; SpCas9
gacagttctagggttcagg

SEQ ID NO: 4604 - DNA, 18 bp, Artificial Sequence
  Synthetic: DMPK O forward 19:45770474-45770495; SpCas9
acagttctagggttcagg

SEQ ID NO: 4605 - DNA, 25 bp, Artificial Sequence
  Synthetic: DMPK O forward 19:45770472-45770500; SpCas9
agacagttctagggttcagggagcg

SEQ ID NO: 4606 - DNA, 24 bp, Artificial Sequence
  Synthetic: DMPK O forward 19:45770473-45770500; SpCas9
gacagttctagggttcagggagcg

SEQ ID NO: 4607 - DNA, 23 bp, Artificial Sequence
  Synthetic: DMPK O forward 19:45770474-45770500; SpCas9
acagttctagggttcagggagcg

SEQ ID NO: 4608 - DNA, 22 bp, Artificial Sequence
  Synthetic: DMPK O forward 19:45770475-45770500; SpCas9
cagttctagggttcagggagcg

SEQ ID NO: 4609 - DNA, 21 bp, Artificial Sequence
  Synthetic: DMPK O forward 19:45770476-45770500; SpCas9
agttctagggttcagggagcg

SEQ ID NO: 4610 - DNA, 20 bp, Artificial Sequence
  Synthetic: DMPK O forward 19:45770477-45770500; SpCas9
gttctagggttcagggagcg

SEQ ID NO: 4611 - DNA, 19 bp, Artificial Sequence
  Synthetic: DMPK O forward 19:45770478-45770500; SpCas9
ttctagggttcagggagcg

SEQ ID NO: 4612 - DNA, 18 bp, Artificial Sequence
  Synthetic: DMPK O forward 19:45770479-45770500; SpCas9
tctagggttcagggagcg

SEQ ID NO: 4613 - DNA, 25 bp, Artificial Sequence
  Synthetic: DMPK O forward 19:45770473-45770501; SpCas9
gacagttctagggttcagggagcgc

SEQ ID NO: 4614 - DNA, 24 bp, Artificial Sequence
  Synthetic: DMPK O forward 19:45770474-45770501; SpCas9
acagttctagggttcagggagcgc

SEQ ID NO: 4615 - DNA, 23 bp, Artificial Sequence
  Synthetic: DMPK O forward 19:45770475-45770501; SpCas9
cagttctagggttcagggagcgc

SEQ ID NO: 4616 - DNA, 22 bp, Artificial Sequence
  Synthetic: DMPK O forward 19:45770476-45770501; SpCas9
agttctagggttcagggagcgc

SEQ ID NO: 4617 - DNA, 21 bp, Artificial Sequence
  Synthetic: DMPK O forward 19:45770477-45770501; SpCas9
gttctagggttcagggagcgc

SEQ ID NO: 4618 - DNA, 20 bp, Artificial Sequence
  Synthetic: DMPK O forward 19:45770478-45770501; SpCas9
ttctagggttcagggagcgc

SEQ ID NO: 4619 - DNA, 19 bp, Artificial Sequence
  Synthetic: DMPK O forward 19:45770479-45770501; SpCas9
tctagggttcagggagcgc

SEQ ID NO: 4620 - DNA, 18 bp, Artificial Sequence
  Synthetic: DMPK O forward 19:45770480-45770501; SpCas9
ctagggttcagggagcgc

SEQ ID NO: 4621 - DNA, 25 bp, Artificial Sequence
  Synthetic: DMPK O forward 19:45770476-45770504; SpCas9
agttctagggttcagggagcgcggg

SEQ ID NO: 4622 - DNA, 24 bp, Artificial Sequence
  Synthetic: DMPK O forward 19:45770477-45770504; SpCas9
gttctagggttcagggagcgcggg

SEQ ID NO: 4623 - DNA, 23 bp, Artificial Sequence
  Synthetic: DMPK O forward 19:45770478-45770504; SpCas9
ttctagggttcagggagcgcggg

SEQ ID NO: 4624 - DNA, 22 bp, Artificial Sequence
  Synthetic: DMPK O forward 19:45770479-45770504; SpCas9
tctagggttcagggagcgcggg

SEQ ID NO: 4625 - DNA, 21 bp, Artificial Sequence
  Synthetic: DMPK O forward 19:45770480-45770504; SpCas9
ctagggttcagggagcgcggg

SEQ ID NO: 4626 - DNA, 20 bp, Artificial Sequence
  Synthetic: DMPK O forward 19:45770481-45770504; SpCas9
tagggttcagggagcgcggg

SEQ ID NO: 4627 - DNA, 19 bp, Artificial Sequence
  Synthetic: DMPK O forward 19:45770482-45770504; SpCas9
agggttcagggagcgcggg

SEQ ID NO: 4628 - DNA, 18 bp, Artificial Sequence
  Synthetic: DMPK O forward 19:45770483-45770504; SpCas9
gggttcagggagcgcggg

SEQ ID NO: 4629 - DNA, 25 bp, Artificial Sequence
  Synthetic: DMPK O forward 19:45770483-45770511; SpCas9
gggttcagggagcgcgggcggctcc

SEQ ID NO: 4630 - DNA, 24 bp, Artificial Sequence
  Synthetic: DMPK O forward 19:45770484-45770511; SpCas9
ggttcagggagcgcgggcggctcc

SEQ ID NO: 4631 - DNA, 23 bp, Artificial Sequence
  Synthetic: DMPK O forward 19:45770485-45770511; SpCas9
gttcagggagcgcgggcggctcc

SEQ ID NO: 4632 - DNA, 22 bp, Artificial Sequence
  Synthetic: DMPK O forward 19:45770486-45770511; SpCas9
ttcagggagcgcgggcggctcc

SEQ ID NO: 4633 - DNA, 21 bp, Artificial Sequence
  Synthetic: DMPK O forward 19:45770487-45770511; SpCas9
tcagggagcgcgggcggctcc

SEQ ID NO: 4634 - DNA, 20 bp, Artificial Sequence
  Synthetic: DMPK O forward 19:45770488-45770511; SpCas9
cagggagcgcgggcggctcc

SEQ ID NO: 4635 - DNA, 19 bp, Artificial Sequence
  Synthetic: DMPK O forward 19:45770489-45770511; SpCas9
agggagcgcgggcggctcc

SEQ ID NO: 4636 - DNA, 18 bp, Artificial Sequence
  Synthetic: DMPK O forward 19:45770490-45770511; SpCas9
gggagcgcgggcggctcc

SEQ ID NO: 4637 - DNA, 25 bp, Artificial Sequence
  Synthetic: DMPK O forward 19:45770484-45770512; SpCas9
ggttcagggagcgcgggcggctcct

SEQ ID NO: 4638 - DNA, 24 bp, Artificial Sequence
  Synthetic: DMPK O forward 19:45770485-45770512; SpCas9
gttcagggagcgcgggcggctcct

SEQ ID NO: 4639 - DNA, 23 bp, Artificial Sequence
  Synthetic: DMPK O forward 19:45770486-45770512; SpCas9
ttcagggagcgcgggcggctcct

SEQ ID NO: 4640 - DNA, 22 bp, Artificial Sequence
  Synthetic: DMPK O forward 19:45770487-45770512; SpCas9
tcagggagcgcgggcggctcct

SEQ ID NO: 4641 - DNA, 21 bp, Artificial Sequence
  Synthetic: DMPK O forward 19:45770488-45770512; SpCas9
cagggagcgcgggcggctcct

SEQ ID NO: 4642 - DNA, 20 bp, Artificial Sequence
  Synthetic: DMPK O forward 19:45770489-45770512; SpCas9
agggagcgcgggcggctcct

SEQ ID NO: 4643 - DNA, 19 bp, Artificial Sequence
  Synthetic: DMPK O forward 19:45770490-45770512; SpCas9
gggagcgcgggcggctcct

SEQ ID NO: 4644 - DNA, 18 bp, Artificial Sequence
  Synthetic: DMPK O forward 19:45770491-45770512; SpCas9
ggagcgcgggcggctcct

SEQ ID NO: 4645 - DNA, 25 bp, Artificial Sequence
  Synthetic: DMPK O forward 19:45770487-45770515; SpCas9
tcagggagcgcgggcggctcctggg

SEQ ID NO: 4646 - DNA, 24 bp, Artificial Sequence
  Synthetic: DMPK O forward 19:45770488-45770515; SpCas9
cagggagcgcgggcggctcctggg

SEQ ID NO: 4647 - DNA, 23 bp, Artificial Sequence
  Synthetic: DMPK O forward 19:45770489-45770515; SpCas9
agggagcgcgggcggctcctggg

SEQ ID NO: 4648 - DNA, 22 bp, Artificial Sequence
  Synthetic: DMPK O forward 19:45770490-45770515; SpCas9
gggagcgcgggcggctcctggg

SEQ ID NO: 4649 - DNA, 21 bp, Artificial Sequence
  Synthetic: DMPK O forward 19:45770491-45770515; SpCas9
ggagcgcgggcggctcctggg

SEQ ID NO: 4650 - DNA, 20 bp, Artificial Sequence
  Synthetic: DMPK O forward 19:45770492-45770515; SpCas9
gagcgcgggcggctcctggg

SEQ ID NO: 4651 - DNA, 19 bp, Artificial Sequence
  Synthetic: DMPK O forward 19:45770493-45770515; SpCas9
agcgcgggcggctcctggg

SEQ ID NO: 4652 - DNA, 18 bp, Artificial Sequence
  Synthetic: DMPK O forward 19:45770494-45770515; SpCas9
gcgcgggcggctcctggg

SEQ ID NO: 4653 - DNA, 25 bp, Artificial Sequence
  Synthetic: DMPK O forward 19:45770493-45770521; SpCas9
agcgcgggcggctcctgggcggcgc

SEQ ID NO: 4654 - DNA, 24 bp, Artificial Sequence
  Synthetic: DMPK O forward 19:45770494-45770521; SpCas9
gcgcgggcggctcctgggcggcgc

SEQ ID NO: 4655 - DNA, 23 bp, Artificial Sequence
  Synthetic: DMPK O forward 19:45770495-45770521; SpCas9
cgcgggcggctcctgggcggcgc

SEQ ID NO: 4656 - DNA, 22 bp, Artificial Sequence
  Synthetic: DMPK O forward 19:45770496-45770521; SpCas9
gcgggcggctcctgggcggcgc

SEQ ID NO: 4657 - DNA, 21 bp, Artificial Sequence
  Synthetic: DMPK O forward 19:45770497-45770521; SpCas9
cgggcggctcctgggcggcgc

SEQ ID NO: 4658 - DNA, 20 bp, Artificial Sequence
  Synthetic: DMPK O forward 19:45770498-45770521; SpCas9
gggcggctcctgggcggcgc

SEQ ID NO: 4659 - DNA, 19 bp, Artificial Sequence
  Synthetic: DMPK O forward 19:45770499-45770521; SpCas9
ggcggctcctgggcggcgc

SEQ ID NO: 4660 - DNA, 18 bp, Artificial Sequence
  Synthetic: DMPK O forward 19:45770500-45770521; SpCas9
gcggctcctgggcggcgc

SEQ ID NO: 4661 - DNA, 25 bp, Artificial Sequence
  Synthetic: DMPK O forward 19:45770500-45770528; SpCas9
gcggctcctgggcggcgccagactg

SEQ ID NO: 4662 - DNA, 24 bp, Artificial Sequence
  Synthetic: DMPK O forward 19:45770501-45770528; SpCas9
cggctcctgggcggcgccagactg

SEQ ID NO: 4663 - DNA, 23 bp, Artificial Sequence
  Synthetic: DMPK O forward 19:45770502-45770528; SpCas9
ggctcctgggcggcgccagactg

SEQ ID NO: 4664 - DNA, 22 bp, Artificial Sequence
  Synthetic: DMPK O forward 19:45770503-45770528; SpCas9
gctcctgggcggcgccagactg

SEQ ID NO: 4665 - DNA, 21 bp, Artificial Sequence
  Synthetic: DMPK O forward 19:45770504-45770528; SpCas9
ctcctgggcggcgccagactg

SEQ ID NO: 4666 - DNA, 20 bp, Artificial Sequence
  Synthetic: DMPK O forward 19:45770505-45770528; SpCas9
tcctgggcggcgccagactg

SEQ ID NO: 4667 - DNA, 19 bp, Artificial Sequence
  Synthetic: DMPK O forward 19:45770506-45770528; SpCas9
cctgggcggcgccagactg

SEQ ID NO: 4668 - DNA, 18 bp, Artificial Sequence
  Synthetic: DMPK O forward 19:45770507-45770528; SpCas9
ctgggcggcgccagactg

SEQ ID NO: 4669 - DNA, 25 bp, Artificial Sequence
  Synthetic: DMPK O forward 19:45770504-45770532; SpCas9
ctcctgggcggcgccagactgcggt

SEQ ID NO: 4670 - DNA, 24 bp, Artificial Sequence
  Synthetic: DMPK O forward 19:45770505-45770532; SpCas9
tcctgggcggcgccagactgcggt

SEQ ID NO: 4671 - DNA, 23 bp, Artificial Sequence
  Synthetic: DMPK O forward 19:45770506-45770532; SpCas9
cctgggcggcgccagactgcggt

SEQ ID NO: 4672 - DNA, 22 bp, Artificial Sequence
  Synthetic: DMPK O forward 19:45770507-45770532; SpCas9
ctgggcggcgccagactgcggt

SEQ ID NO: 4673 - DNA, 21 bp, Artificial Sequence
  Synthetic: DMPK O forward 19:45770508-45770532; SpCas9
tgggcggcgccagactgcggt

SEQ ID NO: 4674 - DNA, 20 bp, Artificial Sequence
  Synthetic: DMPK O forward 19:45770509-45770532; SpCas9
gggcggcgccagactgcggt

SEQ ID NO: 4675 - DNA, 19 bp, Artificial Sequence
  Synthetic: DMPK O forward 19:45770510-45770532; SpCas9
ggcggcgccagactgcggt

SEQ ID NO: 4676 - DNA, 18 bp, Artificial Sequence
  Synthetic: DMPK O forward 19:45770511-45770532; SpCas9
gcggcgccagactgcggt

SEQ ID NO: 4677 - DNA, 25 bp, Artificial Sequence
  Synthetic: DMPK O reverse 19:45770504-45770532; SpCas9
ctcaccgcagtctggcgccgcccag

SEQ ID NO: 4678 - DNA, 24 bp, Artificial Sequence
  Synthetic: DMPK O reverse 19:45770505-45770532; SpCas9
tcaccgcagtctggcgccgcccag

SEQ ID NO: 4679 - DNA, 23 bp, Artificial Sequence
  Synthetic: DMPK O reverse 19:45770506-45770532; SpCas9
caccgcagtctggcgccgcccag

SEQ ID NO: 4680 - DNA, 22 bp, Artificial Sequence
  Synthetic: DMPK O reverse 19:45770507-45770532; SpCas9
accgcagtctggcgccgcccag

SEQ ID NO: 4681 - DNA, 21 bp, Artificial Sequence
  Synthetic: DMPK O reverse 19:45770508-45770532; SpCas9
ccgcagtctggcgccgcccag

SEQ ID NO: 4682 - DNA, 20 bp, Artificial Sequence
  Synthetic: DMPK O reverse 19:45770509-45770532; SpCas9
cgcagtctggcgccgcccag

SEQ ID NO: 4683 - DNA, 19 bp, Artificial Sequence
  Synthetic: DMPK O reverse 19:45770510-45770532; SpCas9
gcagtctggcgccgcccag

SEQ ID NO: 4684 - DNA, 18 bp, Artificial Sequence
  Synthetic: DMPK O reverse 19:45770511-45770532; SpCas9
cagtctggcgccgcccag

SEQ ID NO: 4685 - DNA, 25 bp, Artificial Sequence
  Synthetic: DMPK O reverse 19:45770506-45770534; SpCas9
aactcaccgcagtctggcgccgccc

SEQ ID NO: 4686 - DNA, 24 bp, Artificial Sequence
  Synthetic: DMPK O reverse 19:45770507-45770534; SpCas9
actcaccgcagtctggcgccgccc

SEQ ID NO: 4687 - DNA, 23 bp, Artificial Sequence
  Synthetic: DMPK O reverse 19:45770508-45770534; SpCas9
ctcaccgcagtctggcgccgccc

SEQ ID NO: 4688 - DNA, 22 bp, Artificial Sequence
  Synthetic: DMPK O reverse 19:45770509-45770534; SpCas9
tcaccgcagtctggcgccgccc

SEQ ID NO: 4689 - DNA, 21 bp, Artificial Sequence
  Synthetic: DMPK O reverse 19:45770510-45770534; SpCas9
caccgcagtctggcgccgccc

SEQ ID NO: 4690 - DNA, 20 bp, Artificial Sequence
  Synthetic: DMPK O reverse 19:45770511-45770534; SpCas9
accgcagtctggcgccgccc

SEQ ID NO: 4691 - DNA, 19 bp, Artificial Sequence
  Synthetic: DMPK O reverse 19:45770512-45770534; SpCas9
ccgcagtctggcgccgccc

SEQ ID NO: 4692 - DNA, 18 bp, Artificial Sequence
  Synthetic: DMPK O reverse 19:45770513-45770534; SpCas9
cgcagtctggcgccgccc

SEQ ID NO: 4693 - DNA, 25 bp, Artificial Sequence
  Synthetic: DMPK O reverse 19:45770507-45770535; SpCas9
caactcaccgcagtctggcgccgcc

SEQ ID NO: 4694 - DNA, 24 bp, Artificial Sequence
  Synthetic: DMPK O reverse 19:45770508-45770535; SpCas9
aactcaccgcagtctggcgccgcc

SEQ ID NO: 4695 - DNA, 23 bp, Artificial Sequence
  Synthetic: DMPK O reverse 19:45770509-45770535; SpCas9
actcaccgcagtctggcgccgcc

SEQ ID NO: 4696 - DNA, 22 bp, Artificial Sequence
  Synthetic: DMPK O reverse 19:45770510-45770535; SpCas9
ctcaccgcagtctggcgccgcc

SEQ ID NO: 4697 - DNA, 21 bp, Artificial Sequence
  Synthetic: DMPK O reverse 19:45770511-45770535; SpCas9
tcaccgcagtctggcgccgcc

SEQ ID NO: 4698 - DNA, 20 bp, Artificial Sequence
  Synthetic: DMPK O reverse 19:45770512-45770535; SpCas9
caccgcagtctggcgccgcc

SEQ ID NO: 4699 - DNA, 19 bp, Artificial Sequence
  Synthetic: DMPK O reverse 19:45770513-45770535; SpCas9
accgcagtctggcgccgcc

SEQ ID NO: 4700 - DNA, 18 bp, Artificial Sequence
  Synthetic: DMPK O reverse 19:45770514-45770535; SpCas9
ccgcagtctggcgccgcc

SEQ ID NO: 4701 - DNA, 25 bp, Artificial Sequence
  Synthetic: DMPK O forward 19:45770508-45770536; SpCas9
tgggcggcgccagactgcggtgagt

SEQ ID NO: 4702 - DNA, 24 bp, Artificial Sequence
  Synthetic: DMPK O forward 19:45770509-45770536; SpCas9
gggcggcgccagactgcggtgagt

SEQ ID NO: 4703 - DNA, 23 bp, Artificial Sequence
  Synthetic: DMPK O forward 19:45770510-45770536; SpCas9
ggcggcgccagactgcggtgagt

SEQ ID NO: 4704 - DNA, 22 bp, Artificial Sequence
  Synthetic: DMPK O forward 19:45770511-45770536; SpCas9
gcggcgccagactgcggtgagt

SEQ ID NO: 4705 - DNA, 21 bp, Artificial Sequence
  Synthetic: DMPK O forward 19:45770512-45770536; SpCas9
cggcgccagactgcggtgagt

SEQ ID NO: 4706 - DNA, 20 bp, Artificial Sequence
  Synthetic: DMPK O forward 19:45770513-45770536; SpCas9
ggcgccagactgcggtgagt

SEQ ID NO: 4707 - DNA, 19 bp, Artificial Sequence
  Synthetic: DMPK O forward 19:45770514-45770536; SpCas9
gcgccagactgcggtgagt

SEQ ID NO: 4708 - DNA, 18 bp, Artificial Sequence
  Synthetic: DMPK O forward 19:45770515-45770536; SpCas9
cgccagactgcggtgagt

SEQ ID NO: 4709 - DNA, 25 bp, Artificial Sequence
  Synthetic: DMPK O forward 19:45770512-45770540; SpCas9
cggcgccagactgcggtgagttggc

SEQ ID NO: 4710 - DNA, 24 bp, Artificial Sequence
  Synthetic: DMPK O forward 19:45770513-45770540; SpCas9
ggcgccagactgcggtgagttggc

SEQ ID NO: 4711 - DNA, 23 bp, Artificial Sequence
  Synthetic: DMPK O forward 19:45770514-45770540; SpCas9
gcgccagactgcggtgagttggc

SEQ ID NO: 4712 - DNA, 22 bp, Artificial Sequence
  Synthetic: DMPK O forward 19:45770515-45770540; SpCas9
cgccagactgcggtgagttggc

SEQ ID NO: 4713 - DNA, 21 bp, Artificial Sequence
  Synthetic: DMPK O forward 19:45770516-45770540; SpCas9
gccagactgcggtgagttggc

SEQ ID NO: 4714 - DNA, 20 bp, Artificial Sequence
  Synthetic: DMPK O forward 19:45770517-45770540; SpCas9
ccagactgcggtgagttggc

SEQ ID NO: 4715 - DNA, 19 bp, Artificial Sequence
  Synthetic: DMPK O forward 19:45770518-45770540; SpCas9
cagactgcggtgagttggc

SEQ ID NO: 4716 - DNA, 18 bp, Artificial Sequence
  Synthetic: DMPK O forward 19:45770519-45770540; SpCas9
agactgcggtgagttggc

SEQ ID NO: 4717 - DNA, 25 bp, Artificial Sequence
  Synthetic: DMPK O forward 19:45770517-45770545; SpCas9
ccagactgcggtgagttggccggcg

SEQ ID NO: 4718 - DNA, 24 bp, Artificial Sequence
  Synthetic: DMPK O forward 19:45770518-45770545; SpCas9
cagactgcggtgagttggccggcg

SEQ ID NO: 4719 - DNA, 23 bp, Artificial Sequence
  Synthetic: DMPK O forward 19:45770519-45770545; SpCas9
agactgcggtgagttggccggcg

SEQ ID NO: 4720 - DNA, 22 bp, Artificial Sequence
  Synthetic: DMPK O forward 19:45770520-45770545; SpCas9
gactgcggtgagttggccggcg

SEQ ID NO: 4721 - DNA, 21 bp, Artificial Sequence
  Synthetic: DMPK O forward 19:45770521-45770545; SpCas9
actgcggtgagttggccggcg

SEQ ID NO: 4722 - DNA, 20 bp, Artificial Sequence
  Synthetic: DMPK O forward 19:45770522-45770545; SpCas9
ctgcggtgagttggccggcg

SEQ ID NO: 4723 - DNA, 19 bp, Artificial Sequence
  Synthetic: DMPK O forward 19:45770523-45770545; SpCas9
tgcggtgagttggccggcg

SEQ ID NO: 4724 - DNA, 18 bp, Artificial Sequence
  Synthetic: DMPK O forward 19:45770524-45770545; SpCas9
gcggtgagttggccggcg

SEQ ID NO: 4725 - DNA, 25 bp, Artificial Sequence
  Synthetic: DMPK O reverse 19:45770517-45770545; SpCas9
ccacgccggccaactcaccgcagtc

SEQ ID NO: 4726 - DNA, 24 bp, Artificial Sequence
  Synthetic: DMPK O reverse 19:45770518-45770545; SpCas9
cacgccggccaactcaccgcagtc

SEQ ID NO: 4727 - DNA, 23 bp, Artificial Sequence
  Synthetic: DMPK O reverse 19:45770519-45770545; SpCas9
acgccggccaactcaccgcagtc

SEQ ID NO: 4728 - DNA, 22 bp, Artificial Sequence
  Synthetic: DMPK O reverse 19:45770520-45770545; SpCas9
cgccggccaactcaccgcagtc

SEQ ID NO: 4729 - DNA, 21 bp, Artificial Sequence
  Synthetic: DMPK O reverse 19:45770521-45770545; SpCas9
gccggccaactcaccgcagtc

SEQ ID NO: 4730 - DNA, 20 bp, Artificial Sequence
  Synthetic: DMPK O reverse 19:45770522-45770545; SpCas9
ccggccaactcaccgcagtc

SEQ ID NO: 4731 - DNA, 19 bp, Artificial Sequence
  Synthetic: DMPK O reverse 19:45770523-45770545; SpCas9
cggccaactcaccgcagtc

SEQ ID NO: 4732 - DNA, 18 bp, Artificial Sequence
  Synthetic: DMPK O reverse 19:45770524-45770545; SpCas9
ggccaactcaccgcagtc

SEQ ID NO: 4733 - DNA, 25 bp, Artificial Sequence
  Synthetic: DMPK O forward 19:45770518-45770546; SpCas9
cagactgcggtgagttggccggcgt

SEQ ID NO: 4734 - DNA, 24 bp, Artificial Sequence
  Synthetic: DMPK O forward 19:45770519-45770546; SpCas9
agactgcggtgagttggccggcgt

SEQ ID NO: 4735 - DNA, 23 bp, Artificial Sequence
  Synthetic: DMPK O forward 19:45770520-45770546; SpCas9
gactgcggtgagttggccggcgt

SEQ ID NO: 4736 - DNA, 22 bp, Artificial Sequence
  Synthetic: DMPK O forward 19:45770521-45770546; SpCas9
actgcggtgagttggccggcgt

SEQ ID NO: 4737 - DNA, 21 bp, Artificial Sequence
  Synthetic: DMPK O forward 19:45770522-45770546; SpCas9
ctgcggtgagttggccggcgt

SEQ ID NO: 4738 - DNA, 20 bp, Artificial Sequence
  Synthetic: DMPK O forward 19:45770523-45770546; SpCas9
tgcggtgagttggccggcgt

SEQ ID NO: 4739 - DNA, 19 bp, Artificial Sequence
  Synthetic: DMPK O forward 19:45770524-45770546; SpCas9
gcggtgagttggccggcgt

SEQ ID NO: 4740 - DNA, 18 bp, Artificial Sequence
  Synthetic: DMPK O forward 19:45770525-45770546; SpCas9
cggtgagttggccggcgt

SEQ ID NO: 4741 - DNA, 25 bp, Artificial Sequence
  Synthetic: DMPK O reverse 19:45770522-45770550; SpCas9
gtggcccacgccggccaactcaccg

SEQ ID NO: 4742 - DNA, 24 bp, Artificial Sequence
  Synthetic: DMPK O reverse 19:45770523-45770550; SpCas9
tggcccacgccggccaactcaccg

SEQ ID NO: 4743 - DNA, 23 bp, Artificial Sequence
  Synthetic: DMPK O reverse 19:45770524-45770550; SpCas9
ggcccacgccggccaactcaccg

SEQ ID NO: 4744 - DNA, 22 bp, Artificial Sequence
  Synthetic: DMPK O reverse 19:45770525-45770550; SpCas9
gcccacgccggccaactcaccg

SEQ ID NO: 4745 - DNA, 21 bp, Artificial Sequence
  Synthetic: DMPK O reverse 19:45770526-45770550; SpCas9
cccacgccggccaactcaccg

SEQ ID NO: 4746 - DNA, 20 bp, Artificial Sequence
  Synthetic: DMPK O reverse 19:45770527-45770550; SpCas9
ccacgccggccaactcaccg

SEQ ID NO: 4747 - DNA, 19 bp, Artificial Sequence
  Synthetic: DMPK O reverse 19:45770528-45770550; SpCas9
cacgccggccaactcaccg

SEQ ID NO: 4748 - DNA, 18 bp, Artificial Sequence
  Synthetic: DMPK O reverse 19:45770529-45770550; SpCas9
acgccggccaactcaccg

SEQ ID NO: 4749 - DNA, 25 bp, Artificial Sequence
  Synthetic: DMPK O forward 19:45770535-45770563; SpCas9
gccggcgtgggccaccaacccaatg

SEQ ID NO: 4750 - DNA, 24 bp, Artificial Sequence
  Synthetic: DMPK O forward 19:45770536-45770563; SpCas9
ccggcgtgggccaccaacccaatg

SEQ ID NO: 4751 - DNA, 23 bp, Artificial Sequence
  Synthetic: DMPK O forward 19:45770537-45770563; SpCas9
cggcgtgggccaccaacccaatg

SEQ ID NO: 4752 - DNA, 22 bp, Artificial Sequence
  Synthetic: DMPK O forward 19:45770538-45770563; SpCas9
ggcgtgggccaccaacccaatg

SEQ ID NO: 4753 - DNA, 21 bp, Artificial Sequence
  Synthetic: DMPK O forward 19:45770539-45770563; SpCas9
gcgtgggccaccaacccaatg

SEQ ID NO: 4754 - DNA, 20 bp, Artificial Sequence
  Synthetic: DMPK O forward 19:45770540-45770563; SpCas9
cgtgggccaccaacccaatg

SEQ ID NO: 4755 - DNA, 19 bp, Artificial Sequence
  Synthetic: DMPK O forward 19:45770541-45770563; SpCas9
gtgggccaccaacccaatg

SEQ ID NO: 4756 - DNA, 18 bp, Artificial Sequence
  Synthetic: DMPK O forward 19:45770542-45770563; SpCas9
tgggccaccaacccaatg

SEQ ID NO: 4757 - DNA, 25 bp, Artificial Sequence
  Synthetic: DMPK O reverse 19:45770536-45770564; SpCas9
gctgcattgggttggtggcccacgc

SEQ ID NO: 4758 - DNA, 24 bp, Artificial Sequence
  Synthetic: DMPK O reverse 19:45770537-45770564; SpCas9
ctgcattgggttggtggcccacgc

SEQ ID NO: 4759 - DNA, 23 bp, Artificial Sequence
  Synthetic: DMPK O reverse 19:45770538-45770564; SpCas9
tgcattgggttggtggcccacgc

SEQ ID NO: 4760 - DNA, 22 bp, Artificial Sequence
  Synthetic: DMPK O reverse 19:45770539-45770564; SpCas9
gcattgggttggtggcccacgc

SEQ ID NO: 4761 - DNA, 21 bp, Artificial Sequence
  Synthetic: DMPK O reverse 19:45770540-45770564; SpCas9
cattgggttggtggcccacgc

SEQ ID NO: 4762 - DNA, 20 bp, Artificial Sequence
  Synthetic: DMPK O reverse 19:45770541-45770564; SpCas9
attgggttggtggcccacgc

SEQ ID NO: 4763 - DNA, 19 bp, Artificial Sequence
  Synthetic: DMPK O reverse 19:45770542-45770564; SpCas9
ttgggttggtggcccacgc

SEQ ID NO: 4764 - DNA, 18 bp, Artificial Sequence
  Synthetic: DMPK O reverse 19:45770543-45770564; SpCas9
tgggttggtggcccacgc

SEQ ID NO: 4765 - DNA, 25 bp, Artificial Sequence
  Synthetic: DMPK O forward 19:45770540-45770568; SpCas9
cgtgggccaccaacccaatgcagcc

SEQ ID NO: 4766 - DNA, 24 bp, Artificial Sequence
  Synthetic: DMPK O forward 19:45770541-45770568; SpCas9
gtgggccaccaacccaatgcagcc

SEQ ID NO: 4767 - DNA, 23 bp, Artificial Sequence
  Synthetic: DMPK O forward 19:45770542-45770568; SpCas9
tgggccaccaacccaatgcagcc

SEQ ID NO: 4768 - DNA, 22 bp, Artificial Sequence
  Synthetic: DMPK O forward 19:45770543-45770568; SpCas9
gggccaccaacccaatgcagcc

SEQ ID NO: 4769 - DNA, 21 bp, Artificial Sequence
  Synthetic: DMPK O forward 19:45770544-45770568; SpCas9
ggccaccaacccaatgcagcc

SEQ ID NO: 4770 - DNA, 20 bp, Artificial Sequence
  Synthetic: DMPK O forward 19:45770545-45770568; SpCas9
gccaccaacccaatgcagcc

SEQ ID NO: 4771 - DNA, 19 bp, Artificial Sequence
  Synthetic: DMPK O forward 19:45770546-45770568; SpCas9
ccaccaacccaatgcagcc

SEQ ID NO: 4772 - DNA, 18 bp, Artificial Sequence
  Synthetic: DMPK O forward 19:45770547-45770568; SpCas9
caccaacccaatgcagcc

SEQ ID NO: 4773 - DNA, 25 bp, Artificial Sequence
  Synthetic: DMPK O forward 19:45770541-45770569; SpCas9
gtgggccaccaacccaatgcagccc

SEQ ID NO: 4774 - DNA, 24 bp, Artificial Sequence
  Synthetic: DMPK O forward 19:45770542-45770569; SpCas9
tgggccaccaacccaatgcagccc

SEQ ID NO: 4775 - DNA, 23 bp, Artificial Sequence
  Synthetic: DMPK O forward 19:45770543-45770569; SpCas9
gggccaccaacccaatgcagccc

SEQ ID NO: 4776 - DNA, 22 bp, Artificial Sequence
  Synthetic: DMPK O forward 19:45770544-45770569; SpCas9
ggccaccaacccaatgcagccc

SEQ ID NO: 4777 - DNA, 21 bp, Artificial Sequence
  Synthetic: DMPK O forward 19:45770545-45770569; SpCas9
gccaccaacccaatgcagccc

SEQ ID NO: 4778 - DNA, 20 bp, Artificial Sequence
  Synthetic: DMPK O forward 19:45770546-45770569; SpCas9
ccaccaacccaatgcagccc

SEQ ID NO: 4779 - DNA, 19 bp, Artificial Sequence
  Synthetic: DMPK O forward 19:45770547-45770569; SpCas9
caccaacccaatgcagccc

SEQ ID NO: 4780 - DNA, 18 bp, Artificial Sequence
  Synthetic: DMPK O forward 19:45770548-45770569; SpCas9
accaacccaatgcagccc

SEQ ID NO: 4781 - DNA, 25 bp, Artificial Sequence
  Synthetic: DMPK O forward 19:45770542-45770570; SpCas9
tgggccaccaacccaatgcagccca

SEQ ID NO: 4782 - DNA, 24 bp, Artificial Sequence
  Synthetic: DMPK O forward 19:45770543-45770570; SpCas9
gggccaccaacccaatgcagccca

SEQ ID NO: 4783 - DNA, 23 bp, Artificial Sequence
  Synthetic: DMPK O forward 19:45770544-45770570; SpCas9
ggccaccaacccaatgcagccca

SEQ ID NO: 4784 - DNA, 22 bp, Artificial Sequence
  Synthetic: DMPK O forward 19:45770545-45770570; SpCas9
gccaccaacccaatgcagccca

SEQ ID NO: 4785 - DNA, 21 bp, Artificial Sequence
  Synthetic: DMPK O forward 19:45770546-45770570; SpCas9
ccaccaacccaatgcagccca

SEQ ID NO: 4786 - DNA, 20 bp, Artificial Sequence
  Synthetic: DMPK O forward 19:45770547-45770570; SpCas9
caccaacccaatgcagccca

SEQ ID NO: 4787 - DNA, 19 bp, Artificial Sequence
  Synthetic: DMPK O forward 19:45770548-45770570; SpCas9
accaacccaatgcagccca

SEQ ID NO: 4788 - DNA, 18 bp, Artificial Sequence
  Synthetic: DMPK O forward 19:45770549-45770570; SpCas9
ccaacccaatgcagccca

SEQ ID NO: 4789 - DNA, 25 bp, Artificial Sequence
  Synthetic: DMPK O forward 19:45770545-45770573; SpCas9
gccaccaacccaatgcagcccaggg

SEQ ID NO: 4790 - DNA, 24 bp, Artificial Sequence
  Synthetic: DMPK O forward 19:45770546-45770573; SpCas9
ccaccaacccaatgcagcccaggg

SEQ ID NO: 4791 - DNA, 23 bp, Artificial Sequence
  Synthetic: DMPK O forward 19:45770547-45770573; SpCas9
caccaacccaatgcagcccaggg

SEQ ID NO: 4792 - DNA, 22 bp, Artificial Sequence
  Synthetic: DMPK O forward 19:45770548-45770573; SpCas9
accaacccaatgcagcccaggg

SEQ ID NO: 4793 - DNA, 21 bp, Artificial Sequence
  Synthetic: DMPK O forward 19:45770549-45770573; SpCas9
ccaacccaatgcagcccaggg

SEQ ID NO: 4794 - DNA, 20 bp, Artificial Sequence
  Synthetic: DMPK O forward 19:45770550-45770573; SpCas9
caacccaatgcagcccaggg

SEQ ID NO: 4795 - DNA, 19 bp, Artificial Sequence
  Synthetic: DMPK O forward 19:45770551-45770573; SpCas9
aacccaatgcagcccaggg

SEQ ID NO: 4796 - DNA, 18 bp, Artificial Sequence
  Synthetic: DMPK O forward 19:45770552-45770573; SpCas9
acccaatgcagcccaggg

SEQ ID NO: 4797 - DNA, 25 bp, Artificial Sequence
  Synthetic: DMPK O reverse 19:45770546-45770574; SpCas9
gccgccctgggctgcattgggttgg

SEQ ID NO: 4798 - DNA, 24 bp, Artificial Sequence
  Synthetic: DMPK O reverse 19:45770547-45770574; SpCas9
ccgccctgggctgcattgggttgg

SEQ ID NO: 4799 - DNA, 23 bp, Artificial Sequence
  Synthetic: DMPK O reverse 19:45770548-45770574; SpCas9
cgccctgggctgcattgggttgg

SEQ ID NO: 4800 - DNA, 22 bp, Artificial Sequence
  Synthetic: DMPK O reverse 19:45770549-45770574; SpCas9
gccctgggctgcattgggttgg

SEQ ID NO: 4801 - DNA, 21 bp, Artificial Sequence
  Synthetic: DMPK O reverse 19:45770550-45770574; SpCas9
ccctgggctgcattgggttgg

SEQ ID NO: 4802 - DNA, 20 bp, Artificial Sequence
  Synthetic: DMPK O reverse 19:45770551-45770574; SpCas9
cctgggctgcattgggttgg

SEQ ID NO: 4803 - DNA, 19 bp, Artificial Sequence
  Synthetic: DMPK O reverse 19:45770552-45770574; SpCas9
ctgggctgcattgggttgg

SEQ ID NO: 4804 - DNA, 18 bp, Artificial Sequence
  Synthetic: DMPK O reverse 19:45770553-45770574; SpCas9
tgggctgcattgggttgg

SEQ ID NO: 4805 - DNA, 25 bp, Artificial Sequence
  Synthetic: DMPK O forward 19:45770548-45770576; SpCas9
accaacccaatgcagcccagggcgg

SEQ ID NO: 4806 - DNA, 24 bp, Artificial Sequence
  Synthetic: DMPK O forward 19:45770549-45770576; SpCas9
ccaacccaatgcagcccagggcgg

SEQ ID NO: 4807 - DNA, 23 bp, Artificial Sequence
  Synthetic: DMPK O forward 19:45770550-45770576; SpCas9
caacccaatgcagcccagggcgg

SEQ ID NO: 4808 - DNA, 22 bp, Artificial Sequence
  Synthetic: DMPK O forward 19:45770551-45770576; SpCas9
aacccaatgcagcccagggcgg

SEQ ID NO: 4809 - DNA, 21 bp, Artificial Sequence
  Synthetic: DMPK O forward 19:45770552-45770576; SpCas9
acccaatgcagcccagggcgg

SEQ ID NO: 4810 - DNA, 20 bp, Artificial Sequence
  Synthetic: DMPK O forward 19:45770553-45770576; SpCas9
cccaatgcagcccagggcgg

SEQ ID NO: 4811 - DNA, 19 bp, Artificial Sequence
  Synthetic: DMPK O forward 19:45770554-45770576; SpCas9
ccaatgcagcccagggcgg

SEQ ID NO: 4812 - DNA, 18 bp, Artificial Sequence
  Synthetic: DMPK O forward 19:45770555-45770576; SpCas9
caatgcagcccagggcgg

SEQ ID NO: 4813 - DNA, 25 bp, Artificial Sequence
  Synthetic: DMPK O reverse 19:45770549-45770577; SpCas9
gccgccgccctgggctgcattgggt

SEQ ID NO: 4814 - DNA, 24 bp, Artificial Sequence
  Synthetic: DMPK O reverse 19:45770550-45770577; SpCas9
ccgccgccctgggctgcattgggt

SEQ ID NO: 4815 - DNA, 23 bp, Artificial Sequence
  Synthetic: DMPK O reverse 19:45770551-45770577; SpCas9
cgccgccctgggctgcattgggt

SEQ ID NO: 4816 - DNA, 22 bp, Artificial Sequence
  Synthetic: DMPK O reverse 19:45770552-45770577; SpCas9
gccgccctgggctgcattgggt

SEQ ID NO: 4817 - DNA, 21 bp, Artificial Sequence
  Synthetic: DMPK O reverse 19:45770553-45770577; SpCas9
ccgccctgggctgcattgggt

SEQ ID NO: 4818 - DNA, 20 bp, Artificial Sequence
  Synthetic: DMPK O reverse 19:45770554-45770577; SpCas9
cgccctgggctgcattgggt

SEQ ID NO: 4819 - DNA, 19 bp, Artificial Sequence
  Synthetic: DMPK O reverse 19:45770555-45770577; SpCas9
gccctgggctgcattgggt

SEQ ID NO: 4820 - DNA, 18 bp, Artificial Sequence
  Synthetic: DMPK O reverse 19:45770556-45770577; SpCas9
ccctgggctgcattgggt

SEQ ID NO: 4821 - DNA, 25 bp, Artificial Sequence
  Synthetic: DMPK O reverse 19:45770553-45770581; SpCas9
tcgtgccgccgccctgggctgcatt

SEQ ID NO: 4822 - DNA, 24 bp, Artificial Sequence
  Synthetic: DMPK O reverse 19:45770554-45770581; SpCas9
cgtgccgccgccctgggctgcatt

SEQ ID NO: 4823 - DNA, 23 bp, Artificial Sequence
  Synthetic: DMPK O reverse 19:45770555-45770581; SpCas9
gtgccgccgccctgggctgcatt

SEQ ID NO: 4824 - DNA, 22 bp, Artificial Sequence
  Synthetic: DMPK O reverse 19:45770556-45770581; SpCas9
tgccgccgccctgggctgcatt

SEQ ID NO: 4825 - DNA, 21 bp, Artificial Sequence
  Synthetic: DMPK O reverse 19:45770557-45770581; SpCas9
gccgccgccctgggctgcatt

SEQ ID NO: 4826 - DNA, 20 bp, Artificial Sequence
  Synthetic: DMPK O reverse 19:45770558-45770581; SpCas9
ccgccgccctgggctgcatt

SEQ ID NO: 4827 - DNA, 19 bp, Artificial Sequence
  Synthetic: DMPK O reverse 19:45770559-45770581; SpCas9
cgccgccctgggctgcatt

SEQ ID NO: 4828 - DNA, 18 bp, Artificial Sequence
  Synthetic: DMPK O reverse 19:45770560-45770581; SpCas9
gccgccctgggctgcatt

SEQ ID NO: 4829 - DNA, 25 bp, Artificial Sequence
  Synthetic: DMPK O forward 19:45770554-45770582; SpCas9
ccaatgcagcccagggcggcggcac

SEQ ID NO: 4830 - DNA, 24 bp, Artificial Sequence
  Synthetic: DMPK O forward 19:45770555-45770582; SpCas9
caatgcagcccagggcggcggcac

SEQ ID NO: 4831 - DNA, 23 bp, Artificial Sequence
  Synthetic: DMPK O forward 19:45770556-45770582; SpCas9
aatgcagcccagggcggcggcac

SEQ ID NO: 4832 - DNA, 22 bp, Artificial Sequence
  Synthetic: DMPK O forward 19:45770557-45770582; SpCas9
atgcagcccagggcggcggcac

SEQ ID NO: 4833 - DNA, 21 bp, Artificial Sequence
  Synthetic: DMPK O forward 19:45770558-45770582; SpCas9
tgcagcccagggcggcggcac

SEQ ID NO: 4834 - DNA, 20 bp, Artificial Sequence
  Synthetic: DMPK O forward 19:45770559-45770582; SpCas9
gcagcccagggcggcggcac

SEQ ID NO: 4835 - DNA, 19 bp, Artificial Sequence
  Synthetic: DMPK O forward 19:45770560-45770582; SpCas9
cagcccagggcggcggcac

SEQ ID NO: 4836 - DNA, 18 bp, Artificial Sequence
  Synthetic: DMPK O forward 19:45770561-45770582; SpCas9
agcccagggcggcggcac

SEQ ID NO: 4837 - DNA, 25 bp, Artificial Sequence
  Synthetic: DMPK O reverse 19:45770554-45770582; SpCas9
ctcgtgccgccgccctgggctgcat

SEQ ID NO: 4838 - DNA, 24 bp, Artificial Sequence
  Synthetic: DMPK O reverse 19:45770555-45770582; SpCas9
tcgtgccgccgccctgggctgcat

SEQ ID NO: 4839 - DNA, 23 bp, Artificial Sequence
  Synthetic: DMPK O reverse 19:45770556-45770582; SpCas9
cgtgccgccgccctgggctgcat

SEQ ID NO: 4840 - DNA, 22 bp, Artificial Sequence
  Synthetic: DMPK O reverse 19:45770557-45770582; SpCas9
gtgccgccgccctgggctgcat

SEQ ID NO: 4841 - DNA, 21 bp, Artificial Sequence
  Synthetic: DMPK O reverse 19:45770558-45770582; SpCas9
tgccgccgccctgggctgcat

SEQ ID NO: 4842 - DNA, 20 bp, Artificial Sequence
  Synthetic: DMPK O reverse 19:45770559-45770582; SpCas9
gccgccgccctgggctgcat

SEQ ID NO: 4843 - DNA, 19 bp, Artificial Sequence
  Synthetic: DMPK O reverse 19:45770560-45770582; SpCas9
ccgccgccctgggctgcat

SEQ ID NO: 4844 - DNA, 18 bp, Artificial Sequence
  Synthetic: DMPK O reverse 19:45770561-45770582; SpCas9
cgccgccctgggctgcat

SEQ ID NO: 4845 - DNA, 25 bp, Artificial Sequence
  Synthetic: DMPK O forward 19:45770558-45770586; SpCas9
tgcagcccagggcggcggcacgaga

SEQ ID NO: 4846 - DNA, 24 bp, Artificial Sequence
  Synthetic: DMPK O forward 19:45770559-45770586; SpCas9
gcagcccagggcggcggcacgaga

SEQ ID NO: 4847 - DNA, 23 bp, Artificial Sequence
  Synthetic: DMPK O forward 19:45770560-45770586; SpCas9
cagcccagggcggcggcacgaga

SEQ ID NO: 4848 - DNA, 22 bp, Artificial Sequence
  Synthetic: DMPK O forward 19:45770561-45770586; SpCas9
agcccagggcggcggcacgaga

SEQ ID NO: 4849 - DNA, 21 bp, Artificial Sequence
  Synthetic: DMPK O forward 19:45770562-45770586; SpCas9
gcccagggcggcggcacgaga

SEQ ID NO: 4850 - DNA, 20 bp, Artificial Sequence
  Synthetic: DMPK O forward 19:45770563-45770586; SpCas9
cccagggcggcggcacgaga

SEQ ID NO: 4851 - DNA, 19 bp, Artificial Sequence
  Synthetic: DMPK O forward 19:45770564-45770586; SpCas9
ccagggcggcggcacgaga

SEQ ID NO: 4852 - DNA, 18 bp, Artificial Sequence
  Synthetic: DMPK O forward 19:45770565-45770586; SpCas9
cagggcggcggcacgaga

SEQ ID NO: 4853 - DNA, 25 bp, Artificial Sequence
  Synthetic: DMPK O reverse 19:45770563-45770591; SpCas9
ttgttctgtctcgtgccgccgccct

SEQ ID NO: 4854 - DNA, 24 bp, Artificial Sequence
  Synthetic: DMPK O reverse 19:45770564-45770591; SpCas9
tgttctgtctcgtgccgccgccct

SEQ ID NO: 4855 - DNA, 23 bp, Artificial Sequence
  Synthetic: DMPK O reverse 19:45770565-45770591; SpCas9
gttctgtctcgtgccgccgccct

SEQ ID NO: 4856 - DNA, 22 bp, Artificial Sequence
  Synthetic: DMPK O reverse 19:45770566-45770591; SpCas9
ttctgtctcgtgccgccgccct

SEQ ID NO: 4857 - DNA, 21 bp, Artificial Sequence
  Synthetic: DMPK O reverse 19:45770567-45770591; SpCas9
tctgtctcgtgccgccgccct

SEQ ID NO: 4858 - DNA, 20 bp, Artificial Sequence
  Synthetic: DMPK O reverse 19:45770568-45770591; SpCas9
ctgtctcgtgccgccgccct

SEQ ID NO: 4859 - DNA, 19 bp, Artificial Sequence
  Synthetic: DMPK O reverse 19:45770569-45770591; SpCas9
tgtctcgtgccgccgccct

SEQ ID NO: 4860 - DNA, 18 bp, Artificial Sequence
  Synthetic: DMPK O reverse 19:45770570-45770591; SpCas9
gtctcgtgccgccgccct

SEQ ID NO: 4861 - DNA, 25 bp, Artificial Sequence
  Synthetic: DMPK O reverse 19:45770564-45770592; SpCas9
gttgttctgtctcgtgccgccgccc

SEQ ID NO: 4862 - DNA, 24 bp, Artificial Sequence
  Synthetic: DMPK O reverse 19:45770565-45770592; SpCas9
ttgttctgtctcgtgccgccgccc

SEQ ID NO: 4863 - DNA, 23 bp, Artificial Sequence
  Synthetic: DMPK O reverse 19:45770566-45770592; SpCas9
tgttctgtctcgtgccgccgccc

SEQ ID NO: 4864 - DNA, 22 bp, Artificial Sequence
  Synthetic: DMPK O reverse 19:45770567-45770592; SpCas9
gttctgtctcgtgccgccgccc

SEQ ID NO: 4865 - DNA, 21 bp, Artificial Sequence
  Synthetic: DMPK O reverse 19:45770568-45770592; SpCas9
ttctgtctcgtgccgccgccc

SEQ ID NO: 4866 - DNA, 20 bp, Artificial Sequence
  Synthetic: DMPK O reverse 19:45770569-45770592; SpCas9
tctgtctcgtgccgccgccc

SEQ ID NO: 4867 - DNA, 19 bp, Artificial Sequence
  Synthetic: DMPK O reverse 19:45770570-45770592; SpCas9
ctgtctcgtgccgccgccc

SEQ ID NO: 4868 - DNA, 18 bp, Artificial Sequence
  Synthetic: DMPK O reverse 19:45770571-45770592; SpCas9
tgtctcgtgccgccgccc

SEQ ID NO: 4869 - DNA, 25 bp, Artificial Sequence
  Synthetic: DMPK O forward 19:45770566-45770594; SpCas9
agggcggcggcacgagacagaacaa

SEQ ID NO: 4870 - DNA, 24 bp, Artificial Sequence
  Synthetic: DMPK O forward 19:45770567-45770594; SpCas9
gggcggcggcacgagacagaacaa

SEQ ID NO: 4871 - DNA, 23 bp, Artificial Sequence
  Synthetic: DMPK O forward 19:45770568-45770594; SpCas9
ggcggcggcacgagacagaacaa

SEQ ID NO: 4872 - DNA, 22 bp, Artificial Sequence
  Synthetic: DMPK O forward 19:45770569-45770594; SpCas9
gcggcggcacgagacagaacaa

SEQ ID NO: 4873 - DNA, 21 bp, Artificial Sequence
  Synthetic: DMPK O forward 19:45770570-45770594; SpCas9
cggcggcacgagacagaacaa

SEQ ID NO: 4874 - DNA, 20 bp, Artificial Sequence
  Synthetic: DMPK O forward 19:45770571-45770594; SpCas9
ggcggcacgagacagaacaa

SEQ ID NO: 4875 - DNA, 19 bp, Artificial Sequence
  Synthetic: DMPK O forward 19:45770572-45770594; SpCas9
gcggcacgagacagaacaa

SEQ ID NO: 4876 - DNA, 18 bp, Artificial Sequence
  Synthetic: DMPK O forward 19:45770573-45770594; SpCas9
cggcacgagacagaacaa

SEQ ID NO: 4877 - DNA, 25 bp, Artificial Sequence
  Synthetic: DMPK O forward 19:45770573-45770601; SpCas9
cggcacgagacagaacaacggcgaa

SEQ ID NO: 4878 - DNA, 24 bp, Artificial Sequence
  Synthetic: DMPK O forward 19:45770574-45770601; SpCas9
ggcacgagacagaacaacggcgaa

SEQ ID NO: 4879 - DNA, 23 bp, Artificial Sequence
  Synthetic: DMPK O forward 19:45770575-45770601; SpCas9
gcacgagacagaacaacggcgaa

SEQ ID NO: 4880 - DNA, 22 bp, Artificial Sequence
  Synthetic: DMPK O forward 19:45770576-45770601; SpCas9
cacgagacagaacaacggcgaa

SEQ ID NO: 4881 - DNA, 21 bp, Artificial Sequence
  Synthetic: DMPK O forward 19:45770577-45770601; SpCas9
acgagacagaacaacggcgaa

SEQ ID NO: 4882 - DNA, 20 bp, Artificial Sequence
  Synthetic: DMPK O forward 19:45770578-45770601; SpCas9
cgagacagaacaacggcgaa

SEQ ID NO: 4883 - DNA, 19 bp, Artificial Sequence
  Synthetic: DMPK O forward 19:45770579-45770601; SpCas9
gagacagaacaacggcgaa

SEQ ID NO: 4884 - DNA, 18 bp, Artificial Sequence
  Synthetic: DMPK O forward 19:45770580-45770601; SpCas9
agacagaacaacggcgaa

SEQ ID NO: 4885 - DNA, 25 bp, Artificial Sequence
  Synthetic: DMPK O forward 19:45770574-45770602; SpCas9
ggcacgagacagaacaacggcgaac

SEQ ID NO: 4886 - DNA, 24 bp, Artificial Sequence
  Synthetic: DMPK O forward 19:45770575-45770602; SpCas9
gcacgagacagaacaacggcgaac

SEQ ID NO: 4887 - DNA, 23 bp, Artificial Sequence
  Synthetic: DMPK O forward 19:45770576-45770602; SpCas9
cacgagacagaacaacggcgaac

SEQ ID NO: 4888 - DNA, 22 bp, Artificial Sequence
  Synthetic: DMPK O forward 19:45770577-45770602; SpCas9
acgagacagaacaacggcgaac

SEQ ID NO: 4889 - DNA, 21 bp, Artificial Sequence
  Synthetic: DMPK O forward 19:45770578-45770602; SpCas9
cgagacagaacaacggcgaac

SEQ ID NO: 4890 - DNA, 20 bp, Artificial Sequence
  Synthetic: DMPK O forward 19:45770579-45770602; SpCas9
gagacagaacaacggcgaac

SEQ ID NO: 4891 - DNA, 19 bp, Artificial Sequence
  Synthetic: DMPK O forward 19:45770580-45770602; SpCas9
agacagaacaacggcgaac

SEQ ID NO: 4892 - DNA, 18 bp, Artificial Sequence
  Synthetic: DMPK O forward 19:45770581-45770602; SpCas9
gacagaacaacggcgaac

SEQ ID NO: 4893 - DNA, 25 bp, Artificial Sequence
  Synthetic: DMPK O forward 19:45770576-45770604; SpCas9
cacgagacagaacaacggcgaacag

SEQ ID NO: 4894 - DNA, 24 bp, Artificial Sequence
  Synthetic: DMPK O forward 19:45770577-45770604; SpCas9
acgagacagaacaacggcgaacag

SEQ ID NO: 4895 - DNA, 23 bp, Artificial Sequence
  Synthetic: DMPK O forward 19:45770578-45770604; SpCas9
cgagacagaacaacggcgaacag

SEQ ID NO: 4896 - DNA, 22 bp, Artificial Sequence
  Synthetic: DMPK O forward 19:45770579-45770604; SpCas9
gagacagaacaacggcgaacag

SEQ ID NO: 4897 - DNA, 21 bp, Artificial Sequence
  Synthetic: DMPK O forward 19:45770580-45770604; SpCas9
agacagaacaacggcgaacag

SEQ ID NO: 4898 - DNA, 20 bp, Artificial Sequence
  Synthetic: DMPK O forward 19:45770581-45770604; SpCas9
gacagaacaacggcgaacag

SEQ ID NO: 4899 - DNA, 19 bp, Artificial Sequence
  Synthetic: DMPK O forward 19:45770582-45770604; SpCas9
acagaacaacggcgaacag

SEQ ID NO: 4900 - DNA, 18 bp, Artificial Sequence
  Synthetic: DMPK O forward 19:45770583-45770604; SpCas9
cagaacaacggcgaacag

SEQ ID NO: 4901 - DNA, 25 bp, Artificial Sequence
  Synthetic: DMPK O forward 19:45770579-45770607; SpCas9
gagacagaacaacggcgaacaggag

SEQ ID NO: 4902 - DNA, 24 bp, Artificial Sequence
  Synthetic: DMPK O forward 19:45770580-45770607; SpCas9
agacagaacaacggcgaacaggag

SEQ ID NO: 4903 - DNA, 23 bp, Artificial Sequence
  Synthetic: DMPK O forward 19:45770581-45770607; SpCas9
gacagaacaacggcgaacaggag

SEQ ID NO: 4904 - DNA, 22 bp, Artificial Sequence
  Synthetic: DMPK O forward 19:45770582-45770607; SpCas9
acagaacaacggcgaacaggag

SEQ ID NO: 4905 - DNA, 21 bp, Artificial Sequence
  Synthetic: DMPK O forward 19:45770583-45770607; SpCas9
cagaacaacggcgaacaggag

SEQ ID NO: 4906 - DNA, 20 bp, Artificial Sequence
  Synthetic: DMPK O forward 19:45770584-45770607; SpCas9
agaacaacggcgaacaggag

SEQ ID NO: 4907 - DNA, 19 bp, Artificial Sequence
  Synthetic: DMPK O forward 19:45770585-45770607; SpCas9
gaacaacggcgaacaggag

SEQ ID NO: 4908 - DNA, 18 bp, Artificial Sequence
  Synthetic: DMPK O forward 19:45770586-45770607; SpCas9
aacaacggcgaacaggag

SEQ ID NO: 4909 - DNA, 25 bp, Artificial Sequence
  Synthetic: DMPK O forward 19:45770580-45770608; SpCas9
agacagaacaacggcgaacaggagc

SEQ ID NO: 4910 - DNA, 24 bp, Artificial Sequence
  Synthetic: DMPK O forward 19:45770581-45770608; SpCas9
gacagaacaacggcgaacaggagc

SEQ ID NO: 4911 - DNA, 23 bp, Artificial Sequence
  Synthetic: DMPK O forward 19:45770582-45770608; SpCas9
acagaacaacggcgaacaggagc

SEQ ID NO: 4912 - DNA, 22 bp, Artificial Sequence
  Synthetic: DMPK O forward 19:45770583-45770608; SpCas9
cagaacaacggcgaacaggagc

SEQ ID NO: 4913 - DNA, 21 bp, Artificial Sequence
  Synthetic: DMPK O forward 19:45770584-45770608; SpCas9
agaacaacggcgaacaggagc

SEQ ID NO: 4914 - DNA, 20 bp, Artificial Sequence
  Synthetic: DMPK O forward 19:45770585-45770608; SpCas9
gaacaacggcgaacaggagc

SEQ ID NO: 4915 - DNA, 19 bp, Artificial Sequence
  Synthetic: DMPK O forward 19:45770586-45770608; SpCas9
aacaacggcgaacaggagc

SEQ ID NO: 4916 - DNA, 18 bp, Artificial Sequence
  Synthetic: DMPK O forward 19:45770587-45770608; SpCas9
acaacggcgaacaggagc

SEQ ID NO: 4917 - DNA, 25 bp, Artificial Sequence
  Synthetic: DMPK O forward 19:45770581-45770609; SpCas9
gacagaacaacggcgaacaggagca

SEQ ID NO: 4918 - DNA, 24 bp, Artificial Sequence
  Synthetic: DMPK O forward 19:45770582-45770609; SpCas9
acagaacaacggcgaacaggagca

SEQ ID NO: 4919 - DNA, 23 bp, Artificial Sequence
  Synthetic: DMPK O forward 19:45770583-45770609; SpCas9
cagaacaacggcgaacaggagca

SEQ ID NO: 4920 - DNA, 22 bp, Artificial Sequence
  Synthetic: DMPK O forward 19:45770584-45770609; SpCas9
agaacaacggcgaacaggagca

SEQ ID NO: 4921 - DNA, 21 bp, Artificial Sequence
  Synthetic: DMPK O forward 19:45770585-45770609; SpCas9
gaacaacggcgaacaggagca

SEQ ID NO: 4922 - DNA, 20 bp, Artificial Sequence
  Synthetic: DMPK O forward 19:45770586-45770609; SpCas9
aacaacggcgaacaggagca

SEQ ID NO: 4923 - DNA, 19 bp, Artificial Sequence
  Synthetic: DMPK O forward 19:45770587-45770609; SpCas9
acaacggcgaacaggagca

SEQ ID NO: 4924 - DNA, 18 bp, Artificial Sequence
  Synthetic: DMPK O forward 19:45770588-45770609; SpCas9
caacggcgaacaggagca

SEQ ID NO: 4925 - DNA, 25 bp, Artificial Sequence
  Synthetic: DMPK O forward 19:45770585-45770613; SpCas9
gaacaacggcgaacaggagcaggga

SEQ ID NO: 4926 - DNA, 24 bp, Artificial Sequence
  Synthetic: DMPK O forward 19:45770586-45770613; SpCas9
aacaacggcgaacaggagcaggga

SEQ ID NO: 4927 - DNA, 23 bp, Artificial Sequence
  Synthetic: DMPK O forward 19:45770587-45770613; SpCas9
acaacggcgaacaggagcaggga

SEQ ID NO: 4928 - DNA, 22 bp, Artificial Sequence
  Synthetic: DMPK O forward 19:45770588-45770613; SpCas9
caacggcgaacaggagcaggga

SEQ ID NO: 4929 - DNA, 21 bp, Artificial Sequence
  Synthetic: DMPK O forward 19:45770589-45770613; SpCas9
aacggcgaacaggagcaggga

SEQ ID NO: 4930 - DNA, 20 bp, Artificial Sequence
  Synthetic: DMPK O forward 19:45770590-45770613; SpCas9
acggcgaacaggagcaggga

SEQ ID NO: 4931 - DNA, 19 bp, Artificial Sequence
  Synthetic: DMPK O forward 19:45770591-45770613; SpCas9
cggcgaacaggagcaggga

SEQ ID NO: 4932 - DNA, 18 bp, Artificial Sequence
  Synthetic: DMPK O forward 19:45770592-45770613; SpCas9
ggcgaacaggagcaggga

SEQ ID NO: 4933 - DNA, 25 bp, Artificial Sequence
  Synthetic: DMPK O forward 19:45770597-45770625; SpCas9
acaggagcagggaaagcgcctccga

SEQ ID NO: 4934 - DNA, 24 bp, Artificial Sequence
  Synthetic: DMPK O forward 19:45770598-45770625; SpCas9
caggagcagggaaagcgcctccga

SEQ ID NO: 4935 - DNA, 23 bp, Artificial Sequence
  Synthetic: DMPK O forward 19:45770599-45770625; SpCas9
aggagcagggaaagcgcctccga

SEQ ID NO: 4936 - DNA, 22 bp, Artificial Sequence
  Synthetic: DMPK O forward 19:45770600-45770625; SpCas9
ggagcagggaaagcgcctccga

SEQ ID NO: 4937 - DNA, 21 bp, Artificial Sequence
  Synthetic: DMPK O forward 19:45770601-45770625; SpCas9
gagcagggaaagcgcctccga

SEQ ID NO: 4938 - DNA, 20 bp, Artificial Sequence
  Synthetic: DMPK O forward 19:45770602-45770625; SpCas9
agcagggaaagcgcctccga

SEQ ID NO: 4939 - DNA, 19 bp, Artificial Sequence
  Synthetic: DMPK O forward 19:45770603-45770625; SpCas9
gcagggaaagcgcctccga

SEQ ID NO: 4940 - DNA, 18 bp, Artificial Sequence
  Synthetic: DMPK O forward 19:45770604-45770625; SpCas9
cagggaaagcgcctccga

SEQ ID NO: 4941 - DNA, 25 bp, Artificial Sequence
  Synthetic: DMPK O forward 19:45770598-45770626; SpCas9
caggagcagggaaagcgcctccgat

SEQ ID NO: 4942 - DNA, 24 bp, Artificial Sequence
  Synthetic: DMPK O forward 19:45770599-45770626; SpCas9
aggagcagggaaagcgcctccgat

SEQ ID NO: 4943 - DNA, 23 bp, Artificial Sequence
  Synthetic: DMPK O forward 19:45770600-45770626; SpCas9
ggagcagggaaagcgcctccgat

SEQ ID NO: 4944 - DNA, 22 bp, Artificial Sequence
  Synthetic: DMPK O forward 19:45770601-45770626; SpCas9
gagcagggaaagcgcctccgat

SEQ ID NO: 4945 - DNA, 21 bp, Artificial Sequence
  Synthetic: DMPK O forward 19:45770602-45770626; SpCas9
agcagggaaagcgcctccgat

SEQ ID NO: 4946 - DNA, 20 bp, Artificial Sequence
  Synthetic: DMPK O forward 19:45770603-45770626; SpCas9
gcagggaaagcgcctccgat

SEQ ID NO: 4947 - DNA, 19 bp, Artificial Sequence
  Synthetic: DMPK O forward 19:45770604-45770626; SpCas9
cagggaaagcgcctccgat

SEQ ID NO: 4948 - DNA, 18 bp, Artificial Sequence
  Synthetic: DMPK O forward 19:45770605-45770626; SpCas9
agggaaagcgcctccgat

SEQ ID NO: 4949 - DNA, 25 bp, Artificial Sequence
  Synthetic: DMPK O forward 19:45770602-45770630; SpCas9
agcagggaaagcgcctccgataggc

SEQ ID NO: 4950 - DNA, 24 bp, Artificial Sequence
  Synthetic: DMPK O forward 19:45770603-45770630; SpCas9
gcagggaaagcgcctccgataggc

SEQ ID NO: 4951 - DNA, 23 bp, Artificial Sequence
  Synthetic: DMPK O forward 19:45770604-45770630; SpCas9
cagggaaagcgcctccgataggc

SEQ ID NO: 4952 - DNA, 22 bp, Artificial Sequence
  Synthetic: DMPK O forward 19:45770605-45770630; SpCas9
agggaaagcgcctccgataggc

SEQ ID NO: 4953 - DNA, 21 bp, Artificial Sequence
  Synthetic: DMPK O forward 19:45770606-45770630; SpCas9
gggaaagcgcctccgataggc

SEQ ID NO: 4954 - DNA, 20 bp, Artificial Sequence
  Synthetic: DMPK O forward 19:45770607-45770630; SpCas9
ggaaagcgcctccgataggc

SEQ ID NO: 4955 - DNA, 19 bp, Artificial Sequence
  Synthetic: DMPK O forward 19:45770608-45770630; SpCas9
gaaagcgcctccgataggc

SEQ ID NO: 4956 - DNA, 18 bp, Artificial Sequence
  Synthetic: DMPK O forward 19:45770609-45770630; SpCas9
aaagcgcctccgataggc

SEQ ID NO: 4957 - DNA, 25 bp, Artificial Sequence
  Synthetic: DMPK O forward 19:45770603-45770631; SpCas9
gcagggaaagcgcctccgataggcc

SEQ ID NO: 4958 - DNA, 24 bp, Artificial Sequence
  Synthetic: DMPK O forward 19:45770604-45770631; SpCas9
cagggaaagcgcctccgataggcc

SEQ ID NO: 4959 - DNA, 23 bp, Artificial Sequence
  Synthetic: DMPK O forward 19:45770605-45770631; SpCas9
agggaaagcgcctccgataggcc

SEQ ID NO: 4960 - DNA, 22 bp, Artificial Sequence
  Synthetic: DMPK O forward 19:45770606-45770631; SpCas9
gggaaagcgcctccgataggcc

SEQ ID NO: 4961 - DNA, 21 bp, Artificial Sequence
  Synthetic: DMPK O forward 19:45770607-45770631; SpCas9
ggaaagcgcctccgataggcc

SEQ ID NO: 4962 - DNA, 20 bp, Artificial Sequence
  Synthetic: DMPK O forward 19:45770608-45770631; SpCas9
gaaagcgcctccgataggcc

SEQ ID NO: 4963 - DNA, 19 bp, Artificial Sequence
  Synthetic: DMPK O forward 19:45770609-45770631; SpCas9
aaagcgcctccgataggcc

SEQ ID NO: 4964 - DNA, 18 bp, Artificial Sequence
  Synthetic: DMPK O forward 19:45770610-45770631; SpCas9
aagcgcctccgataggcc

SEQ ID NO: 4965 - DNA, 25 bp, Artificial Sequence
  Synthetic: DMPK O forward 19:45770608-45770636; SpCas9
gaaagcgcctccgataggccaggcc

SEQ ID NO: 4966 - DNA, 24 bp, Artificial Sequence
  Synthetic: DMPK O forward 19:45770609-45770636; SpCas9
aaagcgcctccgataggccaggcc

SEQ ID NO: 4967 - DNA, 23 bp, Artificial Sequence
  Synthetic: DMPK O forward 19:45770610-45770636; SpCas9
aagcgcctccgataggccaggcc

SEQ ID NO: 4968 - DNA, 22 bp, Artificial Sequence
  Synthetic: DMPK O forward 19:45770611-45770636; SpCas9
agcgcctccgataggccaggcc

SEQ ID NO: 4969 - DNA, 21 bp, Artificial Sequence
  Synthetic: DMPK O forward 19:45770612-45770636; SpCas9
gcgcctccgataggccaggcc

SEQ ID NO: 4970 - DNA, 20 bp, Artificial Sequence
  Synthetic: DMPK O forward 19:45770613-45770636; SpCas9
cgcctccgataggccaggcc

SEQ ID NO: 4971 - DNA, 19 bp, Artificial Sequence
  Synthetic: DMPK O forward 19:45770614-45770636; SpCas9
gcctccgataggccaggcc

SEQ ID NO: 4972 - DNA, 18 bp, Artificial Sequence
  Synthetic: DMPK O forward 19:45770615-45770636; SpCas9
cctccgataggccaggcc

SEQ ID NO: 4973 - DNA, 25 bp, Artificial Sequence
  Synthetic: DMPK O forward 19:45770609-45770637; SpCas9
aaagcgcctccgataggccaggcct

SEQ ID NO: 4974 - DNA, 24 bp, Artificial Sequence
  Synthetic: DMPK O forward 19:45770610-45770637; SpCas9
aagcgcctccgataggccaggcct

SEQ ID NO: 4975 - DNA, 23 bp, Artificial Sequence
  Synthetic: DMPK O forward 19:45770611-45770637; SpCas9
agcgcctccgataggccaggcct

SEQ ID NO: 4976 - DNA, 22 bp, Artificial Sequence
  Synthetic: DMPK O forward 19:45770612-45770637; SpCas9
gcgcctccgataggccaggcct

SEQ ID NO: 4977 - DNA, 21 bp, Artificial Sequence
  Synthetic: DMPK O forward 19:45770613-45770637; SpCas9
cgcctccgataggccaggcct

SEQ ID NO: 4978 - DNA, 20 bp, Artificial Sequence
  Synthetic: DMPK O forward 19:45770614-45770637; SpCas9
gcctccgataggccaggcct

SEQ ID NO: 4979 - DNA, 19 bp, Artificial Sequence
  Synthetic: DMPK O forward 19:45770615-45770637; SpCas9
cctccgataggccaggcct

SEQ ID NO: 4980 - DNA, 18 bp, Artificial Sequence
  Synthetic: DMPK O forward 19:45770616-45770637; SpCas9
ctccgataggccaggcct

SEQ ID NO: 4981 - DNA, 25 bp, Artificial Sequence
  Synthetic: DMPK O forward 19:45770610-45770638; SpCas9
aagcgcctccgataggccaggccta

SEQ ID NO: 4982 - DNA, 24 bp, Artificial Sequence
  Synthetic: DMPK O forward 19:45770611-45770638; SpCas9
agcgcctccgataggccaggccta

SEQ ID NO: 4983 - DNA, 23 bp, Artificial Sequence
  Synthetic: DMPK O forward 19:45770612-45770638; SpCas9
gcgcctccgataggccaggccta

SEQ ID NO: 4984 - DNA, 22 bp, Artificial Sequence
  Synthetic: DMPK O forward 19:45770613-45770638; SpCas9
cgcctccgataggccaggccta

SEQ ID NO: 4985 - DNA, 21 bp, Artificial Sequence
  Synthetic: DMPK O forward 19:45770614-45770638; SpCas9
gcctccgataggccaggccta

SEQ ID NO: 4986 - DNA, 20 bp, Artificial Sequence
  Synthetic: DMPK O forward 19:45770615-45770638; SpCas9
cctccgataggccaggccta

SEQ ID NO: 4987 - DNA, 19 bp, Artificial Sequence
  Synthetic: DMPK O forward 19:45770616-45770638; SpCas9
ctccgataggccaggccta

SEQ ID NO: 4988 - DNA, 18 bp, Artificial Sequence
  Synthetic: DMPK O forward 19:45770617-45770638; SpCas9
tccgataggccaggccta

SEQ ID NO: 4989 - DNA, 22 bp, Artificial Sequence
  Synthetic: SaCas9
gcgggatgcgaagcggccgaat

SEQ ID NO: 4990 - DNA, 22 bp, Artificial Sequence
  Synthetic: SaCas9
gagctagcgggatgcgaagcgg

SEQ ID NO: 4991 - DNA, 22 bp, Artificial Sequence
  Synthetic: SaCas9
cttcggccgcctccacacgcct

SEQ ID NO: 4992 - DNA, 22 bp, Artificial Sequence
  Synthetic: SaCas9
ccgaaggtctgggaggagctag

SEQ ID NO: 4993-5000 - skipped (8 entries)

SEQ ID NO: 5001 - DNA, 18 bp, Artificial Sequence
  Synthetic: FMR1 3 reverse X:147912144-147912166; AsCpf1-1
gccctgctagcgccggga

SEQ ID NO: 5002 - DNA, 19 bp, Artificial Sequence
  Synthetic: FMR1 3 reverse X:147912144-147912167; AsCpf1-1
gccctgctagcgccgggag

SEQ ID NO: 5003 - DNA, 20 bp, Artificial Sequence
  Synthetic: FMR1 3 reverse X:147912144-147912168; AsCpf1-1
gccctgctagcgccgggagc

SEQ ID NO: 5004 - DNA, 21 bp, Artificial Sequence
  Synthetic: FMR1 3 reverse X:147912144-147912169; AsCpf1-1
gccctgctagcgccgggagcc

SEQ ID NO: 5005 - DNA, 22 bp, Artificial Sequence
  Synthetic: FMR1 3 reverse X:147912144-147912170; AsCpf1-1
gccctgctagcgccgggagccc

SEQ ID NO: 5006 - DNA, 23 bp, Artificial Sequence
  Synthetic: FMR1 3 reverse X:147912144-147912171; AsCpf1-1
gccctgctagcgccgggagcccg

SEQ ID NO: 5007 - DNA, 24 bp, Artificial Sequence
  Synthetic: FMR1 3 reverse X:147912144-147912172; AsCpf1-1
gccctgctagcgccgggagcccgc

SEQ ID NO: 5008 - DNA, 25 bp, Artificial Sequence
  Synthetic: FMR1 3 reverse X:147912144-147912173; AsCpf1-1
gccctgctagcgccgggagcccgcc

SEQ ID NO: 5009 - DNA, 18 bp, Artificial Sequence
  Synthetic: FMR1 3 forward X:147912151-147912173; AsCpf1-1
ggcgctagcagggctgaa

SEQ ID NO: 5010 - DNA, 19 bp, Artificial Sequence
  Synthetic: FMR1 3 forward X:147912151-147912174; AsCpf1-1
ggcgctagcagggctgaag

SEQ ID NO: 5011 - DNA, 20 bp, Artificial Sequence
  Synthetic: FMR1 3 forward X:147912151-147912175; AsCpf1-1
ggcgctagcagggctgaaga

SEQ ID NO: 5012 - DNA, 21 bp, Artificial Sequence
  Synthetic: FMR1 3 forward X:147912151-147912176; AsCpf1-1
ggcgctagcagggctgaagag

SEQ ID NO: 5013 - DNA, 22 bp, Artificial Sequence
  Synthetic: FMR1 3 forward X:147912151-147912177; AsCpf1-1
ggcgctagcagggctgaagaga

SEQ ID NO: 5014 - DNA, 23 bp, Artificial Sequence
  Synthetic: FMR1 3 forward X:147912151-147912178; AsCpf1-1
ggcgctagcagggctgaagagaa

SEQ ID NO: 5015 - DNA, 24 bp, Artificial Sequence
  Synthetic: FMR1 3 forward X:147912151-147912179; AsCpf1-1
ggcgctagcagggctgaagagaag

SEQ ID NO: 5016 - DNA, 25 bp, Artificial Sequence
  Synthetic: FMR1 3 forward X:147912151-147912180; AsCpf1-1
ggcgctagcagggctgaagagaaga

SEQ ID NO: 5017 - DNA, 18 bp, Artificial Sequence
  Synthetic: FMR1 3 reverse X:147912155-147912177; AsCpf1-1
tcttctcttcagccctgc

SEQ ID NO: 5018 - DNA, 19 bp, Artificial Sequence
  Synthetic: FMR1 3 reverse X:147912155-147912178; AsCpf1-1
tcttctcttcagccctgct

SEQ ID NO: 5019 - DNA, 20 bp, Artificial Sequence
  Synthetic: FMR1 3 reverse X:147912155-147912179; AsCpf1-1
tcttctcttcagccctgcta

SEQ ID NO: 5020 - DNA, 21 bp, Artificial Sequence
  Synthetic: FMR1 3 reverse X:147912155-147912180; AsCpf1-1
tcttctcttcagccctgctag

SEQ ID NO: 5021 - DNA, 22 bp, Artificial Sequence
  Synthetic: FMR1 3 reverse X:147912155-147912181; AsCpf1-1
tcttctcttcagccctgctagc

SEQ ID NO: 5022 - DNA, 23 bp, Artificial Sequence
  Synthetic: FMR1 3 reverse X:147912155-147912182; AsCpf1-1
tcttctcttcagccctgctagcg

SEQ ID NO: 5023 - DNA, 24 bp, Artificial Sequence
  Synthetic: FMR1 3 reverse X:147912155-147912183; AsCpf1-1
tcttctcttcagccctgctagcgc

SEQ ID NO: 5024 - DNA, 25 bp, Artificial Sequence
  Synthetic: FMR1 3 reverse X:147912155-147912184; AsCpf1-1
tcttctcttcagccctgctagcgcc

SEQ ID NO: 5025 - DNA, 18 bp, Artificial Sequence
  Synthetic: FMR1 3 reverse X:147912170-147912192; AsCpf1-1
ccaccagctcctccatct

SEQ ID NO: 5026 - DNA, 19 bp, Artificial Sequence
  Synthetic: FMR1 3 reverse X:147912170-147912193; AsCpf1-1
ccaccagctcctccatctt

SEQ ID NO: 5027 - DNA, 20 bp, Artificial Sequence
  Synthetic: FMR1 3 reverse X:147912170-147912194; AsCpf1-1
ccaccagctcctccatcttc

SEQ ID NO: 5028 - DNA, 21 bp, Artificial Sequence
  Synthetic: FMR1 3 reverse X:147912170-147912195; AsCpf1-1
ccaccagctcctccatcttct

SEQ ID NO: 5029 - DNA, 22 bp, Artificial Sequence
  Synthetic: FMR1 3 reverse X:147912170-147912196; AsCpf1-1
ccaccagctcctccatcttctc

SEQ ID NO: 5030 - DNA, 23 bp, Artificial Sequence
  Synthetic: FMR1 3 reverse X:147912170-147912197; AsCpf1-1
ccaccagctcctccatcttctct

SEQ ID NO: 5031 - DNA, 24 bp, Artificial Sequence
  Synthetic: FMR1 3 reverse X:147912170-147912198; AsCpf1-1
ccaccagctcctccatcttctctt

SEQ ID NO: 5032 - DNA, 25 bp, Artificial Sequence
  Synthetic: FMR1 3 reverse X:147912170-147912199; AsCpf1-1
ccaccagctcctccatcttctcttc

SEQ ID NO: 5033 - DNA, 18 bp, Artificial Sequence
  Synthetic: FMR1 3 reverse X:147912171-147912193; AsCpf1-1
accaccagctcctccatc

SEQ ID NO: 5034 - DNA, 19 bp, Artificial Sequence
  Synthetic: FMR1 3 reverse X:147912171-147912194; AsCpf1-1
accaccagctcctccatct

SEQ ID NO: 5035 - DNA, 20 bp, Artificial Sequence
  Synthetic: FMR1 3 reverse X:147912171-147912195; AsCpf1-1
accaccagctcctccatctt

SEQ ID NO: 5036 - DNA, 21 bp, Artificial Sequence
  Synthetic: FMR1 3 reverse X:147912171-147912196; AsCpf1-1
accaccagctcctccatcttc

SEQ ID NO: 5037 - DNA, 22 bp, Artificial Sequence
  Synthetic: FMR1 3 reverse X:147912171-147912197; AsCpf1-1
accaccagctcctccatcttct

SEQ ID NO: 5038 - DNA, 23 bp, Artificial Sequence
  Synthetic: FMR1 3 reverse X:147912171-147912198; AsCpf1-1
accaccagctcctccatcttctc

SEQ ID NO: 5039 - DNA, 24 bp, Artificial Sequence
  Synthetic: FMR1 3 reverse X:147912171-147912199; AsCpf1-1
accaccagctcctccatcttctct

SEQ ID NO: 5040 - DNA, 25 bp, Artificial Sequence
  Synthetic: FMR1 3 reverse X:147912171-147912200; AsCpf1-1
accaccagctcctccatcttctctt

SEQ ID NO: 5041 - DNA, 25 bp, Artificial Sequence
  Synthetic: FMR1 3 forward X:147912085-147912116; SaCas9
gcggcggcggcggcggcggcggcgg

SEQ ID NO: 5042 - DNA, 24 bp, Artificial Sequence
  Synthetic: FMR1 3 forward X:147912086-147912116; SaCas9
cggcggcggcggcggcggcggcgg

SEQ ID NO: 5043 - DNA, 23 bp, Artificial Sequence
  Synthetic: FMR1 3 forward X:147912087-147912116; SaCas9
ggcggcggcggcggcggcggcgg

SEQ ID NO: 5044 - DNA, 22 bp, Artificial Sequence
  Synthetic: FMR1 3 forward X:147912088-147912116; SaCas9
gcggcggcggcggcggcggcgg

SEQ ID NO: 5045 - DNA, 21 bp, Artificial Sequence
  Synthetic: FMR1 3 forward X:147912089-147912116; SaCas9
cggcggcggcggcggcggcgg

SEQ ID NO: 5046 - DNA, 20 bp, Artificial Sequence
  Synthetic: FMR1 3 forward X:147912090-147912116; SaCas9
ggcggcggcggcggcggcgg

SEQ ID NO: 5047 - DNA, 19 bp, Artificial Sequence
  Synthetic: FMR1 3 forward X:147912091-147912116; SaCas9
gcggcggcggcggcggcgg

SEQ ID NO: 5048 - DNA, 18 bp, Artificial Sequence
  Synthetic: FMR1 3 forward X:147912092-147912116; SaCas9
cggcggcggcggcggcgg

SEQ ID NO: 5049 - DNA, 25 bp, Artificial Sequence
  Synthetic: FMR1 3 forward X:147912092-147912123; SaCas9
cggcggcggcggcggcggctgggcc

SEQ ID NO: 5050 - DNA, 24 bp, Artificial Sequence
  Synthetic: FMR1 3 forward X:147912093-147912123; SaCas9
ggcggcggcggcggcggctgggcc

SEQ ID NO: 5051 - DNA, 23 bp, Artificial Sequence
  Synthetic: FMR1 3 forward X:147912094-147912123; SaCas9
gcggcggcggcggcggctgggcc

SEQ ID NO: 5052 - DNA, 22 bp, Artificial Sequence
  Synthetic: FMR1 3 forward X:147912095-147912123; SaCas9
cggcggcggcggcggctgggcc

SEQ ID NO: 5053 - DNA, 21 bp, Artificial Sequence
  Synthetic: FMR1 3 forward X:147912096-147912123; SaCas9
ggcggcggcggcggctgggcc

SEQ ID NO: 5054 - DNA, 20 bp, Artificial Sequence
  Synthetic: FMR1 3 forward X:147912097-147912123; SaCas9
gcggcggcggcggctgggcc

SEQ ID NO: 5055 - DNA, 19 bp, Artificial Sequence
  Synthetic: FMR1 3 forward X:147912098-147912123; SaCas9
cggcggcggcggctgggcc

SEQ ID NO: 5056 - DNA, 18 bp, Artificial Sequence
  Synthetic: FMR1 3 forward X:147912099-147912123; SaCas9
ggcggcggcggctgggcc

SEQ ID NO: 5057 - DNA, 25 bp, Artificial Sequence
  Synthetic: FMR1 3 forward X:147912114-147912145; SaCas9
gcctcgagcgcccgcagcccacctc

SEQ ID NO: 5058 - DNA, 24 bp, Artificial Sequence
  Synthetic: FMR1 3 forward X:147912115-147912145; SaCas9
cctcgagcgcccgcagcccacctc

SEQ ID NO: 5059 - DNA, 23 bp, Artificial Sequence
  Synthetic: FMR1 3 forward X:147912116-147912145; SaCas9
ctcgagcgcccgcagcccacctc

SEQ ID NO: 5060 - DNA, 22 bp, Artificial Sequence
  Synthetic: FMR1 3 forward X:147912117-147912145; SaCas9
tcgagcgcccgcagcccacctc

SEQ ID NO: 5061 - DNA, 21 bp, Artificial Sequence
  Synthetic: FMR1 3 forward X:147912118-147912145; SaCas9
cgagcgcccgcagcccacctc

SEQ ID NO: 5062 - DNA, 20 bp, Artificial Sequence
  Synthetic: FMR1 3 forward X:147912119-147912145; SaCas9
gagcgcccgcagcccacctc

SEQ ID NO: 5063 - DNA, 19 bp, Artificial Sequence
  Synthetic: FMR1 3 forward X:147912120-147912145; SaCas9
agcgcccgcagcccacctc

SEQ ID NO: 5064 - DNA, 18 bp, Artificial Sequence
  Synthetic: FMR1 3 forward X:147912121-147912145; SaCas9
gcgcccgcagcccacctc

SEQ ID NO: 5065 - DNA, 25 bp, Artificial Sequence
  Synthetic: FMR1 3 forward X:147912115-147912146; SaCas9
cctcgagcgcccgcagcccacctct

SEQ ID NO: 5066 - DNA, 24 bp, Artificial Sequence
  Synthetic: FMR1 3 forward X:147912116-147912146; SaCas9
ctcgagcgcccgcagcccacctct

SEQ ID NO: 5067 - DNA, 23 bp, Artificial Sequence
  Synthetic: FMR1 3 forward X:147912117-147912146; SaCas9
tcgagcgcccgcagcccacctct

SEQ ID NO: 5068 - DNA, 22 bp, Artificial Sequence
  Synthetic: FMR1 3 forward X:147912118-147912146; SaCas9
cgagcgcccgcagcccacctct

SEQ ID NO: 5069 - DNA, 21 bp, Artificial Sequence
  Synthetic: FMR1 3 forward X:147912119-147912146; SaCas9
gagcgcccgcagcccacctct

SEQ ID NO: 5070 - DNA, 20 bp, Artificial Sequence
  Synthetic: FMR1 3 forward X:147912120-147912146; SaCas9
agcgcccgcagcccacctct

SEQ ID NO: 5071 - DNA, 19 bp, Artificial Sequence
  Synthetic: FMR1 3 forward X:147912121-147912146; SaCas9
gcgcccgcagcccacctct

SEQ ID NO: 5072 - DNA, 18 bp, Artificial Sequence
  Synthetic: FMR1 3 forward X:147912122-147912146; SaCas9
cgcccgcagcccacctct

SEQ ID NO: 5073 - DNA, 25 bp, Artificial Sequence
  Synthetic: FMR1 3 reverse X:147912115-147912146; SaCas9
cccccgagaggtgggctgcgggcgc

SEQ ID NO: 5074 - DNA, 24 bp, Artificial Sequence
  Synthetic: FMR1 3 reverse X:147912116-147912146; SaCas9
ccccgagaggtgggctgcgggcgc

SEQ ID NO: 5075 - DNA, 23 bp, Artificial Sequence
  Synthetic: FMR1 3 reverse X:147912117-147912146; SaCas9
cccgagaggtgggctgcgggcgc

SEQ ID NO: 5076 - DNA, 22 bp, Artificial Sequence
  Synthetic: FMR1 3 reverse X:147912118-147912146; SaCas9
ccgagaggtgggctgcgggcgc

SEQ ID NO: 5077 - DNA, 21 bp, Artificial Sequence
  Synthetic: FMR1 3 reverse X:147912119-147912146; SaCas9
cgagaggtgggctgcgggcgc

SEQ ID NO: 5078 - DNA, 20 bp, Artificial Sequence
  Synthetic: FMR1 3 reverse X:147912120-147912146; SaCas9
gagaggtgggctgcgggcgc

SEQ ID NO: 5079 - DNA, 19 bp, Artificial Sequence
  Synthetic: FMR1 3 reverse X:147912121-147912146; SaCas9
agaggtgggctgcgggcgc

SEQ ID NO: 5080 - DNA, 18 bp, Artificial Sequence
  Synthetic: FMR1 3 reverse X:147912122-147912146; SaCas9
gaggtgggctgcgggcgc

SEQ ID NO: 5081 - DNA, 25 bp, Artificial Sequence
  Synthetic: FMR1 3 forward X:147912116-147912147; SaCas9
ctcgagcgcccgcagcccacctctc

SEQ ID NO: 5082 - DNA, 24 bp, Artificial Sequence
  Synthetic: FMR1 3 forward X:147912117-147912147; SaCas9
tcgagcgcccgcagcccacctctc

SEQ ID NO: 5083 - DNA, 23 bp, Artificial Sequence
  Synthetic: FMR1 3 forward X:147912118-147912147; SaCas9
cgagcgcccgcagcccacctctc

SEQ ID NO: 5084 - DNA, 22 bp, Artificial Sequence
  Synthetic: FMR1 3 forward X:147912119-147912147; SaCas9
gagcgcccgcagcccacctctc

SEQ ID NO: 5085 - DNA, 21 bp, Artificial Sequence
  Synthetic: FMR1 3 forward X:147912120-147912147; SaCas9
agcgcccgcagcccacctctc

SEQ ID NO: 5086 - DNA, 20 bp, Artificial Sequence
  Synthetic: FMR1 3 forward X:147912121-147912147; SaCas9
gcgcccgcagcccacctctc

SEQ ID NO: 5087 - DNA, 19 bp, Artificial Sequence
  Synthetic: FMR1 3 forward X:147912122-147912147; SaCas9
cgcccgcagcccacctctc

SEQ ID NO: 5088 - DNA, 18 bp, Artificial Sequence
  Synthetic: FMR1 3 forward X:147912123-147912147; SaCas9
gcccgcagcccacctctc

SEQ ID NO: 5089 - DNA, 25 bp, Artificial Sequence
  Synthetic: FMR1 3 forward X:147912120-147912151; SaCas9
agcgcccgcagcccacctctcgggg

SEQ ID NO: 5090 - DNA, 24 bp, Artificial Sequence
  Synthetic: FMR1 3 forward X:147912121-147912151; SaCas9
gcgcccgcagcccacctctcgggg

SEQ ID NO: 5091 - DNA, 23 bp, Artificial Sequence
  Synthetic: FMR1 3 forward X:147912122-147912151; SaCas9
cgcccgcagcccacctctcgggg

SEQ ID NO: 5092 - DNA, 22 bp, Artificial Sequence
  Synthetic: FMR1 3 forward X:147912123-147912151; SaCas9
gcccgcagcccacctctcgggg

SEQ ID NO: 5093 - DNA, 21 bp, Artificial Sequence
  Synthetic: FMR1 3 forward X:147912124-147912151; SaCas9
cccgcagcccacctctcgggg

SEQ ID NO: 5094 - DNA, 20 bp, Artificial Sequence
  Synthetic: FMR1 3 forward X:147912125-147912151; SaCas9
ccgcagcccacctctcgggg

SEQ ID NO: 5095 - DNA, 19 bp, Artificial Sequence
  Synthetic: FMR1 3 forward X:147912126-147912151; SaCas9
cgcagcccacctctcgggg

SEQ ID NO: 5096 - DNA, 18 bp, Artificial Sequence
  Synthetic: FMR1 3 forward X:147912127-147912151; SaCas9
gcagcccacctctcgggg

SEQ ID NO: 5097 - DNA, 25 bp, Artificial Sequence
  Synthetic: FMR1 3 reverse X:147912123-147912154; SaCas9
ggagcccgcccccgagaggtgggct

SEQ ID NO: 5098 - DNA, 24 bp, Artificial Sequence
  Synthetic: FMR1 3 reverse X:147912124-147912154; SaCas9
gagcccgcccccgagaggtgggct

SEQ ID NO: 5099 - DNA, 23 bp, Artificial Sequence
  Synthetic: FMR1 3 reverse X:147912125-147912154; SaCas9
agcccgcccccgagaggtgggct

SEQ ID NO: 5100 - DNA, 22 bp, Artificial Sequence
  Synthetic: FMR1 3 reverse X:147912126-147912154; SaCas9
gcccgcccccgagaggtgggct

SEQ ID NO: 5101 - DNA, 21 bp, Artificial Sequence
  Synthetic: FMR1 3 reverse X:147912127-147912154; SaCas9
cccgcccccgagaggtgggct

SEQ ID NO: 5102 - DNA, 20 bp, Artificial Sequence
  Synthetic: FMR1 3 reverse X:147912128-147912154; SaCas9
ccgcccccgagaggtgggct

SEQ ID NO: 5103 - DNA, 19 bp, Artificial Sequence
  Synthetic: FMR1 3 reverse X:147912129-147912154; SaCas9
cgcccccgagaggtgggct

SEQ ID NO: 5104 - DNA, 18 bp, Artificial Sequence
  Synthetic: FMR1 3 reverse X:147912130-147912154; SaCas9
gcccccgagaggtgggct

SEQ ID NO: 5105 - DNA, 25 bp, Artificial Sequence
  Synthetic: FMR1 3 reverse X:147912130-147912161; SaCas9
agcgccgggagcccgcccccgagag

SEQ ID NO: 5106 - DNA, 24 bp, Artificial Sequence
  Synthetic: FMR1 3 reverse X:147912131-147912161; SaCas9
gcgccgggagcccgcccccgagag

SEQ ID NO: 5107 - DNA, 23 bp, Artificial Sequence
  Synthetic: FMR1 3 reverse X:147912132-147912161; SaCas9
cgccgggagcccgcccccgagag

SEQ ID NO: 5108 - DNA, 22 bp, Artificial Sequence
  Synthetic: FMR1 3 reverse X:147912133-147912161; SaCas9
gccgggagcccgcccccgagag

SEQ ID NO: 5109 - DNA, 21 bp, Artificial Sequence
  Synthetic: FMR1 3 reverse X:147912134-147912161; SaCas9
ccgggagcccgcccccgagag

SEQ ID NO: 5110 - DNA, 20 bp, Artificial Sequence
  Synthetic: FMR1 3 reverse X:147912135-147912161; SaCas9
cgggagcccgcccccgagag

SEQ ID NO: 5111 - DNA, 19 bp, Artificial Sequence
  Synthetic: FMR1 3 reverse X:147912136-147912161; SaCas9
gggagcccgcccccgagag

SEQ ID NO: 5112 - DNA, 18 bp, Artificial Sequence
  Synthetic: FMR1 3 reverse X:147912137-147912161; SaCas9
ggagcccgcccccgagag

SEQ ID NO: 5113 - DNA, 25 bp, Artificial Sequence
  Synthetic: FMR1 3 reverse X:147912135-147912166; SaCas9
ctgctagcgccgggagcccgccccc

SEQ ID NO: 5114 - DNA, 24 bp, Artificial Sequence
  Synthetic: FMR1 3 reverse X:147912136-147912166; SaCas9
tgctagcgccgggagcccgccccc

SEQ ID NO: 5115 - DNA, 23 bp, Artificial Sequence
  Synthetic: FMR1 3 reverse X:147912137-147912166; SaCas9
gctagcgccgggagcccgccccc

SEQ ID NO: 5116 - DNA, 22 bp, Artificial Sequence
  Synthetic: FMR1 3 reverse X:147912138-147912166; SaCas9
ctagcgccgggagcccgccccc

SEQ ID NO: 5117 - DNA, 21 bp, Artificial Sequence
  Synthetic: FMR1 3 reverse X:147912139-147912166; SaCas9
tagcgccgggagcccgccccc

SEQ ID NO: 5118 - DNA, 20 bp, Artificial Sequence
  Synthetic: FMR1 3 reverse X:147912140-147912166; SaCas9
agcgccgggagcccgccccc

SEQ ID NO: 5119 - DNA, 19 bp, Artificial Sequence
  Synthetic: FMR1 3 reverse X:147912141-147912166; SaCas9
gcgccgggagcccgccccc

SEQ ID NO: 5120 - DNA, 18 bp, Artificial Sequence
  Synthetic: FMR1 3 reverse X:147912142-147912166; SaCas9
cgccgggagcccgccccc

SEQ ID NO: 5121 - DNA, 25 bp, Artificial Sequence
  Synthetic: FMR1 3 reverse X:147912137-147912168; SaCas9
ccctgctagcgccgggagcccgccc

SEQ ID NO: 5122 - DNA, 24 bp, Artificial Sequence
  Synthetic: FMR1 3 reverse X:147912138-147912168; SaCas9
cctgctagcgccgggagcccgccc

SEQ ID NO: 5123 - DNA, 23 bp, Artificial Sequence
  Synthetic: FMR1 3 reverse X:147912139-147912168; SaCas9
ctgctagcgccgggagcccgccc

SEQ ID NO: 5124 - DNA, 22 bp, Artificial Sequence
  Synthetic: FMR1 3 reverse X:147912140-147912168; SaCas9
tgctagcgccgggagcccgccc

SEQ ID NO: 5125 - DNA, 21 bp, Artificial Sequence
  Synthetic: FMR1 3 reverse X:147912141-147912168; SaCas9
gctagcgccgggagcccgccc

SEQ ID NO: 5126 - DNA, 20 bp, Artificial Sequence
  Synthetic: FMR1 3 reverse X:147912142-147912168; SaCas9
ctagcgccgggagcccgccc

SEQ ID NO: 5127 - DNA, 19 bp, Artificial Sequence
  Synthetic: FMR1 3 reverse X:147912143-147912168; SaCas9
tagcgccgggagcccgccc

SEQ ID NO: 5128 - DNA, 18 bp, Artificial Sequence
  Synthetic: FMR1 3 reverse X:147912144-147912168; SaCas9
agcgccgggagcccgccc

SEQ ID NO: 5129 - DNA, 25 bp, Artificial Sequence
  Synthetic: FMR1 3 forward X:147912138-147912169; SaCas9
ctcgggggcgggctcccggcgctag

SEQ ID NO: 5130 - DNA, 24 bp, Artificial Sequence
  Synthetic: FMR1 3 forward X:147912139-147912169; SaCas9
tcgggggcgggctcccggcgctag

SEQ ID NO: 5131 - DNA, 23 bp, Artificial Sequence
  Synthetic: FMR1 3 forward X:147912140-147912169; SaCas9
cgggggcgggctcccggcgctag

SEQ ID NO: 5132 - DNA, 22 bp, Artificial Sequence
  Synthetic: FMR1 3 forward X:147912141-147912169; SaCas9
gggggcgggctcccggcgctag

SEQ ID NO: 5133 - DNA, 21 bp, Artificial Sequence
  Synthetic: FMR1 3 forward X:147912142-147912169; SaCas9
ggggcgggctcccggcgctag

SEQ ID NO: 5134 - DNA, 20 bp, Artificial Sequence
  Synthetic: FMR1 3 forward X:147912143-147912169; SaCas9
gggcgggctcccggcgctag

SEQ ID NO: 5135 - DNA, 19 bp, Artificial Sequence
  Synthetic: FMR1 3 forward X:147912144-147912169; SaCas9
ggcgggctcccggcgctag

SEQ ID NO: 5136 - DNA, 18 bp, Artificial Sequence
  Synthetic: FMR1 3 forward X:147912145-147912169; SaCas9
gcgggctcccggcgctag

SEQ ID NO: 5137 - DNA, 25 bp, Artificial Sequence
  Synthetic: FMR1 3 forward X:147912143-147912174; SaCas9
gggcgggctcccggcgctagcaggg

SEQ ID NO: 5138 - DNA, 24 bp, Artificial Sequence
  Synthetic: FMR1 3 forward X:147912144-147912174; SaCas9
ggcgggctcccggcgctagcaggg

SEQ ID NO: 5139 - DNA, 23 bp, Artificial Sequence
  Synthetic: FMR1 3 forward X:147912145-147912174; SaCas9
gcgggctcccggcgctagcaggg

SEQ ID NO: 5140 - DNA, 22 bp, Artificial Sequence
  Synthetic: FMR1 3 forward X:147912146-147912174; SaCas9
cgggctcccggcgctagcaggg

SEQ ID NO: 5141 - DNA, 21 bp, Artificial Sequence
  Synthetic: FMR1 3 forward X:147912147-147912174; SaCas9
gggctcccggcgctagcaggg

SEQ ID NO: 5142 - DNA, 20 bp, Artificial Sequence
  Synthetic: FMR1 3 forward X:147912148-147912174; SaCas9
ggctcccggcgctagcaggg

SEQ ID NO: 5143 - DNA, 19 bp, Artificial Sequence
  Synthetic: FMR1 3 forward X:147912149-147912174; SaCas9
gctcccggcgctagcaggg

SEQ ID NO: 5144 - DNA, 18 bp, Artificial Sequence
  Synthetic: FMR1 3 forward X:147912150-147912174; SaCas9
ctcccggcgctagcaggg

SEQ ID NO: 5145 - DNA, 25 bp, Artificial Sequence
  Synthetic: FMR1 3 forward X:147912146-147912177; SaCas9
cgggctcccggcgctagcagggctg

SEQ ID NO: 5146 - DNA, 24 bp, Artificial Sequence
  Synthetic: FMR1 3 forward X:147912147-147912177; SaCas9
gggctcccggcgctagcagggctg

SEQ ID NO: 5147 - DNA, 23 bp, Artificial Sequence
  Synthetic: FMR1 3 forward X:147912148-147912177; SaCas9
ggctcccggcgctagcagggctg

SEQ ID NO: 5148 - DNA, 22 bp, Artificial Sequence
  Synthetic: FMR1 3 forward X:147912149-147912177; SaCas9
gctcccggcgctagcagggctg

SEQ ID NO: 5149 - DNA, 21 bp, Artificial Sequence
  Synthetic: FMR1 3 forward X:147912150-147912177; SaCas9
ctcccggcgctagcagggctg

SEQ ID NO: 5150 - DNA, 20 bp, Artificial Sequence
  Synthetic: FMR1 3 forward X:147912151-147912177; SaCas9
tcccggcgctagcagggctg

SEQ ID NO: 5151 - DNA, 19 bp, Artificial Sequence
  Synthetic: FMR1 3 forward X:147912152-147912177; SaCas9
cccggcgctagcagggctg

SEQ ID NO: 5152 - DNA, 18 bp, Artificial Sequence
  Synthetic: FMR1 3 forward X:147912153-147912177; SaCas9
ccggcgctagcagggctg

SEQ ID NO: 5153 - DNA, 25 bp, Artificial Sequence
  Synthetic: FMR1 3 forward X:147912148-147912179; SaCas9
ggctcccggcgctagcagggctgaa

SEQ ID NO: 5154 - DNA, 24 bp, Artificial Sequence
  Synthetic: FMR1 3 forward X:147912149-147912179; SaCas9
gctcccggcgctagcagggctgaa

SEQ ID NO: 5155 - DNA, 23 bp, Artificial Sequence
  Synthetic: FMR1 3 forward X:147912150-147912179; SaCas9
ctcccggcgctagcagggctgaa

SEQ ID NO: 5156 - DNA, 22 bp, Artificial Sequence
  Synthetic: FMR1 3 forward X:147912151-147912179; SaCas9
tcccggcgctagcagggctgaa

SEQ ID NO: 5157 - DNA, 21 bp, Artificial Sequence
  Synthetic: FMR1 3 forward X:147912152-147912179; SaCas9
cccggcgctagcagggctgaa

SEQ ID NO: 5158 - DNA, 20 bp, Artificial Sequence
  Synthetic: FMR1 3 forward X:147912153-147912179; SaCas9
ccggcgctagcagggctgaa

SEQ ID NO: 5159 - DNA, 19 bp, Artificial Sequence
  Synthetic: FMR1 3 forward X:147912154-147912179; SaCas9
cggcgctagcagggctgaa

SEQ ID NO: 5160 - DNA, 18 bp, Artificial Sequence
  Synthetic: FMR1 3 forward X:147912155-147912179; SaCas9
ggcgctagcagggctgaa

SEQ ID NO: 5161 - DNA, 25 bp, Artificial Sequence
  Synthetic: FMR1 3 reverse X:147912149-147912180; SaCas9
tcttctcttcagccctgctagcgcc

SEQ ID NO: 5162 - DNA, 24 bp, Artificial Sequence
  Synthetic: FMR1 3 reverse X:147912150-147912180; SaCas9
cttctcttcagccctgctagcgcc

SEQ ID NO: 5163 - DNA, 23 bp, Artificial Sequence
  Synthetic: FMR1 3 reverse X:147912151-147912180; SaCas9
ttctcttcagccctgctagcgcc

SEQ ID NO: 5164 - DNA, 22 bp, Artificial Sequence
  Synthetic: FMR1 3 reverse X:147912152-147912180; SaCas9
tctcttcagccctgctagcgcc

SEQ ID NO: 5165 - DNA, 21 bp, Artificial Sequence
  Synthetic: FMR1 3 reverse X:147912153-147912180; SaCas9
ctcttcagccctgctagcgcc

SEQ ID NO: 5166 - DNA, 20 bp, Artificial Sequence
  Synthetic: FMR1 3 reverse X:147912154-147912180; SaCas9
tcttcagccctgctagcgcc

SEQ ID NO: 5167 - DNA, 19 bp, Artificial Sequence
  Synthetic: FMR1 3 reverse X:147912155-147912180; SaCas9
cttcagccctgctagcgcc

SEQ ID NO: 5168 - DNA, 18 bp, Artificial Sequence
  Synthetic: FMR1 3 reverse X:147912156-147912180; SaCas9
ttcagccctgctagcgcc

SEQ ID NO: 5169 - DNA, 25 bp, Artificial Sequence
  Synthetic: FMR1 3 reverse X:147912150-147912181; SaCas9
atcttctcttcagccctgctagcgc

SEQ ID NO: 5170 - DNA, 24 bp, Artificial Sequence
  Synthetic: FMR1 3 reverse X:147912151-147912181; SaCas9
tcttctcttcagccctgctagcgc

SEQ ID NO: 5171 - DNA, 23 bp, Artificial Sequence
  Synthetic: FMR1 3 reverse X:147912152-147912181; SaCas9
cttctcttcagccctgctagcgc

SEQ ID NO: 5172 - DNA, 22 bp, Artificial Sequence
  Synthetic: FMR1 3 reverse X:147912153-147912181; SaCas9
ttctcttcagccctgctagcgc

SEQ ID NO: 5173 - DNA, 21 bp, Artificial Sequence
  Synthetic: FMR1 3 reverse X:147912154-147912181; SaCas9
tctcttcagccctgctagcgc

SEQ ID NO: 5174 - DNA, 20 bp, Artificial Sequence
  Synthetic: FMR1 3 reverse X:147912155-147912181; SaCas9
ctcttcagccctgctagcgc

SEQ ID NO: 5175 - DNA, 19 bp, Artificial Sequence
  Synthetic: FMR1 3 reverse X:147912156-147912181; SaCas9
tcttcagccctgctagcgc

SEQ ID NO: 5176 - DNA, 18 bp, Artificial Sequence
  Synthetic: FMR1 3 reverse X:147912157-147912181; SaCas9
cttcagccctgctagcgc

SEQ ID NO: 5177 - DNA, 25 bp, Artificial Sequence
  Synthetic: FMR1 3 reverse X:147912151-147912182; SaCas9
catcttctcttcagccctgctagcg

SEQ ID NO: 5178 - DNA, 24 bp, Artificial Sequence
  Synthetic: FMR1 3 reverse X:147912152-147912182; SaCas9
atcttctcttcagccctgctagcg

SEQ ID NO: 5179 - DNA, 23 bp, Artificial Sequence
  Synthetic: FMR1 3 reverse X:147912153-147912182; SaCas9
tcttctcttcagccctgctagcg

SEQ ID NO: 5180 - DNA, 22 bp, Artificial Sequence
  Synthetic: FMR1 3 reverse X:147912154-147912182; SaCas9
cttctcttcagccctgctagcg

SEQ ID NO: 5181 - DNA, 21 bp, Artificial Sequence
  Synthetic: FMR1 3 reverse X:147912155-147912182; SaCas9
ttctcttcagccctgctagcg

SEQ ID NO: 5182 - DNA, 20 bp, Artificial Sequence
  Synthetic: FMR1 3 reverse X:147912156-147912182; SaCas9
tctcttcagccctgctagcg

SEQ ID NO: 5183 - DNA, 19 bp, Artificial Sequence
  Synthetic: FMR1 3 reverse X:147912157-147912182; SaCas9
ctcttcagccctgctagcg

SEQ ID NO: 5184 - DNA, 18 bp, Artificial Sequence
  Synthetic: FMR1 3 reverse X:147912158-147912182; SaCas9
tcttcagccctgctagcg

SEQ ID NO: 5185 - DNA, 25 bp, Artificial Sequence
  Synthetic: FMR1 3 forward X:147912154-147912185; SaCas9
cggcgctagcagggctgaagagaag

SEQ ID NO: 5186 - DNA, 24 bp, Artificial Sequence
  Synthetic: FMR1 3 forward X:147912155-147912185; SaCas9
ggcgctagcagggctgaagagaag

SEQ ID NO: 5187 - DNA, 23 bp, Artificial Sequence
  Synthetic: FMR1 3 forward X:147912156-147912185; SaCas9
gcgctagcagggctgaagagaag

SEQ ID NO: 5188 - DNA, 22 bp, Artificial Sequence
  Synthetic: FMR1 3 forward X:147912157-147912185; SaCas9
cgctagcagggctgaagagaag

SEQ ID NO: 5189 - DNA, 21 bp, Artificial Sequence
  Synthetic: FMR1 3 forward X:147912158-147912185; SaCas9
gctagcagggctgaagagaag

SEQ ID NO: 5190 - DNA, 20 bp, Artificial Sequence
  Synthetic: FMR1 3 forward X:147912159-147912185; SaCas9
ctagcagggctgaagagaag

SEQ ID NO: 5191 - DNA, 19 bp, Artificial Sequence
  Synthetic: FMR1 3 forward X:147912160-147912185; SaCas9
tagcagggctgaagagaag

SEQ ID NO: 5192 - DNA, 18 bp, Artificial Sequence
  Synthetic: FMR1 3 forward X:147912161-147912185; SaCas9
agcagggctgaagagaag

SEQ ID NO: 5193 - DNA, 25 bp, Artificial Sequence
  Synthetic: FMR1 3 forward X:147912155-147912186; SaCas9
ggcgctagcagggctgaagagaaga

SEQ ID NO: 5194 - DNA, 24 bp, Artificial Sequence
  Synthetic: FMR1 3 forward X:147912156-147912186; SaCas9
gcgctagcagggctgaagagaaga

SEQ ID NO: 5195 - DNA, 23 bp, Artificial Sequence
  Synthetic: FMR1 3 forward X:147912157-147912186; SaCas9
cgctagcagggctgaagagaaga

SEQ ID NO: 5196 - DNA, 22 bp, Artificial Sequence
  Synthetic: FMR1 3 forward X:147912158-147912186; SaCas9
gctagcagggctgaagagaaga

SEQ ID NO: 5197 - DNA, 21 bp, Artificial Sequence
  Synthetic: FMR1 3 forward X:147912159-147912186; SaCas9
ctagcagggctgaagagaaga

SEQ ID NO: 5198 - DNA, 20 bp, Artificial Sequence
  Synthetic: FMR1 3 forward X:147912160-147912186; SaCas9
tagcagggctgaagagaaga

SEQ ID NO: 5199 - DNA, 19 bp, Artificial Sequence
  Synthetic: FMR1 3 forward X:147912161-147912186; SaCas9
agcagggctgaagagaaga

SEQ ID NO: 5200 - DNA, 18 bp, Artificial Sequence
  Synthetic: FMR1 3 forward X:147912162-147912186; SaCas9
gcagggctgaagagaaga

SEQ ID NO: 5201 - DNA, 25 bp, Artificial Sequence
  Synthetic: FMR1 3 forward X:147912157-147912188; SaCas9
cgctagcagggctgaagagaagatg

SEQ ID NO: 5202 - DNA, 24 bp, Artificial Sequence
  Synthetic: FMR1 3 forward X:147912158-147912188; SaCas9
gctagcagggctgaagagaagatg

SEQ ID NO: 5203 - DNA, 23 bp, Artificial Sequence
  Synthetic: FMR1 3 forward X:147912159-147912188; SaCas9
ctagcagggctgaagagaagatg

SEQ ID NO: 5204 - DNA, 22 bp, Artificial Sequence
  Synthetic: FMR1 3 forward X:147912160-147912188; SaCas9
tagcagggctgaagagaagatg

SEQ ID NO: 5205 - DNA, 21 bp, Artificial Sequence
  Synthetic: FMR1 3 forward X:147912161-147912188; SaCas9
agcagggctgaagagaagatg

SEQ ID NO: 5206 - DNA, 20 bp, Artificial Sequence
  Synthetic: FMR1 3 forward X:147912162-147912188; SaCas9
gcagggctgaagagaagatg

SEQ ID NO: 5207 - DNA, 19 bp, Artificial Sequence
  Synthetic: FMR1 3 forward X:147912163-147912188; SaCas9
cagggctgaagagaagatg

SEQ ID NO: 5208 - DNA, 18 bp, Artificial Sequence
  Synthetic: FMR1 3 forward X:147912164-147912188; SaCas9
agggctgaagagaagatg

SEQ ID NO: 5209 - DNA, 25 bp, Artificial Sequence
  Synthetic: FMR1 3 forward X:147912158-147912189; SaCas9
gctagcagggctgaagagaagatgg

SEQ ID NO: 5210 - DNA, 24 bp, Artificial Sequence
  Synthetic: FMR1 3 forward X:147912159-147912189; SaCas9
ctagcagggctgaagagaagatgg

SEQ ID NO: 5211 - DNA, 23 bp, Artificial Sequence
  Synthetic: FMR1 3 forward X:147912160-147912189; SaCas9
tagcagggctgaagagaagatgg

SEQ ID NO: 5212 - DNA, 22 bp, Artificial Sequence
  Synthetic: FMR1 3 forward X:147912161-147912189; SaCas9
agcagggctgaagagaagatgg

SEQ ID NO: 5213 - DNA, 21 bp, Artificial Sequence
  Synthetic: FMR1 3 forward X:147912162-147912189; SaCas9
gcagggctgaagagaagatgg

SEQ ID NO: 5214 - DNA, 20 bp, Artificial Sequence
  Synthetic: FMR1 3 forward X:147912163-147912189; SaCas9
cagggctgaagagaagatgg

SEQ ID NO: 5215 - DNA, 19 bp, Artificial Sequence
  Synthetic: FMR1 3 forward X:147912164-147912189; SaCas9
agggctgaagagaagatgg

SEQ ID NO: 5216 - DNA, 18 bp, Artificial Sequence
  Synthetic: FMR1 3 forward X:147912165-147912189; SaCas9
gggctgaagagaagatgg

SEQ ID NO: 5217 - DNA, 25 bp, Artificial Sequence
  Synthetic: FMR1 3 forward X:147912086-147912114; SpCas9
cggcggcggcggcggcggcggcggc

SEQ ID NO: 5218 - DNA, 24 bp, Artificial Sequence
  Synthetic: FMR1 3 forward X:147912087-147912114; SpCas9
ggcggcggcggcggcggcggcggc

SEQ ID NO: 5219 - DNA, 23 bp, Artificial Sequence
  Synthetic: FMR1 3 forward X:147912088-147912114; SpCas9
gcggcggcggcggcggcggcggc

SEQ ID NO: 5220 - DNA, 22 bp, Artificial Sequence
  Synthetic: FMR1 3 forward X:147912089-147912114; SpCas9
cggcggcggcggcggcggcggc

SEQ ID NO: 5221 - DNA, 21 bp, Artificial Sequence
  Synthetic: FMR1 3 forward X:147912090-147912114; SpCas9
ggcggcggcggcggcggcggc

SEQ ID NO: 5222 - DNA, 20 bp, Artificial Sequence
  Synthetic: FMR1 3 forward X:147912091-147912114; SpCas9
gcggcggcggcggcggcggc

SEQ ID NO: 5223 - DNA, 19 bp, Artificial Sequence
  Synthetic: FMR1 3 forward X:147912092-147912114; SpCas9
cggcggcggcggcggcggc

SEQ ID NO: 5224 - DNA, 18 bp, Artificial Sequence
  Synthetic: FMR1 3 forward X:147912093-147912114; SpCas9
ggcggcggcggcggcggc

SEQ ID NO: 5225 - DNA, 25 bp, Artificial Sequence
  Synthetic: FMR1 3 forward X:147912087-147912115; SpCas9
ggcggcggcggcggcggcggcggct

SEQ ID NO: 5226 - DNA, 24 bp, Artificial Sequence
  Synthetic: FMR1 3 forward X:147912088-147912115; SpCas9
gcggcggcggcggcggcggcggct

SEQ ID NO: 5227 - DNA, 23 bp, Artificial Sequence
  Synthetic: FMR1 3 forward X:147912089-147912115; SpCas9
cggcggcggcggcggcggcggct

SEQ ID NO: 5228 - DNA, 22 bp, Artificial Sequence
  Synthetic: FMR1 3 forward X:147912090-147912115; SpCas9
ggcggcggcggcggcggcggct

SEQ ID NO: 5229 - DNA, 21 bp, Artificial Sequence
  Synthetic: FMR1 3 forward X:147912091-147912115; SpCas9
gcggcggcggcggcggcggct

SEQ ID NO: 5230 - DNA, 20 bp, Artificial Sequence
  Synthetic: FMR1 3 forward X:147912092-147912115; SpCas9
cggcggcggcggcggcggct

SEQ ID NO: 5231 - DNA, 19 bp, Artificial Sequence
  Synthetic: FMR1 3 forward X:147912093-147912115; SpCas9
ggcggcggcggcggcggct

SEQ ID NO: 5232 - DNA, 18 bp, Artificial Sequence
  Synthetic: FMR1 3 forward X:147912094-147912115; SpCas9
gcggcggcggcggcggct

SEQ ID NO: 5233 - DNA, 25 bp, Artificial Sequence
  Synthetic: FMR1 3 forward X:147912094-147912122; SpCas9
gcggcggcggcggcggctgggcctc

SEQ ID NO: 5234 - DNA, 24 bp, Artificial Sequence
  Synthetic: FMR1 3 forward X:147912095-147912122; SpCas9
cggcggcggcggcggctgggcctc

SEQ ID NO: 5235 - DNA, 23 bp, Artificial Sequence
  Synthetic: FMR1 3 forward X:147912096-147912122; SpCas9
ggcggcggcggcggctgggcctc

SEQ ID NO: 5236 - DNA, 22 bp, Artificial Sequence
  Synthetic: FMR1 3 forward X:147912097-147912122; SpCas9
gcggcggcggcggctgggcctc

SEQ ID NO: 5237 - DNA, 21 bp, Artificial Sequence
  Synthetic: FMR1 3 forward X:147912098-147912122; SpCas9
cggcggcggcggctgggcctc

SEQ ID NO: 5238 - DNA, 20 bp, Artificial Sequence
  Synthetic: FMR1 3 forward X:147912099-147912122; SpCas9
ggcggcggcggctgggcctc

SEQ ID NO: 5239 - DNA, 19 bp, Artificial Sequence
  Synthetic: FMR1 3 forward X:147912100-147912122; SpCas9
gcggcggcggctgggcctc

SEQ ID NO: 5240 - DNA, 18 bp, Artificial Sequence
  Synthetic: FMR1 3 forward X:147912101-147912122; SpCas9
cggcggcggctgggcctc

SEQ ID NO: 5241 - DNA, 25 bp, Artificial Sequence
  Synthetic: FMR1 3 forward X:147912103-147912131; SpCas9
gcggcggctgggcctcgagcgcccg

SEQ ID NO: 5242 - DNA, 24 bp, Artificial Sequence
  Synthetic: FMR1 3 forward X:147912104-147912131; SpCas9
cggcggctgggcctcgagcgcccg

SEQ ID NO: 5243 - DNA, 23 bp, Artificial Sequence
  Synthetic: FMR1 3 forward X:147912105-147912131; SpCas9
ggcggctgggcctcgagcgcccg

SEQ ID NO: 5244 - DNA, 22 bp, Artificial Sequence
  Synthetic: FMR1 3 forward X:147912106-147912131; SpCas9
gcggctgggcctcgagcgcccg

SEQ ID NO: 5245 - DNA, 21 bp, Artificial Sequence
  Synthetic: FMR1 3 forward X:147912107-147912131; SpCas9
cggctgggcctcgagcgcccg

SEQ ID NO: 5246 - DNA, 20 bp, Artificial Sequence
  Synthetic: FMR1 3 forward X:147912108-147912131; SpCas9
ggctgggcctcgagcgcccg

SEQ ID NO: 5247 - DNA, 19 bp, Artificial Sequence
  Synthetic: FMR1 3 forward X:147912109-147912131; SpCas9
gctgggcctcgagcgcccg

SEQ ID NO: 5248 - DNA, 18 bp, Artificial Sequence
  Synthetic: FMR1 3 forward X:147912110-147912131; SpCas9
ctgggcctcgagcgcccg

SEQ ID NO: 5249 - DNA, 25 bp, Artificial Sequence
  Synthetic: FMR1 3 reverse X:147912110-147912138; SpCas9
aggtgggctgcgggcgctcgaggcc

SEQ ID NO: 5250 - DNA, 24 bp, Artificial Sequence
  Synthetic: FMR1 3 reverse X:147912111-147912138; SpCas9
ggtgggctgcgggcgctcgaggcc

SEQ ID NO: 5251 - DNA, 23 bp, Artificial Sequence
  Synthetic: FMR1 3 reverse X:147912112-147912138; SpCas9
gtgggctgcgggcgctcgaggcc

SEQ ID NO: 5252 - DNA, 22 bp, Artificial Sequence
  Synthetic: FMR1 3 reverse X:147912113-147912138; SpCas9
tgggctgcgggcgctcgaggcc

SEQ ID NO: 5253 - DNA, 21 bp, Artificial Sequence
  Synthetic: FMR1 3 reverse X:147912114-147912138; SpCas9
gggctgcgggcgctcgaggcc

SEQ ID NO: 5254 - DNA, 20 bp, Artificial Sequence
  Synthetic: FMR1 3 reverse X:147912115-147912138; SpCas9
ggctgcgggcgctcgaggcc

SEQ ID NO: 5255 - DNA, 19 bp, Artificial Sequence
  Synthetic: FMR1 3 reverse X:147912116-147912138; SpCas9
gctgcgggcgctcgaggcc

SEQ ID NO: 5256 - DNA, 18 bp, Artificial Sequence
  Synthetic: FMR1 3 reverse X:147912117-147912138; SpCas9
ctgcgggcgctcgaggcc

SEQ ID NO: 5257 - DNA, 25 bp, Artificial Sequence
  Synthetic: FMR1 3 forward X:147912115-147912143; SpCas9
cctcgagcgcccgcagcccacctct

SEQ ID NO: 5258 - DNA, 24 bp, Artificial Sequence
  Synthetic: FMR1 3 forward X:147912116-147912143; SpCas9
ctcgagcgcccgcagcccacctct

SEQ ID NO: 5259 - DNA, 23 bp, Artificial Sequence
  Synthetic: FMR1 3 forward X:147912117-147912143; SpCas9
tcgagcgcccgcagcccacctct

SEQ ID NO: 5260 - DNA, 22 bp, Artificial Sequence
  Synthetic: FMR1 3 forward X:147912118-147912143; SpCas9
cgagcgcccgcagcccacctct

SEQ ID NO: 5261 - DNA, 21 bp, Artificial Sequence
  Synthetic: FMR1 3 forward X:147912119-147912143; SpCas9
gagcgcccgcagcccacctct

SEQ ID NO: 5262 - DNA, 20 bp, Artificial Sequence
  Synthetic: FMR1 3 forward X:147912120-147912143; SpCas9
agcgcccgcagcccacctct

SEQ ID NO: 5263 - DNA, 19 bp, Artificial Sequence
  Synthetic: FMR1 3 forward X:147912121-147912143; SpCas9
gcgcccgcagcccacctct

SEQ ID NO: 5264 - DNA, 18 bp, Artificial Sequence
  Synthetic: FMR1 3 forward X:147912122-147912143; SpCas9
cgcccgcagcccacctct

SEQ ID NO: 5265 - DNA, 25 bp, Artificial Sequence
  Synthetic: FMR1 3 reverse X:147912115-147912143; SpCas9
ccgagaggtgggctgcgggcgctcg

SEQ ID NO: 5266 - DNA, 24 bp, Artificial Sequence
  Synthetic: FMR1 3 reverse X:147912116-147912143; SpCas9
cgagaggtgggctgcgggcgctcg

SEQ ID NO: 5267 - DNA, 23 bp, Artificial Sequence
  Synthetic: FMR1 3 reverse X:147912117-147912143; SpCas9
gagaggtgggctgcgggcgctcg

SEQ ID NO: 5268 - DNA, 22 bp, Artificial Sequence
  Synthetic: FMR1 3 reverse X:147912118-147912143; SpCas9
agaggtgggctgcgggcgctcg

SEQ ID NO: 5269 - DNA, 21 bp, Artificial Sequence
  Synthetic: FMR1 3 reverse X:147912119-147912143; SpCas9
gaggtgggctgcgggcgctcg

SEQ ID NO: 5270 - DNA, 20 bp, Artificial Sequence
  Synthetic: FMR1 3 reverse X:147912120-147912143; SpCas9
aggtgggctgcgggcgctcg

SEQ ID NO: 5271 - DNA, 19 bp, Artificial Sequence
  Synthetic: FMR1 3 reverse X:147912121-147912143; SpCas9
ggtgggctgcgggcgctcg

SEQ ID NO: 5272 - DNA, 18 bp, Artificial Sequence
  Synthetic: FMR1 3 reverse X:147912122-147912143; SpCas9
gtgggctgcgggcgctcg

SEQ ID NO: 5273 - DNA, 25 bp, Artificial Sequence
  Synthetic: FMR1 3 forward X:147912116-147912144; SpCas9
ctcgagcgcccgcagcccacctctc

SEQ ID NO: 5274 - DNA, 24 bp, Artificial Sequence
  Synthetic: FMR1 3 forward X:147912117-147912144; SpCas9
tcgagcgcccgcagcccacctctc

SEQ ID NO: 5275 - DNA, 23 bp, Artificial Sequence
  Synthetic: FMR1 3 forward X:147912118-147912144; SpCas9
cgagcgcccgcagcccacctctc

SEQ ID NO: 5276 - DNA, 22 bp, Artificial Sequence
  Synthetic: FMR1 3 forward X:147912119-147912144; SpCas9
gagcgcccgcagcccacctctc

SEQ ID NO: 5277 - DNA, 21 bp, Artificial Sequence
  Synthetic: FMR1 3 forward X:147912120-147912144; SpCas9
agcgcccgcagcccacctctc

SEQ ID NO: 5278 - DNA, 20 bp, Artificial Sequence
  Synthetic: FMR1 3 forward X:147912121-147912144; SpCas9
gcgcccgcagcccacctctc

SEQ ID NO: 5279 - DNA, 19 bp, Artificial Sequence
  Synthetic: FMR1 3 forward X:147912122-147912144; SpCas9
cgcccgcagcccacctctc

SEQ ID NO: 5280 - DNA, 18 bp, Artificial Sequence
  Synthetic: FMR1 3 forward X:147912123-147912144; SpCas9
gcccgcagcccacctctc

SEQ ID NO: 5281 - DNA, 25 bp, Artificial Sequence
  Synthetic: FMR1 3 reverse X:147912116-147912144; SpCas9
cccgagaggtgggctgcgggcgctc

SEQ ID NO: 5282 - DNA, 24 bp, Artificial Sequence
  Synthetic: FMR1 3 reverse X:147912117-147912144; SpCas9
ccgagaggtgggctgcgggcgctc

SEQ ID NO: 5283 - DNA, 23 bp, Artificial Sequence
  Synthetic: FMR1 3 reverse X:147912118-147912144; SpCas9
cgagaggtgggctgcgggcgctc

SEQ ID NO: 5284 - DNA, 22 bp, Artificial Sequence
  Synthetic: FMR1 3 reverse X:147912119-147912144; SpCas9
gagaggtgggctgcgggcgctc

SEQ ID NO: 5285 - DNA, 21 bp, Artificial Sequence
  Synthetic: FMR1 3 reverse X:147912120-147912144; SpCas9
agaggtgggctgcgggcgctc

SEQ ID NO: 5286 - DNA, 20 bp, Artificial Sequence
  Synthetic: FMR1 3 reverse X:147912121-147912144; SpCas9
gaggtgggctgcgggcgctc

SEQ ID NO: 5287 - DNA, 19 bp, Artificial Sequence
  Synthetic: FMR1 3 reverse X:147912122-147912144; SpCas9
aggtgggctgcgggcgctc

SEQ ID NO: 5288 - DNA, 18 bp, Artificial Sequence
  Synthetic: FMR1 3 reverse X:147912123-147912144; SpCas9
ggtgggctgcgggcgctc

SEQ ID NO: 5289 - DNA, 25 bp, Artificial Sequence
  Synthetic: FMR1 3 forward X:147912117-147912145; SpCas9
tcgagcgcccgcagcccacctctcg

SEQ ID NO: 5290 - DNA, 24 bp, Artificial Sequence
  Synthetic: FMR1 3 forward X:147912118-147912145; SpCas9
cgagcgcccgcagcccacctctcg

SEQ ID NO: 5291 - DNA, 23 bp, Artificial Sequence
  Synthetic: FMR1 3 forward X:147912119-147912145; SpCas9
gagcgcccgcagcccacctctcg

SEQ ID NO: 5292 - DNA, 22 bp, Artificial Sequence
  Synthetic: FMR1 3 forward X:147912120-147912145; SpCas9
agcgcccgcagcccacctctcg

SEQ ID NO: 5293 - DNA, 21 bp, Artificial Sequence
  Synthetic: FMR1 3 forward X:147912121-147912145; SpCas9
gcgcccgcagcccacctctcg

SEQ ID NO: 5294 - DNA, 20 bp, Artificial Sequence
  Synthetic: FMR1 3 forward X:147912122-147912145; SpCas9
cgcccgcagcccacctctcg

SEQ ID NO: 5295 - DNA, 19 bp, Artificial Sequence
  Synthetic: FMR1 3 forward X:147912123-147912145; SpCas9
gcccgcagcccacctctcg

SEQ ID NO: 5296 - DNA, 18 bp, Artificial Sequence
  Synthetic: FMR1 3 forward X:147912124-147912145; SpCas9
cccgcagcccacctctcg

SEQ ID NO: 5297 - DNA, 25 bp, Artificial Sequence
  Synthetic: FMR1 3 forward X:147912118-147912146; SpCas9
cgagcgcccgcagcccacctctcgg

SEQ ID NO: 5298 - DNA, 24 bp, Artificial Sequence
  Synthetic: FMR1 3 forward X:147912119-147912146; SpCas9
gagcgcccgcagcccacctctcgg

SEQ ID NO: 5299 - DNA, 23 bp, Artificial Sequence
  Synthetic: FMR1 3 forward X:147912120-147912146; SpCas9
agcgcccgcagcccacctctcgg

SEQ ID NO: 5300 - DNA, 22 bp, Artificial Sequence
  Synthetic: FMR1 3 forward X:147912121-147912146; SpCas9
gcgcccgcagcccacctctcgg

SEQ ID NO: 5301 - DNA, 21 bp, Artificial Sequence
  Synthetic: FMR1 3 forward X:147912122-147912146; SpCas9
cgcccgcagcccacctctcgg

SEQ ID NO: 5302 - DNA, 20 bp, Artificial Sequence
  Synthetic: FMR1 3 forward X:147912123-147912146; SpCas9
gcccgcagcccacctctcgg

SEQ ID NO: 5303 - DNA, 19 bp, Artificial Sequence
  Synthetic: FMR1 3 forward X:147912124-147912146; SpCas9
cccgcagcccacctctcgg

SEQ ID NO: 5304 - DNA, 18 bp, Artificial Sequence
  Synthetic: FMR1 3 forward X:147912125-147912146; SpCas9
ccgcagcccacctctcgg

SEQ ID NO: 5305 - DNA, 25 bp, Artificial Sequence
  Synthetic: FMR1 3 forward X:147912121-147912149; SpCas9
gcgcccgcagcccacctctcggggg

SEQ ID NO: 5306 - DNA, 24 bp, Artificial Sequence
  Synthetic: FMR1 3 forward X:147912122-147912149; SpCas9
cgcccgcagcccacctctcggggg

SEQ ID NO: 5307 - DNA, 23 bp, Artificial Sequence
  Synthetic: FMR1 3 forward X:147912123-147912149; SpCas9
gcccgcagcccacctctcggggg

SEQ ID NO: 5308 - DNA, 22 bp, Artificial Sequence
  Synthetic: FMR1 3 forward X:147912124-147912149; SpCas9
cccgcagcccacctctcggggg

SEQ ID NO: 5309 - DNA, 21 bp, Artificial Sequence
  Synthetic: FMR1 3 forward X:147912125-147912149; SpCas9
ccgcagcccacctctcggggg

SEQ ID NO: 5310 - DNA, 20 bp, Artificial Sequence
  Synthetic: FMR1 3 forward X:147912126-147912149; SpCas9
cgcagcccacctctcggggg

SEQ ID NO: 5311 - DNA, 19 bp, Artificial Sequence
  Synthetic: FMR1 3 forward X:147912127-147912149; SpCas9
gcagcccacctctcggggg

SEQ ID NO: 5312 - DNA, 18 bp, Artificial Sequence
  Synthetic: FMR1 3 forward X:147912128-147912149; SpCas9
cagcccacctctcggggg

SEQ ID NO: 5313 - DNA, 25 bp, Artificial Sequence
  Synthetic: FMR1 3 forward X:147912122-147912150; SpCas9
cgcccgcagcccacctctcgggggc

SEQ ID NO: 5314 - DNA, 24 bp, Artificial Sequence
  Synthetic: FMR1 3 forward X:147912123-147912150; SpCas9
gcccgcagcccacctctcgggggc

SEQ ID NO: 5315 - DNA, 23 bp, Artificial Sequence
  Synthetic: FMR1 3 forward X:147912124-147912150; SpCas9
cccgcagcccacctctcgggggc

SEQ ID NO: 5316 - DNA, 22 bp, Artificial Sequence
  Synthetic: FMR1 3 forward X:147912125-147912150; SpCas9
ccgcagcccacctctcgggggc

SEQ ID NO: 5317 - DNA, 21 bp, Artificial Sequence
  Synthetic: FMR1 3 forward X:147912126-147912150; SpCas9
cgcagcccacctctcgggggc

SEQ ID NO: 5318 - DNA, 20 bp, Artificial Sequence
  Synthetic: FMR1 3 forward X:147912127-147912150; SpCas9
gcagcccacctctcgggggc

SEQ ID NO: 5319 - DNA, 19 bp, Artificial Sequence
  Synthetic: FMR1 3 forward X:147912128-147912150; SpCas9
cagcccacctctcgggggc

SEQ ID NO: 5320 - DNA, 18 bp, Artificial Sequence
  Synthetic: FMR1 3 forward X:147912129-147912150; SpCas9
agcccacctctcgggggc

SEQ ID NO: 5321 - DNA, 25 bp, Artificial Sequence
  Synthetic: FMR1 3 reverse X:147912124-147912152; SpCas9
agcccgcccccgagaggtgggctgc

SEQ ID NO: 5322 - DNA, 24 bp, Artificial Sequence
  Synthetic: FMR1 3 reverse X:147912125-147912152; SpCas9
gcccgcccccgagaggtgggctgc

SEQ ID NO: 5323 - DNA, 23 bp, Artificial Sequence
  Synthetic: FMR1 3 reverse X:147912126-147912152; SpCas9
cccgcccccgagaggtgggctgc

SEQ ID NO: 5324 - DNA, 22 bp, Artificial Sequence
  Synthetic: FMR1 3 reverse X:147912127-147912152; SpCas9
ccgcccccgagaggtgggctgc

SEQ ID NO: 5325 - DNA, 21 bp, Artificial Sequence
  Synthetic: FMR1 3 reverse X:147912128-147912152; SpCas9
cgcccccgagaggtgggctgc

SEQ ID NO: 5326 - DNA, 20 bp, Artificial Sequence
  Synthetic: FMR1 3 reverse X:147912129-147912152; SpCas9
gcccccgagaggtgggctgc

SEQ ID NO: 5327 - DNA, 19 bp, Artificial Sequence
  Synthetic: FMR1 3 reverse X:147912130-147912152; SpCas9
cccccgagaggtgggctgc

SEQ ID NO: 5328 - DNA, 18 bp, Artificial Sequence
  Synthetic: FMR1 3 reverse X:147912131-147912152; SpCas9
ccccgagaggtgggctgc

SEQ ID NO: 5329 - DNA, 25 bp, Artificial Sequence
  Synthetic: FMR1 3 reverse X:147912125-147912153; SpCas9
gagcccgcccccgagaggtgggctg

SEQ ID NO: 5330 - DNA, 24 bp, Artificial Sequence
  Synthetic: FMR1 3 reverse X:147912126-147912153; SpCas9
agcccgcccccgagaggtgggctg

SEQ ID NO: 5331 - DNA, 23 bp, Artificial Sequence
  Synthetic: FMR1 3 reverse X:147912127-147912153; SpCas9
gcccgcccccgagaggtgggctg

SEQ ID NO: 5332 - DNA, 22 bp, Artificial Sequence
  Synthetic: FMR1 3 reverse X:147912128-147912153; SpCas9
cccgcccccgagaggtgggctg

SEQ ID NO: 5333 - DNA, 21 bp, Artificial Sequence
  Synthetic: FMR1 3 reverse X:147912129-147912153; SpCas9
ccgcccccgagaggtgggctg

SEQ ID NO: 5334 - DNA, 20 bp, Artificial Sequence
  Synthetic: FMR1 3 reverse X:147912130-147912153; SpCas9
cgcccccgagaggtgggctg

SEQ ID NO: 5335 - DNA, 19 bp, Artificial Sequence
  Synthetic: FMR1 3 reverse X:147912131-147912153; SpCas9
gcccccgagaggtgggctg

SEQ ID NO: 5336 - DNA, 18 bp, Artificial Sequence
  Synthetic: FMR1 3 reverse X:147912132-147912153; SpCas9
cccccgagaggtgggctg

SEQ ID NO: 5337 - DNA, 25 bp, Artificial Sequence
  Synthetic: FMR1 3 forward X:147912129-147912157; SpCas9
agcccacctctcgggggcgggctcc

SEQ ID NO: 5338 - DNA, 24 bp, Artificial Sequence
  Synthetic: FMR1 3 forward X:147912130-147912157; SpCas9
gcccacctctcgggggcgggctcc

SEQ ID NO: 5339 - DNA, 23 bp, Artificial Sequence
  Synthetic: FMR1 3 forward X:147912131-147912157; SpCas9
cccacctctcgggggcgggctcc

SEQ ID NO: 5340 - DNA, 22 bp, Artificial Sequence
  Synthetic: FMR1 3 forward X:147912132-147912157; SpCas9
ccacctctcgggggcgggctcc

SEQ ID NO: 5341 - DNA, 21 bp, Artificial Sequence
  Synthetic: FMR1 3 forward X:147912133-147912157; SpCas9
cacctctcgggggcgggctcc

SEQ ID NO: 5342 - DNA, 20 bp, Artificial Sequence
  Synthetic: FMR1 3 forward X:147912134-147912157; SpCas9
acctctcgggggcgggctcc

SEQ ID NO: 5343 - DNA, 19 bp, Artificial Sequence
  Synthetic: FMR1 3 forward X:147912135-147912157; SpCas9
cctctcgggggcgggctcc

SEQ ID NO: 5344 - DNA, 18 bp, Artificial Sequence
  Synthetic: FMR1 3 forward X:147912136-147912157; SpCas9
ctctcgggggcgggctcc

SEQ ID NO: 5345 - DNA, 25 bp, Artificial Sequence
  Synthetic: FMR1 3 reverse X:147912131-147912159; SpCas9
cgccgggagcccgcccccgagaggt

SEQ ID NO: 5346 - DNA, 24 bp, Artificial Sequence
  Synthetic: FMR1 3 reverse X:147912132-147912159; SpCas9
gccgggagcccgcccccgagaggt

SEQ ID NO: 5347 - DNA, 23 bp, Artificial Sequence
  Synthetic: FMR1 3 reverse X:147912133-147912159; SpCas9
ccgggagcccgcccccgagaggt

SEQ ID NO: 5348 - DNA, 22 bp, Artificial Sequence
  Synthetic: FMR1 3 reverse X:147912134-147912159; SpCas9
cgggagcccgcccccgagaggt

SEQ ID NO: 5349 - DNA, 21 bp, Artificial Sequence
  Synthetic: FMR1 3 reverse X:147912135-147912159; SpCas9
gggagcccgcccccgagaggt

SEQ ID NO: 5350 - DNA, 20 bp, Artificial Sequence
  Synthetic: FMR1 3 reverse X:147912136-147912159; SpCas9
ggagcccgcccccgagaggt

SEQ ID NO: 5351 - DNA, 19 bp, Artificial Sequence
  Synthetic: FMR1 3 reverse X:147912137-147912159; SpCas9
gagcccgcccccgagaggt

SEQ ID NO: 5352 - DNA, 18 bp, Artificial Sequence
  Synthetic: FMR1 3 reverse X:147912138-147912159; SpCas9
agcccgcccccgagaggt

SEQ ID NO: 5353 - DNA, 25 bp, Artificial Sequence
  Synthetic: FMR1 3 reverse X:147912132-147912160; SpCas9
gcgccgggagcccgcccccgagagg

SEQ ID NO: 5354 - DNA, 24 bp, Artificial Sequence
  Synthetic: FMR1 3 reverse X:147912133-147912160; SpCas9
cgccgggagcccgcccccgagagg

SEQ ID NO: 5355 - DNA, 23 bp, Artificial Sequence
  Synthetic: FMR1 3 reverse X:147912134-147912160; SpCas9
gccgggagcccgcccccgagagg

SEQ ID NO: 5356 - DNA, 22 bp, Artificial Sequence
  Synthetic: FMR1 3 reverse X:147912135-147912160; SpCas9
ccgggagcccgcccccgagagg

SEQ ID NO: 5357 - DNA, 21 bp, Artificial Sequence
  Synthetic: FMR1 3 reverse X:147912136-147912160; SpCas9
cgggagcccgcccccgagagg

SEQ ID NO: 5358 - DNA, 20 bp, Artificial Sequence
  Synthetic: FMR1 3 reverse X:147912137-147912160; SpCas9
gggagcccgcccccgagagg

SEQ ID NO: 5359 - DNA, 19 bp, Artificial Sequence
  Synthetic: FMR1 3 reverse X:147912138-147912160; SpCas9
ggagcccgcccccgagagg

SEQ ID NO: 5360 - DNA, 18 bp, Artificial Sequence
  Synthetic: FMR1 3 reverse X:147912139-147912160; SpCas9
gagcccgcccccgagagg

SEQ ID NO: 5361 - DNA, 25 bp, Artificial Sequence
  Synthetic: FMR1 3 forward X:147912135-147912163; SpCas9
cctctcgggggcgggctcccggcgc

SEQ ID NO: 5362 - DNA, 24 bp, Artificial Sequence
  Synthetic: FMR1 3 forward X:147912136-147912163; SpCas9
ctctcgggggcgggctcccggcgc

SEQ ID NO: 5363 - DNA, 23 bp, Artificial Sequence
  Synthetic: FMR1 3 forward X:147912137-147912163; SpCas9
tctcgggggcgggctcccggcgc

SEQ ID NO: 5364 - DNA, 22 bp, Artificial Sequence
  Synthetic: FMR1 3 forward X:147912138-147912163; SpCas9
ctcgggggcgggctcccggcgc

SEQ ID NO: 5365 - DNA, 21 bp, Artificial Sequence
  Synthetic: FMR1 3 forward X:147912139-147912163; SpCas9
tcgggggcgggctcccggcgc

SEQ ID NO: 5366 - DNA, 20 bp, Artificial Sequence
  Synthetic: FMR1 3 forward X:147912140-147912163; SpCas9
cgggggcgggctcccggcgc

SEQ ID NO: 5367 - DNA, 19 bp, Artificial Sequence
  Synthetic: FMR1 3 forward X:147912141-147912163; SpCas9
gggggcgggctcccggcgc

SEQ ID NO: 5368 - DNA, 18 bp, Artificial Sequence
  Synthetic: FMR1 3 forward X:147912142-147912163; SpCas9
ggggcgggctcccggcgc

SEQ ID NO: 5369 - DNA, 25 bp, Artificial Sequence
  Synthetic: FMR1 3 reverse X:147912135-147912163; SpCas9
ctagcgccgggagcccgcccccgag

SEQ ID NO: 5370 - DNA, 24 bp, Artificial Sequence
  Synthetic: FMR1 3 reverse X:147912136-147912163; SpCas9
tagcgccgggagcccgcccccgag

SEQ ID NO: 5371 - DNA, 23 bp, Artificial Sequence
  Synthetic: FMR1 3 reverse X:147912137-147912163; SpCas9
agcgccgggagcccgcccccgag

SEQ ID NO: 5372 - DNA, 22 bp, Artificial Sequence
  Synthetic: FMR1 3 reverse X:147912138-147912163; SpCas9
gcgccgggagcccgcccccgag

SEQ ID NO: 5373 - DNA, 21 bp, Artificial Sequence
  Synthetic: FMR1 3 reverse X:147912139-147912163; SpCas9
cgccgggagcccgcccccgag

SEQ ID NO: 5374 - DNA, 20 bp, Artificial Sequence
  Synthetic: FMR1 3 reverse X:147912140-147912163; SpCas9
gccgggagcccgcccccgag

SEQ ID NO: 5375 - DNA, 19 bp, Artificial Sequence
  Synthetic: FMR1 3 reverse X:147912141-147912163; SpCas9
ccgggagcccgcccccgag

SEQ ID NO: 5376 - DNA, 18 bp, Artificial Sequence
  Synthetic: FMR1 3 reverse X:147912142-147912163; SpCas9
cgggagcccgcccccgag

SEQ ID NO: 5377 - DNA, 25 bp, Artificial Sequence
  Synthetic: FMR1 3 reverse X:147912136-147912164; SpCas9
gctagcgccgggagcccgcccccga

SEQ ID NO: 5378 - DNA, 24 bp, Artificial Sequence
  Synthetic: FMR1 3 reverse X:147912137-147912164; SpCas9
ctagcgccgggagcccgcccccga

SEQ ID NO: 5379 - DNA, 23 bp, Artificial Sequence
  Synthetic: FMR1 3 reverse X:147912138-147912164; SpCas9
tagcgccgggagcccgcccccga

SEQ ID NO: 5380 - DNA, 22 bp, Artificial Sequence
  Synthetic: FMR1 3 reverse X:147912139-147912164; SpCas9
agcgccgggagcccgcccccga

SEQ ID NO: 5381 - DNA, 21 bp, Artificial Sequence
  Synthetic: FMR1 3 reverse X:147912140-147912164; SpCas9
gcgccgggagcccgcccccga

SEQ ID NO: 5382 - DNA, 20 bp, Artificial Sequence
  Synthetic: FMR1 3 reverse X:147912141-147912164; SpCas9
cgccgggagcccgcccccga

SEQ ID NO: 5383 - DNA, 19 bp, Artificial Sequence
  Synthetic: FMR1 3 reverse X:147912142-147912164; SpCas9
gccgggagcccgcccccga

SEQ ID NO: 5384 - DNA, 18 bp, Artificial Sequence
  Synthetic: FMR1 3 reverse X:147912143-147912164; SpCas9
ccgggagcccgcccccga

SEQ ID NO: 5385 - DNA, 25 bp, Artificial Sequence
  Synthetic: FMR1 3 forward X:147912138-147912166; SpCas9
ctcgggggcgggctcccggcgctag

SEQ ID NO: 5386 - DNA, 24 bp, Artificial Sequence
  Synthetic: FMR1 3 forward X:147912139-147912166; SpCas9
tcgggggcgggctcccggcgctag

SEQ ID NO: 5387 - DNA, 23 bp, Artificial Sequence
  Synthetic: FMR1 3 forward X:147912140-147912166; SpCas9
cgggggcgggctcccggcgctag

SEQ ID NO: 5388 - DNA, 22 bp, Artificial Sequence
  Synthetic: FMR1 3 forward X:147912141-147912166; SpCas9
gggggcgggctcccggcgctag

SEQ ID NO: 5389 - DNA, 21 bp, Artificial Sequence
  Synthetic: FMR1 3 forward X:147912142-147912166; SpCas9
ggggcgggctcccggcgctag

SEQ ID NO: 5390 - DNA, 20 bp, Artificial Sequence
  Synthetic: FMR1 3 forward X:147912143-147912166; SpCas9
gggcgggctcccggcgctag

SEQ ID NO: 5391 - DNA, 19 bp, Artificial Sequence
  Synthetic: FMR1 3 forward X:147912144-147912166; SpCas9
ggcgggctcccggcgctag

SEQ ID NO: 5392 - DNA, 18 bp, Artificial Sequence
  Synthetic: FMR1 3 forward X:147912145-147912166; SpCas9
gcgggctcccggcgctag

SEQ ID NO: 5393 - DNA, 25 bp, Artificial Sequence
  Synthetic: FMR1 3 reverse X:147912138-147912166; SpCas9
ctgctagcgccgggagcccgccccc

SEQ ID NO: 5394 - DNA, 24 bp, Artificial Sequence
  Synthetic: FMR1 3 reverse X:147912139-147912166; SpCas9
tgctagcgccgggagcccgccccc

SEQ ID NO: 5395 - DNA, 23 bp, Artificial Sequence
  Synthetic: FMR1 3 reverse X:147912140-147912166; SpCas9
gctagcgccgggagcccgccccc

SEQ ID NO: 5396 - DNA, 22 bp, Artificial Sequence
  Synthetic: FMR1 3 reverse X:147912141-147912166; SpCas9
ctagcgccgggagcccgccccc

SEQ ID NO: 5397 - DNA, 21 bp, Artificial Sequence
  Synthetic: FMR1 3 reverse X:147912142-147912166; SpCas9
tagcgccgggagcccgccccc

SEQ ID NO: 5398 - DNA, 20 bp, Artificial Sequence
  Synthetic: FMR1 3 reverse X:147912143-147912166; SpCas9
agcgccgggagcccgccccc

SEQ ID NO: 5399 - DNA, 19 bp, Artificial Sequence
  Synthetic: FMR1 3 reverse X:147912144-147912166; SpCas9
gcgccgggagcccgccccc

SEQ ID NO: 5400 - DNA, 18 bp, Artificial Sequence
  Synthetic: FMR1 3 reverse X:147912145-147912166; SpCas9
cgccgggagcccgccccc

SEQ ID NO: 5401 - DNA, 25 bp, Artificial Sequence
  Synthetic: FMR1 3 forward X:147912139-147912167; SpCas9
tcgggggcgggctcccggcgctagc

SEQ ID NO: 5402 - DNA, 24 bp, Artificial Sequence
  Synthetic: FMR1 3 forward X:147912140-147912167; SpCas9
cgggggcgggctcccggcgctagc

SEQ ID NO: 5403 - DNA, 23 bp, Artificial Sequence
  Synthetic: FMR1 3 forward X:147912141-147912167; SpCas9
gggggcgggctcccggcgctagc

SEQ ID NO: 5404 - DNA, 22 bp, Artificial Sequence
  Synthetic: FMR1 3 forward X:147912142-147912167; SpCas9
ggggcgggctcccggcgctagc

SEQ ID NO: 5405 - DNA, 21 bp, Artificial Sequence
  Synthetic: FMR1 3 forward X:147912143-147912167; SpCas9
gggcgggctcccggcgctagc

SEQ ID NO: 5406 - DNA, 20 bp, Artificial Sequence
  Synthetic: FMR1 3 forward X:147912144-147912167; SpCas9
ggcgggctcccggcgctagc

SEQ ID NO: 5407 - DNA, 19 bp, Artificial Sequence
  Synthetic: FMR1 3 forward X:147912145-147912167; SpCas9
gcgggctcccggcgctagc

SEQ ID NO: 5408 - DNA, 18 bp, Artificial Sequence
  Synthetic: FMR1 3 forward X:147912146-147912167; SpCas9
cgggctcccggcgctagc

SEQ ID NO: 5409 - DNA, 25 bp, Artificial Sequence
  Synthetic: FMR1 3 forward X:147912140-147912168; SpCas9
cgggggcgggctcccggcgctagca

SEQ ID NO: 5410 - DNA, 24 bp, Artificial Sequence
  Synthetic: FMR1 3 forward X:147912141-147912168; SpCas9
gggggcgggctcccggcgctagca

SEQ ID NO: 5411 - DNA, 23 bp, Artificial Sequence
  Synthetic: FMR1 3 forward X:147912142-147912168; SpCas9
ggggcgggctcccggcgctagca

SEQ ID NO: 5412 - DNA, 22 bp, Artificial Sequence
  Synthetic: FMR1 3 forward X:147912143-147912168; SpCas9
gggcgggctcccggcgctagca

SEQ ID NO: 5413 - DNA, 21 bp, Artificial Sequence
  Synthetic: FMR1 3 forward X:147912144-147912168; SpCas9
ggcgggctcccggcgctagca

SEQ ID NO: 5414 - DNA, 20 bp, Artificial Sequence
  Synthetic: FMR1 3 forward X:147912145-147912168; SpCas9
gcgggctcccggcgctagca

SEQ ID NO: 5415 - DNA, 19 bp, Artificial Sequence
  Synthetic: FMR1 3 forward X:147912146-147912168; SpCas9
cgggctcccggcgctagca

SEQ ID NO: 5416 - DNA, 18 bp, Artificial Sequence
  Synthetic: FMR1 3 forward X:147912147-147912168; SpCas9
gggctcccggcgctagca

SEQ ID NO: 5417 - DNA, 25 bp, Artificial Sequence
  Synthetic: FMR1 3 forward X:147912146-147912174; SpCas9
cgggctcccggcgctagcagggctg

SEQ ID NO: 5418 - DNA, 24 bp, Artificial Sequence
  Synthetic: FMR1 3 forward X:147912147-147912174; SpCas9
gggctcccggcgctagcagggctg

SEQ ID NO: 5419 - DNA, 23 bp, Artificial Sequence
  Synthetic: FMR1 3 forward X:147912148-147912174; SpCas9
ggctcccggcgctagcagggctg

SEQ ID NO: 5420 - DNA, 22 bp, Artificial Sequence
  Synthetic: FMR1 3 forward X:147912149-147912174; SpCas9
gctcccggcgctagcagggctg

SEQ ID NO: 5421 - DNA, 21 bp, Artificial Sequence
  Synthetic: FMR1 3 forward X:147912150-147912174; SpCas9
ctcccggcgctagcagggctg

SEQ ID NO: 5422 - DNA, 20 bp, Artificial Sequence
  Synthetic: FMR1 3 forward X:147912151-147912174; SpCas9
tcccggcgctagcagggctg

SEQ ID NO: 5423 - DNA, 19 bp, Artificial Sequence
  Synthetic: FMR1 3 forward X:147912152-147912174; SpCas9
cccggcgctagcagggctg

SEQ ID NO: 5424 - DNA, 18 bp, Artificial Sequence
  Synthetic: FMR1 3 forward X:147912153-147912174; SpCas9
ccggcgctagcagggctg

SEQ ID NO: 5425 - DNA, 25 bp, Artificial Sequence
  Synthetic: FMR1 3 forward X:147912148-147912176; SpCas9
ggctcccggcgctagcagggctgaa

SEQ ID NO: 5426 - DNA, 24 bp, Artificial Sequence
  Synthetic: FMR1 3 forward X:147912149-147912176; SpCas9
gctcccggcgctagcagggctgaa

SEQ ID NO: 5427 - DNA, 23 bp, Artificial Sequence
  Synthetic: FMR1 3 forward X:147912150-147912176; SpCas9
ctcccggcgctagcagggctgaa

SEQ ID NO: 5428 - DNA, 22 bp, Artificial Sequence
  Synthetic: FMR1 3 forward X:147912151-147912176; SpCas9
tcccggcgctagcagggctgaa

SEQ ID NO: 5429 - DNA, 21 bp, Artificial Sequence
  Synthetic: FMR1 3 forward X:147912152-147912176; SpCas9
cccggcgctagcagggctgaa

SEQ ID NO: 5430 - DNA, 20 bp, Artificial Sequence
  Synthetic: FMR1 3 forward X:147912153-147912176; SpCas9
ccggcgctagcagggctgaa

SEQ ID NO: 5431 - DNA, 19 bp, Artificial Sequence
  Synthetic: FMR1 3 forward X:147912154-147912176; SpCas9
cggcgctagcagggctgaa

SEQ ID NO: 5432 - DNA, 18 bp, Artificial Sequence
  Synthetic: FMR1 3 forward X:147912155-147912176; SpCas9
ggcgctagcagggctgaa

SEQ ID NO: 5433 - DNA, 25 bp, Artificial Sequence
  Synthetic: FMR1 3 reverse X:147912150-147912178; SpCas9
ttctcttcagccctgctagcgccgg

SEQ ID NO: 5434 - DNA, 24 bp, Artificial Sequence
  Synthetic: FMR1 3 reverse X:147912151-147912178; SpCas9
tctcttcagccctgctagcgccgg

SEQ ID NO: 5435 - DNA, 23 bp, Artificial Sequence
  Synthetic: FMR1 3 reverse X:147912152-147912178; SpCas9
ctcttcagccctgctagcgccgg

SEQ ID NO: 5436 - DNA, 22 bp, Artificial Sequence
  Synthetic: FMR1 3 reverse X:147912153-147912178; SpCas9
tcttcagccctgctagcgccgg

SEQ ID NO: 5437 - DNA, 21 bp, Artificial Sequence
  Synthetic: FMR1 3 reverse X:147912154-147912178; SpCas9
cttcagccctgctagcgccgg

SEQ ID NO: 5438 - DNA, 20 bp, Artificial Sequence
  Synthetic: FMR1 3 reverse X:147912155-147912178; SpCas9
ttcagccctgctagcgccgg

SEQ ID NO: 5439 - DNA, 19 bp, Artificial Sequence
  Synthetic: FMR1 3 reverse X:147912156-147912178; SpCas9
tcagccctgctagcgccgg

SEQ ID NO: 5440 - DNA, 18 bp, Artificial Sequence
  Synthetic: FMR1 3 reverse X:147912157-147912178; SpCas9
cagccctgctagcgccgg

SEQ ID NO: 5441 - DNA, 25 bp, Artificial Sequence
  Synthetic: FMR1 3 forward X:147912151-147912179; SpCas9
tcccggcgctagcagggctgaagag

SEQ ID NO: 5442 - DNA, 24 bp, Artificial Sequence
  Synthetic: FMR1 3 forward X:147912152-147912179; SpCas9
cccggcgctagcagggctgaagag

SEQ ID NO: 5443 - DNA, 23 bp, Artificial Sequence
  Synthetic: FMR1 3 forward X:147912153-147912179; SpCas9
ccggcgctagcagggctgaagag

SEQ ID NO: 5444 - DNA, 22 bp, Artificial Sequence
  Synthetic: FMR1 3 forward X:147912154-147912179; SpCas9
cggcgctagcagggctgaagag

SEQ ID NO: 5445 - DNA, 21 bp, Artificial Sequence
  Synthetic: FMR1 3 forward X:147912155-147912179; SpCas9
ggcgctagcagggctgaagag

SEQ ID NO: 5446 - DNA, 20 bp, Artificial Sequence
  Synthetic: FMR1 3 forward X:147912156-147912179; SpCas9
gcgctagcagggctgaagag

SEQ ID NO: 5447 - DNA, 19 bp, Artificial Sequence
  Synthetic: FMR1 3 forward X:147912157-147912179; SpCas9
cgctagcagggctgaagag

SEQ ID NO: 5448 - DNA, 18 bp, Artificial Sequence
  Synthetic: FMR1 3 forward X:147912158-147912179; SpCas9
gctagcagggctgaagag

SEQ ID NO: 5449 - DNA, 25 bp, Artificial Sequence
  Synthetic: FMR1 3 reverse X:147912152-147912180; SpCas9
tcttctcttcagccctgctagcgcc

SEQ ID NO: 5450 - DNA, 24 bp, Artificial Sequence
  Synthetic: FMR1 3 reverse X:147912153-147912180; SpCas9
cttctcttcagccctgctagcgcc

SEQ ID NO: 5451 - DNA, 23 bp, Artificial Sequence
  Synthetic: FMR1 3 reverse X:147912154-147912180; SpCas9
ttctcttcagccctgctagcgcc

SEQ ID NO: 5452 - DNA, 22 bp, Artificial Sequence
  Synthetic: FMR1 3 reverse X:147912155-147912180; SpCas9
tctcttcagccctgctagcgcc

SEQ ID NO: 5453 - DNA, 21 bp, Artificial Sequence
  Synthetic: FMR1 3 reverse X:147912156-147912180; SpCas9
ctcttcagccctgctagcgcc

SEQ ID NO: 5454 - DNA, 20 bp, Artificial Sequence
  Synthetic: FMR1 3 reverse X:147912157-147912180; SpCas9
tcttcagccctgctagcgcc

SEQ ID NO: 5455 - DNA, 19 bp, Artificial Sequence
  Synthetic: FMR1 3 reverse X:147912158-147912180; SpCas9
cttcagccctgctagcgcc

SEQ ID NO: 5456 - DNA, 18 bp, Artificial Sequence
  Synthetic: FMR1 3 reverse X:147912159-147912180; SpCas9
ttcagccctgctagcgcc

SEQ ID NO: 5457 - DNA, 25 bp, Artificial Sequence
  Synthetic: FMR1 3 reverse X:147912153-147912181; SpCas9
atcttctcttcagccctgctagcgc

SEQ ID NO: 5458 - DNA, 24 bp, Artificial Sequence
  Synthetic: FMR1 3 reverse X:147912154-147912181; SpCas9
tcttctcttcagccctgctagcgc

SEQ ID NO: 5459 - DNA, 23 bp, Artificial Sequence
  Synthetic: FMR1 3 reverse X:147912155-147912181; SpCas9
cttctcttcagccctgctagcgc

SEQ ID NO: 5460 - DNA, 22 bp, Artificial Sequence
  Synthetic: FMR1 3 reverse X:147912156-147912181; SpCas9
ttctcttcagccctgctagcgc

SEQ ID NO: 5461 - DNA, 21 bp, Artificial Sequence
  Synthetic: FMR1 3 reverse X:147912157-147912181; SpCas9
tctcttcagccctgctagcgc

SEQ ID NO: 5462 - DNA, 20 bp, Artificial Sequence
  Synthetic: FMR1 3 reverse X:147912158-147912181; SpCas9
ctcttcagccctgctagcgc

SEQ ID NO: 5463 - DNA, 19 bp, Artificial Sequence
  Synthetic: FMR1 3 reverse X:147912159-147912181; SpCas9
tcttcagccctgctagcgc

SEQ ID NO: 5464 - DNA, 18 bp, Artificial Sequence
  Synthetic: FMR1 3 reverse X:147912160-147912181; SpCas9
cttcagccctgctagcgc

SEQ ID NO: 5465 - DNA, 25 bp, Artificial Sequence
  Synthetic: FMR1 3 forward X:147912155-147912183; SpCas9
ggcgctagcagggctgaagagaaga

SEQ ID NO: 5466 - DNA, 24 bp, Artificial Sequence
  Synthetic: FMR1 3 forward X:147912156-147912183; SpCas9
gcgctagcagggctgaagagaaga

SEQ ID NO: 5467 - DNA, 23 bp, Artificial Sequence
  Synthetic: FMR1 3 forward X:147912157-147912183; SpCas9
cgctagcagggctgaagagaaga

SEQ ID NO: 5468 - DNA, 22 bp, Artificial Sequence
  Synthetic: FMR1 3 forward X:147912158-147912183; SpCas9
gctagcagggctgaagagaaga

SEQ ID NO: 5469 - DNA, 21 bp, Artificial Sequence
  Synthetic: FMR1 3 forward X:147912159-147912183; SpCas9
ctagcagggctgaagagaaga

SEQ ID NO: 5470 - DNA, 20 bp, Artificial Sequence
  Synthetic: FMR1 3 forward X:147912160-147912183; SpCas9
tagcagggctgaagagaaga

SEQ ID NO: 5471 - DNA, 19 bp, Artificial Sequence
  Synthetic: FMR1 3 forward X:147912161-147912183; SpCas9
agcagggctgaagagaaga

SEQ ID NO: 5472 - DNA, 18 bp, Artificial Sequence
  Synthetic: FMR1 3 forward X:147912162-147912183; SpCas9
gcagggctgaagagaaga

SEQ ID NO: 5473 - DNA, 25 bp, Artificial Sequence
  Synthetic: FMR1 3 forward X:147912157-147912185; SpCas9
cgctagcagggctgaagagaagatg

SEQ ID NO: 5474 - DNA, 24 bp, Artificial Sequence
  Synthetic: FMR1 3 forward X:147912158-147912185; SpCas9
gctagcagggctgaagagaagatg

SEQ ID NO: 5475 - DNA, 23 bp, Artificial Sequence
  Synthetic: FMR1 3 forward X:147912159-147912185; SpCas9
ctagcagggctgaagagaagatg

SEQ ID NO: 5476 - DNA, 22 bp, Artificial Sequence
  Synthetic: FMR1 3 forward X:147912160-147912185; SpCas9
tagcagggctgaagagaagatg

SEQ ID NO: 5477 - DNA, 21 bp, Artificial Sequence
  Synthetic: FMR1 3 forward X:147912161-147912185; SpCas9
agcagggctgaagagaagatg

SEQ ID NO: 5478 - DNA, 20 bp, Artificial Sequence
  Synthetic: FMR1 3 forward X:147912162-147912185; SpCas9
gcagggctgaagagaagatg

SEQ ID NO: 5479 - DNA, 19 bp, Artificial Sequence
  Synthetic: FMR1 3 forward X:147912163-147912185; SpCas9
cagggctgaagagaagatg

SEQ ID NO: 5480 - DNA, 18 bp, Artificial Sequence
  Synthetic: FMR1 3 forward X:147912164-147912185; SpCas9
agggctgaagagaagatg

SEQ ID NO: 5481 - DNA, 25 bp, Artificial Sequence
  Synthetic: FMR1 3 reverse X:147912159-147912187; SpCas9
tcctccatcttctcttcagccctgc

SEQ ID NO: 5482 - DNA, 24 bp, Artificial Sequence
  Synthetic: FMR1 3 reverse X:147912160-147912187; SpCas9
cctccatcttctcttcagccctgc

SEQ ID NO: 5483 - DNA, 23 bp, Artificial Sequence
  Synthetic: FMR1 3 reverse X:147912161-147912187; SpCas9
ctccatcttctcttcagccctgc

SEQ ID NO: 5484 - DNA, 22 bp, Artificial Sequence
  Synthetic: FMR1 3 reverse X:147912162-147912187; SpCas9
tccatcttctcttcagccctgc

SEQ ID NO: 5485 - DNA, 21 bp, Artificial Sequence
  Synthetic: FMR1 3 reverse X:147912163-147912187; SpCas9
ccatcttctcttcagccctgc

SEQ ID NO: 5486 - DNA, 20 bp, Artificial Sequence
  Synthetic: FMR1 3 reverse X:147912164-147912187; SpCas9
catcttctcttcagccctgc

SEQ ID NO: 5487 - DNA, 19 bp, Artificial Sequence
  Synthetic: FMR1 3 reverse X:147912165-147912187; SpCas9
atcttctcttcagccctgc

SEQ ID NO: 5488 - DNA, 18 bp, Artificial Sequence
  Synthetic: FMR1 3 reverse X:147912166-147912187; SpCas9
tcttctcttcagccctgc

SEQ ID NO: 5489 - DNA, 25 bp, Artificial Sequence
  Synthetic: FMR1 3 reverse X:147912168-147912196; SpCas9
accaccagctcctccatcttctctt

SEQ ID NO: 5490 - DNA, 24 bp, Artificial Sequence
  Synthetic: FMR1 3 reverse X:147912169-147912196; SpCas9
ccaccagctcctccatcttctctt

SEQ ID NO: 5491 - DNA, 23 bp, Artificial Sequence
  Synthetic: FMR1 3 reverse X:147912170-147912196; SpCas9
caccagctcctccatcttctctt

SEQ ID NO: 5492 - DNA, 22 bp, Artificial Sequence
  Synthetic: FMR1 3 reverse X:147912171-147912196; SpCas9
accagctcctccatcttctctt

SEQ ID NO: 5493 - DNA, 21 bp, Artificial Sequence
  Synthetic: FMR1 3 reverse X:147912172-147912196; SpCas9
ccagctcctccatcttctctt

SEQ ID NO: 5494 - DNA, 20 bp, Artificial Sequence
  Synthetic: FMR1 3 reverse X:147912173-147912196; SpCas9
cagctcctccatcttctctt

SEQ ID NO: 5495 - DNA, 19 bp, Artificial Sequence
  Synthetic: FMR1 3 reverse X:147912174-147912196; SpCas9
agctcctccatcttctctt

SEQ ID NO: 5496 - DNA, 18 bp, Artificial Sequence
  Synthetic: FMR1 3 reverse X:147912175-147912196; SpCas9
gctcctccatcttctctt

SEQ ID NO: 5497 - DNA, 18 bp, Artificial Sequence
  Synthetic: FMR1 5 forward X:147911940-147911962; As/LbCpf1
ggtttcacttccggtgga

SEQ ID NO: 5498 - DNA, 19 bp, Artificial Sequence
  Synthetic: FMR1 5 forward X:147911940-147911963; As/LbCpf1
ggtttcacttccggtggag

SEQ ID NO: 5499 - DNA, 20 bp, Artificial Sequence
  Synthetic: FMR1 5 forward X:147911940-147911964; As/LbCpf1
ggtttcacttccggtggagg

SEQ ID NO: 5500 - DNA, 21 bp, Artificial Sequence
  Synthetic: FMR1 5 forward X:147911940-147911965; As/LbCpf1
ggtttcacttccggtggaggg

SEQ ID NO: 5501 - DNA, 22 bp, Artificial Sequence
  Synthetic: FMR1 5 forward X:147911940-147911966; As/LbCpf1
ggtttcacttccggtggagggc

SEQ ID NO: 5502 - DNA, 23 bp, Artificial Sequence
  Synthetic: FMR1 5 forward X:147911940-147911967; As/LbCpf1
ggtttcacttccggtggagggcc

SEQ ID NO: 5503 - DNA, 24 bp, Artificial Sequence
  Synthetic: FMR1 5 forward X:147911940-147911968; As/LbCpf1
ggtttcacttccggtggagggccg

SEQ ID NO: 5504 - DNA, 25 bp, Artificial Sequence
  Synthetic: FMR1 5 forward X:147911940-147911969; As/LbCpf1
ggtttcacttccggtggagggccgc

SEQ ID NO: 5505 - DNA, 18 bp, Artificial Sequence
  Synthetic: FMR1 5 forward X:147911946-147911968; As/LbCpf1
acttccggtggagggccg

SEQ ID NO: 5506 - DNA, 19 bp, Artificial Sequence
  Synthetic: FMR1 5 forward X:147911946-147911969; As/LbCpf1
acttccggtggagggccgc

SEQ ID NO: 5507 - DNA, 20 bp, Artificial Sequence
  Synthetic: FMR1 5 forward X:147911946-147911970; As/LbCpf1
acttccggtggagggccgcc

SEQ ID NO: 5508 - DNA, 21 bp, Artificial Sequence
  Synthetic: FMR1 5 forward X:147911946-147911971; As/LbCpf1
acttccggtggagggccgcct

SEQ ID NO: 5509 - DNA, 22 bp, Artificial Sequence
  Synthetic: FMR1 5 forward X:147911946-147911972; As/LbCpf1
acttccggtggagggccgcctc

SEQ ID NO: 5510 - DNA, 23 bp, Artificial Sequence
  Synthetic: FMR1 5 forward X:147911946-147911973; As/LbCpf1
acttccggtggagggccgcctct

SEQ ID NO: 5511 - DNA, 24 bp, Artificial Sequence
  Synthetic: FMR1 5 forward X:147911946-147911974; As/LbCpf1
acttccggtggagggccgcctctg

SEQ ID NO: 5512 - DNA, 25 bp, Artificial Sequence
  Synthetic: FMR1 5 forward X:147911946-147911975; As/LbCpf1
acttccggtggagggccgcctctga

SEQ ID NO: 5513 - DNA, 18 bp, Artificial Sequence
  Synthetic: FMR1 5 forward X:147911936-147911958; AsCpf1-1
tttcggtttcacttccgg

SEQ ID NO: 5514 - DNA, 19 bp, Artificial Sequence
  Synthetic: FMR1 5 forward X:147911936-147911959; AsCpf1-1
tttcggtttcacttccggt

SEQ ID NO: 5515 - DNA, 20 bp, Artificial Sequence
  Synthetic: FMR1 5 forward X:147911936-147911960; AsCpf1-1
tttcggtttcacttccggtg

SEQ ID NO: 5516 - DNA, 21 bp, Artificial Sequence
  Synthetic: FMR1 5 forward X:147911936-147911961; AsCpf1-1
tttcggtttcacttccggtgg

SEQ ID NO: 5517 - DNA, 22 bp, Artificial Sequence
  Synthetic: FMR1 5 forward X:147911936-147911962; AsCpf1-1
tttcggtttcacttccggtgga

SEQ ID NO: 5518 - DNA, 23 bp, Artificial Sequence
  Synthetic: FMR1 5 forward X:147911936-147911963; AsCpf1-1
tttcggtttcacttccggtggag

SEQ ID NO: 5519 - DNA, 24 bp, Artificial Sequence
  Synthetic: FMR1 5 forward X:147911936-147911964; AsCpf1-1
tttcggtttcacttccggtggagg

SEQ ID NO: 5520 - DNA, 25 bp, Artificial Sequence
  Synthetic: FMR1 5 forward X:147911936-147911965; AsCpf1-1
tttcggtttcacttccggtggaggg

SEQ ID NO: 5521 - DNA, 18 bp, Artificial Sequence
  Synthetic: FMR1 5 forward X:147911941-147911963; AsCpf1-1
gtttcacttccggtggag

SEQ ID NO: 5522 - DNA, 19 bp, Artificial Sequence
  Synthetic: FMR1 5 forward X:147911941-147911964; AsCpf1-1
gtttcacttccggtggagg

SEQ ID NO: 5523 - DNA, 20 bp, Artificial Sequence
  Synthetic: FMR1 5 forward X:147911941-147911965; AsCpf1-1
gtttcacttccggtggaggg

SEQ ID NO: 5524 - DNA, 21 bp, Artificial Sequence
  Synthetic: FMR1 5 forward X:147911941-147911966; AsCpf1-1
gtttcacttccggtggagggc

SEQ ID NO: 5525 - DNA, 22 bp, Artificial Sequence
  Synthetic: FMR1 5 forward X:147911941-147911967; AsCpf1-1
gtttcacttccggtggagggcc

SEQ ID NO: 5526 - DNA, 23 bp, Artificial Sequence
  Synthetic: FMR1 5 forward X:147911941-147911968; AsCpf1-1
gtttcacttccggtggagggccg

SEQ ID NO: 5527 - DNA, 24 bp, Artificial Sequence
  Synthetic: FMR1 5 forward X:147911941-147911969; AsCpf1-1
gtttcacttccggtggagggccgc

SEQ ID NO: 5528 - DNA, 25 bp, Artificial Sequence
  Synthetic: FMR1 5 forward X:147911941-147911970; AsCpf1-1
gtttcacttccggtggagggccgcc

SEQ ID NO: 5529 - DNA, 18 bp, Artificial Sequence
  Synthetic: FMR1 5 forward X:147911947-147911969; AsCpf1-1
cttccggtggagggccgc

SEQ ID NO: 5530 - DNA, 19 bp, Artificial Sequence
  Synthetic: FMR1 5 forward X:147911947-147911970; AsCpf1-1
cttccggtggagggccgcc

SEQ ID NO: 5531 - DNA, 20 bp, Artificial Sequence
  Synthetic: FMR1 5 forward X:147911947-147911971; AsCpf1-1
cttccggtggagggccgcct

SEQ ID NO: 5532 - DNA, 21 bp, Artificial Sequence
  Synthetic: FMR1 5 forward X:147911947-147911972; AsCpf1-1
cttccggtggagggccgcctc

SEQ ID NO: 5533 - DNA, 22 bp, Artificial Sequence
  Synthetic: FMR1 5 forward X:147911947-147911973; AsCpf1-1
cttccggtggagggccgcctct

SEQ ID NO: 5534 - DNA, 23 bp, Artificial Sequence
  Synthetic: FMR1 5 forward X:147911947-147911974; AsCpf1-1
cttccggtggagggccgcctctg

SEQ ID NO: 5535 - DNA, 24 bp, Artificial Sequence
  Synthetic: FMR1 5 forward X:147911947-147911975; AsCpf1-1
cttccggtggagggccgcctctga

SEQ ID NO: 5536 - DNA, 25 bp, Artificial Sequence
  Synthetic: FMR1 5 forward X:147911947-147911976; AsCpf1-1
cttccggtggagggccgcctctgag

SEQ ID NO: 5537 - DNA, 18 bp, Artificial Sequence
  Synthetic: FMR1 5 forward X:147911952-147911974; AsCpf1-1
ggtggagggccgcctctg

SEQ ID NO: 5538 - DNA, 19 bp, Artificial Sequence
  Synthetic: FMR1 5 forward X:147911952-147911975; AsCpf1-1
ggtggagggccgcctctga

SEQ ID NO: 5539 - DNA, 20 bp, Artificial Sequence
  Synthetic: FMR1 5 forward X:147911952-147911976; AsCpf1-1
ggtggagggccgcctctgag

SEQ ID NO: 5540 - DNA, 21 bp, Artificial Sequence
  Synthetic: FMR1 5 forward X:147911952-147911977; AsCpf1-1
ggtggagggccgcctctgagc

SEQ ID NO: 5541 - DNA, 22 bp, Artificial Sequence
  Synthetic: FMR1 5 forward X:147911952-147911978; AsCpf1-1
ggtggagggccgcctctgagcg

SEQ ID NO: 5542 - DNA, 23 bp, Artificial Sequence
  Synthetic: FMR1 5 forward X:147911952-147911979; AsCpf1-1
ggtggagggccgcctctgagcgg

SEQ ID NO: 5543 - DNA, 24 bp, Artificial Sequence
  Synthetic: FMR1 5 forward X:147911952-147911980; AsCpf1-1
ggtggagggccgcctctgagcggg

SEQ ID NO: 5544 - DNA, 25 bp, Artificial Sequence
  Synthetic: FMR1 5 forward X:147911952-147911981; AsCpf1-1
ggtggagggccgcctctgagcgggc

SEQ ID NO: 5545 - DNA, 18 bp, Artificial Sequence
  Synthetic: FMR1 5 forward X:147911953-147911975; AsCpf1-1
gtggagggccgcctctga

SEQ ID NO: 5546 - DNA, 19 bp, Artificial Sequence
  Synthetic: FMR1 5 forward X:147911953-147911976; AsCpf1-1
gtggagggccgcctctgag

SEQ ID NO: 5547 - DNA, 20 bp, Artificial Sequence
  Synthetic: FMR1 5 forward X:147911953-147911977; AsCpf1-1
gtggagggccgcctctgagc

SEQ ID NO: 5548 - DNA, 21 bp, Artificial Sequence
  Synthetic: FMR1 5 forward X:147911953-147911978; AsCpf1-1
gtggagggccgcctctgagcg

SEQ ID NO: 5549 - DNA, 22 bp, Artificial Sequence
  Synthetic: FMR1 5 forward X:147911953-147911979; AsCpf1-1
gtggagggccgcctctgagcgg

SEQ ID NO: 5550 - DNA, 23 bp, Artificial Sequence
  Synthetic: FMR1 5 forward X:147911953-147911980; AsCpf1-1
gtggagggccgcctctgagcggg

SEQ ID NO: 5551 - DNA, 24 bp, Artificial Sequence
  Synthetic: FMR1 5 forward X:147911953-147911981; AsCpf1-1
gtggagggccgcctctgagcgggc

SEQ ID NO: 5552 - DNA, 25 bp, Artificial Sequence
  Synthetic: FMR1 5 forward X:147911953-147911982; AsCpf1-1
gtggagggccgcctctgagcgggcg

SEQ ID NO: 5553 - DNA, 18 bp, Artificial Sequence
  Synthetic: FMR1 5 reverse X:147911991-147912013; AsCpf1-1
tcaccgccgccgcccgcg

SEQ ID NO: 5554 - DNA, 19 bp, Artificial Sequence
  Synthetic: FMR1 5 reverse X:147911991-147912014; AsCpf1-1
tcaccgccgccgcccgcgc

SEQ ID NO: 5555 - DNA, 20 bp, Artificial Sequence
  Synthetic: FMR1 5 reverse X:147911991-147912015; AsCpf1-1
tcaccgccgccgcccgcgct

SEQ ID NO: 5556 - DNA, 21 bp, Artificial Sequence
  Synthetic: FMR1 5 reverse X:147911991-147912016; AsCpf1-1
tcaccgccgccgcccgcgctc

SEQ ID NO: 5557 - DNA, 22 bp, Artificial Sequence
  Synthetic: FMR1 5 reverse X:147911991-147912017; AsCpf1-1
tcaccgccgccgcccgcgctcg

SEQ ID NO: 5558 - DNA, 23 bp, Artificial Sequence
  Synthetic: FMR1 5 reverse X:147911991-147912018; AsCpf1-1
tcaccgccgccgcccgcgctcgc

SEQ ID NO: 5559 - DNA, 24 bp, Artificial Sequence
  Synthetic: FMR1 5 reverse X:147911991-147912019; AsCpf1-1
tcaccgccgccgcccgcgctcgcc

SEQ ID NO: 5560 - DNA, 25 bp, Artificial Sequence
  Synthetic: FMR1 5 reverse X:147911991-147912020; AsCpf1-1
tcaccgccgccgcccgcgctcgccg

SEQ ID NO: 5561 - DNA, 25 bp, Artificial Sequence
  Synthetic: FMR1 5 forward X:147911932-147911963; SaCas9
cagctccgtttcggtttcacttccg

SEQ ID NO: 5562 - DNA, 24 bp, Artificial Sequence
  Synthetic: FMR1 5 forward X:147911933-147911963; SaCas9
agctccgtttcggtttcacttccg

SEQ ID NO: 5563 - DNA, 23 bp, Artificial Sequence
  Synthetic: FMR1 5 forward X:147911934-147911963; SaCas9
gctccgtttcggtttcacttccg

SEQ ID NO: 5564 - DNA, 22 bp, Artificial Sequence
  Synthetic: FMR1 5 forward X:147911935-147911963; SaCas9
ctccgtttcggtttcacttccg

SEQ ID NO: 5565 - DNA, 21 bp, Artificial Sequence
  Synthetic: FMR1 5 forward X:147911936-147911963; SaCas9
tccgtttcggtttcacttccg

SEQ ID NO: 5566 - DNA, 20 bp, Artificial Sequence
  Synthetic: FMR1 5 forward X:147911937-147911963; SaCas9
ccgtttcggtttcacttccg

SEQ ID NO: 5567 - DNA, 19 bp, Artificial Sequence
  Synthetic: FMR1 5 forward X:147911938-147911963; SaCas9
cgtttcggtttcacttccg

SEQ ID NO: 5568 - DNA, 18 bp, Artificial Sequence
  Synthetic: FMR1 5 forward X:147911939-147911963; SaCas9
gtttcggtttcacttccg

SEQ ID NO: 5569 - DNA, 25 bp, Artificial Sequence
  Synthetic: FMR1 5 forward X:147911933-147911964; SaCas9
agctccgtttcggtttcacttccgg

SEQ ID NO: 5570 - DNA, 24 bp, Artificial Sequence
  Synthetic: FMR1 5 forward X:147911934-147911964; SaCas9
gctccgtttcggtttcacttccgg

SEQ ID NO: 5571 - DNA, 23 bp, Artificial Sequence
  Synthetic: FMR1 5 forward X:147911935-147911964; SaCas9
ctccgtttcggtttcacttccgg

SEQ ID NO: 5572 - DNA, 22 bp, Artificial Sequence
  Synthetic: FMR1 5 forward X:147911936-147911964; SaCas9
tccgtttcggtttcacttccgg

SEQ ID NO: 5573 - DNA, 21 bp, Artificial Sequence
  Synthetic: FMR1 5 forward X:147911937-147911964; SaCas9
ccgtttcggtttcacttccgg

SEQ ID NO: 5574 - DNA, 20 bp, Artificial Sequence
  Synthetic: FMR1 5 forward X:147911938-147911964; SaCas9
cgtttcggtttcacttccgg

SEQ ID NO: 5575 - DNA, 19 bp, Artificial Sequence
  Synthetic: FMR1 5 forward X:147911939-147911964; SaCas9
gtttcggtttcacttccgg

SEQ ID NO: 5576 - DNA, 18 bp, Artificial Sequence
  Synthetic: FMR1 5 forward X:147911940-147911964; SaCas9
tttcggtttcacttccgg

SEQ ID NO: 5577 - DNA, 25 bp, Artificial Sequence
  Synthetic: FMR1 5 forward X:147911935-147911966; SaCas9
ctccgtttcggtttcacttccggtg

SEQ ID NO: 5578 - DNA, 24 bp, Artificial Sequence
  Synthetic: FMR1 5 forward X:147911936-147911966; SaCas9
tccgtttcggtttcacttccggtg

SEQ ID NO: 5579 - DNA, 23 bp, Artificial Sequence
  Synthetic: FMR1 5 forward X:147911937-147911966; SaCas9
ccgtttcggtttcacttccggtg

SEQ ID NO: 5580 - DNA, 22 bp, Artificial Sequence
  Synthetic: FMR1 5 forward X:147911938-147911966; SaCas9
cgtttcggtttcacttccggtg

SEQ ID NO: 5581 - DNA, 21 bp, Artificial Sequence
  Synthetic: FMR1 5 forward X:147911939-147911966; SaCas9
gtttcggtttcacttccggtg

SEQ ID NO: 5582 - DNA, 20 bp, Artificial Sequence
  Synthetic: FMR1 5 forward X:147911940-147911966; SaCas9
tttcggtttcacttccggtg

SEQ ID NO: 5583 - DNA, 19 bp, Artificial Sequence
  Synthetic: FMR1 5 forward X:147911941-147911966; SaCas9
ttcggtttcacttccggtg

SEQ ID NO: 5584 - DNA, 18 bp, Artificial Sequence
  Synthetic: FMR1 5 forward X:147911942-147911966; SaCas9
tcggtttcacttccggtg

SEQ ID NO: 5585 - DNA, 25 bp, Artificial Sequence
  Synthetic: FMR1 5 reverse X:147911940-147911971; SaCas9
aggcggccctccaccggaagtgaaa

SEQ ID NO: 5586 - DNA, 24 bp, Artificial Sequence
  Synthetic: FMR1 5 reverse X:147911941-147911971; SaCas9
ggcggccctccaccggaagtgaaa

SEQ ID NO: 5587 - DNA, 23 bp, Artificial Sequence
  Synthetic: FMR1 5 reverse X:147911942-147911971; SaCas9
gcggccctccaccggaagtgaaa

SEQ ID NO: 5588 - DNA, 22 bp, Artificial Sequence
  Synthetic: FMR1 5 reverse X:147911943-147911971; SaCas9
cggccctccaccggaagtgaaa

SEQ ID NO: 5589 - DNA, 21 bp, Artificial Sequence
  Synthetic: FMR1 5 reverse X:147911944-147911971; SaCas9
ggccctccaccggaagtgaaa

SEQ ID NO: 5590 - DNA, 20 bp, Artificial Sequence
  Synthetic: FMR1 5 reverse X:147911945-147911971; SaCas9
gccctccaccggaagtgaaa

SEQ ID NO: 5591 - DNA, 19 bp, Artificial Sequence
  Synthetic: FMR1 5 reverse X:147911946-147911971; SaCas9
ccctccaccggaagtgaaa

SEQ ID NO: 5592 - DNA, 18 bp, Artificial Sequence
  Synthetic: FMR1 5 reverse X:147911947-147911971; SaCas9
cctccaccggaagtgaaa

SEQ ID NO: 5593 - DNA, 25 bp, Artificial Sequence
  Synthetic: FMR1 5 forward X:147911946-147911977; SaCas9
tttcacttccggtggagggccgcct

SEQ ID NO: 5594 - DNA, 24 bp, Artificial Sequence
  Synthetic: FMR1 5 forward X:147911947-147911977; SaCas9
ttcacttccggtggagggccgcct

SEQ ID NO: 5595 - DNA, 23 bp, Artificial Sequence
  Synthetic: FMR1 5 forward X:147911948-147911977; SaCas9
tcacttccggtggagggccgcct

SEQ ID NO: 5596 - DNA, 22 bp, Artificial Sequence
  Synthetic: FMR1 5 forward X:147911949-147911977; SaCas9
cacttccggtggagggccgcct

SEQ ID NO: 5597 - DNA, 21 bp, Artificial Sequence
  Synthetic: FMR1 5 forward X:147911950-147911977; SaCas9
acttccggtggagggccgcct

SEQ ID NO: 5598 - DNA, 20 bp, Artificial Sequence
  Synthetic: FMR1 5 forward X:147911951-147911977; SaCas9
cttccggtggagggccgcct

SEQ ID NO: 5599 - DNA, 19 bp, Artificial Sequence
  Synthetic: FMR1 5 forward X:147911952-147911977; SaCas9
ttccggtggagggccgcct

SEQ ID NO: 5600 - DNA, 18 bp, Artificial Sequence
  Synthetic: FMR1 5 forward X:147911953-147911977; SaCas9
tccggtggagggccgcct

SEQ ID NO: 5601 - DNA, 25 bp, Artificial Sequence
  Synthetic: FMR1 5 reverse X:147911946-147911977; SaCas9
gctcagaggcggccctccaccggaa

SEQ ID NO: 5602 - DNA, 24 bp, Artificial Sequence
  Synthetic: FMR1 5 reverse X:147911947-147911977; SaCas9
ctcagaggcggccctccaccggaa

SEQ ID NO: 5603 - DNA, 23 bp, Artificial Sequence
  Synthetic: FMR1 5 reverse X:147911948-147911977; SaCas9
tcagaggcggccctccaccggaa

SEQ ID NO: 5604 - DNA, 22 bp, Artificial Sequence
  Synthetic: FMR1 5 reverse X:147911949-147911977; SaCas9
cagaggcggccctccaccggaa

SEQ ID NO: 5605 - DNA, 21 bp, Artificial Sequence
  Synthetic: FMR1 5 reverse X:147911950-147911977; SaCas9
agaggcggccctccaccggaa

SEQ ID NO: 5606 - DNA, 20 bp, Artificial Sequence
  Synthetic: FMR1 5 reverse X:147911951-147911977; SaCas9
gaggcggccctccaccggaa

SEQ ID NO: 5607 - DNA, 19 bp, Artificial Sequence
  Synthetic: FMR1 5 reverse X:147911952-147911977; SaCas9
aggcggccctccaccggaa

SEQ ID NO: 5608 - DNA, 18 bp, Artificial Sequence
  Synthetic: FMR1 5 reverse X:147911953-147911977; SaCas9
ggcggccctccaccggaa

SEQ ID NO: 5609 - DNA, 25 bp, Artificial Sequence
  Synthetic: FMR1 5 forward X:147911950-147911981; SaCas9
acttccggtggagggccgcctctga

SEQ ID NO: 5610 - DNA, 24 bp, Artificial Sequence
  Synthetic: FMR1 5 forward X:147911951-147911981; SaCas9
cttccggtggagggccgcctctga

SEQ ID NO: 5611 - DNA, 23 bp, Artificial Sequence
  Synthetic: FMR1 5 forward X:147911952-147911981; SaCas9
ttccggtggagggccgcctctga

SEQ ID NO: 5612 - DNA, 22 bp, Artificial Sequence
  Synthetic: FMR1 5 forward X:147911953-147911981; SaCas9
tccggtggagggccgcctctga

SEQ ID NO: 5613 - DNA, 21 bp, Artificial Sequence
  Synthetic: FMR1 5 forward X:147911954-147911981; SaCas9
ccggtggagggccgcctctga

SEQ ID NO: 5614 - DNA, 20 bp, Artificial Sequence
  Synthetic: FMR1 5 forward X:147911955-147911981; SaCas9
cggtggagggccgcctctga

SEQ ID NO: 5615 - DNA, 19 bp, Artificial Sequence
  Synthetic: FMR1 5 forward X:147911956-147911981; SaCas9
ggtggagggccgcctctga

SEQ ID NO: 5616 - DNA, 18 bp, Artificial Sequence
  Synthetic: FMR1 5 forward X:147911957-147911981; SaCas9
gtggagggccgcctctga

SEQ ID NO: 5617 - DNA, 25 bp, Artificial Sequence
  Synthetic: FMR1 5 reverse X:147911951-147911982; SaCas9
cgcccgctcagaggcggccctccac

SEQ ID NO: 5618 - DNA, 24 bp, Artificial Sequence
  Synthetic: FMR1 5 reverse X:147911952-147911982; SaCas9
gcccgctcagaggcggccctccac

SEQ ID NO: 5619 - DNA, 23 bp, Artificial Sequence
  Synthetic: FMR1 5 reverse X:147911953-147911982; SaCas9
cccgctcagaggcggccctccac

SEQ ID NO: 5620 - DNA, 22 bp, Artificial Sequence
  Synthetic: FMR1 5 reverse X:147911954-147911982; SaCas9
ccgctcagaggcggccctccac

SEQ ID NO: 5621 - DNA, 21 bp, Artificial Sequence
  Synthetic: FMR1 5 reverse X:147911955-147911982; SaCas9
cgctcagaggcggccctccac

SEQ ID NO: 5622 - DNA, 20 bp, Artificial Sequence
  Synthetic: FMR1 5 reverse X:147911956-147911982; SaCas9
gctcagaggcggccctccac

SEQ ID NO: 5623 - DNA, 19 bp, Artificial Sequence
  Synthetic: FMR1 5 reverse X:147911957-147911982; SaCas9
ctcagaggcggccctccac

SEQ ID NO: 5624 - DNA, 18 bp, Artificial Sequence
  Synthetic: FMR1 5 reverse X:147911958-147911982; SaCas9
tcagaggcggccctccac

SEQ ID NO: 5625 - DNA, 25 bp, Artificial Sequence
  Synthetic: FMR1 5 reverse X:147911952-147911983; SaCas9
ccgcccgctcagaggcggccctcca

SEQ ID NO: 5626 - DNA, 24 bp, Artificial Sequence
  Synthetic: FMR1 5 reverse X:147911953-147911983; SaCas9
cgcccgctcagaggcggccctcca

SEQ ID NO: 5627 - DNA, 23 bp, Artificial Sequence
  Synthetic: FMR1 5 reverse X:147911954-147911983; SaCas9
gcccgctcagaggcggccctcca

SEQ ID NO: 5628 - DNA, 22 bp, Artificial Sequence
  Synthetic: FMR1 5 reverse X:147911955-147911983; SaCas9
cccgctcagaggcggccctcca

SEQ ID NO: 5629 - DNA, 21 bp, Artificial Sequence
  Synthetic: FMR1 5 reverse X:147911956-147911983; SaCas9
ccgctcagaggcggccctcca

SEQ ID NO: 5630 - DNA, 20 bp, Artificial Sequence
  Synthetic: FMR1 5 reverse X:147911957-147911983; SaCas9
cgctcagaggcggccctcca

SEQ ID NO: 5631 - DNA, 19 bp, Artificial Sequence
  Synthetic: FMR1 5 reverse X:147911958-147911983; SaCas9
gctcagaggcggccctcca

SEQ ID NO: 5632 - DNA, 18 bp, Artificial Sequence
  Synthetic: FMR1 5 reverse X:147911959-147911983; SaCas9
ctcagaggcggccctcca

SEQ ID NO: 5633 - DNA, 25 bp, Artificial Sequence
  Synthetic: FMR1 5 forward X:147911957-147911988; SaCas9
gtggagggccgcctctgagcgggcg

SEQ ID NO: 5634 - DNA, 24 bp, Artificial Sequence
  Synthetic: FMR1 5 forward X:147911958-147911988; SaCas9
tggagggccgcctctgagcgggcg

SEQ ID NO: 5635 - DNA, 23 bp, Artificial Sequence
  Synthetic: FMR1 5 forward X:147911959-147911988; SaCas9
ggagggccgcctctgagcgggcg

SEQ ID NO: 5636 - DNA, 22 bp, Artificial Sequence
  Synthetic: FMR1 5 forward X:147911960-147911988; SaCas9
gagggccgcctctgagcgggcg

SEQ ID NO: 5637 - DNA, 21 bp, Artificial Sequence
  Synthetic: FMR1 5 forward X:147911961-147911988; SaCas9
agggccgcctctgagcgggcg

SEQ ID NO: 5638 - DNA, 20 bp, Artificial Sequence
  Synthetic: FMR1 5 forward X:147911962-147911988; SaCas9
gggccgcctctgagcgggcg

SEQ ID NO: 5639 - DNA, 19 bp, Artificial Sequence
  Synthetic: FMR1 5 forward X:147911963-147911988; SaCas9
ggccgcctctgagcgggcg

SEQ ID NO: 5640 - DNA, 18 bp, Artificial Sequence
  Synthetic: FMR1 5 forward X:147911964-147911988; SaCas9
gccgcctctgagcgggcg

SEQ ID NO: 5641 - DNA, 25 bp, Artificial Sequence
  Synthetic: FMR1 5 forward X:147911968-147911999; SaCas9
cctctgagcgggcggcgggccgacg

SEQ ID NO: 5642 - DNA, 24 bp, Artificial Sequence
  Synthetic: FMR1 5 forward X:147911969-147911999; SaCas9
ctctgagcgggcggcgggccgacg

SEQ ID NO: 5643 - DNA, 23 bp, Artificial Sequence
  Synthetic: FMR1 5 forward X:147911970-147911999; SaCas9
tctgagcgggcggcgggccgacg

SEQ ID NO: 5644 - DNA, 22 bp, Artificial Sequence
  Synthetic: FMR1 5 forward X:147911971-147911999; SaCas9
ctgagcgggcggcgggccgacg

SEQ ID NO: 5645 - DNA, 21 bp, Artificial Sequence
  Synthetic: FMR1 5 forward X:147911972-147911999; SaCas9
tgagcgggcggcgggccgacg

SEQ ID NO: 5646 - DNA, 20 bp, Artificial Sequence
  Synthetic: FMR1 5 forward X:147911973-147911999; SaCas9
gagcgggcggcgggccgacg

SEQ ID NO: 5647 - DNA, 19 bp, Artificial Sequence
  Synthetic: FMR1 5 forward X:147911974-147911999; SaCas9
agcgggcggcgggccgacg

SEQ ID NO: 5648 - DNA, 18 bp, Artificial Sequence
  Synthetic: FMR1 5 forward X:147911975-147911999; SaCas9
gcgggcggcgggccgacg

SEQ ID NO: 5649 - DNA, 25 bp, Artificial Sequence
  Synthetic: FMR1 5 reverse X:147911968-147911999; SaCas9
gctcgccgtcggcccgccgcccgct

SEQ ID NO: 5650 - DNA, 24 bp, Artificial Sequence
  Synthetic: FMR1 5 reverse X:147911969-147911999; SaCas9
ctcgccgtcggcccgccgcccgct

SEQ ID NO: 5651 - DNA, 23 bp, Artificial Sequence
  Synthetic: FMR1 5 reverse X:147911970-147911999; SaCas9
tcgccgtcggcccgccgcccgct

SEQ ID NO: 5652 - DNA, 22 bp, Artificial Sequence
  Synthetic: FMR1 5 reverse X:147911971-147911999; SaCas9
cgccgtcggcccgccgcccgct

SEQ ID NO: 5653 - DNA, 21 bp, Artificial Sequence
  Synthetic: FMR1 5 reverse X:147911972-147911999; SaCas9
gccgtcggcccgccgcccgct

SEQ ID NO: 5654 - DNA, 20 bp, Artificial Sequence
  Synthetic: FMR1 5 reverse X:147911973-147911999; SaCas9
ccgtcggcccgccgcccgct

SEQ ID NO: 5655 - DNA, 19 bp, Artificial Sequence
  Synthetic: FMR1 5 reverse X:147911974-147911999; SaCas9
cgtcggcccgccgcccgct

SEQ ID NO: 5656 - DNA, 18 bp, Artificial Sequence
  Synthetic: FMR1 5 reverse X:147911975-147911999; SaCas9
gtcggcccgccgcccgct

SEQ ID NO: 5657 - DNA, 25 bp, Artificial Sequence
  Synthetic: FMR1 5 forward X:147911974-147912005; SaCas9
agcgggcggcgggccgacggcgagc

SEQ ID NO: 5658 - DNA, 24 bp, Artificial Sequence
  Synthetic: FMR1 5 forward X:147911975-147912005; SaCas9
gcgggcggcgggccgacggcgagc

SEQ ID NO: 5659 - DNA, 23 bp, Artificial Sequence
  Synthetic: FMR1 5 forward X:147911976-147912005; SaCas9
cgggcggcgggccgacggcgagc

SEQ ID NO: 5660 - DNA, 22 bp, Artificial Sequence
  Synthetic: FMR1 5 forward X:147911977-147912005; SaCas9
gggcggcgggccgacggcgagc

SEQ ID NO: 5661 - DNA, 21 bp, Artificial Sequence
  Synthetic: FMR1 5 forward X:147911978-147912005; SaCas9
ggcggcgggccgacggcgagc

SEQ ID NO: 5662 - DNA, 20 bp, Artificial Sequence
  Synthetic: FMR1 5 forward X:147911979-147912005; SaCas9
gcggcgggccgacggcgagc

SEQ ID NO: 5663 - DNA, 19 bp, Artificial Sequence
  Synthetic: FMR1 5 forward X:147911980-147912005; SaCas9
cggcgggccgacggcgagc

SEQ ID NO: 5664 - DNA, 18 bp, Artificial Sequence
  Synthetic: FMR1 5 forward X:147911981-147912005; SaCas9
ggcgggccgacggcgagc

SEQ ID NO: 5665 - DNA, 25 bp, Artificial Sequence
  Synthetic: FMR1 5 forward X:147911990-147912021; SaCas9
acggcgagcgcgggcggcggcggtg

SEQ ID NO: 5666 - DNA, 24 bp, Artificial Sequence
  Synthetic: FMR1 5 forward X:147911991-147912021; SaCas9
cggcgagcgcgggcggcggcggtg

SEQ ID NO: 5667 - DNA, 23 bp, Artificial Sequence
  Synthetic: FMR1 5 forward X:147911992-147912021; SaCas9
ggcgagcgcgggcggcggcggtg

SEQ ID NO: 5668 - DNA, 22 bp, Artificial Sequence
  Synthetic: FMR1 5 forward X:147911993-147912021; SaCas9
gcgagcgcgggcggcggcggtg

SEQ ID NO: 5669 - DNA, 21 bp, Artificial Sequence
  Synthetic: FMR1 5 forward X:147911994-147912021; SaCas9
cgagcgcgggcggcggcggtg

SEQ ID NO: 5670 - DNA, 20 bp, Artificial Sequence
  Synthetic: FMR1 5 forward X:147911995-147912021; SaCas9
gagcgcgggcggcggcggtg

SEQ ID NO: 5671 - DNA, 19 bp, Artificial Sequence
  Synthetic: FMR1 5 forward X:147911996-147912021; SaCas9
agcgcgggcggcggcggtg

SEQ ID NO: 5672 - DNA, 18 bp, Artificial Sequence
  Synthetic: FMR1 5 forward X:147911997-147912021; SaCas9
gcgcgggcggcggcggtg

SEQ ID NO: 5673 - DNA, 25 bp, Artificial Sequence
  Synthetic: FMR1 5 forward X:147911991-147912022; SaCas9
cggcgagcgcgggcggcggcggtga

SEQ ID NO: 5674 - DNA, 24 bp, Artificial Sequence
  Synthetic: FMR1 5 forward X:147911992-147912022; SaCas9
ggcgagcgcgggcggcggcggtga

SEQ ID NO: 5675 - DNA, 23 bp, Artificial Sequence
  Synthetic: FMR1 5 forward X:147911993-147912022; SaCas9
gcgagcgcgggcggcggcggtga

SEQ ID NO: 5676 - DNA, 22 bp, Artificial Sequence
  Synthetic: FMR1 5 forward X:147911994-147912022; SaCas9
cgagcgcgggcggcggcggtga

SEQ ID NO: 5677 - DNA, 21 bp, Artificial Sequence
  Synthetic: FMR1 5 forward X:147911995-147912022; SaCas9
gagcgcgggcggcggcggtga

SEQ ID NO: 5678 - DNA, 20 bp, Artificial Sequence
  Synthetic: FMR1 5 forward X:147911996-147912022; SaCas9
agcgcgggcggcggcggtga

SEQ ID NO: 5679 - DNA, 19 bp, Artificial Sequence
  Synthetic: FMR1 5 forward X:147911997-147912022; SaCas9
gcgcgggcggcggcggtga

SEQ ID NO: 5680 - DNA, 18 bp, Artificial Sequence
  Synthetic: FMR1 5 forward X:147911998-147912022; SaCas9
cgcgggcggcggcggtga

SEQ ID NO: 5681 - DNA, 25 bp, Artificial Sequence
  Synthetic: FMR1 5 forward X:147912006-147912037; SaCas9
gcggcggtgacggaggcgccgctgc

SEQ ID NO: 5682 - DNA, 24 bp, Artificial Sequence
  Synthetic: FMR1 5 forward X:147912007-147912037; SaCas9
cggcggtgacggaggcgccgctgc

SEQ ID NO: 5683 - DNA, 23 bp, Artificial Sequence
  Synthetic: FMR1 5 forward X:147912008-147912037; SaCas9
ggcggtgacggaggcgccgctgc

SEQ ID NO: 5684 - DNA, 22 bp, Artificial Sequence
  Synthetic: FMR1 5 forward X:147912009-147912037; SaCas9
gcggtgacggaggcgccgctgc

SEQ ID NO: 5685 - DNA, 21 bp, Artificial Sequence
  Synthetic: FMR1 5 forward X:147912010-147912037; SaCas9
cggtgacggaggcgccgctgc

SEQ ID NO: 5686 - DNA, 20 bp, Artificial Sequence
  Synthetic: FMR1 5 forward X:147912011-147912037; SaCas9
ggtgacggaggcgccgctgc

SEQ ID NO: 5687 - DNA, 19 bp, Artificial Sequence
  Synthetic: FMR1 5 forward X:147912012-147912037; SaCas9
gtgacggaggcgccgctgc

SEQ ID NO: 5688 - DNA, 18 bp, Artificial Sequence
  Synthetic: FMR1 5 forward X:147912013-147912037; SaCas9
tgacggaggcgccgctgc

SEQ ID NO: 5689 - DNA, 25 bp, Artificial Sequence
  Synthetic: FMR1 5 forward X:147912007-147912038; SaCas9
cggcggtgacggaggcgccgctgcc

SEQ ID NO: 5690 - DNA, 24 bp, Artificial Sequence
  Synthetic: FMR1 5 forward X:147912008-147912038; SaCas9
ggcggtgacggaggcgccgctgcc

SEQ ID NO: 5691 - DNA, 23 bp, Artificial Sequence
  Synthetic: FMR1 5 forward X:147912009-147912038; SaCas9
gcggtgacggaggcgccgctgcc

SEQ ID NO: 5692 - DNA, 22 bp, Artificial Sequence
  Synthetic: FMR1 5 forward X:147912010-147912038; SaCas9
cggtgacggaggcgccgctgcc

SEQ ID NO: 5693 - DNA, 21 bp, Artificial Sequence
  Synthetic: FMR1 5 forward X:147912011-147912038; SaCas9
ggtgacggaggcgccgctgcc

SEQ ID NO: 5694 - DNA, 20 bp, Artificial Sequence
  Synthetic: FMR1 5 forward X:147912012-147912038; SaCas9
gtgacggaggcgccgctgcc

SEQ ID NO: 5695 - DNA, 19 bp, Artificial Sequence
  Synthetic: FMR1 5 forward X:147912013-147912038; SaCas9
tgacggaggcgccgctgcc

SEQ ID NO: 5696 - DNA, 18 bp, Artificial Sequence
  Synthetic: FMR1 5 forward X:147912014-147912038; SaCas9
gacggaggcgccgctgcc

SEQ ID NO: 5697 - DNA, 25 bp, Artificial Sequence
  Synthetic: FMR1 5 forward X:147912008-147912039; SaCas9
ggcggtgacggaggcgccgctgcca

SEQ ID NO: 5698 - DNA, 24 bp, Artificial Sequence
  Synthetic: FMR1 5 forward X:147912009-147912039; SaCas9
gcggtgacggaggcgccgctgcca

SEQ ID NO: 5699 - DNA, 23 bp, Artificial Sequence
  Synthetic: FMR1 5 forward X:147912010-147912039; SaCas9
cggtgacggaggcgccgctgcca

SEQ ID NO: 5700 - DNA, 22 bp, Artificial Sequence
  Synthetic: FMR1 5 forward X:147912011-147912039; SaCas9
ggtgacggaggcgccgctgcca

SEQ ID NO: 5701 - DNA, 21 bp, Artificial Sequence
  Synthetic: FMR1 5 forward X:147912012-147912039; SaCas9
gtgacggaggcgccgctgcca

SEQ ID NO: 5702 - DNA, 20 bp, Artificial Sequence
  Synthetic: FMR1 5 forward X:147912013-147912039; SaCas9
tgacggaggcgccgctgcca

SEQ ID NO: 5703 - DNA, 19 bp, Artificial Sequence
  Synthetic: FMR1 5 forward X:147912014-147912039; SaCas9
gacggaggcgccgctgcca

SEQ ID NO: 5704 - DNA, 18 bp, Artificial Sequence
  Synthetic: FMR1 5 forward X:147912015-147912039; SaCas9
acggaggcgccgctgcca

SEQ ID NO: 5705 - DNA, 25 bp, Artificial Sequence
  Synthetic: FMR1 5 forward X:147911930-147911958; SpCas9
ctcagctccgtttcggtttcacttc

SEQ ID NO: 5706 - DNA, 24 bp, Artificial Sequence
  Synthetic: FMR1 5 forward X:147911931-147911958; SpCas9
tcagctccgtttcggtttcacttc

SEQ ID NO: 5707 - DNA, 23 bp, Artificial Sequence
  Synthetic: FMR1 5 forward X:147911932-147911958; SpCas9
cagctccgtttcggtttcacttc

SEQ ID NO: 5708 - DNA, 22 bp, Artificial Sequence
  Synthetic: FMR1 5 forward X:147911933-147911958; SpCas9
agctccgtttcggtttcacttc

SEQ ID NO: 5709 - DNA, 21 bp, Artificial Sequence
  Synthetic: FMR1 5 forward X:147911934-147911958; SpCas9
gctccgtttcggtttcacttc

SEQ ID NO: 5710 - DNA, 20 bp, Artificial Sequence
  Synthetic: FMR1 5 forward X:147911935-147911958; SpCas9
ctccgtttcggtttcacttc

SEQ ID NO: 5711 - DNA, 19 bp, Artificial Sequence
  Synthetic: FMR1 5 forward X:147911936-147911958; SpCas9
tccgtttcggtttcacttc

SEQ ID NO: 5712 - DNA, 18 bp, Artificial Sequence
  Synthetic: FMR1 5 forward X:147911937-147911958; SpCas9
ccgtttcggtttcacttc

SEQ ID NO: 5713 - DNA, 25 bp, Artificial Sequence
  Synthetic: FMR1 5 forward X:147911933-147911961; SpCas9
agctccgtttcggtttcacttccgg

SEQ ID NO: 5714 - DNA, 24 bp, Artificial Sequence
  Synthetic: FMR1 5 forward X:147911934-147911961; SpCas9
gctccgtttcggtttcacttccgg

SEQ ID NO: 5715 - DNA, 23 bp, Artificial Sequence
  Synthetic: FMR1 5 forward X:147911935-147911961; SpCas9
ctccgtttcggtttcacttccgg

SEQ ID NO: 5716 - DNA, 22 bp, Artificial Sequence
  Synthetic: FMR1 5 forward X:147911936-147911961; SpCas9
tccgtttcggtttcacttccgg

SEQ ID NO: 5717 - DNA, 21 bp, Artificial Sequence
  Synthetic: FMR1 5 forward X:147911937-147911961; SpCas9
ccgtttcggtttcacttccgg

SEQ ID NO: 5718 - DNA, 20 bp, Artificial Sequence
  Synthetic: FMR1 5 forward X:147911938-147911961; SpCas9
cgtttcggtttcacttccgg

SEQ ID NO: 5719 - DNA, 19 bp, Artificial Sequence
  Synthetic: FMR1 5 forward X:147911939-147911961; SpCas9
gtttcggtttcacttccgg

SEQ ID NO: 5720 - DNA, 18 bp, Artificial Sequence
  Synthetic: FMR1 5 forward X:147911940-147911961; SpCas9
tttcggtttcacttccgg

SEQ ID NO: 5721 - DNA, 25 bp, Artificial Sequence
  Synthetic: FMR1 5 forward X:147911935-147911963; SpCas9
ctccgtttcggtttcacttccggtg

SEQ ID NO: 5722 - DNA, 24 bp, Artificial Sequence
  Synthetic: FMR1 5 forward X:147911936-147911963; SpCas9
tccgtttcggtttcacttccggtg

SEQ ID NO: 5723 - DNA, 23 bp, Artificial Sequence
  Synthetic: FMR1 5 forward X:147911937-147911963; SpCas9
ccgtttcggtttcacttccggtg

SEQ ID NO: 5724 - DNA, 22 bp, Artificial Sequence
  Synthetic: FMR1 5 forward X:147911938-147911963; SpCas9
cgtttcggtttcacttccggtg

SEQ ID NO: 5725 - DNA, 21 bp, Artificial Sequence
  Synthetic: FMR1 5 forward X:147911939-147911963; SpCas9
gtttcggtttcacttccggtg

SEQ ID NO: 5726 - DNA, 20 bp, Artificial Sequence
  Synthetic: FMR1 5 forward X:147911940-147911963; SpCas9
tttcggtttcacttccggtg

SEQ ID NO: 5727 - DNA, 19 bp, Artificial Sequence
  Synthetic: FMR1 5 forward X:147911941-147911963; SpCas9
ttcggtttcacttccggtg

SEQ ID NO: 5728 - DNA, 18 bp, Artificial Sequence
  Synthetic: FMR1 5 forward X:147911942-147911963; SpCas9
tcggtttcacttccggtg

SEQ ID NO: 5729 - DNA, 25 bp, Artificial Sequence
  Synthetic: FMR1 5 forward X:147911936-147911964; SpCas9
tccgtttcggtttcacttccggtgg

SEQ ID NO: 5730 - DNA, 24 bp, Artificial Sequence
  Synthetic: FMR1 5 forward X:147911937-147911964; SpCas9
ccgtttcggtttcacttccggtgg

SEQ ID NO: 5731 - DNA, 23 bp, Artificial Sequence
  Synthetic: FMR1 5 forward X:147911938-147911964; SpCas9
cgtttcggtttcacttccggtgg

SEQ ID NO: 5732 - DNA, 22 bp, Artificial Sequence
  Synthetic: FMR1 5 forward X:147911939-147911964; SpCas9
gtttcggtttcacttccggtgg

SEQ ID NO: 5733 - DNA, 21 bp, Artificial Sequence
  Synthetic: FMR1 5 forward X:147911940-147911964; SpCas9
tttcggtttcacttccggtgg

SEQ ID NO: 5734 - DNA, 20 bp, Artificial Sequence
  Synthetic: FMR1 5 forward X:147911941-147911964; SpCas9
ttcggtttcacttccggtgg

SEQ ID NO: 5735 - DNA, 19 bp, Artificial Sequence
  Synthetic: FMR1 5 forward X:147911942-147911964; SpCas9
tcggtttcacttccggtgg

SEQ ID NO: 5736 - DNA, 18 bp, Artificial Sequence
  Synthetic: FMR1 5 forward X:147911943-147911964; SpCas9
cggtttcacttccggtgg

SEQ ID NO: 5737 - DNA, 25 bp, Artificial Sequence
  Synthetic: FMR1 5 forward X:147911937-147911965; SpCas9
ccgtttcggtttcacttccggtgga

SEQ ID NO: 5738 - DNA, 24 bp, Artificial Sequence
  Synthetic: FMR1 5 forward X:147911938-147911965; SpCas9
cgtttcggtttcacttccggtgga

SEQ ID NO: 5739 - DNA, 23 bp, Artificial Sequence
  Synthetic: FMR1 5 forward X:147911939-147911965; SpCas9
gtttcggtttcacttccggtgga

SEQ ID NO: 5740 - DNA, 22 bp, Artificial Sequence
  Synthetic: FMR1 5 forward X:147911940-147911965; SpCas9
tttcggtttcacttccggtgga

SEQ ID NO: 5741 - DNA, 21 bp, Artificial Sequence
  Synthetic: FMR1 5 forward X:147911941-147911965; SpCas9
ttcggtttcacttccggtgga

SEQ ID NO: 5742 - DNA, 20 bp, Artificial Sequence
  Synthetic: FMR1 5 forward X:147911942-147911965; SpCas9
tcggtttcacttccggtgga

SEQ ID NO: 5743 - DNA, 19 bp, Artificial Sequence
  Synthetic: FMR1 5 forward X:147911943-147911965; SpCas9
cggtttcacttccggtgga

SEQ ID NO: 5744 - DNA, 18 bp, Artificial Sequence
  Synthetic: FMR1 5 forward X:147911944-147911965; SpCas9
ggtttcacttccggtgga

SEQ ID NO: 5745 - DNA, 25 bp, Artificial Sequence
  Synthetic: FMR1 5 forward X:147911948-147911976; SpCas9
tcacttccggtggagggccgcctct

SEQ ID NO: 5746 - DNA, 24 bp, Artificial Sequence
  Synthetic: FMR1 5 forward X:147911949-147911976; SpCas9
cacttccggtggagggccgcctct

SEQ ID NO: 5747 - DNA, 23 bp, Artificial Sequence
  Synthetic: FMR1 5 forward X:147911950-147911976; SpCas9
acttccggtggagggccgcctct

SEQ ID NO: 5748 - DNA, 22 bp, Artificial Sequence
  Synthetic: FMR1 5 forward X:147911951-147911976; SpCas9
cttccggtggagggccgcctct

SEQ ID NO: 5749 - DNA, 21 bp, Artificial Sequence
  Synthetic: FMR1 5 forward X:147911952-147911976; SpCas9
ttccggtggagggccgcctct

SEQ ID NO: 5750 - DNA, 20 bp, Artificial Sequence
  Synthetic: FMR1 5 forward X:147911953-147911976; SpCas9
tccggtggagggccgcctct

SEQ ID NO: 5751 - DNA, 19 bp, Artificial Sequence
  Synthetic: FMR1 5 forward X:147911954-147911976; SpCas9
ccggtggagggccgcctct

SEQ ID NO: 5752 - DNA, 18 bp, Artificial Sequence
  Synthetic: FMR1 5 forward X:147911955-147911976; SpCas9
cggtggagggccgcctct

SEQ ID NO: 5753 - DNA, 25 bp, Artificial Sequence
  Synthetic: FMR1 5 forward X:147911951-147911979; SpCas9
cttccggtggagggccgcctctgag

SEQ ID NO: 5754 - DNA, 24 bp, Artificial Sequence
  Synthetic: FMR1 5 forward X:147911952-147911979; SpCas9
ttccggtggagggccgcctctgag

SEQ ID NO: 5755 - DNA, 23 bp, Artificial Sequence
  Synthetic: FMR1 5 forward X:147911953-147911979; SpCas9
tccggtggagggccgcctctgag

SEQ ID NO: 5756 - DNA, 22 bp, Artificial Sequence
  Synthetic: FMR1 5 forward X:147911954-147911979; SpCas9
ccggtggagggccgcctctgag

SEQ ID NO: 5757 - DNA, 21 bp, Artificial Sequence
  Synthetic: FMR1 5 forward X:147911955-147911979; SpCas9
cggtggagggccgcctctgag

SEQ ID NO: 5758 - DNA, 20 bp, Artificial Sequence
  Synthetic: FMR1 5 forward X:147911956-147911979; SpCas9
ggtggagggccgcctctgag

SEQ ID NO: 5759 - DNA, 19 bp, Artificial Sequence
  Synthetic: FMR1 5 forward X:147911957-147911979; SpCas9
gtggagggccgcctctgag

SEQ ID NO: 5760 - DNA, 18 bp, Artificial Sequence
  Synthetic: FMR1 5 forward X:147911958-147911979; SpCas9
tggagggccgcctctgag

SEQ ID NO: 5761 - DNA, 25 bp, Artificial Sequence
  Synthetic: FMR1 5 reverse X:147911951-147911979; SpCas9
ccgctcagaggcggccctccaccgg

SEQ ID NO: 5762 - DNA, 24 bp, Artificial Sequence
  Synthetic: FMR1 5 reverse X:147911952-147911979; SpCas9
cgctcagaggcggccctccaccgg

SEQ ID NO: 5763 - DNA, 23 bp, Artificial Sequence
  Synthetic: FMR1 5 reverse X:147911953-147911979; SpCas9
gctcagaggcggccctccaccgg

SEQ ID NO: 5764 - DNA, 22 bp, Artificial Sequence
  Synthetic: FMR1 5 reverse X:147911954-147911979; SpCas9
ctcagaggcggccctccaccgg

SEQ ID NO: 5765 - DNA, 21 bp, Artificial Sequence
  Synthetic: FMR1 5 reverse X:147911955-147911979; SpCas9
tcagaggcggccctccaccgg

SEQ ID NO: 5766 - DNA, 20 bp, Artificial Sequence
  Synthetic: FMR1 5 reverse X:147911956-147911979; SpCas9
cagaggcggccctccaccgg

SEQ ID NO: 5767 - DNA, 19 bp, Artificial Sequence
  Synthetic: FMR1 5 reverse X:147911957-147911979; SpCas9
agaggcggccctccaccgg

SEQ ID NO: 5768 - DNA, 18 bp, Artificial Sequence
  Synthetic: FMR1 5 reverse X:147911958-147911979; SpCas9
gaggcggccctccaccgg

SEQ ID NO: 5769 - DNA, 25 bp, Artificial Sequence
  Synthetic: FMR1 5 forward X:147911952-147911980; SpCas9
ttccggtggagggccgcctctgagc

SEQ ID NO: 5770 - DNA, 24 bp, Artificial Sequence
  Synthetic: FMR1 5 forward X:147911953-147911980; SpCas9
tccggtggagggccgcctctgagc

SEQ ID NO: 5771 - DNA, 23 bp, Artificial Sequence
  Synthetic: FMR1 5 forward X:147911954-147911980; SpCas9
ccggtggagggccgcctctgagc

SEQ ID NO: 5772 - DNA, 22 bp, Artificial Sequence
  Synthetic: FMR1 5 forward X:147911955-147911980; SpCas9
cggtggagggccgcctctgagc

SEQ ID NO: 5773 - DNA, 21 bp, Artificial Sequence
  Synthetic: FMR1 5 forward X:147911956-147911980; SpCas9
ggtggagggccgcctctgagc

SEQ ID NO: 5774 - DNA, 20 bp, Artificial Sequence
  Synthetic: FMR1 5 forward X:147911957-147911980; SpCas9
gtggagggccgcctctgagc

SEQ ID NO: 5775 - DNA, 19 bp, Artificial Sequence
  Synthetic: FMR1 5 forward X:147911958-147911980; SpCas9
tggagggccgcctctgagc

SEQ ID NO: 5776 - DNA, 18 bp, Artificial Sequence
  Synthetic: FMR1 5 forward X:147911959-147911980; SpCas9
ggagggccgcctctgagc

SEQ ID NO: 5777 - DNA, 25 bp, Artificial Sequence
  Synthetic: FMR1 5 reverse X:147911954-147911982; SpCas9
cgcccgctcagaggcggccctccac

SEQ ID NO: 5778 - DNA, 24 bp, Artificial Sequence
  Synthetic: FMR1 5 reverse X:147911955-147911982; SpCas9
gcccgctcagaggcggccctccac

SEQ ID NO: 5779 - DNA, 23 bp, Artificial Sequence
  Synthetic: FMR1 5 reverse X:147911956-147911982; SpCas9
cccgctcagaggcggccctccac

SEQ ID NO: 5780 - DNA, 22 bp, Artificial Sequence
  Synthetic: FMR1 5 reverse X:147911957-147911982; SpCas9
ccgctcagaggcggccctccac

SEQ ID NO: 5781 - DNA, 21 bp, Artificial Sequence
  Synthetic: FMR1 5 reverse X:147911958-147911982; SpCas9
cgctcagaggcggccctccac

SEQ ID NO: 5782 - DNA, 20 bp, Artificial Sequence
  Synthetic: FMR1 5 reverse X:147911959-147911982; SpCas9
gctcagaggcggccctccac

SEQ ID NO: 5783 - DNA, 19 bp, Artificial Sequence
  Synthetic: FMR1 5 reverse X:147911960-147911982; SpCas9
ctcagaggcggccctccac

SEQ ID NO: 5784 - DNA, 18 bp, Artificial Sequence
  Synthetic: FMR1 5 reverse X:147911961-147911982; SpCas9
tcagaggcggccctccac

SEQ ID NO: 5785 - DNA, 25 bp, Artificial Sequence
  Synthetic: FMR1 5 forward X:147911955-147911983; SpCas9
cggtggagggccgcctctgagcggg

SEQ ID NO: 5786 - DNA, 24 bp, Artificial Sequence
  Synthetic: FMR1 5 forward X:147911956-147911983; SpCas9
ggtggagggccgcctctgagcggg

SEQ ID NO: 5787 - DNA, 23 bp, Artificial Sequence
  Synthetic: FMR1 5 forward X:147911957-147911983; SpCas9
gtggagggccgcctctgagcggg

SEQ ID NO: 5788 - DNA, 22 bp, Artificial Sequence
  Synthetic: FMR1 5 forward X:147911958-147911983; SpCas9
tggagggccgcctctgagcggg

SEQ ID NO: 5789 - DNA, 21 bp, Artificial Sequence
  Synthetic: FMR1 5 forward X:147911959-147911983; SpCas9
ggagggccgcctctgagcggg

SEQ ID NO: 5790 - DNA, 20 bp, Artificial Sequence
  Synthetic: FMR1 5 forward X:147911960-147911983; SpCas9
gagggccgcctctgagcggg

SEQ ID NO: 5791 - DNA, 19 bp, Artificial Sequence
  Synthetic: FMR1 5 forward X:147911961-147911983; SpCas9
agggccgcctctgagcggg

SEQ ID NO: 5792 - DNA, 18 bp, Artificial Sequence
  Synthetic: FMR1 5 forward X:147911962-147911983; SpCas9
gggccgcctctgagcggg

SEQ ID NO: 5793 - DNA, 25 bp, Artificial Sequence
  Synthetic: FMR1 5 forward X:147911958-147911986; SpCas9
tggagggccgcctctgagcgggcgg

SEQ ID NO: 5794 - DNA, 24 bp, Artificial Sequence
  Synthetic: FMR1 5 forward X:147911959-147911986; SpCas9
ggagggccgcctctgagcgggcgg

SEQ ID NO: 5795 - DNA, 23 bp, Artificial Sequence
  Synthetic: FMR1 5 forward X:147911960-147911986; SpCas9
gagggccgcctctgagcgggcgg

SEQ ID NO: 5796 - DNA, 22 bp, Artificial Sequence
  Synthetic: FMR1 5 forward X:147911961-147911986; SpCas9
agggccgcctctgagcgggcgg

SEQ ID NO: 5797 - DNA, 21 bp, Artificial Sequence
  Synthetic: FMR1 5 forward X:147911962-147911986; SpCas9
gggccgcctctgagcgggcgg

SEQ ID NO: 5798 - DNA, 20 bp, Artificial Sequence
  Synthetic: FMR1 5 forward X:147911963-147911986; SpCas9
ggccgcctctgagcgggcgg

SEQ ID NO: 5799 - DNA, 19 bp, Artificial Sequence
  Synthetic: FMR1 5 forward X:147911964-147911986; SpCas9
gccgcctctgagcgggcgg

SEQ ID NO: 5800 - DNA, 18 bp, Artificial Sequence
  Synthetic: FMR1 5 forward X:147911965-147911986; SpCas9
ccgcctctgagcgggcgg

SEQ ID NO: 5801 - DNA, 25 bp, Artificial Sequence
  Synthetic: FMR1 5 forward X:147911959-147911987; SpCas9
ggagggccgcctctgagcgggcggc

SEQ ID NO: 5802 - DNA, 24 bp, Artificial Sequence
  Synthetic: FMR1 5 forward X:147911960-147911987; SpCas9
gagggccgcctctgagcgggcggc

SEQ ID NO: 5803 - DNA, 23 bp, Artificial Sequence
  Synthetic: FMR1 5 forward X:147911961-147911987; SpCas9
agggccgcctctgagcgggcggc

SEQ ID NO: 5804 - DNA, 22 bp, Artificial Sequence
  Synthetic: FMR1 5 forward X:147911962-147911987; SpCas9
gggccgcctctgagcgggcggc

SEQ ID NO: 5805 - DNA, 21 bp, Artificial Sequence
  Synthetic: FMR1 5 forward X:147911963-147911987; SpCas9
ggccgcctctgagcgggcggc

SEQ ID NO: 5806 - DNA, 20 bp, Artificial Sequence
  Synthetic: FMR1 5 forward X:147911964-147911987; SpCas9
gccgcctctgagcgggcggc

SEQ ID NO: 5807 - DNA, 19 bp, Artificial Sequence
  Synthetic: FMR1 5 forward X:147911965-147911987; SpCas9
ccgcctctgagcgggcggc

SEQ ID NO: 5808 - DNA, 18 bp, Artificial Sequence
  Synthetic: FMR1 5 forward X:147911966-147911987; SpCas9
cgcctctgagcgggcggc

SEQ ID NO: 5809 - DNA, 25 bp, Artificial Sequence
  Synthetic: FMR1 5 reverse X:147911965-147911993; SpCas9
cgtcggcccgccgcccgctcagagg

SEQ ID NO: 5810 - DNA, 24 bp, Artificial Sequence
  Synthetic: FMR1 5 reverse X:147911966-147911993; SpCas9
gtcggcccgccgcccgctcagagg

SEQ ID NO: 5811 - DNA, 23 bp, Artificial Sequence
  Synthetic: FMR1 5 reverse X:147911967-147911993; SpCas9
tcggcccgccgcccgctcagagg

SEQ ID NO: 5812 - DNA, 22 bp, Artificial Sequence
  Synthetic: FMR1 5 reverse X:147911968-147911993; SpCas9
cggcccgccgcccgctcagagg

SEQ ID NO: 5813 - DNA, 21 bp, Artificial Sequence
  Synthetic: FMR1 5 reverse X:147911969-147911993; SpCas9
ggcccgccgcccgctcagagg

SEQ ID NO: 5814 - DNA, 20 bp, Artificial Sequence
  Synthetic: FMR1 5 reverse X:147911970-147911993; SpCas9
gcccgccgcccgctcagagg

SEQ ID NO: 5815 - DNA, 19 bp, Artificial Sequence
  Synthetic: FMR1 5 reverse X:147911971-147911993; SpCas9
cccgccgcccgctcagagg

SEQ ID NO: 5816 - DNA, 18 bp, Artificial Sequence
  Synthetic: FMR1 5 reverse X:147911972-147911993; SpCas9
ccgccgcccgctcagagg

SEQ ID NO: 5817 - DNA, 25 bp, Artificial Sequence
  Synthetic: FMR1 5 forward X:147911966-147911994; SpCas9
cgcctctgagcgggcggcgggccga

SEQ ID NO: 5818 - DNA, 24 bp, Artificial Sequence
  Synthetic: FMR1 5 forward X:147911967-147911994; SpCas9
gcctctgagcgggcggcgggccga

SEQ ID NO: 5819 - DNA, 23 bp, Artificial Sequence
  Synthetic: FMR1 5 forward X:147911968-147911994; SpCas9
cctctgagcgggcggcgggccga

SEQ ID NO: 5820 - DNA, 22 bp, Artificial Sequence
  Synthetic: FMR1 5 forward X:147911969-147911994; SpCas9
ctctgagcgggcggcgggccga

SEQ ID NO: 5821 - DNA, 21 bp, Artificial Sequence
  Synthetic: FMR1 5 forward X:147911970-147911994; SpCas9
tctgagcgggcggcgggccga

SEQ ID NO: 5822 - DNA, 20 bp, Artificial Sequence
  Synthetic: FMR1 5 forward X:147911971-147911994; SpCas9
ctgagcgggcggcgggccga

SEQ ID NO: 5823 - DNA, 19 bp, Artificial Sequence
  Synthetic: FMR1 5 forward X:147911972-147911994; SpCas9
tgagcgggcggcgggccga

SEQ ID NO: 5824 - DNA, 18 bp, Artificial Sequence
  Synthetic: FMR1 5 forward X:147911973-147911994; SpCas9
gagcgggcggcgggccga

SEQ ID NO: 5825 - DNA, 25 bp, Artificial Sequence
  Synthetic: FMR1 5 reverse X:147911968-147911996; SpCas9
cgccgtcggcccgccgcccgctcag

SEQ ID NO: 5826 - DNA, 24 bp, Artificial Sequence
  Synthetic: FMR1 5 reverse X:147911969-147911996; SpCas9
gccgtcggcccgccgcccgctcag

SEQ ID NO: 5827 - DNA, 23 bp, Artificial Sequence
  Synthetic: FMR1 5 reverse X:147911970-147911996; SpCas9
ccgtcggcccgccgcccgctcag

SEQ ID NO: 5828 - DNA, 22 bp, Artificial Sequence
  Synthetic: FMR1 5 reverse X:147911971-147911996; SpCas9
cgtcggcccgccgcccgctcag

SEQ ID NO: 5829 - DNA, 21 bp, Artificial Sequence
  Synthetic: FMR1 5 reverse X:147911972-147911996; SpCas9
gtcggcccgccgcccgctcag

SEQ ID NO: 5830 - DNA, 20 bp, Artificial Sequence
  Synthetic: FMR1 5 reverse X:147911973-147911996; SpCas9
tcggcccgccgcccgctcag

SEQ ID NO: 5831 - DNA, 19 bp, Artificial Sequence
  Synthetic: FMR1 5 reverse X:147911974-147911996; SpCas9
cggcccgccgcccgctcag

SEQ ID NO: 5832 - DNA, 18 bp, Artificial Sequence
  Synthetic: FMR1 5 reverse X:147911975-147911996; SpCas9
ggcccgccgcccgctcag

SEQ ID NO: 5833 - DNA, 25 bp, Artificial Sequence
  Synthetic: FMR1 5 reverse X:147911969-147911997; SpCas9
tcgccgtcggcccgccgcccgctca

SEQ ID NO: 5834 - DNA, 24 bp, Artificial Sequence
  Synthetic: FMR1 5 reverse X:147911970-147911997; SpCas9
cgccgtcggcccgccgcccgctca

SEQ ID NO: 5835 - DNA, 23 bp, Artificial Sequence
  Synthetic: FMR1 5 reverse X:147911971-147911997; SpCas9
gccgtcggcccgccgcccgctca

SEQ ID NO: 5836 - DNA, 22 bp, Artificial Sequence
  Synthetic: FMR1 5 reverse X:147911972-147911997; SpCas9
ccgtcggcccgccgcccgctca

SEQ ID NO: 5837 - DNA, 21 bp, Artificial Sequence
  Synthetic: FMR1 5 reverse X:147911973-147911997; SpCas9
cgtcggcccgccgcccgctca

SEQ ID NO: 5838 - DNA, 20 bp, Artificial Sequence
  Synthetic: FMR1 5 reverse X:147911974-147911997; SpCas9
gtcggcccgccgcccgctca

SEQ ID NO: 5839 - DNA, 19 bp, Artificial Sequence
  Synthetic: FMR1 5 reverse X:147911975-147911997; SpCas9
tcggcccgccgcccgctca

SEQ ID NO: 5840 - DNA, 18 bp, Artificial Sequence
  Synthetic: FMR1 5 reverse X:147911976-147911997; SpCas9
cggcccgccgcccgctca

SEQ ID NO: 5841 - DNA, 25 bp, Artificial Sequence
  Synthetic: FMR1 5 forward X:147911970-147911998; SpCas9
tctgagcgggcggcgggccgacggc

SEQ ID NO: 5842 - DNA, 24 bp, Artificial Sequence
  Synthetic: FMR1 5 forward X:147911971-147911998; SpCas9
ctgagcgggcggcgggccgacggc

SEQ ID NO: 5843 - DNA, 23 bp, Artificial Sequence
  Synthetic: FMR1 5 forward X:147911972-147911998; SpCas9
tgagcgggcggcgggccgacggc

SEQ ID NO: 5844 - DNA, 22 bp, Artificial Sequence
  Synthetic: FMR1 5 forward X:147911973-147911998; SpCas9
gagcgggcggcgggccgacggc

SEQ ID NO: 5845 - DNA, 21 bp, Artificial Sequence
  Synthetic: FMR1 5 forward X:147911974-147911998; SpCas9
agcgggcggcgggccgacggc

SEQ ID NO: 5846 - DNA, 20 bp, Artificial Sequence
  Synthetic: FMR1 5 forward X:147911975-147911998; SpCas9
gcgggcggcgggccgacggc

SEQ ID NO: 5847 - DNA, 19 bp, Artificial Sequence
  Synthetic: FMR1 5 forward X:147911976-147911998; SpCas9
cgggcggcgggccgacggc

SEQ ID NO: 5848 - DNA, 18 bp, Artificial Sequence
  Synthetic: FMR1 5 forward X:147911977-147911998; SpCas9
gggcggcgggccgacggc

SEQ ID NO: 5849 - DNA, 25 bp, Artificial Sequence
  Synthetic: FMR1 5 reverse X:147911971-147911999; SpCas9
gctcgccgtcggcccgccgcccgct

SEQ ID NO: 5850 - DNA, 24 bp, Artificial Sequence
  Synthetic: FMR1 5 reverse X:147911972-147911999; SpCas9
ctcgccgtcggcccgccgcccgct

SEQ ID NO: 5851 - DNA, 23 bp, Artificial Sequence
  Synthetic: FMR1 5 reverse X:147911973-147911999; SpCas9
tcgccgtcggcccgccgcccgct

SEQ ID NO: 5852 - DNA, 22 bp, Artificial Sequence
  Synthetic: FMR1 5 reverse X:147911974-147911999; SpCas9
cgccgtcggcccgccgcccgct

SEQ ID NO: 5853 - DNA, 21 bp, Artificial Sequence
  Synthetic: FMR1 5 reverse X:147911975-147911999; SpCas9
gccgtcggcccgccgcccgct

SEQ ID NO: 5854 - DNA, 20 bp, Artificial Sequence
  Synthetic: FMR1 5 reverse X:147911976-147911999; SpCas9
ccgtcggcccgccgcccgct

SEQ ID NO: 5855 - DNA, 19 bp, Artificial Sequence
  Synthetic: FMR1 5 reverse X:147911977-147911999; SpCas9
cgtcggcccgccgcccgct

SEQ ID NO: 5856 - DNA, 18 bp, Artificial Sequence
  Synthetic: FMR1 5 reverse X:147911978-147911999; SpCas9
gtcggcccgccgcccgct

SEQ ID NO: 5857 - DNA, 25 bp, Artificial Sequence
  Synthetic: FMR1 5 forward X:147911975-147912003; SpCas9
gcgggcggcgggccgacggcgagcg

SEQ ID NO: 5858 - DNA, 24 bp, Artificial Sequence
  Synthetic: FMR1 5 forward X:147911976-147912003; SpCas9
cgggcggcgggccgacggcgagcg

SEQ ID NO: 5859 - DNA, 23 bp, Artificial Sequence
  Synthetic: FMR1 5 forward X:147911977-147912003; SpCas9
gggcggcgggccgacggcgagcg

SEQ ID NO: 5860 - DNA, 22 bp, Artificial Sequence
  Synthetic: FMR1 5 forward X:147911978-147912003; SpCas9
ggcggcgggccgacggcgagcg

SEQ ID NO: 5861 - DNA, 21 bp, Artificial Sequence
  Synthetic: FMR1 5 forward X:147911979-147912003; SpCas9
gcggcgggccgacggcgagcg

SEQ ID NO: 5862 - DNA, 20 bp, Artificial Sequence
  Synthetic: FMR1 5 forward X:147911980-147912003; SpCas9
cggcgggccgacggcgagcg

SEQ ID NO: 5863 - DNA, 19 bp, Artificial Sequence
  Synthetic: FMR1 5 forward X:147911981-147912003; SpCas9
ggcgggccgacggcgagcg

SEQ ID NO: 5864 - DNA, 18 bp, Artificial Sequence
  Synthetic: FMR1 5 forward X:147911982-147912003; SpCas9
gcgggccgacggcgagcg

SEQ ID NO: 5865 - DNA, 25 bp, Artificial Sequence
  Synthetic: FMR1 5 forward X:147911976-147912004; SpCas9
cgggcggcgggccgacggcgagcgc

SEQ ID NO: 5866 - DNA, 24 bp, Artificial Sequence
  Synthetic: FMR1 5 forward X:147911977-147912004; SpCas9
gggcggcgggccgacggcgagcgc

SEQ ID NO: 5867 - DNA, 23 bp, Artificial Sequence
  Synthetic: FMR1 5 forward X:147911978-147912004; SpCas9
ggcggcgggccgacggcgagcgc

SEQ ID NO: 5868 - DNA, 22 bp, Artificial Sequence
  Synthetic: FMR1 5 forward X:147911979-147912004; SpCas9
gcggcgggccgacggcgagcgc

SEQ ID NO: 5869 - DNA, 21 bp, Artificial Sequence
  Synthetic: FMR1 5 forward X:147911980-147912004; SpCas9
cggcgggccgacggcgagcgc

SEQ ID NO: 5870 - DNA, 20 bp, Artificial Sequence
  Synthetic: FMR1 5 forward X:147911981-147912004; SpCas9
ggcgggccgacggcgagcgc

SEQ ID NO: 5871 - DNA, 19 bp, Artificial Sequence
  Synthetic: FMR1 5 forward X:147911982-147912004; SpCas9
gcgggccgacggcgagcgc

SEQ ID NO: 5872 - DNA, 18 bp, Artificial Sequence
  Synthetic: FMR1 5 forward X:147911983-147912004; SpCas9
cgggccgacggcgagcgc

SEQ ID NO: 5873 - DNA, 25 bp, Artificial Sequence
  Synthetic: FMR1 5 forward X:147911979-147912007; SpCas9
gcggcgggccgacggcgagcgcggg

SEQ ID NO: 5874 - DNA, 24 bp, Artificial Sequence
  Synthetic: FMR1 5 forward X:147911980-147912007; SpCas9
cggcgggccgacggcgagcgcggg

SEQ ID NO: 5875 - DNA, 23 bp, Artificial Sequence
  Synthetic: FMR1 5 forward X:147911981-147912007; SpCas9
ggcgggccgacggcgagcgcggg

SEQ ID NO: 5876 - DNA, 22 bp, Artificial Sequence
  Synthetic: FMR1 5 forward X:147911982-147912007; SpCas9
gcgggccgacggcgagcgcggg

SEQ ID NO: 5877 - DNA, 21 bp, Artificial Sequence
  Synthetic: FMR1 5 forward X:147911983-147912007; SpCas9
cgggccgacggcgagcgcggg

SEQ ID NO: 5878 - DNA, 20 bp, Artificial Sequence
  Synthetic: FMR1 5 forward X:147911984-147912007; SpCas9
gggccgacggcgagcgcggg

SEQ ID NO: 5879 - DNA, 19 bp, Artificial Sequence
  Synthetic: FMR1 5 forward X:147911985-147912007; SpCas9
ggccgacggcgagcgcggg

SEQ ID NO: 5880 - DNA, 18 bp, Artificial Sequence
  Synthetic: FMR1 5 forward X:147911986-147912007; SpCas9
gccgacggcgagcgcggg

SEQ ID NO: 5881 - DNA, 25 bp, Artificial Sequence
  Synthetic: FMR1 5 forward X:147911982-147912010; SpCas9
gcgggccgacggcgagcgcgggcgg

SEQ ID NO: 5882 - DNA, 24 bp, Artificial Sequence
  Synthetic: FMR1 5 forward X:147911983-147912010; SpCas9
cgggccgacggcgagcgcgggcgg

SEQ ID NO: 5883 - DNA, 23 bp, Artificial Sequence
  Synthetic: FMR1 5 forward X:147911984-147912010; SpCas9
gggccgacggcgagcgcgggcgg

SEQ ID NO: 5884 - DNA, 22 bp, Artificial Sequence
  Synthetic: FMR1 5 forward X:147911985-147912010; SpCas9
ggccgacggcgagcgcgggcgg

SEQ ID NO: 5885 - DNA, 21 bp, Artificial Sequence
  Synthetic: FMR1 5 forward X:147911986-147912010; SpCas9
gccgacggcgagcgcgggcgg

SEQ ID NO: 5886 - DNA, 20 bp, Artificial Sequence
  Synthetic: FMR1 5 forward X:147911987-147912010; SpCas9
ccgacggcgagcgcgggcgg

SEQ ID NO: 5887 - DNA, 19 bp, Artificial Sequence
  Synthetic: FMR1 5 forward X:147911988-147912010; SpCas9
cgacggcgagcgcgggcgg

SEQ ID NO: 5888 - DNA, 18 bp, Artificial Sequence
  Synthetic: FMR1 5 forward X:147911989-147912010; SpCas9
gacggcgagcgcgggcgg

SEQ ID NO: 5889 - DNA, 25 bp, Artificial Sequence
  Synthetic: FMR1 5 forward X:147911985-147912013; SpCas9
ggccgacggcgagcgcgggcggcgg

SEQ ID NO: 5890 - DNA, 24 bp, Artificial Sequence
  Synthetic: FMR1 5 forward X:147911986-147912013; SpCas9
gccgacggcgagcgcgggcggcgg

SEQ ID NO: 5891 - DNA, 23 bp, Artificial Sequence
  Synthetic: FMR1 5 forward X:147911987-147912013; SpCas9
ccgacggcgagcgcgggcggcgg

SEQ ID NO: 5892 - DNA, 22 bp, Artificial Sequence
  Synthetic: FMR1 5 forward X:147911988-147912013; SpCas9
cgacggcgagcgcgggcggcgg

SEQ ID NO: 5893 - DNA, 21 bp, Artificial Sequence
  Synthetic: FMR1 5 forward X:147911989-147912013; SpCas9
gacggcgagcgcgggcggcgg

SEQ ID NO: 5894 - DNA, 20 bp, Artificial Sequence
  Synthetic: FMR1 5 forward X:147911990-147912013; SpCas9
acggcgagcgcgggcggcgg

SEQ ID NO: 5895 - DNA, 19 bp, Artificial Sequence
  Synthetic: FMR1 5 forward X:147911991-147912013; SpCas9
cggcgagcgcgggcggcgg

SEQ ID NO: 5896 - DNA, 18 bp, Artificial Sequence
  Synthetic: FMR1 5 forward X:147911992-147912013; SpCas9
ggcgagcgcgggcggcgg

SEQ ID NO: 5897 - DNA, 25 bp, Artificial Sequence
  Synthetic: FMR1 5 reverse X:147911987-147912015; SpCas9
caccgccgccgcccgcgctcgccgt

SEQ ID NO: 5898 - DNA, 24 bp, Artificial Sequence
  Synthetic: FMR1 5 reverse X:147911988-147912015; SpCas9
accgccgccgcccgcgctcgccgt

SEQ ID NO: 5899 - DNA, 23 bp, Artificial Sequence
  Synthetic: FMR1 5 reverse X:147911989-147912015; SpCas9
ccgccgccgcccgcgctcgccgt

SEQ ID NO: 5900 - DNA, 22 bp, Artificial Sequence
  Synthetic: FMR1 5 reverse X:147911990-147912015; SpCas9
cgccgccgcccgcgctcgccgt

SEQ ID NO: 5901 - DNA, 21 bp, Artificial Sequence
  Synthetic: FMR1 5 reverse X:147911991-147912015; SpCas9
gccgccgcccgcgctcgccgt

SEQ ID NO: 5902 - DNA, 20 bp, Artificial Sequence
  Synthetic: FMR1 5 reverse X:147911992-147912015; SpCas9
ccgccgcccgcgctcgccgt

SEQ ID NO: 5903 - DNA, 19 bp, Artificial Sequence
  Synthetic: FMR1 5 reverse X:147911993-147912015; SpCas9
cgccgcccgcgctcgccgt

SEQ ID NO: 5904 - DNA, 18 bp, Artificial Sequence
  Synthetic: FMR1 5 reverse X:147911994-147912015; SpCas9
gccgcccgcgctcgccgt

SEQ ID NO: 5905 - DNA, 25 bp, Artificial Sequence
  Synthetic: FMR1 5 forward X:147911991-147912019; SpCas9
cggcgagcgcgggcggcggcggtga

SEQ ID NO: 5906 - DNA, 24 bp, Artificial Sequence
  Synthetic: FMR1 5 forward X:147911992-147912019; SpCas9
ggcgagcgcgggcggcggcggtga

SEQ ID NO: 5907 - DNA, 23 bp, Artificial Sequence
  Synthetic: FMR1 5 forward X:147911993-147912019; SpCas9
gcgagcgcgggcggcggcggtga

SEQ ID NO: 5908 - DNA, 22 bp, Artificial Sequence
  Synthetic: FMR1 5 forward X:147911994-147912019; SpCas9
cgagcgcgggcggcggcggtga

SEQ ID NO: 5909 - DNA, 21 bp, Artificial Sequence
  Synthetic: FMR1 5 forward X:147911995-147912019; SpCas9
gagcgcgggcggcggcggtga

SEQ ID NO: 5910 - DNA, 20 bp, Artificial Sequence
  Synthetic: FMR1 5 forward X:147911996-147912019; SpCas9
agcgcgggcggcggcggtga

SEQ ID NO: 5911 - DNA, 19 bp, Artificial Sequence
  Synthetic: FMR1 5 forward X:147911997-147912019; SpCas9
gcgcgggcggcggcggtga

SEQ ID NO: 5912 - DNA, 18 bp, Artificial Sequence
  Synthetic: FMR1 5 forward X:147911998-147912019; SpCas9
cgcgggcggcggcggtga

SEQ ID NO: 5913 - DNA, 25 bp, Artificial Sequence
  Synthetic: FMR1 5 forward X:147911993-147912021; SpCas9
gcgagcgcgggcggcggcggtgacg

SEQ ID NO: 5914 - DNA, 24 bp, Artificial Sequence
  Synthetic: FMR1 5 forward X:147911994-147912021; SpCas9
cgagcgcgggcggcggcggtgacg

SEQ ID NO: 5915 - DNA, 23 bp, Artificial Sequence
  Synthetic: FMR1 5 forward X:147911995-147912021; SpCas9
gagcgcgggcggcggcggtgacg

SEQ ID NO: 5916 - DNA, 22 bp, Artificial Sequence
  Synthetic: FMR1 5 forward X:147911996-147912021; SpCas9
agcgcgggcggcggcggtgacg

SEQ ID NO: 5917 - DNA, 21 bp, Artificial Sequence
  Synthetic: FMR1 5 forward X:147911997-147912021; SpCas9
gcgcgggcggcggcggtgacg

SEQ ID NO: 5918 - DNA, 20 bp, Artificial Sequence
  Synthetic: FMR1 5 forward X:147911998-147912021; SpCas9
cgcgggcggcggcggtgacg

SEQ ID NO: 5919 - DNA, 19 bp, Artificial Sequence
  Synthetic: FMR1 5 forward X:147911999-147912021; SpCas9
gcgggcggcggcggtgacg

SEQ ID NO: 5920 - DNA, 18 bp, Artificial Sequence
  Synthetic: FMR1 5 forward X:147912000-147912021; SpCas9
cgggcggcggcggtgacg

SEQ ID NO: 5921 - DNA, 25 bp, Artificial Sequence
  Synthetic: FMR1 5 forward X:147911994-147912022; SpCas9
cgagcgcgggcggcggcggtgacgg

SEQ ID NO: 5922 - DNA, 24 bp, Artificial Sequence
  Synthetic: FMR1 5 forward X:147911995-147912022; SpCas9
gagcgcgggcggcggcggtgacgg

SEQ ID NO: 5923 - DNA, 23 bp, Artificial Sequence
  Synthetic: FMR1 5 forward X:147911996-147912022; SpCas9
agcgcgggcggcggcggtgacgg

SEQ ID NO: 5924 - DNA, 22 bp, Artificial Sequence
  Synthetic: FMR1 5 forward X:147911997-147912022; SpCas9
gcgcgggcggcggcggtgacgg

SEQ ID NO: 5925 - DNA, 21 bp, Artificial Sequence
  Synthetic: FMR1 5 forward X:147911998-147912022; SpCas9
cgcgggcggcggcggtgacgg

SEQ ID NO: 5926 - DNA, 20 bp, Artificial Sequence
  Synthetic: FMR1 5 forward X:147911999-147912022; SpCas9
gcgggcggcggcggtgacgg

SEQ ID NO: 5927 - DNA, 19 bp, Artificial Sequence
  Synthetic: FMR1 5 forward X:147912000-147912022; SpCas9
cgggcggcggcggtgacgg

SEQ ID NO: 5928 - DNA, 18 bp, Artificial Sequence
  Synthetic: FMR1 5 forward X:147912001-147912022; SpCas9
gggcggcggcggtgacgg

SEQ ID NO: 5929 - DNA, 25 bp, Artificial Sequence
  Synthetic: FMR1 5 forward X:147912006-147912034; SpCas9
gcggcggtgacggaggcgccgctgc

SEQ ID NO: 5930 - DNA, 24 bp, Artificial Sequence
  Synthetic: FMR1 5 forward X:147912007-147912034; SpCas9
cggcggtgacggaggcgccgctgc

SEQ ID NO: 5931 - DNA, 23 bp, Artificial Sequence
  Synthetic: FMR1 5 forward X:147912008-147912034; SpCas9
ggcggtgacggaggcgccgctgc

SEQ ID NO: 5932 - DNA, 22 bp, Artificial Sequence
  Synthetic: FMR1 5 forward X:147912009-147912034; SpCas9
gcggtgacggaggcgccgctgc

SEQ ID NO: 5933 - DNA, 21 bp, Artificial Sequence
  Synthetic: FMR1 5 forward X:147912010-147912034; SpCas9
cggtgacggaggcgccgctgc

SEQ ID NO: 5934 - DNA, 20 bp, Artificial Sequence
  Synthetic: FMR1 5 forward X:147912011-147912034; SpCas9
ggtgacggaggcgccgctgc

SEQ ID NO: 5935 - DNA, 19 bp, Artificial Sequence
  Synthetic: FMR1 5 forward X:147912012-147912034; SpCas9
gtgacggaggcgccgctgc

SEQ ID NO: 5936 - DNA, 18 bp, Artificial Sequence
  Synthetic: FMR1 5 forward X:147912013-147912034; SpCas9
tgacggaggcgccgctgc

SEQ ID NO: 5937 - DNA, 25 bp, Artificial Sequence
  Synthetic: FMR1 5 forward X:147912007-147912035; SpCas9
cggcggtgacggaggcgccgctgcc

SEQ ID NO: 5938 - DNA, 24 bp, Artificial Sequence
  Synthetic: FMR1 5 forward X:147912008-147912035; SpCas9
ggcggtgacggaggcgccgctgcc

SEQ ID NO: 5939 - DNA, 23 bp, Artificial Sequence
  Synthetic: FMR1 5 forward X:147912009-147912035; SpCas9
gcggtgacggaggcgccgctgcc

SEQ ID NO: 5940 - DNA, 22 bp, Artificial Sequence
  Synthetic: FMR1 5 forward X:147912010-147912035; SpCas9
cggtgacggaggcgccgctgcc

SEQ ID NO: 5941 - DNA, 21 bp, Artificial Sequence
  Synthetic: FMR1 5 forward X:147912011-147912035; SpCas9
ggtgacggaggcgccgctgcc

SEQ ID NO: 5942 - DNA, 20 bp, Artificial Sequence
  Synthetic: FMR1 5 forward X:147912012-147912035; SpCas9
gtgacggaggcgccgctgcc

SEQ ID NO: 5943 - DNA, 19 bp, Artificial Sequence
  Synthetic: FMR1 5 forward X:147912013-147912035; SpCas9
tgacggaggcgccgctgcc

SEQ ID NO: 5944 - DNA, 18 bp, Artificial Sequence
  Synthetic: FMR1 5 forward X:147912014-147912035; SpCas9
gacggaggcgccgctgcc

SEQ ID NO: 5945 - DNA, 25 bp, Artificial Sequence
  Synthetic: FMR1 5 forward X:147912008-147912036; SpCas9
ggcggtgacggaggcgccgctgcca

SEQ ID NO: 5946 - DNA, 24 bp, Artificial Sequence
  Synthetic: FMR1 5 forward X:147912009-147912036; SpCas9
gcggtgacggaggcgccgctgcca

SEQ ID NO: 5947 - DNA, 23 bp, Artificial Sequence
  Synthetic: FMR1 5 forward X:147912010-147912036; SpCas9
cggtgacggaggcgccgctgcca

SEQ ID NO: 5948 - DNA, 22 bp, Artificial Sequence
  Synthetic: FMR1 5 forward X:147912011-147912036; SpCas9
ggtgacggaggcgccgctgcca

SEQ ID NO: 5949 - DNA, 21 bp, Artificial Sequence
  Synthetic: FMR1 5 forward X:147912012-147912036; SpCas9
gtgacggaggcgccgctgcca

SEQ ID NO: 5950 - DNA, 20 bp, Artificial Sequence
  Synthetic: FMR1 5 forward X:147912013-147912036; SpCas9
tgacggaggcgccgctgcca

SEQ ID NO: 5951 - DNA, 19 bp, Artificial Sequence
  Synthetic: FMR1 5 forward X:147912014-147912036; SpCas9
gacggaggcgccgctgcca

SEQ ID NO: 5952 - DNA, 18 bp, Artificial Sequence
  Synthetic: FMR1 5 forward X:147912015-147912036; SpCas9
acggaggcgccgctgcca

SEQ ID NO: 5953 - DNA, 25 bp, Artificial Sequence
  Synthetic: FMR1 5 forward X:147912009-147912037; SpCas9
gcggtgacggaggcgccgctgccag

SEQ ID NO: 5954 - DNA, 24 bp, Artificial Sequence
  Synthetic: FMR1 5 forward X:147912010-147912037; SpCas9
cggtgacggaggcgccgctgccag

SEQ ID NO: 5955 - DNA, 23 bp, Artificial Sequence
  Synthetic: FMR1 5 forward X:147912011-147912037; SpCas9
ggtgacggaggcgccgctgccag

SEQ ID NO: 5956 - DNA, 22 bp, Artificial Sequence
  Synthetic: FMR1 5 forward X:147912012-147912037; SpCas9
gtgacggaggcgccgctgccag

SEQ ID NO: 5957 - DNA, 21 bp, Artificial Sequence
  Synthetic: FMR1 5 forward X:147912013-147912037; SpCas9
tgacggaggcgccgctgccag

SEQ ID NO: 5958 - DNA, 20 bp, Artificial Sequence
  Synthetic: FMR1 5 forward X:147912014-147912037; SpCas9
gacggaggcgccgctgccag

SEQ ID NO: 5959 - DNA, 19 bp, Artificial Sequence
  Synthetic: FMR1 5 forward X:147912015-147912037; SpCas9
acggaggcgccgctgccag

SEQ ID NO: 5960 - DNA, 18 bp, Artificial Sequence
  Synthetic: FMR1 5 forward X:147912016-147912037; SpCas9
cggaggcgccgctgccag

SEQ ID NO: 5961 - DNA, 25 bp, Artificial Sequence
  Synthetic: FMR1 5 forward X:147912010-147912038; SpCas9
cggtgacggaggcgccgctgccagg

SEQ ID NO: 5962 - DNA, 24 bp, Artificial Sequence
  Synthetic: FMR1 5 forward X:147912011-147912038; SpCas9
ggtgacggaggcgccgctgccagg

SEQ ID NO: 5963 - DNA, 23 bp, Artificial Sequence
  Synthetic: FMR1 5 forward X:147912012-147912038; SpCas9
gtgacggaggcgccgctgccagg

SEQ ID NO: 5964 - DNA, 22 bp, Artificial Sequence
  Synthetic: FMR1 5 forward X:147912013-147912038; SpCas9
tgacggaggcgccgctgccagg

SEQ ID NO: 5965 - DNA, 21 bp, Artificial Sequence
  Synthetic: FMR1 5 forward X:147912014-147912038; SpCas9
gacggaggcgccgctgccagg

SEQ ID NO: 5966 - DNA, 20 bp, Artificial Sequence
  Synthetic: FMR1 5 forward X:147912015-147912038; SpCas9
acggaggcgccgctgccagg

SEQ ID NO: 5967 - DNA, 19 bp, Artificial Sequence
  Synthetic: FMR1 5 forward X:147912016-147912038; SpCas9
cggaggcgccgctgccagg

SEQ ID NO: 5968 - DNA, 18 bp, Artificial Sequence
  Synthetic: FMR1 5 forward X:147912017-147912038; SpCas9
ggaggcgccgctgccagg

SEQ ID NO: 5969 - DNA, 25 bp, Artificial Sequence
  Synthetic: FMR1 5 forward X:147912017-147912045; SpCas9
ggaggcgccgctgccagggggcgtg

SEQ ID NO: 5970 - DNA, 24 bp, Artificial Sequence
  Synthetic: FMR1 5 forward X:147912018-147912045; SpCas9
gaggcgccgctgccagggggcgtg

SEQ ID NO: 5971 - DNA, 23 bp, Artificial Sequence
  Synthetic: FMR1 5 forward X:147912019-147912045; SpCas9
aggcgccgctgccagggggcgtg

SEQ ID NO: 5972 - DNA, 22 bp, Artificial Sequence
  Synthetic: FMR1 5 forward X:147912020-147912045; SpCas9
ggcgccgctgccagggggcgtg

SEQ ID NO: 5973 - DNA, 21 bp, Artificial Sequence
  Synthetic: FMR1 5 forward X:147912021-147912045; SpCas9
gcgccgctgccagggggcgtg

SEQ ID NO: 5974 - DNA, 20 bp, Artificial Sequence
  Synthetic: FMR1 5 forward X:147912022-147912045; SpCas9
cgccgctgccagggggcgtg

SEQ ID NO: 5975 - DNA, 19 bp, Artificial Sequence
  Synthetic: FMR1 5 forward X:147912023-147912045; SpCas9
gccgctgccagggggcgtg

SEQ ID NO: 5976 - DNA, 18 bp, Artificial Sequence
  Synthetic: FMR1 5 forward X:147912024-147912045; SpCas9
ccgctgccagggggcgtg

SEQ ID NO: 5977 - DNA, 25 bp, Artificial Sequence
  Synthetic: FMR1 5 forward X:147912020-147912048; SpCas9
ggcgccgctgccagggggcgtgcgg

SEQ ID NO: 5978 - DNA, 24 bp, Artificial Sequence
  Synthetic: FMR1 5 forward X:147912021-147912048; SpCas9
gcgccgctgccagggggcgtgcgg

SEQ ID NO: 5979 - DNA, 23 bp, Artificial Sequence
  Synthetic: FMR1 5 forward X:147912022-147912048; SpCas9
cgccgctgccagggggcgtgcgg

SEQ ID NO: 5980 - DNA, 22 bp, Artificial Sequence
  Synthetic: FMR1 5 forward X:147912023-147912048; SpCas9
gccgctgccagggggcgtgcgg

SEQ ID NO: 5981 - DNA, 21 bp, Artificial Sequence
  Synthetic: FMR1 5 forward X:147912024-147912048; SpCas9
ccgctgccagggggcgtgcgg

SEQ ID NO: 5982 - DNA, 20 bp, Artificial Sequence
  Synthetic: FMR1 5 forward X:147912025-147912048; SpCas9
cgctgccagggggcgtgcgg

SEQ ID NO: 5983 - DNA, 19 bp, Artificial Sequence
  Synthetic: FMR1 5 forward X:147912026-147912048; SpCas9
gctgccagggggcgtgcgg

SEQ ID NO: 5984 - DNA, 18 bp, Artificial Sequence
  Synthetic: FMR1 5 forward X:147912027-147912048; SpCas9
ctgccagggggcgtgcgg

SEQ ID NO: 5985 - DNA, 25 bp, Artificial Sequence
  Synthetic: FMR1 5 reverse X:147912024-147912052; SpCas9
cgcgctgccgcacgccccctggcag

SEQ ID NO: 5986 - DNA, 24 bp, Artificial Sequence
  Synthetic: FMR1 5 reverse X:147912025-147912052; SpCas9
gcgctgccgcacgccccctggcag

SEQ ID NO: 5987 - DNA, 23 bp, Artificial Sequence
  Synthetic: FMR1 5 reverse X:147912026-147912052; SpCas9
cgctgccgcacgccccctggcag

SEQ ID NO: 5988 - DNA, 22 bp, Artificial Sequence
  Synthetic: FMR1 5 reverse X:147912027-147912052; SpCas9
gctgccgcacgccccctggcag

SEQ ID NO: 5989 - DNA, 21 bp, Artificial Sequence
  Synthetic: FMR1 5 reverse X:147912028-147912052; SpCas9
ctgccgcacgccccctggcag

SEQ ID NO: 5990 - DNA, 20 bp, Artificial Sequence
  Synthetic: FMR1 5 reverse X:147912029-147912052; SpCas9
tgccgcacgccccctggcag

SEQ ID NO: 5991 - DNA, 19 bp, Artificial Sequence
  Synthetic: FMR1 5 reverse X:147912030-147912052; SpCas9
gccgcacgccccctggcag

SEQ ID NO: 5992 - DNA, 18 bp, Artificial Sequence
  Synthetic: FMR1 5 reverse X:147912031-147912052; SpCas9
ccgcacgccccctggcag

SEQ ID NO: 5993 - DNA, 25 bp, Artificial Sequence
  Synthetic: FMR1 5 forward X:147912025-147912053; SpCas9
cgctgccagggggcgtgcggcagcg

SEQ ID NO: 5994 - DNA, 24 bp, Artificial Sequence
  Synthetic: FMR1 5 forward X:147912026-147912053; SpCas9
gctgccagggggcgtgcggcagcg

SEQ ID NO: 5995 - DNA, 23 bp, Artificial Sequence
  Synthetic: FMR1 5 forward X:147912027-147912053; SpCas9
ctgccagggggcgtgcggcagcg

SEQ ID NO: 5996 - DNA, 22 bp, Artificial Sequence
  Synthetic: FMR1 5 forward X:147912028-147912053; SpCas9
tgccagggggcgtgcggcagcg

SEQ ID NO: 5997 - DNA, 21 bp, Artificial Sequence
  Synthetic: FMR1 5 forward X:147912029-147912053; SpCas9
gccagggggcgtgcggcagcg

SEQ ID NO: 5998 - DNA, 20 bp, Artificial Sequence
  Synthetic: FMR1 5 forward X:147912030-147912053; SpCas9
ccagggggcgtgcggcagcg

SEQ ID NO: 5999 - DNA, 19 bp, Artificial Sequence
  Synthetic: FMR1 5 forward X:147912031-147912053; SpCas9
cagggggcgtgcggcagcg

SEQ ID NO: 6000 - DNA, 18 bp, Artificial Sequence
  Synthetic: FMR1 5 forward X:147912032-147912053; SpCas9
agggggcgtgcggcagcg

SEQ ID NO: 6001 - DNA, 25 bp, Artificial Sequence
  Synthetic: FMR1 5 reverse X:147912027-147912055; SpCas9
cgccgcgctgccgcacgccccctgg

SEQ ID NO: 6002 - DNA, 24 bp, Artificial Sequence
  Synthetic: FMR1 5 reverse X:147912028-147912055; SpCas9
gccgcgctgccgcacgccccctgg

SEQ ID NO: 6003 - DNA, 23 bp, Artificial Sequence
  Synthetic: FMR1 5 reverse X:147912029-147912055; SpCas9
ccgcgctgccgcacgccccctgg

SEQ ID NO: 6004 - DNA, 22 bp, Artificial Sequence
  Synthetic: FMR1 5 reverse X:147912030-147912055; SpCas9
cgcgctgccgcacgccccctgg

SEQ ID NO: 6005 - DNA, 21 bp, Artificial Sequence
  Synthetic: FMR1 5 reverse X:147912031-147912055; SpCas9
gcgctgccgcacgccccctgg

SEQ ID NO: 6006 - DNA, 20 bp, Artificial Sequence
  Synthetic: FMR1 5 reverse X:147912032-147912055; SpCas9
cgctgccgcacgccccctgg

SEQ ID NO: 6007 - DNA, 19 bp, Artificial Sequence
  Synthetic: FMR1 5 reverse X:147912033-147912055; SpCas9
gctgccgcacgccccctgg

SEQ ID NO: 6008 - DNA, 18 bp, Artificial Sequence
  Synthetic: FMR1 5 reverse X:147912034-147912055; SpCas9
ctgccgcacgccccctgg

SEQ ID NO: 6009 - DNA, 25 bp, Artificial Sequence
  Synthetic: FMR1 5 forward X:147912028-147912056; SpCas9
tgccagggggcgtgcggcagcgcgg

SEQ ID NO: 6010 - DNA, 24 bp, Artificial Sequence
  Synthetic: FMR1 5 forward X:147912029-147912056; SpCas9
gccagggggcgtgcggcagcgcgg

SEQ ID NO: 6011 - DNA, 23 bp, Artificial Sequence
  Synthetic: FMR1 5 forward X:147912030-147912056; SpCas9
ccagggggcgtgcggcagcgcgg

SEQ ID NO: 6012 - DNA, 22 bp, Artificial Sequence
  Synthetic: FMR1 5 forward X:147912031-147912056; SpCas9
cagggggcgtgcggcagcgcgg

SEQ ID NO: 6013 - DNA, 21 bp, Artificial Sequence
  Synthetic: FMR1 5 forward X:147912032-147912056; SpCas9
agggggcgtgcggcagcgcgg

SEQ ID NO: 6014 - DNA, 20 bp, Artificial Sequence
  Synthetic: FMR1 5 forward X:147912033-147912056; SpCas9
gggggcgtgcggcagcgcgg

SEQ ID NO: 6015 - DNA, 19 bp, Artificial Sequence
  Synthetic: FMR1 5 forward X:147912034-147912056; SpCas9
ggggcgtgcggcagcgcgg

SEQ ID NO: 6016 - DNA, 18 bp, Artificial Sequence
  Synthetic: FMR1 5 forward X:147912035-147912056; SpCas9
gggcgtgcggcagcgcgg

SEQ ID NO: 6017 - DNA, 25 bp, Artificial Sequence
  Synthetic: FMR1 5 reverse X:147912030-147912058; SpCas9
cgccgccgcgctgccgcacgccccc

SEQ ID NO: 6018 - DNA, 24 bp, Artificial Sequence
  Synthetic: FMR1 5 reverse X:147912031-147912058; SpCas9
gccgccgcgctgccgcacgccccc

SEQ ID NO: 6019 - DNA, 23 bp, Artificial Sequence
  Synthetic: FMR1 5 reverse X:147912032-147912058; SpCas9
ccgccgcgctgccgcacgccccc

SEQ ID NO: 6020 - DNA, 22 bp, Artificial Sequence
  Synthetic: FMR1 5 reverse X:147912033-147912058; SpCas9
cgccgcgctgccgcacgccccc

SEQ ID NO: 6021 - DNA, 21 bp, Artificial Sequence
  Synthetic: FMR1 5 reverse X:147912034-147912058; SpCas9
gccgcgctgccgcacgccccc

SEQ ID NO: 6022 - DNA, 20 bp, Artificial Sequence
  Synthetic: FMR1 5 reverse X:147912035-147912058; SpCas9
ccgcgctgccgcacgccccc

SEQ ID NO: 6023 - DNA, 19 bp, Artificial Sequence
  Synthetic: FMR1 5 reverse X:147912036-147912058; SpCas9
cgcgctgccgcacgccccc

SEQ ID NO: 6024 - DNA, 18 bp, Artificial Sequence
  Synthetic: FMR1 5 reverse X:147912037-147912058; SpCas9
gcgctgccgcacgccccc

SEQ ID NO: 6025 - DNA, 25 bp, Artificial Sequence
  Synthetic: FMR1 5 forward X:147912031-147912059; SpCas9
cagggggcgtgcggcagcgcggcgg

SEQ ID NO: 6026 - DNA, 24 bp, Artificial Sequence
  Synthetic: FMR1 5 forward X:147912032-147912059; SpCas9
agggggcgtgcggcagcgcggcgg

SEQ ID NO: 6027 - DNA, 23 bp, Artificial Sequence
  Synthetic: FMR1 5 forward X:147912033-147912059; SpCas9
gggggcgtgcggcagcgcggcgg

SEQ ID NO: 6028 - DNA, 22 bp, Artificial Sequence
  Synthetic: FMR1 5 forward X:147912034-147912059; SpCas9
ggggcgtgcggcagcgcggcgg

SEQ ID NO: 6029 - DNA, 21 bp, Artificial Sequence
  Synthetic: FMR1 5 forward X:147912035-147912059; SpCas9
gggcgtgcggcagcgcggcgg

SEQ ID NO: 6030 - DNA, 20 bp, Artificial Sequence
  Synthetic: FMR1 5 forward X:147912036-147912059; SpCas9
ggcgtgcggcagcgcggcgg

SEQ ID NO: 6031 - DNA, 19 bp, Artificial Sequence
  Synthetic: FMR1 5 forward X:147912037-147912059; SpCas9
gcgtgcggcagcgcggcgg

SEQ ID NO: 6032 - DNA, 18 bp, Artificial Sequence
  Synthetic: FMR1 5 forward X:147912038-147912059; SpCas9
cgtgcggcagcgcggcgg

SEQ ID NO: 6033 - DNA, 25 bp, Artificial Sequence
  Synthetic: FMR1 5 forward X:147912034-147912062; SpCas9
ggggcgtgcggcagcgcggcggcgg

SEQ ID NO: 6034 - DNA, 24 bp, Artificial Sequence
  Synthetic: FMR1 5 forward X:147912035-147912062; SpCas9
gggcgtgcggcagcgcggcggcgg

SEQ ID NO: 6035 - DNA, 23 bp, Artificial Sequence
  Synthetic: FMR1 5 forward X:147912036-147912062; SpCas9
ggcgtgcggcagcgcggcggcgg

SEQ ID NO: 6036 - DNA, 22 bp, Artificial Sequence
  Synthetic: FMR1 5 forward X:147912037-147912062; SpCas9
gcgtgcggcagcgcggcggcgg

SEQ ID NO: 6037 - DNA, 21 bp, Artificial Sequence
  Synthetic: FMR1 5 forward X:147912038-147912062; SpCas9
cgtgcggcagcgcggcggcgg

SEQ ID NO: 6038 - DNA, 20 bp, Artificial Sequence
  Synthetic: FMR1 5 forward X:147912039-147912062; SpCas9
gtgcggcagcgcggcggcgg

SEQ ID NO: 6039 - DNA, 19 bp, Artificial Sequence
  Synthetic: FMR1 5 forward X:147912040-147912062; SpCas9
tgcggcagcgcggcggcgg

SEQ ID NO: 6040 - DNA, 18 bp, Artificial Sequence
  Synthetic: FMR1 5 forward X:147912041-147912062; SpCas9
gcggcagcgcggcggcgg

SEQ ID NO: 6041 - DNA, 25 bp, Artificial Sequence
  Synthetic: FMR1 5 forward X:147912037-147912065; SpCas9
gcgtgcggcagcgcggcggcggcgg

SEQ ID NO: 6042 - DNA, 24 bp, Artificial Sequence
  Synthetic: FMR1 5 forward X:147912038-147912065; SpCas9
cgtgcggcagcgcggcggcggcgg

SEQ ID NO: 6043 - DNA, 23 bp, Artificial Sequence
  Synthetic: FMR1 5 forward X:147912039-147912065; SpCas9
gtgcggcagcgcggcggcggcgg

SEQ ID NO: 6044 - DNA, 22 bp, Artificial Sequence
  Synthetic: FMR1 5 forward X:147912040-147912065; SpCas9
tgcggcagcgcggcggcggcgg

SEQ ID NO: 6045 - DNA, 21 bp, Artificial Sequence
  Synthetic: FMR1 5 forward X:147912041-147912065; SpCas9
gcggcagcgcggcggcggcgg

SEQ ID NO: 6046 - DNA, 20 bp, Artificial Sequence
  Synthetic: FMR1 5 forward X:147912042-147912065; SpCas9
cggcagcgcggcggcggcgg

SEQ ID NO: 6047 - DNA, 19 bp, Artificial Sequence
  Synthetic: FMR1 5 forward X:147912043-147912065; SpCas9
ggcagcgcggcggcggcgg

SEQ ID NO: 6048 - DNA, 18 bp, Artificial Sequence
  Synthetic: FMR1 5 forward X:147912044-147912065; SpCas9
gcagcgcggcggcggcgg

SEQ ID NO: 6049 - DNA, 25 bp, Artificial Sequence
  Synthetic: FMR1 5 forward X:147912040-147912068; SpCas9
tgcggcagcgcggcggcggcggcgg

SEQ ID NO: 6050 - DNA, 24 bp, Artificial Sequence
  Synthetic: FMR1 5 forward X:147912041-147912068; SpCas9
gcggcagcgcggcggcggcggcgg

SEQ ID NO: 6051 - DNA, 23 bp, Artificial Sequence
  Synthetic: FMR1 5 forward X:147912042-147912068; SpCas9
cggcagcgcggcggcggcggcgg

SEQ ID NO: 6052 - DNA, 22 bp, Artificial Sequence
  Synthetic: FMR1 5 forward X:147912043-147912068; SpCas9
ggcagcgcggcggcggcggcgg

SEQ ID NO: 6053 - DNA, 21 bp, Artificial Sequence
  Synthetic: FMR1 5 forward X:147912044-147912068; SpCas9
gcagcgcggcggcggcggcgg

SEQ ID NO: 6054 - DNA, 20 bp, Artificial Sequence
  Synthetic: FMR1 5 forward X:147912045-147912068; SpCas9
cagcgcggcggcggcggcgg

SEQ ID NO: 6055 - DNA, 19 bp, Artificial Sequence
  Synthetic: FMR1 5 forward X:147912046-147912068; SpCas9
agcgcggcggcggcggcgg

SEQ ID NO: 6056 - DNA, 18 bp, Artificial Sequence
  Synthetic: FMR1 5 forward X:147912047-147912068; SpCas9
gcgcggcggcggcggcgg

SEQ ID NO: 6057 - DNA, 25 bp, Artificial Sequence
  Synthetic: FMR1 5 forward X:147912043-147912071; SpCas9
ggcagcgcggcggcggcggcggcgg

SEQ ID NO: 6058 - DNA, 24 bp, Artificial Sequence
  Synthetic: FMR1 5 forward X:147912044-147912071; SpCas9
gcagcgcggcggcggcggcggcgg

SEQ ID NO: 6059 - DNA, 23 bp, Artificial Sequence
  Synthetic: FMR1 5 forward X:147912045-147912071; SpCas9
cagcgcggcggcggcggcggcgg

SEQ ID NO: 6060 - DNA, 22 bp, Artificial Sequence
  Synthetic: FMR1 5 forward X:147912046-147912071; SpCas9
agcgcggcggcggcggcggcgg

SEQ ID NO: 6061 - DNA, 21 bp, Artificial Sequence
  Synthetic: FMR1 5 forward X:147912047-147912071; SpCas9
gcgcggcggcggcggcggcgg

SEQ ID NO: 6062 - DNA, 20 bp, Artificial Sequence
  Synthetic: FMR1 5 forward X:147912048-147912071; SpCas9
cgcggcggcggcggcggcgg

SEQ ID NO: 6063 - DNA, 19 bp, Artificial Sequence
  Synthetic: FMR1 5 forward X:147912049-147912071; SpCas9
gcggcggcggcggcggcgg

SEQ ID NO: 6064 - DNA, 18 bp, Artificial Sequence
  Synthetic: FMR1 5 forward X:147912050-147912071; SpCas9
cggcggcggcggcggcgg

SEQ ID NO: 6065 - DNA, 25 bp, Artificial Sequence
  Synthetic: FMR1 5 forward X:147912046-147912074; SpCas9
agcgcggcggcggcggcggcggcgg

SEQ ID NO: 6066 - DNA, 24 bp, Artificial Sequence
  Synthetic: FMR1 5 forward X:147912047-147912074; SpCas9
gcgcggcggcggcggcggcggcgg

SEQ ID NO: 6067 - DNA, 23 bp, Artificial Sequence
  Synthetic: FMR1 5 forward X:147912048-147912074; SpCas9
cgcggcggcggcggcggcggcgg

SEQ ID NO: 6068 - DNA, 22 bp, Artificial Sequence
  Synthetic: FMR1 5 forward X:147912049-147912074; SpCas9
gcggcggcggcggcggcggcgg

SEQ ID NO: 6069 - DNA, 21 bp, Artificial Sequence
  Synthetic: FMR1 5 forward X:147912050-147912074; SpCas9
cggcggcggcggcggcggcgg

SEQ ID NO: 6070 - DNA, 20 bp, Artificial Sequence
  Synthetic: FMR1 5 forward X:147912051-147912074; SpCas9
ggcggcggcggcggcggcgg

SEQ ID NO: 6071 - DNA, 19 bp, Artificial Sequence
  Synthetic: FMR1 5 forward X:147912052-147912074; SpCas9
gcggcggcggcggcggcgg

SEQ ID NO: 6072 - DNA, 18 bp, Artificial Sequence
  Synthetic: FMR1 5 forward X:147912053-147912074; SpCas9
cggcggcggcggcggcgg

SEQ ID NO: 6073 - DNA, 25 bp, Artificial Sequence
  Synthetic: FMR1 5 forward X:147912049-147912077; SpCas9
gcggcggcggcggcggcggcggcgg

SEQ ID NO: 6074 - DNA, 24 bp, Artificial Sequence
  Synthetic: FMR1 5 forward X:147912050-147912077; SpCas9
cggcggcggcggcggcggcggcgg

SEQ ID NO: 6075 - DNA, 23 bp, Artificial Sequence
  Synthetic: FMR1 5 forward X:147912051-147912077; SpCas9
ggcggcggcggcggcggcggcgg

SEQ ID NO: 6076 - DNA, 22 bp, Artificial Sequence
  Synthetic: FMR1 5 forward X:147912052-147912077; SpCas9
gcggcggcggcggcggcggcgg

SEQ ID NO: 6077 - DNA, 21 bp, Artificial Sequence
  Synthetic: FMR1 5 forward X:147912053-147912077; SpCas9
cggcggcggcggcggcggcgg

SEQ ID NO: 6078 - DNA, 20 bp, Artificial Sequence
  Synthetic: FMR1 5 forward X:147912054-147912077; SpCas9
ggcggcggcggcggcggcgg

SEQ ID NO: 6079 - DNA, 19 bp, Artificial Sequence
  Synthetic: FMR1 5 forward X:147912055-147912077; SpCas9
gcggcggcggcggcggcgg

SEQ ID NO: 6080 - DNA, 18 bp, Artificial Sequence
  Synthetic: FMR1 5 forward X:147912056-147912077; SpCas9
cggcggcggcggcggcgg

SEQ ID NO: 6081 - DNA, 18 bp, Artificial Sequence
  Synthetic: FMR1 O forward X:147911880-147911902; As/LbCpf1
agtgtttacacccgcagc

SEQ ID NO: 6082 - DNA, 19 bp, Artificial Sequence
  Synthetic: FMR1 O forward X:147911880-147911903; As/LbCpf1
agtgtttacacccgcagcg

SEQ ID NO: 6083 - DNA, 20 bp, Artificial Sequence
  Synthetic: FMR1 O forward X:147911880-147911904; As/LbCpf1
agtgtttacacccgcagcgg

SEQ ID NO: 6084 - DNA, 21 bp, Artificial Sequence
  Synthetic: FMR1 O forward X:147911880-147911905; As/LbCpf1
agtgtttacacccgcagcggg

SEQ ID NO: 6085 - DNA, 22 bp, Artificial Sequence
  Synthetic: FMR1 O forward X:147911880-147911906; As/LbCpf1
agtgtttacacccgcagcgggc

SEQ ID NO: 6086 - DNA, 23 bp, Artificial Sequence
  Synthetic: FMR1 O forward X:147911880-147911907; As/LbCpf1
agtgtttacacccgcagcgggcc

SEQ ID NO: 6087 - DNA, 24 bp, Artificial Sequence
  Synthetic: FMR1 O forward X:147911880-147911908; As/LbCpf1
agtgtttacacccgcagcgggccg

SEQ ID NO: 6088 - DNA, 25 bp, Artificial Sequence
  Synthetic: FMR1 O forward X:147911880-147911909; As/LbCpf1
agtgtttacacccgcagcgggccgg

SEQ ID NO: 6089 - DNA, 18 bp, Artificial Sequence
  Synthetic: FMR1 O forward X:147911888-147911910; As/LbCpf1
cacccgcagcgggccggg

SEQ ID NO: 6090 - DNA, 19 bp, Artificial Sequence
  Synthetic: FMR1 O forward X:147911888-147911911; As/LbCpf1
cacccgcagcgggccgggg

SEQ ID NO: 6091 - DNA, 20 bp, Artificial Sequence
  Synthetic: FMR1 O forward X:147911888-147911912; As/LbCpf1
cacccgcagcgggccggggg

SEQ ID NO: 6092 - DNA, 21 bp, Artificial Sequence
  Synthetic: FMR1 O forward X:147911888-147911913; As/LbCpf1
cacccgcagcgggccgggggt

SEQ ID NO: 6093 - DNA, 22 bp, Artificial Sequence
  Synthetic: FMR1 O forward X:147911888-147911914; As/LbCpf1
cacccgcagcgggccgggggtt

SEQ ID NO: 6094 - DNA, 23 bp, Artificial Sequence
  Synthetic: FMR1 O forward X:147911888-147911915; As/LbCpf1
cacccgcagcgggccgggggttc

SEQ ID NO: 6095 - DNA, 24 bp, Artificial Sequence
  Synthetic: FMR1 O forward X:147911888-147911916; As/LbCpf1
cacccgcagcgggccgggggttcg

SEQ ID NO: 6096 - DNA, 25 bp, Artificial Sequence
  Synthetic: FMR1 O forward X:147911888-147911917; As/LbCpf1
cacccgcagcgggccgggggttcgg

SEQ ID NO: 6097 - DNA, 18 bp, Artificial Sequence
  Synthetic: FMR1 O forward X:147912220-147912242; As/LbCpf1
tacaaggtacttggctct

SEQ ID NO: 6098 - DNA, 19 bp, Artificial Sequence
  Synthetic: FMR1 O forward X:147912220-147912243; As/LbCpf1
tacaaggtacttggctcta

SEQ ID NO: 6099 - DNA, 20 bp, Artificial Sequence
  Synthetic: FMR1 O forward X:147912220-147912244; As/LbCpf1
tacaaggtacttggctctag

SEQ ID NO: 6100 - DNA, 21 bp, Artificial Sequence
  Synthetic: FMR1 O forward X:147912220-147912245; As/LbCpf1
tacaaggtacttggctctagg

SEQ ID NO: 6101 - DNA, 22 bp, Artificial Sequence
  Synthetic: FMR1 O forward X:147912220-147912246; As/LbCpf1
tacaaggtacttggctctaggg

SEQ ID NO: 6102 - DNA, 23 bp, Artificial Sequence
  Synthetic: FMR1 O forward X:147912220-147912247; As/LbCpf1
tacaaggtacttggctctagggc

SEQ ID NO: 6103 - DNA, 24 bp, Artificial Sequence
  Synthetic: FMR1 O forward X:147912220-147912248; As/LbCpf1
tacaaggtacttggctctagggca

SEQ ID NO: 6104 - DNA, 25 bp, Artificial Sequence
  Synthetic: FMR1 O forward X:147912220-147912249; As/LbCpf1
tacaaggtacttggctctagggcag

SEQ ID NO: 6105 - DNA, 18 bp, Artificial Sequence
  Synthetic: FMR1 O forward X:147912277-147912299; As/LbCpf1
cttcttggtgtcggcggg

SEQ ID NO: 6106 - DNA, 19 bp, Artificial Sequence
  Synthetic: FMR1 O forward X:147912277-147912300; As/LbCpf1
cttcttggtgtcggcggga

SEQ ID NO: 6107 - DNA, 20 bp, Artificial Sequence
  Synthetic: FMR1 O forward X:147912277-147912301; As/LbCpf1
cttcttggtgtcggcgggag

SEQ ID NO: 6108 - DNA, 21 bp, Artificial Sequence
  Synthetic: FMR1 O forward X:147912277-147912302; As/LbCpf1
cttcttggtgtcggcgggagg

SEQ ID NO: 6109 - DNA, 22 bp, Artificial Sequence
  Synthetic: FMR1 O forward X:147912277-147912303; As/LbCpf1
cttcttggtgtcggcgggaggc

SEQ ID NO: 6110 - DNA, 23 bp, Artificial Sequence
  Synthetic: FMR1 O forward X:147912277-147912304; As/LbCpf1
cttcttggtgtcggcgggaggca

SEQ ID NO: 6111 - DNA, 24 bp, Artificial Sequence
  Synthetic: FMR1 O forward X:147912277-147912305; As/LbCpf1
cttcttggtgtcggcgggaggcag

SEQ ID NO: 6112 - DNA, 25 bp, Artificial Sequence
  Synthetic: FMR1 O forward X:147912277-147912306; As/LbCpf1
cttcttggtgtcggcgggaggcagg

SEQ ID NO: 6113 - DNA, 18 bp, Artificial Sequence
  Synthetic: FMR1 O forward X:147912278-147912300; As/LbCpf1
ttcttggtgtcggcggga

SEQ ID NO: 6114 - DNA, 19 bp, Artificial Sequence
  Synthetic: FMR1 O forward X:147912278-147912301; As/LbCpf1
ttcttggtgtcggcgggag

SEQ ID NO: 6115 - DNA, 20 bp, Artificial Sequence
  Synthetic: FMR1 O forward X:147912278-147912302; As/LbCpf1
ttcttggtgtcggcgggagg

SEQ ID NO: 6116 - DNA, 21 bp, Artificial Sequence
  Synthetic: FMR1 O forward X:147912278-147912303; As/LbCpf1
ttcttggtgtcggcgggaggc

SEQ ID NO: 6117 - DNA, 22 bp, Artificial Sequence
  Synthetic: FMR1 O forward X:147912278-147912304; As/LbCpf1
ttcttggtgtcggcgggaggca

SEQ ID NO: 6118 - DNA, 23 bp, Artificial Sequence
  Synthetic: FMR1 O forward X:147912278-147912305; As/LbCpf1
ttcttggtgtcggcgggaggcag

SEQ ID NO: 6119 - DNA, 24 bp, Artificial Sequence
  Synthetic: FMR1 O forward X:147912278-147912306; As/LbCpf1
ttcttggtgtcggcgggaggcagg

SEQ ID NO: 6120 - DNA, 25 bp, Artificial Sequence
  Synthetic: FMR1 O forward X:147912278-147912307; As/LbCpf1
ttcttggtgtcggcgggaggcaggc

SEQ ID NO: 6121 - DNA, 18 bp, Artificial Sequence
  Synthetic: FMR1 O forward X:147911881-147911903; AsCpf1-1
gtgtttacacccgcagcg

SEQ ID NO: 6122 - DNA, 19 bp, Artificial Sequence
  Synthetic: FMR1 O forward X:147911881-147911904; AsCpf1-1
gtgtttacacccgcagcgg

SEQ ID NO: 6123 - DNA, 20 bp, Artificial Sequence
  Synthetic: FMR1 O forward X:147911881-147911905; AsCpf1-1
gtgtttacacccgcagcggg

SEQ ID NO: 6124 - DNA, 21 bp, Artificial Sequence
  Synthetic: FMR1 O forward X:147911881-147911906; AsCpf1-1
gtgtttacacccgcagcgggc

SEQ ID NO: 6125 - DNA, 22 bp, Artificial Sequence
  Synthetic: FMR1 O forward X:147911881-147911907; AsCpf1-1
gtgtttacacccgcagcgggcc

SEQ ID NO: 6126 - DNA, 23 bp, Artificial Sequence
  Synthetic: FMR1 O forward X:147911881-147911908; AsCpf1-1
gtgtttacacccgcagcgggccg

SEQ ID NO: 6127 - DNA, 24 bp, Artificial Sequence
  Synthetic: FMR1 O forward X:147911881-147911909; AsCpf1-1
gtgtttacacccgcagcgggccgg

SEQ ID NO: 6128 - DNA, 25 bp, Artificial Sequence
  Synthetic: FMR1 O forward X:147911881-147911910; AsCpf1-1
gtgtttacacccgcagcgggccggg

SEQ ID NO: 6129 - DNA, 18 bp, Artificial Sequence
  Synthetic: FMR1 O forward X:147911912-147911934; AsCpf1-1
gcctcagtcaggcgctca

SEQ ID NO: 6130 - DNA, 19 bp, Artificial Sequence
  Synthetic: FMR1 O forward X:147911912-147911935; AsCpf1-1
gcctcagtcaggcgctcag

SEQ ID NO: 6131 - DNA, 20 bp, Artificial Sequence
  Synthetic: FMR1 O forward X:147911912-147911936; AsCpf1-1
gcctcagtcaggcgctcagc

SEQ ID NO: 6132 - DNA, 21 bp, Artificial Sequence
  Synthetic: FMR1 O forward X:147911912-147911937; AsCpf1-1
gcctcagtcaggcgctcagct

SEQ ID NO: 6133 - DNA, 22 bp, Artificial Sequence
  Synthetic: FMR1 O forward X:147911912-147911938; AsCpf1-1
gcctcagtcaggcgctcagctc

SEQ ID NO: 6134 - DNA, 23 bp, Artificial Sequence
  Synthetic: FMR1 O forward X:147911912-147911939; AsCpf1-1
gcctcagtcaggcgctcagctcc

SEQ ID NO: 6135 - DNA, 24 bp, Artificial Sequence
  Synthetic: FMR1 O forward X:147911912-147911940; AsCpf1-1
gcctcagtcaggcgctcagctccg

SEQ ID NO: 6136 - DNA, 25 bp, Artificial Sequence
  Synthetic: FMR1 O forward X:147911912-147911941; AsCpf1-1
gcctcagtcaggcgctcagctccgt

SEQ ID NO: 6137 - DNA, 18 bp, Artificial Sequence
  Synthetic: FMR1 O reverse X:147911933-147911955; AsCpf1-1
ccggaagtgaaaccgaaa

SEQ ID NO: 6138 - DNA, 19 bp, Artificial Sequence
  Synthetic: FMR1 O reverse X:147911933-147911956; AsCpf1-1
ccggaagtgaaaccgaaac

SEQ ID NO: 6139 - DNA, 20 bp, Artificial Sequence
  Synthetic: FMR1 O reverse X:147911933-147911957; AsCpf1-1
ccggaagtgaaaccgaaacg

SEQ ID NO: 6140 - DNA, 21 bp, Artificial Sequence
  Synthetic: FMR1 O reverse X:147911933-147911958; AsCpf1-1
ccggaagtgaaaccgaaacgg

SEQ ID NO: 6141 - DNA, 22 bp, Artificial Sequence
  Synthetic: FMR1 O reverse X:147911933-147911959; AsCpf1-1
ccggaagtgaaaccgaaacgga

SEQ ID NO: 6142 - DNA, 23 bp, Artificial Sequence
  Synthetic: FMR1 O reverse X:147911933-147911960; AsCpf1-1
ccggaagtgaaaccgaaacggag

SEQ ID NO: 6143 - DNA, 24 bp, Artificial Sequence
  Synthetic: FMR1 O reverse X:147911933-147911961; AsCpf1-1
ccggaagtgaaaccgaaacggagc

SEQ ID NO: 6144 - DNA, 25 bp, Artificial Sequence
  Synthetic: FMR1 O reverse X:147911933-147911962; AsCpf1-1
ccggaagtgaaaccgaaacggagct

SEQ ID NO: 6145 - DNA, 18 bp, Artificial Sequence
  Synthetic: FMR1 O reverse X:147912052-147912074; AsCpf1-1
ccgccgccgccgccgccg

SEQ ID NO: 6146 - DNA, 19 bp, Artificial Sequence
  Synthetic: FMR1 O reverse X:147912052-147912075; AsCpf1-1
ccgccgccgccgccgccgc

SEQ ID NO: 6147 - DNA, 20 bp, Artificial Sequence
  Synthetic: FMR1 O reverse X:147912052-147912076; AsCpf1-1
ccgccgccgccgccgccgcc

SEQ ID NO: 6148 - DNA, 21 bp, Artificial Sequence
  Synthetic: FMR1 O reverse X:147912052-147912077; AsCpf1-1
ccgccgccgccgccgccgccg

SEQ ID NO: 6149 - DNA, 22 bp, Artificial Sequence
  Synthetic: FMR1 O reverse X:147912052-147912078; AsCpf1-1
ccgccgccgccgccgccgccgc

SEQ ID NO: 6150 - DNA, 23 bp, Artificial Sequence
  Synthetic: FMR1 O reverse X:147912052-147912079; AsCpf1-1
ccgccgccgccgccgccgccgcc

SEQ ID NO: 6151 - DNA, 24 bp, Artificial Sequence
  Synthetic: FMR1 O reverse X:147912052-147912080; AsCpf1-1
ccgccgccgccgccgccgccgccg

SEQ ID NO: 6152 - DNA, 25 bp, Artificial Sequence
  Synthetic: FMR1 O reverse X:147912052-147912081; AsCpf1-1
ccgccgccgccgccgccgccgccgc

SEQ ID NO: 6153 - DNA, 18 bp, Artificial Sequence
  Synthetic: FMR1 O forward X:147912209-147912231; AsCpf1-1
atggcgctttctacaagg

SEQ ID NO: 6154 - DNA, 19 bp, Artificial Sequence
  Synthetic: FMR1 O forward X:147912209-147912232; AsCpf1-1
atggcgctttctacaaggt

SEQ ID NO: 6155 - DNA, 20 bp, Artificial Sequence
  Synthetic: FMR1 O forward X:147912209-147912233; AsCpf1-1
atggcgctttctacaaggta

SEQ ID NO: 6156 - DNA, 21 bp, Artificial Sequence
  Synthetic: FMR1 O forward X:147912209-147912234; AsCpf1-1
atggcgctttctacaaggtac

SEQ ID NO: 6157 - DNA, 22 bp, Artificial Sequence
  Synthetic: FMR1 O forward X:147912209-147912235; AsCpf1-1
atggcgctttctacaaggtact

SEQ ID NO: 6158 - DNA, 23 bp, Artificial Sequence
  Synthetic: FMR1 O forward X:147912209-147912236; AsCpf1-1
atggcgctttctacaaggtactt

SEQ ID NO: 6159 - DNA, 24 bp, Artificial Sequence
  Synthetic: FMR1 O forward X:147912209-147912237; AsCpf1-1
atggcgctttctacaaggtacttg

SEQ ID NO: 6160 - DNA, 25 bp, Artificial Sequence
  Synthetic: FMR1 O forward X:147912209-147912238; AsCpf1-1
atggcgctttctacaaggtacttgg

SEQ ID NO: 6161 - DNA, 18 bp, Artificial Sequence
  Synthetic: FMR1 O forward X:147912257-147912279; AsCpf1-1
cccttccttccctccctt

SEQ ID NO: 6162 - DNA, 19 bp, Artificial Sequence
  Synthetic: FMR1 O forward X:147912257-147912280; AsCpf1-1
cccttccttccctcccttt

SEQ ID NO: 6163 - DNA, 20 bp, Artificial Sequence
  Synthetic: FMR1 O forward X:147912257-147912281; AsCpf1-1
cccttccttccctccctttt

SEQ ID NO: 6164 - DNA, 21 bp, Artificial Sequence
  Synthetic: FMR1 O forward X:147912257-147912282; AsCpf1-1
cccttccttccctcccttttc

SEQ ID NO: 6165 - DNA, 22 bp, Artificial Sequence
  Synthetic: FMR1 O forward X:147912257-147912283; AsCpf1-1
cccttccttccctcccttttct

SEQ ID NO: 6166 - DNA, 23 bp, Artificial Sequence
  Synthetic: FMR1 O forward X:147912257-147912284; AsCpf1-1
cccttccttccctcccttttctt

SEQ ID NO: 6167 - DNA, 24 bp, Artificial Sequence
  Synthetic: FMR1 O forward X:147912257-147912285; AsCpf1-1
cccttccttccctcccttttcttc

SEQ ID NO: 6168 - DNA, 25 bp, Artificial Sequence
  Synthetic: FMR1 O forward X:147912257-147912286; AsCpf1-1
cccttccttccctcccttttcttct

SEQ ID NO: 6169 - DNA, 18 bp, Artificial Sequence
  Synthetic: FMR1 O forward X:147912264-147912286; AsCpf1-1
ttccctcccttttcttct

SEQ ID NO: 6170 - DNA, 19 bp, Artificial Sequence
  Synthetic: FMR1 O forward X:147912264-147912287; AsCpf1-1
ttccctcccttttcttctt

SEQ ID NO: 6171 - DNA, 20 bp, Artificial Sequence
  Synthetic: FMR1 O forward X:147912264-147912288; AsCpf1-1
ttccctcccttttcttcttg

SEQ ID NO: 6172 - DNA, 21 bp, Artificial Sequence
  Synthetic: FMR1 O forward X:147912264-147912289; AsCpf1-1
ttccctcccttttcttcttgg

SEQ ID NO: 6173 - DNA, 22 bp, Artificial Sequence
  Synthetic: FMR1 O forward X:147912264-147912290; AsCpf1-1
ttccctcccttttcttcttggt

SEQ ID NO: 6174 - DNA, 23 bp, Artificial Sequence
  Synthetic: FMR1 O forward X:147912264-147912291; AsCpf1-1
ttccctcccttttcttcttggtg

SEQ ID NO: 6175 - DNA, 24 bp, Artificial Sequence
  Synthetic: FMR1 O forward X:147912264-147912292; AsCpf1-1
ttccctcccttttcttcttggtgt

SEQ ID NO: 6176 - DNA, 25 bp, Artificial Sequence
  Synthetic: FMR1 O forward X:147912264-147912293; AsCpf1-1
ttccctcccttttcttcttggtgtc

SEQ ID NO: 6177 - DNA, 18 bp, Artificial Sequence
  Synthetic: FMR1 O forward X:147912268-147912290; AsCpf1-1
ctcccttttcttcttggt

SEQ ID NO: 6178 - DNA, 19 bp, Artificial Sequence
  Synthetic: FMR1 O forward X:147912268-147912291; AsCpf1-1
ctcccttttcttcttggtg

SEQ ID NO: 6179 - DNA, 20 bp, Artificial Sequence
  Synthetic: FMR1 O forward X:147912268-147912292; AsCpf1-1
ctcccttttcttcttggtgt

SEQ ID NO: 6180 - DNA, 21 bp, Artificial Sequence
  Synthetic: FMR1 O forward X:147912268-147912293; AsCpf1-1
ctcccttttcttcttggtgtc

SEQ ID NO: 6181 - DNA, 22 bp, Artificial Sequence
  Synthetic: FMR1 O forward X:147912268-147912294; AsCpf1-1
ctcccttttcttcttggtgtcg

SEQ ID NO: 6182 - DNA, 23 bp, Artificial Sequence
  Synthetic: FMR1 O forward X:147912268-147912295; AsCpf1-1
ctcccttttcttcttggtgtcgg

SEQ ID NO: 6183 - DNA, 24 bp, Artificial Sequence
  Synthetic: FMR1 O forward X:147912268-147912296; AsCpf1-1
ctcccttttcttcttggtgtcggc

SEQ ID NO: 6184 - DNA, 25 bp, Artificial Sequence
  Synthetic: FMR1 O forward X:147912268-147912297; AsCpf1-1
ctcccttttcttcttggtgtcggcg

SEQ ID NO: 6185 - DNA, 18 bp, Artificial Sequence
  Synthetic: FMR1 O forward X:147912269-147912291; AsCpf1-1
tcccttttcttcttggtg

SEQ ID NO: 6186 - DNA, 19 bp, Artificial Sequence
  Synthetic: FMR1 O forward X:147912269-147912292; AsCpf1-1
tcccttttcttcttggtgt

SEQ ID NO: 6187 - DNA, 20 bp, Artificial Sequence
  Synthetic: FMR1 O forward X:147912269-147912293; AsCpf1-1
tcccttttcttcttggtgtc

SEQ ID NO: 6188 - DNA, 21 bp, Artificial Sequence
  Synthetic: FMR1 O forward X:147912269-147912294; AsCpf1-1
tcccttttcttcttggtgtcg

SEQ ID NO: 6189 - DNA, 22 bp, Artificial Sequence
  Synthetic: FMR1 O forward X:147912269-147912295; AsCpf1-1
tcccttttcttcttggtgtcgg

SEQ ID NO: 6190 - DNA, 23 bp, Artificial Sequence
  Synthetic: FMR1 O forward X:147912269-147912296; AsCpf1-1
tcccttttcttcttggtgtcggc

SEQ ID NO: 6191 - DNA, 24 bp, Artificial Sequence
  Synthetic: FMR1 O forward X:147912269-147912297; AsCpf1-1
tcccttttcttcttggtgtcggcg

SEQ ID NO: 6192 - DNA, 25 bp, Artificial Sequence
  Synthetic: FMR1 O forward X:147912269-147912298; AsCpf1-1
tcccttttcttcttggtgtcggcgg

SEQ ID NO: 6193 - DNA, 18 bp, Artificial Sequence
  Synthetic: FMR1 O reverse X:147912271-147912293; AsCpf1-1
gccgacaccaagaagaaa

SEQ ID NO: 6194 - DNA, 19 bp, Artificial Sequence
  Synthetic: FMR1 O reverse X:147912271-147912294; AsCpf1-1
gccgacaccaagaagaaaa

SEQ ID NO: 6195 - DNA, 20 bp, Artificial Sequence
  Synthetic: FMR1 O reverse X:147912271-147912295; AsCpf1-1
gccgacaccaagaagaaaag

SEQ ID NO: 6196 - DNA, 21 bp, Artificial Sequence
  Synthetic: FMR1 O reverse X:147912271-147912296; AsCpf1-1
gccgacaccaagaagaaaagg

SEQ ID NO: 6197 - DNA, 22 bp, Artificial Sequence
  Synthetic: FMR1 O reverse X:147912271-147912297; AsCpf1-1
gccgacaccaagaagaaaaggg

SEQ ID NO: 6198 - DNA, 23 bp, Artificial Sequence
  Synthetic: FMR1 O reverse X:147912271-147912298; AsCpf1-1
gccgacaccaagaagaaaaggga

SEQ ID NO: 6199 - DNA, 24 bp, Artificial Sequence
  Synthetic: FMR1 O reverse X:147912271-147912299; AsCpf1-1
gccgacaccaagaagaaaagggag

SEQ ID NO: 6200 - DNA, 25 bp, Artificial Sequence
  Synthetic: FMR1 O reverse X:147912271-147912300; AsCpf1-1
gccgacaccaagaagaaaagggagg

SEQ ID NO: 6201 - DNA, 18 bp, Artificial Sequence
  Synthetic: FMR1 O forward X:147912273-147912295; AsCpf1-1
ttttcttcttggtgtcgg

SEQ ID NO: 6202 - DNA, 19 bp, Artificial Sequence
  Synthetic: FMR1 O forward X:147912273-147912296; AsCpf1-1
ttttcttcttggtgtcggc

SEQ ID NO: 6203 - DNA, 20 bp, Artificial Sequence
  Synthetic: FMR1 O forward X:147912273-147912297; AsCpf1-1
ttttcttcttggtgtcggcg

SEQ ID NO: 6204 - DNA, 21 bp, Artificial Sequence
  Synthetic: FMR1 O forward X:147912273-147912298; AsCpf1-1
ttttcttcttggtgtcggcgg

SEQ ID NO: 6205 - DNA, 22 bp, Artificial Sequence
  Synthetic: FMR1 O forward X:147912273-147912299; AsCpf1-1
ttttcttcttggtgtcggcggg

SEQ ID NO: 6206 - DNA, 23 bp, Artificial Sequence
  Synthetic: FMR1 O forward X:147912273-147912300; AsCpf1-1
ttttcttcttggtgtcggcggga

SEQ ID NO: 6207 - DNA, 24 bp, Artificial Sequence
  Synthetic: FMR1 O forward X:147912273-147912301; AsCpf1-1
ttttcttcttggtgtcggcgggag

SEQ ID NO: 6208 - DNA, 25 bp, Artificial Sequence
  Synthetic: FMR1 O forward X:147912273-147912302; AsCpf1-1
ttttcttcttggtgtcggcgggagg

SEQ ID NO: 6209 - DNA, 25 bp, Artificial Sequence
  Synthetic: FMR1 O forward X:147911875-147911906; SaCas9
cgtggtttcagtgtttacacccgca

SEQ ID NO: 6210 - DNA, 24 bp, Artificial Sequence
  Synthetic: FMR1 O forward X:147911876-147911906; SaCas9
gtggtttcagtgtttacacccgca

SEQ ID NO: 6211 - DNA, 23 bp, Artificial Sequence
  Synthetic: FMR1 O forward X:147911877-147911906; SaCas9
tggtttcagtgtttacacccgca

SEQ ID NO: 6212 - DNA, 22 bp, Artificial Sequence
  Synthetic: FMR1 O forward X:147911878-147911906; SaCas9
ggtttcagtgtttacacccgca

SEQ ID NO: 6213 - DNA, 21 bp, Artificial Sequence
  Synthetic: FMR1 O forward X:147911879-147911906; SaCas9
gtttcagtgtttacacccgca

SEQ ID NO: 6214 - DNA, 20 bp, Artificial Sequence
  Synthetic: FMR1 O forward X:147911880-147911906; SaCas9
tttcagtgtttacacccgca

SEQ ID NO: 6215 - DNA, 19 bp, Artificial Sequence
  Synthetic: FMR1 O forward X:147911881-147911906; SaCas9
ttcagtgtttacacccgca

SEQ ID NO: 6216 - DNA, 18 bp, Artificial Sequence
  Synthetic: FMR1 O forward X:147911882-147911906; SaCas9
tcagtgtttacacccgca

SEQ ID NO: 6217 - DNA, 25 bp, Artificial Sequence
  Synthetic: FMR1 O forward X:147911880-147911911; SaCas9
tttcagtgtttacacccgcagcggg

SEQ ID NO: 6218 - DNA, 24 bp, Artificial Sequence
  Synthetic: FMR1 O forward X:147911881-147911911; SaCas9
ttcagtgtttacacccgcagcggg

SEQ ID NO: 6219 - DNA, 23 bp, Artificial Sequence
  Synthetic: FMR1 O forward X:147911882-147911911; SaCas9
tcagtgtttacacccgcagcggg

SEQ ID NO: 6220 - DNA, 22 bp, Artificial Sequence
  Synthetic: FMR1 O forward X:147911883-147911911; SaCas9
cagtgtttacacccgcagcggg

SEQ ID NO: 6221 - DNA, 21 bp, Artificial Sequence
  Synthetic: FMR1 O forward X:147911884-147911911; SaCas9
agtgtttacacccgcagcggg

SEQ ID NO: 6222 - DNA, 20 bp, Artificial Sequence
  Synthetic: FMR1 O forward X:147911885-147911911; SaCas9
gtgtttacacccgcagcggg

SEQ ID NO: 6223 - DNA, 19 bp, Artificial Sequence
  Synthetic: FMR1 O forward X:147911886-147911911; SaCas9
tgtttacacccgcagcggg

SEQ ID NO: 6224 - DNA, 18 bp, Artificial Sequence
  Synthetic: FMR1 O forward X:147911887-147911911; SaCas9
gtttacacccgcagcggg

SEQ ID NO: 6225 - DNA, 25 bp, Artificial Sequence
  Synthetic: FMR1 O reverse X:147911880-147911911; SaCas9
ccccggcccgctgcgggtgtaaaca

SEQ ID NO: 6226 - DNA, 24 bp, Artificial Sequence
  Synthetic: FMR1 O reverse X:147911881-147911911; SaCas9
cccggcccgctgcgggtgtaaaca

SEQ ID NO: 6227 - DNA, 23 bp, Artificial Sequence
  Synthetic: FMR1 O reverse X:147911882-147911911; SaCas9
ccggcccgctgcgggtgtaaaca

SEQ ID NO: 6228 - DNA, 22 bp, Artificial Sequence
  Synthetic: FMR1 O reverse X:147911883-147911911; SaCas9
cggcccgctgcgggtgtaaaca

SEQ ID NO: 6229 - DNA, 21 bp, Artificial Sequence
  Synthetic: FMR1 O reverse X:147911884-147911911; SaCas9
ggcccgctgcgggtgtaaaca

SEQ ID NO: 6230 - DNA, 20 bp, Artificial Sequence
  Synthetic: FMR1 O reverse X:147911885-147911911; SaCas9
gcccgctgcgggtgtaaaca

SEQ ID NO: 6231 - DNA, 19 bp, Artificial Sequence
  Synthetic: FMR1 O reverse X:147911886-147911911; SaCas9
cccgctgcgggtgtaaaca

SEQ ID NO: 6232 - DNA, 18 bp, Artificial Sequence
  Synthetic: FMR1 O reverse X:147911887-147911911; SaCas9
ccgctgcgggtgtaaaca

SEQ ID NO: 6233 - DNA, 25 bp, Artificial Sequence
  Synthetic: FMR1 O forward X:147911881-147911912; SaCas9
ttcagtgtttacacccgcagcgggc

SEQ ID NO: 6234 - DNA, 24 bp, Artificial Sequence
  Synthetic: FMR1 O forward X:147911882-147911912; SaCas9
tcagtgtttacacccgcagcgggc

SEQ ID NO: 6235 - DNA, 23 bp, Artificial Sequence
  Synthetic: FMR1 O forward X:147911883-147911912; SaCas9
cagtgtttacacccgcagcgggc

SEQ ID NO: 6236 - DNA, 22 bp, Artificial Sequence
  Synthetic: FMR1 O forward X:147911884-147911912; SaCas9
agtgtttacacccgcagcgggc

SEQ ID NO: 6237 - DNA, 21 bp, Artificial Sequence
  Synthetic: FMR1 O forward X:147911885-147911912; SaCas9
gtgtttacacccgcagcgggc

SEQ ID NO: 6238 - DNA, 20 bp, Artificial Sequence
  Synthetic: FMR1 O forward X:147911886-147911912; SaCas9
tgtttacacccgcagcgggc

SEQ ID NO: 6239 - DNA, 19 bp, Artificial Sequence
  Synthetic: FMR1 O forward X:147911887-147911912; SaCas9
gtttacacccgcagcgggc

SEQ ID NO: 6240 - DNA, 18 bp, Artificial Sequence
  Synthetic: FMR1 O forward X:147911888-147911912; SaCas9
tttacacccgcagcgggc

SEQ ID NO: 6241 - DNA, 25 bp, Artificial Sequence
  Synthetic: FMR1 O forward X:147911882-147911913; SaCas9
tcagtgtttacacccgcagcgggcc

SEQ ID NO: 6242 - DNA, 24 bp, Artificial Sequence
  Synthetic: FMR1 O forward X:147911883-147911913; SaCas9
cagtgtttacacccgcagcgggcc

SEQ ID NO: 6243 - DNA, 23 bp, Artificial Sequence
  Synthetic: FMR1 O forward X:147911884-147911913; SaCas9
agtgtttacacccgcagcgggcc

SEQ ID NO: 6244 - DNA, 22 bp, Artificial Sequence
  Synthetic: FMR1 O forward X:147911885-147911913; SaCas9
gtgtttacacccgcagcgggcc

SEQ ID NO: 6245 - DNA, 21 bp, Artificial Sequence
  Synthetic: FMR1 O forward X:147911886-147911913; SaCas9
tgtttacacccgcagcgggcc

SEQ ID NO: 6246 - DNA, 20 bp, Artificial Sequence
  Synthetic: FMR1 O forward X:147911887-147911913; SaCas9
gtttacacccgcagcgggcc

SEQ ID NO: 6247 - DNA, 19 bp, Artificial Sequence
  Synthetic: FMR1 O forward X:147911888-147911913; SaCas9
tttacacccgcagcgggcc

SEQ ID NO: 6248 - DNA, 18 bp, Artificial Sequence
  Synthetic: FMR1 O forward X:147911889-147911913; SaCas9
ttacacccgcagcgggcc

SEQ ID NO: 6249 - DNA, 25 bp, Artificial Sequence
  Synthetic: FMR1 O reverse X:147911893-147911924; SaCas9
actgaggccgaacccccggcccgct

SEQ ID NO: 6250 - DNA, 24 bp, Artificial Sequence
  Synthetic: FMR1 O reverse X:147911894-147911924; SaCas9
ctgaggccgaacccccggcccgct

SEQ ID NO: 6251 - DNA, 23 bp, Artificial Sequence
  Synthetic: FMR1 O reverse X:147911895-147911924; SaCas9
tgaggccgaacccccggcccgct

SEQ ID NO: 6252 - DNA, 22 bp, Artificial Sequence
  Synthetic: FMR1 O reverse X:147911896-147911924; SaCas9
gaggccgaacccccggcccgct

SEQ ID NO: 6253 - DNA, 21 bp, Artificial Sequence
  Synthetic: FMR1 O reverse X:147911897-147911924; SaCas9
aggccgaacccccggcccgct

SEQ ID NO: 6254 - DNA, 20 bp, Artificial Sequence
  Synthetic: FMR1 O reverse X:147911898-147911924; SaCas9
ggccgaacccccggcccgct

SEQ ID NO: 6255 - DNA, 19 bp, Artificial Sequence
  Synthetic: FMR1 O reverse X:147911899-147911924; SaCas9
gccgaacccccggcccgct

SEQ ID NO: 6256 - DNA, 18 bp, Artificial Sequence
  Synthetic: FMR1 O reverse X:147911900-147911924; SaCas9
ccgaacccccggcccgct

SEQ ID NO: 6257 - DNA, 25 bp, Artificial Sequence
  Synthetic: FMR1 O reverse X:147911911-147911942; SaCas9
aacggagctgagcgcctgactgagg

SEQ ID NO: 6258 - DNA, 24 bp, Artificial Sequence
  Synthetic: FMR1 O reverse X:147911912-147911942; SaCas9
acggagctgagcgcctgactgagg

SEQ ID NO: 6259 - DNA, 23 bp, Artificial Sequence
  Synthetic: FMR1 O reverse X:147911913-147911942; SaCas9
cggagctgagcgcctgactgagg

SEQ ID NO: 6260 - DNA, 22 bp, Artificial Sequence
  Synthetic: FMR1 O reverse X:147911914-147911942; SaCas9
ggagctgagcgcctgactgagg

SEQ ID NO: 6261 - DNA, 21 bp, Artificial Sequence
  Synthetic: FMR1 O reverse X:147911915-147911942; SaCas9
gagctgagcgcctgactgagg

SEQ ID NO: 6262 - DNA, 20 bp, Artificial Sequence
  Synthetic: FMR1 O reverse X:147911916-147911942; SaCas9
agctgagcgcctgactgagg

SEQ ID NO: 6263 - DNA, 19 bp, Artificial Sequence
  Synthetic: FMR1 O reverse X:147911917-147911942; SaCas9
gctgagcgcctgactgagg

SEQ ID NO: 6264 - DNA, 18 bp, Artificial Sequence
  Synthetic: FMR1 O reverse X:147911918-147911942; SaCas9
ctgagcgcctgactgagg

SEQ ID NO: 6265 - DNA, 25 bp, Artificial Sequence
  Synthetic: FMR1 O reverse X:147911917-147911948; SaCas9
aaccgaaacggagctgagcgcctga

SEQ ID NO: 6266 - DNA, 24 bp, Artificial Sequence
  Synthetic: FMR1 O reverse X:147911918-147911948; SaCas9
accgaaacggagctgagcgcctga

SEQ ID NO: 6267 - DNA, 23 bp, Artificial Sequence
  Synthetic: FMR1 O reverse X:147911919-147911948; SaCas9
ccgaaacggagctgagcgcctga

SEQ ID NO: 6268 - DNA, 22 bp, Artificial Sequence
  Synthetic: FMR1 O reverse X:147911920-147911948; SaCas9
cgaaacggagctgagcgcctga

SEQ ID NO: 6269 - DNA, 21 bp, Artificial Sequence
  Synthetic: FMR1 O reverse X:147911921-147911948; SaCas9
gaaacggagctgagcgcctga

SEQ ID NO: 6270 - DNA, 20 bp, Artificial Sequence
  Synthetic: FMR1 O reverse X:147911922-147911948; SaCas9
aaacggagctgagcgcctga

SEQ ID NO: 6271 - DNA, 19 bp, Artificial Sequence
  Synthetic: FMR1 O reverse X:147911923-147911948; SaCas9
aacggagctgagcgcctga

SEQ ID NO: 6272 - DNA, 18 bp, Artificial Sequence
  Synthetic: FMR1 O reverse X:147911924-147911948; SaCas9
acggagctgagcgcctga

SEQ ID NO: 6273 - DNA, 25 bp, Artificial Sequence
  Synthetic: FMR1 O reverse X:147911929-147911960; SaCas9
caccggaagtgaaaccgaaacggag

SEQ ID NO: 6274 - DNA, 24 bp, Artificial Sequence
  Synthetic: FMR1 O reverse X:147911930-147911960; SaCas9
accggaagtgaaaccgaaacggag

SEQ ID NO: 6275 - DNA, 23 bp, Artificial Sequence
  Synthetic: FMR1 O reverse X:147911931-147911960; SaCas9
ccggaagtgaaaccgaaacggag

SEQ ID NO: 6276 - DNA, 22 bp, Artificial Sequence
  Synthetic: FMR1 O reverse X:147911932-147911960; SaCas9
cggaagtgaaaccgaaacggag

SEQ ID NO: 6277 - DNA, 21 bp, Artificial Sequence
  Synthetic: FMR1 O reverse X:147911933-147911960; SaCas9
ggaagtgaaaccgaaacggag

SEQ ID NO: 6278 - DNA, 20 bp, Artificial Sequence
  Synthetic: FMR1 O reverse X:147911934-147911960; SaCas9
gaagtgaaaccgaaacggag

SEQ ID NO: 6279 - DNA, 19 bp, Artificial Sequence
  Synthetic: FMR1 O reverse X:147911935-147911960; SaCas9
aagtgaaaccgaaacggag

SEQ ID NO: 6280 - DNA, 18 bp, Artificial Sequence
  Synthetic: FMR1 O reverse X:147911936-147911960; SaCas9
agtgaaaccgaaacggag

SEQ ID NO: 6281 - DNA, 25 bp, Artificial Sequence
  Synthetic: FMR1 O reverse X:147911934-147911965; SaCas9
ccctccaccggaagtgaaaccgaaa

SEQ ID NO: 6282 - DNA, 24 bp, Artificial Sequence
  Synthetic: FMR1 O reverse X:147911935-147911965; SaCas9
cctccaccggaagtgaaaccgaaa

SEQ ID NO: 6283 - DNA, 23 bp, Artificial Sequence
  Synthetic: FMR1 O reverse X:147911936-147911965; SaCas9
ctccaccggaagtgaaaccgaaa

SEQ ID NO: 6284 - DNA, 22 bp, Artificial Sequence
  Synthetic: FMR1 O reverse X:147911937-147911965; SaCas9
tccaccggaagtgaaaccgaaa

SEQ ID NO: 6285 - DNA, 21 bp, Artificial Sequence
  Synthetic: FMR1 O reverse X:147911938-147911965; SaCas9
ccaccggaagtgaaaccgaaa

SEQ ID NO: 6286 - DNA, 20 bp, Artificial Sequence
  Synthetic: FMR1 O reverse X:147911939-147911965; SaCas9
caccggaagtgaaaccgaaa

SEQ ID NO: 6287 - DNA, 19 bp, Artificial Sequence
  Synthetic: FMR1 O reverse X:147911940-147911965; SaCas9
accggaagtgaaaccgaaa

SEQ ID NO: 6288 - DNA, 18 bp, Artificial Sequence
  Synthetic: FMR1 O reverse X:147911941-147911965; SaCas9
ccggaagtgaaaccgaaa

SEQ ID NO: 6289 - DNA, 25 bp, Artificial Sequence
  Synthetic: FMR1 O reverse X:147911935-147911966; SaCas9
gccctccaccggaagtgaaaccgaa

SEQ ID NO: 6290 - DNA, 24 bp, Artificial Sequence
  Synthetic: FMR1 O reverse X:147911936-147911966; SaCas9
ccctccaccggaagtgaaaccgaa

SEQ ID NO: 6291 - DNA, 23 bp, Artificial Sequence
  Synthetic: FMR1 O reverse X:147911937-147911966; SaCas9
cctccaccggaagtgaaaccgaa

SEQ ID NO: 6292 - DNA, 22 bp, Artificial Sequence
  Synthetic: FMR1 O reverse X:147911938-147911966; SaCas9
ctccaccggaagtgaaaccgaa

SEQ ID NO: 6293 - DNA, 21 bp, Artificial Sequence
  Synthetic: FMR1 O reverse X:147911939-147911966; SaCas9
tccaccggaagtgaaaccgaa

SEQ ID NO: 6294 - DNA, 20 bp, Artificial Sequence
  Synthetic: FMR1 O reverse X:147911940-147911966; SaCas9
ccaccggaagtgaaaccgaa

SEQ ID NO: 6295 - DNA, 19 bp, Artificial Sequence
  Synthetic: FMR1 O reverse X:147911941-147911966; SaCas9
caccggaagtgaaaccgaa

SEQ ID NO: 6296 - DNA, 18 bp, Artificial Sequence
  Synthetic: FMR1 O reverse X:147911942-147911966; SaCas9
accggaagtgaaaccgaa

SEQ ID NO: 6297 - DNA, 25 bp, Artificial Sequence
  Synthetic: FMR1 O forward X:147912051-147912082; SaCas9
ggcggcggcggcggcggcggcggcg

SEQ ID NO: 6298 - DNA, 24 bp, Artificial Sequence
  Synthetic: FMR1 O forward X:147912052-147912082; SaCas9
gcggcggcggcggcggcggcggcg

SEQ ID NO: 6299 - DNA, 23 bp, Artificial Sequence
  Synthetic: FMR1 O forward X:147912053-147912082; SaCas9
cggcggcggcggcggcggcggcg

SEQ ID NO: 6300 - DNA, 22 bp, Artificial Sequence
  Synthetic: FMR1 O forward X:147912054-147912082; SaCas9
ggcggcggcggcggcggcggcg

SEQ ID NO: 6301 - DNA, 21 bp, Artificial Sequence
  Synthetic: FMR1 O forward X:147912055-147912082; SaCas9
gcggcggcggcggcggcggcg

SEQ ID NO: 6302 - DNA, 20 bp, Artificial Sequence
  Synthetic: FMR1 O forward X:147912056-147912082; SaCas9
cggcggcggcggcggcggcg

SEQ ID NO: 6303 - DNA, 19 bp, Artificial Sequence
  Synthetic: FMR1 O forward X:147912057-147912082; SaCas9
ggcggcggcggcggcggcg

SEQ ID NO: 6304 - DNA, 18 bp, Artificial Sequence
  Synthetic: FMR1 O forward X:147912058-147912082; SaCas9
gcggcggcggcggcggcg

SEQ ID NO: 6305 - DNA, 25 bp, Artificial Sequence
  Synthetic: FMR1 O forward X:147912052-147912083; SaCas9
gcggcggcggcggcggcggcggcgg

SEQ ID NO: 6306 - DNA, 24 bp, Artificial Sequence
  Synthetic: FMR1 O forward X:147912053-147912083; SaCas9
cggcggcggcggcggcggcggcgg

SEQ ID NO: 6307 - DNA, 23 bp, Artificial Sequence
  Synthetic: FMR1 O forward X:147912054-147912083; SaCas9
ggcggcggcggcggcggcggcgg

SEQ ID NO: 6308 - DNA, 22 bp, Artificial Sequence
  Synthetic: FMR1 O forward X:147912055-147912083; SaCas9
gcggcggcggcggcggcggcgg

SEQ ID NO: 6309 - DNA, 21 bp, Artificial Sequence
  Synthetic: FMR1 O forward X:147912056-147912083; SaCas9
cggcggcggcggcggcggcgg

SEQ ID NO: 6310 - DNA, 20 bp, Artificial Sequence
  Synthetic: FMR1 O forward X:147912057-147912083; SaCas9
ggcggcggcggcggcggcgg

SEQ ID NO: 6311 - DNA, 19 bp, Artificial Sequence
  Synthetic: FMR1 O forward X:147912058-147912083; SaCas9
gcggcggcggcggcggcgg

SEQ ID NO: 6312 - DNA, 18 bp, Artificial Sequence
  Synthetic: FMR1 O forward X:147912059-147912083; SaCas9
cggcggcggcggcggcgg

SEQ ID NO: 6313 - DNA, 25 bp, Artificial Sequence
  Synthetic: FMR1 O forward X:147912169-147912200; SaCas9
tgaagagaagatggaggagctggtg

SEQ ID NO: 6314 - DNA, 24 bp, Artificial Sequence
  Synthetic: FMR1 O forward X:147912170-147912200; SaCas9
gaagagaagatggaggagctggtg

SEQ ID NO: 6315 - DNA, 23 bp, Artificial Sequence
  Synthetic: FMR1 O forward X:147912171-147912200; SaCas9
aagagaagatggaggagctggtg

SEQ ID NO: 6316 - DNA, 22 bp, Artificial Sequence
  Synthetic: FMR1 O forward X:147912172-147912200; SaCas9
agagaagatggaggagctggtg

SEQ ID NO: 6317 - DNA, 21 bp, Artificial Sequence
  Synthetic: FMR1 O forward X:147912173-147912200; SaCas9
gagaagatggaggagctggtg

SEQ ID NO: 6318 - DNA, 20 bp, Artificial Sequence
  Synthetic: FMR1 O forward X:147912174-147912200; SaCas9
agaagatggaggagctggtg

SEQ ID NO: 6319 - DNA, 19 bp, Artificial Sequence
  Synthetic: FMR1 O forward X:147912175-147912200; SaCas9
gaagatggaggagctggtg

SEQ ID NO: 6320 - DNA, 18 bp, Artificial Sequence
  Synthetic: FMR1 O forward X:147912176-147912200; SaCas9
aagatggaggagctggtg

SEQ ID NO: 6321 - DNA, 25 bp, Artificial Sequence
  Synthetic: FMR1 O forward X:147912170-147912201; SaCas9
gaagagaagatggaggagctggtgg

SEQ ID NO: 6322 - DNA, 24 bp, Artificial Sequence
  Synthetic: FMR1 O forward X:147912171-147912201; SaCas9
aagagaagatggaggagctggtgg

SEQ ID NO: 6323 - DNA, 23 bp, Artificial Sequence
  Synthetic: FMR1 O forward X:147912172-147912201; SaCas9
agagaagatggaggagctggtgg

SEQ ID NO: 6324 - DNA, 22 bp, Artificial Sequence
  Synthetic: FMR1 O forward X:147912173-147912201; SaCas9
gagaagatggaggagctggtgg

SEQ ID NO: 6325 - DNA, 21 bp, Artificial Sequence
  Synthetic: FMR1 O forward X:147912174-147912201; SaCas9
agaagatggaggagctggtgg

SEQ ID NO: 6326 - DNA, 20 bp, Artificial Sequence
  Synthetic: FMR1 O forward X:147912175-147912201; SaCas9
gaagatggaggagctggtgg

SEQ ID NO: 6327 - DNA, 19 bp, Artificial Sequence
  Synthetic: FMR1 O forward X:147912176-147912201; SaCas9
aagatggaggagctggtgg

SEQ ID NO: 6328 - DNA, 18 bp, Artificial Sequence
  Synthetic: FMR1 O forward X:147912177-147912201; SaCas9
agatggaggagctggtgg

SEQ ID NO: 6329 - DNA, 25 bp, Artificial Sequence
  Synthetic: FMR1 O forward X:147912177-147912208; SaCas9
agatggaggagctggtggtggaagt

SEQ ID NO: 6330 - DNA, 24 bp, Artificial Sequence
  Synthetic: FMR1 O forward X:147912178-147912208; SaCas9
gatggaggagctggtggtggaagt

SEQ ID NO: 6331 - DNA, 23 bp, Artificial Sequence
  Synthetic: FMR1 O forward X:147912179-147912208; SaCas9
atggaggagctggtggtggaagt

SEQ ID NO: 6332 - DNA, 22 bp, Artificial Sequence
  Synthetic: FMR1 O forward X:147912180-147912208; SaCas9
tggaggagctggtggtggaagt

SEQ ID NO: 6333 - DNA, 21 bp, Artificial Sequence
  Synthetic: FMR1 O forward X:147912181-147912208; SaCas9
ggaggagctggtggtggaagt

SEQ ID NO: 6334 - DNA, 20 bp, Artificial Sequence
  Synthetic: FMR1 O forward X:147912182-147912208; SaCas9
gaggagctggtggtggaagt

SEQ ID NO: 6335 - DNA, 19 bp, Artificial Sequence
  Synthetic: FMR1 O forward X:147912183-147912208; SaCas9
aggagctggtggtggaagt

SEQ ID NO: 6336 - DNA, 18 bp, Artificial Sequence
  Synthetic: FMR1 O forward X:147912184-147912208; SaCas9
ggagctggtggtggaagt

SEQ ID NO: 6337 - DNA, 25 bp, Artificial Sequence
  Synthetic: FMR1 O forward X:147912178-147912209; SaCas9
gatggaggagctggtggtggaagtg

SEQ ID NO: 6338 - DNA, 24 bp, Artificial Sequence
  Synthetic: FMR1 O forward X:147912179-147912209; SaCas9
atggaggagctggtggtggaagtg

SEQ ID NO: 6339 - DNA, 23 bp, Artificial Sequence
  Synthetic: FMR1 O forward X:147912180-147912209; SaCas9
tggaggagctggtggtggaagtg

SEQ ID NO: 6340 - DNA, 22 bp, Artificial Sequence
  Synthetic: FMR1 O forward X:147912181-147912209; SaCas9
ggaggagctggtggtggaagtg

SEQ ID NO: 6341 - DNA, 21 bp, Artificial Sequence
  Synthetic: FMR1 O forward X:147912182-147912209; SaCas9
gaggagctggtggtggaagtg

SEQ ID NO: 6342 - DNA, 20 bp, Artificial Sequence
  Synthetic: FMR1 O forward X:147912183-147912209; SaCas9
aggagctggtggtggaagtg

SEQ ID NO: 6343 - DNA, 19 bp, Artificial Sequence
  Synthetic: FMR1 O forward X:147912184-147912209; SaCas9
ggagctggtggtggaagtg

SEQ ID NO: 6344 - DNA, 18 bp, Artificial Sequence
  Synthetic: FMR1 O forward X:147912185-147912209; SaCas9
gagctggtggtggaagtg

SEQ ID NO: 6345 - DNA, 25 bp, Artificial Sequence
  Synthetic: FMR1 O reverse X:147912207-147912238; SaCas9
ccaagtaccttgtagaaagcgccat

SEQ ID NO: 6346 - DNA, 24 bp, Artificial Sequence
  Synthetic: FMR1 O reverse X:147912208-147912238; SaCas9
caagtaccttgtagaaagcgccat

SEQ ID NO: 6347 - DNA, 23 bp, Artificial Sequence
  Synthetic: FMR1 O reverse X:147912209-147912238; SaCas9
aagtaccttgtagaaagcgccat

SEQ ID NO: 6348 - DNA, 22 bp, Artificial Sequence
  Synthetic: FMR1 O reverse X:147912210-147912238; SaCas9
agtaccttgtagaaagcgccat

SEQ ID NO: 6349 - DNA, 21 bp, Artificial Sequence
  Synthetic: FMR1 O reverse X:147912211-147912238; SaCas9
gtaccttgtagaaagcgccat

SEQ ID NO: 6350 - DNA, 20 bp, Artificial Sequence
  Synthetic: FMR1 O reverse X:147912212-147912238; SaCas9
taccttgtagaaagcgccat

SEQ ID NO: 6351 - DNA, 19 bp, Artificial Sequence
  Synthetic: FMR1 O reverse X:147912213-147912238; SaCas9
accttgtagaaagcgccat

SEQ ID NO: 6352 - DNA, 18 bp, Artificial Sequence
  Synthetic: FMR1 O reverse X:147912214-147912238; SaCas9
ccttgtagaaagcgccat

SEQ ID NO: 6353 - DNA, 25 bp, Artificial Sequence
  Synthetic: FMR1 O reverse X:147912208-147912239; SaCas9
gccaagtaccttgtagaaagcgcca

SEQ ID NO: 6354 - DNA, 24 bp, Artificial Sequence
  Synthetic: FMR1 O reverse X:147912209-147912239; SaCas9
ccaagtaccttgtagaaagcgcca

SEQ ID NO: 6355 - DNA, 23 bp, Artificial Sequence
  Synthetic: FMR1 O reverse X:147912210-147912239; SaCas9
caagtaccttgtagaaagcgcca

SEQ ID NO: 6356 - DNA, 22 bp, Artificial Sequence
  Synthetic: FMR1 O reverse X:147912211-147912239; SaCas9
aagtaccttgtagaaagcgcca

SEQ ID NO: 6357 - DNA, 21 bp, Artificial Sequence
  Synthetic: FMR1 O reverse X:147912212-147912239; SaCas9
agtaccttgtagaaagcgcca

SEQ ID NO: 6358 - DNA, 20 bp, Artificial Sequence
  Synthetic: FMR1 O reverse X:147912213-147912239; SaCas9
gtaccttgtagaaagcgcca

SEQ ID NO: 6359 - DNA, 19 bp, Artificial Sequence
  Synthetic: FMR1 O reverse X:147912214-147912239; SaCas9
taccttgtagaaagcgcca

SEQ ID NO: 6360 - DNA, 18 bp, Artificial Sequence
  Synthetic: FMR1 O reverse X:147912215-147912239; SaCas9
accttgtagaaagcgcca

SEQ ID NO: 6361 - DNA, 25 bp, Artificial Sequence
  Synthetic: FMR1 O forward X:147912216-147912247; SaCas9
gcgctttctacaaggtacttggctc

SEQ ID NO: 6362 - DNA, 24 bp, Artificial Sequence
  Synthetic: FMR1 O forward X:147912217-147912247; SaCas9
cgctttctacaaggtacttggctc

SEQ ID NO: 6363 - DNA, 23 bp, Artificial Sequence
  Synthetic: FMR1 O forward X:147912218-147912247; SaCas9
gctttctacaaggtacttggctc

SEQ ID NO: 6364 - DNA, 22 bp, Artificial Sequence
  Synthetic: FMR1 O forward X:147912219-147912247; SaCas9
ctttctacaaggtacttggctc

SEQ ID NO: 6365 - DNA, 21 bp, Artificial Sequence
  Synthetic: FMR1 O forward X:147912220-147912247; SaCas9
tttctacaaggtacttggctc

SEQ ID NO: 6366 - DNA, 20 bp, Artificial Sequence
  Synthetic: FMR1 O forward X:147912221-147912247; SaCas9
ttctacaaggtacttggctc

SEQ ID NO: 6367 - DNA, 19 bp, Artificial Sequence
  Synthetic: FMR1 O forward X:147912222-147912247; SaCas9
tctacaaggtacttggctc

SEQ ID NO: 6368 - DNA, 18 bp, Artificial Sequence
  Synthetic: FMR1 O forward X:147912223-147912247; SaCas9
ctacaaggtacttggctc

SEQ ID NO: 6369 - DNA, 25 bp, Artificial Sequence
  Synthetic: FMR1 O reverse X:147912220-147912251; SaCas9
gcctgccctagagccaagtaccttg

SEQ ID NO: 6370 - DNA, 24 bp, Artificial Sequence
  Synthetic: FMR1 O reverse X:147912221-147912251; SaCas9
cctgccctagagccaagtaccttg

SEQ ID NO: 6371 - DNA, 23 bp, Artificial Sequence
  Synthetic: FMR1 O reverse X:147912222-147912251; SaCas9
ctgccctagagccaagtaccttg

SEQ ID NO: 6372 - DNA, 22 bp, Artificial Sequence
  Synthetic: FMR1 O reverse X:147912223-147912251; SaCas9
tgccctagagccaagtaccttg

SEQ ID NO: 6373 - DNA, 21 bp, Artificial Sequence
  Synthetic: FMR1 O reverse X:147912224-147912251; SaCas9
gccctagagccaagtaccttg

SEQ ID NO: 6374 - DNA, 20 bp, Artificial Sequence
  Synthetic: FMR1 O reverse X:147912225-147912251; SaCas9
ccctagagccaagtaccttg

SEQ ID NO: 6375 - DNA, 19 bp, Artificial Sequence
  Synthetic: FMR1 O reverse X:147912226-147912251; SaCas9
cctagagccaagtaccttg

SEQ ID NO: 6376 - DNA, 18 bp, Artificial Sequence
  Synthetic: FMR1 O reverse X:147912227-147912251; SaCas9
ctagagccaagtaccttg

SEQ ID NO: 6377 - DNA, 25 bp, Artificial Sequence
  Synthetic: FMR1 O reverse X:147912237-147912268; SaCas9
ggaagggcgaagatggggcctgccc

SEQ ID NO: 6378 - DNA, 24 bp, Artificial Sequence
  Synthetic: FMR1 O reverse X:147912238-147912268; SaCas9
gaagggcgaagatggggcctgccc

SEQ ID NO: 6379 - DNA, 23 bp, Artificial Sequence
  Synthetic: FMR1 O reverse X:147912239-147912268; SaCas9
aagggcgaagatggggcctgccc

SEQ ID NO: 6380 - DNA, 22 bp, Artificial Sequence
  Synthetic: FMR1 O reverse X:147912240-147912268; SaCas9
agggcgaagatggggcctgccc

SEQ ID NO: 6381 - DNA, 21 bp, Artificial Sequence
  Synthetic: FMR1 O reverse X:147912241-147912268; SaCas9
gggcgaagatggggcctgccc

SEQ ID NO: 6382 - DNA, 20 bp, Artificial Sequence
  Synthetic: FMR1 O reverse X:147912242-147912268; SaCas9
ggcgaagatggggcctgccc

SEQ ID NO: 6383 - DNA, 19 bp, Artificial Sequence
  Synthetic: FMR1 O reverse X:147912243-147912268; SaCas9
gcgaagatggggcctgccc

SEQ ID NO: 6384 - DNA, 18 bp, Artificial Sequence
  Synthetic: FMR1 O reverse X:147912244-147912268; SaCas9
cgaagatggggcctgccc

SEQ ID NO: 6385 - DNA, 25 bp, Artificial Sequence
  Synthetic: FMR1 O reverse X:147912249-147912280; SaCas9
aaagggagggaaggaagggcgaaga

SEQ ID NO: 6386 - DNA, 24 bp, Artificial Sequence
  Synthetic: FMR1 O reverse X:147912250-147912280; SaCas9
aagggagggaaggaagggcgaaga

SEQ ID NO: 6387 - DNA, 23 bp, Artificial Sequence
  Synthetic: FMR1 O reverse X:147912251-147912280; SaCas9
agggagggaaggaagggcgaaga

SEQ ID NO: 6388 - DNA, 22 bp, Artificial Sequence
  Synthetic: FMR1 O reverse X:147912252-147912280; SaCas9
gggagggaaggaagggcgaaga

SEQ ID NO: 6389 - DNA, 21 bp, Artificial Sequence
  Synthetic: FMR1 O reverse X:147912253-147912280; SaCas9
ggagggaaggaagggcgaaga

SEQ ID NO: 6390 - DNA, 20 bp, Artificial Sequence
  Synthetic: FMR1 O reverse X:147912254-147912280; SaCas9
gagggaaggaagggcgaaga

SEQ ID NO: 6391 - DNA, 19 bp, Artificial Sequence
  Synthetic: FMR1 O reverse X:147912255-147912280; SaCas9
agggaaggaagggcgaaga

SEQ ID NO: 6392 - DNA, 18 bp, Artificial Sequence
  Synthetic: FMR1 O reverse X:147912256-147912280; SaCas9
gggaaggaagggcgaaga

SEQ ID NO: 6393 - DNA, 25 bp, Artificial Sequence
  Synthetic: FMR1 O reverse X:147912250-147912281; SaCas9
aaaagggagggaaggaagggcgaag

SEQ ID NO: 6394 - DNA, 24 bp, Artificial Sequence
  Synthetic: FMR1 O reverse X:147912251-147912281; SaCas9
aaagggagggaaggaagggcgaag

SEQ ID NO: 6395 - DNA, 23 bp, Artificial Sequence
  Synthetic: FMR1 O reverse X:147912252-147912281; SaCas9
aagggagggaaggaagggcgaag

SEQ ID NO: 6396 - DNA, 22 bp, Artificial Sequence
  Synthetic: FMR1 O reverse X:147912253-147912281; SaCas9
agggagggaaggaagggcgaag

SEQ ID NO: 6397 - DNA, 21 bp, Artificial Sequence
  Synthetic: FMR1 O reverse X:147912254-147912281; SaCas9
gggagggaaggaagggcgaag

SEQ ID NO: 6398 - DNA, 20 bp, Artificial Sequence
  Synthetic: FMR1 O reverse X:147912255-147912281; SaCas9
ggagggaaggaagggcgaag

SEQ ID NO: 6399 - DNA, 19 bp, Artificial Sequence
  Synthetic: FMR1 O reverse X:147912256-147912281; SaCas9
gagggaaggaagggcgaag

SEQ ID NO: 6400 - DNA, 18 bp, Artificial Sequence
  Synthetic: FMR1 O reverse X:147912257-147912281; SaCas9
agggaaggaagggcgaag

SEQ ID NO: 6401 - DNA, 25 bp, Artificial Sequence
  Synthetic: FMR1 O reverse X:147912256-147912287; SaCas9
aagaagaaaagggagggaaggaagg

SEQ ID NO: 6402 - DNA, 24 bp, Artificial Sequence
  Synthetic: FMR1 O reverse X:147912257-147912287; SaCas9
agaagaaaagggagggaaggaagg

SEQ ID NO: 6403 - DNA, 23 bp, Artificial Sequence
  Synthetic: FMR1 O reverse X:147912258-147912287; SaCas9
gaagaaaagggagggaaggaagg

SEQ ID NO: 6404 - DNA, 22 bp, Artificial Sequence
  Synthetic: FMR1 O reverse X:147912259-147912287; SaCas9
aagaaaagggagggaaggaagg

SEQ ID NO: 6405 - DNA, 21 bp, Artificial Sequence
  Synthetic: FMR1 O reverse X:147912260-147912287; SaCas9
agaaaagggagggaaggaagg

SEQ ID NO: 6406 - DNA, 20 bp, Artificial Sequence
  Synthetic: FMR1 O reverse X:147912261-147912287; SaCas9
gaaaagggagggaaggaagg

SEQ ID NO: 6407 - DNA, 19 bp, Artificial Sequence
  Synthetic: FMR1 O reverse X:147912262-147912287; SaCas9
aaaagggagggaaggaagg

SEQ ID NO: 6408 - DNA, 18 bp, Artificial Sequence
  Synthetic: FMR1 O reverse X:147912263-147912287; SaCas9
aaagggagggaaggaagg

SEQ ID NO: 6409 - DNA, 25 bp, Artificial Sequence
  Synthetic: FMR1 O reverse X:147912260-147912291; SaCas9
caccaagaagaaaagggagggaagg

SEQ ID NO: 6410 - DNA, 24 bp, Artificial Sequence
  Synthetic: FMR1 O reverse X:147912261-147912291; SaCas9
accaagaagaaaagggagggaagg

SEQ ID NO: 6411 - DNA, 23 bp, Artificial Sequence
  Synthetic: FMR1 O reverse X:147912262-147912291; SaCas9
ccaagaagaaaagggagggaagg

SEQ ID NO: 6412 - DNA, 22 bp, Artificial Sequence
  Synthetic: FMR1 O reverse X:147912263-147912291; SaCas9
caagaagaaaagggagggaagg

SEQ ID NO: 6413 - DNA, 21 bp, Artificial Sequence
  Synthetic: FMR1 O reverse X:147912264-147912291; SaCas9
aagaagaaaagggagggaagg

SEQ ID NO: 6414 - DNA, 20 bp, Artificial Sequence
  Synthetic: FMR1 O reverse X:147912265-147912291; SaCas9
agaagaaaagggagggaagg

SEQ ID NO: 6415 - DNA, 19 bp, Artificial Sequence
  Synthetic: FMR1 O reverse X:147912266-147912291; SaCas9
gaagaaaagggagggaagg

SEQ ID NO: 6416 - DNA, 18 bp, Artificial Sequence
  Synthetic: FMR1 O reverse X:147912267-147912291; SaCas9
aagaaaagggagggaagg

SEQ ID NO: 6417 - DNA, 25 bp, Artificial Sequence
  Synthetic: FMR1 O reverse X:147912263-147912294; SaCas9
cgacaccaagaagaaaagggaggga

SEQ ID NO: 6418 - DNA, 24 bp, Artificial Sequence
  Synthetic: FMR1 O reverse X:147912264-147912294; SaCas9
gacaccaagaagaaaagggaggga

SEQ ID NO: 6419 - DNA, 23 bp, Artificial Sequence
  Synthetic: FMR1 O reverse X:147912265-147912294; SaCas9
acaccaagaagaaaagggaggga

SEQ ID NO: 6420 - DNA, 22 bp, Artificial Sequence
  Synthetic: FMR1 O reverse X:147912266-147912294; SaCas9
caccaagaagaaaagggaggga

SEQ ID NO: 6421 - DNA, 21 bp, Artificial Sequence
  Synthetic: FMR1 O reverse X:147912267-147912294; SaCas9
accaagaagaaaagggaggga

SEQ ID NO: 6422 - DNA, 20 bp, Artificial Sequence
  Synthetic: FMR1 O reverse X:147912268-147912294; SaCas9
ccaagaagaaaagggaggga

SEQ ID NO: 6423 - DNA, 19 bp, Artificial Sequence
  Synthetic: FMR1 O reverse X:147912269-147912294; SaCas9
caagaagaaaagggaggga

SEQ ID NO: 6424 - DNA, 18 bp, Artificial Sequence
  Synthetic: FMR1 O reverse X:147912270-147912294; SaCas9
aagaagaaaagggaggga

SEQ ID NO: 6425 - DNA, 25 bp, Artificial Sequence
  Synthetic: FMR1 O reverse X:147912264-147912295; SaCas9
ccgacaccaagaagaaaagggaggg

SEQ ID NO: 6426 - DNA, 24 bp, Artificial Sequence
  Synthetic: FMR1 O reverse X:147912265-147912295; SaCas9
cgacaccaagaagaaaagggaggg

SEQ ID NO: 6427 - DNA, 23 bp, Artificial Sequence
  Synthetic: FMR1 O reverse X:147912266-147912295; SaCas9
gacaccaagaagaaaagggaggg

SEQ ID NO: 6428 - DNA, 22 bp, Artificial Sequence
  Synthetic: FMR1 O reverse X:147912267-147912295; SaCas9
acaccaagaagaaaagggaggg

SEQ ID NO: 6429 - DNA, 21 bp, Artificial Sequence
  Synthetic: FMR1 O reverse X:147912268-147912295; SaCas9
caccaagaagaaaagggaggg

SEQ ID NO: 6430 - DNA, 20 bp, Artificial Sequence
  Synthetic: FMR1 O reverse X:147912269-147912295; SaCas9
accaagaagaaaagggaggg

SEQ ID NO: 6431 - DNA, 19 bp, Artificial Sequence
  Synthetic: FMR1 O reverse X:147912270-147912295; SaCas9
ccaagaagaaaagggaggg

SEQ ID NO: 6432 - DNA, 18 bp, Artificial Sequence
  Synthetic: FMR1 O reverse X:147912271-147912295; SaCas9
caagaagaaaagggaggg

SEQ ID NO: 6433 - DNA, 25 bp, Artificial Sequence
  Synthetic: FMR1 O reverse X:147912267-147912298; SaCas9
ccgccgacaccaagaagaaaaggga

SEQ ID NO: 6434 - DNA, 24 bp, Artificial Sequence
  Synthetic: FMR1 O reverse X:147912268-147912298; SaCas9
cgccgacaccaagaagaaaaggga

SEQ ID NO: 6435 - DNA, 23 bp, Artificial Sequence
  Synthetic: FMR1 O reverse X:147912269-147912298; SaCas9
gccgacaccaagaagaaaaggga

SEQ ID NO: 6436 - DNA, 22 bp, Artificial Sequence
  Synthetic: FMR1 O reverse X:147912270-147912298; SaCas9
ccgacaccaagaagaaaaggga

SEQ ID NO: 6437 - DNA, 21 bp, Artificial Sequence
  Synthetic: FMR1 O reverse X:147912271-147912298; SaCas9
cgacaccaagaagaaaaggga

SEQ ID NO: 6438 - DNA, 20 bp, Artificial Sequence
  Synthetic: FMR1 O reverse X:147912272-147912298; SaCas9
gacaccaagaagaaaaggga

SEQ ID NO: 6439 - DNA, 19 bp, Artificial Sequence
  Synthetic: FMR1 O reverse X:147912273-147912298; SaCas9
acaccaagaagaaaaggga

SEQ ID NO: 6440 - DNA, 18 bp, Artificial Sequence
  Synthetic: FMR1 O reverse X:147912274-147912298; SaCas9
caccaagaagaaaaggga

SEQ ID NO: 6441 - DNA, 25 bp, Artificial Sequence
  Synthetic: FMR1 O reverse X:147912268-147912299; SaCas9
cccgccgacaccaagaagaaaaggg

SEQ ID NO: 6442 - DNA, 24 bp, Artificial Sequence
  Synthetic: FMR1 O reverse X:147912269-147912299; SaCas9
ccgccgacaccaagaagaaaaggg

SEQ ID NO: 6443 - DNA, 23 bp, Artificial Sequence
  Synthetic: FMR1 O reverse X:147912270-147912299; SaCas9
cgccgacaccaagaagaaaaggg

SEQ ID NO: 6444 - DNA, 22 bp, Artificial Sequence
  Synthetic: FMR1 O reverse X:147912271-147912299; SaCas9
gccgacaccaagaagaaaaggg

SEQ ID NO: 6445 - DNA, 21 bp, Artificial Sequence
  Synthetic: FMR1 O reverse X:147912272-147912299; SaCas9
ccgacaccaagaagaaaaggg

SEQ ID NO: 6446 - DNA, 20 bp, Artificial Sequence
  Synthetic: FMR1 O reverse X:147912273-147912299; SaCas9
cgacaccaagaagaaaaggg

SEQ ID NO: 6447 - DNA, 19 bp, Artificial Sequence
  Synthetic: FMR1 O reverse X:147912274-147912299; SaCas9
gacaccaagaagaaaaggg

SEQ ID NO: 6448 - DNA, 18 bp, Artificial Sequence
  Synthetic: FMR1 O reverse X:147912275-147912299; SaCas9
acaccaagaagaaaaggg

SEQ ID NO: 6449 - DNA, 25 bp, Artificial Sequence
  Synthetic: FMR1 O forward X:147912269-147912300; SaCas9
tccctcccttttcttcttggtgtcg

SEQ ID NO: 6450 - DNA, 24 bp, Artificial Sequence
  Synthetic: FMR1 O forward X:147912270-147912300; SaCas9
ccctcccttttcttcttggtgtcg

SEQ ID NO: 6451 - DNA, 23 bp, Artificial Sequence
  Synthetic: FMR1 O forward X:147912271-147912300; SaCas9
cctcccttttcttcttggtgtcg

SEQ ID NO: 6452 - DNA, 22 bp, Artificial Sequence
  Synthetic: FMR1 O forward X:147912272-147912300; SaCas9
ctcccttttcttcttggtgtcg

SEQ ID NO: 6453 - DNA, 21 bp, Artificial Sequence
  Synthetic: FMR1 O forward X:147912273-147912300; SaCas9
tcccttttcttcttggtgtcg

SEQ ID NO: 6454 - DNA, 20 bp, Artificial Sequence
  Synthetic: FMR1 O forward X:147912274-147912300; SaCas9
cccttttcttcttggtgtcg

SEQ ID NO: 6455 - DNA, 19 bp, Artificial Sequence
  Synthetic: FMR1 O forward X:147912275-147912300; SaCas9
ccttttcttcttggtgtcg

SEQ ID NO: 6456 - DNA, 18 bp, Artificial Sequence
  Synthetic: FMR1 O forward X:147912276-147912300; SaCas9
cttttcttcttggtgtcg

SEQ ID NO: 6457 - DNA, 25 bp, Artificial Sequence
  Synthetic: FMR1 O reverse X:147912269-147912300; SaCas9
tcccgccgacaccaagaagaaaagg

SEQ ID NO: 6458 - DNA, 24 bp, Artificial Sequence
  Synthetic: FMR1 O reverse X:147912270-147912300; SaCas9
cccgccgacaccaagaagaaaagg

SEQ ID NO: 6459 - DNA, 23 bp, Artificial Sequence
  Synthetic: FMR1 O reverse X:147912271-147912300; SaCas9
ccgccgacaccaagaagaaaagg

SEQ ID NO: 6460 - DNA, 22 bp, Artificial Sequence
  Synthetic: FMR1 O reverse X:147912272-147912300; SaCas9
cgccgacaccaagaagaaaagg

SEQ ID NO: 6461 - DNA, 21 bp, Artificial Sequence
  Synthetic: FMR1 O reverse X:147912273-147912300; SaCas9
gccgacaccaagaagaaaagg

SEQ ID NO: 6462 - DNA, 20 bp, Artificial Sequence
  Synthetic: FMR1 O reverse X:147912274-147912300; SaCas9
ccgacaccaagaagaaaagg

SEQ ID NO: 6463 - DNA, 19 bp, Artificial Sequence
  Synthetic: FMR1 O reverse X:147912275-147912300; SaCas9
cgacaccaagaagaaaagg

SEQ ID NO: 6464 - DNA, 18 bp, Artificial Sequence
  Synthetic: FMR1 O reverse X:147912276-147912300; SaCas9
gacaccaagaagaaaagg

SEQ ID NO: 6465 - DNA, 25 bp, Artificial Sequence
  Synthetic: FMR1 O forward X:147912270-147912301; SaCas9
ccctcccttttcttcttggtgtcgg

SEQ ID NO: 6466 - DNA, 24 bp, Artificial Sequence
  Synthetic: FMR1 O forward X:147912271-147912301; SaCas9
cctcccttttcttcttggtgtcgg

SEQ ID NO: 6467 - DNA, 23 bp, Artificial Sequence
  Synthetic: FMR1 O forward X:147912272-147912301; SaCas9
ctcccttttcttcttggtgtcgg

SEQ ID NO: 6468 - DNA, 22 bp, Artificial Sequence
  Synthetic: FMR1 O forward X:147912273-147912301; SaCas9
tcccttttcttcttggtgtcgg

SEQ ID NO: 6469 - DNA, 21 bp, Artificial Sequence
  Synthetic: FMR1 O forward X:147912274-147912301; SaCas9
cccttttcttcttggtgtcgg

SEQ ID NO: 6470 - DNA, 20 bp, Artificial Sequence
  Synthetic: FMR1 O forward X:147912275-147912301; SaCas9
ccttttcttcttggtgtcgg

SEQ ID NO: 6471 - DNA, 19 bp, Artificial Sequence
  Synthetic: FMR1 O forward X:147912276-147912301; SaCas9
cttttcttcttggtgtcgg

SEQ ID NO: 6472 - DNA, 18 bp, Artificial Sequence
  Synthetic: FMR1 O forward X:147912277-147912301; SaCas9
ttttcttcttggtgtcgg

SEQ ID NO: 6473 - DNA, 25 bp, Artificial Sequence
  Synthetic: FMR1 O forward X:147912271-147912302; SaCas9
cctcccttttcttcttggtgtcggc

SEQ ID NO: 6474 - DNA, 24 bp, Artificial Sequence
  Synthetic: FMR1 O forward X:147912272-147912302; SaCas9
ctcccttttcttcttggtgtcggc

SEQ ID NO: 6475 - DNA, 23 bp, Artificial Sequence
  Synthetic: FMR1 O forward X:147912273-147912302; SaCas9
tcccttttcttcttggtgtcggc

SEQ ID NO: 6476 - DNA, 22 bp, Artificial Sequence
  Synthetic: FMR1 O forward X:147912274-147912302; SaCas9
cccttttcttcttggtgtcggc

SEQ ID NO: 6477 - DNA, 21 bp, Artificial Sequence
  Synthetic: FMR1 O forward X:147912275-147912302; SaCas9
ccttttcttcttggtgtcggc

SEQ ID NO: 6478 - DNA, 20 bp, Artificial Sequence
  Synthetic: FMR1 O forward X:147912276-147912302; SaCas9
cttttcttcttggtgtcggc

SEQ ID NO: 6479 - DNA, 19 bp, Artificial Sequence
  Synthetic: FMR1 O forward X:147912277-147912302; SaCas9
ttttcttcttggtgtcggc

SEQ ID NO: 6480 - DNA, 18 bp, Artificial Sequence
  Synthetic: FMR1 O forward X:147912278-147912302; SaCas9
tttcttcttggtgtcggc

SEQ ID NO: 6481 - DNA, 25 bp, Artificial Sequence
  Synthetic: FMR1 O reverse X:147912271-147912302; SaCas9
cctcccgccgacaccaagaagaaaa

SEQ ID NO: 6482 - DNA, 24 bp, Artificial Sequence
  Synthetic: FMR1 O reverse X:147912272-147912302; SaCas9
ctcccgccgacaccaagaagaaaa

SEQ ID NO: 6483 - DNA, 23 bp, Artificial Sequence
  Synthetic: FMR1 O reverse X:147912273-147912302; SaCas9
tcccgccgacaccaagaagaaaa

SEQ ID NO: 6484 - DNA, 22 bp, Artificial Sequence
  Synthetic: FMR1 O reverse X:147912274-147912302; SaCas9
cccgccgacaccaagaagaaaa

SEQ ID NO: 6485 - DNA, 21 bp, Artificial Sequence
  Synthetic: FMR1 O reverse X:147912275-147912302; SaCas9
ccgccgacaccaagaagaaaa

SEQ ID NO: 6486 - DNA, 20 bp, Artificial Sequence
  Synthetic: FMR1 O reverse X:147912276-147912302; SaCas9
cgccgacaccaagaagaaaa

SEQ ID NO: 6487 - DNA, 19 bp, Artificial Sequence
  Synthetic: FMR1 O reverse X:147912277-147912302; SaCas9
gccgacaccaagaagaaaa

SEQ ID NO: 6488 - DNA, 18 bp, Artificial Sequence
  Synthetic: FMR1 O reverse X:147912278-147912302; SaCas9
ccgacaccaagaagaaaa

SEQ ID NO: 6489 - DNA, 25 bp, Artificial Sequence
  Synthetic: FMR1 O reverse X:147912272-147912303; SaCas9
gcctcccgccgacaccaagaagaaa

SEQ ID NO: 6490 - DNA, 24 bp, Artificial Sequence
  Synthetic: FMR1 O reverse X:147912273-147912303; SaCas9
cctcccgccgacaccaagaagaaa

SEQ ID NO: 6491 - DNA, 23 bp, Artificial Sequence
  Synthetic: FMR1 O reverse X:147912274-147912303; SaCas9
ctcccgccgacaccaagaagaaa

SEQ ID NO: 6492 - DNA, 22 bp, Artificial Sequence
  Synthetic: FMR1 O reverse X:147912275-147912303; SaCas9
tcccgccgacaccaagaagaaa

SEQ ID NO: 6493 - DNA, 21 bp, Artificial Sequence
  Synthetic: FMR1 O reverse X:147912276-147912303; SaCas9
cccgccgacaccaagaagaaa

SEQ ID NO: 6494 - DNA, 20 bp, Artificial Sequence
  Synthetic: FMR1 O reverse X:147912277-147912303; SaCas9
ccgccgacaccaagaagaaa

SEQ ID NO: 6495 - DNA, 19 bp, Artificial Sequence
  Synthetic: FMR1 O reverse X:147912278-147912303; SaCas9
cgccgacaccaagaagaaa

SEQ ID NO: 6496 - DNA, 18 bp, Artificial Sequence
  Synthetic: FMR1 O reverse X:147912279-147912303; SaCas9
gccgacaccaagaagaaa

SEQ ID NO: 6497 - DNA, 25 bp, Artificial Sequence
  Synthetic: FMR1 O reverse X:147912273-147912304; SaCas9
tgcctcccgccgacaccaagaagaa

SEQ ID NO: 6498 - DNA, 24 bp, Artificial Sequence
  Synthetic: FMR1 O reverse X:147912274-147912304; SaCas9
gcctcccgccgacaccaagaagaa

SEQ ID NO: 6499 - DNA, 23 bp, Artificial Sequence
  Synthetic: FMR1 O reverse X:147912275-147912304; SaCas9
cctcccgccgacaccaagaagaa

SEQ ID NO: 6500 - DNA, 22 bp, Artificial Sequence
  Synthetic: FMR1 O reverse X:147912276-147912304; SaCas9
ctcccgccgacaccaagaagaa

SEQ ID NO: 6501 - DNA, 21 bp, Artificial Sequence
  Synthetic: FMR1 O reverse X:147912277-147912304; SaCas9
tcccgccgacaccaagaagaa

SEQ ID NO: 6502 - DNA, 20 bp, Artificial Sequence
  Synthetic: FMR1 O reverse X:147912278-147912304; SaCas9
cccgccgacaccaagaagaa

SEQ ID NO: 6503 - DNA, 19 bp, Artificial Sequence
  Synthetic: FMR1 O reverse X:147912279-147912304; SaCas9
ccgccgacaccaagaagaa

SEQ ID NO: 6504 - DNA, 18 bp, Artificial Sequence
  Synthetic: FMR1 O reverse X:147912280-147912304; SaCas9
cgccgacaccaagaagaa

SEQ ID NO: 6505 - DNA, 25 bp, Artificial Sequence
  Synthetic: FMR1 O reverse X:147912278-147912309; SaCas9
gggcctgcctcccgccgacaccaag

SEQ ID NO: 6506 - DNA, 24 bp, Artificial Sequence
  Synthetic: FMR1 O reverse X:147912279-147912309; SaCas9
ggcctgcctcccgccgacaccaag

SEQ ID NO: 6507 - DNA, 23 bp, Artificial Sequence
  Synthetic: FMR1 O reverse X:147912280-147912309; SaCas9
gcctgcctcccgccgacaccaag

SEQ ID NO: 6508 - DNA, 22 bp, Artificial Sequence
  Synthetic: FMR1 O reverse X:147912281-147912309; SaCas9
cctgcctcccgccgacaccaag

SEQ ID NO: 6509 - DNA, 21 bp, Artificial Sequence
  Synthetic: FMR1 O reverse X:147912282-147912309; SaCas9
ctgcctcccgccgacaccaag

SEQ ID NO: 6510 - DNA, 20 bp, Artificial Sequence
  Synthetic: FMR1 O reverse X:147912283-147912309; SaCas9
tgcctcccgccgacaccaag

SEQ ID NO: 6511 - DNA, 19 bp, Artificial Sequence
  Synthetic: FMR1 O reverse X:147912284-147912309; SaCas9
gcctcccgccgacaccaag

SEQ ID NO: 6512 - DNA, 18 bp, Artificial Sequence
  Synthetic: FMR1 O reverse X:147912285-147912309; SaCas9
cctcccgccgacaccaag

SEQ ID NO: 6513 - DNA, 25 bp, Artificial Sequence
  Synthetic: FMR1 O reverse X:147912281-147912312; SaCas9
cccgggcctgcctcccgccgacacc

SEQ ID NO: 6514 - DNA, 24 bp, Artificial Sequence
  Synthetic: FMR1 O reverse X:147912282-147912312; SaCas9
ccgggcctgcctcccgccgacacc

SEQ ID NO: 6515 - DNA, 23 bp, Artificial Sequence
  Synthetic: FMR1 O reverse X:147912283-147912312; SaCas9
cgggcctgcctcccgccgacacc

SEQ ID NO: 6516 - DNA, 22 bp, Artificial Sequence
  Synthetic: FMR1 O reverse X:147912284-147912312; SaCas9
gggcctgcctcccgccgacacc

SEQ ID NO: 6517 - DNA, 21 bp, Artificial Sequence
  Synthetic: FMR1 O reverse X:147912285-147912312; SaCas9
ggcctgcctcccgccgacacc

SEQ ID NO: 6518 - DNA, 20 bp, Artificial Sequence
  Synthetic: FMR1 O reverse X:147912286-147912312; SaCas9
gcctgcctcccgccgacacc

SEQ ID NO: 6519 - DNA, 19 bp, Artificial Sequence
  Synthetic: FMR1 O reverse X:147912287-147912312; SaCas9
cctgcctcccgccgacacc

SEQ ID NO: 6520 - DNA, 18 bp, Artificial Sequence
  Synthetic: FMR1 O reverse X:147912288-147912312; SaCas9
ctgcctcccgccgacacc

SEQ ID NO: 6521 - DNA, 25 bp, Artificial Sequence
  Synthetic: FMR1 O forward X:147912282-147912313; SaCas9
ttcttggtgtcggcgggaggcaggc

SEQ ID NO: 6522 - DNA, 24 bp, Artificial Sequence
  Synthetic: FMR1 O forward X:147912283-147912313; SaCas9
tcttggtgtcggcgggaggcaggc

SEQ ID NO: 6523 - DNA, 23 bp, Artificial Sequence
  Synthetic: FMR1 O forward X:147912284-147912313; SaCas9
cttggtgtcggcgggaggcaggc

SEQ ID NO: 6524 - DNA, 22 bp, Artificial Sequence
  Synthetic: FMR1 O forward X:147912285-147912313; SaCas9
ttggtgtcggcgggaggcaggc

SEQ ID NO: 6525 - DNA, 21 bp, Artificial Sequence
  Synthetic: FMR1 O forward X:147912286-147912313; SaCas9
tggtgtcggcgggaggcaggc

SEQ ID NO: 6526 - DNA, 20 bp, Artificial Sequence
  Synthetic: FMR1 O forward X:147912287-147912313; SaCas9
ggtgtcggcgggaggcaggc

SEQ ID NO: 6527 - DNA, 19 bp, Artificial Sequence
  Synthetic: FMR1 O forward X:147912288-147912313; SaCas9
gtgtcggcgggaggcaggc

SEQ ID NO: 6528 - DNA, 18 bp, Artificial Sequence
  Synthetic: FMR1 O forward X:147912289-147912313; SaCas9
tgtcggcgggaggcaggc

SEQ ID NO: 6529 - DNA, 25 bp, Artificial Sequence
  Synthetic: FMR1 O forward X:147912283-147912314; SaCas9
tcttggtgtcggcgggaggcaggcc

SEQ ID NO: 6530 - DNA, 24 bp, Artificial Sequence
  Synthetic: FMR1 O forward X:147912284-147912314; SaCas9
cttggtgtcggcgggaggcaggcc

SEQ ID NO: 6531 - DNA, 23 bp, Artificial Sequence
  Synthetic: FMR1 O forward X:147912285-147912314; SaCas9
ttggtgtcggcgggaggcaggcc

SEQ ID NO: 6532 - DNA, 22 bp, Artificial Sequence
  Synthetic: FMR1 O forward X:147912286-147912314; SaCas9
tggtgtcggcgggaggcaggcc

SEQ ID NO: 6533 - DNA, 21 bp, Artificial Sequence
  Synthetic: FMR1 O forward X:147912287-147912314; SaCas9
ggtgtcggcgggaggcaggcc

SEQ ID NO: 6534 - DNA, 20 bp, Artificial Sequence
  Synthetic: FMR1 O forward X:147912288-147912314; SaCas9
gtgtcggcgggaggcaggcc

SEQ ID NO: 6535 - DNA, 19 bp, Artificial Sequence
  Synthetic: FMR1 O forward X:147912289-147912314; SaCas9
tgtcggcgggaggcaggcc

SEQ ID NO: 6536 - DNA, 18 bp, Artificial Sequence
  Synthetic: FMR1 O forward X:147912290-147912314; SaCas9
gtcggcgggaggcaggcc

SEQ ID NO: 6537 - DNA, 25 bp, Artificial Sequence
  Synthetic: FMR1 O forward X:147912296-147912327; SaCas9
gggaggcaggcccggggccctcttc

SEQ ID NO: 6538 - DNA, 24 bp, Artificial Sequence
  Synthetic: FMR1 O forward X:147912297-147912327; SaCas9
ggaggcaggcccggggccctcttc

SEQ ID NO: 6539 - DNA, 23 bp, Artificial Sequence
  Synthetic: FMR1 O forward X:147912298-147912327; SaCas9
gaggcaggcccggggccctcttc

SEQ ID NO: 6540 - DNA, 22 bp, Artificial Sequence
  Synthetic: FMR1 O forward X:147912299-147912327; SaCas9
aggcaggcccggggccctcttc

SEQ ID NO: 6541 - DNA, 21 bp, Artificial Sequence
  Synthetic: FMR1 O forward X:147912300-147912327; SaCas9
ggcaggcccggggccctcttc

SEQ ID NO: 6542 - DNA, 20 bp, Artificial Sequence
  Synthetic: FMR1 O forward X:147912301-147912327; SaCas9
gcaggcccggggccctcttc

SEQ ID NO: 6543 - DNA, 19 bp, Artificial Sequence
  Synthetic: FMR1 O forward X:147912302-147912327; SaCas9
caggcccggggccctcttc

SEQ ID NO: 6544 - DNA, 18 bp, Artificial Sequence
  Synthetic: FMR1 O forward X:147912303-147912327; SaCas9
aggcccggggccctcttc

SEQ ID NO: 6545 - DNA, 25 bp, Artificial Sequence
  Synthetic: FMR1 O forward X:147911852-147911880; SpCas9
agggaacagcgttgatcacgtgacg

SEQ ID NO: 6546 - DNA, 24 bp, Artificial Sequence
  Synthetic: FMR1 O forward X:147911853-147911880; SpCas9
gggaacagcgttgatcacgtgacg

SEQ ID NO: 6547 - DNA, 23 bp, Artificial Sequence
  Synthetic: FMR1 O forward X:147911854-147911880; SpCas9
ggaacagcgttgatcacgtgacg

SEQ ID NO: 6548 - DNA, 22 bp, Artificial Sequence
  Synthetic: FMR1 O forward X:147911855-147911880; SpCas9
gaacagcgttgatcacgtgacg

SEQ ID NO: 6549 - DNA, 21 bp, Artificial Sequence
  Synthetic: FMR1 O forward X:147911856-147911880; SpCas9
aacagcgttgatcacgtgacg

SEQ ID NO: 6550 - DNA, 20 bp, Artificial Sequence
  Synthetic: FMR1 O forward X:147911857-147911880; SpCas9
acagcgttgatcacgtgacg

SEQ ID NO: 6551 - DNA, 19 bp, Artificial Sequence
  Synthetic: FMR1 O forward X:147911858-147911880; SpCas9
cagcgttgatcacgtgacg

SEQ ID NO: 6552 - DNA, 18 bp, Artificial Sequence
  Synthetic: FMR1 O forward X:147911859-147911880; SpCas9
agcgttgatcacgtgacg

SEQ ID NO: 6553 - DNA, 25 bp, Artificial Sequence
  Synthetic: FMR1 O forward X:147911858-147911886; SpCas9
cagcgttgatcacgtgacgtggttt

SEQ ID NO: 6554 - DNA, 24 bp, Artificial Sequence
  Synthetic: FMR1 O forward X:147911859-147911886; SpCas9
agcgttgatcacgtgacgtggttt

SEQ ID NO: 6555 - DNA, 23 bp, Artificial Sequence
  Synthetic: FMR1 O forward X:147911860-147911886; SpCas9
gcgttgatcacgtgacgtggttt

SEQ ID NO: 6556 - DNA, 22 bp, Artificial Sequence
  Synthetic: FMR1 O forward X:147911861-147911886; SpCas9
cgttgatcacgtgacgtggttt

SEQ ID NO: 6557 - DNA, 21 bp, Artificial Sequence
  Synthetic: FMR1 O forward X:147911862-147911886; SpCas9
gttgatcacgtgacgtggttt

SEQ ID NO: 6558 - DNA, 20 bp, Artificial Sequence
  Synthetic: FMR1 O forward X:147911863-147911886; SpCas9
ttgatcacgtgacgtggttt

SEQ ID NO: 6559 - DNA, 19 bp, Artificial Sequence
  Synthetic: FMR1 O forward X:147911864-147911886; SpCas9
tgatcacgtgacgtggttt

SEQ ID NO: 6560 - DNA, 18 bp, Artificial Sequence
  Synthetic: FMR1 O forward X:147911865-147911886; SpCas9
gatcacgtgacgtggttt

SEQ ID NO: 6561 - DNA, 25 bp, Artificial Sequence
  Synthetic: FMR1 O forward X:147911873-147911901; SpCas9
gacgtggtttcagtgtttacacccg

SEQ ID NO: 6562 - DNA, 24 bp, Artificial Sequence
  Synthetic: FMR1 O forward X:147911874-147911901; SpCas9
acgtggtttcagtgtttacacccg

SEQ ID NO: 6563 - DNA, 23 bp, Artificial Sequence
  Synthetic: FMR1 O forward X:147911875-147911901; SpCas9
cgtggtttcagtgtttacacccg

SEQ ID NO: 6564 - DNA, 22 bp, Artificial Sequence
  Synthetic: FMR1 O forward X:147911876-147911901; SpCas9
gtggtttcagtgtttacacccg

SEQ ID NO: 6565 - DNA, 21 bp, Artificial Sequence
  Synthetic: FMR1 O forward X:147911877-147911901; SpCas9
tggtttcagtgtttacacccg

SEQ ID NO: 6566 - DNA, 20 bp, Artificial Sequence
  Synthetic: FMR1 O forward X:147911878-147911901; SpCas9
ggtttcagtgtttacacccg

SEQ ID NO: 6567 - DNA, 19 bp, Artificial Sequence
  Synthetic: FMR1 O forward X:147911879-147911901; SpCas9
gtttcagtgtttacacccg

SEQ ID NO: 6568 - DNA, 18 bp, Artificial Sequence
  Synthetic: FMR1 O forward X:147911880-147911901; SpCas9
tttcagtgtttacacccg

SEQ ID NO: 6569 - DNA, 25 bp, Artificial Sequence
  Synthetic: FMR1 O forward X:147911876-147911904; SpCas9
gtggtttcagtgtttacacccgcag

SEQ ID NO: 6570 - DNA, 24 bp, Artificial Sequence
  Synthetic: FMR1 O forward X:147911877-147911904; SpCas9
tggtttcagtgtttacacccgcag

SEQ ID NO: 6571 - DNA, 23 bp, Artificial Sequence
  Synthetic: FMR1 O forward X:147911878-147911904; SpCas9
ggtttcagtgtttacacccgcag

SEQ ID NO: 6572 - DNA, 22 bp, Artificial Sequence
  Synthetic: FMR1 O forward X:147911879-147911904; SpCas9
gtttcagtgtttacacccgcag

SEQ ID NO: 6573 - DNA, 21 bp, Artificial Sequence
  Synthetic: FMR1 O forward X:147911880-147911904; SpCas9
tttcagtgtttacacccgcag

SEQ ID NO: 6574 - DNA, 20 bp, Artificial Sequence
  Synthetic: FMR1 O forward X:147911881-147911904; SpCas9
ttcagtgtttacacccgcag

SEQ ID NO: 6575 - DNA, 19 bp, Artificial Sequence
  Synthetic: FMR1 O forward X:147911882-147911904; SpCas9
tcagtgtttacacccgcag

SEQ ID NO: 6576 - DNA, 18 bp, Artificial Sequence
  Synthetic: FMR1 O forward X:147911883-147911904; SpCas9
cagtgtttacacccgcag

SEQ ID NO: 6577 - DNA, 25 bp, Artificial Sequence
  Synthetic: FMR1 O forward X:147911877-147911905; SpCas9
tggtttcagtgtttacacccgcagc

SEQ ID NO: 6578 - DNA, 24 bp, Artificial Sequence
  Synthetic: FMR1 O forward X:147911878-147911905; SpCas9
ggtttcagtgtttacacccgcagc

SEQ ID NO: 6579 - DNA, 23 bp, Artificial Sequence
  Synthetic: FMR1 O forward X:147911879-147911905; SpCas9
gtttcagtgtttacacccgcagc

SEQ ID NO: 6580 - DNA, 22 bp, Artificial Sequence
  Synthetic: FMR1 O forward X:147911880-147911905; SpCas9
tttcagtgtttacacccgcagc

SEQ ID NO: 6581 - DNA, 21 bp, Artificial Sequence
  Synthetic: FMR1 O forward X:147911881-147911905; SpCas9
ttcagtgtttacacccgcagc

SEQ ID NO: 6582 - DNA, 20 bp, Artificial Sequence
  Synthetic: FMR1 O forward X:147911882-147911905; SpCas9
tcagtgtttacacccgcagc

SEQ ID NO: 6583 - DNA, 19 bp, Artificial Sequence
  Synthetic: FMR1 O forward X:147911883-147911905; SpCas9
cagtgtttacacccgcagc

SEQ ID NO: 6584 - DNA, 18 bp, Artificial Sequence
  Synthetic: FMR1 O forward X:147911884-147911905; SpCas9
agtgtttacacccgcagc

SEQ ID NO: 6585 - DNA, 25 bp, Artificial Sequence
  Synthetic: FMR1 O forward X:147911881-147911909; SpCas9
ttcagtgtttacacccgcagcgggc

SEQ ID NO: 6586 - DNA, 24 bp, Artificial Sequence
  Synthetic: FMR1 O forward X:147911882-147911909; SpCas9
tcagtgtttacacccgcagcgggc

SEQ ID NO: 6587 - DNA, 23 bp, Artificial Sequence
  Synthetic: FMR1 O forward X:147911883-147911909; SpCas9
cagtgtttacacccgcagcgggc

SEQ ID NO: 6588 - DNA, 22 bp, Artificial Sequence
  Synthetic: FMR1 O forward X:147911884-147911909; SpCas9
agtgtttacacccgcagcgggc

SEQ ID NO: 6589 - DNA, 21 bp, Artificial Sequence
  Synthetic: FMR1 O forward X:147911885-147911909; SpCas9
gtgtttacacccgcagcgggc

SEQ ID NO: 6590 - DNA, 20 bp, Artificial Sequence
  Synthetic: FMR1 O forward X:147911886-147911909; SpCas9
tgtttacacccgcagcgggc

SEQ ID NO: 6591 - DNA, 19 bp, Artificial Sequence
  Synthetic: FMR1 O forward X:147911887-147911909; SpCas9
gtttacacccgcagcgggc

SEQ ID NO: 6592 - DNA, 18 bp, Artificial Sequence
  Synthetic: FMR1 O forward X:147911888-147911909; SpCas9
tttacacccgcagcgggc

SEQ ID NO: 6593 - DNA, 25 bp, Artificial Sequence
  Synthetic: FMR1 O forward X:147911882-147911910; SpCas9
tcagtgtttacacccgcagcgggcc

SEQ ID NO: 6594 - DNA, 24 bp, Artificial Sequence
  Synthetic: FMR1 O forward X:147911883-147911910; SpCas9
cagtgtttacacccgcagcgggcc

SEQ ID NO: 6595 - DNA, 23 bp, Artificial Sequence
  Synthetic: FMR1 O forward X:147911884-147911910; SpCas9
agtgtttacacccgcagcgggcc

SEQ ID NO: 6596 - DNA, 22 bp, Artificial Sequence
  Synthetic: FMR1 O forward X:147911885-147911910; SpCas9
gtgtttacacccgcagcgggcc

SEQ ID NO: 6597 - DNA, 21 bp, Artificial Sequence
  Synthetic: FMR1 O forward X:147911886-147911910; SpCas9
tgtttacacccgcagcgggcc

SEQ ID NO: 6598 - DNA, 20 bp, Artificial Sequence
  Synthetic: FMR1 O forward X:147911887-147911910; SpCas9
gtttacacccgcagcgggcc

SEQ ID NO: 6599 - DNA, 19 bp, Artificial Sequence
  Synthetic: FMR1 O forward X:147911888-147911910; SpCas9
tttacacccgcagcgggcc

SEQ ID NO: 6600 - DNA, 18 bp, Artificial Sequence
  Synthetic: FMR1 O forward X:147911889-147911910; SpCas9
ttacacccgcagcgggcc

SEQ ID NO: 6601 - DNA, 25 bp, Artificial Sequence
  Synthetic: FMR1 O forward X:147911883-147911911; SpCas9
cagtgtttacacccgcagcgggccg

SEQ ID NO: 6602 - DNA, 24 bp, Artificial Sequence
  Synthetic: FMR1 O forward X:147911884-147911911; SpCas9
agtgtttacacccgcagcgggccg

SEQ ID NO: 6603 - DNA, 23 bp, Artificial Sequence
  Synthetic: FMR1 O forward X:147911885-147911911; SpCas9
gtgtttacacccgcagcgggccg

SEQ ID NO: 6604 - DNA, 22 bp, Artificial Sequence
  Synthetic: FMR1 O forward X:147911886-147911911; SpCas9
tgtttacacccgcagcgggccg

SEQ ID NO: 6605 - DNA, 21 bp, Artificial Sequence
  Synthetic: FMR1 O forward X:147911887-147911911; SpCas9
gtttacacccgcagcgggccg

SEQ ID NO: 6606 - DNA, 20 bp, Artificial Sequence
  Synthetic: FMR1 O forward X:147911888-147911911; SpCas9
tttacacccgcagcgggccg

SEQ ID NO: 6607 - DNA, 19 bp, Artificial Sequence
  Synthetic: FMR1 O forward X:147911889-147911911; SpCas9
ttacacccgcagcgggccg

SEQ ID NO: 6608 - DNA, 18 bp, Artificial Sequence
  Synthetic: FMR1 O forward X:147911890-147911911; SpCas9
tacacccgcagcgggccg

SEQ ID NO: 6609 - DNA, 25 bp, Artificial Sequence
  Synthetic: FMR1 O forward X:147911884-147911912; SpCas9
agtgtttacacccgcagcgggccgg

SEQ ID NO: 6610 - DNA, 24 bp, Artificial Sequence
  Synthetic: FMR1 O forward X:147911885-147911912; SpCas9
gtgtttacacccgcagcgggccgg

SEQ ID NO: 6611 - DNA, 23 bp, Artificial Sequence
  Synthetic: FMR1 O forward X:147911886-147911912; SpCas9
tgtttacacccgcagcgggccgg

SEQ ID NO: 6612 - DNA, 22 bp, Artificial Sequence
  Synthetic: FMR1 O forward X:147911887-147911912; SpCas9
gtttacacccgcagcgggccgg

SEQ ID NO: 6613 - DNA, 21 bp, Artificial Sequence
  Synthetic: FMR1 O forward X:147911888-147911912; SpCas9
tttacacccgcagcgggccgg

SEQ ID NO: 6614 - DNA, 20 bp, Artificial Sequence
  Synthetic: FMR1 O forward X:147911889-147911912; SpCas9
ttacacccgcagcgggccgg

SEQ ID NO: 6615 - DNA, 19 bp, Artificial Sequence
  Synthetic: FMR1 O forward X:147911890-147911912; SpCas9
tacacccgcagcgggccgg

SEQ ID NO: 6616 - DNA, 18 bp, Artificial Sequence
  Synthetic: FMR1 O forward X:147911891-147911912; SpCas9
acacccgcagcgggccgg

SEQ ID NO: 6617 - DNA, 25 bp, Artificial Sequence
  Synthetic: FMR1 O forward X:147911889-147911917; SpCas9
ttacacccgcagcgggccgggggtt

SEQ ID NO: 6618 - DNA, 24 bp, Artificial Sequence
  Synthetic: FMR1 O forward X:147911890-147911917; SpCas9
tacacccgcagcgggccgggggtt

SEQ ID NO: 6619 - DNA, 23 bp, Artificial Sequence
  Synthetic: FMR1 O forward X:147911891-147911917; SpCas9
acacccgcagcgggccgggggtt

SEQ ID NO: 6620 - DNA, 22 bp, Artificial Sequence
  Synthetic: FMR1 O forward X:147911892-147911917; SpCas9
cacccgcagcgggccgggggtt

SEQ ID NO: 6621 - DNA, 21 bp, Artificial Sequence
  Synthetic: FMR1 O forward X:147911893-147911917; SpCas9
acccgcagcgggccgggggtt

SEQ ID NO: 6622 - DNA, 20 bp, Artificial Sequence
  Synthetic: FMR1 O forward X:147911894-147911917; SpCas9
cccgcagcgggccgggggtt

SEQ ID NO: 6623 - DNA, 19 bp, Artificial Sequence
  Synthetic: FMR1 O forward X:147911895-147911917; SpCas9
ccgcagcgggccgggggtt

SEQ ID NO: 6624 - DNA, 18 bp, Artificial Sequence
  Synthetic: FMR1 O forward X:147911896-147911917; SpCas9
cgcagcgggccgggggtt

SEQ ID NO: 6625 - DNA, 25 bp, Artificial Sequence
  Synthetic: FMR1 O reverse X:147911894-147911922; SpCas9
tgaggccgaacccccggcccgctgc

SEQ ID NO: 6626 - DNA, 24 bp, Artificial Sequence
  Synthetic: FMR1 O reverse X:147911895-147911922; SpCas9
gaggccgaacccccggcccgctgc

SEQ ID NO: 6627 - DNA, 23 bp, Artificial Sequence
  Synthetic: FMR1 O reverse X:147911896-147911922; SpCas9
aggccgaacccccggcccgctgc

SEQ ID NO: 6628 - DNA, 22 bp, Artificial Sequence
  Synthetic: FMR1 O reverse X:147911897-147911922; SpCas9
ggccgaacccccggcccgctgc

SEQ ID NO: 6629 - DNA, 21 bp, Artificial Sequence
  Synthetic: FMR1 O reverse X:147911898-147911922; SpCas9
gccgaacccccggcccgctgc

SEQ ID NO: 6630 - DNA, 20 bp, Artificial Sequence
  Synthetic: FMR1 O reverse X:147911899-147911922; SpCas9
ccgaacccccggcccgctgc

SEQ ID NO: 6631 - DNA, 19 bp, Artificial Sequence
  Synthetic: FMR1 O reverse X:147911900-147911922; SpCas9
cgaacccccggcccgctgc

SEQ ID NO: 6632 - DNA, 18 bp, Artificial Sequence
  Synthetic: FMR1 O reverse X:147911901-147911922; SpCas9
gaacccccggcccgctgc

SEQ ID NO: 6633 - DNA, 25 bp, Artificial Sequence
  Synthetic: FMR1 O forward X:147911895-147911923; SpCas9
ccgcagcgggccgggggttcggcct

SEQ ID NO: 6634 - DNA, 24 bp, Artificial Sequence
  Synthetic: FMR1 O forward X:147911896-147911923; SpCas9
cgcagcgggccgggggttcggcct

SEQ ID NO: 6635 - DNA, 23 bp, Artificial Sequence
  Synthetic: FMR1 O forward X:147911897-147911923; SpCas9
gcagcgggccgggggttcggcct

SEQ ID NO: 6636 - DNA, 22 bp, Artificial Sequence
  Synthetic: FMR1 O forward X:147911898-147911923; SpCas9
cagcgggccgggggttcggcct

SEQ ID NO: 6637 - DNA, 21 bp, Artificial Sequence
  Synthetic: FMR1 O forward X:147911899-147911923; SpCas9
agcgggccgggggttcggcct

SEQ ID NO: 6638 - DNA, 20 bp, Artificial Sequence
  Synthetic: FMR1 O forward X:147911900-147911923; SpCas9
gcgggccgggggttcggcct

SEQ ID NO: 6639 - DNA, 19 bp, Artificial Sequence
  Synthetic: FMR1 O forward X:147911901-147911923; SpCas9
cgggccgggggttcggcct

SEQ ID NO: 6640 - DNA, 18 bp, Artificial Sequence
  Synthetic: FMR1 O forward X:147911902-147911923; SpCas9
gggccgggggttcggcct

SEQ ID NO: 6641 - DNA, 25 bp, Artificial Sequence
  Synthetic: FMR1 O reverse X:147911895-147911923; SpCas9
ctgaggccgaacccccggcccgctg

SEQ ID NO: 6642 - DNA, 24 bp, Artificial Sequence
  Synthetic: FMR1 O reverse X:147911896-147911923; SpCas9
tgaggccgaacccccggcccgctg

SEQ ID NO: 6643 - DNA, 23 bp, Artificial Sequence
  Synthetic: FMR1 O reverse X:147911897-147911923; SpCas9
gaggccgaacccccggcccgctg

SEQ ID NO: 6644 - DNA, 22 bp, Artificial Sequence
  Synthetic: FMR1 O reverse X:147911898-147911923; SpCas9
aggccgaacccccggcccgctg

SEQ ID NO: 6645 - DNA, 21 bp, Artificial Sequence
  Synthetic: FMR1 O reverse X:147911899-147911923; SpCas9
ggccgaacccccggcccgctg

SEQ ID NO: 6646 - DNA, 20 bp, Artificial Sequence
  Synthetic: FMR1 O reverse X:147911900-147911923; SpCas9
gccgaacccccggcccgctg

SEQ ID NO: 6647 - DNA, 19 bp, Artificial Sequence
  Synthetic: FMR1 O reverse X:147911901-147911923; SpCas9
ccgaacccccggcccgctg

SEQ ID NO: 6648 - DNA, 18 bp, Artificial Sequence
  Synthetic: FMR1 O reverse X:147911902-147911923; SpCas9
cgaacccccggcccgctg

SEQ ID NO: 6649 - DNA, 25 bp, Artificial Sequence
  Synthetic: FMR1 O forward X:147911899-147911927; SpCas9
agcgggccgggggttcggcctcagt

SEQ ID NO: 6650 - DNA, 24 bp, Artificial Sequence
  Synthetic: FMR1 O forward X:147911900-147911927; SpCas9
gcgggccgggggttcggcctcagt

SEQ ID NO: 6651 - DNA, 23 bp, Artificial Sequence
  Synthetic: FMR1 O forward X:147911901-147911927; SpCas9
cgggccgggggttcggcctcagt

SEQ ID NO: 6652 - DNA, 22 bp, Artificial Sequence
  Synthetic: FMR1 O forward X:147911902-147911927; SpCas9
gggccgggggttcggcctcagt

SEQ ID NO: 6653 - DNA, 21 bp, Artificial Sequence
  Synthetic: FMR1 O forward X:147911903-147911927; SpCas9
ggccgggggttcggcctcagt

SEQ ID NO: 6654 - DNA, 20 bp, Artificial Sequence
  Synthetic: FMR1 O forward X:147911904-147911927; SpCas9
gccgggggttcggcctcagt

SEQ ID NO: 6655 - DNA, 19 bp, Artificial Sequence
  Synthetic: FMR1 O forward X:147911905-147911927; SpCas9
ccgggggttcggcctcagt

SEQ ID NO: 6656 - DNA, 18 bp, Artificial Sequence
  Synthetic: FMR1 O forward X:147911906-147911927; SpCas9
cgggggttcggcctcagt

SEQ ID NO: 6657 - DNA, 25 bp, Artificial Sequence
  Synthetic: FMR1 O forward X:147911900-147911928; SpCas9
gcgggccgggggttcggcctcagtc

SEQ ID NO: 6658 - DNA, 24 bp, Artificial Sequence
  Synthetic: FMR1 O forward X:147911901-147911928; SpCas9
cgggccgggggttcggcctcagtc

SEQ ID NO: 6659 - DNA, 23 bp, Artificial Sequence
  Synthetic: FMR1 O forward X:147911902-147911928; SpCas9
gggccgggggttcggcctcagtc

SEQ ID NO: 6660 - DNA, 22 bp, Artificial Sequence
  Synthetic: FMR1 O forward X:147911903-147911928; SpCas9
ggccgggggttcggcctcagtc

SEQ ID NO: 6661 - DNA, 21 bp, Artificial Sequence
  Synthetic: FMR1 O forward X:147911904-147911928; SpCas9
gccgggggttcggcctcagtc

SEQ ID NO: 6662 - DNA, 20 bp, Artificial Sequence
  Synthetic: FMR1 O forward X:147911905-147911928; SpCas9
ccgggggttcggcctcagtc

SEQ ID NO: 6663 - DNA, 19 bp, Artificial Sequence
  Synthetic: FMR1 O forward X:147911906-147911928; SpCas9
cgggggttcggcctcagtc

SEQ ID NO: 6664 - DNA, 18 bp, Artificial Sequence
  Synthetic: FMR1 O forward X:147911907-147911928; SpCas9
gggggttcggcctcagtc

SEQ ID NO: 6665 - DNA, 25 bp, Artificial Sequence
  Synthetic: FMR1 O reverse X:147911905-147911933; SpCas9
gagcgcctgactgaggccgaacccc

SEQ ID NO: 6666 - DNA, 24 bp, Artificial Sequence
  Synthetic: FMR1 O reverse X:147911906-147911933; SpCas9
agcgcctgactgaggccgaacccc

SEQ ID NO: 6667 - DNA, 23 bp, Artificial Sequence
  Synthetic: FMR1 O reverse X:147911907-147911933; SpCas9
gcgcctgactgaggccgaacccc

SEQ ID NO: 6668 - DNA, 22 bp, Artificial Sequence
  Synthetic: FMR1 O reverse X:147911908-147911933; SpCas9
cgcctgactgaggccgaacccc

SEQ ID NO: 6669 - DNA, 21 bp, Artificial Sequence
  Synthetic: FMR1 O reverse X:147911909-147911933; SpCas9
gcctgactgaggccgaacccc

SEQ ID NO: 6670 - DNA, 20 bp, Artificial Sequence
  Synthetic: FMR1 O reverse X:147911910-147911933; SpCas9
cctgactgaggccgaacccc

SEQ ID NO: 6671 - DNA, 19 bp, Artificial Sequence
  Synthetic: FMR1 O reverse X:147911911-147911933; SpCas9
ctgactgaggccgaacccc

SEQ ID NO: 6672 - DNA, 18 bp, Artificial Sequence
  Synthetic: FMR1 O reverse X:147911912-147911933; SpCas9
tgactgaggccgaacccc

SEQ ID NO: 6673 - DNA, 25 bp, Artificial Sequence
  Synthetic: FMR1 O forward X:147911907-147911935; SpCas9
gggggttcggcctcagtcaggcgct

SEQ ID NO: 6674 - DNA, 24 bp, Artificial Sequence
  Synthetic: FMR1 O forward X:147911908-147911935; SpCas9
ggggttcggcctcagtcaggcgct

SEQ ID NO: 6675 - DNA, 23 bp, Artificial Sequence
  Synthetic: FMR1 O forward X:147911909-147911935; SpCas9
gggttcggcctcagtcaggcgct

SEQ ID NO: 6676 - DNA, 22 bp, Artificial Sequence
  Synthetic: FMR1 O forward X:147911910-147911935; SpCas9
ggttcggcctcagtcaggcgct

SEQ ID NO: 6677 - DNA, 21 bp, Artificial Sequence
  Synthetic: FMR1 O forward X:147911911-147911935; SpCas9
gttcggcctcagtcaggcgct

SEQ ID NO: 6678 - DNA, 20 bp, Artificial Sequence
  Synthetic: FMR1 O forward X:147911912-147911935; SpCas9
ttcggcctcagtcaggcgct

SEQ ID NO: 6679 - DNA, 19 bp, Artificial Sequence
  Synthetic: FMR1 O forward X:147911913-147911935; SpCas9
tcggcctcagtcaggcgct

SEQ ID NO: 6680 - DNA, 18 bp, Artificial Sequence
  Synthetic: FMR1 O forward X:147911914-147911935; SpCas9
cggcctcagtcaggcgct

SEQ ID NO: 6681 - DNA, 25 bp, Artificial Sequence
  Synthetic: FMR1 O reverse X:147911917-147911945; SpCas9
cgaaacggagctgagcgcctgactg

SEQ ID NO: 6682 - DNA, 24 bp, Artificial Sequence
  Synthetic: FMR1 O reverse X:147911918-147911945; SpCas9
gaaacggagctgagcgcctgactg

SEQ ID NO: 6683 - DNA, 23 bp, Artificial Sequence
  Synthetic: FMR1 O reverse X:147911919-147911945; SpCas9
aaacggagctgagcgcctgactg

SEQ ID NO: 6684 - DNA, 22 bp, Artificial Sequence
  Synthetic: FMR1 O reverse X:147911920-147911945; SpCas9
aacggagctgagcgcctgactg

SEQ ID NO: 6685 - DNA, 21 bp, Artificial Sequence
  Synthetic: FMR1 O reverse X:147911921-147911945; SpCas9
acggagctgagcgcctgactg

SEQ ID NO: 6686 - DNA, 20 bp, Artificial Sequence
  Synthetic: FMR1 O reverse X:147911922-147911945; SpCas9
cggagctgagcgcctgactg

SEQ ID NO: 6687 - DNA, 19 bp, Artificial Sequence
  Synthetic: FMR1 O reverse X:147911923-147911945; SpCas9
ggagctgagcgcctgactg

SEQ ID NO: 6688 - DNA, 18 bp, Artificial Sequence
  Synthetic: FMR1 O reverse X:147911924-147911945; SpCas9
gagctgagcgcctgactg

SEQ ID NO: 6689 - DNA, 25 bp, Artificial Sequence
  Synthetic: FMR1 O forward X:147911918-147911946; SpCas9
ctcagtcaggcgctcagctccgttt

SEQ ID NO: 6690 - DNA, 24 bp, Artificial Sequence
  Synthetic: FMR1 O forward X:147911919-147911946; SpCas9
tcagtcaggcgctcagctccgttt

SEQ ID NO: 6691 - DNA, 23 bp, Artificial Sequence
  Synthetic: FMR1 O forward X:147911920-147911946; SpCas9
cagtcaggcgctcagctccgttt

SEQ ID NO: 6692 - DNA, 22 bp, Artificial Sequence
  Synthetic: FMR1 O forward X:147911921-147911946; SpCas9
agtcaggcgctcagctccgttt

SEQ ID NO: 6693 - DNA, 21 bp, Artificial Sequence
  Synthetic: FMR1 O forward X:147911922-147911946; SpCas9
gtcaggcgctcagctccgttt

SEQ ID NO: 6694 - DNA, 20 bp, Artificial Sequence
  Synthetic: FMR1 O forward X:147911923-147911946; SpCas9
tcaggcgctcagctccgttt

SEQ ID NO: 6695 - DNA, 19 bp, Artificial Sequence
  Synthetic: FMR1 O forward X:147911924-147911946; SpCas9
caggcgctcagctccgttt

SEQ ID NO: 6696 - DNA, 18 bp, Artificial Sequence
  Synthetic: FMR1 O forward X:147911925-147911946; SpCas9
aggcgctcagctccgttt

SEQ ID NO: 6697 - DNA, 25 bp, Artificial Sequence
  Synthetic: FMR1 O reverse X:147911918-147911946; SpCas9
ccgaaacggagctgagcgcctgact

SEQ ID NO: 6698 - DNA, 24 bp, Artificial Sequence
  Synthetic: FMR1 O reverse X:147911919-147911946; SpCas9
cgaaacggagctgagcgcctgact

SEQ ID NO: 6699 - DNA, 23 bp, Artificial Sequence
  Synthetic: FMR1 O reverse X:147911920-147911946; SpCas9
gaaacggagctgagcgcctgact

SEQ ID NO: 6700 - DNA, 22 bp, Artificial Sequence
  Synthetic: FMR1 O reverse X:147911921-147911946; SpCas9
aaacggagctgagcgcctgact

SEQ ID NO: 6701 - DNA, 21 bp, Artificial Sequence
  Synthetic: FMR1 O reverse X:147911922-147911946; SpCas9
aacggagctgagcgcctgact

SEQ ID NO: 6702 - DNA, 20 bp, Artificial Sequence
  Synthetic: FMR1 O reverse X:147911923-147911946; SpCas9
acggagctgagcgcctgact

SEQ ID NO: 6703 - DNA, 19 bp, Artificial Sequence
  Synthetic: FMR1 O reverse X:147911924-147911946; SpCas9
cggagctgagcgcctgact

SEQ ID NO: 6704 - DNA, 18 bp, Artificial Sequence
  Synthetic: FMR1 O reverse X:147911925-147911946; SpCas9
ggagctgagcgcctgact

SEQ ID NO: 6705 - DNA, 25 bp, Artificial Sequence
  Synthetic: FMR1 O reverse X:147911930-147911958; SpCas9
ccggaagtgaaaccgaaacggagct

SEQ ID NO: 6706 - DNA, 24 bp, Artificial Sequence
  Synthetic: FMR1 O reverse X:147911931-147911958; SpCas9
cggaagtgaaaccgaaacggagct

SEQ ID NO: 6707 - DNA, 23 bp, Artificial Sequence
  Synthetic: FMR1 O reverse X:147911932-147911958; SpCas9
ggaagtgaaaccgaaacggagct

SEQ ID NO: 6708 - DNA, 22 bp, Artificial Sequence
  Synthetic: FMR1 O reverse X:147911933-147911958; SpCas9
gaagtgaaaccgaaacggagct

SEQ ID NO: 6709 - DNA, 21 bp, Artificial Sequence
  Synthetic: FMR1 O reverse X:147911934-147911958; SpCas9
aagtgaaaccgaaacggagct

SEQ ID NO: 6710 - DNA, 20 bp, Artificial Sequence
  Synthetic: FMR1 O reverse X:147911935-147911958; SpCas9
agtgaaaccgaaacggagct

SEQ ID NO: 6711 - DNA, 19 bp, Artificial Sequence
  Synthetic: FMR1 O reverse X:147911936-147911958; SpCas9
gtgaaaccgaaacggagct

SEQ ID NO: 6712 - DNA, 18 bp, Artificial Sequence
  Synthetic: FMR1 O reverse X:147911937-147911958; SpCas9
tgaaaccgaaacggagct

SEQ ID NO: 6713 - DNA, 25 bp, Artificial Sequence
  Synthetic: FMR1 O reverse X:147911935-147911963; SpCas9
ctccaccggaagtgaaaccgaaacg

SEQ ID NO: 6714 - DNA, 24 bp, Artificial Sequence
  Synthetic: FMR1 O reverse X:147911936-147911963; SpCas9
tccaccggaagtgaaaccgaaacg

SEQ ID NO: 6715 - DNA, 23 bp, Artificial Sequence
  Synthetic: FMR1 O reverse X:147911937-147911963; SpCas9
ccaccggaagtgaaaccgaaacg

SEQ ID NO: 6716 - DNA, 22 bp, Artificial Sequence
  Synthetic: FMR1 O reverse X:147911938-147911963; SpCas9
caccggaagtgaaaccgaaacg

SEQ ID NO: 6717 - DNA, 21 bp, Artificial Sequence
  Synthetic: FMR1 O reverse X:147911939-147911963; SpCas9
accggaagtgaaaccgaaacg

SEQ ID NO: 6718 - DNA, 20 bp, Artificial Sequence
  Synthetic: FMR1 O reverse X:147911940-147911963; SpCas9
ccggaagtgaaaccgaaacg

SEQ ID NO: 6719 - DNA, 19 bp, Artificial Sequence
  Synthetic: FMR1 O reverse X:147911941-147911963; SpCas9
cggaagtgaaaccgaaacg

SEQ ID NO: 6720 - DNA, 18 bp, Artificial Sequence
  Synthetic: FMR1 O reverse X:147911942-147911963; SpCas9
ggaagtgaaaccgaaacg

SEQ ID NO: 6721 - DNA, 25 bp, Artificial Sequence
  Synthetic: FMR1 O reverse X:147911937-147911965; SpCas9
ccctccaccggaagtgaaaccgaaa

SEQ ID NO: 6722 - DNA, 24 bp, Artificial Sequence
  Synthetic: FMR1 O reverse X:147911938-147911965; SpCas9
cctccaccggaagtgaaaccgaaa

SEQ ID NO: 6723 - DNA, 23 bp, Artificial Sequence
  Synthetic: FMR1 O reverse X:147911939-147911965; SpCas9
ctccaccggaagtgaaaccgaaa

SEQ ID NO: 6724 - DNA, 22 bp, Artificial Sequence
  Synthetic: FMR1 O reverse X:147911940-147911965; SpCas9
tccaccggaagtgaaaccgaaa

SEQ ID NO: 6725 - DNA, 21 bp, Artificial Sequence
  Synthetic: FMR1 O reverse X:147911941-147911965; SpCas9
ccaccggaagtgaaaccgaaa

SEQ ID NO: 6726 - DNA, 20 bp, Artificial Sequence
  Synthetic: FMR1 O reverse X:147911942-147911965; SpCas9
caccggaagtgaaaccgaaa

SEQ ID NO: 6727 - DNA, 19 bp, Artificial Sequence
  Synthetic: FMR1 O reverse X:147911943-147911965; SpCas9
accggaagtgaaaccgaaa

SEQ ID NO: 6728 - DNA, 18 bp, Artificial Sequence
  Synthetic: FMR1 O reverse X:147911944-147911965; SpCas9
ccggaagtgaaaccgaaa

SEQ ID NO: 6729 - DNA, 25 bp, Artificial Sequence
  Synthetic: FMR1 O forward X:147912052-147912080; SpCas9
gcggcggcggcggcggcggcggcgg

SEQ ID NO: 6730 - DNA, 24 bp, Artificial Sequence
  Synthetic: FMR1 O forward X:147912053-147912080; SpCas9
cggcggcggcggcggcggcggcgg

SEQ ID NO: 6731 - DNA, 23 bp, Artificial Sequence
  Synthetic: FMR1 O forward X:147912054-147912080; SpCas9
ggcggcggcggcggcggcggcgg

SEQ ID NO: 6732 - DNA, 22 bp, Artificial Sequence
  Synthetic: FMR1 O forward X:147912055-147912080; SpCas9
gcggcggcggcggcggcggcgg

SEQ ID NO: 6733 - DNA, 21 bp, Artificial Sequence
  Synthetic: FMR1 O forward X:147912056-147912080; SpCas9
cggcggcggcggcggcggcgg

SEQ ID NO: 6734 - DNA, 20 bp, Artificial Sequence
  Synthetic: FMR1 O forward X:147912057-147912080; SpCas9
ggcggcggcggcggcggcgg

SEQ ID NO: 6735 - DNA, 19 bp, Artificial Sequence
  Synthetic: FMR1 O forward X:147912058-147912080; SpCas9
gcggcggcggcggcggcgg

SEQ ID NO: 6736 - DNA, 18 bp, Artificial Sequence
  Synthetic: FMR1 O forward X:147912059-147912080; SpCas9
cggcggcggcggcggcgg

SEQ ID NO: 6737 - DNA, 25 bp, Artificial Sequence
  Synthetic: FMR1 O forward X:147912054-147912082; SpCas9
ggcggcggcggcggcggcggcggcg

SEQ ID NO: 6738 - DNA, 24 bp, Artificial Sequence
  Synthetic: FMR1 O forward X:147912055-147912082; SpCas9
gcggcggcggcggcggcggcggcg

SEQ ID NO: 6739 - DNA, 23 bp, Artificial Sequence
  Synthetic: FMR1 O forward X:147912056-147912082; SpCas9
cggcggcggcggcggcggcggcg

SEQ ID NO: 6740 - DNA, 22 bp, Artificial Sequence
  Synthetic: FMR1 O forward X:147912057-147912082; SpCas9
ggcggcggcggcggcggcggcg

SEQ ID NO: 6741 - DNA, 21 bp, Artificial Sequence
  Synthetic: FMR1 O forward X:147912058-147912082; SpCas9
gcggcggcggcggcggcggcg

SEQ ID NO: 6742 - DNA, 20 bp, Artificial Sequence
  Synthetic: FMR1 O forward X:147912059-147912082; SpCas9
cggcggcggcggcggcggcg

SEQ ID NO: 6743 - DNA, 19 bp, Artificial Sequence
  Synthetic: FMR1 O forward X:147912060-147912082; SpCas9
ggcggcggcggcggcggcg

SEQ ID NO: 6744 - DNA, 18 bp, Artificial Sequence
  Synthetic: FMR1 O forward X:147912061-147912082; SpCas9
gcggcggcggcggcggcg

SEQ ID NO: 6745 - DNA, 25 bp, Artificial Sequence
  Synthetic: FMR1 O forward X:147912055-147912083; SpCas9
gcggcggcggcggcggcggcggcgg

SEQ ID NO: 6746 - DNA, 24 bp, Artificial Sequence
  Synthetic: FMR1 O forward X:147912056-147912083; SpCas9
cggcggcggcggcggcggcggcgg

SEQ ID NO: 6747 - DNA, 23 bp, Artificial Sequence
  Synthetic: FMR1 O forward X:147912057-147912083; SpCas9
ggcggcggcggcggcggcggcgg

SEQ ID NO: 6748 - DNA, 22 bp, Artificial Sequence
  Synthetic: FMR1 O forward X:147912058-147912083; SpCas9
gcggcggcggcggcggcggcgg

SEQ ID NO: 6749 - DNA, 21 bp, Artificial Sequence
  Synthetic: FMR1 O forward X:147912059-147912083; SpCas9
cggcggcggcggcggcggcgg

SEQ ID NO: 6750 - DNA, 20 bp, Artificial Sequence
  Synthetic: FMR1 O forward X:147912060-147912083; SpCas9
ggcggcggcggcggcggcgg

SEQ ID NO: 6751 - DNA, 19 bp, Artificial Sequence
  Synthetic: FMR1 O forward X:147912061-147912083; SpCas9
gcggcggcggcggcggcgg

SEQ ID NO: 6752 - DNA, 18 bp, Artificial Sequence
  Synthetic: FMR1 O forward X:147912062-147912083; SpCas9
cggcggcggcggcggcgg

SEQ ID NO: 6753 - DNA, 25 bp, Artificial Sequence
  Synthetic: FMR1 O forward X:147912058-147912086; SpCas9
gcggcggcggcggcggcggcggagg

SEQ ID NO: 6754 - DNA, 24 bp, Artificial Sequence
  Synthetic: FMR1 O forward X:147912059-147912086; SpCas9
cggcggcggcggcggcggcggagg

SEQ ID NO: 6755 - DNA, 23 bp, Artificial Sequence
  Synthetic: FMR1 O forward X:147912060-147912086; SpCas9
ggcggcggcggcggcggcggagg

SEQ ID NO: 6756 - DNA, 22 bp, Artificial Sequence
  Synthetic: FMR1 O forward X:147912061-147912086; SpCas9
gcggcggcggcggcggcggagg

SEQ ID NO: 6757 - DNA, 21 bp, Artificial Sequence
  Synthetic: FMR1 O forward X:147912062-147912086; SpCas9
cggcggcggcggcggcggagg

SEQ ID NO: 6758 - DNA, 20 bp, Artificial Sequence
  Synthetic: FMR1 O forward X:147912063-147912086; SpCas9
ggcggcggcggcggcggagg

SEQ ID NO: 6759 - DNA, 19 bp, Artificial Sequence
  Synthetic: FMR1 O forward X:147912064-147912086; SpCas9
gcggcggcggcggcggagg

SEQ ID NO: 6760 - DNA, 18 bp, Artificial Sequence
  Synthetic: FMR1 O forward X:147912065-147912086; SpCas9
cggcggcggcggcggagg

SEQ ID NO: 6761 - DNA, 25 bp, Artificial Sequence
  Synthetic: FMR1 O forward X:147912061-147912089; SpCas9
gcggcggcggcggcggcggaggcgg

SEQ ID NO: 6762 - DNA, 24 bp, Artificial Sequence
  Synthetic: FMR1 O forward X:147912062-147912089; SpCas9
cggcggcggcggcggcggaggcgg

SEQ ID NO: 6763 - DNA, 23 bp, Artificial Sequence
  Synthetic: FMR1 O forward X:147912063-147912089; SpCas9
ggcggcggcggcggcggaggcgg

SEQ ID NO: 6764 - DNA, 22 bp, Artificial Sequence
  Synthetic: FMR1 O forward X:147912064-147912089; SpCas9
gcggcggcggcggcggaggcgg

SEQ ID NO: 6765 - DNA, 21 bp, Artificial Sequence
  Synthetic: FMR1 O forward X:147912065-147912089; SpCas9
cggcggcggcggcggaggcgg

SEQ ID NO: 6766 - DNA, 20 bp, Artificial Sequence
  Synthetic: FMR1 O forward X:147912066-147912089; SpCas9
ggcggcggcggcggaggcgg

SEQ ID NO: 6767 - DNA, 19 bp, Artificial Sequence
  Synthetic: FMR1 O forward X:147912067-147912089; SpCas9
gcggcggcggcggaggcgg

SEQ ID NO: 6768 - DNA, 18 bp, Artificial Sequence
  Synthetic: FMR1 O forward X:147912068-147912089; SpCas9
cggcggcggcggaggcgg

SEQ ID NO: 6769 - DNA, 25 bp, Artificial Sequence
  Synthetic: FMR1 O forward X:147912064-147912092; SpCas9
gcggcggcggcggcggaggcggcgg

SEQ ID NO: 6770 - DNA, 24 bp, Artificial Sequence
  Synthetic: FMR1 O forward X:147912065-147912092; SpCas9
cggcggcggcggcggaggcggcgg

SEQ ID NO: 6771 - DNA, 23 bp, Artificial Sequence
  Synthetic: FMR1 O forward X:147912066-147912092; SpCas9
ggcggcggcggcggaggcggcgg

SEQ ID NO: 6772 - DNA, 22 bp, Artificial Sequence
  Synthetic: FMR1 O forward X:147912067-147912092; SpCas9
gcggcggcggcggaggcggcgg

SEQ ID NO: 6773 - DNA, 21 bp, Artificial Sequence
  Synthetic: FMR1 O forward X:147912068-147912092; SpCas9
cggcggcggcggaggcggcgg

SEQ ID NO: 6774 - DNA, 20 bp, Artificial Sequence
  Synthetic: FMR1 O forward X:147912069-147912092; SpCas9
ggcggcggcggaggcggcgg

SEQ ID NO: 6775 - DNA, 19 bp, Artificial Sequence
  Synthetic: FMR1 O forward X:147912070-147912092; SpCas9
gcggcggcggaggcggcgg

SEQ ID NO: 6776 - DNA, 18 bp, Artificial Sequence
  Synthetic: FMR1 O forward X:147912071-147912092; SpCas9
cggcggcggaggcggcgg

SEQ ID NO: 6777 - DNA, 25 bp, Artificial Sequence
  Synthetic: FMR1 O forward X:147912067-147912095; SpCas9
gcggcggcggcggaggcggcggcgg

SEQ ID NO: 6778 - DNA, 24 bp, Artificial Sequence
  Synthetic: FMR1 O forward X:147912068-147912095; SpCas9
cggcggcggcggaggcggcggcgg

SEQ ID NO: 6779 - DNA, 23 bp, Artificial Sequence
  Synthetic: FMR1 O forward X:147912069-147912095; SpCas9
ggcggcggcggaggcggcggcgg

SEQ ID NO: 6780 - DNA, 22 bp, Artificial Sequence
  Synthetic: FMR1 O forward X:147912070-147912095; SpCas9
gcggcggcggaggcggcggcgg

SEQ ID NO: 6781 - DNA, 21 bp, Artificial Sequence
  Synthetic: FMR1 O forward X:147912071-147912095; SpCas9
cggcggcggaggcggcggcgg

SEQ ID NO: 6782 - DNA, 20 bp, Artificial Sequence
  Synthetic: FMR1 O forward X:147912072-147912095; SpCas9
ggcggcggaggcggcggcgg

SEQ ID NO: 6783 - DNA, 19 bp, Artificial Sequence
  Synthetic: FMR1 O forward X:147912073-147912095; SpCas9
gcggcggaggcggcggcgg

SEQ ID NO: 6784 - DNA, 18 bp, Artificial Sequence
  Synthetic: FMR1 O forward X:147912074-147912095; SpCas9
cggcggaggcggcggcgg

SEQ ID NO: 6785 - DNA, 25 bp, Artificial Sequence
  Synthetic: FMR1 O forward X:147912070-147912098; SpCas9
gcggcggcggaggcggcggcggcgg

SEQ ID NO: 6786 - DNA, 24 bp, Artificial Sequence
  Synthetic: FMR1 O forward X:147912071-147912098; SpCas9
cggcggcggaggcggcggcggcgg

SEQ ID NO: 6787 - DNA, 23 bp, Artificial Sequence
  Synthetic: FMR1 O forward X:147912072-147912098; SpCas9
ggcggcggaggcggcggcggcgg

SEQ ID NO: 6788 - DNA, 22 bp, Artificial Sequence
  Synthetic: FMR1 O forward X:147912073-147912098; SpCas9
gcggcggaggcggcggcggcgg

SEQ ID NO: 6789 - DNA, 21 bp, Artificial Sequence
  Synthetic: FMR1 O forward X:147912074-147912098; SpCas9
cggcggaggcggcggcggcgg

SEQ ID NO: 6790 - DNA, 20 bp, Artificial Sequence
  Synthetic: FMR1 O forward X:147912075-147912098; SpCas9
ggcggaggcggcggcggcgg

SEQ ID NO: 6791 - DNA, 19 bp, Artificial Sequence
  Synthetic: FMR1 O forward X:147912076-147912098; SpCas9
gcggaggcggcggcggcgg

SEQ ID NO: 6792 - DNA, 18 bp, Artificial Sequence
  Synthetic: FMR1 O forward X:147912077-147912098; SpCas9
cggaggcggcggcggcgg

SEQ ID NO: 6793 - DNA, 25 bp, Artificial Sequence
  Synthetic: FMR1 O forward X:147912073-147912101; SpCas9
gcggcggaggcggcggcggcggcgg

SEQ ID NO: 6794 - DNA, 24 bp, Artificial Sequence
  Synthetic: FMR1 O forward X:147912074-147912101; SpCas9
cggcggaggcggcggcggcggcgg

SEQ ID NO: 6795 - DNA, 23 bp, Artificial Sequence
  Synthetic: FMR1 O forward X:147912075-147912101; SpCas9
ggcggaggcggcggcggcggcgg

SEQ ID NO: 6796 - DNA, 22 bp, Artificial Sequence
  Synthetic: FMR1 O forward X:147912076-147912101; SpCas9
gcggaggcggcggcggcggcgg

SEQ ID NO: 6797 - DNA, 21 bp, Artificial Sequence
  Synthetic: FMR1 O forward X:147912077-147912101; SpCas9
cggaggcggcggcggcggcgg

SEQ ID NO: 6798 - DNA, 20 bp, Artificial Sequence
  Synthetic: FMR1 O forward X:147912078-147912101; SpCas9
ggaggcggcggcggcggcgg

SEQ ID NO: 6799 - DNA, 19 bp, Artificial Sequence
  Synthetic: FMR1 O forward X:147912079-147912101; SpCas9
gaggcggcggcggcggcgg

SEQ ID NO: 6800 - DNA, 18 bp, Artificial Sequence
  Synthetic: FMR1 O forward X:147912080-147912101; SpCas9
aggcggcggcggcggcgg

SEQ ID NO: 6801 - DNA, 25 bp, Artificial Sequence
  Synthetic: FMR1 O forward X:147912076-147912104; SpCas9
gcggaggcggcggcggcggcggcgg

SEQ ID NO: 6802 - DNA, 24 bp, Artificial Sequence
  Synthetic: FMR1 O forward X:147912077-147912104; SpCas9
cggaggcggcggcggcggcggcgg

SEQ ID NO: 6803 - DNA, 23 bp, Artificial Sequence
  Synthetic: FMR1 O forward X:147912078-147912104; SpCas9
ggaggcggcggcggcggcggcgg

SEQ ID NO: 6804 - DNA, 22 bp, Artificial Sequence
  Synthetic: FMR1 O forward X:147912079-147912104; SpCas9
gaggcggcggcggcggcggcgg

SEQ ID NO: 6805 - DNA, 21 bp, Artificial Sequence
  Synthetic: FMR1 O forward X:147912080-147912104; SpCas9
aggcggcggcggcggcggcgg

SEQ ID NO: 6806 - DNA, 20 bp, Artificial Sequence
  Synthetic: FMR1 O forward X:147912081-147912104; SpCas9
ggcggcggcggcggcggcgg

SEQ ID NO: 6807 - DNA, 19 bp, Artificial Sequence
  Synthetic: FMR1 O forward X:147912082-147912104; SpCas9
gcggcggcggcggcggcgg

SEQ ID NO: 6808 - DNA, 18 bp, Artificial Sequence
  Synthetic: FMR1 O forward X:147912083-147912104; SpCas9
cggcggcggcggcggcgg

SEQ ID NO: 6809 - DNA, 25 bp, Artificial Sequence
  Synthetic: FMR1 O forward X:147912079-147912107; SpCas9
gaggcggcggcggcggcggcggcgg

SEQ ID NO: 6810 - DNA, 24 bp, Artificial Sequence
  Synthetic: FMR1 O forward X:147912080-147912107; SpCas9
aggcggcggcggcggcggcggcgg

SEQ ID NO: 6811 - DNA, 23 bp, Artificial Sequence
  Synthetic: FMR1 O forward X:147912081-147912107; SpCas9
ggcggcggcggcggcggcggcgg

SEQ ID NO: 6812 - DNA, 22 bp, Artificial Sequence
  Synthetic: FMR1 O forward X:147912082-147912107; SpCas9
gcggcggcggcggcggcggcgg

SEQ ID NO: 6813 - DNA, 21 bp, Artificial Sequence
  Synthetic: FMR1 O forward X:147912083-147912107; SpCas9
cggcggcggcggcggcggcgg

SEQ ID NO: 6814 - DNA, 20 bp, Artificial Sequence
  Synthetic: FMR1 O forward X:147912084-147912107; SpCas9
ggcggcggcggcggcggcgg

SEQ ID NO: 6815 - DNA, 19 bp, Artificial Sequence
  Synthetic: FMR1 O forward X:147912085-147912107; SpCas9
gcggcggcggcggcggcgg

SEQ ID NO: 6816 - DNA, 18 bp, Artificial Sequence
  Synthetic: FMR1 O forward X:147912086-147912107; SpCas9
cggcggcggcggcggcgg

SEQ ID NO: 6817 - DNA, 25 bp, Artificial Sequence
  Synthetic: FMR1 O forward X:147912082-147912110; SpCas9
gcggcggcggcggcggcggcggcgg

SEQ ID NO: 6818 - DNA, 24 bp, Artificial Sequence
  Synthetic: FMR1 O forward X:147912083-147912110; SpCas9
cggcggcggcggcggcggcggcgg

SEQ ID NO: 6819 - DNA, 23 bp, Artificial Sequence
  Synthetic: FMR1 O forward X:147912084-147912110; SpCas9
ggcggcggcggcggcggcggcgg

SEQ ID NO: 6820 - DNA, 22 bp, Artificial Sequence
  Synthetic: FMR1 O forward X:147912085-147912110; SpCas9
gcggcggcggcggcggcggcgg

SEQ ID NO: 6821 - DNA, 21 bp, Artificial Sequence
  Synthetic: FMR1 O forward X:147912086-147912110; SpCas9
cggcggcggcggcggcggcgg

SEQ ID NO: 6822 - DNA, 20 bp, Artificial Sequence
  Synthetic: FMR1 O forward X:147912087-147912110; SpCas9
ggcggcggcggcggcggcgg

SEQ ID NO: 6823 - DNA, 19 bp, Artificial Sequence
  Synthetic: FMR1 O forward X:147912088-147912110; SpCas9
gcggcggcggcggcggcgg

SEQ ID NO: 6824 - DNA, 18 bp, Artificial Sequence
  Synthetic: FMR1 O forward X:147912089-147912110; SpCas9
cggcggcggcggcggcgg

SEQ ID NO: 6825 - DNA, 25 bp, Artificial Sequence
  Synthetic: FMR1 O forward X:147912158-147912186; SpCas9
gctagcagggctgaagagaagatgg

SEQ ID NO: 6826 - DNA, 24 bp, Artificial Sequence
  Synthetic: FMR1 O forward X:147912159-147912186; SpCas9
ctagcagggctgaagagaagatgg

SEQ ID NO: 6827 - DNA, 23 bp, Artificial Sequence
  Synthetic: FMR1 O forward X:147912160-147912186; SpCas9
tagcagggctgaagagaagatgg

SEQ ID NO: 6828 - DNA, 22 bp, Artificial Sequence
  Synthetic: FMR1 O forward X:147912161-147912186; SpCas9
agcagggctgaagagaagatgg

SEQ ID NO: 6829 - DNA, 21 bp, Artificial Sequence
  Synthetic: FMR1 O forward X:147912162-147912186; SpCas9
gcagggctgaagagaagatgg

SEQ ID NO: 6830 - DNA, 20 bp, Artificial Sequence
  Synthetic: FMR1 O forward X:147912163-147912186; SpCas9
cagggctgaagagaagatgg

SEQ ID NO: 6831 - DNA, 19 bp, Artificial Sequence
  Synthetic: FMR1 O forward X:147912164-147912186; SpCas9
agggctgaagagaagatgg

SEQ ID NO: 6832 - DNA, 18 bp, Artificial Sequence
  Synthetic: FMR1 O forward X:147912165-147912186; SpCas9
gggctgaagagaagatgg

SEQ ID NO: 6833 - DNA, 25 bp, Artificial Sequence
  Synthetic: FMR1 O forward X:147912160-147912188; SpCas9
tagcagggctgaagagaagatggag

SEQ ID NO: 6834 - DNA, 24 bp, Artificial Sequence
  Synthetic: FMR1 O forward X:147912161-147912188; SpCas9
agcagggctgaagagaagatggag

SEQ ID NO: 6835 - DNA, 23 bp, Artificial Sequence
  Synthetic: FMR1 O forward X:147912162-147912188; SpCas9
gcagggctgaagagaagatggag

SEQ ID NO: 6836 - DNA, 22 bp, Artificial Sequence
  Synthetic: FMR1 O forward X:147912163-147912188; SpCas9
cagggctgaagagaagatggag

SEQ ID NO: 6837 - DNA, 21 bp, Artificial Sequence
  Synthetic: FMR1 O forward X:147912164-147912188; SpCas9
agggctgaagagaagatggag

SEQ ID NO: 6838 - DNA, 20 bp, Artificial Sequence
  Synthetic: FMR1 O forward X:147912165-147912188; SpCas9
gggctgaagagaagatggag

SEQ ID NO: 6839 - DNA, 19 bp, Artificial Sequence
  Synthetic: FMR1 O forward X:147912166-147912188; SpCas9
ggctgaagagaagatggag

SEQ ID NO: 6840 - DNA, 18 bp, Artificial Sequence
  Synthetic: FMR1 O forward X:147912167-147912188; SpCas9
gctgaagagaagatggag

SEQ ID NO: 6841 - DNA, 25 bp, Artificial Sequence
  Synthetic: FMR1 O forward X:147912164-147912192; SpCas9
agggctgaagagaagatggaggagc

SEQ ID NO: 6842 - DNA, 24 bp, Artificial Sequence
  Synthetic: FMR1 O forward X:147912165-147912192; SpCas9
gggctgaagagaagatggaggagc

SEQ ID NO: 6843 - DNA, 23 bp, Artificial Sequence
  Synthetic: FMR1 O forward X:147912166-147912192; SpCas9
ggctgaagagaagatggaggagc

SEQ ID NO: 6844 - DNA, 22 bp, Artificial Sequence
  Synthetic: FMR1 O forward X:147912167-147912192; SpCas9
gctgaagagaagatggaggagc

SEQ ID NO: 6845 - DNA, 21 bp, Artificial Sequence
  Synthetic: FMR1 O forward X:147912168-147912192; SpCas9
ctgaagagaagatggaggagc

SEQ ID NO: 6846 - DNA, 20 bp, Artificial Sequence
  Synthetic: FMR1 O forward X:147912169-147912192; SpCas9
tgaagagaagatggaggagc

SEQ ID NO: 6847 - DNA, 19 bp, Artificial Sequence
  Synthetic: FMR1 O forward X:147912170-147912192; SpCas9
gaagagaagatggaggagc

SEQ ID NO: 6848 - DNA, 18 bp, Artificial Sequence
  Synthetic: FMR1 O forward X:147912171-147912192; SpCas9
aagagaagatggaggagc

SEQ ID NO: 6849 - DNA, 25 bp, Artificial Sequence
  Synthetic: FMR1 O forward X:147912167-147912195; SpCas9
gctgaagagaagatggaggagctgg

SEQ ID NO: 6850 - DNA, 24 bp, Artificial Sequence
  Synthetic: FMR1 O forward X:147912168-147912195; SpCas9
ctgaagagaagatggaggagctgg

SEQ ID NO: 6851 - DNA, 23 bp, Artificial Sequence
  Synthetic: FMR1 O forward X:147912169-147912195; SpCas9
tgaagagaagatggaggagctgg

SEQ ID NO: 6852 - DNA, 22 bp, Artificial Sequence
  Synthetic: FMR1 O forward X:147912170-147912195; SpCas9
gaagagaagatggaggagctgg

SEQ ID NO: 6853 - DNA, 21 bp, Artificial Sequence
  Synthetic: FMR1 O forward X:147912171-147912195; SpCas9
aagagaagatggaggagctgg

SEQ ID NO: 6854 - DNA, 20 bp, Artificial Sequence
  Synthetic: FMR1 O forward X:147912172-147912195; SpCas9
agagaagatggaggagctgg

SEQ ID NO: 6855 - DNA, 19 bp, Artificial Sequence
  Synthetic: FMR1 O forward X:147912173-147912195; SpCas9
gagaagatggaggagctgg

SEQ ID NO: 6856 - DNA, 18 bp, Artificial Sequence
  Synthetic: FMR1 O forward X:147912174-147912195; SpCas9
agaagatggaggagctgg

SEQ ID NO: 6857 - DNA, 25 bp, Artificial Sequence
  Synthetic: FMR1 O forward X:147912170-147912198; SpCas9
gaagagaagatggaggagctggtgg

SEQ ID NO: 6858 - DNA, 24 bp, Artificial Sequence
  Synthetic: FMR1 O forward X:147912171-147912198; SpCas9
aagagaagatggaggagctggtgg

SEQ ID NO: 6859 - DNA, 23 bp, Artificial Sequence
  Synthetic: FMR1 O forward X:147912172-147912198; SpCas9
agagaagatggaggagctggtgg

SEQ ID NO: 6860 - DNA, 22 bp, Artificial Sequence
  Synthetic: FMR1 O forward X:147912173-147912198; SpCas9
gagaagatggaggagctggtgg

SEQ ID NO: 6861 - DNA, 21 bp, Artificial Sequence
  Synthetic: FMR1 O forward X:147912174-147912198; SpCas9
agaagatggaggagctggtgg

SEQ ID NO: 6862 - DNA, 20 bp, Artificial Sequence
  Synthetic: FMR1 O forward X:147912175-147912198; SpCas9
gaagatggaggagctggtgg

SEQ ID NO: 6863 - DNA, 19 bp, Artificial Sequence
  Synthetic: FMR1 O forward X:147912176-147912198; SpCas9
aagatggaggagctggtgg

SEQ ID NO: 6864 - DNA, 18 bp, Artificial Sequence
  Synthetic: FMR1 O forward X:147912177-147912198; SpCas9
agatggaggagctggtgg

SEQ ID NO: 6865 - DNA, 25 bp, Artificial Sequence
  Synthetic: FMR1 O forward X:147912173-147912201; SpCas9
gagaagatggaggagctggtggtgg

SEQ ID NO: 6866 - DNA, 24 bp, Artificial Sequence
  Synthetic: FMR1 O forward X:147912174-147912201; SpCas9
agaagatggaggagctggtggtgg

SEQ ID NO: 6867 - DNA, 23 bp, Artificial Sequence
  Synthetic: FMR1 O forward X:147912175-147912201; SpCas9
gaagatggaggagctggtggtgg

SEQ ID NO: 6868 - DNA, 22 bp, Artificial Sequence
  Synthetic: FMR1 O forward X:147912176-147912201; SpCas9
aagatggaggagctggtggtgg

SEQ ID NO: 6869 - DNA, 21 bp, Artificial Sequence
  Synthetic: FMR1 O forward X:147912177-147912201; SpCas9
agatggaggagctggtggtgg

SEQ ID NO: 6870 - DNA, 20 bp, Artificial Sequence
  Synthetic: FMR1 O forward X:147912178-147912201; SpCas9
gatggaggagctggtggtgg

SEQ ID NO: 6871 - DNA, 19 bp, Artificial Sequence
  Synthetic: FMR1 O forward X:147912179-147912201; SpCas9
atggaggagctggtggtgg

SEQ ID NO: 6872 - DNA, 18 bp, Artificial Sequence
  Synthetic: FMR1 O forward X:147912180-147912201; SpCas9
tggaggagctggtggtgg

SEQ ID NO: 6873 - DNA, 25 bp, Artificial Sequence
  Synthetic: FMR1 O forward X:147912178-147912206; SpCas9
gatggaggagctggtggtggaagtg

SEQ ID NO: 6874 - DNA, 24 bp, Artificial Sequence
  Synthetic: FMR1 O forward X:147912179-147912206; SpCas9
atggaggagctggtggtggaagtg

SEQ ID NO: 6875 - DNA, 23 bp, Artificial Sequence
  Synthetic: FMR1 O forward X:147912180-147912206; SpCas9
tggaggagctggtggtggaagtg

SEQ ID NO: 6876 - DNA, 22 bp, Artificial Sequence
  Synthetic: FMR1 O forward X:147912181-147912206; SpCas9
ggaggagctggtggtggaagtg

SEQ ID NO: 6877 - DNA, 21 bp, Artificial Sequence
  Synthetic: FMR1 O forward X:147912182-147912206; SpCas9
gaggagctggtggtggaagtg

SEQ ID NO: 6878 - DNA, 20 bp, Artificial Sequence
  Synthetic: FMR1 O forward X:147912183-147912206; SpCas9
aggagctggtggtggaagtg

SEQ ID NO: 6879 - DNA, 19 bp, Artificial Sequence
  Synthetic: FMR1 O forward X:147912184-147912206; SpCas9
ggagctggtggtggaagtg

SEQ ID NO: 6880 - DNA, 18 bp, Artificial Sequence
  Synthetic: FMR1 O forward X:147912185-147912206; SpCas9
gagctggtggtggaagtg

SEQ ID NO: 6881 - DNA, 25 bp, Artificial Sequence
  Synthetic: FMR1 O forward X:147912179-147912207; SpCas9
atggaggagctggtggtggaagtgc

SEQ ID NO: 6882 - DNA, 24 bp, Artificial Sequence
  Synthetic: FMR1 O forward X:147912180-147912207; SpCas9
tggaggagctggtggtggaagtgc

SEQ ID NO: 6883 - DNA, 23 bp, Artificial Sequence
  Synthetic: FMR1 O forward X:147912181-147912207; SpCas9
ggaggagctggtggtggaagtgc

SEQ ID NO: 6884 - DNA, 22 bp, Artificial Sequence
  Synthetic: FMR1 O forward X:147912182-147912207; SpCas9
gaggagctggtggtggaagtgc

SEQ ID NO: 6885 - DNA, 21 bp, Artificial Sequence
  Synthetic: FMR1 O forward X:147912183-147912207; SpCas9
aggagctggtggtggaagtgc

SEQ ID NO: 6886 - DNA, 20 bp, Artificial Sequence
  Synthetic: FMR1 O forward X:147912184-147912207; SpCas9
ggagctggtggtggaagtgc

SEQ ID NO: 6887 - DNA, 19 bp, Artificial Sequence
  Synthetic: FMR1 O forward X:147912185-147912207; SpCas9
gagctggtggtggaagtgc

SEQ ID NO: 6888 - DNA, 18 bp, Artificial Sequence
  Synthetic: FMR1 O forward X:147912186-147912207; SpCas9
agctggtggtggaagtgc

SEQ ID NO: 6889 - DNA, 25 bp, Artificial Sequence
  Synthetic: FMR1 O forward X:147912180-147912208; SpCas9
tggaggagctggtggtggaagtgcg

SEQ ID NO: 6890 - DNA, 24 bp, Artificial Sequence
  Synthetic: FMR1 O forward X:147912181-147912208; SpCas9
ggaggagctggtggtggaagtgcg

SEQ ID NO: 6891 - DNA, 23 bp, Artificial Sequence
  Synthetic: FMR1 O forward X:147912182-147912208; SpCas9
gaggagctggtggtggaagtgcg

SEQ ID NO: 6892 - DNA, 22 bp, Artificial Sequence
  Synthetic: FMR1 O forward X:147912183-147912208; SpCas9
aggagctggtggtggaagtgcg

SEQ ID NO: 6893 - DNA, 21 bp, Artificial Sequence
  Synthetic: FMR1 O forward X:147912184-147912208; SpCas9
ggagctggtggtggaagtgcg

SEQ ID NO: 6894 - DNA, 20 bp, Artificial Sequence
  Synthetic: FMR1 O forward X:147912185-147912208; SpCas9
gagctggtggtggaagtgcg

SEQ ID NO: 6895 - DNA, 19 bp, Artificial Sequence
  Synthetic: FMR1 O forward X:147912186-147912208; SpCas9
agctggtggtggaagtgcg

SEQ ID NO: 6896 - DNA, 18 bp, Artificial Sequence
  Synthetic: FMR1 O forward X:147912187-147912208; SpCas9
gctggtggtggaagtgcg

SEQ ID NO: 6897 - DNA, 25 bp, Artificial Sequence
  Synthetic: FMR1 O reverse X:147912188-147912216; SpCas9
cattggagccccgcacttccaccac

SEQ ID NO: 6898 - DNA, 24 bp, Artificial Sequence
  Synthetic: FMR1 O reverse X:147912189-147912216; SpCas9
attggagccccgcacttccaccac

SEQ ID NO: 6899 - DNA, 23 bp, Artificial Sequence
  Synthetic: FMR1 O reverse X:147912190-147912216; SpCas9
ttggagccccgcacttccaccac

SEQ ID NO: 6900 - DNA, 22 bp, Artificial Sequence
  Synthetic: FMR1 O reverse X:147912191-147912216; SpCas9
tggagccccgcacttccaccac

SEQ ID NO: 6901 - DNA, 21 bp, Artificial Sequence
  Synthetic: FMR1 O reverse X:147912192-147912216; SpCas9
ggagccccgcacttccaccac

SEQ ID NO: 6902 - DNA, 20 bp, Artificial Sequence
  Synthetic: FMR1 O reverse X:147912193-147912216; SpCas9
gagccccgcacttccaccac

SEQ ID NO: 6903 - DNA, 19 bp, Artificial Sequence
  Synthetic: FMR1 O reverse X:147912194-147912216; SpCas9
agccccgcacttccaccac

SEQ ID NO: 6904 - DNA, 18 bp, Artificial Sequence
  Synthetic: FMR1 O reverse X:147912195-147912216; SpCas9
gccccgcacttccaccac

SEQ ID NO: 6905 - DNA, 25 bp, Artificial Sequence
  Synthetic: FMR1 O forward X:147912189-147912217; SpCas9
tggtggtggaagtgcggggctccaa

SEQ ID NO: 6906 - DNA, 24 bp, Artificial Sequence
  Synthetic: FMR1 O forward X:147912190-147912217; SpCas9
ggtggtggaagtgcggggctccaa

SEQ ID NO: 6907 - DNA, 23 bp, Artificial Sequence
  Synthetic: FMR1 O forward X:147912191-147912217; SpCas9
gtggtggaagtgcggggctccaa

SEQ ID NO: 6908 - DNA, 22 bp, Artificial Sequence
  Synthetic: FMR1 O forward X:147912192-147912217; SpCas9
tggtggaagtgcggggctccaa

SEQ ID NO: 6909 - DNA, 21 bp, Artificial Sequence
  Synthetic: FMR1 O forward X:147912193-147912217; SpCas9
ggtggaagtgcggggctccaa

SEQ ID NO: 6910 - DNA, 20 bp, Artificial Sequence
  Synthetic: FMR1 O forward X:147912194-147912217; SpCas9
gtggaagtgcggggctccaa

SEQ ID NO: 6911 - DNA, 19 bp, Artificial Sequence
  Synthetic: FMR1 O forward X:147912195-147912217; SpCas9
tggaagtgcggggctccaa

SEQ ID NO: 6912 - DNA, 18 bp, Artificial Sequence
  Synthetic: FMR1 O forward X:147912196-147912217; SpCas9
ggaagtgcggggctccaa

SEQ ID NO: 6913 - DNA, 25 bp, Artificial Sequence
  Synthetic: FMR1 O forward X:147912202-147912230; SpCas9
gcggggctccaatggcgctttctac

SEQ ID NO: 6914 - DNA, 24 bp, Artificial Sequence
  Synthetic: FMR1 O forward X:147912203-147912230; SpCas9
cggggctccaatggcgctttctac

SEQ ID NO: 6915 - DNA, 23 bp, Artificial Sequence
  Synthetic: FMR1 O forward X:147912204-147912230; SpCas9
ggggctccaatggcgctttctac

SEQ ID NO: 6916 - DNA, 22 bp, Artificial Sequence
  Synthetic: FMR1 O forward X:147912205-147912230; SpCas9
gggctccaatggcgctttctac

SEQ ID NO: 6917 - DNA, 21 bp, Artificial Sequence
  Synthetic: FMR1 O forward X:147912206-147912230; SpCas9
ggctccaatggcgctttctac

SEQ ID NO: 6918 - DNA, 20 bp, Artificial Sequence
  Synthetic: FMR1 O forward X:147912207-147912230; SpCas9
gctccaatggcgctttctac

SEQ ID NO: 6919 - DNA, 19 bp, Artificial Sequence
  Synthetic: FMR1 O forward X:147912208-147912230; SpCas9
ctccaatggcgctttctac

SEQ ID NO: 6920 - DNA, 18 bp, Artificial Sequence
  Synthetic: FMR1 O forward X:147912209-147912230; SpCas9
tccaatggcgctttctac

SEQ ID NO: 6921 - DNA, 25 bp, Artificial Sequence
  Synthetic: FMR1 O forward X:147912203-147912231; SpCas9
cggggctccaatggcgctttctaca

SEQ ID NO: 6922 - DNA, 24 bp, Artificial Sequence
  Synthetic: FMR1 O forward X:147912204-147912231; SpCas9
ggggctccaatggcgctttctaca

SEQ ID NO: 6923 - DNA, 23 bp, Artificial Sequence
  Synthetic: FMR1 O forward X:147912205-147912231; SpCas9
gggctccaatggcgctttctaca

SEQ ID NO: 6924 - DNA, 22 bp, Artificial Sequence
  Synthetic: FMR1 O forward X:147912206-147912231; SpCas9
ggctccaatggcgctttctaca

SEQ ID NO: 6925 - DNA, 21 bp, Artificial Sequence
  Synthetic: FMR1 O forward X:147912207-147912231; SpCas9
gctccaatggcgctttctaca

SEQ ID NO: 6926 - DNA, 20 bp, Artificial Sequence
  Synthetic: FMR1 O forward X:147912208-147912231; SpCas9
ctccaatggcgctttctaca

SEQ ID NO: 6927 - DNA, 19 bp, Artificial Sequence
  Synthetic: FMR1 O forward X:147912209-147912231; SpCas9
tccaatggcgctttctaca

SEQ ID NO: 6928 - DNA, 18 bp, Artificial Sequence
  Synthetic: FMR1 O forward X:147912210-147912231; SpCas9
ccaatggcgctttctaca

SEQ ID NO: 6929 - DNA, 25 bp, Artificial Sequence
  Synthetic: FMR1 O reverse X:147912208-147912236; SpCas9
aagtaccttgtagaaagcgccattg

SEQ ID NO: 6930 - DNA, 24 bp, Artificial Sequence
  Synthetic: FMR1 O reverse X:147912209-147912236; SpCas9
agtaccttgtagaaagcgccattg

SEQ ID NO: 6931 - DNA, 23 bp, Artificial Sequence
  Synthetic: FMR1 O reverse X:147912210-147912236; SpCas9
gtaccttgtagaaagcgccattg

SEQ ID NO: 6932 - DNA, 22 bp, Artificial Sequence
  Synthetic: FMR1 O reverse X:147912211-147912236; SpCas9
taccttgtagaaagcgccattg

SEQ ID NO: 6933 - DNA, 21 bp, Artificial Sequence
  Synthetic: FMR1 O reverse X:147912212-147912236; SpCas9
accttgtagaaagcgccattg

SEQ ID NO: 6934 - DNA, 20 bp, Artificial Sequence
  Synthetic: FMR1 O reverse X:147912213-147912236; SpCas9
ccttgtagaaagcgccattg

SEQ ID NO: 6935 - DNA, 19 bp, Artificial Sequence
  Synthetic: FMR1 O reverse X:147912214-147912236; SpCas9
cttgtagaaagcgccattg

SEQ ID NO: 6936 - DNA, 18 bp, Artificial Sequence
  Synthetic: FMR1 O reverse X:147912215-147912236; SpCas9
ttgtagaaagcgccattg

SEQ ID NO: 6937 - DNA, 25 bp, Artificial Sequence
  Synthetic: FMR1 O forward X:147912210-147912238; SpCas9
ccaatggcgctttctacaaggtact

SEQ ID NO: 6938 - DNA, 24 bp, Artificial Sequence
  Synthetic: FMR1 O forward X:147912211-147912238; SpCas9
caatggcgctttctacaaggtact

SEQ ID NO: 6939 - DNA, 23 bp, Artificial Sequence
  Synthetic: FMR1 O forward X:147912212-147912238; SpCas9
aatggcgctttctacaaggtact

SEQ ID NO: 6940 - DNA, 22 bp, Artificial Sequence
  Synthetic: FMR1 O forward X:147912213-147912238; SpCas9
atggcgctttctacaaggtact

SEQ ID NO: 6941 - DNA, 21 bp, Artificial Sequence
  Synthetic: FMR1 O forward X:147912214-147912238; SpCas9
tggcgctttctacaaggtact

SEQ ID NO: 6942 - DNA, 20 bp, Artificial Sequence
  Synthetic: FMR1 O forward X:147912215-147912238; SpCas9
ggcgctttctacaaggtact

SEQ ID NO: 6943 - DNA, 19 bp, Artificial Sequence
  Synthetic: FMR1 O forward X:147912216-147912238; SpCas9
gcgctttctacaaggtact

SEQ ID NO: 6944 - DNA, 18 bp, Artificial Sequence
  Synthetic: FMR1 O forward X:147912217-147912238; SpCas9
cgctttctacaaggtact

SEQ ID NO: 6945 - DNA, 25 bp, Artificial Sequence
  Synthetic: FMR1 O reverse X:147912210-147912238; SpCas9
ccaagtaccttgtagaaagcgccat

SEQ ID NO: 6946 - DNA, 24 bp, Artificial Sequence
  Synthetic: FMR1 O reverse X:147912211-147912238; SpCas9
caagtaccttgtagaaagcgccat

SEQ ID NO: 6947 - DNA, 23 bp, Artificial Sequence
  Synthetic: FMR1 O reverse X:147912212-147912238; SpCas9
aagtaccttgtagaaagcgccat

SEQ ID NO: 6948 - DNA, 22 bp, Artificial Sequence
  Synthetic: FMR1 O reverse X:147912213-147912238; SpCas9
agtaccttgtagaaagcgccat

SEQ ID NO: 6949 - DNA, 21 bp, Artificial Sequence
  Synthetic: FMR1 O reverse X:147912214-147912238; SpCas9
gtaccttgtagaaagcgccat

SEQ ID NO: 6950 - DNA, 20 bp, Artificial Sequence
  Synthetic: FMR1 O reverse X:147912215-147912238; SpCas9
taccttgtagaaagcgccat

SEQ ID NO: 6951 - DNA, 19 bp, Artificial Sequence
  Synthetic: FMR1 O reverse X:147912216-147912238; SpCas9
accttgtagaaagcgccat

SEQ ID NO: 6952 - DNA, 18 bp, Artificial Sequence
  Synthetic: FMR1 O reverse X:147912217-147912238; SpCas9
ccttgtagaaagcgccat

SEQ ID NO: 6953 - DNA, 25 bp, Artificial Sequence
  Synthetic: FMR1 O forward X:147912216-147912244; SpCas9
gcgctttctacaaggtacttggctc

SEQ ID NO: 6954 - DNA, 24 bp, Artificial Sequence
  Synthetic: FMR1 O forward X:147912217-147912244; SpCas9
cgctttctacaaggtacttggctc

SEQ ID NO: 6955 - DNA, 23 bp, Artificial Sequence
  Synthetic: FMR1 O forward X:147912218-147912244; SpCas9
gctttctacaaggtacttggctc

SEQ ID NO: 6956 - DNA, 22 bp, Artificial Sequence
  Synthetic: FMR1 O forward X:147912219-147912244; SpCas9
ctttctacaaggtacttggctc

SEQ ID NO: 6957 - DNA, 21 bp, Artificial Sequence
  Synthetic: FMR1 O forward X:147912220-147912244; SpCas9
tttctacaaggtacttggctc

SEQ ID NO: 6958 - DNA, 20 bp, Artificial Sequence
  Synthetic: FMR1 O forward X:147912221-147912244; SpCas9
ttctacaaggtacttggctc

SEQ ID NO: 6959 - DNA, 19 bp, Artificial Sequence
  Synthetic: FMR1 O forward X:147912222-147912244; SpCas9
tctacaaggtacttggctc

SEQ ID NO: 6960 - DNA, 18 bp, Artificial Sequence
  Synthetic: FMR1 O forward X:147912223-147912244; SpCas9
ctacaaggtacttggctc

SEQ ID NO: 6961 - DNA, 25 bp, Artificial Sequence
  Synthetic: FMR1 O forward X:147912217-147912245; SpCas9
cgctttctacaaggtacttggctct

SEQ ID NO: 6962 - DNA, 24 bp, Artificial Sequence
  Synthetic: FMR1 O forward X:147912218-147912245; SpCas9
gctttctacaaggtacttggctct

SEQ ID NO: 6963 - DNA, 23 bp, Artificial Sequence
  Synthetic: FMR1 O forward X:147912219-147912245; SpCas9
ctttctacaaggtacttggctct

SEQ ID NO: 6964 - DNA, 22 bp, Artificial Sequence
  Synthetic: FMR1 O forward X:147912220-147912245; SpCas9
tttctacaaggtacttggctct

SEQ ID NO: 6965 - DNA, 21 bp, Artificial Sequence
  Synthetic: FMR1 O forward X:147912221-147912245; SpCas9
ttctacaaggtacttggctct

SEQ ID NO: 6966 - DNA, 20 bp, Artificial Sequence
  Synthetic: FMR1 O forward X:147912222-147912245; SpCas9
tctacaaggtacttggctct

SEQ ID NO: 6967 - DNA, 19 bp, Artificial Sequence
  Synthetic: FMR1 O forward X:147912223-147912245; SpCas9
ctacaaggtacttggctct

SEQ ID NO: 6968 - DNA, 18 bp, Artificial Sequence
  Synthetic: FMR1 O forward X:147912224-147912245; SpCas9
tacaaggtacttggctct

SEQ ID NO: 6969 - DNA, 25 bp, Artificial Sequence
  Synthetic: FMR1 O forward X:147912218-147912246; SpCas9
gctttctacaaggtacttggctcta

SEQ ID NO: 6970 - DNA, 24 bp, Artificial Sequence
  Synthetic: FMR1 O forward X:147912219-147912246; SpCas9
ctttctacaaggtacttggctcta

SEQ ID NO: 6971 - DNA, 23 bp, Artificial Sequence
  Synthetic: FMR1 O forward X:147912220-147912246; SpCas9
tttctacaaggtacttggctcta

SEQ ID NO: 6972 - DNA, 22 bp, Artificial Sequence
  Synthetic: FMR1 O forward X:147912221-147912246; SpCas9
ttctacaaggtacttggctcta

SEQ ID NO: 6973 - DNA, 21 bp, Artificial Sequence
  Synthetic: FMR1 O forward X:147912222-147912246; SpCas9
tctacaaggtacttggctcta

SEQ ID NO: 6974 - DNA, 20 bp, Artificial Sequence
  Synthetic: FMR1 O forward X:147912223-147912246; SpCas9
ctacaaggtacttggctcta

SEQ ID NO: 6975 - DNA, 19 bp, Artificial Sequence
  Synthetic: FMR1 O forward X:147912224-147912246; SpCas9
tacaaggtacttggctcta

SEQ ID NO: 6976 - DNA, 18 bp, Artificial Sequence
  Synthetic: FMR1 O forward X:147912225-147912246; SpCas9
acaaggtacttggctcta

SEQ ID NO: 6977 - DNA, 25 bp, Artificial Sequence
  Synthetic: FMR1 O reverse X:147912219-147912247; SpCas9
gccctagagccaagtaccttgtaga

SEQ ID NO: 6978 - DNA, 24 bp, Artificial Sequence
  Synthetic: FMR1 O reverse X:147912220-147912247; SpCas9
ccctagagccaagtaccttgtaga

SEQ ID NO: 6979 - DNA, 23 bp, Artificial Sequence
  Synthetic: FMR1 O reverse X:147912221-147912247; SpCas9
cctagagccaagtaccttgtaga

SEQ ID NO: 6980 - DNA, 22 bp, Artificial Sequence
  Synthetic: FMR1 O reverse X:147912222-147912247; SpCas9
ctagagccaagtaccttgtaga

SEQ ID NO: 6981 - DNA, 21 bp, Artificial Sequence
  Synthetic: FMR1 O reverse X:147912223-147912247; SpCas9
tagagccaagtaccttgtaga

SEQ ID NO: 6982 - DNA, 20 bp, Artificial Sequence
  Synthetic: FMR1 O reverse X:147912224-147912247; SpCas9
agagccaagtaccttgtaga

SEQ ID NO: 6983 - DNA, 19 bp, Artificial Sequence
  Synthetic: FMR1 O reverse X:147912225-147912247; SpCas9
gagccaagtaccttgtaga

SEQ ID NO: 6984 - DNA, 18 bp, Artificial Sequence
  Synthetic: FMR1 O reverse X:147912226-147912247; SpCas9
agccaagtaccttgtaga

SEQ ID NO: 6985 - DNA, 25 bp, Artificial Sequence
  Synthetic: FMR1 O forward X:147912221-147912249; SpCas9
ttctacaaggtacttggctctaggg

SEQ ID NO: 6986 - DNA, 24 bp, Artificial Sequence
  Synthetic: FMR1 O forward X:147912222-147912249; SpCas9
tctacaaggtacttggctctaggg

SEQ ID NO: 6987 - DNA, 23 bp, Artificial Sequence
  Synthetic: FMR1 O forward X:147912223-147912249; SpCas9
ctacaaggtacttggctctaggg

SEQ ID NO: 6988 - DNA, 22 bp, Artificial Sequence
  Synthetic: FMR1 O forward X:147912224-147912249; SpCas9
tacaaggtacttggctctaggg

SEQ ID NO: 6989 - DNA, 21 bp, Artificial Sequence
  Synthetic: FMR1 O forward X:147912225-147912249; SpCas9
acaaggtacttggctctaggg

SEQ ID NO: 6990 - DNA, 20 bp, Artificial Sequence
  Synthetic: FMR1 O forward X:147912226-147912249; SpCas9
caaggtacttggctctaggg

SEQ ID NO: 6991 - DNA, 19 bp, Artificial Sequence
  Synthetic: FMR1 O forward X:147912227-147912249; SpCas9
aaggtacttggctctaggg

SEQ ID NO: 6992 - DNA, 18 bp, Artificial Sequence
  Synthetic: FMR1 O forward X:147912228-147912249; SpCas9
aggtacttggctctaggg

SEQ ID NO: 6993 - DNA, 25 bp, Artificial Sequence
  Synthetic: FMR1 O forward X:147912222-147912250; SpCas9
tctacaaggtacttggctctagggc

SEQ ID NO: 6994 - DNA, 24 bp, Artificial Sequence
  Synthetic: FMR1 O forward X:147912223-147912250; SpCas9
ctacaaggtacttggctctagggc

SEQ ID NO: 6995 - DNA, 23 bp, Artificial Sequence
  Synthetic: FMR1 O forward X:147912224-147912250; SpCas9
tacaaggtacttggctctagggc

SEQ ID NO: 6996 - DNA, 22 bp, Artificial Sequence
  Synthetic: FMR1 O forward X:147912225-147912250; SpCas9
acaaggtacttggctctagggc

SEQ ID NO: 6997 - DNA, 21 bp, Artificial Sequence
  Synthetic: FMR1 O forward X:147912226-147912250; SpCas9
caaggtacttggctctagggc

SEQ ID NO: 6998 - DNA, 20 bp, Artificial Sequence
  Synthetic: FMR1 O forward X:147912227-147912250; SpCas9
aaggtacttggctctagggc

SEQ ID NO: 6999 - DNA, 19 bp, Artificial Sequence
  Synthetic: FMR1 O forward X:147912228-147912250; SpCas9
aggtacttggctctagggc

SEQ ID NO: 7000 - DNA, 18 bp, Artificial Sequence
  Synthetic: FMR1 O forward X:147912229-147912250; SpCas9
ggtacttggctctagggc

SEQ ID NO: 7001 - DNA, 25 bp, Artificial Sequence
  Synthetic: FMR1 O reverse X:147912223-147912251; SpCas9
gcctgccctagagccaagtaccttg

SEQ ID NO: 7002 - DNA, 24 bp, Artificial Sequence
  Synthetic: FMR1 O reverse X:147912224-147912251; SpCas9
cctgccctagagccaagtaccttg

SEQ ID NO: 7003 - DNA, 23 bp, Artificial Sequence
  Synthetic: FMR1 O reverse X:147912225-147912251; SpCas9
ctgccctagagccaagtaccttg

SEQ ID NO: 7004 - DNA, 22 bp, Artificial Sequence
  Synthetic: FMR1 O reverse X:147912226-147912251; SpCas9
tgccctagagccaagtaccttg

SEQ ID NO: 7005 - DNA, 21 bp, Artificial Sequence
  Synthetic: FMR1 O reverse X:147912227-147912251; SpCas9
gccctagagccaagtaccttg

SEQ ID NO: 7006 - DNA, 20 bp, Artificial Sequence
  Synthetic: FMR1 O reverse X:147912228-147912251; SpCas9
ccctagagccaagtaccttg

SEQ ID NO: 7007 - DNA, 19 bp, Artificial Sequence
  Synthetic: FMR1 O reverse X:147912229-147912251; SpCas9
cctagagccaagtaccttg

SEQ ID NO: 7008 - DNA, 18 bp, Artificial Sequence
  Synthetic: FMR1 O reverse X:147912230-147912251; SpCas9
ctagagccaagtaccttg

SEQ ID NO: 7009 - DNA, 25 bp, Artificial Sequence
  Synthetic: FMR1 O reverse X:147912233-147912261; SpCas9
cgaagatggggcctgccctagagcc

SEQ ID NO: 7010 - DNA, 24 bp, Artificial Sequence
  Synthetic: FMR1 O reverse X:147912234-147912261; SpCas9
gaagatggggcctgccctagagcc

SEQ ID NO: 7011 - DNA, 23 bp, Artificial Sequence
  Synthetic: FMR1 O reverse X:147912235-147912261; SpCas9
aagatggggcctgccctagagcc

SEQ ID NO: 7012 - DNA, 22 bp, Artificial Sequence
  Synthetic: FMR1 O reverse X:147912236-147912261; SpCas9
agatggggcctgccctagagcc

SEQ ID NO: 7013 - DNA, 21 bp, Artificial Sequence
  Synthetic: FMR1 O reverse X:147912237-147912261; SpCas9
gatggggcctgccctagagcc

SEQ ID NO: 7014 - DNA, 20 bp, Artificial Sequence
  Synthetic: FMR1 O reverse X:147912238-147912261; SpCas9
atggggcctgccctagagcc

SEQ ID NO: 7015 - DNA, 19 bp, Artificial Sequence
  Synthetic: FMR1 O reverse X:147912239-147912261; SpCas9
tggggcctgccctagagcc

SEQ ID NO: 7016 - DNA, 18 bp, Artificial Sequence
  Synthetic: FMR1 O reverse X:147912240-147912261; SpCas9
ggggcctgccctagagcc

SEQ ID NO: 7017 - DNA, 25 bp, Artificial Sequence
  Synthetic: FMR1 O reverse X:147912238-147912266; SpCas9
aagggcgaagatggggcctgcccta

SEQ ID NO: 7018 - DNA, 24 bp, Artificial Sequence
  Synthetic: FMR1 O reverse X:147912239-147912266; SpCas9
agggcgaagatggggcctgcccta

SEQ ID NO: 7019 - DNA, 23 bp, Artificial Sequence
  Synthetic: FMR1 O reverse X:147912240-147912266; SpCas9
gggcgaagatggggcctgcccta

SEQ ID NO: 7020 - DNA, 22 bp, Artificial Sequence
  Synthetic: FMR1 O reverse X:147912241-147912266; SpCas9
ggcgaagatggggcctgcccta

SEQ ID NO: 7021 - DNA, 21 bp, Artificial Sequence
  Synthetic: FMR1 O reverse X:147912242-147912266; SpCas9
gcgaagatggggcctgcccta

SEQ ID NO: 7022 - DNA, 20 bp, Artificial Sequence
  Synthetic: FMR1 O reverse X:147912243-147912266; SpCas9
cgaagatggggcctgcccta

SEQ ID NO: 7023 - DNA, 19 bp, Artificial Sequence
  Synthetic: FMR1 O reverse X:147912244-147912266; SpCas9
gaagatggggcctgcccta

SEQ ID NO: 7024 - DNA, 18 bp, Artificial Sequence
  Synthetic: FMR1 O reverse X:147912245-147912266; SpCas9
aagatggggcctgcccta

SEQ ID NO: 7025 - DNA, 25 bp, Artificial Sequence
  Synthetic: FMR1 O reverse X:147912240-147912268; SpCas9
ggaagggcgaagatggggcctgccc

SEQ ID NO: 7026 - DNA, 24 bp, Artificial Sequence
  Synthetic: FMR1 O reverse X:147912241-147912268; SpCas9
gaagggcgaagatggggcctgccc

SEQ ID NO: 7027 - DNA, 23 bp, Artificial Sequence
  Synthetic: FMR1 O reverse X:147912242-147912268; SpCas9
aagggcgaagatggggcctgccc

SEQ ID NO: 7028 - DNA, 22 bp, Artificial Sequence
  Synthetic: FMR1 O reverse X:147912243-147912268; SpCas9
agggcgaagatggggcctgccc

SEQ ID NO: 7029 - DNA, 21 bp, Artificial Sequence
  Synthetic: FMR1 O reverse X:147912244-147912268; SpCas9
gggcgaagatggggcctgccc

SEQ ID NO: 7030 - DNA, 20 bp, Artificial Sequence
  Synthetic: FMR1 O reverse X:147912245-147912268; SpCas9
ggcgaagatggggcctgccc

SEQ ID NO: 7031 - DNA, 19 bp, Artificial Sequence
  Synthetic: FMR1 O reverse X:147912246-147912268; SpCas9
gcgaagatggggcctgccc

SEQ ID NO: 7032 - DNA, 18 bp, Artificial Sequence
  Synthetic: FMR1 O reverse X:147912247-147912268; SpCas9
cgaagatggggcctgccc

SEQ ID NO: 7033 - DNA, 25 bp, Artificial Sequence
  Synthetic: FMR1 O reverse X:147912250-147912278; SpCas9
agggagggaaggaagggcgaagatg

SEQ ID NO: 7034 - DNA, 24 bp, Artificial Sequence
  Synthetic: FMR1 O reverse X:147912251-147912278; SpCas9
gggagggaaggaagggcgaagatg

SEQ ID NO: 7035 - DNA, 23 bp, Artificial Sequence
  Synthetic: FMR1 O reverse X:147912252-147912278; SpCas9
ggagggaaggaagggcgaagatg

SEQ ID NO: 7036 - DNA, 22 bp, Artificial Sequence
  Synthetic: FMR1 O reverse X:147912253-147912278; SpCas9
gagggaaggaagggcgaagatg

SEQ ID NO: 7037 - DNA, 21 bp, Artificial Sequence
  Synthetic: FMR1 O reverse X:147912254-147912278; SpCas9
agggaaggaagggcgaagatg

SEQ ID NO: 7038 - DNA, 20 bp, Artificial Sequence
  Synthetic: FMR1 O reverse X:147912255-147912278; SpCas9
gggaaggaagggcgaagatg

SEQ ID NO: 7039 - DNA, 19 bp, Artificial Sequence
  Synthetic: FMR1 O reverse X:147912256-147912278; SpCas9
ggaaggaagggcgaagatg

SEQ ID NO: 7040 - DNA, 18 bp, Artificial Sequence
  Synthetic: FMR1 O reverse X:147912257-147912278; SpCas9
gaaggaagggcgaagatg

SEQ ID NO: 7041 - DNA, 25 bp, Artificial Sequence
  Synthetic: FMR1 O reverse X:147912251-147912279; SpCas9
aagggagggaaggaagggcgaagat

SEQ ID NO: 7042 - DNA, 24 bp, Artificial Sequence
  Synthetic: FMR1 O reverse X:147912252-147912279; SpCas9
agggagggaaggaagggcgaagat

SEQ ID NO: 7043 - DNA, 23 bp, Artificial Sequence
  Synthetic: FMR1 O reverse X:147912253-147912279; SpCas9
gggagggaaggaagggcgaagat

SEQ ID NO: 7044 - DNA, 22 bp, Artificial Sequence
  Synthetic: FMR1 O reverse X:147912254-147912279; SpCas9
ggagggaaggaagggcgaagat

SEQ ID NO: 7045 - DNA, 21 bp, Artificial Sequence
  Synthetic: FMR1 O reverse X:147912255-147912279; SpCas9
gagggaaggaagggcgaagat

SEQ ID NO: 7046 - DNA, 20 bp, Artificial Sequence
  Synthetic: FMR1 O reverse X:147912256-147912279; SpCas9
agggaaggaagggcgaagat

SEQ ID NO: 7047 - DNA, 19 bp, Artificial Sequence
  Synthetic: FMR1 O reverse X:147912257-147912279; SpCas9
gggaaggaagggcgaagat

SEQ ID NO: 7048 - DNA, 18 bp, Artificial Sequence
  Synthetic: FMR1 O reverse X:147912258-147912279; SpCas9
ggaaggaagggcgaagat

SEQ ID NO: 7049 - DNA, 25 bp, Artificial Sequence
  Synthetic: FMR1 O reverse X:147912252-147912280; SpCas9
aaagggagggaaggaagggcgaaga

SEQ ID NO: 7050 - DNA, 24 bp, Artificial Sequence
  Synthetic: FMR1 O reverse X:147912253-147912280; SpCas9
aagggagggaaggaagggcgaaga

SEQ ID NO: 7051 - DNA, 23 bp, Artificial Sequence
  Synthetic: FMR1 O reverse X:147912254-147912280; SpCas9
agggagggaaggaagggcgaaga

SEQ ID NO: 7052 - DNA, 22 bp, Artificial Sequence
  Synthetic: FMR1 O reverse X:147912255-147912280; SpCas9
gggagggaaggaagggcgaaga

SEQ ID NO: 7053 - DNA, 21 bp, Artificial Sequence
  Synthetic: FMR1 O reverse X:147912256-147912280; SpCas9
ggagggaaggaagggcgaaga

SEQ ID NO: 7054 - DNA, 20 bp, Artificial Sequence
  Synthetic: FMR1 O reverse X:147912257-147912280; SpCas9
gagggaaggaagggcgaaga

SEQ ID NO: 7055 - DNA, 19 bp, Artificial Sequence
  Synthetic: FMR1 O reverse X:147912258-147912280; SpCas9
agggaaggaagggcgaaga

SEQ ID NO: 7056 - DNA, 18 bp, Artificial Sequence
  Synthetic: FMR1 O reverse X:147912259-147912280; SpCas9
gggaaggaagggcgaaga

SEQ ID NO: 7057 - DNA, 25 bp, Artificial Sequence
  Synthetic: FMR1 O reverse X:147912256-147912284; SpCas9
aagaaaagggagggaaggaagggcg

SEQ ID NO: 7058 - DNA, 24 bp, Artificial Sequence
  Synthetic: FMR1 O reverse X:147912257-147912284; SpCas9
agaaaagggagggaaggaagggcg

SEQ ID NO: 7059 - DNA, 23 bp, Artificial Sequence
  Synthetic: FMR1 O reverse X:147912258-147912284; SpCas9
gaaaagggagggaaggaagggcg

SEQ ID NO: 7060 - DNA, 22 bp, Artificial Sequence
  Synthetic: FMR1 O reverse X:147912259-147912284; SpCas9
aaaagggagggaaggaagggcg

SEQ ID NO: 7061 - DNA, 21 bp, Artificial Sequence
  Synthetic: FMR1 O reverse X:147912260-147912284; SpCas9
aaagggagggaaggaagggcg

SEQ ID NO: 7062 - DNA, 20 bp, Artificial Sequence
  Synthetic: FMR1 O reverse X:147912261-147912284; SpCas9
aagggagggaaggaagggcg

SEQ ID NO: 7063 - DNA, 19 bp, Artificial Sequence
  Synthetic: FMR1 O reverse X:147912262-147912284; SpCas9
agggagggaaggaagggcg

SEQ ID NO: 7064 - DNA, 18 bp, Artificial Sequence
  Synthetic: FMR1 O reverse X:147912263-147912284; SpCas9
gggagggaaggaagggcg

SEQ ID NO: 7065 - DNA, 25 bp, Artificial Sequence
  Synthetic: FMR1 O forward X:147912261-147912289; SpCas9
cccttccttccctcccttttcttct

SEQ ID NO: 7066 - DNA, 24 bp, Artificial Sequence
  Synthetic: FMR1 O forward X:147912262-147912289; SpCas9
ccttccttccctcccttttcttct

SEQ ID NO: 7067 - DNA, 23 bp, Artificial Sequence
  Synthetic: FMR1 O forward X:147912263-147912289; SpCas9
cttccttccctcccttttcttct

SEQ ID NO: 7068 - DNA, 22 bp, Artificial Sequence
  Synthetic: FMR1 O forward X:147912264-147912289; SpCas9
ttccttccctcccttttcttct

SEQ ID NO: 7069 - DNA, 21 bp, Artificial Sequence
  Synthetic: FMR1 O forward X:147912265-147912289; SpCas9
tccttccctcccttttcttct

SEQ ID NO: 7070 - DNA, 20 bp, Artificial Sequence
  Synthetic: FMR1 O forward X:147912266-147912289; SpCas9
ccttccctcccttttcttct

SEQ ID NO: 7071 - DNA, 19 bp, Artificial Sequence
  Synthetic: FMR1 O forward X:147912267-147912289; SpCas9
cttccctcccttttcttct

SEQ ID NO: 7072 - DNA, 18 bp, Artificial Sequence
  Synthetic: FMR1 O forward X:147912268-147912289; SpCas9
ttccctcccttttcttct

SEQ ID NO: 7073 - DNA, 25 bp, Artificial Sequence
  Synthetic: FMR1 O reverse X:147912261-147912289; SpCas9
ccaagaagaaaagggagggaaggaa

SEQ ID NO: 7074 - DNA, 24 bp, Artificial Sequence
  Synthetic: FMR1 O reverse X:147912262-147912289; SpCas9
caagaagaaaagggagggaaggaa

SEQ ID NO: 7075 - DNA, 23 bp, Artificial Sequence
  Synthetic: FMR1 O reverse X:147912263-147912289; SpCas9
aagaagaaaagggagggaaggaa

SEQ ID NO: 7076 - DNA, 22 bp, Artificial Sequence
  Synthetic: FMR1 O reverse X:147912264-147912289; SpCas9
agaagaaaagggagggaaggaa

SEQ ID NO: 7077 - DNA, 21 bp, Artificial Sequence
  Synthetic: FMR1 O reverse X:147912265-147912289; SpCas9
gaagaaaagggagggaaggaa

SEQ ID NO: 7078 - DNA, 20 bp, Artificial Sequence
  Synthetic: FMR1 O reverse X:147912266-147912289; SpCas9
aagaaaagggagggaaggaa

SEQ ID NO: 7079 - DNA, 19 bp, Artificial Sequence
  Synthetic: FMR1 O reverse X:147912267-147912289; SpCas9
agaaaagggagggaaggaa

SEQ ID NO: 7080 - DNA, 18 bp, Artificial Sequence
  Synthetic: FMR1 O reverse X:147912268-147912289; SpCas9
gaaaagggagggaaggaa

SEQ ID NO: 7081 - DNA, 25 bp, Artificial Sequence
  Synthetic: FMR1 O reverse X:147912262-147912290; SpCas9
accaagaagaaaagggagggaagga

SEQ ID NO: 7082 - DNA, 24 bp, Artificial Sequence
  Synthetic: FMR1 O reverse X:147912263-147912290; SpCas9
ccaagaagaaaagggagggaagga

SEQ ID NO: 7083 - DNA, 23 bp, Artificial Sequence
  Synthetic: FMR1 O reverse X:147912264-147912290; SpCas9
caagaagaaaagggagggaagga

SEQ ID NO: 7084 - DNA, 22 bp, Artificial Sequence
  Synthetic: FMR1 O reverse X:147912265-147912290; SpCas9
aagaagaaaagggagggaagga

SEQ ID NO: 7085 - DNA, 21 bp, Artificial Sequence
  Synthetic: FMR1 O reverse X:147912266-147912290; SpCas9
agaagaaaagggagggaagga

SEQ ID NO: 7086 - DNA, 20 bp, Artificial Sequence
  Synthetic: FMR1 O reverse X:147912267-147912290; SpCas9
gaagaaaagggagggaagga

SEQ ID NO: 7087 - DNA, 19 bp, Artificial Sequence
  Synthetic: FMR1 O reverse X:147912268-147912290; SpCas9
aagaaaagggagggaagga

SEQ ID NO: 7088 - DNA, 18 bp, Artificial Sequence
  Synthetic: FMR1 O reverse X:147912269-147912290; SpCas9
agaaaagggagggaagga

SEQ ID NO: 7089 - DNA, 25 bp, Artificial Sequence
  Synthetic: FMR1 O reverse X:147912263-147912291; SpCas9
caccaagaagaaaagggagggaagg

SEQ ID NO: 7090 - DNA, 24 bp, Artificial Sequence
  Synthetic: FMR1 O reverse X:147912264-147912291; SpCas9
accaagaagaaaagggagggaagg

SEQ ID NO: 7091 - DNA, 23 bp, Artificial Sequence
  Synthetic: FMR1 O reverse X:147912265-147912291; SpCas9
ccaagaagaaaagggagggaagg

SEQ ID NO: 7092 - DNA, 22 bp, Artificial Sequence
  Synthetic: FMR1 O reverse X:147912266-147912291; SpCas9
caagaagaaaagggagggaagg

SEQ ID NO: 7093 - DNA, 21 bp, Artificial Sequence
  Synthetic: FMR1 O reverse X:147912267-147912291; SpCas9
aagaagaaaagggagggaagg

SEQ ID NO: 7094 - DNA, 20 bp, Artificial Sequence
  Synthetic: FMR1 O reverse X:147912268-147912291; SpCas9
agaagaaaagggagggaagg

SEQ ID NO: 7095 - DNA, 19 bp, Artificial Sequence
  Synthetic: FMR1 O reverse X:147912269-147912291; SpCas9
gaagaaaagggagggaagg

SEQ ID NO: 7096 - DNA, 18 bp, Artificial Sequence
  Synthetic: FMR1 O reverse X:147912270-147912291; SpCas9
aagaaaagggagggaagg

SEQ ID NO: 7097 - DNA, 25 bp, Artificial Sequence
  Synthetic: FMR1 O reverse X:147912266-147912294; SpCas9
cgacaccaagaagaaaagggaggga

SEQ ID NO: 7098 - DNA, 24 bp, Artificial Sequence
  Synthetic: FMR1 O reverse X:147912267-147912294; SpCas9
gacaccaagaagaaaagggaggga

SEQ ID NO: 7099 - DNA, 23 bp, Artificial Sequence
  Synthetic: FMR1 O reverse X:147912268-147912294; SpCas9
acaccaagaagaaaagggaggga

SEQ ID NO: 7100 - DNA, 22 bp, Artificial Sequence
  Synthetic: FMR1 O reverse X:147912269-147912294; SpCas9
caccaagaagaaaagggaggga

SEQ ID NO: 7101 - DNA, 21 bp, Artificial Sequence
  Synthetic: FMR1 O reverse X:147912270-147912294; SpCas9
accaagaagaaaagggaggga

SEQ ID NO: 7102 - DNA, 20 bp, Artificial Sequence
  Synthetic: FMR1 O reverse X:147912271-147912294; SpCas9
ccaagaagaaaagggaggga

SEQ ID NO: 7103 - DNA, 19 bp, Artificial Sequence
  Synthetic: FMR1 O reverse X:147912272-147912294; SpCas9
caagaagaaaagggaggga

SEQ ID NO: 7104 - DNA, 18 bp, Artificial Sequence
  Synthetic: FMR1 O reverse X:147912273-147912294; SpCas9
aagaagaaaagggaggga

SEQ ID NO: 7105 - DNA, 25 bp, Artificial Sequence
  Synthetic: FMR1 O forward X:147912267-147912295; SpCas9
cttccctcccttttcttcttggtgt

SEQ ID NO: 7106 - DNA, 24 bp, Artificial Sequence
  Synthetic: FMR1 O forward X:147912268-147912295; SpCas9
ttccctcccttttcttcttggtgt

SEQ ID NO: 7107 - DNA, 23 bp, Artificial Sequence
  Synthetic: FMR1 O forward X:147912269-147912295; SpCas9
tccctcccttttcttcttggtgt

SEQ ID NO: 7108 - DNA, 22 bp, Artificial Sequence
  Synthetic: FMR1 O forward X:147912270-147912295; SpCas9
ccctcccttttcttcttggtgt

SEQ ID NO: 7109 - DNA, 21 bp, Artificial Sequence
  Synthetic: FMR1 O forward X:147912271-147912295; SpCas9
cctcccttttcttcttggtgt

SEQ ID NO: 7110 - DNA, 20 bp, Artificial Sequence
  Synthetic: FMR1 O forward X:147912272-147912295; SpCas9
ctcccttttcttcttggtgt

SEQ ID NO: 7111 - DNA, 19 bp, Artificial Sequence
  Synthetic: FMR1 O forward X:147912273-147912295; SpCas9
tcccttttcttcttggtgt

SEQ ID NO: 7112 - DNA, 18 bp, Artificial Sequence
  Synthetic: FMR1 O forward X:147912274-147912295; SpCas9
cccttttcttcttggtgt

SEQ ID NO: 7113 - DNA, 25 bp, Artificial Sequence
  Synthetic: FMR1 O reverse X:147912267-147912295; SpCas9
ccgacaccaagaagaaaagggaggg

SEQ ID NO: 7114 - DNA, 24 bp, Artificial Sequence
  Synthetic: FMR1 O reverse X:147912268-147912295; SpCas9
cgacaccaagaagaaaagggaggg

SEQ ID NO: 7115 - DNA, 23 bp, Artificial Sequence
  Synthetic: FMR1 O reverse X:147912269-147912295; SpCas9
gacaccaagaagaaaagggaggg

SEQ ID NO: 7116 - DNA, 22 bp, Artificial Sequence
  Synthetic: FMR1 O reverse X:147912270-147912295; SpCas9
acaccaagaagaaaagggaggg

SEQ ID NO: 7117 - DNA, 21 bp, Artificial Sequence
  Synthetic: FMR1 O reverse X:147912271-147912295; SpCas9
caccaagaagaaaagggaggg

SEQ ID NO: 7118 - DNA, 20 bp, Artificial Sequence
  Synthetic: FMR1 O reverse X:147912272-147912295; SpCas9
accaagaagaaaagggaggg

SEQ ID NO: 7119 - DNA, 19 bp, Artificial Sequence
  Synthetic: FMR1 O reverse X:147912273-147912295; SpCas9
ccaagaagaaaagggaggg

SEQ ID NO: 7120 - DNA, 18 bp, Artificial Sequence
  Synthetic: FMR1 O reverse X:147912274-147912295; SpCas9
caagaagaaaagggaggg

SEQ ID NO: 7121 - DNA, 25 bp, Artificial Sequence
  Synthetic: FMR1 O forward X:147912270-147912298; SpCas9
ccctcccttttcttcttggtgtcgg

SEQ ID NO: 7122 - DNA, 24 bp, Artificial Sequence
  Synthetic: FMR1 O forward X:147912271-147912298; SpCas9
cctcccttttcttcttggtgtcgg

SEQ ID NO: 7123 - DNA, 23 bp, Artificial Sequence
  Synthetic: FMR1 O forward X:147912272-147912298; SpCas9
ctcccttttcttcttggtgtcgg

SEQ ID NO: 7124 - DNA, 22 bp, Artificial Sequence
  Synthetic: FMR1 O forward X:147912273-147912298; SpCas9
tcccttttcttcttggtgtcgg

SEQ ID NO: 7125 - DNA, 21 bp, Artificial Sequence
  Synthetic: FMR1 O forward X:147912274-147912298; SpCas9
cccttttcttcttggtgtcgg

SEQ ID NO: 7126 - DNA, 20 bp, Artificial Sequence
  Synthetic: FMR1 O forward X:147912275-147912298; SpCas9
ccttttcttcttggtgtcgg

SEQ ID NO: 7127 - DNA, 19 bp, Artificial Sequence
  Synthetic: FMR1 O forward X:147912276-147912298; SpCas9
cttttcttcttggtgtcgg

SEQ ID NO: 7128 - DNA, 18 bp, Artificial Sequence
  Synthetic: FMR1 O forward X:147912277-147912298; SpCas9
ttttcttcttggtgtcgg

SEQ ID NO: 7129 - DNA, 25 bp, Artificial Sequence
  Synthetic: FMR1 O reverse X:147912270-147912298; SpCas9
ccgccgacaccaagaagaaaaggga

SEQ ID NO: 7130 - DNA, 24 bp, Artificial Sequence
  Synthetic: FMR1 O reverse X:147912271-147912298; SpCas9
cgccgacaccaagaagaaaaggga

SEQ ID NO: 7131 - DNA, 23 bp, Artificial Sequence
  Synthetic: FMR1 O reverse X:147912272-147912298; SpCas9
gccgacaccaagaagaaaaggga

SEQ ID NO: 7132 - DNA, 22 bp, Artificial Sequence
  Synthetic: FMR1 O reverse X:147912273-147912298; SpCas9
ccgacaccaagaagaaaaggga

SEQ ID NO: 7133 - DNA, 21 bp, Artificial Sequence
  Synthetic: FMR1 O reverse X:147912274-147912298; SpCas9
cgacaccaagaagaaaaggga

SEQ ID NO: 7134 - DNA, 20 bp, Artificial Sequence
  Synthetic: FMR1 O reverse X:147912275-147912298; SpCas9
gacaccaagaagaaaaggga

SEQ ID NO: 7135 - DNA, 19 bp, Artificial Sequence
  Synthetic: FMR1 O reverse X:147912276-147912298; SpCas9
acaccaagaagaaaaggga

SEQ ID NO: 7136 - DNA, 18 bp, Artificial Sequence
  Synthetic: FMR1 O reverse X:147912277-147912298; SpCas9
caccaagaagaaaaggga

SEQ ID NO: 7137 - DNA, 25 bp, Artificial Sequence
  Synthetic: FMR1 O forward X:147912271-147912299; SpCas9
cctcccttttcttcttggtgtcggc

SEQ ID NO: 7138 - DNA, 24 bp, Artificial Sequence
  Synthetic: FMR1 O forward X:147912272-147912299; SpCas9
ctcccttttcttcttggtgtcggc

SEQ ID NO: 7139 - DNA, 23 bp, Artificial Sequence
  Synthetic: FMR1 O forward X:147912273-147912299; SpCas9
tcccttttcttcttggtgtcggc

SEQ ID NO: 7140 - DNA, 22 bp, Artificial Sequence
  Synthetic: FMR1 O forward X:147912274-147912299; SpCas9
cccttttcttcttggtgtcggc

SEQ ID NO: 7141 - DNA, 21 bp, Artificial Sequence
  Synthetic: FMR1 O forward X:147912275-147912299; SpCas9
ccttttcttcttggtgtcggc

SEQ ID NO: 7142 - DNA, 20 bp, Artificial Sequence
  Synthetic: FMR1 O forward X:147912276-147912299; SpCas9
cttttcttcttggtgtcggc

SEQ ID NO: 7143 - DNA, 19 bp, Artificial Sequence
  Synthetic: FMR1 O forward X:147912277-147912299; SpCas9
ttttcttcttggtgtcggc

SEQ ID NO: 7144 - DNA, 18 bp, Artificial Sequence
  Synthetic: FMR1 O forward X:147912278-147912299; SpCas9
tttcttcttggtgtcggc

SEQ ID NO: 7145 - DNA, 25 bp, Artificial Sequence
  Synthetic: FMR1 O reverse X:147912271-147912299; SpCas9
cccgccgacaccaagaagaaaaggg

SEQ ID NO: 7146 - DNA, 24 bp, Artificial Sequence
  Synthetic: FMR1 O reverse X:147912272-147912299; SpCas9
ccgccgacaccaagaagaaaaggg

SEQ ID NO: 7147 - DNA, 23 bp, Artificial Sequence
  Synthetic: FMR1 O reverse X:147912273-147912299; SpCas9
cgccgacaccaagaagaaaaggg

SEQ ID NO: 7148 - DNA, 22 bp, Artificial Sequence
  Synthetic: FMR1 O reverse X:147912274-147912299; SpCas9
gccgacaccaagaagaaaaggg

SEQ ID NO: 7149 - DNA, 21 bp, Artificial Sequence
  Synthetic: FMR1 O reverse X:147912275-147912299; SpCas9
ccgacaccaagaagaaaaggg

SEQ ID NO: 7150 - DNA, 20 bp, Artificial Sequence
  Synthetic: FMR1 O reverse X:147912276-147912299; SpCas9
cgacaccaagaagaaaaggg

SEQ ID NO: 7151 - DNA, 19 bp, Artificial Sequence
  Synthetic: FMR1 O reverse X:147912277-147912299; SpCas9
gacaccaagaagaaaaggg

SEQ ID NO: 7152 - DNA, 18 bp, Artificial Sequence
  Synthetic: FMR1 O reverse X:147912278-147912299; SpCas9
acaccaagaagaaaaggg

SEQ ID NO: 7153 - DNA, 25 bp, Artificial Sequence
  Synthetic: FMR1 O reverse X:147912272-147912300; SpCas9
tcccgccgacaccaagaagaaaagg

SEQ ID NO: 7154 - DNA, 24 bp, Artificial Sequence
  Synthetic: FMR1 O reverse X:147912273-147912300; SpCas9
cccgccgacaccaagaagaaaagg

SEQ ID NO: 7155 - DNA, 23 bp, Artificial Sequence
  Synthetic: FMR1 O reverse X:147912274-147912300; SpCas9
ccgccgacaccaagaagaaaagg

SEQ ID NO: 7156 - DNA, 22 bp, Artificial Sequence
  Synthetic: FMR1 O reverse X:147912275-147912300; SpCas9
cgccgacaccaagaagaaaagg

SEQ ID NO: 7157 - DNA, 21 bp, Artificial Sequence
  Synthetic: FMR1 O reverse X:147912276-147912300; SpCas9
gccgacaccaagaagaaaagg

SEQ ID NO: 7158 - DNA, 20 bp, Artificial Sequence
  Synthetic: FMR1 O reverse X:147912277-147912300; SpCas9
ccgacaccaagaagaaaagg

SEQ ID NO: 7159 - DNA, 19 bp, Artificial Sequence
  Synthetic: FMR1 O reverse X:147912278-147912300; SpCas9
cgacaccaagaagaaaagg

SEQ ID NO: 7160 - DNA, 18 bp, Artificial Sequence
  Synthetic: FMR1 O reverse X:147912279-147912300; SpCas9
gacaccaagaagaaaagg

SEQ ID NO: 7161 - DNA, 25 bp, Artificial Sequence
  Synthetic: FMR1 O forward X:147912273-147912301; SpCas9
tcccttttcttcttggtgtcggcgg

SEQ ID NO: 7162 - DNA, 24 bp, Artificial Sequence
  Synthetic: FMR1 O forward X:147912274-147912301; SpCas9
cccttttcttcttggtgtcggcgg

SEQ ID NO: 7163 - DNA, 23 bp, Artificial Sequence
  Synthetic: FMR1 O forward X:147912275-147912301; SpCas9
ccttttcttcttggtgtcggcgg

SEQ ID NO: 7164 - DNA, 22 bp, Artificial Sequence
  Synthetic: FMR1 O forward X:147912276-147912301; SpCas9
cttttcttcttggtgtcggcgg

SEQ ID NO: 7165 - DNA, 21 bp, Artificial Sequence
  Synthetic: FMR1 O forward X:147912277-147912301; SpCas9
ttttcttcttggtgtcggcgg

SEQ ID NO: 7166 - DNA, 20 bp, Artificial Sequence
  Synthetic: FMR1 O forward X:147912278-147912301; SpCas9
tttcttcttggtgtcggcgg

SEQ ID NO: 7167 - DNA, 19 bp, Artificial Sequence
  Synthetic: FMR1 O forward X:147912279-147912301; SpCas9
ttcttcttggtgtcggcgg

SEQ ID NO: 7168 - DNA, 18 bp, Artificial Sequence
  Synthetic: FMR1 O forward X:147912280-147912301; SpCas9
tcttcttggtgtcggcgg

SEQ ID NO: 7169 - DNA, 25 bp, Artificial Sequence
  Synthetic: FMR1 O forward X:147912274-147912302; SpCas9
cccttttcttcttggtgtcggcggg

SEQ ID NO: 7170 - DNA, 24 bp, Artificial Sequence
  Synthetic: FMR1 O forward X:147912275-147912302; SpCas9
ccttttcttcttggtgtcggcggg

SEQ ID NO: 7171 - DNA, 23 bp, Artificial Sequence
  Synthetic: FMR1 O forward X:147912276-147912302; SpCas9
cttttcttcttggtgtcggcggg

SEQ ID NO: 7172 - DNA, 22 bp, Artificial Sequence
  Synthetic: FMR1 O forward X:147912277-147912302; SpCas9
ttttcttcttggtgtcggcggg

SEQ ID NO: 7173 - DNA, 21 bp, Artificial Sequence
  Synthetic: FMR1 O forward X:147912278-147912302; SpCas9
tttcttcttggtgtcggcggg

SEQ ID NO: 7174 - DNA, 20 bp, Artificial Sequence
  Synthetic: FMR1 O forward X:147912279-147912302; SpCas9
ttcttcttggtgtcggcggg

SEQ ID NO: 7175 - DNA, 19 bp, Artificial Sequence
  Synthetic: FMR1 O forward X:147912280-147912302; SpCas9
tcttcttggtgtcggcggg

SEQ ID NO: 7176 - DNA, 18 bp, Artificial Sequence
  Synthetic: FMR1 O forward X:147912281-147912302; SpCas9
cttcttggtgtcggcggg

SEQ ID NO: 7177 - DNA, 25 bp, Artificial Sequence
  Synthetic: FMR1 O reverse X:147912274-147912302; SpCas9
cctcccgccgacaccaagaagaaaa

SEQ ID NO: 7178 - DNA, 24 bp, Artificial Sequence
  Synthetic: FMR1 O reverse X:147912275-147912302; SpCas9
ctcccgccgacaccaagaagaaaa

SEQ ID NO: 7179 - DNA, 23 bp, Artificial Sequence
  Synthetic: FMR1 O reverse X:147912276-147912302; SpCas9
tcccgccgacaccaagaagaaaa

SEQ ID NO: 7180 - DNA, 22 bp, Artificial Sequence
  Synthetic: FMR1 O reverse X:147912277-147912302; SpCas9
cccgccgacaccaagaagaaaa

SEQ ID NO: 7181 - DNA, 21 bp, Artificial Sequence
  Synthetic: FMR1 O reverse X:147912278-147912302; SpCas9
ccgccgacaccaagaagaaaa

SEQ ID NO: 7182 - DNA, 20 bp, Artificial Sequence
  Synthetic: FMR1 O reverse X:147912279-147912302; SpCas9
cgccgacaccaagaagaaaa

SEQ ID NO: 7183 - DNA, 19 bp, Artificial Sequence
  Synthetic: FMR1 O reverse X:147912280-147912302; SpCas9
gccgacaccaagaagaaaa

SEQ ID NO: 7184 - DNA, 18 bp, Artificial Sequence
  Synthetic: FMR1 O reverse X:147912281-147912302; SpCas9
ccgacaccaagaagaaaa

SEQ ID NO: 7185 - DNA, 25 bp, Artificial Sequence
  Synthetic: FMR1 O reverse X:147912275-147912303; SpCas9
gcctcccgccgacaccaagaagaaa

SEQ ID NO: 7186 - DNA, 24 bp, Artificial Sequence
  Synthetic: FMR1 O reverse X:147912276-147912303; SpCas9
cctcccgccgacaccaagaagaaa

SEQ ID NO: 7187 - DNA, 23 bp, Artificial Sequence
  Synthetic: FMR1 O reverse X:147912277-147912303; SpCas9
ctcccgccgacaccaagaagaaa

SEQ ID NO: 7188 - DNA, 22 bp, Artificial Sequence
  Synthetic: FMR1 O reverse X:147912278-147912303; SpCas9
tcccgccgacaccaagaagaaa

SEQ ID NO: 7189 - DNA, 21 bp, Artificial Sequence
  Synthetic: FMR1 O reverse X:147912279-147912303; SpCas9
cccgccgacaccaagaagaaa

SEQ ID NO: 7190 - DNA, 20 bp, Artificial Sequence
  Synthetic: FMR1 O reverse X:147912280-147912303; SpCas9
ccgccgacaccaagaagaaa

SEQ ID NO: 7191 - DNA, 19 bp, Artificial Sequence
  Synthetic: FMR1 O reverse X:147912281-147912303; SpCas9
cgccgacaccaagaagaaa

SEQ ID NO: 7192 - DNA, 18 bp, Artificial Sequence
  Synthetic: FMR1 O reverse X:147912282-147912303; SpCas9
gccgacaccaagaagaaa

SEQ ID NO: 7193 - DNA, 25 bp, Artificial Sequence
  Synthetic: FMR1 O reverse X:147912276-147912304; SpCas9
tgcctcccgccgacaccaagaagaa

SEQ ID NO: 7194 - DNA, 24 bp, Artificial Sequence
  Synthetic: FMR1 O reverse X:147912277-147912304; SpCas9
gcctcccgccgacaccaagaagaa

SEQ ID NO: 7195 - DNA, 23 bp, Artificial Sequence
  Synthetic: FMR1 O reverse X:147912278-147912304; SpCas9
cctcccgccgacaccaagaagaa

SEQ ID NO: 7196 - DNA, 22 bp, Artificial Sequence
  Synthetic: FMR1 O reverse X:147912279-147912304; SpCas9
ctcccgccgacaccaagaagaa

SEQ ID NO: 7197 - DNA, 21 bp, Artificial Sequence
  Synthetic: FMR1 O reverse X:147912280-147912304; SpCas9
tcccgccgacaccaagaagaa

SEQ ID NO: 7198 - DNA, 20 bp, Artificial Sequence
  Synthetic: FMR1 O reverse X:147912281-147912304; SpCas9
cccgccgacaccaagaagaa

SEQ ID NO: 7199 - DNA, 19 bp, Artificial Sequence
  Synthetic: FMR1 O reverse X:147912282-147912304; SpCas9
ccgccgacaccaagaagaa

SEQ ID NO: 7200 - DNA, 18 bp, Artificial Sequence
  Synthetic: FMR1 O reverse X:147912283-147912304; SpCas9
cgccgacaccaagaagaa

SEQ ID NO: 7201 - DNA, 25 bp, Artificial Sequence
  Synthetic: FMR1 O forward X:147912277-147912305; SpCas9
ttttcttcttggtgtcggcgggagg

SEQ ID NO: 7202 - DNA, 24 bp, Artificial Sequence
  Synthetic: FMR1 O forward X:147912278-147912305; SpCas9
tttcttcttggtgtcggcgggagg

SEQ ID NO: 7203 - DNA, 23 bp, Artificial Sequence
  Synthetic: FMR1 O forward X:147912279-147912305; SpCas9
ttcttcttggtgtcggcgggagg

SEQ ID NO: 7204 - DNA, 22 bp, Artificial Sequence
  Synthetic: FMR1 O forward X:147912280-147912305; SpCas9
tcttcttggtgtcggcgggagg

SEQ ID NO: 7205 - DNA, 21 bp, Artificial Sequence
  Synthetic: FMR1 O forward X:147912281-147912305; SpCas9
cttcttggtgtcggcgggagg

SEQ ID NO: 7206 - DNA, 20 bp, Artificial Sequence
  Synthetic: FMR1 O forward X:147912282-147912305; SpCas9
ttcttggtgtcggcgggagg

SEQ ID NO: 7207 - DNA, 19 bp, Artificial Sequence
  Synthetic: FMR1 O forward X:147912283-147912305; SpCas9
tcttggtgtcggcgggagg

SEQ ID NO: 7208 - DNA, 18 bp, Artificial Sequence
  Synthetic: FMR1 O forward X:147912284-147912305; SpCas9
cttggtgtcggcgggagg

SEQ ID NO: 7209 - DNA, 25 bp, Artificial Sequence
  Synthetic: FMR1 O forward X:147912278-147912306; SpCas9
tttcttcttggtgtcggcgggaggc

SEQ ID NO: 7210 - DNA, 24 bp, Artificial Sequence
  Synthetic: FMR1 O forward X:147912279-147912306; SpCas9
ttcttcttggtgtcggcgggaggc

SEQ ID NO: 7211 - DNA, 23 bp, Artificial Sequence
  Synthetic: FMR1 O forward X:147912280-147912306; SpCas9
tcttcttggtgtcggcgggaggc

SEQ ID NO: 7212 - DNA, 22 bp, Artificial Sequence
  Synthetic: FMR1 O forward X:147912281-147912306; SpCas9
cttcttggtgtcggcgggaggc

SEQ ID NO: 7213 - DNA, 21 bp, Artificial Sequence
  Synthetic: FMR1 O forward X:147912282-147912306; SpCas9
ttcttggtgtcggcgggaggc

SEQ ID NO: 7214 - DNA, 20 bp, Artificial Sequence
  Synthetic: FMR1 O forward X:147912283-147912306; SpCas9
tcttggtgtcggcgggaggc

SEQ ID NO: 7215 - DNA, 19 bp, Artificial Sequence
  Synthetic: FMR1 O forward X:147912284-147912306; SpCas9
cttggtgtcggcgggaggc

SEQ ID NO: 7216 - DNA, 18 bp, Artificial Sequence
  Synthetic: FMR1 O forward X:147912285-147912306; SpCas9
ttggtgtcggcgggaggc

SEQ ID NO: 7217 - DNA, 25 bp, Artificial Sequence
  Synthetic: FMR1 O reverse X:147912281-147912309; SpCas9
gggcctgcctcccgccgacaccaag

SEQ ID NO: 7218 - DNA, 24 bp, Artificial Sequence
  Synthetic: FMR1 O reverse X:147912282-147912309; SpCas9
ggcctgcctcccgccgacaccaag

SEQ ID NO: 7219 - DNA, 23 bp, Artificial Sequence
  Synthetic: FMR1 O reverse X:147912283-147912309; SpCas9
gcctgcctcccgccgacaccaag

SEQ ID NO: 7220 - DNA, 22 bp, Artificial Sequence
  Synthetic: FMR1 O reverse X:147912284-147912309; SpCas9
cctgcctcccgccgacaccaag

SEQ ID NO: 7221 - DNA, 21 bp, Artificial Sequence
  Synthetic: FMR1 O reverse X:147912285-147912309; SpCas9
ctgcctcccgccgacaccaag

SEQ ID NO: 7222 - DNA, 20 bp, Artificial Sequence
  Synthetic: FMR1 O reverse X:147912286-147912309; SpCas9
tgcctcccgccgacaccaag

SEQ ID NO: 7223 - DNA, 19 bp, Artificial Sequence
  Synthetic: FMR1 O reverse X:147912287-147912309; SpCas9
gcctcccgccgacaccaag

SEQ ID NO: 7224 - DNA, 18 bp, Artificial Sequence
  Synthetic: FMR1 O reverse X:147912288-147912309; SpCas9
cctcccgccgacaccaag

SEQ ID NO: 7225 - DNA, 25 bp, Artificial Sequence
  Synthetic: FMR1 O forward X:147912283-147912311; SpCas9
tcttggtgtcggcgggaggcaggcc

SEQ ID NO: 7226 - DNA, 24 bp, Artificial Sequence
  Synthetic: FMR1 O forward X:147912284-147912311; SpCas9
cttggtgtcggcgggaggcaggcc

SEQ ID NO: 7227 - DNA, 23 bp, Artificial Sequence
  Synthetic: FMR1 O forward X:147912285-147912311; SpCas9
ttggtgtcggcgggaggcaggcc

SEQ ID NO: 7228 - DNA, 22 bp, Artificial Sequence
  Synthetic: FMR1 O forward X:147912286-147912311; SpCas9
tggtgtcggcgggaggcaggcc

SEQ ID NO: 7229 - DNA, 21 bp, Artificial Sequence
  Synthetic: FMR1 O forward X:147912287-147912311; SpCas9
ggtgtcggcgggaggcaggcc

SEQ ID NO: 7230 - DNA, 20 bp, Artificial Sequence
  Synthetic: FMR1 O forward X:147912288-147912311; SpCas9
gtgtcggcgggaggcaggcc

SEQ ID NO: 7231 - DNA, 19 bp, Artificial Sequence
  Synthetic: FMR1 O forward X:147912289-147912311; SpCas9
tgtcggcgggaggcaggcc

SEQ ID NO: 7232 - DNA, 18 bp, Artificial Sequence
  Synthetic: FMR1 O forward X:147912290-147912311; SpCas9
gtcggcgggaggcaggcc

SEQ ID NO: 7233 - DNA, 25 bp, Artificial Sequence
  Synthetic: FMR1 O forward X:147912284-147912312; SpCas9
cttggtgtcggcgggaggcaggccc

SEQ ID NO: 7234 - DNA, 24 bp, Artificial Sequence
  Synthetic: FMR1 O forward X:147912285-147912312; SpCas9
ttggtgtcggcgggaggcaggccc

SEQ ID NO: 7235 - DNA, 23 bp, Artificial Sequence
  Synthetic: FMR1 O forward X:147912286-147912312; SpCas9
tggtgtcggcgggaggcaggccc

SEQ ID NO: 7236 - DNA, 22 bp, Artificial Sequence
  Synthetic: FMR1 O forward X:147912287-147912312; SpCas9
ggtgtcggcgggaggcaggccc

SEQ ID NO: 7237 - DNA, 21 bp, Artificial Sequence
  Synthetic: FMR1 O forward X:147912288-147912312; SpCas9
gtgtcggcgggaggcaggccc

SEQ ID NO: 7238 - DNA, 20 bp, Artificial Sequence
  Synthetic: FMR1 O forward X:147912289-147912312; SpCas9
tgtcggcgggaggcaggccc

SEQ ID NO: 7239 - DNA, 19 bp, Artificial Sequence
  Synthetic: FMR1 O forward X:147912290-147912312; SpCas9
gtcggcgggaggcaggccc

SEQ ID NO: 7240 - DNA, 18 bp, Artificial Sequence
  Synthetic: FMR1 O forward X:147912291-147912312; SpCas9
tcggcgggaggcaggccc

SEQ ID NO: 7241 - DNA, 25 bp, Artificial Sequence
  Synthetic: FMR1 O reverse X:147912284-147912312; SpCas9
cccgggcctgcctcccgccgacacc

SEQ ID NO: 7242 - DNA, 24 bp, Artificial Sequence
  Synthetic: FMR1 O reverse X:147912285-147912312; SpCas9
ccgggcctgcctcccgccgacacc

SEQ ID NO: 7243 - DNA, 23 bp, Artificial Sequence
  Synthetic: FMR1 O reverse X:147912286-147912312; SpCas9
cgggcctgcctcccgccgacacc

SEQ ID NO: 7244 - DNA, 22 bp, Artificial Sequence
  Synthetic: FMR1 O reverse X:147912287-147912312; SpCas9
gggcctgcctcccgccgacacc

SEQ ID NO: 7245 - DNA, 21 bp, Artificial Sequence
  Synthetic: FMR1 O reverse X:147912288-147912312; SpCas9
ggcctgcctcccgccgacacc

SEQ ID NO: 7246 - DNA, 20 bp, Artificial Sequence
  Synthetic: FMR1 O reverse X:147912289-147912312; SpCas9
gcctgcctcccgccgacacc

SEQ ID NO: 7247 - DNA, 19 bp, Artificial Sequence
  Synthetic: FMR1 O reverse X:147912290-147912312; SpCas9
cctgcctcccgccgacacc

SEQ ID NO: 7248 - DNA, 18 bp, Artificial Sequence
  Synthetic: FMR1 O reverse X:147912291-147912312; SpCas9
ctgcctcccgccgacacc

SEQ ID NO: 7249 - DNA, 25 bp, Artificial Sequence
  Synthetic: FMR1 O forward X:147912285-147912313; SpCas9
ttggtgtcggcgggaggcaggcccg

SEQ ID NO: 7250 - DNA, 24 bp, Artificial Sequence
  Synthetic: FMR1 O forward X:147912286-147912313; SpCas9
tggtgtcggcgggaggcaggcccg

SEQ ID NO: 7251 - DNA, 23 bp, Artificial Sequence
  Synthetic: FMR1 O forward X:147912287-147912313; SpCas9
ggtgtcggcgggaggcaggcccg

SEQ ID NO: 7252 - DNA, 22 bp, Artificial Sequence
  Synthetic: FMR1 O forward X:147912288-147912313; SpCas9
gtgtcggcgggaggcaggcccg

SEQ ID NO: 7253 - DNA, 21 bp, Artificial Sequence
  Synthetic: FMR1 O forward X:147912289-147912313; SpCas9
tgtcggcgggaggcaggcccg

SEQ ID NO: 7254 - DNA, 20 bp, Artificial Sequence
  Synthetic: FMR1 O forward X:147912290-147912313; SpCas9
gtcggcgggaggcaggcccg

SEQ ID NO: 7255 - DNA, 19 bp, Artificial Sequence
  Synthetic: FMR1 O forward X:147912291-147912313; SpCas9
tcggcgggaggcaggcccg

SEQ ID NO: 7256 - DNA, 18 bp, Artificial Sequence
  Synthetic: FMR1 O forward X:147912292-147912313; SpCas9
cggcgggaggcaggcccg

SEQ ID NO: 7257 - DNA, 25 bp, Artificial Sequence
  Synthetic: FMR1 O forward X:147912298-147912326; SpCas9
gaggcaggcccggggccctcttccc

SEQ ID NO: 7258 - DNA, 24 bp, Artificial Sequence
  Synthetic: FMR1 O forward X:147912299-147912326; SpCas9
aggcaggcccggggccctcttccc

SEQ ID NO: 7259 - DNA, 23 bp, Artificial Sequence
  Synthetic: FMR1 O forward X:147912300-147912326; SpCas9
ggcaggcccggggccctcttccc

SEQ ID NO: 7260 - DNA, 22 bp, Artificial Sequence
  Synthetic: FMR1 O forward X:147912301-147912326; SpCas9
gcaggcccggggccctcttccc

SEQ ID NO: 7261 - DNA, 21 bp, Artificial Sequence
  Synthetic: FMR1 O forward X:147912302-147912326; SpCas9
caggcccggggccctcttccc

SEQ ID NO: 7262 - DNA, 20 bp, Artificial Sequence
  Synthetic: FMR1 O forward X:147912303-147912326; SpCas9
aggcccggggccctcttccc

SEQ ID NO: 7263 - DNA, 19 bp, Artificial Sequence
  Synthetic: FMR1 O forward X:147912304-147912326; SpCas9
ggcccggggccctcttccc

SEQ ID NO: 7264 - DNA, 18 bp, Artificial Sequence
  Synthetic: FMR1 O forward X:147912305-147912326; SpCas9
gcccggggccctcttccc

SEQ ID NO: 7265-7300 - skipped (36 entries)

SEQ ID NO: 7301 - DNA, 18 bp, Artificial Sequence
  Synthetic: FXN 3 reverse 9:69037286-69037308; As/LbCpf1
ctttattttcttcttctt

SEQ ID NO: 7302 - DNA, 19 bp, Artificial Sequence
  Synthetic: FXN 3 reverse 9:69037286-69037309; As/LbCpf1
ctttattttcttcttcttc

SEQ ID NO: 7303 - DNA, 20 bp, Artificial Sequence
  Synthetic: FXN 3 reverse 9:69037286-69037310; As/LbCpf1
ctttattttcttcttcttct

SEQ ID NO: 7304 - DNA, 21 bp, Artificial Sequence
  Synthetic: FXN 3 reverse 9:69037286-69037311; As/LbCpf1
ctttattttcttcttcttctt

SEQ ID NO: 7305 - DNA, 22 bp, Artificial Sequence
  Synthetic: FXN 3 reverse 9:69037286-69037312; As/LbCpf1
ctttattttcttcttcttcttc

SEQ ID NO: 7306 - DNA, 23 bp, Artificial Sequence
  Synthetic: FXN 3 reverse 9:69037286-69037313; As/LbCpf1
ctttattttcttcttcttcttct

SEQ ID NO: 7307 - DNA, 24 bp, Artificial Sequence
  Synthetic: FXN 3 reverse 9:69037286-69037314; As/LbCpf1
ctttattttcttcttcttcttctt

SEQ ID NO: 7308 - DNA, 25 bp, Artificial Sequence
  Synthetic: FXN 3 reverse 9:69037286-69037315; As/LbCpf1
ctttattttcttcttcttcttcttc

SEQ ID NO: 7309 - DNA, 18 bp, Artificial Sequence
  Synthetic: FXN 3 reverse 9:69037438-69037460; As/LbCpf1
agacggagtcttgctctg

SEQ ID NO: 7310 - DNA, 19 bp, Artificial Sequence
  Synthetic: FXN 3 reverse 9:69037438-69037461; As/LbCpf1
agacggagtcttgctctgt

SEQ ID NO: 7311 - DNA, 20 bp, Artificial Sequence
  Synthetic: FXN 3 reverse 9:69037438-69037462; As/LbCpf1
agacggagtcttgctctgtc

SEQ ID NO: 7312 - DNA, 21 bp, Artificial Sequence
  Synthetic: FXN 3 reverse 9:69037438-69037463; As/LbCpf1
agacggagtcttgctctgtcg

SEQ ID NO: 7313 - DNA, 22 bp, Artificial Sequence
  Synthetic: FXN 3 reverse 9:69037438-69037464; As/LbCpf1
agacggagtcttgctctgtcgc

SEQ ID NO: 7314 - DNA, 23 bp, Artificial Sequence
  Synthetic: FXN 3 reverse 9:69037438-69037465; As/LbCpf1
agacggagtcttgctctgtcgcc

SEQ ID NO: 7315 - DNA, 24 bp, Artificial Sequence
  Synthetic: FXN 3 reverse 9:69037438-69037466; As/LbCpf1
agacggagtcttgctctgtcgccc

SEQ ID NO: 7316 - DNA, 25 bp, Artificial Sequence
  Synthetic: FXN 3 reverse 9:69037438-69037467; As/LbCpf1
agacggagtcttgctctgtcgccca

SEQ ID NO: 7317 - DNA, 18 bp, Artificial Sequence
  Synthetic: FXN 3 reverse 9:69037439-69037461; As/LbCpf1
gagacggagtcttgctct

SEQ ID NO: 7318 - DNA, 19 bp, Artificial Sequence
  Synthetic: FXN 3 reverse 9:69037439-69037462; As/LbCpf1
gagacggagtcttgctctg

SEQ ID NO: 7319 - DNA, 20 bp, Artificial Sequence
  Synthetic: FXN 3 reverse 9:69037439-69037463; As/LbCpf1
gagacggagtcttgctctgt

SEQ ID NO: 7320 - DNA, 21 bp, Artificial Sequence
  Synthetic: FXN 3 reverse 9:69037439-69037464; As/LbCpf1
gagacggagtcttgctctgtc

SEQ ID NO: 7321 - DNA, 22 bp, Artificial Sequence
  Synthetic: FXN 3 reverse 9:69037439-69037465; As/LbCpf1
gagacggagtcttgctctgtcg

SEQ ID NO: 7322 - DNA, 23 bp, Artificial Sequence
  Synthetic: FXN 3 reverse 9:69037439-69037466; As/LbCpf1
gagacggagtcttgctctgtcgc

SEQ ID NO: 7323 - DNA, 24 bp, Artificial Sequence
  Synthetic: FXN 3 reverse 9:69037439-69037467; As/LbCpf1
gagacggagtcttgctctgtcgcc

SEQ ID NO: 7324 - DNA, 25 bp, Artificial Sequence
  Synthetic: FXN 3 reverse 9:69037439-69037468; As/LbCpf1
gagacggagtcttgctctgtcgccc

SEQ ID NO: 7325 - DNA, 18 bp, Artificial Sequence
  Synthetic: FXN 3 reverse 9:69037440-69037462; As/LbCpf1
tgagacggagtcttgctc

SEQ ID NO: 7326 - DNA, 19 bp, Artificial Sequence
  Synthetic: FXN 3 reverse 9:69037440-69037463; As/LbCpf1
tgagacggagtcttgctct

SEQ ID NO: 7327 - DNA, 20 bp, Artificial Sequence
  Synthetic: FXN 3 reverse 9:69037440-69037464; As/LbCpf1
tgagacggagtcttgctctg

SEQ ID NO: 7328 - DNA, 21 bp, Artificial Sequence
  Synthetic: FXN 3 reverse 9:69037440-69037465; As/LbCpf1
tgagacggagtcttgctctgt

SEQ ID NO: 7329 - DNA, 22 bp, Artificial Sequence
  Synthetic: FXN 3 reverse 9:69037440-69037466; As/LbCpf1
tgagacggagtcttgctctgtc

SEQ ID NO: 7330 - DNA, 23 bp, Artificial Sequence
  Synthetic: FXN 3 reverse 9:69037440-69037467; As/LbCpf1
tgagacggagtcttgctctgtcg

SEQ ID NO: 7331 - DNA, 24 bp, Artificial Sequence
  Synthetic: FXN 3 reverse 9:69037440-69037468; As/LbCpf1
tgagacggagtcttgctctgtcgc

SEQ ID NO: 7332 - DNA, 25 bp, Artificial Sequence
  Synthetic: FXN 3 reverse 9:69037440-69037469; As/LbCpf1
tgagacggagtcttgctctgtcgcc

SEQ ID NO: 7333 - DNA, 18 bp, Artificial Sequence
  Synthetic: FXN 3 reverse 9:69037441-69037463; As/LbCpf1
ttgagacggagtcttgct

SEQ ID NO: 7334 - DNA, 19 bp, Artificial Sequence
  Synthetic: FXN 3 reverse 9:69037441-69037464; As/LbCpf1
ttgagacggagtcttgctc

SEQ ID NO: 7335 - DNA, 20 bp, Artificial Sequence
  Synthetic: FXN 3 reverse 9:69037441-69037465; As/LbCpf1
ttgagacggagtcttgctct

SEQ ID NO: 7336 - DNA, 21 bp, Artificial Sequence
  Synthetic: FXN 3 reverse 9:69037441-69037466; As/LbCpf1
ttgagacggagtcttgctctg

SEQ ID NO: 7337 - DNA, 22 bp, Artificial Sequence
  Synthetic: FXN 3 reverse 9:69037441-69037467; As/LbCpf1
ttgagacggagtcttgctctgt

SEQ ID NO: 7338 - DNA, 23 bp, Artificial Sequence
  Synthetic: FXN 3 reverse 9:69037441-69037468; As/LbCpf1
ttgagacggagtcttgctctgtc

SEQ ID NO: 7339 - DNA, 24 bp, Artificial Sequence
  Synthetic: FXN 3 reverse 9:69037441-69037469; As/LbCpf1
ttgagacggagtcttgctctgtcg

SEQ ID NO: 7340 - DNA, 25 bp, Artificial Sequence
  Synthetic: FXN 3 reverse 9:69037441-69037470; As/LbCpf1
ttgagacggagtcttgctctgtcgc

SEQ ID NO: 7341 - DNA, 18 bp, Artificial Sequence
  Synthetic: FXN 3 reverse 9:69037454-69037476; As/LbCpf1
ttattattattttttgag

SEQ ID NO: 7342 - DNA, 19 bp, Artificial Sequence
  Synthetic: FXN 3 reverse 9:69037454-69037477; As/LbCpf1
ttattattattttttgaga

SEQ ID NO: 7343 - DNA, 20 bp, Artificial Sequence
  Synthetic: FXN 3 reverse 9:69037454-69037478; As/LbCpf1
ttattattattttttgagac

SEQ ID NO: 7344 - DNA, 21 bp, Artificial Sequence
  Synthetic: FXN 3 reverse 9:69037454-69037479; As/LbCpf1
ttattattattttttgagacg

SEQ ID NO: 7345 - DNA, 22 bp, Artificial Sequence
  Synthetic: FXN 3 reverse 9:69037454-69037480; As/LbCpf1
ttattattattttttgagacgg

SEQ ID NO: 7346 - DNA, 23 bp, Artificial Sequence
  Synthetic: FXN 3 reverse 9:69037454-69037481; As/LbCpf1
ttattattattttttgagacgga

SEQ ID NO: 7347 - DNA, 24 bp, Artificial Sequence
  Synthetic: FXN 3 reverse 9:69037454-69037482; As/LbCpf1
ttattattattttttgagacggag

SEQ ID NO: 7348 - DNA, 25 bp, Artificial Sequence
  Synthetic: FXN 3 reverse 9:69037454-69037483; As/LbCpf1
ttattattattttttgagacggagt

SEQ ID NO: 7349 - DNA, 18 bp, Artificial Sequence
  Synthetic: FXN 3 reverse 9:69037458-69037480; As/LbCpf1
tttattattattattttt

SEQ ID NO: 7350 - DNA, 19 bp, Artificial Sequence
  Synthetic: FXN 3 reverse 9:69037458-69037481; As/LbCpf1
tttattattattatttttt

SEQ ID NO: 7351 - DNA, 20 bp, Artificial Sequence
  Synthetic: FXN 3 reverse 9:69037458-69037482; As/LbCpf1
tttattattattattttttg

SEQ ID NO: 7352 - DNA, 21 bp, Artificial Sequence
  Synthetic: FXN 3 reverse 9:69037458-69037483; As/LbCpf1
tttattattattattttttga

SEQ ID NO: 7353 - DNA, 22 bp, Artificial Sequence
  Synthetic: FXN 3 reverse 9:69037458-69037484; As/LbCpf1
tttattattattattttttgag

SEQ ID NO: 7354 - DNA, 23 bp, Artificial Sequence
  Synthetic: FXN 3 reverse 9:69037458-69037485; As/LbCpf1
tttattattattattttttgaga

SEQ ID NO: 7355 - DNA, 24 bp, Artificial Sequence
  Synthetic: FXN 3 reverse 9:69037458-69037486; As/LbCpf1
tttattattattattttttgagac

SEQ ID NO: 7356 - DNA, 25 bp, Artificial Sequence
  Synthetic: FXN 3 reverse 9:69037458-69037487; As/LbCpf1
tttattattattattttttgagacg

SEQ ID NO: 7357 - DNA, 18 bp, Artificial Sequence
  Synthetic: FXN 3 reverse 9:69037459-69037481; As/LbCpf1
atttattattattatttt

SEQ ID NO: 7358 - DNA, 19 bp, Artificial Sequence
  Synthetic: FXN 3 reverse 9:69037459-69037482; As/LbCpf1
atttattattattattttt

SEQ ID NO: 7359 - DNA, 20 bp, Artificial Sequence
  Synthetic: FXN 3 reverse 9:69037459-69037483; As/LbCpf1
atttattattattatttttt

SEQ ID NO: 7360 - DNA, 21 bp, Artificial Sequence
  Synthetic: FXN 3 reverse 9:69037459-69037484; As/LbCpf1
atttattattattattttttg

SEQ ID NO: 7361 - DNA, 22 bp, Artificial Sequence
  Synthetic: FXN 3 reverse 9:69037459-69037485; As/LbCpf1
atttattattattattttttga

SEQ ID NO: 7362 - DNA, 23 bp, Artificial Sequence
  Synthetic: FXN 3 reverse 9:69037459-69037486; As/LbCpf1
atttattattattattttttgag

SEQ ID NO: 7363 - DNA, 24 bp, Artificial Sequence
  Synthetic: FXN 3 reverse 9:69037459-69037487; As/LbCpf1
atttattattattattttttgaga

SEQ ID NO: 7364 - DNA, 25 bp, Artificial Sequence
  Synthetic: FXN 3 reverse 9:69037459-69037488; As/LbCpf1
atttattattattattttttgagac

SEQ ID NO: 7365 - DNA, 18 bp, Artificial Sequence
  Synthetic: FXN 3 reverse 9:69037460-69037482; As/LbCpf1
tatttattattattattt

SEQ ID NO: 7366 - DNA, 19 bp, Artificial Sequence
  Synthetic: FXN 3 reverse 9:69037460-69037483; As/LbCpf1
tatttattattattatttt

SEQ ID NO: 7367 - DNA, 20 bp, Artificial Sequence
  Synthetic: FXN 3 reverse 9:69037460-69037484; As/LbCpf1
tatttattattattattttt

SEQ ID NO: 7368 - DNA, 21 bp, Artificial Sequence
  Synthetic: FXN 3 reverse 9:69037460-69037485; As/LbCpf1
tatttattattattatttttt

SEQ ID NO: 7369 - DNA, 22 bp, Artificial Sequence
  Synthetic: FXN 3 reverse 9:69037460-69037486; As/LbCpf1
tatttattattattattttttg

SEQ ID NO: 7370 - DNA, 23 bp, Artificial Sequence
  Synthetic: FXN 3 reverse 9:69037460-69037487; As/LbCpf1
tatttattattattattttttga

SEQ ID NO: 7371 - DNA, 24 bp, Artificial Sequence
  Synthetic: FXN 3 reverse 9:69037460-69037488; As/LbCpf1
tatttattattattattttttgag

SEQ ID NO: 7372 - DNA, 25 bp, Artificial Sequence
  Synthetic: FXN 3 reverse 9:69037460-69037489; As/LbCpf1
tatttattattattattttttgaga

SEQ ID NO: 7373 - DNA, 18 bp, Artificial Sequence
  Synthetic: FXN 3 reverse 9:69037464-69037486; As/LbCpf1
tttttatttattattatt

SEQ ID NO: 7374 - DNA, 19 bp, Artificial Sequence
  Synthetic: FXN 3 reverse 9:69037464-69037487; As/LbCpf1
tttttatttattattatta

SEQ ID NO: 7375 - DNA, 20 bp, Artificial Sequence
  Synthetic: FXN 3 reverse 9:69037464-69037488; As/LbCpf1
tttttatttattattattat

SEQ ID NO: 7376 - DNA, 21 bp, Artificial Sequence
  Synthetic: FXN 3 reverse 9:69037464-69037489; As/LbCpf1
tttttatttattattattatt

SEQ ID NO: 7377 - DNA, 22 bp, Artificial Sequence
  Synthetic: FXN 3 reverse 9:69037464-69037490; As/LbCpf1
tttttatttattattattattt

SEQ ID NO: 7378 - DNA, 23 bp, Artificial Sequence
  Synthetic: FXN 3 reverse 9:69037464-69037491; As/LbCpf1
tttttatttattattattatttt

SEQ ID NO: 7379 - DNA, 24 bp, Artificial Sequence
  Synthetic: FXN 3 reverse 9:69037464-69037492; As/LbCpf1
tttttatttattattattattttt

SEQ ID NO: 7380 - DNA, 25 bp, Artificial Sequence
  Synthetic: FXN 3 reverse 9:69037464-69037493; As/LbCpf1
tttttatttattattattatttttt

SEQ ID NO: 7381 - DNA, 18 bp, Artificial Sequence
  Synthetic: FXN 3 reverse 9:69037465-69037487; As/LbCpf1
atttttatttattattat

SEQ ID NO: 7382 - DNA, 19 bp, Artificial Sequence
  Synthetic: FXN 3 reverse 9:69037465-69037488; As/LbCpf1
atttttatttattattatt

SEQ ID NO: 7383 - DNA, 20 bp, Artificial Sequence
  Synthetic: FXN 3 reverse 9:69037465-69037489; As/LbCpf1
atttttatttattattatta

SEQ ID NO: 7384 - DNA, 21 bp, Artificial Sequence
  Synthetic: FXN 3 reverse 9:69037465-69037490; As/LbCpf1
atttttatttattattattat

SEQ ID NO: 7385 - DNA, 22 bp, Artificial Sequence
  Synthetic: FXN 3 reverse 9:69037465-69037491; As/LbCpf1
atttttatttattattattatt

SEQ ID NO: 7386 - DNA, 23 bp, Artificial Sequence
  Synthetic: FXN 3 reverse 9:69037465-69037492; As/LbCpf1
atttttatttattattattattt

SEQ ID NO: 7387 - DNA, 24 bp, Artificial Sequence
  Synthetic: FXN 3 reverse 9:69037465-69037493; As/LbCpf1
atttttatttattattattatttt

SEQ ID NO: 7388 - DNA, 25 bp, Artificial Sequence
  Synthetic: FXN 3 reverse 9:69037465-69037494; As/LbCpf1
atttttatttattattattattttt

SEQ ID NO: 7389 - DNA, 18 bp, Artificial Sequence
  Synthetic: FXN 3 reverse 9:69037466-69037488; As/LbCpf1
tatttttatttattatta

SEQ ID NO: 7390 - DNA, 19 bp, Artificial Sequence
  Synthetic: FXN 3 reverse 9:69037466-69037489; As/LbCpf1
tatttttatttattattat

SEQ ID NO: 7391 - DNA, 20 bp, Artificial Sequence
  Synthetic: FXN 3 reverse 9:69037466-69037490; As/LbCpf1
tatttttatttattattatt

SEQ ID NO: 7392 - DNA, 21 bp, Artificial Sequence
  Synthetic: FXN 3 reverse 9:69037466-69037491; As/LbCpf1
tatttttatttattattatta

SEQ ID NO: 7393 - DNA, 22 bp, Artificial Sequence
  Synthetic: FXN 3 reverse 9:69037466-69037492; As/LbCpf1
tatttttatttattattattat

SEQ ID NO: 7394 - DNA, 23 bp, Artificial Sequence
  Synthetic: FXN 3 reverse 9:69037466-69037493; As/LbCpf1
tatttttatttattattattatt

SEQ ID NO: 7395 - DNA, 24 bp, Artificial Sequence
  Synthetic: FXN 3 reverse 9:69037466-69037494; As/LbCpf1
tatttttatttattattattattt

SEQ ID NO: 7396 - DNA, 25 bp, Artificial Sequence
  Synthetic: FXN 3 reverse 9:69037466-69037495; As/LbCpf1
tatttttatttattattattatttt

SEQ ID NO: 7397 - DNA, 18 bp, Artificial Sequence
  Synthetic: FXN 3 reverse 9:69037467-69037489; As/LbCpf1
ttatttttatttattatt

SEQ ID NO: 7398 - DNA, 19 bp, Artificial Sequence
  Synthetic: FXN 3 reverse 9:69037467-69037490; As/LbCpf1
ttatttttatttattatta

SEQ ID NO: 7399 - DNA, 20 bp, Artificial Sequence
  Synthetic: FXN 3 reverse 9:69037467-69037491; As/LbCpf1
ttatttttatttattattat

SEQ ID NO: 7400 - DNA, 21 bp, Artificial Sequence
  Synthetic: FXN 3 reverse 9:69037467-69037492; As/LbCpf1
ttatttttatttattattatt

SEQ ID NO: 7401 - DNA, 22 bp, Artificial Sequence
  Synthetic: FXN 3 reverse 9:69037467-69037493; As/LbCpf1
ttatttttatttattattatta

SEQ ID NO: 7402 - DNA, 23 bp, Artificial Sequence
  Synthetic: FXN 3 reverse 9:69037467-69037494; As/LbCpf1
ttatttttatttattattattat

SEQ ID NO: 7403 - DNA, 24 bp, Artificial Sequence
  Synthetic: FXN 3 reverse 9:69037467-69037495; As/LbCpf1
ttatttttatttattattattatt

SEQ ID NO: 7404 - DNA, 25 bp, Artificial Sequence
  Synthetic: FXN 3 reverse 9:69037467-69037496; As/LbCpf1
ttatttttatttattattattattt

SEQ ID NO: 7405 - DNA, 18 bp, Artificial Sequence
  Synthetic: FXN 3 reverse 9:69037471-69037493; As/LbCpf1
ttttttatttttatttat

SEQ ID NO: 7406 - DNA, 19 bp, Artificial Sequence
  Synthetic: FXN 3 reverse 9:69037471-69037494; As/LbCpf1
ttttttatttttatttatt

SEQ ID NO: 7407 - DNA, 20 bp, Artificial Sequence
  Synthetic: FXN 3 reverse 9:69037471-69037495; As/LbCpf1
ttttttatttttatttatta

SEQ ID NO: 7408 - DNA, 21 bp, Artificial Sequence
  Synthetic: FXN 3 reverse 9:69037471-69037496; As/LbCpf1
ttttttatttttatttattat

SEQ ID NO: 7409 - DNA, 22 bp, Artificial Sequence
  Synthetic: FXN 3 reverse 9:69037471-69037497; As/LbCpf1
ttttttatttttatttattatt

SEQ ID NO: 7410 - DNA, 23 bp, Artificial Sequence
  Synthetic: FXN 3 reverse 9:69037471-69037498; As/LbCpf1
ttttttatttttatttattatta

SEQ ID NO: 7411 - DNA, 24 bp, Artificial Sequence
  Synthetic: FXN 3 reverse 9:69037471-69037499; As/LbCpf1
ttttttatttttatttattattat

SEQ ID NO: 7412 - DNA, 25 bp, Artificial Sequence
  Synthetic: FXN 3 reverse 9:69037471-69037500; As/LbCpf1
ttttttatttttatttattattatt

SEQ ID NO: 7413 - DNA, 18 bp, Artificial Sequence
  Synthetic: FXN 3 reverse 9:69037472-69037494; As/LbCpf1
attttttatttttattta

SEQ ID NO: 7414 - DNA, 19 bp, Artificial Sequence
  Synthetic: FXN 3 reverse 9:69037472-69037495; As/LbCpf1
attttttatttttatttat

SEQ ID NO: 7415 - DNA, 20 bp, Artificial Sequence
  Synthetic: FXN 3 reverse 9:69037472-69037496; As/LbCpf1
attttttatttttatttatt

SEQ ID NO: 7416 - DNA, 21 bp, Artificial Sequence
  Synthetic: FXN 3 reverse 9:69037472-69037497; As/LbCpf1
attttttatttttatttatta

SEQ ID NO: 7417 - DNA, 22 bp, Artificial Sequence
  Synthetic: FXN 3 reverse 9:69037472-69037498; As/LbCpf1
attttttatttttatttattat

SEQ ID NO: 7418 - DNA, 23 bp, Artificial Sequence
  Synthetic: FXN 3 reverse 9:69037472-69037499; As/LbCpf1
attttttatttttatttattatt

SEQ ID NO: 7419 - DNA, 24 bp, Artificial Sequence
  Synthetic: FXN 3 reverse 9:69037472-69037500; As/LbCpf1
attttttatttttatttattatta

SEQ ID NO: 7420 - DNA, 25 bp, Artificial Sequence
  Synthetic: FXN 3 reverse 9:69037472-69037501; As/LbCpf1
attttttatttttatttattattat

SEQ ID NO: 7421 - DNA, 18 bp, Artificial Sequence
  Synthetic: FXN 3 reverse 9:69037496-69037518; As/LbCpf1
cagagatgctgggaaatc

SEQ ID NO: 7422 - DNA, 19 bp, Artificial Sequence
  Synthetic: FXN 3 reverse 9:69037496-69037519; As/LbCpf1
cagagatgctgggaaatcc

SEQ ID NO: 7423 - DNA, 20 bp, Artificial Sequence
  Synthetic: FXN 3 reverse 9:69037496-69037520; As/LbCpf1
cagagatgctgggaaatcca

SEQ ID NO: 7424 - DNA, 21 bp, Artificial Sequence
  Synthetic: FXN 3 reverse 9:69037496-69037521; As/LbCpf1
cagagatgctgggaaatccat

SEQ ID NO: 7425 - DNA, 22 bp, Artificial Sequence
  Synthetic: FXN 3 reverse 9:69037496-69037522; As/LbCpf1
cagagatgctgggaaatccatt

SEQ ID NO: 7426 - DNA, 23 bp, Artificial Sequence
  Synthetic: FXN 3 reverse 9:69037496-69037523; As/LbCpf1
cagagatgctgggaaatccattt

SEQ ID NO: 7427 - DNA, 24 bp, Artificial Sequence
  Synthetic: FXN 3 reverse 9:69037496-69037524; As/LbCpf1
cagagatgctgggaaatccatttt

SEQ ID NO: 7428 - DNA, 25 bp, Artificial Sequence
  Synthetic: FXN 3 reverse 9:69037496-69037525; As/LbCpf1
cagagatgctgggaaatccatttta

SEQ ID NO: 7429 - DNA, 18 bp, Artificial Sequence
  Synthetic: FXN 3 reverse 9:69037497-69037519; As/LbCpf1
ccagagatgctgggaaat

SEQ ID NO: 7430 - DNA, 19 bp, Artificial Sequence
  Synthetic: FXN 3 reverse 9:69037497-69037520; As/LbCpf1
ccagagatgctgggaaatc

SEQ ID NO: 7431 - DNA, 20 bp, Artificial Sequence
  Synthetic: FXN 3 reverse 9:69037497-69037521; As/LbCpf1
ccagagatgctgggaaatcc

SEQ ID NO: 7432 - DNA, 21 bp, Artificial Sequence
  Synthetic: FXN 3 reverse 9:69037497-69037522; As/LbCpf1
ccagagatgctgggaaatcca

SEQ ID NO: 7433 - DNA, 22 bp, Artificial Sequence
  Synthetic: FXN 3 reverse 9:69037497-69037523; As/LbCpf1
ccagagatgctgggaaatccat

SEQ ID NO: 7434 - DNA, 23 bp, Artificial Sequence
  Synthetic: FXN 3 reverse 9:69037497-69037524; As/LbCpf1
ccagagatgctgggaaatccatt

SEQ ID NO: 7435 - DNA, 24 bp, Artificial Sequence
  Synthetic: FXN 3 reverse 9:69037497-69037525; As/LbCpf1
ccagagatgctgggaaatccattt

SEQ ID NO: 7436 - DNA, 25 bp, Artificial Sequence
  Synthetic: FXN 3 reverse 9:69037497-69037526; As/LbCpf1
ccagagatgctgggaaatccatttt

SEQ ID NO: 7437 - DNA, 18 bp, Artificial Sequence
  Synthetic: FXN 3 reverse 9:69037498-69037520; As/LbCpf1
tccagagatgctgggaaa

SEQ ID NO: 7438 - DNA, 19 bp, Artificial Sequence
  Synthetic: FXN 3 reverse 9:69037498-69037521; As/LbCpf1
tccagagatgctgggaaat

SEQ ID NO: 7439 - DNA, 20 bp, Artificial Sequence
  Synthetic: FXN 3 reverse 9:69037498-69037522; As/LbCpf1
tccagagatgctgggaaatc

SEQ ID NO: 7440 - DNA, 21 bp, Artificial Sequence
  Synthetic: FXN 3 reverse 9:69037498-69037523; As/LbCpf1
tccagagatgctgggaaatcc

SEQ ID NO: 7441 - DNA, 22 bp, Artificial Sequence
  Synthetic: FXN 3 reverse 9:69037498-69037524; As/LbCpf1
tccagagatgctgggaaatcca

SEQ ID NO: 7442 - DNA, 23 bp, Artificial Sequence
  Synthetic: FXN 3 reverse 9:69037498-69037525; As/LbCpf1
tccagagatgctgggaaatccat

SEQ ID NO: 7443 - DNA, 24 bp, Artificial Sequence
  Synthetic: FXN 3 reverse 9:69037498-69037526; As/LbCpf1
tccagagatgctgggaaatccatt

SEQ ID NO: 7444 - DNA, 25 bp, Artificial Sequence
  Synthetic: FXN 3 reverse 9:69037498-69037527; As/LbCpf1
tccagagatgctgggaaatccattt

SEQ ID NO: 7445 - DNA, 18 bp, Artificial Sequence
  Synthetic: FXN 3 forward 9:69037505-69037527; As/LbCpf1
ccagcatctctggaaaaa

SEQ ID NO: 7446 - DNA, 19 bp, Artificial Sequence
  Synthetic: FXN 3 forward 9:69037505-69037528; As/LbCpf1
ccagcatctctggaaaaat

SEQ ID NO: 7447 - DNA, 20 bp, Artificial Sequence
  Synthetic: FXN 3 forward 9:69037505-69037529; As/LbCpf1
ccagcatctctggaaaaata

SEQ ID NO: 7448 - DNA, 21 bp, Artificial Sequence
  Synthetic: FXN 3 forward 9:69037505-69037530; As/LbCpf1
ccagcatctctggaaaaatag

SEQ ID NO: 7449 - DNA, 22 bp, Artificial Sequence
  Synthetic: FXN 3 forward 9:69037505-69037531; As/LbCpf1
ccagcatctctggaaaaatagg

SEQ ID NO: 7450 - DNA, 23 bp, Artificial Sequence
  Synthetic: FXN 3 forward 9:69037505-69037532; As/LbCpf1
ccagcatctctggaaaaataggc

SEQ ID NO: 7451 - DNA, 24 bp, Artificial Sequence
  Synthetic: FXN 3 forward 9:69037505-69037533; As/LbCpf1
ccagcatctctggaaaaataggca

SEQ ID NO: 7452 - DNA, 25 bp, Artificial Sequence
  Synthetic: FXN 3 forward 9:69037505-69037534; As/LbCpf1
ccagcatctctggaaaaataggcaa

SEQ ID NO: 7453 - DNA, 18 bp, Artificial Sequence
  Synthetic: FXN 3 reverse 9:69037542-69037564; As/LbCpf1
ctagaggagatctaagga

SEQ ID NO: 7454 - DNA, 19 bp, Artificial Sequence
  Synthetic: FXN 3 reverse 9:69037542-69037565; As/LbCpf1
ctagaggagatctaaggac

SEQ ID NO: 7455 - DNA, 20 bp, Artificial Sequence
  Synthetic: FXN 3 reverse 9:69037542-69037566; As/LbCpf1
ctagaggagatctaaggacc

SEQ ID NO: 7456 - DNA, 21 bp, Artificial Sequence
  Synthetic: FXN 3 reverse 9:69037542-69037567; As/LbCpf1
ctagaggagatctaaggacca

SEQ ID NO: 7457 - DNA, 22 bp, Artificial Sequence
  Synthetic: FXN 3 reverse 9:69037542-69037568; As/LbCpf1
ctagaggagatctaaggaccat

SEQ ID NO: 7458 - DNA, 23 bp, Artificial Sequence
  Synthetic: FXN 3 reverse 9:69037542-69037569; As/LbCpf1
ctagaggagatctaaggaccatc

SEQ ID NO: 7459 - DNA, 24 bp, Artificial Sequence
  Synthetic: FXN 3 reverse 9:69037542-69037570; As/LbCpf1
ctagaggagatctaaggaccatca

SEQ ID NO: 7460 - DNA, 25 bp, Artificial Sequence
  Synthetic: FXN 3 reverse 9:69037542-69037571; As/LbCpf1
ctagaggagatctaaggaccatcat

SEQ ID NO: 7461 - DNA, 18 bp, Artificial Sequence
  Synthetic: FXN 3 forward 9:69037578-69037600; As/LbCpf1
ttacttggcttctgtgca

SEQ ID NO: 7462 - DNA, 19 bp, Artificial Sequence
  Synthetic: FXN 3 forward 9:69037578-69037601; As/LbCpf1
ttacttggcttctgtgcac

SEQ ID NO: 7463 - DNA, 20 bp, Artificial Sequence
  Synthetic: FXN 3 forward 9:69037578-69037602; As/LbCpf1
ttacttggcttctgtgcact

SEQ ID NO: 7464 - DNA, 21 bp, Artificial Sequence
  Synthetic: FXN 3 forward 9:69037578-69037603; As/LbCpf1
ttacttggcttctgtgcacta

SEQ ID NO: 7465 - DNA, 22 bp, Artificial Sequence
  Synthetic: FXN 3 forward 9:69037578-69037604; As/LbCpf1
ttacttggcttctgtgcactat

SEQ ID NO: 7466 - DNA, 23 bp, Artificial Sequence
  Synthetic: FXN 3 forward 9:69037578-69037605; As/LbCpf1
ttacttggcttctgtgcactatc

SEQ ID NO: 7467 - DNA, 24 bp, Artificial Sequence
  Synthetic: FXN 3 forward 9:69037578-69037606; As/LbCpf1
ttacttggcttctgtgcactatct

SEQ ID NO: 7468 - DNA, 25 bp, Artificial Sequence
  Synthetic: FXN 3 forward 9:69037578-69037607; As/LbCpf1
ttacttggcttctgtgcactatctg

SEQ ID NO: 7469 - DNA, 18 bp, Artificial Sequence
  Synthetic: FXN 3 forward 9:69037672-69037694; As/LbCpf1
gttttgtttttttgagac

SEQ ID NO: 7470 - DNA, 19 bp, Artificial Sequence
  Synthetic: FXN 3 forward 9:69037672-69037695; As/LbCpf1
gttttgtttttttgagaca

SEQ ID NO: 7471 - DNA, 20 bp, Artificial Sequence
  Synthetic: FXN 3 forward 9:69037672-69037696; As/LbCpf1
gttttgtttttttgagacag

SEQ ID NO: 7472 - DNA, 21 bp, Artificial Sequence
  Synthetic: FXN 3 forward 9:69037672-69037697; As/LbCpf1
gttttgtttttttgagacaga

SEQ ID NO: 7473 - DNA, 22 bp, Artificial Sequence
  Synthetic: FXN 3 forward 9:69037672-69037698; As/LbCpf1
gttttgtttttttgagacagag

SEQ ID NO: 7474 - DNA, 23 bp, Artificial Sequence
  Synthetic: FXN 3 forward 9:69037672-69037699; As/LbCpf1
gttttgtttttttgagacagagt

SEQ ID NO: 7475 - DNA, 24 bp, Artificial Sequence
  Synthetic: FXN 3 forward 9:69037672-69037700; As/LbCpf1
gttttgtttttttgagacagagtt

SEQ ID NO: 7476 - DNA, 25 bp, Artificial Sequence
  Synthetic: FXN 3 forward 9:69037672-69037701; As/LbCpf1
gttttgtttttttgagacagagttt

SEQ ID NO: 7477 - DNA, 18 bp, Artificial Sequence
  Synthetic: FXN 3 forward 9:69037673-69037695; As/LbCpf1
ttttgtttttttgagaca

SEQ ID NO: 7478 - DNA, 19 bp, Artificial Sequence
  Synthetic: FXN 3 forward 9:69037673-69037696; As/LbCpf1
ttttgtttttttgagacag

SEQ ID NO: 7479 - DNA, 20 bp, Artificial Sequence
  Synthetic: FXN 3 forward 9:69037673-69037697; As/LbCpf1
ttttgtttttttgagacaga

SEQ ID NO: 7480 - DNA, 21 bp, Artificial Sequence
  Synthetic: FXN 3 forward 9:69037673-69037698; As/LbCpf1
ttttgtttttttgagacagag

SEQ ID NO: 7481 - DNA, 22 bp, Artificial Sequence
  Synthetic: FXN 3 forward 9:69037673-69037699; As/LbCpf1
ttttgtttttttgagacagagt

SEQ ID NO: 7482 - DNA, 23 bp, Artificial Sequence
  Synthetic: FXN 3 forward 9:69037673-69037700; As/LbCpf1
ttttgtttttttgagacagagtt

SEQ ID NO: 7483 - DNA, 24 bp, Artificial Sequence
  Synthetic: FXN 3 forward 9:69037673-69037701; As/LbCpf1
ttttgtttttttgagacagagttt

SEQ ID NO: 7484 - DNA, 25 bp, Artificial Sequence
  Synthetic: FXN 3 forward 9:69037673-69037702; As/LbCpf1
ttttgtttttttgagacagagtttc

SEQ ID NO: 7485 - DNA, 18 bp, Artificial Sequence
  Synthetic: FXN 3 forward 9:69037677-69037699; As/LbCpf1
gtttttttgagacagagt

SEQ ID NO: 7486 - DNA, 19 bp, Artificial Sequence
  Synthetic: FXN 3 forward 9:69037677-69037700; As/LbCpf1
gtttttttgagacagagtt

SEQ ID NO: 7487 - DNA, 20 bp, Artificial Sequence
  Synthetic: FXN 3 forward 9:69037677-69037701; As/LbCpf1
gtttttttgagacagagttt

SEQ ID NO: 7488 - DNA, 21 bp, Artificial Sequence
  Synthetic: FXN 3 forward 9:69037677-69037702; As/LbCpf1
gtttttttgagacagagtttc

SEQ ID NO: 7489 - DNA, 22 bp, Artificial Sequence
  Synthetic: FXN 3 forward 9:69037677-69037703; As/LbCpf1
gtttttttgagacagagtttcc

SEQ ID NO: 7490 - DNA, 23 bp, Artificial Sequence
  Synthetic: FXN 3 forward 9:69037677-69037704; As/LbCpf1
gtttttttgagacagagtttccc

SEQ ID NO: 7491 - DNA, 24 bp, Artificial Sequence
  Synthetic: FXN 3 forward 9:69037677-69037705; As/LbCpf1
gtttttttgagacagagtttccct

SEQ ID NO: 7492 - DNA, 25 bp, Artificial Sequence
  Synthetic: FXN 3 forward 9:69037677-69037706; As/LbCpf1
gtttttttgagacagagtttccctc

SEQ ID NO: 7493 - DNA, 18 bp, Artificial Sequence
  Synthetic: FXN 3 forward 9:69037678-69037700; As/LbCpf1
tttttttgagacagagtt

SEQ ID NO: 7494 - DNA, 19 bp, Artificial Sequence
  Synthetic: FXN 3 forward 9:69037678-69037701; As/LbCpf1
tttttttgagacagagttt

SEQ ID NO: 7495 - DNA, 20 bp, Artificial Sequence
  Synthetic: FXN 3 forward 9:69037678-69037702; As/LbCpf1
tttttttgagacagagtttc

SEQ ID NO: 7496 - DNA, 21 bp, Artificial Sequence
  Synthetic: FXN 3 forward 9:69037678-69037703; As/LbCpf1
tttttttgagacagagtttcc

SEQ ID NO: 7497 - DNA, 22 bp, Artificial Sequence
  Synthetic: FXN 3 forward 9:69037678-69037704; As/LbCpf1
tttttttgagacagagtttccc

SEQ ID NO: 7498 - DNA, 23 bp, Artificial Sequence
  Synthetic: FXN 3 forward 9:69037678-69037705; As/LbCpf1
tttttttgagacagagtttccct

SEQ ID NO: 7499 - DNA, 24 bp, Artificial Sequence
  Synthetic: FXN 3 forward 9:69037678-69037706; As/LbCpf1
tttttttgagacagagtttccctc

SEQ ID NO: 7500 - DNA, 25 bp, Artificial Sequence
  Synthetic: FXN 3 forward 9:69037678-69037707; As/LbCpf1
tttttttgagacagagtttccctct

SEQ ID NO: 7501 - DNA, 18 bp, Artificial Sequence
  Synthetic: FXN 3 forward 9:69037682-69037704; As/LbCpf1
tttgagacagagtttccc

SEQ ID NO: 7502 - DNA, 19 bp, Artificial Sequence
  Synthetic: FXN 3 forward 9:69037682-69037705; As/LbCpf1
tttgagacagagtttccct

SEQ ID NO: 7503 - DNA, 20 bp, Artificial Sequence
  Synthetic: FXN 3 forward 9:69037682-69037706; As/LbCpf1
tttgagacagagtttccctc

SEQ ID NO: 7504 - DNA, 21 bp, Artificial Sequence
  Synthetic: FXN 3 forward 9:69037682-69037707; As/LbCpf1
tttgagacagagtttccctct

SEQ ID NO: 7505 - DNA, 22 bp, Artificial Sequence
  Synthetic: FXN 3 forward 9:69037682-69037708; As/LbCpf1
tttgagacagagtttccctctt

SEQ ID NO: 7506 - DNA, 23 bp, Artificial Sequence
  Synthetic: FXN 3 forward 9:69037682-69037709; As/LbCpf1
tttgagacagagtttccctcttg

SEQ ID NO: 7507 - DNA, 24 bp, Artificial Sequence
  Synthetic: FXN 3 forward 9:69037682-69037710; As/LbCpf1
tttgagacagagtttccctcttgt

SEQ ID NO: 7508 - DNA, 25 bp, Artificial Sequence
  Synthetic: FXN 3 forward 9:69037682-69037711; As/LbCpf1
tttgagacagagtttccctcttgtt

SEQ ID NO: 7509 - DNA, 18 bp, Artificial Sequence
  Synthetic: FXN 3 forward 9:69037683-69037705; As/LbCpf1
ttgagacagagtttccct

SEQ ID NO: 7510 - DNA, 19 bp, Artificial Sequence
  Synthetic: FXN 3 forward 9:69037683-69037706; As/LbCpf1
ttgagacagagtttccctc

SEQ ID NO: 7511 - DNA, 20 bp, Artificial Sequence
  Synthetic: FXN 3 forward 9:69037683-69037707; As/LbCpf1
ttgagacagagtttccctct

SEQ ID NO: 7512 - DNA, 21 bp, Artificial Sequence
  Synthetic: FXN 3 forward 9:69037683-69037708; As/LbCpf1
ttgagacagagtttccctctt

SEQ ID NO: 7513 - DNA, 22 bp, Artificial Sequence
  Synthetic: FXN 3 forward 9:69037683-69037709; As/LbCpf1
ttgagacagagtttccctcttg

SEQ ID NO: 7514 - DNA, 23 bp, Artificial Sequence
  Synthetic: FXN 3 forward 9:69037683-69037710; As/LbCpf1
ttgagacagagtttccctcttgt

SEQ ID NO: 7515 - DNA, 24 bp, Artificial Sequence
  Synthetic: FXN 3 forward 9:69037683-69037711; As/LbCpf1
ttgagacagagtttccctcttgtt

SEQ ID NO: 7516 - DNA, 25 bp, Artificial Sequence
  Synthetic: FXN 3 forward 9:69037683-69037712; As/LbCpf1
ttgagacagagtttccctcttgttg

SEQ ID NO: 7517 - DNA, 18 bp, Artificial Sequence
  Synthetic: FXN 3 forward 9:69037684-69037706; As/LbCpf1
tgagacagagtttccctc

SEQ ID NO: 7518 - DNA, 19 bp, Artificial Sequence
  Synthetic: FXN 3 forward 9:69037684-69037707; As/LbCpf1
tgagacagagtttccctct

SEQ ID NO: 7519 - DNA, 20 bp, Artificial Sequence
  Synthetic: FXN 3 forward 9:69037684-69037708; As/LbCpf1
tgagacagagtttccctctt

SEQ ID NO: 7520 - DNA, 21 bp, Artificial Sequence
  Synthetic: FXN 3 forward 9:69037684-69037709; As/LbCpf1
tgagacagagtttccctcttg

SEQ ID NO: 7521 - DNA, 22 bp, Artificial Sequence
  Synthetic: FXN 3 forward 9:69037684-69037710; As/LbCpf1
tgagacagagtttccctcttgt

SEQ ID NO: 7522 - DNA, 23 bp, Artificial Sequence
  Synthetic: FXN 3 forward 9:69037684-69037711; As/LbCpf1
tgagacagagtttccctcttgtt

SEQ ID NO: 7523 - DNA, 24 bp, Artificial Sequence
  Synthetic: FXN 3 forward 9:69037684-69037712; As/LbCpf1
tgagacagagtttccctcttgttg

SEQ ID NO: 7524 - DNA, 25 bp, Artificial Sequence
  Synthetic: FXN 3 forward 9:69037684-69037713; As/LbCpf1
tgagacagagtttccctcttgttgc

SEQ ID NO: 7525 - DNA, 18 bp, Artificial Sequence
  Synthetic: FXN 3 forward 9:69037685-69037707; As/LbCpf1
gagacagagtttccctct

SEQ ID NO: 7526 - DNA, 19 bp, Artificial Sequence
  Synthetic: FXN 3 forward 9:69037685-69037708; As/LbCpf1
gagacagagtttccctctt

SEQ ID NO: 7527 - DNA, 20 bp, Artificial Sequence
  Synthetic: FXN 3 forward 9:69037685-69037709; As/LbCpf1
gagacagagtttccctcttg

SEQ ID NO: 7528 - DNA, 21 bp, Artificial Sequence
  Synthetic: FXN 3 forward 9:69037685-69037710; As/LbCpf1
gagacagagtttccctcttgt

SEQ ID NO: 7529 - DNA, 22 bp, Artificial Sequence
  Synthetic: FXN 3 forward 9:69037685-69037711; As/LbCpf1
gagacagagtttccctcttgtt

SEQ ID NO: 7530 - DNA, 23 bp, Artificial Sequence
  Synthetic: FXN 3 forward 9:69037685-69037712; As/LbCpf1
gagacagagtttccctcttgttg

SEQ ID NO: 7531 - DNA, 24 bp, Artificial Sequence
  Synthetic: FXN 3 forward 9:69037685-69037713; As/LbCpf1
gagacagagtttccctcttgttgc

SEQ ID NO: 7532 - DNA, 25 bp, Artificial Sequence
  Synthetic: FXN 3 forward 9:69037685-69037714; As/LbCpf1
gagacagagtttccctcttgttgcc

SEQ ID NO: 7533 - DNA, 18 bp, Artificial Sequence
  Synthetic: FXN 3 forward 9:69037686-69037708; As/LbCpf1
agacagagtttccctctt

SEQ ID NO: 7534 - DNA, 19 bp, Artificial Sequence
  Synthetic: FXN 3 forward 9:69037686-69037709; As/LbCpf1
agacagagtttccctcttg

SEQ ID NO: 7535 - DNA, 20 bp, Artificial Sequence
  Synthetic: FXN 3 forward 9:69037686-69037710; As/LbCpf1
agacagagtttccctcttgt

SEQ ID NO: 7536 - DNA, 21 bp, Artificial Sequence
  Synthetic: FXN 3 forward 9:69037686-69037711; As/LbCpf1
agacagagtttccctcttgtt

SEQ ID NO: 7537 - DNA, 22 bp, Artificial Sequence
  Synthetic: FXN 3 forward 9:69037686-69037712; As/LbCpf1
agacagagtttccctcttgttg

SEQ ID NO: 7538 - DNA, 23 bp, Artificial Sequence
  Synthetic: FXN 3 forward 9:69037686-69037713; As/LbCpf1
agacagagtttccctcttgttgc

SEQ ID NO: 7539 - DNA, 24 bp, Artificial Sequence
  Synthetic: FXN 3 forward 9:69037686-69037714; As/LbCpf1
agacagagtttccctcttgttgcc

SEQ ID NO: 7540 - DNA, 25 bp, Artificial Sequence
  Synthetic: FXN 3 forward 9:69037686-69037715; As/LbCpf1
agacagagtttccctcttgttgccc

SEQ ID NO: 7541 - DNA, 18 bp, Artificial Sequence
  Synthetic: FXN 3 forward 9:69037698-69037720; As/LbCpf1
cctcttgttgcccaggct

SEQ ID NO: 7542 - DNA, 19 bp, Artificial Sequence
  Synthetic: FXN 3 forward 9:69037698-69037721; As/LbCpf1
cctcttgttgcccaggctg

SEQ ID NO: 7543 - DNA, 20 bp, Artificial Sequence
  Synthetic: FXN 3 forward 9:69037698-69037722; As/LbCpf1
cctcttgttgcccaggctgg

SEQ ID NO: 7544 - DNA, 21 bp, Artificial Sequence
  Synthetic: FXN 3 forward 9:69037698-69037723; As/LbCpf1
cctcttgttgcccaggctgga

SEQ ID NO: 7545 - DNA, 22 bp, Artificial Sequence
  Synthetic: FXN 3 forward 9:69037698-69037724; As/LbCpf1
cctcttgttgcccaggctggag

SEQ ID NO: 7546 - DNA, 23 bp, Artificial Sequence
  Synthetic: FXN 3 forward 9:69037698-69037725; As/LbCpf1
cctcttgttgcccaggctggagt

SEQ ID NO: 7547 - DNA, 24 bp, Artificial Sequence
  Synthetic: FXN 3 forward 9:69037698-69037726; As/LbCpf1
cctcttgttgcccaggctggagtg

SEQ ID NO: 7548 - DNA, 25 bp, Artificial Sequence
  Synthetic: FXN 3 forward 9:69037698-69037727; As/LbCpf1
cctcttgttgcccaggctggagtgc

SEQ ID NO: 7549 - DNA, 18 bp, Artificial Sequence
  Synthetic: FXN 3 forward 9:69037820-69037842; As/LbCpf1
gtatttttagtagagaca

SEQ ID NO: 7550 - DNA, 19 bp, Artificial Sequence
  Synthetic: FXN 3 forward 9:69037820-69037843; As/LbCpf1
gtatttttagtagagacag

SEQ ID NO: 7551 - DNA, 20 bp, Artificial Sequence
  Synthetic: FXN 3 forward 9:69037820-69037844; As/LbCpf1
gtatttttagtagagacaga

SEQ ID NO: 7552 - DNA, 21 bp, Artificial Sequence
  Synthetic: FXN 3 forward 9:69037820-69037845; As/LbCpf1
gtatttttagtagagacagat

SEQ ID NO: 7553 - DNA, 22 bp, Artificial Sequence
  Synthetic: FXN 3 forward 9:69037820-69037846; As/LbCpf1
gtatttttagtagagacagatt

SEQ ID NO: 7554 - DNA, 23 bp, Artificial Sequence
  Synthetic: FXN 3 forward 9:69037820-69037847; As/LbCpf1
gtatttttagtagagacagattt

SEQ ID NO: 7555 - DNA, 24 bp, Artificial Sequence
  Synthetic: FXN 3 forward 9:69037820-69037848; As/LbCpf1
gtatttttagtagagacagatttc

SEQ ID NO: 7556 - DNA, 25 bp, Artificial Sequence
  Synthetic: FXN 3 forward 9:69037820-69037849; As/LbCpf1
gtatttttagtagagacagatttct

SEQ ID NO: 7557 - DNA, 18 bp, Artificial Sequence
  Synthetic: FXN 3 forward 9:69037821-69037843; As/LbCpf1
tatttttagtagagacag

SEQ ID NO: 7558 - DNA, 19 bp, Artificial Sequence
  Synthetic: FXN 3 forward 9:69037821-69037844; As/LbCpf1
tatttttagtagagacaga

SEQ ID NO: 7559 - DNA, 20 bp, Artificial Sequence
  Synthetic: FXN 3 forward 9:69037821-69037845; As/LbCpf1
tatttttagtagagacagat

SEQ ID NO: 7560 - DNA, 21 bp, Artificial Sequence
  Synthetic: FXN 3 forward 9:69037821-69037846; As/LbCpf1
tatttttagtagagacagatt

SEQ ID NO: 7561 - DNA, 22 bp, Artificial Sequence
  Synthetic: FXN 3 forward 9:69037821-69037847; As/LbCpf1
tatttttagtagagacagattt

SEQ ID NO: 7562 - DNA, 23 bp, Artificial Sequence
  Synthetic: FXN 3 forward 9:69037821-69037848; As/LbCpf1
tatttttagtagagacagatttc

SEQ ID NO: 7563 - DNA, 24 bp, Artificial Sequence
  Synthetic: FXN 3 forward 9:69037821-69037849; As/LbCpf1
tatttttagtagagacagatttct

SEQ ID NO: 7564 - DNA, 25 bp, Artificial Sequence
  Synthetic: FXN 3 forward 9:69037821-69037850; As/LbCpf1
tatttttagtagagacagatttctc

SEQ ID NO: 7565 - DNA, 18 bp, Artificial Sequence
  Synthetic: FXN 3 forward 9:69037827-69037849; As/LbCpf1
tagtagagacagatttct

SEQ ID NO: 7566 - DNA, 19 bp, Artificial Sequence
  Synthetic: FXN 3 forward 9:69037827-69037850; As/LbCpf1
tagtagagacagatttctc

SEQ ID NO: 7567 - DNA, 20 bp, Artificial Sequence
  Synthetic: FXN 3 forward 9:69037827-69037851; As/LbCpf1
tagtagagacagatttctcc

SEQ ID NO: 7568 - DNA, 21 bp, Artificial Sequence
  Synthetic: FXN 3 forward 9:69037827-69037852; As/LbCpf1
tagtagagacagatttctcca

SEQ ID NO: 7569 - DNA, 22 bp, Artificial Sequence
  Synthetic: FXN 3 forward 9:69037827-69037853; As/LbCpf1
tagtagagacagatttctccat

SEQ ID NO: 7570 - DNA, 23 bp, Artificial Sequence
  Synthetic: FXN 3 forward 9:69037827-69037854; As/LbCpf1
tagtagagacagatttctccatg

SEQ ID NO: 7571 - DNA, 24 bp, Artificial Sequence
  Synthetic: FXN 3 forward 9:69037827-69037855; As/LbCpf1
tagtagagacagatttctccatgt

SEQ ID NO: 7572 - DNA, 25 bp, Artificial Sequence
  Synthetic: FXN 3 forward 9:69037827-69037856; As/LbCpf1
tagtagagacagatttctccatgtt

SEQ ID NO: 7573 - DNA, 18 bp, Artificial Sequence
  Synthetic: FXN 3 forward 9:69037828-69037850; As/LbCpf1
agtagagacagatttctc

SEQ ID NO: 7574 - DNA, 19 bp, Artificial Sequence
  Synthetic: FXN 3 forward 9:69037828-69037851; As/LbCpf1
agtagagacagatttctcc

SEQ ID NO: 7575 - DNA, 20 bp, Artificial Sequence
  Synthetic: FXN 3 forward 9:69037828-69037852; As/LbCpf1
agtagagacagatttctcca

SEQ ID NO: 7576 - DNA, 21 bp, Artificial Sequence
  Synthetic: FXN 3 forward 9:69037828-69037853; As/LbCpf1
agtagagacagatttctccat

SEQ ID NO: 7577 - DNA, 22 bp, Artificial Sequence
  Synthetic: FXN 3 forward 9:69037828-69037854; As/LbCpf1
agtagagacagatttctccatg

SEQ ID NO: 7578 - DNA, 23 bp, Artificial Sequence
  Synthetic: FXN 3 forward 9:69037828-69037855; As/LbCpf1
agtagagacagatttctccatgt

SEQ ID NO: 7579 - DNA, 24 bp, Artificial Sequence
  Synthetic: FXN 3 forward 9:69037828-69037856; As/LbCpf1
agtagagacagatttctccatgtt

SEQ ID NO: 7580 - DNA, 25 bp, Artificial Sequence
  Synthetic: FXN 3 forward 9:69037828-69037857; As/LbCpf1
agtagagacagatttctccatgttg

SEQ ID NO: 7581 - DNA, 18 bp, Artificial Sequence
  Synthetic: FXN 3 forward 9:69037829-69037851; As/LbCpf1
gtagagacagatttctcc

SEQ ID NO: 7582 - DNA, 19 bp, Artificial Sequence
  Synthetic: FXN 3 forward 9:69037829-69037852; As/LbCpf1
gtagagacagatttctcca

SEQ ID NO: 7583 - DNA, 20 bp, Artificial Sequence
  Synthetic: FXN 3 forward 9:69037829-69037853; As/LbCpf1
gtagagacagatttctccat

SEQ ID NO: 7584 - DNA, 21 bp, Artificial Sequence
  Synthetic: FXN 3 forward 9:69037829-69037854; As/LbCpf1
gtagagacagatttctccatg

SEQ ID NO: 7585 - DNA, 22 bp, Artificial Sequence
  Synthetic: FXN 3 forward 9:69037829-69037855; As/LbCpf1
gtagagacagatttctccatgt

SEQ ID NO: 7586 - DNA, 23 bp, Artificial Sequence
  Synthetic: FXN 3 forward 9:69037829-69037856; As/LbCpf1
gtagagacagatttctccatgtt

SEQ ID NO: 7587 - DNA, 24 bp, Artificial Sequence
  Synthetic: FXN 3 forward 9:69037829-69037857; As/LbCpf1
gtagagacagatttctccatgttg

SEQ ID NO: 7588 - DNA, 25 bp, Artificial Sequence
  Synthetic: FXN 3 forward 9:69037829-69037858; As/LbCpf1
gtagagacagatttctccatgttgg

SEQ ID NO: 7589 - DNA, 18 bp, Artificial Sequence
  Synthetic: FXN 3 forward 9:69037844-69037866; As/LbCpf1
tccatgttggtcaggctg

SEQ ID NO: 7590 - DNA, 19 bp, Artificial Sequence
  Synthetic: FXN 3 forward 9:69037844-69037867; As/LbCpf1
tccatgttggtcaggctgg

SEQ ID NO: 7591 - DNA, 20 bp, Artificial Sequence
  Synthetic: FXN 3 forward 9:69037844-69037868; As/LbCpf1
tccatgttggtcaggctggt

SEQ ID NO: 7592 - DNA, 21 bp, Artificial Sequence
  Synthetic: FXN 3 forward 9:69037844-69037869; As/LbCpf1
tccatgttggtcaggctggtc

SEQ ID NO: 7593 - DNA, 22 bp, Artificial Sequence
  Synthetic: FXN 3 forward 9:69037844-69037870; As/LbCpf1
tccatgttggtcaggctggtct

SEQ ID NO: 7594 - DNA, 23 bp, Artificial Sequence
  Synthetic: FXN 3 forward 9:69037844-69037871; As/LbCpf1
tccatgttggtcaggctggtctc

SEQ ID NO: 7595 - DNA, 24 bp, Artificial Sequence
  Synthetic: FXN 3 forward 9:69037844-69037872; As/LbCpf1
tccatgttggtcaggctggtctcg

SEQ ID NO: 7596 - DNA, 25 bp, Artificial Sequence
  Synthetic: FXN 3 forward 9:69037844-69037873; As/LbCpf1
tccatgttggtcaggctggtctcga

SEQ ID NO: 7597 - DNA, 18 bp, Artificial Sequence
  Synthetic: FXN 3 reverse 9:69037885-69037907; As/LbCpf1
ggagggcgaggtgggcgg

SEQ ID NO: 7598 - DNA, 19 bp, Artificial Sequence
  Synthetic: FXN 3 reverse 9:69037885-69037908; As/LbCpf1
ggagggcgaggtgggcgga

SEQ ID NO: 7599 - DNA, 20 bp, Artificial Sequence
  Synthetic: FXN 3 reverse 9:69037885-69037909; As/LbCpf1
ggagggcgaggtgggcggat

SEQ ID NO: 7600 - DNA, 21 bp, Artificial Sequence
  Synthetic: FXN 3 reverse 9:69037885-69037910; As/LbCpf1
ggagggcgaggtgggcggatc

SEQ ID NO: 7601 - DNA, 22 bp, Artificial Sequence
  Synthetic: FXN 3 reverse 9:69037885-69037911; As/LbCpf1
ggagggcgaggtgggcggatca

SEQ ID NO: 7602 - DNA, 23 bp, Artificial Sequence
  Synthetic: FXN 3 reverse 9:69037885-69037912; As/LbCpf1
ggagggcgaggtgggcggatcac

SEQ ID NO: 7603 - DNA, 24 bp, Artificial Sequence
  Synthetic: FXN 3 reverse 9:69037885-69037913; As/LbCpf1
ggagggcgaggtgggcggatcacc

SEQ ID NO: 7604 - DNA, 25 bp, Artificial Sequence
  Synthetic: FXN 3 reverse 9:69037885-69037914; As/LbCpf1
ggagggcgaggtgggcggatcacct

SEQ ID NO: 7605 - DNA, 18 bp, Artificial Sequence
  Synthetic: FXN 3 forward 9:69037961-69037983; As/LbCpf1
taatttaggagaatgaca

SEQ ID NO: 7606 - DNA, 19 bp, Artificial Sequence
  Synthetic: FXN 3 forward 9:69037961-69037984; As/LbCpf1
taatttaggagaatgacaa

SEQ ID NO: 7607 - DNA, 20 bp, Artificial Sequence
  Synthetic: FXN 3 forward 9:69037961-69037985; As/LbCpf1
taatttaggagaatgacaag

SEQ ID NO: 7608 - DNA, 21 bp, Artificial Sequence
  Synthetic: FXN 3 forward 9:69037961-69037986; As/LbCpf1
taatttaggagaatgacaaga

SEQ ID NO: 7609 - DNA, 22 bp, Artificial Sequence
  Synthetic: FXN 3 forward 9:69037961-69037987; As/LbCpf1
taatttaggagaatgacaagag

SEQ ID NO: 7610 - DNA, 23 bp, Artificial Sequence
  Synthetic: FXN 3 forward 9:69037961-69037988; As/LbCpf1
taatttaggagaatgacaagagg

SEQ ID NO: 7611 - DNA, 24 bp, Artificial Sequence
  Synthetic: FXN 3 forward 9:69037961-69037989; As/LbCpf1
taatttaggagaatgacaagaggt

SEQ ID NO: 7612 - DNA, 25 bp, Artificial Sequence
  Synthetic: FXN 3 forward 9:69037961-69037990; As/LbCpf1
taatttaggagaatgacaagaggtg

SEQ ID NO: 7613 - DNA, 18 bp, Artificial Sequence
  Synthetic: FXN 3 forward 9:69037962-69037984; As/LbCpf1
aatttaggagaatgacaa

SEQ ID NO: 7614 - DNA, 19 bp, Artificial Sequence
  Synthetic: FXN 3 forward 9:69037962-69037985; As/LbCpf1
aatttaggagaatgacaag

SEQ ID NO: 7615 - DNA, 20 bp, Artificial Sequence
  Synthetic: FXN 3 forward 9:69037962-69037986; As/LbCpf1
aatttaggagaatgacaaga

SEQ ID NO: 7616 - DNA, 21 bp, Artificial Sequence
  Synthetic: FXN 3 forward 9:69037962-69037987; As/LbCpf1
aatttaggagaatgacaagag

SEQ ID NO: 7617 - DNA, 22 bp, Artificial Sequence
  Synthetic: FXN 3 forward 9:69037962-69037988; As/LbCpf1
aatttaggagaatgacaagagg

SEQ ID NO: 7618 - DNA, 23 bp, Artificial Sequence
  Synthetic: FXN 3 forward 9:69037962-69037989; As/LbCpf1
aatttaggagaatgacaagaggt

SEQ ID NO: 7619 - DNA, 24 bp, Artificial Sequence
  Synthetic: FXN 3 forward 9:69037962-69037990; As/LbCpf1
aatttaggagaatgacaagaggtg

SEQ ID NO: 7620 - DNA, 25 bp, Artificial Sequence
  Synthetic: FXN 3 forward 9:69037962-69037991; As/LbCpf1
aatttaggagaatgacaagaggtgg

SEQ ID NO: 7621 - DNA, 18 bp, Artificial Sequence
  Synthetic: FXN 3 forward 9:69037963-69037985; As/LbCpf1
atttaggagaatgacaag

SEQ ID NO: 7622 - DNA, 19 bp, Artificial Sequence
  Synthetic: FXN 3 forward 9:69037963-69037986; As/LbCpf1
atttaggagaatgacaaga

SEQ ID NO: 7623 - DNA, 20 bp, Artificial Sequence
  Synthetic: FXN 3 forward 9:69037963-69037987; As/LbCpf1
atttaggagaatgacaagag

SEQ ID NO: 7624 - DNA, 21 bp, Artificial Sequence
  Synthetic: FXN 3 forward 9:69037963-69037988; As/LbCpf1
atttaggagaatgacaagagg

SEQ ID NO: 7625 - DNA, 22 bp, Artificial Sequence
  Synthetic: FXN 3 forward 9:69037963-69037989; As/LbCpf1
atttaggagaatgacaagaggt

SEQ ID NO: 7626 - DNA, 23 bp, Artificial Sequence
  Synthetic: FXN 3 forward 9:69037963-69037990; As/LbCpf1
atttaggagaatgacaagaggtg

SEQ ID NO: 7627 - DNA, 24 bp, Artificial Sequence
  Synthetic: FXN 3 forward 9:69037963-69037991; As/LbCpf1
atttaggagaatgacaagaggtgg

SEQ ID NO: 7628 - DNA, 25 bp, Artificial Sequence
  Synthetic: FXN 3 forward 9:69037963-69037992; As/LbCpf1
atttaggagaatgacaagaggtggt

SEQ ID NO: 7629 - DNA, 18 bp, Artificial Sequence
  Synthetic: FXN 3 forward 9:69037968-69037990; As/LbCpf1
ggagaatgacaagaggtg

SEQ ID NO: 7630 - DNA, 19 bp, Artificial Sequence
  Synthetic: FXN 3 forward 9:69037968-69037991; As/LbCpf1
ggagaatgacaagaggtgg

SEQ ID NO: 7631 - DNA, 20 bp, Artificial Sequence
  Synthetic: FXN 3 forward 9:69037968-69037992; As/LbCpf1
ggagaatgacaagaggtggt

SEQ ID NO: 7632 - DNA, 21 bp, Artificial Sequence
  Synthetic: FXN 3 forward 9:69037968-69037993; As/LbCpf1
ggagaatgacaagaggtggta

SEQ ID NO: 7633 - DNA, 22 bp, Artificial Sequence
  Synthetic: FXN 3 forward 9:69037968-69037994; As/LbCpf1
ggagaatgacaagaggtggtac

SEQ ID NO: 7634 - DNA, 23 bp, Artificial Sequence
  Synthetic: FXN 3 forward 9:69037968-69037995; As/LbCpf1
ggagaatgacaagaggtggtaca

SEQ ID NO: 7635 - DNA, 24 bp, Artificial Sequence
  Synthetic: FXN 3 forward 9:69037968-69037996; As/LbCpf1
ggagaatgacaagaggtggtacag

SEQ ID NO: 7636 - DNA, 25 bp, Artificial Sequence
  Synthetic: FXN 3 forward 9:69037968-69037997; As/LbCpf1
ggagaatgacaagaggtggtacagt

SEQ ID NO: 7637 - DNA, 18 bp, Artificial Sequence
  Synthetic: FXN 3 forward 9:69037996-69038018; As/LbCpf1
ttagatggtacctggtgg

SEQ ID NO: 7638 - DNA, 19 bp, Artificial Sequence
  Synthetic: FXN 3 forward 9:69037996-69038019; As/LbCpf1
ttagatggtacctggtggc

SEQ ID NO: 7639 - DNA, 20 bp, Artificial Sequence
  Synthetic: FXN 3 forward 9:69037996-69038020; As/LbCpf1
ttagatggtacctggtggct

SEQ ID NO: 7640 - DNA, 21 bp, Artificial Sequence
  Synthetic: FXN 3 forward 9:69037996-69038021; As/LbCpf1
ttagatggtacctggtggctg

SEQ ID NO: 7641 - DNA, 22 bp, Artificial Sequence
  Synthetic: FXN 3 forward 9:69037996-69038022; As/LbCpf1
ttagatggtacctggtggctgt

SEQ ID NO: 7642 - DNA, 23 bp, Artificial Sequence
  Synthetic: FXN 3 forward 9:69037996-69038023; As/LbCpf1
ttagatggtacctggtggctgtt

SEQ ID NO: 7643 - DNA, 24 bp, Artificial Sequence
  Synthetic: FXN 3 forward 9:69037996-69038024; As/LbCpf1
ttagatggtacctggtggctgtta

SEQ ID NO: 7644 - DNA, 25 bp, Artificial Sequence
  Synthetic: FXN 3 forward 9:69037996-69038025; As/LbCpf1
ttagatggtacctggtggctgttaa

SEQ ID NO: 7645 - DNA, 18 bp, Artificial Sequence
  Synthetic: FXN 3 forward 9:69037997-69038019; As/LbCpf1
tagatggtacctggtggc

SEQ ID NO: 7646 - DNA, 19 bp, Artificial Sequence
  Synthetic: FXN 3 forward 9:69037997-69038020; As/LbCpf1
tagatggtacctggtggct

SEQ ID NO: 7647 - DNA, 20 bp, Artificial Sequence
  Synthetic: FXN 3 forward 9:69037997-69038021; As/LbCpf1
tagatggtacctggtggctg

SEQ ID NO: 7648 - DNA, 21 bp, Artificial Sequence
  Synthetic: FXN 3 forward 9:69037997-69038022; As/LbCpf1
tagatggtacctggtggctgt

SEQ ID NO: 7649 - DNA, 22 bp, Artificial Sequence
  Synthetic: FXN 3 forward 9:69037997-69038023; As/LbCpf1
tagatggtacctggtggctgtt

SEQ ID NO: 7650 - DNA, 23 bp, Artificial Sequence
  Synthetic: FXN 3 forward 9:69037997-69038024; As/LbCpf1
tagatggtacctggtggctgtta

SEQ ID NO: 7651 - DNA, 24 bp, Artificial Sequence
  Synthetic: FXN 3 forward 9:69037997-69038025; As/LbCpf1
tagatggtacctggtggctgttaa

SEQ ID NO: 7652 - DNA, 25 bp, Artificial Sequence
  Synthetic: FXN 3 forward 9:69037997-69038026; As/LbCpf1
tagatggtacctggtggctgttaag

SEQ ID NO: 7653 - DNA, 18 bp, Artificial Sequence
  Synthetic: FXN 3 forward 9:69037998-69038020; As/LbCpf1
agatggtacctggtggct

SEQ ID NO: 7654 - DNA, 19 bp, Artificial Sequence
  Synthetic: FXN 3 forward 9:69037998-69038021; As/LbCpf1
agatggtacctggtggctg

SEQ ID NO: 7655 - DNA, 20 bp, Artificial Sequence
  Synthetic: FXN 3 forward 9:69037998-69038022; As/LbCpf1
agatggtacctggtggctgt

SEQ ID NO: 7656 - DNA, 21 bp, Artificial Sequence
  Synthetic: FXN 3 forward 9:69037998-69038023; As/LbCpf1
agatggtacctggtggctgtt

SEQ ID NO: 7657 - DNA, 22 bp, Artificial Sequence
  Synthetic: FXN 3 forward 9:69037998-69038024; As/LbCpf1
agatggtacctggtggctgtta

SEQ ID NO: 7658 - DNA, 23 bp, Artificial Sequence
  Synthetic: FXN 3 forward 9:69037998-69038025; As/LbCpf1
agatggtacctggtggctgttaa

SEQ ID NO: 7659 - DNA, 24 bp, Artificial Sequence
  Synthetic: FXN 3 forward 9:69037998-69038026; As/LbCpf1
agatggtacctggtggctgttaag

SEQ ID NO: 7660 - DNA, 25 bp, Artificial Sequence
  Synthetic: FXN 3 forward 9:69037998-69038027; As/LbCpf1
agatggtacctggtggctgttaagg

SEQ ID NO: 7661 - DNA, 18 bp, Artificial Sequence
  Synthetic: FXN 3 forward 9:69037999-69038021; As/LbCpf1
gatggtacctggtggctg

SEQ ID NO: 7662 - DNA, 19 bp, Artificial Sequence
  Synthetic: FXN 3 forward 9:69037999-69038022; As/LbCpf1
gatggtacctggtggctgt

SEQ ID NO: 7663 - DNA, 20 bp, Artificial Sequence
  Synthetic: FXN 3 forward 9:69037999-69038023; As/LbCpf1
gatggtacctggtggctgtt

SEQ ID NO: 7664 - DNA, 21 bp, Artificial Sequence
  Synthetic: FXN 3 forward 9:69037999-69038024; As/LbCpf1
gatggtacctggtggctgtta

SEQ ID NO: 7665 - DNA, 22 bp, Artificial Sequence
  Synthetic: FXN 3 forward 9:69037999-69038025; As/LbCpf1
gatggtacctggtggctgttaa

SEQ ID NO: 7666 - DNA, 23 bp, Artificial Sequence
  Synthetic: FXN 3 forward 9:69037999-69038026; As/LbCpf1
gatggtacctggtggctgttaag

SEQ ID NO: 7667 - DNA, 24 bp, Artificial Sequence
  Synthetic: FXN 3 forward 9:69037999-69038027; As/LbCpf1
gatggtacctggtggctgttaagg

SEQ ID NO: 7668 - DNA, 25 bp, Artificial Sequence
  Synthetic: FXN 3 forward 9:69037999-69038028; As/LbCpf1
gatggtacctggtggctgttaaggg

SEQ ID NO: 7669 - DNA, 18 bp, Artificial Sequence
  Synthetic: FXN 3 reverse 9:69038014-69038036; As/LbCpf1
tcagtcaatagcccttaa

SEQ ID NO: 7670 - DNA, 19 bp, Artificial Sequence
  Synthetic: FXN 3 reverse 9:69038014-69038037; As/LbCpf1
tcagtcaatagcccttaac

SEQ ID NO: 7671 - DNA, 20 bp, Artificial Sequence
  Synthetic: FXN 3 reverse 9:69038014-69038038; As/LbCpf1
tcagtcaatagcccttaaca

SEQ ID NO: 7672 - DNA, 21 bp, Artificial Sequence
  Synthetic: FXN 3 reverse 9:69038014-69038039; As/LbCpf1
tcagtcaatagcccttaacag

SEQ ID NO: 7673 - DNA, 22 bp, Artificial Sequence
  Synthetic: FXN 3 reverse 9:69038014-69038040; As/LbCpf1
tcagtcaatagcccttaacagc

SEQ ID NO: 7674 - DNA, 23 bp, Artificial Sequence
  Synthetic: FXN 3 reverse 9:69038014-69038041; As/LbCpf1
tcagtcaatagcccttaacagcc

SEQ ID NO: 7675 - DNA, 24 bp, Artificial Sequence
  Synthetic: FXN 3 reverse 9:69038014-69038042; As/LbCpf1
tcagtcaatagcccttaacagcca

SEQ ID NO: 7676 - DNA, 25 bp, Artificial Sequence
  Synthetic: FXN 3 reverse 9:69038014-69038043; As/LbCpf1
tcagtcaatagcccttaacagccac

SEQ ID NO: 7677 - DNA, 18 bp, Artificial Sequence
  Synthetic: FXN 3 forward 9:69038085-69038107; As/LbCpf1
tggatagatggttagcaa

SEQ ID NO: 7678 - DNA, 19 bp, Artificial Sequence
  Synthetic: FXN 3 forward 9:69038085-69038108; As/LbCpf1
tggatagatggttagcaac

SEQ ID NO: 7679 - DNA, 20 bp, Artificial Sequence
  Synthetic: FXN 3 forward 9:69038085-69038109; As/LbCpf1
tggatagatggttagcaacc

SEQ ID NO: 7680 - DNA, 21 bp, Artificial Sequence
  Synthetic: FXN 3 forward 9:69038085-69038110; As/LbCpf1
tggatagatggttagcaacct

SEQ ID NO: 7681 - DNA, 22 bp, Artificial Sequence
  Synthetic: FXN 3 forward 9:69038085-69038111; As/LbCpf1
tggatagatggttagcaacctc

SEQ ID NO: 7682 - DNA, 23 bp, Artificial Sequence
  Synthetic: FXN 3 forward 9:69038085-69038112; As/LbCpf1
tggatagatggttagcaacctct

SEQ ID NO: 7683 - DNA, 24 bp, Artificial Sequence
  Synthetic: FXN 3 forward 9:69038085-69038113; As/LbCpf1
tggatagatggttagcaacctctg

SEQ ID NO: 7684 - DNA, 25 bp, Artificial Sequence
  Synthetic: FXN 3 forward 9:69038085-69038114; As/LbCpf1
tggatagatggttagcaacctctgt

SEQ ID NO: 7685 - DNA, 18 bp, Artificial Sequence
  Synthetic: FXN 3 forward 9:69038129-69038151; As/LbCpf1
tttctatactgaattaat

SEQ ID NO: 7686 - DNA, 19 bp, Artificial Sequence
  Synthetic: FXN 3 forward 9:69038129-69038152; As/LbCpf1
tttctatactgaattaatc

SEQ ID NO: 7687 - DNA, 20 bp, Artificial Sequence
  Synthetic: FXN 3 forward 9:69038129-69038153; As/LbCpf1
tttctatactgaattaatca

SEQ ID NO: 7688 - DNA, 21 bp, Artificial Sequence
  Synthetic: FXN 3 forward 9:69038129-69038154; As/LbCpf1
tttctatactgaattaatcac

SEQ ID NO: 7689 - DNA, 22 bp, Artificial Sequence
  Synthetic: FXN 3 forward 9:69038129-69038155; As/LbCpf1
tttctatactgaattaatcaca

SEQ ID NO: 7690 - DNA, 23 bp, Artificial Sequence
  Synthetic: FXN 3 forward 9:69038129-69038156; As/LbCpf1
tttctatactgaattaatcacat

SEQ ID NO: 7691 - DNA, 24 bp, Artificial Sequence
  Synthetic: FXN 3 forward 9:69038129-69038157; As/LbCpf1
tttctatactgaattaatcacatt

SEQ ID NO: 7692 - DNA, 25 bp, Artificial Sequence
  Synthetic: FXN 3 forward 9:69038129-69038158; As/LbCpf1
tttctatactgaattaatcacattt

SEQ ID NO: 7693 - DNA, 18 bp, Artificial Sequence
  Synthetic: FXN 3 forward 9:69038130-69038152; As/LbCpf1
ttctatactgaattaatc

SEQ ID NO: 7694 - DNA, 19 bp, Artificial Sequence
  Synthetic: FXN 3 forward 9:69038130-69038153; As/LbCpf1
ttctatactgaattaatca

SEQ ID NO: 7695 - DNA, 20 bp, Artificial Sequence
  Synthetic: FXN 3 forward 9:69038130-69038154; As/LbCpf1
ttctatactgaattaatcac

SEQ ID NO: 7696 - DNA, 21 bp, Artificial Sequence
  Synthetic: FXN 3 forward 9:69038130-69038155; As/LbCpf1
ttctatactgaattaatcaca

SEQ ID NO: 7697 - DNA, 22 bp, Artificial Sequence
  Synthetic: FXN 3 forward 9:69038130-69038156; As/LbCpf1
ttctatactgaattaatcacat

SEQ ID NO: 7698 - DNA, 23 bp, Artificial Sequence
  Synthetic: FXN 3 forward 9:69038130-69038157; As/LbCpf1
ttctatactgaattaatcacatt

SEQ ID NO: 7699 - DNA, 24 bp, Artificial Sequence
  Synthetic: FXN 3 forward 9:69038130-69038158; As/LbCpf1
ttctatactgaattaatcacattt

SEQ ID NO: 7700 - DNA, 25 bp, Artificial Sequence
  Synthetic: FXN 3 forward 9:69038130-69038159; As/LbCpf1
ttctatactgaattaatcacatttg

SEQ ID NO: 7701 - DNA, 18 bp, Artificial Sequence
  Synthetic: FXN 3 forward 9:69038131-69038153; As/LbCpf1
tctatactgaattaatca

SEQ ID NO: 7702 - DNA, 19 bp, Artificial Sequence
  Synthetic: FXN 3 forward 9:69038131-69038154; As/LbCpf1
tctatactgaattaatcac

SEQ ID NO: 7703 - DNA, 20 bp, Artificial Sequence
  Synthetic: FXN 3 forward 9:69038131-69038155; As/LbCpf1
tctatactgaattaatcaca

SEQ ID NO: 7704 - DNA, 21 bp, Artificial Sequence
  Synthetic: FXN 3 forward 9:69038131-69038156; As/LbCpf1
tctatactgaattaatcacat

SEQ ID NO: 7705 - DNA, 22 bp, Artificial Sequence
  Synthetic: FXN 3 forward 9:69038131-69038157; As/LbCpf1
tctatactgaattaatcacatt

SEQ ID NO: 7706 - DNA, 23 bp, Artificial Sequence
  Synthetic: FXN 3 forward 9:69038131-69038158; As/LbCpf1
tctatactgaattaatcacattt

SEQ ID NO: 7707 - DNA, 24 bp, Artificial Sequence
  Synthetic: FXN 3 forward 9:69038131-69038159; As/LbCpf1
tctatactgaattaatcacatttg

SEQ ID NO: 7708 - DNA, 25 bp, Artificial Sequence
  Synthetic: FXN 3 forward 9:69038131-69038160; As/LbCpf1
tctatactgaattaatcacatttgt

SEQ ID NO: 7709 - DNA, 18 bp, Artificial Sequence
  Synthetic: FXN 3 forward 9:69038132-69038154; As/LbCpf1
ctatactgaattaatcac

SEQ ID NO: 7710 - DNA, 19 bp, Artificial Sequence
  Synthetic: FXN 3 forward 9:69038132-69038155; As/LbCpf1
ctatactgaattaatcaca

SEQ ID NO: 7711 - DNA, 20 bp, Artificial Sequence
  Synthetic: FXN 3 forward 9:69038132-69038156; As/LbCpf1
ctatactgaattaatcacat

SEQ ID NO: 7712 - DNA, 21 bp, Artificial Sequence
  Synthetic: FXN 3 forward 9:69038132-69038157; As/LbCpf1
ctatactgaattaatcacatt

SEQ ID NO: 7713 - DNA, 22 bp, Artificial Sequence
  Synthetic: FXN 3 forward 9:69038132-69038158; As/LbCpf1
ctatactgaattaatcacattt

SEQ ID NO: 7714 - DNA, 23 bp, Artificial Sequence
  Synthetic: FXN 3 forward 9:69038132-69038159; As/LbCpf1
ctatactgaattaatcacatttg

SEQ ID NO: 7715 - DNA, 24 bp, Artificial Sequence
  Synthetic: FXN 3 forward 9:69038132-69038160; As/LbCpf1
ctatactgaattaatcacatttgt

SEQ ID NO: 7716 - DNA, 25 bp, Artificial Sequence
  Synthetic: FXN 3 forward 9:69038132-69038161; As/LbCpf1
ctatactgaattaatcacatttgtt

SEQ ID NO: 7717 - DNA, 18 bp, Artificial Sequence
  Synthetic: FXN 3 forward 9:69038133-69038155; As/LbCpf1
tatactgaattaatcaca

SEQ ID NO: 7718 - DNA, 19 bp, Artificial Sequence
  Synthetic: FXN 3 forward 9:69038133-69038156; As/LbCpf1
tatactgaattaatcacat

SEQ ID NO: 7719 - DNA, 20 bp, Artificial Sequence
  Synthetic: FXN 3 forward 9:69038133-69038157; As/LbCpf1
tatactgaattaatcacatt

SEQ ID NO: 7720 - DNA, 21 bp, Artificial Sequence
  Synthetic: FXN 3 forward 9:69038133-69038158; As/LbCpf1
tatactgaattaatcacattt

SEQ ID NO: 7721 - DNA, 22 bp, Artificial Sequence
  Synthetic: FXN 3 forward 9:69038133-69038159; As/LbCpf1
tatactgaattaatcacatttg

SEQ ID NO: 7722 - DNA, 23 bp, Artificial Sequence
  Synthetic: FXN 3 forward 9:69038133-69038160; As/LbCpf1
tatactgaattaatcacatttgt

SEQ ID NO: 7723 - DNA, 24 bp, Artificial Sequence
  Synthetic: FXN 3 forward 9:69038133-69038161; As/LbCpf1
tatactgaattaatcacatttgtt

SEQ ID NO: 7724 - DNA, 25 bp, Artificial Sequence
  Synthetic: FXN 3 forward 9:69038133-69038162; As/LbCpf1
tatactgaattaatcacatttgttt

SEQ ID NO: 7725 - DNA, 18 bp, Artificial Sequence
  Synthetic: FXN 3 forward 9:69038155-69038177; As/LbCpf1
tttaacctgtctgttcca

SEQ ID NO: 7726 - DNA, 19 bp, Artificial Sequence
  Synthetic: FXN 3 forward 9:69038155-69038178; As/LbCpf1
tttaacctgtctgttccat

SEQ ID NO: 7727 - DNA, 20 bp, Artificial Sequence
  Synthetic: FXN 3 forward 9:69038155-69038179; As/LbCpf1
tttaacctgtctgttccata

SEQ ID NO: 7728 - DNA, 21 bp, Artificial Sequence
  Synthetic: FXN 3 forward 9:69038155-69038180; As/LbCpf1
tttaacctgtctgttccatag

SEQ ID NO: 7729 - DNA, 22 bp, Artificial Sequence
  Synthetic: FXN 3 forward 9:69038155-69038181; As/LbCpf1
tttaacctgtctgttccatagt

SEQ ID NO: 7730 - DNA, 23 bp, Artificial Sequence
  Synthetic: FXN 3 forward 9:69038155-69038182; As/LbCpf1
tttaacctgtctgttccatagtt

SEQ ID NO: 7731 - DNA, 24 bp, Artificial Sequence
  Synthetic: FXN 3 forward 9:69038155-69038183; As/LbCpf1
tttaacctgtctgttccatagttc

SEQ ID NO: 7732 - DNA, 25 bp, Artificial Sequence
  Synthetic: FXN 3 forward 9:69038155-69038184; As/LbCpf1
tttaacctgtctgttccatagttcc

SEQ ID NO: 7733 - DNA, 18 bp, Artificial Sequence
  Synthetic: FXN 3 forward 9:69038159-69038181; As/LbCpf1
acctgtctgttccatagt

SEQ ID NO: 7734 - DNA, 19 bp, Artificial Sequence
  Synthetic: FXN 3 forward 9:69038159-69038182; As/LbCpf1
acctgtctgttccatagtt

SEQ ID NO: 7735 - DNA, 20 bp, Artificial Sequence
  Synthetic: FXN 3 forward 9:69038159-69038183; As/LbCpf1
acctgtctgttccatagttc

SEQ ID NO: 7736 - DNA, 21 bp, Artificial Sequence
  Synthetic: FXN 3 forward 9:69038159-69038184; As/LbCpf1
acctgtctgttccatagttcc

SEQ ID NO: 7737 - DNA, 22 bp, Artificial Sequence
  Synthetic: FXN 3 forward 9:69038159-69038185; As/LbCpf1
acctgtctgttccatagttccc

SEQ ID NO: 7738 - DNA, 23 bp, Artificial Sequence
  Synthetic: FXN 3 forward 9:69038159-69038186; As/LbCpf1
acctgtctgttccatagttccct

SEQ ID NO: 7739 - DNA, 24 bp, Artificial Sequence
  Synthetic: FXN 3 forward 9:69038159-69038187; As/LbCpf1
acctgtctgttccatagttccctt

SEQ ID NO: 7740 - DNA, 25 bp, Artificial Sequence
  Synthetic: FXN 3 forward 9:69038159-69038188; As/LbCpf1
acctgtctgttccatagttcccttg

SEQ ID NO: 7741 - DNA, 18 bp, Artificial Sequence
  Synthetic: FXN 3 forward 9:69038201-69038223; As/LbCpf1
aggagttgggtgggtggc

SEQ ID NO: 7742 - DNA, 19 bp, Artificial Sequence
  Synthetic: FXN 3 forward 9:69038201-69038224; As/LbCpf1
aggagttgggtgggtggca

SEQ ID NO: 7743 - DNA, 20 bp, Artificial Sequence
  Synthetic: FXN 3 forward 9:69038201-69038225; As/LbCpf1
aggagttgggtgggtggcag

SEQ ID NO: 7744 - DNA, 21 bp, Artificial Sequence
  Synthetic: FXN 3 forward 9:69038201-69038226; As/LbCpf1
aggagttgggtgggtggcagt

SEQ ID NO: 7745 - DNA, 22 bp, Artificial Sequence
  Synthetic: FXN 3 forward 9:69038201-69038227; As/LbCpf1
aggagttgggtgggtggcagtg

SEQ ID NO: 7746 - DNA, 23 bp, Artificial Sequence
  Synthetic: FXN 3 forward 9:69038201-69038228; As/LbCpf1
aggagttgggtgggtggcagtgg

SEQ ID NO: 7747 - DNA, 24 bp, Artificial Sequence
  Synthetic: FXN 3 forward 9:69038201-69038229; As/LbCpf1
aggagttgggtgggtggcagtggc

SEQ ID NO: 7748 - DNA, 25 bp, Artificial Sequence
  Synthetic: FXN 3 forward 9:69038201-69038230; As/LbCpf1
aggagttgggtgggtggcagtggca

SEQ ID NO: 7749 - DNA, 18 bp, Artificial Sequence
  Synthetic: FXN 3 reverse 9:69038234-69038256; As/LbCpf1
aaataattaaacaggatg

SEQ ID NO: 7750 - DNA, 19 bp, Artificial Sequence
  Synthetic: FXN 3 reverse 9:69038234-69038257; As/LbCpf1
aaataattaaacaggatgg

SEQ ID NO: 7751 - DNA, 20 bp, Artificial Sequence
  Synthetic: FXN 3 reverse 9:69038234-69038258; As/LbCpf1
aaataattaaacaggatggt

SEQ ID NO: 7752 - DNA, 21 bp, Artificial Sequence
  Synthetic: FXN 3 reverse 9:69038234-69038259; As/LbCpf1
aaataattaaacaggatggtg

SEQ ID NO: 7753 - DNA, 22 bp, Artificial Sequence
  Synthetic: FXN 3 reverse 9:69038234-69038260; As/LbCpf1
aaataattaaacaggatggtgg

SEQ ID NO: 7754 - DNA, 23 bp, Artificial Sequence
  Synthetic: FXN 3 reverse 9:69038234-69038261; As/LbCpf1
aaataattaaacaggatggtggc

SEQ ID NO: 7755 - DNA, 24 bp, Artificial Sequence
  Synthetic: FXN 3 reverse 9:69038234-69038262; As/LbCpf1
aaataattaaacaggatggtggcc

SEQ ID NO: 7756 - DNA, 25 bp, Artificial Sequence
  Synthetic: FXN 3 reverse 9:69038234-69038263; As/LbCpf1
aaataattaaacaggatggtggccc

SEQ ID NO: 7757 - DNA, 18 bp, Artificial Sequence
  Synthetic: FXN 3 forward 9:69038248-69038270; As/LbCpf1
attattttaaagccctga

SEQ ID NO: 7758 - DNA, 19 bp, Artificial Sequence
  Synthetic: FXN 3 forward 9:69038248-69038271; As/LbCpf1
attattttaaagccctgac

SEQ ID NO: 7759 - DNA, 20 bp, Artificial Sequence
  Synthetic: FXN 3 forward 9:69038248-69038272; As/LbCpf1
attattttaaagccctgact

SEQ ID NO: 7760 - DNA, 21 bp, Artificial Sequence
  Synthetic: FXN 3 forward 9:69038248-69038273; As/LbCpf1
attattttaaagccctgactg

SEQ ID NO: 7761 - DNA, 22 bp, Artificial Sequence
  Synthetic: FXN 3 forward 9:69038248-69038274; As/LbCpf1
attattttaaagccctgactgt

SEQ ID NO: 7762 - DNA, 23 bp, Artificial Sequence
  Synthetic: FXN 3 forward 9:69038248-69038275; As/LbCpf1
attattttaaagccctgactgtc

SEQ ID NO: 7763 - DNA, 24 bp, Artificial Sequence
  Synthetic: FXN 3 forward 9:69038248-69038276; As/LbCpf1
attattttaaagccctgactgtcc

SEQ ID NO: 7764 - DNA, 25 bp, Artificial Sequence
  Synthetic: FXN 3 forward 9:69038248-69038277; As/LbCpf1
attattttaaagccctgactgtcct

SEQ ID NO: 7765 - DNA, 18 bp, Artificial Sequence
  Synthetic: FXN 3 forward 9:69038256-69038278; As/LbCpf1
aaagccctgactgtcctg

SEQ ID NO: 7766 - DNA, 19 bp, Artificial Sequence
  Synthetic: FXN 3 forward 9:69038256-69038279; As/LbCpf1
aaagccctgactgtcctgg

SEQ ID NO: 7767 - DNA, 20 bp, Artificial Sequence
  Synthetic: FXN 3 forward 9:69038256-69038280; As/LbCpf1
aaagccctgactgtcctgga

SEQ ID NO: 7768 - DNA, 21 bp, Artificial Sequence
  Synthetic: FXN 3 forward 9:69038256-69038281; As/LbCpf1
aaagccctgactgtcctggat

SEQ ID NO: 7769 - DNA, 22 bp, Artificial Sequence
  Synthetic: FXN 3 forward 9:69038256-69038282; As/LbCpf1
aaagccctgactgtcctggatt

SEQ ID NO: 7770 - DNA, 23 bp, Artificial Sequence
  Synthetic: FXN 3 forward 9:69038256-69038283; As/LbCpf1
aaagccctgactgtcctggattg

SEQ ID NO: 7771 - DNA, 24 bp, Artificial Sequence
  Synthetic: FXN 3 forward 9:69038256-69038284; As/LbCpf1
aaagccctgactgtcctggattga

SEQ ID NO: 7772 - DNA, 25 bp, Artificial Sequence
  Synthetic: FXN 3 forward 9:69038256-69038285; As/LbCpf1
aaagccctgactgtcctggattgac

SEQ ID NO: 7773 - DNA, 18 bp, Artificial Sequence
  Synthetic: FXN 3 forward 9:69038257-69038279; As/LbCpf1
aagccctgactgtcctgg

SEQ ID NO: 7774 - DNA, 19 bp, Artificial Sequence
  Synthetic: FXN 3 forward 9:69038257-69038280; As/LbCpf1
aagccctgactgtcctgga

SEQ ID NO: 7775 - DNA, 20 bp, Artificial Sequence
  Synthetic: FXN 3 forward 9:69038257-69038281; As/LbCpf1
aagccctgactgtcctggat

SEQ ID NO: 7776 - DNA, 21 bp, Artificial Sequence
  Synthetic: FXN 3 forward 9:69038257-69038282; As/LbCpf1
aagccctgactgtcctggatt

SEQ ID NO: 7777 - DNA, 22 bp, Artificial Sequence
  Synthetic: FXN 3 forward 9:69038257-69038283; As/LbCpf1
aagccctgactgtcctggattg

SEQ ID NO: 7778 - DNA, 23 bp, Artificial Sequence
  Synthetic: FXN 3 forward 9:69038257-69038284; As/LbCpf1
aagccctgactgtcctggattga

SEQ ID NO: 7779 - DNA, 24 bp, Artificial Sequence
  Synthetic: FXN 3 forward 9:69038257-69038285; As/LbCpf1
aagccctgactgtcctggattgac

SEQ ID NO: 7780 - DNA, 25 bp, Artificial Sequence
  Synthetic: FXN 3 forward 9:69038257-69038286; As/LbCpf1
aagccctgactgtcctggattgacc

SEQ ID NO: 7781 - DNA, 18 bp, Artificial Sequence
  Synthetic: FXN 3 reverse 9:69038280-69038302; As/LbCpf1
gagaccagggggagctta

SEQ ID NO: 7782 - DNA, 19 bp, Artificial Sequence
  Synthetic: FXN 3 reverse 9:69038280-69038303; As/LbCpf1
gagaccagggggagcttag

SEQ ID NO: 7783 - DNA, 20 bp, Artificial Sequence
  Synthetic: FXN 3 reverse 9:69038280-69038304; As/LbCpf1
gagaccagggggagcttagg

SEQ ID NO: 7784 - DNA, 21 bp, Artificial Sequence
  Synthetic: FXN 3 reverse 9:69038280-69038305; As/LbCpf1
gagaccagggggagcttaggg

SEQ ID NO: 7785 - DNA, 22 bp, Artificial Sequence
  Synthetic: FXN 3 reverse 9:69038280-69038306; As/LbCpf1
gagaccagggggagcttagggt

SEQ ID NO: 7786 - DNA, 23 bp, Artificial Sequence
  Synthetic: FXN 3 reverse 9:69038280-69038307; As/LbCpf1
gagaccagggggagcttagggtc

SEQ ID NO: 7787 - DNA, 24 bp, Artificial Sequence
  Synthetic: FXN 3 reverse 9:69038280-69038308; As/LbCpf1
gagaccagggggagcttagggtca

SEQ ID NO: 7788 - DNA, 25 bp, Artificial Sequence
  Synthetic: FXN 3 reverse 9:69038280-69038309; As/LbCpf1
gagaccagggggagcttagggtcaa

SEQ ID NO: 7789 - DNA, 18 bp, Artificial Sequence
  Synthetic: FXN 3 reverse 9:69038281-69038303; As/LbCpf1
ggagaccagggggagctt

SEQ ID NO: 7790 - DNA, 19 bp, Artificial Sequence
  Synthetic: FXN 3 reverse 9:69038281-69038304; As/LbCpf1
ggagaccagggggagctta

SEQ ID NO: 7791 - DNA, 20 bp, Artificial Sequence
  Synthetic: FXN 3 reverse 9:69038281-69038305; As/LbCpf1
ggagaccagggggagcttag

SEQ ID NO: 7792 - DNA, 21 bp, Artificial Sequence
  Synthetic: FXN 3 reverse 9:69038281-69038306; As/LbCpf1
ggagaccagggggagcttagg

SEQ ID NO: 7793 - DNA, 22 bp, Artificial Sequence
  Synthetic: FXN 3 reverse 9:69038281-69038307; As/LbCpf1
ggagaccagggggagcttaggg

SEQ ID NO: 7794 - DNA, 23 bp, Artificial Sequence
  Synthetic: FXN 3 reverse 9:69038281-69038308; As/LbCpf1
ggagaccagggggagcttagggt

SEQ ID NO: 7795 - DNA, 24 bp, Artificial Sequence
  Synthetic: FXN 3 reverse 9:69038281-69038309; As/LbCpf1
ggagaccagggggagcttagggtc

SEQ ID NO: 7796 - DNA, 25 bp, Artificial Sequence
  Synthetic: FXN 3 reverse 9:69038281-69038310; As/LbCpf1
ggagaccagggggagcttagggtca

SEQ ID NO: 7797 - DNA, 18 bp, Artificial Sequence
  Synthetic: FXN 3 reverse 9:69038292-69038314; As/LbCpf1
tgatgaattttggagacc

SEQ ID NO: 7798 - DNA, 19 bp, Artificial Sequence
  Synthetic: FXN 3 reverse 9:69038292-69038315; As/LbCpf1
tgatgaattttggagacca

SEQ ID NO: 7799 - DNA, 20 bp, Artificial Sequence
  Synthetic: FXN 3 reverse 9:69038292-69038316; As/LbCpf1
tgatgaattttggagaccag

SEQ ID NO: 7800 - DNA, 21 bp, Artificial Sequence
  Synthetic: FXN 3 reverse 9:69038292-69038317; As/LbCpf1
tgatgaattttggagaccagg

SEQ ID NO: 7801 - DNA, 22 bp, Artificial Sequence
  Synthetic: FXN 3 reverse 9:69038292-69038318; As/LbCpf1
tgatgaattttggagaccaggg

SEQ ID NO: 7802 - DNA, 23 bp, Artificial Sequence
  Synthetic: FXN 3 reverse 9:69038292-69038319; As/LbCpf1
tgatgaattttggagaccagggg

SEQ ID NO: 7803 - DNA, 24 bp, Artificial Sequence
  Synthetic: FXN 3 reverse 9:69038292-69038320; As/LbCpf1
tgatgaattttggagaccaggggg

SEQ ID NO: 7804 - DNA, 25 bp, Artificial Sequence
  Synthetic: FXN 3 reverse 9:69038292-69038321; As/LbCpf1
tgatgaattttggagaccaggggga

SEQ ID NO: 7805 - DNA, 18 bp, Artificial Sequence
  Synthetic: FXN 3 forward 9:69038352-69038374; As/LbCpf1
ctccaccccttgcatcta

SEQ ID NO: 7806 - DNA, 19 bp, Artificial Sequence
  Synthetic: FXN 3 forward 9:69038352-69038375; As/LbCpf1
ctccaccccttgcatctac

SEQ ID NO: 7807 - DNA, 20 bp, Artificial Sequence
  Synthetic: FXN 3 forward 9:69038352-69038376; As/LbCpf1
ctccaccccttgcatctact

SEQ ID NO: 7808 - DNA, 21 bp, Artificial Sequence
  Synthetic: FXN 3 forward 9:69038352-69038377; As/LbCpf1
ctccaccccttgcatctactt

SEQ ID NO: 7809 - DNA, 22 bp, Artificial Sequence
  Synthetic: FXN 3 forward 9:69038352-69038378; As/LbCpf1
ctccaccccttgcatctacttc

SEQ ID NO: 7810 - DNA, 23 bp, Artificial Sequence
  Synthetic: FXN 3 forward 9:69038352-69038379; As/LbCpf1
ctccaccccttgcatctacttct

SEQ ID NO: 7811 - DNA, 24 bp, Artificial Sequence
  Synthetic: FXN 3 forward 9:69038352-69038380; As/LbCpf1
ctccaccccttgcatctacttcta

SEQ ID NO: 7812 - DNA, 25 bp, Artificial Sequence
  Synthetic: FXN 3 forward 9:69038352-69038381; As/LbCpf1
ctccaccccttgcatctacttctaa

SEQ ID NO: 7813 - DNA, 18 bp, Artificial Sequence
  Synthetic: FXN 3 forward 9:69038353-69038375; As/LbCpf1
tccaccccttgcatctac

SEQ ID NO: 7814 - DNA, 19 bp, Artificial Sequence
  Synthetic: FXN 3 forward 9:69038353-69038376; As/LbCpf1
tccaccccttgcatctact

SEQ ID NO: 7815 - DNA, 20 bp, Artificial Sequence
  Synthetic: FXN 3 forward 9:69038353-69038377; As/LbCpf1
tccaccccttgcatctactt

SEQ ID NO: 7816 - DNA, 21 bp, Artificial Sequence
  Synthetic: FXN 3 forward 9:69038353-69038378; As/LbCpf1
tccaccccttgcatctacttc

SEQ ID NO: 7817 - DNA, 22 bp, Artificial Sequence
  Synthetic: FXN 3 forward 9:69038353-69038379; As/LbCpf1
tccaccccttgcatctacttct

SEQ ID NO: 7818 - DNA, 23 bp, Artificial Sequence
  Synthetic: FXN 3 forward 9:69038353-69038380; As/LbCpf1
tccaccccttgcatctacttcta

SEQ ID NO: 7819 - DNA, 24 bp, Artificial Sequence
  Synthetic: FXN 3 forward 9:69038353-69038381; As/LbCpf1
tccaccccttgcatctacttctaa

SEQ ID NO: 7820 - DNA, 25 bp, Artificial Sequence
  Synthetic: FXN 3 forward 9:69038353-69038382; As/LbCpf1
tccaccccttgcatctacttctaaa

SEQ ID NO: 7821 - DNA, 18 bp, Artificial Sequence
  Synthetic: FXN 3 reverse 9:69038353-69038375; As/LbCpf1
gaagtagatgcaaggggt

SEQ ID NO: 7822 - DNA, 19 bp, Artificial Sequence
  Synthetic: FXN 3 reverse 9:69038353-69038376; As/LbCpf1
gaagtagatgcaaggggtg

SEQ ID NO: 7823 - DNA, 20 bp, Artificial Sequence
  Synthetic: FXN 3 reverse 9:69038353-69038377; As/LbCpf1
gaagtagatgcaaggggtgg

SEQ ID NO: 7824 - DNA, 21 bp, Artificial Sequence
  Synthetic: FXN 3 reverse 9:69038353-69038378; As/LbCpf1
gaagtagatgcaaggggtgga

SEQ ID NO: 7825 - DNA, 22 bp, Artificial Sequence
  Synthetic: FXN 3 reverse 9:69038353-69038379; As/LbCpf1
gaagtagatgcaaggggtggag

SEQ ID NO: 7826 - DNA, 23 bp, Artificial Sequence
  Synthetic: FXN 3 reverse 9:69038353-69038380; As/LbCpf1
gaagtagatgcaaggggtggaga

SEQ ID NO: 7827 - DNA, 24 bp, Artificial Sequence
  Synthetic: FXN 3 reverse 9:69038353-69038381; As/LbCpf1
gaagtagatgcaaggggtggagaa

SEQ ID NO: 7828 - DNA, 25 bp, Artificial Sequence
  Synthetic: FXN 3 reverse 9:69038353-69038382; As/LbCpf1
gaagtagatgcaaggggtggagaaa

SEQ ID NO: 7829 - DNA, 18 bp, Artificial Sequence
  Synthetic: FXN 3 reverse 9:69038371-69038393; As/LbCpf1
tgttgaacagctgcttta

SEQ ID NO: 7830 - DNA, 19 bp, Artificial Sequence
  Synthetic: FXN 3 reverse 9:69038371-69038394; As/LbCpf1
tgttgaacagctgctttag

SEQ ID NO: 7831 - DNA, 20 bp, Artificial Sequence
  Synthetic: FXN 3 reverse 9:69038371-69038395; As/LbCpf1
tgttgaacagctgctttaga

SEQ ID NO: 7832 - DNA, 21 bp, Artificial Sequence
  Synthetic: FXN 3 reverse 9:69038371-69038396; As/LbCpf1
tgttgaacagctgctttagaa

SEQ ID NO: 7833 - DNA, 22 bp, Artificial Sequence
  Synthetic: FXN 3 reverse 9:69038371-69038397; As/LbCpf1
tgttgaacagctgctttagaag

SEQ ID NO: 7834 - DNA, 23 bp, Artificial Sequence
  Synthetic: FXN 3 reverse 9:69038371-69038398; As/LbCpf1
tgttgaacagctgctttagaagt

SEQ ID NO: 7835 - DNA, 24 bp, Artificial Sequence
  Synthetic: FXN 3 reverse 9:69038371-69038399; As/LbCpf1
tgttgaacagctgctttagaagta

SEQ ID NO: 7836 - DNA, 25 bp, Artificial Sequence
  Synthetic: FXN 3 reverse 9:69038371-69038400; As/LbCpf1
tgttgaacagctgctttagaagtag

SEQ ID NO: 7837 - DNA, 18 bp, Artificial Sequence
  Synthetic: FXN 3 reverse 9:69038414-69038436; As/LbCpf1
actagaaaatgtagaatt

SEQ ID NO: 7838 - DNA, 19 bp, Artificial Sequence
  Synthetic: FXN 3 reverse 9:69038414-69038437; As/LbCpf1
actagaaaatgtagaatta

SEQ ID NO: 7839 - DNA, 20 bp, Artificial Sequence
  Synthetic: FXN 3 reverse 9:69038414-69038438; As/LbCpf1
actagaaaatgtagaattat

SEQ ID NO: 7840 - DNA, 21 bp, Artificial Sequence
  Synthetic: FXN 3 reverse 9:69038414-69038439; As/LbCpf1
actagaaaatgtagaattatg

SEQ ID NO: 7841 - DNA, 22 bp, Artificial Sequence
  Synthetic: FXN 3 reverse 9:69038414-69038440; As/LbCpf1
actagaaaatgtagaattatgt

SEQ ID NO: 7842 - DNA, 23 bp, Artificial Sequence
  Synthetic: FXN 3 reverse 9:69038414-69038441; As/LbCpf1
actagaaaatgtagaattatgtg

SEQ ID NO: 7843 - DNA, 24 bp, Artificial Sequence
  Synthetic: FXN 3 reverse 9:69038414-69038442; As/LbCpf1
actagaaaatgtagaattatgtgt

SEQ ID NO: 7844 - DNA, 25 bp, Artificial Sequence
  Synthetic: FXN 3 reverse 9:69038414-69038443; As/LbCpf1
actagaaaatgtagaattatgtgtg

SEQ ID NO: 7845 - DNA, 18 bp, Artificial Sequence
  Synthetic: FXN 3 reverse 9:69038415-69038437; As/LbCpf1
aactagaaaatgtagaat

SEQ ID NO: 7846 - DNA, 19 bp, Artificial Sequence
  Synthetic: FXN 3 reverse 9:69038415-69038438; As/LbCpf1
aactagaaaatgtagaatt

SEQ ID NO: 7847 - DNA, 20 bp, Artificial Sequence
  Synthetic: FXN 3 reverse 9:69038415-69038439; As/LbCpf1
aactagaaaatgtagaatta

SEQ ID NO: 7848 - DNA, 21 bp, Artificial Sequence
  Synthetic: FXN 3 reverse 9:69038415-69038440; As/LbCpf1
aactagaaaatgtagaattat

SEQ ID NO: 7849 - DNA, 22 bp, Artificial Sequence
  Synthetic: FXN 3 reverse 9:69038415-69038441; As/LbCpf1
aactagaaaatgtagaattatg

SEQ ID NO: 7850 - DNA, 23 bp, Artificial Sequence
  Synthetic: FXN 3 reverse 9:69038415-69038442; As/LbCpf1
aactagaaaatgtagaattatgt

SEQ ID NO: 7851 - DNA, 24 bp, Artificial Sequence
  Synthetic: FXN 3 reverse 9:69038415-69038443; As/LbCpf1
aactagaaaatgtagaattatgtg

SEQ ID NO: 7852 - DNA, 25 bp, Artificial Sequence
  Synthetic: FXN 3 reverse 9:69038415-69038444; As/LbCpf1
aactagaaaatgtagaattatgtgt

SEQ ID NO: 7853 - DNA, 18 bp, Artificial Sequence
  Synthetic: FXN 3 reverse 9:69038416-69038438; As/LbCpf1
taactagaaaatgtagaa

SEQ ID NO: 7854 - DNA, 19 bp, Artificial Sequence
  Synthetic: FXN 3 reverse 9:69038416-69038439; As/LbCpf1
taactagaaaatgtagaat

SEQ ID NO: 7855 - DNA, 20 bp, Artificial Sequence
  Synthetic: FXN 3 reverse 9:69038416-69038440; As/LbCpf1
taactagaaaatgtagaatt

SEQ ID NO: 7856 - DNA, 21 bp, Artificial Sequence
  Synthetic: FXN 3 reverse 9:69038416-69038441; As/LbCpf1
taactagaaaatgtagaatta

SEQ ID NO: 7857 - DNA, 22 bp, Artificial Sequence
  Synthetic: FXN 3 reverse 9:69038416-69038442; As/LbCpf1
taactagaaaatgtagaattat

SEQ ID NO: 7858 - DNA, 23 bp, Artificial Sequence
  Synthetic: FXN 3 reverse 9:69038416-69038443; As/LbCpf1
taactagaaaatgtagaattatg

SEQ ID NO: 7859 - DNA, 24 bp, Artificial Sequence
  Synthetic: FXN 3 reverse 9:69038416-69038444; As/LbCpf1
taactagaaaatgtagaattatgt

SEQ ID NO: 7860 - DNA, 25 bp, Artificial Sequence
  Synthetic: FXN 3 reverse 9:69038416-69038445; As/LbCpf1
taactagaaaatgtagaattatgtg

SEQ ID NO: 7861 - DNA, 18 bp, Artificial Sequence
  Synthetic: FXN 3 reverse 9:69038420-69038442; As/LbCpf1
tttttaactagaaaatgt

SEQ ID NO: 7862 - DNA, 19 bp, Artificial Sequence
  Synthetic: FXN 3 reverse 9:69038420-69038443; As/LbCpf1
tttttaactagaaaatgta

SEQ ID NO: 7863 - DNA, 20 bp, Artificial Sequence
  Synthetic: FXN 3 reverse 9:69038420-69038444; As/LbCpf1
tttttaactagaaaatgtag

SEQ ID NO: 7864 - DNA, 21 bp, Artificial Sequence
  Synthetic: FXN 3 reverse 9:69038420-69038445; As/LbCpf1
tttttaactagaaaatgtaga

SEQ ID NO: 7865 - DNA, 22 bp, Artificial Sequence
  Synthetic: FXN 3 reverse 9:69038420-69038446; As/LbCpf1
tttttaactagaaaatgtagaa

SEQ ID NO: 7866 - DNA, 23 bp, Artificial Sequence
  Synthetic: FXN 3 reverse 9:69038420-69038447; As/LbCpf1
tttttaactagaaaatgtagaat

SEQ ID NO: 7867 - DNA, 24 bp, Artificial Sequence
  Synthetic: FXN 3 reverse 9:69038420-69038448; As/LbCpf1
tttttaactagaaaatgtagaatt

SEQ ID NO: 7868 - DNA, 25 bp, Artificial Sequence
  Synthetic: FXN 3 reverse 9:69038420-69038449; As/LbCpf1
tttttaactagaaaatgtagaatta

SEQ ID NO: 7869 - DNA, 18 bp, Artificial Sequence
  Synthetic: FXN 3 reverse 9:69038421-69038443; As/LbCpf1
ctttttaactagaaaatg

SEQ ID NO: 7870 - DNA, 19 bp, Artificial Sequence
  Synthetic: FXN 3 reverse 9:69038421-69038444; As/LbCpf1
ctttttaactagaaaatgt

SEQ ID NO: 7871 - DNA, 20 bp, Artificial Sequence
  Synthetic: FXN 3 reverse 9:69038421-69038445; As/LbCpf1
ctttttaactagaaaatgta

SEQ ID NO: 7872 - DNA, 21 bp, Artificial Sequence
  Synthetic: FXN 3 reverse 9:69038421-69038446; As/LbCpf1
ctttttaactagaaaatgtag

SEQ ID NO: 7873 - DNA, 22 bp, Artificial Sequence
  Synthetic: FXN 3 reverse 9:69038421-69038447; As/LbCpf1
ctttttaactagaaaatgtaga

SEQ ID NO: 7874 - DNA, 23 bp, Artificial Sequence
  Synthetic: FXN 3 reverse 9:69038421-69038448; As/LbCpf1
ctttttaactagaaaatgtagaa

SEQ ID NO: 7875 - DNA, 24 bp, Artificial Sequence
  Synthetic: FXN 3 reverse 9:69038421-69038449; As/LbCpf1
ctttttaactagaaaatgtagaat

SEQ ID NO: 7876 - DNA, 25 bp, Artificial Sequence
  Synthetic: FXN 3 reverse 9:69038421-69038450; As/LbCpf1
ctttttaactagaaaatgtagaatt

SEQ ID NO: 7877 - DNA, 18 bp, Artificial Sequence
  Synthetic: FXN 3 reverse 9:69038422-69038444; As/LbCpf1
tctttttaactagaaaat

SEQ ID NO: 7878 - DNA, 19 bp, Artificial Sequence
  Synthetic: FXN 3 reverse 9:69038422-69038445; As/LbCpf1
tctttttaactagaaaatg

SEQ ID NO: 7879 - DNA, 20 bp, Artificial Sequence
  Synthetic: FXN 3 reverse 9:69038422-69038446; As/LbCpf1
tctttttaactagaaaatgt

SEQ ID NO: 7880 - DNA, 21 bp, Artificial Sequence
  Synthetic: FXN 3 reverse 9:69038422-69038447; As/LbCpf1
tctttttaactagaaaatgta

SEQ ID NO: 7881 - DNA, 22 bp, Artificial Sequence
  Synthetic: FXN 3 reverse 9:69038422-69038448; As/LbCpf1
tctttttaactagaaaatgtag

SEQ ID NO: 7882 - DNA, 23 bp, Artificial Sequence
  Synthetic: FXN 3 reverse 9:69038422-69038449; As/LbCpf1
tctttttaactagaaaatgtaga

SEQ ID NO: 7883 - DNA, 24 bp, Artificial Sequence
  Synthetic: FXN 3 reverse 9:69038422-69038450; As/LbCpf1
tctttttaactagaaaatgtagaa

SEQ ID NO: 7884 - DNA, 25 bp, Artificial Sequence
  Synthetic: FXN 3 reverse 9:69038422-69038451; As/LbCpf1
tctttttaactagaaaatgtagaat

SEQ ID NO: 7885 - DNA, 18 bp, Artificial Sequence
  Synthetic: FXN 3 reverse 9:69038423-69038445; As/LbCpf1
ttctttttaactagaaaa

SEQ ID NO: 7886 - DNA, 19 bp, Artificial Sequence
  Synthetic: FXN 3 reverse 9:69038423-69038446; As/LbCpf1
ttctttttaactagaaaat

SEQ ID NO: 7887 - DNA, 20 bp, Artificial Sequence
  Synthetic: FXN 3 reverse 9:69038423-69038447; As/LbCpf1
ttctttttaactagaaaatg

SEQ ID NO: 7888 - DNA, 21 bp, Artificial Sequence
  Synthetic: FXN 3 reverse 9:69038423-69038448; As/LbCpf1
ttctttttaactagaaaatgt

SEQ ID NO: 7889 - DNA, 22 bp, Artificial Sequence
  Synthetic: FXN 3 reverse 9:69038423-69038449; As/LbCpf1
ttctttttaactagaaaatgta

SEQ ID NO: 7890 - DNA, 23 bp, Artificial Sequence
  Synthetic: FXN 3 reverse 9:69038423-69038450; As/LbCpf1
ttctttttaactagaaaatgtag

SEQ ID NO: 7891 - DNA, 24 bp, Artificial Sequence
  Synthetic: FXN 3 reverse 9:69038423-69038451; As/LbCpf1
ttctttttaactagaaaatgtaga

SEQ ID NO: 7892 - DNA, 25 bp, Artificial Sequence
  Synthetic: FXN 3 reverse 9:69038423-69038452; As/LbCpf1
ttctttttaactagaaaatgtagaa

SEQ ID NO: 7893 - DNA, 18 bp, Artificial Sequence
  Synthetic: FXN 3 reverse 9:69038424-69038446; As/LbCpf1
tttctttttaactagaaa

SEQ ID NO: 7894 - DNA, 19 bp, Artificial Sequence
  Synthetic: FXN 3 reverse 9:69038424-69038447; As/LbCpf1
tttctttttaactagaaaa

SEQ ID NO: 7895 - DNA, 20 bp, Artificial Sequence
  Synthetic: FXN 3 reverse 9:69038424-69038448; As/LbCpf1
tttctttttaactagaaaat

SEQ ID NO: 7896 - DNA, 21 bp, Artificial Sequence
  Synthetic: FXN 3 reverse 9:69038424-69038449; As/LbCpf1
tttctttttaactagaaaatg

SEQ ID NO: 7897 - DNA, 22 bp, Artificial Sequence
  Synthetic: FXN 3 reverse 9:69038424-69038450; As/LbCpf1
tttctttttaactagaaaatgt

SEQ ID NO: 7898 - DNA, 23 bp, Artificial Sequence
  Synthetic: FXN 3 reverse 9:69038424-69038451; As/LbCpf1
tttctttttaactagaaaatgta

SEQ ID NO: 7899 - DNA, 24 bp, Artificial Sequence
  Synthetic: FXN 3 reverse 9:69038424-69038452; As/LbCpf1
tttctttttaactagaaaatgtag

SEQ ID NO: 7900 - DNA, 25 bp, Artificial Sequence
  Synthetic: FXN 3 reverse 9:69038424-69038453; As/LbCpf1
tttctttttaactagaaaatgtaga

SEQ ID NO: 7901 - DNA, 18 bp, Artificial Sequence
  Synthetic: FXN 3 reverse 9:69038425-69038447; As/LbCpf1
ttttctttttaactagaa

SEQ ID NO: 7902 - DNA, 19 bp, Artificial Sequence
  Synthetic: FXN 3 reverse 9:69038425-69038448; As/LbCpf1
ttttctttttaactagaaa

SEQ ID NO: 7903 - DNA, 20 bp, Artificial Sequence
  Synthetic: FXN 3 reverse 9:69038425-69038449; As/LbCpf1
ttttctttttaactagaaaa

SEQ ID NO: 7904 - DNA, 21 bp, Artificial Sequence
  Synthetic: FXN 3 reverse 9:69038425-69038450; As/LbCpf1
ttttctttttaactagaaaat

SEQ ID NO: 7905 - DNA, 22 bp, Artificial Sequence
  Synthetic: FXN 3 reverse 9:69038425-69038451; As/LbCpf1
ttttctttttaactagaaaatg

SEQ ID NO: 7906 - DNA, 23 bp, Artificial Sequence
  Synthetic: FXN 3 reverse 9:69038425-69038452; As/LbCpf1
ttttctttttaactagaaaatgt

SEQ ID NO: 7907 - DNA, 24 bp, Artificial Sequence
  Synthetic: FXN 3 reverse 9:69038425-69038453; As/LbCpf1
ttttctttttaactagaaaatgta

SEQ ID NO: 7908 - DNA, 25 bp, Artificial Sequence
  Synthetic: FXN 3 reverse 9:69038425-69038454; As/LbCpf1
ttttctttttaactagaaaatgtag

SEQ ID NO: 7909 - DNA, 18 bp, Artificial Sequence
  Synthetic: FXN 3 reverse 9:69038426-69038448; As/LbCpf1
tttttctttttaactaga

SEQ ID NO: 7910 - DNA, 19 bp, Artificial Sequence
  Synthetic: FXN 3 reverse 9:69038426-69038449; As/LbCpf1
tttttctttttaactagaa

SEQ ID NO: 7911 - DNA, 20 bp, Artificial Sequence
  Synthetic: FXN 3 reverse 9:69038426-69038450; As/LbCpf1
tttttctttttaactagaaa

SEQ ID NO: 7912 - DNA, 21 bp, Artificial Sequence
  Synthetic: FXN 3 reverse 9:69038426-69038451; As/LbCpf1
tttttctttttaactagaaaa

SEQ ID NO: 7913 - DNA, 22 bp, Artificial Sequence
  Synthetic: FXN 3 reverse 9:69038426-69038452; As/LbCpf1
tttttctttttaactagaaaat

SEQ ID NO: 7914 - DNA, 23 bp, Artificial Sequence
  Synthetic: FXN 3 reverse 9:69038426-69038453; As/LbCpf1
tttttctttttaactagaaaatg

SEQ ID NO: 7915 - DNA, 24 bp, Artificial Sequence
  Synthetic: FXN 3 reverse 9:69038426-69038454; As/LbCpf1
tttttctttttaactagaaaatgt

SEQ ID NO: 7916 - DNA, 25 bp, Artificial Sequence
  Synthetic: FXN 3 reverse 9:69038426-69038455; As/LbCpf1
tttttctttttaactagaaaatgta

SEQ ID NO: 7917 - DNA, 18 bp, Artificial Sequence
  Synthetic: FXN 3 forward 9:69038430-69038452; As/LbCpf1
ctagttaaaaagaaaaaa

SEQ ID NO: 7918 - DNA, 19 bp, Artificial Sequence
  Synthetic: FXN 3 forward 9:69038430-69038453; As/LbCpf1
ctagttaaaaagaaaaaaa

SEQ ID NO: 7919 - DNA, 20 bp, Artificial Sequence
  Synthetic: FXN 3 forward 9:69038430-69038454; As/LbCpf1
ctagttaaaaagaaaaaaaa

SEQ ID NO: 7920 - DNA, 21 bp, Artificial Sequence
  Synthetic: FXN 3 forward 9:69038430-69038455; As/LbCpf1
ctagttaaaaagaaaaaaaaa

SEQ ID NO: 7921 - DNA, 22 bp, Artificial Sequence
  Synthetic: FXN 3 forward 9:69038430-69038456; As/LbCpf1
ctagttaaaaagaaaaaaaaat

SEQ ID NO: 7922 - DNA, 23 bp, Artificial Sequence
  Synthetic: FXN 3 forward 9:69038430-69038457; As/LbCpf1
ctagttaaaaagaaaaaaaaatc

SEQ ID NO: 7923 - DNA, 24 bp, Artificial Sequence
  Synthetic: FXN 3 forward 9:69038430-69038458; As/LbCpf1
ctagttaaaaagaaaaaaaaatca

SEQ ID NO: 7924 - DNA, 25 bp, Artificial Sequence
  Synthetic: FXN 3 forward 9:69038430-69038459; As/LbCpf1
ctagttaaaaagaaaaaaaaatcat

SEQ ID NO: 7925 - DNA, 18 bp, Artificial Sequence
  Synthetic: FXN 3 forward 9:69038431-69038453; As/LbCpf1
tagttaaaaagaaaaaaa

SEQ ID NO: 7926 - DNA, 19 bp, Artificial Sequence
  Synthetic: FXN 3 forward 9:69038431-69038454; As/LbCpf1
tagttaaaaagaaaaaaaa

SEQ ID NO: 7927 - DNA, 20 bp, Artificial Sequence
  Synthetic: FXN 3 forward 9:69038431-69038455; As/LbCpf1
tagttaaaaagaaaaaaaaa

SEQ ID NO: 7928 - DNA, 21 bp, Artificial Sequence
  Synthetic: FXN 3 forward 9:69038431-69038456; As/LbCpf1
tagttaaaaagaaaaaaaaat

SEQ ID NO: 7929 - DNA, 22 bp, Artificial Sequence
  Synthetic: FXN 3 forward 9:69038431-69038457; As/LbCpf1
tagttaaaaagaaaaaaaaatc

SEQ ID NO: 7930 - DNA, 23 bp, Artificial Sequence
  Synthetic: FXN 3 forward 9:69038431-69038458; As/LbCpf1
tagttaaaaagaaaaaaaaatca

SEQ ID NO: 7931 - DNA, 24 bp, Artificial Sequence
  Synthetic: FXN 3 forward 9:69038431-69038459; As/LbCpf1
tagttaaaaagaaaaaaaaatcat

SEQ ID NO: 7932 - DNA, 25 bp, Artificial Sequence
  Synthetic: FXN 3 forward 9:69038431-69038460; As/LbCpf1
tagttaaaaagaaaaaaaaatcatt

SEQ ID NO: 7933 - DNA, 18 bp, Artificial Sequence
  Synthetic: FXN 3 forward 9:69038458-69038480; As/LbCpf1
caacaatatatttattca

SEQ ID NO: 7934 - DNA, 19 bp, Artificial Sequence
  Synthetic: FXN 3 forward 9:69038458-69038481; As/LbCpf1
caacaatatatttattcaa

SEQ ID NO: 7935 - DNA, 20 bp, Artificial Sequence
  Synthetic: FXN 3 forward 9:69038458-69038482; As/LbCpf1
caacaatatatttattcaac

SEQ ID NO: 7936 - DNA, 21 bp, Artificial Sequence
  Synthetic: FXN 3 forward 9:69038458-69038483; As/LbCpf1
caacaatatatttattcaacc

SEQ ID NO: 7937 - DNA, 22 bp, Artificial Sequence
  Synthetic: FXN 3 forward 9:69038458-69038484; As/LbCpf1
caacaatatatttattcaacct

SEQ ID NO: 7938 - DNA, 23 bp, Artificial Sequence
  Synthetic: FXN 3 forward 9:69038458-69038485; As/LbCpf1
caacaatatatttattcaaccta

SEQ ID NO: 7939 - DNA, 24 bp, Artificial Sequence
  Synthetic: FXN 3 forward 9:69038458-69038486; As/LbCpf1
caacaatatatttattcaacctag

SEQ ID NO: 7940 - DNA, 25 bp, Artificial Sequence
  Synthetic: FXN 3 forward 9:69038458-69038487; As/LbCpf1
caacaatatatttattcaacctagt

SEQ ID NO: 7941 - DNA, 18 bp, Artificial Sequence
  Synthetic: FXN 3 forward 9:69038459-69038481; As/LbCpf1
aacaatatatttattcaa

SEQ ID NO: 7942 - DNA, 19 bp, Artificial Sequence
  Synthetic: FXN 3 forward 9:69038459-69038482; As/LbCpf1
aacaatatatttattcaac

SEQ ID NO: 7943 - DNA, 20 bp, Artificial Sequence
  Synthetic: FXN 3 forward 9:69038459-69038483; As/LbCpf1
aacaatatatttattcaacc

SEQ ID NO: 7944 - DNA, 21 bp, Artificial Sequence
  Synthetic: FXN 3 forward 9:69038459-69038484; As/LbCpf1
aacaatatatttattcaacct

SEQ ID NO: 7945 - DNA, 22 bp, Artificial Sequence
  Synthetic: FXN 3 forward 9:69038459-69038485; As/LbCpf1
aacaatatatttattcaaccta

SEQ ID NO: 7946 - DNA, 23 bp, Artificial Sequence
  Synthetic: FXN 3 forward 9:69038459-69038486; As/LbCpf1
aacaatatatttattcaacctag

SEQ ID NO: 7947 - DNA, 24 bp, Artificial Sequence
  Synthetic: FXN 3 forward 9:69038459-69038487; As/LbCpf1
aacaatatatttattcaacctagt

SEQ ID NO: 7948 - DNA, 25 bp, Artificial Sequence
  Synthetic: FXN 3 forward 9:69038459-69038488; As/LbCpf1
aacaatatatttattcaacctagta

SEQ ID NO: 7949 - DNA, 18 bp, Artificial Sequence
  Synthetic: FXN 3 reverse 9:69038467-69038489; As/LbCpf1
tatgtactaggttgaata

SEQ ID NO: 7950 - DNA, 19 bp, Artificial Sequence
  Synthetic: FXN 3 reverse 9:69038467-69038490; As/LbCpf1
tatgtactaggttgaataa

SEQ ID NO: 7951 - DNA, 20 bp, Artificial Sequence
  Synthetic: FXN 3 reverse 9:69038467-69038491; As/LbCpf1
tatgtactaggttgaataaa

SEQ ID NO: 7952 - DNA, 21 bp, Artificial Sequence
  Synthetic: FXN 3 reverse 9:69038467-69038492; As/LbCpf1
tatgtactaggttgaataaat

SEQ ID NO: 7953 - DNA, 22 bp, Artificial Sequence
  Synthetic: FXN 3 reverse 9:69038467-69038493; As/LbCpf1
tatgtactaggttgaataaata

SEQ ID NO: 7954 - DNA, 23 bp, Artificial Sequence
  Synthetic: FXN 3 reverse 9:69038467-69038494; As/LbCpf1
tatgtactaggttgaataaatat

SEQ ID NO: 7955 - DNA, 24 bp, Artificial Sequence
  Synthetic: FXN 3 reverse 9:69038467-69038495; As/LbCpf1
tatgtactaggttgaataaatata

SEQ ID NO: 7956 - DNA, 25 bp, Artificial Sequence
  Synthetic: FXN 3 reverse 9:69038467-69038496; As/LbCpf1
tatgtactaggttgaataaatatat

SEQ ID NO: 7957 - DNA, 18 bp, Artificial Sequence
  Synthetic: FXN 3 reverse 9:69038468-69038490; As/LbCpf1
gtatgtactaggttgaat

SEQ ID NO: 7958 - DNA, 19 bp, Artificial Sequence
  Synthetic: FXN 3 reverse 9:69038468-69038491; As/LbCpf1
gtatgtactaggttgaata

SEQ ID NO: 7959 - DNA, 20 bp, Artificial Sequence
  Synthetic: FXN 3 reverse 9:69038468-69038492; As/LbCpf1
gtatgtactaggttgaataa

SEQ ID NO: 7960 - DNA, 21 bp, Artificial Sequence
  Synthetic: FXN 3 reverse 9:69038468-69038493; As/LbCpf1
gtatgtactaggttgaataaa

SEQ ID NO: 7961 - DNA, 22 bp, Artificial Sequence
  Synthetic: FXN 3 reverse 9:69038468-69038494; As/LbCpf1
gtatgtactaggttgaataaat

SEQ ID NO: 7962 - DNA, 23 bp, Artificial Sequence
  Synthetic: FXN 3 reverse 9:69038468-69038495; As/LbCpf1
gtatgtactaggttgaataaata

SEQ ID NO: 7963 - DNA, 24 bp, Artificial Sequence
  Synthetic: FXN 3 reverse 9:69038468-69038496; As/LbCpf1
gtatgtactaggttgaataaatat

SEQ ID NO: 7964 - DNA, 25 bp, Artificial Sequence
  Synthetic: FXN 3 reverse 9:69038468-69038497; As/LbCpf1
gtatgtactaggttgaataaatata

SEQ ID NO: 7965 - DNA, 18 bp, Artificial Sequence
  Synthetic: FXN 3 forward 9:69038472-69038494; As/LbCpf1
ttcaacctagtacataca

SEQ ID NO: 7966 - DNA, 19 bp, Artificial Sequence
  Synthetic: FXN 3 forward 9:69038472-69038495; As/LbCpf1
ttcaacctagtacatacaa

SEQ ID NO: 7967 - DNA, 20 bp, Artificial Sequence
  Synthetic: FXN 3 forward 9:69038472-69038496; As/LbCpf1
ttcaacctagtacatacaaa

SEQ ID NO: 7968 - DNA, 21 bp, Artificial Sequence
  Synthetic: FXN 3 forward 9:69038472-69038497; As/LbCpf1
ttcaacctagtacatacaaaa

SEQ ID NO: 7969 - DNA, 22 bp, Artificial Sequence
  Synthetic: FXN 3 forward 9:69038472-69038498; As/LbCpf1
ttcaacctagtacatacaaaat

SEQ ID NO: 7970 - DNA, 23 bp, Artificial Sequence
  Synthetic: FXN 3 forward 9:69038472-69038499; As/LbCpf1
ttcaacctagtacatacaaaata

SEQ ID NO: 7971 - DNA, 24 bp, Artificial Sequence
  Synthetic: FXN 3 forward 9:69038472-69038500; As/LbCpf1
ttcaacctagtacatacaaaatat

SEQ ID NO: 7972 - DNA, 25 bp, Artificial Sequence
  Synthetic: FXN 3 forward 9:69038472-69038501; As/LbCpf1
ttcaacctagtacatacaaaatatt

SEQ ID NO: 7973 - DNA, 18 bp, Artificial Sequence
  Synthetic: FXN 3 reverse 9:69038502-69038524; As/LbCpf1
aaatactgattacatgtt

SEQ ID NO: 7974 - DNA, 19 bp, Artificial Sequence
  Synthetic: FXN 3 reverse 9:69038502-69038525; As/LbCpf1
aaatactgattacatgttg

SEQ ID NO: 7975 - DNA, 20 bp, Artificial Sequence
  Synthetic: FXN 3 reverse 9:69038502-69038526; As/LbCpf1
aaatactgattacatgttgg

SEQ ID NO: 7976 - DNA, 21 bp, Artificial Sequence
  Synthetic: FXN 3 reverse 9:69038502-69038527; As/LbCpf1
aaatactgattacatgttgga

SEQ ID NO: 7977 - DNA, 22 bp, Artificial Sequence
  Synthetic: FXN 3 reverse 9:69038502-69038528; As/LbCpf1
aaatactgattacatgttggaa

SEQ ID NO: 7978 - DNA, 23 bp, Artificial Sequence
  Synthetic: FXN 3 reverse 9:69038502-69038529; As/LbCpf1
aaatactgattacatgttggaat

SEQ ID NO: 7979 - DNA, 24 bp, Artificial Sequence
  Synthetic: FXN 3 reverse 9:69038502-69038530; As/LbCpf1
aaatactgattacatgttggaatg

SEQ ID NO: 7980 - DNA, 25 bp, Artificial Sequence
  Synthetic: FXN 3 reverse 9:69038502-69038531; As/LbCpf1
aaatactgattacatgttggaatga

SEQ ID NO: 7981 - DNA, 18 bp, Artificial Sequence
  Synthetic: FXN 3 reverse 9:69038503-69038525; As/LbCpf1
aaaatactgattacatgt

SEQ ID NO: 7982 - DNA, 19 bp, Artificial Sequence
  Synthetic: FXN 3 reverse 9:69038503-69038526; As/LbCpf1
aaaatactgattacatgtt

SEQ ID NO: 7983 - DNA, 20 bp, Artificial Sequence
  Synthetic: FXN 3 reverse 9:69038503-69038527; As/LbCpf1
aaaatactgattacatgttg

SEQ ID NO: 7984 - DNA, 21 bp, Artificial Sequence
  Synthetic: FXN 3 reverse 9:69038503-69038528; As/LbCpf1
aaaatactgattacatgttgg

SEQ ID NO: 7985 - DNA, 22 bp, Artificial Sequence
  Synthetic: FXN 3 reverse 9:69038503-69038529; As/LbCpf1
aaaatactgattacatgttgga

SEQ ID NO: 7986 - DNA, 23 bp, Artificial Sequence
  Synthetic: FXN 3 reverse 9:69038503-69038530; As/LbCpf1
aaaatactgattacatgttggaa

SEQ ID NO: 7987 - DNA, 24 bp, Artificial Sequence
  Synthetic: FXN 3 reverse 9:69038503-69038531; As/LbCpf1
aaaatactgattacatgttggaat

SEQ ID NO: 7988 - DNA, 25 bp, Artificial Sequence
  Synthetic: FXN 3 reverse 9:69038503-69038532; As/LbCpf1
aaaatactgattacatgttggaatg

SEQ ID NO: 7989 - DNA, 18 bp, Artificial Sequence
  Synthetic: FXN 3 reverse 9:69038504-69038526; As/LbCpf1
taaaatactgattacatg

SEQ ID NO: 7990 - DNA, 19 bp, Artificial Sequence
  Synthetic: FXN 3 reverse 9:69038504-69038527; As/LbCpf1
taaaatactgattacatgt

SEQ ID NO: 7991 - DNA, 20 bp, Artificial Sequence
  Synthetic: FXN 3 reverse 9:69038504-69038528; As/LbCpf1
taaaatactgattacatgtt

SEQ ID NO: 7992 - DNA, 21 bp, Artificial Sequence
  Synthetic: FXN 3 reverse 9:69038504-69038529; As/LbCpf1
taaaatactgattacatgttg

SEQ ID NO: 7993 - DNA, 22 bp, Artificial Sequence
  Synthetic: FXN 3 reverse 9:69038504-69038530; As/LbCpf1
taaaatactgattacatgttgg

SEQ ID NO: 7994 - DNA, 23 bp, Artificial Sequence
  Synthetic: FXN 3 reverse 9:69038504-69038531; As/LbCpf1
taaaatactgattacatgttgga

SEQ ID NO: 7995 - DNA, 24 bp, Artificial Sequence
  Synthetic: FXN 3 reverse 9:69038504-69038532; As/LbCpf1
taaaatactgattacatgttggaa

SEQ ID NO: 7996 - DNA, 25 bp, Artificial Sequence
  Synthetic: FXN 3 reverse 9:69038504-69038533; As/LbCpf1
taaaatactgattacatgttggaat

SEQ ID NO: 7997 - DNA, 18 bp, Artificial Sequence
  Synthetic: FXN 3 forward 9:69038524-69038546; As/LbCpf1
aaaaatcagtaatgagac

SEQ ID NO: 7998 - DNA, 19 bp, Artificial Sequence
  Synthetic: FXN 3 forward 9:69038524-69038547; As/LbCpf1
aaaaatcagtaatgagacc

SEQ ID NO: 7999 - DNA, 20 bp, Artificial Sequence
  Synthetic: FXN 3 forward 9:69038524-69038548; As/LbCpf1
aaaaatcagtaatgagacca

SEQ ID NO: 8000 - DNA, 21 bp, Artificial Sequence
  Synthetic: FXN 3 forward 9:69038524-69038549; As/LbCpf1
aaaaatcagtaatgagaccag

SEQ ID NO: 8001 - DNA, 22 bp, Artificial Sequence
  Synthetic: FXN 3 forward 9:69038524-69038550; As/LbCpf1
aaaaatcagtaatgagaccagg

SEQ ID NO: 8002 - DNA, 23 bp, Artificial Sequence
  Synthetic: FXN 3 forward 9:69038524-69038551; As/LbCpf1
aaaaatcagtaatgagaccaggc

SEQ ID NO: 8003 - DNA, 24 bp, Artificial Sequence
  Synthetic: FXN 3 forward 9:69038524-69038552; As/LbCpf1
aaaaatcagtaatgagaccaggca

SEQ ID NO: 8004 - DNA, 25 bp, Artificial Sequence
  Synthetic: FXN 3 forward 9:69038524-69038553; As/LbCpf1
aaaaatcagtaatgagaccaggcac

SEQ ID NO: 8005 - DNA, 18 bp, Artificial Sequence
  Synthetic: FXN 3 forward 9:69038525-69038547; As/LbCpf1
aaaatcagtaatgagacc

SEQ ID NO: 8006 - DNA, 19 bp, Artificial Sequence
  Synthetic: FXN 3 forward 9:69038525-69038548; As/LbCpf1
aaaatcagtaatgagacca

SEQ ID NO: 8007 - DNA, 20 bp, Artificial Sequence
  Synthetic: FXN 3 forward 9:69038525-69038549; As/LbCpf1
aaaatcagtaatgagaccag

SEQ ID NO: 8008 - DNA, 21 bp, Artificial Sequence
  Synthetic: FXN 3 forward 9:69038525-69038550; As/LbCpf1
aaaatcagtaatgagaccagg

SEQ ID NO: 8009 - DNA, 22 bp, Artificial Sequence
  Synthetic: FXN 3 forward 9:69038525-69038551; As/LbCpf1
aaaatcagtaatgagaccaggc

SEQ ID NO: 8010 - DNA, 23 bp, Artificial Sequence
  Synthetic: FXN 3 forward 9:69038525-69038552; As/LbCpf1
aaaatcagtaatgagaccaggca

SEQ ID NO: 8011 - DNA, 24 bp, Artificial Sequence
  Synthetic: FXN 3 forward 9:69038525-69038553; As/LbCpf1
aaaatcagtaatgagaccaggcac

SEQ ID NO: 8012 - DNA, 25 bp, Artificial Sequence
  Synthetic: FXN 3 forward 9:69038525-69038554; As/LbCpf1
aaaatcagtaatgagaccaggcacg

SEQ ID NO: 8013 - DNA, 18 bp, Artificial Sequence
  Synthetic: FXN 3 forward 9:69038580-69038602; As/LbCpf1
ggaggccgaggcgagtgg

SEQ ID NO: 8014 - DNA, 19 bp, Artificial Sequence
  Synthetic: FXN 3 forward 9:69038580-69038603; As/LbCpf1
ggaggccgaggcgagtgga

SEQ ID NO: 8015 - DNA, 20 bp, Artificial Sequence
  Synthetic: FXN 3 forward 9:69038580-69038604; As/LbCpf1
ggaggccgaggcgagtggat

SEQ ID NO: 8016 - DNA, 21 bp, Artificial Sequence
  Synthetic: FXN 3 forward 9:69038580-69038605; As/LbCpf1
ggaggccgaggcgagtggatc

SEQ ID NO: 8017 - DNA, 22 bp, Artificial Sequence
  Synthetic: FXN 3 forward 9:69038580-69038606; As/LbCpf1
ggaggccgaggcgagtggatca

SEQ ID NO: 8018 - DNA, 23 bp, Artificial Sequence
  Synthetic: FXN 3 forward 9:69038580-69038607; As/LbCpf1
ggaggccgaggcgagtggatcat

SEQ ID NO: 8019 - DNA, 24 bp, Artificial Sequence
  Synthetic: FXN 3 forward 9:69038580-69038608; As/LbCpf1
ggaggccgaggcgagtggatcatc

SEQ ID NO: 8020 - DNA, 25 bp, Artificial Sequence
  Synthetic: FXN 3 forward 9:69038580-69038609; As/LbCpf1
ggaggccgaggcgagtggatcatct

SEQ ID NO: 8021 - DNA, 18 bp, Artificial Sequence
  Synthetic: FXN 3 reverse 9:69038621-69038643; As/LbCpf1
accatgttggccaggctg

SEQ ID NO: 8022 - DNA, 19 bp, Artificial Sequence
  Synthetic: FXN 3 reverse 9:69038621-69038644; As/LbCpf1
accatgttggccaggctgg

SEQ ID NO: 8023 - DNA, 20 bp, Artificial Sequence
  Synthetic: FXN 3 reverse 9:69038621-69038645; As/LbCpf1
accatgttggccaggctggt

SEQ ID NO: 8024 - DNA, 21 bp, Artificial Sequence
  Synthetic: FXN 3 reverse 9:69038621-69038646; As/LbCpf1
accatgttggccaggctggtc

SEQ ID NO: 8025 - DNA, 22 bp, Artificial Sequence
  Synthetic: FXN 3 reverse 9:69038621-69038647; As/LbCpf1
accatgttggccaggctggtct

SEQ ID NO: 8026 - DNA, 23 bp, Artificial Sequence
  Synthetic: FXN 3 reverse 9:69038621-69038648; As/LbCpf1
accatgttggccaggctggtctt

SEQ ID NO: 8027 - DNA, 24 bp, Artificial Sequence
  Synthetic: FXN 3 reverse 9:69038621-69038649; As/LbCpf1
accatgttggccaggctggtcttg

SEQ ID NO: 8028 - DNA, 25 bp, Artificial Sequence
  Synthetic: FXN 3 reverse 9:69038621-69038650; As/LbCpf1
accatgttggccaggctggtcttga

SEQ ID NO: 8029 - DNA, 18 bp, Artificial Sequence
  Synthetic: FXN 3 reverse 9:69038637-69038659; As/LbCpf1
gtagagatggggtttcac

SEQ ID NO: 8030 - DNA, 19 bp, Artificial Sequence
  Synthetic: FXN 3 reverse 9:69038637-69038660; As/LbCpf1
gtagagatggggtttcacc

SEQ ID NO: 8031 - DNA, 20 bp, Artificial Sequence
  Synthetic: FXN 3 reverse 9:69038637-69038661; As/LbCpf1
gtagagatggggtttcacca

SEQ ID NO: 8032 - DNA, 21 bp, Artificial Sequence
  Synthetic: FXN 3 reverse 9:69038637-69038662; As/LbCpf1
gtagagatggggtttcaccat

SEQ ID NO: 8033 - DNA, 22 bp, Artificial Sequence
  Synthetic: FXN 3 reverse 9:69038637-69038663; As/LbCpf1
gtagagatggggtttcaccatg

SEQ ID NO: 8034 - DNA, 23 bp, Artificial Sequence
  Synthetic: FXN 3 reverse 9:69038637-69038664; As/LbCpf1
gtagagatggggtttcaccatgt

SEQ ID NO: 8035 - DNA, 24 bp, Artificial Sequence
  Synthetic: FXN 3 reverse 9:69038637-69038665; As/LbCpf1
gtagagatggggtttcaccatgtt

SEQ ID NO: 8036 - DNA, 25 bp, Artificial Sequence
  Synthetic: FXN 3 reverse 9:69038637-69038666; As/LbCpf1
gtagagatggggtttcaccatgttg

SEQ ID NO: 8037 - DNA, 18 bp, Artificial Sequence
  Synthetic: FXN 3 reverse 9:69038638-69038660; As/LbCpf1
agtagagatggggtttca

SEQ ID NO: 8038 - DNA, 19 bp, Artificial Sequence
  Synthetic: FXN 3 reverse 9:69038638-69038661; As/LbCpf1
agtagagatggggtttcac

SEQ ID NO: 8039 - DNA, 20 bp, Artificial Sequence
  Synthetic: FXN 3 reverse 9:69038638-69038662; As/LbCpf1
agtagagatggggtttcacc

SEQ ID NO: 8040 - DNA, 21 bp, Artificial Sequence
  Synthetic: FXN 3 reverse 9:69038638-69038663; As/LbCpf1
agtagagatggggtttcacca

SEQ ID NO: 8041 - DNA, 22 bp, Artificial Sequence
  Synthetic: FXN 3 reverse 9:69038638-69038664; As/LbCpf1
agtagagatggggtttcaccat

SEQ ID NO: 8042 - DNA, 23 bp, Artificial Sequence
  Synthetic: FXN 3 reverse 9:69038638-69038665; As/LbCpf1
agtagagatggggtttcaccatg

SEQ ID NO: 8043 - DNA, 24 bp, Artificial Sequence
  Synthetic: FXN 3 reverse 9:69038638-69038666; As/LbCpf1
agtagagatggggtttcaccatgt

SEQ ID NO: 8044 - DNA, 25 bp, Artificial Sequence
  Synthetic: FXN 3 reverse 9:69038638-69038667; As/LbCpf1
agtagagatggggtttcaccatgtt

SEQ ID NO: 8045 - DNA, 18 bp, Artificial Sequence
  Synthetic: FXN 3 reverse 9:69038639-69038661; As/LbCpf1
tagtagagatggggtttc

SEQ ID NO: 8046 - DNA, 19 bp, Artificial Sequence
  Synthetic: FXN 3 reverse 9:69038639-69038662; As/LbCpf1
tagtagagatggggtttca

SEQ ID NO: 8047 - DNA, 20 bp, Artificial Sequence
  Synthetic: FXN 3 reverse 9:69038639-69038663; As/LbCpf1
tagtagagatggggtttcac

SEQ ID NO: 8048 - DNA, 21 bp, Artificial Sequence
  Synthetic: FXN 3 reverse 9:69038639-69038664; As/LbCpf1
tagtagagatggggtttcacc

SEQ ID NO: 8049 - DNA, 22 bp, Artificial Sequence
  Synthetic: FXN 3 reverse 9:69038639-69038665; As/LbCpf1
tagtagagatggggtttcacca

SEQ ID NO: 8050 - DNA, 23 bp, Artificial Sequence
  Synthetic: FXN 3 reverse 9:69038639-69038666; As/LbCpf1
tagtagagatggggtttcaccat

SEQ ID NO: 8051 - DNA, 24 bp, Artificial Sequence
  Synthetic: FXN 3 reverse 9:69038639-69038667; As/LbCpf1
tagtagagatggggtttcaccatg

SEQ ID NO: 8052 - DNA, 25 bp, Artificial Sequence
  Synthetic: FXN 3 reverse 9:69038639-69038668; As/LbCpf1
tagtagagatggggtttcaccatgt

SEQ ID NO: 8053 - DNA, 18 bp, Artificial Sequence
  Synthetic: FXN 3 reverse 9:69038767-69038789; As/LbCpf1
tatgtcacagaatccccc

SEQ ID NO: 8054 - DNA, 19 bp, Artificial Sequence
  Synthetic: FXN 3 reverse 9:69038767-69038790; As/LbCpf1
tatgtcacagaatccccca

SEQ ID NO: 8055 - DNA, 20 bp, Artificial Sequence
  Synthetic: FXN 3 reverse 9:69038767-69038791; As/LbCpf1
tatgtcacagaatcccccaa

SEQ ID NO: 8056 - DNA, 21 bp, Artificial Sequence
  Synthetic: FXN 3 reverse 9:69038767-69038792; As/LbCpf1
tatgtcacagaatcccccaaa

SEQ ID NO: 8057 - DNA, 22 bp, Artificial Sequence
  Synthetic: FXN 3 reverse 9:69038767-69038793; As/LbCpf1
tatgtcacagaatcccccaaaa

SEQ ID NO: 8058 - DNA, 23 bp, Artificial Sequence
  Synthetic: FXN 3 reverse 9:69038767-69038794; As/LbCpf1
tatgtcacagaatcccccaaaat

SEQ ID NO: 8059 - DNA, 24 bp, Artificial Sequence
  Synthetic: FXN 3 reverse 9:69038767-69038795; As/LbCpf1
tatgtcacagaatcccccaaaatc

SEQ ID NO: 8060 - DNA, 25 bp, Artificial Sequence
  Synthetic: FXN 3 reverse 9:69038767-69038796; As/LbCpf1
tatgtcacagaatcccccaaaatct

SEQ ID NO: 8061 - DNA, 18 bp, Artificial Sequence
  Synthetic: FXN 3 reverse 9:69038768-69038790; As/LbCpf1
gtatgtcacagaatcccc

SEQ ID NO: 8062 - DNA, 19 bp, Artificial Sequence
  Synthetic: FXN 3 reverse 9:69038768-69038791; As/LbCpf1
gtatgtcacagaatccccc

SEQ ID NO: 8063 - DNA, 20 bp, Artificial Sequence
  Synthetic: FXN 3 reverse 9:69038768-69038792; As/LbCpf1
gtatgtcacagaatccccca

SEQ ID NO: 8064 - DNA, 21 bp, Artificial Sequence
  Synthetic: FXN 3 reverse 9:69038768-69038793; As/LbCpf1
gtatgtcacagaatcccccaa

SEQ ID NO: 8065 - DNA, 22 bp, Artificial Sequence
  Synthetic: FXN 3 reverse 9:69038768-69038794; As/LbCpf1
gtatgtcacagaatcccccaaa

SEQ ID NO: 8066 - DNA, 23 bp, Artificial Sequence
  Synthetic: FXN 3 reverse 9:69038768-69038795; As/LbCpf1
gtatgtcacagaatcccccaaaa

SEQ ID NO: 8067 - DNA, 24 bp, Artificial Sequence
  Synthetic: FXN 3 reverse 9:69038768-69038796; As/LbCpf1
gtatgtcacagaatcccccaaaat

SEQ ID NO: 8068 - DNA, 25 bp, Artificial Sequence
  Synthetic: FXN 3 reverse 9:69038768-69038797; As/LbCpf1
gtatgtcacagaatcccccaaaatc

SEQ ID NO: 8069 - DNA, 18 bp, Artificial Sequence
  Synthetic: FXN 3 reverse 9:69038769-69038791; As/LbCpf1
tgtatgtcacagaatccc

SEQ ID NO: 8070 - DNA, 19 bp, Artificial Sequence
  Synthetic: FXN 3 reverse 9:69038769-69038792; As/LbCpf1
tgtatgtcacagaatcccc

SEQ ID NO: 8071 - DNA, 20 bp, Artificial Sequence
  Synthetic: FXN 3 reverse 9:69038769-69038793; As/LbCpf1
tgtatgtcacagaatccccc

SEQ ID NO: 8072 - DNA, 21 bp, Artificial Sequence
  Synthetic: FXN 3 reverse 9:69038769-69038794; As/LbCpf1
tgtatgtcacagaatccccca

SEQ ID NO: 8073 - DNA, 22 bp, Artificial Sequence
  Synthetic: FXN 3 reverse 9:69038769-69038795; As/LbCpf1
tgtatgtcacagaatcccccaa

SEQ ID NO: 8074 - DNA, 23 bp, Artificial Sequence
  Synthetic: FXN 3 reverse 9:69038769-69038796; As/LbCpf1
tgtatgtcacagaatcccccaaa

SEQ ID NO: 8075 - DNA, 24 bp, Artificial Sequence
  Synthetic: FXN 3 reverse 9:69038769-69038797; As/LbCpf1
tgtatgtcacagaatcccccaaaa

SEQ ID NO: 8076 - DNA, 25 bp, Artificial Sequence
  Synthetic: FXN 3 reverse 9:69038769-69038798; As/LbCpf1
tgtatgtcacagaatcccccaaaat

SEQ ID NO: 8077 - DNA, 18 bp, Artificial Sequence
  Synthetic: FXN 3 forward 9:69038770-69038792; As/LbCpf1
gggggattctgtgacata

SEQ ID NO: 8078 - DNA, 19 bp, Artificial Sequence
  Synthetic: FXN 3 forward 9:69038770-69038793; As/LbCpf1
gggggattctgtgacatac

SEQ ID NO: 8079 - DNA, 20 bp, Artificial Sequence
  Synthetic: FXN 3 forward 9:69038770-69038794; As/LbCpf1
gggggattctgtgacataca

SEQ ID NO: 8080 - DNA, 21 bp, Artificial Sequence
  Synthetic: FXN 3 forward 9:69038770-69038795; As/LbCpf1
gggggattctgtgacatacaa

SEQ ID NO: 8081 - DNA, 22 bp, Artificial Sequence
  Synthetic: FXN 3 forward 9:69038770-69038796; As/LbCpf1
gggggattctgtgacatacaaa

SEQ ID NO: 8082 - DNA, 23 bp, Artificial Sequence
  Synthetic: FXN 3 forward 9:69038770-69038797; As/LbCpf1
gggggattctgtgacatacaaaa

SEQ ID NO: 8083 - DNA, 24 bp, Artificial Sequence
  Synthetic: FXN 3 forward 9:69038770-69038798; As/LbCpf1
gggggattctgtgacatacaaaaa

SEQ ID NO: 8084 - DNA, 25 bp, Artificial Sequence
  Synthetic: FXN 3 forward 9:69038770-69038799; As/LbCpf1
gggggattctgtgacatacaaaaaa

SEQ ID NO: 8085 - DNA, 18 bp, Artificial Sequence
  Synthetic: FXN 3 reverse 9:69038770-69038792; As/LbCpf1
ttgtatgtcacagaatcc

SEQ ID NO: 8086 - DNA, 19 bp, Artificial Sequence
  Synthetic: FXN 3 reverse 9:69038770-69038793; As/LbCpf1
ttgtatgtcacagaatccc

SEQ ID NO: 8087 - DNA, 20 bp, Artificial Sequence
  Synthetic: FXN 3 reverse 9:69038770-69038794; As/LbCpf1
ttgtatgtcacagaatcccc

SEQ ID NO: 8088 - DNA, 21 bp, Artificial Sequence
  Synthetic: FXN 3 reverse 9:69038770-69038795; As/LbCpf1
ttgtatgtcacagaatccccc

SEQ ID NO: 8089 - DNA, 22 bp, Artificial Sequence
  Synthetic: FXN 3 reverse 9:69038770-69038796; As/LbCpf1
ttgtatgtcacagaatccccca

SEQ ID NO: 8090 - DNA, 23 bp, Artificial Sequence
  Synthetic: FXN 3 reverse 9:69038770-69038797; As/LbCpf1
ttgtatgtcacagaatcccccaa

SEQ ID NO: 8091 - DNA, 24 bp, Artificial Sequence
  Synthetic: FXN 3 reverse 9:69038770-69038798; As/LbCpf1
ttgtatgtcacagaatcccccaaa

SEQ ID NO: 8092 - DNA, 25 bp, Artificial Sequence
  Synthetic: FXN 3 reverse 9:69038770-69038799; As/LbCpf1
ttgtatgtcacagaatcccccaaaa

SEQ ID NO: 8093 - DNA, 18 bp, Artificial Sequence
  Synthetic: FXN 3 forward 9:69038771-69038793; As/LbCpf1
ggggattctgtgacatac

SEQ ID NO: 8094 - DNA, 19 bp, Artificial Sequence
  Synthetic: FXN 3 forward 9:69038771-69038794; As/LbCpf1
ggggattctgtgacataca

SEQ ID NO: 8095 - DNA, 20 bp, Artificial Sequence
  Synthetic: FXN 3 forward 9:69038771-69038795; As/LbCpf1
ggggattctgtgacatacaa

SEQ ID NO: 8096 - DNA, 21 bp, Artificial Sequence
  Synthetic: FXN 3 forward 9:69038771-69038796; As/LbCpf1
ggggattctgtgacatacaaa

SEQ ID NO: 8097 - DNA, 22 bp, Artificial Sequence
  Synthetic: FXN 3 forward 9:69038771-69038797; As/LbCpf1
ggggattctgtgacatacaaaa

SEQ ID NO: 8098 - DNA, 23 bp, Artificial Sequence
  Synthetic: FXN 3 forward 9:69038771-69038798; As/LbCpf1
ggggattctgtgacatacaaaaa

SEQ ID NO: 8099 - DNA, 24 bp, Artificial Sequence
  Synthetic: FXN 3 forward 9:69038771-69038799; As/LbCpf1
ggggattctgtgacatacaaaaaa

SEQ ID NO: 8100 - DNA, 25 bp, Artificial Sequence
  Synthetic: FXN 3 forward 9:69038771-69038800; As/LbCpf1
ggggattctgtgacatacaaaaaaa

SEQ ID NO: 8101 - DNA, 18 bp, Artificial Sequence
  Synthetic: FXN 3 reverse 9:69038771-69038793; As/LbCpf1
tttgtatgtcacagaatc

SEQ ID NO: 8102 - DNA, 19 bp, Artificial Sequence
  Synthetic: FXN 3 reverse 9:69038771-69038794; As/LbCpf1
tttgtatgtcacagaatcc

SEQ ID NO: 8103 - DNA, 20 bp, Artificial Sequence
  Synthetic: FXN 3 reverse 9:69038771-69038795; As/LbCpf1
tttgtatgtcacagaatccc

SEQ ID NO: 8104 - DNA, 21 bp, Artificial Sequence
  Synthetic: FXN 3 reverse 9:69038771-69038796; As/LbCpf1
tttgtatgtcacagaatcccc

SEQ ID NO: 8105 - DNA, 22 bp, Artificial Sequence
  Synthetic: FXN 3 reverse 9:69038771-69038797; As/LbCpf1
tttgtatgtcacagaatccccc

SEQ ID NO: 8106 - DNA, 23 bp, Artificial Sequence
  Synthetic: FXN 3 reverse 9:69038771-69038798; As/LbCpf1
tttgtatgtcacagaatccccca

SEQ ID NO: 8107 - DNA, 24 bp, Artificial Sequence
  Synthetic: FXN 3 reverse 9:69038771-69038799; As/LbCpf1
tttgtatgtcacagaatcccccaa

SEQ ID NO: 8108 - DNA, 25 bp, Artificial Sequence
  Synthetic: FXN 3 reverse 9:69038771-69038800; As/LbCpf1
tttgtatgtcacagaatcccccaaa

SEQ ID NO: 8109 - DNA, 18 bp, Artificial Sequence
  Synthetic: FXN 3 reverse 9:69038772-69038794; As/LbCpf1
ttttgtatgtcacagaat

SEQ ID NO: 8110 - DNA, 19 bp, Artificial Sequence
  Synthetic: FXN 3 reverse 9:69038772-69038795; As/LbCpf1
ttttgtatgtcacagaatc

SEQ ID NO: 8111 - DNA, 20 bp, Artificial Sequence
  Synthetic: FXN 3 reverse 9:69038772-69038796; As/LbCpf1
ttttgtatgtcacagaatcc

SEQ ID NO: 8112 - DNA, 21 bp, Artificial Sequence
  Synthetic: FXN 3 reverse 9:69038772-69038797; As/LbCpf1
ttttgtatgtcacagaatccc

SEQ ID NO: 8113 - DNA, 22 bp, Artificial Sequence
  Synthetic: FXN 3 reverse 9:69038772-69038798; As/LbCpf1
ttttgtatgtcacagaatcccc

SEQ ID NO: 8114 - DNA, 23 bp, Artificial Sequence
  Synthetic: FXN 3 reverse 9:69038772-69038799; As/LbCpf1
ttttgtatgtcacagaatccccc

SEQ ID NO: 8115 - DNA, 24 bp, Artificial Sequence
  Synthetic: FXN 3 reverse 9:69038772-69038800; As/LbCpf1
ttttgtatgtcacagaatccccca

SEQ ID NO: 8116 - DNA, 25 bp, Artificial Sequence
  Synthetic: FXN 3 reverse 9:69038772-69038801; As/LbCpf1
ttttgtatgtcacagaatcccccaa

SEQ ID NO: 8117 - DNA, 18 bp, Artificial Sequence
  Synthetic: FXN 3 forward 9:69038827-69038849; As/LbCpf1
cgtactcatatacttcca

SEQ ID NO: 8118 - DNA, 19 bp, Artificial Sequence
  Synthetic: FXN 3 forward 9:69038827-69038850; As/LbCpf1
cgtactcatatacttccag

SEQ ID NO: 8119 - DNA, 20 bp, Artificial Sequence
  Synthetic: FXN 3 forward 9:69038827-69038851; As/LbCpf1
cgtactcatatacttccagc

SEQ ID NO: 8120 - DNA, 21 bp, Artificial Sequence
  Synthetic: FXN 3 forward 9:69038827-69038852; As/LbCpf1
cgtactcatatacttccagca

SEQ ID NO: 8121 - DNA, 22 bp, Artificial Sequence
  Synthetic: FXN 3 forward 9:69038827-69038853; As/LbCpf1
cgtactcatatacttccagcat

SEQ ID NO: 8122 - DNA, 23 bp, Artificial Sequence
  Synthetic: FXN 3 forward 9:69038827-69038854; As/LbCpf1
cgtactcatatacttccagcata

SEQ ID NO: 8123 - DNA, 24 bp, Artificial Sequence
  Synthetic: FXN 3 forward 9:69038827-69038855; As/LbCpf1
cgtactcatatacttccagcatat

SEQ ID NO: 8124 - DNA, 25 bp, Artificial Sequence
  Synthetic: FXN 3 forward 9:69038827-69038856; As/LbCpf1
cgtactcatatacttccagcatatc

SEQ ID NO: 8125 - DNA, 18 bp, Artificial Sequence
  Synthetic: FXN 3 forward 9:69038828-69038850; As/LbCpf1
gtactcatatacttccag

SEQ ID NO: 8126 - DNA, 19 bp, Artificial Sequence
  Synthetic: FXN 3 forward 9:69038828-69038851; As/LbCpf1
gtactcatatacttccagc

SEQ ID NO: 8127 - DNA, 20 bp, Artificial Sequence
  Synthetic: FXN 3 forward 9:69038828-69038852; As/LbCpf1
gtactcatatacttccagca

SEQ ID NO: 8128 - DNA, 21 bp, Artificial Sequence
  Synthetic: FXN 3 forward 9:69038828-69038853; As/LbCpf1
gtactcatatacttccagcat

SEQ ID NO: 8129 - DNA, 22 bp, Artificial Sequence
  Synthetic: FXN 3 forward 9:69038828-69038854; As/LbCpf1
gtactcatatacttccagcata

SEQ ID NO: 8130 - DNA, 23 bp, Artificial Sequence
  Synthetic: FXN 3 forward 9:69038828-69038855; As/LbCpf1
gtactcatatacttccagcatat

SEQ ID NO: 8131 - DNA, 24 bp, Artificial Sequence
  Synthetic: FXN 3 forward 9:69038828-69038856; As/LbCpf1
gtactcatatacttccagcatatc

SEQ ID NO: 8132 - DNA, 25 bp, Artificial Sequence
  Synthetic: FXN 3 forward 9:69038828-69038857; As/LbCpf1
gtactcatatacttccagcatatct

SEQ ID NO: 8133 - DNA, 18 bp, Artificial Sequence
  Synthetic: FXN 3 reverse 9:69038850-69038872; As/LbCpf1
cttagaaattgtgaattg

SEQ ID NO: 8134 - DNA, 19 bp, Artificial Sequence
  Synthetic: FXN 3 reverse 9:69038850-69038873; As/LbCpf1
cttagaaattgtgaattga

SEQ ID NO: 8135 - DNA, 20 bp, Artificial Sequence
  Synthetic: FXN 3 reverse 9:69038850-69038874; As/LbCpf1
cttagaaattgtgaattgag

SEQ ID NO: 8136 - DNA, 21 bp, Artificial Sequence
  Synthetic: FXN 3 reverse 9:69038850-69038875; As/LbCpf1
cttagaaattgtgaattgaga

SEQ ID NO: 8137 - DNA, 22 bp, Artificial Sequence
  Synthetic: FXN 3 reverse 9:69038850-69038876; As/LbCpf1
cttagaaattgtgaattgagat

SEQ ID NO: 8138 - DNA, 23 bp, Artificial Sequence
  Synthetic: FXN 3 reverse 9:69038850-69038877; As/LbCpf1
cttagaaattgtgaattgagata

SEQ ID NO: 8139 - DNA, 24 bp, Artificial Sequence
  Synthetic: FXN 3 reverse 9:69038850-69038878; As/LbCpf1
cttagaaattgtgaattgagatat

SEQ ID NO: 8140 - DNA, 25 bp, Artificial Sequence
  Synthetic: FXN 3 reverse 9:69038850-69038879; As/LbCpf1
cttagaaattgtgaattgagatatg

SEQ ID NO: 8141 - DNA, 18 bp, Artificial Sequence
  Synthetic: FXN 3 forward 9:69038867-69038889; As/LbCpf1
taagtaaatgctctatct

SEQ ID NO: 8142 - DNA, 19 bp, Artificial Sequence
  Synthetic: FXN 3 forward 9:69038867-69038890; As/LbCpf1
taagtaaatgctctatctg

SEQ ID NO: 8143 - DNA, 20 bp, Artificial Sequence
  Synthetic: FXN 3 forward 9:69038867-69038891; As/LbCpf1
taagtaaatgctctatctgt

SEQ ID NO: 8144 - DNA, 21 bp, Artificial Sequence
  Synthetic: FXN 3 forward 9:69038867-69038892; As/LbCpf1
taagtaaatgctctatctgta

SEQ ID NO: 8145 - DNA, 22 bp, Artificial Sequence
  Synthetic: FXN 3 forward 9:69038867-69038893; As/LbCpf1
taagtaaatgctctatctgtat

SEQ ID NO: 8146 - DNA, 23 bp, Artificial Sequence
  Synthetic: FXN 3 forward 9:69038867-69038894; As/LbCpf1
taagtaaatgctctatctgtatt

SEQ ID NO: 8147 - DNA, 24 bp, Artificial Sequence
  Synthetic: FXN 3 forward 9:69038867-69038895; As/LbCpf1
taagtaaatgctctatctgtattt

SEQ ID NO: 8148 - DNA, 25 bp, Artificial Sequence
  Synthetic: FXN 3 forward 9:69038867-69038896; As/LbCpf1
taagtaaatgctctatctgtattta

SEQ ID NO: 8149 - DNA, 18 bp, Artificial Sequence
  Synthetic: FXN 3 reverse 9:69038877-69038899; As/LbCpf1
taaaagtaaatacagata

SEQ ID NO: 8150 - DNA, 19 bp, Artificial Sequence
  Synthetic: FXN 3 reverse 9:69038877-69038900; As/LbCpf1
taaaagtaaatacagatag

SEQ ID NO: 8151 - DNA, 20 bp, Artificial Sequence
  Synthetic: FXN 3 reverse 9:69038877-69038901; As/LbCpf1
taaaagtaaatacagataga

SEQ ID NO: 8152 - DNA, 21 bp, Artificial Sequence
  Synthetic: FXN 3 reverse 9:69038877-69038902; As/LbCpf1
taaaagtaaatacagatagag

SEQ ID NO: 8153 - DNA, 22 bp, Artificial Sequence
  Synthetic: FXN 3 reverse 9:69038877-69038903; As/LbCpf1
taaaagtaaatacagatagagc

SEQ ID NO: 8154 - DNA, 23 bp, Artificial Sequence
  Synthetic: FXN 3 reverse 9:69038877-69038904; As/LbCpf1
taaaagtaaatacagatagagca

SEQ ID NO: 8155 - DNA, 24 bp, Artificial Sequence
  Synthetic: FXN 3 reverse 9:69038877-69038905; As/LbCpf1
taaaagtaaatacagatagagcat

SEQ ID NO: 8156 - DNA, 25 bp, Artificial Sequence
  Synthetic: FXN 3 reverse 9:69038877-69038906; As/LbCpf1
taaaagtaaatacagatagagcatt

SEQ ID NO: 8157 - DNA, 18 bp, Artificial Sequence
  Synthetic: FXN 3 reverse 9:69038878-69038900; As/LbCpf1
ataaaagtaaatacagat

SEQ ID NO: 8158 - DNA, 19 bp, Artificial Sequence
  Synthetic: FXN 3 reverse 9:69038878-69038901; As/LbCpf1
ataaaagtaaatacagata

SEQ ID NO: 8159 - DNA, 20 bp, Artificial Sequence
  Synthetic: FXN 3 reverse 9:69038878-69038902; As/LbCpf1
ataaaagtaaatacagatag

SEQ ID NO: 8160 - DNA, 21 bp, Artificial Sequence
  Synthetic: FXN 3 reverse 9:69038878-69038903; As/LbCpf1
ataaaagtaaatacagataga

SEQ ID NO: 8161 - DNA, 22 bp, Artificial Sequence
  Synthetic: FXN 3 reverse 9:69038878-69038904; As/LbCpf1
ataaaagtaaatacagatagag

SEQ ID NO: 8162 - DNA, 23 bp, Artificial Sequence
  Synthetic: FXN 3 reverse 9:69038878-69038905; As/LbCpf1
ataaaagtaaatacagatagagc

SEQ ID NO: 8163 - DNA, 24 bp, Artificial Sequence
  Synthetic: FXN 3 reverse 9:69038878-69038906; As/LbCpf1
ataaaagtaaatacagatagagca

SEQ ID NO: 8164 - DNA, 25 bp, Artificial Sequence
  Synthetic: FXN 3 reverse 9:69038878-69038907; As/LbCpf1
ataaaagtaaatacagatagagcat

SEQ ID NO: 8165 - DNA, 18 bp, Artificial Sequence
  Synthetic: FXN 3 reverse 9:69038890-69038912; As/LbCpf1
attgtgaattttataaaa

SEQ ID NO: 8166 - DNA, 19 bp, Artificial Sequence
  Synthetic: FXN 3 reverse 9:69038890-69038913; As/LbCpf1
attgtgaattttataaaag

SEQ ID NO: 8167 - DNA, 20 bp, Artificial Sequence
  Synthetic: FXN 3 reverse 9:69038890-69038914; As/LbCpf1
attgtgaattttataaaagt

SEQ ID NO: 8168 - DNA, 21 bp, Artificial Sequence
  Synthetic: FXN 3 reverse 9:69038890-69038915; As/LbCpf1
attgtgaattttataaaagta

SEQ ID NO: 8169 - DNA, 22 bp, Artificial Sequence
  Synthetic: FXN 3 reverse 9:69038890-69038916; As/LbCpf1
attgtgaattttataaaagtaa

SEQ ID NO: 8170 - DNA, 23 bp, Artificial Sequence
  Synthetic: FXN 3 reverse 9:69038890-69038917; As/LbCpf1
attgtgaattttataaaagtaaa

SEQ ID NO: 8171 - DNA, 24 bp, Artificial Sequence
  Synthetic: FXN 3 reverse 9:69038890-69038918; As/LbCpf1
attgtgaattttataaaagtaaat

SEQ ID NO: 8172 - DNA, 25 bp, Artificial Sequence
  Synthetic: FXN 3 reverse 9:69038890-69038919; As/LbCpf1
attgtgaattttataaaagtaaata

SEQ ID NO: 8173 - DNA, 18 bp, Artificial Sequence
  Synthetic: FXN 3 reverse 9:69038891-69038913; As/LbCpf1
aattgtgaattttataaa

SEQ ID NO: 8174 - DNA, 19 bp, Artificial Sequence
  Synthetic: FXN 3 reverse 9:69038891-69038914; As/LbCpf1
aattgtgaattttataaaa

SEQ ID NO: 8175 - DNA, 20 bp, Artificial Sequence
  Synthetic: FXN 3 reverse 9:69038891-69038915; As/LbCpf1
aattgtgaattttataaaag

SEQ ID NO: 8176 - DNA, 21 bp, Artificial Sequence
  Synthetic: FXN 3 reverse 9:69038891-69038916; As/LbCpf1
aattgtgaattttataaaagt

SEQ ID NO: 8177 - DNA, 22 bp, Artificial Sequence
  Synthetic: FXN 3 reverse 9:69038891-69038917; As/LbCpf1
aattgtgaattttataaaagta

SEQ ID NO: 8178 - DNA, 23 bp, Artificial Sequence
  Synthetic: FXN 3 reverse 9:69038891-69038918; As/LbCpf1
aattgtgaattttataaaagtaa

SEQ ID NO: 8179 - DNA, 24 bp, Artificial Sequence
  Synthetic: FXN 3 reverse 9:69038891-69038919; As/LbCpf1
aattgtgaattttataaaagtaaa

SEQ ID NO: 8180 - DNA, 25 bp, Artificial Sequence
  Synthetic: FXN 3 reverse 9:69038891-69038920; As/LbCpf1
aattgtgaattttataaaagtaaat

SEQ ID NO: 8181 - DNA, 18 bp, Artificial Sequence
  Synthetic: FXN 3 forward 9:69038892-69038914; As/LbCpf1
cttttataaaattcacaa

SEQ ID NO: 8182 - DNA, 19 bp, Artificial Sequence
  Synthetic: FXN 3 forward 9:69038892-69038915; As/LbCpf1
cttttataaaattcacaat

SEQ ID NO: 8183 - DNA, 20 bp, Artificial Sequence
  Synthetic: FXN 3 forward 9:69038892-69038916; As/LbCpf1
cttttataaaattcacaatt

SEQ ID NO: 8184 - DNA, 21 bp, Artificial Sequence
  Synthetic: FXN 3 forward 9:69038892-69038917; As/LbCpf1
cttttataaaattcacaatta

SEQ ID NO: 8185 - DNA, 22 bp, Artificial Sequence
  Synthetic: FXN 3 forward 9:69038892-69038918; As/LbCpf1
cttttataaaattcacaattaa

SEQ ID NO: 8186 - DNA, 23 bp, Artificial Sequence
  Synthetic: FXN 3 forward 9:69038892-69038919; As/LbCpf1
cttttataaaattcacaattaaa

SEQ ID NO: 8187 - DNA, 24 bp, Artificial Sequence
  Synthetic: FXN 3 forward 9:69038892-69038920; As/LbCpf1
cttttataaaattcacaattaaaa

SEQ ID NO: 8188 - DNA, 25 bp, Artificial Sequence
  Synthetic: FXN 3 forward 9:69038892-69038921; As/LbCpf1
cttttataaaattcacaattaaaaa

SEQ ID NO: 8189 - DNA, 18 bp, Artificial Sequence
  Synthetic: FXN 3 reverse 9:69038892-69038914; As/LbCpf1
taattgtgaattttataa

SEQ ID NO: 8190 - DNA, 19 bp, Artificial Sequence
  Synthetic: FXN 3 reverse 9:69038892-69038915; As/LbCpf1
taattgtgaattttataaa

SEQ ID NO: 8191 - DNA, 20 bp, Artificial Sequence
  Synthetic: FXN 3 reverse 9:69038892-69038916; As/LbCpf1
taattgtgaattttataaaa

SEQ ID NO: 8192 - DNA, 21 bp, Artificial Sequence
  Synthetic: FXN 3 reverse 9:69038892-69038917; As/LbCpf1
taattgtgaattttataaaag

SEQ ID NO: 8193 - DNA, 22 bp, Artificial Sequence
  Synthetic: FXN 3 reverse 9:69038892-69038918; As/LbCpf1
taattgtgaattttataaaagt

SEQ ID NO: 8194 - DNA, 23 bp, Artificial Sequence
  Synthetic: FXN 3 reverse 9:69038892-69038919; As/LbCpf1
taattgtgaattttataaaagta

SEQ ID NO: 8195 - DNA, 24 bp, Artificial Sequence
  Synthetic: FXN 3 reverse 9:69038892-69038920; As/LbCpf1
taattgtgaattttataaaagtaa

SEQ ID NO: 8196 - DNA, 25 bp, Artificial Sequence
  Synthetic: FXN 3 reverse 9:69038892-69038921; As/LbCpf1
taattgtgaattttataaaagtaaa

SEQ ID NO: 8197 - DNA, 18 bp, Artificial Sequence
  Synthetic: FXN 3 forward 9:69038897-69038919; As/LbCpf1
ataaaattcacaattaaa

SEQ ID NO: 8198 - DNA, 19 bp, Artificial Sequence
  Synthetic: FXN 3 forward 9:69038897-69038920; As/LbCpf1
ataaaattcacaattaaaa

SEQ ID NO: 8199 - DNA, 20 bp, Artificial Sequence
  Synthetic: FXN 3 forward 9:69038897-69038921; As/LbCpf1
ataaaattcacaattaaaaa

SEQ ID NO: 8200 - DNA, 21 bp, Artificial Sequence
  Synthetic: FXN 3 forward 9:69038897-69038922; As/LbCpf1
ataaaattcacaattaaaaat

SEQ ID NO: 8201 - DNA, 22 bp, Artificial Sequence
  Synthetic: FXN 3 forward 9:69038897-69038923; As/LbCpf1
ataaaattcacaattaaaaatg

SEQ ID NO: 8202 - DNA, 23 bp, Artificial Sequence
  Synthetic: FXN 3 forward 9:69038897-69038924; As/LbCpf1
ataaaattcacaattaaaaatga

SEQ ID NO: 8203 - DNA, 24 bp, Artificial Sequence
  Synthetic: FXN 3 forward 9:69038897-69038925; As/LbCpf1
ataaaattcacaattaaaaatgaa

SEQ ID NO: 8204 - DNA, 25 bp, Artificial Sequence
  Synthetic: FXN 3 forward 9:69038897-69038926; As/LbCpf1
ataaaattcacaattaaaaatgaag

SEQ ID NO: 8205 - DNA, 18 bp, Artificial Sequence
  Synthetic: FXN 3 forward 9:69038898-69038920; As/LbCpf1
taaaattcacaattaaaa

SEQ ID NO: 8206 - DNA, 19 bp, Artificial Sequence
  Synthetic: FXN 3 forward 9:69038898-69038921; As/LbCpf1
taaaattcacaattaaaaa

SEQ ID NO: 8207 - DNA, 20 bp, Artificial Sequence
  Synthetic: FXN 3 forward 9:69038898-69038922; As/LbCpf1
taaaattcacaattaaaaat

SEQ ID NO: 8208 - DNA, 21 bp, Artificial Sequence
  Synthetic: FXN 3 forward 9:69038898-69038923; As/LbCpf1
taaaattcacaattaaaaatg

SEQ ID NO: 8209 - DNA, 22 bp, Artificial Sequence
  Synthetic: FXN 3 forward 9:69038898-69038924; As/LbCpf1
taaaattcacaattaaaaatga

SEQ ID NO: 8210 - DNA, 23 bp, Artificial Sequence
  Synthetic: FXN 3 forward 9:69038898-69038925; As/LbCpf1
taaaattcacaattaaaaatgaa

SEQ ID NO: 8211 - DNA, 24 bp, Artificial Sequence
  Synthetic: FXN 3 forward 9:69038898-69038926; As/LbCpf1
taaaattcacaattaaaaatgaag

SEQ ID NO: 8212 - DNA, 25 bp, Artificial Sequence
  Synthetic: FXN 3 forward 9:69038898-69038927; As/LbCpf1
taaaattcacaattaaaaatgaagg

SEQ ID NO: 8213 - DNA, 18 bp, Artificial Sequence
  Synthetic: FXN 3 reverse 9:69038922-69038944; As/LbCpf1
gaacaacttgactatgtg

SEQ ID NO: 8214 - DNA, 19 bp, Artificial Sequence
  Synthetic: FXN 3 reverse 9:69038922-69038945; As/LbCpf1
gaacaacttgactatgtga

SEQ ID NO: 8215 - DNA, 20 bp, Artificial Sequence
  Synthetic: FXN 3 reverse 9:69038922-69038946; As/LbCpf1
gaacaacttgactatgtgaa

SEQ ID NO: 8216 - DNA, 21 bp, Artificial Sequence
  Synthetic: FXN 3 reverse 9:69038922-69038947; As/LbCpf1
gaacaacttgactatgtgaac

SEQ ID NO: 8217 - DNA, 22 bp, Artificial Sequence
  Synthetic: FXN 3 reverse 9:69038922-69038948; As/LbCpf1
gaacaacttgactatgtgaacc

SEQ ID NO: 8218 - DNA, 23 bp, Artificial Sequence
  Synthetic: FXN 3 reverse 9:69038922-69038949; As/LbCpf1
gaacaacttgactatgtgaacct

SEQ ID NO: 8219 - DNA, 24 bp, Artificial Sequence
  Synthetic: FXN 3 reverse 9:69038922-69038950; As/LbCpf1
gaacaacttgactatgtgaacctt

SEQ ID NO: 8220 - DNA, 25 bp, Artificial Sequence
  Synthetic: FXN 3 reverse 9:69038922-69038951; As/LbCpf1
gaacaacttgactatgtgaaccttc

SEQ ID NO: 8221 - DNA, 18 bp, Artificial Sequence
  Synthetic: FXN 3 reverse 9:69038932-69038954; As/LbCpf1
agtgtgtttggaacaact

SEQ ID NO: 8222 - DNA, 19 bp, Artificial Sequence
  Synthetic: FXN 3 reverse 9:69038932-69038955; As/LbCpf1
agtgtgtttggaacaactt

SEQ ID NO: 8223 - DNA, 20 bp, Artificial Sequence
  Synthetic: FXN 3 reverse 9:69038932-69038956; As/LbCpf1
agtgtgtttggaacaacttg

SEQ ID NO: 8224 - DNA, 21 bp, Artificial Sequence
  Synthetic: FXN 3 reverse 9:69038932-69038957; As/LbCpf1
agtgtgtttggaacaacttga

SEQ ID NO: 8225 - DNA, 22 bp, Artificial Sequence
  Synthetic: FXN 3 reverse 9:69038932-69038958; As/LbCpf1
agtgtgtttggaacaacttgac

SEQ ID NO: 8226 - DNA, 23 bp, Artificial Sequence
  Synthetic: FXN 3 reverse 9:69038932-69038959; As/LbCpf1
agtgtgtttggaacaacttgact

SEQ ID NO: 8227 - DNA, 24 bp, Artificial Sequence
  Synthetic: FXN 3 reverse 9:69038932-69038960; As/LbCpf1
agtgtgtttggaacaacttgacta

SEQ ID NO: 8228 - DNA, 25 bp, Artificial Sequence
  Synthetic: FXN 3 reverse 9:69038932-69038961; As/LbCpf1
agtgtgtttggaacaacttgactat

SEQ ID NO: 8229 - DNA, 18 bp, Artificial Sequence
  Synthetic: FXN 3 forward 9:69039007-69039029; As/LbCpf1
ggaggctgagatgggcgg

SEQ ID NO: 8230 - DNA, 19 bp, Artificial Sequence
  Synthetic: FXN 3 forward 9:69039007-69039030; As/LbCpf1
ggaggctgagatgggcgga

SEQ ID NO: 8231 - DNA, 20 bp, Artificial Sequence
  Synthetic: FXN 3 forward 9:69039007-69039031; As/LbCpf1
ggaggctgagatgggcggat

SEQ ID NO: 8232 - DNA, 21 bp, Artificial Sequence
  Synthetic: FXN 3 forward 9:69039007-69039032; As/LbCpf1
ggaggctgagatgggcggatc

SEQ ID NO: 8233 - DNA, 22 bp, Artificial Sequence
  Synthetic: FXN 3 forward 9:69039007-69039033; As/LbCpf1
ggaggctgagatgggcggatca

SEQ ID NO: 8234 - DNA, 23 bp, Artificial Sequence
  Synthetic: FXN 3 forward 9:69039007-69039034; As/LbCpf1
ggaggctgagatgggcggatcac

SEQ ID NO: 8235 - DNA, 24 bp, Artificial Sequence
  Synthetic: FXN 3 forward 9:69039007-69039035; As/LbCpf1
ggaggctgagatgggcggatcacc

SEQ ID NO: 8236 - DNA, 25 bp, Artificial Sequence
  Synthetic: FXN 3 forward 9:69039007-69039036; As/LbCpf1
ggaggctgagatgggcggatcacct

SEQ ID NO: 8237 - DNA, 18 bp, Artificial Sequence
  Synthetic: FXN 3 forward 9:69039047-69039069; As/LbCpf1
agaccagcctggccaaca

SEQ ID NO: 8238 - DNA, 19 bp, Artificial Sequence
  Synthetic: FXN 3 forward 9:69039047-69039070; As/LbCpf1
agaccagcctggccaacat

SEQ ID NO: 8239 - DNA, 20 bp, Artificial Sequence
  Synthetic: FXN 3 forward 9:69039047-69039071; As/LbCpf1
agaccagcctggccaacatg

SEQ ID NO: 8240 - DNA, 21 bp, Artificial Sequence
  Synthetic: FXN 3 forward 9:69039047-69039072; As/LbCpf1
agaccagcctggccaacatgg

SEQ ID NO: 8241 - DNA, 22 bp, Artificial Sequence
  Synthetic: FXN 3 forward 9:69039047-69039073; As/LbCpf1
agaccagcctggccaacatggt

SEQ ID NO: 8242 - DNA, 23 bp, Artificial Sequence
  Synthetic: FXN 3 forward 9:69039047-69039074; As/LbCpf1
agaccagcctggccaacatggtg

SEQ ID NO: 8243 - DNA, 24 bp, Artificial Sequence
  Synthetic: FXN 3 forward 9:69039047-69039075; As/LbCpf1
agaccagcctggccaacatggtga

SEQ ID NO: 8244 - DNA, 25 bp, Artificial Sequence
  Synthetic: FXN 3 forward 9:69039047-69039076; As/LbCpf1
agaccagcctggccaacatggtgaa

SEQ ID NO: 8245 - DNA, 18 bp, Artificial Sequence
  Synthetic: FXN 3 reverse 9:69039048-69039070; As/LbCpf1
accatgttggccaggctg

SEQ ID NO: 8246 - DNA, 19 bp, Artificial Sequence
  Synthetic: FXN 3 reverse 9:69039048-69039071; As/LbCpf1
accatgttggccaggctgg

SEQ ID NO: 8247 - DNA, 20 bp, Artificial Sequence
  Synthetic: FXN 3 reverse 9:69039048-69039072; As/LbCpf1
accatgttggccaggctggt

SEQ ID NO: 8248 - DNA, 21 bp, Artificial Sequence
  Synthetic: FXN 3 reverse 9:69039048-69039073; As/LbCpf1
accatgttggccaggctggtc

SEQ ID NO: 8249 - DNA, 22 bp, Artificial Sequence
  Synthetic: FXN 3 reverse 9:69039048-69039074; As/LbCpf1
accatgttggccaggctggtct

SEQ ID NO: 8250 - DNA, 23 bp, Artificial Sequence
  Synthetic: FXN 3 reverse 9:69039048-69039075; As/LbCpf1
accatgttggccaggctggtctc

SEQ ID NO: 8251 - DNA, 24 bp, Artificial Sequence
  Synthetic: FXN 3 reverse 9:69039048-69039076; As/LbCpf1
accatgttggccaggctggtctca

SEQ ID NO: 8252 - DNA, 25 bp, Artificial Sequence
  Synthetic: FXN 3 reverse 9:69039048-69039077; As/LbCpf1
accatgttggccaggctggtctcaa

SEQ ID NO: 8253 - DNA, 18 bp, Artificial Sequence
  Synthetic: FXN 3 reverse 9:69039064-69039086; As/LbCpf1
gtagagacggggtttcac

SEQ ID NO: 8254 - DNA, 19 bp, Artificial Sequence
  Synthetic: FXN 3 reverse 9:69039064-69039087; As/LbCpf1
gtagagacggggtttcacc

SEQ ID NO: 8255 - DNA, 20 bp, Artificial Sequence
  Synthetic: FXN 3 reverse 9:69039064-69039088; As/LbCpf1
gtagagacggggtttcacca

SEQ ID NO: 8256 - DNA, 21 bp, Artificial Sequence
  Synthetic: FXN 3 reverse 9:69039064-69039089; As/LbCpf1
gtagagacggggtttcaccat

SEQ ID NO: 8257 - DNA, 22 bp, Artificial Sequence
  Synthetic: FXN 3 reverse 9:69039064-69039090; As/LbCpf1
gtagagacggggtttcaccatg

SEQ ID NO: 8258 - DNA, 23 bp, Artificial Sequence
  Synthetic: FXN 3 reverse 9:69039064-69039091; As/LbCpf1
gtagagacggggtttcaccatgt

SEQ ID NO: 8259 - DNA, 24 bp, Artificial Sequence
  Synthetic: FXN 3 reverse 9:69039064-69039092; As/LbCpf1
gtagagacggggtttcaccatgtt

SEQ ID NO: 8260 - DNA, 25 bp, Artificial Sequence
  Synthetic: FXN 3 reverse 9:69039064-69039093; As/LbCpf1
gtagagacggggtttcaccatgttg

SEQ ID NO: 8261 - DNA, 18 bp, Artificial Sequence
  Synthetic: FXN 3 reverse 9:69039065-69039087; As/LbCpf1
agtagagacggggtttca

SEQ ID NO: 8262 - DNA, 19 bp, Artificial Sequence
  Synthetic: FXN 3 reverse 9:69039065-69039088; As/LbCpf1
agtagagacggggtttcac

SEQ ID NO: 8263 - DNA, 20 bp, Artificial Sequence
  Synthetic: FXN 3 reverse 9:69039065-69039089; As/LbCpf1
agtagagacggggtttcacc

SEQ ID NO: 8264 - DNA, 21 bp, Artificial Sequence
  Synthetic: FXN 3 reverse 9:69039065-69039090; As/LbCpf1
agtagagacggggtttcacca

SEQ ID NO: 8265 - DNA, 22 bp, Artificial Sequence
  Synthetic: FXN 3 reverse 9:69039065-69039091; As/LbCpf1
agtagagacggggtttcaccat

SEQ ID NO: 8266 - DNA, 23 bp, Artificial Sequence
  Synthetic: FXN 3 reverse 9:69039065-69039092; As/LbCpf1
agtagagacggggtttcaccatg

SEQ ID NO: 8267 - DNA, 24 bp, Artificial Sequence
  Synthetic: FXN 3 reverse 9:69039065-69039093; As/LbCpf1
agtagagacggggtttcaccatgt

SEQ ID NO: 8268 - DNA, 25 bp, Artificial Sequence
  Synthetic: FXN 3 reverse 9:69039065-69039094; As/LbCpf1
agtagagacggggtttcaccatgtt

SEQ ID NO: 8269 - DNA, 18 bp, Artificial Sequence
  Synthetic: FXN 3 reverse 9:69039066-69039088; As/LbCpf1
tagtagagacggggtttc

SEQ ID NO: 8270 - DNA, 19 bp, Artificial Sequence
  Synthetic: FXN 3 reverse 9:69039066-69039089; As/LbCpf1
tagtagagacggggtttca

SEQ ID NO: 8271 - DNA, 20 bp, Artificial Sequence
  Synthetic: FXN 3 reverse 9:69039066-69039090; As/LbCpf1
tagtagagacggggtttcac

SEQ ID NO: 8272 - DNA, 21 bp, Artificial Sequence
  Synthetic: FXN 3 reverse 9:69039066-69039091; As/LbCpf1
tagtagagacggggtttcacc

SEQ ID NO: 8273 - DNA, 22 bp, Artificial Sequence
  Synthetic: FXN 3 reverse 9:69039066-69039092; As/LbCpf1
tagtagagacggggtttcacca

SEQ ID NO: 8274 - DNA, 23 bp, Artificial Sequence
  Synthetic: FXN 3 reverse 9:69039066-69039093; As/LbCpf1
tagtagagacggggtttcaccat

SEQ ID NO: 8275 - DNA, 24 bp, Artificial Sequence
  Synthetic: FXN 3 reverse 9:69039066-69039094; As/LbCpf1
tagtagagacggggtttcaccatg

SEQ ID NO: 8276 - DNA, 25 bp, Artificial Sequence
  Synthetic: FXN 3 reverse 9:69039066-69039095; As/LbCpf1
tagtagagacggggtttcaccatgt

SEQ ID NO: 8277 - DNA, 18 bp, Artificial Sequence
  Synthetic: FXN 3 reverse 9:69039072-69039094; As/LbCpf1
tatttttagtagagacgg

SEQ ID NO: 8278 - DNA, 19 bp, Artificial Sequence
  Synthetic: FXN 3 reverse 9:69039072-69039095; As/LbCpf1
tatttttagtagagacggg

SEQ ID NO: 8279 - DNA, 20 bp, Artificial Sequence
  Synthetic: FXN 3 reverse 9:69039072-69039096; As/LbCpf1
tatttttagtagagacgggg

SEQ ID NO: 8280 - DNA, 21 bp, Artificial Sequence
  Synthetic: FXN 3 reverse 9:69039072-69039097; As/LbCpf1
tatttttagtagagacggggt

SEQ ID NO: 8281 - DNA, 22 bp, Artificial Sequence
  Synthetic: FXN 3 reverse 9:69039072-69039098; As/LbCpf1
tatttttagtagagacggggtt

SEQ ID NO: 8282 - DNA, 23 bp, Artificial Sequence
  Synthetic: FXN 3 reverse 9:69039072-69039099; As/LbCpf1
tatttttagtagagacggggttt

SEQ ID NO: 8283 - DNA, 24 bp, Artificial Sequence
  Synthetic: FXN 3 reverse 9:69039072-69039100; As/LbCpf1
tatttttagtagagacggggtttc

SEQ ID NO: 8284 - DNA, 25 bp, Artificial Sequence
  Synthetic: FXN 3 reverse 9:69039072-69039101; As/LbCpf1
tatttttagtagagacggggtttca

SEQ ID NO: 8285 - DNA, 18 bp, Artificial Sequence
  Synthetic: FXN 3 reverse 9:69039073-69039095; As/LbCpf1
gtatttttagtagagacg

SEQ ID NO: 8286 - DNA, 19 bp, Artificial Sequence
  Synthetic: FXN 3 reverse 9:69039073-69039096; As/LbCpf1
gtatttttagtagagacgg

SEQ ID NO: 8287 - DNA, 20 bp, Artificial Sequence
  Synthetic: FXN 3 reverse 9:69039073-69039097; As/LbCpf1
gtatttttagtagagacggg

SEQ ID NO: 8288 - DNA, 21 bp, Artificial Sequence
  Synthetic: FXN 3 reverse 9:69039073-69039098; As/LbCpf1
gtatttttagtagagacgggg

SEQ ID NO: 8289 - DNA, 22 bp, Artificial Sequence
  Synthetic: FXN 3 reverse 9:69039073-69039099; As/LbCpf1
gtatttttagtagagacggggt

SEQ ID NO: 8290 - DNA, 23 bp, Artificial Sequence
  Synthetic: FXN 3 reverse 9:69039073-69039100; As/LbCpf1
gtatttttagtagagacggggtt

SEQ ID NO: 8291 - DNA, 24 bp, Artificial Sequence
  Synthetic: FXN 3 reverse 9:69039073-69039101; As/LbCpf1
gtatttttagtagagacggggttt

SEQ ID NO: 8292 - DNA, 25 bp, Artificial Sequence
  Synthetic: FXN 3 reverse 9:69039073-69039102; As/LbCpf1
gtatttttagtagagacggggtttc

SEQ ID NO: 8293 - DNA, 18 bp, Artificial Sequence
  Synthetic: FXN 3 reverse 9:69039074-69039096; As/LbCpf1
tgtatttttagtagagac

SEQ ID NO: 8294 - DNA, 19 bp, Artificial Sequence
  Synthetic: FXN 3 reverse 9:69039074-69039097; As/LbCpf1
tgtatttttagtagagacg

SEQ ID NO: 8295 - DNA, 20 bp, Artificial Sequence
  Synthetic: FXN 3 reverse 9:69039074-69039098; As/LbCpf1
tgtatttttagtagagacgg

SEQ ID NO: 8296 - DNA, 21 bp, Artificial Sequence
  Synthetic: FXN 3 reverse 9:69039074-69039099; As/LbCpf1
tgtatttttagtagagacggg

SEQ ID NO: 8297 - DNA, 22 bp, Artificial Sequence
  Synthetic: FXN 3 reverse 9:69039074-69039100; As/LbCpf1
tgtatttttagtagagacgggg

SEQ ID NO: 8298 - DNA, 23 bp, Artificial Sequence
  Synthetic: FXN 3 reverse 9:69039074-69039101; As/LbCpf1
tgtatttttagtagagacggggt

SEQ ID NO: 8299 - DNA, 24 bp, Artificial Sequence
  Synthetic: FXN 3 reverse 9:69039074-69039102; As/LbCpf1
tgtatttttagtagagacggggtt

SEQ ID NO: 8300 - DNA, 25 bp, Artificial Sequence
  Synthetic: FXN 3 reverse 9:69039074-69039103; As/LbCpf1
tgtatttttagtagagacggggttt

SEQ ID NO: 8301 - DNA, 18 bp, Artificial Sequence
  Synthetic: FXN 3 reverse 9:69039229-69039251; As/LbCpf1
agacggagtctcgctctg

SEQ ID NO: 8302 - DNA, 19 bp, Artificial Sequence
  Synthetic: FXN 3 reverse 9:69039229-69039252; As/LbCpf1
agacggagtctcgctctgt

SEQ ID NO: 8303 - DNA, 20 bp, Artificial Sequence
  Synthetic: FXN 3 reverse 9:69039229-69039253; As/LbCpf1
agacggagtctcgctctgtc

SEQ ID NO: 8304 - DNA, 21 bp, Artificial Sequence
  Synthetic: FXN 3 reverse 9:69039229-69039254; As/LbCpf1
agacggagtctcgctctgtcg

SEQ ID NO: 8305 - DNA, 22 bp, Artificial Sequence
  Synthetic: FXN 3 reverse 9:69039229-69039255; As/LbCpf1
agacggagtctcgctctgtcgc

SEQ ID NO: 8306 - DNA, 23 bp, Artificial Sequence
  Synthetic: FXN 3 reverse 9:69039229-69039256; As/LbCpf1
agacggagtctcgctctgtcgcc

SEQ ID NO: 8307 - DNA, 24 bp, Artificial Sequence
  Synthetic: FXN 3 reverse 9:69039229-69039257; As/LbCpf1
agacggagtctcgctctgtcgccc

SEQ ID NO: 8308 - DNA, 25 bp, Artificial Sequence
  Synthetic: FXN 3 reverse 9:69039229-69039258; As/LbCpf1
agacggagtctcgctctgtcgccca

SEQ ID NO: 8309 - DNA, 18 bp, Artificial Sequence
  Synthetic: FXN 3 reverse 9:69039230-69039252; As/LbCpf1
gagacggagtctcgctct

SEQ ID NO: 8310 - DNA, 19 bp, Artificial Sequence
  Synthetic: FXN 3 reverse 9:69039230-69039253; As/LbCpf1
gagacggagtctcgctctg

SEQ ID NO: 8311 - DNA, 20 bp, Artificial Sequence
  Synthetic: FXN 3 reverse 9:69039230-69039254; As/LbCpf1
gagacggagtctcgctctgt

SEQ ID NO: 8312 - DNA, 21 bp, Artificial Sequence
  Synthetic: FXN 3 reverse 9:69039230-69039255; As/LbCpf1
gagacggagtctcgctctgtc

SEQ ID NO: 8313 - DNA, 22 bp, Artificial Sequence
  Synthetic: FXN 3 reverse 9:69039230-69039256; As/LbCpf1
gagacggagtctcgctctgtcg

SEQ ID NO: 8314 - DNA, 23 bp, Artificial Sequence
  Synthetic: FXN 3 reverse 9:69039230-69039257; As/LbCpf1
gagacggagtctcgctctgtcgc

SEQ ID NO: 8315 - DNA, 24 bp, Artificial Sequence
  Synthetic: FXN 3 reverse 9:69039230-69039258; As/LbCpf1
gagacggagtctcgctctgtcgcc

SEQ ID NO: 8316 - DNA, 25 bp, Artificial Sequence
  Synthetic: FXN 3 reverse 9:69039230-69039259; As/LbCpf1
gagacggagtctcgctctgtcgccc

SEQ ID NO: 8317 - DNA, 18 bp, Artificial Sequence
  Synthetic: FXN 3 reverse 9:69039231-69039253; As/LbCpf1
tgagacggagtctcgctc

SEQ ID NO: 8318 - DNA, 19 bp, Artificial Sequence
  Synthetic: FXN 3 reverse 9:69039231-69039254; As/LbCpf1
tgagacggagtctcgctct

SEQ ID NO: 8319 - DNA, 20 bp, Artificial Sequence
  Synthetic: FXN 3 reverse 9:69039231-69039255; As/LbCpf1
tgagacggagtctcgctctg

SEQ ID NO: 8320 - DNA, 21 bp, Artificial Sequence
  Synthetic: FXN 3 reverse 9:69039231-69039256; As/LbCpf1
tgagacggagtctcgctctgt

SEQ ID NO: 8321 - DNA, 22 bp, Artificial Sequence
  Synthetic: FXN 3 reverse 9:69039231-69039257; As/LbCpf1
tgagacggagtctcgctctgtc

SEQ ID NO: 8322 - DNA, 23 bp, Artificial Sequence
  Synthetic: FXN 3 reverse 9:69039231-69039258; As/LbCpf1
tgagacggagtctcgctctgtcg

SEQ ID NO: 8323 - DNA, 24 bp, Artificial Sequence
  Synthetic: FXN 3 reverse 9:69039231-69039259; As/LbCpf1
tgagacggagtctcgctctgtcgc

SEQ ID NO: 8324 - DNA, 25 bp, Artificial Sequence
  Synthetic: FXN 3 reverse 9:69039231-69039260; As/LbCpf1
tgagacggagtctcgctctgtcgcc

SEQ ID NO: 8325 - DNA, 18 bp, Artificial Sequence
  Synthetic: FXN 3 reverse 9:69039232-69039254; As/LbCpf1
ttgagacggagtctcgct

SEQ ID NO: 8326 - DNA, 19 bp, Artificial Sequence
  Synthetic: FXN 3 reverse 9:69039232-69039255; As/LbCpf1
ttgagacggagtctcgctc

SEQ ID NO: 8327 - DNA, 20 bp, Artificial Sequence
  Synthetic: FXN 3 reverse 9:69039232-69039256; As/LbCpf1
ttgagacggagtctcgctct

SEQ ID NO: 8328 - DNA, 21 bp, Artificial Sequence
  Synthetic: FXN 3 reverse 9:69039232-69039257; As/LbCpf1
ttgagacggagtctcgctctg

SEQ ID NO: 8329 - DNA, 22 bp, Artificial Sequence
  Synthetic: FXN 3 reverse 9:69039232-69039258; As/LbCpf1
ttgagacggagtctcgctctgt

SEQ ID NO: 8330 - DNA, 23 bp, Artificial Sequence
  Synthetic: FXN 3 reverse 9:69039232-69039259; As/LbCpf1
ttgagacggagtctcgctctgtc

SEQ ID NO: 8331 - DNA, 24 bp, Artificial Sequence
  Synthetic: FXN 3 reverse 9:69039232-69039260; As/LbCpf1
ttgagacggagtctcgctctgtcg

SEQ ID NO: 8332 - DNA, 25 bp, Artificial Sequence
  Synthetic: FXN 3 reverse 9:69039232-69039261; As/LbCpf1
ttgagacggagtctcgctctgtcgc

SEQ ID NO: 8333 - DNA, 18 bp, Artificial Sequence
  Synthetic: FXN 3 reverse 9:69039233-69039255; As/LbCpf1
tttgagacggagtctcgc

SEQ ID NO: 8334 - DNA, 19 bp, Artificial Sequence
  Synthetic: FXN 3 reverse 9:69039233-69039256; As/LbCpf1
tttgagacggagtctcgct

SEQ ID NO: 8335 - DNA, 20 bp, Artificial Sequence
  Synthetic: FXN 3 reverse 9:69039233-69039257; As/LbCpf1
tttgagacggagtctcgctc

SEQ ID NO: 8336 - DNA, 21 bp, Artificial Sequence
  Synthetic: FXN 3 reverse 9:69039233-69039258; As/LbCpf1
tttgagacggagtctcgctct

SEQ ID NO: 8337 - DNA, 22 bp, Artificial Sequence
  Synthetic: FXN 3 reverse 9:69039233-69039259; As/LbCpf1
tttgagacggagtctcgctctg

SEQ ID NO: 8338 - DNA, 23 bp, Artificial Sequence
  Synthetic: FXN 3 reverse 9:69039233-69039260; As/LbCpf1
tttgagacggagtctcgctctgt

SEQ ID NO: 8339 - DNA, 24 bp, Artificial Sequence
  Synthetic: FXN 3 reverse 9:69039233-69039261; As/LbCpf1
tttgagacggagtctcgctctgtc

SEQ ID NO: 8340 - DNA, 25 bp, Artificial Sequence
  Synthetic: FXN 3 reverse 9:69039233-69039262; As/LbCpf1
tttgagacggagtctcgctctgtcg

SEQ ID NO: 8341 - DNA, 18 bp, Artificial Sequence
  Synthetic: FXN 3 reverse 9:69039234-69039256; As/LbCpf1
ttttgagacggagtctcg

SEQ ID NO: 8342 - DNA, 19 bp, Artificial Sequence
  Synthetic: FXN 3 reverse 9:69039234-69039257; As/LbCpf1
ttttgagacggagtctcgc

SEQ ID NO: 8343 - DNA, 20 bp, Artificial Sequence
  Synthetic: FXN 3 reverse 9:69039234-69039258; As/LbCpf1
ttttgagacggagtctcgct

SEQ ID NO: 8344 - DNA, 21 bp, Artificial Sequence
  Synthetic: FXN 3 reverse 9:69039234-69039259; As/LbCpf1
ttttgagacggagtctcgctc

SEQ ID NO: 8345 - DNA, 22 bp, Artificial Sequence
  Synthetic: FXN 3 reverse 9:69039234-69039260; As/LbCpf1
ttttgagacggagtctcgctct

SEQ ID NO: 8346 - DNA, 23 bp, Artificial Sequence
  Synthetic: FXN 3 reverse 9:69039234-69039261; As/LbCpf1
ttttgagacggagtctcgctctg

SEQ ID NO: 8347 - DNA, 24 bp, Artificial Sequence
  Synthetic: FXN 3 reverse 9:69039234-69039262; As/LbCpf1
ttttgagacggagtctcgctctgt

SEQ ID NO: 8348 - DNA, 25 bp, Artificial Sequence
  Synthetic: FXN 3 reverse 9:69039234-69039263; As/LbCpf1
ttttgagacggagtctcgctctgtc

SEQ ID NO: 8349 - DNA, 18 bp, Artificial Sequence
  Synthetic: FXN 3 reverse 9:69039235-69039257; As/LbCpf1
tttttgagacggagtctc

SEQ ID NO: 8350 - DNA, 19 bp, Artificial Sequence
  Synthetic: FXN 3 reverse 9:69039235-69039258; As/LbCpf1
tttttgagacggagtctcg

SEQ ID NO: 8351 - DNA, 20 bp, Artificial Sequence
  Synthetic: FXN 3 reverse 9:69039235-69039259; As/LbCpf1
tttttgagacggagtctcgc

SEQ ID NO: 8352 - DNA, 21 bp, Artificial Sequence
  Synthetic: FXN 3 reverse 9:69039235-69039260; As/LbCpf1
tttttgagacggagtctcgct

SEQ ID NO: 8353 - DNA, 22 bp, Artificial Sequence
  Synthetic: FXN 3 reverse 9:69039235-69039261; As/LbCpf1
tttttgagacggagtctcgctc

SEQ ID NO: 8354 - DNA, 23 bp, Artificial Sequence
  Synthetic: FXN 3 reverse 9:69039235-69039262; As/LbCpf1
tttttgagacggagtctcgctct

SEQ ID NO: 8355 - DNA, 24 bp, Artificial Sequence
  Synthetic: FXN 3 reverse 9:69039235-69039263; As/LbCpf1
tttttgagacggagtctcgctctg

SEQ ID NO: 8356 - DNA, 25 bp, Artificial Sequence
  Synthetic: FXN 3 reverse 9:69039235-69039264; As/LbCpf1
tttttgagacggagtctcgctctgt

SEQ ID NO: 8357 - DNA, 18 bp, Artificial Sequence
  Synthetic: FXN 3 reverse 9:69039236-69039258; As/LbCpf1
ttttttgagacggagtct

SEQ ID NO: 8358 - DNA, 19 bp, Artificial Sequence
  Synthetic: FXN 3 reverse 9:69039236-69039259; As/LbCpf1
ttttttgagacggagtctc

SEQ ID NO: 8359 - DNA, 20 bp, Artificial Sequence
  Synthetic: FXN 3 reverse 9:69039236-69039260; As/LbCpf1
ttttttgagacggagtctcg

SEQ ID NO: 8360 - DNA, 21 bp, Artificial Sequence
  Synthetic: FXN 3 reverse 9:69039236-69039261; As/LbCpf1
ttttttgagacggagtctcgc

SEQ ID NO: 8361 - DNA, 22 bp, Artificial Sequence
  Synthetic: FXN 3 reverse 9:69039236-69039262; As/LbCpf1
ttttttgagacggagtctcgct

SEQ ID NO: 8362 - DNA, 23 bp, Artificial Sequence
  Synthetic: FXN 3 reverse 9:69039236-69039263; As/LbCpf1
ttttttgagacggagtctcgctc

SEQ ID NO: 8363 - DNA, 24 bp, Artificial Sequence
  Synthetic: FXN 3 reverse 9:69039236-69039264; As/LbCpf1
ttttttgagacggagtctcgctct

SEQ ID NO: 8364 - DNA, 25 bp, Artificial Sequence
  Synthetic: FXN 3 reverse 9:69039236-69039265; As/LbCpf1
ttttttgagacggagtctcgctctg

SEQ ID NO: 8365 - DNA, 18 bp, Artificial Sequence
  Synthetic: FXN 3 reverse 9:69039237-69039259; As/LbCpf1
tttttttgagacggagtc

SEQ ID NO: 8366 - DNA, 19 bp, Artificial Sequence
  Synthetic: FXN 3 reverse 9:69039237-69039260; As/LbCpf1
tttttttgagacggagtct

SEQ ID NO: 8367 - DNA, 20 bp, Artificial Sequence
  Synthetic: FXN 3 reverse 9:69039237-69039261; As/LbCpf1
tttttttgagacggagtctc

SEQ ID NO: 8368 - DNA, 21 bp, Artificial Sequence
  Synthetic: FXN 3 reverse 9:69039237-69039262; As/LbCpf1
tttttttgagacggagtctcg

SEQ ID NO: 8369 - DNA, 22 bp, Artificial Sequence
  Synthetic: FXN 3 reverse 9:69039237-69039263; As/LbCpf1
tttttttgagacggagtctcgc

SEQ ID NO: 8370 - DNA, 23 bp, Artificial Sequence
  Synthetic: FXN 3 reverse 9:69039237-69039264; As/LbCpf1
tttttttgagacggagtctcgct

SEQ ID NO: 8371 - DNA, 24 bp, Artificial Sequence
  Synthetic: FXN 3 reverse 9:69039237-69039265; As/LbCpf1
tttttttgagacggagtctcgctc

SEQ ID NO: 8372 - DNA, 25 bp, Artificial Sequence
  Synthetic: FXN 3 reverse 9:69039237-69039266; As/LbCpf1
tttttttgagacggagtctcgctct

SEQ ID NO: 8373 - DNA, 18 bp, Artificial Sequence
  Synthetic: FXN 3 reverse 9:69039238-69039260; As/LbCpf1
ttttttttgagacggagt

SEQ ID NO: 8374 - DNA, 19 bp, Artificial Sequence
  Synthetic: FXN 3 reverse 9:69039238-69039261; As/LbCpf1
ttttttttgagacggagtc

SEQ ID NO: 8375 - DNA, 20 bp, Artificial Sequence
  Synthetic: FXN 3 reverse 9:69039238-69039262; As/LbCpf1
ttttttttgagacggagtct

SEQ ID NO: 8376 - DNA, 21 bp, Artificial Sequence
  Synthetic: FXN 3 reverse 9:69039238-69039263; As/LbCpf1
ttttttttgagacggagtctc

SEQ ID NO: 8377 - DNA, 22 bp, Artificial Sequence
  Synthetic: FXN 3 reverse 9:69039238-69039264; As/LbCpf1
ttttttttgagacggagtctcg

SEQ ID NO: 8378 - DNA, 23 bp, Artificial Sequence
  Synthetic: FXN 3 reverse 9:69039238-69039265; As/LbCpf1
ttttttttgagacggagtctcgc

SEQ ID NO: 8379 - DNA, 24 bp, Artificial Sequence
  Synthetic: FXN 3 reverse 9:69039238-69039266; As/LbCpf1
ttttttttgagacggagtctcgct

SEQ ID NO: 8380 - DNA, 25 bp, Artificial Sequence
  Synthetic: FXN 3 reverse 9:69039238-69039267; As/LbCpf1
ttttttttgagacggagtctcgctc

SEQ ID NO: 8381 - DNA, 18 bp, Artificial Sequence
  Synthetic: FXN 3 reverse 9:69039239-69039261; As/LbCpf1
tttttttttgagacggag

SEQ ID NO: 8382 - DNA, 19 bp, Artificial Sequence
  Synthetic: FXN 3 reverse 9:69039239-69039262; As/LbCpf1
tttttttttgagacggagt

SEQ ID NO: 8383 - DNA, 20 bp, Artificial Sequence
  Synthetic: FXN 3 reverse 9:69039239-69039263; As/LbCpf1
tttttttttgagacggagtc

SEQ ID NO: 8384 - DNA, 21 bp, Artificial Sequence
  Synthetic: FXN 3 reverse 9:69039239-69039264; As/LbCpf1
tttttttttgagacggagtct

SEQ ID NO: 8385 - DNA, 22 bp, Artificial Sequence
  Synthetic: FXN 3 reverse 9:69039239-69039265; As/LbCpf1
tttttttttgagacggagtctc

SEQ ID NO: 8386 - DNA, 23 bp, Artificial Sequence
  Synthetic: FXN 3 reverse 9:69039239-69039266; As/LbCpf1
tttttttttgagacggagtctcg

SEQ ID NO: 8387 - DNA, 24 bp, Artificial Sequence
  Synthetic: FXN 3 reverse 9:69039239-69039267; As/LbCpf1
tttttttttgagacggagtctcgc

SEQ ID NO: 8388 - DNA, 25 bp, Artificial Sequence
  Synthetic: FXN 3 reverse 9:69039239-69039268; As/LbCpf1
tttttttttgagacggagtctcgct

SEQ ID NO: 8389 - DNA, 18 bp, Artificial Sequence
  Synthetic: FXN 3 reverse 9:69039240-69039262; As/LbCpf1
ttttttttttgagacgga

SEQ ID NO: 8390 - DNA, 19 bp, Artificial Sequence
  Synthetic: FXN 3 reverse 9:69039240-69039263; As/LbCpf1
ttttttttttgagacggag

SEQ ID NO: 8391 - DNA, 20 bp, Artificial Sequence
  Synthetic: FXN 3 reverse 9:69039240-69039264; As/LbCpf1
ttttttttttgagacggagt

SEQ ID NO: 8392 - DNA, 21 bp, Artificial Sequence
  Synthetic: FXN 3 reverse 9:69039240-69039265; As/LbCpf1
ttttttttttgagacggagtc

SEQ ID NO: 8393 - DNA, 22 bp, Artificial Sequence
  Synthetic: FXN 3 reverse 9:69039240-69039266; As/LbCpf1
ttttttttttgagacggagtct

SEQ ID NO: 8394 - DNA, 23 bp, Artificial Sequence
  Synthetic: FXN 3 reverse 9:69039240-69039267; As/LbCpf1
ttttttttttgagacggagtctc

SEQ ID NO: 8395 - DNA, 24 bp, Artificial Sequence
  Synthetic: FXN 3 reverse 9:69039240-69039268; As/LbCpf1
ttttttttttgagacggagtctcg

SEQ ID NO: 8396 - DNA, 25 bp, Artificial Sequence
  Synthetic: FXN 3 reverse 9:69039240-69039269; As/LbCpf1
ttttttttttgagacggagtctcgc

SEQ ID NO: 8397 - DNA, 18 bp, Artificial Sequence
  Synthetic: FXN 3 reverse 9:69039278-69039300; As/LbCpf1
aggtgataataaagtaat

SEQ ID NO: 8398 - DNA, 19 bp, Artificial Sequence
  Synthetic: FXN 3 reverse 9:69039278-69039301; As/LbCpf1
aggtgataataaagtaata

SEQ ID NO: 8399 - DNA, 20 bp, Artificial Sequence
  Synthetic: FXN 3 reverse 9:69039278-69039302; As/LbCpf1
aggtgataataaagtaataa

SEQ ID NO: 8400 - DNA, 21 bp, Artificial Sequence
  Synthetic: FXN 3 reverse 9:69039278-69039303; As/LbCpf1
aggtgataataaagtaataaa

SEQ ID NO: 8401 - DNA, 22 bp, Artificial Sequence
  Synthetic: FXN 3 reverse 9:69039278-69039304; As/LbCpf1
aggtgataataaagtaataaag

SEQ ID NO: 8402 - DNA, 23 bp, Artificial Sequence
  Synthetic: FXN 3 reverse 9:69039278-69039305; As/LbCpf1
aggtgataataaagtaataaagt

SEQ ID NO: 8403 - DNA, 24 bp, Artificial Sequence
  Synthetic: FXN 3 reverse 9:69039278-69039306; As/LbCpf1
aggtgataataaagtaataaagtt

SEQ ID NO: 8404 - DNA, 25 bp, Artificial Sequence
  Synthetic: FXN 3 reverse 9:69039278-69039307; As/LbCpf1
aggtgataataaagtaataaagtta

SEQ ID NO: 8405 - DNA, 18 bp, Artificial Sequence
  Synthetic: FXN 3 forward 9:69039282-69039304; As/LbCpf1
ttactttattatcacctc

SEQ ID NO: 8406 - DNA, 19 bp, Artificial Sequence
  Synthetic: FXN 3 forward 9:69039282-69039305; As/LbCpf1
ttactttattatcacctca

SEQ ID NO: 8407 - DNA, 20 bp, Artificial Sequence
  Synthetic: FXN 3 forward 9:69039282-69039306; As/LbCpf1
ttactttattatcacctcaa

SEQ ID NO: 8408 - DNA, 21 bp, Artificial Sequence
  Synthetic: FXN 3 forward 9:69039282-69039307; As/LbCpf1
ttactttattatcacctcaaa

SEQ ID NO: 8409 - DNA, 22 bp, Artificial Sequence
  Synthetic: FXN 3 forward 9:69039282-69039308; As/LbCpf1
ttactttattatcacctcaaat

SEQ ID NO: 8410 - DNA, 23 bp, Artificial Sequence
  Synthetic: FXN 3 forward 9:69039282-69039309; As/LbCpf1
ttactttattatcacctcaaata

SEQ ID NO: 8411 - DNA, 24 bp, Artificial Sequence
  Synthetic: FXN 3 forward 9:69039282-69039310; As/LbCpf1
ttactttattatcacctcaaataa

SEQ ID NO: 8412 - DNA, 25 bp, Artificial Sequence
  Synthetic: FXN 3 forward 9:69039282-69039311; As/LbCpf1
ttactttattatcacctcaaataat

SEQ ID NO: 8413 - DNA, 18 bp, Artificial Sequence
  Synthetic: FXN 3 reverse 9:69039286-69039308; As/LbCpf1
attatttgaggtgataat

SEQ ID NO: 8414 - DNA, 19 bp, Artificial Sequence
  Synthetic: FXN 3 reverse 9:69039286-69039309; As/LbCpf1
attatttgaggtgataata

SEQ ID NO: 8415 - DNA, 20 bp, Artificial Sequence
  Synthetic: FXN 3 reverse 9:69039286-69039310; As/LbCpf1
attatttgaggtgataataa

SEQ ID NO: 8416 - DNA, 21 bp, Artificial Sequence
  Synthetic: FXN 3 reverse 9:69039286-69039311; As/LbCpf1
attatttgaggtgataataaa

SEQ ID NO: 8417 - DNA, 22 bp, Artificial Sequence
  Synthetic: FXN 3 reverse 9:69039286-69039312; As/LbCpf1
attatttgaggtgataataaag

SEQ ID NO: 8418 - DNA, 23 bp, Artificial Sequence
  Synthetic: FXN 3 reverse 9:69039286-69039313; As/LbCpf1
attatttgaggtgataataaagt

SEQ ID NO: 8419 - DNA, 24 bp, Artificial Sequence
  Synthetic: FXN 3 reverse 9:69039286-69039314; As/LbCpf1
attatttgaggtgataataaagta

SEQ ID NO: 8420 - DNA, 25 bp, Artificial Sequence
  Synthetic: FXN 3 reverse 9:69039286-69039315; As/LbCpf1
attatttgaggtgataataaagtaa

SEQ ID NO: 8421 - DNA, 18 bp, Artificial Sequence
  Synthetic: FXN 3 reverse 9:69039287-69039309; As/LbCpf1
aattatttgaggtgataa

SEQ ID NO: 8422 - DNA, 19 bp, Artificial Sequence
  Synthetic: FXN 3 reverse 9:69039287-69039310; As/LbCpf1
aattatttgaggtgataat

SEQ ID NO: 8423 - DNA, 20 bp, Artificial Sequence
  Synthetic: FXN 3 reverse 9:69039287-69039311; As/LbCpf1
aattatttgaggtgataata

SEQ ID NO: 8424 - DNA, 21 bp, Artificial Sequence
  Synthetic: FXN 3 reverse 9:69039287-69039312; As/LbCpf1
aattatttgaggtgataataa

SEQ ID NO: 8425 - DNA, 22 bp, Artificial Sequence
  Synthetic: FXN 3 reverse 9:69039287-69039313; As/LbCpf1
aattatttgaggtgataataaa

SEQ ID NO: 8426 - DNA, 23 bp, Artificial Sequence
  Synthetic: FXN 3 reverse 9:69039287-69039314; As/LbCpf1
aattatttgaggtgataataaag

SEQ ID NO: 8427 - DNA, 24 bp, Artificial Sequence
  Synthetic: FXN 3 reverse 9:69039287-69039315; As/LbCpf1
aattatttgaggtgataataaagt

SEQ ID NO: 8428 - DNA, 25 bp, Artificial Sequence
  Synthetic: FXN 3 reverse 9:69039287-69039316; As/LbCpf1
aattatttgaggtgataataaagta

SEQ ID NO: 8429 - DNA, 18 bp, Artificial Sequence
  Synthetic: FXN 3 forward 9:69039290-69039312; As/LbCpf1
ttatcacctcaaataatt

SEQ ID NO: 8430 - DNA, 19 bp, Artificial Sequence
  Synthetic: FXN 3 forward 9:69039290-69039313; As/LbCpf1
ttatcacctcaaataatta

SEQ ID NO: 8431 - DNA, 20 bp, Artificial Sequence
  Synthetic: FXN 3 forward 9:69039290-69039314; As/LbCpf1
ttatcacctcaaataattaa

SEQ ID NO: 8432 - DNA, 21 bp, Artificial Sequence
  Synthetic: FXN 3 forward 9:69039290-69039315; As/LbCpf1
ttatcacctcaaataattaaa

SEQ ID NO: 8433 - DNA, 22 bp, Artificial Sequence
  Synthetic: FXN 3 forward 9:69039290-69039316; As/LbCpf1
ttatcacctcaaataattaaaa

SEQ ID NO: 8434 - DNA, 23 bp, Artificial Sequence
  Synthetic: FXN 3 forward 9:69039290-69039317; As/LbCpf1
ttatcacctcaaataattaaaat

SEQ ID NO: 8435 - DNA, 24 bp, Artificial Sequence
  Synthetic: FXN 3 forward 9:69039290-69039318; As/LbCpf1
ttatcacctcaaataattaaaatt

SEQ ID NO: 8436 - DNA, 25 bp, Artificial Sequence
  Synthetic: FXN 3 forward 9:69039290-69039319; As/LbCpf1
ttatcacctcaaataattaaaatta

SEQ ID NO: 8437 - DNA, 18 bp, Artificial Sequence
  Synthetic: FXN 3 reverse 9:69039292-69039314; As/LbCpf1
attttaattatttgaggt

SEQ ID NO: 8438 - DNA, 19 bp, Artificial Sequence
  Synthetic: FXN 3 reverse 9:69039292-69039315; As/LbCpf1
attttaattatttgaggtg

SEQ ID NO: 8439 - DNA, 20 bp, Artificial Sequence
  Synthetic: FXN 3 reverse 9:69039292-69039316; As/LbCpf1
attttaattatttgaggtga

SEQ ID NO: 8440 - DNA, 21 bp, Artificial Sequence
  Synthetic: FXN 3 reverse 9:69039292-69039317; As/LbCpf1
attttaattatttgaggtgat

SEQ ID NO: 8441 - DNA, 22 bp, Artificial Sequence
  Synthetic: FXN 3 reverse 9:69039292-69039318; As/LbCpf1
attttaattatttgaggtgata

SEQ ID NO: 8442 - DNA, 23 bp, Artificial Sequence
  Synthetic: FXN 3 reverse 9:69039292-69039319; As/LbCpf1
attttaattatttgaggtgataa

SEQ ID NO: 8443 - DNA, 24 bp, Artificial Sequence
  Synthetic: FXN 3 reverse 9:69039292-69039320; As/LbCpf1
attttaattatttgaggtgataat

SEQ ID NO: 8444 - DNA, 25 bp, Artificial Sequence
  Synthetic: FXN 3 reverse 9:69039292-69039321; As/LbCpf1
attttaattatttgaggtgataata

SEQ ID NO: 8445 - DNA, 18 bp, Artificial Sequence
  Synthetic: FXN 3 reverse 9:69039303-69039325; As/LbCpf1
aacttcatttaattttaa

SEQ ID NO: 8446 - DNA, 19 bp, Artificial Sequence
  Synthetic: FXN 3 reverse 9:69039303-69039326; As/LbCpf1
aacttcatttaattttaat

SEQ ID NO: 8447 - DNA, 20 bp, Artificial Sequence
  Synthetic: FXN 3 reverse 9:69039303-69039327; As/LbCpf1
aacttcatttaattttaatt

SEQ ID NO: 8448 - DNA, 21 bp, Artificial Sequence
  Synthetic: FXN 3 reverse 9:69039303-69039328; As/LbCpf1
aacttcatttaattttaatta

SEQ ID NO: 8449 - DNA, 22 bp, Artificial Sequence
  Synthetic: FXN 3 reverse 9:69039303-69039329; As/LbCpf1
aacttcatttaattttaattat

SEQ ID NO: 8450 - DNA, 23 bp, Artificial Sequence
  Synthetic: FXN 3 reverse 9:69039303-69039330; As/LbCpf1
aacttcatttaattttaattatt

SEQ ID NO: 8451 - DNA, 24 bp, Artificial Sequence
  Synthetic: FXN 3 reverse 9:69039303-69039331; As/LbCpf1
aacttcatttaattttaattattt

SEQ ID NO: 8452 - DNA, 25 bp, Artificial Sequence
  Synthetic: FXN 3 reverse 9:69039303-69039332; As/LbCpf1
aacttcatttaattttaattatttg

SEQ ID NO: 8453 - DNA, 18 bp, Artificial Sequence
  Synthetic: FXN 3 reverse 9:69039304-69039326; As/LbCpf1
caacttcatttaatttta

SEQ ID NO: 8454 - DNA, 19 bp, Artificial Sequence
  Synthetic: FXN 3 reverse 9:69039304-69039327; As/LbCpf1
caacttcatttaattttaa

SEQ ID NO: 8455 - DNA, 20 bp, Artificial Sequence
  Synthetic: FXN 3 reverse 9:69039304-69039328; As/LbCpf1
caacttcatttaattttaat

SEQ ID NO: 8456 - DNA, 21 bp, Artificial Sequence
  Synthetic: FXN 3 reverse 9:69039304-69039329; As/LbCpf1
caacttcatttaattttaatt

SEQ ID NO: 8457 - DNA, 22 bp, Artificial Sequence
  Synthetic: FXN 3 reverse 9:69039304-69039330; As/LbCpf1
caacttcatttaattttaatta

SEQ ID NO: 8458 - DNA, 23 bp, Artificial Sequence
  Synthetic: FXN 3 reverse 9:69039304-69039331; As/LbCpf1
caacttcatttaattttaattat

SEQ ID NO: 8459 - DNA, 24 bp, Artificial Sequence
  Synthetic: FXN 3 reverse 9:69039304-69039332; As/LbCpf1
caacttcatttaattttaattatt

SEQ ID NO: 8460 - DNA, 25 bp, Artificial Sequence
  Synthetic: FXN 3 reverse 9:69039304-69039333; As/LbCpf1
caacttcatttaattttaattattt

SEQ ID NO: 8461 - DNA, 18 bp, Artificial Sequence
  Synthetic: FXN 3 forward 9:69039360-69039382; As/LbCpf1
tagtgctcagtagccacg

SEQ ID NO: 8462 - DNA, 19 bp, Artificial Sequence
  Synthetic: FXN 3 forward 9:69039360-69039383; As/LbCpf1
tagtgctcagtagccacgg

SEQ ID NO: 8463 - DNA, 20 bp, Artificial Sequence
  Synthetic: FXN 3 forward 9:69039360-69039384; As/LbCpf1
tagtgctcagtagccacggg

SEQ ID NO: 8464 - DNA, 21 bp, Artificial Sequence
  Synthetic: FXN 3 forward 9:69039360-69039385; As/LbCpf1
tagtgctcagtagccacgggg

SEQ ID NO: 8465 - DNA, 22 bp, Artificial Sequence
  Synthetic: FXN 3 forward 9:69039360-69039386; As/LbCpf1
tagtgctcagtagccacggggg

SEQ ID NO: 8466 - DNA, 23 bp, Artificial Sequence
  Synthetic: FXN 3 forward 9:69039360-69039387; As/LbCpf1
tagtgctcagtagccacgggggc

SEQ ID NO: 8467 - DNA, 24 bp, Artificial Sequence
  Synthetic: FXN 3 forward 9:69039360-69039388; As/LbCpf1
tagtgctcagtagccacgggggct

SEQ ID NO: 8468 - DNA, 25 bp, Artificial Sequence
  Synthetic: FXN 3 forward 9:69039360-69039389; As/LbCpf1
tagtgctcagtagccacgggggctg

SEQ ID NO: 8469 - DNA, 18 bp, Artificial Sequence
  Synthetic: FXN 3 forward 9:69039413-69039435; As/LbCpf1
gtacctgatcattggttc

SEQ ID NO: 8470 - DNA, 19 bp, Artificial Sequence
  Synthetic: FXN 3 forward 9:69039413-69039436; As/LbCpf1
gtacctgatcattggttct

SEQ ID NO: 8471 - DNA, 20 bp, Artificial Sequence
  Synthetic: FXN 3 forward 9:69039413-69039437; As/LbCpf1
gtacctgatcattggttctc

SEQ ID NO: 8472 - DNA, 21 bp, Artificial Sequence
  Synthetic: FXN 3 forward 9:69039413-69039438; As/LbCpf1
gtacctgatcattggttctca

SEQ ID NO: 8473 - DNA, 22 bp, Artificial Sequence
  Synthetic: FXN 3 forward 9:69039413-69039439; As/LbCpf1
gtacctgatcattggttctcag

SEQ ID NO: 8474 - DNA, 23 bp, Artificial Sequence
  Synthetic: FXN 3 forward 9:69039413-69039440; As/LbCpf1
gtacctgatcattggttctcaga

SEQ ID NO: 8475 - DNA, 24 bp, Artificial Sequence
  Synthetic: FXN 3 forward 9:69039413-69039441; As/LbCpf1
gtacctgatcattggttctcagat

SEQ ID NO: 8476 - DNA, 25 bp, Artificial Sequence
  Synthetic: FXN 3 forward 9:69039413-69039442; As/LbCpf1
gtacctgatcattggttctcagatc

SEQ ID NO: 8477 - DNA, 18 bp, Artificial Sequence
  Synthetic: FXN 3 reverse 9:69039446-69039468; As/LbCpf1
tgtggattcttggttctg

SEQ ID NO: 8478 - DNA, 19 bp, Artificial Sequence
  Synthetic: FXN 3 reverse 9:69039446-69039469; As/LbCpf1
tgtggattcttggttctgc

SEQ ID NO: 8479 - DNA, 20 bp, Artificial Sequence
  Synthetic: FXN 3 reverse 9:69039446-69039470; As/LbCpf1
tgtggattcttggttctgct

SEQ ID NO: 8480 - DNA, 21 bp, Artificial Sequence
  Synthetic: FXN 3 reverse 9:69039446-69039471; As/LbCpf1
tgtggattcttggttctgctg

SEQ ID NO: 8481 - DNA, 22 bp, Artificial Sequence
  Synthetic: FXN 3 reverse 9:69039446-69039472; As/LbCpf1
tgtggattcttggttctgctga

SEQ ID NO: 8482 - DNA, 23 bp, Artificial Sequence
  Synthetic: FXN 3 reverse 9:69039446-69039473; As/LbCpf1
tgtggattcttggttctgctgag

SEQ ID NO: 8483 - DNA, 24 bp, Artificial Sequence
  Synthetic: FXN 3 reverse 9:69039446-69039474; As/LbCpf1
tgtggattcttggttctgctgagt

SEQ ID NO: 8484 - DNA, 25 bp, Artificial Sequence
  Synthetic: FXN 3 reverse 9:69039446-69039475; As/LbCpf1
tgtggattcttggttctgctgagta

SEQ ID NO: 8485 - DNA, 18 bp, Artificial Sequence
  Synthetic: FXN 3 reverse 9:69039457-69039479; As/LbCpf1
aaagccgtttctgtggat

SEQ ID NO: 8486 - DNA, 19 bp, Artificial Sequence
  Synthetic: FXN 3 reverse 9:69039457-69039480; As/LbCpf1
aaagccgtttctgtggatt

SEQ ID NO: 8487 - DNA, 20 bp, Artificial Sequence
  Synthetic: FXN 3 reverse 9:69039457-69039481; As/LbCpf1
aaagccgtttctgtggattc

SEQ ID NO: 8488 - DNA, 21 bp, Artificial Sequence
  Synthetic: FXN 3 reverse 9:69039457-69039482; As/LbCpf1
aaagccgtttctgtggattct

SEQ ID NO: 8489 - DNA, 22 bp, Artificial Sequence
  Synthetic: FXN 3 reverse 9:69039457-69039483; As/LbCpf1
aaagccgtttctgtggattctt

SEQ ID NO: 8490 - DNA, 23 bp, Artificial Sequence
  Synthetic: FXN 3 reverse 9:69039457-69039484; As/LbCpf1
aaagccgtttctgtggattcttg

SEQ ID NO: 8491 - DNA, 24 bp, Artificial Sequence
  Synthetic: FXN 3 reverse 9:69039457-69039485; As/LbCpf1
aaagccgtttctgtggattcttgg

SEQ ID NO: 8492 - DNA, 25 bp, Artificial Sequence
  Synthetic: FXN 3 reverse 9:69039457-69039486; As/LbCpf1
aaagccgtttctgtggattcttggt

SEQ ID NO: 8493 - DNA, 18 bp, Artificial Sequence
  Synthetic: FXN 3 reverse 9:69039458-69039480; As/LbCpf1
aaaagccgtttctgtgga

SEQ ID NO: 8494 - DNA, 19 bp, Artificial Sequence
  Synthetic: FXN 3 reverse 9:69039458-69039481; As/LbCpf1
aaaagccgtttctgtggat

SEQ ID NO: 8495 - DNA, 20 bp, Artificial Sequence
  Synthetic: FXN 3 reverse 9:69039458-69039482; As/LbCpf1
aaaagccgtttctgtggatt

SEQ ID NO: 8496 - DNA, 21 bp, Artificial Sequence
  Synthetic: FXN 3 reverse 9:69039458-69039483; As/LbCpf1
aaaagccgtttctgtggattc

SEQ ID NO: 8497 - DNA, 22 bp, Artificial Sequence
  Synthetic: FXN 3 reverse 9:69039458-69039484; As/LbCpf1
aaaagccgtttctgtggattct

SEQ ID NO: 8498 - DNA, 23 bp, Artificial Sequence
  Synthetic: FXN 3 reverse 9:69039458-69039485; As/LbCpf1
aaaagccgtttctgtggattctt

SEQ ID NO: 8499 - DNA, 24 bp, Artificial Sequence
  Synthetic: FXN 3 reverse 9:69039458-69039486; As/LbCpf1
aaaagccgtttctgtggattcttg

SEQ ID NO: 8500 - DNA, 25 bp, Artificial Sequence
  Synthetic: FXN 3 reverse 9:69039458-69039487; As/LbCpf1
aaaagccgtttctgtggattcttgg

SEQ ID NO: 8501 - DNA, 18 bp, Artificial Sequence
  Synthetic: FXN 3 forward 9:69039479-69039501; As/LbCpf1
aaaagcacagccccacag

SEQ ID NO: 8502 - DNA, 19 bp, Artificial Sequence
  Synthetic: FXN 3 forward 9:69039479-69039502; As/LbCpf1
aaaagcacagccccacagc

SEQ ID NO: 8503 - DNA, 20 bp, Artificial Sequence
  Synthetic: FXN 3 forward 9:69039479-69039503; As/LbCpf1
aaaagcacagccccacagcc

SEQ ID NO: 8504 - DNA, 21 bp, Artificial Sequence
  Synthetic: FXN 3 forward 9:69039479-69039504; As/LbCpf1
aaaagcacagccccacagccc

SEQ ID NO: 8505 - DNA, 22 bp, Artificial Sequence
  Synthetic: FXN 3 forward 9:69039479-69039505; As/LbCpf1
aaaagcacagccccacagcccc

SEQ ID NO: 8506 - DNA, 23 bp, Artificial Sequence
  Synthetic: FXN 3 forward 9:69039479-69039506; As/LbCpf1
aaaagcacagccccacagccccc

SEQ ID NO: 8507 - DNA, 24 bp, Artificial Sequence
  Synthetic: FXN 3 forward 9:69039479-69039507; As/LbCpf1
aaaagcacagccccacagccccca

SEQ ID NO: 8508 - DNA, 25 bp, Artificial Sequence
  Synthetic: FXN 3 forward 9:69039479-69039508; As/LbCpf1
aaaagcacagccccacagcccccag

SEQ ID NO: 8509 - DNA, 18 bp, Artificial Sequence
  Synthetic: FXN 3 forward 9:69039480-69039502; As/LbCpf1
aaagcacagccccacagc

SEQ ID NO: 8510 - DNA, 19 bp, Artificial Sequence
  Synthetic: FXN 3 forward 9:69039480-69039503; As/LbCpf1
aaagcacagccccacagcc

SEQ ID NO: 8511 - DNA, 20 bp, Artificial Sequence
  Synthetic: FXN 3 forward 9:69039480-69039504; As/LbCpf1
aaagcacagccccacagccc

SEQ ID NO: 8512 - DNA, 21 bp, Artificial Sequence
  Synthetic: FXN 3 forward 9:69039480-69039505; As/LbCpf1
aaagcacagccccacagcccc

SEQ ID NO: 8513 - DNA, 22 bp, Artificial Sequence
  Synthetic: FXN 3 forward 9:69039480-69039506; As/LbCpf1
aaagcacagccccacagccccc

SEQ ID NO: 8514 - DNA, 23 bp, Artificial Sequence
  Synthetic: FXN 3 forward 9:69039480-69039507; As/LbCpf1
aaagcacagccccacagccccca

SEQ ID NO: 8515 - DNA, 24 bp, Artificial Sequence
  Synthetic: FXN 3 forward 9:69039480-69039508; As/LbCpf1
aaagcacagccccacagcccccag

SEQ ID NO: 8516 - DNA, 25 bp, Artificial Sequence
  Synthetic: FXN 3 forward 9:69039480-69039509; As/LbCpf1
aaagcacagccccacagcccccagc

SEQ ID NO: 8517 - DNA, 18 bp, Artificial Sequence
  Synthetic: FXN 3 forward 9:69039566-69039588; As/LbCpf1
ttgatggagggatgtgac

SEQ ID NO: 8518 - DNA, 19 bp, Artificial Sequence
  Synthetic: FXN 3 forward 9:69039566-69039589; As/LbCpf1
ttgatggagggatgtgaca

SEQ ID NO: 8519 - DNA, 20 bp, Artificial Sequence
  Synthetic: FXN 3 forward 9:69039566-69039590; As/LbCpf1
ttgatggagggatgtgacag

SEQ ID NO: 8520 - DNA, 21 bp, Artificial Sequence
  Synthetic: FXN 3 forward 9:69039566-69039591; As/LbCpf1
ttgatggagggatgtgacagg

SEQ ID NO: 8521 - DNA, 22 bp, Artificial Sequence
  Synthetic: FXN 3 forward 9:69039566-69039592; As/LbCpf1
ttgatggagggatgtgacaggg

SEQ ID NO: 8522 - DNA, 23 bp, Artificial Sequence
  Synthetic: FXN 3 forward 9:69039566-69039593; As/LbCpf1
ttgatggagggatgtgacagggg

SEQ ID NO: 8523 - DNA, 24 bp, Artificial Sequence
  Synthetic: FXN 3 forward 9:69039566-69039594; As/LbCpf1
ttgatggagggatgtgacaggggc

SEQ ID NO: 8524 - DNA, 25 bp, Artificial Sequence
  Synthetic: FXN 3 forward 9:69039566-69039595; As/LbCpf1
ttgatggagggatgtgacaggggct

SEQ ID NO: 8525 - DNA, 18 bp, Artificial Sequence
  Synthetic: FXN 3 forward 9:69039567-69039589; As/LbCpf1
tgatggagggatgtgaca

SEQ ID NO: 8526 - DNA, 19 bp, Artificial Sequence
  Synthetic: FXN 3 forward 9:69039567-69039590; As/LbCpf1
tgatggagggatgtgacag

SEQ ID NO: 8527 - DNA, 20 bp, Artificial Sequence
  Synthetic: FXN 3 forward 9:69039567-69039591; As/LbCpf1
tgatggagggatgtgacagg

SEQ ID NO: 8528 - DNA, 21 bp, Artificial Sequence
  Synthetic: FXN 3 forward 9:69039567-69039592; As/LbCpf1
tgatggagggatgtgacaggg

SEQ ID NO: 8529 - DNA, 22 bp, Artificial Sequence
  Synthetic: FXN 3 forward 9:69039567-69039593; As/LbCpf1
tgatggagggatgtgacagggg

SEQ ID NO: 8530 - DNA, 23 bp, Artificial Sequence
  Synthetic: FXN 3 forward 9:69039567-69039594; As/LbCpf1
tgatggagggatgtgacaggggc

SEQ ID NO: 8531 - DNA, 24 bp, Artificial Sequence
  Synthetic: FXN 3 forward 9:69039567-69039595; As/LbCpf1
tgatggagggatgtgacaggggct

SEQ ID NO: 8532 - DNA, 25 bp, Artificial Sequence
  Synthetic: FXN 3 forward 9:69039567-69039596; As/LbCpf1
tgatggagggatgtgacaggggctg

SEQ ID NO: 8533 - DNA, 18 bp, Artificial Sequence
  Synthetic: FXN 3 forward 9:69039568-69039590; As/LbCpf1
gatggagggatgtgacag

SEQ ID NO: 8534 - DNA, 19 bp, Artificial Sequence
  Synthetic: FXN 3 forward 9:69039568-69039591; As/LbCpf1
gatggagggatgtgacagg

SEQ ID NO: 8535 - DNA, 20 bp, Artificial Sequence
  Synthetic: FXN 3 forward 9:69039568-69039592; As/LbCpf1
gatggagggatgtgacaggg

SEQ ID NO: 8536 - DNA, 21 bp, Artificial Sequence
  Synthetic: FXN 3 forward 9:69039568-69039593; As/LbCpf1
gatggagggatgtgacagggg

SEQ ID NO: 8537 - DNA, 22 bp, Artificial Sequence
  Synthetic: FXN 3 forward 9:69039568-69039594; As/LbCpf1
gatggagggatgtgacaggggc

SEQ ID NO: 8538 - DNA, 23 bp, Artificial Sequence
  Synthetic: FXN 3 forward 9:69039568-69039595; As/LbCpf1
gatggagggatgtgacaggggct

SEQ ID NO: 8539 - DNA, 24 bp, Artificial Sequence
  Synthetic: FXN 3 forward 9:69039568-69039596; As/LbCpf1
gatggagggatgtgacaggggctg

SEQ ID NO: 8540 - DNA, 25 bp, Artificial Sequence
  Synthetic: FXN 3 forward 9:69039568-69039597; As/LbCpf1
gatggagggatgtgacaggggctgc

SEQ ID NO: 8541 - DNA, 18 bp, Artificial Sequence
  Synthetic: FXN 3 forward 9:69039569-69039591; As/LbCpf1
atggagggatgtgacagg

SEQ ID NO: 8542 - DNA, 19 bp, Artificial Sequence
  Synthetic: FXN 3 forward 9:69039569-69039592; As/LbCpf1
atggagggatgtgacaggg

SEQ ID NO: 8543 - DNA, 20 bp, Artificial Sequence
  Synthetic: FXN 3 forward 9:69039569-69039593; As/LbCpf1
atggagggatgtgacagggg

SEQ ID NO: 8544 - DNA, 21 bp, Artificial Sequence
  Synthetic: FXN 3 forward 9:69039569-69039594; As/LbCpf1
atggagggatgtgacaggggc

SEQ ID NO: 8545 - DNA, 22 bp, Artificial Sequence
  Synthetic: FXN 3 forward 9:69039569-69039595; As/LbCpf1
atggagggatgtgacaggggct

SEQ ID NO: 8546 - DNA, 23 bp, Artificial Sequence
  Synthetic: FXN 3 forward 9:69039569-69039596; As/LbCpf1
atggagggatgtgacaggggctg

SEQ ID NO: 8547 - DNA, 24 bp, Artificial Sequence
  Synthetic: FXN 3 forward 9:69039569-69039597; As/LbCpf1
atggagggatgtgacaggggctgc

SEQ ID NO: 8548 - DNA, 25 bp, Artificial Sequence
  Synthetic: FXN 3 forward 9:69039569-69039598; As/LbCpf1
atggagggatgtgacaggggctgca

SEQ ID NO: 8549 - DNA, 18 bp, Artificial Sequence
  Synthetic: FXN 3 reverse 9:69039590-69039612; As/LbCpf1
agaggaaacgttaaagat

SEQ ID NO: 8550 - DNA, 19 bp, Artificial Sequence
  Synthetic: FXN 3 reverse 9:69039590-69039613; As/LbCpf1
agaggaaacgttaaagatg

SEQ ID NO: 8551 - DNA, 20 bp, Artificial Sequence
  Synthetic: FXN 3 reverse 9:69039590-69039614; As/LbCpf1
agaggaaacgttaaagatgc

SEQ ID NO: 8552 - DNA, 21 bp, Artificial Sequence
  Synthetic: FXN 3 reverse 9:69039590-69039615; As/LbCpf1
agaggaaacgttaaagatgca

SEQ ID NO: 8553 - DNA, 22 bp, Artificial Sequence
  Synthetic: FXN 3 reverse 9:69039590-69039616; As/LbCpf1
agaggaaacgttaaagatgcag

SEQ ID NO: 8554 - DNA, 23 bp, Artificial Sequence
  Synthetic: FXN 3 reverse 9:69039590-69039617; As/LbCpf1
agaggaaacgttaaagatgcagc

SEQ ID NO: 8555 - DNA, 24 bp, Artificial Sequence
  Synthetic: FXN 3 reverse 9:69039590-69039618; As/LbCpf1
agaggaaacgttaaagatgcagcc

SEQ ID NO: 8556 - DNA, 25 bp, Artificial Sequence
  Synthetic: FXN 3 reverse 9:69039590-69039619; As/LbCpf1
agaggaaacgttaaagatgcagccc

SEQ ID NO: 8557 - DNA, 18 bp, Artificial Sequence
  Synthetic: FXN 3 forward 9:69039600-69039622; As/LbCpf1
acgtttcctcttaaatac

SEQ ID NO: 8558 - DNA, 19 bp, Artificial Sequence
  Synthetic: FXN 3 forward 9:69039600-69039623; As/LbCpf1
acgtttcctcttaaatact

SEQ ID NO: 8559 - DNA, 20 bp, Artificial Sequence
  Synthetic: FXN 3 forward 9:69039600-69039624; As/LbCpf1
acgtttcctcttaaatactg

SEQ ID NO: 8560 - DNA, 21 bp, Artificial Sequence
  Synthetic: FXN 3 forward 9:69039600-69039625; As/LbCpf1
acgtttcctcttaaatactgg

SEQ ID NO: 8561 - DNA, 22 bp, Artificial Sequence
  Synthetic: FXN 3 forward 9:69039600-69039626; As/LbCpf1
acgtttcctcttaaatactgga

SEQ ID NO: 8562 - DNA, 23 bp, Artificial Sequence
  Synthetic: FXN 3 forward 9:69039600-69039627; As/LbCpf1
acgtttcctcttaaatactggag

SEQ ID NO: 8563 - DNA, 24 bp, Artificial Sequence
  Synthetic: FXN 3 forward 9:69039600-69039628; As/LbCpf1
acgtttcctcttaaatactggaga

SEQ ID NO: 8564 - DNA, 25 bp, Artificial Sequence
  Synthetic: FXN 3 forward 9:69039600-69039629; As/LbCpf1
acgtttcctcttaaatactggagac

SEQ ID NO: 8565 - DNA, 18 bp, Artificial Sequence
  Synthetic: FXN 3 forward 9:69039607-69039629; As/LbCpf1
ctcttaaatactggagac

SEQ ID NO: 8566 - DNA, 19 bp, Artificial Sequence
  Synthetic: FXN 3 forward 9:69039607-69039630; As/LbCpf1
ctcttaaatactggagaca

SEQ ID NO: 8567 - DNA, 20 bp, Artificial Sequence
  Synthetic: FXN 3 forward 9:69039607-69039631; As/LbCpf1
ctcttaaatactggagacag

SEQ ID NO: 8568 - DNA, 21 bp, Artificial Sequence
  Synthetic: FXN 3 forward 9:69039607-69039632; As/LbCpf1
ctcttaaatactggagacagc

SEQ ID NO: 8569 - DNA, 22 bp, Artificial Sequence
  Synthetic: FXN 3 forward 9:69039607-69039633; As/LbCpf1
ctcttaaatactggagacagct

SEQ ID NO: 8570 - DNA, 23 bp, Artificial Sequence
  Synthetic: FXN 3 forward 9:69039607-69039634; As/LbCpf1
ctcttaaatactggagacagctt

SEQ ID NO: 8571 - DNA, 24 bp, Artificial Sequence
  Synthetic: FXN 3 forward 9:69039607-69039635; As/LbCpf1
ctcttaaatactggagacagcttc

SEQ ID NO: 8572 - DNA, 25 bp, Artificial Sequence
  Synthetic: FXN 3 forward 9:69039607-69039636; As/LbCpf1
ctcttaaatactggagacagcttcg

SEQ ID NO: 8573 - DNA, 18 bp, Artificial Sequence
  Synthetic: FXN 3 forward 9:69039667-69039689; As/LbCpf1
atggagggatgtgacggg

SEQ ID NO: 8574 - DNA, 19 bp, Artificial Sequence
  Synthetic: FXN 3 forward 9:69039667-69039690; As/LbCpf1
atggagggatgtgacgggg

SEQ ID NO: 8575 - DNA, 20 bp, Artificial Sequence
  Synthetic: FXN 3 forward 9:69039667-69039691; As/LbCpf1
atggagggatgtgacggggc

SEQ ID NO: 8576 - DNA, 21 bp, Artificial Sequence
  Synthetic: FXN 3 forward 9:69039667-69039692; As/LbCpf1
atggagggatgtgacggggct

SEQ ID NO: 8577 - DNA, 22 bp, Artificial Sequence
  Synthetic: FXN 3 forward 9:69039667-69039693; As/LbCpf1
atggagggatgtgacggggctg

SEQ ID NO: 8578 - DNA, 23 bp, Artificial Sequence
  Synthetic: FXN 3 forward 9:69039667-69039694; As/LbCpf1
atggagggatgtgacggggctgc

SEQ ID NO: 8579 - DNA, 24 bp, Artificial Sequence
  Synthetic: FXN 3 forward 9:69039667-69039695; As/LbCpf1
atggagggatgtgacggggctgcg

SEQ ID NO: 8580 - DNA, 25 bp, Artificial Sequence
  Synthetic: FXN 3 forward 9:69039667-69039696; As/LbCpf1
atggagggatgtgacggggctgcgt

SEQ ID NO: 8581 - DNA, 18 bp, Artificial Sequence
  Synthetic: FXN 3 reverse 9:69039687-69039709; As/LbCpf1
agaggaaacgttaaagac

SEQ ID NO: 8582 - DNA, 19 bp, Artificial Sequence
  Synthetic: FXN 3 reverse 9:69039687-69039710; As/LbCpf1
agaggaaacgttaaagacg

SEQ ID NO: 8583 - DNA, 20 bp, Artificial Sequence
  Synthetic: FXN 3 reverse 9:69039687-69039711; As/LbCpf1
agaggaaacgttaaagacgc

SEQ ID NO: 8584 - DNA, 21 bp, Artificial Sequence
  Synthetic: FXN 3 reverse 9:69039687-69039712; As/LbCpf1
agaggaaacgttaaagacgca

SEQ ID NO: 8585 - DNA, 22 bp, Artificial Sequence
  Synthetic: FXN 3 reverse 9:69039687-69039713; As/LbCpf1
agaggaaacgttaaagacgcag

SEQ ID NO: 8586 - DNA, 23 bp, Artificial Sequence
  Synthetic: FXN 3 reverse 9:69039687-69039714; As/LbCpf1
agaggaaacgttaaagacgcagc

SEQ ID NO: 8587 - DNA, 24 bp, Artificial Sequence
  Synthetic: FXN 3 reverse 9:69039687-69039715; As/LbCpf1
agaggaaacgttaaagacgcagcc

SEQ ID NO: 8588 - DNA, 25 bp, Artificial Sequence
  Synthetic: FXN 3 reverse 9:69039687-69039716; As/LbCpf1
agaggaaacgttaaagacgcagccc

SEQ ID NO: 8589 - DNA, 18 bp, Artificial Sequence
  Synthetic: FXN 3 forward 9:69039697-69039719; As/LbCpf1
acgtttcctcttaaatac

SEQ ID NO: 8590 - DNA, 19 bp, Artificial Sequence
  Synthetic: FXN 3 forward 9:69039697-69039720; As/LbCpf1
acgtttcctcttaaatacc

SEQ ID NO: 8591 - DNA, 20 bp, Artificial Sequence
  Synthetic: FXN 3 forward 9:69039697-69039721; As/LbCpf1
acgtttcctcttaaataccg

SEQ ID NO: 8592 - DNA, 21 bp, Artificial Sequence
  Synthetic: FXN 3 forward 9:69039697-69039722; As/LbCpf1
acgtttcctcttaaataccgg

SEQ ID NO: 8593 - DNA, 22 bp, Artificial Sequence
  Synthetic: FXN 3 forward 9:69039697-69039723; As/LbCpf1
acgtttcctcttaaataccgga

SEQ ID NO: 8594 - DNA, 23 bp, Artificial Sequence
  Synthetic: FXN 3 forward 9:69039697-69039724; As/LbCpf1
acgtttcctcttaaataccggag

SEQ ID NO: 8595 - DNA, 24 bp, Artificial Sequence
  Synthetic: FXN 3 forward 9:69039697-69039725; As/LbCpf1
acgtttcctcttaaataccggaga

SEQ ID NO: 8596 - DNA, 25 bp, Artificial Sequence
  Synthetic: FXN 3 forward 9:69039697-69039726; As/LbCpf1
acgtttcctcttaaataccggagac

SEQ ID NO: 8597 - DNA, 18 bp, Artificial Sequence
  Synthetic: FXN 3 forward 9:69039704-69039726; As/LbCpf1
ctcttaaataccggagac

SEQ ID NO: 8598 - DNA, 19 bp, Artificial Sequence
  Synthetic: FXN 3 forward 9:69039704-69039727; As/LbCpf1
ctcttaaataccggagaca

SEQ ID NO: 8599 - DNA, 20 bp, Artificial Sequence
  Synthetic: FXN 3 forward 9:69039704-69039728; As/LbCpf1
ctcttaaataccggagacag

SEQ ID NO: 8600 - DNA, 21 bp, Artificial Sequence
  Synthetic: FXN 3 forward 9:69039704-69039729; As/LbCpf1
ctcttaaataccggagacagc

SEQ ID NO: 8601 - DNA, 22 bp, Artificial Sequence
  Synthetic: FXN 3 forward 9:69039704-69039730; As/LbCpf1
ctcttaaataccggagacagct

SEQ ID NO: 8602 - DNA, 23 bp, Artificial Sequence
  Synthetic: FXN 3 forward 9:69039704-69039731; As/LbCpf1
ctcttaaataccggagacagctt

SEQ ID NO: 8603 - DNA, 24 bp, Artificial Sequence
  Synthetic: FXN 3 forward 9:69039704-69039732; As/LbCpf1
ctcttaaataccggagacagcttc

SEQ ID NO: 8604 - DNA, 25 bp, Artificial Sequence
  Synthetic: FXN 3 forward 9:69039704-69039733; As/LbCpf1
ctcttaaataccggagacagcttcg

SEQ ID NO: 8605 - DNA, 18 bp, Artificial Sequence
  Synthetic: FXN 3 forward 9:69039752-69039774; As/LbCpf1
ttagtccattttctgttg

SEQ ID NO: 8606 - DNA, 19 bp, Artificial Sequence
  Synthetic: FXN 3 forward 9:69039752-69039775; As/LbCpf1
ttagtccattttctgttgc

SEQ ID NO: 8607 - DNA, 20 bp, Artificial Sequence
  Synthetic: FXN 3 forward 9:69039752-69039776; As/LbCpf1
ttagtccattttctgttgct

SEQ ID NO: 8608 - DNA, 21 bp, Artificial Sequence
  Synthetic: FXN 3 forward 9:69039752-69039777; As/LbCpf1
ttagtccattttctgttgctt

SEQ ID NO: 8609 - DNA, 22 bp, Artificial Sequence
  Synthetic: FXN 3 forward 9:69039752-69039778; As/LbCpf1
ttagtccattttctgttgcttg

SEQ ID NO: 8610 - DNA, 23 bp, Artificial Sequence
  Synthetic: FXN 3 forward 9:69039752-69039779; As/LbCpf1
ttagtccattttctgttgcttgt

SEQ ID NO: 8611 - DNA, 24 bp, Artificial Sequence
  Synthetic: FXN 3 forward 9:69039752-69039780; As/LbCpf1
ttagtccattttctgttgcttgtg

SEQ ID NO: 8612 - DNA, 25 bp, Artificial Sequence
  Synthetic: FXN 3 forward 9:69039752-69039781; As/LbCpf1
ttagtccattttctgttgcttgtga

SEQ ID NO: 8613 - DNA, 18 bp, Artificial Sequence
  Synthetic: FXN 3 forward 9:69039764-69039786; As/LbCpf1
ctgttgcttgtgacagaa

SEQ ID NO: 8614 - DNA, 19 bp, Artificial Sequence
  Synthetic: FXN 3 forward 9:69039764-69039787; As/LbCpf1
ctgttgcttgtgacagaat

SEQ ID NO: 8615 - DNA, 20 bp, Artificial Sequence
  Synthetic: FXN 3 forward 9:69039764-69039788; As/LbCpf1
ctgttgcttgtgacagaata

SEQ ID NO: 8616 - DNA, 21 bp, Artificial Sequence
  Synthetic: FXN 3 forward 9:69039764-69039789; As/LbCpf1
ctgttgcttgtgacagaatac

SEQ ID NO: 8617 - DNA, 22 bp, Artificial Sequence
  Synthetic: FXN 3 forward 9:69039764-69039790; As/LbCpf1
ctgttgcttgtgacagaatacc

SEQ ID NO: 8618 - DNA, 23 bp, Artificial Sequence
  Synthetic: FXN 3 forward 9:69039764-69039791; As/LbCpf1
ctgttgcttgtgacagaatacct

SEQ ID NO: 8619 - DNA, 24 bp, Artificial Sequence
  Synthetic: FXN 3 forward 9:69039764-69039792; As/LbCpf1
ctgttgcttgtgacagaatacctg

SEQ ID NO: 8620 - DNA, 25 bp, Artificial Sequence
  Synthetic: FXN 3 forward 9:69039764-69039793; As/LbCpf1
ctgttgcttgtgacagaatacctga

SEQ ID NO: 8621 - DNA, 18 bp, Artificial Sequence
  Synthetic: FXN 3 forward 9:69039765-69039787; As/LbCpf1
tgttgcttgtgacagaat

SEQ ID NO: 8622 - DNA, 19 bp, Artificial Sequence
  Synthetic: FXN 3 forward 9:69039765-69039788; As/LbCpf1
tgttgcttgtgacagaata

SEQ ID NO: 8623 - DNA, 20 bp, Artificial Sequence
  Synthetic: FXN 3 forward 9:69039765-69039789; As/LbCpf1
tgttgcttgtgacagaatac

SEQ ID NO: 8624 - DNA, 21 bp, Artificial Sequence
  Synthetic: FXN 3 forward 9:69039765-69039790; As/LbCpf1
tgttgcttgtgacagaatacc

SEQ ID NO: 8625 - DNA, 22 bp, Artificial Sequence
  Synthetic: FXN 3 forward 9:69039765-69039791; As/LbCpf1
tgttgcttgtgacagaatacct

SEQ ID NO: 8626 - DNA, 23 bp, Artificial Sequence
  Synthetic: FXN 3 forward 9:69039765-69039792; As/LbCpf1
tgttgcttgtgacagaatacctg

SEQ ID NO: 8627 - DNA, 24 bp, Artificial Sequence
  Synthetic: FXN 3 forward 9:69039765-69039793; As/LbCpf1
tgttgcttgtgacagaatacctga

SEQ ID NO: 8628 - DNA, 25 bp, Artificial Sequence
  Synthetic: FXN 3 forward 9:69039765-69039794; As/LbCpf1
tgttgcttgtgacagaatacctgaa

SEQ ID NO: 8629 - DNA, 18 bp, Artificial Sequence
  Synthetic: FXN 3 reverse 9:69039766-69039788; As/LbCpf1
aggtattctgtcacaagc

SEQ ID NO: 8630 - DNA, 19 bp, Artificial Sequence
  Synthetic: FXN 3 reverse 9:69039766-69039789; As/LbCpf1
aggtattctgtcacaagca

SEQ ID NO: 8631 - DNA, 20 bp, Artificial Sequence
  Synthetic: FXN 3 reverse 9:69039766-69039790; As/LbCpf1
aggtattctgtcacaagcaa

SEQ ID NO: 8632 - DNA, 21 bp, Artificial Sequence
  Synthetic: FXN 3 reverse 9:69039766-69039791; As/LbCpf1
aggtattctgtcacaagcaac

SEQ ID NO: 8633 - DNA, 22 bp, Artificial Sequence
  Synthetic: FXN 3 reverse 9:69039766-69039792; As/LbCpf1
aggtattctgtcacaagcaaca

SEQ ID NO: 8634 - DNA, 23 bp, Artificial Sequence
  Synthetic: FXN 3 reverse 9:69039766-69039793; As/LbCpf1
aggtattctgtcacaagcaacag

SEQ ID NO: 8635 - DNA, 24 bp, Artificial Sequence
  Synthetic: FXN 3 reverse 9:69039766-69039794; As/LbCpf1
aggtattctgtcacaagcaacaga

SEQ ID NO: 8636 - DNA, 25 bp, Artificial Sequence
  Synthetic: FXN 3 reverse 9:69039766-69039795; As/LbCpf1
aggtattctgtcacaagcaacagaa

SEQ ID NO: 8637 - DNA, 18 bp, Artificial Sequence
  Synthetic: FXN 3 reverse 9:69039787-69039809; As/LbCpf1
ccatataaattgcccagt

SEQ ID NO: 8638 - DNA, 19 bp, Artificial Sequence
  Synthetic: FXN 3 reverse 9:69039787-69039810; As/LbCpf1
ccatataaattgcccagtt

SEQ ID NO: 8639 - DNA, 20 bp, Artificial Sequence
  Synthetic: FXN 3 reverse 9:69039787-69039811; As/LbCpf1
ccatataaattgcccagttt

SEQ ID NO: 8640 - DNA, 21 bp, Artificial Sequence
  Synthetic: FXN 3 reverse 9:69039787-69039812; As/LbCpf1
ccatataaattgcccagtttc

SEQ ID NO: 8641 - DNA, 22 bp, Artificial Sequence
  Synthetic: FXN 3 reverse 9:69039787-69039813; As/LbCpf1
ccatataaattgcccagtttca

SEQ ID NO: 8642 - DNA, 23 bp, Artificial Sequence
  Synthetic: FXN 3 reverse 9:69039787-69039814; As/LbCpf1
ccatataaattgcccagtttcag

SEQ ID NO: 8643 - DNA, 24 bp, Artificial Sequence
  Synthetic: FXN 3 reverse 9:69039787-69039815; As/LbCpf1
ccatataaattgcccagtttcagg

SEQ ID NO: 8644 - DNA, 25 bp, Artificial Sequence
  Synthetic: FXN 3 reverse 9:69039787-69039816; As/LbCpf1
ccatataaattgcccagtttcaggt

SEQ ID NO: 8645 - DNA, 18 bp, Artificial Sequence
  Synthetic: FXN 3 reverse 9:69039788-69039810; As/LbCpf1
accatataaattgcccag

SEQ ID NO: 8646 - DNA, 19 bp, Artificial Sequence
  Synthetic: FXN 3 reverse 9:69039788-69039811; As/LbCpf1
accatataaattgcccagt

SEQ ID NO: 8647 - DNA, 20 bp, Artificial Sequence
  Synthetic: FXN 3 reverse 9:69039788-69039812; As/LbCpf1
accatataaattgcccagtt

SEQ ID NO: 8648 - DNA, 21 bp, Artificial Sequence
  Synthetic: FXN 3 reverse 9:69039788-69039813; As/LbCpf1
accatataaattgcccagttt

SEQ ID NO: 8649 - DNA, 22 bp, Artificial Sequence
  Synthetic: FXN 3 reverse 9:69039788-69039814; As/LbCpf1
accatataaattgcccagtttc

SEQ ID NO: 8650 - DNA, 23 bp, Artificial Sequence
  Synthetic: FXN 3 reverse 9:69039788-69039815; As/LbCpf1
accatataaattgcccagtttca

SEQ ID NO: 8651 - DNA, 24 bp, Artificial Sequence
  Synthetic: FXN 3 reverse 9:69039788-69039816; As/LbCpf1
accatataaattgcccagtttcag

SEQ ID NO: 8652 - DNA, 25 bp, Artificial Sequence
  Synthetic: FXN 3 reverse 9:69039788-69039817; As/LbCpf1
accatataaattgcccagtttcagg

SEQ ID NO: 8653 - DNA, 18 bp, Artificial Sequence
  Synthetic: FXN 3 reverse 9:69039789-69039811; As/LbCpf1
taccatataaattgccca

SEQ ID NO: 8654 - DNA, 19 bp, Artificial Sequence
  Synthetic: FXN 3 reverse 9:69039789-69039812; As/LbCpf1
taccatataaattgcccag

SEQ ID NO: 8655 - DNA, 20 bp, Artificial Sequence
  Synthetic: FXN 3 reverse 9:69039789-69039813; As/LbCpf1
taccatataaattgcccagt

SEQ ID NO: 8656 - DNA, 21 bp, Artificial Sequence
  Synthetic: FXN 3 reverse 9:69039789-69039814; As/LbCpf1
taccatataaattgcccagtt

SEQ ID NO: 8657 - DNA, 22 bp, Artificial Sequence
  Synthetic: FXN 3 reverse 9:69039789-69039815; As/LbCpf1
taccatataaattgcccagttt

SEQ ID NO: 8658 - DNA, 23 bp, Artificial Sequence
  Synthetic: FXN 3 reverse 9:69039789-69039816; As/LbCpf1
taccatataaattgcccagtttc

SEQ ID NO: 8659 - DNA, 24 bp, Artificial Sequence
  Synthetic: FXN 3 reverse 9:69039789-69039817; As/LbCpf1
taccatataaattgcccagtttca

SEQ ID NO: 8660 - DNA, 25 bp, Artificial Sequence
  Synthetic: FXN 3 reverse 9:69039789-69039818; As/LbCpf1
taccatataaattgcccagtttcag

SEQ ID NO: 8661 - DNA, 18 bp, Artificial Sequence
  Synthetic: FXN 3 reverse 9:69039790-69039812; As/LbCpf1
ttaccatataaattgccc

SEQ ID NO: 8662 - DNA, 19 bp, Artificial Sequence
  Synthetic: FXN 3 reverse 9:69039790-69039813; As/LbCpf1
ttaccatataaattgccca

SEQ ID NO: 8663 - DNA, 20 bp, Artificial Sequence
  Synthetic: FXN 3 reverse 9:69039790-69039814; As/LbCpf1
ttaccatataaattgcccag

SEQ ID NO: 8664 - DNA, 21 bp, Artificial Sequence
  Synthetic: FXN 3 reverse 9:69039790-69039815; As/LbCpf1
ttaccatataaattgcccagt

SEQ ID NO: 8665 - DNA, 22 bp, Artificial Sequence
  Synthetic: FXN 3 reverse 9:69039790-69039816; As/LbCpf1
ttaccatataaattgcccagtt

SEQ ID NO: 8666 - DNA, 23 bp, Artificial Sequence
  Synthetic: FXN 3 reverse 9:69039790-69039817; As/LbCpf1
ttaccatataaattgcccagttt

SEQ ID NO: 8667 - DNA, 24 bp, Artificial Sequence
  Synthetic: FXN 3 reverse 9:69039790-69039818; As/LbCpf1
ttaccatataaattgcccagtttc

SEQ ID NO: 8668 - DNA, 25 bp, Artificial Sequence
  Synthetic: FXN 3 reverse 9:69039790-69039819; As/LbCpf1
ttaccatataaattgcccagtttca

SEQ ID NO: 8669 - DNA, 18 bp, Artificial Sequence
  Synthetic: FXN 3 forward 9:69039803-69039825; As/LbCpf1
tatggtaaaaaattttct

SEQ ID NO: 8670 - DNA, 19 bp, Artificial Sequence
  Synthetic: FXN 3 forward 9:69039803-69039826; As/LbCpf1
tatggtaaaaaattttctt

SEQ ID NO: 8671 - DNA, 20 bp, Artificial Sequence
  Synthetic: FXN 3 forward 9:69039803-69039827; As/LbCpf1
tatggtaaaaaattttcttc

SEQ ID NO: 8672 - DNA, 21 bp, Artificial Sequence
  Synthetic: FXN 3 forward 9:69039803-69039828; As/LbCpf1
tatggtaaaaaattttcttct

SEQ ID NO: 8673 - DNA, 22 bp, Artificial Sequence
  Synthetic: FXN 3 forward 9:69039803-69039829; As/LbCpf1
tatggtaaaaaattttcttctt

SEQ ID NO: 8674 - DNA, 23 bp, Artificial Sequence
  Synthetic: FXN 3 forward 9:69039803-69039830; As/LbCpf1
tatggtaaaaaattttcttctta

SEQ ID NO: 8675 - DNA, 24 bp, Artificial Sequence
  Synthetic: FXN 3 forward 9:69039803-69039831; As/LbCpf1
tatggtaaaaaattttcttcttac

SEQ ID NO: 8676 - DNA, 25 bp, Artificial Sequence
  Synthetic: FXN 3 forward 9:69039803-69039832; As/LbCpf1
tatggtaaaaaattttcttcttact

SEQ ID NO: 8677 - DNA, 18 bp, Artificial Sequence
  Synthetic: FXN 3 forward 9:69039819-69039841; As/LbCpf1
cttcttactgctctggag

SEQ ID NO: 8678 - DNA, 19 bp, Artificial Sequence
  Synthetic: FXN 3 forward 9:69039819-69039842; As/LbCpf1
cttcttactgctctggagg

SEQ ID NO: 8679 - DNA, 20 bp, Artificial Sequence
  Synthetic: FXN 3 forward 9:69039819-69039843; As/LbCpf1
cttcttactgctctggaggc

SEQ ID NO: 8680 - DNA, 21 bp, Artificial Sequence
  Synthetic: FXN 3 forward 9:69039819-69039844; As/LbCpf1
cttcttactgctctggaggct

SEQ ID NO: 8681 - DNA, 22 bp, Artificial Sequence
  Synthetic: FXN 3 forward 9:69039819-69039845; As/LbCpf1
cttcttactgctctggaggctg

SEQ ID NO: 8682 - DNA, 23 bp, Artificial Sequence
  Synthetic: FXN 3 forward 9:69039819-69039846; As/LbCpf1
cttcttactgctctggaggctga

SEQ ID NO: 8683 - DNA, 24 bp, Artificial Sequence
  Synthetic: FXN 3 forward 9:69039819-69039847; As/LbCpf1
cttcttactgctctggaggctgag

SEQ ID NO: 8684 - DNA, 25 bp, Artificial Sequence
  Synthetic: FXN 3 forward 9:69039819-69039848; As/LbCpf1
cttcttactgctctggaggctgaga

SEQ ID NO: 8685 - DNA, 18 bp, Artificial Sequence
  Synthetic: FXN 3 forward 9:69039820-69039842; As/LbCpf1
ttcttactgctctggagg

SEQ ID NO: 8686 - DNA, 19 bp, Artificial Sequence
  Synthetic: FXN 3 forward 9:69039820-69039843; As/LbCpf1
ttcttactgctctggaggc

SEQ ID NO: 8687 - DNA, 20 bp, Artificial Sequence
  Synthetic: FXN 3 forward 9:69039820-69039844; As/LbCpf1
ttcttactgctctggaggct

SEQ ID NO: 8688 - DNA, 21 bp, Artificial Sequence
  Synthetic: FXN 3 forward 9:69039820-69039845; As/LbCpf1
ttcttactgctctggaggctg

SEQ ID NO: 8689 - DNA, 22 bp, Artificial Sequence
  Synthetic: FXN 3 forward 9:69039820-69039846; As/LbCpf1
ttcttactgctctggaggctga

SEQ ID NO: 8690 - DNA, 23 bp, Artificial Sequence
  Synthetic: FXN 3 forward 9:69039820-69039847; As/LbCpf1
ttcttactgctctggaggctgag

SEQ ID NO: 8691 - DNA, 24 bp, Artificial Sequence
  Synthetic: FXN 3 forward 9:69039820-69039848; As/LbCpf1
ttcttactgctctggaggctgaga

SEQ ID NO: 8692 - DNA, 25 bp, Artificial Sequence
  Synthetic: FXN 3 forward 9:69039820-69039849; As/LbCpf1
ttcttactgctctggaggctgagaa

SEQ ID NO: 8693 - DNA, 18 bp, Artificial Sequence
  Synthetic: FXN 3 reverse 9:69039827-69039849; As/LbCpf1
gacttctcagcctccaga

SEQ ID NO: 8694 - DNA, 19 bp, Artificial Sequence
  Synthetic: FXN 3 reverse 9:69039827-69039850; As/LbCpf1
gacttctcagcctccagag

SEQ ID NO: 8695 - DNA, 20 bp, Artificial Sequence
  Synthetic: FXN 3 reverse 9:69039827-69039851; As/LbCpf1
gacttctcagcctccagagc

SEQ ID NO: 8696 - DNA, 21 bp, Artificial Sequence
  Synthetic: FXN 3 reverse 9:69039827-69039852; As/LbCpf1
gacttctcagcctccagagca

SEQ ID NO: 8697 - DNA, 22 bp, Artificial Sequence
  Synthetic: FXN 3 reverse 9:69039827-69039853; As/LbCpf1
gacttctcagcctccagagcag

SEQ ID NO: 8698 - DNA, 23 bp, Artificial Sequence
  Synthetic: FXN 3 reverse 9:69039827-69039854; As/LbCpf1
gacttctcagcctccagagcagt

SEQ ID NO: 8699 - DNA, 24 bp, Artificial Sequence
  Synthetic: FXN 3 reverse 9:69039827-69039855; As/LbCpf1
gacttctcagcctccagagcagta

SEQ ID NO: 8700 - DNA, 25 bp, Artificial Sequence
  Synthetic: FXN 3 reverse 9:69039827-69039856; As/LbCpf1
gacttctcagcctccagagcagtaa

SEQ ID NO: 8701 - DNA, 18 bp, Artificial Sequence
  Synthetic: FXN 3 forward 9:69039883-69039905; As/LbCpf1
cagagtattgaggcggca

SEQ ID NO: 8702 - DNA, 19 bp, Artificial Sequence
  Synthetic: FXN 3 forward 9:69039883-69039906; As/LbCpf1
cagagtattgaggcggcac

SEQ ID NO: 8703 - DNA, 20 bp, Artificial Sequence
  Synthetic: FXN 3 forward 9:69039883-69039907; As/LbCpf1
cagagtattgaggcggcacc

SEQ ID NO: 8704 - DNA, 21 bp, Artificial Sequence
  Synthetic: FXN 3 forward 9:69039883-69039908; As/LbCpf1
cagagtattgaggcggcaccg

SEQ ID NO: 8705 - DNA, 22 bp, Artificial Sequence
  Synthetic: FXN 3 forward 9:69039883-69039909; As/LbCpf1
cagagtattgaggcggcaccgg

SEQ ID NO: 8706 - DNA, 23 bp, Artificial Sequence
  Synthetic: FXN 3 forward 9:69039883-69039910; As/LbCpf1
cagagtattgaggcggcaccggg

SEQ ID NO: 8707 - DNA, 24 bp, Artificial Sequence
  Synthetic: FXN 3 forward 9:69039883-69039911; As/LbCpf1
cagagtattgaggcggcaccgggc

SEQ ID NO: 8708 - DNA, 25 bp, Artificial Sequence
  Synthetic: FXN 3 forward 9:69039883-69039912; As/LbCpf1
cagagtattgaggcggcaccgggcg

SEQ ID NO: 8709 - DNA, 18 bp, Artificial Sequence
  Synthetic: FXN 3 reverse 9:69039939-69039961; As/LbCpf1
taagaaaagaaaaagaca

SEQ ID NO: 8710 - DNA, 19 bp, Artificial Sequence
  Synthetic: FXN 3 reverse 9:69039939-69039962; As/LbCpf1
taagaaaagaaaaagacac

SEQ ID NO: 8711 - DNA, 20 bp, Artificial Sequence
  Synthetic: FXN 3 reverse 9:69039939-69039963; As/LbCpf1
taagaaaagaaaaagacacc

SEQ ID NO: 8712 - DNA, 21 bp, Artificial Sequence
  Synthetic: FXN 3 reverse 9:69039939-69039964; As/LbCpf1
taagaaaagaaaaagacacct

SEQ ID NO: 8713 - DNA, 22 bp, Artificial Sequence
  Synthetic: FXN 3 reverse 9:69039939-69039965; As/LbCpf1
taagaaaagaaaaagacacctg

SEQ ID NO: 8714 - DNA, 23 bp, Artificial Sequence
  Synthetic: FXN 3 reverse 9:69039939-69039966; As/LbCpf1
taagaaaagaaaaagacacctga

SEQ ID NO: 8715 - DNA, 24 bp, Artificial Sequence
  Synthetic: FXN 3 reverse 9:69039939-69039967; As/LbCpf1
taagaaaagaaaaagacacctgag

SEQ ID NO: 8716 - DNA, 25 bp, Artificial Sequence
  Synthetic: FXN 3 reverse 9:69039939-69039968; As/LbCpf1
taagaaaagaaaaagacacctgagg

SEQ ID NO: 8717 - DNA, 18 bp, Artificial Sequence
  Synthetic: FXN 3 forward 9:69039950-69039972; As/LbCpf1
tcttttcttataaagcct

SEQ ID NO: 8718 - DNA, 19 bp, Artificial Sequence
  Synthetic: FXN 3 forward 9:69039950-69039973; As/LbCpf1
tcttttcttataaagccta

SEQ ID NO: 8719 - DNA, 20 bp, Artificial Sequence
  Synthetic: FXN 3 forward 9:69039950-69039974; As/LbCpf1
tcttttcttataaagcctaa

SEQ ID NO: 8720 - DNA, 21 bp, Artificial Sequence
  Synthetic: FXN 3 forward 9:69039950-69039975; As/LbCpf1
tcttttcttataaagcctaac

SEQ ID NO: 8721 - DNA, 22 bp, Artificial Sequence
  Synthetic: FXN 3 forward 9:69039950-69039976; As/LbCpf1
tcttttcttataaagcctaact

SEQ ID NO: 8722 - DNA, 23 bp, Artificial Sequence
  Synthetic: FXN 3 forward 9:69039950-69039977; As/LbCpf1
tcttttcttataaagcctaacta

SEQ ID NO: 8723 - DNA, 24 bp, Artificial Sequence
  Synthetic: FXN 3 forward 9:69039950-69039978; As/LbCpf1
tcttttcttataaagcctaactag

SEQ ID NO: 8724 - DNA, 25 bp, Artificial Sequence
  Synthetic: FXN 3 forward 9:69039950-69039979; As/LbCpf1
tcttttcttataaagcctaactagt

SEQ ID NO: 8725 - DNA, 18 bp, Artificial Sequence
  Synthetic: FXN 3 forward 9:69039951-69039973; As/LbCpf1
cttttcttataaagccta

SEQ ID NO: 8726 - DNA, 19 bp, Artificial Sequence
  Synthetic: FXN 3 forward 9:69039951-69039974; As/LbCpf1
cttttcttataaagcctaa

SEQ ID NO: 8727 - DNA, 20 bp, Artificial Sequence
  Synthetic: FXN 3 forward 9:69039951-69039975; As/LbCpf1
cttttcttataaagcctaac

SEQ ID NO: 8728 - DNA, 21 bp, Artificial Sequence
  Synthetic: FXN 3 forward 9:69039951-69039976; As/LbCpf1
cttttcttataaagcctaact

SEQ ID NO: 8729 - DNA, 22 bp, Artificial Sequence
  Synthetic: FXN 3 forward 9:69039951-69039977; As/LbCpf1
cttttcttataaagcctaacta

SEQ ID NO: 8730 - DNA, 23 bp, Artificial Sequence
  Synthetic: FXN 3 forward 9:69039951-69039978; As/LbCpf1
cttttcttataaagcctaactag

SEQ ID NO: 8731 - DNA, 24 bp, Artificial Sequence
  Synthetic: FXN 3 forward 9:69039951-69039979; As/LbCpf1
cttttcttataaagcctaactagt

SEQ ID NO: 8732 - DNA, 25 bp, Artificial Sequence
  Synthetic: FXN 3 forward 9:69039951-69039980; As/LbCpf1
cttttcttataaagcctaactagtt

SEQ ID NO: 8733 - DNA, 18 bp, Artificial Sequence
  Synthetic: FXN 3 forward 9:69039952-69039974; As/LbCpf1
ttttcttataaagcctaa

SEQ ID NO: 8734 - DNA, 19 bp, Artificial Sequence
  Synthetic: FXN 3 forward 9:69039952-69039975; As/LbCpf1
ttttcttataaagcctaac

SEQ ID NO: 8735 - DNA, 20 bp, Artificial Sequence
  Synthetic: FXN 3 forward 9:69039952-69039976; As/LbCpf1
ttttcttataaagcctaact

SEQ ID NO: 8736 - DNA, 21 bp, Artificial Sequence
  Synthetic: FXN 3 forward 9:69039952-69039977; As/LbCpf1
ttttcttataaagcctaacta

SEQ ID NO: 8737 - DNA, 22 bp, Artificial Sequence
  Synthetic: FXN 3 forward 9:69039952-69039978; As/LbCpf1
ttttcttataaagcctaactag

SEQ ID NO: 8738 - DNA, 23 bp, Artificial Sequence
  Synthetic: FXN 3 forward 9:69039952-69039979; As/LbCpf1
ttttcttataaagcctaactagt

SEQ ID NO: 8739 - DNA, 24 bp, Artificial Sequence
  Synthetic: FXN 3 forward 9:69039952-69039980; As/LbCpf1
ttttcttataaagcctaactagtt

SEQ ID NO: 8740 - DNA, 25 bp, Artificial Sequence
  Synthetic: FXN 3 forward 9:69039952-69039981; As/LbCpf1
ttttcttataaagcctaactagttt

SEQ ID NO: 8741 - DNA, 18 bp, Artificial Sequence
  Synthetic: FXN 3 forward 9:69039956-69039978; As/LbCpf1
cttataaagcctaactag

SEQ ID NO: 8742 - DNA, 19 bp, Artificial Sequence
  Synthetic: FXN 3 forward 9:69039956-69039979; As/LbCpf1
cttataaagcctaactagt

SEQ ID NO: 8743 - DNA, 20 bp, Artificial Sequence
  Synthetic: FXN 3 forward 9:69039956-69039980; As/LbCpf1
cttataaagcctaactagtt

SEQ ID NO: 8744 - DNA, 21 bp, Artificial Sequence
  Synthetic: FXN 3 forward 9:69039956-69039981; As/LbCpf1
cttataaagcctaactagttt

SEQ ID NO: 8745 - DNA, 22 bp, Artificial Sequence
  Synthetic: FXN 3 forward 9:69039956-69039982; As/LbCpf1
cttataaagcctaactagtttc

SEQ ID NO: 8746 - DNA, 23 bp, Artificial Sequence
  Synthetic: FXN 3 forward 9:69039956-69039983; As/LbCpf1
cttataaagcctaactagtttca

SEQ ID NO: 8747 - DNA, 24 bp, Artificial Sequence
  Synthetic: FXN 3 forward 9:69039956-69039984; As/LbCpf1
cttataaagcctaactagtttcac

SEQ ID NO: 8748 - DNA, 25 bp, Artificial Sequence
  Synthetic: FXN 3 forward 9:69039956-69039985; As/LbCpf1
cttataaagcctaactagtttcact

SEQ ID NO: 8749 - DNA, 18 bp, Artificial Sequence
  Synthetic: FXN 3 forward 9:69039957-69039979; As/LbCpf1
ttataaagcctaactagt

SEQ ID NO: 8750 - DNA, 19 bp, Artificial Sequence
  Synthetic: FXN 3 forward 9:69039957-69039980; As/LbCpf1
ttataaagcctaactagtt

SEQ ID NO: 8751 - DNA, 20 bp, Artificial Sequence
  Synthetic: FXN 3 forward 9:69039957-69039981; As/LbCpf1
ttataaagcctaactagttt

SEQ ID NO: 8752 - DNA, 21 bp, Artificial Sequence
  Synthetic: FXN 3 forward 9:69039957-69039982; As/LbCpf1
ttataaagcctaactagtttc

SEQ ID NO: 8753 - DNA, 22 bp, Artificial Sequence
  Synthetic: FXN 3 forward 9:69039957-69039983; As/LbCpf1
ttataaagcctaactagtttca

SEQ ID NO: 8754 - DNA, 23 bp, Artificial Sequence
  Synthetic: FXN 3 forward 9:69039957-69039984; As/LbCpf1
ttataaagcctaactagtttcac

SEQ ID NO: 8755 - DNA, 24 bp, Artificial Sequence
  Synthetic: FXN 3 forward 9:69039957-69039985; As/LbCpf1
ttataaagcctaactagtttcact

SEQ ID NO: 8756 - DNA, 25 bp, Artificial Sequence
  Synthetic: FXN 3 forward 9:69039957-69039986; As/LbCpf1
ttataaagcctaactagtttcactc

SEQ ID NO: 8757 - DNA, 18 bp, Artificial Sequence
  Synthetic: FXN 3 forward 9:69039978-69040000; As/LbCpf1
actcccatgataacccat

SEQ ID NO: 8758 - DNA, 19 bp, Artificial Sequence
  Synthetic: FXN 3 forward 9:69039978-69040001; As/LbCpf1
actcccatgataacccatt

SEQ ID NO: 8759 - DNA, 20 bp, Artificial Sequence
  Synthetic: FXN 3 forward 9:69039978-69040002; As/LbCpf1
actcccatgataacccatta

SEQ ID NO: 8760 - DNA, 21 bp, Artificial Sequence
  Synthetic: FXN 3 forward 9:69039978-69040003; As/LbCpf1
actcccatgataacccattaa

SEQ ID NO: 8761 - DNA, 22 bp, Artificial Sequence
  Synthetic: FXN 3 forward 9:69039978-69040004; As/LbCpf1
actcccatgataacccattaat

SEQ ID NO: 8762 - DNA, 23 bp, Artificial Sequence
  Synthetic: FXN 3 forward 9:69039978-69040005; As/LbCpf1
actcccatgataacccattaatc

SEQ ID NO: 8763 - DNA, 24 bp, Artificial Sequence
  Synthetic: FXN 3 forward 9:69039978-69040006; As/LbCpf1
actcccatgataacccattaatct

SEQ ID NO: 8764 - DNA, 25 bp, Artificial Sequence
  Synthetic: FXN 3 forward 9:69039978-69040007; As/LbCpf1
actcccatgataacccattaatcta

SEQ ID NO: 8765 - DNA, 18 bp, Artificial Sequence
  Synthetic: FXN 3 reverse 9:69040035-69040057; As/LbCpf1
agcggtgactgggtcatg

SEQ ID NO: 8766 - DNA, 19 bp, Artificial Sequence
  Synthetic: FXN 3 reverse 9:69040035-69040058; As/LbCpf1
agcggtgactgggtcatga

SEQ ID NO: 8767 - DNA, 20 bp, Artificial Sequence
  Synthetic: FXN 3 reverse 9:69040035-69040059; As/LbCpf1
agcggtgactgggtcatgaa

SEQ ID NO: 8768 - DNA, 21 bp, Artificial Sequence
  Synthetic: FXN 3 reverse 9:69040035-69040060; As/LbCpf1
agcggtgactgggtcatgaag

SEQ ID NO: 8769 - DNA, 22 bp, Artificial Sequence
  Synthetic: FXN 3 reverse 9:69040035-69040061; As/LbCpf1
agcggtgactgggtcatgaagg

SEQ ID NO: 8770 - DNA, 23 bp, Artificial Sequence
  Synthetic: FXN 3 reverse 9:69040035-69040062; As/LbCpf1
agcggtgactgggtcatgaaggt

SEQ ID NO: 8771 - DNA, 24 bp, Artificial Sequence
  Synthetic: FXN 3 reverse 9:69040035-69040063; As/LbCpf1
agcggtgactgggtcatgaaggtt

SEQ ID NO: 8772 - DNA, 25 bp, Artificial Sequence
  Synthetic: FXN 3 reverse 9:69040035-69040064; As/LbCpf1
agcggtgactgggtcatgaaggttc

SEQ ID NO: 8773 - DNA, 18 bp, Artificial Sequence
  Synthetic: FXN 3 reverse 9:69040100-69040122; As/LbCpf1
tcacctccgaaactcatg

SEQ ID NO: 8774 - DNA, 19 bp, Artificial Sequence
  Synthetic: FXN 3 reverse 9:69040100-69040123; As/LbCpf1
tcacctccgaaactcatgt

SEQ ID NO: 8775 - DNA, 20 bp, Artificial Sequence
  Synthetic: FXN 3 reverse 9:69040100-69040124; As/LbCpf1
tcacctccgaaactcatgtt

SEQ ID NO: 8776 - DNA, 21 bp, Artificial Sequence
  Synthetic: FXN 3 reverse 9:69040100-69040125; As/LbCpf1
tcacctccgaaactcatgttg

SEQ ID NO: 8777 - DNA, 22 bp, Artificial Sequence
  Synthetic: FXN 3 reverse 9:69040100-69040126; As/LbCpf1
tcacctccgaaactcatgttga

SEQ ID NO: 8778 - DNA, 23 bp, Artificial Sequence
  Synthetic: FXN 3 reverse 9:69040100-69040127; As/LbCpf1
tcacctccgaaactcatgttgaa

SEQ ID NO: 8779 - DNA, 24 bp, Artificial Sequence
  Synthetic: FXN 3 reverse 9:69040100-69040128; As/LbCpf1
tcacctccgaaactcatgttgaaa

SEQ ID NO: 8780 - DNA, 25 bp, Artificial Sequence
  Synthetic: FXN 3 reverse 9:69040100-69040129; As/LbCpf1
tcacctccgaaactcatgttgaaac

SEQ ID NO: 8781 - DNA, 18 bp, Artificial Sequence
  Synthetic: FXN 3 forward 9:69040101-69040123; As/LbCpf1
aacatgagtttcggaggt

SEQ ID NO: 8782 - DNA, 19 bp, Artificial Sequence
  Synthetic: FXN 3 forward 9:69040101-69040124; As/LbCpf1
aacatgagtttcggaggtg

SEQ ID NO: 8783 - DNA, 20 bp, Artificial Sequence
  Synthetic: FXN 3 forward 9:69040101-69040125; As/LbCpf1
aacatgagtttcggaggtga

SEQ ID NO: 8784 - DNA, 21 bp, Artificial Sequence
  Synthetic: FXN 3 forward 9:69040101-69040126; As/LbCpf1
aacatgagtttcggaggtgac

SEQ ID NO: 8785 - DNA, 22 bp, Artificial Sequence
  Synthetic: FXN 3 forward 9:69040101-69040127; As/LbCpf1
aacatgagtttcggaggtgaca

SEQ ID NO: 8786 - DNA, 23 bp, Artificial Sequence
  Synthetic: FXN 3 forward 9:69040101-69040128; As/LbCpf1
aacatgagtttcggaggtgacaa

SEQ ID NO: 8787 - DNA, 24 bp, Artificial Sequence
  Synthetic: FXN 3 forward 9:69040101-69040129; As/LbCpf1
aacatgagtttcggaggtgacaaa

SEQ ID NO: 8788 - DNA, 25 bp, Artificial Sequence
  Synthetic: FXN 3 forward 9:69040101-69040130; As/LbCpf1
aacatgagtttcggaggtgacaaac

SEQ ID NO: 8789 - DNA, 18 bp, Artificial Sequence
  Synthetic: FXN 3 reverse 9:69040108-69040130; As/LbCpf1
aatgtttgtcacctccga

SEQ ID NO: 8790 - DNA, 19 bp, Artificial Sequence
  Synthetic: FXN 3 reverse 9:69040108-69040131; As/LbCpf1
aatgtttgtcacctccgaa

SEQ ID NO: 8791 - DNA, 20 bp, Artificial Sequence
  Synthetic: FXN 3 reverse 9:69040108-69040132; As/LbCpf1
aatgtttgtcacctccgaaa

SEQ ID NO: 8792 - DNA, 21 bp, Artificial Sequence
  Synthetic: FXN 3 reverse 9:69040108-69040133; As/LbCpf1
aatgtttgtcacctccgaaac

SEQ ID NO: 8793 - DNA, 22 bp, Artificial Sequence
  Synthetic: FXN 3 reverse 9:69040108-69040134; As/LbCpf1
aatgtttgtcacctccgaaact

SEQ ID NO: 8794 - DNA, 23 bp, Artificial Sequence
  Synthetic: FXN 3 reverse 9:69040108-69040135; As/LbCpf1
aatgtttgtcacctccgaaactc

SEQ ID NO: 8795 - DNA, 24 bp, Artificial Sequence
  Synthetic: FXN 3 reverse 9:69040108-69040136; As/LbCpf1
aatgtttgtcacctccgaaactca

SEQ ID NO: 8796 - DNA, 25 bp, Artificial Sequence
  Synthetic: FXN 3 reverse 9:69040108-69040137; As/LbCpf1
aatgtttgtcacctccgaaactcat

SEQ ID NO: 8797 - DNA, 18 bp, Artificial Sequence
  Synthetic: FXN 3 forward 9:69040113-69040135; As/LbCpf1
ggaggtgacaaacattca

SEQ ID NO: 8798 - DNA, 19 bp, Artificial Sequence
  Synthetic: FXN 3 forward 9:69040113-69040136; As/LbCpf1
ggaggtgacaaacattcaa

SEQ ID NO: 8799 - DNA, 20 bp, Artificial Sequence
  Synthetic: FXN 3 forward 9:69040113-69040137; As/LbCpf1
ggaggtgacaaacattcaaa

SEQ ID NO: 8800 - DNA, 21 bp, Artificial Sequence
  Synthetic: FXN 3 forward 9:69040113-69040138; As/LbCpf1
ggaggtgacaaacattcaaac

SEQ ID NO: 8801 - DNA, 22 bp, Artificial Sequence
  Synthetic: FXN 3 forward 9:69040113-69040139; As/LbCpf1
ggaggtgacaaacattcaaacc

SEQ ID NO: 8802 - DNA, 23 bp, Artificial Sequence
  Synthetic: FXN 3 forward 9:69040113-69040140; As/LbCpf1
ggaggtgacaaacattcaaacca

SEQ ID NO: 8803 - DNA, 24 bp, Artificial Sequence
  Synthetic: FXN 3 forward 9:69040113-69040141; As/LbCpf1
ggaggtgacaaacattcaaaccat

SEQ ID NO: 8804 - DNA, 25 bp, Artificial Sequence
  Synthetic: FXN 3 forward 9:69040113-69040142; As/LbCpf1
ggaggtgacaaacattcaaaccata

SEQ ID NO: 8805 - DNA, 18 bp, Artificial Sequence
  Synthetic: FXN 3 reverse 9:69040130-69040152; As/LbCpf1
agagacagcatgctatgg

SEQ ID NO: 8806 - DNA, 19 bp, Artificial Sequence
  Synthetic: FXN 3 reverse 9:69040130-69040153; As/LbCpf1
agagacagcatgctatggt

SEQ ID NO: 8807 - DNA, 20 bp, Artificial Sequence
  Synthetic: FXN 3 reverse 9:69040130-69040154; As/LbCpf1
agagacagcatgctatggtt

SEQ ID NO: 8808 - DNA, 21 bp, Artificial Sequence
  Synthetic: FXN 3 reverse 9:69040130-69040155; As/LbCpf1
agagacagcatgctatggttt

SEQ ID NO: 8809 - DNA, 22 bp, Artificial Sequence
  Synthetic: FXN 3 reverse 9:69040130-69040156; As/LbCpf1
agagacagcatgctatggtttg

SEQ ID NO: 8810 - DNA, 23 bp, Artificial Sequence
  Synthetic: FXN 3 reverse 9:69040130-69040157; As/LbCpf1
agagacagcatgctatggtttga

SEQ ID NO: 8811 - DNA, 24 bp, Artificial Sequence
  Synthetic: FXN 3 reverse 9:69040130-69040158; As/LbCpf1
agagacagcatgctatggtttgaa

SEQ ID NO: 8812 - DNA, 25 bp, Artificial Sequence
  Synthetic: FXN 3 reverse 9:69040130-69040159; As/LbCpf1
agagacagcatgctatggtttgaat

SEQ ID NO: 8813 - DNA, 18 bp, Artificial Sequence
  Synthetic: FXN 3 forward 9:69040207-69040229; As/LbCpf1
agacatctgtccattttc

SEQ ID NO: 8814 - DNA, 19 bp, Artificial Sequence
  Synthetic: FXN 3 forward 9:69040207-69040230; As/LbCpf1
agacatctgtccattttcc

SEQ ID NO: 8815 - DNA, 20 bp, Artificial Sequence
  Synthetic: FXN 3 forward 9:69040207-69040231; As/LbCpf1
agacatctgtccattttcct

SEQ ID NO: 8816 - DNA, 21 bp, Artificial Sequence
  Synthetic: FXN 3 forward 9:69040207-69040232; As/LbCpf1
agacatctgtccattttccta

SEQ ID NO: 8817 - DNA, 22 bp, Artificial Sequence
  Synthetic: FXN 3 forward 9:69040207-69040233; As/LbCpf1
agacatctgtccattttcctag

SEQ ID NO: 8818 - DNA, 23 bp, Artificial Sequence
  Synthetic: FXN 3 forward 9:69040207-69040234; As/LbCpf1
agacatctgtccattttcctaga

SEQ ID NO: 8819 - DNA, 24 bp, Artificial Sequence
  Synthetic: FXN 3 forward 9:69040207-69040235; As/LbCpf1
agacatctgtccattttcctagag

SEQ ID NO: 8820 - DNA, 25 bp, Artificial Sequence
  Synthetic: FXN 3 forward 9:69040207-69040236; As/LbCpf1
agacatctgtccattttcctagagg

SEQ ID NO: 8821 - DNA, 18 bp, Artificial Sequence
  Synthetic: FXN 3 forward 9:69040208-69040230; As/LbCpf1
gacatctgtccattttcc

SEQ ID NO: 8822 - DNA, 19 bp, Artificial Sequence
  Synthetic: FXN 3 forward 9:69040208-69040231; As/LbCpf1
gacatctgtccattttcct

SEQ ID NO: 8823 - DNA, 20 bp, Artificial Sequence
  Synthetic: FXN 3 forward 9:69040208-69040232; As/LbCpf1
gacatctgtccattttccta

SEQ ID NO: 8824 - DNA, 21 bp, Artificial Sequence
  Synthetic: FXN 3 forward 9:69040208-69040233; As/LbCpf1
gacatctgtccattttcctag

SEQ ID NO: 8825 - DNA, 22 bp, Artificial Sequence
  Synthetic: FXN 3 forward 9:69040208-69040234; As/LbCpf1
gacatctgtccattttcctaga

SEQ ID NO: 8826 - DNA, 23 bp, Artificial Sequence
  Synthetic: FXN 3 forward 9:69040208-69040235; As/LbCpf1
gacatctgtccattttcctagag

SEQ ID NO: 8827 - DNA, 24 bp, Artificial Sequence
  Synthetic: FXN 3 forward 9:69040208-69040236; As/LbCpf1
gacatctgtccattttcctagagg

SEQ ID NO: 8828 - DNA, 25 bp, Artificial Sequence
  Synthetic: FXN 3 forward 9:69040208-69040237; As/LbCpf1
gacatctgtccattttcctagaggg

SEQ ID NO: 8829 - DNA, 18 bp, Artificial Sequence
  Synthetic: FXN 3 forward 9:69040224-69040246; As/LbCpf1
cctagagggacaagacca

SEQ ID NO: 8830 - DNA, 19 bp, Artificial Sequence
  Synthetic: FXN 3 forward 9:69040224-69040247; As/LbCpf1
cctagagggacaagaccac

SEQ ID NO: 8831 - DNA, 20 bp, Artificial Sequence
  Synthetic: FXN 3 forward 9:69040224-69040248; As/LbCpf1
cctagagggacaagaccacc

SEQ ID NO: 8832 - DNA, 21 bp, Artificial Sequence
  Synthetic: FXN 3 forward 9:69040224-69040249; As/LbCpf1
cctagagggacaagaccacca

SEQ ID NO: 8833 - DNA, 22 bp, Artificial Sequence
  Synthetic: FXN 3 forward 9:69040224-69040250; As/LbCpf1
cctagagggacaagaccaccac

SEQ ID NO: 8834 - DNA, 23 bp, Artificial Sequence
  Synthetic: FXN 3 forward 9:69040224-69040251; As/LbCpf1
cctagagggacaagaccaccacc

SEQ ID NO: 8835 - DNA, 24 bp, Artificial Sequence
  Synthetic: FXN 3 forward 9:69040224-69040252; As/LbCpf1
cctagagggacaagaccaccacct

SEQ ID NO: 8836 - DNA, 25 bp, Artificial Sequence
  Synthetic: FXN 3 forward 9:69040224-69040253; As/LbCpf1
cctagagggacaagaccaccacctg

SEQ ID NO: 8837 - DNA, 18 bp, Artificial Sequence
  Synthetic: FXN 3 forward 9:69040225-69040247; As/LbCpf1
ctagagggacaagaccac

SEQ ID NO: 8838 - DNA, 19 bp, Artificial Sequence
  Synthetic: FXN 3 forward 9:69040225-69040248; As/LbCpf1
ctagagggacaagaccacc

SEQ ID NO: 8839 - DNA, 20 bp, Artificial Sequence
  Synthetic: FXN 3 forward 9:69040225-69040249; As/LbCpf1
ctagagggacaagaccacca

SEQ ID NO: 8840 - DNA, 21 bp, Artificial Sequence
  Synthetic: FXN 3 forward 9:69040225-69040250; As/LbCpf1
ctagagggacaagaccaccac

SEQ ID NO: 8841 - DNA, 22 bp, Artificial Sequence
  Synthetic: FXN 3 forward 9:69040225-69040251; As/LbCpf1
ctagagggacaagaccaccacc

SEQ ID NO: 8842 - DNA, 23 bp, Artificial Sequence
  Synthetic: FXN 3 forward 9:69040225-69040252; As/LbCpf1
ctagagggacaagaccaccacct

SEQ ID NO: 8843 - DNA, 24 bp, Artificial Sequence
  Synthetic: FXN 3 forward 9:69040225-69040253; As/LbCpf1
ctagagggacaagaccaccacctg

SEQ ID NO: 8844 - DNA, 25 bp, Artificial Sequence
  Synthetic: FXN 3 forward 9:69040225-69040254; As/LbCpf1
ctagagggacaagaccaccacctgt

SEQ ID NO: 8845 - DNA, 18 bp, Artificial Sequence
  Synthetic: FXN 3 forward 9:69040266-69040288; As/LbCpf1
ggctttaggcctaacaag

SEQ ID NO: 8846 - DNA, 19 bp, Artificial Sequence
  Synthetic: FXN 3 forward 9:69040266-69040289; As/LbCpf1
ggctttaggcctaacaagc

SEQ ID NO: 8847 - DNA, 20 bp, Artificial Sequence
  Synthetic: FXN 3 forward 9:69040266-69040290; As/LbCpf1
ggctttaggcctaacaagca

SEQ ID NO: 8848 - DNA, 21 bp, Artificial Sequence
  Synthetic: FXN 3 forward 9:69040266-69040291; As/LbCpf1
ggctttaggcctaacaagcag

SEQ ID NO: 8849 - DNA, 22 bp, Artificial Sequence
  Synthetic: FXN 3 forward 9:69040266-69040292; As/LbCpf1
ggctttaggcctaacaagcagg

SEQ ID NO: 8850 - DNA, 23 bp, Artificial Sequence
  Synthetic: FXN 3 forward 9:69040266-69040293; As/LbCpf1
ggctttaggcctaacaagcaggt

SEQ ID NO: 8851 - DNA, 24 bp, Artificial Sequence
  Synthetic: FXN 3 forward 9:69040266-69040294; As/LbCpf1
ggctttaggcctaacaagcaggtt

SEQ ID NO: 8852 - DNA, 25 bp, Artificial Sequence
  Synthetic: FXN 3 forward 9:69040266-69040295; As/LbCpf1
ggctttaggcctaacaagcaggtta

SEQ ID NO: 8853 - DNA, 18 bp, Artificial Sequence
  Synthetic: FXN 3 forward 9:69040267-69040289; As/LbCpf1
gctttaggcctaacaagc

SEQ ID NO: 8854 - DNA, 19 bp, Artificial Sequence
  Synthetic: FXN 3 forward 9:69040267-69040290; As/LbCpf1
gctttaggcctaacaagca

SEQ ID NO: 8855 - DNA, 20 bp, Artificial Sequence
  Synthetic: FXN 3 forward 9:69040267-69040291; As/LbCpf1
gctttaggcctaacaagcag

SEQ ID NO: 8856 - DNA, 21 bp, Artificial Sequence
  Synthetic: FXN 3 forward 9:69040267-69040292; As/LbCpf1
gctttaggcctaacaagcagg

SEQ ID NO: 8857 - DNA, 22 bp, Artificial Sequence
  Synthetic: FXN 3 forward 9:69040267-69040293; As/LbCpf1
gctttaggcctaacaagcaggt

SEQ ID NO: 8858 - DNA, 23 bp, Artificial Sequence
  Synthetic: FXN 3 forward 9:69040267-69040294; As/LbCpf1
gctttaggcctaacaagcaggtt

SEQ ID NO: 8859 - DNA, 24 bp, Artificial Sequence
  Synthetic: FXN 3 forward 9:69040267-69040295; As/LbCpf1
gctttaggcctaacaagcaggtta

SEQ ID NO: 8860 - DNA, 25 bp, Artificial Sequence
  Synthetic: FXN 3 forward 9:69040267-69040296; As/LbCpf1
gctttaggcctaacaagcaggttat

SEQ ID NO: 8861 - DNA, 18 bp, Artificial Sequence
  Synthetic: FXN 3 forward 9:69040273-69040295; As/LbCpf1
ggcctaacaagcaggtta

SEQ ID NO: 8862 - DNA, 19 bp, Artificial Sequence
  Synthetic: FXN 3 forward 9:69040273-69040296; As/LbCpf1
ggcctaacaagcaggttat

SEQ ID NO: 8863 - DNA, 20 bp, Artificial Sequence
  Synthetic: FXN 3 forward 9:69040273-69040297; As/LbCpf1
ggcctaacaagcaggttata

SEQ ID NO: 8864 - DNA, 21 bp, Artificial Sequence
  Synthetic: FXN 3 forward 9:69040273-69040298; As/LbCpf1
ggcctaacaagcaggttatac

SEQ ID NO: 8865 - DNA, 22 bp, Artificial Sequence
  Synthetic: FXN 3 forward 9:69040273-69040299; As/LbCpf1
ggcctaacaagcaggttatacc

SEQ ID NO: 8866 - DNA, 23 bp, Artificial Sequence
  Synthetic: FXN 3 forward 9:69040273-69040300; As/LbCpf1
ggcctaacaagcaggttataccc

SEQ ID NO: 8867 - DNA, 24 bp, Artificial Sequence
  Synthetic: FXN 3 forward 9:69040273-69040301; As/LbCpf1
ggcctaacaagcaggttataccct

SEQ ID NO: 8868 - DNA, 25 bp, Artificial Sequence
  Synthetic: FXN 3 forward 9:69040273-69040302; As/LbCpf1
ggcctaacaagcaggttataccctc

SEQ ID NO: 8869 - DNA, 18 bp, Artificial Sequence
  Synthetic: FXN 3 reverse 9:69040286-69040308; As/LbCpf1
aaagtgagtgagggtata

SEQ ID NO: 8870 - DNA, 19 bp, Artificial Sequence
  Synthetic: FXN 3 reverse 9:69040286-69040309; As/LbCpf1
aaagtgagtgagggtataa

SEQ ID NO: 8871 - DNA, 20 bp, Artificial Sequence
  Synthetic: FXN 3 reverse 9:69040286-69040310; As/LbCpf1
aaagtgagtgagggtataac

SEQ ID NO: 8872 - DNA, 21 bp, Artificial Sequence
  Synthetic: FXN 3 reverse 9:69040286-69040311; As/LbCpf1
aaagtgagtgagggtataacc

SEQ ID NO: 8873 - DNA, 22 bp, Artificial Sequence
  Synthetic: FXN 3 reverse 9:69040286-69040312; As/LbCpf1
aaagtgagtgagggtataacct

SEQ ID NO: 8874 - DNA, 23 bp, Artificial Sequence
  Synthetic: FXN 3 reverse 9:69040286-69040313; As/LbCpf1
aaagtgagtgagggtataacctg

SEQ ID NO: 8875 - DNA, 24 bp, Artificial Sequence
  Synthetic: FXN 3 reverse 9:69040286-69040314; As/LbCpf1
aaagtgagtgagggtataacctgc

SEQ ID NO: 8876 - DNA, 25 bp, Artificial Sequence
  Synthetic: FXN 3 reverse 9:69040286-69040315; As/LbCpf1
aaagtgagtgagggtataacctgct

SEQ ID NO: 8877 - DNA, 18 bp, Artificial Sequence
  Synthetic: FXN 3 forward 9:69040308-69040330; As/LbCpf1
aaatcatttttattgtct

SEQ ID NO: 8878 - DNA, 19 bp, Artificial Sequence
  Synthetic: FXN 3 forward 9:69040308-69040331; As/LbCpf1
aaatcatttttattgtctt

SEQ ID NO: 8879 - DNA, 20 bp, Artificial Sequence
  Synthetic: FXN 3 forward 9:69040308-69040332; As/LbCpf1
aaatcatttttattgtcttg

SEQ ID NO: 8880 - DNA, 21 bp, Artificial Sequence
  Synthetic: FXN 3 forward 9:69040308-69040333; As/LbCpf1
aaatcatttttattgtcttgc

SEQ ID NO: 8881 - DNA, 22 bp, Artificial Sequence
  Synthetic: FXN 3 forward 9:69040308-69040334; As/LbCpf1
aaatcatttttattgtcttgca

SEQ ID NO: 8882 - DNA, 23 bp, Artificial Sequence
  Synthetic: FXN 3 forward 9:69040308-69040335; As/LbCpf1
aaatcatttttattgtcttgcag

SEQ ID NO: 8883 - DNA, 24 bp, Artificial Sequence
  Synthetic: FXN 3 forward 9:69040308-69040336; As/LbCpf1
aaatcatttttattgtcttgcaga

SEQ ID NO: 8884 - DNA, 25 bp, Artificial Sequence
  Synthetic: FXN 3 forward 9:69040308-69040337; As/LbCpf1
aaatcatttttattgtcttgcagac

SEQ ID NO: 8885 - DNA, 18 bp, Artificial Sequence
  Synthetic: FXN 3 forward 9:69040318-69040340; As/LbCpf1
tattgtcttgcagacaat

SEQ ID NO: 8886 - DNA, 19 bp, Artificial Sequence
  Synthetic: FXN 3 forward 9:69040318-69040341; As/LbCpf1
tattgtcttgcagacaatt

SEQ ID NO: 8887 - DNA, 20 bp, Artificial Sequence
  Synthetic: FXN 3 forward 9:69040318-69040342; As/LbCpf1
tattgtcttgcagacaattt

SEQ ID NO: 8888 - DNA, 21 bp, Artificial Sequence
  Synthetic: FXN 3 forward 9:69040318-69040343; As/LbCpf1
tattgtcttgcagacaattta

SEQ ID NO: 8889 - DNA, 22 bp, Artificial Sequence
  Synthetic: FXN 3 forward 9:69040318-69040344; As/LbCpf1
tattgtcttgcagacaatttac

SEQ ID NO: 8890 - DNA, 23 bp, Artificial Sequence
  Synthetic: FXN 3 forward 9:69040318-69040345; As/LbCpf1
tattgtcttgcagacaatttaca

SEQ ID NO: 8891 - DNA, 24 bp, Artificial Sequence
  Synthetic: FXN 3 forward 9:69040318-69040346; As/LbCpf1
tattgtcttgcagacaatttacac

SEQ ID NO: 8892 - DNA, 25 bp, Artificial Sequence
  Synthetic: FXN 3 forward 9:69040318-69040347; As/LbCpf1
tattgtcttgcagacaatttacaca

SEQ ID NO: 8893 - DNA, 18 bp, Artificial Sequence
  Synthetic: FXN 3 forward 9:69040319-69040341; As/LbCpf1
attgtcttgcagacaatt

SEQ ID NO: 8894 - DNA, 19 bp, Artificial Sequence
  Synthetic: FXN 3 forward 9:69040319-69040342; As/LbCpf1
attgtcttgcagacaattt

SEQ ID NO: 8895 - DNA, 20 bp, Artificial Sequence
  Synthetic: FXN 3 forward 9:69040319-69040343; As/LbCpf1
attgtcttgcagacaattta

SEQ ID NO: 8896 - DNA, 21 bp, Artificial Sequence
  Synthetic: FXN 3 forward 9:69040319-69040344; As/LbCpf1
attgtcttgcagacaatttac

SEQ ID NO: 8897 - DNA, 22 bp, Artificial Sequence
  Synthetic: FXN 3 forward 9:69040319-69040345; As/LbCpf1
attgtcttgcagacaatttaca

SEQ ID NO: 8898 - DNA, 23 bp, Artificial Sequence
  Synthetic: FXN 3 forward 9:69040319-69040346; As/LbCpf1
attgtcttgcagacaatttacac

SEQ ID NO: 8899 - DNA, 24 bp, Artificial Sequence
  Synthetic: FXN 3 forward 9:69040319-69040347; As/LbCpf1
attgtcttgcagacaatttacaca

SEQ ID NO: 8900 - DNA, 25 bp, Artificial Sequence
  Synthetic: FXN 3 forward 9:69040319-69040348; As/LbCpf1
attgtcttgcagacaatttacacaa

SEQ ID NO: 8901 - DNA, 18 bp, Artificial Sequence
  Synthetic: FXN 3 forward 9:69040320-69040342; As/LbCpf1
ttgtcttgcagacaattt

SEQ ID NO: 8902 - DNA, 19 bp, Artificial Sequence
  Synthetic: FXN 3 forward 9:69040320-69040343; As/LbCpf1
ttgtcttgcagacaattta

SEQ ID NO: 8903 - DNA, 20 bp, Artificial Sequence
  Synthetic: FXN 3 forward 9:69040320-69040344; As/LbCpf1
ttgtcttgcagacaatttac

SEQ ID NO: 8904 - DNA, 21 bp, Artificial Sequence
  Synthetic: FXN 3 forward 9:69040320-69040345; As/LbCpf1
ttgtcttgcagacaatttaca

SEQ ID NO: 8905 - DNA, 22 bp, Artificial Sequence
  Synthetic: FXN 3 forward 9:69040320-69040346; As/LbCpf1
ttgtcttgcagacaatttacac

SEQ ID NO: 8906 - DNA, 23 bp, Artificial Sequence
  Synthetic: FXN 3 forward 9:69040320-69040347; As/LbCpf1
ttgtcttgcagacaatttacaca

SEQ ID NO: 8907 - DNA, 24 bp, Artificial Sequence
  Synthetic: FXN 3 forward 9:69040320-69040348; As/LbCpf1
ttgtcttgcagacaatttacacaa

SEQ ID NO: 8908 - DNA, 25 bp, Artificial Sequence
  Synthetic: FXN 3 forward 9:69040320-69040349; As/LbCpf1
ttgtcttgcagacaatttacacaag

SEQ ID NO: 8909 - DNA, 18 bp, Artificial Sequence
  Synthetic: FXN 3 reverse 9:69040334-69040356; As/LbCpf1
tatgtgtaaacttgtgta

SEQ ID NO: 8910 - DNA, 19 bp, Artificial Sequence
  Synthetic: FXN 3 reverse 9:69040334-69040357; As/LbCpf1
tatgtgtaaacttgtgtaa

SEQ ID NO: 8911 - DNA, 20 bp, Artificial Sequence
  Synthetic: FXN 3 reverse 9:69040334-69040358; As/LbCpf1
tatgtgtaaacttgtgtaaa

SEQ ID NO: 8912 - DNA, 21 bp, Artificial Sequence
  Synthetic: FXN 3 reverse 9:69040334-69040359; As/LbCpf1
tatgtgtaaacttgtgtaaat

SEQ ID NO: 8913 - DNA, 22 bp, Artificial Sequence
  Synthetic: FXN 3 reverse 9:69040334-69040360; As/LbCpf1
tatgtgtaaacttgtgtaaatt

SEQ ID NO: 8914 - DNA, 23 bp, Artificial Sequence
  Synthetic: FXN 3 reverse 9:69040334-69040361; As/LbCpf1
tatgtgtaaacttgtgtaaattg

SEQ ID NO: 8915 - DNA, 24 bp, Artificial Sequence
  Synthetic: FXN 3 reverse 9:69040334-69040362; As/LbCpf1
tatgtgtaaacttgtgtaaattgt

SEQ ID NO: 8916 - DNA, 25 bp, Artificial Sequence
  Synthetic: FXN 3 reverse 9:69040334-69040363; As/LbCpf1
tatgtgtaaacttgtgtaaattgtc

SEQ ID NO: 8917 - DNA, 18 bp, Artificial Sequence
  Synthetic: FXN 3 reverse 9:69040335-69040357; As/LbCpf1
ctatgtgtaaacttgtgt

SEQ ID NO: 8918 - DNA, 19 bp, Artificial Sequence
  Synthetic: FXN 3 reverse 9:69040335-69040358; As/LbCpf1
ctatgtgtaaacttgtgta

SEQ ID NO: 8919 - DNA, 20 bp, Artificial Sequence
  Synthetic: FXN 3 reverse 9:69040335-69040359; As/LbCpf1
ctatgtgtaaacttgtgtaa

SEQ ID NO: 8920 - DNA, 21 bp, Artificial Sequence
  Synthetic: FXN 3 reverse 9:69040335-69040360; As/LbCpf1
ctatgtgtaaacttgtgtaaa

SEQ ID NO: 8921 - DNA, 22 bp, Artificial Sequence
  Synthetic: FXN 3 reverse 9:69040335-69040361; As/LbCpf1
ctatgtgtaaacttgtgtaaat

SEQ ID NO: 8922 - DNA, 23 bp, Artificial Sequence
  Synthetic: FXN 3 reverse 9:69040335-69040362; As/LbCpf1
ctatgtgtaaacttgtgtaaatt

SEQ ID NO: 8923 - DNA, 24 bp, Artificial Sequence
  Synthetic: FXN 3 reverse 9:69040335-69040363; As/LbCpf1
ctatgtgtaaacttgtgtaaattg

SEQ ID NO: 8924 - DNA, 25 bp, Artificial Sequence
  Synthetic: FXN 3 reverse 9:69040335-69040364; As/LbCpf1
ctatgtgtaaacttgtgtaaattgt

SEQ ID NO: 8925 - DNA, 18 bp, Artificial Sequence
  Synthetic: FXN 3 forward 9:69040339-69040361; As/LbCpf1
cacaagtttacacataga

SEQ ID NO: 8926 - DNA, 19 bp, Artificial Sequence
  Synthetic: FXN 3 forward 9:69040339-69040362; As/LbCpf1
cacaagtttacacatagaa

SEQ ID NO: 8927 - DNA, 20 bp, Artificial Sequence
  Synthetic: FXN 3 forward 9:69040339-69040363; As/LbCpf1
cacaagtttacacatagaaa

SEQ ID NO: 8928 - DNA, 21 bp, Artificial Sequence
  Synthetic: FXN 3 forward 9:69040339-69040364; As/LbCpf1
cacaagtttacacatagaaaa

SEQ ID NO: 8929 - DNA, 22 bp, Artificial Sequence
  Synthetic: FXN 3 forward 9:69040339-69040365; As/LbCpf1
cacaagtttacacatagaaaag

SEQ ID NO: 8930 - DNA, 23 bp, Artificial Sequence
  Synthetic: FXN 3 forward 9:69040339-69040366; As/LbCpf1
cacaagtttacacatagaaaagg

SEQ ID NO: 8931 - DNA, 24 bp, Artificial Sequence
  Synthetic: FXN 3 forward 9:69040339-69040367; As/LbCpf1
cacaagtttacacatagaaaagga

SEQ ID NO: 8932 - DNA, 25 bp, Artificial Sequence
  Synthetic: FXN 3 forward 9:69040339-69040368; As/LbCpf1
cacaagtttacacatagaaaaggat

SEQ ID NO: 8933 - DNA, 18 bp, Artificial Sequence
  Synthetic: FXN 3 reverse 9:69040346-69040368; As/LbCpf1
catatccttttctatgtg

SEQ ID NO: 8934 - DNA, 19 bp, Artificial Sequence
  Synthetic: FXN 3 reverse 9:69040346-69040369; As/LbCpf1
catatccttttctatgtgt

SEQ ID NO: 8935 - DNA, 20 bp, Artificial Sequence
  Synthetic: FXN 3 reverse 9:69040346-69040370; As/LbCpf1
catatccttttctatgtgta

SEQ ID NO: 8936 - DNA, 21 bp, Artificial Sequence
  Synthetic: FXN 3 reverse 9:69040346-69040371; As/LbCpf1
catatccttttctatgtgtaa

SEQ ID NO: 8937 - DNA, 22 bp, Artificial Sequence
  Synthetic: FXN 3 reverse 9:69040346-69040372; As/LbCpf1
catatccttttctatgtgtaaa

SEQ ID NO: 8938 - DNA, 23 bp, Artificial Sequence
  Synthetic: FXN 3 reverse 9:69040346-69040373; As/LbCpf1
catatccttttctatgtgtaaac

SEQ ID NO: 8939 - DNA, 24 bp, Artificial Sequence
  Synthetic: FXN 3 reverse 9:69040346-69040374; As/LbCpf1
catatccttttctatgtgtaaact

SEQ ID NO: 8940 - DNA, 25 bp, Artificial Sequence
  Synthetic: FXN 3 reverse 9:69040346-69040375; As/LbCpf1
catatccttttctatgtgtaaactt

SEQ ID NO: 8941 - DNA, 18 bp, Artificial Sequence
  Synthetic: FXN 3 forward 9:69040349-69040371; As/LbCpf1
cacatagaaaaggatatg

SEQ ID NO: 8942 - DNA, 19 bp, Artificial Sequence
  Synthetic: FXN 3 forward 9:69040349-69040372; As/LbCpf1
cacatagaaaaggatatgt

SEQ ID NO: 8943 - DNA, 20 bp, Artificial Sequence
  Synthetic: FXN 3 forward 9:69040349-69040373; As/LbCpf1
cacatagaaaaggatatgta

SEQ ID NO: 8944 - DNA, 21 bp, Artificial Sequence
  Synthetic: FXN 3 forward 9:69040349-69040374; As/LbCpf1
cacatagaaaaggatatgtaa

SEQ ID NO: 8945 - DNA, 22 bp, Artificial Sequence
  Synthetic: FXN 3 forward 9:69040349-69040375; As/LbCpf1
cacatagaaaaggatatgtaaa

SEQ ID NO: 8946 - DNA, 23 bp, Artificial Sequence
  Synthetic: FXN 3 forward 9:69040349-69040376; As/LbCpf1
cacatagaaaaggatatgtaaat

SEQ ID NO: 8947 - DNA, 24 bp, Artificial Sequence
  Synthetic: FXN 3 forward 9:69040349-69040377; As/LbCpf1
cacatagaaaaggatatgtaaata

SEQ ID NO: 8948 - DNA, 25 bp, Artificial Sequence
  Synthetic: FXN 3 forward 9:69040349-69040378; As/LbCpf1
cacatagaaaaggatatgtaaatat

SEQ ID NO: 8949 - DNA, 18 bp, Artificial Sequence
  Synthetic: FXN 3 forward 9:69040377-69040399; As/LbCpf1
tacgctgccgggcgcggt

SEQ ID NO: 8950 - DNA, 19 bp, Artificial Sequence
  Synthetic: FXN 3 forward 9:69040377-69040400; As/LbCpf1
tacgctgccgggcgcggtg

SEQ ID NO: 8951 - DNA, 20 bp, Artificial Sequence
  Synthetic: FXN 3 forward 9:69040377-69040401; As/LbCpf1
tacgctgccgggcgcggtgg

SEQ ID NO: 8952 - DNA, 21 bp, Artificial Sequence
  Synthetic: FXN 3 forward 9:69040377-69040402; As/LbCpf1
tacgctgccgggcgcggtggc

SEQ ID NO: 8953 - DNA, 22 bp, Artificial Sequence
  Synthetic: FXN 3 forward 9:69040377-69040403; As/LbCpf1
tacgctgccgggcgcggtggct

SEQ ID NO: 8954 - DNA, 23 bp, Artificial Sequence
  Synthetic: FXN 3 forward 9:69040377-69040404; As/LbCpf1
tacgctgccgggcgcggtggctc

SEQ ID NO: 8955 - DNA, 24 bp, Artificial Sequence
  Synthetic: FXN 3 forward 9:69040377-69040405; As/LbCpf1
tacgctgccgggcgcggtggctca

SEQ ID NO: 8956 - DNA, 25 bp, Artificial Sequence
  Synthetic: FXN 3 forward 9:69040377-69040406; As/LbCpf1
tacgctgccgggcgcggtggctcac

SEQ ID NO: 8957 - DNA, 18 bp, Artificial Sequence
  Synthetic: FXN 3 forward 9:69040423-69040445; As/LbCpf1
ggaggccgaggcaggtgg

SEQ ID NO: 8958 - DNA, 19 bp, Artificial Sequence
  Synthetic: FXN 3 forward 9:69040423-69040446; As/LbCpf1
ggaggccgaggcaggtgga

SEQ ID NO: 8959 - DNA, 20 bp, Artificial Sequence
  Synthetic: FXN 3 forward 9:69040423-69040447; As/LbCpf1
ggaggccgaggcaggtggat

SEQ ID NO: 8960 - DNA, 21 bp, Artificial Sequence
  Synthetic: FXN 3 forward 9:69040423-69040448; As/LbCpf1
ggaggccgaggcaggtggatc

SEQ ID NO: 8961 - DNA, 22 bp, Artificial Sequence
  Synthetic: FXN 3 forward 9:69040423-69040449; As/LbCpf1
ggaggccgaggcaggtggatca

SEQ ID NO: 8962 - DNA, 23 bp, Artificial Sequence
  Synthetic: FXN 3 forward 9:69040423-69040450; As/LbCpf1
ggaggccgaggcaggtggatcac

SEQ ID NO: 8963 - DNA, 24 bp, Artificial Sequence
  Synthetic: FXN 3 forward 9:69040423-69040451; As/LbCpf1
ggaggccgaggcaggtggatcacg

SEQ ID NO: 8964 - DNA, 25 bp, Artificial Sequence
  Synthetic: FXN 3 forward 9:69040423-69040452; As/LbCpf1
ggaggccgaggcaggtggatcacga

SEQ ID NO: 8965 - DNA, 18 bp, Artificial Sequence
  Synthetic: FXN 3 reverse 9:69040462-69040484; As/LbCpf1
atcgtattagccaggatg

SEQ ID NO: 8966 - DNA, 19 bp, Artificial Sequence
  Synthetic: FXN 3 reverse 9:69040462-69040485; As/LbCpf1
atcgtattagccaggatgg

SEQ ID NO: 8967 - DNA, 20 bp, Artificial Sequence
  Synthetic: FXN 3 reverse 9:69040462-69040486; As/LbCpf1
atcgtattagccaggatggt

SEQ ID NO: 8968 - DNA, 21 bp, Artificial Sequence
  Synthetic: FXN 3 reverse 9:69040462-69040487; As/LbCpf1
atcgtattagccaggatggtc

SEQ ID NO: 8969 - DNA, 22 bp, Artificial Sequence
  Synthetic: FXN 3 reverse 9:69040462-69040488; As/LbCpf1
atcgtattagccaggatggtct

SEQ ID NO: 8970 - DNA, 23 bp, Artificial Sequence
  Synthetic: FXN 3 reverse 9:69040462-69040489; As/LbCpf1
atcgtattagccaggatggtctc

SEQ ID NO: 8971 - DNA, 24 bp, Artificial Sequence
  Synthetic: FXN 3 reverse 9:69040462-69040490; As/LbCpf1
atcgtattagccaggatggtctcc

SEQ ID NO: 8972 - DNA, 25 bp, Artificial Sequence
  Synthetic: FXN 3 reverse 9:69040462-69040491; As/LbCpf1
atcgtattagccaggatggtctcca

SEQ ID NO: 8973 - DNA, 18 bp, Artificial Sequence
  Synthetic: FXN 3 reverse 9:69040478-69040500; As/LbCpf1
gtagagatggggtttcat

SEQ ID NO: 8974 - DNA, 19 bp, Artificial Sequence
  Synthetic: FXN 3 reverse 9:69040478-69040501; As/LbCpf1
gtagagatggggtttcatc

SEQ ID NO: 8975 - DNA, 20 bp, Artificial Sequence
  Synthetic: FXN 3 reverse 9:69040478-69040502; As/LbCpf1
gtagagatggggtttcatcg

SEQ ID NO: 8976 - DNA, 21 bp, Artificial Sequence
  Synthetic: FXN 3 reverse 9:69040478-69040503; As/LbCpf1
gtagagatggggtttcatcgt

SEQ ID NO: 8977 - DNA, 22 bp, Artificial Sequence
  Synthetic: FXN 3 reverse 9:69040478-69040504; As/LbCpf1
gtagagatggggtttcatcgta

SEQ ID NO: 8978 - DNA, 23 bp, Artificial Sequence
  Synthetic: FXN 3 reverse 9:69040478-69040505; As/LbCpf1
gtagagatggggtttcatcgtat

SEQ ID NO: 8979 - DNA, 24 bp, Artificial Sequence
  Synthetic: FXN 3 reverse 9:69040478-69040506; As/LbCpf1
gtagagatggggtttcatcgtatt

SEQ ID NO: 8980 - DNA, 25 bp, Artificial Sequence
  Synthetic: FXN 3 reverse 9:69040478-69040507; As/LbCpf1
gtagagatggggtttcatcgtatta

SEQ ID NO: 8981 - DNA, 18 bp, Artificial Sequence
  Synthetic: FXN 3 reverse 9:69040479-69040501; As/LbCpf1
agtagagatggggtttca

SEQ ID NO: 8982 - DNA, 19 bp, Artificial Sequence
  Synthetic: FXN 3 reverse 9:69040479-69040502; As/LbCpf1
agtagagatggggtttcat

SEQ ID NO: 8983 - DNA, 20 bp, Artificial Sequence
  Synthetic: FXN 3 reverse 9:69040479-69040503; As/LbCpf1
agtagagatggggtttcatc

SEQ ID NO: 8984 - DNA, 21 bp, Artificial Sequence
  Synthetic: FXN 3 reverse 9:69040479-69040504; As/LbCpf1
agtagagatggggtttcatcg

SEQ ID NO: 8985 - DNA, 22 bp, Artificial Sequence
  Synthetic: FXN 3 reverse 9:69040479-69040505; As/LbCpf1
agtagagatggggtttcatcgt

SEQ ID NO: 8986 - DNA, 23 bp, Artificial Sequence
  Synthetic: FXN 3 reverse 9:69040479-69040506; As/LbCpf1
agtagagatggggtttcatcgta

SEQ ID NO: 8987 - DNA, 24 bp, Artificial Sequence
  Synthetic: FXN 3 reverse 9:69040479-69040507; As/LbCpf1
agtagagatggggtttcatcgtat

SEQ ID NO: 8988 - DNA, 25 bp, Artificial Sequence
  Synthetic: FXN 3 reverse 9:69040479-69040508; As/LbCpf1
agtagagatggggtttcatcgtatt

SEQ ID NO: 8989 - DNA, 18 bp, Artificial Sequence
  Synthetic: FXN 3 reverse 9:69040480-69040502; As/LbCpf1
tagtagagatggggtttc

SEQ ID NO: 8990 - DNA, 19 bp, Artificial Sequence
  Synthetic: FXN 3 reverse 9:69040480-69040503; As/LbCpf1
tagtagagatggggtttca

SEQ ID NO: 8991 - DNA, 20 bp, Artificial Sequence
  Synthetic: FXN 3 reverse 9:69040480-69040504; As/LbCpf1
tagtagagatggggtttcat

SEQ ID NO: 8992 - DNA, 21 bp, Artificial Sequence
  Synthetic: FXN 3 reverse 9:69040480-69040505; As/LbCpf1
tagtagagatggggtttcatc

SEQ ID NO: 8993 - DNA, 22 bp, Artificial Sequence
  Synthetic: FXN 3 reverse 9:69040480-69040506; As/LbCpf1
tagtagagatggggtttcatcg

SEQ ID NO: 8994 - DNA, 23 bp, Artificial Sequence
  Synthetic: FXN 3 reverse 9:69040480-69040507; As/LbCpf1
tagtagagatggggtttcatcgt

SEQ ID NO: 8995 - DNA, 24 bp, Artificial Sequence
  Synthetic: FXN 3 reverse 9:69040480-69040508; As/LbCpf1
tagtagagatggggtttcatcgta

SEQ ID NO: 8996 - DNA, 25 bp, Artificial Sequence
  Synthetic: FXN 3 reverse 9:69040480-69040509; As/LbCpf1
tagtagagatggggtttcatcgtat

SEQ ID NO: 8997 - DNA, 18 bp, Artificial Sequence
  Synthetic: FXN 3 reverse 9:69040486-69040508; As/LbCpf1
tatttttagtagagatgg

SEQ ID NO: 8998 - DNA, 19 bp, Artificial Sequence
  Synthetic: FXN 3 reverse 9:69040486-69040509; As/LbCpf1
tatttttagtagagatggg

SEQ ID NO: 8999 - DNA, 20 bp, Artificial Sequence
  Synthetic: FXN 3 reverse 9:69040486-69040510; As/LbCpf1
tatttttagtagagatgggg

SEQ ID NO: 9000 - DNA, 21 bp, Artificial Sequence
  Synthetic: FXN 3 reverse 9:69040486-69040511; As/LbCpf1
tatttttagtagagatggggt

SEQ ID NO: 9001 - DNA, 22 bp, Artificial Sequence
  Synthetic: FXN 3 reverse 9:69040486-69040512; As/LbCpf1
tatttttagtagagatggggtt

SEQ ID NO: 9002 - DNA, 23 bp, Artificial Sequence
  Synthetic: FXN 3 reverse 9:69040486-69040513; As/LbCpf1
tatttttagtagagatggggttt

SEQ ID NO: 9003 - DNA, 24 bp, Artificial Sequence
  Synthetic: FXN 3 reverse 9:69040486-69040514; As/LbCpf1
tatttttagtagagatggggtttc

SEQ ID NO: 9004 - DNA, 25 bp, Artificial Sequence
  Synthetic: FXN 3 reverse 9:69040486-69040515; As/LbCpf1
tatttttagtagagatggggtttca

SEQ ID NO: 9005 - DNA, 18 bp, Artificial Sequence
  Synthetic: FXN 3 reverse 9:69040487-69040509; As/LbCpf1
gtatttttagtagagatg

SEQ ID NO: 9006 - DNA, 19 bp, Artificial Sequence
  Synthetic: FXN 3 reverse 9:69040487-69040510; As/LbCpf1
gtatttttagtagagatgg

SEQ ID NO: 9007 - DNA, 20 bp, Artificial Sequence
  Synthetic: FXN 3 reverse 9:69040487-69040511; As/LbCpf1
gtatttttagtagagatggg

SEQ ID NO: 9008 - DNA, 21 bp, Artificial Sequence
  Synthetic: FXN 3 reverse 9:69040487-69040512; As/LbCpf1
gtatttttagtagagatgggg

SEQ ID NO: 9009 - DNA, 22 bp, Artificial Sequence
  Synthetic: FXN 3 reverse 9:69040487-69040513; As/LbCpf1
gtatttttagtagagatggggt

SEQ ID NO: 9010 - DNA, 23 bp, Artificial Sequence
  Synthetic: FXN 3 reverse 9:69040487-69040514; As/LbCpf1
gtatttttagtagagatggggtt

SEQ ID NO: 9011 - DNA, 24 bp, Artificial Sequence
  Synthetic: FXN 3 reverse 9:69040487-69040515; As/LbCpf1
gtatttttagtagagatggggttt

SEQ ID NO: 9012 - DNA, 25 bp, Artificial Sequence
  Synthetic: FXN 3 reverse 9:69040487-69040516; As/LbCpf1
gtatttttagtagagatggggtttc

SEQ ID NO: 9013 - DNA, 18 bp, Artificial Sequence
  Synthetic: FXN 3 reverse 9:69040488-69040510; As/LbCpf1
tgtatttttagtagagat

SEQ ID NO: 9014 - DNA, 19 bp, Artificial Sequence
  Synthetic: FXN 3 reverse 9:69040488-69040511; As/LbCpf1
tgtatttttagtagagatg

SEQ ID NO: 9015 - DNA, 20 bp, Artificial Sequence
  Synthetic: FXN 3 reverse 9:69040488-69040512; As/LbCpf1
tgtatttttagtagagatgg

SEQ ID NO: 9016 - DNA, 21 bp, Artificial Sequence
  Synthetic: FXN 3 reverse 9:69040488-69040513; As/LbCpf1
tgtatttttagtagagatggg

SEQ ID NO: 9017 - DNA, 22 bp, Artificial Sequence
  Synthetic: FXN 3 reverse 9:69040488-69040514; As/LbCpf1
tgtatttttagtagagatgggg

SEQ ID NO: 9018 - DNA, 23 bp, Artificial Sequence
  Synthetic: FXN 3 reverse 9:69040488-69040515; As/LbCpf1
tgtatttttagtagagatggggt

SEQ ID NO: 9019 - DNA, 24 bp, Artificial Sequence
  Synthetic: FXN 3 reverse 9:69040488-69040516; As/LbCpf1
tgtatttttagtagagatggggtt

SEQ ID NO: 9020 - DNA, 25 bp, Artificial Sequence
  Synthetic: FXN 3 reverse 9:69040488-69040517; As/LbCpf1
tgtatttttagtagagatggggttt

SEQ ID NO: 9021 - DNA, 18 bp, Artificial Sequence
  Synthetic: FXN 3 reverse 9:69040489-69040511; As/LbCpf1
ttgtatttttagtagaga

SEQ ID NO: 9022 - DNA, 19 bp, Artificial Sequence
  Synthetic: FXN 3 reverse 9:69040489-69040512; As/LbCpf1
ttgtatttttagtagagat

SEQ ID NO: 9023 - DNA, 20 bp, Artificial Sequence
  Synthetic: FXN 3 reverse 9:69040489-69040513; As/LbCpf1
ttgtatttttagtagagatg

SEQ ID NO: 9024 - DNA, 21 bp, Artificial Sequence
  Synthetic: FXN 3 reverse 9:69040489-69040514; As/LbCpf1
ttgtatttttagtagagatgg

SEQ ID NO: 9025 - DNA, 22 bp, Artificial Sequence
  Synthetic: FXN 3 reverse 9:69040489-69040515; As/LbCpf1
ttgtatttttagtagagatggg

SEQ ID NO: 9026 - DNA, 23 bp, Artificial Sequence
  Synthetic: FXN 3 reverse 9:69040489-69040516; As/LbCpf1
ttgtatttttagtagagatgggg

SEQ ID NO: 9027 - DNA, 24 bp, Artificial Sequence
  Synthetic: FXN 3 reverse 9:69040489-69040517; As/LbCpf1
ttgtatttttagtagagatggggt

SEQ ID NO: 9028 - DNA, 25 bp, Artificial Sequence
  Synthetic: FXN 3 reverse 9:69040489-69040518; As/LbCpf1
ttgtatttttagtagagatggggtt

SEQ ID NO: 9029 - DNA, 18 bp, Artificial Sequence
  Synthetic: FXN 3 reverse 9:69040641-69040663; As/LbCpf1
agatgcagtctcgctctg

SEQ ID NO: 9030 - DNA, 19 bp, Artificial Sequence
  Synthetic: FXN 3 reverse 9:69040641-69040664; As/LbCpf1
agatgcagtctcgctctgt

SEQ ID NO: 9031 - DNA, 20 bp, Artificial Sequence
  Synthetic: FXN 3 reverse 9:69040641-69040665; As/LbCpf1
agatgcagtctcgctctgtc

SEQ ID NO: 9032 - DNA, 21 bp, Artificial Sequence
  Synthetic: FXN 3 reverse 9:69040641-69040666; As/LbCpf1
agatgcagtctcgctctgtca

SEQ ID NO: 9033 - DNA, 22 bp, Artificial Sequence
  Synthetic: FXN 3 reverse 9:69040641-69040667; As/LbCpf1
agatgcagtctcgctctgtcac

SEQ ID NO: 9034 - DNA, 23 bp, Artificial Sequence
  Synthetic: FXN 3 reverse 9:69040641-69040668; As/LbCpf1
agatgcagtctcgctctgtcacc

SEQ ID NO: 9035 - DNA, 24 bp, Artificial Sequence
  Synthetic: FXN 3 reverse 9:69040641-69040669; As/LbCpf1
agatgcagtctcgctctgtcaccc

SEQ ID NO: 9036 - DNA, 25 bp, Artificial Sequence
  Synthetic: FXN 3 reverse 9:69040641-69040670; As/LbCpf1
agatgcagtctcgctctgtcaccca

SEQ ID NO: 9037 - DNA, 18 bp, Artificial Sequence
  Synthetic: FXN 3 reverse 9:69040645-69040667; As/LbCpf1
tttgagatgcagtctcgc

SEQ ID NO: 9038 - DNA, 19 bp, Artificial Sequence
  Synthetic: FXN 3 reverse 9:69040645-69040668; As/LbCpf1
tttgagatgcagtctcgct

SEQ ID NO: 9039 - DNA, 20 bp, Artificial Sequence
  Synthetic: FXN 3 reverse 9:69040645-69040669; As/LbCpf1
tttgagatgcagtctcgctc

SEQ ID NO: 9040 - DNA, 21 bp, Artificial Sequence
  Synthetic: FXN 3 reverse 9:69040645-69040670; As/LbCpf1
tttgagatgcagtctcgctct

SEQ ID NO: 9041 - DNA, 22 bp, Artificial Sequence
  Synthetic: FXN 3 reverse 9:69040645-69040671; As/LbCpf1
tttgagatgcagtctcgctctg

SEQ ID NO: 9042 - DNA, 23 bp, Artificial Sequence
  Synthetic: FXN 3 reverse 9:69040645-69040672; As/LbCpf1
tttgagatgcagtctcgctctgt

SEQ ID NO: 9043 - DNA, 24 bp, Artificial Sequence
  Synthetic: FXN 3 reverse 9:69040645-69040673; As/LbCpf1
tttgagatgcagtctcgctctgtc

SEQ ID NO: 9044 - DNA, 25 bp, Artificial Sequence
  Synthetic: FXN 3 reverse 9:69040645-69040674; As/LbCpf1
tttgagatgcagtctcgctctgtca

SEQ ID NO: 9045 - DNA, 18 bp, Artificial Sequence
  Synthetic: FXN 3 reverse 9:69040646-69040668; As/LbCpf1
ctttgagatgcagtctcg

SEQ ID NO: 9046 - DNA, 19 bp, Artificial Sequence
  Synthetic: FXN 3 reverse 9:69040646-69040669; As/LbCpf1
ctttgagatgcagtctcgc

SEQ ID NO: 9047 - DNA, 20 bp, Artificial Sequence
  Synthetic: FXN 3 reverse 9:69040646-69040670; As/LbCpf1
ctttgagatgcagtctcgct

SEQ ID NO: 9048 - DNA, 21 bp, Artificial Sequence
  Synthetic: FXN 3 reverse 9:69040646-69040671; As/LbCpf1
ctttgagatgcagtctcgctc

SEQ ID NO: 9049 - DNA, 22 bp, Artificial Sequence
  Synthetic: FXN 3 reverse 9:69040646-69040672; As/LbCpf1
ctttgagatgcagtctcgctct

SEQ ID NO: 9050 - DNA, 23 bp, Artificial Sequence
  Synthetic: FXN 3 reverse 9:69040646-69040673; As/LbCpf1
ctttgagatgcagtctcgctctg

SEQ ID NO: 9051 - DNA, 24 bp, Artificial Sequence
  Synthetic: FXN 3 reverse 9:69040646-69040674; As/LbCpf1
ctttgagatgcagtctcgctctgt

SEQ ID NO: 9052 - DNA, 25 bp, Artificial Sequence
  Synthetic: FXN 3 reverse 9:69040646-69040675; As/LbCpf1
ctttgagatgcagtctcgctctgtc

SEQ ID NO: 9053 - DNA, 18 bp, Artificial Sequence
  Synthetic: FXN 3 reverse 9:69040647-69040669; As/LbCpf1
tctttgagatgcagtctc

SEQ ID NO: 9054 - DNA, 19 bp, Artificial Sequence
  Synthetic: FXN 3 reverse 9:69040647-69040670; As/LbCpf1
tctttgagatgcagtctcg

SEQ ID NO: 9055 - DNA, 20 bp, Artificial Sequence
  Synthetic: FXN 3 reverse 9:69040647-69040671; As/LbCpf1
tctttgagatgcagtctcgc

SEQ ID NO: 9056 - DNA, 21 bp, Artificial Sequence
  Synthetic: FXN 3 reverse 9:69040647-69040672; As/LbCpf1
tctttgagatgcagtctcgct

SEQ ID NO: 9057 - DNA, 22 bp, Artificial Sequence
  Synthetic: FXN 3 reverse 9:69040647-69040673; As/LbCpf1
tctttgagatgcagtctcgctc

SEQ ID NO: 9058 - DNA, 23 bp, Artificial Sequence
  Synthetic: FXN 3 reverse 9:69040647-69040674; As/LbCpf1
tctttgagatgcagtctcgctct

SEQ ID NO: 9059 - DNA, 24 bp, Artificial Sequence
  Synthetic: FXN 3 reverse 9:69040647-69040675; As/LbCpf1
tctttgagatgcagtctcgctctg

SEQ ID NO: 9060 - DNA, 25 bp, Artificial Sequence
  Synthetic: FXN 3 reverse 9:69040647-69040676; As/LbCpf1
tctttgagatgcagtctcgctctgt

SEQ ID NO: 9061 - DNA, 18 bp, Artificial Sequence
  Synthetic: FXN 3 reverse 9:69040648-69040670; As/LbCpf1
ttctttgagatgcagtct

SEQ ID NO: 9062 - DNA, 19 bp, Artificial Sequence
  Synthetic: FXN 3 reverse 9:69040648-69040671; As/LbCpf1
ttctttgagatgcagtctc

SEQ ID NO: 9063 - DNA, 20 bp, Artificial Sequence
  Synthetic: FXN 3 reverse 9:69040648-69040672; As/LbCpf1
ttctttgagatgcagtctcg

SEQ ID NO: 9064 - DNA, 21 bp, Artificial Sequence
  Synthetic: FXN 3 reverse 9:69040648-69040673; As/LbCpf1
ttctttgagatgcagtctcgc

SEQ ID NO: 9065 - DNA, 22 bp, Artificial Sequence
  Synthetic: FXN 3 reverse 9:69040648-69040674; As/LbCpf1
ttctttgagatgcagtctcgct

SEQ ID NO: 9066 - DNA, 23 bp, Artificial Sequence
  Synthetic: FXN 3 reverse 9:69040648-69040675; As/LbCpf1
ttctttgagatgcagtctcgctc

SEQ ID NO: 9067 - DNA, 24 bp, Artificial Sequence
  Synthetic: FXN 3 reverse 9:69040648-69040676; As/LbCpf1
ttctttgagatgcagtctcgctct

SEQ ID NO: 9068 - DNA, 25 bp, Artificial Sequence
  Synthetic: FXN 3 reverse 9:69040648-69040677; As/LbCpf1
ttctttgagatgcagtctcgctctg

SEQ ID NO: 9069 - DNA, 18 bp, Artificial Sequence
  Synthetic: FXN 3 reverse 9:69040649-69040671; As/LbCpf1
tttctttgagatgcagtc

SEQ ID NO: 9070 - DNA, 19 bp, Artificial Sequence
  Synthetic: FXN 3 reverse 9:69040649-69040672; As/LbCpf1
tttctttgagatgcagtct

SEQ ID NO: 9071 - DNA, 20 bp, Artificial Sequence
  Synthetic: FXN 3 reverse 9:69040649-69040673; As/LbCpf1
tttctttgagatgcagtctc

SEQ ID NO: 9072 - DNA, 21 bp, Artificial Sequence
  Synthetic: FXN 3 reverse 9:69040649-69040674; As/LbCpf1
tttctttgagatgcagtctcg

SEQ ID NO: 9073 - DNA, 22 bp, Artificial Sequence
  Synthetic: FXN 3 reverse 9:69040649-69040675; As/LbCpf1
tttctttgagatgcagtctcgc

SEQ ID NO: 9074 - DNA, 23 bp, Artificial Sequence
  Synthetic: FXN 3 reverse 9:69040649-69040676; As/LbCpf1
tttctttgagatgcagtctcgct

SEQ ID NO: 9075 - DNA, 24 bp, Artificial Sequence
  Synthetic: FXN 3 reverse 9:69040649-69040677; As/LbCpf1
tttctttgagatgcagtctcgctc

SEQ ID NO: 9076 - DNA, 25 bp, Artificial Sequence
  Synthetic: FXN 3 reverse 9:69040649-69040678; As/LbCpf1
tttctttgagatgcagtctcgctct

SEQ ID NO: 9077 - DNA, 18 bp, Artificial Sequence
  Synthetic: FXN 3 reverse 9:69040653-69040675; As/LbCpf1
tttttttctttgagatgc

SEQ ID NO: 9078 - DNA, 19 bp, Artificial Sequence
  Synthetic: FXN 3 reverse 9:69040653-69040676; As/LbCpf1
tttttttctttgagatgca

SEQ ID NO: 9079 - DNA, 20 bp, Artificial Sequence
  Synthetic: FXN 3 reverse 9:69040653-69040677; As/LbCpf1
tttttttctttgagatgcag

SEQ ID NO: 9080 - DNA, 21 bp, Artificial Sequence
  Synthetic: FXN 3 reverse 9:69040653-69040678; As/LbCpf1
tttttttctttgagatgcagt

SEQ ID NO: 9081 - DNA, 22 bp, Artificial Sequence
  Synthetic: FXN 3 reverse 9:69040653-69040679; As/LbCpf1
tttttttctttgagatgcagtc

SEQ ID NO: 9082 - DNA, 23 bp, Artificial Sequence
  Synthetic: FXN 3 reverse 9:69040653-69040680; As/LbCpf1
tttttttctttgagatgcagtct

SEQ ID NO: 9083 - DNA, 24 bp, Artificial Sequence
  Synthetic: FXN 3 reverse 9:69040653-69040681; As/LbCpf1
tttttttctttgagatgcagtctc

SEQ ID NO: 9084 - DNA, 25 bp, Artificial Sequence
  Synthetic: FXN 3 reverse 9:69040653-69040682; As/LbCpf1
tttttttctttgagatgcagtctcg

SEQ ID NO: 9085 - DNA, 18 bp, Artificial Sequence
  Synthetic: FXN 3 reverse 9:69040657-69040679; As/LbCpf1
tttatttttttctttgag

SEQ ID NO: 9086 - DNA, 19 bp, Artificial Sequence
  Synthetic: FXN 3 reverse 9:69040657-69040680; As/LbCpf1
tttatttttttctttgaga

SEQ ID NO: 9087 - DNA, 20 bp, Artificial Sequence
  Synthetic: FXN 3 reverse 9:69040657-69040681; As/LbCpf1
tttatttttttctttgagat

SEQ ID NO: 9088 - DNA, 21 bp, Artificial Sequence
  Synthetic: FXN 3 reverse 9:69040657-69040682; As/LbCpf1
tttatttttttctttgagatg

SEQ ID NO: 9089 - DNA, 22 bp, Artificial Sequence
  Synthetic: FXN 3 reverse 9:69040657-69040683; As/LbCpf1
tttatttttttctttgagatgc

SEQ ID NO: 9090 - DNA, 23 bp, Artificial Sequence
  Synthetic: FXN 3 reverse 9:69040657-69040684; As/LbCpf1
tttatttttttctttgagatgca

SEQ ID NO: 9091 - DNA, 24 bp, Artificial Sequence
  Synthetic: FXN 3 reverse 9:69040657-69040685; As/LbCpf1
tttatttttttctttgagatgcag

SEQ ID NO: 9092 - DNA, 25 bp, Artificial Sequence
  Synthetic: FXN 3 reverse 9:69040657-69040686; As/LbCpf1
tttatttttttctttgagatgcagt

SEQ ID NO: 9093 - DNA, 18 bp, Artificial Sequence
  Synthetic: FXN 3 reverse 9:69040661-69040683; As/LbCpf1
tttatttatttttttctt

SEQ ID NO: 9094 - DNA, 19 bp, Artificial Sequence
  Synthetic: FXN 3 reverse 9:69040661-69040684; As/LbCpf1
tttatttatttttttcttt

SEQ ID NO: 9095 - DNA, 20 bp, Artificial Sequence
  Synthetic: FXN 3 reverse 9:69040661-69040685; As/LbCpf1
tttatttatttttttctttg

SEQ ID NO: 9096 - DNA, 21 bp, Artificial Sequence
  Synthetic: FXN 3 reverse 9:69040661-69040686; As/LbCpf1
tttatttatttttttctttga

SEQ ID NO: 9097 - DNA, 22 bp, Artificial Sequence
  Synthetic: FXN 3 reverse 9:69040661-69040687; As/LbCpf1
tttatttatttttttctttgag

SEQ ID NO: 9098 - DNA, 23 bp, Artificial Sequence
  Synthetic: FXN 3 reverse 9:69040661-69040688; As/LbCpf1
tttatttatttttttctttgaga

SEQ ID NO: 9099 - DNA, 24 bp, Artificial Sequence
  Synthetic: FXN 3 reverse 9:69040661-69040689; As/LbCpf1
tttatttatttttttctttgagat

SEQ ID NO: 9100 - DNA, 25 bp, Artificial Sequence
  Synthetic: FXN 3 reverse 9:69040661-69040690; As/LbCpf1
tttatttatttttttctttgagatg

SEQ ID NO: 9101 - DNA, 18 bp, Artificial Sequence
  Synthetic: FXN 3 reverse 9:69040665-69040687; As/LbCpf1
tttatttatttatttttt

SEQ ID NO: 9102 - DNA, 19 bp, Artificial Sequence
  Synthetic: FXN 3 reverse 9:69040665-69040688; As/LbCpf1
tttatttatttattttttt

SEQ ID NO: 9103 - DNA, 20 bp, Artificial Sequence
  Synthetic: FXN 3 reverse 9:69040665-69040689; As/LbCpf1
tttatttatttatttttttc

SEQ ID NO: 9104 - DNA, 21 bp, Artificial Sequence
  Synthetic: FXN 3 reverse 9:69040665-69040690; As/LbCpf1
tttatttatttatttttttct

SEQ ID NO: 9105 - DNA, 22 bp, Artificial Sequence
  Synthetic: FXN 3 reverse 9:69040665-69040691; As/LbCpf1
tttatttatttatttttttctt

SEQ ID NO: 9106 - DNA, 23 bp, Artificial Sequence
  Synthetic: FXN 3 reverse 9:69040665-69040692; As/LbCpf1
tttatttatttatttttttcttt

SEQ ID NO: 9107 - DNA, 24 bp, Artificial Sequence
  Synthetic: FXN 3 reverse 9:69040665-69040693; As/LbCpf1
tttatttatttatttttttctttg

SEQ ID NO: 9108 - DNA, 25 bp, Artificial Sequence
  Synthetic: FXN 3 reverse 9:69040665-69040694; As/LbCpf1
tttatttatttatttttttctttga

SEQ ID NO: 9109 - DNA, 18 bp, Artificial Sequence
  Synthetic: FXN 3 reverse 9:69040684-69040706; As/LbCpf1
taagcagtataaatattt

SEQ ID NO: 9110 - DNA, 19 bp, Artificial Sequence
  Synthetic: FXN 3 reverse 9:69040684-69040707; As/LbCpf1
taagcagtataaatattta

SEQ ID NO: 9111 - DNA, 20 bp, Artificial Sequence
  Synthetic: FXN 3 reverse 9:69040684-69040708; As/LbCpf1
taagcagtataaatatttat

SEQ ID NO: 9112 - DNA, 21 bp, Artificial Sequence
  Synthetic: FXN 3 reverse 9:69040684-69040709; As/LbCpf1
taagcagtataaatatttatt

SEQ ID NO: 9113 - DNA, 22 bp, Artificial Sequence
  Synthetic: FXN 3 reverse 9:69040684-69040710; As/LbCpf1
taagcagtataaatatttattt

SEQ ID NO: 9114 - DNA, 23 bp, Artificial Sequence
  Synthetic: FXN 3 reverse 9:69040684-69040711; As/LbCpf1
taagcagtataaatatttattta

SEQ ID NO: 9115 - DNA, 24 bp, Artificial Sequence
  Synthetic: FXN 3 reverse 9:69040684-69040712; As/LbCpf1
taagcagtataaatatttatttat

SEQ ID NO: 9116 - DNA, 25 bp, Artificial Sequence
  Synthetic: FXN 3 reverse 9:69040684-69040713; As/LbCpf1
taagcagtataaatatttatttatt

SEQ ID NO: 9117 - DNA, 18 bp, Artificial Sequence
  Synthetic: FXN 3 reverse 9:69040695-69040717; As/LbCpf1
ttattagtttataagcag

SEQ ID NO: 9118 - DNA, 19 bp, Artificial Sequence
  Synthetic: FXN 3 reverse 9:69040695-69040718; As/LbCpf1
ttattagtttataagcagt

SEQ ID NO: 9119 - DNA, 20 bp, Artificial Sequence
  Synthetic: FXN 3 reverse 9:69040695-69040719; As/LbCpf1
ttattagtttataagcagta

SEQ ID NO: 9120 - DNA, 21 bp, Artificial Sequence
  Synthetic: FXN 3 reverse 9:69040695-69040720; As/LbCpf1
ttattagtttataagcagtat

SEQ ID NO: 9121 - DNA, 22 bp, Artificial Sequence
  Synthetic: FXN 3 reverse 9:69040695-69040721; As/LbCpf1
ttattagtttataagcagtata

SEQ ID NO: 9122 - DNA, 23 bp, Artificial Sequence
  Synthetic: FXN 3 reverse 9:69040695-69040722; As/LbCpf1
ttattagtttataagcagtataa

SEQ ID NO: 9123 - DNA, 24 bp, Artificial Sequence
  Synthetic: FXN 3 reverse 9:69040695-69040723; As/LbCpf1
ttattagtttataagcagtataaa

SEQ ID NO: 9124 - DNA, 25 bp, Artificial Sequence
  Synthetic: FXN 3 reverse 9:69040695-69040724; As/LbCpf1
ttattagtttataagcagtataaat

SEQ ID NO: 9125 - DNA, 18 bp, Artificial Sequence
  Synthetic: FXN 3 forward 9:69040696-69040718; As/LbCpf1
tactgcttataaactaat

SEQ ID NO: 9126 - DNA, 19 bp, Artificial Sequence
  Synthetic: FXN 3 forward 9:69040696-69040719; As/LbCpf1
tactgcttataaactaata

SEQ ID NO: 9127 - DNA, 20 bp, Artificial Sequence
  Synthetic: FXN 3 forward 9:69040696-69040720; As/LbCpf1
tactgcttataaactaataa

SEQ ID NO: 9128 - DNA, 21 bp, Artificial Sequence
  Synthetic: FXN 3 forward 9:69040696-69040721; As/LbCpf1
tactgcttataaactaataat

SEQ ID NO: 9129 - DNA, 22 bp, Artificial Sequence
  Synthetic: FXN 3 forward 9:69040696-69040722; As/LbCpf1
tactgcttataaactaataata

SEQ ID NO: 9130 - DNA, 23 bp, Artificial Sequence
  Synthetic: FXN 3 forward 9:69040696-69040723; As/LbCpf1
tactgcttataaactaataataa

SEQ ID NO: 9131 - DNA, 24 bp, Artificial Sequence
  Synthetic: FXN 3 forward 9:69040696-69040724; As/LbCpf1
tactgcttataaactaataataaa

SEQ ID NO: 9132 - DNA, 25 bp, Artificial Sequence
  Synthetic: FXN 3 forward 9:69040696-69040725; As/LbCpf1
tactgcttataaactaataataaat

SEQ ID NO: 9133 - DNA, 18 bp, Artificial Sequence
  Synthetic: FXN 3 forward 9:69040740-69040762; As/LbCpf1
tgtcaccccaccattcat

SEQ ID NO: 9134 - DNA, 19 bp, Artificial Sequence
  Synthetic: FXN 3 forward 9:69040740-69040763; As/LbCpf1
tgtcaccccaccattcata

SEQ ID NO: 9135 - DNA, 20 bp, Artificial Sequence
  Synthetic: FXN 3 forward 9:69040740-69040764; As/LbCpf1
tgtcaccccaccattcatat

SEQ ID NO: 9136 - DNA, 21 bp, Artificial Sequence
  Synthetic: FXN 3 forward 9:69040740-69040765; As/LbCpf1
tgtcaccccaccattcatatg

SEQ ID NO: 9137 - DNA, 22 bp, Artificial Sequence
  Synthetic: FXN 3 forward 9:69040740-69040766; As/LbCpf1
tgtcaccccaccattcatatgt

SEQ ID NO: 9138 - DNA, 23 bp, Artificial Sequence
  Synthetic: FXN 3 forward 9:69040740-69040767; As/LbCpf1
tgtcaccccaccattcatatgtt

SEQ ID NO: 9139 - DNA, 24 bp, Artificial Sequence
  Synthetic: FXN 3 forward 9:69040740-69040768; As/LbCpf1
tgtcaccccaccattcatatgtta

SEQ ID NO: 9140 - DNA, 25 bp, Artificial Sequence
  Synthetic: FXN 3 forward 9:69040740-69040769; As/LbCpf1
tgtcaccccaccattcatatgttaa

SEQ ID NO: 9141 - DNA, 18 bp, Artificial Sequence
  Synthetic: FXN 3 reverse 9:69040741-69040763; As/LbCpf1
acatatgaatggtggggt

SEQ ID NO: 9142 - DNA, 19 bp, Artificial Sequence
  Synthetic: FXN 3 reverse 9:69040741-69040764; As/LbCpf1
acatatgaatggtggggtg

SEQ ID NO: 9143 - DNA, 20 bp, Artificial Sequence
  Synthetic: FXN 3 reverse 9:69040741-69040765; As/LbCpf1
acatatgaatggtggggtga

SEQ ID NO: 9144 - DNA, 21 bp, Artificial Sequence
  Synthetic: FXN 3 reverse 9:69040741-69040766; As/LbCpf1
acatatgaatggtggggtgac

SEQ ID NO: 9145 - DNA, 22 bp, Artificial Sequence
  Synthetic: FXN 3 reverse 9:69040741-69040767; As/LbCpf1
acatatgaatggtggggtgaca

SEQ ID NO: 9146 - DNA, 23 bp, Artificial Sequence
  Synthetic: FXN 3 reverse 9:69040741-69040768; As/LbCpf1
acatatgaatggtggggtgacac

SEQ ID NO: 9147 - DNA, 24 bp, Artificial Sequence
  Synthetic: FXN 3 reverse 9:69040741-69040769; As/LbCpf1
acatatgaatggtggggtgacaca

SEQ ID NO: 9148 - DNA, 25 bp, Artificial Sequence
  Synthetic: FXN 3 reverse 9:69040741-69040770; As/LbCpf1
acatatgaatggtggggtgacacaa

SEQ ID NO: 9149 - DNA, 18 bp, Artificial Sequence
  Synthetic: FXN 3 reverse 9:69040742-69040764; As/LbCpf1
aacatatgaatggtgggg

SEQ ID NO: 9150 - DNA, 19 bp, Artificial Sequence
  Synthetic: FXN 3 reverse 9:69040742-69040765; As/LbCpf1
aacatatgaatggtggggt

SEQ ID NO: 9151 - DNA, 20 bp, Artificial Sequence
  Synthetic: FXN 3 reverse 9:69040742-69040766; As/LbCpf1
aacatatgaatggtggggtg

SEQ ID NO: 9152 - DNA, 21 bp, Artificial Sequence
  Synthetic: FXN 3 reverse 9:69040742-69040767; As/LbCpf1
aacatatgaatggtggggtga

SEQ ID NO: 9153 - DNA, 22 bp, Artificial Sequence
  Synthetic: FXN 3 reverse 9:69040742-69040768; As/LbCpf1
aacatatgaatggtggggtgac

SEQ ID NO: 9154 - DNA, 23 bp, Artificial Sequence
  Synthetic: FXN 3 reverse 9:69040742-69040769; As/LbCpf1
aacatatgaatggtggggtgaca

SEQ ID NO: 9155 - DNA, 24 bp, Artificial Sequence
  Synthetic: FXN 3 reverse 9:69040742-69040770; As/LbCpf1
aacatatgaatggtggggtgacac

SEQ ID NO: 9156 - DNA, 25 bp, Artificial Sequence
  Synthetic: FXN 3 reverse 9:69040742-69040771; As/LbCpf1
aacatatgaatggtggggtgacaca

SEQ ID NO: 9157 - DNA, 18 bp, Artificial Sequence
  Synthetic: FXN 3 reverse 9:69040755-69040777; As/LbCpf1
gtgattaggttttaacat

SEQ ID NO: 9158 - DNA, 19 bp, Artificial Sequence
  Synthetic: FXN 3 reverse 9:69040755-69040778; As/LbCpf1
gtgattaggttttaacata

SEQ ID NO: 9159 - DNA, 20 bp, Artificial Sequence
  Synthetic: FXN 3 reverse 9:69040755-69040779; As/LbCpf1
gtgattaggttttaacatat

SEQ ID NO: 9160 - DNA, 21 bp, Artificial Sequence
  Synthetic: FXN 3 reverse 9:69040755-69040780; As/LbCpf1
gtgattaggttttaacatatg

SEQ ID NO: 9161 - DNA, 22 bp, Artificial Sequence
  Synthetic: FXN 3 reverse 9:69040755-69040781; As/LbCpf1
gtgattaggttttaacatatga

SEQ ID NO: 9162 - DNA, 23 bp, Artificial Sequence
  Synthetic: FXN 3 reverse 9:69040755-69040782; As/LbCpf1
gtgattaggttttaacatatgaa

SEQ ID NO: 9163 - DNA, 24 bp, Artificial Sequence
  Synthetic: FXN 3 reverse 9:69040755-69040783; As/LbCpf1
gtgattaggttttaacatatgaat

SEQ ID NO: 9164 - DNA, 25 bp, Artificial Sequence
  Synthetic: FXN 3 reverse 9:69040755-69040784; As/LbCpf1
gtgattaggttttaacatatgaatg

SEQ ID NO: 9165 - DNA, 18 bp, Artificial Sequence
  Synthetic: FXN 3 reverse 9:69040837-69040859; As/LbCpf1
gaagggcactaatcccaa

SEQ ID NO: 9166 - DNA, 19 bp, Artificial Sequence
  Synthetic: FXN 3 reverse 9:69040837-69040860; As/LbCpf1
gaagggcactaatcccaat

SEQ ID NO: 9167 - DNA, 20 bp, Artificial Sequence
  Synthetic: FXN 3 reverse 9:69040837-69040861; As/LbCpf1
gaagggcactaatcccaatc

SEQ ID NO: 9168 - DNA, 21 bp, Artificial Sequence
  Synthetic: FXN 3 reverse 9:69040837-69040862; As/LbCpf1
gaagggcactaatcccaatca

SEQ ID NO: 9169 - DNA, 22 bp, Artificial Sequence
  Synthetic: FXN 3 reverse 9:69040837-69040863; As/LbCpf1
gaagggcactaatcccaatcat

SEQ ID NO: 9170 - DNA, 23 bp, Artificial Sequence
  Synthetic: FXN 3 reverse 9:69040837-69040864; As/LbCpf1
gaagggcactaatcccaatcata

SEQ ID NO: 9171 - DNA, 24 bp, Artificial Sequence
  Synthetic: FXN 3 reverse 9:69040837-69040865; As/LbCpf1
gaagggcactaatcccaatcatat

SEQ ID NO: 9172 - DNA, 25 bp, Artificial Sequence
  Synthetic: FXN 3 reverse 9:69040837-69040866; As/LbCpf1
gaagggcactaatcccaatcatatg

SEQ ID NO: 9173 - DNA, 18 bp, Artificial Sequence
  Synthetic: FXN 3 reverse 9:69040838-69040860; As/LbCpf1
agaagggcactaatccca

SEQ ID NO: 9174 - DNA, 19 bp, Artificial Sequence
  Synthetic: FXN 3 reverse 9:69040838-69040861; As/LbCpf1
agaagggcactaatcccaa

SEQ ID NO: 9175 - DNA, 20 bp, Artificial Sequence
  Synthetic: FXN 3 reverse 9:69040838-69040862; As/LbCpf1
agaagggcactaatcccaat

SEQ ID NO: 9176 - DNA, 21 bp, Artificial Sequence
  Synthetic: FXN 3 reverse 9:69040838-69040863; As/LbCpf1
agaagggcactaatcccaatc

SEQ ID NO: 9177 - DNA, 22 bp, Artificial Sequence
  Synthetic: FXN 3 reverse 9:69040838-69040864; As/LbCpf1
agaagggcactaatcccaatca

SEQ ID NO: 9178 - DNA, 23 bp, Artificial Sequence
  Synthetic: FXN 3 reverse 9:69040838-69040865; As/LbCpf1
agaagggcactaatcccaatcat

SEQ ID NO: 9179 - DNA, 24 bp, Artificial Sequence
  Synthetic: FXN 3 reverse 9:69040838-69040866; As/LbCpf1
agaagggcactaatcccaatcata

SEQ ID NO: 9180 - DNA, 25 bp, Artificial Sequence
  Synthetic: FXN 3 reverse 9:69040838-69040867; As/LbCpf1
agaagggcactaatcccaatcatat

SEQ ID NO: 9181 - DNA, 18 bp, Artificial Sequence
  Synthetic: FXN 3 reverse 9:69040885-69040907; As/LbCpf1
ctggttcatagatgatgc

SEQ ID NO: 9182 - DNA, 19 bp, Artificial Sequence
  Synthetic: FXN 3 reverse 9:69040885-69040908; As/LbCpf1
ctggttcatagatgatgcc

SEQ ID NO: 9183 - DNA, 20 bp, Artificial Sequence
  Synthetic: FXN 3 reverse 9:69040885-69040909; As/LbCpf1
ctggttcatagatgatgcct

SEQ ID NO: 9184 - DNA, 21 bp, Artificial Sequence
  Synthetic: FXN 3 reverse 9:69040885-69040910; As/LbCpf1
ctggttcatagatgatgcctt

SEQ ID NO: 9185 - DNA, 22 bp, Artificial Sequence
  Synthetic: FXN 3 reverse 9:69040885-69040911; As/LbCpf1
ctggttcatagatgatgccttg

SEQ ID NO: 9186 - DNA, 23 bp, Artificial Sequence
  Synthetic: FXN 3 reverse 9:69040885-69040912; As/LbCpf1
ctggttcatagatgatgccttgt

SEQ ID NO: 9187 - DNA, 24 bp, Artificial Sequence
  Synthetic: FXN 3 reverse 9:69040885-69040913; As/LbCpf1
ctggttcatagatgatgccttgtc

SEQ ID NO: 9188 - DNA, 25 bp, Artificial Sequence
  Synthetic: FXN 3 reverse 9:69040885-69040914; As/LbCpf1
ctggttcatagatgatgccttgtca

SEQ ID NO: 9189 - DNA, 18 bp, Artificial Sequence
  Synthetic: FXN 3 reverse 9:69040907-69040929; As/LbCpf1
gtgtctggtgagggccag

SEQ ID NO: 9190 - DNA, 19 bp, Artificial Sequence
  Synthetic: FXN 3 reverse 9:69040907-69040930; As/LbCpf1
gtgtctggtgagggccagt

SEQ ID NO: 9191 - DNA, 20 bp, Artificial Sequence
  Synthetic: FXN 3 reverse 9:69040907-69040931; As/LbCpf1
gtgtctggtgagggccagtt

SEQ ID NO: 9192 - DNA, 21 bp, Artificial Sequence
  Synthetic: FXN 3 reverse 9:69040907-69040932; As/LbCpf1
gtgtctggtgagggccagttt

SEQ ID NO: 9193 - DNA, 22 bp, Artificial Sequence
  Synthetic: FXN 3 reverse 9:69040907-69040933; As/LbCpf1
gtgtctggtgagggccagtttc

SEQ ID NO: 9194 - DNA, 23 bp, Artificial Sequence
  Synthetic: FXN 3 reverse 9:69040907-69040934; As/LbCpf1
gtgtctggtgagggccagtttcc

SEQ ID NO: 9195 - DNA, 24 bp, Artificial Sequence
  Synthetic: FXN 3 reverse 9:69040907-69040935; As/LbCpf1
gtgtctggtgagggccagtttcct

SEQ ID NO: 9196 - DNA, 25 bp, Artificial Sequence
  Synthetic: FXN 3 reverse 9:69040907-69040936; As/LbCpf1
gtgtctggtgagggccagtttcctg

SEQ ID NO: 9197 - DNA, 18 bp, Artificial Sequence
  Synthetic: FXN 3 reverse 9:69040957-69040979; As/LbCpf1
ttagagtcctggagggtg

SEQ ID NO: 9198 - DNA, 19 bp, Artificial Sequence
  Synthetic: FXN 3 reverse 9:69040957-69040980; As/LbCpf1
ttagagtcctggagggtgg

SEQ ID NO: 9199 - DNA, 20 bp, Artificial Sequence
  Synthetic: FXN 3 reverse 9:69040957-69040981; As/LbCpf1
ttagagtcctggagggtggg

SEQ ID NO: 9200 - DNA, 21 bp, Artificial Sequence
  Synthetic: FXN 3 reverse 9:69040957-69040982; As/LbCpf1
ttagagtcctggagggtggga

SEQ ID NO: 9201 - DNA, 22 bp, Artificial Sequence
  Synthetic: FXN 3 reverse 9:69040957-69040983; As/LbCpf1
ttagagtcctggagggtgggaa

SEQ ID NO: 9202 - DNA, 23 bp, Artificial Sequence
  Synthetic: FXN 3 reverse 9:69040957-69040984; As/LbCpf1
ttagagtcctggagggtgggaaa

SEQ ID NO: 9203 - DNA, 24 bp, Artificial Sequence
  Synthetic: FXN 3 reverse 9:69040957-69040985; As/LbCpf1
ttagagtcctggagggtgggaaat

SEQ ID NO: 9204 - DNA, 25 bp, Artificial Sequence
  Synthetic: FXN 3 reverse 9:69040957-69040986; As/LbCpf1
ttagagtcctggagggtgggaaatc

SEQ ID NO: 9205 - DNA, 18 bp, Artificial Sequence
  Synthetic: FXN 3 forward 9:69040959-69040981; As/LbCpf1
ccaccctccaggactcta

SEQ ID NO: 9206 - DNA, 19 bp, Artificial Sequence
  Synthetic: FXN 3 forward 9:69040959-69040982; As/LbCpf1
ccaccctccaggactctaa

SEQ ID NO: 9207 - DNA, 20 bp, Artificial Sequence
  Synthetic: FXN 3 forward 9:69040959-69040983; As/LbCpf1
ccaccctccaggactctaag

SEQ ID NO: 9208 - DNA, 21 bp, Artificial Sequence
  Synthetic: FXN 3 forward 9:69040959-69040984; As/LbCpf1
ccaccctccaggactctaaga

SEQ ID NO: 9209 - DNA, 22 bp, Artificial Sequence
  Synthetic: FXN 3 forward 9:69040959-69040985; As/LbCpf1
ccaccctccaggactctaagaa

SEQ ID NO: 9210 - DNA, 23 bp, Artificial Sequence
  Synthetic: FXN 3 forward 9:69040959-69040986; As/LbCpf1
ccaccctccaggactctaagaaa

SEQ ID NO: 9211 - DNA, 24 bp, Artificial Sequence
  Synthetic: FXN 3 forward 9:69040959-69040987; As/LbCpf1
ccaccctccaggactctaagaaac

SEQ ID NO: 9212 - DNA, 25 bp, Artificial Sequence
  Synthetic: FXN 3 forward 9:69040959-69040988; As/LbCpf1
ccaccctccaggactctaagaaaca

SEQ ID NO: 9213 - DNA, 18 bp, Artificial Sequence
  Synthetic: FXN 3 forward 9:69040990-69041012; As/LbCpf1
tattgtttataagccacc

SEQ ID NO: 9214 - DNA, 19 bp, Artificial Sequence
  Synthetic: FXN 3 forward 9:69040990-69041013; As/LbCpf1
tattgtttataagccaccc

SEQ ID NO: 9215 - DNA, 20 bp, Artificial Sequence
  Synthetic: FXN 3 forward 9:69040990-69041014; As/LbCpf1
tattgtttataagccaccca

SEQ ID NO: 9216 - DNA, 21 bp, Artificial Sequence
  Synthetic: FXN 3 forward 9:69040990-69041015; As/LbCpf1
tattgtttataagccacccag

SEQ ID NO: 9217 - DNA, 22 bp, Artificial Sequence
  Synthetic: FXN 3 forward 9:69040990-69041016; As/LbCpf1
tattgtttataagccacccagt

SEQ ID NO: 9218 - DNA, 23 bp, Artificial Sequence
  Synthetic: FXN 3 forward 9:69040990-69041017; As/LbCpf1
tattgtttataagccacccagtg

SEQ ID NO: 9219 - DNA, 24 bp, Artificial Sequence
  Synthetic: FXN 3 forward 9:69040990-69041018; As/LbCpf1
tattgtttataagccacccagtgg

SEQ ID NO: 9220 - DNA, 25 bp, Artificial Sequence
  Synthetic: FXN 3 forward 9:69040990-69041019; As/LbCpf1
tattgtttataagccacccagtggc

SEQ ID NO: 9221 - DNA, 18 bp, Artificial Sequence
  Synthetic: FXN 3 forward 9:69040999-69041021; As/LbCpf1
taagccacccagtggctg

SEQ ID NO: 9222 - DNA, 19 bp, Artificial Sequence
  Synthetic: FXN 3 forward 9:69040999-69041022; As/LbCpf1
taagccacccagtggctgg

SEQ ID NO: 9223 - DNA, 20 bp, Artificial Sequence
  Synthetic: FXN 3 forward 9:69040999-69041023; As/LbCpf1
taagccacccagtggctggt

SEQ ID NO: 9224 - DNA, 21 bp, Artificial Sequence
  Synthetic: FXN 3 forward 9:69040999-69041024; As/LbCpf1
taagccacccagtggctggta

SEQ ID NO: 9225 - DNA, 22 bp, Artificial Sequence
  Synthetic: FXN 3 forward 9:69040999-69041025; As/LbCpf1
taagccacccagtggctggtat

SEQ ID NO: 9226 - DNA, 23 bp, Artificial Sequence
  Synthetic: FXN 3 forward 9:69040999-69041026; As/LbCpf1
taagccacccagtggctggtatt

SEQ ID NO: 9227 - DNA, 24 bp, Artificial Sequence
  Synthetic: FXN 3 forward 9:69040999-69041027; As/LbCpf1
taagccacccagtggctggtattt

SEQ ID NO: 9228 - DNA, 25 bp, Artificial Sequence
  Synthetic: FXN 3 forward 9:69040999-69041028; As/LbCpf1
taagccacccagtggctggtatttt

SEQ ID NO: 9229 - DNA, 18 bp, Artificial Sequence
  Synthetic: FXN 3 forward 9:69041024-69041046; As/LbCpf1
gttataacatcccagact

SEQ ID NO: 9230 - DNA, 19 bp, Artificial Sequence
  Synthetic: FXN 3 forward 9:69041024-69041047; As/LbCpf1
gttataacatcccagacta

SEQ ID NO: 9231 - DNA, 20 bp, Artificial Sequence
  Synthetic: FXN 3 forward 9:69041024-69041048; As/LbCpf1
gttataacatcccagactaa

SEQ ID NO: 9232 - DNA, 21 bp, Artificial Sequence
  Synthetic: FXN 3 forward 9:69041024-69041049; As/LbCpf1
gttataacatcccagactaag

SEQ ID NO: 9233 - DNA, 22 bp, Artificial Sequence
  Synthetic: FXN 3 forward 9:69041024-69041050; As/LbCpf1
gttataacatcccagactaaga

SEQ ID NO: 9234 - DNA, 23 bp, Artificial Sequence
  Synthetic: FXN 3 forward 9:69041024-69041051; As/LbCpf1
gttataacatcccagactaagac

SEQ ID NO: 9235 - DNA, 24 bp, Artificial Sequence
  Synthetic: FXN 3 forward 9:69041024-69041052; As/LbCpf1
gttataacatcccagactaagaca

SEQ ID NO: 9236 - DNA, 25 bp, Artificial Sequence
  Synthetic: FXN 3 forward 9:69041024-69041053; As/LbCpf1
gttataacatcccagactaagacaa

SEQ ID NO: 9237 - DNA, 18 bp, Artificial Sequence
  Synthetic: FXN 3 forward 9:69041025-69041047; As/LbCpf1
ttataacatcccagacta

SEQ ID NO: 9238 - DNA, 19 bp, Artificial Sequence
  Synthetic: FXN 3 forward 9:69041025-69041048; As/LbCpf1
ttataacatcccagactaa

SEQ ID NO: 9239 - DNA, 20 bp, Artificial Sequence
  Synthetic: FXN 3 forward 9:69041025-69041049; As/LbCpf1
ttataacatcccagactaag

SEQ ID NO: 9240 - DNA, 21 bp, Artificial Sequence
  Synthetic: FXN 3 forward 9:69041025-69041050; As/LbCpf1
ttataacatcccagactaaga

SEQ ID NO: 9241 - DNA, 22 bp, Artificial Sequence
  Synthetic: FXN 3 forward 9:69041025-69041051; As/LbCpf1
ttataacatcccagactaagac

SEQ ID NO: 9242 - DNA, 23 bp, Artificial Sequence
  Synthetic: FXN 3 forward 9:69041025-69041052; As/LbCpf1
ttataacatcccagactaagaca

SEQ ID NO: 9243 - DNA, 24 bp, Artificial Sequence
  Synthetic: FXN 3 forward 9:69041025-69041053; As/LbCpf1
ttataacatcccagactaagacaa

SEQ ID NO: 9244 - DNA, 25 bp, Artificial Sequence
  Synthetic: FXN 3 forward 9:69041025-69041054; As/LbCpf1
ttataacatcccagactaagacaaa

SEQ ID NO: 9245 - DNA, 18 bp, Artificial Sequence
  Synthetic: FXN 3 reverse 9:69041025-69041047; As/LbCpf1
tcttagtctgggatgtta

SEQ ID NO: 9246 - DNA, 19 bp, Artificial Sequence
  Synthetic: FXN 3 reverse 9:69041025-69041048; As/LbCpf1
tcttagtctgggatgttat

SEQ ID NO: 9247 - DNA, 20 bp, Artificial Sequence
  Synthetic: FXN 3 reverse 9:69041025-69041049; As/LbCpf1
tcttagtctgggatgttata

SEQ ID NO: 9248 - DNA, 21 bp, Artificial Sequence
  Synthetic: FXN 3 reverse 9:69041025-69041050; As/LbCpf1
tcttagtctgggatgttataa

SEQ ID NO: 9249 - DNA, 22 bp, Artificial Sequence
  Synthetic: FXN 3 reverse 9:69041025-69041051; As/LbCpf1
tcttagtctgggatgttataac

SEQ ID NO: 9250 - DNA, 23 bp, Artificial Sequence
  Synthetic: FXN 3 reverse 9:69041025-69041052; As/LbCpf1
tcttagtctgggatgttataaca

SEQ ID NO: 9251 - DNA, 24 bp, Artificial Sequence
  Synthetic: FXN 3 reverse 9:69041025-69041053; As/LbCpf1
tcttagtctgggatgttataacaa

SEQ ID NO: 9252 - DNA, 25 bp, Artificial Sequence
  Synthetic: FXN 3 reverse 9:69041025-69041054; As/LbCpf1
tcttagtctgggatgttataacaaa

SEQ ID NO: 9253 - DNA, 18 bp, Artificial Sequence
  Synthetic: FXN 3 reverse 9:69041032-69041054; As/LbCpf1
ttatttgtcttagtctgg

SEQ ID NO: 9254 - DNA, 19 bp, Artificial Sequence
  Synthetic: FXN 3 reverse 9:69041032-69041055; As/LbCpf1
ttatttgtcttagtctggg

SEQ ID NO: 9255 - DNA, 20 bp, Artificial Sequence
  Synthetic: FXN 3 reverse 9:69041032-69041056; As/LbCpf1
ttatttgtcttagtctggga

SEQ ID NO: 9256 - DNA, 21 bp, Artificial Sequence
  Synthetic: FXN 3 reverse 9:69041032-69041057; As/LbCpf1
ttatttgtcttagtctgggat

SEQ ID NO: 9257 - DNA, 22 bp, Artificial Sequence
  Synthetic: FXN 3 reverse 9:69041032-69041058; As/LbCpf1
ttatttgtcttagtctgggatg

SEQ ID NO: 9258 - DNA, 23 bp, Artificial Sequence
  Synthetic: FXN 3 reverse 9:69041032-69041059; As/LbCpf1
ttatttgtcttagtctgggatgt

SEQ ID NO: 9259 - DNA, 24 bp, Artificial Sequence
  Synthetic: FXN 3 reverse 9:69041032-69041060; As/LbCpf1
ttatttgtcttagtctgggatgtt

SEQ ID NO: 9260 - DNA, 25 bp, Artificial Sequence
  Synthetic: FXN 3 reverse 9:69041032-69041061; As/LbCpf1
ttatttgtcttagtctgggatgtta

SEQ ID NO: 9261 - DNA, 18 bp, Artificial Sequence
  Synthetic: FXN 3 forward 9:69041096-69041118; As/LbCpf1
tttgttcctctggaggcc

SEQ ID NO: 9262 - DNA, 19 bp, Artificial Sequence
  Synthetic: FXN 3 forward 9:69041096-69041119; As/LbCpf1
tttgttcctctggaggccc

SEQ ID NO: 9263 - DNA, 20 bp, Artificial Sequence
  Synthetic: FXN 3 forward 9:69041096-69041120; As/LbCpf1
tttgttcctctggaggccct

SEQ ID NO: 9264 - DNA, 21 bp, Artificial Sequence
  Synthetic: FXN 3 forward 9:69041096-69041121; As/LbCpf1
tttgttcctctggaggccctt

SEQ ID NO: 9265 - DNA, 22 bp, Artificial Sequence
  Synthetic: FXN 3 forward 9:69041096-69041122; As/LbCpf1
tttgttcctctggaggcccttg

SEQ ID NO: 9266 - DNA, 23 bp, Artificial Sequence
  Synthetic: FXN 3 forward 9:69041096-69041123; As/LbCpf1
tttgttcctctggaggcccttgt

SEQ ID NO: 9267 - DNA, 24 bp, Artificial Sequence
  Synthetic: FXN 3 forward 9:69041096-69041124; As/LbCpf1
tttgttcctctggaggcccttgtc

SEQ ID NO: 9268 - DNA, 25 bp, Artificial Sequence
  Synthetic: FXN 3 forward 9:69041096-69041125; As/LbCpf1
tttgttcctctggaggcccttgtct

SEQ ID NO: 9269 - DNA, 18 bp, Artificial Sequence
  Synthetic: FXN 3 forward 9:69041100-69041122; As/LbCpf1
ttcctctggaggcccttg

SEQ ID NO: 9270 - DNA, 19 bp, Artificial Sequence
  Synthetic: FXN 3 forward 9:69041100-69041123; As/LbCpf1
ttcctctggaggcccttgt

SEQ ID NO: 9271 - DNA, 20 bp, Artificial Sequence
  Synthetic: FXN 3 forward 9:69041100-69041124; As/LbCpf1
ttcctctggaggcccttgtc

SEQ ID NO: 9272 - DNA, 21 bp, Artificial Sequence
  Synthetic: FXN 3 forward 9:69041100-69041125; As/LbCpf1
ttcctctggaggcccttgtct

SEQ ID NO: 9273 - DNA, 22 bp, Artificial Sequence
  Synthetic: FXN 3 forward 9:69041100-69041126; As/LbCpf1
ttcctctggaggcccttgtctt

SEQ ID NO: 9274 - DNA, 23 bp, Artificial Sequence
  Synthetic: FXN 3 forward 9:69041100-69041127; As/LbCpf1
ttcctctggaggcccttgtcttc

SEQ ID NO: 9275 - DNA, 24 bp, Artificial Sequence
  Synthetic: FXN 3 forward 9:69041100-69041128; As/LbCpf1
ttcctctggaggcccttgtcttca

SEQ ID NO: 9276 - DNA, 25 bp, Artificial Sequence
  Synthetic: FXN 3 forward 9:69041100-69041129; As/LbCpf1
ttcctctggaggcccttgtcttcac

SEQ ID NO: 9277 - DNA, 18 bp, Artificial Sequence
  Synthetic: FXN 3 forward 9:69041193-69041215; As/LbCpf1
cttagagtttgacctcct

SEQ ID NO: 9278 - DNA, 19 bp, Artificial Sequence
  Synthetic: FXN 3 forward 9:69041193-69041216; As/LbCpf1
cttagagtttgacctcctc

SEQ ID NO: 9279 - DNA, 20 bp, Artificial Sequence
  Synthetic: FXN 3 forward 9:69041193-69041217; As/LbCpf1
cttagagtttgacctcctct

SEQ ID NO: 9280 - DNA, 21 bp, Artificial Sequence
  Synthetic: FXN 3 forward 9:69041193-69041218; As/LbCpf1
cttagagtttgacctcctctg

SEQ ID NO: 9281 - DNA, 22 bp, Artificial Sequence
  Synthetic: FXN 3 forward 9:69041193-69041219; As/LbCpf1
cttagagtttgacctcctctgt

SEQ ID NO: 9282 - DNA, 23 bp, Artificial Sequence
  Synthetic: FXN 3 forward 9:69041193-69041220; As/LbCpf1
cttagagtttgacctcctctgta

SEQ ID NO: 9283 - DNA, 24 bp, Artificial Sequence
  Synthetic: FXN 3 forward 9:69041193-69041221; As/LbCpf1
cttagagtttgacctcctctgtat

SEQ ID NO: 9284 - DNA, 25 bp, Artificial Sequence
  Synthetic: FXN 3 forward 9:69041193-69041222; As/LbCpf1
cttagagtttgacctcctctgtatc

SEQ ID NO: 9285 - DNA, 18 bp, Artificial Sequence
  Synthetic: FXN 3 forward 9:69041194-69041216; As/LbCpf1
ttagagtttgacctcctc

SEQ ID NO: 9286 - DNA, 19 bp, Artificial Sequence
  Synthetic: FXN 3 forward 9:69041194-69041217; As/LbCpf1
ttagagtttgacctcctct

SEQ ID NO: 9287 - DNA, 20 bp, Artificial Sequence
  Synthetic: FXN 3 forward 9:69041194-69041218; As/LbCpf1
ttagagtttgacctcctctg

SEQ ID NO: 9288 - DNA, 21 bp, Artificial Sequence
  Synthetic: FXN 3 forward 9:69041194-69041219; As/LbCpf1
ttagagtttgacctcctctgt

SEQ ID NO: 9289 - DNA, 22 bp, Artificial Sequence
  Synthetic: FXN 3 forward 9:69041194-69041220; As/LbCpf1
ttagagtttgacctcctctgta

SEQ ID NO: 9290 - DNA, 23 bp, Artificial Sequence
  Synthetic: FXN 3 forward 9:69041194-69041221; As/LbCpf1
ttagagtttgacctcctctgtat

SEQ ID NO: 9291 - DNA, 24 bp, Artificial Sequence
  Synthetic: FXN 3 forward 9:69041194-69041222; As/LbCpf1
ttagagtttgacctcctctgtatc

SEQ ID NO: 9292 - DNA, 25 bp, Artificial Sequence
  Synthetic: FXN 3 forward 9:69041194-69041223; As/LbCpf1
ttagagtttgacctcctctgtatct

SEQ ID NO: 9293 - DNA, 18 bp, Artificial Sequence
  Synthetic: FXN 3 forward 9:69041204-69041226; As/LbCpf1
acctcctctgtatctccc

SEQ ID NO: 9294 - DNA, 19 bp, Artificial Sequence
  Synthetic: FXN 3 forward 9:69041204-69041227; As/LbCpf1
acctcctctgtatctcccc

SEQ ID NO: 9295 - DNA, 20 bp, Artificial Sequence
  Synthetic: FXN 3 forward 9:69041204-69041228; As/LbCpf1
acctcctctgtatctccccc

SEQ ID NO: 9296 - DNA, 21 bp, Artificial Sequence
  Synthetic: FXN 3 forward 9:69041204-69041229; As/LbCpf1
acctcctctgtatctccccca

SEQ ID NO: 9297 - DNA, 22 bp, Artificial Sequence
  Synthetic: FXN 3 forward 9:69041204-69041230; As/LbCpf1
acctcctctgtatctcccccaa

SEQ ID NO: 9298 - DNA, 23 bp, Artificial Sequence
  Synthetic: FXN 3 forward 9:69041204-69041231; As/LbCpf1
acctcctctgtatctcccccaat

SEQ ID NO: 9299 - DNA, 24 bp, Artificial Sequence
  Synthetic: FXN 3 forward 9:69041204-69041232; As/LbCpf1
acctcctctgtatctcccccaatc

SEQ ID NO: 9300 - DNA, 25 bp, Artificial Sequence
  Synthetic: FXN 3 forward 9:69041204-69041233; As/LbCpf1
acctcctctgtatctcccccaatcc

SEQ ID NO: 9301 - DNA, 18 bp, Artificial Sequence
  Synthetic: FXN 3 forward 9:69041289-69041311; As/LbCpf1
gttcaacactgtttttgt

SEQ ID NO: 9302 - DNA, 19 bp, Artificial Sequence
  Synthetic: FXN 3 forward 9:69041289-69041312; As/LbCpf1
gttcaacactgtttttgtg

SEQ ID NO: 9303 - DNA, 20 bp, Artificial Sequence
  Synthetic: FXN 3 forward 9:69041289-69041313; As/LbCpf1
gttcaacactgtttttgtgc

SEQ ID NO: 9304 - DNA, 21 bp, Artificial Sequence
  Synthetic: FXN 3 forward 9:69041289-69041314; As/LbCpf1
gttcaacactgtttttgtgcg

SEQ ID NO: 9305 - DNA, 22 bp, Artificial Sequence
  Synthetic: FXN 3 forward 9:69041289-69041315; As/LbCpf1
gttcaacactgtttttgtgcgt

SEQ ID NO: 9306 - DNA, 23 bp, Artificial Sequence
  Synthetic: FXN 3 forward 9:69041289-69041316; As/LbCpf1
gttcaacactgtttttgtgcgtc

SEQ ID NO: 9307 - DNA, 24 bp, Artificial Sequence
  Synthetic: FXN 3 forward 9:69041289-69041317; As/LbCpf1
gttcaacactgtttttgtgcgtca

SEQ ID NO: 9308 - DNA, 25 bp, Artificial Sequence
  Synthetic: FXN 3 forward 9:69041289-69041318; As/LbCpf1
gttcaacactgtttttgtgcgtcat

SEQ ID NO: 9309 - DNA, 18 bp, Artificial Sequence
  Synthetic: FXN 3 forward 9:69041290-69041312; As/LbCpf1
ttcaacactgtttttgtg

SEQ ID NO: 9310 - DNA, 19 bp, Artificial Sequence
  Synthetic: FXN 3 forward 9:69041290-69041313; As/LbCpf1
ttcaacactgtttttgtgc

SEQ ID NO: 9311 - DNA, 20 bp, Artificial Sequence
  Synthetic: FXN 3 forward 9:69041290-69041314; As/LbCpf1
ttcaacactgtttttgtgcg

SEQ ID NO: 9312 - DNA, 21 bp, Artificial Sequence
  Synthetic: FXN 3 forward 9:69041290-69041315; As/LbCpf1
ttcaacactgtttttgtgcgt

SEQ ID NO: 9313 - DNA, 22 bp, Artificial Sequence
  Synthetic: FXN 3 forward 9:69041290-69041316; As/LbCpf1
ttcaacactgtttttgtgcgtc

SEQ ID NO: 9314 - DNA, 23 bp, Artificial Sequence
  Synthetic: FXN 3 forward 9:69041290-69041317; As/LbCpf1
ttcaacactgtttttgtgcgtca

SEQ ID NO: 9315 - DNA, 24 bp, Artificial Sequence
  Synthetic: FXN 3 forward 9:69041290-69041318; As/LbCpf1
ttcaacactgtttttgtgcgtcat

SEQ ID NO: 9316 - DNA, 25 bp, Artificial Sequence
  Synthetic: FXN 3 forward 9:69041290-69041319; As/LbCpf1
ttcaacactgtttttgtgcgtcatc

SEQ ID NO: 9317 - DNA, 18 bp, Artificial Sequence
  Synthetic: FXN 3 forward 9:69041304-69041326; As/LbCpf1
tgtgcgtcatctgcattg

SEQ ID NO: 9318 - DNA, 19 bp, Artificial Sequence
  Synthetic: FXN 3 forward 9:69041304-69041327; As/LbCpf1
tgtgcgtcatctgcattga

SEQ ID NO: 9319 - DNA, 20 bp, Artificial Sequence
  Synthetic: FXN 3 forward 9:69041304-69041328; As/LbCpf1
tgtgcgtcatctgcattgat

SEQ ID NO: 9320 - DNA, 21 bp, Artificial Sequence
  Synthetic: FXN 3 forward 9:69041304-69041329; As/LbCpf1
tgtgcgtcatctgcattgatg

SEQ ID NO: 9321 - DNA, 22 bp, Artificial Sequence
  Synthetic: FXN 3 forward 9:69041304-69041330; As/LbCpf1
tgtgcgtcatctgcattgatgc

SEQ ID NO: 9322 - DNA, 23 bp, Artificial Sequence
  Synthetic: FXN 3 forward 9:69041304-69041331; As/LbCpf1
tgtgcgtcatctgcattgatgca

SEQ ID NO: 9323 - DNA, 24 bp, Artificial Sequence
  Synthetic: FXN 3 forward 9:69041304-69041332; As/LbCpf1
tgtgcgtcatctgcattgatgcat

SEQ ID NO: 9324 - DNA, 25 bp, Artificial Sequence
  Synthetic: FXN 3 forward 9:69041304-69041333; As/LbCpf1
tgtgcgtcatctgcattgatgcatg

SEQ ID NO: 9325 - DNA, 18 bp, Artificial Sequence
  Synthetic: FXN 3 forward 9:69041305-69041327; As/LbCpf1
gtgcgtcatctgcattga

SEQ ID NO: 9326 - DNA, 19 bp, Artificial Sequence
  Synthetic: FXN 3 forward 9:69041305-69041328; As/LbCpf1
gtgcgtcatctgcattgat

SEQ ID NO: 9327 - DNA, 20 bp, Artificial Sequence
  Synthetic: FXN 3 forward 9:69041305-69041329; As/LbCpf1
gtgcgtcatctgcattgatg

SEQ ID NO: 9328 - DNA, 21 bp, Artificial Sequence
  Synthetic: FXN 3 forward 9:69041305-69041330; As/LbCpf1
gtgcgtcatctgcattgatgc

SEQ ID NO: 9329 - DNA, 22 bp, Artificial Sequence
  Synthetic: FXN 3 forward 9:69041305-69041331; As/LbCpf1
gtgcgtcatctgcattgatgca

SEQ ID NO: 9330 - DNA, 23 bp, Artificial Sequence
  Synthetic: FXN 3 forward 9:69041305-69041332; As/LbCpf1
gtgcgtcatctgcattgatgcat

SEQ ID NO: 9331 - DNA, 24 bp, Artificial Sequence
  Synthetic: FXN 3 forward 9:69041305-69041333; As/LbCpf1
gtgcgtcatctgcattgatgcatg

SEQ ID NO: 9332 - DNA, 25 bp, Artificial Sequence
  Synthetic: FXN 3 forward 9:69041305-69041334; As/LbCpf1
gtgcgtcatctgcattgatgcatgc

SEQ ID NO: 9333 - DNA, 18 bp, Artificial Sequence
  Synthetic: FXN 3 forward 9:69041306-69041328; As/LbCpf1
tgcgtcatctgcattgat

SEQ ID NO: 9334 - DNA, 19 bp, Artificial Sequence
  Synthetic: FXN 3 forward 9:69041306-69041329; As/LbCpf1
tgcgtcatctgcattgatg

SEQ ID NO: 9335 - DNA, 20 bp, Artificial Sequence
  Synthetic: FXN 3 forward 9:69041306-69041330; As/LbCpf1
tgcgtcatctgcattgatgc

SEQ ID NO: 9336 - DNA, 21 bp, Artificial Sequence
  Synthetic: FXN 3 forward 9:69041306-69041331; As/LbCpf1
tgcgtcatctgcattgatgca

SEQ ID NO: 9337 - DNA, 22 bp, Artificial Sequence
  Synthetic: FXN 3 forward 9:69041306-69041332; As/LbCpf1
tgcgtcatctgcattgatgcat

SEQ ID NO: 9338 - DNA, 23 bp, Artificial Sequence
  Synthetic: FXN 3 forward 9:69041306-69041333; As/LbCpf1
tgcgtcatctgcattgatgcatg

SEQ ID NO: 9339 - DNA, 24 bp, Artificial Sequence
  Synthetic: FXN 3 forward 9:69041306-69041334; As/LbCpf1
tgcgtcatctgcattgatgcatgc

SEQ ID NO: 9340 - DNA, 25 bp, Artificial Sequence
  Synthetic: FXN 3 forward 9:69041306-69041335; As/LbCpf1
tgcgtcatctgcattgatgcatgca

SEQ ID NO: 9341 - DNA, 18 bp, Artificial Sequence
  Synthetic: FXN 3 forward 9:69041342-69041364; As/LbCpf1
tttgttctcactgctgga

SEQ ID NO: 9342 - DNA, 19 bp, Artificial Sequence
  Synthetic: FXN 3 forward 9:69041342-69041365; As/LbCpf1
tttgttctcactgctggat

SEQ ID NO: 9343 - DNA, 20 bp, Artificial Sequence
  Synthetic: FXN 3 forward 9:69041342-69041366; As/LbCpf1
tttgttctcactgctggata

SEQ ID NO: 9344 - DNA, 21 bp, Artificial Sequence
  Synthetic: FXN 3 forward 9:69041342-69041367; As/LbCpf1
tttgttctcactgctggatag

SEQ ID NO: 9345 - DNA, 22 bp, Artificial Sequence
  Synthetic: FXN 3 forward 9:69041342-69041368; As/LbCpf1
tttgttctcactgctggatagt

SEQ ID NO: 9346 - DNA, 23 bp, Artificial Sequence
  Synthetic: FXN 3 forward 9:69041342-69041369; As/LbCpf1
tttgttctcactgctggatagta

SEQ ID NO: 9347 - DNA, 24 bp, Artificial Sequence
  Synthetic: FXN 3 forward 9:69041342-69041370; As/LbCpf1
tttgttctcactgctggatagtat

SEQ ID NO: 9348 - DNA, 25 bp, Artificial Sequence
  Synthetic: FXN 3 forward 9:69041342-69041371; As/LbCpf1
tttgttctcactgctggatagtatc

SEQ ID NO: 9349 - DNA, 18 bp, Artificial Sequence
  Synthetic: FXN 3 forward 9:69041346-69041368; As/LbCpf1
ttctcactgctggatagt

SEQ ID NO: 9350 - DNA, 19 bp, Artificial Sequence
  Synthetic: FXN 3 forward 9:69041346-69041369; As/LbCpf1
ttctcactgctggatagta

SEQ ID NO: 9351 - DNA, 20 bp, Artificial Sequence
  Synthetic: FXN 3 forward 9:69041346-69041370; As/LbCpf1
ttctcactgctggatagtat

SEQ ID NO: 9352 - DNA, 21 bp, Artificial Sequence
  Synthetic: FXN 3 forward 9:69041346-69041371; As/LbCpf1
ttctcactgctggatagtatc

SEQ ID NO: 9353 - DNA, 22 bp, Artificial Sequence
  Synthetic: FXN 3 forward 9:69041346-69041372; As/LbCpf1
ttctcactgctggatagtatct

SEQ ID NO: 9354 - DNA, 23 bp, Artificial Sequence
  Synthetic: FXN 3 forward 9:69041346-69041373; As/LbCpf1
ttctcactgctggatagtatctg

SEQ ID NO: 9355 - DNA, 24 bp, Artificial Sequence
  Synthetic: FXN 3 forward 9:69041346-69041374; As/LbCpf1
ttctcactgctggatagtatctgg

SEQ ID NO: 9356 - DNA, 25 bp, Artificial Sequence
  Synthetic: FXN 3 forward 9:69041346-69041375; As/LbCpf1
ttctcactgctggatagtatctggt

SEQ ID NO: 9357 - DNA, 18 bp, Artificial Sequence
  Synthetic: FXN 3 reverse 9:69041354-69041376; As/LbCpf1
cccaaccagatactatcc

SEQ ID NO: 9358 - DNA, 19 bp, Artificial Sequence
  Synthetic: FXN 3 reverse 9:69041354-69041377; As/LbCpf1
cccaaccagatactatcca

SEQ ID NO: 9359 - DNA, 20 bp, Artificial Sequence
  Synthetic: FXN 3 reverse 9:69041354-69041378; As/LbCpf1
cccaaccagatactatccag

SEQ ID NO: 9360 - DNA, 21 bp, Artificial Sequence
  Synthetic: FXN 3 reverse 9:69041354-69041379; As/LbCpf1
cccaaccagatactatccagc

SEQ ID NO: 9361 - DNA, 22 bp, Artificial Sequence
  Synthetic: FXN 3 reverse 9:69041354-69041380; As/LbCpf1
cccaaccagatactatccagca

SEQ ID NO: 9362 - DNA, 23 bp, Artificial Sequence
  Synthetic: FXN 3 reverse 9:69041354-69041381; As/LbCpf1
cccaaccagatactatccagcag

SEQ ID NO: 9363 - DNA, 24 bp, Artificial Sequence
  Synthetic: FXN 3 reverse 9:69041354-69041382; As/LbCpf1
cccaaccagatactatccagcagt

SEQ ID NO: 9364 - DNA, 25 bp, Artificial Sequence
  Synthetic: FXN 3 reverse 9:69041354-69041383; As/LbCpf1
cccaaccagatactatccagcagtg

SEQ ID NO: 9365 - DNA, 18 bp, Artificial Sequence
  Synthetic: FXN 3 reverse 9:69041370-69041392; As/LbCpf1
cagtgtgatatatttacc

SEQ ID NO: 9366 - DNA, 19 bp, Artificial Sequence
  Synthetic: FXN 3 reverse 9:69041370-69041393; As/LbCpf1
cagtgtgatatatttaccc

SEQ ID NO: 9367 - DNA, 20 bp, Artificial Sequence
  Synthetic: FXN 3 reverse 9:69041370-69041394; As/LbCpf1
cagtgtgatatatttaccca

SEQ ID NO: 9368 - DNA, 21 bp, Artificial Sequence
  Synthetic: FXN 3 reverse 9:69041370-69041395; As/LbCpf1
cagtgtgatatatttacccaa

SEQ ID NO: 9369 - DNA, 22 bp, Artificial Sequence
  Synthetic: FXN 3 reverse 9:69041370-69041396; As/LbCpf1
cagtgtgatatatttacccaac

SEQ ID NO: 9370 - DNA, 23 bp, Artificial Sequence
  Synthetic: FXN 3 reverse 9:69041370-69041397; As/LbCpf1
cagtgtgatatatttacccaacc

SEQ ID NO: 9371 - DNA, 24 bp, Artificial Sequence
  Synthetic: FXN 3 reverse 9:69041370-69041398; As/LbCpf1
cagtgtgatatatttacccaacca

SEQ ID NO: 9372 - DNA, 25 bp, Artificial Sequence
  Synthetic: FXN 3 reverse 9:69041370-69041399; As/LbCpf1
cagtgtgatatatttacccaaccag

SEQ ID NO: 9373 - DNA, 18 bp, Artificial Sequence
  Synthetic: FXN 3 forward 9:69041417-69041439; As/LbCpf1
ggtgacatttggttgatt

SEQ ID NO: 9374 - DNA, 19 bp, Artificial Sequence
  Synthetic: FXN 3 forward 9:69041417-69041440; As/LbCpf1
ggtgacatttggttgattg

SEQ ID NO: 9375 - DNA, 20 bp, Artificial Sequence
  Synthetic: FXN 3 forward 9:69041417-69041441; As/LbCpf1
ggtgacatttggttgattgc

SEQ ID NO: 9376 - DNA, 21 bp, Artificial Sequence
  Synthetic: FXN 3 forward 9:69041417-69041442; As/LbCpf1
ggtgacatttggttgattgca

SEQ ID NO: 9377 - DNA, 22 bp, Artificial Sequence
  Synthetic: FXN 3 forward 9:69041417-69041443; As/LbCpf1
ggtgacatttggttgattgcag

SEQ ID NO: 9378 - DNA, 23 bp, Artificial Sequence
  Synthetic: FXN 3 forward 9:69041417-69041444; As/LbCpf1
ggtgacatttggttgattgcagt

SEQ ID NO: 9379 - DNA, 24 bp, Artificial Sequence
  Synthetic: FXN 3 forward 9:69041417-69041445; As/LbCpf1
ggtgacatttggttgattgcagtg

SEQ ID NO: 9380 - DNA, 25 bp, Artificial Sequence
  Synthetic: FXN 3 forward 9:69041417-69041446; As/LbCpf1
ggtgacatttggttgattgcagtgt

SEQ ID NO: 9381 - DNA, 18 bp, Artificial Sequence
  Synthetic: FXN 3 forward 9:69041428-69041450; As/LbCpf1
gttgattgcagtgttctg

SEQ ID NO: 9382 - DNA, 19 bp, Artificial Sequence
  Synthetic: FXN 3 forward 9:69041428-69041451; As/LbCpf1
gttgattgcagtgttctgt

SEQ ID NO: 9383 - DNA, 20 bp, Artificial Sequence
  Synthetic: FXN 3 forward 9:69041428-69041452; As/LbCpf1
gttgattgcagtgttctgtt

SEQ ID NO: 9384 - DNA, 21 bp, Artificial Sequence
  Synthetic: FXN 3 forward 9:69041428-69041453; As/LbCpf1
gttgattgcagtgttctgttg

SEQ ID NO: 9385 - DNA, 22 bp, Artificial Sequence
  Synthetic: FXN 3 forward 9:69041428-69041454; As/LbCpf1
gttgattgcagtgttctgttgt

SEQ ID NO: 9386 - DNA, 23 bp, Artificial Sequence
  Synthetic: FXN 3 forward 9:69041428-69041455; As/LbCpf1
gttgattgcagtgttctgttgtt

SEQ ID NO: 9387 - DNA, 24 bp, Artificial Sequence
  Synthetic: FXN 3 forward 9:69041428-69041456; As/LbCpf1
gttgattgcagtgttctgttgtta

SEQ ID NO: 9388 - DNA, 25 bp, Artificial Sequence
  Synthetic: FXN 3 forward 9:69041428-69041457; As/LbCpf1
gttgattgcagtgttctgttgttac

SEQ ID NO: 9389 - DNA, 18 bp, Artificial Sequence
  Synthetic: FXN 3 forward 9:69041500-69041522; As/LbCpf1
aggtgaatttctcagaat

SEQ ID NO: 9390 - DNA, 19 bp, Artificial Sequence
  Synthetic: FXN 3 forward 9:69041500-69041523; As/LbCpf1
aggtgaatttctcagaatg

SEQ ID NO: 9391 - DNA, 20 bp, Artificial Sequence
  Synthetic: FXN 3 forward 9:69041500-69041524; As/LbCpf1
aggtgaatttctcagaatgg

SEQ ID NO: 9392 - DNA, 21 bp, Artificial Sequence
  Synthetic: FXN 3 forward 9:69041500-69041525; As/LbCpf1
aggtgaatttctcagaatgga

SEQ ID NO: 9393 - DNA, 22 bp, Artificial Sequence
  Synthetic: FXN 3 forward 9:69041500-69041526; As/LbCpf1
aggtgaatttctcagaatggaa

SEQ ID NO: 9394 - DNA, 23 bp, Artificial Sequence
  Synthetic: FXN 3 forward 9:69041500-69041527; As/LbCpf1
aggtgaatttctcagaatggaat

SEQ ID NO: 9395 - DNA, 24 bp, Artificial Sequence
  Synthetic: FXN 3 forward 9:69041500-69041528; As/LbCpf1
aggtgaatttctcagaatggaatt

SEQ ID NO: 9396 - DNA, 25 bp, Artificial Sequence
  Synthetic: FXN 3 forward 9:69041500-69041529; As/LbCpf1
aggtgaatttctcagaatggaattg

SEQ ID NO: 9397 - DNA, 18 bp, Artificial Sequence
  Synthetic: FXN 3 reverse 9:69041509-69041531; As/LbCpf1
cccagcaattccattctg

SEQ ID NO: 9398 - DNA, 19 bp, Artificial Sequence
  Synthetic: FXN 3 reverse 9:69041509-69041532; As/LbCpf1
cccagcaattccattctga

SEQ ID NO: 9399 - DNA, 20 bp, Artificial Sequence
  Synthetic: FXN 3 reverse 9:69041509-69041533; As/LbCpf1
cccagcaattccattctgag

SEQ ID NO: 9400 - DNA, 21 bp, Artificial Sequence
  Synthetic: FXN 3 reverse 9:69041509-69041534; As/LbCpf1
cccagcaattccattctgaga

SEQ ID NO: 9401 - DNA, 22 bp, Artificial Sequence
  Synthetic: FXN 3 reverse 9:69041509-69041535; As/LbCpf1
cccagcaattccattctgagaa

SEQ ID NO: 9402 - DNA, 23 bp, Artificial Sequence
  Synthetic: FXN 3 reverse 9:69041509-69041536; As/LbCpf1
cccagcaattccattctgagaaa

SEQ ID NO: 9403 - DNA, 24 bp, Artificial Sequence
  Synthetic: FXN 3 reverse 9:69041509-69041537; As/LbCpf1
cccagcaattccattctgagaaat

SEQ ID NO: 9404 - DNA, 25 bp, Artificial Sequence
  Synthetic: FXN 3 reverse 9:69041509-69041538; As/LbCpf1
cccagcaattccattctgagaaatt

SEQ ID NO: 9405 - DNA, 18 bp, Artificial Sequence
  Synthetic: FXN 3 forward 9:69041511-69041533; As/LbCpf1
tcagaatggaattgctgg

SEQ ID NO: 9406 - DNA, 19 bp, Artificial Sequence
  Synthetic: FXN 3 forward 9:69041511-69041534; As/LbCpf1
tcagaatggaattgctggg

SEQ ID NO: 9407 - DNA, 20 bp, Artificial Sequence
  Synthetic: FXN 3 forward 9:69041511-69041535; As/LbCpf1
tcagaatggaattgctgggc

SEQ ID NO: 9408 - DNA, 21 bp, Artificial Sequence
  Synthetic: FXN 3 forward 9:69041511-69041536; As/LbCpf1
tcagaatggaattgctgggca

SEQ ID NO: 9409 - DNA, 22 bp, Artificial Sequence
  Synthetic: FXN 3 forward 9:69041511-69041537; As/LbCpf1
tcagaatggaattgctgggcaa

SEQ ID NO: 9410 - DNA, 23 bp, Artificial Sequence
  Synthetic: FXN 3 forward 9:69041511-69041538; As/LbCpf1
tcagaatggaattgctgggcaaa

SEQ ID NO: 9411 - DNA, 24 bp, Artificial Sequence
  Synthetic: FXN 3 forward 9:69041511-69041539; As/LbCpf1
tcagaatggaattgctgggcaaag

SEQ ID NO: 9412 - DNA, 25 bp, Artificial Sequence
  Synthetic: FXN 3 forward 9:69041511-69041540; As/LbCpf1
tcagaatggaattgctgggcaaagg

SEQ ID NO: 9413 - DNA, 18 bp, Artificial Sequence
  Synthetic: FXN 3 reverse 9:69041543-69041565; As/LbCpf1
gcatcaaatgagttgatt

SEQ ID NO: 9414 - DNA, 19 bp, Artificial Sequence
  Synthetic: FXN 3 reverse 9:69041543-69041566; As/LbCpf1
gcatcaaatgagttgatta

SEQ ID NO: 9415 - DNA, 20 bp, Artificial Sequence
  Synthetic: FXN 3 reverse 9:69041543-69041567; As/LbCpf1
gcatcaaatgagttgattat

SEQ ID NO: 9416 - DNA, 21 bp, Artificial Sequence
  Synthetic: FXN 3 reverse 9:69041543-69041568; As/LbCpf1
gcatcaaatgagttgattatt

SEQ ID NO: 9417 - DNA, 22 bp, Artificial Sequence
  Synthetic: FXN 3 reverse 9:69041543-69041569; As/LbCpf1
gcatcaaatgagttgattattg

SEQ ID NO: 9418 - DNA, 23 bp, Artificial Sequence
  Synthetic: FXN 3 reverse 9:69041543-69041570; As/LbCpf1
gcatcaaatgagttgattattgg

SEQ ID NO: 9419 - DNA, 24 bp, Artificial Sequence
  Synthetic: FXN 3 reverse 9:69041543-69041571; As/LbCpf1
gcatcaaatgagttgattattggc

SEQ ID NO: 9420 - DNA, 25 bp, Artificial Sequence
  Synthetic: FXN 3 reverse 9:69041543-69041572; As/LbCpf1
gcatcaaatgagttgattattggct

SEQ ID NO: 9421 - DNA, 18 bp, Artificial Sequence
  Synthetic: FXN 3 reverse 9:69041544-69041566; As/LbCpf1
ggcatcaaatgagttgat

SEQ ID NO: 9422 - DNA, 19 bp, Artificial Sequence
  Synthetic: FXN 3 reverse 9:69041544-69041567; As/LbCpf1
ggcatcaaatgagttgatt

SEQ ID NO: 9423 - DNA, 20 bp, Artificial Sequence
  Synthetic: FXN 3 reverse 9:69041544-69041568; As/LbCpf1
ggcatcaaatgagttgatta

SEQ ID NO: 9424 - DNA, 21 bp, Artificial Sequence
  Synthetic: FXN 3 reverse 9:69041544-69041569; As/LbCpf1
ggcatcaaatgagttgattat

SEQ ID NO: 9425 - DNA, 22 bp, Artificial Sequence
  Synthetic: FXN 3 reverse 9:69041544-69041570; As/LbCpf1
ggcatcaaatgagttgattatt

SEQ ID NO: 9426 - DNA, 23 bp, Artificial Sequence
  Synthetic: FXN 3 reverse 9:69041544-69041571; As/LbCpf1
ggcatcaaatgagttgattattg

SEQ ID NO: 9427 - DNA, 24 bp, Artificial Sequence
  Synthetic: FXN 3 reverse 9:69041544-69041572; As/LbCpf1
ggcatcaaatgagttgattattgg

SEQ ID NO: 9428 - DNA, 25 bp, Artificial Sequence
  Synthetic: FXN 3 reverse 9:69041544-69041573; As/LbCpf1
ggcatcaaatgagttgattattggc

SEQ ID NO: 9429 - DNA, 18 bp, Artificial Sequence
  Synthetic: FXN 3 forward 9:69041560-69041582; As/LbCpf1
atgccaaaagtggtggtg

SEQ ID NO: 9430 - DNA, 19 bp, Artificial Sequence
  Synthetic: FXN 3 forward 9:69041560-69041583; As/LbCpf1
atgccaaaagtggtggtgc

SEQ ID NO: 9431 - DNA, 20 bp, Artificial Sequence
  Synthetic: FXN 3 forward 9:69041560-69041584; As/LbCpf1
atgccaaaagtggtggtgcc

SEQ ID NO: 9432 - DNA, 21 bp, Artificial Sequence
  Synthetic: FXN 3 forward 9:69041560-69041585; As/LbCpf1
atgccaaaagtggtggtgcca

SEQ ID NO: 9433 - DNA, 22 bp, Artificial Sequence
  Synthetic: FXN 3 forward 9:69041560-69041586; As/LbCpf1
atgccaaaagtggtggtgccag

SEQ ID NO: 9434 - DNA, 23 bp, Artificial Sequence
  Synthetic: FXN 3 forward 9:69041560-69041587; As/LbCpf1
atgccaaaagtggtggtgccagt

SEQ ID NO: 9435 - DNA, 24 bp, Artificial Sequence
  Synthetic: FXN 3 forward 9:69041560-69041588; As/LbCpf1
atgccaaaagtggtggtgccagtt

SEQ ID NO: 9436 - DNA, 25 bp, Artificial Sequence
  Synthetic: FXN 3 forward 9:69041560-69041589; As/LbCpf1
atgccaaaagtggtggtgccagttc

SEQ ID NO: 9437 - DNA, 18 bp, Artificial Sequence
  Synthetic: FXN 3 forward 9:69041638-69041660; As/LbCpf1
acagggccgggggtgaca

SEQ ID NO: 9438 - DNA, 19 bp, Artificial Sequence
  Synthetic: FXN 3 forward 9:69041638-69041661; As/LbCpf1
acagggccgggggtgacaa

SEQ ID NO: 9439 - DNA, 20 bp, Artificial Sequence
  Synthetic: FXN 3 forward 9:69041638-69041662; As/LbCpf1
acagggccgggggtgacaag

SEQ ID NO: 9440 - DNA, 21 bp, Artificial Sequence
  Synthetic: FXN 3 forward 9:69041638-69041663; As/LbCpf1
acagggccgggggtgacaagg

SEQ ID NO: 9441 - DNA, 22 bp, Artificial Sequence
  Synthetic: FXN 3 forward 9:69041638-69041664; As/LbCpf1
acagggccgggggtgacaaggg

SEQ ID NO: 9442 - DNA, 23 bp, Artificial Sequence
  Synthetic: FXN 3 forward 9:69041638-69041665; As/LbCpf1
acagggccgggggtgacaagggg

SEQ ID NO: 9443 - DNA, 24 bp, Artificial Sequence
  Synthetic: FXN 3 forward 9:69041638-69041666; As/LbCpf1
acagggccgggggtgacaagggga

SEQ ID NO: 9444 - DNA, 25 bp, Artificial Sequence
  Synthetic: FXN 3 forward 9:69041638-69041667; As/LbCpf1
acagggccgggggtgacaaggggac

SEQ ID NO: 9445 - DNA, 18 bp, Artificial Sequence
  Synthetic: FXN 3 reverse 9:69041652-69041674; As/LbCpf1
cttcccaggtgtcccctt

SEQ ID NO: 9446 - DNA, 19 bp, Artificial Sequence
  Synthetic: FXN 3 reverse 9:69041652-69041675; As/LbCpf1
cttcccaggtgtccccttg

SEQ ID NO: 9447 - DNA, 20 bp, Artificial Sequence
  Synthetic: FXN 3 reverse 9:69041652-69041676; As/LbCpf1
cttcccaggtgtccccttgt

SEQ ID NO: 9448 - DNA, 21 bp, Artificial Sequence
  Synthetic: FXN 3 reverse 9:69041652-69041677; As/LbCpf1
cttcccaggtgtccccttgtc

SEQ ID NO: 9449 - DNA, 22 bp, Artificial Sequence
  Synthetic: FXN 3 reverse 9:69041652-69041678; As/LbCpf1
cttcccaggtgtccccttgtca

SEQ ID NO: 9450 - DNA, 23 bp, Artificial Sequence
  Synthetic: FXN 3 reverse 9:69041652-69041679; As/LbCpf1
cttcccaggtgtccccttgtcac

SEQ ID NO: 9451 - DNA, 24 bp, Artificial Sequence
  Synthetic: FXN 3 reverse 9:69041652-69041680; As/LbCpf1
cttcccaggtgtccccttgtcacc

SEQ ID NO: 9452 - DNA, 25 bp, Artificial Sequence
  Synthetic: FXN 3 reverse 9:69041652-69041681; As/LbCpf1
cttcccaggtgtccccttgtcaccc

SEQ ID NO: 9453 - DNA, 18 bp, Artificial Sequence
  Synthetic: FXN 3 reverse 9:69041756-69041778; As/LbCpf1
tgggcctgaagtctcagg

SEQ ID NO: 9454 - DNA, 19 bp, Artificial Sequence
  Synthetic: FXN 3 reverse 9:69041756-69041779; As/LbCpf1
tgggcctgaagtctcaggc

SEQ ID NO: 9455 - DNA, 20 bp, Artificial Sequence
  Synthetic: FXN 3 reverse 9:69041756-69041780; As/LbCpf1
tgggcctgaagtctcaggcc

SEQ ID NO: 9456 - DNA, 21 bp, Artificial Sequence
  Synthetic: FXN 3 reverse 9:69041756-69041781; As/LbCpf1
tgggcctgaagtctcaggccc

SEQ ID NO: 9457 - DNA, 22 bp, Artificial Sequence
  Synthetic: FXN 3 reverse 9:69041756-69041782; As/LbCpf1
tgggcctgaagtctcaggccca

SEQ ID NO: 9458 - DNA, 23 bp, Artificial Sequence
  Synthetic: FXN 3 reverse 9:69041756-69041783; As/LbCpf1
tgggcctgaagtctcaggcccag

SEQ ID NO: 9459 - DNA, 24 bp, Artificial Sequence
  Synthetic: FXN 3 reverse 9:69041756-69041784; As/LbCpf1
tgggcctgaagtctcaggcccagt

SEQ ID NO: 9460 - DNA, 25 bp, Artificial Sequence
  Synthetic: FXN 3 reverse 9:69041756-69041785; As/LbCpf1
tgggcctgaagtctcaggcccagtg

SEQ ID NO: 9461 - DNA, 18 bp, Artificial Sequence
  Synthetic: FXN 3 reverse 9:69041776-69041798; As/LbCpf1
aggaaatattagatagtt

SEQ ID NO: 9462 - DNA, 19 bp, Artificial Sequence
  Synthetic: FXN 3 reverse 9:69041776-69041799; As/LbCpf1
aggaaatattagatagttt

SEQ ID NO: 9463 - DNA, 20 bp, Artificial Sequence
  Synthetic: FXN 3 reverse 9:69041776-69041800; As/LbCpf1
aggaaatattagatagtttc

SEQ ID NO: 9464 - DNA, 21 bp, Artificial Sequence
  Synthetic: FXN 3 reverse 9:69041776-69041801; As/LbCpf1
aggaaatattagatagtttct

SEQ ID NO: 9465 - DNA, 22 bp, Artificial Sequence
  Synthetic: FXN 3 reverse 9:69041776-69041802; As/LbCpf1
aggaaatattagatagtttctg

SEQ ID NO: 9466 - DNA, 23 bp, Artificial Sequence
  Synthetic: FXN 3 reverse 9:69041776-69041803; As/LbCpf1
aggaaatattagatagtttctgg

SEQ ID NO: 9467 - DNA, 24 bp, Artificial Sequence
  Synthetic: FXN 3 reverse 9:69041776-69041804; As/LbCpf1
aggaaatattagatagtttctggg

SEQ ID NO: 9468 - DNA, 25 bp, Artificial Sequence
  Synthetic: FXN 3 reverse 9:69041776-69041805; As/LbCpf1
aggaaatattagatagtttctgggc

SEQ ID NO: 9469 - DNA, 18 bp, Artificial Sequence
  Synthetic: FXN 3 forward 9:69041795-69041817; As/LbCpf1
ctcaaatgcatcccatga

SEQ ID NO: 9470 - DNA, 19 bp, Artificial Sequence
  Synthetic: FXN 3 forward 9:69041795-69041818; As/LbCpf1
ctcaaatgcatcccatgag

SEQ ID NO: 9471 - DNA, 20 bp, Artificial Sequence
  Synthetic: FXN 3 forward 9:69041795-69041819; As/LbCpf1
ctcaaatgcatcccatgagc

SEQ ID NO: 9472 - DNA, 21 bp, Artificial Sequence
  Synthetic: FXN 3 forward 9:69041795-69041820; As/LbCpf1
ctcaaatgcatcccatgagca

SEQ ID NO: 9473 - DNA, 22 bp, Artificial Sequence
  Synthetic: FXN 3 forward 9:69041795-69041821; As/LbCpf1
ctcaaatgcatcccatgagcag

SEQ ID NO: 9474 - DNA, 23 bp, Artificial Sequence
  Synthetic: FXN 3 forward 9:69041795-69041822; As/LbCpf1
ctcaaatgcatcccatgagcagg

SEQ ID NO: 9475 - DNA, 24 bp, Artificial Sequence
  Synthetic: FXN 3 forward 9:69041795-69041823; As/LbCpf1
ctcaaatgcatcccatgagcaggc

SEQ ID NO: 9476 - DNA, 25 bp, Artificial Sequence
  Synthetic: FXN 3 forward 9:69041795-69041824; As/LbCpf1
ctcaaatgcatcccatgagcaggca

SEQ ID NO: 9477 - DNA, 18 bp, Artificial Sequence
  Synthetic: FXN 3 reverse 9:69041918-69041940; As/LbCpf1
taaagccacctggcagcc

SEQ ID NO: 9478 - DNA, 19 bp, Artificial Sequence
  Synthetic: FXN 3 reverse 9:69041918-69041941; As/LbCpf1
taaagccacctggcagcca

SEQ ID NO: 9479 - DNA, 20 bp, Artificial Sequence
  Synthetic: FXN 3 reverse 9:69041918-69041942; As/LbCpf1
taaagccacctggcagccat

SEQ ID NO: 9480 - DNA, 21 bp, Artificial Sequence
  Synthetic: FXN 3 reverse 9:69041918-69041943; As/LbCpf1
taaagccacctggcagccatg

SEQ ID NO: 9481 - DNA, 22 bp, Artificial Sequence
  Synthetic: FXN 3 reverse 9:69041918-69041944; As/LbCpf1
taaagccacctggcagccatgt

SEQ ID NO: 9482 - DNA, 23 bp, Artificial Sequence
  Synthetic: FXN 3 reverse 9:69041918-69041945; As/LbCpf1
taaagccacctggcagccatgtc

SEQ ID NO: 9483 - DNA, 24 bp, Artificial Sequence
  Synthetic: FXN 3 reverse 9:69041918-69041946; As/LbCpf1
taaagccacctggcagccatgtct

SEQ ID NO: 9484 - DNA, 25 bp, Artificial Sequence
  Synthetic: FXN 3 reverse 9:69041918-69041947; As/LbCpf1
taaagccacctggcagccatgtctc

SEQ ID NO: 9485 - DNA, 18 bp, Artificial Sequence
  Synthetic: FXN 3 forward 9:69041939-69041961; As/LbCpf1
gaaagaacactcatcatg

SEQ ID NO: 9486 - DNA, 19 bp, Artificial Sequence
  Synthetic: FXN 3 forward 9:69041939-69041962; As/LbCpf1
gaaagaacactcatcatgg

SEQ ID NO: 9487 - DNA, 20 bp, Artificial Sequence
  Synthetic: FXN 3 forward 9:69041939-69041963; As/LbCpf1
gaaagaacactcatcatggc

SEQ ID NO: 9488 - DNA, 21 bp, Artificial Sequence
  Synthetic: FXN 3 forward 9:69041939-69041964; As/LbCpf1
gaaagaacactcatcatggcc

SEQ ID NO: 9489 - DNA, 22 bp, Artificial Sequence
  Synthetic: FXN 3 forward 9:69041939-69041965; As/LbCpf1
gaaagaacactcatcatggcca

SEQ ID NO: 9490 - DNA, 23 bp, Artificial Sequence
  Synthetic: FXN 3 forward 9:69041939-69041966; As/LbCpf1
gaaagaacactcatcatggccag

SEQ ID NO: 9491 - DNA, 24 bp, Artificial Sequence
  Synthetic: FXN 3 forward 9:69041939-69041967; As/LbCpf1
gaaagaacactcatcatggccagg

SEQ ID NO: 9492 - DNA, 25 bp, Artificial Sequence
  Synthetic: FXN 3 forward 9:69041939-69041968; As/LbCpf1
gaaagaacactcatcatggccaggt

SEQ ID NO: 9493 - DNA, 18 bp, Artificial Sequence
  Synthetic: FXN 3 forward 9:69041997-69042019; As/LbCpf1
ggaggccaaggtgggtgg

SEQ ID NO: 9494 - DNA, 19 bp, Artificial Sequence
  Synthetic: FXN 3 forward 9:69041997-69042020; As/LbCpf1
ggaggccaaggtgggtgga

SEQ ID NO: 9495 - DNA, 20 bp, Artificial Sequence
  Synthetic: FXN 3 forward 9:69041997-69042021; As/LbCpf1
ggaggccaaggtgggtggat

SEQ ID NO: 9496 - DNA, 21 bp, Artificial Sequence
  Synthetic: FXN 3 forward 9:69041997-69042022; As/LbCpf1
ggaggccaaggtgggtggatc

SEQ ID NO: 9497 - DNA, 22 bp, Artificial Sequence
  Synthetic: FXN 3 forward 9:69041997-69042023; As/LbCpf1
ggaggccaaggtgggtggatca

SEQ ID NO: 9498 - DNA, 23 bp, Artificial Sequence
  Synthetic: FXN 3 forward 9:69041997-69042024; As/LbCpf1
ggaggccaaggtgggtggatcat

SEQ ID NO: 9499 - DNA, 24 bp, Artificial Sequence
  Synthetic: FXN 3 forward 9:69041997-69042025; As/LbCpf1
ggaggccaaggtgggtggatcatg

SEQ ID NO: 9500 - DNA, 25 bp, Artificial Sequence
  Synthetic: FXN 3 forward 9:69041997-69042026; As/LbCpf1
ggaggccaaggtgggtggatcatga

SEQ ID NO: 9501 - DNA, 18 bp, Artificial Sequence
  Synthetic: FXN 3 reverse 9:69042034-69042056; As/LbCpf1
agcatgttggtcaggctg

SEQ ID NO: 9502 - DNA, 19 bp, Artificial Sequence
  Synthetic: FXN 3 reverse 9:69042034-69042057; As/LbCpf1
agcatgttggtcaggctgg

SEQ ID NO: 9503 - DNA, 20 bp, Artificial Sequence
  Synthetic: FXN 3 reverse 9:69042034-69042058; As/LbCpf1
agcatgttggtcaggctggt

SEQ ID NO: 9504 - DNA, 21 bp, Artificial Sequence
  Synthetic: FXN 3 reverse 9:69042034-69042059; As/LbCpf1
agcatgttggtcaggctggtc

SEQ ID NO: 9505 - DNA, 22 bp, Artificial Sequence
  Synthetic: FXN 3 reverse 9:69042034-69042060; As/LbCpf1
agcatgttggtcaggctggtct

SEQ ID NO: 9506 - DNA, 23 bp, Artificial Sequence
  Synthetic: FXN 3 reverse 9:69042034-69042061; As/LbCpf1
agcatgttggtcaggctggtctc

SEQ ID NO: 9507 - DNA, 24 bp, Artificial Sequence
  Synthetic: FXN 3 reverse 9:69042034-69042062; As/LbCpf1
agcatgttggtcaggctggtctca

SEQ ID NO: 9508 - DNA, 25 bp, Artificial Sequence
  Synthetic: FXN 3 reverse 9:69042034-69042063; As/LbCpf1
agcatgttggtcaggctggtctcac

SEQ ID NO: 9509 - DNA, 18 bp, Artificial Sequence
  Synthetic: FXN 3 reverse 9:69042049-69042071; As/LbCpf1
ggagagacaggtttcagc

SEQ ID NO: 9510 - DNA, 19 bp, Artificial Sequence
  Synthetic: FXN 3 reverse 9:69042049-69042072; As/LbCpf1
ggagagacaggtttcagca

SEQ ID NO: 9511 - DNA, 20 bp, Artificial Sequence
  Synthetic: FXN 3 reverse 9:69042049-69042073; As/LbCpf1
ggagagacaggtttcagcat

SEQ ID NO: 9512 - DNA, 21 bp, Artificial Sequence
  Synthetic: FXN 3 reverse 9:69042049-69042074; As/LbCpf1
ggagagacaggtttcagcatg

SEQ ID NO: 9513 - DNA, 22 bp, Artificial Sequence
  Synthetic: FXN 3 reverse 9:69042049-69042075; As/LbCpf1
ggagagacaggtttcagcatgt

SEQ ID NO: 9514 - DNA, 23 bp, Artificial Sequence
  Synthetic: FXN 3 reverse 9:69042049-69042076; As/LbCpf1
ggagagacaggtttcagcatgtt

SEQ ID NO: 9515 - DNA, 24 bp, Artificial Sequence
  Synthetic: FXN 3 reverse 9:69042049-69042077; As/LbCpf1
ggagagacaggtttcagcatgttg

SEQ ID NO: 9516 - DNA, 25 bp, Artificial Sequence
  Synthetic: FXN 3 reverse 9:69042049-69042078; As/LbCpf1
ggagagacaggtttcagcatgttgg

SEQ ID NO: 9517 - DNA, 18 bp, Artificial Sequence
  Synthetic: FXN 3 reverse 9:69042050-69042072; As/LbCpf1
aggagagacaggtttcag

SEQ ID NO: 9518 - DNA, 19 bp, Artificial Sequence
  Synthetic: FXN 3 reverse 9:69042050-69042073; As/LbCpf1
aggagagacaggtttcagc

SEQ ID NO: 9519 - DNA, 20 bp, Artificial Sequence
  Synthetic: FXN 3 reverse 9:69042050-69042074; As/LbCpf1
aggagagacaggtttcagca

SEQ ID NO: 9520 - DNA, 21 bp, Artificial Sequence
  Synthetic: FXN 3 reverse 9:69042050-69042075; As/LbCpf1
aggagagacaggtttcagcat

SEQ ID NO: 9521 - DNA, 22 bp, Artificial Sequence
  Synthetic: FXN 3 reverse 9:69042050-69042076; As/LbCpf1
aggagagacaggtttcagcatg

SEQ ID NO: 9522 - DNA, 23 bp, Artificial Sequence
  Synthetic: FXN 3 reverse 9:69042050-69042077; As/LbCpf1
aggagagacaggtttcagcatgt

SEQ ID NO: 9523 - DNA, 24 bp, Artificial Sequence
  Synthetic: FXN 3 reverse 9:69042050-69042078; As/LbCpf1
aggagagacaggtttcagcatgtt

SEQ ID NO: 9524 - DNA, 25 bp, Artificial Sequence
  Synthetic: FXN 3 reverse 9:69042050-69042079; As/LbCpf1
aggagagacaggtttcagcatgttg

SEQ ID NO: 9525 - DNA, 18 bp, Artificial Sequence
  Synthetic: FXN 3 reverse 9:69042051-69042073; As/LbCpf1
taggagagacaggtttca

SEQ ID NO: 9526 - DNA, 19 bp, Artificial Sequence
  Synthetic: FXN 3 reverse 9:69042051-69042074; As/LbCpf1
taggagagacaggtttcag

SEQ ID NO: 9527 - DNA, 20 bp, Artificial Sequence
  Synthetic: FXN 3 reverse 9:69042051-69042075; As/LbCpf1
taggagagacaggtttcagc

SEQ ID NO: 9528 - DNA, 21 bp, Artificial Sequence
  Synthetic: FXN 3 reverse 9:69042051-69042076; As/LbCpf1
taggagagacaggtttcagca

SEQ ID NO: 9529 - DNA, 22 bp, Artificial Sequence
  Synthetic: FXN 3 reverse 9:69042051-69042077; As/LbCpf1
taggagagacaggtttcagcat

SEQ ID NO: 9530 - DNA, 23 bp, Artificial Sequence
  Synthetic: FXN 3 reverse 9:69042051-69042078; As/LbCpf1
taggagagacaggtttcagcatg

SEQ ID NO: 9531 - DNA, 24 bp, Artificial Sequence
  Synthetic: FXN 3 reverse 9:69042051-69042079; As/LbCpf1
taggagagacaggtttcagcatgt

SEQ ID NO: 9532 - DNA, 25 bp, Artificial Sequence
  Synthetic: FXN 3 reverse 9:69042051-69042080; As/LbCpf1
taggagagacaggtttcagcatgtt

SEQ ID NO: 9533 - DNA, 18 bp, Artificial Sequence
  Synthetic: FXN 3 reverse 9:69042057-69042079; As/LbCpf1
tgtttttaggagagacag

SEQ ID NO: 9534 - DNA, 19 bp, Artificial Sequence
  Synthetic: FXN 3 reverse 9:69042057-69042080; As/LbCpf1
tgtttttaggagagacagg

SEQ ID NO: 9535 - DNA, 20 bp, Artificial Sequence
  Synthetic: FXN 3 reverse 9:69042057-69042081; As/LbCpf1
tgtttttaggagagacaggt

SEQ ID NO: 9536 - DNA, 21 bp, Artificial Sequence
  Synthetic: FXN 3 reverse 9:69042057-69042082; As/LbCpf1
tgtttttaggagagacaggtt

SEQ ID NO: 9537 - DNA, 22 bp, Artificial Sequence
  Synthetic: FXN 3 reverse 9:69042057-69042083; As/LbCpf1
tgtttttaggagagacaggttt

SEQ ID NO: 9538 - DNA, 23 bp, Artificial Sequence
  Synthetic: FXN 3 reverse 9:69042057-69042084; As/LbCpf1
tgtttttaggagagacaggtttc

SEQ ID NO: 9539 - DNA, 24 bp, Artificial Sequence
  Synthetic: FXN 3 reverse 9:69042057-69042085; As/LbCpf1
tgtttttaggagagacaggtttca

SEQ ID NO: 9540 - DNA, 25 bp, Artificial Sequence
  Synthetic: FXN 3 reverse 9:69042057-69042086; As/LbCpf1
tgtttttaggagagacaggtttcag

SEQ ID NO: 9541 - DNA, 18 bp, Artificial Sequence
  Synthetic: FXN 3 reverse 9:69042058-69042080; As/LbCpf1
gtgtttttaggagagaca

SEQ ID NO: 9542 - DNA, 19 bp, Artificial Sequence
  Synthetic: FXN 3 reverse 9:69042058-69042081; As/LbCpf1
gtgtttttaggagagacag

SEQ ID NO: 9543 - DNA, 20 bp, Artificial Sequence
  Synthetic: FXN 3 reverse 9:69042058-69042082; As/LbCpf1
gtgtttttaggagagacagg

SEQ ID NO: 9544 - DNA, 21 bp, Artificial Sequence
  Synthetic: FXN 3 reverse 9:69042058-69042083; As/LbCpf1
gtgtttttaggagagacaggt

SEQ ID NO: 9545 - DNA, 22 bp, Artificial Sequence
  Synthetic: FXN 3 reverse 9:69042058-69042084; As/LbCpf1
gtgtttttaggagagacaggtt

SEQ ID NO: 9546 - DNA, 23 bp, Artificial Sequence
  Synthetic: FXN 3 reverse 9:69042058-69042085; As/LbCpf1
gtgtttttaggagagacaggttt

SEQ ID NO: 9547 - DNA, 24 bp, Artificial Sequence
  Synthetic: FXN 3 reverse 9:69042058-69042086; As/LbCpf1
gtgtttttaggagagacaggtttc

SEQ ID NO: 9548 - DNA, 25 bp, Artificial Sequence
  Synthetic: FXN 3 reverse 9:69042058-69042087; As/LbCpf1
gtgtttttaggagagacaggtttca

SEQ ID NO: 9549 - DNA, 18 bp, Artificial Sequence
  Synthetic: FXN 3 reverse 9:69042059-69042081; As/LbCpf1
tgtgtttttaggagagac

SEQ ID NO: 9550 - DNA, 19 bp, Artificial Sequence
  Synthetic: FXN 3 reverse 9:69042059-69042082; As/LbCpf1
tgtgtttttaggagagaca

SEQ ID NO: 9551 - DNA, 20 bp, Artificial Sequence
  Synthetic: FXN 3 reverse 9:69042059-69042083; As/LbCpf1
tgtgtttttaggagagacag

SEQ ID NO: 9552 - DNA, 21 bp, Artificial Sequence
  Synthetic: FXN 3 reverse 9:69042059-69042084; As/LbCpf1
tgtgtttttaggagagacagg

SEQ ID NO: 9553 - DNA, 22 bp, Artificial Sequence
  Synthetic: FXN 3 reverse 9:69042059-69042085; As/LbCpf1
tgtgtttttaggagagacaggt

SEQ ID NO: 9554 - DNA, 23 bp, Artificial Sequence
  Synthetic: FXN 3 reverse 9:69042059-69042086; As/LbCpf1
tgtgtttttaggagagacaggtt

SEQ ID NO: 9555 - DNA, 24 bp, Artificial Sequence
  Synthetic: FXN 3 reverse 9:69042059-69042087; As/LbCpf1
tgtgtttttaggagagacaggttt

SEQ ID NO: 9556 - DNA, 25 bp, Artificial Sequence
  Synthetic: FXN 3 reverse 9:69042059-69042088; As/LbCpf1
tgtgtttttaggagagacaggtttc

SEQ ID NO: 9557 - DNA, 18 bp, Artificial Sequence
  Synthetic: FXN 3 reverse 9:69042213-69042235; As/LbCpf1
tgagacggagtcttgctc

SEQ ID NO: 9558 - DNA, 19 bp, Artificial Sequence
  Synthetic: FXN 3 reverse 9:69042213-69042236; As/LbCpf1
tgagacggagtcttgctct

SEQ ID NO: 9559 - DNA, 20 bp, Artificial Sequence
  Synthetic: FXN 3 reverse 9:69042213-69042237; As/LbCpf1
tgagacggagtcttgctctg

SEQ ID NO: 9560 - DNA, 21 bp, Artificial Sequence
  Synthetic: FXN 3 reverse 9:69042213-69042238; As/LbCpf1
tgagacggagtcttgctctgt

SEQ ID NO: 9561 - DNA, 22 bp, Artificial Sequence
  Synthetic: FXN 3 reverse 9:69042213-69042239; As/LbCpf1
tgagacggagtcttgctctgtt

SEQ ID NO: 9562 - DNA, 23 bp, Artificial Sequence
  Synthetic: FXN 3 reverse 9:69042213-69042240; As/LbCpf1
tgagacggagtcttgctctgttg

SEQ ID NO: 9563 - DNA, 24 bp, Artificial Sequence
  Synthetic: FXN 3 reverse 9:69042213-69042241; As/LbCpf1
tgagacggagtcttgctctgttgc

SEQ ID NO: 9564 - DNA, 25 bp, Artificial Sequence
  Synthetic: FXN 3 reverse 9:69042213-69042242; As/LbCpf1
tgagacggagtcttgctctgttgcc

SEQ ID NO: 9565 - DNA, 18 bp, Artificial Sequence
  Synthetic: FXN 3 reverse 9:69042214-69042236; As/LbCpf1
ctgagacggagtcttgct

SEQ ID NO: 9566 - DNA, 19 bp, Artificial Sequence
  Synthetic: FXN 3 reverse 9:69042214-69042237; As/LbCpf1
ctgagacggagtcttgctc

SEQ ID NO: 9567 - DNA, 20 bp, Artificial Sequence
  Synthetic: FXN 3 reverse 9:69042214-69042238; As/LbCpf1
ctgagacggagtcttgctct

SEQ ID NO: 9568 - DNA, 21 bp, Artificial Sequence
  Synthetic: FXN 3 reverse 9:69042214-69042239; As/LbCpf1
ctgagacggagtcttgctctg

SEQ ID NO: 9569 - DNA, 22 bp, Artificial Sequence
  Synthetic: FXN 3 reverse 9:69042214-69042240; As/LbCpf1
ctgagacggagtcttgctctgt

SEQ ID NO: 9570 - DNA, 23 bp, Artificial Sequence
  Synthetic: FXN 3 reverse 9:69042214-69042241; As/LbCpf1
ctgagacggagtcttgctctgtt

SEQ ID NO: 9571 - DNA, 24 bp, Artificial Sequence
  Synthetic: FXN 3 reverse 9:69042214-69042242; As/LbCpf1
ctgagacggagtcttgctctgttg

SEQ ID NO: 9572 - DNA, 25 bp, Artificial Sequence
  Synthetic: FXN 3 reverse 9:69042214-69042243; As/LbCpf1
ctgagacggagtcttgctctgttgc

SEQ ID NO: 9573 - DNA, 18 bp, Artificial Sequence
  Synthetic: FXN 3 reverse 9:69042215-69042237; As/LbCpf1
tctgagacggagtcttgc

SEQ ID NO: 9574 - DNA, 19 bp, Artificial Sequence
  Synthetic: FXN 3 reverse 9:69042215-69042238; As/LbCpf1
tctgagacggagtcttgct

SEQ ID NO: 9575 - DNA, 20 bp, Artificial Sequence
  Synthetic: FXN 3 reverse 9:69042215-69042239; As/LbCpf1
tctgagacggagtcttgctc

SEQ ID NO: 9576 - DNA, 21 bp, Artificial Sequence
  Synthetic: FXN 3 reverse 9:69042215-69042240; As/LbCpf1
tctgagacggagtcttgctct

SEQ ID NO: 9577 - DNA, 22 bp, Artificial Sequence
  Synthetic: FXN 3 reverse 9:69042215-69042241; As/LbCpf1
tctgagacggagtcttgctctg

SEQ ID NO: 9578 - DNA, 23 bp, Artificial Sequence
  Synthetic: FXN 3 reverse 9:69042215-69042242; As/LbCpf1
tctgagacggagtcttgctctgt

SEQ ID NO: 9579 - DNA, 24 bp, Artificial Sequence
  Synthetic: FXN 3 reverse 9:69042215-69042243; As/LbCpf1
tctgagacggagtcttgctctgtt

SEQ ID NO: 9580 - DNA, 25 bp, Artificial Sequence
  Synthetic: FXN 3 reverse 9:69042215-69042244; As/LbCpf1
tctgagacggagtcttgctctgttg

SEQ ID NO: 9581 - DNA, 18 bp, Artificial Sequence
  Synthetic: FXN 3 reverse 9:69042216-69042238; As/LbCpf1
ttctgagacggagtcttg

SEQ ID NO: 9582 - DNA, 19 bp, Artificial Sequence
  Synthetic: FXN 3 reverse 9:69042216-69042239; As/LbCpf1
ttctgagacggagtcttgc

SEQ ID NO: 9583 - DNA, 20 bp, Artificial Sequence
  Synthetic: FXN 3 reverse 9:69042216-69042240; As/LbCpf1
ttctgagacggagtcttgct

SEQ ID NO: 9584 - DNA, 21 bp, Artificial Sequence
  Synthetic: FXN 3 reverse 9:69042216-69042241; As/LbCpf1
ttctgagacggagtcttgctc

SEQ ID NO: 9585 - DNA, 22 bp, Artificial Sequence
  Synthetic: FXN 3 reverse 9:69042216-69042242; As/LbCpf1
ttctgagacggagtcttgctct

SEQ ID NO: 9586 - DNA, 23 bp, Artificial Sequence
  Synthetic: FXN 3 reverse 9:69042216-69042243; As/LbCpf1
ttctgagacggagtcttgctctg

SEQ ID NO: 9587 - DNA, 24 bp, Artificial Sequence
  Synthetic: FXN 3 reverse 9:69042216-69042244; As/LbCpf1
ttctgagacggagtcttgctctgt

SEQ ID NO: 9588 - DNA, 25 bp, Artificial Sequence
  Synthetic: FXN 3 reverse 9:69042216-69042245; As/LbCpf1
ttctgagacggagtcttgctctgtt

SEQ ID NO: 9589 - DNA, 18 bp, Artificial Sequence
  Synthetic: FXN 3 reverse 9:69042217-69042239; As/LbCpf1
tttctgagacggagtctt

SEQ ID NO: 9590 - DNA, 19 bp, Artificial Sequence
  Synthetic: FXN 3 reverse 9:69042217-69042240; As/LbCpf1
tttctgagacggagtcttg

SEQ ID NO: 9591 - DNA, 20 bp, Artificial Sequence
  Synthetic: FXN 3 reverse 9:69042217-69042241; As/LbCpf1
tttctgagacggagtcttgc

SEQ ID NO: 9592 - DNA, 21 bp, Artificial Sequence
  Synthetic: FXN 3 reverse 9:69042217-69042242; As/LbCpf1
tttctgagacggagtcttgct

SEQ ID NO: 9593 - DNA, 22 bp, Artificial Sequence
  Synthetic: FXN 3 reverse 9:69042217-69042243; As/LbCpf1
tttctgagacggagtcttgctc

SEQ ID NO: 9594 - DNA, 23 bp, Artificial Sequence
  Synthetic: FXN 3 reverse 9:69042217-69042244; As/LbCpf1
tttctgagacggagtcttgctct

SEQ ID NO: 9595 - DNA, 24 bp, Artificial Sequence
  Synthetic: FXN 3 reverse 9:69042217-69042245; As/LbCpf1
tttctgagacggagtcttgctctg

SEQ ID NO: 9596 - DNA, 25 bp, Artificial Sequence
  Synthetic: FXN 3 reverse 9:69042217-69042246; As/LbCpf1
tttctgagacggagtcttgctctgt

SEQ ID NO: 9597 - DNA, 18 bp, Artificial Sequence
  Synthetic: FXN 3 reverse 9:69042218-69042240; As/LbCpf1
ttttctgagacggagtct

SEQ ID NO: 9598 - DNA, 19 bp, Artificial Sequence
  Synthetic: FXN 3 reverse 9:69042218-69042241; As/LbCpf1
ttttctgagacggagtctt

SEQ ID NO: 9599 - DNA, 20 bp, Artificial Sequence
  Synthetic: FXN 3 reverse 9:69042218-69042242; As/LbCpf1
ttttctgagacggagtcttg

SEQ ID NO: 9600 - DNA, 21 bp, Artificial Sequence
  Synthetic: FXN 3 reverse 9:69042218-69042243; As/LbCpf1
ttttctgagacggagtcttgc

SEQ ID NO: 9601 - DNA, 22 bp, Artificial Sequence
  Synthetic: FXN 3 reverse 9:69042218-69042244; As/LbCpf1
ttttctgagacggagtcttgct

SEQ ID NO: 9602 - DNA, 23 bp, Artificial Sequence
  Synthetic: FXN 3 reverse 9:69042218-69042245; As/LbCpf1
ttttctgagacggagtcttgctc

SEQ ID NO: 9603 - DNA, 24 bp, Artificial Sequence
  Synthetic: FXN 3 reverse 9:69042218-69042246; As/LbCpf1
ttttctgagacggagtcttgctct

SEQ ID NO: 9604 - DNA, 25 bp, Artificial Sequence
  Synthetic: FXN 3 reverse 9:69042218-69042247; As/LbCpf1
ttttctgagacggagtcttgctctg

SEQ ID NO: 9605 - DNA, 18 bp, Artificial Sequence
  Synthetic: FXN 3 reverse 9:69042219-69042241; As/LbCpf1
tttttctgagacggagtc

SEQ ID NO: 9606 - DNA, 19 bp, Artificial Sequence
  Synthetic: FXN 3 reverse 9:69042219-69042242; As/LbCpf1
tttttctgagacggagtct

SEQ ID NO: 9607 - DNA, 20 bp, Artificial Sequence
  Synthetic: FXN 3 reverse 9:69042219-69042243; As/LbCpf1
tttttctgagacggagtctt

SEQ ID NO: 9608 - DNA, 21 bp, Artificial Sequence
  Synthetic: FXN 3 reverse 9:69042219-69042244; As/LbCpf1
tttttctgagacggagtcttg

SEQ ID NO: 9609 - DNA, 22 bp, Artificial Sequence
  Synthetic: FXN 3 reverse 9:69042219-69042245; As/LbCpf1
tttttctgagacggagtcttgc

SEQ ID NO: 9610 - DNA, 23 bp, Artificial Sequence
  Synthetic: FXN 3 reverse 9:69042219-69042246; As/LbCpf1
tttttctgagacggagtcttgct

SEQ ID NO: 9611 - DNA, 24 bp, Artificial Sequence
  Synthetic: FXN 3 reverse 9:69042219-69042247; As/LbCpf1
tttttctgagacggagtcttgctc

SEQ ID NO: 9612 - DNA, 25 bp, Artificial Sequence
  Synthetic: FXN 3 reverse 9:69042219-69042248; As/LbCpf1
tttttctgagacggagtcttgctct

SEQ ID NO: 9613 - DNA, 18 bp, Artificial Sequence
  Synthetic: FXN 3 reverse 9:69042220-69042242; As/LbCpf1
ttttttctgagacggagt

SEQ ID NO: 9614 - DNA, 19 bp, Artificial Sequence
  Synthetic: FXN 3 reverse 9:69042220-69042243; As/LbCpf1
ttttttctgagacggagtc

SEQ ID NO: 9615 - DNA, 20 bp, Artificial Sequence
  Synthetic: FXN 3 reverse 9:69042220-69042244; As/LbCpf1
ttttttctgagacggagtct

SEQ ID NO: 9616 - DNA, 21 bp, Artificial Sequence
  Synthetic: FXN 3 reverse 9:69042220-69042245; As/LbCpf1
ttttttctgagacggagtctt

SEQ ID NO: 9617 - DNA, 22 bp, Artificial Sequence
  Synthetic: FXN 3 reverse 9:69042220-69042246; As/LbCpf1
ttttttctgagacggagtcttg

SEQ ID NO: 9618 - DNA, 23 bp, Artificial Sequence
  Synthetic: FXN 3 reverse 9:69042220-69042247; As/LbCpf1
ttttttctgagacggagtcttgc

SEQ ID NO: 9619 - DNA, 24 bp, Artificial Sequence
  Synthetic: FXN 3 reverse 9:69042220-69042248; As/LbCpf1
ttttttctgagacggagtcttgct

SEQ ID NO: 9620 - DNA, 25 bp, Artificial Sequence
  Synthetic: FXN 3 reverse 9:69042220-69042249; As/LbCpf1
ttttttctgagacggagtcttgctc

SEQ ID NO: 9621 - DNA, 18 bp, Artificial Sequence
  Synthetic: FXN 3 reverse 9:69042221-69042243; As/LbCpf1
tttttttctgagacggag

SEQ ID NO: 9622 - DNA, 19 bp, Artificial Sequence
  Synthetic: FXN 3 reverse 9:69042221-69042244; As/LbCpf1
tttttttctgagacggagt

SEQ ID NO: 9623 - DNA, 20 bp, Artificial Sequence
  Synthetic: FXN 3 reverse 9:69042221-69042245; As/LbCpf1
tttttttctgagacggagtc

SEQ ID NO: 9624 - DNA, 21 bp, Artificial Sequence
  Synthetic: FXN 3 reverse 9:69042221-69042246; As/LbCpf1
tttttttctgagacggagtct

SEQ ID NO: 9625 - DNA, 22 bp, Artificial Sequence
  Synthetic: FXN 3 reverse 9:69042221-69042247; As/LbCpf1
tttttttctgagacggagtctt

SEQ ID NO: 9626 - DNA, 23 bp, Artificial Sequence
  Synthetic: FXN 3 reverse 9:69042221-69042248; As/LbCpf1
tttttttctgagacggagtcttg

SEQ ID NO: 9627 - DNA, 24 bp, Artificial Sequence
  Synthetic: FXN 3 reverse 9:69042221-69042249; As/LbCpf1
tttttttctgagacggagtcttgc

SEQ ID NO: 9628 - DNA, 25 bp, Artificial Sequence
  Synthetic: FXN 3 reverse 9:69042221-69042250; As/LbCpf1
tttttttctgagacggagtcttgct

SEQ ID NO: 9629 - DNA, 18 bp, Artificial Sequence
  Synthetic: FXN 3 reverse 9:69042222-69042244; As/LbCpf1
ttttttttctgagacgga

SEQ ID NO: 9630 - DNA, 19 bp, Artificial Sequence
  Synthetic: FXN 3 reverse 9:69042222-69042245; As/LbCpf1
ttttttttctgagacggag

SEQ ID NO: 9631 - DNA, 20 bp, Artificial Sequence
  Synthetic: FXN 3 reverse 9:69042222-69042246; As/LbCpf1
ttttttttctgagacggagt

SEQ ID NO: 9632 - DNA, 21 bp, Artificial Sequence
  Synthetic: FXN 3 reverse 9:69042222-69042247; As/LbCpf1
ttttttttctgagacggagtc

SEQ ID NO: 9633 - DNA, 22 bp, Artificial Sequence
  Synthetic: FXN 3 reverse 9:69042222-69042248; As/LbCpf1
ttttttttctgagacggagtct

SEQ ID NO: 9634 - DNA, 23 bp, Artificial Sequence
  Synthetic: FXN 3 reverse 9:69042222-69042249; As/LbCpf1
ttttttttctgagacggagtctt

SEQ ID NO: 9635 - DNA, 24 bp, Artificial Sequence
  Synthetic: FXN 3 reverse 9:69042222-69042250; As/LbCpf1
ttttttttctgagacggagtcttg

SEQ ID NO: 9636 - DNA, 25 bp, Artificial Sequence
  Synthetic: FXN 3 reverse 9:69042222-69042251; As/LbCpf1
ttttttttctgagacggagtcttgc

SEQ ID NO: 9637 - DNA, 18 bp, Artificial Sequence
  Synthetic: FXN 3 reverse 9:69042223-69042245; As/LbCpf1
tttttttttctgagacgg

SEQ ID NO: 9638 - DNA, 19 bp, Artificial Sequence
  Synthetic: FXN 3 reverse 9:69042223-69042246; As/LbCpf1
tttttttttctgagacgga

SEQ ID NO: 9639 - DNA, 20 bp, Artificial Sequence
  Synthetic: FXN 3 reverse 9:69042223-69042247; As/LbCpf1
tttttttttctgagacggag

SEQ ID NO: 9640 - DNA, 21 bp, Artificial Sequence
  Synthetic: FXN 3 reverse 9:69042223-69042248; As/LbCpf1
tttttttttctgagacggagt

SEQ ID NO: 9641 - DNA, 22 bp, Artificial Sequence
  Synthetic: FXN 3 reverse 9:69042223-69042249; As/LbCpf1
tttttttttctgagacggagtc

SEQ ID NO: 9642 - DNA, 23 bp, Artificial Sequence
  Synthetic: FXN 3 reverse 9:69042223-69042250; As/LbCpf1
tttttttttctgagacggagtct

SEQ ID NO: 9643 - DNA, 24 bp, Artificial Sequence
  Synthetic: FXN 3 reverse 9:69042223-69042251; As/LbCpf1
tttttttttctgagacggagtctt

SEQ ID NO: 9644 - DNA, 25 bp, Artificial Sequence
  Synthetic: FXN 3 reverse 9:69042223-69042252; As/LbCpf1
tttttttttctgagacggagtcttg

SEQ ID NO: 9645 - DNA, 18 bp, Artificial Sequence
  Synthetic: FXN 3 reverse 9:69042224-69042246; As/LbCpf1
ttttttttttctgagacg

SEQ ID NO: 9646 - DNA, 19 bp, Artificial Sequence
  Synthetic: FXN 3 reverse 9:69042224-69042247; As/LbCpf1
ttttttttttctgagacgg

SEQ ID NO: 9647 - DNA, 20 bp, Artificial Sequence
  Synthetic: FXN 3 reverse 9:69042224-69042248; As/LbCpf1
ttttttttttctgagacgga

SEQ ID NO: 9648 - DNA, 21 bp, Artificial Sequence
  Synthetic: FXN 3 reverse 9:69042224-69042249; As/LbCpf1
ttttttttttctgagacggag

SEQ ID NO: 9649 - DNA, 22 bp, Artificial Sequence
  Synthetic: FXN 3 reverse 9:69042224-69042250; As/LbCpf1
ttttttttttctgagacggagt

SEQ ID NO: 9650 - DNA, 23 bp, Artificial Sequence
  Synthetic: FXN 3 reverse 9:69042224-69042251; As/LbCpf1
ttttttttttctgagacggagtc

SEQ ID NO: 9651 - DNA, 24 bp, Artificial Sequence
  Synthetic: FXN 3 reverse 9:69042224-69042252; As/LbCpf1
ttttttttttctgagacggagtct

SEQ ID NO: 9652 - DNA, 25 bp, Artificial Sequence
  Synthetic: FXN 3 reverse 9:69042224-69042253; As/LbCpf1
ttttttttttctgagacggagtctt

SEQ ID NO: 9653 - DNA, 18 bp, Artificial Sequence
  Synthetic: FXN 3 reverse 9:69042225-69042247; As/LbCpf1
tttttttttttctgagac

SEQ ID NO: 9654 - DNA, 19 bp, Artificial Sequence
  Synthetic: FXN 3 reverse 9:69042225-69042248; As/LbCpf1
tttttttttttctgagacg

SEQ ID NO: 9655 - DNA, 20 bp, Artificial Sequence
  Synthetic: FXN 3 reverse 9:69042225-69042249; As/LbCpf1
tttttttttttctgagacgg

SEQ ID NO: 9656 - DNA, 21 bp, Artificial Sequence
  Synthetic: FXN 3 reverse 9:69042225-69042250; As/LbCpf1
tttttttttttctgagacgga

SEQ ID NO: 9657 - DNA, 22 bp, Artificial Sequence
  Synthetic: FXN 3 reverse 9:69042225-69042251; As/LbCpf1
tttttttttttctgagacggag

SEQ ID NO: 9658 - DNA, 23 bp, Artificial Sequence
  Synthetic: FXN 3 reverse 9:69042225-69042252; As/LbCpf1
tttttttttttctgagacggagt

SEQ ID NO: 9659 - DNA, 24 bp, Artificial Sequence
  Synthetic: FXN 3 reverse 9:69042225-69042253; As/LbCpf1
tttttttttttctgagacggagtc

SEQ ID NO: 9660 - DNA, 25 bp, Artificial Sequence
  Synthetic: FXN 3 reverse 9:69042225-69042254; As/LbCpf1
tttttttttttctgagacggagtct

SEQ ID NO: 9661 - DNA, 18 bp, Artificial Sequence
  Synthetic: FXN 3 forward 9:69042290-69042312; As/LbCpf1
cctccctcaagcagaaca

SEQ ID NO: 9662 - DNA, 19 bp, Artificial Sequence
  Synthetic: FXN 3 forward 9:69042290-69042313; As/LbCpf1
cctccctcaagcagaacag

SEQ ID NO: 9663 - DNA, 20 bp, Artificial Sequence
  Synthetic: FXN 3 forward 9:69042290-69042314; As/LbCpf1
cctccctcaagcagaacaga

SEQ ID NO: 9664 - DNA, 21 bp, Artificial Sequence
  Synthetic: FXN 3 forward 9:69042290-69042315; As/LbCpf1
cctccctcaagcagaacagaa

SEQ ID NO: 9665 - DNA, 22 bp, Artificial Sequence
  Synthetic: FXN 3 forward 9:69042290-69042316; As/LbCpf1
cctccctcaagcagaacagaat

SEQ ID NO: 9666 - DNA, 23 bp, Artificial Sequence
  Synthetic: FXN 3 forward 9:69042290-69042317; As/LbCpf1
cctccctcaagcagaacagaatg

SEQ ID NO: 9667 - DNA, 24 bp, Artificial Sequence
  Synthetic: FXN 3 forward 9:69042290-69042318; As/LbCpf1
cctccctcaagcagaacagaatgg

SEQ ID NO: 9668 - DNA, 25 bp, Artificial Sequence
  Synthetic: FXN 3 forward 9:69042290-69042319; As/LbCpf1
cctccctcaagcagaacagaatgga

SEQ ID NO: 9669 - DNA, 18 bp, Artificial Sequence
  Synthetic: FXN 3 forward 9:69042343-69042365; As/LbCpf1
cctctcacctagttctcc

SEQ ID NO: 9670 - DNA, 19 bp, Artificial Sequence
  Synthetic: FXN 3 forward 9:69042343-69042366; As/LbCpf1
cctctcacctagttctcca

SEQ ID NO: 9671 - DNA, 20 bp, Artificial Sequence
  Synthetic: FXN 3 forward 9:69042343-69042367; As/LbCpf1
cctctcacctagttctccat

SEQ ID NO: 9672 - DNA, 21 bp, Artificial Sequence
  Synthetic: FXN 3 forward 9:69042343-69042368; As/LbCpf1
cctctcacctagttctccatt

SEQ ID NO: 9673 - DNA, 22 bp, Artificial Sequence
  Synthetic: FXN 3 forward 9:69042343-69042369; As/LbCpf1
cctctcacctagttctccattc

SEQ ID NO: 9674 - DNA, 23 bp, Artificial Sequence
  Synthetic: FXN 3 forward 9:69042343-69042370; As/LbCpf1
cctctcacctagttctccattct

SEQ ID NO: 9675 - DNA, 24 bp, Artificial Sequence
  Synthetic: FXN 3 forward 9:69042343-69042371; As/LbCpf1
cctctcacctagttctccattctt

SEQ ID NO: 9676 - DNA, 25 bp, Artificial Sequence
  Synthetic: FXN 3 forward 9:69042343-69042372; As/LbCpf1
cctctcacctagttctccattcttt

SEQ ID NO: 9677 - DNA, 18 bp, Artificial Sequence
  Synthetic: FXN 3 forward 9:69042369-69042391; As/LbCpf1
gttcagagcctgaatacc

SEQ ID NO: 9678 - DNA, 19 bp, Artificial Sequence
  Synthetic: FXN 3 forward 9:69042369-69042392; As/LbCpf1
gttcagagcctgaataccc

SEQ ID NO: 9679 - DNA, 20 bp, Artificial Sequence
  Synthetic: FXN 3 forward 9:69042369-69042393; As/LbCpf1
gttcagagcctgaataccct

SEQ ID NO: 9680 - DNA, 21 bp, Artificial Sequence
  Synthetic: FXN 3 forward 9:69042369-69042394; As/LbCpf1
gttcagagcctgaataccctc

SEQ ID NO: 9681 - DNA, 22 bp, Artificial Sequence
  Synthetic: FXN 3 forward 9:69042369-69042395; As/LbCpf1
gttcagagcctgaataccctca

SEQ ID NO: 9682 - DNA, 23 bp, Artificial Sequence
  Synthetic: FXN 3 forward 9:69042369-69042396; As/LbCpf1
gttcagagcctgaataccctcag

SEQ ID NO: 9683 - DNA, 24 bp, Artificial Sequence
  Synthetic: FXN 3 forward 9:69042369-69042397; As/LbCpf1
gttcagagcctgaataccctcagg

SEQ ID NO: 9684 - DNA, 25 bp, Artificial Sequence
  Synthetic: FXN 3 forward 9:69042369-69042398; As/LbCpf1
gttcagagcctgaataccctcaggc

SEQ ID NO: 9685 - DNA, 18 bp, Artificial Sequence
  Synthetic: FXN 3 forward 9:69042370-69042392; As/LbCpf1
ttcagagcctgaataccc

SEQ ID NO: 9686 - DNA, 19 bp, Artificial Sequence
  Synthetic: FXN 3 forward 9:69042370-69042393; As/LbCpf1
ttcagagcctgaataccct

SEQ ID NO: 9687 - DNA, 20 bp, Artificial Sequence
  Synthetic: FXN 3 forward 9:69042370-69042394; As/LbCpf1
ttcagagcctgaataccctc

SEQ ID NO: 9688 - DNA, 21 bp, Artificial Sequence
  Synthetic: FXN 3 forward 9:69042370-69042395; As/LbCpf1
ttcagagcctgaataccctca

SEQ ID NO: 9689 - DNA, 22 bp, Artificial Sequence
  Synthetic: FXN 3 forward 9:69042370-69042396; As/LbCpf1
ttcagagcctgaataccctcag

SEQ ID NO: 9690 - DNA, 23 bp, Artificial Sequence
  Synthetic: FXN 3 forward 9:69042370-69042397; As/LbCpf1
ttcagagcctgaataccctcagg

SEQ ID NO: 9691 - DNA, 24 bp, Artificial Sequence
  Synthetic: FXN 3 forward 9:69042370-69042398; As/LbCpf1
ttcagagcctgaataccctcaggc

SEQ ID NO: 9692 - DNA, 25 bp, Artificial Sequence
  Synthetic: FXN 3 forward 9:69042370-69042399; As/LbCpf1
ttcagagcctgaataccctcaggct

SEQ ID NO: 9693 - DNA, 18 bp, Artificial Sequence
  Synthetic: FXN 3 forward 9:69042413-69042435; As/LbCpf1
tgttctcttgttttatgc

SEQ ID NO: 9694 - DNA, 19 bp, Artificial Sequence
  Synthetic: FXN 3 forward 9:69042413-69042436; As/LbCpf1
tgttctcttgttttatgct

SEQ ID NO: 9695 - DNA, 20 bp, Artificial Sequence
  Synthetic: FXN 3 forward 9:69042413-69042437; As/LbCpf1
tgttctcttgttttatgctc

SEQ ID NO: 9696 - DNA, 21 bp, Artificial Sequence
  Synthetic: FXN 3 forward 9:69042413-69042438; As/LbCpf1
tgttctcttgttttatgctca

SEQ ID NO: 9697 - DNA, 22 bp, Artificial Sequence
  Synthetic: FXN 3 forward 9:69042413-69042439; As/LbCpf1
tgttctcttgttttatgctcac

SEQ ID NO: 9698 - DNA, 23 bp, Artificial Sequence
  Synthetic: FXN 3 forward 9:69042413-69042440; As/LbCpf1
tgttctcttgttttatgctcacg

SEQ ID NO: 9699 - DNA, 24 bp, Artificial Sequence
  Synthetic: FXN 3 forward 9:69042413-69042441; As/LbCpf1
tgttctcttgttttatgctcacgg

SEQ ID NO: 9700 - DNA, 25 bp, Artificial Sequence
  Synthetic: FXN 3 forward 9:69042413-69042442; As/LbCpf1
tgttctcttgttttatgctcacggt

SEQ ID NO: 9701 - DNA, 18 bp, Artificial Sequence
  Synthetic: FXN 3 forward 9:69042427-69042449; As/LbCpf1
atgctcacggttgtgagg

SEQ ID NO: 9702 - DNA, 19 bp, Artificial Sequence
  Synthetic: FXN 3 forward 9:69042427-69042450; As/LbCpf1
atgctcacggttgtgaggt

SEQ ID NO: 9703 - DNA, 20 bp, Artificial Sequence
  Synthetic: FXN 3 forward 9:69042427-69042451; As/LbCpf1
atgctcacggttgtgaggtt

SEQ ID NO: 9704 - DNA, 21 bp, Artificial Sequence
  Synthetic: FXN 3 forward 9:69042427-69042452; As/LbCpf1
atgctcacggttgtgaggttt

SEQ ID NO: 9705 - DNA, 22 bp, Artificial Sequence
  Synthetic: FXN 3 forward 9:69042427-69042453; As/LbCpf1
atgctcacggttgtgaggtttg

SEQ ID NO: 9706 - DNA, 23 bp, Artificial Sequence
  Synthetic: FXN 3 forward 9:69042427-69042454; As/LbCpf1
atgctcacggttgtgaggtttgt

SEQ ID NO: 9707 - DNA, 24 bp, Artificial Sequence
  Synthetic: FXN 3 forward 9:69042427-69042455; As/LbCpf1
atgctcacggttgtgaggtttgtt

SEQ ID NO: 9708 - DNA, 25 bp, Artificial Sequence
  Synthetic: FXN 3 forward 9:69042427-69042456; As/LbCpf1
atgctcacggttgtgaggtttgttg

SEQ ID NO: 9709 - DNA, 18 bp, Artificial Sequence
  Synthetic: FXN 3 forward 9:69042428-69042450; As/LbCpf1
tgctcacggttgtgaggt

SEQ ID NO: 9710 - DNA, 19 bp, Artificial Sequence
  Synthetic: FXN 3 forward 9:69042428-69042451; As/LbCpf1
tgctcacggttgtgaggtt

SEQ ID NO: 9711 - DNA, 20 bp, Artificial Sequence
  Synthetic: FXN 3 forward 9:69042428-69042452; As/LbCpf1
tgctcacggttgtgaggttt

SEQ ID NO: 9712 - DNA, 21 bp, Artificial Sequence
  Synthetic: FXN 3 forward 9:69042428-69042453; As/LbCpf1
tgctcacggttgtgaggtttg

SEQ ID NO: 9713 - DNA, 22 bp, Artificial Sequence
  Synthetic: FXN 3 forward 9:69042428-69042454; As/LbCpf1
tgctcacggttgtgaggtttgt

SEQ ID NO: 9714 - DNA, 23 bp, Artificial Sequence
  Synthetic: FXN 3 forward 9:69042428-69042455; As/LbCpf1
tgctcacggttgtgaggtttgtt

SEQ ID NO: 9715 - DNA, 24 bp, Artificial Sequence
  Synthetic: FXN 3 forward 9:69042428-69042456; As/LbCpf1
tgctcacggttgtgaggtttgttg

SEQ ID NO: 9716 - DNA, 25 bp, Artificial Sequence
  Synthetic: FXN 3 forward 9:69042428-69042457; As/LbCpf1
tgctcacggttgtgaggtttgttgt

SEQ ID NO: 9717 - DNA, 18 bp, Artificial Sequence
  Synthetic: FXN 3 forward 9:69042449-69042471; As/LbCpf1
ttgtgagtaccacgatcc

SEQ ID NO: 9718 - DNA, 19 bp, Artificial Sequence
  Synthetic: FXN 3 forward 9:69042449-69042472; As/LbCpf1
ttgtgagtaccacgatccc

SEQ ID NO: 9719 - DNA, 20 bp, Artificial Sequence
  Synthetic: FXN 3 forward 9:69042449-69042473; As/LbCpf1
ttgtgagtaccacgatccct

SEQ ID NO: 9720 - DNA, 21 bp, Artificial Sequence
  Synthetic: FXN 3 forward 9:69042449-69042474; As/LbCpf1
ttgtgagtaccacgatccctt

SEQ ID NO: 9721 - DNA, 22 bp, Artificial Sequence
  Synthetic: FXN 3 forward 9:69042449-69042475; As/LbCpf1
ttgtgagtaccacgatcccttc

SEQ ID NO: 9722 - DNA, 23 bp, Artificial Sequence
  Synthetic: FXN 3 forward 9:69042449-69042476; As/LbCpf1
ttgtgagtaccacgatcccttcc

SEQ ID NO: 9723 - DNA, 24 bp, Artificial Sequence
  Synthetic: FXN 3 forward 9:69042449-69042477; As/LbCpf1
ttgtgagtaccacgatcccttcct

SEQ ID NO: 9724 - DNA, 25 bp, Artificial Sequence
  Synthetic: FXN 3 forward 9:69042449-69042478; As/LbCpf1
ttgtgagtaccacgatcccttcctt

SEQ ID NO: 9725 - DNA, 18 bp, Artificial Sequence
  Synthetic: FXN 3 reverse 9:69042461-69042483; As/LbCpf1
ctcctctgaaggaaggga

SEQ ID NO: 9726 - DNA, 19 bp, Artificial Sequence
  Synthetic: FXN 3 reverse 9:69042461-69042484; As/LbCpf1
ctcctctgaaggaagggat

SEQ ID NO: 9727 - DNA, 20 bp, Artificial Sequence
  Synthetic: FXN 3 reverse 9:69042461-69042485; As/LbCpf1
ctcctctgaaggaagggatc

SEQ ID NO: 9728 - DNA, 21 bp, Artificial Sequence
  Synthetic: FXN 3 reverse 9:69042461-69042486; As/LbCpf1
ctcctctgaaggaagggatcg

SEQ ID NO: 9729 - DNA, 22 bp, Artificial Sequence
  Synthetic: FXN 3 reverse 9:69042461-69042487; As/LbCpf1
ctcctctgaaggaagggatcgt

SEQ ID NO: 9730 - DNA, 23 bp, Artificial Sequence
  Synthetic: FXN 3 reverse 9:69042461-69042488; As/LbCpf1
ctcctctgaaggaagggatcgtg

SEQ ID NO: 9731 - DNA, 24 bp, Artificial Sequence
  Synthetic: FXN 3 reverse 9:69042461-69042489; As/LbCpf1
ctcctctgaaggaagggatcgtgg

SEQ ID NO: 9732 - DNA, 25 bp, Artificial Sequence
  Synthetic: FXN 3 reverse 9:69042461-69042490; As/LbCpf1
ctcctctgaaggaagggatcgtggt

SEQ ID NO: 9733 - DNA, 18 bp, Artificial Sequence
  Synthetic: FXN 3 reverse 9:69042474-69042496; As/LbCpf1
gaacctcagtttactcct

SEQ ID NO: 9734 - DNA, 19 bp, Artificial Sequence
  Synthetic: FXN 3 reverse 9:69042474-69042497; As/LbCpf1
gaacctcagtttactcctc

SEQ ID NO: 9735 - DNA, 20 bp, Artificial Sequence
  Synthetic: FXN 3 reverse 9:69042474-69042498; As/LbCpf1
gaacctcagtttactcctct

SEQ ID NO: 9736 - DNA, 21 bp, Artificial Sequence
  Synthetic: FXN 3 reverse 9:69042474-69042499; As/LbCpf1
gaacctcagtttactcctctg

SEQ ID NO: 9737 - DNA, 22 bp, Artificial Sequence
  Synthetic: FXN 3 reverse 9:69042474-69042500; As/LbCpf1
gaacctcagtttactcctctga

SEQ ID NO: 9738 - DNA, 23 bp, Artificial Sequence
  Synthetic: FXN 3 reverse 9:69042474-69042501; As/LbCpf1
gaacctcagtttactcctctgaa

SEQ ID NO: 9739 - DNA, 24 bp, Artificial Sequence
  Synthetic: FXN 3 reverse 9:69042474-69042502; As/LbCpf1
gaacctcagtttactcctctgaag

SEQ ID NO: 9740 - DNA, 25 bp, Artificial Sequence
  Synthetic: FXN 3 reverse 9:69042474-69042503; As/LbCpf1
gaacctcagtttactcctctgaagg

SEQ ID NO: 9741 - DNA, 18 bp, Artificial Sequence
  Synthetic: FXN 3 reverse 9:69042475-69042497; As/LbCpf1
ggaacctcagtttactcc

SEQ ID NO: 9742 - DNA, 19 bp, Artificial Sequence
  Synthetic: FXN 3 reverse 9:69042475-69042498; As/LbCpf1
ggaacctcagtttactcct

SEQ ID NO: 9743 - DNA, 20 bp, Artificial Sequence
  Synthetic: FXN 3 reverse 9:69042475-69042499; As/LbCpf1
ggaacctcagtttactcctc

SEQ ID NO: 9744 - DNA, 21 bp, Artificial Sequence
  Synthetic: FXN 3 reverse 9:69042475-69042500; As/LbCpf1
ggaacctcagtttactcctct

SEQ ID NO: 9745 - DNA, 22 bp, Artificial Sequence
  Synthetic: FXN 3 reverse 9:69042475-69042501; As/LbCpf1
ggaacctcagtttactcctctg

SEQ ID NO: 9746 - DNA, 23 bp, Artificial Sequence
  Synthetic: FXN 3 reverse 9:69042475-69042502; As/LbCpf1
ggaacctcagtttactcctctga

SEQ ID NO: 9747 - DNA, 24 bp, Artificial Sequence
  Synthetic: FXN 3 reverse 9:69042475-69042503; As/LbCpf1
ggaacctcagtttactcctctgaa

SEQ ID NO: 9748 - DNA, 25 bp, Artificial Sequence
  Synthetic: FXN 3 reverse 9:69042475-69042504; As/LbCpf1
ggaacctcagtttactcctctgaag

SEQ ID NO: 9749 - DNA, 18 bp, Artificial Sequence
  Synthetic: FXN 3 reverse 9:69042504-69042526; As/LbCpf1
atattcctcgggcaactg

SEQ ID NO: 9750 - DNA, 19 bp, Artificial Sequence
  Synthetic: FXN 3 reverse 9:69042504-69042527; As/LbCpf1
atattcctcgggcaactgc

SEQ ID NO: 9751 - DNA, 20 bp, Artificial Sequence
  Synthetic: FXN 3 reverse 9:69042504-69042528; As/LbCpf1
atattcctcgggcaactgct

SEQ ID NO: 9752 - DNA, 21 bp, Artificial Sequence
  Synthetic: FXN 3 reverse 9:69042504-69042529; As/LbCpf1
atattcctcgggcaactgcta

SEQ ID NO: 9753 - DNA, 22 bp, Artificial Sequence
  Synthetic: FXN 3 reverse 9:69042504-69042530; As/LbCpf1
atattcctcgggcaactgctaa

SEQ ID NO: 9754 - DNA, 23 bp, Artificial Sequence
  Synthetic: FXN 3 reverse 9:69042504-69042531; As/LbCpf1
atattcctcgggcaactgctaaa

SEQ ID NO: 9755 - DNA, 24 bp, Artificial Sequence
  Synthetic: FXN 3 reverse 9:69042504-69042532; As/LbCpf1
atattcctcgggcaactgctaaac

SEQ ID NO: 9756 - DNA, 25 bp, Artificial Sequence
  Synthetic: FXN 3 reverse 9:69042504-69042533; As/LbCpf1
atattcctcgggcaactgctaaacc

SEQ ID NO: 9757 - DNA, 18 bp, Artificial Sequence
  Synthetic: FXN 3 forward 9:69042506-69042528; As/LbCpf1
gcagttgcccgaggaata

SEQ ID NO: 9758 - DNA, 19 bp, Artificial Sequence
  Synthetic: FXN 3 forward 9:69042506-69042529; As/LbCpf1
gcagttgcccgaggaatat

SEQ ID NO: 9759 - DNA, 20 bp, Artificial Sequence
  Synthetic: FXN 3 forward 9:69042506-69042530; As/LbCpf1
gcagttgcccgaggaatatt

SEQ ID NO: 9760 - DNA, 21 bp, Artificial Sequence
  Synthetic: FXN 3 forward 9:69042506-69042531; As/LbCpf1
gcagttgcccgaggaatatta

SEQ ID NO: 9761 - DNA, 22 bp, Artificial Sequence
  Synthetic: FXN 3 forward 9:69042506-69042532; As/LbCpf1
gcagttgcccgaggaatattaa

SEQ ID NO: 9762 - DNA, 23 bp, Artificial Sequence
  Synthetic: FXN 3 forward 9:69042506-69042533; As/LbCpf1
gcagttgcccgaggaatattaaa

SEQ ID NO: 9763 - DNA, 24 bp, Artificial Sequence
  Synthetic: FXN 3 forward 9:69042506-69042534; As/LbCpf1
gcagttgcccgaggaatattaaat

SEQ ID NO: 9764 - DNA, 25 bp, Artificial Sequence
  Synthetic: FXN 3 forward 9:69042506-69042535; As/LbCpf1
gcagttgcccgaggaatattaaatt

SEQ ID NO: 9765 - DNA, 18 bp, Artificial Sequence
  Synthetic: FXN 3 reverse 9:69042512-69042534; As/LbCpf1
ccaatttaatattcctcg

SEQ ID NO: 9766 - DNA, 19 bp, Artificial Sequence
  Synthetic: FXN 3 reverse 9:69042512-69042535; As/LbCpf1
ccaatttaatattcctcgg

SEQ ID NO: 9767 - DNA, 20 bp, Artificial Sequence
  Synthetic: FXN 3 reverse 9:69042512-69042536; As/LbCpf1
ccaatttaatattcctcggg

SEQ ID NO: 9768 - DNA, 21 bp, Artificial Sequence
  Synthetic: FXN 3 reverse 9:69042512-69042537; As/LbCpf1
ccaatttaatattcctcgggc

SEQ ID NO: 9769 - DNA, 22 bp, Artificial Sequence
  Synthetic: FXN 3 reverse 9:69042512-69042538; As/LbCpf1
ccaatttaatattcctcgggca

SEQ ID NO: 9770 - DNA, 23 bp, Artificial Sequence
  Synthetic: FXN 3 reverse 9:69042512-69042539; As/LbCpf1
ccaatttaatattcctcgggcaa

SEQ ID NO: 9771 - DNA, 24 bp, Artificial Sequence
  Synthetic: FXN 3 reverse 9:69042512-69042540; As/LbCpf1
ccaatttaatattcctcgggcaac

SEQ ID NO: 9772 - DNA, 25 bp, Artificial Sequence
  Synthetic: FXN 3 reverse 9:69042512-69042541; As/LbCpf1
ccaatttaatattcctcgggcaact

SEQ ID NO: 9773 - DNA, 18 bp, Artificial Sequence
  Synthetic: FXN 3 reverse 9:69042513-69042535; As/LbCpf1
gccaatttaatattcctc

SEQ ID NO: 9774 - DNA, 19 bp, Artificial Sequence
  Synthetic: FXN 3 reverse 9:69042513-69042536; As/LbCpf1
gccaatttaatattcctcg

SEQ ID NO: 9775 - DNA, 20 bp, Artificial Sequence
  Synthetic: FXN 3 reverse 9:69042513-69042537; As/LbCpf1
gccaatttaatattcctcgg

SEQ ID NO: 9776 - DNA, 21 bp, Artificial Sequence
  Synthetic: FXN 3 reverse 9:69042513-69042538; As/LbCpf1
gccaatttaatattcctcggg

SEQ ID NO: 9777 - DNA, 22 bp, Artificial Sequence
  Synthetic: FXN 3 reverse 9:69042513-69042539; As/LbCpf1
gccaatttaatattcctcgggc

SEQ ID NO: 9778 - DNA, 23 bp, Artificial Sequence
  Synthetic: FXN 3 reverse 9:69042513-69042540; As/LbCpf1
gccaatttaatattcctcgggca

SEQ ID NO: 9779 - DNA, 24 bp, Artificial Sequence
  Synthetic: FXN 3 reverse 9:69042513-69042541; As/LbCpf1
gccaatttaatattcctcgggcaa

SEQ ID NO: 9780 - DNA, 25 bp, Artificial Sequence
  Synthetic: FXN 3 reverse 9:69042513-69042542; As/LbCpf1
gccaatttaatattcctcgggcaac

SEQ ID NO: 9781 - DNA, 18 bp, Artificial Sequence
  Synthetic: FXN 3 reverse 9:69042529-69042551; As/LbCpf1
tattctacctgcttttgc

SEQ ID NO: 9782 - DNA, 19 bp, Artificial Sequence
  Synthetic: FXN 3 reverse 9:69042529-69042552; As/LbCpf1
tattctacctgcttttgcc

SEQ ID NO: 9783 - DNA, 20 bp, Artificial Sequence
  Synthetic: FXN 3 reverse 9:69042529-69042553; As/LbCpf1
tattctacctgcttttgcca

SEQ ID NO: 9784 - DNA, 21 bp, Artificial Sequence
  Synthetic: FXN 3 reverse 9:69042529-69042554; As/LbCpf1
tattctacctgcttttgccaa

SEQ ID NO: 9785 - DNA, 22 bp, Artificial Sequence
  Synthetic: FXN 3 reverse 9:69042529-69042555; As/LbCpf1
tattctacctgcttttgccaat

SEQ ID NO: 9786 - DNA, 23 bp, Artificial Sequence
  Synthetic: FXN 3 reverse 9:69042529-69042556; As/LbCpf1
tattctacctgcttttgccaatt

SEQ ID NO: 9787 - DNA, 24 bp, Artificial Sequence
  Synthetic: FXN 3 reverse 9:69042529-69042557; As/LbCpf1
tattctacctgcttttgccaattt

SEQ ID NO: 9788 - DNA, 25 bp, Artificial Sequence
  Synthetic: FXN 3 reverse 9:69042529-69042558; As/LbCpf1
tattctacctgcttttgccaattta

SEQ ID NO: 9789 - DNA, 18 bp, Artificial Sequence
  Synthetic: FXN 3 forward 9:69042568-69042590; As/LbCpf1
gcaacggttcttttttat

SEQ ID NO: 9790 - DNA, 19 bp, Artificial Sequence
  Synthetic: FXN 3 forward 9:69042568-69042591; As/LbCpf1
gcaacggttcttttttatg

SEQ ID NO: 9791 - DNA, 20 bp, Artificial Sequence
  Synthetic: FXN 3 forward 9:69042568-69042592; As/LbCpf1
gcaacggttcttttttatga

SEQ ID NO: 9792 - DNA, 21 bp, Artificial Sequence
  Synthetic: FXN 3 forward 9:69042568-69042593; As/LbCpf1
gcaacggttcttttttatgat

SEQ ID NO: 9793 - DNA, 22 bp, Artificial Sequence
  Synthetic: FXN 3 forward 9:69042568-69042594; As/LbCpf1
gcaacggttcttttttatgatt

SEQ ID NO: 9794 - DNA, 23 bp, Artificial Sequence
  Synthetic: FXN 3 forward 9:69042568-69042595; As/LbCpf1
gcaacggttcttttttatgatta

SEQ ID NO: 9795 - DNA, 24 bp, Artificial Sequence
  Synthetic: FXN 3 forward 9:69042568-69042596; As/LbCpf1
gcaacggttcttttttatgattaa

SEQ ID NO: 9796 - DNA, 25 bp, Artificial Sequence
  Synthetic: FXN 3 forward 9:69042568-69042597; As/LbCpf1
gcaacggttcttttttatgattaaa

SEQ ID NO: 9797 - DNA, 18 bp, Artificial Sequence
  Synthetic: FXN 3 reverse 9:69042568-69042590; As/LbCpf1
atcataaaaaagaaccgt

SEQ ID NO: 9798 - DNA, 19 bp, Artificial Sequence
  Synthetic: FXN 3 reverse 9:69042568-69042591; As/LbCpf1
atcataaaaaagaaccgtt

SEQ ID NO: 9799 - DNA, 20 bp, Artificial Sequence
  Synthetic: FXN 3 reverse 9:69042568-69042592; As/LbCpf1
atcataaaaaagaaccgttg

SEQ ID NO: 9800 - DNA, 21 bp, Artificial Sequence
  Synthetic: FXN 3 reverse 9:69042568-69042593; As/LbCpf1
atcataaaaaagaaccgttgc

SEQ ID NO: 9801 - DNA, 22 bp, Artificial Sequence
  Synthetic: FXN 3 reverse 9:69042568-69042594; As/LbCpf1
atcataaaaaagaaccgttgcc

SEQ ID NO: 9802 - DNA, 23 bp, Artificial Sequence
  Synthetic: FXN 3 reverse 9:69042568-69042595; As/LbCpf1
atcataaaaaagaaccgttgcca

SEQ ID NO: 9803 - DNA, 24 bp, Artificial Sequence
  Synthetic: FXN 3 reverse 9:69042568-69042596; As/LbCpf1
atcataaaaaagaaccgttgccaa

SEQ ID NO: 9804 - DNA, 25 bp, Artificial Sequence
  Synthetic: FXN 3 reverse 9:69042568-69042597; As/LbCpf1
atcataaaaaagaaccgttgccaaa

SEQ ID NO: 9805 - DNA, 18 bp, Artificial Sequence
  Synthetic: FXN 3 reverse 9:69042569-69042591; As/LbCpf1
aatcataaaaaagaaccg

SEQ ID NO: 9806 - DNA, 19 bp, Artificial Sequence
  Synthetic: FXN 3 reverse 9:69042569-69042592; As/LbCpf1
aatcataaaaaagaaccgt

SEQ ID NO: 9807 - DNA, 20 bp, Artificial Sequence
  Synthetic: FXN 3 reverse 9:69042569-69042593; As/LbCpf1
aatcataaaaaagaaccgtt

SEQ ID NO: 9808 - DNA, 21 bp, Artificial Sequence
  Synthetic: FXN 3 reverse 9:69042569-69042594; As/LbCpf1
aatcataaaaaagaaccgttg

SEQ ID NO: 9809 - DNA, 22 bp, Artificial Sequence
  Synthetic: FXN 3 reverse 9:69042569-69042595; As/LbCpf1
aatcataaaaaagaaccgttgc

SEQ ID NO: 9810 - DNA, 23 bp, Artificial Sequence
  Synthetic: FXN 3 reverse 9:69042569-69042596; As/LbCpf1
aatcataaaaaagaaccgttgcc

SEQ ID NO: 9811 - DNA, 24 bp, Artificial Sequence
  Synthetic: FXN 3 reverse 9:69042569-69042597; As/LbCpf1
aatcataaaaaagaaccgttgcca

SEQ ID NO: 9812 - DNA, 25 bp, Artificial Sequence
  Synthetic: FXN 3 reverse 9:69042569-69042598; As/LbCpf1
aatcataaaaaagaaccgttgccaa

SEQ ID NO: 9813 - DNA, 18 bp, Artificial Sequence
  Synthetic: FXN 3 reverse 9:69042570-69042592; As/LbCpf1
taatcataaaaaagaacc

SEQ ID NO: 9814 - DNA, 19 bp, Artificial Sequence
  Synthetic: FXN 3 reverse 9:69042570-69042593; As/LbCpf1
taatcataaaaaagaaccg

SEQ ID NO: 9815 - DNA, 20 bp, Artificial Sequence
  Synthetic: FXN 3 reverse 9:69042570-69042594; As/LbCpf1
taatcataaaaaagaaccgt

SEQ ID NO: 9816 - DNA, 21 bp, Artificial Sequence
  Synthetic: FXN 3 reverse 9:69042570-69042595; As/LbCpf1
taatcataaaaaagaaccgtt

SEQ ID NO: 9817 - DNA, 22 bp, Artificial Sequence
  Synthetic: FXN 3 reverse 9:69042570-69042596; As/LbCpf1
taatcataaaaaagaaccgttg

SEQ ID NO: 9818 - DNA, 23 bp, Artificial Sequence
  Synthetic: FXN 3 reverse 9:69042570-69042597; As/LbCpf1
taatcataaaaaagaaccgttgc

SEQ ID NO: 9819 - DNA, 24 bp, Artificial Sequence
  Synthetic: FXN 3 reverse 9:69042570-69042598; As/LbCpf1
taatcataaaaaagaaccgttgcc

SEQ ID NO: 9820 - DNA, 25 bp, Artificial Sequence
  Synthetic: FXN 3 reverse 9:69042570-69042599; As/LbCpf1
taatcataaaaaagaaccgttgcca

SEQ ID NO: 9821 - DNA, 18 bp, Artificial Sequence
  Synthetic: FXN 3 forward 9:69042582-69042604; As/LbCpf1
ttatgattaaaaacagcc

SEQ ID NO: 9822 - DNA, 19 bp, Artificial Sequence
  Synthetic: FXN 3 forward 9:69042582-69042605; As/LbCpf1
ttatgattaaaaacagccg

SEQ ID NO: 9823 - DNA, 20 bp, Artificial Sequence
  Synthetic: FXN 3 forward 9:69042582-69042606; As/LbCpf1
ttatgattaaaaacagccga

SEQ ID NO: 9824 - DNA, 21 bp, Artificial Sequence
  Synthetic: FXN 3 forward 9:69042582-69042607; As/LbCpf1
ttatgattaaaaacagccgaa

SEQ ID NO: 9825 - DNA, 22 bp, Artificial Sequence
  Synthetic: FXN 3 forward 9:69042582-69042608; As/LbCpf1
ttatgattaaaaacagccgaag

SEQ ID NO: 9826 - DNA, 23 bp, Artificial Sequence
  Synthetic: FXN 3 forward 9:69042582-69042609; As/LbCpf1
ttatgattaaaaacagccgaaga

SEQ ID NO: 9827 - DNA, 24 bp, Artificial Sequence
  Synthetic: FXN 3 forward 9:69042582-69042610; As/LbCpf1
ttatgattaaaaacagccgaagaa

SEQ ID NO: 9828 - DNA, 25 bp, Artificial Sequence
  Synthetic: FXN 3 forward 9:69042582-69042611; As/LbCpf1
ttatgattaaaaacagccgaagaaa

SEQ ID NO: 9829 - DNA, 18 bp, Artificial Sequence
  Synthetic: FXN 3 reverse 9:69042582-69042604; As/LbCpf1
ttcggctgtttttaatca

SEQ ID NO: 9830 - DNA, 19 bp, Artificial Sequence
  Synthetic: FXN 3 reverse 9:69042582-69042605; As/LbCpf1
ttcggctgtttttaatcat

SEQ ID NO: 9831 - DNA, 20 bp, Artificial Sequence
  Synthetic: FXN 3 reverse 9:69042582-69042606; As/LbCpf1
ttcggctgtttttaatcata

SEQ ID NO: 9832 - DNA, 21 bp, Artificial Sequence
  Synthetic: FXN 3 reverse 9:69042582-69042607; As/LbCpf1
ttcggctgtttttaatcataa

SEQ ID NO: 9833 - DNA, 22 bp, Artificial Sequence
  Synthetic: FXN 3 reverse 9:69042582-69042608; As/LbCpf1
ttcggctgtttttaatcataaa

SEQ ID NO: 9834 - DNA, 23 bp, Artificial Sequence
  Synthetic: FXN 3 reverse 9:69042582-69042609; As/LbCpf1
ttcggctgtttttaatcataaaa

SEQ ID NO: 9835 - DNA, 24 bp, Artificial Sequence
  Synthetic: FXN 3 reverse 9:69042582-69042610; As/LbCpf1
ttcggctgtttttaatcataaaaa

SEQ ID NO: 9836 - DNA, 25 bp, Artificial Sequence
  Synthetic: FXN 3 reverse 9:69042582-69042611; As/LbCpf1
ttcggctgtttttaatcataaaaaa

SEQ ID NO: 9837 - DNA, 18 bp, Artificial Sequence
  Synthetic: FXN 3 forward 9:69042583-69042605; As/LbCpf1
tatgattaaaaacagccg

SEQ ID NO: 9838 - DNA, 19 bp, Artificial Sequence
  Synthetic: FXN 3 forward 9:69042583-69042606; As/LbCpf1
tatgattaaaaacagccga

SEQ ID NO: 9839 - DNA, 20 bp, Artificial Sequence
  Synthetic: FXN 3 forward 9:69042583-69042607; As/LbCpf1
tatgattaaaaacagccgaa

SEQ ID NO: 9840 - DNA, 21 bp, Artificial Sequence
  Synthetic: FXN 3 forward 9:69042583-69042608; As/LbCpf1
tatgattaaaaacagccgaag

SEQ ID NO: 9841 - DNA, 22 bp, Artificial Sequence
  Synthetic: FXN 3 forward 9:69042583-69042609; As/LbCpf1
tatgattaaaaacagccgaaga

SEQ ID NO: 9842 - DNA, 23 bp, Artificial Sequence
  Synthetic: FXN 3 forward 9:69042583-69042610; As/LbCpf1
tatgattaaaaacagccgaagaa

SEQ ID NO: 9843 - DNA, 24 bp, Artificial Sequence
  Synthetic: FXN 3 forward 9:69042583-69042611; As/LbCpf1
tatgattaaaaacagccgaagaaa

SEQ ID NO: 9844 - DNA, 25 bp, Artificial Sequence
  Synthetic: FXN 3 forward 9:69042583-69042612; As/LbCpf1
tatgattaaaaacagccgaagaaag

SEQ ID NO: 9845 - DNA, 18 bp, Artificial Sequence
  Synthetic: FXN 3 forward 9:69042584-69042606; As/LbCpf1
atgattaaaaacagccga

SEQ ID NO: 9846 - DNA, 19 bp, Artificial Sequence
  Synthetic: FXN 3 forward 9:69042584-69042607; As/LbCpf1
atgattaaaaacagccgaa

SEQ ID NO: 9847 - DNA, 20 bp, Artificial Sequence
  Synthetic: FXN 3 forward 9:69042584-69042608; As/LbCpf1
atgattaaaaacagccgaag

SEQ ID NO: 9848 - DNA, 21 bp, Artificial Sequence
  Synthetic: FXN 3 forward 9:69042584-69042609; As/LbCpf1
atgattaaaaacagccgaaga

SEQ ID NO: 9849 - DNA, 22 bp, Artificial Sequence
  Synthetic: FXN 3 forward 9:69042584-69042610; As/LbCpf1
atgattaaaaacagccgaagaa

SEQ ID NO: 9850 - DNA, 23 bp, Artificial Sequence
  Synthetic: FXN 3 forward 9:69042584-69042611; As/LbCpf1
atgattaaaaacagccgaagaaa

SEQ ID NO: 9851 - DNA, 24 bp, Artificial Sequence
  Synthetic: FXN 3 forward 9:69042584-69042612; As/LbCpf1
atgattaaaaacagccgaagaaag

SEQ ID NO: 9852 - DNA, 25 bp, Artificial Sequence
  Synthetic: FXN 3 forward 9:69042584-69042613; As/LbCpf1
atgattaaaaacagccgaagaaaga

SEQ ID NO: 9853 - DNA, 18 bp, Artificial Sequence
  Synthetic: FXN 3 forward 9:69042585-69042607; As/LbCpf1
tgattaaaaacagccgaa

SEQ ID NO: 9854 - DNA, 19 bp, Artificial Sequence
  Synthetic: FXN 3 forward 9:69042585-69042608; As/LbCpf1
tgattaaaaacagccgaag

SEQ ID NO: 9855 - DNA, 20 bp, Artificial Sequence
  Synthetic: FXN 3 forward 9:69042585-69042609; As/LbCpf1
tgattaaaaacagccgaaga

SEQ ID NO: 9856 - DNA, 21 bp, Artificial Sequence
  Synthetic: FXN 3 forward 9:69042585-69042610; As/LbCpf1
tgattaaaaacagccgaagaa

SEQ ID NO: 9857 - DNA, 22 bp, Artificial Sequence
  Synthetic: FXN 3 forward 9:69042585-69042611; As/LbCpf1
tgattaaaaacagccgaagaaa

SEQ ID NO: 9858 - DNA, 23 bp, Artificial Sequence
  Synthetic: FXN 3 forward 9:69042585-69042612; As/LbCpf1
tgattaaaaacagccgaagaaag

SEQ ID NO: 9859 - DNA, 24 bp, Artificial Sequence
  Synthetic: FXN 3 forward 9:69042585-69042613; As/LbCpf1
tgattaaaaacagccgaagaaaga

SEQ ID NO: 9860 - DNA, 25 bp, Artificial Sequence
  Synthetic: FXN 3 forward 9:69042585-69042614; As/LbCpf1
tgattaaaaacagccgaagaaagac

SEQ ID NO: 9861 - DNA, 18 bp, Artificial Sequence
  Synthetic: FXN 3 forward 9:69042627-69042649; As/LbCpf1
aaggagtaactgcatttg

SEQ ID NO: 9862 - DNA, 19 bp, Artificial Sequence
  Synthetic: FXN 3 forward 9:69042627-69042650; As/LbCpf1
aaggagtaactgcatttga

SEQ ID NO: 9863 - DNA, 20 bp, Artificial Sequence
  Synthetic: FXN 3 forward 9:69042627-69042651; As/LbCpf1
aaggagtaactgcatttgac

SEQ ID NO: 9864 - DNA, 21 bp, Artificial Sequence
  Synthetic: FXN 3 forward 9:69042627-69042652; As/LbCpf1
aaggagtaactgcatttgacc

SEQ ID NO: 9865 - DNA, 22 bp, Artificial Sequence
  Synthetic: FXN 3 forward 9:69042627-69042653; As/LbCpf1
aaggagtaactgcatttgacct

SEQ ID NO: 9866 - DNA, 23 bp, Artificial Sequence
  Synthetic: FXN 3 forward 9:69042627-69042654; As/LbCpf1
aaggagtaactgcatttgacctt

SEQ ID NO: 9867 - DNA, 24 bp, Artificial Sequence
  Synthetic: FXN 3 forward 9:69042627-69042655; As/LbCpf1
aaggagtaactgcatttgaccttc

SEQ ID NO: 9868 - DNA, 25 bp, Artificial Sequence
  Synthetic: FXN 3 forward 9:69042627-69042656; As/LbCpf1
aaggagtaactgcatttgaccttcc

SEQ ID NO: 9869 - DNA, 18 bp, Artificial Sequence
  Synthetic: FXN 3 forward 9:69042645-69042667; As/LbCpf1
accttcccaccagtaaca

SEQ ID NO: 9870 - DNA, 19 bp, Artificial Sequence
  Synthetic: FXN 3 forward 9:69042645-69042668; As/LbCpf1
accttcccaccagtaacaa

SEQ ID NO: 9871 - DNA, 20 bp, Artificial Sequence
  Synthetic: FXN 3 forward 9:69042645-69042669; As/LbCpf1
accttcccaccagtaacaac

SEQ ID NO: 9872 - DNA, 21 bp, Artificial Sequence
  Synthetic: FXN 3 forward 9:69042645-69042670; As/LbCpf1
accttcccaccagtaacaacc

SEQ ID NO: 9873 - DNA, 22 bp, Artificial Sequence
  Synthetic: FXN 3 forward 9:69042645-69042671; As/LbCpf1
accttcccaccagtaacaacca

SEQ ID NO: 9874 - DNA, 23 bp, Artificial Sequence
  Synthetic: FXN 3 forward 9:69042645-69042672; As/LbCpf1
accttcccaccagtaacaaccat

SEQ ID NO: 9875 - DNA, 24 bp, Artificial Sequence
  Synthetic: FXN 3 forward 9:69042645-69042673; As/LbCpf1
accttcccaccagtaacaaccatc

SEQ ID NO: 9876 - DNA, 25 bp, Artificial Sequence
  Synthetic: FXN 3 forward 9:69042645-69042674; As/LbCpf1
accttcccaccagtaacaaccatca

SEQ ID NO: 9877 - DNA, 18 bp, Artificial Sequence
  Synthetic: FXN 3 reverse 9:69042647-69042669; As/LbCpf1
atggttgttactggtggg

SEQ ID NO: 9878 - DNA, 19 bp, Artificial Sequence
  Synthetic: FXN 3 reverse 9:69042647-69042670; As/LbCpf1
atggttgttactggtggga

SEQ ID NO: 9879 - DNA, 20 bp, Artificial Sequence
  Synthetic: FXN 3 reverse 9:69042647-69042671; As/LbCpf1
atggttgttactggtgggaa

SEQ ID NO: 9880 - DNA, 21 bp, Artificial Sequence
  Synthetic: FXN 3 reverse 9:69042647-69042672; As/LbCpf1
atggttgttactggtgggaag

SEQ ID NO: 9881 - DNA, 22 bp, Artificial Sequence
  Synthetic: FXN 3 reverse 9:69042647-69042673; As/LbCpf1
atggttgttactggtgggaagg

SEQ ID NO: 9882 - DNA, 23 bp, Artificial Sequence
  Synthetic: FXN 3 reverse 9:69042647-69042674; As/LbCpf1
atggttgttactggtgggaaggt

SEQ ID NO: 9883 - DNA, 24 bp, Artificial Sequence
  Synthetic: FXN 3 reverse 9:69042647-69042675; As/LbCpf1
atggttgttactggtgggaaggtc

SEQ ID NO: 9884 - DNA, 25 bp, Artificial Sequence
  Synthetic: FXN 3 reverse 9:69042647-69042676; As/LbCpf1
atggttgttactggtgggaaggtca

SEQ ID NO: 9885 - DNA, 18 bp, Artificial Sequence
  Synthetic: FXN 3 reverse 9:69042658-69042680; As/LbCpf1
atagagatttgatggttg

SEQ ID NO: 9886 - DNA, 19 bp, Artificial Sequence
  Synthetic: FXN 3 reverse 9:69042658-69042681; As/LbCpf1
atagagatttgatggttgt

SEQ ID NO: 9887 - DNA, 20 bp, Artificial Sequence
  Synthetic: FXN 3 reverse 9:69042658-69042682; As/LbCpf1
atagagatttgatggttgtt

SEQ ID NO: 9888 - DNA, 21 bp, Artificial Sequence
  Synthetic: FXN 3 reverse 9:69042658-69042683; As/LbCpf1
atagagatttgatggttgtta

SEQ ID NO: 9889 - DNA, 22 bp, Artificial Sequence
  Synthetic: FXN 3 reverse 9:69042658-69042684; As/LbCpf1
atagagatttgatggttgttac

SEQ ID NO: 9890 - DNA, 23 bp, Artificial Sequence
  Synthetic: FXN 3 reverse 9:69042658-69042685; As/LbCpf1
atagagatttgatggttgttact

SEQ ID NO: 9891 - DNA, 24 bp, Artificial Sequence
  Synthetic: FXN 3 reverse 9:69042658-69042686; As/LbCpf1
atagagatttgatggttgttactg

SEQ ID NO: 9892 - DNA, 25 bp, Artificial Sequence
  Synthetic: FXN 3 reverse 9:69042658-69042687; As/LbCpf1
atagagatttgatggttgttactgg

SEQ ID NO: 9893 - DNA, 18 bp, Artificial Sequence
  Synthetic: FXN 3 reverse 9:69042663-69042685; As/LbCpf1
atttaatagagatttgat

SEQ ID NO: 9894 - DNA, 19 bp, Artificial Sequence
  Synthetic: FXN 3 reverse 9:69042663-69042686; As/LbCpf1
atttaatagagatttgatg

SEQ ID NO: 9895 - DNA, 20 bp, Artificial Sequence
  Synthetic: FXN 3 reverse 9:69042663-69042687; As/LbCpf1
atttaatagagatttgatgg

SEQ ID NO: 9896 - DNA, 21 bp, Artificial Sequence
  Synthetic: FXN 3 reverse 9:69042663-69042688; As/LbCpf1
atttaatagagatttgatggt

SEQ ID NO: 9897 - DNA, 22 bp, Artificial Sequence
  Synthetic: FXN 3 reverse 9:69042663-69042689; As/LbCpf1
atttaatagagatttgatggtt

SEQ ID NO: 9898 - DNA, 23 bp, Artificial Sequence
  Synthetic: FXN 3 reverse 9:69042663-69042690; As/LbCpf1
atttaatagagatttgatggttg

SEQ ID NO: 9899 - DNA, 24 bp, Artificial Sequence
  Synthetic: FXN 3 reverse 9:69042663-69042691; As/LbCpf1
atttaatagagatttgatggttgt

SEQ ID NO: 9900 - DNA, 25 bp, Artificial Sequence
  Synthetic: FXN 3 reverse 9:69042663-69042692; As/LbCpf1
atttaatagagatttgatggttgtt

SEQ ID NO: 9901 - DNA, 18 bp, Artificial Sequence
  Synthetic: FXN 3 reverse 9:69042679-69042701; As/LbCpf1
tgtgtgtgtgtgtttaat

SEQ ID NO: 9902 - DNA, 19 bp, Artificial Sequence
  Synthetic: FXN 3 reverse 9:69042679-69042702; As/LbCpf1
tgtgtgtgtgtgtttaatt

SEQ ID NO: 9903 - DNA, 20 bp, Artificial Sequence
  Synthetic: FXN 3 reverse 9:69042679-69042703; As/LbCpf1
tgtgtgtgtgtgtttaattt

SEQ ID NO: 9904 - DNA, 21 bp, Artificial Sequence
  Synthetic: FXN 3 reverse 9:69042679-69042704; As/LbCpf1
tgtgtgtgtgtgtttaattta

SEQ ID NO: 9905 - DNA, 22 bp, Artificial Sequence
  Synthetic: FXN 3 reverse 9:69042679-69042705; As/LbCpf1
tgtgtgtgtgtgtttaatttaa

SEQ ID NO: 9906 - DNA, 23 bp, Artificial Sequence
  Synthetic: FXN 3 reverse 9:69042679-69042706; As/LbCpf1
tgtgtgtgtgtgtttaatttaat

SEQ ID NO: 9907 - DNA, 24 bp, Artificial Sequence
  Synthetic: FXN 3 reverse 9:69042679-69042707; As/LbCpf1
tgtgtgtgtgtgtttaatttaata

SEQ ID NO: 9908 - DNA, 25 bp, Artificial Sequence
  Synthetic: FXN 3 reverse 9:69042679-69042708; As/LbCpf1
tgtgtgtgtgtgtttaatttaatag

SEQ ID NO: 9909 - DNA, 18 bp, Artificial Sequence
  Synthetic: FXN 3 reverse 9:69042683-69042705; As/LbCpf1
tttgtgtgtgtgtgtgtt

SEQ ID NO: 9910 - DNA, 19 bp, Artificial Sequence
  Synthetic: FXN 3 reverse 9:69042683-69042706; As/LbCpf1
tttgtgtgtgtgtgtgttt

SEQ ID NO: 9911 - DNA, 20 bp, Artificial Sequence
  Synthetic: FXN 3 reverse 9:69042683-69042707; As/LbCpf1
tttgtgtgtgtgtgtgttta

SEQ ID NO: 9912 - DNA, 21 bp, Artificial Sequence
  Synthetic: FXN 3 reverse 9:69042683-69042708; As/LbCpf1
tttgtgtgtgtgtgtgtttaa

SEQ ID NO: 9913 - DNA, 22 bp, Artificial Sequence
  Synthetic: FXN 3 reverse 9:69042683-69042709; As/LbCpf1
tttgtgtgtgtgtgtgtttaat

SEQ ID NO: 9914 - DNA, 23 bp, Artificial Sequence
  Synthetic: FXN 3 reverse 9:69042683-69042710; As/LbCpf1
tttgtgtgtgtgtgtgtttaatt

SEQ ID NO: 9915 - DNA, 24 bp, Artificial Sequence
  Synthetic: FXN 3 reverse 9:69042683-69042711; As/LbCpf1
tttgtgtgtgtgtgtgtttaattt

SEQ ID NO: 9916 - DNA, 25 bp, Artificial Sequence
  Synthetic: FXN 3 reverse 9:69042683-69042712; As/LbCpf1
tttgtgtgtgtgtgtgtttaattta

SEQ ID NO: 9917 - DNA, 18 bp, Artificial Sequence
  Synthetic: FXN 3 reverse 9:69042684-69042706; As/LbCpf1
gtttgtgtgtgtgtgtgt

SEQ ID NO: 9918 - DNA, 19 bp, Artificial Sequence
  Synthetic: FXN 3 reverse 9:69042684-69042707; As/LbCpf1
gtttgtgtgtgtgtgtgtt

SEQ ID NO: 9919 - DNA, 20 bp, Artificial Sequence
  Synthetic: FXN 3 reverse 9:69042684-69042708; As/LbCpf1
gtttgtgtgtgtgtgtgttt

SEQ ID NO: 9920 - DNA, 21 bp, Artificial Sequence
  Synthetic: FXN 3 reverse 9:69042684-69042709; As/LbCpf1
gtttgtgtgtgtgtgtgttta

SEQ ID NO: 9921 - DNA, 22 bp, Artificial Sequence
  Synthetic: FXN 3 reverse 9:69042684-69042710; As/LbCpf1
gtttgtgtgtgtgtgtgtttaa

SEQ ID NO: 9922 - DNA, 23 bp, Artificial Sequence
  Synthetic: FXN 3 reverse 9:69042684-69042711; As/LbCpf1
gtttgtgtgtgtgtgtgtttaat

SEQ ID NO: 9923 - DNA, 24 bp, Artificial Sequence
  Synthetic: FXN 3 reverse 9:69042684-69042712; As/LbCpf1
gtttgtgtgtgtgtgtgtttaatt

SEQ ID NO: 9924 - DNA, 25 bp, Artificial Sequence
  Synthetic: FXN 3 reverse 9:69042684-69042713; As/LbCpf1
gtttgtgtgtgtgtgtgtttaattt

SEQ ID NO: 9925 - DNA, 18 bp, Artificial Sequence
  Synthetic: FXN 3 reverse 9:69042685-69042707; As/LbCpf1
tgtttgtgtgtgtgtgtg

SEQ ID NO: 9926 - DNA, 19 bp, Artificial Sequence
  Synthetic: FXN 3 reverse 9:69042685-69042708; As/LbCpf1
tgtttgtgtgtgtgtgtgt

SEQ ID NO: 9927 - DNA, 20 bp, Artificial Sequence
  Synthetic: FXN 3 reverse 9:69042685-69042709; As/LbCpf1
tgtttgtgtgtgtgtgtgtt

SEQ ID NO: 9928 - DNA, 21 bp, Artificial Sequence
  Synthetic: FXN 3 reverse 9:69042685-69042710; As/LbCpf1
tgtttgtgtgtgtgtgtgttt

SEQ ID NO: 9929 - DNA, 22 bp, Artificial Sequence
  Synthetic: FXN 3 reverse 9:69042685-69042711; As/LbCpf1
tgtttgtgtgtgtgtgtgttta

SEQ ID NO: 9930 - DNA, 23 bp, Artificial Sequence
  Synthetic: FXN 3 reverse 9:69042685-69042712; As/LbCpf1
tgtttgtgtgtgtgtgtgtttaa

SEQ ID NO: 9931 - DNA, 24 bp, Artificial Sequence
  Synthetic: FXN 3 reverse 9:69042685-69042713; As/LbCpf1
tgtttgtgtgtgtgtgtgtttaat

SEQ ID NO: 9932 - DNA, 25 bp, Artificial Sequence
  Synthetic: FXN 3 reverse 9:69042685-69042714; As/LbCpf1
tgtttgtgtgtgtgtgtgtttaatt

SEQ ID NO: 9933 - DNA, 18 bp, Artificial Sequence
  Synthetic: FXN 3 forward 9:69042753-69042775; As/LbCpf1
aggggccaggatcctgga

SEQ ID NO: 9934 - DNA, 19 bp, Artificial Sequence
  Synthetic: FXN 3 forward 9:69042753-69042776; As/LbCpf1
aggggccaggatcctggag

SEQ ID NO: 9935 - DNA, 20 bp, Artificial Sequence
  Synthetic: FXN 3 forward 9:69042753-69042777; As/LbCpf1
aggggccaggatcctggaga

SEQ ID NO: 9936 - DNA, 21 bp, Artificial Sequence
  Synthetic: FXN 3 forward 9:69042753-69042778; As/LbCpf1
aggggccaggatcctggagag

SEQ ID NO: 9937 - DNA, 22 bp, Artificial Sequence
  Synthetic: FXN 3 forward 9:69042753-69042779; As/LbCpf1
aggggccaggatcctggagaga

SEQ ID NO: 9938 - DNA, 23 bp, Artificial Sequence
  Synthetic: FXN 3 forward 9:69042753-69042780; As/LbCpf1
aggggccaggatcctggagagat

SEQ ID NO: 9939 - DNA, 24 bp, Artificial Sequence
  Synthetic: FXN 3 forward 9:69042753-69042781; As/LbCpf1
aggggccaggatcctggagagatg

SEQ ID NO: 9940 - DNA, 25 bp, Artificial Sequence
  Synthetic: FXN 3 forward 9:69042753-69042782; As/LbCpf1
aggggccaggatcctggagagatgg

SEQ ID NO: 9941 - DNA, 18 bp, Artificial Sequence
  Synthetic: FXN 3 reverse 9:69042756-69042778; As/LbCpf1
catctctccaggatcctg

SEQ ID NO: 9942 - DNA, 19 bp, Artificial Sequence
  Synthetic: FXN 3 reverse 9:69042756-69042779; As/LbCpf1
catctctccaggatcctgg

SEQ ID NO: 9943 - DNA, 20 bp, Artificial Sequence
  Synthetic: FXN 3 reverse 9:69042756-69042780; As/LbCpf1
catctctccaggatcctggc

SEQ ID NO: 9944 - DNA, 21 bp, Artificial Sequence
  Synthetic: FXN 3 reverse 9:69042756-69042781; As/LbCpf1
catctctccaggatcctggcc

SEQ ID NO: 9945 - DNA, 22 bp, Artificial Sequence
  Synthetic: FXN 3 reverse 9:69042756-69042782; As/LbCpf1
catctctccaggatcctggccc

SEQ ID NO: 9946 - DNA, 23 bp, Artificial Sequence
  Synthetic: FXN 3 reverse 9:69042756-69042783; As/LbCpf1
catctctccaggatcctggcccc

SEQ ID NO: 9947 - DNA, 24 bp, Artificial Sequence
  Synthetic: FXN 3 reverse 9:69042756-69042784; As/LbCpf1
catctctccaggatcctggcccct

SEQ ID NO: 9948 - DNA, 25 bp, Artificial Sequence
  Synthetic: FXN 3 reverse 9:69042756-69042785; As/LbCpf1
catctctccaggatcctggcccctc

SEQ ID NO: 9949 - DNA, 18 bp, Artificial Sequence
  Synthetic: FXN 3 forward 9:69042818-69042840; As/LbCpf1
ccttggatgttttgagca

SEQ ID NO: 9950 - DNA, 19 bp, Artificial Sequence
  Synthetic: FXN 3 forward 9:69042818-69042841; As/LbCpf1
ccttggatgttttgagcac

SEQ ID NO: 9951 - DNA, 20 bp, Artificial Sequence
  Synthetic: FXN 3 forward 9:69042818-69042842; As/LbCpf1
ccttggatgttttgagcact

SEQ ID NO: 9952 - DNA, 21 bp, Artificial Sequence
  Synthetic: FXN 3 forward 9:69042818-69042843; As/LbCpf1
ccttggatgttttgagcactg

SEQ ID NO: 9953 - DNA, 22 bp, Artificial Sequence
  Synthetic: FXN 3 forward 9:69042818-69042844; As/LbCpf1
ccttggatgttttgagcactgc

SEQ ID NO: 9954 - DNA, 23 bp, Artificial Sequence
  Synthetic: FXN 3 forward 9:69042818-69042845; As/LbCpf1
ccttggatgttttgagcactgct

SEQ ID NO: 9955 - DNA, 24 bp, Artificial Sequence
  Synthetic: FXN 3 forward 9:69042818-69042846; As/LbCpf1
ccttggatgttttgagcactgctt

SEQ ID NO: 9956 - DNA, 25 bp, Artificial Sequence
  Synthetic: FXN 3 forward 9:69042818-69042847; As/LbCpf1
ccttggatgttttgagcactgcttt

SEQ ID NO: 9957 - DNA, 18 bp, Artificial Sequence
  Synthetic: FXN 3 forward 9:69042819-69042841; As/LbCpf1
cttggatgttttgagcac

SEQ ID NO: 9958 - DNA, 19 bp, Artificial Sequence
  Synthetic: FXN 3 forward 9:69042819-69042842; As/LbCpf1
cttggatgttttgagcact

SEQ ID NO: 9959 - DNA, 20 bp, Artificial Sequence
  Synthetic: FXN 3 forward 9:69042819-69042843; As/LbCpf1
cttggatgttttgagcactg

SEQ ID NO: 9960 - DNA, 21 bp, Artificial Sequence
  Synthetic: FXN 3 forward 9:69042819-69042844; As/LbCpf1
cttggatgttttgagcactgc

SEQ ID NO: 9961 - DNA, 22 bp, Artificial Sequence
  Synthetic: FXN 3 forward 9:69042819-69042845; As/LbCpf1
cttggatgttttgagcactgct

SEQ ID NO: 9962 - DNA, 23 bp, Artificial Sequence
  Synthetic: FXN 3 forward 9:69042819-69042846; As/LbCpf1
cttggatgttttgagcactgctt

SEQ ID NO: 9963 - DNA, 24 bp, Artificial Sequence
  Synthetic: FXN 3 forward 9:69042819-69042847; As/LbCpf1
cttggatgttttgagcactgcttt

SEQ ID NO: 9964 - DNA, 25 bp, Artificial Sequence
  Synthetic: FXN 3 forward 9:69042819-69042848; As/LbCpf1
cttggatgttttgagcactgcttta

SEQ ID NO: 9965 - DNA, 18 bp, Artificial Sequence
  Synthetic: FXN 3 forward 9:69042831-69042853; As/LbCpf1
gagcactgctttaattcc

SEQ ID NO: 9966 - DNA, 19 bp, Artificial Sequence
  Synthetic: FXN 3 forward 9:69042831-69042854; As/LbCpf1
gagcactgctttaattcct

SEQ ID NO: 9967 - DNA, 20 bp, Artificial Sequence
  Synthetic: FXN 3 forward 9:69042831-69042855; As/LbCpf1
gagcactgctttaattcctg

SEQ ID NO: 9968 - DNA, 21 bp, Artificial Sequence
  Synthetic: FXN 3 forward 9:69042831-69042856; As/LbCpf1
gagcactgctttaattcctgg

SEQ ID NO: 9969 - DNA, 22 bp, Artificial Sequence
  Synthetic: FXN 3 forward 9:69042831-69042857; As/LbCpf1
gagcactgctttaattcctggg

SEQ ID NO: 9970 - DNA, 23 bp, Artificial Sequence
  Synthetic: FXN 3 forward 9:69042831-69042858; As/LbCpf1
gagcactgctttaattcctggga

SEQ ID NO: 9971 - DNA, 24 bp, Artificial Sequence
  Synthetic: FXN 3 forward 9:69042831-69042859; As/LbCpf1
gagcactgctttaattcctgggaa

SEQ ID NO: 9972 - DNA, 25 bp, Artificial Sequence
  Synthetic: FXN 3 forward 9:69042831-69042860; As/LbCpf1
gagcactgctttaattcctgggaaa

SEQ ID NO: 9973 - DNA, 18 bp, Artificial Sequence
  Synthetic: FXN 3 reverse 9:69042831-69042853; As/LbCpf1
ccaggaattaaagcagtg

SEQ ID NO: 9974 - DNA, 19 bp, Artificial Sequence
  Synthetic: FXN 3 reverse 9:69042831-69042854; As/LbCpf1
ccaggaattaaagcagtgc

SEQ ID NO: 9975 - DNA, 20 bp, Artificial Sequence
  Synthetic: FXN 3 reverse 9:69042831-69042855; As/LbCpf1
ccaggaattaaagcagtgct

SEQ ID NO: 9976 - DNA, 21 bp, Artificial Sequence
  Synthetic: FXN 3 reverse 9:69042831-69042856; As/LbCpf1
ccaggaattaaagcagtgctc

SEQ ID NO: 9977 - DNA, 22 bp, Artificial Sequence
  Synthetic: FXN 3 reverse 9:69042831-69042857; As/LbCpf1
ccaggaattaaagcagtgctca

SEQ ID NO: 9978 - DNA, 23 bp, Artificial Sequence
  Synthetic: FXN 3 reverse 9:69042831-69042858; As/LbCpf1
ccaggaattaaagcagtgctcaa

SEQ ID NO: 9979 - DNA, 24 bp, Artificial Sequence
  Synthetic: FXN 3 reverse 9:69042831-69042859; As/LbCpf1
ccaggaattaaagcagtgctcaaa

SEQ ID NO: 9980 - DNA, 25 bp, Artificial Sequence
  Synthetic: FXN 3 reverse 9:69042831-69042860; As/LbCpf1
ccaggaattaaagcagtgctcaaaa

SEQ ID NO: 9981 - DNA, 18 bp, Artificial Sequence
  Synthetic: FXN 3 forward 9:69042832-69042854; As/LbCpf1
agcactgctttaattcct

SEQ ID NO: 9982 - DNA, 19 bp, Artificial Sequence
  Synthetic: FXN 3 forward 9:69042832-69042855; As/LbCpf1
agcactgctttaattcctg

SEQ ID NO: 9983 - DNA, 20 bp, Artificial Sequence
  Synthetic: FXN 3 forward 9:69042832-69042856; As/LbCpf1
agcactgctttaattcctgg

SEQ ID NO: 9984 - DNA, 21 bp, Artificial Sequence
  Synthetic: FXN 3 forward 9:69042832-69042857; As/LbCpf1
agcactgctttaattcctggg

SEQ ID NO: 9985 - DNA, 22 bp, Artificial Sequence
  Synthetic: FXN 3 forward 9:69042832-69042858; As/LbCpf1
agcactgctttaattcctggga

SEQ ID NO: 9986 - DNA, 23 bp, Artificial Sequence
  Synthetic: FXN 3 forward 9:69042832-69042859; As/LbCpf1
agcactgctttaattcctgggaa

SEQ ID NO: 9987 - DNA, 24 bp, Artificial Sequence
  Synthetic: FXN 3 forward 9:69042832-69042860; As/LbCpf1
agcactgctttaattcctgggaaa

SEQ ID NO: 9988 - DNA, 25 bp, Artificial Sequence
  Synthetic: FXN 3 forward 9:69042832-69042861; As/LbCpf1
agcactgctttaattcctgggaaaa

SEQ ID NO: 9989 - DNA, 18 bp, Artificial Sequence
  Synthetic: FXN 3 reverse 9:69042832-69042854; As/LbCpf1
cccaggaattaaagcagt

SEQ ID NO: 9990 - DNA, 19 bp, Artificial Sequence
  Synthetic: FXN 3 reverse 9:69042832-69042855; As/LbCpf1
cccaggaattaaagcagtg

SEQ ID NO: 9991 - DNA, 20 bp, Artificial Sequence
  Synthetic: FXN 3 reverse 9:69042832-69042856; As/LbCpf1
cccaggaattaaagcagtgc

SEQ ID NO: 9992 - DNA, 21 bp, Artificial Sequence
  Synthetic: FXN 3 reverse 9:69042832-69042857; As/LbCpf1
cccaggaattaaagcagtgct

SEQ ID NO: 9993 - DNA, 22 bp, Artificial Sequence
  Synthetic: FXN 3 reverse 9:69042832-69042858; As/LbCpf1
cccaggaattaaagcagtgctc

SEQ ID NO: 9994 - DNA, 23 bp, Artificial Sequence
  Synthetic: FXN 3 reverse 9:69042832-69042859; As/LbCpf1
cccaggaattaaagcagtgctca

SEQ ID NO: 9995 - DNA, 24 bp, Artificial Sequence
  Synthetic: FXN 3 reverse 9:69042832-69042860; As/LbCpf1
cccaggaattaaagcagtgctcaa

SEQ ID NO: 9996 - DNA, 25 bp, Artificial Sequence
  Synthetic: FXN 3 reverse 9:69042832-69042861; As/LbCpf1
cccaggaattaaagcagtgctcaaa

SEQ ID NO: 9997 - DNA, 18 bp, Artificial Sequence
  Synthetic: FXN 3 forward 9:69042844-69042866; As/LbCpf1
attcctgggaaaacaatt

SEQ ID NO: 9998 - DNA, 19 bp, Artificial Sequence
  Synthetic: FXN 3 forward 9:69042844-69042867; As/LbCpf1
attcctgggaaaacaattc

SEQ ID NO: 9999 - DNA, 20 bp, Artificial Sequence
  Synthetic: FXN 3 forward 9:69042844-69042868; As/LbCpf1
attcctgggaaaacaattcc

SEQ ID NO: 10000 - DNA, 21 bp, Artificial Sequence
  Synthetic: FXN 3 forward 9:69042844-69042869; As/LbCpf1
attcctgggaaaacaattcct

SEQ ID NO: 10001 - DNA, 22 bp, Artificial Sequence
  Synthetic: FXN 3 forward 9:69042844-69042870; As/LbCpf1
attcctgggaaaacaattcctt

SEQ ID NO: 10002 - DNA, 23 bp, Artificial Sequence
  Synthetic: FXN 3 forward 9:69042844-69042871; As/LbCpf1
attcctgggaaaacaattccttc

SEQ ID NO: 10003 - DNA, 24 bp, Artificial Sequence
  Synthetic: FXN 3 forward 9:69042844-69042872; As/LbCpf1
attcctgggaaaacaattccttcc

SEQ ID NO: 10004 - DNA, 25 bp, Artificial Sequence
  Synthetic: FXN 3 forward 9:69042844-69042873; As/LbCpf1
attcctgggaaaacaattccttcca

SEQ ID NO: 10005 - DNA, 18 bp, Artificial Sequence
  Synthetic: FXN 3 forward 9:69042960-69042982; As/LbCpf1
gtgcgtcagtttcctcat

SEQ ID NO: 10006 - DNA, 19 bp, Artificial Sequence
  Synthetic: FXN 3 forward 9:69042960-69042983; As/LbCpf1
gtgcgtcagtttcctcatc

SEQ ID NO: 10007 - DNA, 20 bp, Artificial Sequence
  Synthetic: FXN 3 forward 9:69042960-69042984; As/LbCpf1
gtgcgtcagtttcctcatct

SEQ ID NO: 10008 - DNA, 21 bp, Artificial Sequence
  Synthetic: FXN 3 forward 9:69042960-69042985; As/LbCpf1
gtgcgtcagtttcctcatctg

SEQ ID NO: 10009 - DNA, 22 bp, Artificial Sequence
  Synthetic: FXN 3 forward 9:69042960-69042986; As/LbCpf1
gtgcgtcagtttcctcatctgt

SEQ ID NO: 10010 - DNA, 23 bp, Artificial Sequence
  Synthetic: FXN 3 forward 9:69042960-69042987; As/LbCpf1
gtgcgtcagtttcctcatctgta

SEQ ID NO: 10011 - DNA, 24 bp, Artificial Sequence
  Synthetic: FXN 3 forward 9:69042960-69042988; As/LbCpf1
gtgcgtcagtttcctcatctgtaa

SEQ ID NO: 10012 - DNA, 25 bp, Artificial Sequence
  Synthetic: FXN 3 forward 9:69042960-69042989; As/LbCpf1
gtgcgtcagtttcctcatctgtaaa

SEQ ID NO: 10013 - DNA, 18 bp, Artificial Sequence
  Synthetic: FXN 3 reverse 9:69042960-69042982; As/LbCpf1
cagatgaggaaactgacg

SEQ ID NO: 10014 - DNA, 19 bp, Artificial Sequence
  Synthetic: FXN 3 reverse 9:69042960-69042983; As/LbCpf1
cagatgaggaaactgacgc

SEQ ID NO: 10015 - DNA, 20 bp, Artificial Sequence
  Synthetic: FXN 3 reverse 9:69042960-69042984; As/LbCpf1
cagatgaggaaactgacgca

SEQ ID NO: 10016 - DNA, 21 bp, Artificial Sequence
  Synthetic: FXN 3 reverse 9:69042960-69042985; As/LbCpf1
cagatgaggaaactgacgcac

SEQ ID NO: 10017 - DNA, 22 bp, Artificial Sequence
  Synthetic: FXN 3 reverse 9:69042960-69042986; As/LbCpf1
cagatgaggaaactgacgcacc

SEQ ID NO: 10018 - DNA, 23 bp, Artificial Sequence
  Synthetic: FXN 3 reverse 9:69042960-69042987; As/LbCpf1
cagatgaggaaactgacgcacca

SEQ ID NO: 10019 - DNA, 24 bp, Artificial Sequence
  Synthetic: FXN 3 reverse 9:69042960-69042988; As/LbCpf1
cagatgaggaaactgacgcaccaa

SEQ ID NO: 10020 - DNA, 25 bp, Artificial Sequence
  Synthetic: FXN 3 reverse 9:69042960-69042989; As/LbCpf1
cagatgaggaaactgacgcaccaaa

SEQ ID NO: 10021 - DNA, 18 bp, Artificial Sequence
  Synthetic: FXN 3 reverse 9:69042961-69042983; As/LbCpf1
acagatgaggaaactgac

SEQ ID NO: 10022 - DNA, 19 bp, Artificial Sequence
  Synthetic: FXN 3 reverse 9:69042961-69042984; As/LbCpf1
acagatgaggaaactgacg

SEQ ID NO: 10023 - DNA, 20 bp, Artificial Sequence
  Synthetic: FXN 3 reverse 9:69042961-69042985; As/LbCpf1
acagatgaggaaactgacgc

SEQ ID NO: 10024 - DNA, 21 bp, Artificial Sequence
  Synthetic: FXN 3 reverse 9:69042961-69042986; As/LbCpf1
acagatgaggaaactgacgca

SEQ ID NO: 10025 - DNA, 22 bp, Artificial Sequence
  Synthetic: FXN 3 reverse 9:69042961-69042987; As/LbCpf1
acagatgaggaaactgacgcac

SEQ ID NO: 10026 - DNA, 23 bp, Artificial Sequence
  Synthetic: FXN 3 reverse 9:69042961-69042988; As/LbCpf1
acagatgaggaaactgacgcacc

SEQ ID NO: 10027 - DNA, 24 bp, Artificial Sequence
  Synthetic: FXN 3 reverse 9:69042961-69042989; As/LbCpf1
acagatgaggaaactgacgcacca

SEQ ID NO: 10028 - DNA, 25 bp, Artificial Sequence
  Synthetic: FXN 3 reverse 9:69042961-69042990; As/LbCpf1
acagatgaggaaactgacgcaccaa

SEQ ID NO: 10029 - DNA, 18 bp, Artificial Sequence
  Synthetic: FXN 3 forward 9:69042973-69042995; As/LbCpf1
ctcatctgtaaaacacaa

SEQ ID NO: 10030 - DNA, 19 bp, Artificial Sequence
  Synthetic: FXN 3 forward 9:69042973-69042996; As/LbCpf1
ctcatctgtaaaacacaac

SEQ ID NO: 10031 - DNA, 20 bp, Artificial Sequence
  Synthetic: FXN 3 forward 9:69042973-69042997; As/LbCpf1
ctcatctgtaaaacacaact

SEQ ID NO: 10032 - DNA, 21 bp, Artificial Sequence
  Synthetic: FXN 3 forward 9:69042973-69042998; As/LbCpf1
ctcatctgtaaaacacaacta

SEQ ID NO: 10033 - DNA, 22 bp, Artificial Sequence
  Synthetic: FXN 3 forward 9:69042973-69042999; As/LbCpf1
ctcatctgtaaaacacaactat

SEQ ID NO: 10034 - DNA, 23 bp, Artificial Sequence
  Synthetic: FXN 3 forward 9:69042973-69043000; As/LbCpf1
ctcatctgtaaaacacaactata

SEQ ID NO: 10035 - DNA, 24 bp, Artificial Sequence
  Synthetic: FXN 3 forward 9:69042973-69043001; As/LbCpf1
ctcatctgtaaaacacaactatag

SEQ ID NO: 10036 - DNA, 25 bp, Artificial Sequence
  Synthetic: FXN 3 forward 9:69042973-69043002; As/LbCpf1
ctcatctgtaaaacacaactatagt

SEQ ID NO: 10037 - DNA, 18 bp, Artificial Sequence
  Synthetic: FXN 3 reverse 9:69043024-69043046; As/LbCpf1
gcaagtgagcaaattaac

SEQ ID NO: 10038 - DNA, 19 bp, Artificial Sequence
  Synthetic: FXN 3 reverse 9:69043024-69043047; As/LbCpf1
gcaagtgagcaaattaaca

SEQ ID NO: 10039 - DNA, 20 bp, Artificial Sequence
  Synthetic: FXN 3 reverse 9:69043024-69043048; As/LbCpf1
gcaagtgagcaaattaacaa

SEQ ID NO: 10040 - DNA, 21 bp, Artificial Sequence
  Synthetic: FXN 3 reverse 9:69043024-69043049; As/LbCpf1
gcaagtgagcaaattaacaag

SEQ ID NO: 10041 - DNA, 22 bp, Artificial Sequence
  Synthetic: FXN 3 reverse 9:69043024-69043050; As/LbCpf1
gcaagtgagcaaattaacaagt

SEQ ID NO: 10042 - DNA, 23 bp, Artificial Sequence
  Synthetic: FXN 3 reverse 9:69043024-69043051; As/LbCpf1
gcaagtgagcaaattaacaagta

SEQ ID NO: 10043 - DNA, 24 bp, Artificial Sequence
  Synthetic: FXN 3 reverse 9:69043024-69043052; As/LbCpf1
gcaagtgagcaaattaacaagtac

SEQ ID NO: 10044 - DNA, 25 bp, Artificial Sequence
  Synthetic: FXN 3 reverse 9:69043024-69043053; As/LbCpf1
gcaagtgagcaaattaacaagtaca

SEQ ID NO: 10045 - DNA, 18 bp, Artificial Sequence
  Synthetic: FXN 3 reverse 9:69043025-69043047; As/LbCpf1
agcaagtgagcaaattaa

SEQ ID NO: 10046 - DNA, 19 bp, Artificial Sequence
  Synthetic: FXN 3 reverse 9:69043025-69043048; As/LbCpf1
agcaagtgagcaaattaac

SEQ ID NO: 10047 - DNA, 20 bp, Artificial Sequence
  Synthetic: FXN 3 reverse 9:69043025-69043049; As/LbCpf1
agcaagtgagcaaattaaca

SEQ ID NO: 10048 - DNA, 21 bp, Artificial Sequence
  Synthetic: FXN 3 reverse 9:69043025-69043050; As/LbCpf1
agcaagtgagcaaattaacaa

SEQ ID NO: 10049 - DNA, 22 bp, Artificial Sequence
  Synthetic: FXN 3 reverse 9:69043025-69043051; As/LbCpf1
agcaagtgagcaaattaacaag

SEQ ID NO: 10050 - DNA, 23 bp, Artificial Sequence
  Synthetic: FXN 3 reverse 9:69043025-69043052; As/LbCpf1
agcaagtgagcaaattaacaagt

SEQ ID NO: 10051 - DNA, 24 bp, Artificial Sequence
  Synthetic: FXN 3 reverse 9:69043025-69043053; As/LbCpf1
agcaagtgagcaaattaacaagta

SEQ ID NO: 10052 - DNA, 25 bp, Artificial Sequence
  Synthetic: FXN 3 reverse 9:69043025-69043054; As/LbCpf1
agcaagtgagcaaattaacaagtac

SEQ ID NO: 10053 - DNA, 18 bp, Artificial Sequence
  Synthetic: FXN 3 forward 9:69043036-69043058; As/LbCpf1
ctcacttgctaaaatttg

SEQ ID NO: 10054 - DNA, 19 bp, Artificial Sequence
  Synthetic: FXN 3 forward 9:69043036-69043059; As/LbCpf1
ctcacttgctaaaatttgt

SEQ ID NO: 10055 - DNA, 20 bp, Artificial Sequence
  Synthetic: FXN 3 forward 9:69043036-69043060; As/LbCpf1
ctcacttgctaaaatttgtt

SEQ ID NO: 10056 - DNA, 21 bp, Artificial Sequence
  Synthetic: FXN 3 forward 9:69043036-69043061; As/LbCpf1
ctcacttgctaaaatttgtta

SEQ ID NO: 10057 - DNA, 22 bp, Artificial Sequence
  Synthetic: FXN 3 forward 9:69043036-69043062; As/LbCpf1
ctcacttgctaaaatttgttac

SEQ ID NO: 10058 - DNA, 23 bp, Artificial Sequence
  Synthetic: FXN 3 forward 9:69043036-69043063; As/LbCpf1
ctcacttgctaaaatttgttacc

SEQ ID NO: 10059 - DNA, 24 bp, Artificial Sequence
  Synthetic: FXN 3 forward 9:69043036-69043064; As/LbCpf1
ctcacttgctaaaatttgttaccc

SEQ ID NO: 10060 - DNA, 25 bp, Artificial Sequence
  Synthetic: FXN 3 forward 9:69043036-69043065; As/LbCpf1
ctcacttgctaaaatttgttacccc

SEQ ID NO: 10061 - DNA, 18 bp, Artificial Sequence
  Synthetic: FXN 3 reverse 9:69043039-69043061; As/LbCpf1
gggtaacaaattttagca

SEQ ID NO: 10062 - DNA, 19 bp, Artificial Sequence
  Synthetic: FXN 3 reverse 9:69043039-69043062; As/LbCpf1
gggtaacaaattttagcaa

SEQ ID NO: 10063 - DNA, 20 bp, Artificial Sequence
  Synthetic: FXN 3 reverse 9:69043039-69043063; As/LbCpf1
gggtaacaaattttagcaag

SEQ ID NO: 10064 - DNA, 21 bp, Artificial Sequence
  Synthetic: FXN 3 reverse 9:69043039-69043064; As/LbCpf1
gggtaacaaattttagcaagt

SEQ ID NO: 10065 - DNA, 22 bp, Artificial Sequence
  Synthetic: FXN 3 reverse 9:69043039-69043065; As/LbCpf1
gggtaacaaattttagcaagtg

SEQ ID NO: 10066 - DNA, 23 bp, Artificial Sequence
  Synthetic: FXN 3 reverse 9:69043039-69043066; As/LbCpf1
gggtaacaaattttagcaagtga

SEQ ID NO: 10067 - DNA, 24 bp, Artificial Sequence
  Synthetic: FXN 3 reverse 9:69043039-69043067; As/LbCpf1
gggtaacaaattttagcaagtgag

SEQ ID NO: 10068 - DNA, 25 bp, Artificial Sequence
  Synthetic: FXN 3 reverse 9:69043039-69043068; As/LbCpf1
gggtaacaaattttagcaagtgagc

SEQ ID NO: 10069 - DNA, 18 bp, Artificial Sequence
  Synthetic: FXN 3 reverse 9:69043040-69043062; As/LbCpf1
ggggtaacaaattttagc

SEQ ID NO: 10070 - DNA, 19 bp, Artificial Sequence
  Synthetic: FXN 3 reverse 9:69043040-69043063; As/LbCpf1
ggggtaacaaattttagca

SEQ ID NO: 10071 - DNA, 20 bp, Artificial Sequence
  Synthetic: FXN 3 reverse 9:69043040-69043064; As/LbCpf1
ggggtaacaaattttagcaa

SEQ ID NO: 10072 - DNA, 21 bp, Artificial Sequence
  Synthetic: FXN 3 reverse 9:69043040-69043065; As/LbCpf1
ggggtaacaaattttagcaag

SEQ ID NO: 10073 - DNA, 22 bp, Artificial Sequence
  Synthetic: FXN 3 reverse 9:69043040-69043066; As/LbCpf1
ggggtaacaaattttagcaagt

SEQ ID NO: 10074 - DNA, 23 bp, Artificial Sequence
  Synthetic: FXN 3 reverse 9:69043040-69043067; As/LbCpf1
ggggtaacaaattttagcaagtg

SEQ ID NO: 10075 - DNA, 24 bp, Artificial Sequence
  Synthetic: FXN 3 reverse 9:69043040-69043068; As/LbCpf1
ggggtaacaaattttagcaagtga

SEQ ID NO: 10076 - DNA, 25 bp, Artificial Sequence
  Synthetic: FXN 3 reverse 9:69043040-69043069; As/LbCpf1
ggggtaacaaattttagcaagtgag

SEQ ID NO: 10077 - DNA, 18 bp, Artificial Sequence
  Synthetic: FXN 3 forward 9:69043054-69043076; As/LbCpf1
ttaccccaaaatcagtac

SEQ ID NO: 10078 - DNA, 19 bp, Artificial Sequence
  Synthetic: FXN 3 forward 9:69043054-69043077; As/LbCpf1
ttaccccaaaatcagtacc

SEQ ID NO: 10079 - DNA, 20 bp, Artificial Sequence
  Synthetic: FXN 3 forward 9:69043054-69043078; As/LbCpf1
ttaccccaaaatcagtaccc

SEQ ID NO: 10080 - DNA, 21 bp, Artificial Sequence
  Synthetic: FXN 3 forward 9:69043054-69043079; As/LbCpf1
ttaccccaaaatcagtacccc

SEQ ID NO: 10081 - DNA, 22 bp, Artificial Sequence
  Synthetic: FXN 3 forward 9:69043054-69043080; As/LbCpf1
ttaccccaaaatcagtacccct

SEQ ID NO: 10082 - DNA, 23 bp, Artificial Sequence
  Synthetic: FXN 3 forward 9:69043054-69043081; As/LbCpf1
ttaccccaaaatcagtaccccta

SEQ ID NO: 10083 - DNA, 24 bp, Artificial Sequence
  Synthetic: FXN 3 forward 9:69043054-69043082; As/LbCpf1
ttaccccaaaatcagtacccctag

SEQ ID NO: 10084 - DNA, 25 bp, Artificial Sequence
  Synthetic: FXN 3 forward 9:69043054-69043083; As/LbCpf1
ttaccccaaaatcagtacccctagc

SEQ ID NO: 10085 - DNA, 18 bp, Artificial Sequence
  Synthetic: FXN 3 reverse 9:69043073-69043095; As/LbCpf1
aaacgaccccaaaaggct

SEQ ID NO: 10086 - DNA, 19 bp, Artificial Sequence
  Synthetic: FXN 3 reverse 9:69043073-69043096; As/LbCpf1
aaacgaccccaaaaggcta

SEQ ID NO: 10087 - DNA, 20 bp, Artificial Sequence
  Synthetic: FXN 3 reverse 9:69043073-69043097; As/LbCpf1
aaacgaccccaaaaggctag

SEQ ID NO: 10088 - DNA, 21 bp, Artificial Sequence
  Synthetic: FXN 3 reverse 9:69043073-69043098; As/LbCpf1
aaacgaccccaaaaggctagg

SEQ ID NO: 10089 - DNA, 22 bp, Artificial Sequence
  Synthetic: FXN 3 reverse 9:69043073-69043099; As/LbCpf1
aaacgaccccaaaaggctaggg

SEQ ID NO: 10090 - DNA, 23 bp, Artificial Sequence
  Synthetic: FXN 3 reverse 9:69043073-69043100; As/LbCpf1
aaacgaccccaaaaggctagggg

SEQ ID NO: 10091 - DNA, 24 bp, Artificial Sequence
  Synthetic: FXN 3 reverse 9:69043073-69043101; As/LbCpf1
aaacgaccccaaaaggctaggggt

SEQ ID NO: 10092 - DNA, 25 bp, Artificial Sequence
  Synthetic: FXN 3 reverse 9:69043073-69043102; As/LbCpf1
aaacgaccccaaaaggctaggggta

SEQ ID NO: 10093 - DNA, 18 bp, Artificial Sequence
  Synthetic: FXN 3 forward 9:69043084-69043106; As/LbCpf1
ggggtcgtttcaaagatg

SEQ ID NO: 10094 - DNA, 19 bp, Artificial Sequence
  Synthetic: FXN 3 forward 9:69043084-69043107; As/LbCpf1
ggggtcgtttcaaagatgt

SEQ ID NO: 10095 - DNA, 20 bp, Artificial Sequence
  Synthetic: FXN 3 forward 9:69043084-69043108; As/LbCpf1
ggggtcgtttcaaagatgtg

SEQ ID NO: 10096 - DNA, 21 bp, Artificial Sequence
  Synthetic: FXN 3 forward 9:69043084-69043109; As/LbCpf1
ggggtcgtttcaaagatgtgt

SEQ ID NO: 10097 - DNA, 22 bp, Artificial Sequence
  Synthetic: FXN 3 forward 9:69043084-69043110; As/LbCpf1
ggggtcgtttcaaagatgtgtg

SEQ ID NO: 10098 - DNA, 23 bp, Artificial Sequence
  Synthetic: FXN 3 forward 9:69043084-69043111; As/LbCpf1
ggggtcgtttcaaagatgtgtgc

SEQ ID NO: 10099 - DNA, 24 bp, Artificial Sequence
  Synthetic: FXN 3 forward 9:69043084-69043112; As/LbCpf1
ggggtcgtttcaaagatgtgtgca

SEQ ID NO: 10100 - DNA, 25 bp, Artificial Sequence
  Synthetic: FXN 3 forward 9:69043084-69043113; As/LbCpf1
ggggtcgtttcaaagatgtgtgcag

SEQ ID NO: 10101 - DNA, 18 bp, Artificial Sequence
  Synthetic: FXN 3 forward 9:69043085-69043107; As/LbCpf1
gggtcgtttcaaagatgt

SEQ ID NO: 10102 - DNA, 19 bp, Artificial Sequence
  Synthetic: FXN 3 forward 9:69043085-69043108; As/LbCpf1
gggtcgtttcaaagatgtg

SEQ ID NO: 10103 - DNA, 20 bp, Artificial Sequence
  Synthetic: FXN 3 forward 9:69043085-69043109; As/LbCpf1
gggtcgtttcaaagatgtgt

SEQ ID NO: 10104 - DNA, 21 bp, Artificial Sequence
  Synthetic: FXN 3 forward 9:69043085-69043110; As/LbCpf1
gggtcgtttcaaagatgtgtg

SEQ ID NO: 10105 - DNA, 22 bp, Artificial Sequence
  Synthetic: FXN 3 forward 9:69043085-69043111; As/LbCpf1
gggtcgtttcaaagatgtgtgc

SEQ ID NO: 10106 - DNA, 23 bp, Artificial Sequence
  Synthetic: FXN 3 forward 9:69043085-69043112; As/LbCpf1
gggtcgtttcaaagatgtgtgca

SEQ ID NO: 10107 - DNA, 24 bp, Artificial Sequence
  Synthetic: FXN 3 forward 9:69043085-69043113; As/LbCpf1
gggtcgtttcaaagatgtgtgcag

SEQ ID NO: 10108 - DNA, 25 bp, Artificial Sequence
  Synthetic: FXN 3 forward 9:69043085-69043114; As/LbCpf1
gggtcgtttcaaagatgtgtgcaga

SEQ ID NO: 10109 - DNA, 18 bp, Artificial Sequence
  Synthetic: FXN 3 reverse 9:69043093-69043115; As/LbCpf1
ccgctctgcacacatctt

SEQ ID NO: 10110 - DNA, 19 bp, Artificial Sequence
  Synthetic: FXN 3 reverse 9:69043093-69043116; As/LbCpf1
ccgctctgcacacatcttt

SEQ ID NO: 10111 - DNA, 20 bp, Artificial Sequence
  Synthetic: FXN 3 reverse 9:69043093-69043117; As/LbCpf1
ccgctctgcacacatctttg

SEQ ID NO: 10112 - DNA, 21 bp, Artificial Sequence
  Synthetic: FXN 3 reverse 9:69043093-69043118; As/LbCpf1
ccgctctgcacacatctttga

SEQ ID NO: 10113 - DNA, 22 bp, Artificial Sequence
  Synthetic: FXN 3 reverse 9:69043093-69043119; As/LbCpf1
ccgctctgcacacatctttgaa

SEQ ID NO: 10114 - DNA, 23 bp, Artificial Sequence
  Synthetic: FXN 3 reverse 9:69043093-69043120; As/LbCpf1
ccgctctgcacacatctttgaaa

SEQ ID NO: 10115 - DNA, 24 bp, Artificial Sequence
  Synthetic: FXN 3 reverse 9:69043093-69043121; As/LbCpf1
ccgctctgcacacatctttgaaac

SEQ ID NO: 10116 - DNA, 25 bp, Artificial Sequence
  Synthetic: FXN 3 reverse 9:69043093-69043122; As/LbCpf1
ccgctctgcacacatctttgaaacg

SEQ ID NO: 10117 - DNA, 18 bp, Artificial Sequence
  Synthetic: FXN 3 reverse 9:69043094-69043116; As/LbCpf1
gccgctctgcacacatct

SEQ ID NO: 10118 - DNA, 19 bp, Artificial Sequence
  Synthetic: FXN 3 reverse 9:69043094-69043117; As/LbCpf1
gccgctctgcacacatctt

SEQ ID NO: 10119 - DNA, 20 bp, Artificial Sequence
  Synthetic: FXN 3 reverse 9:69043094-69043118; As/LbCpf1
gccgctctgcacacatcttt

SEQ ID NO: 10120 - DNA, 21 bp, Artificial Sequence
  Synthetic: FXN 3 reverse 9:69043094-69043119; As/LbCpf1
gccgctctgcacacatctttg

SEQ ID NO: 10121 - DNA, 22 bp, Artificial Sequence
  Synthetic: FXN 3 reverse 9:69043094-69043120; As/LbCpf1
gccgctctgcacacatctttga

SEQ ID NO: 10122 - DNA, 23 bp, Artificial Sequence
  Synthetic: FXN 3 reverse 9:69043094-69043121; As/LbCpf1
gccgctctgcacacatctttgaa

SEQ ID NO: 10123 - DNA, 24 bp, Artificial Sequence
  Synthetic: FXN 3 reverse 9:69043094-69043122; As/LbCpf1
gccgctctgcacacatctttgaaa

SEQ ID NO: 10124 - DNA, 25 bp, Artificial Sequence
  Synthetic: FXN 3 reverse 9:69043094-69043123; As/LbCpf1
gccgctctgcacacatctttgaaac

SEQ ID NO: 10125 - DNA, 18 bp, Artificial Sequence
  Synthetic: FXN 3 forward 9:69043095-69043117; As/LbCpf1
aaagatgtgtgcagagcg

SEQ ID NO: 10126 - DNA, 19 bp, Artificial Sequence
  Synthetic: FXN 3 forward 9:69043095-69043118; As/LbCpf1
aaagatgtgtgcagagcgg

SEQ ID NO: 10127 - DNA, 20 bp, Artificial Sequence
  Synthetic: FXN 3 forward 9:69043095-69043119; As/LbCpf1
aaagatgtgtgcagagcggc

SEQ ID NO: 10128 - DNA, 21 bp, Artificial Sequence
  Synthetic: FXN 3 forward 9:69043095-69043120; As/LbCpf1
aaagatgtgtgcagagcggca

SEQ ID NO: 10129 - DNA, 22 bp, Artificial Sequence
  Synthetic: FXN 3 forward 9:69043095-69043121; As/LbCpf1
aaagatgtgtgcagagcggcaa

SEQ ID NO: 10130 - DNA, 23 bp, Artificial Sequence
  Synthetic: FXN 3 forward 9:69043095-69043122; As/LbCpf1
aaagatgtgtgcagagcggcaaa

SEQ ID NO: 10131 - DNA, 24 bp, Artificial Sequence
  Synthetic: FXN 3 forward 9:69043095-69043123; As/LbCpf1
aaagatgtgtgcagagcggcaaaa

SEQ ID NO: 10132 - DNA, 25 bp, Artificial Sequence
  Synthetic: FXN 3 forward 9:69043095-69043124; As/LbCpf1
aaagatgtgtgcagagcggcaaaaa

SEQ ID NO: 10133 - DNA, 18 bp, Artificial Sequence
  Synthetic: FXN 3 reverse 9:69043095-69043117; As/LbCpf1
tgccgctctgcacacatc

SEQ ID NO: 10134 - DNA, 19 bp, Artificial Sequence
  Synthetic: FXN 3 reverse 9:69043095-69043118; As/LbCpf1
tgccgctctgcacacatct

SEQ ID NO: 10135 - DNA, 20 bp, Artificial Sequence
  Synthetic: FXN 3 reverse 9:69043095-69043119; As/LbCpf1
tgccgctctgcacacatctt

SEQ ID NO: 10136 - DNA, 21 bp, Artificial Sequence
  Synthetic: FXN 3 reverse 9:69043095-69043120; As/LbCpf1
tgccgctctgcacacatcttt

SEQ ID NO: 10137 - DNA, 22 bp, Artificial Sequence
  Synthetic: FXN 3 reverse 9:69043095-69043121; As/LbCpf1
tgccgctctgcacacatctttg

SEQ ID NO: 10138 - DNA, 23 bp, Artificial Sequence
  Synthetic: FXN 3 reverse 9:69043095-69043122; As/LbCpf1
tgccgctctgcacacatctttga

SEQ ID NO: 10139 - DNA, 24 bp, Artificial Sequence
  Synthetic: FXN 3 reverse 9:69043095-69043123; As/LbCpf1
tgccgctctgcacacatctttgaa

SEQ ID NO: 10140 - DNA, 25 bp, Artificial Sequence
  Synthetic: FXN 3 reverse 9:69043095-69043124; As/LbCpf1
tgccgctctgcacacatctttgaaa

SEQ ID NO: 10141 - DNA, 18 bp, Artificial Sequence
  Synthetic: FXN 3 reverse 9:69043096-69043118; As/LbCpf1
ttgccgctctgcacacat

SEQ ID NO: 10142 - DNA, 19 bp, Artificial Sequence
  Synthetic: FXN 3 reverse 9:69043096-69043119; As/LbCpf1
ttgccgctctgcacacatc

SEQ ID NO: 10143 - DNA, 20 bp, Artificial Sequence
  Synthetic: FXN 3 reverse 9:69043096-69043120; As/LbCpf1
ttgccgctctgcacacatct

SEQ ID NO: 10144 - DNA, 21 bp, Artificial Sequence
  Synthetic: FXN 3 reverse 9:69043096-69043121; As/LbCpf1
ttgccgctctgcacacatctt

SEQ ID NO: 10145 - DNA, 22 bp, Artificial Sequence
  Synthetic: FXN 3 reverse 9:69043096-69043122; As/LbCpf1
ttgccgctctgcacacatcttt

SEQ ID NO: 10146 - DNA, 23 bp, Artificial Sequence
  Synthetic: FXN 3 reverse 9:69043096-69043123; As/LbCpf1
ttgccgctctgcacacatctttg

SEQ ID NO: 10147 - DNA, 24 bp, Artificial Sequence
  Synthetic: FXN 3 reverse 9:69043096-69043124; As/LbCpf1
ttgccgctctgcacacatctttga

SEQ ID NO: 10148 - DNA, 25 bp, Artificial Sequence
  Synthetic: FXN 3 reverse 9:69043096-69043125; As/LbCpf1
ttgccgctctgcacacatctttgaa

SEQ ID NO: 10149 - DNA, 18 bp, Artificial Sequence
  Synthetic: FXN 3 reverse 9:69043097-69043119; As/LbCpf1
tttgccgctctgcacaca

SEQ ID NO: 10150 - DNA, 19 bp, Artificial Sequence
  Synthetic: FXN 3 reverse 9:69043097-69043120; As/LbCpf1
tttgccgctctgcacacat

SEQ ID NO: 10151 - DNA, 20 bp, Artificial Sequence
  Synthetic: FXN 3 reverse 9:69043097-69043121; As/LbCpf1
tttgccgctctgcacacatc

SEQ ID NO: 10152 - DNA, 21 bp, Artificial Sequence
  Synthetic: FXN 3 reverse 9:69043097-69043122; As/LbCpf1
tttgccgctctgcacacatct

SEQ ID NO: 10153 - DNA, 22 bp, Artificial Sequence
  Synthetic: FXN 3 reverse 9:69043097-69043123; As/LbCpf1
tttgccgctctgcacacatctt

SEQ ID NO: 10154 - DNA, 23 bp, Artificial Sequence
  Synthetic: FXN 3 reverse 9:69043097-69043124; As/LbCpf1
tttgccgctctgcacacatcttt

SEQ ID NO: 10155 - DNA, 24 bp, Artificial Sequence
  Synthetic: FXN 3 reverse 9:69043097-69043125; As/LbCpf1
tttgccgctctgcacacatctttg

SEQ ID NO: 10156 - DNA, 25 bp, Artificial Sequence
  Synthetic: FXN 3 reverse 9:69043097-69043126; As/LbCpf1
tttgccgctctgcacacatctttga

SEQ ID NO: 10157 - DNA, 18 bp, Artificial Sequence
  Synthetic: FXN 3 reverse 9:69043141-69043163; As/LbCpf1
ttggaccttggctgggaa

SEQ ID NO: 10158 - DNA, 19 bp, Artificial Sequence
  Synthetic: FXN 3 reverse 9:69043141-69043164; As/LbCpf1
ttggaccttggctgggaac

SEQ ID NO: 10159 - DNA, 20 bp, Artificial Sequence
  Synthetic: FXN 3 reverse 9:69043141-69043165; As/LbCpf1
ttggaccttggctgggaaca

SEQ ID NO: 10160 - DNA, 21 bp, Artificial Sequence
  Synthetic: FXN 3 reverse 9:69043141-69043166; As/LbCpf1
ttggaccttggctgggaacat

SEQ ID NO: 10161 - DNA, 22 bp, Artificial Sequence
  Synthetic: FXN 3 reverse 9:69043141-69043167; As/LbCpf1
ttggaccttggctgggaacatg

SEQ ID NO: 10162 - DNA, 23 bp, Artificial Sequence
  Synthetic: FXN 3 reverse 9:69043141-69043168; As/LbCpf1
ttggaccttggctgggaacatga

SEQ ID NO: 10163 - DNA, 24 bp, Artificial Sequence
  Synthetic: FXN 3 reverse 9:69043141-69043169; As/LbCpf1
ttggaccttggctgggaacatgag

SEQ ID NO: 10164 - DNA, 25 bp, Artificial Sequence
  Synthetic: FXN 3 reverse 9:69043141-69043170; As/LbCpf1
ttggaccttggctgggaacatgagc

SEQ ID NO: 10165 - DNA, 18 bp, Artificial Sequence
  Synthetic: FXN 3 reverse 9:69043181-69043203; As/LbCpf1
cactatgacagctgaaat

SEQ ID NO: 10166 - DNA, 19 bp, Artificial Sequence
  Synthetic: FXN 3 reverse 9:69043181-69043204; As/LbCpf1
cactatgacagctgaaata

SEQ ID NO: 10167 - DNA, 20 bp, Artificial Sequence
  Synthetic: FXN 3 reverse 9:69043181-69043205; As/LbCpf1
cactatgacagctgaaataa

SEQ ID NO: 10168 - DNA, 21 bp, Artificial Sequence
  Synthetic: FXN 3 reverse 9:69043181-69043206; As/LbCpf1
cactatgacagctgaaataag

SEQ ID NO: 10169 - DNA, 22 bp, Artificial Sequence
  Synthetic: FXN 3 reverse 9:69043181-69043207; As/LbCpf1
cactatgacagctgaaataaga

SEQ ID NO: 10170 - DNA, 23 bp, Artificial Sequence
  Synthetic: FXN 3 reverse 9:69043181-69043208; As/LbCpf1
cactatgacagctgaaataagaa

SEQ ID NO: 10171 - DNA, 24 bp, Artificial Sequence
  Synthetic: FXN 3 reverse 9:69043181-69043209; As/LbCpf1
cactatgacagctgaaataagaag

SEQ ID NO: 10172 - DNA, 25 bp, Artificial Sequence
  Synthetic: FXN 3 reverse 9:69043181-69043210; As/LbCpf1
cactatgacagctgaaataagaagg

SEQ ID NO: 10173 - DNA, 18 bp, Artificial Sequence
  Synthetic: FXN 3 forward 9:69043189-69043211; As/LbCpf1
agctgtcatagtgtaaac

SEQ ID NO: 10174 - DNA, 19 bp, Artificial Sequence
  Synthetic: FXN 3 forward 9:69043189-69043212; As/LbCpf1
agctgtcatagtgtaaact

SEQ ID NO: 10175 - DNA, 20 bp, Artificial Sequence
  Synthetic: FXN 3 forward 9:69043189-69043213; As/LbCpf1
agctgtcatagtgtaaactg

SEQ ID NO: 10176 - DNA, 21 bp, Artificial Sequence
  Synthetic: FXN 3 forward 9:69043189-69043214; As/LbCpf1
agctgtcatagtgtaaactgt

SEQ ID NO: 10177 - DNA, 22 bp, Artificial Sequence
  Synthetic: FXN 3 forward 9:69043189-69043215; As/LbCpf1
agctgtcatagtgtaaactgtg

SEQ ID NO: 10178 - DNA, 23 bp, Artificial Sequence
  Synthetic: FXN 3 forward 9:69043189-69043216; As/LbCpf1
agctgtcatagtgtaaactgtgt

SEQ ID NO: 10179 - DNA, 24 bp, Artificial Sequence
  Synthetic: FXN 3 forward 9:69043189-69043217; As/LbCpf1
agctgtcatagtgtaaactgtgtc

SEQ ID NO: 10180 - DNA, 25 bp, Artificial Sequence
  Synthetic: FXN 3 forward 9:69043189-69043218; As/LbCpf1
agctgtcatagtgtaaactgtgtcc

SEQ ID NO: 10181 - DNA, 18 bp, Artificial Sequence
  Synthetic: FXN 3 forward 9:69043218-69043240; As/LbCpf1
cacagtctgattagtgcc

SEQ ID NO: 10182 - DNA, 19 bp, Artificial Sequence
  Synthetic: FXN 3 forward 9:69043218-69043241; As/LbCpf1
cacagtctgattagtgcca

SEQ ID NO: 10183 - DNA, 20 bp, Artificial Sequence
  Synthetic: FXN 3 forward 9:69043218-69043242; As/LbCpf1
cacagtctgattagtgccat

SEQ ID NO: 10184 - DNA, 21 bp, Artificial Sequence
  Synthetic: FXN 3 forward 9:69043218-69043243; As/LbCpf1
cacagtctgattagtgccatg

SEQ ID NO: 10185 - DNA, 22 bp, Artificial Sequence
  Synthetic: FXN 3 forward 9:69043218-69043244; As/LbCpf1
cacagtctgattagtgccatgt

SEQ ID NO: 10186 - DNA, 23 bp, Artificial Sequence
  Synthetic: FXN 3 forward 9:69043218-69043245; As/LbCpf1
cacagtctgattagtgccatgtt

SEQ ID NO: 10187 - DNA, 24 bp, Artificial Sequence
  Synthetic: FXN 3 forward 9:69043218-69043246; As/LbCpf1
cacagtctgattagtgccatgttt

SEQ ID NO: 10188 - DNA, 25 bp, Artificial Sequence
  Synthetic: FXN 3 forward 9:69043218-69043247; As/LbCpf1
cacagtctgattagtgccatgtttt

SEQ ID NO: 10189 - DNA, 18 bp, Artificial Sequence
  Synthetic: FXN 3 forward 9:69043219-69043241; As/LbCpf1
acagtctgattagtgcca

SEQ ID NO: 10190 - DNA, 19 bp, Artificial Sequence
  Synthetic: FXN 3 forward 9:69043219-69043242; As/LbCpf1
acagtctgattagtgccat

SEQ ID NO: 10191 - DNA, 20 bp, Artificial Sequence
  Synthetic: FXN 3 forward 9:69043219-69043243; As/LbCpf1
acagtctgattagtgccatg

SEQ ID NO: 10192 - DNA, 21 bp, Artificial Sequence
  Synthetic: FXN 3 forward 9:69043219-69043244; As/LbCpf1
acagtctgattagtgccatgt

SEQ ID NO: 10193 - DNA, 22 bp, Artificial Sequence
  Synthetic: FXN 3 forward 9:69043219-69043245; As/LbCpf1
acagtctgattagtgccatgtt

SEQ ID NO: 10194 - DNA, 23 bp, Artificial Sequence
  Synthetic: FXN 3 forward 9:69043219-69043246; As/LbCpf1
acagtctgattagtgccatgttt

SEQ ID NO: 10195 - DNA, 24 bp, Artificial Sequence
  Synthetic: FXN 3 forward 9:69043219-69043247; As/LbCpf1
acagtctgattagtgccatgtttt

SEQ ID NO: 10196 - DNA, 25 bp, Artificial Sequence
  Synthetic: FXN 3 forward 9:69043219-69043248; As/LbCpf1
acagtctgattagtgccatgttttt

SEQ ID NO: 10197 - DNA, 18 bp, Artificial Sequence
  Synthetic: FXN 3 forward 9:69043243-69043265; As/LbCpf1
tcagatttttatgctttt

SEQ ID NO: 10198 - DNA, 19 bp, Artificial Sequence
  Synthetic: FXN 3 forward 9:69043243-69043266; As/LbCpf1
tcagatttttatgcttttt

SEQ ID NO: 10199 - DNA, 20 bp, Artificial Sequence
  Synthetic: FXN 3 forward 9:69043243-69043267; As/LbCpf1
tcagatttttatgctttttt

SEQ ID NO: 10200 - DNA, 21 bp, Artificial Sequence
  Synthetic: FXN 3 forward 9:69043243-69043268; As/LbCpf1
tcagatttttatgcttttttc

SEQ ID NO: 10201 - DNA, 22 bp, Artificial Sequence
  Synthetic: FXN 3 forward 9:69043243-69043269; As/LbCpf1
tcagatttttatgcttttttct

SEQ ID NO: 10202 - DNA, 23 bp, Artificial Sequence
  Synthetic: FXN 3 forward 9:69043243-69043270; As/LbCpf1
tcagatttttatgcttttttctt

SEQ ID NO: 10203 - DNA, 24 bp, Artificial Sequence
  Synthetic: FXN 3 forward 9:69043243-69043271; As/LbCpf1
tcagatttttatgcttttttcttg

SEQ ID NO: 10204 - DNA, 25 bp, Artificial Sequence
  Synthetic: FXN 3 forward 9:69043243-69043272; As/LbCpf1
tcagatttttatgcttttttcttgg

SEQ ID NO: 10205 - DNA, 18 bp, Artificial Sequence
  Synthetic: FXN 3 forward 9:69043244-69043266; As/LbCpf1
cagatttttatgcttttt

SEQ ID NO: 10206 - DNA, 19 bp, Artificial Sequence
  Synthetic: FXN 3 forward 9:69043244-69043267; As/LbCpf1
cagatttttatgctttttt

SEQ ID NO: 10207 - DNA, 20 bp, Artificial Sequence
  Synthetic: FXN 3 forward 9:69043244-69043268; As/LbCpf1
cagatttttatgcttttttc

SEQ ID NO: 10208 - DNA, 21 bp, Artificial Sequence
  Synthetic: FXN 3 forward 9:69043244-69043269; As/LbCpf1
cagatttttatgcttttttct

SEQ ID NO: 10209 - DNA, 22 bp, Artificial Sequence
  Synthetic: FXN 3 forward 9:69043244-69043270; As/LbCpf1
cagatttttatgcttttttctt

SEQ ID NO: 10210 - DNA, 23 bp, Artificial Sequence
  Synthetic: FXN 3 forward 9:69043244-69043271; As/LbCpf1
cagatttttatgcttttttcttg

SEQ ID NO: 10211 - DNA, 24 bp, Artificial Sequence
  Synthetic: FXN 3 forward 9:69043244-69043272; As/LbCpf1
cagatttttatgcttttttcttgg

SEQ ID NO: 10212 - DNA, 25 bp, Artificial Sequence
  Synthetic: FXN 3 forward 9:69043244-69043273; As/LbCpf1
cagatttttatgcttttttcttggt

SEQ ID NO: 10213 - DNA, 18 bp, Artificial Sequence
  Synthetic: FXN 3 forward 9:69043245-69043267; As/LbCpf1
agatttttatgctttttt

SEQ ID NO: 10214 - DNA, 19 bp, Artificial Sequence
  Synthetic: FXN 3 forward 9:69043245-69043268; As/LbCpf1
agatttttatgcttttttc

SEQ ID NO: 10215 - DNA, 20 bp, Artificial Sequence
  Synthetic: FXN 3 forward 9:69043245-69043269; As/LbCpf1
agatttttatgcttttttct

SEQ ID NO: 10216 - DNA, 21 bp, Artificial Sequence
  Synthetic: FXN 3 forward 9:69043245-69043270; As/LbCpf1
agatttttatgcttttttctt

SEQ ID NO: 10217 - DNA, 22 bp, Artificial Sequence
  Synthetic: FXN 3 forward 9:69043245-69043271; As/LbCpf1
agatttttatgcttttttcttg

SEQ ID NO: 10218 - DNA, 23 bp, Artificial Sequence
  Synthetic: FXN 3 forward 9:69043245-69043272; As/LbCpf1
agatttttatgcttttttcttgg

SEQ ID NO: 10219 - DNA, 24 bp, Artificial Sequence
  Synthetic: FXN 3 forward 9:69043245-69043273; As/LbCpf1
agatttttatgcttttttcttggt

SEQ ID NO: 10220 - DNA, 25 bp, Artificial Sequence
  Synthetic: FXN 3 forward 9:69043245-69043274; As/LbCpf1
agatttttatgcttttttcttggtt

SEQ ID NO: 10221 - DNA, 18 bp, Artificial Sequence
  Synthetic: FXN 3 forward 9:69043252-69043274; As/LbCpf1
tatgcttttttcttggtt

SEQ ID NO: 10222 - DNA, 19 bp, Artificial Sequence
  Synthetic: FXN 3 forward 9:69043252-69043275; As/LbCpf1
tatgcttttttcttggtta

SEQ ID NO: 10223 - DNA, 20 bp, Artificial Sequence
  Synthetic: FXN 3 forward 9:69043252-69043276; As/LbCpf1
tatgcttttttcttggttat

SEQ ID NO: 10224 - DNA, 21 bp, Artificial Sequence
  Synthetic: FXN 3 forward 9:69043252-69043277; As/LbCpf1
tatgcttttttcttggttatt

SEQ ID NO: 10225 - DNA, 22 bp, Artificial Sequence
  Synthetic: FXN 3 forward 9:69043252-69043278; As/LbCpf1
tatgcttttttcttggttattt

SEQ ID NO: 10226 - DNA, 23 bp, Artificial Sequence
  Synthetic: FXN 3 forward 9:69043252-69043279; As/LbCpf1
tatgcttttttcttggttatttc

SEQ ID NO: 10227 - DNA, 24 bp, Artificial Sequence
  Synthetic: FXN 3 forward 9:69043252-69043280; As/LbCpf1
tatgcttttttcttggttatttct

SEQ ID NO: 10228 - DNA, 25 bp, Artificial Sequence
  Synthetic: FXN 3 forward 9:69043252-69043281; As/LbCpf1
tatgcttttttcttggttatttctc

SEQ ID NO: 10229 - DNA, 18 bp, Artificial Sequence
  Synthetic: FXN 3 forward 9:69043253-69043275; As/LbCpf1
atgcttttttcttggtta

SEQ ID NO: 10230 - DNA, 19 bp, Artificial Sequence
  Synthetic: FXN 3 forward 9:69043253-69043276; As/LbCpf1
atgcttttttcttggttat

SEQ ID NO: 10231 - DNA, 20 bp, Artificial Sequence
  Synthetic: FXN 3 forward 9:69043253-69043277; As/LbCpf1
atgcttttttcttggttatt

SEQ ID NO: 10232 - DNA, 21 bp, Artificial Sequence
  Synthetic: FXN 3 forward 9:69043253-69043278; As/LbCpf1
atgcttttttcttggttattt

SEQ ID NO: 10233 - DNA, 22 bp, Artificial Sequence
  Synthetic: FXN 3 forward 9:69043253-69043279; As/LbCpf1
atgcttttttcttggttatttc

SEQ ID NO: 10234 - DNA, 23 bp, Artificial Sequence
  Synthetic: FXN 3 forward 9:69043253-69043280; As/LbCpf1
atgcttttttcttggttatttct

SEQ ID NO: 10235 - DNA, 24 bp, Artificial Sequence
  Synthetic: FXN 3 forward 9:69043253-69043281; As/LbCpf1
atgcttttttcttggttatttctc

SEQ ID NO: 10236 - DNA, 25 bp, Artificial Sequence
  Synthetic: FXN 3 forward 9:69043253-69043282; As/LbCpf1
atgcttttttcttggttatttctct

SEQ ID NO: 10237 - DNA, 18 bp, Artificial Sequence
  Synthetic: FXN 3 forward 9:69043254-69043276; As/LbCpf1
tgcttttttcttggttat

SEQ ID NO: 10238 - DNA, 19 bp, Artificial Sequence
  Synthetic: FXN 3 forward 9:69043254-69043277; As/LbCpf1
tgcttttttcttggttatt

SEQ ID NO: 10239 - DNA, 20 bp, Artificial Sequence
  Synthetic: FXN 3 forward 9:69043254-69043278; As/LbCpf1
tgcttttttcttggttattt

SEQ ID NO: 10240 - DNA, 21 bp, Artificial Sequence
  Synthetic: FXN 3 forward 9:69043254-69043279; As/LbCpf1
tgcttttttcttggttatttc

SEQ ID NO: 10241 - DNA, 22 bp, Artificial Sequence
  Synthetic: FXN 3 forward 9:69043254-69043280; As/LbCpf1
tgcttttttcttggttatttct

SEQ ID NO: 10242 - DNA, 23 bp, Artificial Sequence
  Synthetic: FXN 3 forward 9:69043254-69043281; As/LbCpf1
tgcttttttcttggttatttctc

SEQ ID NO: 10243 - DNA, 24 bp, Artificial Sequence
  Synthetic: FXN 3 forward 9:69043254-69043282; As/LbCpf1
tgcttttttcttggttatttctct

SEQ ID NO: 10244 - DNA, 25 bp, Artificial Sequence
  Synthetic: FXN 3 forward 9:69043254-69043283; As/LbCpf1
tgcttttttcttggttatttctctg

SEQ ID NO: 10245 - DNA, 18 bp, Artificial Sequence
  Synthetic: FXN 3 reverse 9:69043259-69043281; As/LbCpf1
acagagaaataaccaaga

SEQ ID NO: 10246 - DNA, 19 bp, Artificial Sequence
  Synthetic: FXN 3 reverse 9:69043259-69043282; As/LbCpf1
acagagaaataaccaagaa

SEQ ID NO: 10247 - DNA, 20 bp, Artificial Sequence
  Synthetic: FXN 3 reverse 9:69043259-69043283; As/LbCpf1
acagagaaataaccaagaaa

SEQ ID NO: 10248 - DNA, 21 bp, Artificial Sequence
  Synthetic: FXN 3 reverse 9:69043259-69043284; As/LbCpf1
acagagaaataaccaagaaaa

SEQ ID NO: 10249 - DNA, 22 bp, Artificial Sequence
  Synthetic: FXN 3 reverse 9:69043259-69043285; As/LbCpf1
acagagaaataaccaagaaaaa

SEQ ID NO: 10250 - DNA, 23 bp, Artificial Sequence
  Synthetic: FXN 3 reverse 9:69043259-69043286; As/LbCpf1
acagagaaataaccaagaaaaaa

SEQ ID NO: 10251 - DNA, 24 bp, Artificial Sequence
  Synthetic: FXN 3 reverse 9:69043259-69043287; As/LbCpf1
acagagaaataaccaagaaaaaag

SEQ ID NO: 10252 - DNA, 25 bp, Artificial Sequence
  Synthetic: FXN 3 reverse 9:69043259-69043288; As/LbCpf1
acagagaaataaccaagaaaaaagc

SEQ ID NO: 10253 - DNA, 18 bp, Artificial Sequence
  Synthetic: FXN 3 reverse 9:69043260-69043282; As/LbCpf1
aacagagaaataaccaag

SEQ ID NO: 10254 - DNA, 19 bp, Artificial Sequence
  Synthetic: FXN 3 reverse 9:69043260-69043283; As/LbCpf1
aacagagaaataaccaaga

SEQ ID NO: 10255 - DNA, 20 bp, Artificial Sequence
  Synthetic: FXN 3 reverse 9:69043260-69043284; As/LbCpf1
aacagagaaataaccaagaa

SEQ ID NO: 10256 - DNA, 21 bp, Artificial Sequence
  Synthetic: FXN 3 reverse 9:69043260-69043285; As/LbCpf1
aacagagaaataaccaagaaa

SEQ ID NO: 10257 - DNA, 22 bp, Artificial Sequence
  Synthetic: FXN 3 reverse 9:69043260-69043286; As/LbCpf1
aacagagaaataaccaagaaaa

SEQ ID NO: 10258 - DNA, 23 bp, Artificial Sequence
  Synthetic: FXN 3 reverse 9:69043260-69043287; As/LbCpf1
aacagagaaataaccaagaaaaa

SEQ ID NO: 10259 - DNA, 24 bp, Artificial Sequence
  Synthetic: FXN 3 reverse 9:69043260-69043288; As/LbCpf1
aacagagaaataaccaagaaaaaa

SEQ ID NO: 10260 - DNA, 25 bp, Artificial Sequence
  Synthetic: FXN 3 reverse 9:69043260-69043289; As/LbCpf1
aacagagaaataaccaagaaaaaag

SEQ ID NO: 10261 - DNA, 18 bp, Artificial Sequence
  Synthetic: FXN 3 forward 9:69043261-69043283; As/LbCpf1
ttcttggttatttctctg

SEQ ID NO: 10262 - DNA, 19 bp, Artificial Sequence
  Synthetic: FXN 3 forward 9:69043261-69043284; As/LbCpf1
ttcttggttatttctctgt

SEQ ID NO: 10263 - DNA, 20 bp, Artificial Sequence
  Synthetic: FXN 3 forward 9:69043261-69043285; As/LbCpf1
ttcttggttatttctctgtt

SEQ ID NO: 10264 - DNA, 21 bp, Artificial Sequence
  Synthetic: FXN 3 forward 9:69043261-69043286; As/LbCpf1
ttcttggttatttctctgtta

SEQ ID NO: 10265 - DNA, 22 bp, Artificial Sequence
  Synthetic: FXN 3 forward 9:69043261-69043287; As/LbCpf1
ttcttggttatttctctgttaa

SEQ ID NO: 10266 - DNA, 23 bp, Artificial Sequence
  Synthetic: FXN 3 forward 9:69043261-69043288; As/LbCpf1
ttcttggttatttctctgttaaa

SEQ ID NO: 10267 - DNA, 24 bp, Artificial Sequence
  Synthetic: FXN 3 forward 9:69043261-69043289; As/LbCpf1
ttcttggttatttctctgttaaaa

SEQ ID NO: 10268 - DNA, 25 bp, Artificial Sequence
  Synthetic: FXN 3 forward 9:69043261-69043290; As/LbCpf1
ttcttggttatttctctgttaaaat

SEQ ID NO: 10269 - DNA, 18 bp, Artificial Sequence
  Synthetic: FXN 3 forward 9:69043262-69043284; As/LbCpf1
tcttggttatttctctgt

SEQ ID NO: 10270 - DNA, 19 bp, Artificial Sequence
  Synthetic: FXN 3 forward 9:69043262-69043285; As/LbCpf1
tcttggttatttctctgtt

SEQ ID NO: 10271 - DNA, 20 bp, Artificial Sequence
  Synthetic: FXN 3 forward 9:69043262-69043286; As/LbCpf1
tcttggttatttctctgtta

SEQ ID NO: 10272 - DNA, 21 bp, Artificial Sequence
  Synthetic: FXN 3 forward 9:69043262-69043287; As/LbCpf1
tcttggttatttctctgttaa

SEQ ID NO: 10273 - DNA, 22 bp, Artificial Sequence
  Synthetic: FXN 3 forward 9:69043262-69043288; As/LbCpf1
tcttggttatttctctgttaaa

SEQ ID NO: 10274 - DNA, 23 bp, Artificial Sequence
  Synthetic: FXN 3 forward 9:69043262-69043289; As/LbCpf1
tcttggttatttctctgttaaaa

SEQ ID NO: 10275 - DNA, 24 bp, Artificial Sequence
  Synthetic: FXN 3 forward 9:69043262-69043290; As/LbCpf1
tcttggttatttctctgttaaaat

SEQ ID NO: 10276 - DNA, 25 bp, Artificial Sequence
  Synthetic: FXN 3 forward 9:69043262-69043291; As/LbCpf1
tcttggttatttctctgttaaaatt

SEQ ID NO: 10277 - DNA, 18 bp, Artificial Sequence
  Synthetic: FXN 3 forward 9:69043263-69043285; As/LbCpf1
cttggttatttctctgtt

SEQ ID NO: 10278 - DNA, 19 bp, Artificial Sequence
  Synthetic: FXN 3 forward 9:69043263-69043286; As/LbCpf1
cttggttatttctctgtta

SEQ ID NO: 10279 - DNA, 20 bp, Artificial Sequence
  Synthetic: FXN 3 forward 9:69043263-69043287; As/LbCpf1
cttggttatttctctgttaa

SEQ ID NO: 10280 - DNA, 21 bp, Artificial Sequence
  Synthetic: FXN 3 forward 9:69043263-69043288; As/LbCpf1
cttggttatttctctgttaaa

SEQ ID NO: 10281 - DNA, 22 bp, Artificial Sequence
  Synthetic: FXN 3 forward 9:69043263-69043289; As/LbCpf1
cttggttatttctctgttaaaa

SEQ ID NO: 10282 - DNA, 23 bp, Artificial Sequence
  Synthetic: FXN 3 forward 9:69043263-69043290; As/LbCpf1
cttggttatttctctgttaaaat

SEQ ID NO: 10283 - DNA, 24 bp, Artificial Sequence
  Synthetic: FXN 3 forward 9:69043263-69043291; As/LbCpf1
cttggttatttctctgttaaaatt

SEQ ID NO: 10284 - DNA, 25 bp, Artificial Sequence
  Synthetic: FXN 3 forward 9:69043263-69043292; As/LbCpf1
cttggttatttctctgttaaaattg

SEQ ID NO: 10285 - DNA, 18 bp, Artificial Sequence
  Synthetic: FXN 3 forward 9:69043264-69043286; As/LbCpf1
ttggttatttctctgtta

SEQ ID NO: 10286 - DNA, 19 bp, Artificial Sequence
  Synthetic: FXN 3 forward 9:69043264-69043287; As/LbCpf1
ttggttatttctctgttaa

SEQ ID NO: 10287 - DNA, 20 bp, Artificial Sequence
  Synthetic: FXN 3 forward 9:69043264-69043288; As/LbCpf1
ttggttatttctctgttaaa

SEQ ID NO: 10288 - DNA, 21 bp, Artificial Sequence
  Synthetic: FXN 3 forward 9:69043264-69043289; As/LbCpf1
ttggttatttctctgttaaaa

SEQ ID NO: 10289 - DNA, 22 bp, Artificial Sequence
  Synthetic: FXN 3 forward 9:69043264-69043290; As/LbCpf1
ttggttatttctctgttaaaat

SEQ ID NO: 10290 - DNA, 23 bp, Artificial Sequence
  Synthetic: FXN 3 forward 9:69043264-69043291; As/LbCpf1
ttggttatttctctgttaaaatt

SEQ ID NO: 10291 - DNA, 24 bp, Artificial Sequence
  Synthetic: FXN 3 forward 9:69043264-69043292; As/LbCpf1
ttggttatttctctgttaaaattg

SEQ ID NO: 10292 - DNA, 25 bp, Artificial Sequence
  Synthetic: FXN 3 forward 9:69043264-69043293; As/LbCpf1
ttggttatttctctgttaaaattgt

SEQ ID NO: 10293 - DNA, 18 bp, Artificial Sequence
  Synthetic: FXN 3 forward 9:69043275-69043297; As/LbCpf1
tctgttaaaattgtctcc

SEQ ID NO: 10294 - DNA, 19 bp, Artificial Sequence
  Synthetic: FXN 3 forward 9:69043275-69043298; As/LbCpf1
tctgttaaaattgtctcca

SEQ ID NO: 10295 - DNA, 20 bp, Artificial Sequence
  Synthetic: FXN 3 forward 9:69043275-69043299; As/LbCpf1
tctgttaaaattgtctccaa

SEQ ID NO: 10296 - DNA, 21 bp, Artificial Sequence
  Synthetic: FXN 3 forward 9:69043275-69043300; As/LbCpf1
tctgttaaaattgtctccaag

SEQ ID NO: 10297 - DNA, 22 bp, Artificial Sequence
  Synthetic: FXN 3 forward 9:69043275-69043301; As/LbCpf1
tctgttaaaattgtctccaagt

SEQ ID NO: 10298 - DNA, 23 bp, Artificial Sequence
  Synthetic: FXN 3 forward 9:69043275-69043302; As/LbCpf1
tctgttaaaattgtctccaagtg

SEQ ID NO: 10299 - DNA, 24 bp, Artificial Sequence
  Synthetic: FXN 3 forward 9:69043275-69043303; As/LbCpf1
tctgttaaaattgtctccaagtgt

SEQ ID NO: 10300 - DNA, 25 bp, Artificial Sequence
  Synthetic: FXN 3 forward 9:69043275-69043304; As/LbCpf1
tctgttaaaattgtctccaagtgta

SEQ ID NO: 10301 - DNA, 18 bp, Artificial Sequence
  Synthetic: FXN 3 reverse 9:69043282-69043304; As/LbCpf1
cactacacttggagacaa

SEQ ID NO: 10302 - DNA, 19 bp, Artificial Sequence
  Synthetic: FXN 3 reverse 9:69043282-69043305; As/LbCpf1
cactacacttggagacaat

SEQ ID NO: 10303 - DNA, 20 bp, Artificial Sequence
  Synthetic: FXN 3 reverse 9:69043282-69043306; As/LbCpf1
cactacacttggagacaatt

SEQ ID NO: 10304 - DNA, 21 bp, Artificial Sequence
  Synthetic: FXN 3 reverse 9:69043282-69043307; As/LbCpf1
cactacacttggagacaattt

SEQ ID NO: 10305 - DNA, 22 bp, Artificial Sequence
  Synthetic: FXN 3 reverse 9:69043282-69043308; As/LbCpf1
cactacacttggagacaatttt

SEQ ID NO: 10306 - DNA, 23 bp, Artificial Sequence
  Synthetic: FXN 3 reverse 9:69043282-69043309; As/LbCpf1
cactacacttggagacaatttta

SEQ ID NO: 10307 - DNA, 24 bp, Artificial Sequence
  Synthetic: FXN 3 reverse 9:69043282-69043310; As/LbCpf1
cactacacttggagacaattttaa

SEQ ID NO: 10308 - DNA, 25 bp, Artificial Sequence
  Synthetic: FXN 3 reverse 9:69043282-69043311; As/LbCpf1
cactacacttggagacaattttaac

SEQ ID NO: 10309 - DNA, 18 bp, Artificial Sequence
  Synthetic: FXN 3 forward 9:69043312-69043334; As/LbCpf1
gcacgaggaggctgtgat

SEQ ID NO: 10310 - DNA, 19 bp, Artificial Sequence
  Synthetic: FXN 3 forward 9:69043312-69043335; As/LbCpf1
gcacgaggaggctgtgatg

SEQ ID NO: 10311 - DNA, 20 bp, Artificial Sequence
  Synthetic: FXN 3 forward 9:69043312-69043336; As/LbCpf1
gcacgaggaggctgtgatgt

SEQ ID NO: 10312 - DNA, 21 bp, Artificial Sequence
  Synthetic: FXN 3 forward 9:69043312-69043337; As/LbCpf1
gcacgaggaggctgtgatgtt

SEQ ID NO: 10313 - DNA, 22 bp, Artificial Sequence
  Synthetic: FXN 3 forward 9:69043312-69043338; As/LbCpf1
gcacgaggaggctgtgatgttc

SEQ ID NO: 10314 - DNA, 23 bp, Artificial Sequence
  Synthetic: FXN 3 forward 9:69043312-69043339; As/LbCpf1
gcacgaggaggctgtgatgttcc

SEQ ID NO: 10315 - DNA, 24 bp, Artificial Sequence
  Synthetic: FXN 3 forward 9:69043312-69043340; As/LbCpf1
gcacgaggaggctgtgatgttcct

SEQ ID NO: 10316 - DNA, 25 bp, Artificial Sequence
  Synthetic: FXN 3 forward 9:69043312-69043341; As/LbCpf1
gcacgaggaggctgtgatgttcctt

SEQ ID NO: 10317 - DNA, 18 bp, Artificial Sequence
  Synthetic: FXN 3 reverse 9:69043321-69043343; As/LbCpf1
tctgtaaggaacatcaca

SEQ ID NO: 10318 - DNA, 19 bp, Artificial Sequence
  Synthetic: FXN 3 reverse 9:69043321-69043344; As/LbCpf1
tctgtaaggaacatcacag

SEQ ID NO: 10319 - DNA, 20 bp, Artificial Sequence
  Synthetic: FXN 3 reverse 9:69043321-69043345; As/LbCpf1
tctgtaaggaacatcacagc

SEQ ID NO: 10320 - DNA, 21 bp, Artificial Sequence
  Synthetic: FXN 3 reverse 9:69043321-69043346; As/LbCpf1
tctgtaaggaacatcacagcc

SEQ ID NO: 10321 - DNA, 22 bp, Artificial Sequence
  Synthetic: FXN 3 reverse 9:69043321-69043347; As/LbCpf1
tctgtaaggaacatcacagcct

SEQ ID NO: 10322 - DNA, 23 bp, Artificial Sequence
  Synthetic: FXN 3 reverse 9:69043321-69043348; As/LbCpf1
tctgtaaggaacatcacagcctc

SEQ ID NO: 10323 - DNA, 24 bp, Artificial Sequence
  Synthetic: FXN 3 reverse 9:69043321-69043349; As/LbCpf1
tctgtaaggaacatcacagcctcc

SEQ ID NO: 10324 - DNA, 25 bp, Artificial Sequence
  Synthetic: FXN 3 reverse 9:69043321-69043350; As/LbCpf1
tctgtaaggaacatcacagcctcct

SEQ ID NO: 10325 - DNA, 18 bp, Artificial Sequence
  Synthetic: FXN 3 reverse 9:69043322-69043344; As/LbCpf1
ctctgtaaggaacatcac

SEQ ID NO: 10326 - DNA, 19 bp, Artificial Sequence
  Synthetic: FXN 3 reverse 9:69043322-69043345; As/LbCpf1
ctctgtaaggaacatcaca

SEQ ID NO: 10327 - DNA, 20 bp, Artificial Sequence
  Synthetic: FXN 3 reverse 9:69043322-69043346; As/LbCpf1
ctctgtaaggaacatcacag

SEQ ID NO: 10328 - DNA, 21 bp, Artificial Sequence
  Synthetic: FXN 3 reverse 9:69043322-69043347; As/LbCpf1
ctctgtaaggaacatcacagc

SEQ ID NO: 10329 - DNA, 22 bp, Artificial Sequence
  Synthetic: FXN 3 reverse 9:69043322-69043348; As/LbCpf1
ctctgtaaggaacatcacagcc

SEQ ID NO: 10330 - DNA, 23 bp, Artificial Sequence
  Synthetic: FXN 3 reverse 9:69043322-69043349; As/LbCpf1
ctctgtaaggaacatcacagcct

SEQ ID NO: 10331 - DNA, 24 bp, Artificial Sequence
  Synthetic: FXN 3 reverse 9:69043322-69043350; As/LbCpf1
ctctgtaaggaacatcacagcctc

SEQ ID NO: 10332 - DNA, 25 bp, Artificial Sequence
  Synthetic: FXN 3 reverse 9:69043322-69043351; As/LbCpf1
ctctgtaaggaacatcacagcctcc

SEQ ID NO: 10333 - DNA, 18 bp, Artificial Sequence
  Synthetic: FXN 3 forward 9:69043369-69043391; As/LbCpf1
tcaggcatgagttaaggt

SEQ ID NO: 10334 - DNA, 19 bp, Artificial Sequence
  Synthetic: FXN 3 forward 9:69043369-69043392; As/LbCpf1
tcaggcatgagttaaggtg

SEQ ID NO: 10335 - DNA, 20 bp, Artificial Sequence
  Synthetic: FXN 3 forward 9:69043369-69043393; As/LbCpf1
tcaggcatgagttaaggtgc

SEQ ID NO: 10336 - DNA, 21 bp, Artificial Sequence
  Synthetic: FXN 3 forward 9:69043369-69043394; As/LbCpf1
tcaggcatgagttaaggtgct

SEQ ID NO: 10337 - DNA, 22 bp, Artificial Sequence
  Synthetic: FXN 3 forward 9:69043369-69043395; As/LbCpf1
tcaggcatgagttaaggtgctg

SEQ ID NO: 10338 - DNA, 23 bp, Artificial Sequence
  Synthetic: FXN 3 forward 9:69043369-69043396; As/LbCpf1
tcaggcatgagttaaggtgctgt

SEQ ID NO: 10339 - DNA, 24 bp, Artificial Sequence
  Synthetic: FXN 3 forward 9:69043369-69043397; As/LbCpf1
tcaggcatgagttaaggtgctgtt

SEQ ID NO: 10340 - DNA, 25 bp, Artificial Sequence
  Synthetic: FXN 3 forward 9:69043369-69043398; As/LbCpf1
tcaggcatgagttaaggtgctgttg

SEQ ID NO: 10341 - DNA, 18 bp, Artificial Sequence
  Synthetic: FXN 3 forward 9:69043414-69043436; As/LbCpf1
ttgttgttgttgtttgag

SEQ ID NO: 10342 - DNA, 19 bp, Artificial Sequence
  Synthetic: FXN 3 forward 9:69043414-69043437; As/LbCpf1
ttgttgttgttgtttgaga

SEQ ID NO: 10343 - DNA, 20 bp, Artificial Sequence
  Synthetic: FXN 3 forward 9:69043414-69043438; As/LbCpf1
ttgttgttgttgtttgagac

SEQ ID NO: 10344 - DNA, 21 bp, Artificial Sequence
  Synthetic: FXN 3 forward 9:69043414-69043439; As/LbCpf1
ttgttgttgttgtttgagaca

SEQ ID NO: 10345 - DNA, 22 bp, Artificial Sequence
  Synthetic: FXN 3 forward 9:69043414-69043440; As/LbCpf1
ttgttgttgttgtttgagacag

SEQ ID NO: 10346 - DNA, 23 bp, Artificial Sequence
  Synthetic: FXN 3 forward 9:69043414-69043441; As/LbCpf1
ttgttgttgttgtttgagacagg

SEQ ID NO: 10347 - DNA, 24 bp, Artificial Sequence
  Synthetic: FXN 3 forward 9:69043414-69043442; As/LbCpf1
ttgttgttgttgtttgagacaggg

SEQ ID NO: 10348 - DNA, 25 bp, Artificial Sequence
  Synthetic: FXN 3 forward 9:69043414-69043443; As/LbCpf1
ttgttgttgttgtttgagacagggt

SEQ ID NO: 10349 - DNA, 18 bp, Artificial Sequence
  Synthetic: FXN 3 forward 9:69043430-69043452; As/LbCpf1
agacagggtctccctctg

SEQ ID NO: 10350 - DNA, 19 bp, Artificial Sequence
  Synthetic: FXN 3 forward 9:69043430-69043453; As/LbCpf1
agacagggtctccctctgt

SEQ ID NO: 10351 - DNA, 20 bp, Artificial Sequence
  Synthetic: FXN 3 forward 9:69043430-69043454; As/LbCpf1
agacagggtctccctctgtt

SEQ ID NO: 10352 - DNA, 21 bp, Artificial Sequence
  Synthetic: FXN 3 forward 9:69043430-69043455; As/LbCpf1
agacagggtctccctctgttg

SEQ ID NO: 10353 - DNA, 22 bp, Artificial Sequence
  Synthetic: FXN 3 forward 9:69043430-69043456; As/LbCpf1
agacagggtctccctctgttgc

SEQ ID NO: 10354 - DNA, 23 bp, Artificial Sequence
  Synthetic: FXN 3 forward 9:69043430-69043457; As/LbCpf1
agacagggtctccctctgttgcc

SEQ ID NO: 10355 - DNA, 24 bp, Artificial Sequence
  Synthetic: FXN 3 forward 9:69043430-69043458; As/LbCpf1
agacagggtctccctctgttgccc

SEQ ID NO: 10356 - DNA, 25 bp, Artificial Sequence
  Synthetic: FXN 3 forward 9:69043430-69043459; As/LbCpf1
agacagggtctccctctgttgccca

SEQ ID NO: 10357 - DNA, 18 bp, Artificial Sequence
  Synthetic: FXN 3 forward 9:69043587-69043609; As/LbCpf1
tgatatttttttaggtgg

SEQ ID NO: 10358 - DNA, 19 bp, Artificial Sequence
  Synthetic: FXN 3 forward 9:69043587-69043610; As/LbCpf1
tgatatttttttaggtgga

SEQ ID NO: 10359 - DNA, 20 bp, Artificial Sequence
  Synthetic: FXN 3 forward 9:69043587-69043611; As/LbCpf1
tgatatttttttaggtggaa

SEQ ID NO: 10360 - DNA, 21 bp, Artificial Sequence
  Synthetic: FXN 3 forward 9:69043587-69043612; As/LbCpf1
tgatatttttttaggtggaat

SEQ ID NO: 10361 - DNA, 22 bp, Artificial Sequence
  Synthetic: FXN 3 forward 9:69043587-69043613; As/LbCpf1
tgatatttttttaggtggaatt

SEQ ID NO: 10362 - DNA, 23 bp, Artificial Sequence
  Synthetic: FXN 3 forward 9:69043587-69043614; As/LbCpf1
tgatatttttttaggtggaattt

SEQ ID NO: 10363 - DNA, 24 bp, Artificial Sequence
  Synthetic: FXN 3 forward 9:69043587-69043615; As/LbCpf1
tgatatttttttaggtggaatttt

SEQ ID NO: 10364 - DNA, 25 bp, Artificial Sequence
  Synthetic: FXN 3 forward 9:69043587-69043616; As/LbCpf1
tgatatttttttaggtggaattttg

SEQ ID NO: 10365 - DNA, 18 bp, Artificial Sequence
  Synthetic: FXN 3 forward 9:69043588-69043610; As/LbCpf1
gatatttttttaggtgga

SEQ ID NO: 10366 - DNA, 19 bp, Artificial Sequence
  Synthetic: FXN 3 forward 9:69043588-69043611; As/LbCpf1
gatatttttttaggtggaa

SEQ ID NO: 10367 - DNA, 20 bp, Artificial Sequence
  Synthetic: FXN 3 forward 9:69043588-69043612; As/LbCpf1
gatatttttttaggtggaat

SEQ ID NO: 10368 - DNA, 21 bp, Artificial Sequence
  Synthetic: FXN 3 forward 9:69043588-69043613; As/LbCpf1
gatatttttttaggtggaatt

SEQ ID NO: 10369 - DNA, 22 bp, Artificial Sequence
  Synthetic: FXN 3 forward 9:69043588-69043614; As/LbCpf1
gatatttttttaggtggaattt

SEQ ID NO: 10370 - DNA, 23 bp, Artificial Sequence
  Synthetic: FXN 3 forward 9:69043588-69043615; As/LbCpf1
gatatttttttaggtggaatttt

SEQ ID NO: 10371 - DNA, 24 bp, Artificial Sequence
  Synthetic: FXN 3 forward 9:69043588-69043616; As/LbCpf1
gatatttttttaggtggaattttg

SEQ ID NO: 10372 - DNA, 25 bp, Artificial Sequence
  Synthetic: FXN 3 forward 9:69043588-69043617; As/LbCpf1
gatatttttttaggtggaattttgc

SEQ ID NO: 10373 - DNA, 18 bp, Artificial Sequence
  Synthetic: FXN 3 forward 9:69043589-69043611; As/LbCpf1
atatttttttaggtggaa

SEQ ID NO: 10374 - DNA, 19 bp, Artificial Sequence
  Synthetic: FXN 3 forward 9:69043589-69043612; As/LbCpf1
atatttttttaggtggaat

SEQ ID NO: 10375 - DNA, 20 bp, Artificial Sequence
  Synthetic: FXN 3 forward 9:69043589-69043613; As/LbCpf1
atatttttttaggtggaatt

SEQ ID NO: 10376 - DNA, 21 bp, Artificial Sequence
  Synthetic: FXN 3 forward 9:69043589-69043614; As/LbCpf1
atatttttttaggtggaattt

SEQ ID NO: 10377 - DNA, 22 bp, Artificial Sequence
  Synthetic: FXN 3 forward 9:69043589-69043615; As/LbCpf1
atatttttttaggtggaatttt

SEQ ID NO: 10378 - DNA, 23 bp, Artificial Sequence
  Synthetic: FXN 3 forward 9:69043589-69043616; As/LbCpf1
atatttttttaggtggaattttg

SEQ ID NO: 10379 - DNA, 24 bp, Artificial Sequence
  Synthetic: FXN 3 forward 9:69043589-69043617; As/LbCpf1
atatttttttaggtggaattttgc

SEQ ID NO: 10380 - DNA, 25 bp, Artificial Sequence
  Synthetic: FXN 3 forward 9:69043589-69043618; As/LbCpf1
atatttttttaggtggaattttgct

SEQ ID NO: 10381 - DNA, 18 bp, Artificial Sequence
  Synthetic: FXN 3 forward 9:69043596-69043618; As/LbCpf1
tttaggtggaattttgct

SEQ ID NO: 10382 - DNA, 19 bp, Artificial Sequence
  Synthetic: FXN 3 forward 9:69043596-69043619; As/LbCpf1
tttaggtggaattttgctc

SEQ ID NO: 10383 - DNA, 20 bp, Artificial Sequence
  Synthetic: FXN 3 forward 9:69043596-69043620; As/LbCpf1
tttaggtggaattttgctca

SEQ ID NO: 10384 - DNA, 21 bp, Artificial Sequence
  Synthetic: FXN 3 forward 9:69043596-69043621; As/LbCpf1
tttaggtggaattttgctcat

SEQ ID NO: 10385 - DNA, 22 bp, Artificial Sequence
  Synthetic: FXN 3 forward 9:69043596-69043622; As/LbCpf1
tttaggtggaattttgctcatc

SEQ ID NO: 10386 - DNA, 23 bp, Artificial Sequence
  Synthetic: FXN 3 forward 9:69043596-69043623; As/LbCpf1
tttaggtggaattttgctcatca

SEQ ID NO: 10387 - DNA, 24 bp, Artificial Sequence
  Synthetic: FXN 3 forward 9:69043596-69043624; As/LbCpf1
tttaggtggaattttgctcatcac

SEQ ID NO: 10388 - DNA, 25 bp, Artificial Sequence
  Synthetic: FXN 3 forward 9:69043596-69043625; As/LbCpf1
tttaggtggaattttgctcatcacc

SEQ ID NO: 10389 - DNA, 18 bp, Artificial Sequence
  Synthetic: FXN 3 forward 9:69043597-69043619; As/LbCpf1
ttaggtggaattttgctc

SEQ ID NO: 10390 - DNA, 19 bp, Artificial Sequence
  Synthetic: FXN 3 forward 9:69043597-69043620; As/LbCpf1
ttaggtggaattttgctca

SEQ ID NO: 10391 - DNA, 20 bp, Artificial Sequence
  Synthetic: FXN 3 forward 9:69043597-69043621; As/LbCpf1
ttaggtggaattttgctcat

SEQ ID NO: 10392 - DNA, 21 bp, Artificial Sequence
  Synthetic: FXN 3 forward 9:69043597-69043622; As/LbCpf1
ttaggtggaattttgctcatc

SEQ ID NO: 10393 - DNA, 22 bp, Artificial Sequence
  Synthetic: FXN 3 forward 9:69043597-69043623; As/LbCpf1
ttaggtggaattttgctcatca

SEQ ID NO: 10394 - DNA, 23 bp, Artificial Sequence
  Synthetic: FXN 3 forward 9:69043597-69043624; As/LbCpf1
ttaggtggaattttgctcatcac

SEQ ID NO: 10395 - DNA, 24 bp, Artificial Sequence
  Synthetic: FXN 3 forward 9:69043597-69043625; As/LbCpf1
ttaggtggaattttgctcatcacc

SEQ ID NO: 10396 - DNA, 25 bp, Artificial Sequence
  Synthetic: FXN 3 forward 9:69043597-69043626; As/LbCpf1
ttaggtggaattttgctcatcaccc

SEQ ID NO: 10397 - DNA, 18 bp, Artificial Sequence
  Synthetic: FXN 3 forward 9:69043598-69043620; As/LbCpf1
taggtggaattttgctca

SEQ ID NO: 10398 - DNA, 19 bp, Artificial Sequence
  Synthetic: FXN 3 forward 9:69043598-69043621; As/LbCpf1
taggtggaattttgctcat

SEQ ID NO: 10399 - DNA, 20 bp, Artificial Sequence
  Synthetic: FXN 3 forward 9:69043598-69043622; As/LbCpf1
taggtggaattttgctcatc

SEQ ID NO: 10400 - DNA, 21 bp, Artificial Sequence
  Synthetic: FXN 3 forward 9:69043598-69043623; As/LbCpf1
taggtggaattttgctcatca

SEQ ID NO: 10401 - DNA, 22 bp, Artificial Sequence
  Synthetic: FXN 3 forward 9:69043598-69043624; As/LbCpf1
taggtggaattttgctcatcac

SEQ ID NO: 10402 - DNA, 23 bp, Artificial Sequence
  Synthetic: FXN 3 forward 9:69043598-69043625; As/LbCpf1
taggtggaattttgctcatcacc

SEQ ID NO: 10403 - DNA, 24 bp, Artificial Sequence
  Synthetic: FXN 3 forward 9:69043598-69043626; As/LbCpf1
taggtggaattttgctcatcaccc

SEQ ID NO: 10404 - DNA, 25 bp, Artificial Sequence
  Synthetic: FXN 3 forward 9:69043598-69043627; As/LbCpf1
taggtggaattttgctcatcaccca

SEQ ID NO: 10405 - DNA, 18 bp, Artificial Sequence
  Synthetic: FXN 3 forward 9:69043599-69043621; As/LbCpf1
aggtggaattttgctcat

SEQ ID NO: 10406 - DNA, 19 bp, Artificial Sequence
  Synthetic: FXN 3 forward 9:69043599-69043622; As/LbCpf1
aggtggaattttgctcatc

SEQ ID NO: 10407 - DNA, 20 bp, Artificial Sequence
  Synthetic: FXN 3 forward 9:69043599-69043623; As/LbCpf1
aggtggaattttgctcatca

SEQ ID NO: 10408 - DNA, 21 bp, Artificial Sequence
  Synthetic: FXN 3 forward 9:69043599-69043624; As/LbCpf1
aggtggaattttgctcatcac

SEQ ID NO: 10409 - DNA, 22 bp, Artificial Sequence
  Synthetic: FXN 3 forward 9:69043599-69043625; As/LbCpf1
aggtggaattttgctcatcacc

SEQ ID NO: 10410 - DNA, 23 bp, Artificial Sequence
  Synthetic: FXN 3 forward 9:69043599-69043626; As/LbCpf1
aggtggaattttgctcatcaccc

SEQ ID NO: 10411 - DNA, 24 bp, Artificial Sequence
  Synthetic: FXN 3 forward 9:69043599-69043627; As/LbCpf1
aggtggaattttgctcatcaccca

SEQ ID NO: 10412 - DNA, 25 bp, Artificial Sequence
  Synthetic: FXN 3 forward 9:69043599-69043628; As/LbCpf1
aggtggaattttgctcatcacccag

SEQ ID NO: 10413 - DNA, 18 bp, Artificial Sequence
  Synthetic: FXN 3 forward 9:69043600-69043622; As/LbCpf1
ggtggaattttgctcatc

SEQ ID NO: 10414 - DNA, 19 bp, Artificial Sequence
  Synthetic: FXN 3 forward 9:69043600-69043623; As/LbCpf1
ggtggaattttgctcatca

SEQ ID NO: 10415 - DNA, 20 bp, Artificial Sequence
  Synthetic: FXN 3 forward 9:69043600-69043624; As/LbCpf1
ggtggaattttgctcatcac

SEQ ID NO: 10416 - DNA, 21 bp, Artificial Sequence
  Synthetic: FXN 3 forward 9:69043600-69043625; As/LbCpf1
ggtggaattttgctcatcacc

SEQ ID NO: 10417 - DNA, 22 bp, Artificial Sequence
  Synthetic: FXN 3 forward 9:69043600-69043626; As/LbCpf1
ggtggaattttgctcatcaccc

SEQ ID NO: 10418 - DNA, 23 bp, Artificial Sequence
  Synthetic: FXN 3 forward 9:69043600-69043627; As/LbCpf1
ggtggaattttgctcatcaccca

SEQ ID NO: 10419 - DNA, 24 bp, Artificial Sequence
  Synthetic: FXN 3 forward 9:69043600-69043628; As/LbCpf1
ggtggaattttgctcatcacccag

SEQ ID NO: 10420 - DNA, 25 bp, Artificial Sequence
  Synthetic: FXN 3 forward 9:69043600-69043629; As/LbCpf1
ggtggaattttgctcatcacccagg

SEQ ID NO: 10421 - DNA, 18 bp, Artificial Sequence
  Synthetic: FXN 3 forward 9:69043611-69043633; As/LbCpf1
gctcatcacccaggctgg

SEQ ID NO: 10422 - DNA, 19 bp, Artificial Sequence
  Synthetic: FXN 3 forward 9:69043611-69043634; As/LbCpf1
gctcatcacccaggctgga

SEQ ID NO: 10423 - DNA, 20 bp, Artificial Sequence
  Synthetic: FXN 3 forward 9:69043611-69043635; As/LbCpf1
gctcatcacccaggctggag

SEQ ID NO: 10424 - DNA, 21 bp, Artificial Sequence
  Synthetic: FXN 3 forward 9:69043611-69043636; As/LbCpf1
gctcatcacccaggctggagt

SEQ ID NO: 10425 - DNA, 22 bp, Artificial Sequence
  Synthetic: FXN 3 forward 9:69043611-69043637; As/LbCpf1
gctcatcacccaggctggagtg

SEQ ID NO: 10426 - DNA, 23 bp, Artificial Sequence
  Synthetic: FXN 3 forward 9:69043611-69043638; As/LbCpf1
gctcatcacccaggctggagtgc

SEQ ID NO: 10427 - DNA, 24 bp, Artificial Sequence
  Synthetic: FXN 3 forward 9:69043611-69043639; As/LbCpf1
gctcatcacccaggctggagtgca

SEQ ID NO: 10428 - DNA, 25 bp, Artificial Sequence
  Synthetic: FXN 3 forward 9:69043611-69043640; As/LbCpf1
gctcatcacccaggctggagtgcaa

SEQ ID NO: 10429 - DNA, 18 bp, Artificial Sequence
  Synthetic: FXN 3 forward 9:69043612-69043634; As/LbCpf1
ctcatcacccaggctgga

SEQ ID NO: 10430 - DNA, 19 bp, Artificial Sequence
  Synthetic: FXN 3 forward 9:69043612-69043635; As/LbCpf1
ctcatcacccaggctggag

SEQ ID NO: 10431 - DNA, 20 bp, Artificial Sequence
  Synthetic: FXN 3 forward 9:69043612-69043636; As/LbCpf1
ctcatcacccaggctggagt

SEQ ID NO: 10432 - DNA, 21 bp, Artificial Sequence
  Synthetic: FXN 3 forward 9:69043612-69043637; As/LbCpf1
ctcatcacccaggctggagtg

SEQ ID NO: 10433 - DNA, 22 bp, Artificial Sequence
  Synthetic: FXN 3 forward 9:69043612-69043638; As/LbCpf1
ctcatcacccaggctggagtgc

SEQ ID NO: 10434 - DNA, 23 bp, Artificial Sequence
  Synthetic: FXN 3 forward 9:69043612-69043639; As/LbCpf1
ctcatcacccaggctggagtgca

SEQ ID NO: 10435 - DNA, 24 bp, Artificial Sequence
  Synthetic: FXN 3 forward 9:69043612-69043640; As/LbCpf1
ctcatcacccaggctggagtgcaa

SEQ ID NO: 10436 - DNA, 25 bp, Artificial Sequence
  Synthetic: FXN 3 forward 9:69043612-69043641; As/LbCpf1
ctcatcacccaggctggagtgcaat

SEQ ID NO: 10437 - DNA, 18 bp, Artificial Sequence
  Synthetic: FXN 3 forward 9:69043750-69043772; As/LbCpf1
tgtgtttttagtagaggc

SEQ ID NO: 10438 - DNA, 19 bp, Artificial Sequence
  Synthetic: FXN 3 forward 9:69043750-69043773; As/LbCpf1
tgtgtttttagtagaggcg

SEQ ID NO: 10439 - DNA, 20 bp, Artificial Sequence
  Synthetic: FXN 3 forward 9:69043750-69043774; As/LbCpf1
tgtgtttttagtagaggcgg

SEQ ID NO: 10440 - DNA, 21 bp, Artificial Sequence
  Synthetic: FXN 3 forward 9:69043750-69043775; As/LbCpf1
tgtgtttttagtagaggcggg

SEQ ID NO: 10441 - DNA, 22 bp, Artificial Sequence
  Synthetic: FXN 3 forward 9:69043750-69043776; As/LbCpf1
tgtgtttttagtagaggcgggg

SEQ ID NO: 10442 - DNA, 23 bp, Artificial Sequence
  Synthetic: FXN 3 forward 9:69043750-69043777; As/LbCpf1
tgtgtttttagtagaggcggggt

SEQ ID NO: 10443 - DNA, 24 bp, Artificial Sequence
  Synthetic: FXN 3 forward 9:69043750-69043778; As/LbCpf1
tgtgtttttagtagaggcggggtt

SEQ ID NO: 10444 - DNA, 25 bp, Artificial Sequence
  Synthetic: FXN 3 forward 9:69043750-69043779; As/LbCpf1
tgtgtttttagtagaggcggggttt

SEQ ID NO: 10445 - DNA, 18 bp, Artificial Sequence
  Synthetic: FXN 3 forward 9:69043751-69043773; As/LbCpf1
gtgtttttagtagaggcg

SEQ ID NO: 10446 - DNA, 19 bp, Artificial Sequence
  Synthetic: FXN 3 forward 9:69043751-69043774; As/LbCpf1
gtgtttttagtagaggcgg

SEQ ID NO: 10447 - DNA, 20 bp, Artificial Sequence
  Synthetic: FXN 3 forward 9:69043751-69043775; As/LbCpf1
gtgtttttagtagaggcggg

SEQ ID NO: 10448 - DNA, 21 bp, Artificial Sequence
  Synthetic: FXN 3 forward 9:69043751-69043776; As/LbCpf1
gtgtttttagtagaggcgggg

SEQ ID NO: 10449 - DNA, 22 bp, Artificial Sequence
  Synthetic: FXN 3 forward 9:69043751-69043777; As/LbCpf1
gtgtttttagtagaggcggggt

SEQ ID NO: 10450 - DNA, 23 bp, Artificial Sequence
  Synthetic: FXN 3 forward 9:69043751-69043778; As/LbCpf1
gtgtttttagtagaggcggggtt

SEQ ID NO: 10451 - DNA, 24 bp, Artificial Sequence
  Synthetic: FXN 3 forward 9:69043751-69043779; As/LbCpf1
gtgtttttagtagaggcggggttt

SEQ ID NO: 10452 - DNA, 25 bp, Artificial Sequence
  Synthetic: FXN 3 forward 9:69043751-69043780; As/LbCpf1
gtgtttttagtagaggcggggtttc

SEQ ID NO: 10453 - DNA, 18 bp, Artificial Sequence
  Synthetic: FXN 3 forward 9:69043752-69043774; As/LbCpf1
tgtttttagtagaggcgg

SEQ ID NO: 10454 - DNA, 19 bp, Artificial Sequence
  Synthetic: FXN 3 forward 9:69043752-69043775; As/LbCpf1
tgtttttagtagaggcggg

SEQ ID NO: 10455 - DNA, 20 bp, Artificial Sequence
  Synthetic: FXN 3 forward 9:69043752-69043776; As/LbCpf1
tgtttttagtagaggcgggg

SEQ ID NO: 10456 - DNA, 21 bp, Artificial Sequence
  Synthetic: FXN 3 forward 9:69043752-69043777; As/LbCpf1
tgtttttagtagaggcggggt

SEQ ID NO: 10457 - DNA, 22 bp, Artificial Sequence
  Synthetic: FXN 3 forward 9:69043752-69043778; As/LbCpf1
tgtttttagtagaggcggggtt

SEQ ID NO: 10458 - DNA, 23 bp, Artificial Sequence
  Synthetic: FXN 3 forward 9:69043752-69043779; As/LbCpf1
tgtttttagtagaggcggggttt

SEQ ID NO: 10459 - DNA, 24 bp, Artificial Sequence
  Synthetic: FXN 3 forward 9:69043752-69043780; As/LbCpf1
tgtttttagtagaggcggggtttc

SEQ ID NO: 10460 - DNA, 25 bp, Artificial Sequence
  Synthetic: FXN 3 forward 9:69043752-69043781; As/LbCpf1
tgtttttagtagaggcggggtttca

SEQ ID NO: 10461 - DNA, 18 bp, Artificial Sequence
  Synthetic: FXN 3 forward 9:69043758-69043780; As/LbCpf1
tagtagaggcggggtttc

SEQ ID NO: 10462 - DNA, 19 bp, Artificial Sequence
  Synthetic: FXN 3 forward 9:69043758-69043781; As/LbCpf1
tagtagaggcggggtttca

SEQ ID NO: 10463 - DNA, 20 bp, Artificial Sequence
  Synthetic: FXN 3 forward 9:69043758-69043782; As/LbCpf1
tagtagaggcggggtttcac

SEQ ID NO: 10464 - DNA, 21 bp, Artificial Sequence
  Synthetic: FXN 3 forward 9:69043758-69043783; As/LbCpf1
tagtagaggcggggtttcacc

SEQ ID NO: 10465 - DNA, 22 bp, Artificial Sequence
  Synthetic: FXN 3 forward 9:69043758-69043784; As/LbCpf1
tagtagaggcggggtttcacca

SEQ ID NO: 10466 - DNA, 23 bp, Artificial Sequence
  Synthetic: FXN 3 forward 9:69043758-69043785; As/LbCpf1
tagtagaggcggggtttcaccat

SEQ ID NO: 10467 - DNA, 24 bp, Artificial Sequence
  Synthetic: FXN 3 forward 9:69043758-69043786; As/LbCpf1
tagtagaggcggggtttcaccatg

SEQ ID NO: 10468 - DNA, 25 bp, Artificial Sequence
  Synthetic: FXN 3 forward 9:69043758-69043787; As/LbCpf1
tagtagaggcggggtttcaccatgt

SEQ ID NO: 10469 - DNA, 18 bp, Artificial Sequence
  Synthetic: FXN 3 forward 9:69043759-69043781; As/LbCpf1
agtagaggcggggtttca

SEQ ID NO: 10470 - DNA, 19 bp, Artificial Sequence
  Synthetic: FXN 3 forward 9:69043759-69043782; As/LbCpf1
agtagaggcggggtttcac

SEQ ID NO: 10471 - DNA, 20 bp, Artificial Sequence
  Synthetic: FXN 3 forward 9:69043759-69043783; As/LbCpf1
agtagaggcggggtttcacc

SEQ ID NO: 10472 - DNA, 21 bp, Artificial Sequence
  Synthetic: FXN 3 forward 9:69043759-69043784; As/LbCpf1
agtagaggcggggtttcacca

SEQ ID NO: 10473 - DNA, 22 bp, Artificial Sequence
  Synthetic: FXN 3 forward 9:69043759-69043785; As/LbCpf1
agtagaggcggggtttcaccat

SEQ ID NO: 10474 - DNA, 23 bp, Artificial Sequence
  Synthetic: FXN 3 forward 9:69043759-69043786; As/LbCpf1
agtagaggcggggtttcaccatg

SEQ ID NO: 10475 - DNA, 24 bp, Artificial Sequence
  Synthetic: FXN 3 forward 9:69043759-69043787; As/LbCpf1
agtagaggcggggtttcaccatgt

SEQ ID NO: 10476 - DNA, 25 bp, Artificial Sequence
  Synthetic: FXN 3 forward 9:69043759-69043788; As/LbCpf1
agtagaggcggggtttcaccatgtt

SEQ ID NO: 10477 - DNA, 18 bp, Artificial Sequence
  Synthetic: FXN 3 forward 9:69043760-69043782; As/LbCpf1
gtagaggcggggtttcac

SEQ ID NO: 10478 - DNA, 19 bp, Artificial Sequence
  Synthetic: FXN 3 forward 9:69043760-69043783; As/LbCpf1
gtagaggcggggtttcacc

SEQ ID NO: 10479 - DNA, 20 bp, Artificial Sequence
  Synthetic: FXN 3 forward 9:69043760-69043784; As/LbCpf1
gtagaggcggggtttcacca

SEQ ID NO: 10480 - DNA, 21 bp, Artificial Sequence
  Synthetic: FXN 3 forward 9:69043760-69043785; As/LbCpf1
gtagaggcggggtttcaccat

SEQ ID NO: 10481 - DNA, 22 bp, Artificial Sequence
  Synthetic: FXN 3 forward 9:69043760-69043786; As/LbCpf1
gtagaggcggggtttcaccatg

SEQ ID NO: 10482 - DNA, 23 bp, Artificial Sequence
  Synthetic: FXN 3 forward 9:69043760-69043787; As/LbCpf1
gtagaggcggggtttcaccatgt

SEQ ID NO: 10483 - DNA, 24 bp, Artificial Sequence
  Synthetic: FXN 3 forward 9:69043760-69043788; As/LbCpf1
gtagaggcggggtttcaccatgtt

SEQ ID NO: 10484 - DNA, 25 bp, Artificial Sequence
  Synthetic: FXN 3 forward 9:69043760-69043789; As/LbCpf1
gtagaggcggggtttcaccatgttg

SEQ ID NO: 10485 - DNA, 18 bp, Artificial Sequence
  Synthetic: FXN 3 forward 9:69043776-69043798; As/LbCpf1
accatgttggccaggcta

SEQ ID NO: 10486 - DNA, 19 bp, Artificial Sequence
  Synthetic: FXN 3 forward 9:69043776-69043799; As/LbCpf1
accatgttggccaggctag

SEQ ID NO: 10487 - DNA, 20 bp, Artificial Sequence
  Synthetic: FXN 3 forward 9:69043776-69043800; As/LbCpf1
accatgttggccaggctagt

SEQ ID NO: 10488 - DNA, 21 bp, Artificial Sequence
  Synthetic: FXN 3 forward 9:69043776-69043801; As/LbCpf1
accatgttggccaggctagtc

SEQ ID NO: 10489 - DNA, 22 bp, Artificial Sequence
  Synthetic: FXN 3 forward 9:69043776-69043802; As/LbCpf1
accatgttggccaggctagtct

SEQ ID NO: 10490 - DNA, 23 bp, Artificial Sequence
  Synthetic: FXN 3 forward 9:69043776-69043803; As/LbCpf1
accatgttggccaggctagtctt

SEQ ID NO: 10491 - DNA, 24 bp, Artificial Sequence
  Synthetic: FXN 3 forward 9:69043776-69043804; As/LbCpf1
accatgttggccaggctagtcttg

SEQ ID NO: 10492 - DNA, 25 bp, Artificial Sequence
  Synthetic: FXN 3 forward 9:69043776-69043805; As/LbCpf1
accatgttggccaggctagtcttga

SEQ ID NO: 10493 - DNA, 18 bp, Artificial Sequence
  Synthetic: FXN 3 reverse 9:69043817-69043839; As/LbCpf1
ggaggcggaggcgggtgg

SEQ ID NO: 10494 - DNA, 19 bp, Artificial Sequence
  Synthetic: FXN 3 reverse 9:69043817-69043840; As/LbCpf1
ggaggcggaggcgggtgga

SEQ ID NO: 10495 - DNA, 20 bp, Artificial Sequence
  Synthetic: FXN 3 reverse 9:69043817-69043841; As/LbCpf1
ggaggcggaggcgggtggat

SEQ ID NO: 10496 - DNA, 21 bp, Artificial Sequence
  Synthetic: FXN 3 reverse 9:69043817-69043842; As/LbCpf1
ggaggcggaggcgggtggatc

SEQ ID NO: 10497 - DNA, 22 bp, Artificial Sequence
  Synthetic: FXN 3 reverse 9:69043817-69043843; As/LbCpf1
ggaggcggaggcgggtggatca

SEQ ID NO: 10498 - DNA, 23 bp, Artificial Sequence
  Synthetic: FXN 3 reverse 9:69043817-69043844; As/LbCpf1
ggaggcggaggcgggtggatcac

SEQ ID NO: 10499 - DNA, 24 bp, Artificial Sequence
  Synthetic: FXN 3 reverse 9:69043817-69043845; As/LbCpf1
ggaggcggaggcgggtggatcacc

SEQ ID NO: 10500 - DNA, 25 bp, Artificial Sequence
  Synthetic: FXN 3 reverse 9:69043817-69043846; As/LbCpf1
ggaggcggaggcgggtggatcacct

SEQ ID NO: 10501 - DNA, 18 bp, Artificial Sequence
  Synthetic: FXN 3 reverse 9:69043881-69043903; As/LbCpf1
aacttgaaaaataaaaaa

SEQ ID NO: 10502 - DNA, 19 bp, Artificial Sequence
  Synthetic: FXN 3 reverse 9:69043881-69043904; As/LbCpf1
aacttgaaaaataaaaaac

SEQ ID NO: 10503 - DNA, 20 bp, Artificial Sequence
  Synthetic: FXN 3 reverse 9:69043881-69043905; As/LbCpf1
aacttgaaaaataaaaaaca

SEQ ID NO: 10504 - DNA, 21 bp, Artificial Sequence
  Synthetic: FXN 3 reverse 9:69043881-69043906; As/LbCpf1
aacttgaaaaataaaaaacat

SEQ ID NO: 10505 - DNA, 22 bp, Artificial Sequence
  Synthetic: FXN 3 reverse 9:69043881-69043907; As/LbCpf1
aacttgaaaaataaaaaacatg

SEQ ID NO: 10506 - DNA, 23 bp, Artificial Sequence
  Synthetic: FXN 3 reverse 9:69043881-69043908; As/LbCpf1
aacttgaaaaataaaaaacatga

SEQ ID NO: 10507 - DNA, 24 bp, Artificial Sequence
  Synthetic: FXN 3 reverse 9:69043881-69043909; As/LbCpf1
aacttgaaaaataaaaaacatgag

SEQ ID NO: 10508 - DNA, 25 bp, Artificial Sequence
  Synthetic: FXN 3 reverse 9:69043881-69043910; As/LbCpf1
aacttgaaaaataaaaaacatgagg

SEQ ID NO: 10509 - DNA, 18 bp, Artificial Sequence
  Synthetic: FXN 3 forward 9:69043888-69043910; As/LbCpf1
ttatttttcaagttgaaa

SEQ ID NO: 10510 - DNA, 19 bp, Artificial Sequence
  Synthetic: FXN 3 forward 9:69043888-69043911; As/LbCpf1
ttatttttcaagttgaaat

SEQ ID NO: 10511 - DNA, 20 bp, Artificial Sequence
  Synthetic: FXN 3 forward 9:69043888-69043912; As/LbCpf1
ttatttttcaagttgaaatg

SEQ ID NO: 10512 - DNA, 21 bp, Artificial Sequence
  Synthetic: FXN 3 forward 9:69043888-69043913; As/LbCpf1
ttatttttcaagttgaaatga

SEQ ID NO: 10513 - DNA, 22 bp, Artificial Sequence
  Synthetic: FXN 3 forward 9:69043888-69043914; As/LbCpf1
ttatttttcaagttgaaatgag

SEQ ID NO: 10514 - DNA, 23 bp, Artificial Sequence
  Synthetic: FXN 3 forward 9:69043888-69043915; As/LbCpf1
ttatttttcaagttgaaatgagg

SEQ ID NO: 10515 - DNA, 24 bp, Artificial Sequence
  Synthetic: FXN 3 forward 9:69043888-69043916; As/LbCpf1
ttatttttcaagttgaaatgaggt

SEQ ID NO: 10516 - DNA, 25 bp, Artificial Sequence
  Synthetic: FXN 3 forward 9:69043888-69043917; As/LbCpf1
ttatttttcaagttgaaatgaggtc

SEQ ID NO: 10517 - DNA, 18 bp, Artificial Sequence
  Synthetic: FXN 3 forward 9:69043889-69043911; As/LbCpf1
tatttttcaagttgaaat

SEQ ID NO: 10518 - DNA, 19 bp, Artificial Sequence
  Synthetic: FXN 3 forward 9:69043889-69043912; As/LbCpf1
tatttttcaagttgaaatg

SEQ ID NO: 10519 - DNA, 20 bp, Artificial Sequence
  Synthetic: FXN 3 forward 9:69043889-69043913; As/LbCpf1
tatttttcaagttgaaatga

SEQ ID NO: 10520 - DNA, 21 bp, Artificial Sequence
  Synthetic: FXN 3 forward 9:69043889-69043914; As/LbCpf1
tatttttcaagttgaaatgag

SEQ ID NO: 10521 - DNA, 22 bp, Artificial Sequence
  Synthetic: FXN 3 forward 9:69043889-69043915; As/LbCpf1
tatttttcaagttgaaatgagg

SEQ ID NO: 10522 - DNA, 23 bp, Artificial Sequence
  Synthetic: FXN 3 forward 9:69043889-69043916; As/LbCpf1
tatttttcaagttgaaatgaggt

SEQ ID NO: 10523 - DNA, 24 bp, Artificial Sequence
  Synthetic: FXN 3 forward 9:69043889-69043917; As/LbCpf1
tatttttcaagttgaaatgaggtc

SEQ ID NO: 10524 - DNA, 25 bp, Artificial Sequence
  Synthetic: FXN 3 forward 9:69043889-69043918; As/LbCpf1
tatttttcaagttgaaatgaggtct

SEQ ID NO: 10525 - DNA, 18 bp, Artificial Sequence
  Synthetic: FXN 3 forward 9:69043890-69043912; As/LbCpf1
atttttcaagttgaaatg

SEQ ID NO: 10526 - DNA, 19 bp, Artificial Sequence
  Synthetic: FXN 3 forward 9:69043890-69043913; As/LbCpf1
atttttcaagttgaaatga

SEQ ID NO: 10527 - DNA, 20 bp, Artificial Sequence
  Synthetic: FXN 3 forward 9:69043890-69043914; As/LbCpf1
atttttcaagttgaaatgag

SEQ ID NO: 10528 - DNA, 21 bp, Artificial Sequence
  Synthetic: FXN 3 forward 9:69043890-69043915; As/LbCpf1
atttttcaagttgaaatgagg

SEQ ID NO: 10529 - DNA, 22 bp, Artificial Sequence
  Synthetic: FXN 3 forward 9:69043890-69043916; As/LbCpf1
atttttcaagttgaaatgaggt

SEQ ID NO: 10530 - DNA, 23 bp, Artificial Sequence
  Synthetic: FXN 3 forward 9:69043890-69043917; As/LbCpf1
atttttcaagttgaaatgaggtc

SEQ ID NO: 10531 - DNA, 24 bp, Artificial Sequence
  Synthetic: FXN 3 forward 9:69043890-69043918; As/LbCpf1
atttttcaagttgaaatgaggtct

SEQ ID NO: 10532 - DNA, 25 bp, Artificial Sequence
  Synthetic: FXN 3 forward 9:69043890-69043919; As/LbCpf1
atttttcaagttgaaatgaggtctc

SEQ ID NO: 10533 - DNA, 18 bp, Artificial Sequence
  Synthetic: FXN 3 forward 9:69043891-69043913; As/LbCpf1
tttttcaagttgaaatga

SEQ ID NO: 10534 - DNA, 19 bp, Artificial Sequence
  Synthetic: FXN 3 forward 9:69043891-69043914; As/LbCpf1
tttttcaagttgaaatgag

SEQ ID NO: 10535 - DNA, 20 bp, Artificial Sequence
  Synthetic: FXN 3 forward 9:69043891-69043915; As/LbCpf1
tttttcaagttgaaatgagg

SEQ ID NO: 10536 - DNA, 21 bp, Artificial Sequence
  Synthetic: FXN 3 forward 9:69043891-69043916; As/LbCpf1
tttttcaagttgaaatgaggt

SEQ ID NO: 10537 - DNA, 22 bp, Artificial Sequence
  Synthetic: FXN 3 forward 9:69043891-69043917; As/LbCpf1
tttttcaagttgaaatgaggtc

SEQ ID NO: 10538 - DNA, 23 bp, Artificial Sequence
  Synthetic: FXN 3 forward 9:69043891-69043918; As/LbCpf1
tttttcaagttgaaatgaggtct

SEQ ID NO: 10539 - DNA, 24 bp, Artificial Sequence
  Synthetic: FXN 3 forward 9:69043891-69043919; As/LbCpf1
tttttcaagttgaaatgaggtctc

SEQ ID NO: 10540 - DNA, 25 bp, Artificial Sequence
  Synthetic: FXN 3 forward 9:69043891-69043920; As/LbCpf1
tttttcaagttgaaatgaggtctct

SEQ ID NO: 10541 - DNA, 18 bp, Artificial Sequence
  Synthetic: FXN 3 forward 9:69043895-69043917; As/LbCpf1
tcaagttgaaatgaggtc

SEQ ID NO: 10542 - DNA, 19 bp, Artificial Sequence
  Synthetic: FXN 3 forward 9:69043895-69043918; As/LbCpf1
tcaagttgaaatgaggtct

SEQ ID NO: 10543 - DNA, 20 bp, Artificial Sequence
  Synthetic: FXN 3 forward 9:69043895-69043919; As/LbCpf1
tcaagttgaaatgaggtctc

SEQ ID NO: 10544 - DNA, 21 bp, Artificial Sequence
  Synthetic: FXN 3 forward 9:69043895-69043920; As/LbCpf1
tcaagttgaaatgaggtctct

SEQ ID NO: 10545 - DNA, 22 bp, Artificial Sequence
  Synthetic: FXN 3 forward 9:69043895-69043921; As/LbCpf1
tcaagttgaaatgaggtctctc

SEQ ID NO: 10546 - DNA, 23 bp, Artificial Sequence
  Synthetic: FXN 3 forward 9:69043895-69043922; As/LbCpf1
tcaagttgaaatgaggtctctct

SEQ ID NO: 10547 - DNA, 24 bp, Artificial Sequence
  Synthetic: FXN 3 forward 9:69043895-69043923; As/LbCpf1
tcaagttgaaatgaggtctctcta

SEQ ID NO: 10548 - DNA, 25 bp, Artificial Sequence
  Synthetic: FXN 3 forward 9:69043895-69043924; As/LbCpf1
tcaagttgaaatgaggtctctctat

SEQ ID NO: 10549 - DNA, 18 bp, Artificial Sequence
  Synthetic: FXN 3 forward 9:69043896-69043918; As/LbCpf1
caagttgaaatgaggtct

SEQ ID NO: 10550 - DNA, 19 bp, Artificial Sequence
  Synthetic: FXN 3 forward 9:69043896-69043919; As/LbCpf1
caagttgaaatgaggtctc

SEQ ID NO: 10551 - DNA, 20 bp, Artificial Sequence
  Synthetic: FXN 3 forward 9:69043896-69043920; As/LbCpf1
caagttgaaatgaggtctct

SEQ ID NO: 10552 - DNA, 21 bp, Artificial Sequence
  Synthetic: FXN 3 forward 9:69043896-69043921; As/LbCpf1
caagttgaaatgaggtctctc

SEQ ID NO: 10553 - DNA, 22 bp, Artificial Sequence
  Synthetic: FXN 3 forward 9:69043896-69043922; As/LbCpf1
caagttgaaatgaggtctctct

SEQ ID NO: 10554 - DNA, 23 bp, Artificial Sequence
  Synthetic: FXN 3 forward 9:69043896-69043923; As/LbCpf1
caagttgaaatgaggtctctcta

SEQ ID NO: 10555 - DNA, 24 bp, Artificial Sequence
  Synthetic: FXN 3 forward 9:69043896-69043924; As/LbCpf1
caagttgaaatgaggtctctctat

SEQ ID NO: 10556 - DNA, 25 bp, Artificial Sequence
  Synthetic: FXN 3 forward 9:69043896-69043925; As/LbCpf1
caagttgaaatgaggtctctctatg

SEQ ID NO: 10557 - DNA, 18 bp, Artificial Sequence
  Synthetic: FXN 3 forward 9:69043897-69043919; As/LbCpf1
aagttgaaatgaggtctc

SEQ ID NO: 10558 - DNA, 19 bp, Artificial Sequence
  Synthetic: FXN 3 forward 9:69043897-69043920; As/LbCpf1
aagttgaaatgaggtctct

SEQ ID NO: 10559 - DNA, 20 bp, Artificial Sequence
  Synthetic: FXN 3 forward 9:69043897-69043921; As/LbCpf1
aagttgaaatgaggtctctc

SEQ ID NO: 10560 - DNA, 21 bp, Artificial Sequence
  Synthetic: FXN 3 forward 9:69043897-69043922; As/LbCpf1
aagttgaaatgaggtctctct

SEQ ID NO: 10561 - DNA, 22 bp, Artificial Sequence
  Synthetic: FXN 3 forward 9:69043897-69043923; As/LbCpf1
aagttgaaatgaggtctctcta

SEQ ID NO: 10562 - DNA, 23 bp, Artificial Sequence
  Synthetic: FXN 3 forward 9:69043897-69043924; As/LbCpf1
aagttgaaatgaggtctctctat

SEQ ID NO: 10563 - DNA, 24 bp, Artificial Sequence
  Synthetic: FXN 3 forward 9:69043897-69043925; As/LbCpf1
aagttgaaatgaggtctctctatg

SEQ ID NO: 10564 - DNA, 25 bp, Artificial Sequence
  Synthetic: FXN 3 forward 9:69043897-69043926; As/LbCpf1
aagttgaaatgaggtctctctatgt

SEQ ID NO: 10565 - DNA, 18 bp, Artificial Sequence
  Synthetic: FXN 3 reverse 9:69043916-69043938; As/LbCpf1
agaccaacctgggcaaca

SEQ ID NO: 10566 - DNA, 19 bp, Artificial Sequence
  Synthetic: FXN 3 reverse 9:69043916-69043939; As/LbCpf1
agaccaacctgggcaacat

SEQ ID NO: 10567 - DNA, 20 bp, Artificial Sequence
  Synthetic: FXN 3 reverse 9:69043916-69043940; As/LbCpf1
agaccaacctgggcaacata

SEQ ID NO: 10568 - DNA, 21 bp, Artificial Sequence
  Synthetic: FXN 3 reverse 9:69043916-69043941; As/LbCpf1
agaccaacctgggcaacatag

SEQ ID NO: 10569 - DNA, 22 bp, Artificial Sequence
  Synthetic: FXN 3 reverse 9:69043916-69043942; As/LbCpf1
agaccaacctgggcaacataga

SEQ ID NO: 10570 - DNA, 23 bp, Artificial Sequence
  Synthetic: FXN 3 reverse 9:69043916-69043943; As/LbCpf1
agaccaacctgggcaacatagag

SEQ ID NO: 10571 - DNA, 24 bp, Artificial Sequence
  Synthetic: FXN 3 reverse 9:69043916-69043944; As/LbCpf1
agaccaacctgggcaacatagaga

SEQ ID NO: 10572 - DNA, 25 bp, Artificial Sequence
  Synthetic: FXN 3 reverse 9:69043916-69043945; As/LbCpf1
agaccaacctgggcaacatagagag

SEQ ID NO: 10573 - DNA, 18 bp, Artificial Sequence
  Synthetic: FXN 3 reverse 9:69043956-69043978; As/LbCpf1
ggaggccaaggtgggagg

SEQ ID NO: 10574 - DNA, 19 bp, Artificial Sequence
  Synthetic: FXN 3 reverse 9:69043956-69043979; As/LbCpf1
ggaggccaaggtgggagga

SEQ ID NO: 10575 - DNA, 20 bp, Artificial Sequence
  Synthetic: FXN 3 reverse 9:69043956-69043980; As/LbCpf1
ggaggccaaggtgggaggat

SEQ ID NO: 10576 - DNA, 21 bp, Artificial Sequence
  Synthetic: FXN 3 reverse 9:69043956-69043981; As/LbCpf1
ggaggccaaggtgggaggatt

SEQ ID NO: 10577 - DNA, 22 bp, Artificial Sequence
  Synthetic: FXN 3 reverse 9:69043956-69043982; As/LbCpf1
ggaggccaaggtgggaggatta

SEQ ID NO: 10578 - DNA, 23 bp, Artificial Sequence
  Synthetic: FXN 3 reverse 9:69043956-69043983; As/LbCpf1
ggaggccaaggtgggaggattac

SEQ ID NO: 10579 - DNA, 24 bp, Artificial Sequence
  Synthetic: FXN 3 reverse 9:69043956-69043984; As/LbCpf1
ggaggccaaggtgggaggattact

SEQ ID NO: 10580 - DNA, 25 bp, Artificial Sequence
  Synthetic: FXN 3 reverse 9:69043956-69043985; As/LbCpf1
ggaggccaaggtgggaggattactt

SEQ ID NO: 10581 - DNA, 18 bp, Artificial Sequence
  Synthetic: FXN 3 reverse 9:69044044-69044066; As/LbCpf1
aagacaccttatgtaata

SEQ ID NO: 10582 - DNA, 19 bp, Artificial Sequence
  Synthetic: FXN 3 reverse 9:69044044-69044067; As/LbCpf1
aagacaccttatgtaatat

SEQ ID NO: 10583 - DNA, 20 bp, Artificial Sequence
  Synthetic: FXN 3 reverse 9:69044044-69044068; As/LbCpf1
aagacaccttatgtaatata

SEQ ID NO: 10584 - DNA, 21 bp, Artificial Sequence
  Synthetic: FXN 3 reverse 9:69044044-69044069; As/LbCpf1
aagacaccttatgtaatatat

SEQ ID NO: 10585 - DNA, 22 bp, Artificial Sequence
  Synthetic: FXN 3 reverse 9:69044044-69044070; As/LbCpf1
aagacaccttatgtaatatata

SEQ ID NO: 10586 - DNA, 23 bp, Artificial Sequence
  Synthetic: FXN 3 reverse 9:69044044-69044071; As/LbCpf1
aagacaccttatgtaatatatat

SEQ ID NO: 10587 - DNA, 24 bp, Artificial Sequence
  Synthetic: FXN 3 reverse 9:69044044-69044072; As/LbCpf1
aagacaccttatgtaatatatata

SEQ ID NO: 10588 - DNA, 25 bp, Artificial Sequence
  Synthetic: FXN 3 reverse 9:69044044-69044073; As/LbCpf1
aagacaccttatgtaatatatatag

SEQ ID NO: 10589 - DNA, 18 bp, Artificial Sequence
  Synthetic: FXN 3 reverse 9:69044050-69044072; As/LbCpf1
tgtttaaagacaccttat

SEQ ID NO: 10590 - DNA, 19 bp, Artificial Sequence
  Synthetic: FXN 3 reverse 9:69044050-69044073; As/LbCpf1
tgtttaaagacaccttatg

SEQ ID NO: 10591 - DNA, 20 bp, Artificial Sequence
  Synthetic: FXN 3 reverse 9:69044050-69044074; As/LbCpf1
tgtttaaagacaccttatgt

SEQ ID NO: 10592 - DNA, 21 bp, Artificial Sequence
  Synthetic: FXN 3 reverse 9:69044050-69044075; As/LbCpf1
tgtttaaagacaccttatgta

SEQ ID NO: 10593 - DNA, 22 bp, Artificial Sequence
  Synthetic: FXN 3 reverse 9:69044050-69044076; As/LbCpf1
tgtttaaagacaccttatgtaa

SEQ ID NO: 10594 - DNA, 23 bp, Artificial Sequence
  Synthetic: FXN 3 reverse 9:69044050-69044077; As/LbCpf1
tgtttaaagacaccttatgtaat

SEQ ID NO: 10595 - DNA, 24 bp, Artificial Sequence
  Synthetic: FXN 3 reverse 9:69044050-69044078; As/LbCpf1
tgtttaaagacaccttatgtaata

SEQ ID NO: 10596 - DNA, 25 bp, Artificial Sequence
  Synthetic: FXN 3 reverse 9:69044050-69044079; As/LbCpf1
tgtttaaagacaccttatgtaatat

SEQ ID NO: 10597 - DNA, 18 bp, Artificial Sequence
  Synthetic: FXN 3 forward 9:69044067-69044089; As/LbCpf1
aacagaaataaggttata

SEQ ID NO: 10598 - DNA, 19 bp, Artificial Sequence
  Synthetic: FXN 3 forward 9:69044067-69044090; As/LbCpf1
aacagaaataaggttatat

SEQ ID NO: 10599 - DNA, 20 bp, Artificial Sequence
  Synthetic: FXN 3 forward 9:69044067-69044091; As/LbCpf1
aacagaaataaggttatata

SEQ ID NO: 10600 - DNA, 21 bp, Artificial Sequence
  Synthetic: FXN 3 forward 9:69044067-69044092; As/LbCpf1
aacagaaataaggttatatat

SEQ ID NO: 10601 - DNA, 22 bp, Artificial Sequence
  Synthetic: FXN 3 forward 9:69044067-69044093; As/LbCpf1
aacagaaataaggttatatatt

SEQ ID NO: 10602 - DNA, 23 bp, Artificial Sequence
  Synthetic: FXN 3 forward 9:69044067-69044094; As/LbCpf1
aacagaaataaggttatatattg

SEQ ID NO: 10603 - DNA, 24 bp, Artificial Sequence
  Synthetic: FXN 3 forward 9:69044067-69044095; As/LbCpf1
aacagaaataaggttatatattga

SEQ ID NO: 10604 - DNA, 25 bp, Artificial Sequence
  Synthetic: FXN 3 forward 9:69044067-69044096; As/LbCpf1
aacagaaataaggttatatattgat

SEQ ID NO: 10605 - DNA, 18 bp, Artificial Sequence
  Synthetic: FXN 3 reverse 9:69044131-69044153; As/LbCpf1
taggagaaatacaaggct

SEQ ID NO: 10606 - DNA, 19 bp, Artificial Sequence
  Synthetic: FXN 3 reverse 9:69044131-69044154; As/LbCpf1
taggagaaatacaaggcta

SEQ ID NO: 10607 - DNA, 20 bp, Artificial Sequence
  Synthetic: FXN 3 reverse 9:69044131-69044155; As/LbCpf1
taggagaaatacaaggctag

SEQ ID NO: 10608 - DNA, 21 bp, Artificial Sequence
  Synthetic: FXN 3 reverse 9:69044131-69044156; As/LbCpf1
taggagaaatacaaggctagg

SEQ ID NO: 10609 - DNA, 22 bp, Artificial Sequence
  Synthetic: FXN 3 reverse 9:69044131-69044157; As/LbCpf1
taggagaaatacaaggctaggt

SEQ ID NO: 10610 - DNA, 23 bp, Artificial Sequence
  Synthetic: FXN 3 reverse 9:69044131-69044158; As/LbCpf1
taggagaaatacaaggctaggta

SEQ ID NO: 10611 - DNA, 24 bp, Artificial Sequence
  Synthetic: FXN 3 reverse 9:69044131-69044159; As/LbCpf1
taggagaaatacaaggctaggtac

SEQ ID NO: 10612 - DNA, 25 bp, Artificial Sequence
  Synthetic: FXN 3 reverse 9:69044131-69044160; As/LbCpf1
taggagaaatacaaggctaggtacc

SEQ ID NO: 10613 - DNA, 18 bp, Artificial Sequence
  Synthetic: FXN 3 forward 9:69044147-69044169; As/LbCpf1
tcctataaataatttgct

SEQ ID NO: 10614 - DNA, 19 bp, Artificial Sequence
  Synthetic: FXN 3 forward 9:69044147-69044170; As/LbCpf1
tcctataaataatttgctc

SEQ ID NO: 10615 - DNA, 20 bp, Artificial Sequence
  Synthetic: FXN 3 forward 9:69044147-69044171; As/LbCpf1
tcctataaataatttgctcg

SEQ ID NO: 10616 - DNA, 21 bp, Artificial Sequence
  Synthetic: FXN 3 forward 9:69044147-69044172; As/LbCpf1
tcctataaataatttgctcgt

SEQ ID NO: 10617 - DNA, 22 bp, Artificial Sequence
  Synthetic: FXN 3 forward 9:69044147-69044173; As/LbCpf1
tcctataaataatttgctcgtt

SEQ ID NO: 10618 - DNA, 23 bp, Artificial Sequence
  Synthetic: FXN 3 forward 9:69044147-69044174; As/LbCpf1
tcctataaataatttgctcgttg

SEQ ID NO: 10619 - DNA, 24 bp, Artificial Sequence
  Synthetic: FXN 3 forward 9:69044147-69044175; As/LbCpf1
tcctataaataatttgctcgttga

SEQ ID NO: 10620 - DNA, 25 bp, Artificial Sequence
  Synthetic: FXN 3 forward 9:69044147-69044176; As/LbCpf1
tcctataaataatttgctcgttgag

SEQ ID NO: 10621 - DNA, 18 bp, Artificial Sequence
  Synthetic: FXN 3 forward 9:69044163-69044185; As/LbCpf1
ctcgttgagtgtttgtgg

SEQ ID NO: 10622 - DNA, 19 bp, Artificial Sequence
  Synthetic: FXN 3 forward 9:69044163-69044186; As/LbCpf1
ctcgttgagtgtttgtggc

SEQ ID NO: 10623 - DNA, 20 bp, Artificial Sequence
  Synthetic: FXN 3 forward 9:69044163-69044187; As/LbCpf1
ctcgttgagtgtttgtggca

SEQ ID NO: 10624 - DNA, 21 bp, Artificial Sequence
  Synthetic: FXN 3 forward 9:69044163-69044188; As/LbCpf1
ctcgttgagtgtttgtggcaa

SEQ ID NO: 10625 - DNA, 22 bp, Artificial Sequence
  Synthetic: FXN 3 forward 9:69044163-69044189; As/LbCpf1
ctcgttgagtgtttgtggcaac

SEQ ID NO: 10626 - DNA, 23 bp, Artificial Sequence
  Synthetic: FXN 3 forward 9:69044163-69044190; As/LbCpf1
ctcgttgagtgtttgtggcaact

SEQ ID NO: 10627 - DNA, 24 bp, Artificial Sequence
  Synthetic: FXN 3 forward 9:69044163-69044191; As/LbCpf1
ctcgttgagtgtttgtggcaactt

SEQ ID NO: 10628 - DNA, 25 bp, Artificial Sequence
  Synthetic: FXN 3 forward 9:69044163-69044192; As/LbCpf1
ctcgttgagtgtttgtggcaacttt

SEQ ID NO: 10629 - DNA, 18 bp, Artificial Sequence
  Synthetic: FXN 3 forward 9:69044178-69044200; As/LbCpf1
tggcaactttgtagcaca

SEQ ID NO: 10630 - DNA, 19 bp, Artificial Sequence
  Synthetic: FXN 3 forward 9:69044178-69044201; As/LbCpf1
tggcaactttgtagcacat

SEQ ID NO: 10631 - DNA, 20 bp, Artificial Sequence
  Synthetic: FXN 3 forward 9:69044178-69044202; As/LbCpf1
tggcaactttgtagcacata

SEQ ID NO: 10632 - DNA, 21 bp, Artificial Sequence
  Synthetic: FXN 3 forward 9:69044178-69044203; As/LbCpf1
tggcaactttgtagcacataa

SEQ ID NO: 10633 - DNA, 22 bp, Artificial Sequence
  Synthetic: FXN 3 forward 9:69044178-69044204; As/LbCpf1
tggcaactttgtagcacataac

SEQ ID NO: 10634 - DNA, 23 bp, Artificial Sequence
  Synthetic: FXN 3 forward 9:69044178-69044205; As/LbCpf1
tggcaactttgtagcacataact

SEQ ID NO: 10635 - DNA, 24 bp, Artificial Sequence
  Synthetic: FXN 3 forward 9:69044178-69044206; As/LbCpf1
tggcaactttgtagcacataacta

SEQ ID NO: 10636 - DNA, 25 bp, Artificial Sequence
  Synthetic: FXN 3 forward 9:69044178-69044207; As/LbCpf1
tggcaactttgtagcacataactac

SEQ ID NO: 10637 - DNA, 18 bp, Artificial Sequence
  Synthetic: FXN 3 forward 9:69044189-69044211; As/LbCpf1
tagcacataactaccaag

SEQ ID NO: 10638 - DNA, 19 bp, Artificial Sequence
  Synthetic: FXN 3 forward 9:69044189-69044212; As/LbCpf1
tagcacataactaccaaga

SEQ ID NO: 10639 - DNA, 20 bp, Artificial Sequence
  Synthetic: FXN 3 forward 9:69044189-69044213; As/LbCpf1
tagcacataactaccaagaa

SEQ ID NO: 10640 - DNA, 21 bp, Artificial Sequence
  Synthetic: FXN 3 forward 9:69044189-69044214; As/LbCpf1
tagcacataactaccaagaat

SEQ ID NO: 10641 - DNA, 22 bp, Artificial Sequence
  Synthetic: FXN 3 forward 9:69044189-69044215; As/LbCpf1
tagcacataactaccaagaata

SEQ ID NO: 10642 - DNA, 23 bp, Artificial Sequence
  Synthetic: FXN 3 forward 9:69044189-69044216; As/LbCpf1
tagcacataactaccaagaataa

SEQ ID NO: 10643 - DNA, 24 bp, Artificial Sequence
  Synthetic: FXN 3 forward 9:69044189-69044217; As/LbCpf1
tagcacataactaccaagaataag

SEQ ID NO: 10644 - DNA, 25 bp, Artificial Sequence
  Synthetic: FXN 3 forward 9:69044189-69044218; As/LbCpf1
tagcacataactaccaagaataagg

SEQ ID NO: 10645 - DNA, 18 bp, Artificial Sequence
  Synthetic: FXN 3 reverse 9:69044249-69044271; As/LbCpf1
tgtaaatggactcagtct

SEQ ID NO: 10646 - DNA, 19 bp, Artificial Sequence
  Synthetic: FXN 3 reverse 9:69044249-69044272; As/LbCpf1
tgtaaatggactcagtctt

SEQ ID NO: 10647 - DNA, 20 bp, Artificial Sequence
  Synthetic: FXN 3 reverse 9:69044249-69044273; As/LbCpf1
tgtaaatggactcagtcttc

SEQ ID NO: 10648 - DNA, 21 bp, Artificial Sequence
  Synthetic: FXN 3 reverse 9:69044249-69044274; As/LbCpf1
tgtaaatggactcagtcttca

SEQ ID NO: 10649 - DNA, 22 bp, Artificial Sequence
  Synthetic: FXN 3 reverse 9:69044249-69044275; As/LbCpf1
tgtaaatggactcagtcttcat

SEQ ID NO: 10650 - DNA, 23 bp, Artificial Sequence
  Synthetic: FXN 3 reverse 9:69044249-69044276; As/LbCpf1
tgtaaatggactcagtcttcatt

SEQ ID NO: 10651 - DNA, 24 bp, Artificial Sequence
  Synthetic: FXN 3 reverse 9:69044249-69044277; As/LbCpf1
tgtaaatggactcagtcttcatta

SEQ ID NO: 10652 - DNA, 25 bp, Artificial Sequence
  Synthetic: FXN 3 reverse 9:69044249-69044278; As/LbCpf1
tgtaaatggactcagtcttcattac

SEQ ID NO: 10653 - DNA, 18 bp, Artificial Sequence
  Synthetic: FXN 3 forward 9:69044268-69044290; As/LbCpf1
cataaaggctgagagcag

SEQ ID NO: 10654 - DNA, 19 bp, Artificial Sequence
  Synthetic: FXN 3 forward 9:69044268-69044291; As/LbCpf1
cataaaggctgagagcagt

SEQ ID NO: 10655 - DNA, 20 bp, Artificial Sequence
  Synthetic: FXN 3 forward 9:69044268-69044292; As/LbCpf1
cataaaggctgagagcagtg

SEQ ID NO: 10656 - DNA, 21 bp, Artificial Sequence
  Synthetic: FXN 3 forward 9:69044268-69044293; As/LbCpf1
cataaaggctgagagcagtgt

SEQ ID NO: 10657 - DNA, 22 bp, Artificial Sequence
  Synthetic: FXN 3 forward 9:69044268-69044294; As/LbCpf1
cataaaggctgagagcagtgtc

SEQ ID NO: 10658 - DNA, 23 bp, Artificial Sequence
  Synthetic: FXN 3 forward 9:69044268-69044295; As/LbCpf1
cataaaggctgagagcagtgtca

SEQ ID NO: 10659 - DNA, 24 bp, Artificial Sequence
  Synthetic: FXN 3 forward 9:69044268-69044296; As/LbCpf1
cataaaggctgagagcagtgtcaa

SEQ ID NO: 10660 - DNA, 25 bp, Artificial Sequence
  Synthetic: FXN 3 forward 9:69044268-69044297; As/LbCpf1
cataaaggctgagagcagtgtcaag

SEQ ID NO: 10661 - DNA, 18 bp, Artificial Sequence
  Synthetic: FXN 3 forward 9:69044378-69044400; As/LbCpf1
taaggtctgcactctgcc

SEQ ID NO: 10662 - DNA, 19 bp, Artificial Sequence
  Synthetic: FXN 3 forward 9:69044378-69044401; As/LbCpf1
taaggtctgcactctgccc

SEQ ID NO: 10663 - DNA, 20 bp, Artificial Sequence
  Synthetic: FXN 3 forward 9:69044378-69044402; As/LbCpf1
taaggtctgcactctgcccc

SEQ ID NO: 10664 - DNA, 21 bp, Artificial Sequence
  Synthetic: FXN 3 forward 9:69044378-69044403; As/LbCpf1
taaggtctgcactctgcccca

SEQ ID NO: 10665 - DNA, 22 bp, Artificial Sequence
  Synthetic: FXN 3 forward 9:69044378-69044404; As/LbCpf1
taaggtctgcactctgccccac

SEQ ID NO: 10666 - DNA, 23 bp, Artificial Sequence
  Synthetic: FXN 3 forward 9:69044378-69044405; As/LbCpf1
taaggtctgcactctgccccacc

SEQ ID NO: 10667 - DNA, 24 bp, Artificial Sequence
  Synthetic: FXN 3 forward 9:69044378-69044406; As/LbCpf1
taaggtctgcactctgccccaccc

SEQ ID NO: 10668 - DNA, 25 bp, Artificial Sequence
  Synthetic: FXN 3 forward 9:69044378-69044407; As/LbCpf1
taaggtctgcactctgccccaccct

SEQ ID NO: 10669 - DNA, 18 bp, Artificial Sequence
  Synthetic: FXN 3 forward 9:69044431-69044453; As/LbCpf1
ctcctccacttacttccc

SEQ ID NO: 10670 - DNA, 19 bp, Artificial Sequence
  Synthetic: FXN 3 forward 9:69044431-69044454; As/LbCpf1
ctcctccacttacttccca

SEQ ID NO: 10671 - DNA, 20 bp, Artificial Sequence
  Synthetic: FXN 3 forward 9:69044431-69044455; As/LbCpf1
ctcctccacttacttcccag

SEQ ID NO: 10672 - DNA, 21 bp, Artificial Sequence
  Synthetic: FXN 3 forward 9:69044431-69044456; As/LbCpf1
ctcctccacttacttcccagc

SEQ ID NO: 10673 - DNA, 22 bp, Artificial Sequence
  Synthetic: FXN 3 forward 9:69044431-69044457; As/LbCpf1
ctcctccacttacttcccagcc

SEQ ID NO: 10674 - DNA, 23 bp, Artificial Sequence
  Synthetic: FXN 3 forward 9:69044431-69044458; As/LbCpf1
ctcctccacttacttcccagccc

SEQ ID NO: 10675 - DNA, 24 bp, Artificial Sequence
  Synthetic: FXN 3 forward 9:69044431-69044459; As/LbCpf1
ctcctccacttacttcccagccct

SEQ ID NO: 10676 - DNA, 25 bp, Artificial Sequence
  Synthetic: FXN 3 forward 9:69044431-69044460; As/LbCpf1
ctcctccacttacttcccagccctg

SEQ ID NO: 10677 - DNA, 18 bp, Artificial Sequence
  Synthetic: FXN 3 forward 9:69044476-69044498; As/LbCpf1
ctgagtttgctaagggca

SEQ ID NO: 10678 - DNA, 19 bp, Artificial Sequence
  Synthetic: FXN 3 forward 9:69044476-69044499; As/LbCpf1
ctgagtttgctaagggcac

SEQ ID NO: 10679 - DNA, 20 bp, Artificial Sequence
  Synthetic: FXN 3 forward 9:69044476-69044500; As/LbCpf1
ctgagtttgctaagggcact

SEQ ID NO: 10680 - DNA, 21 bp, Artificial Sequence
  Synthetic: FXN 3 forward 9:69044476-69044501; As/LbCpf1
ctgagtttgctaagggcactg

SEQ ID NO: 10681 - DNA, 22 bp, Artificial Sequence
  Synthetic: FXN 3 forward 9:69044476-69044502; As/LbCpf1
ctgagtttgctaagggcactgc

SEQ ID NO: 10682 - DNA, 23 bp, Artificial Sequence
  Synthetic: FXN 3 forward 9:69044476-69044503; As/LbCpf1
ctgagtttgctaagggcactgct

SEQ ID NO: 10683 - DNA, 24 bp, Artificial Sequence
  Synthetic: FXN 3 forward 9:69044476-69044504; As/LbCpf1
ctgagtttgctaagggcactgctg

SEQ ID NO: 10684 - DNA, 25 bp, Artificial Sequence
  Synthetic: FXN 3 forward 9:69044476-69044505; As/LbCpf1
ctgagtttgctaagggcactgctgg

SEQ ID NO: 10685 - DNA, 18 bp, Artificial Sequence
  Synthetic: FXN 3 forward 9:69044477-69044499; As/LbCpf1
tgagtttgctaagggcac

SEQ ID NO: 10686 - DNA, 19 bp, Artificial Sequence
  Synthetic: FXN 3 forward 9:69044477-69044500; As/LbCpf1
tgagtttgctaagggcact

SEQ ID NO: 10687 - DNA, 20 bp, Artificial Sequence
  Synthetic: FXN 3 forward 9:69044477-69044501; As/LbCpf1
tgagtttgctaagggcactg

SEQ ID NO: 10688 - DNA, 21 bp, Artificial Sequence
  Synthetic: FXN 3 forward 9:69044477-69044502; As/LbCpf1
tgagtttgctaagggcactgc

SEQ ID NO: 10689 - DNA, 22 bp, Artificial Sequence
  Synthetic: FXN 3 forward 9:69044477-69044503; As/LbCpf1
tgagtttgctaagggcactgct

SEQ ID NO: 10690 - DNA, 23 bp, Artificial Sequence
  Synthetic: FXN 3 forward 9:69044477-69044504; As/LbCpf1
tgagtttgctaagggcactgctg

SEQ ID NO: 10691 - DNA, 24 bp, Artificial Sequence
  Synthetic: FXN 3 forward 9:69044477-69044505; As/LbCpf1
tgagtttgctaagggcactgctgg

SEQ ID NO: 10692 - DNA, 25 bp, Artificial Sequence
  Synthetic: FXN 3 forward 9:69044477-69044506; As/LbCpf1
tgagtttgctaagggcactgctggc

SEQ ID NO: 10693 - DNA, 18 bp, Artificial Sequence
  Synthetic: FXN 3 forward 9:69044485-69044507; As/LbCpf1
ctaagggcactgctggct

SEQ ID NO: 10694 - DNA, 19 bp, Artificial Sequence
  Synthetic: FXN 3 forward 9:69044485-69044508; As/LbCpf1
ctaagggcactgctggctc

SEQ ID NO: 10695 - DNA, 20 bp, Artificial Sequence
  Synthetic: FXN 3 forward 9:69044485-69044509; As/LbCpf1
ctaagggcactgctggctca

SEQ ID NO: 10696 - DNA, 21 bp, Artificial Sequence
  Synthetic: FXN 3 forward 9:69044485-69044510; As/LbCpf1
ctaagggcactgctggctcaa

SEQ ID NO: 10697 - DNA, 22 bp, Artificial Sequence
  Synthetic: FXN 3 forward 9:69044485-69044511; As/LbCpf1
ctaagggcactgctggctcaag

SEQ ID NO: 10698 - DNA, 23 bp, Artificial Sequence
  Synthetic: FXN 3 forward 9:69044485-69044512; As/LbCpf1
ctaagggcactgctggctcaaga

SEQ ID NO: 10699 - DNA, 24 bp, Artificial Sequence
  Synthetic: FXN 3 forward 9:69044485-69044513; As/LbCpf1
ctaagggcactgctggctcaagag

SEQ ID NO: 10700 - DNA, 25 bp, Artificial Sequence
  Synthetic: FXN 3 forward 9:69044485-69044514; As/LbCpf1
ctaagggcactgctggctcaagagc

SEQ ID NO: 10701 - DNA, 18 bp, Artificial Sequence
  Synthetic: FXN 3 reverse 9:69044547-69044569; As/LbCpf1
cattctccaaaggtcact

SEQ ID NO: 10702 - DNA, 19 bp, Artificial Sequence
  Synthetic: FXN 3 reverse 9:69044547-69044570; As/LbCpf1
cattctccaaaggtcactg

SEQ ID NO: 10703 - DNA, 20 bp, Artificial Sequence
  Synthetic: FXN 3 reverse 9:69044547-69044571; As/LbCpf1
cattctccaaaggtcactgg

SEQ ID NO: 10704 - DNA, 21 bp, Artificial Sequence
  Synthetic: FXN 3 reverse 9:69044547-69044572; As/LbCpf1
cattctccaaaggtcactggt

SEQ ID NO: 10705 - DNA, 22 bp, Artificial Sequence
  Synthetic: FXN 3 reverse 9:69044547-69044573; As/LbCpf1
cattctccaaaggtcactggtt

SEQ ID NO: 10706 - DNA, 23 bp, Artificial Sequence
  Synthetic: FXN 3 reverse 9:69044547-69044574; As/LbCpf1
cattctccaaaggtcactggttg

SEQ ID NO: 10707 - DNA, 24 bp, Artificial Sequence
  Synthetic: FXN 3 reverse 9:69044547-69044575; As/LbCpf1
cattctccaaaggtcactggttgc

SEQ ID NO: 10708 - DNA, 25 bp, Artificial Sequence
  Synthetic: FXN 3 reverse 9:69044547-69044576; As/LbCpf1
cattctccaaaggtcactggttgcc

SEQ ID NO: 10709 - DNA, 18 bp, Artificial Sequence
  Synthetic: FXN 3 forward 9:69044561-69044583; As/LbCpf1
gagaatgtaaaccttatc

SEQ ID NO: 10710 - DNA, 19 bp, Artificial Sequence
  Synthetic: FXN 3 forward 9:69044561-69044584; As/LbCpf1
gagaatgtaaaccttatca

SEQ ID NO: 10711 - DNA, 20 bp, Artificial Sequence
  Synthetic: FXN 3 forward 9:69044561-69044585; As/LbCpf1
gagaatgtaaaccttatcac

SEQ ID NO: 10712 - DNA, 21 bp, Artificial Sequence
  Synthetic: FXN 3 forward 9:69044561-69044586; As/LbCpf1
gagaatgtaaaccttatcacc

SEQ ID NO: 10713 - DNA, 22 bp, Artificial Sequence
  Synthetic: FXN 3 forward 9:69044561-69044587; As/LbCpf1
gagaatgtaaaccttatcacca

SEQ ID NO: 10714 - DNA, 23 bp, Artificial Sequence
  Synthetic: FXN 3 forward 9:69044561-69044588; As/LbCpf1
gagaatgtaaaccttatcaccaa

SEQ ID NO: 10715 - DNA, 24 bp, Artificial Sequence
  Synthetic: FXN 3 forward 9:69044561-69044589; As/LbCpf1
gagaatgtaaaccttatcaccaat

SEQ ID NO: 10716 - DNA, 25 bp, Artificial Sequence
  Synthetic: FXN 3 forward 9:69044561-69044590; As/LbCpf1
gagaatgtaaaccttatcaccaatc

SEQ ID NO: 10717 - DNA, 18 bp, Artificial Sequence
  Synthetic: FXN 3 reverse 9:69044568-69044590; As/LbCpf1
agagattggtgataaggt

SEQ ID NO: 10718 - DNA, 19 bp, Artificial Sequence
  Synthetic: FXN 3 reverse 9:69044568-69044591; As/LbCpf1
agagattggtgataaggtt

SEQ ID NO: 10719 - DNA, 20 bp, Artificial Sequence
  Synthetic: FXN 3 reverse 9:69044568-69044592; As/LbCpf1
agagattggtgataaggttt

SEQ ID NO: 10720 - DNA, 21 bp, Artificial Sequence
  Synthetic: FXN 3 reverse 9:69044568-69044593; As/LbCpf1
agagattggtgataaggttta

SEQ ID NO: 10721 - DNA, 22 bp, Artificial Sequence
  Synthetic: FXN 3 reverse 9:69044568-69044594; As/LbCpf1
agagattggtgataaggtttac

SEQ ID NO: 10722 - DNA, 23 bp, Artificial Sequence
  Synthetic: FXN 3 reverse 9:69044568-69044595; As/LbCpf1
agagattggtgataaggtttaca

SEQ ID NO: 10723 - DNA, 24 bp, Artificial Sequence
  Synthetic: FXN 3 reverse 9:69044568-69044596; As/LbCpf1
agagattggtgataaggtttacat

SEQ ID NO: 10724 - DNA, 25 bp, Artificial Sequence
  Synthetic: FXN 3 reverse 9:69044568-69044597; As/LbCpf1
agagattggtgataaggtttacatt

SEQ ID NO: 10725 - DNA, 18 bp, Artificial Sequence
  Synthetic: FXN 3 forward 9:69044751-69044773; As/LbCpf1
cttcatctccccagctgg

SEQ ID NO: 10726 - DNA, 19 bp, Artificial Sequence
  Synthetic: FXN 3 forward 9:69044751-69044774; As/LbCpf1
cttcatctccccagctggt

SEQ ID NO: 10727 - DNA, 20 bp, Artificial Sequence
  Synthetic: FXN 3 forward 9:69044751-69044775; As/LbCpf1
cttcatctccccagctggtc

SEQ ID NO: 10728 - DNA, 21 bp, Artificial Sequence
  Synthetic: FXN 3 forward 9:69044751-69044776; As/LbCpf1
cttcatctccccagctggtca

SEQ ID NO: 10729 - DNA, 22 bp, Artificial Sequence
  Synthetic: FXN 3 forward 9:69044751-69044777; As/LbCpf1
cttcatctccccagctggtcag

SEQ ID NO: 10730 - DNA, 23 bp, Artificial Sequence
  Synthetic: FXN 3 forward 9:69044751-69044778; As/LbCpf1
cttcatctccccagctggtcagc

SEQ ID NO: 10731 - DNA, 24 bp, Artificial Sequence
  Synthetic: FXN 3 forward 9:69044751-69044779; As/LbCpf1
cttcatctccccagctggtcagca

SEQ ID NO: 10732 - DNA, 25 bp, Artificial Sequence
  Synthetic: FXN 3 forward 9:69044751-69044780; As/LbCpf1
cttcatctccccagctggtcagcag

SEQ ID NO: 10733 - DNA, 18 bp, Artificial Sequence
  Synthetic: FXN 3 reverse 9:69044809-69044831; As/LbCpf1
gtccctaactgctggaca

SEQ ID NO: 10734 - DNA, 19 bp, Artificial Sequence
  Synthetic: FXN 3 reverse 9:69044809-69044832; As/LbCpf1
gtccctaactgctggacat

SEQ ID NO: 10735 - DNA, 20 bp, Artificial Sequence
  Synthetic: FXN 3 reverse 9:69044809-69044833; As/LbCpf1
gtccctaactgctggacatc

SEQ ID NO: 10736 - DNA, 21 bp, Artificial Sequence
  Synthetic: FXN 3 reverse 9:69044809-69044834; As/LbCpf1
gtccctaactgctggacatcc

SEQ ID NO: 10737 - DNA, 22 bp, Artificial Sequence
  Synthetic: FXN 3 reverse 9:69044809-69044835; As/LbCpf1
gtccctaactgctggacatcca

SEQ ID NO: 10738 - DNA, 23 bp, Artificial Sequence
  Synthetic: FXN 3 reverse 9:69044809-69044836; As/LbCpf1
gtccctaactgctggacatccag

SEQ ID NO: 10739 - DNA, 24 bp, Artificial Sequence
  Synthetic: FXN 3 reverse 9:69044809-69044837; As/LbCpf1
gtccctaactgctggacatccagg

SEQ ID NO: 10740 - DNA, 25 bp, Artificial Sequence
  Synthetic: FXN 3 reverse 9:69044809-69044838; As/LbCpf1
gtccctaactgctggacatccaggt

SEQ ID NO: 10741 - DNA, 18 bp, Artificial Sequence
  Synthetic: FXN 3 reverse 9:69044810-69044832; As/LbCpf1
agtccctaactgctggac

SEQ ID NO: 10742 - DNA, 19 bp, Artificial Sequence
  Synthetic: FXN 3 reverse 9:69044810-69044833; As/LbCpf1
agtccctaactgctggaca

SEQ ID NO: 10743 - DNA, 20 bp, Artificial Sequence
  Synthetic: FXN 3 reverse 9:69044810-69044834; As/LbCpf1
agtccctaactgctggacat

SEQ ID NO: 10744 - DNA, 21 bp, Artificial Sequence
  Synthetic: FXN 3 reverse 9:69044810-69044835; As/LbCpf1
agtccctaactgctggacatc

SEQ ID NO: 10745 - DNA, 22 bp, Artificial Sequence
  Synthetic: FXN 3 reverse 9:69044810-69044836; As/LbCpf1
agtccctaactgctggacatcc

SEQ ID NO: 10746 - DNA, 23 bp, Artificial Sequence
  Synthetic: FXN 3 reverse 9:69044810-69044837; As/LbCpf1
agtccctaactgctggacatcca

SEQ ID NO: 10747 - DNA, 24 bp, Artificial Sequence
  Synthetic: FXN 3 reverse 9:69044810-69044838; As/LbCpf1
agtccctaactgctggacatccag

SEQ ID NO: 10748 - DNA, 25 bp, Artificial Sequence
  Synthetic: FXN 3 reverse 9:69044810-69044839; As/LbCpf1
agtccctaactgctggacatccagg

SEQ ID NO: 10749 - DNA, 18 bp, Artificial Sequence
  Synthetic: FXN 3 reverse 9:69044811-69044833; As/LbCpf1
tagtccctaactgctgga

SEQ ID NO: 10750 - DNA, 19 bp, Artificial Sequence
  Synthetic: FXN 3 reverse 9:69044811-69044834; As/LbCpf1
tagtccctaactgctggac

SEQ ID NO: 10751 - DNA, 20 bp, Artificial Sequence
  Synthetic: FXN 3 reverse 9:69044811-69044835; As/LbCpf1
tagtccctaactgctggaca

SEQ ID NO: 10752 - DNA, 21 bp, Artificial Sequence
  Synthetic: FXN 3 reverse 9:69044811-69044836; As/LbCpf1
tagtccctaactgctggacat

SEQ ID NO: 10753 - DNA, 22 bp, Artificial Sequence
  Synthetic: FXN 3 reverse 9:69044811-69044837; As/LbCpf1
tagtccctaactgctggacatc

SEQ ID NO: 10754 - DNA, 23 bp, Artificial Sequence
  Synthetic: FXN 3 reverse 9:69044811-69044838; As/LbCpf1
tagtccctaactgctggacatcc

SEQ ID NO: 10755 - DNA, 24 bp, Artificial Sequence
  Synthetic: FXN 3 reverse 9:69044811-69044839; As/LbCpf1
tagtccctaactgctggacatcca

SEQ ID NO: 10756 - DNA, 25 bp, Artificial Sequence
  Synthetic: FXN 3 reverse 9:69044811-69044840; As/LbCpf1
tagtccctaactgctggacatccag

SEQ ID NO: 10757 - DNA, 18 bp, Artificial Sequence
  Synthetic: FXN 3 reverse 9:69044812-69044834; As/LbCpf1
ttagtccctaactgctgg

SEQ ID NO: 10758 - DNA, 19 bp, Artificial Sequence
  Synthetic: FXN 3 reverse 9:69044812-69044835; As/LbCpf1
ttagtccctaactgctgga

SEQ ID NO: 10759 - DNA, 20 bp, Artificial Sequence
  Synthetic: FXN 3 reverse 9:69044812-69044836; As/LbCpf1
ttagtccctaactgctggac

SEQ ID NO: 10760 - DNA, 21 bp, Artificial Sequence
  Synthetic: FXN 3 reverse 9:69044812-69044837; As/LbCpf1
ttagtccctaactgctggaca

SEQ ID NO: 10761 - DNA, 22 bp, Artificial Sequence
  Synthetic: FXN 3 reverse 9:69044812-69044838; As/LbCpf1
ttagtccctaactgctggacat

SEQ ID NO: 10762 - DNA, 23 bp, Artificial Sequence
  Synthetic: FXN 3 reverse 9:69044812-69044839; As/LbCpf1
ttagtccctaactgctggacatc

SEQ ID NO: 10763 - DNA, 24 bp, Artificial Sequence
  Synthetic: FXN 3 reverse 9:69044812-69044840; As/LbCpf1
ttagtccctaactgctggacatcc

SEQ ID NO: 10764 - DNA, 25 bp, Artificial Sequence
  Synthetic: FXN 3 reverse 9:69044812-69044841; As/LbCpf1
ttagtccctaactgctggacatcca

SEQ ID NO: 10765 - DNA, 18 bp, Artificial Sequence
  Synthetic: FXN 3 reverse 9:69044813-69044835; As/LbCpf1
tttagtccctaactgctg

SEQ ID NO: 10766 - DNA, 19 bp, Artificial Sequence
  Synthetic: FXN 3 reverse 9:69044813-69044836; As/LbCpf1
tttagtccctaactgctgg

SEQ ID NO: 10767 - DNA, 20 bp, Artificial Sequence
  Synthetic: FXN 3 reverse 9:69044813-69044837; As/LbCpf1
tttagtccctaactgctgga

SEQ ID NO: 10768 - DNA, 21 bp, Artificial Sequence
  Synthetic: FXN 3 reverse 9:69044813-69044838; As/LbCpf1
tttagtccctaactgctggac

SEQ ID NO: 10769 - DNA, 22 bp, Artificial Sequence
  Synthetic: FXN 3 reverse 9:69044813-69044839; As/LbCpf1
tttagtccctaactgctggaca

SEQ ID NO: 10770 - DNA, 23 bp, Artificial Sequence
  Synthetic: FXN 3 reverse 9:69044813-69044840; As/LbCpf1
tttagtccctaactgctggacat

SEQ ID NO: 10771 - DNA, 24 bp, Artificial Sequence
  Synthetic: FXN 3 reverse 9:69044813-69044841; As/LbCpf1
tttagtccctaactgctggacatc

SEQ ID NO: 10772 - DNA, 25 bp, Artificial Sequence
  Synthetic: FXN 3 reverse 9:69044813-69044842; As/LbCpf1
tttagtccctaactgctggacatcc

SEQ ID NO: 10773 - DNA, 18 bp, Artificial Sequence
  Synthetic: FXN 3 reverse 9:69044814-69044836; As/LbCpf1
ttttagtccctaactgct

SEQ ID NO: 10774 - DNA, 19 bp, Artificial Sequence
  Synthetic: FXN 3 reverse 9:69044814-69044837; As/LbCpf1
ttttagtccctaactgctg

SEQ ID NO: 10775 - DNA, 20 bp, Artificial Sequence
  Synthetic: FXN 3 reverse 9:69044814-69044838; As/LbCpf1
ttttagtccctaactgctgg

SEQ ID NO: 10776 - DNA, 21 bp, Artificial Sequence
  Synthetic: FXN 3 reverse 9:69044814-69044839; As/LbCpf1
ttttagtccctaactgctgga

SEQ ID NO: 10777 - DNA, 22 bp, Artificial Sequence
  Synthetic: FXN 3 reverse 9:69044814-69044840; As/LbCpf1
ttttagtccctaactgctggac

SEQ ID NO: 10778 - DNA, 23 bp, Artificial Sequence
  Synthetic: FXN 3 reverse 9:69044814-69044841; As/LbCpf1
ttttagtccctaactgctggaca

SEQ ID NO: 10779 - DNA, 24 bp, Artificial Sequence
  Synthetic: FXN 3 reverse 9:69044814-69044842; As/LbCpf1
ttttagtccctaactgctggacat

SEQ ID NO: 10780 - DNA, 25 bp, Artificial Sequence
  Synthetic: FXN 3 reverse 9:69044814-69044843; As/LbCpf1
ttttagtccctaactgctggacatc

SEQ ID NO: 10781 - DNA, 18 bp, Artificial Sequence
  Synthetic: FXN 3 reverse 9:69044888-69044910; As/LbCpf1
gctctgactgctgactgc

SEQ ID NO: 10782 - DNA, 19 bp, Artificial Sequence
  Synthetic: FXN 3 reverse 9:69044888-69044911; As/LbCpf1
gctctgactgctgactgct

SEQ ID NO: 10783 - DNA, 20 bp, Artificial Sequence
  Synthetic: FXN 3 reverse 9:69044888-69044912; As/LbCpf1
gctctgactgctgactgctg

SEQ ID NO: 10784 - DNA, 21 bp, Artificial Sequence
  Synthetic: FXN 3 reverse 9:69044888-69044913; As/LbCpf1
gctctgactgctgactgctgt

SEQ ID NO: 10785 - DNA, 22 bp, Artificial Sequence
  Synthetic: FXN 3 reverse 9:69044888-69044914; As/LbCpf1
gctctgactgctgactgctgtc

SEQ ID NO: 10786 - DNA, 23 bp, Artificial Sequence
  Synthetic: FXN 3 reverse 9:69044888-69044915; As/LbCpf1
gctctgactgctgactgctgtct

SEQ ID NO: 10787 - DNA, 24 bp, Artificial Sequence
  Synthetic: FXN 3 reverse 9:69044888-69044916; As/LbCpf1
gctctgactgctgactgctgtctg

SEQ ID NO: 10788 - DNA, 25 bp, Artificial Sequence
  Synthetic: FXN 3 reverse 9:69044888-69044917; As/LbCpf1
gctctgactgctgactgctgtctga

SEQ ID NO: 10789 - DNA, 18 bp, Artificial Sequence
  Synthetic: FXN 3 forward 9:69044952-69044974; As/LbCpf1
ctgttgcctctcttagtg

SEQ ID NO: 10790 - DNA, 19 bp, Artificial Sequence
  Synthetic: FXN 3 forward 9:69044952-69044975; As/LbCpf1
ctgttgcctctcttagtga

SEQ ID NO: 10791 - DNA, 20 bp, Artificial Sequence
  Synthetic: FXN 3 forward 9:69044952-69044976; As/LbCpf1
ctgttgcctctcttagtgac

SEQ ID NO: 10792 - DNA, 21 bp, Artificial Sequence
  Synthetic: FXN 3 forward 9:69044952-69044977; As/LbCpf1
ctgttgcctctcttagtgacc

SEQ ID NO: 10793 - DNA, 22 bp, Artificial Sequence
  Synthetic: FXN 3 forward 9:69044952-69044978; As/LbCpf1
ctgttgcctctcttagtgacct

SEQ ID NO: 10794 - DNA, 23 bp, Artificial Sequence
  Synthetic: FXN 3 forward 9:69044952-69044979; As/LbCpf1
ctgttgcctctcttagtgacctt

SEQ ID NO: 10795 - DNA, 24 bp, Artificial Sequence
  Synthetic: FXN 3 forward 9:69044952-69044980; As/LbCpf1
ctgttgcctctcttagtgaccttt

SEQ ID NO: 10796 - DNA, 25 bp, Artificial Sequence
  Synthetic: FXN 3 forward 9:69044952-69044981; As/LbCpf1
ctgttgcctctcttagtgacctttt

SEQ ID NO: 10797 - DNA, 18 bp, Artificial Sequence
  Synthetic: FXN 3 forward 9:69044977-69044999; As/LbCpf1
aagagcattgtggatgcc

SEQ ID NO: 10798 - DNA, 19 bp, Artificial Sequence
  Synthetic: FXN 3 forward 9:69044977-69045000; As/LbCpf1
aagagcattgtggatgcct

SEQ ID NO: 10799 - DNA, 20 bp, Artificial Sequence
  Synthetic: FXN 3 forward 9:69044977-69045001; As/LbCpf1
aagagcattgtggatgcctc

SEQ ID NO: 10800 - DNA, 21 bp, Artificial Sequence
  Synthetic: FXN 3 forward 9:69044977-69045002; As/LbCpf1
aagagcattgtggatgcctcc

SEQ ID NO: 10801 - DNA, 22 bp, Artificial Sequence
  Synthetic: FXN 3 forward 9:69044977-69045003; As/LbCpf1
aagagcattgtggatgcctccc

SEQ ID NO: 10802 - DNA, 23 bp, Artificial Sequence
  Synthetic: FXN 3 forward 9:69044977-69045004; As/LbCpf1
aagagcattgtggatgcctccca

SEQ ID NO: 10803 - DNA, 24 bp, Artificial Sequence
  Synthetic: FXN 3 forward 9:69044977-69045005; As/LbCpf1
aagagcattgtggatgcctcccag

SEQ ID NO: 10804 - DNA, 25 bp, Artificial Sequence
  Synthetic: FXN 3 forward 9:69044977-69045006; As/LbCpf1
aagagcattgtggatgcctcccagc

SEQ ID NO: 10805 - DNA, 18 bp, Artificial Sequence
  Synthetic: FXN 3 forward 9:69044978-69045000; As/LbCpf1
agagcattgtggatgcct

SEQ ID NO: 10806 - DNA, 19 bp, Artificial Sequence
  Synthetic: FXN 3 forward 9:69044978-69045001; As/LbCpf1
agagcattgtggatgcctc

SEQ ID NO: 10807 - DNA, 20 bp, Artificial Sequence
  Synthetic: FXN 3 forward 9:69044978-69045002; As/LbCpf1
agagcattgtggatgcctcc

SEQ ID NO: 10808 - DNA, 21 bp, Artificial Sequence
  Synthetic: FXN 3 forward 9:69044978-69045003; As/LbCpf1
agagcattgtggatgcctccc

SEQ ID NO: 10809 - DNA, 22 bp, Artificial Sequence
  Synthetic: FXN 3 forward 9:69044978-69045004; As/LbCpf1
agagcattgtggatgcctccca

SEQ ID NO: 10810 - DNA, 23 bp, Artificial Sequence
  Synthetic: FXN 3 forward 9:69044978-69045005; As/LbCpf1
agagcattgtggatgcctcccag

SEQ ID NO: 10811 - DNA, 24 bp, Artificial Sequence
  Synthetic: FXN 3 forward 9:69044978-69045006; As/LbCpf1
agagcattgtggatgcctcccagc

SEQ ID NO: 10812 - DNA, 25 bp, Artificial Sequence
  Synthetic: FXN 3 forward 9:69044978-69045007; As/LbCpf1
agagcattgtggatgcctcccagcc

SEQ ID NO: 10813 - DNA, 18 bp, Artificial Sequence
  Synthetic: FXN 3 reverse 9:69045051-69045073; As/LbCpf1
catcacatcaggaagttc

SEQ ID NO: 10814 - DNA, 19 bp, Artificial Sequence
  Synthetic: FXN 3 reverse 9:69045051-69045074; As/LbCpf1
catcacatcaggaagttct

SEQ ID NO: 10815 - DNA, 20 bp, Artificial Sequence
  Synthetic: FXN 3 reverse 9:69045051-69045075; As/LbCpf1
catcacatcaggaagttcta

SEQ ID NO: 10816 - DNA, 21 bp, Artificial Sequence
  Synthetic: FXN 3 reverse 9:69045051-69045076; As/LbCpf1
catcacatcaggaagttctac

SEQ ID NO: 10817 - DNA, 22 bp, Artificial Sequence
  Synthetic: FXN 3 reverse 9:69045051-69045077; As/LbCpf1
catcacatcaggaagttctact

SEQ ID NO: 10818 - DNA, 23 bp, Artificial Sequence
  Synthetic: FXN 3 reverse 9:69045051-69045078; As/LbCpf1
catcacatcaggaagttctactg

SEQ ID NO: 10819 - DNA, 24 bp, Artificial Sequence
  Synthetic: FXN 3 reverse 9:69045051-69045079; As/LbCpf1
catcacatcaggaagttctactgg

SEQ ID NO: 10820 - DNA, 25 bp, Artificial Sequence
  Synthetic: FXN 3 reverse 9:69045051-69045080; As/LbCpf1
catcacatcaggaagttctactggg

SEQ ID NO: 10821 - DNA, 18 bp, Artificial Sequence
  Synthetic: FXN 3 reverse 9:69045098-69045120; As/LbCpf1
gagaatcctgtggccaca

SEQ ID NO: 10822 - DNA, 19 bp, Artificial Sequence
  Synthetic: FXN 3 reverse 9:69045098-69045121; As/LbCpf1
gagaatcctgtggccacat

SEQ ID NO: 10823 - DNA, 20 bp, Artificial Sequence
  Synthetic: FXN 3 reverse 9:69045098-69045122; As/LbCpf1
gagaatcctgtggccacatg

SEQ ID NO: 10824 - DNA, 21 bp, Artificial Sequence
  Synthetic: FXN 3 reverse 9:69045098-69045123; As/LbCpf1
gagaatcctgtggccacatgt

SEQ ID NO: 10825 - DNA, 22 bp, Artificial Sequence
  Synthetic: FXN 3 reverse 9:69045098-69045124; As/LbCpf1
gagaatcctgtggccacatgtg

SEQ ID NO: 10826 - DNA, 23 bp, Artificial Sequence
  Synthetic: FXN 3 reverse 9:69045098-69045125; As/LbCpf1
gagaatcctgtggccacatgtgg

SEQ ID NO: 10827 - DNA, 24 bp, Artificial Sequence
  Synthetic: FXN 3 reverse 9:69045098-69045126; As/LbCpf1
gagaatcctgtggccacatgtggc

SEQ ID NO: 10828 - DNA, 25 bp, Artificial Sequence
  Synthetic: FXN 3 reverse 9:69045098-69045127; As/LbCpf1
gagaatcctgtggccacatgtggct

SEQ ID NO: 10829 - DNA, 18 bp, Artificial Sequence
  Synthetic: FXN 3 reverse 9:69045144-69045166; As/LbCpf1
atgagataaaatataaag

SEQ ID NO: 10830 - DNA, 19 bp, Artificial Sequence
  Synthetic: FXN 3 reverse 9:69045144-69045167; As/LbCpf1
atgagataaaatataaagt

SEQ ID NO: 10831 - DNA, 20 bp, Artificial Sequence
  Synthetic: FXN 3 reverse 9:69045144-69045168; As/LbCpf1
atgagataaaatataaagtc

SEQ ID NO: 10832 - DNA, 21 bp, Artificial Sequence
  Synthetic: FXN 3 reverse 9:69045144-69045169; As/LbCpf1
atgagataaaatataaagtca

SEQ ID NO: 10833 - DNA, 22 bp, Artificial Sequence
  Synthetic: FXN 3 reverse 9:69045144-69045170; As/LbCpf1
atgagataaaatataaagtcag

SEQ ID NO: 10834 - DNA, 23 bp, Artificial Sequence
  Synthetic: FXN 3 reverse 9:69045144-69045171; As/LbCpf1
atgagataaaatataaagtcagc

SEQ ID NO: 10835 - DNA, 24 bp, Artificial Sequence
  Synthetic: FXN 3 reverse 9:69045144-69045172; As/LbCpf1
atgagataaaatataaagtcagct

SEQ ID NO: 10836 - DNA, 25 bp, Artificial Sequence
  Synthetic: FXN 3 reverse 9:69045144-69045173; As/LbCpf1
atgagataaaatataaagtcagctc

SEQ ID NO: 10837 - DNA, 18 bp, Artificial Sequence
  Synthetic: FXN 3 reverse 9:69045150-69045172; As/LbCpf1
aatttaatgagataaaat

SEQ ID NO: 10838 - DNA, 19 bp, Artificial Sequence
  Synthetic: FXN 3 reverse 9:69045150-69045173; As/LbCpf1
aatttaatgagataaaata

SEQ ID NO: 10839 - DNA, 20 bp, Artificial Sequence
  Synthetic: FXN 3 reverse 9:69045150-69045174; As/LbCpf1
aatttaatgagataaaatat

SEQ ID NO: 10840 - DNA, 21 bp, Artificial Sequence
  Synthetic: FXN 3 reverse 9:69045150-69045175; As/LbCpf1
aatttaatgagataaaatata

SEQ ID NO: 10841 - DNA, 22 bp, Artificial Sequence
  Synthetic: FXN 3 reverse 9:69045150-69045176; As/LbCpf1
aatttaatgagataaaatataa

SEQ ID NO: 10842 - DNA, 23 bp, Artificial Sequence
  Synthetic: FXN 3 reverse 9:69045150-69045177; As/LbCpf1
aatttaatgagataaaatataaa

SEQ ID NO: 10843 - DNA, 24 bp, Artificial Sequence
  Synthetic: FXN 3 reverse 9:69045150-69045178; As/LbCpf1
aatttaatgagataaaatataaag

SEQ ID NO: 10844 - DNA, 25 bp, Artificial Sequence
  Synthetic: FXN 3 reverse 9:69045150-69045179; As/LbCpf1
aatttaatgagataaaatataaagt

SEQ ID NO: 10845 - DNA, 18 bp, Artificial Sequence
  Synthetic: FXN 3 forward 9:69045152-69045174; As/LbCpf1
tattttatctcattaaat

SEQ ID NO: 10846 - DNA, 19 bp, Artificial Sequence
  Synthetic: FXN 3 forward 9:69045152-69045175; As/LbCpf1
tattttatctcattaaatt

SEQ ID NO: 10847 - DNA, 20 bp, Artificial Sequence
  Synthetic: FXN 3 forward 9:69045152-69045176; As/LbCpf1
tattttatctcattaaattt

SEQ ID NO: 10848 - DNA, 21 bp, Artificial Sequence
  Synthetic: FXN 3 forward 9:69045152-69045177; As/LbCpf1
tattttatctcattaaattta

SEQ ID NO: 10849 - DNA, 22 bp, Artificial Sequence
  Synthetic: FXN 3 forward 9:69045152-69045178; As/LbCpf1
tattttatctcattaaatttaa

SEQ ID NO: 10850 - DNA, 23 bp, Artificial Sequence
  Synthetic: FXN 3 forward 9:69045152-69045179; As/LbCpf1
tattttatctcattaaatttaaa

SEQ ID NO: 10851 - DNA, 24 bp, Artificial Sequence
  Synthetic: FXN 3 forward 9:69045152-69045180; As/LbCpf1
tattttatctcattaaatttaaat

SEQ ID NO: 10852 - DNA, 25 bp, Artificial Sequence
  Synthetic: FXN 3 forward 9:69045152-69045181; As/LbCpf1
tattttatctcattaaatttaaatg

SEQ ID NO: 10853 - DNA, 18 bp, Artificial Sequence
  Synthetic: FXN 3 reverse 9:69045156-69045178; As/LbCpf1
catttaaatttaatgaga

SEQ ID NO: 10854 - DNA, 19 bp, Artificial Sequence
  Synthetic: FXN 3 reverse 9:69045156-69045179; As/LbCpf1
catttaaatttaatgagat

SEQ ID NO: 10855 - DNA, 20 bp, Artificial Sequence
  Synthetic: FXN 3 reverse 9:69045156-69045180; As/LbCpf1
catttaaatttaatgagata

SEQ ID NO: 10856 - DNA, 21 bp, Artificial Sequence
  Synthetic: FXN 3 reverse 9:69045156-69045181; As/LbCpf1
catttaaatttaatgagataa

SEQ ID NO: 10857 - DNA, 22 bp, Artificial Sequence
  Synthetic: FXN 3 reverse 9:69045156-69045182; As/LbCpf1
catttaaatttaatgagataaa

SEQ ID NO: 10858 - DNA, 23 bp, Artificial Sequence
  Synthetic: FXN 3 reverse 9:69045156-69045183; As/LbCpf1
catttaaatttaatgagataaaa

SEQ ID NO: 10859 - DNA, 24 bp, Artificial Sequence
  Synthetic: FXN 3 reverse 9:69045156-69045184; As/LbCpf1
catttaaatttaatgagataaaat

SEQ ID NO: 10860 - DNA, 25 bp, Artificial Sequence
  Synthetic: FXN 3 reverse 9:69045156-69045185; As/LbCpf1
catttaaatttaatgagataaaata

SEQ ID NO: 10861 - DNA, 18 bp, Artificial Sequence
  Synthetic: FXN 3 forward 9:69045158-69045180; As/LbCpf1
atctcattaaatttaaat

SEQ ID NO: 10862 - DNA, 19 bp, Artificial Sequence
  Synthetic: FXN 3 forward 9:69045158-69045181; As/LbCpf1
atctcattaaatttaaatg

SEQ ID NO: 10863 - DNA, 20 bp, Artificial Sequence
  Synthetic: FXN 3 forward 9:69045158-69045182; As/LbCpf1
atctcattaaatttaaatgt

SEQ ID NO: 10864 - DNA, 21 bp, Artificial Sequence
  Synthetic: FXN 3 forward 9:69045158-69045183; As/LbCpf1
atctcattaaatttaaatgta

SEQ ID NO: 10865 - DNA, 22 bp, Artificial Sequence
  Synthetic: FXN 3 forward 9:69045158-69045184; As/LbCpf1
atctcattaaatttaaatgtaa

SEQ ID NO: 10866 - DNA, 23 bp, Artificial Sequence
  Synthetic: FXN 3 forward 9:69045158-69045185; As/LbCpf1
atctcattaaatttaaatgtaaa

SEQ ID NO: 10867 - DNA, 24 bp, Artificial Sequence
  Synthetic: FXN 3 forward 9:69045158-69045186; As/LbCpf1
atctcattaaatttaaatgtaaat

SEQ ID NO: 10868 - DNA, 25 bp, Artificial Sequence
  Synthetic: FXN 3 forward 9:69045158-69045187; As/LbCpf1
atctcattaaatttaaatgtaaata

SEQ ID NO: 10869 - DNA, 18 bp, Artificial Sequence
  Synthetic: FXN 3 forward 9:69045159-69045181; As/LbCpf1
tctcattaaatttaaatg

SEQ ID NO: 10870 - DNA, 19 bp, Artificial Sequence
  Synthetic: FXN 3 forward 9:69045159-69045182; As/LbCpf1
tctcattaaatttaaatgt

SEQ ID NO: 10871 - DNA, 20 bp, Artificial Sequence
  Synthetic: FXN 3 forward 9:69045159-69045183; As/LbCpf1
tctcattaaatttaaatgta

SEQ ID NO: 10872 - DNA, 21 bp, Artificial Sequence
  Synthetic: FXN 3 forward 9:69045159-69045184; As/LbCpf1
tctcattaaatttaaatgtaa

SEQ ID NO: 10873 - DNA, 22 bp, Artificial Sequence
  Synthetic: FXN 3 forward 9:69045159-69045185; As/LbCpf1
tctcattaaatttaaatgtaaa

SEQ ID NO: 10874 - DNA, 23 bp, Artificial Sequence
  Synthetic: FXN 3 forward 9:69045159-69045186; As/LbCpf1
tctcattaaatttaaatgtaaat

SEQ ID NO: 10875 - DNA, 24 bp, Artificial Sequence
  Synthetic: FXN 3 forward 9:69045159-69045187; As/LbCpf1
tctcattaaatttaaatgtaaata

SEQ ID NO: 10876 - DNA, 25 bp, Artificial Sequence
  Synthetic: FXN 3 forward 9:69045159-69045188; As/LbCpf1
tctcattaaatttaaatgtaaatag

SEQ ID NO: 10877 - DNA, 18 bp, Artificial Sequence
  Synthetic: FXN 3 forward 9:69045173-69045195; As/LbCpf1
aatgtaaatagctacgtg

SEQ ID NO: 10878 - DNA, 19 bp, Artificial Sequence
  Synthetic: FXN 3 forward 9:69045173-69045196; As/LbCpf1
aatgtaaatagctacgtgt

SEQ ID NO: 10879 - DNA, 20 bp, Artificial Sequence
  Synthetic: FXN 3 forward 9:69045173-69045197; As/LbCpf1
aatgtaaatagctacgtgtg

SEQ ID NO: 10880 - DNA, 21 bp, Artificial Sequence
  Synthetic: FXN 3 forward 9:69045173-69045198; As/LbCpf1
aatgtaaatagctacgtgtgg

SEQ ID NO: 10881 - DNA, 22 bp, Artificial Sequence
  Synthetic: FXN 3 forward 9:69045173-69045199; As/LbCpf1
aatgtaaatagctacgtgtggc

SEQ ID NO: 10882 - DNA, 23 bp, Artificial Sequence
  Synthetic: FXN 3 forward 9:69045173-69045200; As/LbCpf1
aatgtaaatagctacgtgtggct

SEQ ID NO: 10883 - DNA, 24 bp, Artificial Sequence
  Synthetic: FXN 3 forward 9:69045173-69045201; As/LbCpf1
aatgtaaatagctacgtgtggctt

SEQ ID NO: 10884 - DNA, 25 bp, Artificial Sequence
  Synthetic: FXN 3 forward 9:69045173-69045202; As/LbCpf1
aatgtaaatagctacgtgtggcttg

SEQ ID NO: 10885 - DNA, 18 bp, Artificial Sequence
  Synthetic: FXN 3 reverse 9:69045192-69045214; As/LbCpf1
caataggctagccaacaa

SEQ ID NO: 10886 - DNA, 19 bp, Artificial Sequence
  Synthetic: FXN 3 reverse 9:69045192-69045215; As/LbCpf1
caataggctagccaacaag

SEQ ID NO: 10887 - DNA, 20 bp, Artificial Sequence
  Synthetic: FXN 3 reverse 9:69045192-69045216; As/LbCpf1
caataggctagccaacaagc

SEQ ID NO: 10888 - DNA, 21 bp, Artificial Sequence
  Synthetic: FXN 3 reverse 9:69045192-69045217; As/LbCpf1
caataggctagccaacaagcc

SEQ ID NO: 10889 - DNA, 22 bp, Artificial Sequence
  Synthetic: FXN 3 reverse 9:69045192-69045218; As/LbCpf1
caataggctagccaacaagcca

SEQ ID NO: 10890 - DNA, 23 bp, Artificial Sequence
  Synthetic: FXN 3 reverse 9:69045192-69045219; As/LbCpf1
caataggctagccaacaagccac

SEQ ID NO: 10891 - DNA, 24 bp, Artificial Sequence
  Synthetic: FXN 3 reverse 9:69045192-69045220; As/LbCpf1
caataggctagccaacaagccaca

SEQ ID NO: 10892 - DNA, 25 bp, Artificial Sequence
  Synthetic: FXN 3 reverse 9:69045192-69045221; As/LbCpf1
caataggctagccaacaagccacac

SEQ ID NO: 10893 - DNA, 18 bp, Artificial Sequence
  Synthetic: FXN 3 reverse 9:69045193-69045215; As/LbCpf1
ccaataggctagccaaca

SEQ ID NO: 10894 - DNA, 19 bp, Artificial Sequence
  Synthetic: FXN 3 reverse 9:69045193-69045216; As/LbCpf1
ccaataggctagccaacaa

SEQ ID NO: 10895 - DNA, 20 bp, Artificial Sequence
  Synthetic: FXN 3 reverse 9:69045193-69045217; As/LbCpf1
ccaataggctagccaacaag

SEQ ID NO: 10896 - DNA, 21 bp, Artificial Sequence
  Synthetic: FXN 3 reverse 9:69045193-69045218; As/LbCpf1
ccaataggctagccaacaagc

SEQ ID NO: 10897 - DNA, 22 bp, Artificial Sequence
  Synthetic: FXN 3 reverse 9:69045193-69045219; As/LbCpf1
ccaataggctagccaacaagcc

SEQ ID NO: 10898 - DNA, 23 bp, Artificial Sequence
  Synthetic: FXN 3 reverse 9:69045193-69045220; As/LbCpf1
ccaataggctagccaacaagcca

SEQ ID NO: 10899 - DNA, 24 bp, Artificial Sequence
  Synthetic: FXN 3 reverse 9:69045193-69045221; As/LbCpf1
ccaataggctagccaacaagccac

SEQ ID NO: 10900 - DNA, 25 bp, Artificial Sequence
  Synthetic: FXN 3 reverse 9:69045193-69045222; As/LbCpf1
ccaataggctagccaacaagccaca

SEQ ID NO: 10901 - DNA, 18 bp, Artificial Sequence
  Synthetic: FXN 3 reverse 9:69045238-69045260; As/LbCpf1
gtgcattacagtgattct

SEQ ID NO: 10902 - DNA, 19 bp, Artificial Sequence
  Synthetic: FXN 3 reverse 9:69045238-69045261; As/LbCpf1
gtgcattacagtgattctc

SEQ ID NO: 10903 - DNA, 20 bp, Artificial Sequence
  Synthetic: FXN 3 reverse 9:69045238-69045262; As/LbCpf1
gtgcattacagtgattctcc

SEQ ID NO: 10904 - DNA, 21 bp, Artificial Sequence
  Synthetic: FXN 3 reverse 9:69045238-69045263; As/LbCpf1
gtgcattacagtgattctccc

SEQ ID NO: 10905 - DNA, 22 bp, Artificial Sequence
  Synthetic: FXN 3 reverse 9:69045238-69045264; As/LbCpf1
gtgcattacagtgattctccct

SEQ ID NO: 10906 - DNA, 23 bp, Artificial Sequence
  Synthetic: FXN 3 reverse 9:69045238-69045265; As/LbCpf1
gtgcattacagtgattctccctg

SEQ ID NO: 10907 - DNA, 24 bp, Artificial Sequence
  Synthetic: FXN 3 reverse 9:69045238-69045266; As/LbCpf1
gtgcattacagtgattctccctgt

SEQ ID NO: 10908 - DNA, 25 bp, Artificial Sequence
  Synthetic: FXN 3 reverse 9:69045238-69045267; As/LbCpf1
gtgcattacagtgattctccctgtg

SEQ ID NO: 10909 - DNA, 18 bp, Artificial Sequence
  Synthetic: FXN 3 reverse 9:69045239-69045261; As/LbCpf1
agtgcattacagtgattc

SEQ ID NO: 10910 - DNA, 19 bp, Artificial Sequence
  Synthetic: FXN 3 reverse 9:69045239-69045262; As/LbCpf1
agtgcattacagtgattct

SEQ ID NO: 10911 - DNA, 20 bp, Artificial Sequence
  Synthetic: FXN 3 reverse 9:69045239-69045263; As/LbCpf1
agtgcattacagtgattctc

SEQ ID NO: 10912 - DNA, 21 bp, Artificial Sequence
  Synthetic: FXN 3 reverse 9:69045239-69045264; As/LbCpf1
agtgcattacagtgattctcc

SEQ ID NO: 10913 - DNA, 22 bp, Artificial Sequence
  Synthetic: FXN 3 reverse 9:69045239-69045265; As/LbCpf1
agtgcattacagtgattctccc

SEQ ID NO: 10914 - DNA, 23 bp, Artificial Sequence
  Synthetic: FXN 3 reverse 9:69045239-69045266; As/LbCpf1
agtgcattacagtgattctccct

SEQ ID NO: 10915 - DNA, 24 bp, Artificial Sequence
  Synthetic: FXN 3 reverse 9:69045239-69045267; As/LbCpf1
agtgcattacagtgattctccctg

SEQ ID NO: 10916 - DNA, 25 bp, Artificial Sequence
  Synthetic: FXN 3 reverse 9:69045239-69045268; As/LbCpf1
agtgcattacagtgattctccctgt

SEQ ID NO: 10917 - DNA, 18 bp, Artificial Sequence
  Synthetic: FXN 3 reverse 9:69045248-69045270; As/LbCpf1
ccttcttttagtgcatta

SEQ ID NO: 10918 - DNA, 19 bp, Artificial Sequence
  Synthetic: FXN 3 reverse 9:69045248-69045271; As/LbCpf1
ccttcttttagtgcattac

SEQ ID NO: 10919 - DNA, 20 bp, Artificial Sequence
  Synthetic: FXN 3 reverse 9:69045248-69045272; As/LbCpf1
ccttcttttagtgcattaca

SEQ ID NO: 10920 - DNA, 21 bp, Artificial Sequence
  Synthetic: FXN 3 reverse 9:69045248-69045273; As/LbCpf1
ccttcttttagtgcattacag

SEQ ID NO: 10921 - DNA, 22 bp, Artificial Sequence
  Synthetic: FXN 3 reverse 9:69045248-69045274; As/LbCpf1
ccttcttttagtgcattacagt

SEQ ID NO: 10922 - DNA, 23 bp, Artificial Sequence
  Synthetic: FXN 3 reverse 9:69045248-69045275; As/LbCpf1
ccttcttttagtgcattacagtg

SEQ ID NO: 10923 - DNA, 24 bp, Artificial Sequence
  Synthetic: FXN 3 reverse 9:69045248-69045276; As/LbCpf1
ccttcttttagtgcattacagtga

SEQ ID NO: 10924 - DNA, 25 bp, Artificial Sequence
  Synthetic: FXN 3 reverse 9:69045248-69045277; As/LbCpf1
ccttcttttagtgcattacagtgat

SEQ ID NO: 10925 - DNA, 18 bp, Artificial Sequence
  Synthetic: FXN 3 reverse 9:69045249-69045271; As/LbCpf1
accttcttttagtgcatt

SEQ ID NO: 10926 - DNA, 19 bp, Artificial Sequence
  Synthetic: FXN 3 reverse 9:69045249-69045272; As/LbCpf1
accttcttttagtgcatta

SEQ ID NO: 10927 - DNA, 20 bp, Artificial Sequence
  Synthetic: FXN 3 reverse 9:69045249-69045273; As/LbCpf1
accttcttttagtgcattac

SEQ ID NO: 10928 - DNA, 21 bp, Artificial Sequence
  Synthetic: FXN 3 reverse 9:69045249-69045274; As/LbCpf1
accttcttttagtgcattaca

SEQ ID NO: 10929 - DNA, 22 bp, Artificial Sequence
  Synthetic: FXN 3 reverse 9:69045249-69045275; As/LbCpf1
accttcttttagtgcattacag

SEQ ID NO: 10930 - DNA, 23 bp, Artificial Sequence
  Synthetic: FXN 3 reverse 9:69045249-69045276; As/LbCpf1
accttcttttagtgcattacagt

SEQ ID NO: 10931 - DNA, 24 bp, Artificial Sequence
  Synthetic: FXN 3 reverse 9:69045249-69045277; As/LbCpf1
accttcttttagtgcattacagtg

SEQ ID NO: 10932 - DNA, 25 bp, Artificial Sequence
  Synthetic: FXN 3 reverse 9:69045249-69045278; As/LbCpf1
accttcttttagtgcattacagtga

SEQ ID NO: 10933 - DNA, 18 bp, Artificial Sequence
  Synthetic: FXN 3 reverse 9:69045250-69045272; As/LbCpf1
taccttcttttagtgcat

SEQ ID NO: 10934 - DNA, 19 bp, Artificial Sequence
  Synthetic: FXN 3 reverse 9:69045250-69045273; As/LbCpf1
taccttcttttagtgcatt

SEQ ID NO: 10935 - DNA, 20 bp, Artificial Sequence
  Synthetic: FXN 3 reverse 9:69045250-69045274; As/LbCpf1
taccttcttttagtgcatta

SEQ ID NO: 10936 - DNA, 21 bp, Artificial Sequence
  Synthetic: FXN 3 reverse 9:69045250-69045275; As/LbCpf1
taccttcttttagtgcattac

SEQ ID NO: 10937 - DNA, 22 bp, Artificial Sequence
  Synthetic: FXN 3 reverse 9:69045250-69045276; As/LbCpf1
taccttcttttagtgcattaca

SEQ ID NO: 10938 - DNA, 23 bp, Artificial Sequence
  Synthetic: FXN 3 reverse 9:69045250-69045277; As/LbCpf1
taccttcttttagtgcattacag

SEQ ID NO: 10939 - DNA, 24 bp, Artificial Sequence
  Synthetic: FXN 3 reverse 9:69045250-69045278; As/LbCpf1
taccttcttttagtgcattacagt

SEQ ID NO: 10940 - DNA, 25 bp, Artificial Sequence
  Synthetic: FXN 3 reverse 9:69045250-69045279; As/LbCpf1
taccttcttttagtgcattacagtg

SEQ ID NO: 10941 - DNA, 18 bp, Artificial Sequence
  Synthetic: FXN 3 reverse 9:69045251-69045273; As/LbCpf1
ttaccttcttttagtgca

SEQ ID NO: 10942 - DNA, 19 bp, Artificial Sequence
  Synthetic: FXN 3 reverse 9:69045251-69045274; As/LbCpf1
ttaccttcttttagtgcat

SEQ ID NO: 10943 - DNA, 20 bp, Artificial Sequence
  Synthetic: FXN 3 reverse 9:69045251-69045275; As/LbCpf1
ttaccttcttttagtgcatt

SEQ ID NO: 10944 - DNA, 21 bp, Artificial Sequence
  Synthetic: FXN 3 reverse 9:69045251-69045276; As/LbCpf1
ttaccttcttttagtgcatta

SEQ ID NO: 10945 - DNA, 22 bp, Artificial Sequence
  Synthetic: FXN 3 reverse 9:69045251-69045277; As/LbCpf1
ttaccttcttttagtgcattac

SEQ ID NO: 10946 - DNA, 23 bp, Artificial Sequence
  Synthetic: FXN 3 reverse 9:69045251-69045278; As/LbCpf1
ttaccttcttttagtgcattaca

SEQ ID NO: 10947 - DNA, 24 bp, Artificial Sequence
  Synthetic: FXN 3 reverse 9:69045251-69045279; As/LbCpf1
ttaccttcttttagtgcattacag

SEQ ID NO: 10948 - DNA, 25 bp, Artificial Sequence
  Synthetic: FXN 3 reverse 9:69045251-69045280; As/LbCpf1
ttaccttcttttagtgcattacagt

SEQ ID NO: 10949 - DNA, 18 bp, Artificial Sequence
  Synthetic: FXN 3 reverse 9:69045252-69045274; As/LbCpf1
tttaccttcttttagtgc

SEQ ID NO: 10950 - DNA, 19 bp, Artificial Sequence
  Synthetic: FXN 3 reverse 9:69045252-69045275; As/LbCpf1
tttaccttcttttagtgca

SEQ ID NO: 10951 - DNA, 20 bp, Artificial Sequence
  Synthetic: FXN 3 reverse 9:69045252-69045276; As/LbCpf1
tttaccttcttttagtgcat

SEQ ID NO: 10952 - DNA, 21 bp, Artificial Sequence
  Synthetic: FXN 3 reverse 9:69045252-69045277; As/LbCpf1
tttaccttcttttagtgcatt

SEQ ID NO: 10953 - DNA, 22 bp, Artificial Sequence
  Synthetic: FXN 3 reverse 9:69045252-69045278; As/LbCpf1
tttaccttcttttagtgcatta

SEQ ID NO: 10954 - DNA, 23 bp, Artificial Sequence
  Synthetic: FXN 3 reverse 9:69045252-69045279; As/LbCpf1
tttaccttcttttagtgcattac

SEQ ID NO: 10955 - DNA, 24 bp, Artificial Sequence
  Synthetic: FXN 3 reverse 9:69045252-69045280; As/LbCpf1
tttaccttcttttagtgcattaca

SEQ ID NO: 10956 - DNA, 25 bp, Artificial Sequence
  Synthetic: FXN 3 reverse 9:69045252-69045281; As/LbCpf1
tttaccttcttttagtgcattacag

SEQ ID NO: 10957 - DNA, 18 bp, Artificial Sequence
  Synthetic: FXN 3 reverse 9:69045253-69045275; As/LbCpf1
ttttaccttcttttagtg

SEQ ID NO: 10958 - DNA, 19 bp, Artificial Sequence
  Synthetic: FXN 3 reverse 9:69045253-69045276; As/LbCpf1
ttttaccttcttttagtgc

SEQ ID NO: 10959 - DNA, 20 bp, Artificial Sequence
  Synthetic: FXN 3 reverse 9:69045253-69045277; As/LbCpf1
ttttaccttcttttagtgca

SEQ ID NO: 10960 - DNA, 21 bp, Artificial Sequence
  Synthetic: FXN 3 reverse 9:69045253-69045278; As/LbCpf1
ttttaccttcttttagtgcat

SEQ ID NO: 10961 - DNA, 22 bp, Artificial Sequence
  Synthetic: FXN 3 reverse 9:69045253-69045279; As/LbCpf1
ttttaccttcttttagtgcatt

SEQ ID NO: 10962 - DNA, 23 bp, Artificial Sequence
  Synthetic: FXN 3 reverse 9:69045253-69045280; As/LbCpf1
ttttaccttcttttagtgcatta

SEQ ID NO: 10963 - DNA, 24 bp, Artificial Sequence
  Synthetic: FXN 3 reverse 9:69045253-69045281; As/LbCpf1
ttttaccttcttttagtgcattac

SEQ ID NO: 10964 - DNA, 25 bp, Artificial Sequence
  Synthetic: FXN 3 reverse 9:69045253-69045282; As/LbCpf1
ttttaccttcttttagtgcattaca

SEQ ID NO: 10965 - DNA, 18 bp, Artificial Sequence
  Synthetic: FXN 3 reverse 9:69045254-69045276; As/LbCpf1
tttttaccttcttttagt

SEQ ID NO: 10966 - DNA, 19 bp, Artificial Sequence
  Synthetic: FXN 3 reverse 9:69045254-69045277; As/LbCpf1
tttttaccttcttttagtg

SEQ ID NO: 10967 - DNA, 20 bp, Artificial Sequence
  Synthetic: FXN 3 reverse 9:69045254-69045278; As/LbCpf1
tttttaccttcttttagtgc

SEQ ID NO: 10968 - DNA, 21 bp, Artificial Sequence
  Synthetic: FXN 3 reverse 9:69045254-69045279; As/LbCpf1
tttttaccttcttttagtgca

SEQ ID NO: 10969 - DNA, 22 bp, Artificial Sequence
  Synthetic: FXN 3 reverse 9:69045254-69045280; As/LbCpf1
tttttaccttcttttagtgcat

SEQ ID NO: 10970 - DNA, 23 bp, Artificial Sequence
  Synthetic: FXN 3 reverse 9:69045254-69045281; As/LbCpf1
tttttaccttcttttagtgcatt

SEQ ID NO: 10971 - DNA, 24 bp, Artificial Sequence
  Synthetic: FXN 3 reverse 9:69045254-69045282; As/LbCpf1
tttttaccttcttttagtgcatta

SEQ ID NO: 10972 - DNA, 25 bp, Artificial Sequence
  Synthetic: FXN 3 reverse 9:69045254-69045283; As/LbCpf1
tttttaccttcttttagtgcattac

SEQ ID NO: 10973 - DNA, 18 bp, Artificial Sequence
  Synthetic: FXN 3 reverse 9:69045255-69045277; As/LbCpf1
ttttttaccttcttttag

SEQ ID NO: 10974 - DNA, 19 bp, Artificial Sequence
  Synthetic: FXN 3 reverse 9:69045255-69045278; As/LbCpf1
ttttttaccttcttttagt

SEQ ID NO: 10975 - DNA, 20 bp, Artificial Sequence
  Synthetic: FXN 3 reverse 9:69045255-69045279; As/LbCpf1
ttttttaccttcttttagtg

SEQ ID NO: 10976 - DNA, 21 bp, Artificial Sequence
  Synthetic: FXN 3 reverse 9:69045255-69045280; As/LbCpf1
ttttttaccttcttttagtgc

SEQ ID NO: 10977 - DNA, 22 bp, Artificial Sequence
  Synthetic: FXN 3 reverse 9:69045255-69045281; As/LbCpf1
ttttttaccttcttttagtgca

SEQ ID NO: 10978 - DNA, 23 bp, Artificial Sequence
  Synthetic: FXN 3 reverse 9:69045255-69045282; As/LbCpf1
ttttttaccttcttttagtgcat

SEQ ID NO: 10979 - DNA, 24 bp, Artificial Sequence
  Synthetic: FXN 3 reverse 9:69045255-69045283; As/LbCpf1
ttttttaccttcttttagtgcatt

SEQ ID NO: 10980 - DNA, 25 bp, Artificial Sequence
  Synthetic: FXN 3 reverse 9:69045255-69045284; As/LbCpf1
ttttttaccttcttttagtgcatta

SEQ ID NO: 10981 - DNA, 18 bp, Artificial Sequence
  Synthetic: FXN 3 reverse 9:69045256-69045278; As/LbCpf1
tttttttaccttctttta

SEQ ID NO: 10982 - DNA, 19 bp, Artificial Sequence
  Synthetic: FXN 3 reverse 9:69045256-69045279; As/LbCpf1
tttttttaccttcttttag

SEQ ID NO: 10983 - DNA, 20 bp, Artificial Sequence
  Synthetic: FXN 3 reverse 9:69045256-69045280; As/LbCpf1
tttttttaccttcttttagt

SEQ ID NO: 10984 - DNA, 21 bp, Artificial Sequence
  Synthetic: FXN 3 reverse 9:69045256-69045281; As/LbCpf1
tttttttaccttcttttagtg

SEQ ID NO: 10985 - DNA, 22 bp, Artificial Sequence
  Synthetic: FXN 3 reverse 9:69045256-69045282; As/LbCpf1
tttttttaccttcttttagtgc

SEQ ID NO: 10986 - DNA, 23 bp, Artificial Sequence
  Synthetic: FXN 3 reverse 9:69045256-69045283; As/LbCpf1
tttttttaccttcttttagtgca

SEQ ID NO: 10987 - DNA, 24 bp, Artificial Sequence
  Synthetic: FXN 3 reverse 9:69045256-69045284; As/LbCpf1
tttttttaccttcttttagtgcat

SEQ ID NO: 10988 - DNA, 25 bp, Artificial Sequence
  Synthetic: FXN 3 reverse 9:69045256-69045285; As/LbCpf1
tttttttaccttcttttagtgcatt

SEQ ID NO: 10989 - DNA, 18 bp, Artificial Sequence
  Synthetic: FXN 3 reverse 9:69045257-69045279; As/LbCpf1
ttttttttaccttctttt

SEQ ID NO: 10990 - DNA, 19 bp, Artificial Sequence
  Synthetic: FXN 3 reverse 9:69045257-69045280; As/LbCpf1
ttttttttaccttctttta

SEQ ID NO: 10991 - DNA, 20 bp, Artificial Sequence
  Synthetic: FXN 3 reverse 9:69045257-69045281; As/LbCpf1
ttttttttaccttcttttag

SEQ ID NO: 10992 - DNA, 21 bp, Artificial Sequence
  Synthetic: FXN 3 reverse 9:69045257-69045282; As/LbCpf1
ttttttttaccttcttttagt

SEQ ID NO: 10993 - DNA, 22 bp, Artificial Sequence
  Synthetic: FXN 3 reverse 9:69045257-69045283; As/LbCpf1
ttttttttaccttcttttagtg

SEQ ID NO: 10994 - DNA, 23 bp, Artificial Sequence
  Synthetic: FXN 3 reverse 9:69045257-69045284; As/LbCpf1
ttttttttaccttcttttagtgc

SEQ ID NO: 10995 - DNA, 24 bp, Artificial Sequence
  Synthetic: FXN 3 reverse 9:69045257-69045285; As/LbCpf1
ttttttttaccttcttttagtgca

SEQ ID NO: 10996 - DNA, 25 bp, Artificial Sequence
  Synthetic: FXN 3 reverse 9:69045257-69045286; As/LbCpf1
ttttttttaccttcttttagtgcat

SEQ ID NO: 10997 - DNA, 18 bp, Artificial Sequence
  Synthetic: FXN 3 reverse 9:69045258-69045280; As/LbCpf1
tttttttttaccttcttt

SEQ ID NO: 10998 - DNA, 19 bp, Artificial Sequence
  Synthetic: FXN 3 reverse 9:69045258-69045281; As/LbCpf1
tttttttttaccttctttt

SEQ ID NO: 10999 - DNA, 20 bp, Artificial Sequence
  Synthetic: FXN 3 reverse 9:69045258-69045282; As/LbCpf1
tttttttttaccttctttta

SEQ ID NO: 11000 - DNA, 21 bp, Artificial Sequence
  Synthetic: FXN 3 reverse 9:69045258-69045283; As/LbCpf1
tttttttttaccttcttttag

SEQ ID NO: 11001 - DNA, 22 bp, Artificial Sequence
  Synthetic: FXN 3 reverse 9:69045258-69045284; As/LbCpf1
tttttttttaccttcttttagt

SEQ ID NO: 11002 - DNA, 23 bp, Artificial Sequence
  Synthetic: FXN 3 reverse 9:69045258-69045285; As/LbCpf1
tttttttttaccttcttttagtg

SEQ ID NO: 11003 - DNA, 24 bp, Artificial Sequence
  Synthetic: FXN 3 reverse 9:69045258-69045286; As/LbCpf1
tttttttttaccttcttttagtgc

SEQ ID NO: 11004 - DNA, 25 bp, Artificial Sequence
  Synthetic: FXN 3 reverse 9:69045258-69045287; As/LbCpf1
tttttttttaccttcttttagtgca

SEQ ID NO: 11005 - DNA, 18 bp, Artificial Sequence
  Synthetic: FXN 3 reverse 9:69045268-69045290; As/LbCpf1
ttaggatttttttttttt

SEQ ID NO: 11006 - DNA, 19 bp, Artificial Sequence
  Synthetic: FXN 3 reverse 9:69045268-69045291; As/LbCpf1
ttaggattttttttttttt

SEQ ID NO: 11007 - DNA, 20 bp, Artificial Sequence
  Synthetic: FXN 3 reverse 9:69045268-69045292; As/LbCpf1
ttaggattttttttttttta

SEQ ID NO: 11008 - DNA, 21 bp, Artificial Sequence
  Synthetic: FXN 3 reverse 9:69045268-69045293; As/LbCpf1
ttaggatttttttttttttac

SEQ ID NO: 11009 - DNA, 22 bp, Artificial Sequence
  Synthetic: FXN 3 reverse 9:69045268-69045294; As/LbCpf1
ttaggatttttttttttttacc

SEQ ID NO: 11010 - DNA, 23 bp, Artificial Sequence
  Synthetic: FXN 3 reverse 9:69045268-69045295; As/LbCpf1
ttaggatttttttttttttacct

SEQ ID NO: 11011 - DNA, 24 bp, Artificial Sequence
  Synthetic: FXN 3 reverse 9:69045268-69045296; As/LbCpf1
ttaggatttttttttttttacctt

SEQ ID NO: 11012 - DNA, 25 bp, Artificial Sequence
  Synthetic: FXN 3 reverse 9:69045268-69045297; As/LbCpf1
ttaggatttttttttttttaccttc

SEQ ID NO: 11013 - DNA, 18 bp, Artificial Sequence
  Synthetic: FXN 3 reverse 9:69045278-69045300; As/LbCpf1
ggaatatttcttaggatt

SEQ ID NO: 11014 - DNA, 19 bp, Artificial Sequence
  Synthetic: FXN 3 reverse 9:69045278-69045301; As/LbCpf1
ggaatatttcttaggattt

SEQ ID NO: 11015 - DNA, 20 bp, Artificial Sequence
  Synthetic: FXN 3 reverse 9:69045278-69045302; As/LbCpf1
ggaatatttcttaggatttt

SEQ ID NO: 11016 - DNA, 21 bp, Artificial Sequence
  Synthetic: FXN 3 reverse 9:69045278-69045303; As/LbCpf1
ggaatatttcttaggattttt

SEQ ID NO: 11017 - DNA, 22 bp, Artificial Sequence
  Synthetic: FXN 3 reverse 9:69045278-69045304; As/LbCpf1
ggaatatttcttaggatttttt

SEQ ID NO: 11018 - DNA, 23 bp, Artificial Sequence
  Synthetic: FXN 3 reverse 9:69045278-69045305; As/LbCpf1
ggaatatttcttaggattttttt

SEQ ID NO: 11019 - DNA, 24 bp, Artificial Sequence
  Synthetic: FXN 3 reverse 9:69045278-69045306; As/LbCpf1
ggaatatttcttaggatttttttt

SEQ ID NO: 11020 - DNA, 25 bp, Artificial Sequence
  Synthetic: FXN 3 reverse 9:69045278-69045307; As/LbCpf1
ggaatatttcttaggattttttttt

SEQ ID NO: 11021 - DNA, 18 bp, Artificial Sequence
  Synthetic: FXN 3 reverse 9:69045279-69045301; As/LbCpf1
aggaatatttcttaggat

SEQ ID NO: 11022 - DNA, 19 bp, Artificial Sequence
  Synthetic: FXN 3 reverse 9:69045279-69045302; As/LbCpf1
aggaatatttcttaggatt

SEQ ID NO: 11023 - DNA, 20 bp, Artificial Sequence
  Synthetic: FXN 3 reverse 9:69045279-69045303; As/LbCpf1
aggaatatttcttaggattt

SEQ ID NO: 11024 - DNA, 21 bp, Artificial Sequence
  Synthetic: FXN 3 reverse 9:69045279-69045304; As/LbCpf1
aggaatatttcttaggatttt

SEQ ID NO: 11025 - DNA, 22 bp, Artificial Sequence
  Synthetic: FXN 3 reverse 9:69045279-69045305; As/LbCpf1
aggaatatttcttaggattttt

SEQ ID NO: 11026 - DNA, 23 bp, Artificial Sequence
  Synthetic: FXN 3 reverse 9:69045279-69045306; As/LbCpf1
aggaatatttcttaggatttttt

SEQ ID NO: 11027 - DNA, 24 bp, Artificial Sequence
  Synthetic: FXN 3 reverse 9:69045279-69045307; As/LbCpf1
aggaatatttcttaggattttttt

SEQ ID NO: 11028 - DNA, 25 bp, Artificial Sequence
  Synthetic: FXN 3 reverse 9:69045279-69045308; As/LbCpf1
aggaatatttcttaggatttttttt

SEQ ID NO: 11029 - DNA, 18 bp, Artificial Sequence
  Synthetic: FXN 3 forward 9:69045311-69045333; As/LbCpf1
atatagggctgggtgcgg

SEQ ID NO: 11030 - DNA, 19 bp, Artificial Sequence
  Synthetic: FXN 3 forward 9:69045311-69045334; As/LbCpf1
atatagggctgggtgcggt

SEQ ID NO: 11031 - DNA, 20 bp, Artificial Sequence
  Synthetic: FXN 3 forward 9:69045311-69045335; As/LbCpf1
atatagggctgggtgcggtg

SEQ ID NO: 11032 - DNA, 21 bp, Artificial Sequence
  Synthetic: FXN 3 forward 9:69045311-69045336; As/LbCpf1
atatagggctgggtgcggtgg

SEQ ID NO: 11033 - DNA, 22 bp, Artificial Sequence
  Synthetic: FXN 3 forward 9:69045311-69045337; As/LbCpf1
atatagggctgggtgcggtggc

SEQ ID NO: 11034 - DNA, 23 bp, Artificial Sequence
  Synthetic: FXN 3 forward 9:69045311-69045338; As/LbCpf1
atatagggctgggtgcggtggct

SEQ ID NO: 11035 - DNA, 24 bp, Artificial Sequence
  Synthetic: FXN 3 forward 9:69045311-69045339; As/LbCpf1
atatagggctgggtgcggtggctc

SEQ ID NO: 11036 - DNA, 25 bp, Artificial Sequence
  Synthetic: FXN 3 forward 9:69045311-69045340; As/LbCpf1
atatagggctgggtgcggtggctca

SEQ ID NO: 11037 - DNA, 18 bp, Artificial Sequence
  Synthetic: FXN 3 forward 9:69045349-69045371; As/LbCpf1
gggaagctgaggagggca

SEQ ID NO: 11038 - DNA, 19 bp, Artificial Sequence
  Synthetic: FXN 3 forward 9:69045349-69045372; As/LbCpf1
gggaagctgaggagggcag

SEQ ID NO: 11039 - DNA, 20 bp, Artificial Sequence
  Synthetic: FXN 3 forward 9:69045349-69045373; As/LbCpf1
gggaagctgaggagggcaga

SEQ ID NO: 11040 - DNA, 21 bp, Artificial Sequence
  Synthetic: FXN 3 forward 9:69045349-69045374; As/LbCpf1
gggaagctgaggagggcagat

SEQ ID NO: 11041 - DNA, 22 bp, Artificial Sequence
  Synthetic: FXN 3 forward 9:69045349-69045375; As/LbCpf1
gggaagctgaggagggcagatc

SEQ ID NO: 11042 - DNA, 23 bp, Artificial Sequence
  Synthetic: FXN 3 forward 9:69045349-69045376; As/LbCpf1
gggaagctgaggagggcagatca

SEQ ID NO: 11043 - DNA, 24 bp, Artificial Sequence
  Synthetic: FXN 3 forward 9:69045349-69045377; As/LbCpf1
gggaagctgaggagggcagatcac

SEQ ID NO: 11044 - DNA, 25 bp, Artificial Sequence
  Synthetic: FXN 3 forward 9:69045349-69045378; As/LbCpf1
gggaagctgaggagggcagatcact

SEQ ID NO: 11045 - DNA, 18 bp, Artificial Sequence
  Synthetic: FXN 3 forward 9:69045350-69045372; As/LbCpf1
ggaagctgaggagggcag

SEQ ID NO: 11046 - DNA, 19 bp, Artificial Sequence
  Synthetic: FXN 3 forward 9:69045350-69045373; As/LbCpf1
ggaagctgaggagggcaga

SEQ ID NO: 11047 - DNA, 20 bp, Artificial Sequence
  Synthetic: FXN 3 forward 9:69045350-69045374; As/LbCpf1
ggaagctgaggagggcagat

SEQ ID NO: 11048 - DNA, 21 bp, Artificial Sequence
  Synthetic: FXN 3 forward 9:69045350-69045375; As/LbCpf1
ggaagctgaggagggcagatc

SEQ ID NO: 11049 - DNA, 22 bp, Artificial Sequence
  Synthetic: FXN 3 forward 9:69045350-69045376; As/LbCpf1
ggaagctgaggagggcagatca

SEQ ID NO: 11050 - DNA, 23 bp, Artificial Sequence
  Synthetic: FXN 3 forward 9:69045350-69045377; As/LbCpf1
ggaagctgaggagggcagatcac

SEQ ID NO: 11051 - DNA, 24 bp, Artificial Sequence
  Synthetic: FXN 3 forward 9:69045350-69045378; As/LbCpf1
ggaagctgaggagggcagatcact

SEQ ID NO: 11052 - DNA, 25 bp, Artificial Sequence
  Synthetic: FXN 3 forward 9:69045350-69045379; As/LbCpf1
ggaagctgaggagggcagatcactt

SEQ ID NO: 11053 - DNA, 18 bp, Artificial Sequence
  Synthetic: FXN 3 reverse 9:69045391-69045413; As/LbCpf1
accatgttggccaggctg

SEQ ID NO: 11054 - DNA, 19 bp, Artificial Sequence
  Synthetic: FXN 3 reverse 9:69045391-69045414; As/LbCpf1
accatgttggccaggctgg

SEQ ID NO: 11055 - DNA, 20 bp, Artificial Sequence
  Synthetic: FXN 3 reverse 9:69045391-69045415; As/LbCpf1
accatgttggccaggctggt

SEQ ID NO: 11056 - DNA, 21 bp, Artificial Sequence
  Synthetic: FXN 3 reverse 9:69045391-69045416; As/LbCpf1
accatgttggccaggctggtc

SEQ ID NO: 11057 - DNA, 22 bp, Artificial Sequence
  Synthetic: FXN 3 reverse 9:69045391-69045417; As/LbCpf1
accatgttggccaggctggtct

SEQ ID NO: 11058 - DNA, 23 bp, Artificial Sequence
  Synthetic: FXN 3 reverse 9:69045391-69045418; As/LbCpf1
accatgttggccaggctggtctt

SEQ ID NO: 11059 - DNA, 24 bp, Artificial Sequence
  Synthetic: FXN 3 reverse 9:69045391-69045419; As/LbCpf1
accatgttggccaggctggtcttg

SEQ ID NO: 11060 - DNA, 25 bp, Artificial Sequence
  Synthetic: FXN 3 reverse 9:69045391-69045420; As/LbCpf1
accatgttggccaggctggtcttga

SEQ ID NO: 11061 - DNA, 18 bp, Artificial Sequence
  Synthetic: FXN 3 reverse 9:69045407-69045429; As/LbCpf1
gtagagacggggtttcac

SEQ ID NO: 11062 - DNA, 19 bp, Artificial Sequence
  Synthetic: FXN 3 reverse 9:69045407-69045430; As/LbCpf1
gtagagacggggtttcacc

SEQ ID NO: 11063 - DNA, 20 bp, Artificial Sequence
  Synthetic: FXN 3 reverse 9:69045407-69045431; As/LbCpf1
gtagagacggggtttcacca

SEQ ID NO: 11064 - DNA, 21 bp, Artificial Sequence
  Synthetic: FXN 3 reverse 9:69045407-69045432; As/LbCpf1
gtagagacggggtttcaccat

SEQ ID NO: 11065 - DNA, 22 bp, Artificial Sequence
  Synthetic: FXN 3 reverse 9:69045407-69045433; As/LbCpf1
gtagagacggggtttcaccatg

SEQ ID NO: 11066 - DNA, 23 bp, Artificial Sequence
  Synthetic: FXN 3 reverse 9:69045407-69045434; As/LbCpf1
gtagagacggggtttcaccatgt

SEQ ID NO: 11067 - DNA, 24 bp, Artificial Sequence
  Synthetic: FXN 3 reverse 9:69045407-69045435; As/LbCpf1
gtagagacggggtttcaccatgtt

SEQ ID NO: 11068 - DNA, 25 bp, Artificial Sequence
  Synthetic: FXN 3 reverse 9:69045407-69045436; As/LbCpf1
gtagagacggggtttcaccatgttg

SEQ ID NO: 11069 - DNA, 18 bp, Artificial Sequence
  Synthetic: FXN 3 reverse 9:69045408-69045430; As/LbCpf1
agtagagacggggtttca

SEQ ID NO: 11070 - DNA, 19 bp, Artificial Sequence
  Synthetic: FXN 3 reverse 9:69045408-69045431; As/LbCpf1
agtagagacggggtttcac

SEQ ID NO: 11071 - DNA, 20 bp, Artificial Sequence
  Synthetic: FXN 3 reverse 9:69045408-69045432; As/LbCpf1
agtagagacggggtttcacc

SEQ ID NO: 11072 - DNA, 21 bp, Artificial Sequence
  Synthetic: FXN 3 reverse 9:69045408-69045433; As/LbCpf1
agtagagacggggtttcacca

SEQ ID NO: 11073 - DNA, 22 bp, Artificial Sequence
  Synthetic: FXN 3 reverse 9:69045408-69045434; As/LbCpf1
agtagagacggggtttcaccat

SEQ ID NO: 11074 - DNA, 23 bp, Artificial Sequence
  Synthetic: FXN 3 reverse 9:69045408-69045435; As/LbCpf1
agtagagacggggtttcaccatg

SEQ ID NO: 11075 - DNA, 24 bp, Artificial Sequence
  Synthetic: FXN 3 reverse 9:69045408-69045436; As/LbCpf1
agtagagacggggtttcaccatgt

SEQ ID NO: 11076 - DNA, 25 bp, Artificial Sequence
  Synthetic: FXN 3 reverse 9:69045408-69045437; As/LbCpf1
agtagagacggggtttcaccatgtt

SEQ ID NO: 11077 - DNA, 18 bp, Artificial Sequence
  Synthetic: FXN 3 reverse 9:69045409-69045431; As/LbCpf1
tagtagagacggggtttc

SEQ ID NO: 11078 - DNA, 19 bp, Artificial Sequence
  Synthetic: FXN 3 reverse 9:69045409-69045432; As/LbCpf1
tagtagagacggggtttca

SEQ ID NO: 11079 - DNA, 20 bp, Artificial Sequence
  Synthetic: FXN 3 reverse 9:69045409-69045433; As/LbCpf1
tagtagagacggggtttcac

SEQ ID NO: 11080 - DNA, 21 bp, Artificial Sequence
  Synthetic: FXN 3 reverse 9:69045409-69045434; As/LbCpf1
tagtagagacggggtttcacc

SEQ ID NO: 11081 - DNA, 22 bp, Artificial Sequence
  Synthetic: FXN 3 reverse 9:69045409-69045435; As/LbCpf1
tagtagagacggggtttcacca

SEQ ID NO: 11082 - DNA, 23 bp, Artificial Sequence
  Synthetic: FXN 3 reverse 9:69045409-69045436; As/LbCpf1
tagtagagacggggtttcaccat

SEQ ID NO: 11083 - DNA, 24 bp, Artificial Sequence
  Synthetic: FXN 3 reverse 9:69045409-69045437; As/LbCpf1
tagtagagacggggtttcaccatg

SEQ ID NO: 11084 - DNA, 25 bp, Artificial Sequence
  Synthetic: FXN 3 reverse 9:69045409-69045438; As/LbCpf1
tagtagagacggggtttcaccatgt

SEQ ID NO: 11085 - DNA, 18 bp, Artificial Sequence
  Synthetic: FXN 3 reverse 9:69045415-69045437; As/LbCpf1
tatttttagtagagacgg

SEQ ID NO: 11086 - DNA, 19 bp, Artificial Sequence
  Synthetic: FXN 3 reverse 9:69045415-69045438; As/LbCpf1
tatttttagtagagacggg

SEQ ID NO: 11087 - DNA, 20 bp, Artificial Sequence
  Synthetic: FXN 3 reverse 9:69045415-69045439; As/LbCpf1
tatttttagtagagacgggg

SEQ ID NO: 11088 - DNA, 21 bp, Artificial Sequence
  Synthetic: FXN 3 reverse 9:69045415-69045440; As/LbCpf1
tatttttagtagagacggggt

SEQ ID NO: 11089 - DNA, 22 bp, Artificial Sequence
  Synthetic: FXN 3 reverse 9:69045415-69045441; As/LbCpf1
tatttttagtagagacggggtt

SEQ ID NO: 11090 - DNA, 23 bp, Artificial Sequence
  Synthetic: FXN 3 reverse 9:69045415-69045442; As/LbCpf1
tatttttagtagagacggggttt

SEQ ID NO: 11091 - DNA, 24 bp, Artificial Sequence
  Synthetic: FXN 3 reverse 9:69045415-69045443; As/LbCpf1
tatttttagtagagacggggtttc

SEQ ID NO: 11092 - DNA, 25 bp, Artificial Sequence
  Synthetic: FXN 3 reverse 9:69045415-69045444; As/LbCpf1
tatttttagtagagacggggtttca

SEQ ID NO: 11093 - DNA, 18 bp, Artificial Sequence
  Synthetic: FXN 3 reverse 9:69045416-69045438; As/LbCpf1
gtatttttagtagagacg

SEQ ID NO: 11094 - DNA, 19 bp, Artificial Sequence
  Synthetic: FXN 3 reverse 9:69045416-69045439; As/LbCpf1
gtatttttagtagagacgg

SEQ ID NO: 11095 - DNA, 20 bp, Artificial Sequence
  Synthetic: FXN 3 reverse 9:69045416-69045440; As/LbCpf1
gtatttttagtagagacggg

SEQ ID NO: 11096 - DNA, 21 bp, Artificial Sequence
  Synthetic: FXN 3 reverse 9:69045416-69045441; As/LbCpf1
gtatttttagtagagacgggg

SEQ ID NO: 11097 - DNA, 22 bp, Artificial Sequence
  Synthetic: FXN 3 reverse 9:69045416-69045442; As/LbCpf1
gtatttttagtagagacggggt

SEQ ID NO: 11098 - DNA, 23 bp, Artificial Sequence
  Synthetic: FXN 3 reverse 9:69045416-69045443; As/LbCpf1
gtatttttagtagagacggggtt

SEQ ID NO: 11099 - DNA, 24 bp, Artificial Sequence
  Synthetic: FXN 3 reverse 9:69045416-69045444; As/LbCpf1
gtatttttagtagagacggggttt

SEQ ID NO: 11100 - DNA, 25 bp, Artificial Sequence
  Synthetic: FXN 3 reverse 9:69045416-69045445; As/LbCpf1
gtatttttagtagagacggggtttc

SEQ ID NO: 11101 - DNA, 18 bp, Artificial Sequence
  Synthetic: FXN 3 reverse 9:69045417-69045439; As/LbCpf1
tgtatttttagtagagac

SEQ ID NO: 11102 - DNA, 19 bp, Artificial Sequence
  Synthetic: FXN 3 reverse 9:69045417-69045440; As/LbCpf1
tgtatttttagtagagacg

SEQ ID NO: 11103 - DNA, 20 bp, Artificial Sequence
  Synthetic: FXN 3 reverse 9:69045417-69045441; As/LbCpf1
tgtatttttagtagagacgg

SEQ ID NO: 11104 - DNA, 21 bp, Artificial Sequence
  Synthetic: FXN 3 reverse 9:69045417-69045442; As/LbCpf1
tgtatttttagtagagacggg

SEQ ID NO: 11105 - DNA, 22 bp, Artificial Sequence
  Synthetic: FXN 3 reverse 9:69045417-69045443; As/LbCpf1
tgtatttttagtagagacgggg

SEQ ID NO: 11106 - DNA, 23 bp, Artificial Sequence
  Synthetic: FXN 3 reverse 9:69045417-69045444; As/LbCpf1
tgtatttttagtagagacggggt

SEQ ID NO: 11107 - DNA, 24 bp, Artificial Sequence
  Synthetic: FXN 3 reverse 9:69045417-69045445; As/LbCpf1
tgtatttttagtagagacggggtt

SEQ ID NO: 11108 - DNA, 25 bp, Artificial Sequence
  Synthetic: FXN 3 reverse 9:69045417-69045446; As/LbCpf1
tgtatttttagtagagacggggttt

SEQ ID NO: 11109 - DNA, 18 bp, Artificial Sequence
  Synthetic: FXN 3 reverse 9:69045418-69045440; As/LbCpf1
ttgtatttttagtagaga

SEQ ID NO: 11110 - DNA, 19 bp, Artificial Sequence
  Synthetic: FXN 3 reverse 9:69045418-69045441; As/LbCpf1
ttgtatttttagtagagac

SEQ ID NO: 11111 - DNA, 20 bp, Artificial Sequence
  Synthetic: FXN 3 reverse 9:69045418-69045442; As/LbCpf1
ttgtatttttagtagagacg

SEQ ID NO: 11112 - DNA, 21 bp, Artificial Sequence
  Synthetic: FXN 3 reverse 9:69045418-69045443; As/LbCpf1
ttgtatttttagtagagacgg

SEQ ID NO: 11113 - DNA, 22 bp, Artificial Sequence
  Synthetic: FXN 3 reverse 9:69045418-69045444; As/LbCpf1
ttgtatttttagtagagacggg

SEQ ID NO: 11114 - DNA, 23 bp, Artificial Sequence
  Synthetic: FXN 3 reverse 9:69045418-69045445; As/LbCpf1
ttgtatttttagtagagacgggg

SEQ ID NO: 11115 - DNA, 24 bp, Artificial Sequence
  Synthetic: FXN 3 reverse 9:69045418-69045446; As/LbCpf1
ttgtatttttagtagagacggggt

SEQ ID NO: 11116 - DNA, 25 bp, Artificial Sequence
  Synthetic: FXN 3 reverse 9:69045418-69045447; As/LbCpf1
ttgtatttttagtagagacggggtt

SEQ ID NO: 11117 - DNA, 18 bp, Artificial Sequence
  Synthetic: FXN 3 reverse 9:69045566-69045588; As/LbCpf1
agatgaagtctcgctctg

SEQ ID NO: 11118 - DNA, 19 bp, Artificial Sequence
  Synthetic: FXN 3 reverse 9:69045566-69045589; As/LbCpf1
agatgaagtctcgctctgt

SEQ ID NO: 11119 - DNA, 20 bp, Artificial Sequence
  Synthetic: FXN 3 reverse 9:69045566-69045590; As/LbCpf1
agatgaagtctcgctctgtc

SEQ ID NO: 11120 - DNA, 21 bp, Artificial Sequence
  Synthetic: FXN 3 reverse 9:69045566-69045591; As/LbCpf1
agatgaagtctcgctctgtcg

SEQ ID NO: 11121 - DNA, 22 bp, Artificial Sequence
  Synthetic: FXN 3 reverse 9:69045566-69045592; As/LbCpf1
agatgaagtctcgctctgtcgc

SEQ ID NO: 11122 - DNA, 23 bp, Artificial Sequence
  Synthetic: FXN 3 reverse 9:69045566-69045593; As/LbCpf1
agatgaagtctcgctctgtcgcc

SEQ ID NO: 11123 - DNA, 24 bp, Artificial Sequence
  Synthetic: FXN 3 reverse 9:69045566-69045594; As/LbCpf1
agatgaagtctcgctctgtcgccc

SEQ ID NO: 11124 - DNA, 25 bp, Artificial Sequence
  Synthetic: FXN 3 reverse 9:69045566-69045595; As/LbCpf1
agatgaagtctcgctctgtcgccca

SEQ ID NO: 11125 - DNA, 18 bp, Artificial Sequence
  Synthetic: FXN 3 reverse 9:69045567-69045589; As/LbCpf1
gagatgaagtctcgctct

SEQ ID NO: 11126 - DNA, 19 bp, Artificial Sequence
  Synthetic: FXN 3 reverse 9:69045567-69045590; As/LbCpf1
gagatgaagtctcgctctg

SEQ ID NO: 11127 - DNA, 20 bp, Artificial Sequence
  Synthetic: FXN 3 reverse 9:69045567-69045591; As/LbCpf1
gagatgaagtctcgctctgt

SEQ ID NO: 11128 - DNA, 21 bp, Artificial Sequence
  Synthetic: FXN 3 reverse 9:69045567-69045592; As/LbCpf1
gagatgaagtctcgctctgtc

SEQ ID NO: 11129 - DNA, 22 bp, Artificial Sequence
  Synthetic: FXN 3 reverse 9:69045567-69045593; As/LbCpf1
gagatgaagtctcgctctgtcg

SEQ ID NO: 11130 - DNA, 23 bp, Artificial Sequence
  Synthetic: FXN 3 reverse 9:69045567-69045594; As/LbCpf1
gagatgaagtctcgctctgtcgc

SEQ ID NO: 11131 - DNA, 24 bp, Artificial Sequence
  Synthetic: FXN 3 reverse 9:69045567-69045595; As/LbCpf1
gagatgaagtctcgctctgtcgcc

SEQ ID NO: 11132 - DNA, 25 bp, Artificial Sequence
  Synthetic: FXN 3 reverse 9:69045567-69045596; As/LbCpf1
gagatgaagtctcgctctgtcgccc

SEQ ID NO: 11133 - DNA, 18 bp, Artificial Sequence
  Synthetic: FXN 3 reverse 9:69045568-69045590; As/LbCpf1
tgagatgaagtctcgctc

SEQ ID NO: 11134 - DNA, 19 bp, Artificial Sequence
  Synthetic: FXN 3 reverse 9:69045568-69045591; As/LbCpf1
tgagatgaagtctcgctct

SEQ ID NO: 11135 - DNA, 20 bp, Artificial Sequence
  Synthetic: FXN 3 reverse 9:69045568-69045592; As/LbCpf1
tgagatgaagtctcgctctg

SEQ ID NO: 11136 - DNA, 21 bp, Artificial Sequence
  Synthetic: FXN 3 reverse 9:69045568-69045593; As/LbCpf1
tgagatgaagtctcgctctgt

SEQ ID NO: 11137 - DNA, 22 bp, Artificial Sequence
  Synthetic: FXN 3 reverse 9:69045568-69045594; As/LbCpf1
tgagatgaagtctcgctctgtc

SEQ ID NO: 11138 - DNA, 23 bp, Artificial Sequence
  Synthetic: FXN 3 reverse 9:69045568-69045595; As/LbCpf1
tgagatgaagtctcgctctgtcg

SEQ ID NO: 11139 - DNA, 24 bp, Artificial Sequence
  Synthetic: FXN 3 reverse 9:69045568-69045596; As/LbCpf1
tgagatgaagtctcgctctgtcgc

SEQ ID NO: 11140 - DNA, 25 bp, Artificial Sequence
  Synthetic: FXN 3 reverse 9:69045568-69045597; As/LbCpf1
tgagatgaagtctcgctctgtcgcc

SEQ ID NO: 11141 - DNA, 18 bp, Artificial Sequence
  Synthetic: FXN 3 reverse 9:69045572-69045594; As/LbCpf1
tttttgagatgaagtctc

SEQ ID NO: 11142 - DNA, 19 bp, Artificial Sequence
  Synthetic: FXN 3 reverse 9:69045572-69045595; As/LbCpf1
tttttgagatgaagtctcg

SEQ ID NO: 11143 - DNA, 20 bp, Artificial Sequence
  Synthetic: FXN 3 reverse 9:69045572-69045596; As/LbCpf1
tttttgagatgaagtctcgc

SEQ ID NO: 11144 - DNA, 21 bp, Artificial Sequence
  Synthetic: FXN 3 reverse 9:69045572-69045597; As/LbCpf1
tttttgagatgaagtctcgct

SEQ ID NO: 11145 - DNA, 22 bp, Artificial Sequence
  Synthetic: FXN 3 reverse 9:69045572-69045598; As/LbCpf1
tttttgagatgaagtctcgctc

SEQ ID NO: 11146 - DNA, 23 bp, Artificial Sequence
  Synthetic: FXN 3 reverse 9:69045572-69045599; As/LbCpf1
tttttgagatgaagtctcgctct

SEQ ID NO: 11147 - DNA, 24 bp, Artificial Sequence
  Synthetic: FXN 3 reverse 9:69045572-69045600; As/LbCpf1
tttttgagatgaagtctcgctctg

SEQ ID NO: 11148 - DNA, 25 bp, Artificial Sequence
  Synthetic: FXN 3 reverse 9:69045572-69045601; As/LbCpf1
tttttgagatgaagtctcgctctgt

SEQ ID NO: 11149 - DNA, 18 bp, Artificial Sequence
  Synthetic: FXN 3 reverse 9:69045573-69045595; As/LbCpf1
gtttttgagatgaagtct

SEQ ID NO: 11150 - DNA, 19 bp, Artificial Sequence
  Synthetic: FXN 3 reverse 9:69045573-69045596; As/LbCpf1
gtttttgagatgaagtctc

SEQ ID NO: 11151 - DNA, 20 bp, Artificial Sequence
  Synthetic: FXN 3 reverse 9:69045573-69045597; As/LbCpf1
gtttttgagatgaagtctcg

SEQ ID NO: 11152 - DNA, 21 bp, Artificial Sequence
  Synthetic: FXN 3 reverse 9:69045573-69045598; As/LbCpf1
gtttttgagatgaagtctcgc

SEQ ID NO: 11153 - DNA, 22 bp, Artificial Sequence
  Synthetic: FXN 3 reverse 9:69045573-69045599; As/LbCpf1
gtttttgagatgaagtctcgct

SEQ ID NO: 11154 - DNA, 23 bp, Artificial Sequence
  Synthetic: FXN 3 reverse 9:69045573-69045600; As/LbCpf1
gtttttgagatgaagtctcgctc

SEQ ID NO: 11155 - DNA, 24 bp, Artificial Sequence
  Synthetic: FXN 3 reverse 9:69045573-69045601; As/LbCpf1
gtttttgagatgaagtctcgctct

SEQ ID NO: 11156 - DNA, 25 bp, Artificial Sequence
  Synthetic: FXN 3 reverse 9:69045573-69045602; As/LbCpf1
gtttttgagatgaagtctcgctctg

SEQ ID NO: 11157 - DNA, 18 bp, Artificial Sequence
  Synthetic: FXN 3 reverse 9:69045574-69045596; As/LbCpf1
tgtttttgagatgaagtc

SEQ ID NO: 11158 - DNA, 19 bp, Artificial Sequence
  Synthetic: FXN 3 reverse 9:69045574-69045597; As/LbCpf1
tgtttttgagatgaagtct

SEQ ID NO: 11159 - DNA, 20 bp, Artificial Sequence
  Synthetic: FXN 3 reverse 9:69045574-69045598; As/LbCpf1
tgtttttgagatgaagtctc

SEQ ID NO: 11160 - DNA, 21 bp, Artificial Sequence
  Synthetic: FXN 3 reverse 9:69045574-69045599; As/LbCpf1
tgtttttgagatgaagtctcg

SEQ ID NO: 11161 - DNA, 22 bp, Artificial Sequence
  Synthetic: FXN 3 reverse 9:69045574-69045600; As/LbCpf1
tgtttttgagatgaagtctcgc

SEQ ID NO: 11162 - DNA, 23 bp, Artificial Sequence
  Synthetic: FXN 3 reverse 9:69045574-69045601; As/LbCpf1
tgtttttgagatgaagtctcgct

SEQ ID NO: 11163 - DNA, 24 bp, Artificial Sequence
  Synthetic: FXN 3 reverse 9:69045574-69045602; As/LbCpf1
tgtttttgagatgaagtctcgctc

SEQ ID NO: 11164 - DNA, 25 bp, Artificial Sequence
  Synthetic: FXN 3 reverse 9:69045574-69045603; As/LbCpf1
tgtttttgagatgaagtctcgctct

SEQ ID NO: 11165 - DNA, 18 bp, Artificial Sequence
  Synthetic: FXN 3 reverse 9:69045575-69045597; As/LbCpf1
ttgtttttgagatgaagt

SEQ ID NO: 11166 - DNA, 19 bp, Artificial Sequence
  Synthetic: FXN 3 reverse 9:69045575-69045598; As/LbCpf1
ttgtttttgagatgaagtc

SEQ ID NO: 11167 - DNA, 20 bp, Artificial Sequence
  Synthetic: FXN 3 reverse 9:69045575-69045599; As/LbCpf1
ttgtttttgagatgaagtct

SEQ ID NO: 11168 - DNA, 21 bp, Artificial Sequence
  Synthetic: FXN 3 reverse 9:69045575-69045600; As/LbCpf1
ttgtttttgagatgaagtctc

SEQ ID NO: 11169 - DNA, 22 bp, Artificial Sequence
  Synthetic: FXN 3 reverse 9:69045575-69045601; As/LbCpf1
ttgtttttgagatgaagtctcg

SEQ ID NO: 11170 - DNA, 23 bp, Artificial Sequence
  Synthetic: FXN 3 reverse 9:69045575-69045602; As/LbCpf1
ttgtttttgagatgaagtctcgc

SEQ ID NO: 11171 - DNA, 24 bp, Artificial Sequence
  Synthetic: FXN 3 reverse 9:69045575-69045603; As/LbCpf1
ttgtttttgagatgaagtctcgct

SEQ ID NO: 11172 - DNA, 25 bp, Artificial Sequence
  Synthetic: FXN 3 reverse 9:69045575-69045604; As/LbCpf1
ttgtttttgagatgaagtctcgctc

SEQ ID NO: 11173 - DNA, 18 bp, Artificial Sequence
  Synthetic: FXN 3 reverse 9:69045579-69045601; As/LbCpf1
ttttttgtttttgagatg

SEQ ID NO: 11174 - DNA, 19 bp, Artificial Sequence
  Synthetic: FXN 3 reverse 9:69045579-69045602; As/LbCpf1
ttttttgtttttgagatga

SEQ ID NO: 11175 - DNA, 20 bp, Artificial Sequence
  Synthetic: FXN 3 reverse 9:69045579-69045603; As/LbCpf1
ttttttgtttttgagatgaa

SEQ ID NO: 11176 - DNA, 21 bp, Artificial Sequence
  Synthetic: FXN 3 reverse 9:69045579-69045604; As/LbCpf1
ttttttgtttttgagatgaag

SEQ ID NO: 11177 - DNA, 22 bp, Artificial Sequence
  Synthetic: FXN 3 reverse 9:69045579-69045605; As/LbCpf1
ttttttgtttttgagatgaagt

SEQ ID NO: 11178 - DNA, 23 bp, Artificial Sequence
  Synthetic: FXN 3 reverse 9:69045579-69045606; As/LbCpf1
ttttttgtttttgagatgaagtc

SEQ ID NO: 11179 - DNA, 24 bp, Artificial Sequence
  Synthetic: FXN 3 reverse 9:69045579-69045607; As/LbCpf1
ttttttgtttttgagatgaagtct

SEQ ID NO: 11180 - DNA, 25 bp, Artificial Sequence
  Synthetic: FXN 3 reverse 9:69045579-69045608; As/LbCpf1
ttttttgtttttgagatgaagtctc

SEQ ID NO: 11181 - DNA, 18 bp, Artificial Sequence
  Synthetic: FXN 3 reverse 9:69045580-69045602; As/LbCpf1
gttttttgtttttgagat

SEQ ID NO: 11182 - DNA, 19 bp, Artificial Sequence
  Synthetic: FXN 3 reverse 9:69045580-69045603; As/LbCpf1
gttttttgtttttgagatg

SEQ ID NO: 11183 - DNA, 20 bp, Artificial Sequence
  Synthetic: FXN 3 reverse 9:69045580-69045604; As/LbCpf1
gttttttgtttttgagatga

SEQ ID NO: 11184 - DNA, 21 bp, Artificial Sequence
  Synthetic: FXN 3 reverse 9:69045580-69045605; As/LbCpf1
gttttttgtttttgagatgaa

SEQ ID NO: 11185 - DNA, 22 bp, Artificial Sequence
  Synthetic: FXN 3 reverse 9:69045580-69045606; As/LbCpf1
gttttttgtttttgagatgaag

SEQ ID NO: 11186 - DNA, 23 bp, Artificial Sequence
  Synthetic: FXN 3 reverse 9:69045580-69045607; As/LbCpf1
gttttttgtttttgagatgaagt

SEQ ID NO: 11187 - DNA, 24 bp, Artificial Sequence
  Synthetic: FXN 3 reverse 9:69045580-69045608; As/LbCpf1
gttttttgtttttgagatgaagtc

SEQ ID NO: 11188 - DNA, 25 bp, Artificial Sequence
  Synthetic: FXN 3 reverse 9:69045580-69045609; As/LbCpf1
gttttttgtttttgagatgaagtct

SEQ ID NO: 11189 - DNA, 18 bp, Artificial Sequence
  Synthetic: FXN 3 reverse 9:69045581-69045603; As/LbCpf1
tgttttttgtttttgaga

SEQ ID NO: 11190 - DNA, 19 bp, Artificial Sequence
  Synthetic: FXN 3 reverse 9:69045581-69045604; As/LbCpf1
tgttttttgtttttgagat

SEQ ID NO: 11191 - DNA, 20 bp, Artificial Sequence
  Synthetic: FXN 3 reverse 9:69045581-69045605; As/LbCpf1
tgttttttgtttttgagatg

SEQ ID NO: 11192 - DNA, 21 bp, Artificial Sequence
  Synthetic: FXN 3 reverse 9:69045581-69045606; As/LbCpf1
tgttttttgtttttgagatga

SEQ ID NO: 11193 - DNA, 22 bp, Artificial Sequence
  Synthetic: FXN 3 reverse 9:69045581-69045607; As/LbCpf1
tgttttttgtttttgagatgaa

SEQ ID NO: 11194 - DNA, 23 bp, Artificial Sequence
  Synthetic: FXN 3 reverse 9:69045581-69045608; As/LbCpf1
tgttttttgtttttgagatgaag

SEQ ID NO: 11195 - DNA, 24 bp, Artificial Sequence
  Synthetic: FXN 3 reverse 9:69045581-69045609; As/LbCpf1
tgttttttgtttttgagatgaagt

SEQ ID NO: 11196 - DNA, 25 bp, Artificial Sequence
  Synthetic: FXN 3 reverse 9:69045581-69045610; As/LbCpf1
tgttttttgtttttgagatgaagtc

SEQ ID NO: 11197 - DNA, 18 bp, Artificial Sequence
  Synthetic: FXN 3 reverse 9:69045586-69045608; As/LbCpf1
gtttttgttttttgtttt

SEQ ID NO: 11198 - DNA, 19 bp, Artificial Sequence
  Synthetic: FXN 3 reverse 9:69045586-69045609; As/LbCpf1
gtttttgttttttgttttt

SEQ ID NO: 11199 - DNA, 20 bp, Artificial Sequence
  Synthetic: FXN 3 reverse 9:69045586-69045610; As/LbCpf1
gtttttgttttttgtttttg

SEQ ID NO: 11200 - DNA, 21 bp, Artificial Sequence
  Synthetic: FXN 3 reverse 9:69045586-69045611; As/LbCpf1
gtttttgttttttgtttttga

SEQ ID NO: 11201 - DNA, 22 bp, Artificial Sequence
  Synthetic: FXN 3 reverse 9:69045586-69045612; As/LbCpf1
gtttttgttttttgtttttgag

SEQ ID NO: 11202 - DNA, 23 bp, Artificial Sequence
  Synthetic: FXN 3 reverse 9:69045586-69045613; As/LbCpf1
gtttttgttttttgtttttgaga

SEQ ID NO: 11203 - DNA, 24 bp, Artificial Sequence
  Synthetic: FXN 3 reverse 9:69045586-69045614; As/LbCpf1
gtttttgttttttgtttttgagat

SEQ ID NO: 11204 - DNA, 25 bp, Artificial Sequence
  Synthetic: FXN 3 reverse 9:69045586-69045615; As/LbCpf1
gtttttgttttttgtttttgagatg

SEQ ID NO: 11205 - DNA, 18 bp, Artificial Sequence
  Synthetic: FXN 3 reverse 9:69045587-69045609; As/LbCpf1
ggtttttgttttttgttt

SEQ ID NO: 11206 - DNA, 19 bp, Artificial Sequence
  Synthetic: FXN 3 reverse 9:69045587-69045610; As/LbCpf1
ggtttttgttttttgtttt

SEQ ID NO: 11207 - DNA, 20 bp, Artificial Sequence
  Synthetic: FXN 3 reverse 9:69045587-69045611; As/LbCpf1
ggtttttgttttttgttttt

SEQ ID NO: 11208 - DNA, 21 bp, Artificial Sequence
  Synthetic: FXN 3 reverse 9:69045587-69045612; As/LbCpf1
ggtttttgttttttgtttttg

SEQ ID NO: 11209 - DNA, 22 bp, Artificial Sequence
  Synthetic: FXN 3 reverse 9:69045587-69045613; As/LbCpf1
ggtttttgttttttgtttttga

SEQ ID NO: 11210 - DNA, 23 bp, Artificial Sequence
  Synthetic: FXN 3 reverse 9:69045587-69045614; As/LbCpf1
ggtttttgttttttgtttttgag

SEQ ID NO: 11211 - DNA, 24 bp, Artificial Sequence
  Synthetic: FXN 3 reverse 9:69045587-69045615; As/LbCpf1
ggtttttgttttttgtttttgaga

SEQ ID NO: 11212 - DNA, 25 bp, Artificial Sequence
  Synthetic: FXN 3 reverse 9:69045587-69045616; As/LbCpf1
ggtttttgttttttgtttttgagat

SEQ ID NO: 11213 - DNA, 18 bp, Artificial Sequence
  Synthetic: FXN 3 reverse 9:69045588-69045610; As/LbCpf1
tggtttttgttttttgtt

SEQ ID NO: 11214 - DNA, 19 bp, Artificial Sequence
  Synthetic: FXN 3 reverse 9:69045588-69045611; As/LbCpf1
tggtttttgttttttgttt

SEQ ID NO: 11215 - DNA, 20 bp, Artificial Sequence
  Synthetic: FXN 3 reverse 9:69045588-69045612; As/LbCpf1
tggtttttgttttttgtttt

SEQ ID NO: 11216 - DNA, 21 bp, Artificial Sequence
  Synthetic: FXN 3 reverse 9:69045588-69045613; As/LbCpf1
tggtttttgttttttgttttt

SEQ ID NO: 11217 - DNA, 22 bp, Artificial Sequence
  Synthetic: FXN 3 reverse 9:69045588-69045614; As/LbCpf1
tggtttttgttttttgtttttg

SEQ ID NO: 11218 - DNA, 23 bp, Artificial Sequence
  Synthetic: FXN 3 reverse 9:69045588-69045615; As/LbCpf1
tggtttttgttttttgtttttga

SEQ ID NO: 11219 - DNA, 24 bp, Artificial Sequence
  Synthetic: FXN 3 reverse 9:69045588-69045616; As/LbCpf1
tggtttttgttttttgtttttgag

SEQ ID NO: 11220 - DNA, 25 bp, Artificial Sequence
  Synthetic: FXN 3 reverse 9:69045588-69045617; As/LbCpf1
tggtttttgttttttgtttttgaga

SEQ ID NO: 11221 - DNA, 18 bp, Artificial Sequence
  Synthetic: FXN 3 reverse 9:69045589-69045611; As/LbCpf1
ttggtttttgttttttgt

SEQ ID NO: 11222 - DNA, 19 bp, Artificial Sequence
  Synthetic: FXN 3 reverse 9:69045589-69045612; As/LbCpf1
ttggtttttgttttttgtt

SEQ ID NO: 11223 - DNA, 20 bp, Artificial Sequence
  Synthetic: FXN 3 reverse 9:69045589-69045613; As/LbCpf1
ttggtttttgttttttgttt

SEQ ID NO: 11224 - DNA, 21 bp, Artificial Sequence
  Synthetic: FXN 3 reverse 9:69045589-69045614; As/LbCpf1
ttggtttttgttttttgtttt

SEQ ID NO: 11225 - DNA, 22 bp, Artificial Sequence
  Synthetic: FXN 3 reverse 9:69045589-69045615; As/LbCpf1
ttggtttttgttttttgttttt

SEQ ID NO: 11226 - DNA, 23 bp, Artificial Sequence
  Synthetic: FXN 3 reverse 9:69045589-69045616; As/LbCpf1
ttggtttttgttttttgtttttg

SEQ ID NO: 11227 - DNA, 24 bp, Artificial Sequence
  Synthetic: FXN 3 reverse 9:69045589-69045617; As/LbCpf1
ttggtttttgttttttgtttttga

SEQ ID NO: 11228 - DNA, 25 bp, Artificial Sequence
  Synthetic: FXN 3 reverse 9:69045589-69045618; As/LbCpf1
ttggtttttgttttttgtttttgag

SEQ ID NO: 11229 - DNA, 18 bp, Artificial Sequence
  Synthetic: FXN 3 reverse 9:69045590-69045612; As/LbCpf1
tttggtttttgttttttg

SEQ ID NO: 11230 - DNA, 19 bp, Artificial Sequence
  Synthetic: FXN 3 reverse 9:69045590-69045613; As/LbCpf1
tttggtttttgttttttgt

SEQ ID NO: 11231 - DNA, 20 bp, Artificial Sequence
  Synthetic: FXN 3 reverse 9:69045590-69045614; As/LbCpf1
tttggtttttgttttttgtt

SEQ ID NO: 11232 - DNA, 21 bp, Artificial Sequence
  Synthetic: FXN 3 reverse 9:69045590-69045615; As/LbCpf1
tttggtttttgttttttgttt

SEQ ID NO: 11233 - DNA, 22 bp, Artificial Sequence
  Synthetic: FXN 3 reverse 9:69045590-69045616; As/LbCpf1
tttggtttttgttttttgtttt

SEQ ID NO: 11234 - DNA, 23 bp, Artificial Sequence
  Synthetic: FXN 3 reverse 9:69045590-69045617; As/LbCpf1
tttggtttttgttttttgttttt

SEQ ID NO: 11235 - DNA, 24 bp, Artificial Sequence
  Synthetic: FXN 3 reverse 9:69045590-69045618; As/LbCpf1
tttggtttttgttttttgtttttg

SEQ ID NO: 11236 - DNA, 25 bp, Artificial Sequence
  Synthetic: FXN 3 reverse 9:69045590-69045619; As/LbCpf1
tttggtttttgttttttgtttttga

SEQ ID NO: 11237 - DNA, 18 bp, Artificial Sequence
  Synthetic: FXN 3 reverse 9:69045591-69045613; As/LbCpf1
ttttggtttttgtttttt

SEQ ID NO: 11238 - DNA, 19 bp, Artificial Sequence
  Synthetic: FXN 3 reverse 9:69045591-69045614; As/LbCpf1
ttttggtttttgttttttg

SEQ ID NO: 11239 - DNA, 20 bp, Artificial Sequence
  Synthetic: FXN 3 reverse 9:69045591-69045615; As/LbCpf1
ttttggtttttgttttttgt

SEQ ID NO: 11240 - DNA, 21 bp, Artificial Sequence
  Synthetic: FXN 3 reverse 9:69045591-69045616; As/LbCpf1
ttttggtttttgttttttgtt

SEQ ID NO: 11241 - DNA, 22 bp, Artificial Sequence
  Synthetic: FXN 3 reverse 9:69045591-69045617; As/LbCpf1
ttttggtttttgttttttgttt

SEQ ID NO: 11242 - DNA, 23 bp, Artificial Sequence
  Synthetic: FXN 3 reverse 9:69045591-69045618; As/LbCpf1
ttttggtttttgttttttgtttt

SEQ ID NO: 11243 - DNA, 24 bp, Artificial Sequence
  Synthetic: FXN 3 reverse 9:69045591-69045619; As/LbCpf1
ttttggtttttgttttttgttttt

SEQ ID NO: 11244 - DNA, 25 bp, Artificial Sequence
  Synthetic: FXN 3 reverse 9:69045591-69045620; As/LbCpf1
ttttggtttttgttttttgtttttg

SEQ ID NO: 11245 - DNA, 18 bp, Artificial Sequence
  Synthetic: FXN 3 reverse 9:69045592-69045614; As/LbCpf1
tttttggtttttgttttt

SEQ ID NO: 11246 - DNA, 19 bp, Artificial Sequence
  Synthetic: FXN 3 reverse 9:69045592-69045615; As/LbCpf1
tttttggtttttgtttttt

SEQ ID NO: 11247 - DNA, 20 bp, Artificial Sequence
  Synthetic: FXN 3 reverse 9:69045592-69045616; As/LbCpf1
tttttggtttttgttttttg

SEQ ID NO: 11248 - DNA, 21 bp, Artificial Sequence
  Synthetic: FXN 3 reverse 9:69045592-69045617; As/LbCpf1
tttttggtttttgttttttgt

SEQ ID NO: 11249 - DNA, 22 bp, Artificial Sequence
  Synthetic: FXN 3 reverse 9:69045592-69045618; As/LbCpf1
tttttggtttttgttttttgtt

SEQ ID NO: 11250 - DNA, 23 bp, Artificial Sequence
  Synthetic: FXN 3 reverse 9:69045592-69045619; As/LbCpf1
tttttggtttttgttttttgttt

SEQ ID NO: 11251 - DNA, 24 bp, Artificial Sequence
  Synthetic: FXN 3 reverse 9:69045592-69045620; As/LbCpf1
tttttggtttttgttttttgtttt

SEQ ID NO: 11252 - DNA, 25 bp, Artificial Sequence
  Synthetic: FXN 3 reverse 9:69045592-69045621; As/LbCpf1
tttttggtttttgttttttgttttt

SEQ ID NO: 11253 - DNA, 18 bp, Artificial Sequence
  Synthetic: FXN 3 reverse 9:69045593-69045615; As/LbCpf1
ttttttggtttttgtttt

SEQ ID NO: 11254 - DNA, 19 bp, Artificial Sequence
  Synthetic: FXN 3 reverse 9:69045593-69045616; As/LbCpf1
ttttttggtttttgttttt

SEQ ID NO: 11255 - DNA, 20 bp, Artificial Sequence
  Synthetic: FXN 3 reverse 9:69045593-69045617; As/LbCpf1
ttttttggtttttgtttttt

SEQ ID NO: 11256 - DNA, 21 bp, Artificial Sequence
  Synthetic: FXN 3 reverse 9:69045593-69045618; As/LbCpf1
ttttttggtttttgttttttg

SEQ ID NO: 11257 - DNA, 22 bp, Artificial Sequence
  Synthetic: FXN 3 reverse 9:69045593-69045619; As/LbCpf1
ttttttggtttttgttttttgt

SEQ ID NO: 11258 - DNA, 23 bp, Artificial Sequence
  Synthetic: FXN 3 reverse 9:69045593-69045620; As/LbCpf1
ttttttggtttttgttttttgtt

SEQ ID NO: 11259 - DNA, 24 bp, Artificial Sequence
  Synthetic: FXN 3 reverse 9:69045593-69045621; As/LbCpf1
ttttttggtttttgttttttgttt

SEQ ID NO: 11260 - DNA, 25 bp, Artificial Sequence
  Synthetic: FXN 3 reverse 9:69045593-69045622; As/LbCpf1
ttttttggtttttgttttttgtttt

SEQ ID NO: 11261 - DNA, 18 bp, Artificial Sequence
  Synthetic: FXN 3 reverse 9:69045594-69045616; As/LbCpf1
tttttttggtttttgttt

SEQ ID NO: 11262 - DNA, 19 bp, Artificial Sequence
  Synthetic: FXN 3 reverse 9:69045594-69045617; As/LbCpf1
tttttttggtttttgtttt

SEQ ID NO: 11263 - DNA, 20 bp, Artificial Sequence
  Synthetic: FXN 3 reverse 9:69045594-69045618; As/LbCpf1
tttttttggtttttgttttt

SEQ ID NO: 11264 - DNA, 21 bp, Artificial Sequence
  Synthetic: FXN 3 reverse 9:69045594-69045619; As/LbCpf1
tttttttggtttttgtttttt

SEQ ID NO: 11265 - DNA, 22 bp, Artificial Sequence
  Synthetic: FXN 3 reverse 9:69045594-69045620; As/LbCpf1
tttttttggtttttgttttttg

SEQ ID NO: 11266 - DNA, 23 bp, Artificial Sequence
  Synthetic: FXN 3 reverse 9:69045594-69045621; As/LbCpf1
tttttttggtttttgttttttgt

SEQ ID NO: 11267 - DNA, 24 bp, Artificial Sequence
  Synthetic: FXN 3 reverse 9:69045594-69045622; As/LbCpf1
tttttttggtttttgttttttgtt

SEQ ID NO: 11268 - DNA, 25 bp, Artificial Sequence
  Synthetic: FXN 3 reverse 9:69045594-69045623; As/LbCpf1
tttttttggtttttgttttttgttt

SEQ ID NO: 11269 - DNA, 18 bp, Artificial Sequence
  Synthetic: FXN 3 reverse 9:69045618-69045640; As/LbCpf1
gttaaataatcatgctga

SEQ ID NO: 11270 - DNA, 19 bp, Artificial Sequence
  Synthetic: FXN 3 reverse 9:69045618-69045641; As/LbCpf1
gttaaataatcatgctgaa

SEQ ID NO: 11271 - DNA, 20 bp, Artificial Sequence
  Synthetic: FXN 3 reverse 9:69045618-69045642; As/LbCpf1
gttaaataatcatgctgaag

SEQ ID NO: 11272 - DNA, 21 bp, Artificial Sequence
  Synthetic: FXN 3 reverse 9:69045618-69045643; As/LbCpf1
gttaaataatcatgctgaagt

SEQ ID NO: 11273 - DNA, 22 bp, Artificial Sequence
  Synthetic: FXN 3 reverse 9:69045618-69045644; As/LbCpf1
gttaaataatcatgctgaagtt

SEQ ID NO: 11274 - DNA, 23 bp, Artificial Sequence
  Synthetic: FXN 3 reverse 9:69045618-69045645; As/LbCpf1
gttaaataatcatgctgaagttt

SEQ ID NO: 11275 - DNA, 24 bp, Artificial Sequence
  Synthetic: FXN 3 reverse 9:69045618-69045646; As/LbCpf1
gttaaataatcatgctgaagtttt

SEQ ID NO: 11276 - DNA, 25 bp, Artificial Sequence
  Synthetic: FXN 3 reverse 9:69045618-69045647; As/LbCpf1
gttaaataatcatgctgaagttttt

SEQ ID NO: 11277 - DNA, 18 bp, Artificial Sequence
  Synthetic: FXN 3 reverse 9:69045619-69045641; As/LbCpf1
ggttaaataatcatgctg

SEQ ID NO: 11278 - DNA, 19 bp, Artificial Sequence
  Synthetic: FXN 3 reverse 9:69045619-69045642; As/LbCpf1
ggttaaataatcatgctga

SEQ ID NO: 11279 - DNA, 20 bp, Artificial Sequence
  Synthetic: FXN 3 reverse 9:69045619-69045643; As/LbCpf1
ggttaaataatcatgctgaa

SEQ ID NO: 11280 - DNA, 21 bp, Artificial Sequence
  Synthetic: FXN 3 reverse 9:69045619-69045644; As/LbCpf1
ggttaaataatcatgctgaag

SEQ ID NO: 11281 - DNA, 22 bp, Artificial Sequence
  Synthetic: FXN 3 reverse 9:69045619-69045645; As/LbCpf1
ggttaaataatcatgctgaagt

SEQ ID NO: 11282 - DNA, 23 bp, Artificial Sequence
  Synthetic: FXN 3 reverse 9:69045619-69045646; As/LbCpf1
ggttaaataatcatgctgaagtt

SEQ ID NO: 11283 - DNA, 24 bp, Artificial Sequence
  Synthetic: FXN 3 reverse 9:69045619-69045647; As/LbCpf1
ggttaaataatcatgctgaagttt

SEQ ID NO: 11284 - DNA, 25 bp, Artificial Sequence
  Synthetic: FXN 3 reverse 9:69045619-69045648; As/LbCpf1
ggttaaataatcatgctgaagtttt

SEQ ID NO: 11285 - DNA, 18 bp, Artificial Sequence
  Synthetic: FXN 3 forward 9:69045637-69045659; As/LbCpf1
accaaaatgcaggttagt

SEQ ID NO: 11286 - DNA, 19 bp, Artificial Sequence
  Synthetic: FXN 3 forward 9:69045637-69045660; As/LbCpf1
accaaaatgcaggttagtt

SEQ ID NO: 11287 - DNA, 20 bp, Artificial Sequence
  Synthetic: FXN 3 forward 9:69045637-69045661; As/LbCpf1
accaaaatgcaggttagttg

SEQ ID NO: 11288 - DNA, 21 bp, Artificial Sequence
  Synthetic: FXN 3 forward 9:69045637-69045662; As/LbCpf1
accaaaatgcaggttagttgt

SEQ ID NO: 11289 - DNA, 22 bp, Artificial Sequence
  Synthetic: FXN 3 forward 9:69045637-69045663; As/LbCpf1
accaaaatgcaggttagttgtt

SEQ ID NO: 11290 - DNA, 23 bp, Artificial Sequence
  Synthetic: FXN 3 forward 9:69045637-69045664; As/LbCpf1
accaaaatgcaggttagttgttc

SEQ ID NO: 11291 - DNA, 24 bp, Artificial Sequence
  Synthetic: FXN 3 forward 9:69045637-69045665; As/LbCpf1
accaaaatgcaggttagttgttca

SEQ ID NO: 11292 - DNA, 25 bp, Artificial Sequence
  Synthetic: FXN 3 forward 9:69045637-69045666; As/LbCpf1
accaaaatgcaggttagttgttcac

SEQ ID NO: 11293 - DNA, 18 bp, Artificial Sequence
  Synthetic: FXN 3 reverse 9:69045680-69045702; As/LbCpf1
gtaccaggccttgctctt

SEQ ID NO: 11294 - DNA, 19 bp, Artificial Sequence
  Synthetic: FXN 3 reverse 9:69045680-69045703; As/LbCpf1
gtaccaggccttgctcttg

SEQ ID NO: 11295 - DNA, 20 bp, Artificial Sequence
  Synthetic: FXN 3 reverse 9:69045680-69045704; As/LbCpf1
gtaccaggccttgctcttgt

SEQ ID NO: 11296 - DNA, 21 bp, Artificial Sequence
  Synthetic: FXN 3 reverse 9:69045680-69045705; As/LbCpf1
gtaccaggccttgctcttgtt

SEQ ID NO: 11297 - DNA, 22 bp, Artificial Sequence
  Synthetic: FXN 3 reverse 9:69045680-69045706; As/LbCpf1
gtaccaggccttgctcttgtta

SEQ ID NO: 11298 - DNA, 23 bp, Artificial Sequence
  Synthetic: FXN 3 reverse 9:69045680-69045707; As/LbCpf1
gtaccaggccttgctcttgttaa

SEQ ID NO: 11299 - DNA, 24 bp, Artificial Sequence
  Synthetic: FXN 3 reverse 9:69045680-69045708; As/LbCpf1
gtaccaggccttgctcttgttaat

SEQ ID NO: 11300 - DNA, 25 bp, Artificial Sequence
  Synthetic: FXN 3 reverse 9:69045680-69045709; As/LbCpf1
gtaccaggccttgctcttgttaatt

SEQ ID NO: 11301 - DNA, 18 bp, Artificial Sequence
  Synthetic: FXN 3 reverse 9:69045681-69045703; As/LbCpf1
ggtaccaggccttgctct

SEQ ID NO: 11302 - DNA, 19 bp, Artificial Sequence
  Synthetic: FXN 3 reverse 9:69045681-69045704; As/LbCpf1
ggtaccaggccttgctctt

SEQ ID NO: 11303 - DNA, 20 bp, Artificial Sequence
  Synthetic: FXN 3 reverse 9:69045681-69045705; As/LbCpf1
ggtaccaggccttgctcttg

SEQ ID NO: 11304 - DNA, 21 bp, Artificial Sequence
  Synthetic: FXN 3 reverse 9:69045681-69045706; As/LbCpf1
ggtaccaggccttgctcttgt

SEQ ID NO: 11305 - DNA, 22 bp, Artificial Sequence
  Synthetic: FXN 3 reverse 9:69045681-69045707; As/LbCpf1
ggtaccaggccttgctcttgtt

SEQ ID NO: 11306 - DNA, 23 bp, Artificial Sequence
  Synthetic: FXN 3 reverse 9:69045681-69045708; As/LbCpf1
ggtaccaggccttgctcttgtta

SEQ ID NO: 11307 - DNA, 24 bp, Artificial Sequence
  Synthetic: FXN 3 reverse 9:69045681-69045709; As/LbCpf1
ggtaccaggccttgctcttgttaa

SEQ ID NO: 11308 - DNA, 25 bp, Artificial Sequence
  Synthetic: FXN 3 reverse 9:69045681-69045710; As/LbCpf1
ggtaccaggccttgctcttgttaat

SEQ ID NO: 11309 - DNA, 18 bp, Artificial Sequence
  Synthetic: FXN 3 reverse 9:69045682-69045704; As/LbCpf1
tggtaccaggccttgctc

SEQ ID NO: 11310 - DNA, 19 bp, Artificial Sequence
  Synthetic: FXN 3 reverse 9:69045682-69045705; As/LbCpf1
tggtaccaggccttgctct

SEQ ID NO: 11311 - DNA, 20 bp, Artificial Sequence
  Synthetic: FXN 3 reverse 9:69045682-69045706; As/LbCpf1
tggtaccaggccttgctctt

SEQ ID NO: 11312 - DNA, 21 bp, Artificial Sequence
  Synthetic: FXN 3 reverse 9:69045682-69045707; As/LbCpf1
tggtaccaggccttgctcttg

SEQ ID NO: 11313 - DNA, 22 bp, Artificial Sequence
  Synthetic: FXN 3 reverse 9:69045682-69045708; As/LbCpf1
tggtaccaggccttgctcttgt

SEQ ID NO: 11314 - DNA, 23 bp, Artificial Sequence
  Synthetic: FXN 3 reverse 9:69045682-69045709; As/LbCpf1
tggtaccaggccttgctcttgtt

SEQ ID NO: 11315 - DNA, 24 bp, Artificial Sequence
  Synthetic: FXN 3 reverse 9:69045682-69045710; As/LbCpf1
tggtaccaggccttgctcttgtta

SEQ ID NO: 11316 - DNA, 25 bp, Artificial Sequence
  Synthetic: FXN 3 reverse 9:69045682-69045711; As/LbCpf1
tggtaccaggccttgctcttgttaa

SEQ ID NO: 11317 - DNA, 18 bp, Artificial Sequence
  Synthetic: FXN 3 reverse 9:69045683-69045705; As/LbCpf1
ttggtaccaggccttgct

SEQ ID NO: 11318 - DNA, 19 bp, Artificial Sequence
  Synthetic: FXN 3 reverse 9:69045683-69045706; As/LbCpf1
ttggtaccaggccttgctc

SEQ ID NO: 11319 - DNA, 20 bp, Artificial Sequence
  Synthetic: FXN 3 reverse 9:69045683-69045707; As/LbCpf1
ttggtaccaggccttgctct

SEQ ID NO: 11320 - DNA, 21 bp, Artificial Sequence
  Synthetic: FXN 3 reverse 9:69045683-69045708; As/LbCpf1
ttggtaccaggccttgctctt

SEQ ID NO: 11321 - DNA, 22 bp, Artificial Sequence
  Synthetic: FXN 3 reverse 9:69045683-69045709; As/LbCpf1
ttggtaccaggccttgctcttg

SEQ ID NO: 11322 - DNA, 23 bp, Artificial Sequence
  Synthetic: FXN 3 reverse 9:69045683-69045710; As/LbCpf1
ttggtaccaggccttgctcttgt

SEQ ID NO: 11323 - DNA, 24 bp, Artificial Sequence
  Synthetic: FXN 3 reverse 9:69045683-69045711; As/LbCpf1
ttggtaccaggccttgctcttgtt

SEQ ID NO: 11324 - DNA, 25 bp, Artificial Sequence
  Synthetic: FXN 3 reverse 9:69045683-69045712; As/LbCpf1
ttggtaccaggccttgctcttgtta

SEQ ID NO: 11325 - DNA, 18 bp, Artificial Sequence
  Synthetic: FXN 3 reverse 9:69045684-69045706; As/LbCpf1
tttggtaccaggccttgc

SEQ ID NO: 11326 - DNA, 19 bp, Artificial Sequence
  Synthetic: FXN 3 reverse 9:69045684-69045707; As/LbCpf1
tttggtaccaggccttgct

SEQ ID NO: 11327 - DNA, 20 bp, Artificial Sequence
  Synthetic: FXN 3 reverse 9:69045684-69045708; As/LbCpf1
tttggtaccaggccttgctc

SEQ ID NO: 11328 - DNA, 21 bp, Artificial Sequence
  Synthetic: FXN 3 reverse 9:69045684-69045709; As/LbCpf1
tttggtaccaggccttgctct

SEQ ID NO: 11329 - DNA, 22 bp, Artificial Sequence
  Synthetic: FXN 3 reverse 9:69045684-69045710; As/LbCpf1
tttggtaccaggccttgctctt

SEQ ID NO: 11330 - DNA, 23 bp, Artificial Sequence
  Synthetic: FXN 3 reverse 9:69045684-69045711; As/LbCpf1
tttggtaccaggccttgctcttg

SEQ ID NO: 11331 - DNA, 24 bp, Artificial Sequence
  Synthetic: FXN 3 reverse 9:69045684-69045712; As/LbCpf1
tttggtaccaggccttgctcttgt

SEQ ID NO: 11332 - DNA, 25 bp, Artificial Sequence
  Synthetic: FXN 3 reverse 9:69045684-69045713; As/LbCpf1
tttggtaccaggccttgctcttgtt

SEQ ID NO: 11333 - DNA, 18 bp, Artificial Sequence
  Synthetic: FXN 3 reverse 9:69045701-69045723; As/LbCpf1
ggagtaaattcacttttt

SEQ ID NO: 11334 - DNA, 19 bp, Artificial Sequence
  Synthetic: FXN 3 reverse 9:69045701-69045724; As/LbCpf1
ggagtaaattcactttttt

SEQ ID NO: 11335 - DNA, 20 bp, Artificial Sequence
  Synthetic: FXN 3 reverse 9:69045701-69045725; As/LbCpf1
ggagtaaattcacttttttt

SEQ ID NO: 11336 - DNA, 21 bp, Artificial Sequence
  Synthetic: FXN 3 reverse 9:69045701-69045726; As/LbCpf1
ggagtaaattcactttttttg

SEQ ID NO: 11337 - DNA, 22 bp, Artificial Sequence
  Synthetic: FXN 3 reverse 9:69045701-69045727; As/LbCpf1
ggagtaaattcactttttttgg

SEQ ID NO: 11338 - DNA, 23 bp, Artificial Sequence
  Synthetic: FXN 3 reverse 9:69045701-69045728; As/LbCpf1
ggagtaaattcactttttttggt

SEQ ID NO: 11339 - DNA, 24 bp, Artificial Sequence
  Synthetic: FXN 3 reverse 9:69045701-69045729; As/LbCpf1
ggagtaaattcactttttttggta

SEQ ID NO: 11340 - DNA, 25 bp, Artificial Sequence
  Synthetic: FXN 3 reverse 9:69045701-69045730; As/LbCpf1
ggagtaaattcactttttttggtac

SEQ ID NO: 11341 - DNA, 18 bp, Artificial Sequence
  Synthetic: FXN 3 forward 9:69045718-69045740; As/LbCpf1
ctccgaaactagcttggg

SEQ ID NO: 11342 - DNA, 19 bp, Artificial Sequence
  Synthetic: FXN 3 forward 9:69045718-69045741; As/LbCpf1
ctccgaaactagcttgggt

SEQ ID NO: 11343 - DNA, 20 bp, Artificial Sequence
  Synthetic: FXN 3 forward 9:69045718-69045742; As/LbCpf1
ctccgaaactagcttgggtg

SEQ ID NO: 11344 - DNA, 21 bp, Artificial Sequence
  Synthetic: FXN 3 forward 9:69045718-69045743; As/LbCpf1
ctccgaaactagcttgggtga

SEQ ID NO: 11345 - DNA, 22 bp, Artificial Sequence
  Synthetic: FXN 3 forward 9:69045718-69045744; As/LbCpf1
ctccgaaactagcttgggtgag

SEQ ID NO: 11346 - DNA, 23 bp, Artificial Sequence
  Synthetic: FXN 3 forward 9:69045718-69045745; As/LbCpf1
ctccgaaactagcttgggtgagg

SEQ ID NO: 11347 - DNA, 24 bp, Artificial Sequence
  Synthetic: FXN 3 forward 9:69045718-69045746; As/LbCpf1
ctccgaaactagcttgggtgaggg

SEQ ID NO: 11348 - DNA, 25 bp, Artificial Sequence
  Synthetic: FXN 3 forward 9:69045718-69045747; As/LbCpf1
ctccgaaactagcttgggtgagggg

SEQ ID NO: 11349 - DNA, 18 bp, Artificial Sequence
  Synthetic: FXN 3 reverse 9:69045724-69045746; As/LbCpf1
tacccctcacccaagcta

SEQ ID NO: 11350 - DNA, 19 bp, Artificial Sequence
  Synthetic: FXN 3 reverse 9:69045724-69045747; As/LbCpf1
tacccctcacccaagctag

SEQ ID NO: 11351 - DNA, 20 bp, Artificial Sequence
  Synthetic: FXN 3 reverse 9:69045724-69045748; As/LbCpf1
tacccctcacccaagctagt

SEQ ID NO: 11352 - DNA, 21 bp, Artificial Sequence
  Synthetic: FXN 3 reverse 9:69045724-69045749; As/LbCpf1
tacccctcacccaagctagtt

SEQ ID NO: 11353 - DNA, 22 bp, Artificial Sequence
  Synthetic: FXN 3 reverse 9:69045724-69045750; As/LbCpf1
tacccctcacccaagctagttt

SEQ ID NO: 11354 - DNA, 23 bp, Artificial Sequence
  Synthetic: FXN 3 reverse 9:69045724-69045751; As/LbCpf1
tacccctcacccaagctagtttc

SEQ ID NO: 11355 - DNA, 24 bp, Artificial Sequence
  Synthetic: FXN 3 reverse 9:69045724-69045752; As/LbCpf1
tacccctcacccaagctagtttcg

SEQ ID NO: 11356 - DNA, 25 bp, Artificial Sequence
  Synthetic: FXN 3 reverse 9:69045724-69045753; As/LbCpf1
tacccctcacccaagctagtttcgg

SEQ ID NO: 11357 - DNA, 18 bp, Artificial Sequence
  Synthetic: FXN 3 reverse 9:69045744-69045766; As/LbCpf1
aagaaaggcaggatgctt

SEQ ID NO: 11358 - DNA, 19 bp, Artificial Sequence
  Synthetic: FXN 3 reverse 9:69045744-69045767; As/LbCpf1
aagaaaggcaggatgcttt

SEQ ID NO: 11359 - DNA, 20 bp, Artificial Sequence
  Synthetic: FXN 3 reverse 9:69045744-69045768; As/LbCpf1
aagaaaggcaggatgctttg

SEQ ID NO: 11360 - DNA, 21 bp, Artificial Sequence
  Synthetic: FXN 3 reverse 9:69045744-69045769; As/LbCpf1
aagaaaggcaggatgctttgt

SEQ ID NO: 11361 - DNA, 22 bp, Artificial Sequence
  Synthetic: FXN 3 reverse 9:69045744-69045770; As/LbCpf1
aagaaaggcaggatgctttgta

SEQ ID NO: 11362 - DNA, 23 bp, Artificial Sequence
  Synthetic: FXN 3 reverse 9:69045744-69045771; As/LbCpf1
aagaaaggcaggatgctttgtac

SEQ ID NO: 11363 - DNA, 24 bp, Artificial Sequence
  Synthetic: FXN 3 reverse 9:69045744-69045772; As/LbCpf1
aagaaaggcaggatgctttgtacc

SEQ ID NO: 11364 - DNA, 25 bp, Artificial Sequence
  Synthetic: FXN 3 reverse 9:69045744-69045773; As/LbCpf1
aagaaaggcaggatgctttgtaccc

SEQ ID NO: 11365 - DNA, 18 bp, Artificial Sequence
  Synthetic: FXN 3 reverse 9:69045745-69045767; As/LbCpf1
aaagaaaggcaggatgct

SEQ ID NO: 11366 - DNA, 19 bp, Artificial Sequence
  Synthetic: FXN 3 reverse 9:69045745-69045768; As/LbCpf1
aaagaaaggcaggatgctt

SEQ ID NO: 11367 - DNA, 20 bp, Artificial Sequence
  Synthetic: FXN 3 reverse 9:69045745-69045769; As/LbCpf1
aaagaaaggcaggatgcttt

SEQ ID NO: 11368 - DNA, 21 bp, Artificial Sequence
  Synthetic: FXN 3 reverse 9:69045745-69045770; As/LbCpf1
aaagaaaggcaggatgctttg

SEQ ID NO: 11369 - DNA, 22 bp, Artificial Sequence
  Synthetic: FXN 3 reverse 9:69045745-69045771; As/LbCpf1
aaagaaaggcaggatgctttgt

SEQ ID NO: 11370 - DNA, 23 bp, Artificial Sequence
  Synthetic: FXN 3 reverse 9:69045745-69045772; As/LbCpf1
aaagaaaggcaggatgctttgta

SEQ ID NO: 11371 - DNA, 24 bp, Artificial Sequence
  Synthetic: FXN 3 reverse 9:69045745-69045773; As/LbCpf1
aaagaaaggcaggatgctttgtac

SEQ ID NO: 11372 - DNA, 25 bp, Artificial Sequence
  Synthetic: FXN 3 reverse 9:69045745-69045774; As/LbCpf1
aaagaaaggcaggatgctttgtacc

SEQ ID NO: 11373 - DNA, 18 bp, Artificial Sequence
  Synthetic: FXN 3 forward 9:69045763-69045785; As/LbCpf1
tttaaaagtgctgcttcc

SEQ ID NO: 11374 - DNA, 19 bp, Artificial Sequence
  Synthetic: FXN 3 forward 9:69045763-69045786; As/LbCpf1
tttaaaagtgctgcttccc

SEQ ID NO: 11375 - DNA, 20 bp, Artificial Sequence
  Synthetic: FXN 3 forward 9:69045763-69045787; As/LbCpf1
tttaaaagtgctgcttcccc

SEQ ID NO: 11376 - DNA, 21 bp, Artificial Sequence
  Synthetic: FXN 3 forward 9:69045763-69045788; As/LbCpf1
tttaaaagtgctgcttcccct

SEQ ID NO: 11377 - DNA, 22 bp, Artificial Sequence
  Synthetic: FXN 3 forward 9:69045763-69045789; As/LbCpf1
tttaaaagtgctgcttcccctt

SEQ ID NO: 11378 - DNA, 23 bp, Artificial Sequence
  Synthetic: FXN 3 forward 9:69045763-69045790; As/LbCpf1
tttaaaagtgctgcttccccttg

SEQ ID NO: 11379 - DNA, 24 bp, Artificial Sequence
  Synthetic: FXN 3 forward 9:69045763-69045791; As/LbCpf1
tttaaaagtgctgcttccccttgg

SEQ ID NO: 11380 - DNA, 25 bp, Artificial Sequence
  Synthetic: FXN 3 forward 9:69045763-69045792; As/LbCpf1
tttaaaagtgctgcttccccttgga

SEQ ID NO: 11381 - DNA, 18 bp, Artificial Sequence
  Synthetic: FXN 3 forward 9:69045767-69045789; As/LbCpf1
aaagtgctgcttcccctt

SEQ ID NO: 11382 - DNA, 19 bp, Artificial Sequence
  Synthetic: FXN 3 forward 9:69045767-69045790; As/LbCpf1
aaagtgctgcttccccttg

SEQ ID NO: 11383 - DNA, 20 bp, Artificial Sequence
  Synthetic: FXN 3 forward 9:69045767-69045791; As/LbCpf1
aaagtgctgcttccccttgg

SEQ ID NO: 11384 - DNA, 21 bp, Artificial Sequence
  Synthetic: FXN 3 forward 9:69045767-69045792; As/LbCpf1
aaagtgctgcttccccttgga

SEQ ID NO: 11385 - DNA, 22 bp, Artificial Sequence
  Synthetic: FXN 3 forward 9:69045767-69045793; As/LbCpf1
aaagtgctgcttccccttggaa

SEQ ID NO: 11386 - DNA, 23 bp, Artificial Sequence
  Synthetic: FXN 3 forward 9:69045767-69045794; As/LbCpf1
aaagtgctgcttccccttggaag

SEQ ID NO: 11387 - DNA, 24 bp, Artificial Sequence
  Synthetic: FXN 3 forward 9:69045767-69045795; As/LbCpf1
aaagtgctgcttccccttggaagt

SEQ ID NO: 11388 - DNA, 25 bp, Artificial Sequence
  Synthetic: FXN 3 forward 9:69045767-69045796; As/LbCpf1
aaagtgctgcttccccttggaagta

SEQ ID NO: 11389 - DNA, 18 bp, Artificial Sequence
  Synthetic: FXN 3 reverse 9:69045771-69045793; As/LbCpf1
tacttccaaggggaagca

SEQ ID NO: 11390 - DNA, 19 bp, Artificial Sequence
  Synthetic: FXN 3 reverse 9:69045771-69045794; As/LbCpf1
tacttccaaggggaagcag

SEQ ID NO: 11391 - DNA, 20 bp, Artificial Sequence
  Synthetic: FXN 3 reverse 9:69045771-69045795; As/LbCpf1
tacttccaaggggaagcagc

SEQ ID NO: 11392 - DNA, 21 bp, Artificial Sequence
  Synthetic: FXN 3 reverse 9:69045771-69045796; As/LbCpf1
tacttccaaggggaagcagca

SEQ ID NO: 11393 - DNA, 22 bp, Artificial Sequence
  Synthetic: FXN 3 reverse 9:69045771-69045797; As/LbCpf1
tacttccaaggggaagcagcac

SEQ ID NO: 11394 - DNA, 23 bp, Artificial Sequence
  Synthetic: FXN 3 reverse 9:69045771-69045798; As/LbCpf1
tacttccaaggggaagcagcact

SEQ ID NO: 11395 - DNA, 24 bp, Artificial Sequence
  Synthetic: FXN 3 reverse 9:69045771-69045799; As/LbCpf1
tacttccaaggggaagcagcactt

SEQ ID NO: 11396 - DNA, 25 bp, Artificial Sequence
  Synthetic: FXN 3 reverse 9:69045771-69045800; As/LbCpf1
tacttccaaggggaagcagcacttt

SEQ ID NO: 11397 - DNA, 18 bp, Artificial Sequence
  Synthetic: FXN 3 forward 9:69045808-69045830; As/LbCpf1
ataaggtaaggggggaag

SEQ ID NO: 11398 - DNA, 19 bp, Artificial Sequence
  Synthetic: FXN 3 forward 9:69045808-69045831; As/LbCpf1
ataaggtaaggggggaagt

SEQ ID NO: 11399 - DNA, 20 bp, Artificial Sequence
  Synthetic: FXN 3 forward 9:69045808-69045832; As/LbCpf1
ataaggtaaggggggaagtg

SEQ ID NO: 11400 - DNA, 21 bp, Artificial Sequence
  Synthetic: FXN 3 forward 9:69045808-69045833; As/LbCpf1
ataaggtaaggggggaagtgt

SEQ ID NO: 11401 - DNA, 22 bp, Artificial Sequence
  Synthetic: FXN 3 forward 9:69045808-69045834; As/LbCpf1
ataaggtaaggggggaagtgtg

SEQ ID NO: 11402 - DNA, 23 bp, Artificial Sequence
  Synthetic: FXN 3 forward 9:69045808-69045835; As/LbCpf1
ataaggtaaggggggaagtgtgc

SEQ ID NO: 11403 - DNA, 24 bp, Artificial Sequence
  Synthetic: FXN 3 forward 9:69045808-69045836; As/LbCpf1
ataaggtaaggggggaagtgtgca

SEQ ID NO: 11404 - DNA, 25 bp, Artificial Sequence
  Synthetic: FXN 3 forward 9:69045808-69045837; As/LbCpf1
ataaggtaaggggggaagtgtgcaa

SEQ ID NO: 11405 - DNA, 18 bp, Artificial Sequence
  Synthetic: FXN 3 forward 9:69045809-69045831; As/LbCpf1
taaggtaaggggggaagt

SEQ ID NO: 11406 - DNA, 19 bp, Artificial Sequence
  Synthetic: FXN 3 forward 9:69045809-69045832; As/LbCpf1
taaggtaaggggggaagtg

SEQ ID NO: 11407 - DNA, 20 bp, Artificial Sequence
  Synthetic: FXN 3 forward 9:69045809-69045833; As/LbCpf1
taaggtaaggggggaagtgt

SEQ ID NO: 11408 - DNA, 21 bp, Artificial Sequence
  Synthetic: FXN 3 forward 9:69045809-69045834; As/LbCpf1
taaggtaaggggggaagtgtg

SEQ ID NO: 11409 - DNA, 22 bp, Artificial Sequence
  Synthetic: FXN 3 forward 9:69045809-69045835; As/LbCpf1
taaggtaaggggggaagtgtgc

SEQ ID NO: 11410 - DNA, 23 bp, Artificial Sequence
  Synthetic: FXN 3 forward 9:69045809-69045836; As/LbCpf1
taaggtaaggggggaagtgtgca

SEQ ID NO: 11411 - DNA, 24 bp, Artificial Sequence
  Synthetic: FXN 3 forward 9:69045809-69045837; As/LbCpf1
taaggtaaggggggaagtgtgcaa

SEQ ID NO: 11412 - DNA, 25 bp, Artificial Sequence
  Synthetic: FXN 3 forward 9:69045809-69045838; As/LbCpf1
taaggtaaggggggaagtgtgcaag

SEQ ID NO: 11413 - DNA, 18 bp, Artificial Sequence
  Synthetic: FXN 3 reverse 9:69045944-69045966; As/LbCpf1
attcactgggagggcata

SEQ ID NO: 11414 - DNA, 19 bp, Artificial Sequence
  Synthetic: FXN 3 reverse 9:69045944-69045967; As/LbCpf1
attcactgggagggcatac

SEQ ID NO: 11415 - DNA, 20 bp, Artificial Sequence
  Synthetic: FXN 3 reverse 9:69045944-69045968; As/LbCpf1
attcactgggagggcatact

SEQ ID NO: 11416 - DNA, 21 bp, Artificial Sequence
  Synthetic: FXN 3 reverse 9:69045944-69045969; As/LbCpf1
attcactgggagggcatactg

SEQ ID NO: 11417 - DNA, 22 bp, Artificial Sequence
  Synthetic: FXN 3 reverse 9:69045944-69045970; As/LbCpf1
attcactgggagggcatactga

SEQ ID NO: 11418 - DNA, 23 bp, Artificial Sequence
  Synthetic: FXN 3 reverse 9:69045944-69045971; As/LbCpf1
attcactgggagggcatactgaa

SEQ ID NO: 11419 - DNA, 24 bp, Artificial Sequence
  Synthetic: FXN 3 reverse 9:69045944-69045972; As/LbCpf1
attcactgggagggcatactgaaa

SEQ ID NO: 11420 - DNA, 25 bp, Artificial Sequence
  Synthetic: FXN 3 reverse 9:69045944-69045973; As/LbCpf1
attcactgggagggcatactgaaag

SEQ ID NO: 11421 - DNA, 18 bp, Artificial Sequence
  Synthetic: FXN 3 forward 9:69045945-69045967; As/LbCpf1
agtatgccctcccagtga

SEQ ID NO: 11422 - DNA, 19 bp, Artificial Sequence
  Synthetic: FXN 3 forward 9:69045945-69045968; As/LbCpf1
agtatgccctcccagtgaa

SEQ ID NO: 11423 - DNA, 20 bp, Artificial Sequence
  Synthetic: FXN 3 forward 9:69045945-69045969; As/LbCpf1
agtatgccctcccagtgaat

SEQ ID NO: 11424 - DNA, 21 bp, Artificial Sequence
  Synthetic: FXN 3 forward 9:69045945-69045970; As/LbCpf1
agtatgccctcccagtgaatg

SEQ ID NO: 11425 - DNA, 22 bp, Artificial Sequence
  Synthetic: FXN 3 forward 9:69045945-69045971; As/LbCpf1
agtatgccctcccagtgaatga

SEQ ID NO: 11426 - DNA, 23 bp, Artificial Sequence
  Synthetic: FXN 3 forward 9:69045945-69045972; As/LbCpf1
agtatgccctcccagtgaatgaa

SEQ ID NO: 11427 - DNA, 24 bp, Artificial Sequence
  Synthetic: FXN 3 forward 9:69045945-69045973; As/LbCpf1
agtatgccctcccagtgaatgaaa

SEQ ID NO: 11428 - DNA, 25 bp, Artificial Sequence
  Synthetic: FXN 3 forward 9:69045945-69045974; As/LbCpf1
agtatgccctcccagtgaatgaaag

SEQ ID NO: 11429 - DNA, 18 bp, Artificial Sequence
  Synthetic: FXN 3 reverse 9:69046001-69046023; As/LbCpf1
acctccagtgggtggtgg

SEQ ID NO: 11430 - DNA, 19 bp, Artificial Sequence
  Synthetic: FXN 3 reverse 9:69046001-69046024; As/LbCpf1
acctccagtgggtggtggc

SEQ ID NO: 11431 - DNA, 20 bp, Artificial Sequence
  Synthetic: FXN 3 reverse 9:69046001-69046025; As/LbCpf1
acctccagtgggtggtggcc

SEQ ID NO: 11432 - DNA, 21 bp, Artificial Sequence
  Synthetic: FXN 3 reverse 9:69046001-69046026; As/LbCpf1
acctccagtgggtggtggcct

SEQ ID NO: 11433 - DNA, 22 bp, Artificial Sequence
  Synthetic: FXN 3 reverse 9:69046001-69046027; As/LbCpf1
acctccagtgggtggtggcctg

SEQ ID NO: 11434 - DNA, 23 bp, Artificial Sequence
  Synthetic: FXN 3 reverse 9:69046001-69046028; As/LbCpf1
acctccagtgggtggtggcctgg

SEQ ID NO: 11435 - DNA, 24 bp, Artificial Sequence
  Synthetic: FXN 3 reverse 9:69046001-69046029; As/LbCpf1
acctccagtgggtggtggcctggc

SEQ ID NO: 11436 - DNA, 25 bp, Artificial Sequence
  Synthetic: FXN 3 reverse 9:69046001-69046030; As/LbCpf1
acctccagtgggtggtggcctggca

SEQ ID NO: 11437 - DNA, 18 bp, Artificial Sequence
  Synthetic: FXN 3 forward 9:69046043-69046065; As/LbCpf1
ctttggtctgcgaatcta

SEQ ID NO: 11438 - DNA, 19 bp, Artificial Sequence
  Synthetic: FXN 3 forward 9:69046043-69046066; As/LbCpf1
ctttggtctgcgaatctac

SEQ ID NO: 11439 - DNA, 20 bp, Artificial Sequence
  Synthetic: FXN 3 forward 9:69046043-69046067; As/LbCpf1
ctttggtctgcgaatctact

SEQ ID NO: 11440 - DNA, 21 bp, Artificial Sequence
  Synthetic: FXN 3 forward 9:69046043-69046068; As/LbCpf1
ctttggtctgcgaatctactg

SEQ ID NO: 11441 - DNA, 22 bp, Artificial Sequence
  Synthetic: FXN 3 forward 9:69046043-69046069; As/LbCpf1
ctttggtctgcgaatctactgt

SEQ ID NO: 11442 - DNA, 23 bp, Artificial Sequence
  Synthetic: FXN 3 forward 9:69046043-69046070; As/LbCpf1
ctttggtctgcgaatctactgtc

SEQ ID NO: 11443 - DNA, 24 bp, Artificial Sequence
  Synthetic: FXN 3 forward 9:69046043-69046071; As/LbCpf1
ctttggtctgcgaatctactgtca

SEQ ID NO: 11444 - DNA, 25 bp, Artificial Sequence
  Synthetic: FXN 3 forward 9:69046043-69046072; As/LbCpf1
ctttggtctgcgaatctactgtcat

SEQ ID NO: 11445 - DNA, 18 bp, Artificial Sequence
  Synthetic: FXN 3 forward 9:69046048-69046070; As/LbCpf1
gtctgcgaatctactgtc

SEQ ID NO: 11446 - DNA, 19 bp, Artificial Sequence
  Synthetic: FXN 3 forward 9:69046048-69046071; As/LbCpf1
gtctgcgaatctactgtca

SEQ ID NO: 11447 - DNA, 20 bp, Artificial Sequence
  Synthetic: FXN 3 forward 9:69046048-69046072; As/LbCpf1
gtctgcgaatctactgtcat

SEQ ID NO: 11448 - DNA, 21 bp, Artificial Sequence
  Synthetic: FXN 3 forward 9:69046048-69046073; As/LbCpf1
gtctgcgaatctactgtcatg

SEQ ID NO: 11449 - DNA, 22 bp, Artificial Sequence
  Synthetic: FXN 3 forward 9:69046048-69046074; As/LbCpf1
gtctgcgaatctactgtcatgt

SEQ ID NO: 11450 - DNA, 23 bp, Artificial Sequence
  Synthetic: FXN 3 forward 9:69046048-69046075; As/LbCpf1
gtctgcgaatctactgtcatgtg

SEQ ID NO: 11451 - DNA, 24 bp, Artificial Sequence
  Synthetic: FXN 3 forward 9:69046048-69046076; As/LbCpf1
gtctgcgaatctactgtcatgtgg

SEQ ID NO: 11452 - DNA, 25 bp, Artificial Sequence
  Synthetic: FXN 3 forward 9:69046048-69046077; As/LbCpf1
gtctgcgaatctactgtcatgtgga

SEQ ID NO: 11453 - DNA, 18 bp, Artificial Sequence
  Synthetic: FXN 3 reverse 9:69046083-69046105; As/LbCpf1
taactgtatgctcttcca

SEQ ID NO: 11454 - DNA, 19 bp, Artificial Sequence
  Synthetic: FXN 3 reverse 9:69046083-69046106; As/LbCpf1
taactgtatgctcttccag

SEQ ID NO: 11455 - DNA, 20 bp, Artificial Sequence
  Synthetic: FXN 3 reverse 9:69046083-69046107; As/LbCpf1
taactgtatgctcttccaga

SEQ ID NO: 11456 - DNA, 21 bp, Artificial Sequence
  Synthetic: FXN 3 reverse 9:69046083-69046108; As/LbCpf1
taactgtatgctcttccagag

SEQ ID NO: 11457 - DNA, 22 bp, Artificial Sequence
  Synthetic: FXN 3 reverse 9:69046083-69046109; As/LbCpf1
taactgtatgctcttccagagc

SEQ ID NO: 11458 - DNA, 23 bp, Artificial Sequence
  Synthetic: FXN 3 reverse 9:69046083-69046110; As/LbCpf1
taactgtatgctcttccagagca

SEQ ID NO: 11459 - DNA, 24 bp, Artificial Sequence
  Synthetic: FXN 3 reverse 9:69046083-69046111; As/LbCpf1
taactgtatgctcttccagagcac

SEQ ID NO: 11460 - DNA, 25 bp, Artificial Sequence
  Synthetic: FXN 3 reverse 9:69046083-69046112; As/LbCpf1
taactgtatgctcttccagagcaca

SEQ ID NO: 11461 - DNA, 18 bp, Artificial Sequence
  Synthetic: FXN 3 reverse 9:69046084-69046106; As/LbCpf1
ctaactgtatgctcttcc

SEQ ID NO: 11462 - DNA, 19 bp, Artificial Sequence
  Synthetic: FXN 3 reverse 9:69046084-69046107; As/LbCpf1
ctaactgtatgctcttcca

SEQ ID NO: 11463 - DNA, 20 bp, Artificial Sequence
  Synthetic: FXN 3 reverse 9:69046084-69046108; As/LbCpf1
ctaactgtatgctcttccag

SEQ ID NO: 11464 - DNA, 21 bp, Artificial Sequence
  Synthetic: FXN 3 reverse 9:69046084-69046109; As/LbCpf1
ctaactgtatgctcttccaga

SEQ ID NO: 11465 - DNA, 22 bp, Artificial Sequence
  Synthetic: FXN 3 reverse 9:69046084-69046110; As/LbCpf1
ctaactgtatgctcttccagag

SEQ ID NO: 11466 - DNA, 23 bp, Artificial Sequence
  Synthetic: FXN 3 reverse 9:69046084-69046111; As/LbCpf1
ctaactgtatgctcttccagagc

SEQ ID NO: 11467 - DNA, 24 bp, Artificial Sequence
  Synthetic: FXN 3 reverse 9:69046084-69046112; As/LbCpf1
ctaactgtatgctcttccagagca

SEQ ID NO: 11468 - DNA, 25 bp, Artificial Sequence
  Synthetic: FXN 3 reverse 9:69046084-69046113; As/LbCpf1
ctaactgtatgctcttccagagcac

SEQ ID NO: 11469 - DNA, 18 bp, Artificial Sequence
  Synthetic: FXN 3 reverse 9:69046124-69046146; As/LbCpf1
acctccccttcaccatac

SEQ ID NO: 11470 - DNA, 19 bp, Artificial Sequence
  Synthetic: FXN 3 reverse 9:69046124-69046147; As/LbCpf1
acctccccttcaccataca

SEQ ID NO: 11471 - DNA, 20 bp, Artificial Sequence
  Synthetic: FXN 3 reverse 9:69046124-69046148; As/LbCpf1
acctccccttcaccatacat

SEQ ID NO: 11472 - DNA, 21 bp, Artificial Sequence
  Synthetic: FXN 3 reverse 9:69046124-69046149; As/LbCpf1
acctccccttcaccatacatt

SEQ ID NO: 11473 - DNA, 22 bp, Artificial Sequence
  Synthetic: FXN 3 reverse 9:69046124-69046150; As/LbCpf1
acctccccttcaccatacattc

SEQ ID NO: 11474 - DNA, 23 bp, Artificial Sequence
  Synthetic: FXN 3 reverse 9:69046124-69046151; As/LbCpf1
acctccccttcaccatacattcc

SEQ ID NO: 11475 - DNA, 24 bp, Artificial Sequence
  Synthetic: FXN 3 reverse 9:69046124-69046152; As/LbCpf1
acctccccttcaccatacattccc

SEQ ID NO: 11476 - DNA, 25 bp, Artificial Sequence
  Synthetic: FXN 3 reverse 9:69046124-69046153; As/LbCpf1
acctccccttcaccatacattccct

SEQ ID NO: 11477 - DNA, 18 bp, Artificial Sequence
  Synthetic: FXN 3 forward 9:69046160-69046182; As/LbCpf1
catttctgaagggctaag

SEQ ID NO: 11478 - DNA, 19 bp, Artificial Sequence
  Synthetic: FXN 3 forward 9:69046160-69046183; As/LbCpf1
catttctgaagggctaagt

SEQ ID NO: 11479 - DNA, 20 bp, Artificial Sequence
  Synthetic: FXN 3 forward 9:69046160-69046184; As/LbCpf1
catttctgaagggctaagta

SEQ ID NO: 11480 - DNA, 21 bp, Artificial Sequence
  Synthetic: FXN 3 forward 9:69046160-69046185; As/LbCpf1
catttctgaagggctaagtag

SEQ ID NO: 11481 - DNA, 22 bp, Artificial Sequence
  Synthetic: FXN 3 forward 9:69046160-69046186; As/LbCpf1
catttctgaagggctaagtagg

SEQ ID NO: 11482 - DNA, 23 bp, Artificial Sequence
  Synthetic: FXN 3 forward 9:69046160-69046187; As/LbCpf1
catttctgaagggctaagtagga

SEQ ID NO: 11483 - DNA, 24 bp, Artificial Sequence
  Synthetic: FXN 3 forward 9:69046160-69046188; As/LbCpf1
catttctgaagggctaagtaggaa

SEQ ID NO: 11484 - DNA, 25 bp, Artificial Sequence
  Synthetic: FXN 3 forward 9:69046160-69046189; As/LbCpf1
catttctgaagggctaagtaggaaa

SEQ ID NO: 11485 - DNA, 18 bp, Artificial Sequence
  Synthetic: FXN 3 reverse 9:69046160-69046182; As/LbCpf1
ctacttagcccttcagaa

SEQ ID NO: 11486 - DNA, 19 bp, Artificial Sequence
  Synthetic: FXN 3 reverse 9:69046160-69046183; As/LbCpf1
ctacttagcccttcagaaa

SEQ ID NO: 11487 - DNA, 20 bp, Artificial Sequence
  Synthetic: FXN 3 reverse 9:69046160-69046184; As/LbCpf1
ctacttagcccttcagaaat

SEQ ID NO: 11488 - DNA, 21 bp, Artificial Sequence
  Synthetic: FXN 3 reverse 9:69046160-69046185; As/LbCpf1
ctacttagcccttcagaaatg

SEQ ID NO: 11489 - DNA, 22 bp, Artificial Sequence
  Synthetic: FXN 3 reverse 9:69046160-69046186; As/LbCpf1
ctacttagcccttcagaaatgc

SEQ ID NO: 11490 - DNA, 23 bp, Artificial Sequence
  Synthetic: FXN 3 reverse 9:69046160-69046187; As/LbCpf1
ctacttagcccttcagaaatgca

SEQ ID NO: 11491 - DNA, 24 bp, Artificial Sequence
  Synthetic: FXN 3 reverse 9:69046160-69046188; As/LbCpf1
ctacttagcccttcagaaatgcaa

SEQ ID NO: 11492 - DNA, 25 bp, Artificial Sequence
  Synthetic: FXN 3 reverse 9:69046160-69046189; As/LbCpf1
ctacttagcccttcagaaatgcaaa

SEQ ID NO: 11493 - DNA, 18 bp, Artificial Sequence
  Synthetic: FXN 3 forward 9:69046166-69046188; As/LbCpf1
tgaagggctaagtaggaa

SEQ ID NO: 11494 - DNA, 19 bp, Artificial Sequence
  Synthetic: FXN 3 forward 9:69046166-69046189; As/LbCpf1
tgaagggctaagtaggaaa

SEQ ID NO: 11495 - DNA, 20 bp, Artificial Sequence
  Synthetic: FXN 3 forward 9:69046166-69046190; As/LbCpf1
tgaagggctaagtaggaaac

SEQ ID NO: 11496 - DNA, 21 bp, Artificial Sequence
  Synthetic: FXN 3 forward 9:69046166-69046191; As/LbCpf1
tgaagggctaagtaggaaacc

SEQ ID NO: 11497 - DNA, 22 bp, Artificial Sequence
  Synthetic: FXN 3 forward 9:69046166-69046192; As/LbCpf1
tgaagggctaagtaggaaaccg

SEQ ID NO: 11498 - DNA, 23 bp, Artificial Sequence
  Synthetic: FXN 3 forward 9:69046166-69046193; As/LbCpf1
tgaagggctaagtaggaaaccgg

SEQ ID NO: 11499 - DNA, 24 bp, Artificial Sequence
  Synthetic: FXN 3 forward 9:69046166-69046194; As/LbCpf1
tgaagggctaagtaggaaaccggg

SEQ ID NO: 11500 - DNA, 25 bp, Artificial Sequence
  Synthetic: FXN 3 forward 9:69046166-69046195; As/LbCpf1
tgaagggctaagtaggaaaccggga

SEQ ID NO: 11501 - DNA, 18 bp, Artificial Sequence
  Synthetic: FXN 3 reverse 9:69046212-69046234; As/LbCpf1
ttaaaaaaaattatcctc

SEQ ID NO: 11502 - DNA, 19 bp, Artificial Sequence
  Synthetic: FXN 3 reverse 9:69046212-69046235; As/LbCpf1
ttaaaaaaaattatcctct

SEQ ID NO: 11503 - DNA, 20 bp, Artificial Sequence
  Synthetic: FXN 3 reverse 9:69046212-69046236; As/LbCpf1
ttaaaaaaaattatcctctc

SEQ ID NO: 11504 - DNA, 21 bp, Artificial Sequence
  Synthetic: FXN 3 reverse 9:69046212-69046237; As/LbCpf1
ttaaaaaaaattatcctctct

SEQ ID NO: 11505 - DNA, 22 bp, Artificial Sequence
  Synthetic: FXN 3 reverse 9:69046212-69046238; As/LbCpf1
ttaaaaaaaattatcctctctt

SEQ ID NO: 11506 - DNA, 23 bp, Artificial Sequence
  Synthetic: FXN 3 reverse 9:69046212-69046239; As/LbCpf1
ttaaaaaaaattatcctctcttc

SEQ ID NO: 11507 - DNA, 24 bp, Artificial Sequence
  Synthetic: FXN 3 reverse 9:69046212-69046240; As/LbCpf1
ttaaaaaaaattatcctctcttct

SEQ ID NO: 11508 - DNA, 25 bp, Artificial Sequence
  Synthetic: FXN 3 reverse 9:69046212-69046241; As/LbCpf1
ttaaaaaaaattatcctctcttctc

SEQ ID NO: 11509 - DNA, 18 bp, Artificial Sequence
  Synthetic: FXN 3 reverse 9:69046213-69046235; As/LbCpf1
cttaaaaaaaattatcct

SEQ ID NO: 11510 - DNA, 19 bp, Artificial Sequence
  Synthetic: FXN 3 reverse 9:69046213-69046236; As/LbCpf1
cttaaaaaaaattatcctc

SEQ ID NO: 11511 - DNA, 20 bp, Artificial Sequence
  Synthetic: FXN 3 reverse 9:69046213-69046237; As/LbCpf1
cttaaaaaaaattatcctct

SEQ ID NO: 11512 - DNA, 21 bp, Artificial Sequence
  Synthetic: FXN 3 reverse 9:69046213-69046238; As/LbCpf1
cttaaaaaaaattatcctctc

SEQ ID NO: 11513 - DNA, 22 bp, Artificial Sequence
  Synthetic: FXN 3 reverse 9:69046213-69046239; As/LbCpf1
cttaaaaaaaattatcctctct

SEQ ID NO: 11514 - DNA, 23 bp, Artificial Sequence
  Synthetic: FXN 3 reverse 9:69046213-69046240; As/LbCpf1
cttaaaaaaaattatcctctctt

SEQ ID NO: 11515 - DNA, 24 bp, Artificial Sequence
  Synthetic: FXN 3 reverse 9:69046213-69046241; As/LbCpf1
cttaaaaaaaattatcctctcttc

SEQ ID NO: 11516 - DNA, 25 bp, Artificial Sequence
  Synthetic: FXN 3 reverse 9:69046213-69046242; As/LbCpf1
cttaaaaaaaattatcctctcttct

SEQ ID NO: 11517 - DNA, 18 bp, Artificial Sequence
  Synthetic: FXN 3 forward 9:69046227-69046249; As/LbCpf1
ttttaagaaaagcaacat

SEQ ID NO: 11518 - DNA, 19 bp, Artificial Sequence
  Synthetic: FXN 3 forward 9:69046227-69046250; As/LbCpf1
ttttaagaaaagcaacata

SEQ ID NO: 11519 - DNA, 20 bp, Artificial Sequence
  Synthetic: FXN 3 forward 9:69046227-69046251; As/LbCpf1
ttttaagaaaagcaacatat

SEQ ID NO: 11520 - DNA, 21 bp, Artificial Sequence
  Synthetic: FXN 3 forward 9:69046227-69046252; As/LbCpf1
ttttaagaaaagcaacatatt

SEQ ID NO: 11521 - DNA, 22 bp, Artificial Sequence
  Synthetic: FXN 3 forward 9:69046227-69046253; As/LbCpf1
ttttaagaaaagcaacatattc

SEQ ID NO: 11522 - DNA, 23 bp, Artificial Sequence
  Synthetic: FXN 3 forward 9:69046227-69046254; As/LbCpf1
ttttaagaaaagcaacatattcc

SEQ ID NO: 11523 - DNA, 24 bp, Artificial Sequence
  Synthetic: FXN 3 forward 9:69046227-69046255; As/LbCpf1
ttttaagaaaagcaacatattccc

SEQ ID NO: 11524 - DNA, 25 bp, Artificial Sequence
  Synthetic: FXN 3 forward 9:69046227-69046256; As/LbCpf1
ttttaagaaaagcaacatattccct

SEQ ID NO: 11525 - DNA, 18 bp, Artificial Sequence
  Synthetic: FXN 3 forward 9:69046228-69046250; As/LbCpf1
tttaagaaaagcaacata

SEQ ID NO: 11526 - DNA, 19 bp, Artificial Sequence
  Synthetic: FXN 3 forward 9:69046228-69046251; As/LbCpf1
tttaagaaaagcaacatat

SEQ ID NO: 11527 - DNA, 20 bp, Artificial Sequence
  Synthetic: FXN 3 forward 9:69046228-69046252; As/LbCpf1
tttaagaaaagcaacatatt

SEQ ID NO: 11528 - DNA, 21 bp, Artificial Sequence
  Synthetic: FXN 3 forward 9:69046228-69046253; As/LbCpf1
tttaagaaaagcaacatattc

SEQ ID NO: 11529 - DNA, 22 bp, Artificial Sequence
  Synthetic: FXN 3 forward 9:69046228-69046254; As/LbCpf1
tttaagaaaagcaacatattcc

SEQ ID NO: 11530 - DNA, 23 bp, Artificial Sequence
  Synthetic: FXN 3 forward 9:69046228-69046255; As/LbCpf1
tttaagaaaagcaacatattccc

SEQ ID NO: 11531 - DNA, 24 bp, Artificial Sequence
  Synthetic: FXN 3 forward 9:69046228-69046256; As/LbCpf1
tttaagaaaagcaacatattccct

SEQ ID NO: 11532 - DNA, 25 bp, Artificial Sequence
  Synthetic: FXN 3 forward 9:69046228-69046257; As/LbCpf1
tttaagaaaagcaacatattccctt

SEQ ID NO: 11533 - DNA, 18 bp, Artificial Sequence
  Synthetic: FXN 3 forward 9:69046229-69046251; As/LbCpf1
ttaagaaaagcaacatat

SEQ ID NO: 11534 - DNA, 19 bp, Artificial Sequence
  Synthetic: FXN 3 forward 9:69046229-69046252; As/LbCpf1
ttaagaaaagcaacatatt

SEQ ID NO: 11535 - DNA, 20 bp, Artificial Sequence
  Synthetic: FXN 3 forward 9:69046229-69046253; As/LbCpf1
ttaagaaaagcaacatattc

SEQ ID NO: 11536 - DNA, 21 bp, Artificial Sequence
  Synthetic: FXN 3 forward 9:69046229-69046254; As/LbCpf1
ttaagaaaagcaacatattcc

SEQ ID NO: 11537 - DNA, 22 bp, Artificial Sequence
  Synthetic: FXN 3 forward 9:69046229-69046255; As/LbCpf1
ttaagaaaagcaacatattccc

SEQ ID NO: 11538 - DNA, 23 bp, Artificial Sequence
  Synthetic: FXN 3 forward 9:69046229-69046256; As/LbCpf1
ttaagaaaagcaacatattccct

SEQ ID NO: 11539 - DNA, 24 bp, Artificial Sequence
  Synthetic: FXN 3 forward 9:69046229-69046257; As/LbCpf1
ttaagaaaagcaacatattccctt

SEQ ID NO: 11540 - DNA, 25 bp, Artificial Sequence
  Synthetic: FXN 3 forward 9:69046229-69046258; As/LbCpf1
ttaagaaaagcaacatattcccttt

SEQ ID NO: 11541 - DNA, 18 bp, Artificial Sequence
  Synthetic: FXN 3 forward 9:69046230-69046252; As/LbCpf1
taagaaaagcaacatatt

SEQ ID NO: 11542 - DNA, 19 bp, Artificial Sequence
  Synthetic: FXN 3 forward 9:69046230-69046253; As/LbCpf1
taagaaaagcaacatattc

SEQ ID NO: 11543 - DNA, 20 bp, Artificial Sequence
  Synthetic: FXN 3 forward 9:69046230-69046254; As/LbCpf1
taagaaaagcaacatattcc

SEQ ID NO: 11544 - DNA, 21 bp, Artificial Sequence
  Synthetic: FXN 3 forward 9:69046230-69046255; As/LbCpf1
taagaaaagcaacatattccc

SEQ ID NO: 11545 - DNA, 22 bp, Artificial Sequence
  Synthetic: FXN 3 forward 9:69046230-69046256; As/LbCpf1
taagaaaagcaacatattccct

SEQ ID NO: 11546 - DNA, 23 bp, Artificial Sequence
  Synthetic: FXN 3 forward 9:69046230-69046257; As/LbCpf1
taagaaaagcaacatattccctt

SEQ ID NO: 11547 - DNA, 24 bp, Artificial Sequence
  Synthetic: FXN 3 forward 9:69046230-69046258; As/LbCpf1
taagaaaagcaacatattcccttt

SEQ ID NO: 11548 - DNA, 25 bp, Artificial Sequence
  Synthetic: FXN 3 forward 9:69046230-69046259; As/LbCpf1
taagaaaagcaacatattccctttt

SEQ ID NO: 11549 - DNA, 18 bp, Artificial Sequence
  Synthetic: FXN 3 forward 9:69046231-69046253; As/LbCpf1
aagaaaagcaacatattc

SEQ ID NO: 11550 - DNA, 19 bp, Artificial Sequence
  Synthetic: FXN 3 forward 9:69046231-69046254; As/LbCpf1
aagaaaagcaacatattcc

SEQ ID NO: 11551 - DNA, 20 bp, Artificial Sequence
  Synthetic: FXN 3 forward 9:69046231-69046255; As/LbCpf1
aagaaaagcaacatattccc

SEQ ID NO: 11552 - DNA, 21 bp, Artificial Sequence
  Synthetic: FXN 3 forward 9:69046231-69046256; As/LbCpf1
aagaaaagcaacatattccct

SEQ ID NO: 11553 - DNA, 22 bp, Artificial Sequence
  Synthetic: FXN 3 forward 9:69046231-69046257; As/LbCpf1
aagaaaagcaacatattccctt

SEQ ID NO: 11554 - DNA, 23 bp, Artificial Sequence
  Synthetic: FXN 3 forward 9:69046231-69046258; As/LbCpf1
aagaaaagcaacatattcccttt

SEQ ID NO: 11555 - DNA, 24 bp, Artificial Sequence
  Synthetic: FXN 3 forward 9:69046231-69046259; As/LbCpf1
aagaaaagcaacatattccctttt

SEQ ID NO: 11556 - DNA, 25 bp, Artificial Sequence
  Synthetic: FXN 3 forward 9:69046231-69046260; As/LbCpf1
aagaaaagcaacatattcccttttt

SEQ ID NO: 11557 - DNA, 18 bp, Artificial Sequence
  Synthetic: FXN 3 forward 9:69046232-69046254; As/LbCpf1
agaaaagcaacatattcc

SEQ ID NO: 11558 - DNA, 19 bp, Artificial Sequence
  Synthetic: FXN 3 forward 9:69046232-69046255; As/LbCpf1
agaaaagcaacatattccc

SEQ ID NO: 11559 - DNA, 20 bp, Artificial Sequence
  Synthetic: FXN 3 forward 9:69046232-69046256; As/LbCpf1
agaaaagcaacatattccct

SEQ ID NO: 11560 - DNA, 21 bp, Artificial Sequence
  Synthetic: FXN 3 forward 9:69046232-69046257; As/LbCpf1
agaaaagcaacatattccctt

SEQ ID NO: 11561 - DNA, 22 bp, Artificial Sequence
  Synthetic: FXN 3 forward 9:69046232-69046258; As/LbCpf1
agaaaagcaacatattcccttt

SEQ ID NO: 11562 - DNA, 23 bp, Artificial Sequence
  Synthetic: FXN 3 forward 9:69046232-69046259; As/LbCpf1
agaaaagcaacatattccctttt

SEQ ID NO: 11563 - DNA, 24 bp, Artificial Sequence
  Synthetic: FXN 3 forward 9:69046232-69046260; As/LbCpf1
agaaaagcaacatattcccttttt

SEQ ID NO: 11564 - DNA, 25 bp, Artificial Sequence
  Synthetic: FXN 3 forward 9:69046232-69046261; As/LbCpf1
agaaaagcaacatattccctttttc

SEQ ID NO: 11565 - DNA, 18 bp, Artificial Sequence
  Synthetic: FXN 3 reverse 9:69046239-69046261; As/LbCpf1
taagaaaaagggaatatg

SEQ ID NO: 11566 - DNA, 19 bp, Artificial Sequence
  Synthetic: FXN 3 reverse 9:69046239-69046262; As/LbCpf1
taagaaaaagggaatatgt

SEQ ID NO: 11567 - DNA, 20 bp, Artificial Sequence
  Synthetic: FXN 3 reverse 9:69046239-69046263; As/LbCpf1
taagaaaaagggaatatgtt

SEQ ID NO: 11568 - DNA, 21 bp, Artificial Sequence
  Synthetic: FXN 3 reverse 9:69046239-69046264; As/LbCpf1
taagaaaaagggaatatgttg

SEQ ID NO: 11569 - DNA, 22 bp, Artificial Sequence
  Synthetic: FXN 3 reverse 9:69046239-69046265; As/LbCpf1
taagaaaaagggaatatgttgc

SEQ ID NO: 11570 - DNA, 23 bp, Artificial Sequence
  Synthetic: FXN 3 reverse 9:69046239-69046266; As/LbCpf1
taagaaaaagggaatatgttgct

SEQ ID NO: 11571 - DNA, 24 bp, Artificial Sequence
  Synthetic: FXN 3 reverse 9:69046239-69046267; As/LbCpf1
taagaaaaagggaatatgttgctt

SEQ ID NO: 11572 - DNA, 25 bp, Artificial Sequence
  Synthetic: FXN 3 reverse 9:69046239-69046268; As/LbCpf1
taagaaaaagggaatatgttgcttt

SEQ ID NO: 11573 - DNA, 18 bp, Artificial Sequence
  Synthetic: FXN 3 reverse 9:69046240-69046262; As/LbCpf1
ctaagaaaaagggaatat

SEQ ID NO: 11574 - DNA, 19 bp, Artificial Sequence
  Synthetic: FXN 3 reverse 9:69046240-69046263; As/LbCpf1
ctaagaaaaagggaatatg

SEQ ID NO: 11575 - DNA, 20 bp, Artificial Sequence
  Synthetic: FXN 3 reverse 9:69046240-69046264; As/LbCpf1
ctaagaaaaagggaatatgt

SEQ ID NO: 11576 - DNA, 21 bp, Artificial Sequence
  Synthetic: FXN 3 reverse 9:69046240-69046265; As/LbCpf1
ctaagaaaaagggaatatgtt

SEQ ID NO: 11577 - DNA, 22 bp, Artificial Sequence
  Synthetic: FXN 3 reverse 9:69046240-69046266; As/LbCpf1
ctaagaaaaagggaatatgttg

SEQ ID NO: 11578 - DNA, 23 bp, Artificial Sequence
  Synthetic: FXN 3 reverse 9:69046240-69046267; As/LbCpf1
ctaagaaaaagggaatatgttgc

SEQ ID NO: 11579 - DNA, 24 bp, Artificial Sequence
  Synthetic: FXN 3 reverse 9:69046240-69046268; As/LbCpf1
ctaagaaaaagggaatatgttgct

SEQ ID NO: 11580 - DNA, 25 bp, Artificial Sequence
  Synthetic: FXN 3 reverse 9:69046240-69046269; As/LbCpf1
ctaagaaaaagggaatatgttgctt

SEQ ID NO: 11581 - DNA, 18 bp, Artificial Sequence
  Synthetic: FXN 3 reverse 9:69046241-69046263; As/LbCpf1
tctaagaaaaagggaata

SEQ ID NO: 11582 - DNA, 19 bp, Artificial Sequence
  Synthetic: FXN 3 reverse 9:69046241-69046264; As/LbCpf1
tctaagaaaaagggaatat

SEQ ID NO: 11583 - DNA, 20 bp, Artificial Sequence
  Synthetic: FXN 3 reverse 9:69046241-69046265; As/LbCpf1
tctaagaaaaagggaatatg

SEQ ID NO: 11584 - DNA, 21 bp, Artificial Sequence
  Synthetic: FXN 3 reverse 9:69046241-69046266; As/LbCpf1
tctaagaaaaagggaatatgt

SEQ ID NO: 11585 - DNA, 22 bp, Artificial Sequence
  Synthetic: FXN 3 reverse 9:69046241-69046267; As/LbCpf1
tctaagaaaaagggaatatgtt

SEQ ID NO: 11586 - DNA, 23 bp, Artificial Sequence
  Synthetic: FXN 3 reverse 9:69046241-69046268; As/LbCpf1
tctaagaaaaagggaatatgttg

SEQ ID NO: 11587 - DNA, 24 bp, Artificial Sequence
  Synthetic: FXN 3 reverse 9:69046241-69046269; As/LbCpf1
tctaagaaaaagggaatatgttgc

SEQ ID NO: 11588 - DNA, 25 bp, Artificial Sequence
  Synthetic: FXN 3 reverse 9:69046241-69046270; As/LbCpf1
tctaagaaaaagggaatatgttgct

SEQ ID NO: 11589 - DNA, 18 bp, Artificial Sequence
  Synthetic: FXN 3 reverse 9:69046242-69046264; As/LbCpf1
ttctaagaaaaagggaat

SEQ ID NO: 11590 - DNA, 19 bp, Artificial Sequence
  Synthetic: FXN 3 reverse 9:69046242-69046265; As/LbCpf1
ttctaagaaaaagggaata

SEQ ID NO: 11591 - DNA, 20 bp, Artificial Sequence
  Synthetic: FXN 3 reverse 9:69046242-69046266; As/LbCpf1
ttctaagaaaaagggaatat

SEQ ID NO: 11592 - DNA, 21 bp, Artificial Sequence
  Synthetic: FXN 3 reverse 9:69046242-69046267; As/LbCpf1
ttctaagaaaaagggaatatg

SEQ ID NO: 11593 - DNA, 22 bp, Artificial Sequence
  Synthetic: FXN 3 reverse 9:69046242-69046268; As/LbCpf1
ttctaagaaaaagggaatatgt

SEQ ID NO: 11594 - DNA, 23 bp, Artificial Sequence
  Synthetic: FXN 3 reverse 9:69046242-69046269; As/LbCpf1
ttctaagaaaaagggaatatgtt

SEQ ID NO: 11595 - DNA, 24 bp, Artificial Sequence
  Synthetic: FXN 3 reverse 9:69046242-69046270; As/LbCpf1
ttctaagaaaaagggaatatgttg

SEQ ID NO: 11596 - DNA, 25 bp, Artificial Sequence
  Synthetic: FXN 3 reverse 9:69046242-69046271; As/LbCpf1
ttctaagaaaaagggaatatgttgc

SEQ ID NO: 11597 - DNA, 18 bp, Artificial Sequence
  Synthetic: FXN 3 forward 9:69046255-69046277; As/LbCpf1
tcttagaaaaaatggagc

SEQ ID NO: 11598 - DNA, 19 bp, Artificial Sequence
  Synthetic: FXN 3 forward 9:69046255-69046278; As/LbCpf1
tcttagaaaaaatggagca

SEQ ID NO: 11599 - DNA, 20 bp, Artificial Sequence
  Synthetic: FXN 3 forward 9:69046255-69046279; As/LbCpf1
tcttagaaaaaatggagcac

SEQ ID NO: 11600 - DNA, 21 bp, Artificial Sequence
  Synthetic: FXN 3 forward 9:69046255-69046280; As/LbCpf1
tcttagaaaaaatggagcact

SEQ ID NO: 11601 - DNA, 22 bp, Artificial Sequence
  Synthetic: FXN 3 forward 9:69046255-69046281; As/LbCpf1
tcttagaaaaaatggagcactc

SEQ ID NO: 11602 - DNA, 23 bp, Artificial Sequence
  Synthetic: FXN 3 forward 9:69046255-69046282; As/LbCpf1
tcttagaaaaaatggagcactcg

SEQ ID NO: 11603 - DNA, 24 bp, Artificial Sequence
  Synthetic: FXN 3 forward 9:69046255-69046283; As/LbCpf1
tcttagaaaaaatggagcactcgg

SEQ ID NO: 11604 - DNA, 25 bp, Artificial Sequence
  Synthetic: FXN 3 forward 9:69046255-69046284; As/LbCpf1
tcttagaaaaaatggagcactcggt

SEQ ID NO: 11605 - DNA, 18 bp, Artificial Sequence
  Synthetic: FXN 3 forward 9:69046256-69046278; As/LbCpf1
cttagaaaaaatggagca

SEQ ID NO: 11606 - DNA, 19 bp, Artificial Sequence
  Synthetic: FXN 3 forward 9:69046256-69046279; As/LbCpf1
cttagaaaaaatggagcac

SEQ ID NO: 11607 - DNA, 20 bp, Artificial Sequence
  Synthetic: FXN 3 forward 9:69046256-69046280; As/LbCpf1
cttagaaaaaatggagcact

SEQ ID NO: 11608 - DNA, 21 bp, Artificial Sequence
  Synthetic: FXN 3 forward 9:69046256-69046281; As/LbCpf1
cttagaaaaaatggagcactc

SEQ ID NO: 11609 - DNA, 22 bp, Artificial Sequence
  Synthetic: FXN 3 forward 9:69046256-69046282; As/LbCpf1
cttagaaaaaatggagcactcg

SEQ ID NO: 11610 - DNA, 23 bp, Artificial Sequence
  Synthetic: FXN 3 forward 9:69046256-69046283; As/LbCpf1
cttagaaaaaatggagcactcgg

SEQ ID NO: 11611 - DNA, 24 bp, Artificial Sequence
  Synthetic: FXN 3 forward 9:69046256-69046284; As/LbCpf1
cttagaaaaaatggagcactcggt

SEQ ID NO: 11612 - DNA, 25 bp, Artificial Sequence
  Synthetic: FXN 3 forward 9:69046256-69046285; As/LbCpf1
cttagaaaaaatggagcactcggtt

SEQ ID NO: 11613 - DNA, 18 bp, Artificial Sequence
  Synthetic: FXN 3 forward 9:69046257-69046279; As/LbCpf1
ttagaaaaaatggagcac

SEQ ID NO: 11614 - DNA, 19 bp, Artificial Sequence
  Synthetic: FXN 3 forward 9:69046257-69046280; As/LbCpf1
ttagaaaaaatggagcact

SEQ ID NO: 11615 - DNA, 20 bp, Artificial Sequence
  Synthetic: FXN 3 forward 9:69046257-69046281; As/LbCpf1
ttagaaaaaatggagcactc

SEQ ID NO: 11616 - DNA, 21 bp, Artificial Sequence
  Synthetic: FXN 3 forward 9:69046257-69046282; As/LbCpf1
ttagaaaaaatggagcactcg

SEQ ID NO: 11617 - DNA, 22 bp, Artificial Sequence
  Synthetic: FXN 3 forward 9:69046257-69046283; As/LbCpf1
ttagaaaaaatggagcactcgg

SEQ ID NO: 11618 - DNA, 23 bp, Artificial Sequence
  Synthetic: FXN 3 forward 9:69046257-69046284; As/LbCpf1
ttagaaaaaatggagcactcggt

SEQ ID NO: 11619 - DNA, 24 bp, Artificial Sequence
  Synthetic: FXN 3 forward 9:69046257-69046285; As/LbCpf1
ttagaaaaaatggagcactcggtt

SEQ ID NO: 11620 - DNA, 25 bp, Artificial Sequence
  Synthetic: FXN 3 forward 9:69046257-69046286; As/LbCpf1
ttagaaaaaatggagcactcggtta

SEQ ID NO: 11621 - DNA, 18 bp, Artificial Sequence
  Synthetic: FXN 3 reverse 9:69046291-69046313; As/LbCpf1
tatattgctacttctaca

SEQ ID NO: 11622 - DNA, 19 bp, Artificial Sequence
  Synthetic: FXN 3 reverse 9:69046291-69046314; As/LbCpf1
tatattgctacttctacat

SEQ ID NO: 11623 - DNA, 20 bp, Artificial Sequence
  Synthetic: FXN 3 reverse 9:69046291-69046315; As/LbCpf1
tatattgctacttctacatt

SEQ ID NO: 11624 - DNA, 21 bp, Artificial Sequence
  Synthetic: FXN 3 reverse 9:69046291-69046316; As/LbCpf1
tatattgctacttctacattc

SEQ ID NO: 11625 - DNA, 22 bp, Artificial Sequence
  Synthetic: FXN 3 reverse 9:69046291-69046317; As/LbCpf1
tatattgctacttctacattcg

SEQ ID NO: 11626 - DNA, 23 bp, Artificial Sequence
  Synthetic: FXN 3 reverse 9:69046291-69046318; As/LbCpf1
tatattgctacttctacattcga

SEQ ID NO: 11627 - DNA, 24 bp, Artificial Sequence
  Synthetic: FXN 3 reverse 9:69046291-69046319; As/LbCpf1
tatattgctacttctacattcgag

SEQ ID NO: 11628 - DNA, 25 bp, Artificial Sequence
  Synthetic: FXN 3 reverse 9:69046291-69046320; As/LbCpf1
tatattgctacttctacattcgagt

SEQ ID NO: 11629 - DNA, 18 bp, Artificial Sequence
  Synthetic: FXN 3 reverse 9:69046322-69046344; As/LbCpf1
agtgaattataacccatt

SEQ ID NO: 11630 - DNA, 19 bp, Artificial Sequence
  Synthetic: FXN 3 reverse 9:69046322-69046345; As/LbCpf1
agtgaattataacccatta

SEQ ID NO: 11631 - DNA, 20 bp, Artificial Sequence
  Synthetic: FXN 3 reverse 9:69046322-69046346; As/LbCpf1
agtgaattataacccattaa

SEQ ID NO: 11632 - DNA, 21 bp, Artificial Sequence
  Synthetic: FXN 3 reverse 9:69046322-69046347; As/LbCpf1
agtgaattataacccattaat

SEQ ID NO: 11633 - DNA, 22 bp, Artificial Sequence
  Synthetic: FXN 3 reverse 9:69046322-69046348; As/LbCpf1
agtgaattataacccattaatg

SEQ ID NO: 11634 - DNA, 23 bp, Artificial Sequence
  Synthetic: FXN 3 reverse 9:69046322-69046349; As/LbCpf1
agtgaattataacccattaatgc

SEQ ID NO: 11635 - DNA, 24 bp, Artificial Sequence
  Synthetic: FXN 3 reverse 9:69046322-69046350; As/LbCpf1
agtgaattataacccattaatgca

SEQ ID NO: 11636 - DNA, 25 bp, Artificial Sequence
  Synthetic: FXN 3 reverse 9:69046322-69046351; As/LbCpf1
agtgaattataacccattaatgcat

SEQ ID NO: 11637 - DNA, 18 bp, Artificial Sequence
  Synthetic: FXN 3 reverse 9:69046323-69046345; As/LbCpf1
cagtgaattataacccat

SEQ ID NO: 11638 - DNA, 19 bp, Artificial Sequence
  Synthetic: FXN 3 reverse 9:69046323-69046346; As/LbCpf1
cagtgaattataacccatt

SEQ ID NO: 11639 - DNA, 20 bp, Artificial Sequence
  Synthetic: FXN 3 reverse 9:69046323-69046347; As/LbCpf1
cagtgaattataacccatta

SEQ ID NO: 11640 - DNA, 21 bp, Artificial Sequence
  Synthetic: FXN 3 reverse 9:69046323-69046348; As/LbCpf1
cagtgaattataacccattaa

SEQ ID NO: 11641 - DNA, 22 bp, Artificial Sequence
  Synthetic: FXN 3 reverse 9:69046323-69046349; As/LbCpf1
cagtgaattataacccattaat

SEQ ID NO: 11642 - DNA, 23 bp, Artificial Sequence
  Synthetic: FXN 3 reverse 9:69046323-69046350; As/LbCpf1
cagtgaattataacccattaatg

SEQ ID NO: 11643 - DNA, 24 bp, Artificial Sequence
  Synthetic: FXN 3 reverse 9:69046323-69046351; As/LbCpf1
cagtgaattataacccattaatgc

SEQ ID NO: 11644 - DNA, 25 bp, Artificial Sequence
  Synthetic: FXN 3 reverse 9:69046323-69046352; As/LbCpf1
cagtgaattataacccattaatgca

SEQ ID NO: 11645 - DNA, 18 bp, Artificial Sequence
  Synthetic: FXN 3 reverse 9:69046324-69046346; As/LbCpf1
tcagtgaattataaccca

SEQ ID NO: 11646 - DNA, 19 bp, Artificial Sequence
  Synthetic: FXN 3 reverse 9:69046324-69046347; As/LbCpf1
tcagtgaattataacccat

SEQ ID NO: 11647 - DNA, 20 bp, Artificial Sequence
  Synthetic: FXN 3 reverse 9:69046324-69046348; As/LbCpf1
tcagtgaattataacccatt

SEQ ID NO: 11648 - DNA, 21 bp, Artificial Sequence
  Synthetic: FXN 3 reverse 9:69046324-69046349; As/LbCpf1
tcagtgaattataacccatta

SEQ ID NO: 11649 - DNA, 22 bp, Artificial Sequence
  Synthetic: FXN 3 reverse 9:69046324-69046350; As/LbCpf1
tcagtgaattataacccattaa

SEQ ID NO: 11650 - DNA, 23 bp, Artificial Sequence
  Synthetic: FXN 3 reverse 9:69046324-69046351; As/LbCpf1
tcagtgaattataacccattaat

SEQ ID NO: 11651 - DNA, 24 bp, Artificial Sequence
  Synthetic: FXN 3 reverse 9:69046324-69046352; As/LbCpf1
tcagtgaattataacccattaatg

SEQ ID NO: 11652 - DNA, 25 bp, Artificial Sequence
  Synthetic: FXN 3 reverse 9:69046324-69046353; As/LbCpf1
tcagtgaattataacccattaatgc

SEQ ID NO: 11653 - DNA, 18 bp, Artificial Sequence
  Synthetic: FXN 3 forward 9:69037346-69037368; AsCpf1-1
agctactccagaggctgc

SEQ ID NO: 11654 - DNA, 19 bp, Artificial Sequence
  Synthetic: FXN 3 forward 9:69037346-69037369; AsCpf1-1
agctactccagaggctgcg

SEQ ID NO: 11655 - DNA, 20 bp, Artificial Sequence
  Synthetic: FXN 3 forward 9:69037346-69037370; AsCpf1-1
agctactccagaggctgcgg

SEQ ID NO: 11656 - DNA, 21 bp, Artificial Sequence
  Synthetic: FXN 3 forward 9:69037346-69037371; AsCpf1-1
agctactccagaggctgcggc

SEQ ID NO: 11657 - DNA, 22 bp, Artificial Sequence
  Synthetic: FXN 3 forward 9:69037346-69037372; AsCpf1-1
agctactccagaggctgcggca

SEQ ID NO: 11658 - DNA, 23 bp, Artificial Sequence
  Synthetic: FXN 3 forward 9:69037346-69037373; AsCpf1-1
agctactccagaggctgcggcag

SEQ ID NO: 11659 - DNA, 24 bp, Artificial Sequence
  Synthetic: FXN 3 forward 9:69037346-69037374; AsCpf1-1
agctactccagaggctgcggcagg

SEQ ID NO: 11660 - DNA, 25 bp, Artificial Sequence
  Synthetic: FXN 3 forward 9:69037346-69037375; AsCpf1-1
agctactccagaggctgcggcagga

SEQ ID NO: 11661 - DNA, 18 bp, Artificial Sequence
  Synthetic: FXN 3 forward 9:69037356-69037378; AsCpf1-1
gaggctgcggcaggagaa

SEQ ID NO: 11662 - DNA, 19 bp, Artificial Sequence
  Synthetic: FXN 3 forward 9:69037356-69037379; AsCpf1-1
gaggctgcggcaggagaat

SEQ ID NO: 11663 - DNA, 20 bp, Artificial Sequence
  Synthetic: FXN 3 forward 9:69037356-69037380; AsCpf1-1
gaggctgcggcaggagaatc

SEQ ID NO: 11664 - DNA, 21 bp, Artificial Sequence
  Synthetic: FXN 3 forward 9:69037356-69037381; AsCpf1-1
gaggctgcggcaggagaatcg

SEQ ID NO: 11665 - DNA, 22 bp, Artificial Sequence
  Synthetic: FXN 3 forward 9:69037356-69037382; AsCpf1-1
gaggctgcggcaggagaatcgc

SEQ ID NO: 11666 - DNA, 23 bp, Artificial Sequence
  Synthetic: FXN 3 forward 9:69037356-69037383; AsCpf1-1
gaggctgcggcaggagaatcgct

SEQ ID NO: 11667 - DNA, 24 bp, Artificial Sequence
  Synthetic: FXN 3 forward 9:69037356-69037384; AsCpf1-1
gaggctgcggcaggagaatcgctt

SEQ ID NO: 11668 - DNA, 25 bp, Artificial Sequence
  Synthetic: FXN 3 forward 9:69037356-69037385; AsCpf1-1
gaggctgcggcaggagaatcgcttg

SEQ ID NO: 11669 - DNA, 18 bp, Artificial Sequence
  Synthetic: FXN 3 reverse 9:69037365-69037387; AsCpf1-1
gggctcaagcgattctcc

SEQ ID NO: 11670 - DNA, 19 bp, Artificial Sequence
  Synthetic: FXN 3 reverse 9:69037365-69037388; AsCpf1-1
gggctcaagcgattctcct

SEQ ID NO: 11671 - DNA, 20 bp, Artificial Sequence
  Synthetic: FXN 3 reverse 9:69037365-69037389; AsCpf1-1
gggctcaagcgattctcctg

SEQ ID NO: 11672 - DNA, 21 bp, Artificial Sequence
  Synthetic: FXN 3 reverse 9:69037365-69037390; AsCpf1-1
gggctcaagcgattctcctgc

SEQ ID NO: 11673 - DNA, 22 bp, Artificial Sequence
  Synthetic: FXN 3 reverse 9:69037365-69037391; AsCpf1-1
gggctcaagcgattctcctgcc

SEQ ID NO: 11674 - DNA, 23 bp, Artificial Sequence
  Synthetic: FXN 3 reverse 9:69037365-69037392; AsCpf1-1
gggctcaagcgattctcctgccg

SEQ ID NO: 11675 - DNA, 24 bp, Artificial Sequence
  Synthetic: FXN 3 reverse 9:69037365-69037393; AsCpf1-1
gggctcaagcgattctcctgccgc

SEQ ID NO: 11676 - DNA, 25 bp, Artificial Sequence
  Synthetic: FXN 3 reverse 9:69037365-69037394; AsCpf1-1
gggctcaagcgattctcctgccgca

SEQ ID NO: 11677 - DNA, 18 bp, Artificial Sequence
  Synthetic: FXN 3 forward 9:69037431-69037453; AsCpf1-1
gcctgggcgacagagcaa

SEQ ID NO: 11678 - DNA, 19 bp, Artificial Sequence
  Synthetic: FXN 3 forward 9:69037431-69037454; AsCpf1-1
gcctgggcgacagagcaag

SEQ ID NO: 11679 - DNA, 20 bp, Artificial Sequence
  Synthetic: FXN 3 forward 9:69037431-69037455; AsCpf1-1
gcctgggcgacagagcaaga

SEQ ID NO: 11680 - DNA, 21 bp, Artificial Sequence
  Synthetic: FXN 3 forward 9:69037431-69037456; AsCpf1-1
gcctgggcgacagagcaagac

SEQ ID NO: 11681 - DNA, 22 bp, Artificial Sequence
  Synthetic: FXN 3 forward 9:69037431-69037457; AsCpf1-1
gcctgggcgacagagcaagact

SEQ ID NO: 11682 - DNA, 23 bp, Artificial Sequence
  Synthetic: FXN 3 forward 9:69037431-69037458; AsCpf1-1
gcctgggcgacagagcaagactc

SEQ ID NO: 11683 - DNA, 24 bp, Artificial Sequence
  Synthetic: FXN 3 forward 9:69037431-69037459; AsCpf1-1
gcctgggcgacagagcaagactcc

SEQ ID NO: 11684 - DNA, 25 bp, Artificial Sequence
  Synthetic: FXN 3 forward 9:69037431-69037460; AsCpf1-1
gcctgggcgacagagcaagactccg

SEQ ID NO: 11685 - DNA, 18 bp, Artificial Sequence
  Synthetic: FXN 3 forward 9:69037456-69037478; AsCpf1-1
tctcaaaaaataataata

SEQ ID NO: 11686 - DNA, 19 bp, Artificial Sequence
  Synthetic: FXN 3 forward 9:69037456-69037479; AsCpf1-1
tctcaaaaaataataataa

SEQ ID NO: 11687 - DNA, 20 bp, Artificial Sequence
  Synthetic: FXN 3 forward 9:69037456-69037480; AsCpf1-1
tctcaaaaaataataataat

SEQ ID NO: 11688 - DNA, 21 bp, Artificial Sequence
  Synthetic: FXN 3 forward 9:69037456-69037481; AsCpf1-1
tctcaaaaaataataataata

SEQ ID NO: 11689 - DNA, 22 bp, Artificial Sequence
  Synthetic: FXN 3 forward 9:69037456-69037482; AsCpf1-1
tctcaaaaaataataataataa

SEQ ID NO: 11690 - DNA, 23 bp, Artificial Sequence
  Synthetic: FXN 3 forward 9:69037456-69037483; AsCpf1-1
tctcaaaaaataataataataaa

SEQ ID NO: 11691 - DNA, 24 bp, Artificial Sequence
  Synthetic: FXN 3 forward 9:69037456-69037484; AsCpf1-1
tctcaaaaaataataataataaat

SEQ ID NO: 11692 - DNA, 25 bp, Artificial Sequence
  Synthetic: FXN 3 forward 9:69037456-69037485; AsCpf1-1
tctcaaaaaataataataataaata

SEQ ID NO: 11693 - DNA, 18 bp, Artificial Sequence
  Synthetic: FXN 3 reverse 9:69037476-69037498; AsCpf1-1
ttttattttttattttta

SEQ ID NO: 11694 - DNA, 19 bp, Artificial Sequence
  Synthetic: FXN 3 reverse 9:69037476-69037499; AsCpf1-1
ttttattttttatttttat

SEQ ID NO: 11695 - DNA, 20 bp, Artificial Sequence
  Synthetic: FXN 3 reverse 9:69037476-69037500; AsCpf1-1
ttttattttttatttttatt

SEQ ID NO: 11696 - DNA, 21 bp, Artificial Sequence
  Synthetic: FXN 3 reverse 9:69037476-69037501; AsCpf1-1
ttttattttttatttttattt

SEQ ID NO: 11697 - DNA, 22 bp, Artificial Sequence
  Synthetic: FXN 3 reverse 9:69037476-69037502; AsCpf1-1
ttttattttttatttttattta

SEQ ID NO: 11698 - DNA, 23 bp, Artificial Sequence
  Synthetic: FXN 3 reverse 9:69037476-69037503; AsCpf1-1
ttttattttttatttttatttat

SEQ ID NO: 11699 - DNA, 24 bp, Artificial Sequence
  Synthetic: FXN 3 reverse 9:69037476-69037504; AsCpf1-1
ttttattttttatttttatttatt

SEQ ID NO: 11700 - DNA, 25 bp, Artificial Sequence
  Synthetic: FXN 3 reverse 9:69037476-69037505; AsCpf1-1
ttttattttttatttttatttatta

SEQ ID NO: 11701 - DNA, 18 bp, Artificial Sequence
  Synthetic: FXN 3 reverse 9:69037494-69037516; AsCpf1-1
gagatgctgggaaatcca

SEQ ID NO: 11702 - DNA, 19 bp, Artificial Sequence
  Synthetic: FXN 3 reverse 9:69037494-69037517; AsCpf1-1
gagatgctgggaaatccat

SEQ ID NO: 11703 - DNA, 20 bp, Artificial Sequence
  Synthetic: FXN 3 reverse 9:69037494-69037518; AsCpf1-1
gagatgctgggaaatccatt

SEQ ID NO: 11704 - DNA, 21 bp, Artificial Sequence
  Synthetic: FXN 3 reverse 9:69037494-69037519; AsCpf1-1
gagatgctgggaaatccattt

SEQ ID NO: 11705 - DNA, 22 bp, Artificial Sequence
  Synthetic: FXN 3 reverse 9:69037494-69037520; AsCpf1-1
gagatgctgggaaatccatttt

SEQ ID NO: 11706 - DNA, 23 bp, Artificial Sequence
  Synthetic: FXN 3 reverse 9:69037494-69037521; AsCpf1-1
gagatgctgggaaatccatttta

SEQ ID NO: 11707 - DNA, 24 bp, Artificial Sequence
  Synthetic: FXN 3 reverse 9:69037494-69037522; AsCpf1-1
gagatgctgggaaatccattttat

SEQ ID NO: 11708 - DNA, 25 bp, Artificial Sequence
  Synthetic: FXN 3 reverse 9:69037494-69037523; AsCpf1-1
gagatgctgggaaatccattttatt

SEQ ID NO: 11709 - DNA, 18 bp, Artificial Sequence
  Synthetic: FXN 3 reverse 9:69037495-69037517; AsCpf1-1
agagatgctgggaaatcc

SEQ ID NO: 11710 - DNA, 19 bp, Artificial Sequence
  Synthetic: FXN 3 reverse 9:69037495-69037518; AsCpf1-1
agagatgctgggaaatcca

SEQ ID NO: 11711 - DNA, 20 bp, Artificial Sequence
  Synthetic: FXN 3 reverse 9:69037495-69037519; AsCpf1-1
agagatgctgggaaatccat

SEQ ID NO: 11712 - DNA, 21 bp, Artificial Sequence
  Synthetic: FXN 3 reverse 9:69037495-69037520; AsCpf1-1
agagatgctgggaaatccatt

SEQ ID NO: 11713 - DNA, 22 bp, Artificial Sequence
  Synthetic: FXN 3 reverse 9:69037495-69037521; AsCpf1-1
agagatgctgggaaatccattt

SEQ ID NO: 11714 - DNA, 23 bp, Artificial Sequence
  Synthetic: FXN 3 reverse 9:69037495-69037522; AsCpf1-1
agagatgctgggaaatccatttt

SEQ ID NO: 11715 - DNA, 24 bp, Artificial Sequence
  Synthetic: FXN 3 reverse 9:69037495-69037523; AsCpf1-1
agagatgctgggaaatccatttta

SEQ ID NO: 11716 - DNA, 25 bp, Artificial Sequence
  Synthetic: FXN 3 reverse 9:69037495-69037524; AsCpf1-1
agagatgctgggaaatccattttat

SEQ ID NO: 11717 - DNA, 18 bp, Artificial Sequence
  Synthetic: FXN 3 forward 9:69037506-69037528; AsCpf1-1
cagcatctctggaaaaat

SEQ ID NO: 11718 - DNA, 19 bp, Artificial Sequence
  Synthetic: FXN 3 forward 9:69037506-69037529; AsCpf1-1
cagcatctctggaaaaata

SEQ ID NO: 11719 - DNA, 20 bp, Artificial Sequence
  Synthetic: FXN 3 forward 9:69037506-69037530; AsCpf1-1
cagcatctctggaaaaatag

SEQ ID NO: 11720 - DNA, 21 bp, Artificial Sequence
  Synthetic: FXN 3 forward 9:69037506-69037531; AsCpf1-1
cagcatctctggaaaaatagg

SEQ ID NO: 11721 - DNA, 22 bp, Artificial Sequence
  Synthetic: FXN 3 forward 9:69037506-69037532; AsCpf1-1
cagcatctctggaaaaataggc

SEQ ID NO: 11722 - DNA, 23 bp, Artificial Sequence
  Synthetic: FXN 3 forward 9:69037506-69037533; AsCpf1-1
cagcatctctggaaaaataggca

SEQ ID NO: 11723 - DNA, 24 bp, Artificial Sequence
  Synthetic: FXN 3 forward 9:69037506-69037534; AsCpf1-1
cagcatctctggaaaaataggcaa

SEQ ID NO: 11724 - DNA, 25 bp, Artificial Sequence
  Synthetic: FXN 3 forward 9:69037506-69037535; AsCpf1-1
cagcatctctggaaaaataggcaag

SEQ ID NO: 11725 - DNA, 18 bp, Artificial Sequence
  Synthetic: FXN 3 forward 9:69037507-69037529; AsCpf1-1
agcatctctggaaaaata

SEQ ID NO: 11726 - DNA, 19 bp, Artificial Sequence
  Synthetic: FXN 3 forward 9:69037507-69037530; AsCpf1-1
agcatctctggaaaaatag

SEQ ID NO: 11727 - DNA, 20 bp, Artificial Sequence
  Synthetic: FXN 3 forward 9:69037507-69037531; AsCpf1-1
agcatctctggaaaaatagg

SEQ ID NO: 11728 - DNA, 21 bp, Artificial Sequence
  Synthetic: FXN 3 forward 9:69037507-69037532; AsCpf1-1
agcatctctggaaaaataggc

SEQ ID NO: 11729 - DNA, 22 bp, Artificial Sequence
  Synthetic: FXN 3 forward 9:69037507-69037533; AsCpf1-1
agcatctctggaaaaataggca

SEQ ID NO: 11730 - DNA, 23 bp, Artificial Sequence
  Synthetic: FXN 3 forward 9:69037507-69037534; AsCpf1-1
agcatctctggaaaaataggcaa

SEQ ID NO: 11731 - DNA, 24 bp, Artificial Sequence
  Synthetic: FXN 3 forward 9:69037507-69037535; AsCpf1-1
agcatctctggaaaaataggcaag

SEQ ID NO: 11732 - DNA, 25 bp, Artificial Sequence
  Synthetic: FXN 3 forward 9:69037507-69037536; AsCpf1-1
agcatctctggaaaaataggcaagt

SEQ ID NO: 11733 - DNA, 18 bp, Artificial Sequence
  Synthetic: FXN 3 reverse 9:69037541-69037563; AsCpf1-1
tagaggagatctaaggac

SEQ ID NO: 11734 - DNA, 19 bp, Artificial Sequence
  Synthetic: FXN 3 reverse 9:69037541-69037564; AsCpf1-1
tagaggagatctaaggacc

SEQ ID NO: 11735 - DNA, 20 bp, Artificial Sequence
  Synthetic: FXN 3 reverse 9:69037541-69037565; AsCpf1-1
tagaggagatctaaggacca

SEQ ID NO: 11736 - DNA, 21 bp, Artificial Sequence
  Synthetic: FXN 3 reverse 9:69037541-69037566; AsCpf1-1
tagaggagatctaaggaccat

SEQ ID NO: 11737 - DNA, 22 bp, Artificial Sequence
  Synthetic: FXN 3 reverse 9:69037541-69037567; AsCpf1-1
tagaggagatctaaggaccatc

SEQ ID NO: 11738 - DNA, 23 bp, Artificial Sequence
  Synthetic: FXN 3 reverse 9:69037541-69037568; AsCpf1-1
tagaggagatctaaggaccatca

SEQ ID NO: 11739 - DNA, 24 bp, Artificial Sequence
  Synthetic: FXN 3 reverse 9:69037541-69037569; AsCpf1-1
tagaggagatctaaggaccatcat

SEQ ID NO: 11740 - DNA, 25 bp, Artificial Sequence
  Synthetic: FXN 3 reverse 9:69037541-69037570; AsCpf1-1
tagaggagatctaaggaccatcatg

SEQ ID NO: 11741 - DNA, 18 bp, Artificial Sequence
  Synthetic: FXN 3 reverse 9:69037617-69037639; AsCpf1-1
cacaggcaggggtggaag

SEQ ID NO: 11742 - DNA, 19 bp, Artificial Sequence
  Synthetic: FXN 3 reverse 9:69037617-69037640; AsCpf1-1
cacaggcaggggtggaagc

SEQ ID NO: 11743 - DNA, 20 bp, Artificial Sequence
  Synthetic: FXN 3 reverse 9:69037617-69037641; AsCpf1-1
cacaggcaggggtggaagcc

SEQ ID NO: 11744 - DNA, 21 bp, Artificial Sequence
  Synthetic: FXN 3 reverse 9:69037617-69037642; AsCpf1-1
cacaggcaggggtggaagccc

SEQ ID NO: 11745 - DNA, 22 bp, Artificial Sequence
  Synthetic: FXN 3 reverse 9:69037617-69037643; AsCpf1-1
cacaggcaggggtggaagccca

SEQ ID NO: 11746 - DNA, 23 bp, Artificial Sequence
  Synthetic: FXN 3 reverse 9:69037617-69037644; AsCpf1-1
cacaggcaggggtggaagcccaa

SEQ ID NO: 11747 - DNA, 24 bp, Artificial Sequence
  Synthetic: FXN 3 reverse 9:69037617-69037645; AsCpf1-1
cacaggcaggggtggaagcccaat

SEQ ID NO: 11748 - DNA, 25 bp, Artificial Sequence
  Synthetic: FXN 3 reverse 9:69037617-69037646; AsCpf1-1
cacaggcaggggtggaagcccaata

SEQ ID NO: 11749 - DNA, 18 bp, Artificial Sequence
  Synthetic: FXN 3 forward 9:69037625-69037647; AsCpf1-1
acccctgcctgtgtggac

SEQ ID NO: 11750 - DNA, 19 bp, Artificial Sequence
  Synthetic: FXN 3 forward 9:69037625-69037648; AsCpf1-1
acccctgcctgtgtggaca

SEQ ID NO: 11751 - DNA, 20 bp, Artificial Sequence
  Synthetic: FXN 3 forward 9:69037625-69037649; AsCpf1-1
acccctgcctgtgtggacag

SEQ ID NO: 11752 - DNA, 21 bp, Artificial Sequence
  Synthetic: FXN 3 forward 9:69037625-69037650; AsCpf1-1
acccctgcctgtgtggacagc

SEQ ID NO: 11753 - DNA, 22 bp, Artificial Sequence
  Synthetic: FXN 3 forward 9:69037625-69037651; AsCpf1-1
acccctgcctgtgtggacagca

SEQ ID NO: 11754 - DNA, 23 bp, Artificial Sequence
  Synthetic: FXN 3 forward 9:69037625-69037652; AsCpf1-1
acccctgcctgtgtggacagcat

SEQ ID NO: 11755 - DNA, 24 bp, Artificial Sequence
  Synthetic: FXN 3 forward 9:69037625-69037653; AsCpf1-1
acccctgcctgtgtggacagcatg

SEQ ID NO: 11756 - DNA, 25 bp, Artificial Sequence
  Synthetic: FXN 3 forward 9:69037625-69037654; AsCpf1-1
acccctgcctgtgtggacagcatgg

SEQ ID NO: 11757 - DNA, 18 bp, Artificial Sequence
  Synthetic: FXN 3 forward 9:69037626-69037648; AsCpf1-1
cccctgcctgtgtggaca

SEQ ID NO: 11758 - DNA, 19 bp, Artificial Sequence
  Synthetic: FXN 3 forward 9:69037626-69037649; AsCpf1-1
cccctgcctgtgtggacag

SEQ ID NO: 11759 - DNA, 20 bp, Artificial Sequence
  Synthetic: FXN 3 forward 9:69037626-69037650; AsCpf1-1
cccctgcctgtgtggacagc

SEQ ID NO: 11760 - DNA, 21 bp, Artificial Sequence
  Synthetic: FXN 3 forward 9:69037626-69037651; AsCpf1-1
cccctgcctgtgtggacagca

SEQ ID NO: 11761 - DNA, 22 bp, Artificial Sequence
  Synthetic: FXN 3 forward 9:69037626-69037652; AsCpf1-1
cccctgcctgtgtggacagcat

SEQ ID NO: 11762 - DNA, 23 bp, Artificial Sequence
  Synthetic: FXN 3 forward 9:69037626-69037653; AsCpf1-1
cccctgcctgtgtggacagcatg

SEQ ID NO: 11763 - DNA, 24 bp, Artificial Sequence
  Synthetic: FXN 3 forward 9:69037626-69037654; AsCpf1-1
cccctgcctgtgtggacagcatgg

SEQ ID NO: 11764 - DNA, 25 bp, Artificial Sequence
  Synthetic: FXN 3 forward 9:69037626-69037655; AsCpf1-1
cccctgcctgtgtggacagcatggg

SEQ ID NO: 11765 - DNA, 18 bp, Artificial Sequence
  Synthetic: FXN 3 reverse 9:69037694-69037716; AsCpf1-1
gcctgggcaacaagaggg

SEQ ID NO: 11766 - DNA, 19 bp, Artificial Sequence
  Synthetic: FXN 3 reverse 9:69037694-69037717; AsCpf1-1
gcctgggcaacaagaggga

SEQ ID NO: 11767 - DNA, 20 bp, Artificial Sequence
  Synthetic: FXN 3 reverse 9:69037694-69037718; AsCpf1-1
gcctgggcaacaagagggaa

SEQ ID NO: 11768 - DNA, 21 bp, Artificial Sequence
  Synthetic: FXN 3 reverse 9:69037694-69037719; AsCpf1-1
gcctgggcaacaagagggaaa

SEQ ID NO: 11769 - DNA, 22 bp, Artificial Sequence
  Synthetic: FXN 3 reverse 9:69037694-69037720; AsCpf1-1
gcctgggcaacaagagggaaac

SEQ ID NO: 11770 - DNA, 23 bp, Artificial Sequence
  Synthetic: FXN 3 reverse 9:69037694-69037721; AsCpf1-1
gcctgggcaacaagagggaaact

SEQ ID NO: 11771 - DNA, 24 bp, Artificial Sequence
  Synthetic: FXN 3 reverse 9:69037694-69037722; AsCpf1-1
gcctgggcaacaagagggaaactc

SEQ ID NO: 11772 - DNA, 25 bp, Artificial Sequence
  Synthetic: FXN 3 reverse 9:69037694-69037723; AsCpf1-1
gcctgggcaacaagagggaaactct

SEQ ID NO: 11773 - DNA, 18 bp, Artificial Sequence
  Synthetic: FXN 3 forward 9:69037699-69037721; AsCpf1-1
ctcttgttgcccaggctg

SEQ ID NO: 11774 - DNA, 19 bp, Artificial Sequence
  Synthetic: FXN 3 forward 9:69037699-69037722; AsCpf1-1
ctcttgttgcccaggctgg

SEQ ID NO: 11775 - DNA, 20 bp, Artificial Sequence
  Synthetic: FXN 3 forward 9:69037699-69037723; AsCpf1-1
ctcttgttgcccaggctgga

SEQ ID NO: 11776 - DNA, 21 bp, Artificial Sequence
  Synthetic: FXN 3 forward 9:69037699-69037724; AsCpf1-1
ctcttgttgcccaggctggag

SEQ ID NO: 11777 - DNA, 22 bp, Artificial Sequence
  Synthetic: FXN 3 forward 9:69037699-69037725; AsCpf1-1
ctcttgttgcccaggctggagt

SEQ ID NO: 11778 - DNA, 23 bp, Artificial Sequence
  Synthetic: FXN 3 forward 9:69037699-69037726; AsCpf1-1
ctcttgttgcccaggctggagtg

SEQ ID NO: 11779 - DNA, 24 bp, Artificial Sequence
  Synthetic: FXN 3 forward 9:69037699-69037727; AsCpf1-1
ctcttgttgcccaggctggagtgc

SEQ ID NO: 11780 - DNA, 25 bp, Artificial Sequence
  Synthetic: FXN 3 forward 9:69037699-69037728; AsCpf1-1
ctcttgttgcccaggctggagtgca

SEQ ID NO: 11781 - DNA, 18 bp, Artificial Sequence
  Synthetic: FXN 3 forward 9:69037700-69037722; AsCpf1-1
tcttgttgcccaggctgg

SEQ ID NO: 11782 - DNA, 19 bp, Artificial Sequence
  Synthetic: FXN 3 forward 9:69037700-69037723; AsCpf1-1
tcttgttgcccaggctgga

SEQ ID NO: 11783 - DNA, 20 bp, Artificial Sequence
  Synthetic: FXN 3 forward 9:69037700-69037724; AsCpf1-1
tcttgttgcccaggctggag

SEQ ID NO: 11784 - DNA, 21 bp, Artificial Sequence
  Synthetic: FXN 3 forward 9:69037700-69037725; AsCpf1-1
tcttgttgcccaggctggagt

SEQ ID NO: 11785 - DNA, 22 bp, Artificial Sequence
  Synthetic: FXN 3 forward 9:69037700-69037726; AsCpf1-1
tcttgttgcccaggctggagtg

SEQ ID NO: 11786 - DNA, 23 bp, Artificial Sequence
  Synthetic: FXN 3 forward 9:69037700-69037727; AsCpf1-1
tcttgttgcccaggctggagtgc

SEQ ID NO: 11787 - DNA, 24 bp, Artificial Sequence
  Synthetic: FXN 3 forward 9:69037700-69037728; AsCpf1-1
tcttgttgcccaggctggagtgca

SEQ ID NO: 11788 - DNA, 25 bp, Artificial Sequence
  Synthetic: FXN 3 forward 9:69037700-69037729; AsCpf1-1
tcttgttgcccaggctggagtgcag

SEQ ID NO: 11789 - DNA, 18 bp, Artificial Sequence
  Synthetic: FXN 3 forward 9:69037768-69037790; AsCpf1-1
agtgattctcctgcctca

SEQ ID NO: 11790 - DNA, 19 bp, Artificial Sequence
  Synthetic: FXN 3 forward 9:69037768-69037791; AsCpf1-1
agtgattctcctgcctcag

SEQ ID NO: 11791 - DNA, 20 bp, Artificial Sequence
  Synthetic: FXN 3 forward 9:69037768-69037792; AsCpf1-1
agtgattctcctgcctcagc

SEQ ID NO: 11792 - DNA, 21 bp, Artificial Sequence
  Synthetic: FXN 3 forward 9:69037768-69037793; AsCpf1-1
agtgattctcctgcctcagcc

SEQ ID NO: 11793 - DNA, 22 bp, Artificial Sequence
  Synthetic: FXN 3 forward 9:69037768-69037794; AsCpf1-1
agtgattctcctgcctcagcct

SEQ ID NO: 11794 - DNA, 23 bp, Artificial Sequence
  Synthetic: FXN 3 forward 9:69037768-69037795; AsCpf1-1
agtgattctcctgcctcagcctc

SEQ ID NO: 11795 - DNA, 24 bp, Artificial Sequence
  Synthetic: FXN 3 forward 9:69037768-69037796; AsCpf1-1
agtgattctcctgcctcagcctcc

SEQ ID NO: 11796 - DNA, 25 bp, Artificial Sequence
  Synthetic: FXN 3 forward 9:69037768-69037797; AsCpf1-1
agtgattctcctgcctcagcctccc

SEQ ID NO: 11797 - DNA, 18 bp, Artificial Sequence
  Synthetic: FXN 3 reverse 9:69037780-69037802; AsCpf1-1
agctactcgggaggctga

SEQ ID NO: 11798 - DNA, 19 bp, Artificial Sequence
  Synthetic: FXN 3 reverse 9:69037780-69037803; AsCpf1-1
agctactcgggaggctgag

SEQ ID NO: 11799 - DNA, 20 bp, Artificial Sequence
  Synthetic: FXN 3 reverse 9:69037780-69037804; AsCpf1-1
agctactcgggaggctgagg

SEQ ID NO: 11800 - DNA, 21 bp, Artificial Sequence
  Synthetic: FXN 3 reverse 9:69037780-69037805; AsCpf1-1
agctactcgggaggctgaggc

SEQ ID NO: 11801 - DNA, 22 bp, Artificial Sequence
  Synthetic: FXN 3 reverse 9:69037780-69037806; AsCpf1-1
agctactcgggaggctgaggca

SEQ ID NO: 11802 - DNA, 23 bp, Artificial Sequence
  Synthetic: FXN 3 reverse 9:69037780-69037807; AsCpf1-1
agctactcgggaggctgaggcag

SEQ ID NO: 11803 - DNA, 24 bp, Artificial Sequence
  Synthetic: FXN 3 reverse 9:69037780-69037808; AsCpf1-1
agctactcgggaggctgaggcagg

SEQ ID NO: 11804 - DNA, 25 bp, Artificial Sequence
  Synthetic: FXN 3 reverse 9:69037780-69037809; AsCpf1-1
agctactcgggaggctgaggcagga

SEQ ID NO: 11805 - DNA, 18 bp, Artificial Sequence
  Synthetic: FXN 3 forward 9:69037793-69037815; AsCpf1-1
gagtagctgggattatcg

SEQ ID NO: 11806 - DNA, 19 bp, Artificial Sequence
  Synthetic: FXN 3 forward 9:69037793-69037816; AsCpf1-1
gagtagctgggattatcgg

SEQ ID NO: 11807 - DNA, 20 bp, Artificial Sequence
  Synthetic: FXN 3 forward 9:69037793-69037817; AsCpf1-1
gagtagctgggattatcggc

SEQ ID NO: 11808 - DNA, 21 bp, Artificial Sequence
  Synthetic: FXN 3 forward 9:69037793-69037818; AsCpf1-1
gagtagctgggattatcggct

SEQ ID NO: 11809 - DNA, 22 bp, Artificial Sequence
  Synthetic: FXN 3 forward 9:69037793-69037819; AsCpf1-1
gagtagctgggattatcggcta

SEQ ID NO: 11810 - DNA, 23 bp, Artificial Sequence
  Synthetic: FXN 3 forward 9:69037793-69037820; AsCpf1-1
gagtagctgggattatcggctaa

SEQ ID NO: 11811 - DNA, 24 bp, Artificial Sequence
  Synthetic: FXN 3 forward 9:69037793-69037821; AsCpf1-1
gagtagctgggattatcggctaat

SEQ ID NO: 11812 - DNA, 25 bp, Artificial Sequence
  Synthetic: FXN 3 forward 9:69037793-69037822; AsCpf1-1
gagtagctgggattatcggctaatt

SEQ ID NO: 11813 - DNA, 18 bp, Artificial Sequence
  Synthetic: FXN 3 reverse 9:69037845-69037867; AsCpf1-1
agaccagcctgaccaaca

SEQ ID NO: 11814 - DNA, 19 bp, Artificial Sequence
  Synthetic: FXN 3 reverse 9:69037845-69037868; AsCpf1-1
agaccagcctgaccaacat

SEQ ID NO: 11815 - DNA, 20 bp, Artificial Sequence
  Synthetic: FXN 3 reverse 9:69037845-69037869; AsCpf1-1
agaccagcctgaccaacatg

SEQ ID NO: 11816 - DNA, 21 bp, Artificial Sequence
  Synthetic: FXN 3 reverse 9:69037845-69037870; AsCpf1-1
agaccagcctgaccaacatgg

SEQ ID NO: 11817 - DNA, 22 bp, Artificial Sequence
  Synthetic: FXN 3 reverse 9:69037845-69037871; AsCpf1-1
agaccagcctgaccaacatgga

SEQ ID NO: 11818 - DNA, 23 bp, Artificial Sequence
  Synthetic: FXN 3 reverse 9:69037845-69037872; AsCpf1-1
agaccagcctgaccaacatggag

SEQ ID NO: 11819 - DNA, 24 bp, Artificial Sequence
  Synthetic: FXN 3 reverse 9:69037845-69037873; AsCpf1-1
agaccagcctgaccaacatggaga

SEQ ID NO: 11820 - DNA, 25 bp, Artificial Sequence
  Synthetic: FXN 3 reverse 9:69037845-69037874; AsCpf1-1
agaccagcctgaccaacatggagaa

SEQ ID NO: 11821 - DNA, 18 bp, Artificial Sequence
  Synthetic: FXN 3 forward 9:69037848-69037870; AsCpf1-1
tgttggtcaggctggtct

SEQ ID NO: 11822 - DNA, 19 bp, Artificial Sequence
  Synthetic: FXN 3 forward 9:69037848-69037871; AsCpf1-1
tgttggtcaggctggtctc

SEQ ID NO: 11823 - DNA, 20 bp, Artificial Sequence
  Synthetic: FXN 3 forward 9:69037848-69037872; AsCpf1-1
tgttggtcaggctggtctcg

SEQ ID NO: 11824 - DNA, 21 bp, Artificial Sequence
  Synthetic: FXN 3 forward 9:69037848-69037873; AsCpf1-1
tgttggtcaggctggtctcga

SEQ ID NO: 11825 - DNA, 22 bp, Artificial Sequence
  Synthetic: FXN 3 forward 9:69037848-69037874; AsCpf1-1
tgttggtcaggctggtctcgaa

SEQ ID NO: 11826 - DNA, 23 bp, Artificial Sequence
  Synthetic: FXN 3 forward 9:69037848-69037875; AsCpf1-1
tgttggtcaggctggtctcgaac

SEQ ID NO: 11827 - DNA, 24 bp, Artificial Sequence
  Synthetic: FXN 3 forward 9:69037848-69037876; AsCpf1-1
tgttggtcaggctggtctcgaact

SEQ ID NO: 11828 - DNA, 25 bp, Artificial Sequence
  Synthetic: FXN 3 forward 9:69037848-69037877; AsCpf1-1
tgttggtcaggctggtctcgaactc

SEQ ID NO: 11829 - DNA, 18 bp, Artificial Sequence
  Synthetic: FXN 3 forward 9:69037875-69037897; AsCpf1-1
aacctcaggtgatccgcc

SEQ ID NO: 11830 - DNA, 19 bp, Artificial Sequence
  Synthetic: FXN 3 forward 9:69037875-69037898; AsCpf1-1
aacctcaggtgatccgccc

SEQ ID NO: 11831 - DNA, 20 bp, Artificial Sequence
  Synthetic: FXN 3 forward 9:69037875-69037899; AsCpf1-1
aacctcaggtgatccgccca

SEQ ID NO: 11832 - DNA, 21 bp, Artificial Sequence
  Synthetic: FXN 3 forward 9:69037875-69037900; AsCpf1-1
aacctcaggtgatccgcccac

SEQ ID NO: 11833 - DNA, 22 bp, Artificial Sequence
  Synthetic: FXN 3 forward 9:69037875-69037901; AsCpf1-1
aacctcaggtgatccgcccacc

SEQ ID NO: 11834 - DNA, 23 bp, Artificial Sequence
  Synthetic: FXN 3 forward 9:69037875-69037902; AsCpf1-1
aacctcaggtgatccgcccacct

SEQ ID NO: 11835 - DNA, 24 bp, Artificial Sequence
  Synthetic: FXN 3 forward 9:69037875-69037903; AsCpf1-1
aacctcaggtgatccgcccacctc

SEQ ID NO: 11836 - DNA, 25 bp, Artificial Sequence
  Synthetic: FXN 3 forward 9:69037875-69037904; AsCpf1-1
aacctcaggtgatccgcccacctcg

SEQ ID NO: 11837 - DNA, 18 bp, Artificial Sequence
  Synthetic: FXN 3 forward 9:69037891-69037913; AsCpf1-1
cccacctcgccctcccaa

SEQ ID NO: 11838 - DNA, 19 bp, Artificial Sequence
  Synthetic: FXN 3 forward 9:69037891-69037914; AsCpf1-1
cccacctcgccctcccaaa

SEQ ID NO: 11839 - DNA, 20 bp, Artificial Sequence
  Synthetic: FXN 3 forward 9:69037891-69037915; AsCpf1-1
cccacctcgccctcccaaag

SEQ ID NO: 11840 - DNA, 21 bp, Artificial Sequence
  Synthetic: FXN 3 forward 9:69037891-69037916; AsCpf1-1
cccacctcgccctcccaaagt

SEQ ID NO: 11841 - DNA, 22 bp, Artificial Sequence
  Synthetic: FXN 3 forward 9:69037891-69037917; AsCpf1-1
cccacctcgccctcccaaagtg

SEQ ID NO: 11842 - DNA, 23 bp, Artificial Sequence
  Synthetic: FXN 3 forward 9:69037891-69037918; AsCpf1-1
cccacctcgccctcccaaagtgc

SEQ ID NO: 11843 - DNA, 24 bp, Artificial Sequence
  Synthetic: FXN 3 forward 9:69037891-69037919; AsCpf1-1
cccacctcgccctcccaaagtgct

SEQ ID NO: 11844 - DNA, 25 bp, Artificial Sequence
  Synthetic: FXN 3 forward 9:69037891-69037920; AsCpf1-1
cccacctcgccctcccaaagtgctg

SEQ ID NO: 11845 - DNA, 18 bp, Artificial Sequence
  Synthetic: FXN 3 reverse 9:69037893-69037915; AsCpf1-1
gcactttgggagggcgag

SEQ ID NO: 11846 - DNA, 19 bp, Artificial Sequence
  Synthetic: FXN 3 reverse 9:69037893-69037916; AsCpf1-1
gcactttgggagggcgagg

SEQ ID NO: 11847 - DNA, 20 bp, Artificial Sequence
  Synthetic: FXN 3 reverse 9:69037893-69037917; AsCpf1-1
gcactttgggagggcgaggt

SEQ ID NO: 11848 - DNA, 21 bp, Artificial Sequence
  Synthetic: FXN 3 reverse 9:69037893-69037918; AsCpf1-1
gcactttgggagggcgaggtg

SEQ ID NO: 11849 - DNA, 22 bp, Artificial Sequence
  Synthetic: FXN 3 reverse 9:69037893-69037919; AsCpf1-1
gcactttgggagggcgaggtgg

SEQ ID NO: 11850 - DNA, 23 bp, Artificial Sequence
  Synthetic: FXN 3 reverse 9:69037893-69037920; AsCpf1-1
gcactttgggagggcgaggtggg

SEQ ID NO: 11851 - DNA, 24 bp, Artificial Sequence
  Synthetic: FXN 3 reverse 9:69037893-69037921; AsCpf1-1
gcactttgggagggcgaggtgggc

SEQ ID NO: 11852 - DNA, 25 bp, Artificial Sequence
  Synthetic: FXN 3 reverse 9:69037893-69037922; AsCpf1-1
gcactttgggagggcgaggtgggcg

SEQ ID NO: 11853 - DNA, 18 bp, Artificial Sequence
  Synthetic: FXN 3 reverse 9:69037894-69037916; AsCpf1-1
agcactttgggagggcga

SEQ ID NO: 11854 - DNA, 19 bp, Artificial Sequence
  Synthetic: FXN 3 reverse 9:69037894-69037917; AsCpf1-1
agcactttgggagggcgag

SEQ ID NO: 11855 - DNA, 20 bp, Artificial Sequence
  Synthetic: FXN 3 reverse 9:69037894-69037918; AsCpf1-1
agcactttgggagggcgagg

SEQ ID NO: 11856 - DNA, 21 bp, Artificial Sequence
  Synthetic: FXN 3 reverse 9:69037894-69037919; AsCpf1-1
agcactttgggagggcgaggt

SEQ ID NO: 11857 - DNA, 22 bp, Artificial Sequence
  Synthetic: FXN 3 reverse 9:69037894-69037920; AsCpf1-1
agcactttgggagggcgaggtg

SEQ ID NO: 11858 - DNA, 23 bp, Artificial Sequence
  Synthetic: FXN 3 reverse 9:69037894-69037921; AsCpf1-1
agcactttgggagggcgaggtgg

SEQ ID NO: 11859 - DNA, 24 bp, Artificial Sequence
  Synthetic: FXN 3 reverse 9:69037894-69037922; AsCpf1-1
agcactttgggagggcgaggtggg

SEQ ID NO: 11860 - DNA, 25 bp, Artificial Sequence
  Synthetic: FXN 3 reverse 9:69037894-69037923; AsCpf1-1
agcactttgggagggcgaggtgggc

SEQ ID NO: 11861 - DNA, 18 bp, Artificial Sequence
  Synthetic: FXN 3 forward 9:69037907-69037929; AsCpf1-1
aaagtgctggaattacag

SEQ ID NO: 11862 - DNA, 19 bp, Artificial Sequence
  Synthetic: FXN 3 forward 9:69037907-69037930; AsCpf1-1
aaagtgctggaattacagg

SEQ ID NO: 11863 - DNA, 20 bp, Artificial Sequence
  Synthetic: FXN 3 forward 9:69037907-69037931; AsCpf1-1
aaagtgctggaattacaggc

SEQ ID NO: 11864 - DNA, 21 bp, Artificial Sequence
  Synthetic: FXN 3 forward 9:69037907-69037932; AsCpf1-1
aaagtgctggaattacaggcg

SEQ ID NO: 11865 - DNA, 22 bp, Artificial Sequence
  Synthetic: FXN 3 forward 9:69037907-69037933; AsCpf1-1
aaagtgctggaattacaggcgt

SEQ ID NO: 11866 - DNA, 23 bp, Artificial Sequence
  Synthetic: FXN 3 forward 9:69037907-69037934; AsCpf1-1
aaagtgctggaattacaggcgtg

SEQ ID NO: 11867 - DNA, 24 bp, Artificial Sequence
  Synthetic: FXN 3 forward 9:69037907-69037935; AsCpf1-1
aaagtgctggaattacaggcgtga

SEQ ID NO: 11868 - DNA, 25 bp, Artificial Sequence
  Synthetic: FXN 3 forward 9:69037907-69037936; AsCpf1-1
aaagtgctggaattacaggcgtgag

SEQ ID NO: 11869 - DNA, 18 bp, Artificial Sequence
  Synthetic: FXN 3 reverse 9:69038049-69038071; AsCpf1-1
cctcctgggcggcagcgc

SEQ ID NO: 11870 - DNA, 19 bp, Artificial Sequence
  Synthetic: FXN 3 reverse 9:69038049-69038072; AsCpf1-1
cctcctgggcggcagcgcc

SEQ ID NO: 11871 - DNA, 20 bp, Artificial Sequence
  Synthetic: FXN 3 reverse 9:69038049-69038073; AsCpf1-1
cctcctgggcggcagcgcca

SEQ ID NO: 11872 - DNA, 21 bp, Artificial Sequence
  Synthetic: FXN 3 reverse 9:69038049-69038074; AsCpf1-1
cctcctgggcggcagcgccaa

SEQ ID NO: 11873 - DNA, 22 bp, Artificial Sequence
  Synthetic: FXN 3 reverse 9:69038049-69038075; AsCpf1-1
cctcctgggcggcagcgccaag

SEQ ID NO: 11874 - DNA, 23 bp, Artificial Sequence
  Synthetic: FXN 3 reverse 9:69038049-69038076; AsCpf1-1
cctcctgggcggcagcgccaagt

SEQ ID NO: 11875 - DNA, 24 bp, Artificial Sequence
  Synthetic: FXN 3 reverse 9:69038049-69038077; AsCpf1-1
cctcctgggcggcagcgccaagtt

SEQ ID NO: 11876 - DNA, 25 bp, Artificial Sequence
  Synthetic: FXN 3 reverse 9:69038049-69038078; AsCpf1-1
cctcctgggcggcagcgccaagttg

SEQ ID NO: 11877 - DNA, 18 bp, Artificial Sequence
  Synthetic: FXN 3 reverse 9:69038064-69038086; AsCpf1-1
gaaacccagtgtccacct

SEQ ID NO: 11878 - DNA, 19 bp, Artificial Sequence
  Synthetic: FXN 3 reverse 9:69038064-69038087; AsCpf1-1
gaaacccagtgtccacctc

SEQ ID NO: 11879 - DNA, 20 bp, Artificial Sequence
  Synthetic: FXN 3 reverse 9:69038064-69038088; AsCpf1-1
gaaacccagtgtccacctcc

SEQ ID NO: 11880 - DNA, 21 bp, Artificial Sequence
  Synthetic: FXN 3 reverse 9:69038064-69038089; AsCpf1-1
gaaacccagtgtccacctcct

SEQ ID NO: 11881 - DNA, 22 bp, Artificial Sequence
  Synthetic: FXN 3 reverse 9:69038064-69038090; AsCpf1-1
gaaacccagtgtccacctcctg

SEQ ID NO: 11882 - DNA, 23 bp, Artificial Sequence
  Synthetic: FXN 3 reverse 9:69038064-69038091; AsCpf1-1
gaaacccagtgtccacctcctgg

SEQ ID NO: 11883 - DNA, 24 bp, Artificial Sequence
  Synthetic: FXN 3 reverse 9:69038064-69038092; AsCpf1-1
gaaacccagtgtccacctcctggg

SEQ ID NO: 11884 - DNA, 25 bp, Artificial Sequence
  Synthetic: FXN 3 reverse 9:69038064-69038093; AsCpf1-1
gaaacccagtgtccacctcctgggc

SEQ ID NO: 11885 - DNA, 18 bp, Artificial Sequence
  Synthetic: FXN 3 reverse 9:69038117-69038139; AsCpf1-1
gtatagaaaaaaagaggc

SEQ ID NO: 11886 - DNA, 19 bp, Artificial Sequence
  Synthetic: FXN 3 reverse 9:69038117-69038140; AsCpf1-1
gtatagaaaaaaagaggcc

SEQ ID NO: 11887 - DNA, 20 bp, Artificial Sequence
  Synthetic: FXN 3 reverse 9:69038117-69038141; AsCpf1-1
gtatagaaaaaaagaggccc

SEQ ID NO: 11888 - DNA, 21 bp, Artificial Sequence
  Synthetic: FXN 3 reverse 9:69038117-69038142; AsCpf1-1
gtatagaaaaaaagaggccca

SEQ ID NO: 11889 - DNA, 22 bp, Artificial Sequence
  Synthetic: FXN 3 reverse 9:69038117-69038143; AsCpf1-1
gtatagaaaaaaagaggcccag

SEQ ID NO: 11890 - DNA, 23 bp, Artificial Sequence
  Synthetic: FXN 3 reverse 9:69038117-69038144; AsCpf1-1
gtatagaaaaaaagaggcccagc

SEQ ID NO: 11891 - DNA, 24 bp, Artificial Sequence
  Synthetic: FXN 3 reverse 9:69038117-69038145; AsCpf1-1
gtatagaaaaaaagaggcccagct

SEQ ID NO: 11892 - DNA, 25 bp, Artificial Sequence
  Synthetic: FXN 3 reverse 9:69038117-69038146; AsCpf1-1
gtatagaaaaaaagaggcccagctg

SEQ ID NO: 11893 - DNA, 18 bp, Artificial Sequence
  Synthetic: FXN 3 forward 9:69038172-69038194; AsCpf1-1
atagttcccttgcacatc

SEQ ID NO: 11894 - DNA, 19 bp, Artificial Sequence
  Synthetic: FXN 3 forward 9:69038172-69038195; AsCpf1-1
atagttcccttgcacatct

SEQ ID NO: 11895 - DNA, 20 bp, Artificial Sequence
  Synthetic: FXN 3 forward 9:69038172-69038196; AsCpf1-1
atagttcccttgcacatctt

SEQ ID NO: 11896 - DNA, 21 bp, Artificial Sequence
  Synthetic: FXN 3 forward 9:69038172-69038197; AsCpf1-1
atagttcccttgcacatcttg

SEQ ID NO: 11897 - DNA, 22 bp, Artificial Sequence
  Synthetic: FXN 3 forward 9:69038172-69038198; AsCpf1-1
atagttcccttgcacatcttgg

SEQ ID NO: 11898 - DNA, 23 bp, Artificial Sequence
  Synthetic: FXN 3 forward 9:69038172-69038199; AsCpf1-1
atagttcccttgcacatcttggg

SEQ ID NO: 11899 - DNA, 24 bp, Artificial Sequence
  Synthetic: FXN 3 forward 9:69038172-69038200; AsCpf1-1
atagttcccttgcacatcttgggt

SEQ ID NO: 11900 - DNA, 25 bp, Artificial Sequence
  Synthetic: FXN 3 forward 9:69038172-69038201; AsCpf1-1
atagttcccttgcacatcttgggta

SEQ ID NO: 11901 - DNA, 18 bp, Artificial Sequence
  Synthetic: FXN 3 forward 9:69038173-69038195; AsCpf1-1
tagttcccttgcacatct

SEQ ID NO: 11902 - DNA, 19 bp, Artificial Sequence
  Synthetic: FXN 3 forward 9:69038173-69038196; AsCpf1-1
tagttcccttgcacatctt

SEQ ID NO: 11903 - DNA, 20 bp, Artificial Sequence
  Synthetic: FXN 3 forward 9:69038173-69038197; AsCpf1-1
tagttcccttgcacatcttg

SEQ ID NO: 11904 - DNA, 21 bp, Artificial Sequence
  Synthetic: FXN 3 forward 9:69038173-69038198; AsCpf1-1
tagttcccttgcacatcttgg

SEQ ID NO: 11905 - DNA, 22 bp, Artificial Sequence
  Synthetic: FXN 3 forward 9:69038173-69038199; AsCpf1-1
tagttcccttgcacatcttggg

SEQ ID NO: 11906 - DNA, 23 bp, Artificial Sequence
  Synthetic: FXN 3 forward 9:69038173-69038200; AsCpf1-1
tagttcccttgcacatcttgggt

SEQ ID NO: 11907 - DNA, 24 bp, Artificial Sequence
  Synthetic: FXN 3 forward 9:69038173-69038201; AsCpf1-1
tagttcccttgcacatcttgggta

SEQ ID NO: 11908 - DNA, 25 bp, Artificial Sequence
  Synthetic: FXN 3 forward 9:69038173-69038202; AsCpf1-1
tagttcccttgcacatcttgggtat

SEQ ID NO: 11909 - DNA, 18 bp, Artificial Sequence
  Synthetic: FXN 3 forward 9:69038180-69038202; AsCpf1-1
cttgcacatcttgggtat

SEQ ID NO: 11910 - DNA, 19 bp, Artificial Sequence
  Synthetic: FXN 3 forward 9:69038180-69038203; AsCpf1-1
cttgcacatcttgggtatt

SEQ ID NO: 11911 - DNA, 20 bp, Artificial Sequence
  Synthetic: FXN 3 forward 9:69038180-69038204; AsCpf1-1
cttgcacatcttgggtattt

SEQ ID NO: 11912 - DNA, 21 bp, Artificial Sequence
  Synthetic: FXN 3 forward 9:69038180-69038205; AsCpf1-1
cttgcacatcttgggtatttg

SEQ ID NO: 11913 - DNA, 22 bp, Artificial Sequence
  Synthetic: FXN 3 forward 9:69038180-69038206; AsCpf1-1
cttgcacatcttgggtatttga

SEQ ID NO: 11914 - DNA, 23 bp, Artificial Sequence
  Synthetic: FXN 3 forward 9:69038180-69038207; AsCpf1-1
cttgcacatcttgggtatttgag

SEQ ID NO: 11915 - DNA, 24 bp, Artificial Sequence
  Synthetic: FXN 3 forward 9:69038180-69038208; AsCpf1-1
cttgcacatcttgggtatttgagg

SEQ ID NO: 11916 - DNA, 25 bp, Artificial Sequence
  Synthetic: FXN 3 forward 9:69038180-69038209; AsCpf1-1
cttgcacatcttgggtatttgagga

SEQ ID NO: 11917 - DNA, 18 bp, Artificial Sequence
  Synthetic: FXN 3 forward 9:69038181-69038203; AsCpf1-1
ttgcacatcttgggtatt

SEQ ID NO: 11918 - DNA, 19 bp, Artificial Sequence
  Synthetic: FXN 3 forward 9:69038181-69038204; AsCpf1-1
ttgcacatcttgggtattt

SEQ ID NO: 11919 - DNA, 20 bp, Artificial Sequence
  Synthetic: FXN 3 forward 9:69038181-69038205; AsCpf1-1
ttgcacatcttgggtatttg

SEQ ID NO: 11920 - DNA, 21 bp, Artificial Sequence
  Synthetic: FXN 3 forward 9:69038181-69038206; AsCpf1-1
ttgcacatcttgggtatttga

SEQ ID NO: 11921 - DNA, 22 bp, Artificial Sequence
  Synthetic: FXN 3 forward 9:69038181-69038207; AsCpf1-1
ttgcacatcttgggtatttgag

SEQ ID NO: 11922 - DNA, 23 bp, Artificial Sequence
  Synthetic: FXN 3 forward 9:69038181-69038208; AsCpf1-1
ttgcacatcttgggtatttgagg

SEQ ID NO: 11923 - DNA, 24 bp, Artificial Sequence
  Synthetic: FXN 3 forward 9:69038181-69038209; AsCpf1-1
ttgcacatcttgggtatttgagga

SEQ ID NO: 11924 - DNA, 25 bp, Artificial Sequence
  Synthetic: FXN 3 forward 9:69038181-69038210; AsCpf1-1
ttgcacatcttgggtatttgaggag

SEQ ID NO: 11925 - DNA, 18 bp, Artificial Sequence
  Synthetic: FXN 3 reverse 9:69038251-69038273; AsCpf1-1
ggacagtcagggctttaa

SEQ ID NO: 11926 - DNA, 19 bp, Artificial Sequence
  Synthetic: FXN 3 reverse 9:69038251-69038274; AsCpf1-1
ggacagtcagggctttaaa

SEQ ID NO: 11927 - DNA, 20 bp, Artificial Sequence
  Synthetic: FXN 3 reverse 9:69038251-69038275; AsCpf1-1
ggacagtcagggctttaaaa

SEQ ID NO: 11928 - DNA, 21 bp, Artificial Sequence
  Synthetic: FXN 3 reverse 9:69038251-69038276; AsCpf1-1
ggacagtcagggctttaaaat

SEQ ID NO: 11929 - DNA, 22 bp, Artificial Sequence
  Synthetic: FXN 3 reverse 9:69038251-69038277; AsCpf1-1
ggacagtcagggctttaaaata

SEQ ID NO: 11930 - DNA, 23 bp, Artificial Sequence
  Synthetic: FXN 3 reverse 9:69038251-69038278; AsCpf1-1
ggacagtcagggctttaaaataa

SEQ ID NO: 11931 - DNA, 24 bp, Artificial Sequence
  Synthetic: FXN 3 reverse 9:69038251-69038279; AsCpf1-1
ggacagtcagggctttaaaataat

SEQ ID NO: 11932 - DNA, 25 bp, Artificial Sequence
  Synthetic: FXN 3 reverse 9:69038251-69038280; AsCpf1-1
ggacagtcagggctttaaaataatt

SEQ ID NO: 11933 - DNA, 18 bp, Artificial Sequence
  Synthetic: FXN 3 forward 9:69038292-69038314; AsCpf1-1
cctggtctccaaaattca

SEQ ID NO: 11934 - DNA, 19 bp, Artificial Sequence
  Synthetic: FXN 3 forward 9:69038292-69038315; AsCpf1-1
cctggtctccaaaattcat

SEQ ID NO: 11935 - DNA, 20 bp, Artificial Sequence
  Synthetic: FXN 3 forward 9:69038292-69038316; AsCpf1-1
cctggtctccaaaattcatc

SEQ ID NO: 11936 - DNA, 21 bp, Artificial Sequence
  Synthetic: FXN 3 forward 9:69038292-69038317; AsCpf1-1
cctggtctccaaaattcatca

SEQ ID NO: 11937 - DNA, 22 bp, Artificial Sequence
  Synthetic: FXN 3 forward 9:69038292-69038318; AsCpf1-1
cctggtctccaaaattcatcag

SEQ ID NO: 11938 - DNA, 23 bp, Artificial Sequence
  Synthetic: FXN 3 forward 9:69038292-69038319; AsCpf1-1
cctggtctccaaaattcatcaga

SEQ ID NO: 11939 - DNA, 24 bp, Artificial Sequence
  Synthetic: FXN 3 forward 9:69038292-69038320; AsCpf1-1
cctggtctccaaaattcatcagaa

SEQ ID NO: 11940 - DNA, 25 bp, Artificial Sequence
  Synthetic: FXN 3 forward 9:69038292-69038321; AsCpf1-1
cctggtctccaaaattcatcagaaa

SEQ ID NO: 11941 - DNA, 18 bp, Artificial Sequence
  Synthetic: FXN 3 forward 9:69038303-69038325; AsCpf1-1
aaattcatcagaaactga

SEQ ID NO: 11942 - DNA, 19 bp, Artificial Sequence
  Synthetic: FXN 3 forward 9:69038303-69038326; AsCpf1-1
aaattcatcagaaactgag

SEQ ID NO: 11943 - DNA, 20 bp, Artificial Sequence
  Synthetic: FXN 3 forward 9:69038303-69038327; AsCpf1-1
aaattcatcagaaactgagt

SEQ ID NO: 11944 - DNA, 21 bp, Artificial Sequence
  Synthetic: FXN 3 forward 9:69038303-69038328; AsCpf1-1
aaattcatcagaaactgagtt

SEQ ID NO: 11945 - DNA, 22 bp, Artificial Sequence
  Synthetic: FXN 3 forward 9:69038303-69038329; AsCpf1-1
aaattcatcagaaactgagttc

SEQ ID NO: 11946 - DNA, 23 bp, Artificial Sequence
  Synthetic: FXN 3 forward 9:69038303-69038330; AsCpf1-1
aaattcatcagaaactgagttca

SEQ ID NO: 11947 - DNA, 24 bp, Artificial Sequence
  Synthetic: FXN 3 forward 9:69038303-69038331; AsCpf1-1
aaattcatcagaaactgagttcac

SEQ ID NO: 11948 - DNA, 25 bp, Artificial Sequence
  Synthetic: FXN 3 forward 9:69038303-69038332; AsCpf1-1
aaattcatcagaaactgagttcact

SEQ ID NO: 11949 - DNA, 18 bp, Artificial Sequence
  Synthetic: FXN 3 reverse 9:69038307-69038329; AsCpf1-1
agtgaactcagtttctga

SEQ ID NO: 11950 - DNA, 19 bp, Artificial Sequence
  Synthetic: FXN 3 reverse 9:69038307-69038330; AsCpf1-1
agtgaactcagtttctgat

SEQ ID NO: 11951 - DNA, 20 bp, Artificial Sequence
  Synthetic: FXN 3 reverse 9:69038307-69038331; AsCpf1-1
agtgaactcagtttctgatg

SEQ ID NO: 11952 - DNA, 21 bp, Artificial Sequence
  Synthetic: FXN 3 reverse 9:69038307-69038332; AsCpf1-1
agtgaactcagtttctgatga

SEQ ID NO: 11953 - DNA, 22 bp, Artificial Sequence
  Synthetic: FXN 3 reverse 9:69038307-69038333; AsCpf1-1
agtgaactcagtttctgatgaa

SEQ ID NO: 11954 - DNA, 23 bp, Artificial Sequence
  Synthetic: FXN 3 reverse 9:69038307-69038334; AsCpf1-1
agtgaactcagtttctgatgaat

SEQ ID NO: 11955 - DNA, 24 bp, Artificial Sequence
  Synthetic: FXN 3 reverse 9:69038307-69038335; AsCpf1-1
agtgaactcagtttctgatgaatt

SEQ ID NO: 11956 - DNA, 25 bp, Artificial Sequence
  Synthetic: FXN 3 reverse 9:69038307-69038336; AsCpf1-1
agtgaactcagtttctgatgaattt

SEQ ID NO: 11957 - DNA, 18 bp, Artificial Sequence
  Synthetic: FXN 3 forward 9:69038310-69038332; AsCpf1-1
tcagaaactgagttcact

SEQ ID NO: 11958 - DNA, 19 bp, Artificial Sequence
  Synthetic: FXN 3 forward 9:69038310-69038333; AsCpf1-1
tcagaaactgagttcactt

SEQ ID NO: 11959 - DNA, 20 bp, Artificial Sequence
  Synthetic: FXN 3 forward 9:69038310-69038334; AsCpf1-1
tcagaaactgagttcacttg

SEQ ID NO: 11960 - DNA, 21 bp, Artificial Sequence
  Synthetic: FXN 3 forward 9:69038310-69038335; AsCpf1-1
tcagaaactgagttcacttga

SEQ ID NO: 11961 - DNA, 22 bp, Artificial Sequence
  Synthetic: FXN 3 forward 9:69038310-69038336; AsCpf1-1
tcagaaactgagttcacttgaa

SEQ ID NO: 11962 - DNA, 23 bp, Artificial Sequence
  Synthetic: FXN 3 forward 9:69038310-69038337; AsCpf1-1
tcagaaactgagttcacttgaag

SEQ ID NO: 11963 - DNA, 24 bp, Artificial Sequence
  Synthetic: FXN 3 forward 9:69038310-69038338; AsCpf1-1
tcagaaactgagttcacttgaagg

SEQ ID NO: 11964 - DNA, 25 bp, Artificial Sequence
  Synthetic: FXN 3 forward 9:69038310-69038339; AsCpf1-1
tcagaaactgagttcacttgaaggc

SEQ ID NO: 11965 - DNA, 18 bp, Artificial Sequence
  Synthetic: FXN 3 forward 9:69038326-69038348; AsCpf1-1
cttgaaggcctcttcccc

SEQ ID NO: 11966 - DNA, 19 bp, Artificial Sequence
  Synthetic: FXN 3 forward 9:69038326-69038349; AsCpf1-1
cttgaaggcctcttcccca

SEQ ID NO: 11967 - DNA, 20 bp, Artificial Sequence
  Synthetic: FXN 3 forward 9:69038326-69038350; AsCpf1-1
cttgaaggcctcttccccac

SEQ ID NO: 11968 - DNA, 21 bp, Artificial Sequence
  Synthetic: FXN 3 forward 9:69038326-69038351; AsCpf1-1
cttgaaggcctcttccccacc

SEQ ID NO: 11969 - DNA, 22 bp, Artificial Sequence
  Synthetic: FXN 3 forward 9:69038326-69038352; AsCpf1-1
cttgaaggcctcttccccaccc

SEQ ID NO: 11970 - DNA, 23 bp, Artificial Sequence
  Synthetic: FXN 3 forward 9:69038326-69038353; AsCpf1-1
cttgaaggcctcttccccaccct

SEQ ID NO: 11971 - DNA, 24 bp, Artificial Sequence
  Synthetic: FXN 3 forward 9:69038326-69038354; AsCpf1-1
cttgaaggcctcttccccaccctt

SEQ ID NO: 11972 - DNA, 25 bp, Artificial Sequence
  Synthetic: FXN 3 forward 9:69038326-69038355; AsCpf1-1
cttgaaggcctcttccccacccttt

SEQ ID NO: 11973 - DNA, 18 bp, Artificial Sequence
  Synthetic: FXN 3 forward 9:69038342-69038364; AsCpf1-1
ccacccttttctccaccc

SEQ ID NO: 11974 - DNA, 19 bp, Artificial Sequence
  Synthetic: FXN 3 forward 9:69038342-69038365; AsCpf1-1
ccacccttttctccacccc

SEQ ID NO: 11975 - DNA, 20 bp, Artificial Sequence
  Synthetic: FXN 3 forward 9:69038342-69038366; AsCpf1-1
ccacccttttctccacccct

SEQ ID NO: 11976 - DNA, 21 bp, Artificial Sequence
  Synthetic: FXN 3 forward 9:69038342-69038367; AsCpf1-1
ccacccttttctccacccctt

SEQ ID NO: 11977 - DNA, 22 bp, Artificial Sequence
  Synthetic: FXN 3 forward 9:69038342-69038368; AsCpf1-1
ccacccttttctccaccccttg

SEQ ID NO: 11978 - DNA, 23 bp, Artificial Sequence
  Synthetic: FXN 3 forward 9:69038342-69038369; AsCpf1-1
ccacccttttctccaccccttgc

SEQ ID NO: 11979 - DNA, 24 bp, Artificial Sequence
  Synthetic: FXN 3 forward 9:69038342-69038370; AsCpf1-1
ccacccttttctccaccccttgca

SEQ ID NO: 11980 - DNA, 25 bp, Artificial Sequence
  Synthetic: FXN 3 forward 9:69038342-69038371; AsCpf1-1
ccacccttttctccaccccttgcat

SEQ ID NO: 11981 - DNA, 18 bp, Artificial Sequence
  Synthetic: FXN 3 forward 9:69038343-69038365; AsCpf1-1
cacccttttctccacccc

SEQ ID NO: 11982 - DNA, 19 bp, Artificial Sequence
  Synthetic: FXN 3 forward 9:69038343-69038366; AsCpf1-1
cacccttttctccacccct

SEQ ID NO: 11983 - DNA, 20 bp, Artificial Sequence
  Synthetic: FXN 3 forward 9:69038343-69038367; AsCpf1-1
cacccttttctccacccctt

SEQ ID NO: 11984 - DNA, 21 bp, Artificial Sequence
  Synthetic: FXN 3 forward 9:69038343-69038368; AsCpf1-1
cacccttttctccaccccttg

SEQ ID NO: 11985 - DNA, 22 bp, Artificial Sequence
  Synthetic: FXN 3 forward 9:69038343-69038369; AsCpf1-1
cacccttttctccaccccttgc

SEQ ID NO: 11986 - DNA, 23 bp, Artificial Sequence
  Synthetic: FXN 3 forward 9:69038343-69038370; AsCpf1-1
cacccttttctccaccccttgca

SEQ ID NO: 11987 - DNA, 24 bp, Artificial Sequence
  Synthetic: FXN 3 forward 9:69038343-69038371; AsCpf1-1
cacccttttctccaccccttgcat

SEQ ID NO: 11988 - DNA, 25 bp, Artificial Sequence
  Synthetic: FXN 3 forward 9:69038343-69038372; AsCpf1-1
cacccttttctccaccccttgcatc

SEQ ID NO: 11989 - DNA, 18 bp, Artificial Sequence
  Synthetic: FXN 3 forward 9:69038357-69038379; AsCpf1-1
ccccttgcatctacttct

SEQ ID NO: 11990 - DNA, 19 bp, Artificial Sequence
  Synthetic: FXN 3 forward 9:69038357-69038380; AsCpf1-1
ccccttgcatctacttcta

SEQ ID NO: 11991 - DNA, 20 bp, Artificial Sequence
  Synthetic: FXN 3 forward 9:69038357-69038381; AsCpf1-1
ccccttgcatctacttctaa

SEQ ID NO: 11992 - DNA, 21 bp, Artificial Sequence
  Synthetic: FXN 3 forward 9:69038357-69038382; AsCpf1-1
ccccttgcatctacttctaaa

SEQ ID NO: 11993 - DNA, 22 bp, Artificial Sequence
  Synthetic: FXN 3 forward 9:69038357-69038383; AsCpf1-1
ccccttgcatctacttctaaag

SEQ ID NO: 11994 - DNA, 23 bp, Artificial Sequence
  Synthetic: FXN 3 forward 9:69038357-69038384; AsCpf1-1
ccccttgcatctacttctaaagc

SEQ ID NO: 11995 - DNA, 24 bp, Artificial Sequence
  Synthetic: FXN 3 forward 9:69038357-69038385; AsCpf1-1
ccccttgcatctacttctaaagca

SEQ ID NO: 11996 - DNA, 25 bp, Artificial Sequence
  Synthetic: FXN 3 forward 9:69038357-69038386; AsCpf1-1
ccccttgcatctacttctaaagcag

SEQ ID NO: 11997 - DNA, 18 bp, Artificial Sequence
  Synthetic: FXN 3 reverse 9:69038381-69038403; AsCpf1-1
attctgtttctgttgaac

SEQ ID NO: 11998 - DNA, 19 bp, Artificial Sequence
  Synthetic: FXN 3 reverse 9:69038381-69038404; AsCpf1-1
attctgtttctgttgaaca

SEQ ID NO: 11999 - DNA, 20 bp, Artificial Sequence
  Synthetic: FXN 3 reverse 9:69038381-69038405; AsCpf1-1
attctgtttctgttgaacag

SEQ ID NO: 12000 - DNA, 21 bp, Artificial Sequence
  Synthetic: FXN 3 reverse 9:69038381-69038406; AsCpf1-1
attctgtttctgttgaacagc

SEQ ID NO: 12001 - DNA, 22 bp, Artificial Sequence
  Synthetic: FXN 3 reverse 9:69038381-69038407; AsCpf1-1
attctgtttctgttgaacagct

SEQ ID NO: 12002 - DNA, 23 bp, Artificial Sequence
  Synthetic: FXN 3 reverse 9:69038381-69038408; AsCpf1-1
attctgtttctgttgaacagctg

SEQ ID NO: 12003 - DNA, 24 bp, Artificial Sequence
  Synthetic: FXN 3 reverse 9:69038381-69038409; AsCpf1-1
attctgtttctgttgaacagctgc

SEQ ID NO: 12004 - DNA, 25 bp, Artificial Sequence
  Synthetic: FXN 3 reverse 9:69038381-69038410; AsCpf1-1
attctgtttctgttgaacagctgct

SEQ ID NO: 12005 - DNA, 18 bp, Artificial Sequence
  Synthetic: FXN 3 forward 9:69038389-69038411; AsCpf1-1
acagaaacagaatgggag

SEQ ID NO: 12006 - DNA, 19 bp, Artificial Sequence
  Synthetic: FXN 3 forward 9:69038389-69038412; AsCpf1-1
acagaaacagaatgggagc

SEQ ID NO: 12007 - DNA, 20 bp, Artificial Sequence
  Synthetic: FXN 3 forward 9:69038389-69038413; AsCpf1-1
acagaaacagaatgggagcc

SEQ ID NO: 12008 - DNA, 21 bp, Artificial Sequence
  Synthetic: FXN 3 forward 9:69038389-69038414; AsCpf1-1
acagaaacagaatgggagcca

SEQ ID NO: 12009 - DNA, 22 bp, Artificial Sequence
  Synthetic: FXN 3 forward 9:69038389-69038415; AsCpf1-1
acagaaacagaatgggagccac

SEQ ID NO: 12010 - DNA, 23 bp, Artificial Sequence
  Synthetic: FXN 3 forward 9:69038389-69038416; AsCpf1-1
acagaaacagaatgggagccaca

SEQ ID NO: 12011 - DNA, 24 bp, Artificial Sequence
  Synthetic: FXN 3 forward 9:69038389-69038417; AsCpf1-1
acagaaacagaatgggagccacac

SEQ ID NO: 12012 - DNA, 25 bp, Artificial Sequence
  Synthetic: FXN 3 forward 9:69038389-69038418; AsCpf1-1
acagaaacagaatgggagccacaca

SEQ ID NO: 12013 - DNA, 18 bp, Artificial Sequence
  Synthetic: FXN 3 forward 9:69038460-69038482; AsCpf1-1
acaatatatttattcaac

SEQ ID NO: 12014 - DNA, 19 bp, Artificial Sequence
  Synthetic: FXN 3 forward 9:69038460-69038483; AsCpf1-1
acaatatatttattcaacc

SEQ ID NO: 12015 - DNA, 20 bp, Artificial Sequence
  Synthetic: FXN 3 forward 9:69038460-69038484; AsCpf1-1
acaatatatttattcaacct

SEQ ID NO: 12016 - DNA, 21 bp, Artificial Sequence
  Synthetic: FXN 3 forward 9:69038460-69038485; AsCpf1-1
acaatatatttattcaaccta

SEQ ID NO: 12017 - DNA, 22 bp, Artificial Sequence
  Synthetic: FXN 3 forward 9:69038460-69038486; AsCpf1-1
acaatatatttattcaacctag

SEQ ID NO: 12018 - DNA, 23 bp, Artificial Sequence
  Synthetic: FXN 3 forward 9:69038460-69038487; AsCpf1-1
acaatatatttattcaacctagt

SEQ ID NO: 12019 - DNA, 24 bp, Artificial Sequence
  Synthetic: FXN 3 forward 9:69038460-69038488; AsCpf1-1
acaatatatttattcaacctagta

SEQ ID NO: 12020 - DNA, 25 bp, Artificial Sequence
  Synthetic: FXN 3 forward 9:69038460-69038489; AsCpf1-1
acaatatatttattcaacctagtac

SEQ ID NO: 12021 - DNA, 18 bp, Artificial Sequence
  Synthetic: FXN 3 forward 9:69038476-69038498; AsCpf1-1
acctagtacatacaaaat

SEQ ID NO: 12022 - DNA, 19 bp, Artificial Sequence
  Synthetic: FXN 3 forward 9:69038476-69038499; AsCpf1-1
acctagtacatacaaaata

SEQ ID NO: 12023 - DNA, 20 bp, Artificial Sequence
  Synthetic: FXN 3 forward 9:69038476-69038500; AsCpf1-1
acctagtacatacaaaatat

SEQ ID NO: 12024 - DNA, 21 bp, Artificial Sequence
  Synthetic: FXN 3 forward 9:69038476-69038501; AsCpf1-1
acctagtacatacaaaatatt

SEQ ID NO: 12025 - DNA, 22 bp, Artificial Sequence
  Synthetic: FXN 3 forward 9:69038476-69038502; AsCpf1-1
acctagtacatacaaaatatta

SEQ ID NO: 12026 - DNA, 23 bp, Artificial Sequence
  Synthetic: FXN 3 forward 9:69038476-69038503; AsCpf1-1
acctagtacatacaaaatattat

SEQ ID NO: 12027 - DNA, 24 bp, Artificial Sequence
  Synthetic: FXN 3 forward 9:69038476-69038504; AsCpf1-1
acctagtacatacaaaatattatc

SEQ ID NO: 12028 - DNA, 25 bp, Artificial Sequence
  Synthetic: FXN 3 forward 9:69038476-69038505; AsCpf1-1
acctagtacatacaaaatattatca

SEQ ID NO: 12029 - DNA, 18 bp, Artificial Sequence
  Synthetic: FXN 3 forward 9:69038505-69038527; AsCpf1-1
aacatgtaatcagtattt

SEQ ID NO: 12030 - DNA, 19 bp, Artificial Sequence
  Synthetic: FXN 3 forward 9:69038505-69038528; AsCpf1-1
aacatgtaatcagtatttt

SEQ ID NO: 12031 - DNA, 20 bp, Artificial Sequence
  Synthetic: FXN 3 forward 9:69038505-69038529; AsCpf1-1
aacatgtaatcagtatttta

SEQ ID NO: 12032 - DNA, 21 bp, Artificial Sequence
  Synthetic: FXN 3 forward 9:69038505-69038530; AsCpf1-1
aacatgtaatcagtattttaa

SEQ ID NO: 12033 - DNA, 22 bp, Artificial Sequence
  Synthetic: FXN 3 forward 9:69038505-69038531; AsCpf1-1
aacatgtaatcagtattttaaa

SEQ ID NO: 12034 - DNA, 23 bp, Artificial Sequence
  Synthetic: FXN 3 forward 9:69038505-69038532; AsCpf1-1
aacatgtaatcagtattttaaaa

SEQ ID NO: 12035 - DNA, 24 bp, Artificial Sequence
  Synthetic: FXN 3 forward 9:69038505-69038533; AsCpf1-1
aacatgtaatcagtattttaaaaa

SEQ ID NO: 12036 - DNA, 25 bp, Artificial Sequence
  Synthetic: FXN 3 forward 9:69038505-69038534; AsCpf1-1
aacatgtaatcagtattttaaaaat

SEQ ID NO: 12037 - DNA, 18 bp, Artificial Sequence
  Synthetic: FXN 3 forward 9:69038506-69038528; AsCpf1-1
acatgtaatcagtatttt

SEQ ID NO: 12038 - DNA, 19 bp, Artificial Sequence
  Synthetic: FXN 3 forward 9:69038506-69038529; AsCpf1-1
acatgtaatcagtatttta

SEQ ID NO: 12039 - DNA, 20 bp, Artificial Sequence
  Synthetic: FXN 3 forward 9:69038506-69038530; AsCpf1-1
acatgtaatcagtattttaa

SEQ ID NO: 12040 - DNA, 21 bp, Artificial Sequence
  Synthetic: FXN 3 forward 9:69038506-69038531; AsCpf1-1
acatgtaatcagtattttaaa

SEQ ID NO: 12041 - DNA, 22 bp, Artificial Sequence
  Synthetic: FXN 3 forward 9:69038506-69038532; AsCpf1-1
acatgtaatcagtattttaaaa

SEQ ID NO: 12042 - DNA, 23 bp, Artificial Sequence
  Synthetic: FXN 3 forward 9:69038506-69038533; AsCpf1-1
acatgtaatcagtattttaaaaa

SEQ ID NO: 12043 - DNA, 24 bp, Artificial Sequence
  Synthetic: FXN 3 forward 9:69038506-69038534; AsCpf1-1
acatgtaatcagtattttaaaaat

SEQ ID NO: 12044 - DNA, 25 bp, Artificial Sequence
  Synthetic: FXN 3 forward 9:69038506-69038535; AsCpf1-1
acatgtaatcagtattttaaaaatc

SEQ ID NO: 12045 - DNA, 18 bp, Artificial Sequence
  Synthetic: FXN 3 reverse 9:69038558-69038580; AsCpf1-1
aaagtcctgggattacag

SEQ ID NO: 12046 - DNA, 19 bp, Artificial Sequence
  Synthetic: FXN 3 reverse 9:69038558-69038581; AsCpf1-1
aaagtcctgggattacagt

SEQ ID NO: 12047 - DNA, 20 bp, Artificial Sequence
  Synthetic: FXN 3 reverse 9:69038558-69038582; AsCpf1-1
aaagtcctgggattacagtc

SEQ ID NO: 12048 - DNA, 21 bp, Artificial Sequence
  Synthetic: FXN 3 reverse 9:69038558-69038583; AsCpf1-1
aaagtcctgggattacagtcg

SEQ ID NO: 12049 - DNA, 22 bp, Artificial Sequence
  Synthetic: FXN 3 reverse 9:69038558-69038584; AsCpf1-1
aaagtcctgggattacagtcgt

SEQ ID NO: 12050 - DNA, 23 bp, Artificial Sequence
  Synthetic: FXN 3 reverse 9:69038558-69038585; AsCpf1-1
aaagtcctgggattacagtcgtg

SEQ ID NO: 12051 - DNA, 24 bp, Artificial Sequence
  Synthetic: FXN 3 reverse 9:69038558-69038586; AsCpf1-1
aaagtcctgggattacagtcgtga

SEQ ID NO: 12052 - DNA, 25 bp, Artificial Sequence
  Synthetic: FXN 3 reverse 9:69038558-69038587; AsCpf1-1
aaagtcctgggattacagtcgtgag

SEQ ID NO: 12053 - DNA, 18 bp, Artificial Sequence
  Synthetic: FXN 3 forward 9:69038571-69038593; AsCpf1-1
aggactttgggaggccga

SEQ ID NO: 12054 - DNA, 19 bp, Artificial Sequence
  Synthetic: FXN 3 forward 9:69038571-69038594; AsCpf1-1
aggactttgggaggccgag

SEQ ID NO: 12055 - DNA, 20 bp, Artificial Sequence
  Synthetic: FXN 3 forward 9:69038571-69038595; AsCpf1-1
aggactttgggaggccgagg

SEQ ID NO: 12056 - DNA, 21 bp, Artificial Sequence
  Synthetic: FXN 3 forward 9:69038571-69038596; AsCpf1-1
aggactttgggaggccgaggc

SEQ ID NO: 12057 - DNA, 22 bp, Artificial Sequence
  Synthetic: FXN 3 forward 9:69038571-69038597; AsCpf1-1
aggactttgggaggccgaggcg

SEQ ID NO: 12058 - DNA, 23 bp, Artificial Sequence
  Synthetic: FXN 3 forward 9:69038571-69038598; AsCpf1-1
aggactttgggaggccgaggcga

SEQ ID NO: 12059 - DNA, 24 bp, Artificial Sequence
  Synthetic: FXN 3 forward 9:69038571-69038599; AsCpf1-1
aggactttgggaggccgaggcgag

SEQ ID NO: 12060 - DNA, 25 bp, Artificial Sequence
  Synthetic: FXN 3 forward 9:69038571-69038600; AsCpf1-1
aggactttgggaggccgaggcgagt

SEQ ID NO: 12061 - DNA, 18 bp, Artificial Sequence
  Synthetic: FXN 3 reverse 9:69038574-69038596; AsCpf1-1
ctcgcctcggcctcccaa

SEQ ID NO: 12062 - DNA, 19 bp, Artificial Sequence
  Synthetic: FXN 3 reverse 9:69038574-69038597; AsCpf1-1
ctcgcctcggcctcccaaa

SEQ ID NO: 12063 - DNA, 20 bp, Artificial Sequence
  Synthetic: FXN 3 reverse 9:69038574-69038598; AsCpf1-1
ctcgcctcggcctcccaaag

SEQ ID NO: 12064 - DNA, 21 bp, Artificial Sequence
  Synthetic: FXN 3 reverse 9:69038574-69038599; AsCpf1-1
ctcgcctcggcctcccaaagt

SEQ ID NO: 12065 - DNA, 22 bp, Artificial Sequence
  Synthetic: FXN 3 reverse 9:69038574-69038600; AsCpf1-1
ctcgcctcggcctcccaaagtc

SEQ ID NO: 12066 - DNA, 23 bp, Artificial Sequence
  Synthetic: FXN 3 reverse 9:69038574-69038601; AsCpf1-1
ctcgcctcggcctcccaaagtcc

SEQ ID NO: 12067 - DNA, 24 bp, Artificial Sequence
  Synthetic: FXN 3 reverse 9:69038574-69038602; AsCpf1-1
ctcgcctcggcctcccaaagtcct

SEQ ID NO: 12068 - DNA, 25 bp, Artificial Sequence
  Synthetic: FXN 3 reverse 9:69038574-69038603; AsCpf1-1
ctcgcctcggcctcccaaagtcctg

SEQ ID NO: 12069 - DNA, 18 bp, Artificial Sequence
  Synthetic: FXN 3 forward 9:69038620-69038642; AsCpf1-1
agaccagcctggccaaca

SEQ ID NO: 12070 - DNA, 19 bp, Artificial Sequence
  Synthetic: FXN 3 forward 9:69038620-69038643; AsCpf1-1
agaccagcctggccaacat

SEQ ID NO: 12071 - DNA, 20 bp, Artificial Sequence
  Synthetic: FXN 3 forward 9:69038620-69038644; AsCpf1-1
agaccagcctggccaacatg

SEQ ID NO: 12072 - DNA, 21 bp, Artificial Sequence
  Synthetic: FXN 3 forward 9:69038620-69038645; AsCpf1-1
agaccagcctggccaacatgg

SEQ ID NO: 12073 - DNA, 22 bp, Artificial Sequence
  Synthetic: FXN 3 forward 9:69038620-69038646; AsCpf1-1
agaccagcctggccaacatggt

SEQ ID NO: 12074 - DNA, 23 bp, Artificial Sequence
  Synthetic: FXN 3 forward 9:69038620-69038647; AsCpf1-1
agaccagcctggccaacatggtg

SEQ ID NO: 12075 - DNA, 24 bp, Artificial Sequence
  Synthetic: FXN 3 forward 9:69038620-69038648; AsCpf1-1
agaccagcctggccaacatggtga

SEQ ID NO: 12076 - DNA, 25 bp, Artificial Sequence
  Synthetic: FXN 3 forward 9:69038620-69038649; AsCpf1-1
agaccagcctggccaacatggtgaa

SEQ ID NO: 12077 - DNA, 18 bp, Artificial Sequence
  Synthetic: FXN 3 reverse 9:69038620-69038642; AsCpf1-1
ccatgttggccaggctgg

SEQ ID NO: 12078 - DNA, 19 bp, Artificial Sequence
  Synthetic: FXN 3 reverse 9:69038620-69038643; AsCpf1-1
ccatgttggccaggctggt

SEQ ID NO: 12079 - DNA, 20 bp, Artificial Sequence
  Synthetic: FXN 3 reverse 9:69038620-69038644; AsCpf1-1
ccatgttggccaggctggtc

SEQ ID NO: 12080 - DNA, 21 bp, Artificial Sequence
  Synthetic: FXN 3 reverse 9:69038620-69038645; AsCpf1-1
ccatgttggccaggctggtct

SEQ ID NO: 12081 - DNA, 22 bp, Artificial Sequence
  Synthetic: FXN 3 reverse 9:69038620-69038646; AsCpf1-1
ccatgttggccaggctggtctt

SEQ ID NO: 12082 - DNA, 23 bp, Artificial Sequence
  Synthetic: FXN 3 reverse 9:69038620-69038647; AsCpf1-1
ccatgttggccaggctggtcttg

SEQ ID NO: 12083 - DNA, 24 bp, Artificial Sequence
  Synthetic: FXN 3 reverse 9:69038620-69038648; AsCpf1-1
ccatgttggccaggctggtcttga

SEQ ID NO: 12084 - DNA, 25 bp, Artificial Sequence
  Synthetic: FXN 3 reverse 9:69038620-69038649; AsCpf1-1
ccatgttggccaggctggtcttgaa

SEQ ID NO: 12085 - DNA, 18 bp, Artificial Sequence
  Synthetic: FXN 3 reverse 9:69038685-69038707; AsCpf1-1
gagtagctgggactacag

SEQ ID NO: 12086 - DNA, 19 bp, Artificial Sequence
  Synthetic: FXN 3 reverse 9:69038685-69038708; AsCpf1-1
gagtagctgggactacagg

SEQ ID NO: 12087 - DNA, 20 bp, Artificial Sequence
  Synthetic: FXN 3 reverse 9:69038685-69038709; AsCpf1-1
gagtagctgggactacaggc

SEQ ID NO: 12088 - DNA, 21 bp, Artificial Sequence
  Synthetic: FXN 3 reverse 9:69038685-69038710; AsCpf1-1
gagtagctgggactacaggca

SEQ ID NO: 12089 - DNA, 22 bp, Artificial Sequence
  Synthetic: FXN 3 reverse 9:69038685-69038711; AsCpf1-1
gagtagctgggactacaggcac

SEQ ID NO: 12090 - DNA, 23 bp, Artificial Sequence
  Synthetic: FXN 3 reverse 9:69038685-69038712; AsCpf1-1
gagtagctgggactacaggcacc

SEQ ID NO: 12091 - DNA, 24 bp, Artificial Sequence
  Synthetic: FXN 3 reverse 9:69038685-69038713; AsCpf1-1
gagtagctgggactacaggcaccc

SEQ ID NO: 12092 - DNA, 25 bp, Artificial Sequence
  Synthetic: FXN 3 reverse 9:69038685-69038714; AsCpf1-1
gagtagctgggactacaggcaccca

SEQ ID NO: 12093 - DNA, 18 bp, Artificial Sequence
  Synthetic: FXN 3 forward 9:69038698-69038720; AsCpf1-1
agctactcgggaggctga

SEQ ID NO: 12094 - DNA, 19 bp, Artificial Sequence
  Synthetic: FXN 3 forward 9:69038698-69038721; AsCpf1-1
agctactcgggaggctgag

SEQ ID NO: 12095 - DNA, 20 bp, Artificial Sequence
  Synthetic: FXN 3 forward 9:69038698-69038722; AsCpf1-1
agctactcgggaggctgagg

SEQ ID NO: 12096 - DNA, 21 bp, Artificial Sequence
  Synthetic: FXN 3 forward 9:69038698-69038723; AsCpf1-1
agctactcgggaggctgaggc

SEQ ID NO: 12097 - DNA, 22 bp, Artificial Sequence
  Synthetic: FXN 3 forward 9:69038698-69038724; AsCpf1-1
agctactcgggaggctgaggca

SEQ ID NO: 12098 - DNA, 23 bp, Artificial Sequence
  Synthetic: FXN 3 forward 9:69038698-69038725; AsCpf1-1
agctactcgggaggctgaggcat

SEQ ID NO: 12099 - DNA, 24 bp, Artificial Sequence
  Synthetic: FXN 3 forward 9:69038698-69038726; AsCpf1-1
agctactcgggaggctgaggcatg

SEQ ID NO: 12100 - DNA, 25 bp, Artificial Sequence
  Synthetic: FXN 3 forward 9:69038698-69038727; AsCpf1-1
agctactcgggaggctgaggcatga

SEQ ID NO: 12101 - DNA, 18 bp, Artificial Sequence
  Synthetic: FXN 3 reverse 9:69038751-69038773; AsCpf1-1
ccaaaatcttggctcact

SEQ ID NO: 12102 - DNA, 19 bp, Artificial Sequence
  Synthetic: FXN 3 reverse 9:69038751-69038774; AsCpf1-1
ccaaaatcttggctcactg

SEQ ID NO: 12103 - DNA, 20 bp, Artificial Sequence
  Synthetic: FXN 3 reverse 9:69038751-69038775; AsCpf1-1
ccaaaatcttggctcactgc

SEQ ID NO: 12104 - DNA, 21 bp, Artificial Sequence
  Synthetic: FXN 3 reverse 9:69038751-69038776; AsCpf1-1
ccaaaatcttggctcactgca

SEQ ID NO: 12105 - DNA, 22 bp, Artificial Sequence
  Synthetic: FXN 3 reverse 9:69038751-69038777; AsCpf1-1
ccaaaatcttggctcactgcaa

SEQ ID NO: 12106 - DNA, 23 bp, Artificial Sequence
  Synthetic: FXN 3 reverse 9:69038751-69038778; AsCpf1-1
ccaaaatcttggctcactgcaac

SEQ ID NO: 12107 - DNA, 24 bp, Artificial Sequence
  Synthetic: FXN 3 reverse 9:69038751-69038779; AsCpf1-1
ccaaaatcttggctcactgcaacc

SEQ ID NO: 12108 - DNA, 25 bp, Artificial Sequence
  Synthetic: FXN 3 reverse 9:69038751-69038780; AsCpf1-1
ccaaaatcttggctcactgcaacct

SEQ ID NO: 12109 - DNA, 18 bp, Artificial Sequence
  Synthetic: FXN 3 forward 9:69038829-69038851; AsCpf1-1
tactcatatacttccagc

SEQ ID NO: 12110 - DNA, 19 bp, Artificial Sequence
  Synthetic: FXN 3 forward 9:69038829-69038852; AsCpf1-1
tactcatatacttccagca

SEQ ID NO: 12111 - DNA, 20 bp, Artificial Sequence
  Synthetic: FXN 3 forward 9:69038829-69038853; AsCpf1-1
tactcatatacttccagcat

SEQ ID NO: 12112 - DNA, 21 bp, Artificial Sequence
  Synthetic: FXN 3 forward 9:69038829-69038854; AsCpf1-1
tactcatatacttccagcata

SEQ ID NO: 12113 - DNA, 22 bp, Artificial Sequence
  Synthetic: FXN 3 forward 9:69038829-69038855; AsCpf1-1
tactcatatacttccagcatat

SEQ ID NO: 12114 - DNA, 23 bp, Artificial Sequence
  Synthetic: FXN 3 forward 9:69038829-69038856; AsCpf1-1
tactcatatacttccagcatatc

SEQ ID NO: 12115 - DNA, 24 bp, Artificial Sequence
  Synthetic: FXN 3 forward 9:69038829-69038857; AsCpf1-1
tactcatatacttccagcatatct

SEQ ID NO: 12116 - DNA, 25 bp, Artificial Sequence
  Synthetic: FXN 3 forward 9:69038829-69038858; AsCpf1-1
tactcatatacttccagcatatctc

SEQ ID NO: 12117 - DNA, 18 bp, Artificial Sequence
  Synthetic: FXN 3 forward 9:69038844-69038866; AsCpf1-1
agcatatctcaattcaca

SEQ ID NO: 12118 - DNA, 19 bp, Artificial Sequence
  Synthetic: FXN 3 forward 9:69038844-69038867; AsCpf1-1
agcatatctcaattcacaa

SEQ ID NO: 12119 - DNA, 20 bp, Artificial Sequence
  Synthetic: FXN 3 forward 9:69038844-69038868; AsCpf1-1
agcatatctcaattcacaat

SEQ ID NO: 12120 - DNA, 21 bp, Artificial Sequence
  Synthetic: FXN 3 forward 9:69038844-69038869; AsCpf1-1
agcatatctcaattcacaatt

SEQ ID NO: 12121 - DNA, 22 bp, Artificial Sequence
  Synthetic: FXN 3 forward 9:69038844-69038870; AsCpf1-1
agcatatctcaattcacaattt

SEQ ID NO: 12122 - DNA, 23 bp, Artificial Sequence
  Synthetic: FXN 3 forward 9:69038844-69038871; AsCpf1-1
agcatatctcaattcacaatttc

SEQ ID NO: 12123 - DNA, 24 bp, Artificial Sequence
  Synthetic: FXN 3 forward 9:69038844-69038872; AsCpf1-1
agcatatctcaattcacaatttct

SEQ ID NO: 12124 - DNA, 25 bp, Artificial Sequence
  Synthetic: FXN 3 forward 9:69038844-69038873; AsCpf1-1
agcatatctcaattcacaatttcta

SEQ ID NO: 12125 - DNA, 18 bp, Artificial Sequence
  Synthetic: FXN 3 forward 9:69038845-69038867; AsCpf1-1
gcatatctcaattcacaa

SEQ ID NO: 12126 - DNA, 19 bp, Artificial Sequence
  Synthetic: FXN 3 forward 9:69038845-69038868; AsCpf1-1
gcatatctcaattcacaat

SEQ ID NO: 12127 - DNA, 20 bp, Artificial Sequence
  Synthetic: FXN 3 forward 9:69038845-69038869; AsCpf1-1
gcatatctcaattcacaatt

SEQ ID NO: 12128 - DNA, 21 bp, Artificial Sequence
  Synthetic: FXN 3 forward 9:69038845-69038870; AsCpf1-1
gcatatctcaattcacaattt

SEQ ID NO: 12129 - DNA, 22 bp, Artificial Sequence
  Synthetic: FXN 3 forward 9:69038845-69038871; AsCpf1-1
gcatatctcaattcacaatttc

SEQ ID NO: 12130 - DNA, 23 bp, Artificial Sequence
  Synthetic: FXN 3 forward 9:69038845-69038872; AsCpf1-1
gcatatctcaattcacaatttct

SEQ ID NO: 12131 - DNA, 24 bp, Artificial Sequence
  Synthetic: FXN 3 forward 9:69038845-69038873; AsCpf1-1
gcatatctcaattcacaatttcta

SEQ ID NO: 12132 - DNA, 25 bp, Artificial Sequence
  Synthetic: FXN 3 forward 9:69038845-69038874; AsCpf1-1
gcatatctcaattcacaatttctaa

SEQ ID NO: 12133 - DNA, 18 bp, Artificial Sequence
  Synthetic: FXN 3 forward 9:69038860-69038882; AsCpf1-1
caatttctaagtaaatgc

SEQ ID NO: 12134 - DNA, 19 bp, Artificial Sequence
  Synthetic: FXN 3 forward 9:69038860-69038883; AsCpf1-1
caatttctaagtaaatgct

SEQ ID NO: 12135 - DNA, 20 bp, Artificial Sequence
  Synthetic: FXN 3 forward 9:69038860-69038884; AsCpf1-1
caatttctaagtaaatgctc

SEQ ID NO: 12136 - DNA, 21 bp, Artificial Sequence
  Synthetic: FXN 3 forward 9:69038860-69038885; AsCpf1-1
caatttctaagtaaatgctct

SEQ ID NO: 12137 - DNA, 22 bp, Artificial Sequence
  Synthetic: FXN 3 forward 9:69038860-69038886; AsCpf1-1
caatttctaagtaaatgctcta

SEQ ID NO: 12138 - DNA, 23 bp, Artificial Sequence
  Synthetic: FXN 3 forward 9:69038860-69038887; AsCpf1-1
caatttctaagtaaatgctctat

SEQ ID NO: 12139 - DNA, 24 bp, Artificial Sequence
  Synthetic: FXN 3 forward 9:69038860-69038888; AsCpf1-1
caatttctaagtaaatgctctatc

SEQ ID NO: 12140 - DNA, 25 bp, Artificial Sequence
  Synthetic: FXN 3 forward 9:69038860-69038889; AsCpf1-1
caatttctaagtaaatgctctatct

SEQ ID NO: 12141 - DNA, 18 bp, Artificial Sequence
  Synthetic: FXN 3 reverse 9:69038896-69038918; AsCpf1-1
tttttaattgtgaatttt

SEQ ID NO: 12142 - DNA, 19 bp, Artificial Sequence
  Synthetic: FXN 3 reverse 9:69038896-69038919; AsCpf1-1
tttttaattgtgaatttta

SEQ ID NO: 12143 - DNA, 20 bp, Artificial Sequence
  Synthetic: FXN 3 reverse 9:69038896-69038920; AsCpf1-1
tttttaattgtgaattttat

SEQ ID NO: 12144 - DNA, 21 bp, Artificial Sequence
  Synthetic: FXN 3 reverse 9:69038896-69038921; AsCpf1-1
tttttaattgtgaattttata

SEQ ID NO: 12145 - DNA, 22 bp, Artificial Sequence
  Synthetic: FXN 3 reverse 9:69038896-69038922; AsCpf1-1
tttttaattgtgaattttataa

SEQ ID NO: 12146 - DNA, 23 bp, Artificial Sequence
  Synthetic: FXN 3 reverse 9:69038896-69038923; AsCpf1-1
tttttaattgtgaattttataaa

SEQ ID NO: 12147 - DNA, 24 bp, Artificial Sequence
  Synthetic: FXN 3 reverse 9:69038896-69038924; AsCpf1-1
tttttaattgtgaattttataaaa

SEQ ID NO: 12148 - DNA, 25 bp, Artificial Sequence
  Synthetic: FXN 3 reverse 9:69038896-69038925; AsCpf1-1
tttttaattgtgaattttataaaag

SEQ ID NO: 12149 - DNA, 18 bp, Artificial Sequence
  Synthetic: FXN 3 forward 9:69038907-69038929; AsCpf1-1
caattaaaaatgaaggtt

SEQ ID NO: 12150 - DNA, 19 bp, Artificial Sequence
  Synthetic: FXN 3 forward 9:69038907-69038930; AsCpf1-1
caattaaaaatgaaggttc

SEQ ID NO: 12151 - DNA, 20 bp, Artificial Sequence
  Synthetic: FXN 3 forward 9:69038907-69038931; AsCpf1-1
caattaaaaatgaaggttca

SEQ ID NO: 12152 - DNA, 21 bp, Artificial Sequence
  Synthetic: FXN 3 forward 9:69038907-69038932; AsCpf1-1
caattaaaaatgaaggttcac

SEQ ID NO: 12153 - DNA, 22 bp, Artificial Sequence
  Synthetic: FXN 3 forward 9:69038907-69038933; AsCpf1-1
caattaaaaatgaaggttcaca

SEQ ID NO: 12154 - DNA, 23 bp, Artificial Sequence
  Synthetic: FXN 3 forward 9:69038907-69038934; AsCpf1-1
caattaaaaatgaaggttcacat

SEQ ID NO: 12155 - DNA, 24 bp, Artificial Sequence
  Synthetic: FXN 3 forward 9:69038907-69038935; AsCpf1-1
caattaaaaatgaaggttcacata

SEQ ID NO: 12156 - DNA, 25 bp, Artificial Sequence
  Synthetic: FXN 3 forward 9:69038907-69038936; AsCpf1-1
caattaaaaatgaaggttcacatag

SEQ ID NO: 12157 - DNA, 18 bp, Artificial Sequence
  Synthetic: FXN 3 forward 9:69038927-69038949; AsCpf1-1
catagtcaagttgttcca

SEQ ID NO: 12158 - DNA, 19 bp, Artificial Sequence
  Synthetic: FXN 3 forward 9:69038927-69038950; AsCpf1-1
catagtcaagttgttccaa

SEQ ID NO: 12159 - DNA, 20 bp, Artificial Sequence
  Synthetic: FXN 3 forward 9:69038927-69038951; AsCpf1-1
catagtcaagttgttccaaa

SEQ ID NO: 12160 - DNA, 21 bp, Artificial Sequence
  Synthetic: FXN 3 forward 9:69038927-69038952; AsCpf1-1
catagtcaagttgttccaaac

SEQ ID NO: 12161 - DNA, 22 bp, Artificial Sequence
  Synthetic: FXN 3 forward 9:69038927-69038953; AsCpf1-1
catagtcaagttgttccaaaca

SEQ ID NO: 12162 - DNA, 23 bp, Artificial Sequence
  Synthetic: FXN 3 forward 9:69038927-69038954; AsCpf1-1
catagtcaagttgttccaaacac

SEQ ID NO: 12163 - DNA, 24 bp, Artificial Sequence
  Synthetic: FXN 3 forward 9:69038927-69038955; AsCpf1-1
catagtcaagttgttccaaacaca

SEQ ID NO: 12164 - DNA, 25 bp, Artificial Sequence
  Synthetic: FXN 3 forward 9:69038927-69038956; AsCpf1-1
catagtcaagttgttccaaacacac

SEQ ID NO: 12165 - DNA, 18 bp, Artificial Sequence
  Synthetic: FXN 3 forward 9:69038944-69038966; AsCpf1-1
aaacacacttaaatgtct

SEQ ID NO: 12166 - DNA, 19 bp, Artificial Sequence
  Synthetic: FXN 3 forward 9:69038944-69038967; AsCpf1-1
aaacacacttaaatgtctc

SEQ ID NO: 12167 - DNA, 20 bp, Artificial Sequence
  Synthetic: FXN 3 forward 9:69038944-69038968; AsCpf1-1
aaacacacttaaatgtctcc

SEQ ID NO: 12168 - DNA, 21 bp, Artificial Sequence
  Synthetic: FXN 3 forward 9:69038944-69038969; AsCpf1-1
aaacacacttaaatgtctcct

SEQ ID NO: 12169 - DNA, 22 bp, Artificial Sequence
  Synthetic: FXN 3 forward 9:69038944-69038970; AsCpf1-1
aaacacacttaaatgtctccta

SEQ ID NO: 12170 - DNA, 23 bp, Artificial Sequence
  Synthetic: FXN 3 forward 9:69038944-69038971; AsCpf1-1
aaacacacttaaatgtctcctag

SEQ ID NO: 12171 - DNA, 24 bp, Artificial Sequence
  Synthetic: FXN 3 forward 9:69038944-69038972; AsCpf1-1
aaacacacttaaatgtctcctagg

SEQ ID NO: 12172 - DNA, 25 bp, Artificial Sequence
  Synthetic: FXN 3 forward 9:69038944-69038973; AsCpf1-1
aaacacacttaaatgtctcctaggc

SEQ ID NO: 12173 - DNA, 18 bp, Artificial Sequence
  Synthetic: FXN 3 forward 9:69038945-69038967; AsCpf1-1
aacacacttaaatgtctc

SEQ ID NO: 12174 - DNA, 19 bp, Artificial Sequence
  Synthetic: FXN 3 forward 9:69038945-69038968; AsCpf1-1
aacacacttaaatgtctcc

SEQ ID NO: 12175 - DNA, 20 bp, Artificial Sequence
  Synthetic: FXN 3 forward 9:69038945-69038969; AsCpf1-1
aacacacttaaatgtctcct

SEQ ID NO: 12176 - DNA, 21 bp, Artificial Sequence
  Synthetic: FXN 3 forward 9:69038945-69038970; AsCpf1-1
aacacacttaaatgtctccta

SEQ ID NO: 12177 - DNA, 22 bp, Artificial Sequence
  Synthetic: FXN 3 forward 9:69038945-69038971; AsCpf1-1
aacacacttaaatgtctcctag

SEQ ID NO: 12178 - DNA, 23 bp, Artificial Sequence
  Synthetic: FXN 3 forward 9:69038945-69038972; AsCpf1-1
aacacacttaaatgtctcctagg

SEQ ID NO: 12179 - DNA, 24 bp, Artificial Sequence
  Synthetic: FXN 3 forward 9:69038945-69038973; AsCpf1-1
aacacacttaaatgtctcctaggc

SEQ ID NO: 12180 - DNA, 25 bp, Artificial Sequence
  Synthetic: FXN 3 forward 9:69038945-69038974; AsCpf1-1
aacacacttaaatgtctcctaggct

SEQ ID NO: 12181 - DNA, 18 bp, Artificial Sequence
  Synthetic: FXN 3 reverse 9:69038985-69039007; AsCpf1-1
aaagtgctgggattacag

SEQ ID NO: 12182 - DNA, 19 bp, Artificial Sequence
  Synthetic: FXN 3 reverse 9:69038985-69039008; AsCpf1-1
aaagtgctgggattacagg

SEQ ID NO: 12183 - DNA, 20 bp, Artificial Sequence
  Synthetic: FXN 3 reverse 9:69038985-69039009; AsCpf1-1
aaagtgctgggattacaggt

SEQ ID NO: 12184 - DNA, 21 bp, Artificial Sequence
  Synthetic: FXN 3 reverse 9:69038985-69039010; AsCpf1-1
aaagtgctgggattacaggtg

SEQ ID NO: 12185 - DNA, 22 bp, Artificial Sequence
  Synthetic: FXN 3 reverse 9:69038985-69039011; AsCpf1-1
aaagtgctgggattacaggtgt

SEQ ID NO: 12186 - DNA, 23 bp, Artificial Sequence
  Synthetic: FXN 3 reverse 9:69038985-69039012; AsCpf1-1
aaagtgctgggattacaggtgtg

SEQ ID NO: 12187 - DNA, 24 bp, Artificial Sequence
  Synthetic: FXN 3 reverse 9:69038985-69039013; AsCpf1-1
aaagtgctgggattacaggtgtga

SEQ ID NO: 12188 - DNA, 25 bp, Artificial Sequence
  Synthetic: FXN 3 reverse 9:69038985-69039014; AsCpf1-1
aaagtgctgggattacaggtgtgag

SEQ ID NO: 12189 - DNA, 18 bp, Artificial Sequence
  Synthetic: FXN 3 forward 9:69038998-69039020; AsCpf1-1
agcactttgggaggctga

SEQ ID NO: 12190 - DNA, 19 bp, Artificial Sequence
  Synthetic: FXN 3 forward 9:69038998-69039021; AsCpf1-1
agcactttgggaggctgag

SEQ ID NO: 12191 - DNA, 20 bp, Artificial Sequence
  Synthetic: FXN 3 forward 9:69038998-69039022; AsCpf1-1
agcactttgggaggctgaga

SEQ ID NO: 12192 - DNA, 21 bp, Artificial Sequence
  Synthetic: FXN 3 forward 9:69038998-69039023; AsCpf1-1
agcactttgggaggctgagat

SEQ ID NO: 12193 - DNA, 22 bp, Artificial Sequence
  Synthetic: FXN 3 forward 9:69038998-69039024; AsCpf1-1
agcactttgggaggctgagatg

SEQ ID NO: 12194 - DNA, 23 bp, Artificial Sequence
  Synthetic: FXN 3 forward 9:69038998-69039025; AsCpf1-1
agcactttgggaggctgagatgg

SEQ ID NO: 12195 - DNA, 24 bp, Artificial Sequence
  Synthetic: FXN 3 forward 9:69038998-69039026; AsCpf1-1
agcactttgggaggctgagatggg

SEQ ID NO: 12196 - DNA, 25 bp, Artificial Sequence
  Synthetic: FXN 3 forward 9:69038998-69039027; AsCpf1-1
agcactttgggaggctgagatgggc

SEQ ID NO: 12197 - DNA, 18 bp, Artificial Sequence
  Synthetic: FXN 3 reverse 9:69039001-69039023; AsCpf1-1
cccatctcagcctcccaa

SEQ ID NO: 12198 - DNA, 19 bp, Artificial Sequence
  Synthetic: FXN 3 reverse 9:69039001-69039024; AsCpf1-1
cccatctcagcctcccaaa

SEQ ID NO: 12199 - DNA, 20 bp, Artificial Sequence
  Synthetic: FXN 3 reverse 9:69039001-69039025; AsCpf1-1
cccatctcagcctcccaaag

SEQ ID NO: 12200 - DNA, 21 bp, Artificial Sequence
  Synthetic: FXN 3 reverse 9:69039001-69039026; AsCpf1-1
cccatctcagcctcccaaagt

SEQ ID NO: 12201 - DNA, 22 bp, Artificial Sequence
  Synthetic: FXN 3 reverse 9:69039001-69039027; AsCpf1-1
cccatctcagcctcccaaagtg

SEQ ID NO: 12202 - DNA, 23 bp, Artificial Sequence
  Synthetic: FXN 3 reverse 9:69039001-69039028; AsCpf1-1
cccatctcagcctcccaaagtgc

SEQ ID NO: 12203 - DNA, 24 bp, Artificial Sequence
  Synthetic: FXN 3 reverse 9:69039001-69039029; AsCpf1-1
cccatctcagcctcccaaagtgct

SEQ ID NO: 12204 - DNA, 25 bp, Artificial Sequence
  Synthetic: FXN 3 reverse 9:69039001-69039030; AsCpf1-1
cccatctcagcctcccaaagtgctg

SEQ ID NO: 12205 - DNA, 18 bp, Artificial Sequence
  Synthetic: FXN 3 reverse 9:69039047-69039069; AsCpf1-1
ccatgttggccaggctgg

SEQ ID NO: 12206 - DNA, 19 bp, Artificial Sequence
  Synthetic: FXN 3 reverse 9:69039047-69039070; AsCpf1-1
ccatgttggccaggctggt

SEQ ID NO: 12207 - DNA, 20 bp, Artificial Sequence
  Synthetic: FXN 3 reverse 9:69039047-69039071; AsCpf1-1
ccatgttggccaggctggtc

SEQ ID NO: 12208 - DNA, 21 bp, Artificial Sequence
  Synthetic: FXN 3 reverse 9:69039047-69039072; AsCpf1-1
ccatgttggccaggctggtct

SEQ ID NO: 12209 - DNA, 22 bp, Artificial Sequence
  Synthetic: FXN 3 reverse 9:69039047-69039073; AsCpf1-1
ccatgttggccaggctggtctc

SEQ ID NO: 12210 - DNA, 23 bp, Artificial Sequence
  Synthetic: FXN 3 reverse 9:69039047-69039074; AsCpf1-1
ccatgttggccaggctggtctca

SEQ ID NO: 12211 - DNA, 24 bp, Artificial Sequence
  Synthetic: FXN 3 reverse 9:69039047-69039075; AsCpf1-1
ccatgttggccaggctggtctcaa

SEQ ID NO: 12212 - DNA, 25 bp, Artificial Sequence
  Synthetic: FXN 3 reverse 9:69039047-69039076; AsCpf1-1
ccatgttggccaggctggtctcaaa

SEQ ID NO: 12213 - DNA, 18 bp, Artificial Sequence
  Synthetic: FXN 3 reverse 9:69039083-69039105; AsCpf1-1
gctaatttttgtattttt

SEQ ID NO: 12214 - DNA, 19 bp, Artificial Sequence
  Synthetic: FXN 3 reverse 9:69039083-69039106; AsCpf1-1
gctaatttttgtattttta

SEQ ID NO: 12215 - DNA, 20 bp, Artificial Sequence
  Synthetic: FXN 3 reverse 9:69039083-69039107; AsCpf1-1
gctaatttttgtatttttag

SEQ ID NO: 12216 - DNA, 21 bp, Artificial Sequence
  Synthetic: FXN 3 reverse 9:69039083-69039108; AsCpf1-1
gctaatttttgtatttttagt

SEQ ID NO: 12217 - DNA, 22 bp, Artificial Sequence
  Synthetic: FXN 3 reverse 9:69039083-69039109; AsCpf1-1
gctaatttttgtatttttagta

SEQ ID NO: 12218 - DNA, 23 bp, Artificial Sequence
  Synthetic: FXN 3 reverse 9:69039083-69039110; AsCpf1-1
gctaatttttgtatttttagtag

SEQ ID NO: 12219 - DNA, 24 bp, Artificial Sequence
  Synthetic: FXN 3 reverse 9:69039083-69039111; AsCpf1-1
gctaatttttgtatttttagtaga

SEQ ID NO: 12220 - DNA, 25 bp, Artificial Sequence
  Synthetic: FXN 3 reverse 9:69039083-69039112; AsCpf1-1
gctaatttttgtatttttagtagag

SEQ ID NO: 12221 - DNA, 18 bp, Artificial Sequence
  Synthetic: FXN 3 forward 9:69039133-69039155; AsCpf1-1
agctactcaggaggctga

SEQ ID NO: 12222 - DNA, 19 bp, Artificial Sequence
  Synthetic: FXN 3 forward 9:69039133-69039156; AsCpf1-1
agctactcaggaggctgag

SEQ ID NO: 12223 - DNA, 20 bp, Artificial Sequence
  Synthetic: FXN 3 forward 9:69039133-69039157; AsCpf1-1
agctactcaggaggctgagg

SEQ ID NO: 12224 - DNA, 21 bp, Artificial Sequence
  Synthetic: FXN 3 forward 9:69039133-69039158; AsCpf1-1
agctactcaggaggctgaggc

SEQ ID NO: 12225 - DNA, 22 bp, Artificial Sequence
  Synthetic: FXN 3 forward 9:69039133-69039159; AsCpf1-1
agctactcaggaggctgaggca

SEQ ID NO: 12226 - DNA, 23 bp, Artificial Sequence
  Synthetic: FXN 3 forward 9:69039133-69039160; AsCpf1-1
agctactcaggaggctgaggcag

SEQ ID NO: 12227 - DNA, 24 bp, Artificial Sequence
  Synthetic: FXN 3 forward 9:69039133-69039161; AsCpf1-1
agctactcaggaggctgaggcagg

SEQ ID NO: 12228 - DNA, 25 bp, Artificial Sequence
  Synthetic: FXN 3 forward 9:69039133-69039162; AsCpf1-1
agctactcaggaggctgaggcagga

SEQ ID NO: 12229 - DNA, 18 bp, Artificial Sequence
  Synthetic: FXN 3 reverse 9:69039145-69039167; AsCpf1-1
agcaattatcctgcctca

SEQ ID NO: 12230 - DNA, 19 bp, Artificial Sequence
  Synthetic: FXN 3 reverse 9:69039145-69039168; AsCpf1-1
agcaattatcctgcctcag

SEQ ID NO: 12231 - DNA, 20 bp, Artificial Sequence
  Synthetic: FXN 3 reverse 9:69039145-69039169; AsCpf1-1
agcaattatcctgcctcagc

SEQ ID NO: 12232 - DNA, 21 bp, Artificial Sequence
  Synthetic: FXN 3 reverse 9:69039145-69039170; AsCpf1-1
agcaattatcctgcctcagcc

SEQ ID NO: 12233 - DNA, 22 bp, Artificial Sequence
  Synthetic: FXN 3 reverse 9:69039145-69039171; AsCpf1-1
agcaattatcctgcctcagcct

SEQ ID NO: 12234 - DNA, 23 bp, Artificial Sequence
  Synthetic: FXN 3 reverse 9:69039145-69039172; AsCpf1-1
agcaattatcctgcctcagcctc

SEQ ID NO: 12235 - DNA, 24 bp, Artificial Sequence
  Synthetic: FXN 3 reverse 9:69039145-69039173; AsCpf1-1
agcaattatcctgcctcagcctcc

SEQ ID NO: 12236 - DNA, 25 bp, Artificial Sequence
  Synthetic: FXN 3 reverse 9:69039145-69039174; AsCpf1-1
agcaattatcctgcctcagcctcct

SEQ ID NO: 12237 - DNA, 18 bp, Artificial Sequence
  Synthetic: FXN 3 reverse 9:69039152-69039174; AsCpf1-1
gggttcaagcaattatcc

SEQ ID NO: 12238 - DNA, 19 bp, Artificial Sequence
  Synthetic: FXN 3 reverse 9:69039152-69039175; AsCpf1-1
gggttcaagcaattatcct

SEQ ID NO: 12239 - DNA, 20 bp, Artificial Sequence
  Synthetic: FXN 3 reverse 9:69039152-69039176; AsCpf1-1
gggttcaagcaattatcctg

SEQ ID NO: 12240 - DNA, 21 bp, Artificial Sequence
  Synthetic: FXN 3 reverse 9:69039152-69039177; AsCpf1-1
gggttcaagcaattatcctgc

SEQ ID NO: 12241 - DNA, 22 bp, Artificial Sequence
  Synthetic: FXN 3 reverse 9:69039152-69039178; AsCpf1-1
gggttcaagcaattatcctgcc

SEQ ID NO: 12242 - DNA, 23 bp, Artificial Sequence
  Synthetic: FXN 3 reverse 9:69039152-69039179; AsCpf1-1
gggttcaagcaattatcctgcct

SEQ ID NO: 12243 - DNA, 24 bp, Artificial Sequence
  Synthetic: FXN 3 reverse 9:69039152-69039180; AsCpf1-1
gggttcaagcaattatcctgcctc

SEQ ID NO: 12244 - DNA, 25 bp, Artificial Sequence
  Synthetic: FXN 3 reverse 9:69039152-69039181; AsCpf1-1
gggttcaagcaattatcctgcctca

SEQ ID NO: 12245 - DNA, 18 bp, Artificial Sequence
  Synthetic: FXN 3 reverse 9:69039161-69039183; AsCpf1-1
ccacctcccgggttcaag

SEQ ID NO: 12246 - DNA, 19 bp, Artificial Sequence
  Synthetic: FXN 3 reverse 9:69039161-69039184; AsCpf1-1
ccacctcccgggttcaagc

SEQ ID NO: 12247 - DNA, 20 bp, Artificial Sequence
  Synthetic: FXN 3 reverse 9:69039161-69039185; AsCpf1-1
ccacctcccgggttcaagca

SEQ ID NO: 12248 - DNA, 21 bp, Artificial Sequence
  Synthetic: FXN 3 reverse 9:69039161-69039186; AsCpf1-1
ccacctcccgggttcaagcaa

SEQ ID NO: 12249 - DNA, 22 bp, Artificial Sequence
  Synthetic: FXN 3 reverse 9:69039161-69039187; AsCpf1-1
ccacctcccgggttcaagcaat

SEQ ID NO: 12250 - DNA, 23 bp, Artificial Sequence
  Synthetic: FXN 3 reverse 9:69039161-69039188; AsCpf1-1
ccacctcccgggttcaagcaatt

SEQ ID NO: 12251 - DNA, 24 bp, Artificial Sequence
  Synthetic: FXN 3 reverse 9:69039161-69039189; AsCpf1-1
ccacctcccgggttcaagcaatta

SEQ ID NO: 12252 - DNA, 25 bp, Artificial Sequence
  Synthetic: FXN 3 reverse 9:69039161-69039190; AsCpf1-1
ccacctcccgggttcaagcaattat

SEQ ID NO: 12253 - DNA, 18 bp, Artificial Sequence
  Synthetic: FXN 3 forward 9:69039221-69039243; AsCpf1-1
aacctgggcgacagagcg

SEQ ID NO: 12254 - DNA, 19 bp, Artificial Sequence
  Synthetic: FXN 3 forward 9:69039221-69039244; AsCpf1-1
aacctgggcgacagagcga

SEQ ID NO: 12255 - DNA, 20 bp, Artificial Sequence
  Synthetic: FXN 3 forward 9:69039221-69039245; AsCpf1-1
aacctgggcgacagagcgag

SEQ ID NO: 12256 - DNA, 21 bp, Artificial Sequence
  Synthetic: FXN 3 forward 9:69039221-69039246; AsCpf1-1
aacctgggcgacagagcgaga

SEQ ID NO: 12257 - DNA, 22 bp, Artificial Sequence
  Synthetic: FXN 3 forward 9:69039221-69039247; AsCpf1-1
aacctgggcgacagagcgagac

SEQ ID NO: 12258 - DNA, 23 bp, Artificial Sequence
  Synthetic: FXN 3 forward 9:69039221-69039248; AsCpf1-1
aacctgggcgacagagcgagact

SEQ ID NO: 12259 - DNA, 24 bp, Artificial Sequence
  Synthetic: FXN 3 forward 9:69039221-69039249; AsCpf1-1
aacctgggcgacagagcgagactc

SEQ ID NO: 12260 - DNA, 25 bp, Artificial Sequence
  Synthetic: FXN 3 forward 9:69039221-69039250; AsCpf1-1
aacctgggcgacagagcgagactcc

SEQ ID NO: 12261 - DNA, 18 bp, Artificial Sequence
  Synthetic: FXN 3 forward 9:69039222-69039244; AsCpf1-1
acctgggcgacagagcga

SEQ ID NO: 12262 - DNA, 19 bp, Artificial Sequence
  Synthetic: FXN 3 forward 9:69039222-69039245; AsCpf1-1
acctgggcgacagagcgag

SEQ ID NO: 12263 - DNA, 20 bp, Artificial Sequence
  Synthetic: FXN 3 forward 9:69039222-69039246; AsCpf1-1
acctgggcgacagagcgaga

SEQ ID NO: 12264 - DNA, 21 bp, Artificial Sequence
  Synthetic: FXN 3 forward 9:69039222-69039247; AsCpf1-1
acctgggcgacagagcgagac

SEQ ID NO: 12265 - DNA, 22 bp, Artificial Sequence
  Synthetic: FXN 3 forward 9:69039222-69039248; AsCpf1-1
acctgggcgacagagcgagact

SEQ ID NO: 12266 - DNA, 23 bp, Artificial Sequence
  Synthetic: FXN 3 forward 9:69039222-69039249; AsCpf1-1
acctgggcgacagagcgagactc

SEQ ID NO: 12267 - DNA, 24 bp, Artificial Sequence
  Synthetic: FXN 3 forward 9:69039222-69039250; AsCpf1-1
acctgggcgacagagcgagactcc

SEQ ID NO: 12268 - DNA, 25 bp, Artificial Sequence
  Synthetic: FXN 3 forward 9:69039222-69039251; AsCpf1-1
acctgggcgacagagcgagactccg

SEQ ID NO: 12269 - DNA, 18 bp, Artificial Sequence
  Synthetic: FXN 3 forward 9:69039247-69039269; AsCpf1-1
tctcaaaaaaaaaaaaaa

SEQ ID NO: 12270 - DNA, 19 bp, Artificial Sequence
  Synthetic: FXN 3 forward 9:69039247-69039270; AsCpf1-1
tctcaaaaaaaaaaaaaag

SEQ ID NO: 12271 - DNA, 20 bp, Artificial Sequence
  Synthetic: FXN 3 forward 9:69039247-69039271; AsCpf1-1
tctcaaaaaaaaaaaaaagg

SEQ ID NO: 12272 - DNA, 21 bp, Artificial Sequence
  Synthetic: FXN 3 forward 9:69039247-69039272; AsCpf1-1
tctcaaaaaaaaaaaaaaggc

SEQ ID NO: 12273 - DNA, 22 bp, Artificial Sequence
  Synthetic: FXN 3 forward 9:69039247-69039273; AsCpf1-1
tctcaaaaaaaaaaaaaaggct

SEQ ID NO: 12274 - DNA, 23 bp, Artificial Sequence
  Synthetic: FXN 3 forward 9:69039247-69039274; AsCpf1-1
tctcaaaaaaaaaaaaaaggctc

SEQ ID NO: 12275 - DNA, 24 bp, Artificial Sequence
  Synthetic: FXN 3 forward 9:69039247-69039275; AsCpf1-1
tctcaaaaaaaaaaaaaaggctcc

SEQ ID NO: 12276 - DNA, 25 bp, Artificial Sequence
  Synthetic: FXN 3 forward 9:69039247-69039276; AsCpf1-1
tctcaaaaaaaaaaaaaaggctcct

SEQ ID NO: 12277 - DNA, 18 bp, Artificial Sequence
  Synthetic: FXN 3 reverse 9:69039296-69039318; AsCpf1-1
tttaattttaattatttg

SEQ ID NO: 12278 - DNA, 19 bp, Artificial Sequence
  Synthetic: FXN 3 reverse 9:69039296-69039319; AsCpf1-1
tttaattttaattatttga

SEQ ID NO: 12279 - DNA, 20 bp, Artificial Sequence
  Synthetic: FXN 3 reverse 9:69039296-69039320; AsCpf1-1
tttaattttaattatttgag

SEQ ID NO: 12280 - DNA, 21 bp, Artificial Sequence
  Synthetic: FXN 3 reverse 9:69039296-69039321; AsCpf1-1
tttaattttaattatttgagg

SEQ ID NO: 12281 - DNA, 22 bp, Artificial Sequence
  Synthetic: FXN 3 reverse 9:69039296-69039322; AsCpf1-1
tttaattttaattatttgaggt

SEQ ID NO: 12282 - DNA, 23 bp, Artificial Sequence
  Synthetic: FXN 3 reverse 9:69039296-69039323; AsCpf1-1
tttaattttaattatttgaggtg

SEQ ID NO: 12283 - DNA, 24 bp, Artificial Sequence
  Synthetic: FXN 3 reverse 9:69039296-69039324; AsCpf1-1
tttaattttaattatttgaggtga

SEQ ID NO: 12284 - DNA, 25 bp, Artificial Sequence
  Synthetic: FXN 3 reverse 9:69039296-69039325; AsCpf1-1
tttaattttaattatttgaggtgat

SEQ ID NO: 12285 - DNA, 18 bp, Artificial Sequence
  Synthetic: FXN 3 reverse 9:69039302-69039324; AsCpf1-1
acttcatttaattttaat

SEQ ID NO: 12286 - DNA, 19 bp, Artificial Sequence
  Synthetic: FXN 3 reverse 9:69039302-69039325; AsCpf1-1
acttcatttaattttaatt

SEQ ID NO: 12287 - DNA, 20 bp, Artificial Sequence
  Synthetic: FXN 3 reverse 9:69039302-69039326; AsCpf1-1
acttcatttaattttaatta

SEQ ID NO: 12288 - DNA, 21 bp, Artificial Sequence
  Synthetic: FXN 3 reverse 9:69039302-69039327; AsCpf1-1
acttcatttaattttaattat

SEQ ID NO: 12289 - DNA, 22 bp, Artificial Sequence
  Synthetic: FXN 3 reverse 9:69039302-69039328; AsCpf1-1
acttcatttaattttaattatt

SEQ ID NO: 12290 - DNA, 23 bp, Artificial Sequence
  Synthetic: FXN 3 reverse 9:69039302-69039329; AsCpf1-1
acttcatttaattttaattattt

SEQ ID NO: 12291 - DNA, 24 bp, Artificial Sequence
  Synthetic: FXN 3 reverse 9:69039302-69039330; AsCpf1-1
acttcatttaattttaattatttg

SEQ ID NO: 12292 - DNA, 25 bp, Artificial Sequence
  Synthetic: FXN 3 reverse 9:69039302-69039331; AsCpf1-1
acttcatttaattttaattatttga

SEQ ID NO: 12293 - DNA, 18 bp, Artificial Sequence
  Synthetic: FXN 3 forward 9:69039333-69039355; AsCpf1-1
ggtcctcagtcccattag

SEQ ID NO: 12294 - DNA, 19 bp, Artificial Sequence
  Synthetic: FXN 3 forward 9:69039333-69039356; AsCpf1-1
ggtcctcagtcccattagc

SEQ ID NO: 12295 - DNA, 20 bp, Artificial Sequence
  Synthetic: FXN 3 forward 9:69039333-69039357; AsCpf1-1
ggtcctcagtcccattagcc

SEQ ID NO: 12296 - DNA, 21 bp, Artificial Sequence
  Synthetic: FXN 3 forward 9:69039333-69039358; AsCpf1-1
ggtcctcagtcccattagcca

SEQ ID NO: 12297 - DNA, 22 bp, Artificial Sequence
  Synthetic: FXN 3 forward 9:69039333-69039359; AsCpf1-1
ggtcctcagtcccattagccac

SEQ ID NO: 12298 - DNA, 23 bp, Artificial Sequence
  Synthetic: FXN 3 forward 9:69039333-69039360; AsCpf1-1
ggtcctcagtcccattagccaca

SEQ ID NO: 12299 - DNA, 24 bp, Artificial Sequence
  Synthetic: FXN 3 forward 9:69039333-69039361; AsCpf1-1
ggtcctcagtcccattagccacat

SEQ ID NO: 12300 - DNA, 25 bp, Artificial Sequence
  Synthetic: FXN 3 forward 9:69039333-69039362; AsCpf1-1
ggtcctcagtcccattagccacatt

SEQ ID NO: 12301 - DNA, 18 bp, Artificial Sequence
  Synthetic: FXN 3 forward 9:69039346-69039368; AsCpf1-1
attagccacatttctagt

SEQ ID NO: 12302 - DNA, 19 bp, Artificial Sequence
  Synthetic: FXN 3 forward 9:69039346-69039369; AsCpf1-1
attagccacatttctagtg

SEQ ID NO: 12303 - DNA, 20 bp, Artificial Sequence
  Synthetic: FXN 3 forward 9:69039346-69039370; AsCpf1-1
attagccacatttctagtgc

SEQ ID NO: 12304 - DNA, 21 bp, Artificial Sequence
  Synthetic: FXN 3 forward 9:69039346-69039371; AsCpf1-1
attagccacatttctagtgct

SEQ ID NO: 12305 - DNA, 22 bp, Artificial Sequence
  Synthetic: FXN 3 forward 9:69039346-69039372; AsCpf1-1
attagccacatttctagtgctc

SEQ ID NO: 12306 - DNA, 23 bp, Artificial Sequence
  Synthetic: FXN 3 forward 9:69039346-69039373; AsCpf1-1
attagccacatttctagtgctca

SEQ ID NO: 12307 - DNA, 24 bp, Artificial Sequence
  Synthetic: FXN 3 forward 9:69039346-69039374; AsCpf1-1
attagccacatttctagtgctcag

SEQ ID NO: 12308 - DNA, 25 bp, Artificial Sequence
  Synthetic: FXN 3 forward 9:69039346-69039375; AsCpf1-1
attagccacatttctagtgctcagt

SEQ ID NO: 12309 - DNA, 18 bp, Artificial Sequence
  Synthetic: FXN 3 reverse 9:69039377-69039399; AsCpf1-1
atgtggtggtcaccagcc

SEQ ID NO: 12310 - DNA, 19 bp, Artificial Sequence
  Synthetic: FXN 3 reverse 9:69039377-69039400; AsCpf1-1
atgtggtggtcaccagccc

SEQ ID NO: 12311 - DNA, 20 bp, Artificial Sequence
  Synthetic: FXN 3 reverse 9:69039377-69039401; AsCpf1-1
atgtggtggtcaccagcccc

SEQ ID NO: 12312 - DNA, 21 bp, Artificial Sequence
  Synthetic: FXN 3 reverse 9:69039377-69039402; AsCpf1-1
atgtggtggtcaccagccccc

SEQ ID NO: 12313 - DNA, 22 bp, Artificial Sequence
  Synthetic: FXN 3 reverse 9:69039377-69039403; AsCpf1-1
atgtggtggtcaccagcccccg

SEQ ID NO: 12314 - DNA, 23 bp, Artificial Sequence
  Synthetic: FXN 3 reverse 9:69039377-69039404; AsCpf1-1
atgtggtggtcaccagcccccgt

SEQ ID NO: 12315 - DNA, 24 bp, Artificial Sequence
  Synthetic: FXN 3 reverse 9:69039377-69039405; AsCpf1-1
atgtggtggtcaccagcccccgtg

SEQ ID NO: 12316 - DNA, 25 bp, Artificial Sequence
  Synthetic: FXN 3 reverse 9:69039377-69039406; AsCpf1-1
atgtggtggtcaccagcccccgtgg

SEQ ID NO: 12317 - DNA, 18 bp, Artificial Sequence
  Synthetic: FXN 3 forward 9:69039465-69039487; AsCpf1-1
cagaaacggcttttaaaa

SEQ ID NO: 12318 - DNA, 19 bp, Artificial Sequence
  Synthetic: FXN 3 forward 9:69039465-69039488; AsCpf1-1
cagaaacggcttttaaaag

SEQ ID NO: 12319 - DNA, 20 bp, Artificial Sequence
  Synthetic: FXN 3 forward 9:69039465-69039489; AsCpf1-1
cagaaacggcttttaaaagc

SEQ ID NO: 12320 - DNA, 21 bp, Artificial Sequence
  Synthetic: FXN 3 forward 9:69039465-69039490; AsCpf1-1
cagaaacggcttttaaaagca

SEQ ID NO: 12321 - DNA, 22 bp, Artificial Sequence
  Synthetic: FXN 3 forward 9:69039465-69039491; AsCpf1-1
cagaaacggcttttaaaagcac

SEQ ID NO: 12322 - DNA, 23 bp, Artificial Sequence
  Synthetic: FXN 3 forward 9:69039465-69039492; AsCpf1-1
cagaaacggcttttaaaagcaca

SEQ ID NO: 12323 - DNA, 24 bp, Artificial Sequence
  Synthetic: FXN 3 forward 9:69039465-69039493; AsCpf1-1
cagaaacggcttttaaaagcacag

SEQ ID NO: 12324 - DNA, 25 bp, Artificial Sequence
  Synthetic: FXN 3 forward 9:69039465-69039494; AsCpf1-1
cagaaacggcttttaaaagcacagc

SEQ ID NO: 12325 - DNA, 18 bp, Artificial Sequence
  Synthetic: FXN 3 reverse 9:69039500-69039522; AsCpf1-1
ggtaggtaaggctggggc

SEQ ID NO: 12326 - DNA, 19 bp, Artificial Sequence
  Synthetic: FXN 3 reverse 9:69039500-69039523; AsCpf1-1
ggtaggtaaggctggggct

SEQ ID NO: 12327 - DNA, 20 bp, Artificial Sequence
  Synthetic: FXN 3 reverse 9:69039500-69039524; AsCpf1-1
ggtaggtaaggctggggctg

SEQ ID NO: 12328 - DNA, 21 bp, Artificial Sequence
  Synthetic: FXN 3 reverse 9:69039500-69039525; AsCpf1-1
ggtaggtaaggctggggctgg

SEQ ID NO: 12329 - DNA, 22 bp, Artificial Sequence
  Synthetic: FXN 3 reverse 9:69039500-69039526; AsCpf1-1
ggtaggtaaggctggggctggg

SEQ ID NO: 12330 - DNA, 23 bp, Artificial Sequence
  Synthetic: FXN 3 reverse 9:69039500-69039527; AsCpf1-1
ggtaggtaaggctggggctgggg

SEQ ID NO: 12331 - DNA, 24 bp, Artificial Sequence
  Synthetic: FXN 3 reverse 9:69039500-69039528; AsCpf1-1
ggtaggtaaggctggggctggggg

SEQ ID NO: 12332 - DNA, 25 bp, Artificial Sequence
  Synthetic: FXN 3 reverse 9:69039500-69039529; AsCpf1-1
ggtaggtaaggctggggctgggggc

SEQ ID NO: 12333 - DNA, 18 bp, Artificial Sequence
  Synthetic: FXN 3 reverse 9:69039508-69039530; AsCpf1-1
agcctccaggtaggtaag

SEQ ID NO: 12334 - DNA, 19 bp, Artificial Sequence
  Synthetic: FXN 3 reverse 9:69039508-69039531; AsCpf1-1
agcctccaggtaggtaagg

SEQ ID NO: 12335 - DNA, 20 bp, Artificial Sequence
  Synthetic: FXN 3 reverse 9:69039508-69039532; AsCpf1-1
agcctccaggtaggtaaggc

SEQ ID NO: 12336 - DNA, 21 bp, Artificial Sequence
  Synthetic: FXN 3 reverse 9:69039508-69039533; AsCpf1-1
agcctccaggtaggtaaggct

SEQ ID NO: 12337 - DNA, 22 bp, Artificial Sequence
  Synthetic: FXN 3 reverse 9:69039508-69039534; AsCpf1-1
agcctccaggtaggtaaggctg

SEQ ID NO: 12338 - DNA, 23 bp, Artificial Sequence
  Synthetic: FXN 3 reverse 9:69039508-69039535; AsCpf1-1
agcctccaggtaggtaaggctgg

SEQ ID NO: 12339 - DNA, 24 bp, Artificial Sequence
  Synthetic: FXN 3 reverse 9:69039508-69039536; AsCpf1-1
agcctccaggtaggtaaggctggg

SEQ ID NO: 12340 - DNA, 25 bp, Artificial Sequence
  Synthetic: FXN 3 reverse 9:69039508-69039537; AsCpf1-1
agcctccaggtaggtaaggctgggg

SEQ ID NO: 12341 - DNA, 18 bp, Artificial Sequence
  Synthetic: FXN 3 reverse 9:69039509-69039531; AsCpf1-1
cagcctccaggtaggtaa

SEQ ID NO: 12342 - DNA, 19 bp, Artificial Sequence
  Synthetic: FXN 3 reverse 9:69039509-69039532; AsCpf1-1
cagcctccaggtaggtaag

SEQ ID NO: 12343 - DNA, 20 bp, Artificial Sequence
  Synthetic: FXN 3 reverse 9:69039509-69039533; AsCpf1-1
cagcctccaggtaggtaagg

SEQ ID NO: 12344 - DNA, 21 bp, Artificial Sequence
  Synthetic: FXN 3 reverse 9:69039509-69039534; AsCpf1-1
cagcctccaggtaggtaaggc

SEQ ID NO: 12345 - DNA, 22 bp, Artificial Sequence
  Synthetic: FXN 3 reverse 9:69039509-69039535; AsCpf1-1
cagcctccaggtaggtaaggct

SEQ ID NO: 12346 - DNA, 23 bp, Artificial Sequence
  Synthetic: FXN 3 reverse 9:69039509-69039536; AsCpf1-1
cagcctccaggtaggtaaggctg

SEQ ID NO: 12347 - DNA, 24 bp, Artificial Sequence
  Synthetic: FXN 3 reverse 9:69039509-69039537; AsCpf1-1
cagcctccaggtaggtaaggctgg

SEQ ID NO: 12348 - DNA, 25 bp, Artificial Sequence
  Synthetic: FXN 3 reverse 9:69039509-69039538; AsCpf1-1
cagcctccaggtaggtaaggctggg

SEQ ID NO: 12349 - DNA, 18 bp, Artificial Sequence
  Synthetic: FXN 3 forward 9:69039547-69039569; AsCpf1-1
acgaggcagcctatgttt

SEQ ID NO: 12350 - DNA, 19 bp, Artificial Sequence
  Synthetic: FXN 3 forward 9:69039547-69039570; AsCpf1-1
acgaggcagcctatgtttt

SEQ ID NO: 12351 - DNA, 20 bp, Artificial Sequence
  Synthetic: FXN 3 forward 9:69039547-69039571; AsCpf1-1
acgaggcagcctatgttttt

SEQ ID NO: 12352 - DNA, 21 bp, Artificial Sequence
  Synthetic: FXN 3 forward 9:69039547-69039572; AsCpf1-1
acgaggcagcctatgtttttt

SEQ ID NO: 12353 - DNA, 22 bp, Artificial Sequence
  Synthetic: FXN 3 forward 9:69039547-69039573; AsCpf1-1
acgaggcagcctatgttttttg

SEQ ID NO: 12354 - DNA, 23 bp, Artificial Sequence
  Synthetic: FXN 3 forward 9:69039547-69039574; AsCpf1-1
acgaggcagcctatgttttttga

SEQ ID NO: 12355 - DNA, 24 bp, Artificial Sequence
  Synthetic: FXN 3 forward 9:69039547-69039575; AsCpf1-1
acgaggcagcctatgttttttgat

SEQ ID NO: 12356 - DNA, 25 bp, Artificial Sequence
  Synthetic: FXN 3 forward 9:69039547-69039576; AsCpf1-1
acgaggcagcctatgttttttgatg

SEQ ID NO: 12357 - DNA, 18 bp, Artificial Sequence
  Synthetic: FXN 3 forward 9:69039548-69039570; AsCpf1-1
cgaggcagcctatgtttt

SEQ ID NO: 12358 - DNA, 19 bp, Artificial Sequence
  Synthetic: FXN 3 forward 9:69039548-69039571; AsCpf1-1
cgaggcagcctatgttttt

SEQ ID NO: 12359 - DNA, 20 bp, Artificial Sequence
  Synthetic: FXN 3 forward 9:69039548-69039572; AsCpf1-1
cgaggcagcctatgtttttt

SEQ ID NO: 12360 - DNA, 21 bp, Artificial Sequence
  Synthetic: FXN 3 forward 9:69039548-69039573; AsCpf1-1
cgaggcagcctatgttttttg

SEQ ID NO: 12361 - DNA, 22 bp, Artificial Sequence
  Synthetic: FXN 3 forward 9:69039548-69039574; AsCpf1-1
cgaggcagcctatgttttttga

SEQ ID NO: 12362 - DNA, 23 bp, Artificial Sequence
  Synthetic: FXN 3 forward 9:69039548-69039575; AsCpf1-1
cgaggcagcctatgttttttgat

SEQ ID NO: 12363 - DNA, 24 bp, Artificial Sequence
  Synthetic: FXN 3 forward 9:69039548-69039576; AsCpf1-1
cgaggcagcctatgttttttgatg

SEQ ID NO: 12364 - DNA, 25 bp, Artificial Sequence
  Synthetic: FXN 3 forward 9:69039548-69039577; AsCpf1-1
cgaggcagcctatgttttttgatgg

SEQ ID NO: 12365 - DNA, 18 bp, Artificial Sequence
  Synthetic: FXN 3 reverse 9:69039549-69039571; AsCpf1-1
tcaaaaaacataggctgc

SEQ ID NO: 12366 - DNA, 19 bp, Artificial Sequence
  Synthetic: FXN 3 reverse 9:69039549-69039572; AsCpf1-1
tcaaaaaacataggctgcc

SEQ ID NO: 12367 - DNA, 20 bp, Artificial Sequence
  Synthetic: FXN 3 reverse 9:69039549-69039573; AsCpf1-1
tcaaaaaacataggctgcct

SEQ ID NO: 12368 - DNA, 21 bp, Artificial Sequence
  Synthetic: FXN 3 reverse 9:69039549-69039574; AsCpf1-1
tcaaaaaacataggctgcctc

SEQ ID NO: 12369 - DNA, 22 bp, Artificial Sequence
  Synthetic: FXN 3 reverse 9:69039549-69039575; AsCpf1-1
tcaaaaaacataggctgcctcg

SEQ ID NO: 12370 - DNA, 23 bp, Artificial Sequence
  Synthetic: FXN 3 reverse 9:69039549-69039576; AsCpf1-1
tcaaaaaacataggctgcctcgt

SEQ ID NO: 12371 - DNA, 24 bp, Artificial Sequence
  Synthetic: FXN 3 reverse 9:69039549-69039577; AsCpf1-1
tcaaaaaacataggctgcctcgtg

SEQ ID NO: 12372 - DNA, 25 bp, Artificial Sequence
  Synthetic: FXN 3 reverse 9:69039549-69039578; AsCpf1-1
tcaaaaaacataggctgcctcgtgg

SEQ ID NO: 12373 - DNA, 18 bp, Artificial Sequence
  Synthetic: FXN 3 reverse 9:69039553-69039575; AsCpf1-1
tccatcaaaaaacatagg

SEQ ID NO: 12374 - DNA, 19 bp, Artificial Sequence
  Synthetic: FXN 3 reverse 9:69039553-69039576; AsCpf1-1
tccatcaaaaaacataggc

SEQ ID NO: 12375 - DNA, 20 bp, Artificial Sequence
  Synthetic: FXN 3 reverse 9:69039553-69039577; AsCpf1-1
tccatcaaaaaacataggct

SEQ ID NO: 12376 - DNA, 21 bp, Artificial Sequence
  Synthetic: FXN 3 reverse 9:69039553-69039578; AsCpf1-1
tccatcaaaaaacataggctg

SEQ ID NO: 12377 - DNA, 22 bp, Artificial Sequence
  Synthetic: FXN 3 reverse 9:69039553-69039579; AsCpf1-1
tccatcaaaaaacataggctgc

SEQ ID NO: 12378 - DNA, 23 bp, Artificial Sequence
  Synthetic: FXN 3 reverse 9:69039553-69039580; AsCpf1-1
tccatcaaaaaacataggctgcc

SEQ ID NO: 12379 - DNA, 24 bp, Artificial Sequence
  Synthetic: FXN 3 reverse 9:69039553-69039581; AsCpf1-1
tccatcaaaaaacataggctgcct

SEQ ID NO: 12380 - DNA, 25 bp, Artificial Sequence
  Synthetic: FXN 3 reverse 9:69039553-69039582; AsCpf1-1
tccatcaaaaaacataggctgcctc

SEQ ID NO: 12381 - DNA, 18 bp, Artificial Sequence
  Synthetic: FXN 3 reverse 9:69039597-69039619; AsCpf1-1
gtatttaagaggaaacgt

SEQ ID NO: 12382 - DNA, 19 bp, Artificial Sequence
  Synthetic: FXN 3 reverse 9:69039597-69039620; AsCpf1-1
gtatttaagaggaaacgtt

SEQ ID NO: 12383 - DNA, 20 bp, Artificial Sequence
  Synthetic: FXN 3 reverse 9:69039597-69039621; AsCpf1-1
gtatttaagaggaaacgtta

SEQ ID NO: 12384 - DNA, 21 bp, Artificial Sequence
  Synthetic: FXN 3 reverse 9:69039597-69039622; AsCpf1-1
gtatttaagaggaaacgttaa

SEQ ID NO: 12385 - DNA, 22 bp, Artificial Sequence
  Synthetic: FXN 3 reverse 9:69039597-69039623; AsCpf1-1
gtatttaagaggaaacgttaaa

SEQ ID NO: 12386 - DNA, 23 bp, Artificial Sequence
  Synthetic: FXN 3 reverse 9:69039597-69039624; AsCpf1-1
gtatttaagaggaaacgttaaag

SEQ ID NO: 12387 - DNA, 24 bp, Artificial Sequence
  Synthetic: FXN 3 reverse 9:69039597-69039625; AsCpf1-1
gtatttaagaggaaacgttaaaga

SEQ ID NO: 12388 - DNA, 25 bp, Artificial Sequence
  Synthetic: FXN 3 reverse 9:69039597-69039626; AsCpf1-1
gtatttaagaggaaacgttaaagat

SEQ ID NO: 12389 - DNA, 18 bp, Artificial Sequence
  Synthetic: FXN 3 forward 9:69039608-69039630; AsCpf1-1
tcttaaatactggagaca

SEQ ID NO: 12390 - DNA, 19 bp, Artificial Sequence
  Synthetic: FXN 3 forward 9:69039608-69039631; AsCpf1-1
tcttaaatactggagacag

SEQ ID NO: 12391 - DNA, 20 bp, Artificial Sequence
  Synthetic: FXN 3 forward 9:69039608-69039632; AsCpf1-1
tcttaaatactggagacagc

SEQ ID NO: 12392 - DNA, 21 bp, Artificial Sequence
  Synthetic: FXN 3 forward 9:69039608-69039633; AsCpf1-1
tcttaaatactggagacagct

SEQ ID NO: 12393 - DNA, 22 bp, Artificial Sequence
  Synthetic: FXN 3 forward 9:69039608-69039634; AsCpf1-1
tcttaaatactggagacagctt

SEQ ID NO: 12394 - DNA, 23 bp, Artificial Sequence
  Synthetic: FXN 3 forward 9:69039608-69039635; AsCpf1-1
tcttaaatactggagacagcttc

SEQ ID NO: 12395 - DNA, 24 bp, Artificial Sequence
  Synthetic: FXN 3 forward 9:69039608-69039636; AsCpf1-1
tcttaaatactggagacagcttcg

SEQ ID NO: 12396 - DNA, 25 bp, Artificial Sequence
  Synthetic: FXN 3 forward 9:69039608-69039637; AsCpf1-1
tcttaaatactggagacagcttcga

SEQ ID NO: 12397 - DNA, 18 bp, Artificial Sequence
  Synthetic: FXN 3 reverse 9:69039624-69039646; AsCpf1-1
gttatctcctcctcgaag

SEQ ID NO: 12398 - DNA, 19 bp, Artificial Sequence
  Synthetic: FXN 3 reverse 9:69039624-69039647; AsCpf1-1
gttatctcctcctcgaagc

SEQ ID NO: 12399 - DNA, 20 bp, Artificial Sequence
  Synthetic: FXN 3 reverse 9:69039624-69039648; AsCpf1-1
gttatctcctcctcgaagct

SEQ ID NO: 12400 - DNA, 21 bp, Artificial Sequence
  Synthetic: FXN 3 reverse 9:69039624-69039649; AsCpf1-1
gttatctcctcctcgaagctg

SEQ ID NO: 12401 - DNA, 22 bp, Artificial Sequence
  Synthetic: FXN 3 reverse 9:69039624-69039650; AsCpf1-1
gttatctcctcctcgaagctgt

SEQ ID NO: 12402 - DNA, 23 bp, Artificial Sequence
  Synthetic: FXN 3 reverse 9:69039624-69039651; AsCpf1-1
gttatctcctcctcgaagctgtc

SEQ ID NO: 12403 - DNA, 24 bp, Artificial Sequence
  Synthetic: FXN 3 reverse 9:69039624-69039652; AsCpf1-1
gttatctcctcctcgaagctgtct

SEQ ID NO: 12404 - DNA, 25 bp, Artificial Sequence
  Synthetic: FXN 3 reverse 9:69039624-69039653; AsCpf1-1
gttatctcctcctcgaagctgtctc

SEQ ID NO: 12405 - DNA, 18 bp, Artificial Sequence
  Synthetic: FXN 3 forward 9:69039632-69039654; AsCpf1-1
aggaggagataactggat

SEQ ID NO: 12406 - DNA, 19 bp, Artificial Sequence
  Synthetic: FXN 3 forward 9:69039632-69039655; AsCpf1-1
aggaggagataactggatg

SEQ ID NO: 12407 - DNA, 20 bp, Artificial Sequence
  Synthetic: FXN 3 forward 9:69039632-69039656; AsCpf1-1
aggaggagataactggatgt

SEQ ID NO: 12408 - DNA, 21 bp, Artificial Sequence
  Synthetic: FXN 3 forward 9:69039632-69039657; AsCpf1-1
aggaggagataactggatgtg

SEQ ID NO: 12409 - DNA, 22 bp, Artificial Sequence
  Synthetic: FXN 3 forward 9:69039632-69039658; AsCpf1-1
aggaggagataactggatgtgt

SEQ ID NO: 12410 - DNA, 23 bp, Artificial Sequence
  Synthetic: FXN 3 forward 9:69039632-69039659; AsCpf1-1
aggaggagataactggatgtgtc

SEQ ID NO: 12411 - DNA, 24 bp, Artificial Sequence
  Synthetic: FXN 3 forward 9:69039632-69039660; AsCpf1-1
aggaggagataactggatgtgtct

SEQ ID NO: 12412 - DNA, 25 bp, Artificial Sequence
  Synthetic: FXN 3 forward 9:69039632-69039661; AsCpf1-1
aggaggagataactggatgtgtctt

SEQ ID NO: 12413 - DNA, 18 bp, Artificial Sequence
  Synthetic: FXN 3 reverse 9:69039647-69039669; AsCpf1-1
tcaaatggactaagacac

SEQ ID NO: 12414 - DNA, 19 bp, Artificial Sequence
  Synthetic: FXN 3 reverse 9:69039647-69039670; AsCpf1-1
tcaaatggactaagacaca

SEQ ID NO: 12415 - DNA, 20 bp, Artificial Sequence
  Synthetic: FXN 3 reverse 9:69039647-69039671; AsCpf1-1
tcaaatggactaagacacat

SEQ ID NO: 12416 - DNA, 21 bp, Artificial Sequence
  Synthetic: FXN 3 reverse 9:69039647-69039672; AsCpf1-1
tcaaatggactaagacacatc

SEQ ID NO: 12417 - DNA, 22 bp, Artificial Sequence
  Synthetic: FXN 3 reverse 9:69039647-69039673; AsCpf1-1
tcaaatggactaagacacatcc

SEQ ID NO: 12418 - DNA, 23 bp, Artificial Sequence
  Synthetic: FXN 3 reverse 9:69039647-69039674; AsCpf1-1
tcaaatggactaagacacatcca

SEQ ID NO: 12419 - DNA, 24 bp, Artificial Sequence
  Synthetic: FXN 3 reverse 9:69039647-69039675; AsCpf1-1
tcaaatggactaagacacatccag

SEQ ID NO: 12420 - DNA, 25 bp, Artificial Sequence
  Synthetic: FXN 3 reverse 9:69039647-69039676; AsCpf1-1
tcaaatggactaagacacatccagt

SEQ ID NO: 12421 - DNA, 18 bp, Artificial Sequence
  Synthetic: FXN 3 reverse 9:69039651-69039673; AsCpf1-1
tccatcaaatggactaag

SEQ ID NO: 12422 - DNA, 19 bp, Artificial Sequence
  Synthetic: FXN 3 reverse 9:69039651-69039674; AsCpf1-1
tccatcaaatggactaaga

SEQ ID NO: 12423 - DNA, 20 bp, Artificial Sequence
  Synthetic: FXN 3 reverse 9:69039651-69039675; AsCpf1-1
tccatcaaatggactaagac

SEQ ID NO: 12424 - DNA, 21 bp, Artificial Sequence
  Synthetic: FXN 3 reverse 9:69039651-69039676; AsCpf1-1
tccatcaaatggactaagaca

SEQ ID NO: 12425 - DNA, 22 bp, Artificial Sequence
  Synthetic: FXN 3 reverse 9:69039651-69039677; AsCpf1-1
tccatcaaatggactaagacac

SEQ ID NO: 12426 - DNA, 23 bp, Artificial Sequence
  Synthetic: FXN 3 reverse 9:69039651-69039678; AsCpf1-1
tccatcaaatggactaagacaca

SEQ ID NO: 12427 - DNA, 24 bp, Artificial Sequence
  Synthetic: FXN 3 reverse 9:69039651-69039679; AsCpf1-1
tccatcaaatggactaagacacat

SEQ ID NO: 12428 - DNA, 25 bp, Artificial Sequence
  Synthetic: FXN 3 reverse 9:69039651-69039680; AsCpf1-1
tccatcaaatggactaagacacatc

SEQ ID NO: 12429 - DNA, 18 bp, Artificial Sequence
  Synthetic: FXN 3 forward 9:69039663-69039685; AsCpf1-1
tttgatggagggatgtga

SEQ ID NO: 12430 - DNA, 19 bp, Artificial Sequence
  Synthetic: FXN 3 forward 9:69039663-69039686; AsCpf1-1
tttgatggagggatgtgac

SEQ ID NO: 12431 - DNA, 20 bp, Artificial Sequence
  Synthetic: FXN 3 forward 9:69039663-69039687; AsCpf1-1
tttgatggagggatgtgacg

SEQ ID NO: 12432 - DNA, 21 bp, Artificial Sequence
  Synthetic: FXN 3 forward 9:69039663-69039688; AsCpf1-1
tttgatggagggatgtgacgg

SEQ ID NO: 12433 - DNA, 22 bp, Artificial Sequence
  Synthetic: FXN 3 forward 9:69039663-69039689; AsCpf1-1
tttgatggagggatgtgacggg

SEQ ID NO: 12434 - DNA, 23 bp, Artificial Sequence
  Synthetic: FXN 3 forward 9:69039663-69039690; AsCpf1-1
tttgatggagggatgtgacgggg

SEQ ID NO: 12435 - DNA, 24 bp, Artificial Sequence
  Synthetic: FXN 3 forward 9:69039663-69039691; AsCpf1-1
tttgatggagggatgtgacggggc

SEQ ID NO: 12436 - DNA, 25 bp, Artificial Sequence
  Synthetic: FXN 3 forward 9:69039663-69039692; AsCpf1-1
tttgatggagggatgtgacggggct

SEQ ID NO: 12437 - DNA, 18 bp, Artificial Sequence
  Synthetic: FXN 3 reverse 9:69039694-69039716; AsCpf1-1
gtatttaagaggaaacgt

SEQ ID NO: 12438 - DNA, 19 bp, Artificial Sequence
  Synthetic: FXN 3 reverse 9:69039694-69039717; AsCpf1-1
gtatttaagaggaaacgtt

SEQ ID NO: 12439 - DNA, 20 bp, Artificial Sequence
  Synthetic: FXN 3 reverse 9:69039694-69039718; AsCpf1-1
gtatttaagaggaaacgtta

SEQ ID NO: 12440 - DNA, 21 bp, Artificial Sequence
  Synthetic: FXN 3 reverse 9:69039694-69039719; AsCpf1-1
gtatttaagaggaaacgttaa

SEQ ID NO: 12441 - DNA, 22 bp, Artificial Sequence
  Synthetic: FXN 3 reverse 9:69039694-69039720; AsCpf1-1
gtatttaagaggaaacgttaaa

SEQ ID NO: 12442 - DNA, 23 bp, Artificial Sequence
  Synthetic: FXN 3 reverse 9:69039694-69039721; AsCpf1-1
gtatttaagaggaaacgttaaag

SEQ ID NO: 12443 - DNA, 24 bp, Artificial Sequence
  Synthetic: FXN 3 reverse 9:69039694-69039722; AsCpf1-1
gtatttaagaggaaacgttaaaga

SEQ ID NO: 12444 - DNA, 25 bp, Artificial Sequence
  Synthetic: FXN 3 reverse 9:69039694-69039723; AsCpf1-1
gtatttaagaggaaacgttaaagac

SEQ ID NO: 12445 - DNA, 18 bp, Artificial Sequence
  Synthetic: FXN 3 forward 9:69039705-69039727; AsCpf1-1
tcttaaataccggagaca

SEQ ID NO: 12446 - DNA, 19 bp, Artificial Sequence
  Synthetic: FXN 3 forward 9:69039705-69039728; AsCpf1-1
tcttaaataccggagacag

SEQ ID NO: 12447 - DNA, 20 bp, Artificial Sequence
  Synthetic: FXN 3 forward 9:69039705-69039729; AsCpf1-1
tcttaaataccggagacagc

SEQ ID NO: 12448 - DNA, 21 bp, Artificial Sequence
  Synthetic: FXN 3 forward 9:69039705-69039730; AsCpf1-1
tcttaaataccggagacagct

SEQ ID NO: 12449 - DNA, 22 bp, Artificial Sequence
  Synthetic: FXN 3 forward 9:69039705-69039731; AsCpf1-1
tcttaaataccggagacagctt

SEQ ID NO: 12450 - DNA, 23 bp, Artificial Sequence
  Synthetic: FXN 3 forward 9:69039705-69039732; AsCpf1-1
tcttaaataccggagacagcttc

SEQ ID NO: 12451 - DNA, 24 bp, Artificial Sequence
  Synthetic: FXN 3 forward 9:69039705-69039733; AsCpf1-1
tcttaaataccggagacagcttcg

SEQ ID NO: 12452 - DNA, 25 bp, Artificial Sequence
  Synthetic: FXN 3 forward 9:69039705-69039734; AsCpf1-1
tcttaaataccggagacagcttcga

SEQ ID NO: 12453 - DNA, 18 bp, Artificial Sequence
  Synthetic: FXN 3 reverse 9:69039721-69039743; AsCpf1-1
gttatctccttctcgaag

SEQ ID NO: 12454 - DNA, 19 bp, Artificial Sequence
  Synthetic: FXN 3 reverse 9:69039721-69039744; AsCpf1-1
gttatctccttctcgaagc

SEQ ID NO: 12455 - DNA, 20 bp, Artificial Sequence
  Synthetic: FXN 3 reverse 9:69039721-69039745; AsCpf1-1
gttatctccttctcgaagct

SEQ ID NO: 12456 - DNA, 21 bp, Artificial Sequence
  Synthetic: FXN 3 reverse 9:69039721-69039746; AsCpf1-1
gttatctccttctcgaagctg

SEQ ID NO: 12457 - DNA, 22 bp, Artificial Sequence
  Synthetic: FXN 3 reverse 9:69039721-69039747; AsCpf1-1
gttatctccttctcgaagctgt

SEQ ID NO: 12458 - DNA, 23 bp, Artificial Sequence
  Synthetic: FXN 3 reverse 9:69039721-69039748; AsCpf1-1
gttatctccttctcgaagctgtc

SEQ ID NO: 12459 - DNA, 24 bp, Artificial Sequence
  Synthetic: FXN 3 reverse 9:69039721-69039749; AsCpf1-1
gttatctccttctcgaagctgtct

SEQ ID NO: 12460 - DNA, 25 bp, Artificial Sequence
  Synthetic: FXN 3 reverse 9:69039721-69039750; AsCpf1-1
gttatctccttctcgaagctgtctc

SEQ ID NO: 12461 - DNA, 18 bp, Artificial Sequence
  Synthetic: FXN 3 forward 9:69039729-69039751; AsCpf1-1
agaaggagataactggat

SEQ ID NO: 12462 - DNA, 19 bp, Artificial Sequence
  Synthetic: FXN 3 forward 9:69039729-69039752; AsCpf1-1
agaaggagataactggatg

SEQ ID NO: 12463 - DNA, 20 bp, Artificial Sequence
  Synthetic: FXN 3 forward 9:69039729-69039753; AsCpf1-1
agaaggagataactggatgt

SEQ ID NO: 12464 - DNA, 21 bp, Artificial Sequence
  Synthetic: FXN 3 forward 9:69039729-69039754; AsCpf1-1
agaaggagataactggatgtt

SEQ ID NO: 12465 - DNA, 22 bp, Artificial Sequence
  Synthetic: FXN 3 forward 9:69039729-69039755; AsCpf1-1
agaaggagataactggatgttt

SEQ ID NO: 12466 - DNA, 23 bp, Artificial Sequence
  Synthetic: FXN 3 forward 9:69039729-69039756; AsCpf1-1
agaaggagataactggatgtttc

SEQ ID NO: 12467 - DNA, 24 bp, Artificial Sequence
  Synthetic: FXN 3 forward 9:69039729-69039757; AsCpf1-1
agaaggagataactggatgtttct

SEQ ID NO: 12468 - DNA, 25 bp, Artificial Sequence
  Synthetic: FXN 3 forward 9:69039729-69039758; AsCpf1-1
agaaggagataactggatgtttctt

SEQ ID NO: 12469 - DNA, 18 bp, Artificial Sequence
  Synthetic: FXN 3 forward 9:69039760-69039782; AsCpf1-1
ttttctgttgcttgtgac

SEQ ID NO: 12470 - DNA, 19 bp, Artificial Sequence
  Synthetic: FXN 3 forward 9:69039760-69039783; AsCpf1-1
ttttctgttgcttgtgaca

SEQ ID NO: 12471 - DNA, 20 bp, Artificial Sequence
  Synthetic: FXN 3 forward 9:69039760-69039784; AsCpf1-1
ttttctgttgcttgtgacag

SEQ ID NO: 12472 - DNA, 21 bp, Artificial Sequence
  Synthetic: FXN 3 forward 9:69039760-69039785; AsCpf1-1
ttttctgttgcttgtgacaga

SEQ ID NO: 12473 - DNA, 22 bp, Artificial Sequence
  Synthetic: FXN 3 forward 9:69039760-69039786; AsCpf1-1
ttttctgttgcttgtgacagaa

SEQ ID NO: 12474 - DNA, 23 bp, Artificial Sequence
  Synthetic: FXN 3 forward 9:69039760-69039787; AsCpf1-1
ttttctgttgcttgtgacagaat

SEQ ID NO: 12475 - DNA, 24 bp, Artificial Sequence
  Synthetic: FXN 3 forward 9:69039760-69039788; AsCpf1-1
ttttctgttgcttgtgacagaata

SEQ ID NO: 12476 - DNA, 25 bp, Artificial Sequence
  Synthetic: FXN 3 forward 9:69039760-69039789; AsCpf1-1
ttttctgttgcttgtgacagaatac

SEQ ID NO: 12477 - DNA, 18 bp, Artificial Sequence
  Synthetic: FXN 3 reverse 9:69039765-69039787; AsCpf1-1
ggtattctgtcacaagca

SEQ ID NO: 12478 - DNA, 19 bp, Artificial Sequence
  Synthetic: FXN 3 reverse 9:69039765-69039788; AsCpf1-1
ggtattctgtcacaagcaa

SEQ ID NO: 12479 - DNA, 20 bp, Artificial Sequence
  Synthetic: FXN 3 reverse 9:69039765-69039789; AsCpf1-1
ggtattctgtcacaagcaac

SEQ ID NO: 12480 - DNA, 21 bp, Artificial Sequence
  Synthetic: FXN 3 reverse 9:69039765-69039790; AsCpf1-1
ggtattctgtcacaagcaaca

SEQ ID NO: 12481 - DNA, 22 bp, Artificial Sequence
  Synthetic: FXN 3 reverse 9:69039765-69039791; AsCpf1-1
ggtattctgtcacaagcaacag

SEQ ID NO: 12482 - DNA, 23 bp, Artificial Sequence
  Synthetic: FXN 3 reverse 9:69039765-69039792; AsCpf1-1
ggtattctgtcacaagcaacaga

SEQ ID NO: 12483 - DNA, 24 bp, Artificial Sequence
  Synthetic: FXN 3 reverse 9:69039765-69039793; AsCpf1-1
ggtattctgtcacaagcaacagaa

SEQ ID NO: 12484 - DNA, 25 bp, Artificial Sequence
  Synthetic: FXN 3 reverse 9:69039765-69039794; AsCpf1-1
ggtattctgtcacaagcaacagaaa

SEQ ID NO: 12485 - DNA, 18 bp, Artificial Sequence
  Synthetic: FXN 3 reverse 9:69039811-69039833; AsCpf1-1
gagcagtaagaagaaaat

SEQ ID NO: 12486 - DNA, 19 bp, Artificial Sequence
  Synthetic: FXN 3 reverse 9:69039811-69039834; AsCpf1-1
gagcagtaagaagaaaatt

SEQ ID NO: 12487 - DNA, 20 bp, Artificial Sequence
  Synthetic: FXN 3 reverse 9:69039811-69039835; AsCpf1-1
gagcagtaagaagaaaattt

SEQ ID NO: 12488 - DNA, 21 bp, Artificial Sequence
  Synthetic: FXN 3 reverse 9:69039811-69039836; AsCpf1-1
gagcagtaagaagaaaatttt

SEQ ID NO: 12489 - DNA, 22 bp, Artificial Sequence
  Synthetic: FXN 3 reverse 9:69039811-69039837; AsCpf1-1
gagcagtaagaagaaaattttt

SEQ ID NO: 12490 - DNA, 23 bp, Artificial Sequence
  Synthetic: FXN 3 reverse 9:69039811-69039838; AsCpf1-1
gagcagtaagaagaaaatttttt

SEQ ID NO: 12491 - DNA, 24 bp, Artificial Sequence
  Synthetic: FXN 3 reverse 9:69039811-69039839; AsCpf1-1
gagcagtaagaagaaaatttttta

SEQ ID NO: 12492 - DNA, 25 bp, Artificial Sequence
  Synthetic: FXN 3 reverse 9:69039811-69039840; AsCpf1-1
gagcagtaagaagaaaattttttac

SEQ ID NO: 12493 - DNA, 18 bp, Artificial Sequence
  Synthetic: FXN 3 forward 9:69039850-69039872; AsCpf1-1
aagtcaagtcccttcttg

SEQ ID NO: 12494 - DNA, 19 bp, Artificial Sequence
  Synthetic: FXN 3 forward 9:69039850-69039873; AsCpf1-1
aagtcaagtcccttcttgc

SEQ ID NO: 12495 - DNA, 20 bp, Artificial Sequence
  Synthetic: FXN 3 forward 9:69039850-69039874; AsCpf1-1
aagtcaagtcccttcttgct

SEQ ID NO: 12496 - DNA, 21 bp, Artificial Sequence
  Synthetic: FXN 3 forward 9:69039850-69039875; AsCpf1-1
aagtcaagtcccttcttgctg

SEQ ID NO: 12497 - DNA, 22 bp, Artificial Sequence
  Synthetic: FXN 3 forward 9:69039850-69039876; AsCpf1-1
aagtcaagtcccttcttgctgg

SEQ ID NO: 12498 - DNA, 23 bp, Artificial Sequence
  Synthetic: FXN 3 forward 9:69039850-69039877; AsCpf1-1
aagtcaagtcccttcttgctggt

SEQ ID NO: 12499 - DNA, 24 bp, Artificial Sequence
  Synthetic: FXN 3 forward 9:69039850-69039878; AsCpf1-1
aagtcaagtcccttcttgctggtg

SEQ ID NO: 12500 - DNA, 25 bp, Artificial Sequence
  Synthetic: FXN 3 forward 9:69039850-69039879; AsCpf1-1
aagtcaagtcccttcttgctggtgg

SEQ ID NO: 12501 - DNA, 18 bp, Artificial Sequence
  Synthetic: FXN 3 reverse 9:69039853-69039875; AsCpf1-1
caccagcaagaagggact

SEQ ID NO: 12502 - DNA, 19 bp, Artificial Sequence
  Synthetic: FXN 3 reverse 9:69039853-69039876; AsCpf1-1
caccagcaagaagggactt

SEQ ID NO: 12503 - DNA, 20 bp, Artificial Sequence
  Synthetic: FXN 3 reverse 9:69039853-69039877; AsCpf1-1
caccagcaagaagggacttg

SEQ ID NO: 12504 - DNA, 21 bp, Artificial Sequence
  Synthetic: FXN 3 reverse 9:69039853-69039878; AsCpf1-1
caccagcaagaagggacttga

SEQ ID NO: 12505 - DNA, 22 bp, Artificial Sequence
  Synthetic: FXN 3 reverse 9:69039853-69039879; AsCpf1-1
caccagcaagaagggacttgac

SEQ ID NO: 12506 - DNA, 23 bp, Artificial Sequence
  Synthetic: FXN 3 reverse 9:69039853-69039880; AsCpf1-1
caccagcaagaagggacttgact

SEQ ID NO: 12507 - DNA, 24 bp, Artificial Sequence
  Synthetic: FXN 3 reverse 9:69039853-69039881; AsCpf1-1
caccagcaagaagggacttgactt

SEQ ID NO: 12508 - DNA, 25 bp, Artificial Sequence
  Synthetic: FXN 3 reverse 9:69039853-69039882; AsCpf1-1
caccagcaagaagggacttgacttt

SEQ ID NO: 12509 - DNA, 18 bp, Artificial Sequence
  Synthetic: FXN 3 forward 9:69039862-69039884; AsCpf1-1
ttcttgctggtggggact

SEQ ID NO: 12510 - DNA, 19 bp, Artificial Sequence
  Synthetic: FXN 3 forward 9:69039862-69039885; AsCpf1-1
ttcttgctggtggggactt

SEQ ID NO: 12511 - DNA, 20 bp, Artificial Sequence
  Synthetic: FXN 3 forward 9:69039862-69039886; AsCpf1-1
ttcttgctggtggggacttt

SEQ ID NO: 12512 - DNA, 21 bp, Artificial Sequence
  Synthetic: FXN 3 forward 9:69039862-69039887; AsCpf1-1
ttcttgctggtggggactttg

SEQ ID NO: 12513 - DNA, 22 bp, Artificial Sequence
  Synthetic: FXN 3 forward 9:69039862-69039888; AsCpf1-1
ttcttgctggtggggactttgc

SEQ ID NO: 12514 - DNA, 23 bp, Artificial Sequence
  Synthetic: FXN 3 forward 9:69039862-69039889; AsCpf1-1
ttcttgctggtggggactttgca

SEQ ID NO: 12515 - DNA, 24 bp, Artificial Sequence
  Synthetic: FXN 3 forward 9:69039862-69039890; AsCpf1-1
ttcttgctggtggggactttgcag

SEQ ID NO: 12516 - DNA, 25 bp, Artificial Sequence
  Synthetic: FXN 3 forward 9:69039862-69039891; AsCpf1-1
ttcttgctggtggggactttgcaga

SEQ ID NO: 12517 - DNA, 18 bp, Artificial Sequence
  Synthetic: FXN 3 forward 9:69039979-69040001; AsCpf1-1
ctcccatgataacccatt

SEQ ID NO: 12518 - DNA, 19 bp, Artificial Sequence
  Synthetic: FXN 3 forward 9:69039979-69040002; AsCpf1-1
ctcccatgataacccatta

SEQ ID NO: 12519 - DNA, 20 bp, Artificial Sequence
  Synthetic: FXN 3 forward 9:69039979-69040003; AsCpf1-1
ctcccatgataacccattaa

SEQ ID NO: 12520 - DNA, 21 bp, Artificial Sequence
  Synthetic: FXN 3 forward 9:69039979-69040004; AsCpf1-1
ctcccatgataacccattaat

SEQ ID NO: 12521 - DNA, 22 bp, Artificial Sequence
  Synthetic: FXN 3 forward 9:69039979-69040005; AsCpf1-1
ctcccatgataacccattaatc

SEQ ID NO: 12522 - DNA, 23 bp, Artificial Sequence
  Synthetic: FXN 3 forward 9:69039979-69040006; AsCpf1-1
ctcccatgataacccattaatct

SEQ ID NO: 12523 - DNA, 24 bp, Artificial Sequence
  Synthetic: FXN 3 forward 9:69039979-69040007; AsCpf1-1
ctcccatgataacccattaatcta

SEQ ID NO: 12524 - DNA, 25 bp, Artificial Sequence
  Synthetic: FXN 3 forward 9:69039979-69040008; AsCpf1-1
ctcccatgataacccattaatctat

SEQ ID NO: 12525 - DNA, 18 bp, Artificial Sequence
  Synthetic: FXN 3 reverse 9:69039982-69040004; AsCpf1-1
tagattaatgggttatca

SEQ ID NO: 12526 - DNA, 19 bp, Artificial Sequence
  Synthetic: FXN 3 reverse 9:69039982-69040005; AsCpf1-1
tagattaatgggttatcat

SEQ ID NO: 12527 - DNA, 20 bp, Artificial Sequence
  Synthetic: FXN 3 reverse 9:69039982-69040006; AsCpf1-1
tagattaatgggttatcatg

SEQ ID NO: 12528 - DNA, 21 bp, Artificial Sequence
  Synthetic: FXN 3 reverse 9:69039982-69040007; AsCpf1-1
tagattaatgggttatcatgg

SEQ ID NO: 12529 - DNA, 22 bp, Artificial Sequence
  Synthetic: FXN 3 reverse 9:69039982-69040008; AsCpf1-1
tagattaatgggttatcatggg

SEQ ID NO: 12530 - DNA, 23 bp, Artificial Sequence
  Synthetic: FXN 3 reverse 9:69039982-69040009; AsCpf1-1
tagattaatgggttatcatggga

SEQ ID NO: 12531 - DNA, 24 bp, Artificial Sequence
  Synthetic: FXN 3 reverse 9:69039982-69040010; AsCpf1-1
tagattaatgggttatcatgggag

SEQ ID NO: 12532 - DNA, 25 bp, Artificial Sequence
  Synthetic: FXN 3 reverse 9:69039982-69040011; AsCpf1-1
tagattaatgggttatcatgggagt

SEQ ID NO: 12533 - DNA, 18 bp, Artificial Sequence
  Synthetic: FXN 3 forward 9:69039984-69040006; AsCpf1-1
atgataacccattaatct

SEQ ID NO: 12534 - DNA, 19 bp, Artificial Sequence
  Synthetic: FXN 3 forward 9:69039984-69040007; AsCpf1-1
atgataacccattaatcta

SEQ ID NO: 12535 - DNA, 20 bp, Artificial Sequence
  Synthetic: FXN 3 forward 9:69039984-69040008; AsCpf1-1
atgataacccattaatctat

SEQ ID NO: 12536 - DNA, 21 bp, Artificial Sequence
  Synthetic: FXN 3 forward 9:69039984-69040009; AsCpf1-1
atgataacccattaatctatg

SEQ ID NO: 12537 - DNA, 22 bp, Artificial Sequence
  Synthetic: FXN 3 forward 9:69039984-69040010; AsCpf1-1
atgataacccattaatctatga

SEQ ID NO: 12538 - DNA, 23 bp, Artificial Sequence
  Synthetic: FXN 3 forward 9:69039984-69040011; AsCpf1-1
atgataacccattaatctatgaa

SEQ ID NO: 12539 - DNA, 24 bp, Artificial Sequence
  Synthetic: FXN 3 forward 9:69039984-69040012; AsCpf1-1
atgataacccattaatctatgaat

SEQ ID NO: 12540 - DNA, 25 bp, Artificial Sequence
  Synthetic: FXN 3 forward 9:69039984-69040013; AsCpf1-1
atgataacccattaatctatgaatg

SEQ ID NO: 12541 - DNA, 18 bp, Artificial Sequence
  Synthetic: FXN 3 reverse 9:69039986-69040008; AsCpf1-1
ttcatagattaatgggtt

SEQ ID NO: 12542 - DNA, 19 bp, Artificial Sequence
  Synthetic: FXN 3 reverse 9:69039986-69040009; AsCpf1-1
ttcatagattaatgggtta

SEQ ID NO: 12543 - DNA, 20 bp, Artificial Sequence
  Synthetic: FXN 3 reverse 9:69039986-69040010; AsCpf1-1
ttcatagattaatgggttat

SEQ ID NO: 12544 - DNA, 21 bp, Artificial Sequence
  Synthetic: FXN 3 reverse 9:69039986-69040011; AsCpf1-1
ttcatagattaatgggttatc

SEQ ID NO: 12545 - DNA, 22 bp, Artificial Sequence
  Synthetic: FXN 3 reverse 9:69039986-69040012; AsCpf1-1
ttcatagattaatgggttatca

SEQ ID NO: 12546 - DNA, 23 bp, Artificial Sequence
  Synthetic: FXN 3 reverse 9:69039986-69040013; AsCpf1-1
ttcatagattaatgggttatcat

SEQ ID NO: 12547 - DNA, 24 bp, Artificial Sequence
  Synthetic: FXN 3 reverse 9:69039986-69040014; AsCpf1-1
ttcatagattaatgggttatcatg

SEQ ID NO: 12548 - DNA, 25 bp, Artificial Sequence
  Synthetic: FXN 3 reverse 9:69039986-69040015; AsCpf1-1
ttcatagattaatgggttatcatgg

SEQ ID NO: 12549 - DNA, 18 bp, Artificial Sequence
  Synthetic: FXN 3 reverse 9:69040005-69040027; AsCpf1-1
tcaataatggattaatcc

SEQ ID NO: 12550 - DNA, 19 bp, Artificial Sequence
  Synthetic: FXN 3 reverse 9:69040005-69040028; AsCpf1-1
tcaataatggattaatcca

SEQ ID NO: 12551 - DNA, 20 bp, Artificial Sequence
  Synthetic: FXN 3 reverse 9:69040005-69040029; AsCpf1-1
tcaataatggattaatccat

SEQ ID NO: 12552 - DNA, 21 bp, Artificial Sequence
  Synthetic: FXN 3 reverse 9:69040005-69040030; AsCpf1-1
tcaataatggattaatccatt

SEQ ID NO: 12553 - DNA, 22 bp, Artificial Sequence
  Synthetic: FXN 3 reverse 9:69040005-69040031; AsCpf1-1
tcaataatggattaatccattc

SEQ ID NO: 12554 - DNA, 23 bp, Artificial Sequence
  Synthetic: FXN 3 reverse 9:69040005-69040032; AsCpf1-1
tcaataatggattaatccattca

SEQ ID NO: 12555 - DNA, 24 bp, Artificial Sequence
  Synthetic: FXN 3 reverse 9:69040005-69040033; AsCpf1-1
tcaataatggattaatccattcat

SEQ ID NO: 12556 - DNA, 25 bp, Artificial Sequence
  Synthetic: FXN 3 reverse 9:69040005-69040034; AsCpf1-1
tcaataatggattaatccattcata

SEQ ID NO: 12557 - DNA, 18 bp, Artificial Sequence
  Synthetic: FXN 3 reverse 9:69040006-69040028; AsCpf1-1
ctcaataatggattaatc

SEQ ID NO: 12558 - DNA, 19 bp, Artificial Sequence
  Synthetic: FXN 3 reverse 9:69040006-69040029; AsCpf1-1
ctcaataatggattaatcc

SEQ ID NO: 12559 - DNA, 20 bp, Artificial Sequence
  Synthetic: FXN 3 reverse 9:69040006-69040030; AsCpf1-1
ctcaataatggattaatcca

SEQ ID NO: 12560 - DNA, 21 bp, Artificial Sequence
  Synthetic: FXN 3 reverse 9:69040006-69040031; AsCpf1-1
ctcaataatggattaatccat

SEQ ID NO: 12561 - DNA, 22 bp, Artificial Sequence
  Synthetic: FXN 3 reverse 9:69040006-69040032; AsCpf1-1
ctcaataatggattaatccatt

SEQ ID NO: 12562 - DNA, 23 bp, Artificial Sequence
  Synthetic: FXN 3 reverse 9:69040006-69040033; AsCpf1-1
ctcaataatggattaatccattc

SEQ ID NO: 12563 - DNA, 24 bp, Artificial Sequence
  Synthetic: FXN 3 reverse 9:69040006-69040034; AsCpf1-1
ctcaataatggattaatccattca

SEQ ID NO: 12564 - DNA, 25 bp, Artificial Sequence
  Synthetic: FXN 3 reverse 9:69040006-69040035; AsCpf1-1
ctcaataatggattaatccattcat

SEQ ID NO: 12565 - DNA, 18 bp, Artificial Sequence
  Synthetic: FXN 3 forward 9:69040019-69040041; AsCpf1-1
ttattgagggaagaacct

SEQ ID NO: 12566 - DNA, 19 bp, Artificial Sequence
  Synthetic: FXN 3 forward 9:69040019-69040042; AsCpf1-1
ttattgagggaagaacctt

SEQ ID NO: 12567 - DNA, 20 bp, Artificial Sequence
  Synthetic: FXN 3 forward 9:69040019-69040043; AsCpf1-1
ttattgagggaagaaccttc

SEQ ID NO: 12568 - DNA, 21 bp, Artificial Sequence
  Synthetic: FXN 3 forward 9:69040019-69040044; AsCpf1-1
ttattgagggaagaaccttca

SEQ ID NO: 12569 - DNA, 22 bp, Artificial Sequence
  Synthetic: FXN 3 forward 9:69040019-69040045; AsCpf1-1
ttattgagggaagaaccttcat

SEQ ID NO: 12570 - DNA, 23 bp, Artificial Sequence
  Synthetic: FXN 3 forward 9:69040019-69040046; AsCpf1-1
ttattgagggaagaaccttcatg

SEQ ID NO: 12571 - DNA, 24 bp, Artificial Sequence
  Synthetic: FXN 3 forward 9:69040019-69040047; AsCpf1-1
ttattgagggaagaaccttcatga

SEQ ID NO: 12572 - DNA, 25 bp, Artificial Sequence
  Synthetic: FXN 3 forward 9:69040019-69040048; AsCpf1-1
ttattgagggaagaaccttcatgac

SEQ ID NO: 12573 - DNA, 18 bp, Artificial Sequence
  Synthetic: FXN 3 forward 9:69040040-69040062; AsCpf1-1
tgacccagtcaccgctta

SEQ ID NO: 12574 - DNA, 19 bp, Artificial Sequence
  Synthetic: FXN 3 forward 9:69040040-69040063; AsCpf1-1
tgacccagtcaccgcttaa

SEQ ID NO: 12575 - DNA, 20 bp, Artificial Sequence
  Synthetic: FXN 3 forward 9:69040040-69040064; AsCpf1-1
tgacccagtcaccgcttaaa

SEQ ID NO: 12576 - DNA, 21 bp, Artificial Sequence
  Synthetic: FXN 3 forward 9:69040040-69040065; AsCpf1-1
tgacccagtcaccgcttaaag

SEQ ID NO: 12577 - DNA, 22 bp, Artificial Sequence
  Synthetic: FXN 3 forward 9:69040040-69040066; AsCpf1-1
tgacccagtcaccgcttaaagg

SEQ ID NO: 12578 - DNA, 23 bp, Artificial Sequence
  Synthetic: FXN 3 forward 9:69040040-69040067; AsCpf1-1
tgacccagtcaccgcttaaaggc

SEQ ID NO: 12579 - DNA, 24 bp, Artificial Sequence
  Synthetic: FXN 3 forward 9:69040040-69040068; AsCpf1-1
tgacccagtcaccgcttaaaggcc

SEQ ID NO: 12580 - DNA, 25 bp, Artificial Sequence
  Synthetic: FXN 3 forward 9:69040040-69040069; AsCpf1-1
tgacccagtcaccgcttaaaggccc

SEQ ID NO: 12581 - DNA, 18 bp, Artificial Sequence
  Synthetic: FXN 3 reverse 9:69040066-69040088; AsCpf1-1
gatgtggcagtattgaga

SEQ ID NO: 12582 - DNA, 19 bp, Artificial Sequence
  Synthetic: FXN 3 reverse 9:69040066-69040089; AsCpf1-1
gatgtggcagtattgagag

SEQ ID NO: 12583 - DNA, 20 bp, Artificial Sequence
  Synthetic: FXN 3 reverse 9:69040066-69040090; AsCpf1-1
gatgtggcagtattgagagg

SEQ ID NO: 12584 - DNA, 21 bp, Artificial Sequence
  Synthetic: FXN 3 reverse 9:69040066-69040091; AsCpf1-1
gatgtggcagtattgagaggt

SEQ ID NO: 12585 - DNA, 22 bp, Artificial Sequence
  Synthetic: FXN 3 reverse 9:69040066-69040092; AsCpf1-1
gatgtggcagtattgagaggtg

SEQ ID NO: 12586 - DNA, 23 bp, Artificial Sequence
  Synthetic: FXN 3 reverse 9:69040066-69040093; AsCpf1-1
gatgtggcagtattgagaggtgg

SEQ ID NO: 12587 - DNA, 24 bp, Artificial Sequence
  Synthetic: FXN 3 reverse 9:69040066-69040094; AsCpf1-1
gatgtggcagtattgagaggtggg

SEQ ID NO: 12588 - DNA, 25 bp, Artificial Sequence
  Synthetic: FXN 3 reverse 9:69040066-69040095; AsCpf1-1
gatgtggcagtattgagaggtgggg

SEQ ID NO: 12589 - DNA, 18 bp, Artificial Sequence
  Synthetic: FXN 3 reverse 9:69040067-69040089; AsCpf1-1
cgatgtggcagtattgag

SEQ ID NO: 12590 - DNA, 19 bp, Artificial Sequence
  Synthetic: FXN 3 reverse 9:69040067-69040090; AsCpf1-1
cgatgtggcagtattgaga

SEQ ID NO: 12591 - DNA, 20 bp, Artificial Sequence
  Synthetic: FXN 3 reverse 9:69040067-69040091; AsCpf1-1
cgatgtggcagtattgagag

SEQ ID NO: 12592 - DNA, 21 bp, Artificial Sequence
  Synthetic: FXN 3 reverse 9:69040067-69040092; AsCpf1-1
cgatgtggcagtattgagagg

SEQ ID NO: 12593 - DNA, 22 bp, Artificial Sequence
  Synthetic: FXN 3 reverse 9:69040067-69040093; AsCpf1-1
cgatgtggcagtattgagaggt

SEQ ID NO: 12594 - DNA, 23 bp, Artificial Sequence
  Synthetic: FXN 3 reverse 9:69040067-69040094; AsCpf1-1
cgatgtggcagtattgagaggtg

SEQ ID NO: 12595 - DNA, 24 bp, Artificial Sequence
  Synthetic: FXN 3 reverse 9:69040067-69040095; AsCpf1-1
cgatgtggcagtattgagaggtgg

SEQ ID NO: 12596 - DNA, 25 bp, Artificial Sequence
  Synthetic: FXN 3 reverse 9:69040067-69040096; AsCpf1-1
cgatgtggcagtattgagaggtggg

SEQ ID NO: 12597 - DNA, 18 bp, Artificial Sequence
  Synthetic: FXN 3 reverse 9:69040091-69040113; AsCpf1-1
aaactcatgttgaaactt

SEQ ID NO: 12598 - DNA, 19 bp, Artificial Sequence
  Synthetic: FXN 3 reverse 9:69040091-69040114; AsCpf1-1
aaactcatgttgaaactta

SEQ ID NO: 12599 - DNA, 20 bp, Artificial Sequence
  Synthetic: FXN 3 reverse 9:69040091-69040115; AsCpf1-1
aaactcatgttgaaacttaa

SEQ ID NO: 12600 - DNA, 21 bp, Artificial Sequence
  Synthetic: FXN 3 reverse 9:69040091-69040116; AsCpf1-1
aaactcatgttgaaacttaat

SEQ ID NO: 12601 - DNA, 22 bp, Artificial Sequence
  Synthetic: FXN 3 reverse 9:69040091-69040117; AsCpf1-1
aaactcatgttgaaacttaatt

SEQ ID NO: 12602 - DNA, 23 bp, Artificial Sequence
  Synthetic: FXN 3 reverse 9:69040091-69040118; AsCpf1-1
aaactcatgttgaaacttaattc

SEQ ID NO: 12603 - DNA, 24 bp, Artificial Sequence
  Synthetic: FXN 3 reverse 9:69040091-69040119; AsCpf1-1
aaactcatgttgaaacttaattcc

SEQ ID NO: 12604 - DNA, 25 bp, Artificial Sequence
  Synthetic: FXN 3 reverse 9:69040091-69040120; AsCpf1-1
aaactcatgttgaaacttaattccc

SEQ ID NO: 12605 - DNA, 18 bp, Artificial Sequence
  Synthetic: FXN 3 forward 9:69040102-69040124; AsCpf1-1
acatgagtttcggaggtg

SEQ ID NO: 12606 - DNA, 19 bp, Artificial Sequence
  Synthetic: FXN 3 forward 9:69040102-69040125; AsCpf1-1
acatgagtttcggaggtga

SEQ ID NO: 12607 - DNA, 20 bp, Artificial Sequence
  Synthetic: FXN 3 forward 9:69040102-69040126; AsCpf1-1
acatgagtttcggaggtgac

SEQ ID NO: 12608 - DNA, 21 bp, Artificial Sequence
  Synthetic: FXN 3 forward 9:69040102-69040127; AsCpf1-1
acatgagtttcggaggtgaca

SEQ ID NO: 12609 - DNA, 22 bp, Artificial Sequence
  Synthetic: FXN 3 forward 9:69040102-69040128; AsCpf1-1
acatgagtttcggaggtgacaa

SEQ ID NO: 12610 - DNA, 23 bp, Artificial Sequence
  Synthetic: FXN 3 forward 9:69040102-69040129; AsCpf1-1
acatgagtttcggaggtgacaaa

SEQ ID NO: 12611 - DNA, 24 bp, Artificial Sequence
  Synthetic: FXN 3 forward 9:69040102-69040130; AsCpf1-1
acatgagtttcggaggtgacaaac

SEQ ID NO: 12612 - DNA, 25 bp, Artificial Sequence
  Synthetic: FXN 3 forward 9:69040102-69040131; AsCpf1-1
acatgagtttcggaggtgacaaaca

SEQ ID NO: 12613 - DNA, 18 bp, Artificial Sequence
  Synthetic: FXN 3 forward 9:69040114-69040136; AsCpf1-1
gaggtgacaaacattcaa

SEQ ID NO: 12614 - DNA, 19 bp, Artificial Sequence
  Synthetic: FXN 3 forward 9:69040114-69040137; AsCpf1-1
gaggtgacaaacattcaaa

SEQ ID NO: 12615 - DNA, 20 bp, Artificial Sequence
  Synthetic: FXN 3 forward 9:69040114-69040138; AsCpf1-1
gaggtgacaaacattcaaac

SEQ ID NO: 12616 - DNA, 21 bp, Artificial Sequence
  Synthetic: FXN 3 forward 9:69040114-69040139; AsCpf1-1
gaggtgacaaacattcaaacc

SEQ ID NO: 12617 - DNA, 22 bp, Artificial Sequence
  Synthetic: FXN 3 forward 9:69040114-69040140; AsCpf1-1
gaggtgacaaacattcaaacca

SEQ ID NO: 12618 - DNA, 23 bp, Artificial Sequence
  Synthetic: FXN 3 forward 9:69040114-69040141; AsCpf1-1
gaggtgacaaacattcaaaccat

SEQ ID NO: 12619 - DNA, 24 bp, Artificial Sequence
  Synthetic: FXN 3 forward 9:69040114-69040142; AsCpf1-1
gaggtgacaaacattcaaaccata

SEQ ID NO: 12620 - DNA, 25 bp, Artificial Sequence
  Synthetic: FXN 3 forward 9:69040114-69040143; AsCpf1-1
gaggtgacaaacattcaaaccatag

SEQ ID NO: 12621 - DNA, 18 bp, Artificial Sequence
  Synthetic: FXN 3 forward 9:69040131-69040153; AsCpf1-1
aaccatagcatgctgtct

SEQ ID NO: 12622 - DNA, 19 bp, Artificial Sequence
  Synthetic: FXN 3 forward 9:69040131-69040154; AsCpf1-1
aaccatagcatgctgtctc

SEQ ID NO: 12623 - DNA, 20 bp, Artificial Sequence
  Synthetic: FXN 3 forward 9:69040131-69040155; AsCpf1-1
aaccatagcatgctgtctct

SEQ ID NO: 12624 - DNA, 21 bp, Artificial Sequence
  Synthetic: FXN 3 forward 9:69040131-69040156; AsCpf1-1
aaccatagcatgctgtctctt

SEQ ID NO: 12625 - DNA, 22 bp, Artificial Sequence
  Synthetic: FXN 3 forward 9:69040131-69040157; AsCpf1-1
aaccatagcatgctgtctctta

SEQ ID NO: 12626 - DNA, 23 bp, Artificial Sequence
  Synthetic: FXN 3 forward 9:69040131-69040158; AsCpf1-1
aaccatagcatgctgtctcttaa

SEQ ID NO: 12627 - DNA, 24 bp, Artificial Sequence
  Synthetic: FXN 3 forward 9:69040131-69040159; AsCpf1-1
aaccatagcatgctgtctcttaaa

SEQ ID NO: 12628 - DNA, 25 bp, Artificial Sequence
  Synthetic: FXN 3 forward 9:69040131-69040160; AsCpf1-1
aaccatagcatgctgtctcttaaat

SEQ ID NO: 12629 - DNA, 18 bp, Artificial Sequence
  Synthetic: FXN 3 forward 9:69040182-69040204; AsCpf1-1
cttctgcatgccttgggc

SEQ ID NO: 12630 - DNA, 19 bp, Artificial Sequence
  Synthetic: FXN 3 forward 9:69040182-69040205; AsCpf1-1
cttctgcatgccttgggca

SEQ ID NO: 12631 - DNA, 20 bp, Artificial Sequence
  Synthetic: FXN 3 forward 9:69040182-69040206; AsCpf1-1
cttctgcatgccttgggcag

SEQ ID NO: 12632 - DNA, 21 bp, Artificial Sequence
  Synthetic: FXN 3 forward 9:69040182-69040207; AsCpf1-1
cttctgcatgccttgggcagc

SEQ ID NO: 12633 - DNA, 22 bp, Artificial Sequence
  Synthetic: FXN 3 forward 9:69040182-69040208; AsCpf1-1
cttctgcatgccttgggcagct

SEQ ID NO: 12634 - DNA, 23 bp, Artificial Sequence
  Synthetic: FXN 3 forward 9:69040182-69040209; AsCpf1-1
cttctgcatgccttgggcagctt

SEQ ID NO: 12635 - DNA, 24 bp, Artificial Sequence
  Synthetic: FXN 3 forward 9:69040182-69040210; AsCpf1-1
cttctgcatgccttgggcagcttt

SEQ ID NO: 12636 - DNA, 25 bp, Artificial Sequence
  Synthetic: FXN 3 forward 9:69040182-69040211; AsCpf1-1
cttctgcatgccttgggcagctttt

SEQ ID NO: 12637 - DNA, 18 bp, Artificial Sequence
  Synthetic: FXN 3 reverse 9:69040209-69040231; AsCpf1-1
tctaggaaaatggacaga

SEQ ID NO: 12638 - DNA, 19 bp, Artificial Sequence
  Synthetic: FXN 3 reverse 9:69040209-69040232; AsCpf1-1
tctaggaaaatggacagat

SEQ ID NO: 12639 - DNA, 20 bp, Artificial Sequence
  Synthetic: FXN 3 reverse 9:69040209-69040233; AsCpf1-1
tctaggaaaatggacagatg

SEQ ID NO: 12640 - DNA, 21 bp, Artificial Sequence
  Synthetic: FXN 3 reverse 9:69040209-69040234; AsCpf1-1
tctaggaaaatggacagatgt

SEQ ID NO: 12641 - DNA, 22 bp, Artificial Sequence
  Synthetic: FXN 3 reverse 9:69040209-69040235; AsCpf1-1
tctaggaaaatggacagatgtc

SEQ ID NO: 12642 - DNA, 23 bp, Artificial Sequence
  Synthetic: FXN 3 reverse 9:69040209-69040236; AsCpf1-1
tctaggaaaatggacagatgtct

SEQ ID NO: 12643 - DNA, 24 bp, Artificial Sequence
  Synthetic: FXN 3 reverse 9:69040209-69040237; AsCpf1-1
tctaggaaaatggacagatgtcta

SEQ ID NO: 12644 - DNA, 25 bp, Artificial Sequence
  Synthetic: FXN 3 reverse 9:69040209-69040238; AsCpf1-1
tctaggaaaatggacagatgtctaa

SEQ ID NO: 12645 - DNA, 18 bp, Artificial Sequence
  Synthetic: FXN 3 forward 9:69040220-69040242; AsCpf1-1
ttttcctagagggacaag

SEQ ID NO: 12646 - DNA, 19 bp, Artificial Sequence
  Synthetic: FXN 3 forward 9:69040220-69040243; AsCpf1-1
ttttcctagagggacaaga

SEQ ID NO: 12647 - DNA, 20 bp, Artificial Sequence
  Synthetic: FXN 3 forward 9:69040220-69040244; AsCpf1-1
ttttcctagagggacaagac

SEQ ID NO: 12648 - DNA, 21 bp, Artificial Sequence
  Synthetic: FXN 3 forward 9:69040220-69040245; AsCpf1-1
ttttcctagagggacaagacc

SEQ ID NO: 12649 - DNA, 22 bp, Artificial Sequence
  Synthetic: FXN 3 forward 9:69040220-69040246; AsCpf1-1
ttttcctagagggacaagacca

SEQ ID NO: 12650 - DNA, 23 bp, Artificial Sequence
  Synthetic: FXN 3 forward 9:69040220-69040247; AsCpf1-1
ttttcctagagggacaagaccac

SEQ ID NO: 12651 - DNA, 24 bp, Artificial Sequence
  Synthetic: FXN 3 forward 9:69040220-69040248; AsCpf1-1
ttttcctagagggacaagaccacc

SEQ ID NO: 12652 - DNA, 25 bp, Artificial Sequence
  Synthetic: FXN 3 forward 9:69040220-69040249; AsCpf1-1
ttttcctagagggacaagaccacca

SEQ ID NO: 12653 - DNA, 18 bp, Artificial Sequence
  Synthetic: FXN 3 forward 9:69040226-69040248; AsCpf1-1
tagagggacaagaccacc

SEQ ID NO: 12654 - DNA, 19 bp, Artificial Sequence
  Synthetic: FXN 3 forward 9:69040226-69040249; AsCpf1-1
tagagggacaagaccacca

SEQ ID NO: 12655 - DNA, 20 bp, Artificial Sequence
  Synthetic: FXN 3 forward 9:69040226-69040250; AsCpf1-1
tagagggacaagaccaccac

SEQ ID NO: 12656 - DNA, 21 bp, Artificial Sequence
  Synthetic: FXN 3 forward 9:69040226-69040251; AsCpf1-1
tagagggacaagaccaccacc

SEQ ID NO: 12657 - DNA, 22 bp, Artificial Sequence
  Synthetic: FXN 3 forward 9:69040226-69040252; AsCpf1-1
tagagggacaagaccaccacct

SEQ ID NO: 12658 - DNA, 23 bp, Artificial Sequence
  Synthetic: FXN 3 forward 9:69040226-69040253; AsCpf1-1
tagagggacaagaccaccacctg

SEQ ID NO: 12659 - DNA, 24 bp, Artificial Sequence
  Synthetic: FXN 3 forward 9:69040226-69040254; AsCpf1-1
tagagggacaagaccaccacctgt

SEQ ID NO: 12660 - DNA, 25 bp, Artificial Sequence
  Synthetic: FXN 3 forward 9:69040226-69040255; AsCpf1-1
tagagggacaagaccaccacctgtg

SEQ ID NO: 12661 - DNA, 18 bp, Artificial Sequence
  Synthetic: FXN 3 forward 9:69040309-69040331; AsCpf1-1
aatcatttttattgtctt

SEQ ID NO: 12662 - DNA, 19 bp, Artificial Sequence
  Synthetic: FXN 3 forward 9:69040309-69040332; AsCpf1-1
aatcatttttattgtcttg

SEQ ID NO: 12663 - DNA, 20 bp, Artificial Sequence
  Synthetic: FXN 3 forward 9:69040309-69040333; AsCpf1-1
aatcatttttattgtcttgc

SEQ ID NO: 12664 - DNA, 21 bp, Artificial Sequence
  Synthetic: FXN 3 forward 9:69040309-69040334; AsCpf1-1
aatcatttttattgtcttgca

SEQ ID NO: 12665 - DNA, 22 bp, Artificial Sequence
  Synthetic: FXN 3 forward 9:69040309-69040335; AsCpf1-1
aatcatttttattgtcttgcag

SEQ ID NO: 12666 - DNA, 23 bp, Artificial Sequence
  Synthetic: FXN 3 forward 9:69040309-69040336; AsCpf1-1
aatcatttttattgtcttgcaga

SEQ ID NO: 12667 - DNA, 24 bp, Artificial Sequence
  Synthetic: FXN 3 forward 9:69040309-69040337; AsCpf1-1
aatcatttttattgtcttgcagac

SEQ ID NO: 12668 - DNA, 25 bp, Artificial Sequence
  Synthetic: FXN 3 forward 9:69040309-69040338; AsCpf1-1
aatcatttttattgtcttgcagaca

SEQ ID NO: 12669 - DNA, 18 bp, Artificial Sequence
  Synthetic: FXN 3 reverse 9:69040401-69040423; AsCpf1-1
aaagtgctgggattacag

SEQ ID NO: 12670 - DNA, 19 bp, Artificial Sequence
  Synthetic: FXN 3 reverse 9:69040401-69040424; AsCpf1-1
aaagtgctgggattacagg

SEQ ID NO: 12671 - DNA, 20 bp, Artificial Sequence
  Synthetic: FXN 3 reverse 9:69040401-69040425; AsCpf1-1
aaagtgctgggattacaggc

SEQ ID NO: 12672 - DNA, 21 bp, Artificial Sequence
  Synthetic: FXN 3 reverse 9:69040401-69040426; AsCpf1-1
aaagtgctgggattacaggcg

SEQ ID NO: 12673 - DNA, 22 bp, Artificial Sequence
  Synthetic: FXN 3 reverse 9:69040401-69040427; AsCpf1-1
aaagtgctgggattacaggcgt

SEQ ID NO: 12674 - DNA, 23 bp, Artificial Sequence
  Synthetic: FXN 3 reverse 9:69040401-69040428; AsCpf1-1
aaagtgctgggattacaggcgtg

SEQ ID NO: 12675 - DNA, 24 bp, Artificial Sequence
  Synthetic: FXN 3 reverse 9:69040401-69040429; AsCpf1-1
aaagtgctgggattacaggcgtga

SEQ ID NO: 12676 - DNA, 25 bp, Artificial Sequence
  Synthetic: FXN 3 reverse 9:69040401-69040430; AsCpf1-1
aaagtgctgggattacaggcgtgag

SEQ ID NO: 12677 - DNA, 18 bp, Artificial Sequence
  Synthetic: FXN 3 forward 9:69040414-69040436; AsCpf1-1
agcactttgggaggccga

SEQ ID NO: 12678 - DNA, 19 bp, Artificial Sequence
  Synthetic: FXN 3 forward 9:69040414-69040437; AsCpf1-1
agcactttgggaggccgag

SEQ ID NO: 12679 - DNA, 20 bp, Artificial Sequence
  Synthetic: FXN 3 forward 9:69040414-69040438; AsCpf1-1
agcactttgggaggccgagg

SEQ ID NO: 12680 - DNA, 21 bp, Artificial Sequence
  Synthetic: FXN 3 forward 9:69040414-69040439; AsCpf1-1
agcactttgggaggccgaggc

SEQ ID NO: 12681 - DNA, 22 bp, Artificial Sequence
  Synthetic: FXN 3 forward 9:69040414-69040440; AsCpf1-1
agcactttgggaggccgaggca

SEQ ID NO: 12682 - DNA, 23 bp, Artificial Sequence
  Synthetic: FXN 3 forward 9:69040414-69040441; AsCpf1-1
agcactttgggaggccgaggcag

SEQ ID NO: 12683 - DNA, 24 bp, Artificial Sequence
  Synthetic: FXN 3 forward 9:69040414-69040442; AsCpf1-1
agcactttgggaggccgaggcagg

SEQ ID NO: 12684 - DNA, 25 bp, Artificial Sequence
  Synthetic: FXN 3 forward 9:69040414-69040443; AsCpf1-1
agcactttgggaggccgaggcaggt

SEQ ID NO: 12685 - DNA, 18 bp, Artificial Sequence
  Synthetic: FXN 3 reverse 9:69040417-69040439; AsCpf1-1
cctgcctcggcctcccaa

SEQ ID NO: 12686 - DNA, 19 bp, Artificial Sequence
  Synthetic: FXN 3 reverse 9:69040417-69040440; AsCpf1-1
cctgcctcggcctcccaaa

SEQ ID NO: 12687 - DNA, 20 bp, Artificial Sequence
  Synthetic: FXN 3 reverse 9:69040417-69040441; AsCpf1-1
cctgcctcggcctcccaaag

SEQ ID NO: 12688 - DNA, 21 bp, Artificial Sequence
  Synthetic: FXN 3 reverse 9:69040417-69040442; AsCpf1-1
cctgcctcggcctcccaaagt

SEQ ID NO: 12689 - DNA, 22 bp, Artificial Sequence
  Synthetic: FXN 3 reverse 9:69040417-69040443; AsCpf1-1
cctgcctcggcctcccaaagtg

SEQ ID NO: 12690 - DNA, 23 bp, Artificial Sequence
  Synthetic: FXN 3 reverse 9:69040417-69040444; AsCpf1-1
cctgcctcggcctcccaaagtgc

SEQ ID NO: 12691 - DNA, 24 bp, Artificial Sequence
  Synthetic: FXN 3 reverse 9:69040417-69040445; AsCpf1-1
cctgcctcggcctcccaaagtgct

SEQ ID NO: 12692 - DNA, 25 bp, Artificial Sequence
  Synthetic: FXN 3 reverse 9:69040417-69040446; AsCpf1-1
cctgcctcggcctcccaaagtgctg

SEQ ID NO: 12693 - DNA, 18 bp, Artificial Sequence
  Synthetic: FXN 3 reverse 9:69040437-69040459; AsCpf1-1
tctcctgaactcgtgatc

SEQ ID NO: 12694 - DNA, 19 bp, Artificial Sequence
  Synthetic: FXN 3 reverse 9:69040437-69040460; AsCpf1-1
tctcctgaactcgtgatcc

SEQ ID NO: 12695 - DNA, 20 bp, Artificial Sequence
  Synthetic: FXN 3 reverse 9:69040437-69040461; AsCpf1-1
tctcctgaactcgtgatcca

SEQ ID NO: 12696 - DNA, 21 bp, Artificial Sequence
  Synthetic: FXN 3 reverse 9:69040437-69040462; AsCpf1-1
tctcctgaactcgtgatccac

SEQ ID NO: 12697 - DNA, 22 bp, Artificial Sequence
  Synthetic: FXN 3 reverse 9:69040437-69040463; AsCpf1-1
tctcctgaactcgtgatccacc

SEQ ID NO: 12698 - DNA, 23 bp, Artificial Sequence
  Synthetic: FXN 3 reverse 9:69040437-69040464; AsCpf1-1
tctcctgaactcgtgatccacct

SEQ ID NO: 12699 - DNA, 24 bp, Artificial Sequence
  Synthetic: FXN 3 reverse 9:69040437-69040465; AsCpf1-1
tctcctgaactcgtgatccacctg

SEQ ID NO: 12700 - DNA, 25 bp, Artificial Sequence
  Synthetic: FXN 3 reverse 9:69040437-69040466; AsCpf1-1
tctcctgaactcgtgatccacctgc

SEQ ID NO: 12701 - DNA, 18 bp, Artificial Sequence
  Synthetic: FXN 3 forward 9:69040453-69040475; AsCpf1-1
ggagatggagaccatcct

SEQ ID NO: 12702 - DNA, 19 bp, Artificial Sequence
  Synthetic: FXN 3 forward 9:69040453-69040476; AsCpf1-1
ggagatggagaccatcctg

SEQ ID NO: 12703 - DNA, 20 bp, Artificial Sequence
  Synthetic: FXN 3 forward 9:69040453-69040477; AsCpf1-1
ggagatggagaccatcctgg

SEQ ID NO: 12704 - DNA, 21 bp, Artificial Sequence
  Synthetic: FXN 3 forward 9:69040453-69040478; AsCpf1-1
ggagatggagaccatcctggc

SEQ ID NO: 12705 - DNA, 22 bp, Artificial Sequence
  Synthetic: FXN 3 forward 9:69040453-69040479; AsCpf1-1
ggagatggagaccatcctggct

SEQ ID NO: 12706 - DNA, 23 bp, Artificial Sequence
  Synthetic: FXN 3 forward 9:69040453-69040480; AsCpf1-1
ggagatggagaccatcctggcta

SEQ ID NO: 12707 - DNA, 24 bp, Artificial Sequence
  Synthetic: FXN 3 forward 9:69040453-69040481; AsCpf1-1
ggagatggagaccatcctggctaa

SEQ ID NO: 12708 - DNA, 25 bp, Artificial Sequence
  Synthetic: FXN 3 forward 9:69040453-69040482; AsCpf1-1
ggagatggagaccatcctggctaat

SEQ ID NO: 12709 - DNA, 18 bp, Artificial Sequence
  Synthetic: FXN 3 reverse 9:69040461-69040483; AsCpf1-1
tcgtattagccaggatgg

SEQ ID NO: 12710 - DNA, 19 bp, Artificial Sequence
  Synthetic: FXN 3 reverse 9:69040461-69040484; AsCpf1-1
tcgtattagccaggatggt

SEQ ID NO: 12711 - DNA, 20 bp, Artificial Sequence
  Synthetic: FXN 3 reverse 9:69040461-69040485; AsCpf1-1
tcgtattagccaggatggtc

SEQ ID NO: 12712 - DNA, 21 bp, Artificial Sequence
  Synthetic: FXN 3 reverse 9:69040461-69040486; AsCpf1-1
tcgtattagccaggatggtct

SEQ ID NO: 12713 - DNA, 22 bp, Artificial Sequence
  Synthetic: FXN 3 reverse 9:69040461-69040487; AsCpf1-1
tcgtattagccaggatggtctc

SEQ ID NO: 12714 - DNA, 23 bp, Artificial Sequence
  Synthetic: FXN 3 reverse 9:69040461-69040488; AsCpf1-1
tcgtattagccaggatggtctcc

SEQ ID NO: 12715 - DNA, 24 bp, Artificial Sequence
  Synthetic: FXN 3 reverse 9:69040461-69040489; AsCpf1-1
tcgtattagccaggatggtctcca

SEQ ID NO: 12716 - DNA, 25 bp, Artificial Sequence
  Synthetic: FXN 3 reverse 9:69040461-69040490; AsCpf1-1
tcgtattagccaggatggtctccat

SEQ ID NO: 12717 - DNA, 18 bp, Artificial Sequence
  Synthetic: FXN 3 reverse 9:69040535-69040557; AsCpf1-1
gagtagtggggactacag

SEQ ID NO: 12718 - DNA, 19 bp, Artificial Sequence
  Synthetic: FXN 3 reverse 9:69040535-69040558; AsCpf1-1
gagtagtggggactacagg

SEQ ID NO: 12719 - DNA, 20 bp, Artificial Sequence
  Synthetic: FXN 3 reverse 9:69040535-69040559; AsCpf1-1
gagtagtggggactacaggc

SEQ ID NO: 12720 - DNA, 21 bp, Artificial Sequence
  Synthetic: FXN 3 reverse 9:69040535-69040560; AsCpf1-1
gagtagtggggactacaggca

SEQ ID NO: 12721 - DNA, 22 bp, Artificial Sequence
  Synthetic: FXN 3 reverse 9:69040535-69040561; AsCpf1-1
gagtagtggggactacaggcac

SEQ ID NO: 12722 - DNA, 23 bp, Artificial Sequence
  Synthetic: FXN 3 reverse 9:69040535-69040562; AsCpf1-1
gagtagtggggactacaggcacc

SEQ ID NO: 12723 - DNA, 24 bp, Artificial Sequence
  Synthetic: FXN 3 reverse 9:69040535-69040563; AsCpf1-1
gagtagtggggactacaggcaccc

SEQ ID NO: 12724 - DNA, 25 bp, Artificial Sequence
  Synthetic: FXN 3 reverse 9:69040535-69040564; AsCpf1-1
gagtagtggggactacaggcacccg

SEQ ID NO: 12725 - DNA, 18 bp, Artificial Sequence
  Synthetic: FXN 3 forward 9:69040548-69040570; AsCpf1-1
cactactcgggacgctga

SEQ ID NO: 12726 - DNA, 19 bp, Artificial Sequence
  Synthetic: FXN 3 forward 9:69040548-69040571; AsCpf1-1
cactactcgggacgctgag

SEQ ID NO: 12727 - DNA, 20 bp, Artificial Sequence
  Synthetic: FXN 3 forward 9:69040548-69040572; AsCpf1-1
cactactcgggacgctgagg

SEQ ID NO: 12728 - DNA, 21 bp, Artificial Sequence
  Synthetic: FXN 3 forward 9:69040548-69040573; AsCpf1-1
cactactcgggacgctgaggc

SEQ ID NO: 12729 - DNA, 22 bp, Artificial Sequence
  Synthetic: FXN 3 forward 9:69040548-69040574; AsCpf1-1
cactactcgggacgctgaggca

SEQ ID NO: 12730 - DNA, 23 bp, Artificial Sequence
  Synthetic: FXN 3 forward 9:69040548-69040575; AsCpf1-1
cactactcgggacgctgaggcag

SEQ ID NO: 12731 - DNA, 24 bp, Artificial Sequence
  Synthetic: FXN 3 forward 9:69040548-69040576; AsCpf1-1
cactactcgggacgctgaggcagg

SEQ ID NO: 12732 - DNA, 25 bp, Artificial Sequence
  Synthetic: FXN 3 forward 9:69040548-69040577; AsCpf1-1
cactactcgggacgctgaggcagga

SEQ ID NO: 12733 - DNA, 18 bp, Artificial Sequence
  Synthetic: FXN 3 reverse 9:69040560-69040582; AsCpf1-1
cgccattctcctgcctca

SEQ ID NO: 12734 - DNA, 19 bp, Artificial Sequence
  Synthetic: FXN 3 reverse 9:69040560-69040583; AsCpf1-1
cgccattctcctgcctcag

SEQ ID NO: 12735 - DNA, 20 bp, Artificial Sequence
  Synthetic: FXN 3 reverse 9:69040560-69040584; AsCpf1-1
cgccattctcctgcctcagc

SEQ ID NO: 12736 - DNA, 21 bp, Artificial Sequence
  Synthetic: FXN 3 reverse 9:69040560-69040585; AsCpf1-1
cgccattctcctgcctcagcg

SEQ ID NO: 12737 - DNA, 22 bp, Artificial Sequence
  Synthetic: FXN 3 reverse 9:69040560-69040586; AsCpf1-1
cgccattctcctgcctcagcgt

SEQ ID NO: 12738 - DNA, 23 bp, Artificial Sequence
  Synthetic: FXN 3 reverse 9:69040560-69040587; AsCpf1-1
cgccattctcctgcctcagcgtc

SEQ ID NO: 12739 - DNA, 24 bp, Artificial Sequence
  Synthetic: FXN 3 reverse 9:69040560-69040588; AsCpf1-1
cgccattctcctgcctcagcgtcc

SEQ ID NO: 12740 - DNA, 25 bp, Artificial Sequence
  Synthetic: FXN 3 reverse 9:69040560-69040589; AsCpf1-1
cgccattctcctgcctcagcgtccc

SEQ ID NO: 12741 - DNA, 18 bp, Artificial Sequence
  Synthetic: FXN 3 reverse 9:69040567-69040589; AsCpf1-1
gggttcacgccattctcc

SEQ ID NO: 12742 - DNA, 19 bp, Artificial Sequence
  Synthetic: FXN 3 reverse 9:69040567-69040590; AsCpf1-1
gggttcacgccattctcct

SEQ ID NO: 12743 - DNA, 20 bp, Artificial Sequence
  Synthetic: FXN 3 reverse 9:69040567-69040591; AsCpf1-1
gggttcacgccattctcctg

SEQ ID NO: 12744 - DNA, 21 bp, Artificial Sequence
  Synthetic: FXN 3 reverse 9:69040567-69040592; AsCpf1-1
gggttcacgccattctcctgc

SEQ ID NO: 12745 - DNA, 22 bp, Artificial Sequence
  Synthetic: FXN 3 reverse 9:69040567-69040593; AsCpf1-1
gggttcacgccattctcctgcc

SEQ ID NO: 12746 - DNA, 23 bp, Artificial Sequence
  Synthetic: FXN 3 reverse 9:69040567-69040594; AsCpf1-1
gggttcacgccattctcctgcct

SEQ ID NO: 12747 - DNA, 24 bp, Artificial Sequence
  Synthetic: FXN 3 reverse 9:69040567-69040595; AsCpf1-1
gggttcacgccattctcctgcctc

SEQ ID NO: 12748 - DNA, 25 bp, Artificial Sequence
  Synthetic: FXN 3 reverse 9:69040567-69040596; AsCpf1-1
gggttcacgccattctcctgcctca

SEQ ID NO: 12749 - DNA, 18 bp, Artificial Sequence
  Synthetic: FXN 3 forward 9:69040613-69040635; AsCpf1-1
agatcgtgccactgcact

SEQ ID NO: 12750 - DNA, 19 bp, Artificial Sequence
  Synthetic: FXN 3 forward 9:69040613-69040636; AsCpf1-1
agatcgtgccactgcactc

SEQ ID NO: 12751 - DNA, 20 bp, Artificial Sequence
  Synthetic: FXN 3 forward 9:69040613-69040637; AsCpf1-1
agatcgtgccactgcactcc

SEQ ID NO: 12752 - DNA, 21 bp, Artificial Sequence
  Synthetic: FXN 3 forward 9:69040613-69040638; AsCpf1-1
agatcgtgccactgcactcca

SEQ ID NO: 12753 - DNA, 22 bp, Artificial Sequence
  Synthetic: FXN 3 forward 9:69040613-69040639; AsCpf1-1
agatcgtgccactgcactccag

SEQ ID NO: 12754 - DNA, 23 bp, Artificial Sequence
  Synthetic: FXN 3 forward 9:69040613-69040640; AsCpf1-1
agatcgtgccactgcactccagc

SEQ ID NO: 12755 - DNA, 24 bp, Artificial Sequence
  Synthetic: FXN 3 forward 9:69040613-69040641; AsCpf1-1
agatcgtgccactgcactccagcc

SEQ ID NO: 12756 - DNA, 25 bp, Artificial Sequence
  Synthetic: FXN 3 forward 9:69040613-69040642; AsCpf1-1
agatcgtgccactgcactccagcct

SEQ ID NO: 12757 - DNA, 18 bp, Artificial Sequence
  Synthetic: FXN 3 forward 9:69040634-69040656; AsCpf1-1
gcctgggtgacagagcga

SEQ ID NO: 12758 - DNA, 19 bp, Artificial Sequence
  Synthetic: FXN 3 forward 9:69040634-69040657; AsCpf1-1
gcctgggtgacagagcgag

SEQ ID NO: 12759 - DNA, 20 bp, Artificial Sequence
  Synthetic: FXN 3 forward 9:69040634-69040658; AsCpf1-1
gcctgggtgacagagcgaga

SEQ ID NO: 12760 - DNA, 21 bp, Artificial Sequence
  Synthetic: FXN 3 forward 9:69040634-69040659; AsCpf1-1
gcctgggtgacagagcgagac

SEQ ID NO: 12761 - DNA, 22 bp, Artificial Sequence
  Synthetic: FXN 3 forward 9:69040634-69040660; AsCpf1-1
gcctgggtgacagagcgagact

SEQ ID NO: 12762 - DNA, 23 bp, Artificial Sequence
  Synthetic: FXN 3 forward 9:69040634-69040661; AsCpf1-1
gcctgggtgacagagcgagactg

SEQ ID NO: 12763 - DNA, 24 bp, Artificial Sequence
  Synthetic: FXN 3 forward 9:69040634-69040662; AsCpf1-1
gcctgggtgacagagcgagactgc

SEQ ID NO: 12764 - DNA, 25 bp, Artificial Sequence
  Synthetic: FXN 3 forward 9:69040634-69040663; AsCpf1-1
gcctgggtgacagagcgagactgca

SEQ ID NO: 12765 - DNA, 18 bp, Artificial Sequence
  Synthetic: FXN 3 forward 9:69040757-69040779; AsCpf1-1
tatgttaaaacctaatca

SEQ ID NO: 12766 - DNA, 19 bp, Artificial Sequence
  Synthetic: FXN 3 forward 9:69040757-69040780; AsCpf1-1
tatgttaaaacctaatcac

SEQ ID NO: 12767 - DNA, 20 bp, Artificial Sequence
  Synthetic: FXN 3 forward 9:69040757-69040781; AsCpf1-1
tatgttaaaacctaatcacc

SEQ ID NO: 12768 - DNA, 21 bp, Artificial Sequence
  Synthetic: FXN 3 forward 9:69040757-69040782; AsCpf1-1
tatgttaaaacctaatcacca

SEQ ID NO: 12769 - DNA, 22 bp, Artificial Sequence
  Synthetic: FXN 3 forward 9:69040757-69040783; AsCpf1-1
tatgttaaaacctaatcaccaa

SEQ ID NO: 12770 - DNA, 23 bp, Artificial Sequence
  Synthetic: FXN 3 forward 9:69040757-69040784; AsCpf1-1
tatgttaaaacctaatcaccaaa

SEQ ID NO: 12771 - DNA, 24 bp, Artificial Sequence
  Synthetic: FXN 3 forward 9:69040757-69040785; AsCpf1-1
tatgttaaaacctaatcaccaaag

SEQ ID NO: 12772 - DNA, 25 bp, Artificial Sequence
  Synthetic: FXN 3 forward 9:69040757-69040786; AsCpf1-1
tatgttaaaacctaatcaccaaagt

SEQ ID NO: 12773 - DNA, 18 bp, Artificial Sequence
  Synthetic: FXN 3 reverse 9:69040783-69040805; AsCpf1-1
aagggccccacctcctaa

SEQ ID NO: 12774 - DNA, 19 bp, Artificial Sequence
  Synthetic: FXN 3 reverse 9:69040783-69040806; AsCpf1-1
aagggccccacctcctaat

SEQ ID NO: 12775 - DNA, 20 bp, Artificial Sequence
  Synthetic: FXN 3 reverse 9:69040783-69040807; AsCpf1-1
aagggccccacctcctaata

SEQ ID NO: 12776 - DNA, 21 bp, Artificial Sequence
  Synthetic: FXN 3 reverse 9:69040783-69040808; AsCpf1-1
aagggccccacctcctaatat

SEQ ID NO: 12777 - DNA, 22 bp, Artificial Sequence
  Synthetic: FXN 3 reverse 9:69040783-69040809; AsCpf1-1
aagggccccacctcctaatatc

SEQ ID NO: 12778 - DNA, 23 bp, Artificial Sequence
  Synthetic: FXN 3 reverse 9:69040783-69040810; AsCpf1-1
aagggccccacctcctaatatca

SEQ ID NO: 12779 - DNA, 24 bp, Artificial Sequence
  Synthetic: FXN 3 reverse 9:69040783-69040811; AsCpf1-1
aagggccccacctcctaatatcac

SEQ ID NO: 12780 - DNA, 25 bp, Artificial Sequence
  Synthetic: FXN 3 reverse 9:69040783-69040812; AsCpf1-1
aagggccccacctcctaatatcact

SEQ ID NO: 12781 - DNA, 18 bp, Artificial Sequence
  Synthetic: FXN 3 reverse 9:69040805-69040827; AsCpf1-1
ccctcatacctcatcacc

SEQ ID NO: 12782 - DNA, 19 bp, Artificial Sequence
  Synthetic: FXN 3 reverse 9:69040805-69040828; AsCpf1-1
ccctcatacctcatcacct

SEQ ID NO: 12783 - DNA, 20 bp, Artificial Sequence
  Synthetic: FXN 3 reverse 9:69040805-69040829; AsCpf1-1
ccctcatacctcatcacctc

SEQ ID NO: 12784 - DNA, 21 bp, Artificial Sequence
  Synthetic: FXN 3 reverse 9:69040805-69040830; AsCpf1-1
ccctcatacctcatcacctcc

SEQ ID NO: 12785 - DNA, 22 bp, Artificial Sequence
  Synthetic: FXN 3 reverse 9:69040805-69040831; AsCpf1-1
ccctcatacctcatcacctccc

SEQ ID NO: 12786 - DNA, 23 bp, Artificial Sequence
  Synthetic: FXN 3 reverse 9:69040805-69040832; AsCpf1-1
ccctcatacctcatcacctccca

SEQ ID NO: 12787 - DNA, 24 bp, Artificial Sequence
  Synthetic: FXN 3 reverse 9:69040805-69040833; AsCpf1-1
ccctcatacctcatcacctcccaa

SEQ ID NO: 12788 - DNA, 25 bp, Artificial Sequence
  Synthetic: FXN 3 reverse 9:69040805-69040834; AsCpf1-1
ccctcatacctcatcacctcccaag

SEQ ID NO: 12789 - DNA, 18 bp, Artificial Sequence
  Synthetic: FXN 3 reverse 9:69040821-69040843; AsCpf1-1
aatcatatgggctccacc

SEQ ID NO: 12790 - DNA, 19 bp, Artificial Sequence
  Synthetic: FXN 3 reverse 9:69040821-69040844; AsCpf1-1
aatcatatgggctccaccc

SEQ ID NO: 12791 - DNA, 20 bp, Artificial Sequence
  Synthetic: FXN 3 reverse 9:69040821-69040845; AsCpf1-1
aatcatatgggctccaccct

SEQ ID NO: 12792 - DNA, 21 bp, Artificial Sequence
  Synthetic: FXN 3 reverse 9:69040821-69040846; AsCpf1-1
aatcatatgggctccaccctc

SEQ ID NO: 12793 - DNA, 22 bp, Artificial Sequence
  Synthetic: FXN 3 reverse 9:69040821-69040847; AsCpf1-1
aatcatatgggctccaccctca

SEQ ID NO: 12794 - DNA, 23 bp, Artificial Sequence
  Synthetic: FXN 3 reverse 9:69040821-69040848; AsCpf1-1
aatcatatgggctccaccctcat

SEQ ID NO: 12795 - DNA, 24 bp, Artificial Sequence
  Synthetic: FXN 3 reverse 9:69040821-69040849; AsCpf1-1
aatcatatgggctccaccctcata

SEQ ID NO: 12796 - DNA, 25 bp, Artificial Sequence
  Synthetic: FXN 3 reverse 9:69040821-69040850; AsCpf1-1
aatcatatgggctccaccctcatac

SEQ ID NO: 12797 - DNA, 18 bp, Artificial Sequence
  Synthetic: FXN 3 reverse 9:69040850-69040872; AsCpf1-1
ttgggctattttagaagg

SEQ ID NO: 12798 - DNA, 19 bp, Artificial Sequence
  Synthetic: FXN 3 reverse 9:69040850-69040873; AsCpf1-1
ttgggctattttagaaggg

SEQ ID NO: 12799 - DNA, 20 bp, Artificial Sequence
  Synthetic: FXN 3 reverse 9:69040850-69040874; AsCpf1-1
ttgggctattttagaagggc

SEQ ID NO: 12800 - DNA, 21 bp, Artificial Sequence
  Synthetic: FXN 3 reverse 9:69040850-69040875; AsCpf1-1
ttgggctattttagaagggca

SEQ ID NO: 12801 - DNA, 22 bp, Artificial Sequence
  Synthetic: FXN 3 reverse 9:69040850-69040876; AsCpf1-1
ttgggctattttagaagggcac

SEQ ID NO: 12802 - DNA, 23 bp, Artificial Sequence
  Synthetic: FXN 3 reverse 9:69040850-69040877; AsCpf1-1
ttgggctattttagaagggcact

SEQ ID NO: 12803 - DNA, 24 bp, Artificial Sequence
  Synthetic: FXN 3 reverse 9:69040850-69040878; AsCpf1-1
ttgggctattttagaagggcacta

SEQ ID NO: 12804 - DNA, 25 bp, Artificial Sequence
  Synthetic: FXN 3 reverse 9:69040850-69040879; AsCpf1-1
ttgggctattttagaagggcactaa

SEQ ID NO: 12805 - DNA, 18 bp, Artificial Sequence
  Synthetic: FXN 3 reverse 9:69040877-69040899; AsCpf1-1
tagatgatgccttgtcac

SEQ ID NO: 12806 - DNA, 19 bp, Artificial Sequence
  Synthetic: FXN 3 reverse 9:69040877-69040900; AsCpf1-1
tagatgatgccttgtcact

SEQ ID NO: 12807 - DNA, 20 bp, Artificial Sequence
  Synthetic: FXN 3 reverse 9:69040877-69040901; AsCpf1-1
tagatgatgccttgtcactg

SEQ ID NO: 12808 - DNA, 21 bp, Artificial Sequence
  Synthetic: FXN 3 reverse 9:69040877-69040902; AsCpf1-1
tagatgatgccttgtcactgg

SEQ ID NO: 12809 - DNA, 22 bp, Artificial Sequence
  Synthetic: FXN 3 reverse 9:69040877-69040903; AsCpf1-1
tagatgatgccttgtcactggg

SEQ ID NO: 12810 - DNA, 23 bp, Artificial Sequence
  Synthetic: FXN 3 reverse 9:69040877-69040904; AsCpf1-1
tagatgatgccttgtcactgggc

SEQ ID NO: 12811 - DNA, 24 bp, Artificial Sequence
  Synthetic: FXN 3 reverse 9:69040877-69040905; AsCpf1-1
tagatgatgccttgtcactgggct

SEQ ID NO: 12812 - DNA, 25 bp, Artificial Sequence
  Synthetic: FXN 3 reverse 9:69040877-69040906; AsCpf1-1
tagatgatgccttgtcactgggctc

SEQ ID NO: 12813 - DNA, 18 bp, Artificial Sequence
  Synthetic: FXN 3 reverse 9:69040884-69040906; AsCpf1-1
tggttcatagatgatgcc

SEQ ID NO: 12814 - DNA, 19 bp, Artificial Sequence
  Synthetic: FXN 3 reverse 9:69040884-69040907; AsCpf1-1
tggttcatagatgatgcct

SEQ ID NO: 12815 - DNA, 20 bp, Artificial Sequence
  Synthetic: FXN 3 reverse 9:69040884-69040908; AsCpf1-1
tggttcatagatgatgcctt

SEQ ID NO: 12816 - DNA, 21 bp, Artificial Sequence
  Synthetic: FXN 3 reverse 9:69040884-69040909; AsCpf1-1
tggttcatagatgatgccttg

SEQ ID NO: 12817 - DNA, 22 bp, Artificial Sequence
  Synthetic: FXN 3 reverse 9:69040884-69040910; AsCpf1-1
tggttcatagatgatgccttgt

SEQ ID NO: 12818 - DNA, 23 bp, Artificial Sequence
  Synthetic: FXN 3 reverse 9:69040884-69040911; AsCpf1-1
tggttcatagatgatgccttgtc

SEQ ID NO: 12819 - DNA, 24 bp, Artificial Sequence
  Synthetic: FXN 3 reverse 9:69040884-69040912; AsCpf1-1
tggttcatagatgatgccttgtca

SEQ ID NO: 12820 - DNA, 25 bp, Artificial Sequence
  Synthetic: FXN 3 reverse 9:69040884-69040913; AsCpf1-1
tggttcatagatgatgccttgtcac

SEQ ID NO: 12821 - DNA, 18 bp, Artificial Sequence
  Synthetic: FXN 3 reverse 9:69040930-69040952; AsCpf1-1
agatcaatgcaccaacag

SEQ ID NO: 12822 - DNA, 19 bp, Artificial Sequence
  Synthetic: FXN 3 reverse 9:69040930-69040953; AsCpf1-1
agatcaatgcaccaacagc

SEQ ID NO: 12823 - DNA, 20 bp, Artificial Sequence
  Synthetic: FXN 3 reverse 9:69040930-69040954; AsCpf1-1
agatcaatgcaccaacagct

SEQ ID NO: 12824 - DNA, 21 bp, Artificial Sequence
  Synthetic: FXN 3 reverse 9:69040930-69040955; AsCpf1-1
agatcaatgcaccaacagctt

SEQ ID NO: 12825 - DNA, 22 bp, Artificial Sequence
  Synthetic: FXN 3 reverse 9:69040930-69040956; AsCpf1-1
agatcaatgcaccaacagcttt

SEQ ID NO: 12826 - DNA, 23 bp, Artificial Sequence
  Synthetic: FXN 3 reverse 9:69040930-69040957; AsCpf1-1
agatcaatgcaccaacagctttg

SEQ ID NO: 12827 - DNA, 24 bp, Artificial Sequence
  Synthetic: FXN 3 reverse 9:69040930-69040958; AsCpf1-1
agatcaatgcaccaacagctttgg

SEQ ID NO: 12828 - DNA, 25 bp, Artificial Sequence
  Synthetic: FXN 3 reverse 9:69040930-69040959; AsCpf1-1
agatcaatgcaccaacagctttggt

SEQ ID NO: 12829 - DNA, 18 bp, Artificial Sequence
  Synthetic: FXN 3 forward 9:69040960-69040982; AsCpf1-1
caccctccaggactctaa

SEQ ID NO: 12830 - DNA, 19 bp, Artificial Sequence
  Synthetic: FXN 3 forward 9:69040960-69040983; AsCpf1-1
caccctccaggactctaag

SEQ ID NO: 12831 - DNA, 20 bp, Artificial Sequence
  Synthetic: FXN 3 forward 9:69040960-69040984; AsCpf1-1
caccctccaggactctaaga

SEQ ID NO: 12832 - DNA, 21 bp, Artificial Sequence
  Synthetic: FXN 3 forward 9:69040960-69040985; AsCpf1-1
caccctccaggactctaagaa

SEQ ID NO: 12833 - DNA, 22 bp, Artificial Sequence
  Synthetic: FXN 3 forward 9:69040960-69040986; AsCpf1-1
caccctccaggactctaagaaa

SEQ ID NO: 12834 - DNA, 23 bp, Artificial Sequence
  Synthetic: FXN 3 forward 9:69040960-69040987; AsCpf1-1
caccctccaggactctaagaaac

SEQ ID NO: 12835 - DNA, 24 bp, Artificial Sequence
  Synthetic: FXN 3 forward 9:69040960-69040988; AsCpf1-1
caccctccaggactctaagaaaca

SEQ ID NO: 12836 - DNA, 25 bp, Artificial Sequence
  Synthetic: FXN 3 forward 9:69040960-69040989; AsCpf1-1
caccctccaggactctaagaaacac

SEQ ID NO: 12837 - DNA, 18 bp, Artificial Sequence
  Synthetic: FXN 3 forward 9:69040961-69040983; AsCpf1-1
accctccaggactctaag

SEQ ID NO: 12838 - DNA, 19 bp, Artificial Sequence
  Synthetic: FXN 3 forward 9:69040961-69040984; AsCpf1-1
accctccaggactctaaga

SEQ ID NO: 12839 - DNA, 20 bp, Artificial Sequence
  Synthetic: FXN 3 forward 9:69040961-69040985; AsCpf1-1
accctccaggactctaagaa

SEQ ID NO: 12840 - DNA, 21 bp, Artificial Sequence
  Synthetic: FXN 3 forward 9:69040961-69040986; AsCpf1-1
accctccaggactctaagaaa

SEQ ID NO: 12841 - DNA, 22 bp, Artificial Sequence
  Synthetic: FXN 3 forward 9:69040961-69040987; AsCpf1-1
accctccaggactctaagaaac

SEQ ID NO: 12842 - DNA, 23 bp, Artificial Sequence
  Synthetic: FXN 3 forward 9:69040961-69040988; AsCpf1-1
accctccaggactctaagaaaca

SEQ ID NO: 12843 - DNA, 24 bp, Artificial Sequence
  Synthetic: FXN 3 forward 9:69040961-69040989; AsCpf1-1
accctccaggactctaagaaacac

SEQ ID NO: 12844 - DNA, 25 bp, Artificial Sequence
  Synthetic: FXN 3 forward 9:69040961-69040990; AsCpf1-1
accctccaggactctaagaaacaca

SEQ ID NO: 12845 - DNA, 18 bp, Artificial Sequence
  Synthetic: FXN 3 forward 9:69040969-69040991; AsCpf1-1
ggactctaagaaacacat

SEQ ID NO: 12846 - DNA, 19 bp, Artificial Sequence
  Synthetic: FXN 3 forward 9:69040969-69040992; AsCpf1-1
ggactctaagaaacacatt

SEQ ID NO: 12847 - DNA, 20 bp, Artificial Sequence
  Synthetic: FXN 3 forward 9:69040969-69040993; AsCpf1-1
ggactctaagaaacacattt

SEQ ID NO: 12848 - DNA, 21 bp, Artificial Sequence
  Synthetic: FXN 3 forward 9:69040969-69040994; AsCpf1-1
ggactctaagaaacacatttc

SEQ ID NO: 12849 - DNA, 22 bp, Artificial Sequence
  Synthetic: FXN 3 forward 9:69040969-69040995; AsCpf1-1
ggactctaagaaacacatttct

SEQ ID NO: 12850 - DNA, 23 bp, Artificial Sequence
  Synthetic: FXN 3 forward 9:69040969-69040996; AsCpf1-1
ggactctaagaaacacatttcta

SEQ ID NO: 12851 - DNA, 24 bp, Artificial Sequence
  Synthetic: FXN 3 forward 9:69040969-69040997; AsCpf1-1
ggactctaagaaacacatttctat

SEQ ID NO: 12852 - DNA, 25 bp, Artificial Sequence
  Synthetic: FXN 3 forward 9:69040969-69040998; AsCpf1-1
ggactctaagaaacacatttctatt

SEQ ID NO: 12853 - DNA, 18 bp, Artificial Sequence
  Synthetic: FXN 3 forward 9:69041037-69041059; AsCpf1-1
agactaagacaaataaca

SEQ ID NO: 12854 - DNA, 19 bp, Artificial Sequence
  Synthetic: FXN 3 forward 9:69041037-69041060; AsCpf1-1
agactaagacaaataacaa

SEQ ID NO: 12855 - DNA, 20 bp, Artificial Sequence
  Synthetic: FXN 3 forward 9:69041037-69041061; AsCpf1-1
agactaagacaaataacaaa

SEQ ID NO: 12856 - DNA, 21 bp, Artificial Sequence
  Synthetic: FXN 3 forward 9:69041037-69041062; AsCpf1-1
agactaagacaaataacaaat

SEQ ID NO: 12857 - DNA, 22 bp, Artificial Sequence
  Synthetic: FXN 3 forward 9:69041037-69041063; AsCpf1-1
agactaagacaaataacaaata

SEQ ID NO: 12858 - DNA, 23 bp, Artificial Sequence
  Synthetic: FXN 3 forward 9:69041037-69041064; AsCpf1-1
agactaagacaaataacaaatac

SEQ ID NO: 12859 - DNA, 24 bp, Artificial Sequence
  Synthetic: FXN 3 forward 9:69041037-69041065; AsCpf1-1
agactaagacaaataacaaatact

SEQ ID NO: 12860 - DNA, 25 bp, Artificial Sequence
  Synthetic: FXN 3 forward 9:69041037-69041066; AsCpf1-1
agactaagacaaataacaaatactt

SEQ ID NO: 12861 - DNA, 18 bp, Artificial Sequence
  Synthetic: FXN 3 forward 9:69041069-69041091; AsCpf1-1
tgacaccaggttaagaga

SEQ ID NO: 12862 - DNA, 19 bp, Artificial Sequence
  Synthetic: FXN 3 forward 9:69041069-69041092; AsCpf1-1
tgacaccaggttaagagat

SEQ ID NO: 12863 - DNA, 20 bp, Artificial Sequence
  Synthetic: FXN 3 forward 9:69041069-69041093; AsCpf1-1
tgacaccaggttaagagata

SEQ ID NO: 12864 - DNA, 21 bp, Artificial Sequence
  Synthetic: FXN 3 forward 9:69041069-69041094; AsCpf1-1
tgacaccaggttaagagatag

SEQ ID NO: 12865 - DNA, 22 bp, Artificial Sequence
  Synthetic: FXN 3 forward 9:69041069-69041095; AsCpf1-1
tgacaccaggttaagagataga

SEQ ID NO: 12866 - DNA, 23 bp, Artificial Sequence
  Synthetic: FXN 3 forward 9:69041069-69041096; AsCpf1-1
tgacaccaggttaagagatagaa

SEQ ID NO: 12867 - DNA, 24 bp, Artificial Sequence
  Synthetic: FXN 3 forward 9:69041069-69041097; AsCpf1-1
tgacaccaggttaagagatagaat

SEQ ID NO: 12868 - DNA, 25 bp, Artificial Sequence
  Synthetic: FXN 3 forward 9:69041069-69041098; AsCpf1-1
tgacaccaggttaagagatagaatt

SEQ ID NO: 12869 - DNA, 18 bp, Artificial Sequence
  Synthetic: FXN 3 reverse 9:69041085-69041107; AsCpf1-1
gaggaacaaacaaattct

SEQ ID NO: 12870 - DNA, 19 bp, Artificial Sequence
  Synthetic: FXN 3 reverse 9:69041085-69041108; AsCpf1-1
gaggaacaaacaaattcta

SEQ ID NO: 12871 - DNA, 20 bp, Artificial Sequence
  Synthetic: FXN 3 reverse 9:69041085-69041109; AsCpf1-1
gaggaacaaacaaattctat

SEQ ID NO: 12872 - DNA, 21 bp, Artificial Sequence
  Synthetic: FXN 3 reverse 9:69041085-69041110; AsCpf1-1
gaggaacaaacaaattctatc

SEQ ID NO: 12873 - DNA, 22 bp, Artificial Sequence
  Synthetic: FXN 3 reverse 9:69041085-69041111; AsCpf1-1
gaggaacaaacaaattctatct

SEQ ID NO: 12874 - DNA, 23 bp, Artificial Sequence
  Synthetic: FXN 3 reverse 9:69041085-69041112; AsCpf1-1
gaggaacaaacaaattctatctc

SEQ ID NO: 12875 - DNA, 24 bp, Artificial Sequence
  Synthetic: FXN 3 reverse 9:69041085-69041113; AsCpf1-1
gaggaacaaacaaattctatctct

SEQ ID NO: 12876 - DNA, 25 bp, Artificial Sequence
  Synthetic: FXN 3 reverse 9:69041085-69041114; AsCpf1-1
gaggaacaaacaaattctatctctt

SEQ ID NO: 12877 - DNA, 18 bp, Artificial Sequence
  Synthetic: FXN 3 forward 9:69041104-69041126; AsCpf1-1
tctggaggcccttgtctt

SEQ ID NO: 12878 - DNA, 19 bp, Artificial Sequence
  Synthetic: FXN 3 forward 9:69041104-69041127; AsCpf1-1
tctggaggcccttgtcttc

SEQ ID NO: 12879 - DNA, 20 bp, Artificial Sequence
  Synthetic: FXN 3 forward 9:69041104-69041128; AsCpf1-1
tctggaggcccttgtcttca

SEQ ID NO: 12880 - DNA, 21 bp, Artificial Sequence
  Synthetic: FXN 3 forward 9:69041104-69041129; AsCpf1-1
tctggaggcccttgtcttcac

SEQ ID NO: 12881 - DNA, 22 bp, Artificial Sequence
  Synthetic: FXN 3 forward 9:69041104-69041130; AsCpf1-1
tctggaggcccttgtcttcacc

SEQ ID NO: 12882 - DNA, 23 bp, Artificial Sequence
  Synthetic: FXN 3 forward 9:69041104-69041131; AsCpf1-1
tctggaggcccttgtcttcaccc

SEQ ID NO: 12883 - DNA, 24 bp, Artificial Sequence
  Synthetic: FXN 3 forward 9:69041104-69041132; AsCpf1-1
tctggaggcccttgtcttcacccc

SEQ ID NO: 12884 - DNA, 25 bp, Artificial Sequence
  Synthetic: FXN 3 forward 9:69041104-69041133; AsCpf1-1
tctggaggcccttgtcttcacccca

SEQ ID NO: 12885 - DNA, 18 bp, Artificial Sequence
  Synthetic: FXN 3 forward 9:69041124-69041146; AsCpf1-1
ccccatcactgccctgtc

SEQ ID NO: 12886 - DNA, 19 bp, Artificial Sequence
  Synthetic: FXN 3 forward 9:69041124-69041147; AsCpf1-1
ccccatcactgccctgtcc

SEQ ID NO: 12887 - DNA, 20 bp, Artificial Sequence
  Synthetic: FXN 3 forward 9:69041124-69041148; AsCpf1-1
ccccatcactgccctgtcct

SEQ ID NO: 12888 - DNA, 21 bp, Artificial Sequence
  Synthetic: FXN 3 forward 9:69041124-69041149; AsCpf1-1
ccccatcactgccctgtcctc

SEQ ID NO: 12889 - DNA, 22 bp, Artificial Sequence
  Synthetic: FXN 3 forward 9:69041124-69041150; AsCpf1-1
ccccatcactgccctgtcctcc

SEQ ID NO: 12890 - DNA, 23 bp, Artificial Sequence
  Synthetic: FXN 3 forward 9:69041124-69041151; AsCpf1-1
ccccatcactgccctgtcctccc

SEQ ID NO: 12891 - DNA, 24 bp, Artificial Sequence
  Synthetic: FXN 3 forward 9:69041124-69041152; AsCpf1-1
ccccatcactgccctgtcctccct

SEQ ID NO: 12892 - DNA, 25 bp, Artificial Sequence
  Synthetic: FXN 3 forward 9:69041124-69041153; AsCpf1-1
ccccatcactgccctgtcctccctg

SEQ ID NO: 12893 - DNA, 18 bp, Artificial Sequence
  Synthetic: FXN 3 reverse 9:69041126-69041148; AsCpf1-1
gggaggacagggcagtga

SEQ ID NO: 12894 - DNA, 19 bp, Artificial Sequence
  Synthetic: FXN 3 reverse 9:69041126-69041149; AsCpf1-1
gggaggacagggcagtgat

SEQ ID NO: 12895 - DNA, 20 bp, Artificial Sequence
  Synthetic: FXN 3 reverse 9:69041126-69041150; AsCpf1-1
gggaggacagggcagtgatg

SEQ ID NO: 12896 - DNA, 21 bp, Artificial Sequence
  Synthetic: FXN 3 reverse 9:69041126-69041151; AsCpf1-1
gggaggacagggcagtgatgg

SEQ ID NO: 12897 - DNA, 22 bp, Artificial Sequence
  Synthetic: FXN 3 reverse 9:69041126-69041152; AsCpf1-1
gggaggacagggcagtgatggg

SEQ ID NO: 12898 - DNA, 23 bp, Artificial Sequence
  Synthetic: FXN 3 reverse 9:69041126-69041153; AsCpf1-1
gggaggacagggcagtgatgggg

SEQ ID NO: 12899 - DNA, 24 bp, Artificial Sequence
  Synthetic: FXN 3 reverse 9:69041126-69041154; AsCpf1-1
gggaggacagggcagtgatggggt

SEQ ID NO: 12900 - DNA, 25 bp, Artificial Sequence
  Synthetic: FXN 3 reverse 9:69041126-69041155; AsCpf1-1
gggaggacagggcagtgatggggtg

SEQ ID NO: 12901 - DNA, 18 bp, Artificial Sequence
  Synthetic: FXN 3 reverse 9:69041130-69041152; AsCpf1-1
tccagggaggacagggca

SEQ ID NO: 12902 - DNA, 19 bp, Artificial Sequence
  Synthetic: FXN 3 reverse 9:69041130-69041153; AsCpf1-1
tccagggaggacagggcag

SEQ ID NO: 12903 - DNA, 20 bp, Artificial Sequence
  Synthetic: FXN 3 reverse 9:69041130-69041154; AsCpf1-1
tccagggaggacagggcagt

SEQ ID NO: 12904 - DNA, 21 bp, Artificial Sequence
  Synthetic: FXN 3 reverse 9:69041130-69041155; AsCpf1-1
tccagggaggacagggcagtg

SEQ ID NO: 12905 - DNA, 22 bp, Artificial Sequence
  Synthetic: FXN 3 reverse 9:69041130-69041156; AsCpf1-1
tccagggaggacagggcagtga

SEQ ID NO: 12906 - DNA, 23 bp, Artificial Sequence
  Synthetic: FXN 3 reverse 9:69041130-69041157; AsCpf1-1
tccagggaggacagggcagtgat

SEQ ID NO: 12907 - DNA, 24 bp, Artificial Sequence
  Synthetic: FXN 3 reverse 9:69041130-69041158; AsCpf1-1
tccagggaggacagggcagtgatg

SEQ ID NO: 12908 - DNA, 25 bp, Artificial Sequence
  Synthetic: FXN 3 reverse 9:69041130-69041159; AsCpf1-1
tccagggaggacagggcagtgatgg

SEQ ID NO: 12909 - DNA, 18 bp, Artificial Sequence
  Synthetic: FXN 3 reverse 9:69041144-69041166; AsCpf1-1
ggctggcagattcctcca

SEQ ID NO: 12910 - DNA, 19 bp, Artificial Sequence
  Synthetic: FXN 3 reverse 9:69041144-69041167; AsCpf1-1
ggctggcagattcctccag

SEQ ID NO: 12911 - DNA, 20 bp, Artificial Sequence
  Synthetic: FXN 3 reverse 9:69041144-69041168; AsCpf1-1
ggctggcagattcctccagg

SEQ ID NO: 12912 - DNA, 21 bp, Artificial Sequence
  Synthetic: FXN 3 reverse 9:69041144-69041169; AsCpf1-1
ggctggcagattcctccaggg

SEQ ID NO: 12913 - DNA, 22 bp, Artificial Sequence
  Synthetic: FXN 3 reverse 9:69041144-69041170; AsCpf1-1
ggctggcagattcctccaggga

SEQ ID NO: 12914 - DNA, 23 bp, Artificial Sequence
  Synthetic: FXN 3 reverse 9:69041144-69041171; AsCpf1-1
ggctggcagattcctccagggag

SEQ ID NO: 12915 - DNA, 24 bp, Artificial Sequence
  Synthetic: FXN 3 reverse 9:69041144-69041172; AsCpf1-1
ggctggcagattcctccagggagg

SEQ ID NO: 12916 - DNA, 25 bp, Artificial Sequence
  Synthetic: FXN 3 reverse 9:69041144-69041173; AsCpf1-1
ggctggcagattcctccagggagga

SEQ ID NO: 12917 - DNA, 18 bp, Artificial Sequence
  Synthetic: FXN 3 forward 9:69041147-69041169; AsCpf1-1
tggaggaatctgccagcc

SEQ ID NO: 12918 - DNA, 19 bp, Artificial Sequence
  Synthetic: FXN 3 forward 9:69041147-69041170; AsCpf1-1
tggaggaatctgccagccc

SEQ ID NO: 12919 - DNA, 20 bp, Artificial Sequence
  Synthetic: FXN 3 forward 9:69041147-69041171; AsCpf1-1
tggaggaatctgccagcccg

SEQ ID NO: 12920 - DNA, 21 bp, Artificial Sequence
  Synthetic: FXN 3 forward 9:69041147-69041172; AsCpf1-1
tggaggaatctgccagcccga

SEQ ID NO: 12921 - DNA, 22 bp, Artificial Sequence
  Synthetic: FXN 3 forward 9:69041147-69041173; AsCpf1-1
tggaggaatctgccagcccgaa

SEQ ID NO: 12922 - DNA, 23 bp, Artificial Sequence
  Synthetic: FXN 3 forward 9:69041147-69041174; AsCpf1-1
tggaggaatctgccagcccgaat

SEQ ID NO: 12923 - DNA, 24 bp, Artificial Sequence
  Synthetic: FXN 3 forward 9:69041147-69041175; AsCpf1-1
tggaggaatctgccagcccgaatt

SEQ ID NO: 12924 - DNA, 25 bp, Artificial Sequence
  Synthetic: FXN 3 forward 9:69041147-69041176; AsCpf1-1
tggaggaatctgccagcccgaattc

SEQ ID NO: 12925 - DNA, 18 bp, Artificial Sequence
  Synthetic: FXN 3 forward 9:69041178-69041200; AsCpf1-1
tcgtaccctccttttctt

SEQ ID NO: 12926 - DNA, 19 bp, Artificial Sequence
  Synthetic: FXN 3 forward 9:69041178-69041201; AsCpf1-1
tcgtaccctccttttctta

SEQ ID NO: 12927 - DNA, 20 bp, Artificial Sequence
  Synthetic: FXN 3 forward 9:69041178-69041202; AsCpf1-1
tcgtaccctccttttcttag

SEQ ID NO: 12928 - DNA, 21 bp, Artificial Sequence
  Synthetic: FXN 3 forward 9:69041178-69041203; AsCpf1-1
tcgtaccctccttttcttaga

SEQ ID NO: 12929 - DNA, 22 bp, Artificial Sequence
  Synthetic: FXN 3 forward 9:69041178-69041204; AsCpf1-1
tcgtaccctccttttcttagag

SEQ ID NO: 12930 - DNA, 23 bp, Artificial Sequence
  Synthetic: FXN 3 forward 9:69041178-69041205; AsCpf1-1
tcgtaccctccttttcttagagt

SEQ ID NO: 12931 - DNA, 24 bp, Artificial Sequence
  Synthetic: FXN 3 forward 9:69041178-69041206; AsCpf1-1
tcgtaccctccttttcttagagtt

SEQ ID NO: 12932 - DNA, 25 bp, Artificial Sequence
  Synthetic: FXN 3 forward 9:69041178-69041207; AsCpf1-1
tcgtaccctccttttcttagagttt

SEQ ID NO: 12933 - DNA, 18 bp, Artificial Sequence
  Synthetic: FXN 3 forward 9:69041222-69041244; AsCpf1-1
ccaatccatgtattgctt

SEQ ID NO: 12934 - DNA, 19 bp, Artificial Sequence
  Synthetic: FXN 3 forward 9:69041222-69041245; AsCpf1-1
ccaatccatgtattgctta

SEQ ID NO: 12935 - DNA, 20 bp, Artificial Sequence
  Synthetic: FXN 3 forward 9:69041222-69041246; AsCpf1-1
ccaatccatgtattgcttat

SEQ ID NO: 12936 - DNA, 21 bp, Artificial Sequence
  Synthetic: FXN 3 forward 9:69041222-69041247; AsCpf1-1
ccaatccatgtattgcttata

SEQ ID NO: 12937 - DNA, 22 bp, Artificial Sequence
  Synthetic: FXN 3 forward 9:69041222-69041248; AsCpf1-1
ccaatccatgtattgcttatat

SEQ ID NO: 12938 - DNA, 23 bp, Artificial Sequence
  Synthetic: FXN 3 forward 9:69041222-69041249; AsCpf1-1
ccaatccatgtattgcttatata

SEQ ID NO: 12939 - DNA, 24 bp, Artificial Sequence
  Synthetic: FXN 3 forward 9:69041222-69041250; AsCpf1-1
ccaatccatgtattgcttatatac

SEQ ID NO: 12940 - DNA, 25 bp, Artificial Sequence
  Synthetic: FXN 3 forward 9:69041222-69041251; AsCpf1-1
ccaatccatgtattgcttatataca

SEQ ID NO: 12941 - DNA, 18 bp, Artificial Sequence
  Synthetic: FXN 3 forward 9:69041230-69041252; AsCpf1-1
tgtattgcttatatacaa

SEQ ID NO: 12942 - DNA, 19 bp, Artificial Sequence
  Synthetic: FXN 3 forward 9:69041230-69041253; AsCpf1-1
tgtattgcttatatacaag

SEQ ID NO: 12943 - DNA, 20 bp, Artificial Sequence
  Synthetic: FXN 3 forward 9:69041230-69041254; AsCpf1-1
tgtattgcttatatacaagg

SEQ ID NO: 12944 - DNA, 21 bp, Artificial Sequence
  Synthetic: FXN 3 forward 9:69041230-69041255; AsCpf1-1
tgtattgcttatatacaaggt

SEQ ID NO: 12945 - DNA, 22 bp, Artificial Sequence
  Synthetic: FXN 3 forward 9:69041230-69041256; AsCpf1-1
tgtattgcttatatacaaggta

SEQ ID NO: 12946 - DNA, 23 bp, Artificial Sequence
  Synthetic: FXN 3 forward 9:69041230-69041257; AsCpf1-1
tgtattgcttatatacaaggtat

SEQ ID NO: 12947 - DNA, 24 bp, Artificial Sequence
  Synthetic: FXN 3 forward 9:69041230-69041258; AsCpf1-1
tgtattgcttatatacaaggtatt

SEQ ID NO: 12948 - DNA, 25 bp, Artificial Sequence
  Synthetic: FXN 3 forward 9:69041230-69041259; AsCpf1-1
tgtattgcttatatacaaggtattc

SEQ ID NO: 12949 - DNA, 18 bp, Artificial Sequence
  Synthetic: FXN 3 forward 9:69041294-69041316; AsCpf1-1
acactgtttttgtgcgtc

SEQ ID NO: 12950 - DNA, 19 bp, Artificial Sequence
  Synthetic: FXN 3 forward 9:69041294-69041317; AsCpf1-1
acactgtttttgtgcgtca

SEQ ID NO: 12951 - DNA, 20 bp, Artificial Sequence
  Synthetic: FXN 3 forward 9:69041294-69041318; AsCpf1-1
acactgtttttgtgcgtcat

SEQ ID NO: 12952 - DNA, 21 bp, Artificial Sequence
  Synthetic: FXN 3 forward 9:69041294-69041319; AsCpf1-1
acactgtttttgtgcgtcatc

SEQ ID NO: 12953 - DNA, 22 bp, Artificial Sequence
  Synthetic: FXN 3 forward 9:69041294-69041320; AsCpf1-1
acactgtttttgtgcgtcatct

SEQ ID NO: 12954 - DNA, 23 bp, Artificial Sequence
  Synthetic: FXN 3 forward 9:69041294-69041321; AsCpf1-1
acactgtttttgtgcgtcatctg

SEQ ID NO: 12955 - DNA, 24 bp, Artificial Sequence
  Synthetic: FXN 3 forward 9:69041294-69041322; AsCpf1-1
acactgtttttgtgcgtcatctgc

SEQ ID NO: 12956 - DNA, 25 bp, Artificial Sequence
  Synthetic: FXN 3 forward 9:69041294-69041323; AsCpf1-1
acactgtttttgtgcgtcatctgca

SEQ ID NO: 12957 - DNA, 18 bp, Artificial Sequence
  Synthetic: FXN 3 reverse 9:69041335-69041357; AsCpf1-1
gcagtgagaacaaataaa

SEQ ID NO: 12958 - DNA, 19 bp, Artificial Sequence
  Synthetic: FXN 3 reverse 9:69041335-69041358; AsCpf1-1
gcagtgagaacaaataaag

SEQ ID NO: 12959 - DNA, 20 bp, Artificial Sequence
  Synthetic: FXN 3 reverse 9:69041335-69041359; AsCpf1-1
gcagtgagaacaaataaagg

SEQ ID NO: 12960 - DNA, 21 bp, Artificial Sequence
  Synthetic: FXN 3 reverse 9:69041335-69041360; AsCpf1-1
gcagtgagaacaaataaagga

SEQ ID NO: 12961 - DNA, 22 bp, Artificial Sequence
  Synthetic: FXN 3 reverse 9:69041335-69041361; AsCpf1-1
gcagtgagaacaaataaaggac

SEQ ID NO: 12962 - DNA, 23 bp, Artificial Sequence
  Synthetic: FXN 3 reverse 9:69041335-69041362; AsCpf1-1
gcagtgagaacaaataaaggaca

SEQ ID NO: 12963 - DNA, 24 bp, Artificial Sequence
  Synthetic: FXN 3 reverse 9:69041335-69041363; AsCpf1-1
gcagtgagaacaaataaaggacaa

SEQ ID NO: 12964 - DNA, 25 bp, Artificial Sequence
  Synthetic: FXN 3 reverse 9:69041335-69041364; AsCpf1-1
gcagtgagaacaaataaaggacaac

SEQ ID NO: 12965 - DNA, 18 bp, Artificial Sequence
  Synthetic: FXN 3 forward 9:69041407-69041429; AsCpf1-1
ggttcctttaggtgacat

SEQ ID NO: 12966 - DNA, 19 bp, Artificial Sequence
  Synthetic: FXN 3 forward 9:69041407-69041430; AsCpf1-1
ggttcctttaggtgacatt

SEQ ID NO: 12967 - DNA, 20 bp, Artificial Sequence
  Synthetic: FXN 3 forward 9:69041407-69041431; AsCpf1-1
ggttcctttaggtgacattt

SEQ ID NO: 12968 - DNA, 21 bp, Artificial Sequence
  Synthetic: FXN 3 forward 9:69041407-69041432; AsCpf1-1
ggttcctttaggtgacatttg

SEQ ID NO: 12969 - DNA, 22 bp, Artificial Sequence
  Synthetic: FXN 3 forward 9:69041407-69041433; AsCpf1-1
ggttcctttaggtgacatttgg

SEQ ID NO: 12970 - DNA, 23 bp, Artificial Sequence
  Synthetic: FXN 3 forward 9:69041407-69041434; AsCpf1-1
ggttcctttaggtgacatttggt

SEQ ID NO: 12971 - DNA, 24 bp, Artificial Sequence
  Synthetic: FXN 3 forward 9:69041407-69041435; AsCpf1-1
ggttcctttaggtgacatttggtt

SEQ ID NO: 12972 - DNA, 25 bp, Artificial Sequence
  Synthetic: FXN 3 forward 9:69041407-69041436; AsCpf1-1
ggttcctttaggtgacatttggttg

SEQ ID NO: 12973 - DNA, 18 bp, Artificial Sequence
  Synthetic: FXN 3 forward 9:69041413-69041435; AsCpf1-1
tttaggtgacatttggtt

SEQ ID NO: 12974 - DNA, 19 bp, Artificial Sequence
  Synthetic: FXN 3 forward 9:69041413-69041436; AsCpf1-1
tttaggtgacatttggttg

SEQ ID NO: 12975 - DNA, 20 bp, Artificial Sequence
  Synthetic: FXN 3 forward 9:69041413-69041437; AsCpf1-1
tttaggtgacatttggttga

SEQ ID NO: 12976 - DNA, 21 bp, Artificial Sequence
  Synthetic: FXN 3 forward 9:69041413-69041438; AsCpf1-1
tttaggtgacatttggttgat

SEQ ID NO: 12977 - DNA, 22 bp, Artificial Sequence
  Synthetic: FXN 3 forward 9:69041413-69041439; AsCpf1-1
tttaggtgacatttggttgatt

SEQ ID NO: 12978 - DNA, 23 bp, Artificial Sequence
  Synthetic: FXN 3 forward 9:69041413-69041440; AsCpf1-1
tttaggtgacatttggttgattg

SEQ ID NO: 12979 - DNA, 24 bp, Artificial Sequence
  Synthetic: FXN 3 forward 9:69041413-69041441; AsCpf1-1
tttaggtgacatttggttgattgc

SEQ ID NO: 12980 - DNA, 25 bp, Artificial Sequence
  Synthetic: FXN 3 forward 9:69041413-69041442; AsCpf1-1
tttaggtgacatttggttgattgca

SEQ ID NO: 12981 - DNA, 18 bp, Artificial Sequence
  Synthetic: FXN 3 reverse 9:69041461-69041483; AsCpf1-1
tgcacaagaacagtcaca

SEQ ID NO: 12982 - DNA, 19 bp, Artificial Sequence
  Synthetic: FXN 3 reverse 9:69041461-69041484; AsCpf1-1
tgcacaagaacagtcacag

SEQ ID NO: 12983 - DNA, 20 bp, Artificial Sequence
  Synthetic: FXN 3 reverse 9:69041461-69041485; AsCpf1-1
tgcacaagaacagtcacagc

SEQ ID NO: 12984 - DNA, 21 bp, Artificial Sequence
  Synthetic: FXN 3 reverse 9:69041461-69041486; AsCpf1-1
tgcacaagaacagtcacagca

SEQ ID NO: 12985 - DNA, 22 bp, Artificial Sequence
  Synthetic: FXN 3 reverse 9:69041461-69041487; AsCpf1-1
tgcacaagaacagtcacagcag

SEQ ID NO: 12986 - DNA, 23 bp, Artificial Sequence
  Synthetic: FXN 3 reverse 9:69041461-69041488; AsCpf1-1
tgcacaagaacagtcacagcagc

SEQ ID NO: 12987 - DNA, 24 bp, Artificial Sequence
  Synthetic: FXN 3 reverse 9:69041461-69041489; AsCpf1-1
tgcacaagaacagtcacagcagca

SEQ ID NO: 12988 - DNA, 25 bp, Artificial Sequence
  Synthetic: FXN 3 reverse 9:69041461-69041490; AsCpf1-1
tgcacaagaacagtcacagcagcac

SEQ ID NO: 12989 - DNA, 18 bp, Artificial Sequence
  Synthetic: FXN 3 reverse 9:69041482-69041504; AsCpf1-1
cctgaaaggaacttctgt

SEQ ID NO: 12990 - DNA, 19 bp, Artificial Sequence
  Synthetic: FXN 3 reverse 9:69041482-69041505; AsCpf1-1
cctgaaaggaacttctgtc

SEQ ID NO: 12991 - DNA, 20 bp, Artificial Sequence
  Synthetic: FXN 3 reverse 9:69041482-69041506; AsCpf1-1
cctgaaaggaacttctgtcc

SEQ ID NO: 12992 - DNA, 21 bp, Artificial Sequence
  Synthetic: FXN 3 reverse 9:69041482-69041507; AsCpf1-1
cctgaaaggaacttctgtcca

SEQ ID NO: 12993 - DNA, 22 bp, Artificial Sequence
  Synthetic: FXN 3 reverse 9:69041482-69041508; AsCpf1-1
cctgaaaggaacttctgtccat

SEQ ID NO: 12994 - DNA, 23 bp, Artificial Sequence
  Synthetic: FXN 3 reverse 9:69041482-69041509; AsCpf1-1
cctgaaaggaacttctgtccatg

SEQ ID NO: 12995 - DNA, 24 bp, Artificial Sequence
  Synthetic: FXN 3 reverse 9:69041482-69041510; AsCpf1-1
cctgaaaggaacttctgtccatgc

SEQ ID NO: 12996 - DNA, 25 bp, Artificial Sequence
  Synthetic: FXN 3 reverse 9:69041482-69041511; AsCpf1-1
cctgaaaggaacttctgtccatgca

SEQ ID NO: 12997 - DNA, 18 bp, Artificial Sequence
  Synthetic: FXN 3 forward 9:69041496-69041518; AsCpf1-1
tttcaggtgaatttctca

SEQ ID NO: 12998 - DNA, 19 bp, Artificial Sequence
  Synthetic: FXN 3 forward 9:69041496-69041519; AsCpf1-1
tttcaggtgaatttctcag

SEQ ID NO: 12999 - DNA, 20 bp, Artificial Sequence
  Synthetic: FXN 3 forward 9:69041496-69041520; AsCpf1-1
tttcaggtgaatttctcaga

SEQ ID NO: 13000 - DNA, 21 bp, Artificial Sequence
  Synthetic: FXN 3 forward 9:69041496-69041521; AsCpf1-1
tttcaggtgaatttctcagaa

SEQ ID NO: 13001 - DNA, 22 bp, Artificial Sequence
  Synthetic: FXN 3 forward 9:69041496-69041522; AsCpf1-1
tttcaggtgaatttctcagaat

SEQ ID NO: 13002 - DNA, 23 bp, Artificial Sequence
  Synthetic: FXN 3 forward 9:69041496-69041523; AsCpf1-1
tttcaggtgaatttctcagaatg

SEQ ID NO: 13003 - DNA, 24 bp, Artificial Sequence
  Synthetic: FXN 3 forward 9:69041496-69041524; AsCpf1-1
tttcaggtgaatttctcagaatgg

SEQ ID NO: 13004 - DNA, 25 bp, Artificial Sequence
  Synthetic: FXN 3 forward 9:69041496-69041525; AsCpf1-1
tttcaggtgaatttctcagaatgga

SEQ ID NO: 13005 - DNA, 18 bp, Artificial Sequence
  Synthetic: FXN 3 reverse 9:69041496-69041518; AsCpf1-1
ttctgagaaattcacctg

SEQ ID NO: 13006 - DNA, 19 bp, Artificial Sequence
  Synthetic: FXN 3 reverse 9:69041496-69041519; AsCpf1-1
ttctgagaaattcacctga

SEQ ID NO: 13007 - DNA, 20 bp, Artificial Sequence
  Synthetic: FXN 3 reverse 9:69041496-69041520; AsCpf1-1
ttctgagaaattcacctgaa

SEQ ID NO: 13008 - DNA, 21 bp, Artificial Sequence
  Synthetic: FXN 3 reverse 9:69041496-69041521; AsCpf1-1
ttctgagaaattcacctgaaa

SEQ ID NO: 13009 - DNA, 22 bp, Artificial Sequence
  Synthetic: FXN 3 reverse 9:69041496-69041522; AsCpf1-1
ttctgagaaattcacctgaaag

SEQ ID NO: 13010 - DNA, 23 bp, Artificial Sequence
  Synthetic: FXN 3 reverse 9:69041496-69041523; AsCpf1-1
ttctgagaaattcacctgaaagg

SEQ ID NO: 13011 - DNA, 24 bp, Artificial Sequence
  Synthetic: FXN 3 reverse 9:69041496-69041524; AsCpf1-1
ttctgagaaattcacctgaaagga

SEQ ID NO: 13012 - DNA, 25 bp, Artificial Sequence
  Synthetic: FXN 3 reverse 9:69041496-69041525; AsCpf1-1
ttctgagaaattcacctgaaaggaa

SEQ ID NO: 13013 - DNA, 18 bp, Artificial Sequence
  Synthetic: FXN 3 reverse 9:69041497-69041519; AsCpf1-1
attctgagaaattcacct

SEQ ID NO: 13014 - DNA, 19 bp, Artificial Sequence
  Synthetic: FXN 3 reverse 9:69041497-69041520; AsCpf1-1
attctgagaaattcacctg

SEQ ID NO: 13015 - DNA, 20 bp, Artificial Sequence
  Synthetic: FXN 3 reverse 9:69041497-69041521; AsCpf1-1
attctgagaaattcacctga

SEQ ID NO: 13016 - DNA, 21 bp, Artificial Sequence
  Synthetic: FXN 3 reverse 9:69041497-69041522; AsCpf1-1
attctgagaaattcacctgaa

SEQ ID NO: 13017 - DNA, 22 bp, Artificial Sequence
  Synthetic: FXN 3 reverse 9:69041497-69041523; AsCpf1-1
attctgagaaattcacctgaaa

SEQ ID NO: 13018 - DNA, 23 bp, Artificial Sequence
  Synthetic: FXN 3 reverse 9:69041497-69041524; AsCpf1-1
attctgagaaattcacctgaaag

SEQ ID NO: 13019 - DNA, 24 bp, Artificial Sequence
  Synthetic: FXN 3 reverse 9:69041497-69041525; AsCpf1-1
attctgagaaattcacctgaaagg

SEQ ID NO: 13020 - DNA, 25 bp, Artificial Sequence
  Synthetic: FXN 3 reverse 9:69041497-69041526; AsCpf1-1
attctgagaaattcacctgaaagga

SEQ ID NO: 13021 - DNA, 18 bp, Artificial Sequence
  Synthetic: FXN 3 forward 9:69041501-69041523; AsCpf1-1
ggtgaatttctcagaatg

SEQ ID NO: 13022 - DNA, 19 bp, Artificial Sequence
  Synthetic: FXN 3 forward 9:69041501-69041524; AsCpf1-1
ggtgaatttctcagaatgg

SEQ ID NO: 13023 - DNA, 20 bp, Artificial Sequence
  Synthetic: FXN 3 forward 9:69041501-69041525; AsCpf1-1
ggtgaatttctcagaatgga

SEQ ID NO: 13024 - DNA, 21 bp, Artificial Sequence
  Synthetic: FXN 3 forward 9:69041501-69041526; AsCpf1-1
ggtgaatttctcagaatggaa

SEQ ID NO: 13025 - DNA, 22 bp, Artificial Sequence
  Synthetic: FXN 3 forward 9:69041501-69041527; AsCpf1-1
ggtgaatttctcagaatggaat

SEQ ID NO: 13026 - DNA, 23 bp, Artificial Sequence
  Synthetic: FXN 3 forward 9:69041501-69041528; AsCpf1-1
ggtgaatttctcagaatggaatt

SEQ ID NO: 13027 - DNA, 24 bp, Artificial Sequence
  Synthetic: FXN 3 forward 9:69041501-69041529; AsCpf1-1
ggtgaatttctcagaatggaattg

SEQ ID NO: 13028 - DNA, 25 bp, Artificial Sequence
  Synthetic: FXN 3 forward 9:69041501-69041530; AsCpf1-1
ggtgaatttctcagaatggaattgc

SEQ ID NO: 13029 - DNA, 18 bp, Artificial Sequence
  Synthetic: FXN 3 forward 9:69041586-69041608; AsCpf1-1
tcctcccctgcgaggtat

SEQ ID NO: 13030 - DNA, 19 bp, Artificial Sequence
  Synthetic: FXN 3 forward 9:69041586-69041609; AsCpf1-1
tcctcccctgcgaggtatg

SEQ ID NO: 13031 - DNA, 20 bp, Artificial Sequence
  Synthetic: FXN 3 forward 9:69041586-69041610; AsCpf1-1
tcctcccctgcgaggtatgg

SEQ ID NO: 13032 - DNA, 21 bp, Artificial Sequence
  Synthetic: FXN 3 forward 9:69041586-69041611; AsCpf1-1
tcctcccctgcgaggtatggg

SEQ ID NO: 13033 - DNA, 22 bp, Artificial Sequence
  Synthetic: FXN 3 forward 9:69041586-69041612; AsCpf1-1
tcctcccctgcgaggtatgggt

SEQ ID NO: 13034 - DNA, 23 bp, Artificial Sequence
  Synthetic: FXN 3 forward 9:69041586-69041613; AsCpf1-1
tcctcccctgcgaggtatgggtc

SEQ ID NO: 13035 - DNA, 24 bp, Artificial Sequence
  Synthetic: FXN 3 forward 9:69041586-69041614; AsCpf1-1
tcctcccctgcgaggtatgggtcc

SEQ ID NO: 13036 - DNA, 25 bp, Artificial Sequence
  Synthetic: FXN 3 forward 9:69041586-69041615; AsCpf1-1
tcctcccctgcgaggtatgggtcct

SEQ ID NO: 13037 - DNA, 18 bp, Artificial Sequence
  Synthetic: FXN 3 forward 9:69041593-69041615; AsCpf1-1
ctgcgaggtatgggtcct

SEQ ID NO: 13038 - DNA, 19 bp, Artificial Sequence
  Synthetic: FXN 3 forward 9:69041593-69041616; AsCpf1-1
ctgcgaggtatgggtcctg

SEQ ID NO: 13039 - DNA, 20 bp, Artificial Sequence
  Synthetic: FXN 3 forward 9:69041593-69041617; AsCpf1-1
ctgcgaggtatgggtcctga

SEQ ID NO: 13040 - DNA, 21 bp, Artificial Sequence
  Synthetic: FXN 3 forward 9:69041593-69041618; AsCpf1-1
ctgcgaggtatgggtcctgat

SEQ ID NO: 13041 - DNA, 22 bp, Artificial Sequence
  Synthetic: FXN 3 forward 9:69041593-69041619; AsCpf1-1
ctgcgaggtatgggtcctgatt

SEQ ID NO: 13042 - DNA, 23 bp, Artificial Sequence
  Synthetic: FXN 3 forward 9:69041593-69041620; AsCpf1-1
ctgcgaggtatgggtcctgattc

SEQ ID NO: 13043 - DNA, 24 bp, Artificial Sequence
  Synthetic: FXN 3 forward 9:69041593-69041621; AsCpf1-1
ctgcgaggtatgggtcctgattca

SEQ ID NO: 13044 - DNA, 25 bp, Artificial Sequence
  Synthetic: FXN 3 forward 9:69041593-69041622; AsCpf1-1
ctgcgaggtatgggtcctgattcac

SEQ ID NO: 13045 - DNA, 18 bp, Artificial Sequence
  Synthetic: FXN 3 forward 9:69041617-69041639; AsCpf1-1
ctcttcaagtgctgtggt

SEQ ID NO: 13046 - DNA, 19 bp, Artificial Sequence
  Synthetic: FXN 3 forward 9:69041617-69041640; AsCpf1-1
ctcttcaagtgctgtggtt

SEQ ID NO: 13047 - DNA, 20 bp, Artificial Sequence
  Synthetic: FXN 3 forward 9:69041617-69041641; AsCpf1-1
ctcttcaagtgctgtggttt

SEQ ID NO: 13048 - DNA, 21 bp, Artificial Sequence
  Synthetic: FXN 3 forward 9:69041617-69041642; AsCpf1-1
ctcttcaagtgctgtggtttg

SEQ ID NO: 13049 - DNA, 22 bp, Artificial Sequence
  Synthetic: FXN 3 forward 9:69041617-69041643; AsCpf1-1
ctcttcaagtgctgtggtttga

SEQ ID NO: 13050 - DNA, 23 bp, Artificial Sequence
  Synthetic: FXN 3 forward 9:69041617-69041644; AsCpf1-1
ctcttcaagtgctgtggtttgac

SEQ ID NO: 13051 - DNA, 24 bp, Artificial Sequence
  Synthetic: FXN 3 forward 9:69041617-69041645; AsCpf1-1
ctcttcaagtgctgtggtttgaca

SEQ ID NO: 13052 - DNA, 25 bp, Artificial Sequence
  Synthetic: FXN 3 forward 9:69041617-69041646; AsCpf1-1
ctcttcaagtgctgtggtttgacag

SEQ ID NO: 13053 - DNA, 18 bp, Artificial Sequence
  Synthetic: FXN 3 forward 9:69041624-69041646; AsCpf1-1
agtgctgtggtttgacag

SEQ ID NO: 13054 - DNA, 19 bp, Artificial Sequence
  Synthetic: FXN 3 forward 9:69041624-69041647; AsCpf1-1
agtgctgtggtttgacagg

SEQ ID NO: 13055 - DNA, 20 bp, Artificial Sequence
  Synthetic: FXN 3 forward 9:69041624-69041648; AsCpf1-1
agtgctgtggtttgacaggg

SEQ ID NO: 13056 - DNA, 21 bp, Artificial Sequence
  Synthetic: FXN 3 forward 9:69041624-69041649; AsCpf1-1
agtgctgtggtttgacagggc

SEQ ID NO: 13057 - DNA, 22 bp, Artificial Sequence
  Synthetic: FXN 3 forward 9:69041624-69041650; AsCpf1-1
agtgctgtggtttgacagggcc

SEQ ID NO: 13058 - DNA, 23 bp, Artificial Sequence
  Synthetic: FXN 3 forward 9:69041624-69041651; AsCpf1-1
agtgctgtggtttgacagggccg

SEQ ID NO: 13059 - DNA, 24 bp, Artificial Sequence
  Synthetic: FXN 3 forward 9:69041624-69041652; AsCpf1-1
agtgctgtggtttgacagggccgg

SEQ ID NO: 13060 - DNA, 25 bp, Artificial Sequence
  Synthetic: FXN 3 forward 9:69041624-69041653; AsCpf1-1
agtgctgtggtttgacagggccggg

SEQ ID NO: 13061 - DNA, 18 bp, Artificial Sequence
  Synthetic: FXN 3 reverse 9:69041637-69041659; AsCpf1-1
cttgtcacccccggccct

SEQ ID NO: 13062 - DNA, 19 bp, Artificial Sequence
  Synthetic: FXN 3 reverse 9:69041637-69041660; AsCpf1-1
cttgtcacccccggccctg

SEQ ID NO: 13063 - DNA, 20 bp, Artificial Sequence
  Synthetic: FXN 3 reverse 9:69041637-69041661; AsCpf1-1
cttgtcacccccggccctgt

SEQ ID NO: 13064 - DNA, 21 bp, Artificial Sequence
  Synthetic: FXN 3 reverse 9:69041637-69041662; AsCpf1-1
cttgtcacccccggccctgtc

SEQ ID NO: 13065 - DNA, 22 bp, Artificial Sequence
  Synthetic: FXN 3 reverse 9:69041637-69041663; AsCpf1-1
cttgtcacccccggccctgtca

SEQ ID NO: 13066 - DNA, 23 bp, Artificial Sequence
  Synthetic: FXN 3 reverse 9:69041637-69041664; AsCpf1-1
cttgtcacccccggccctgtcaa

SEQ ID NO: 13067 - DNA, 24 bp, Artificial Sequence
  Synthetic: FXN 3 reverse 9:69041637-69041665; AsCpf1-1
cttgtcacccccggccctgtcaaa

SEQ ID NO: 13068 - DNA, 25 bp, Artificial Sequence
  Synthetic: FXN 3 reverse 9:69041637-69041666; AsCpf1-1
cttgtcacccccggccctgtcaaac

SEQ ID NO: 13069 - DNA, 18 bp, Artificial Sequence
  Synthetic: FXN 3 reverse 9:69041646-69041668; AsCpf1-1
aggtgtccccttgtcacc

SEQ ID NO: 13070 - DNA, 19 bp, Artificial Sequence
  Synthetic: FXN 3 reverse 9:69041646-69041669; AsCpf1-1
aggtgtccccttgtcaccc

SEQ ID NO: 13071 - DNA, 20 bp, Artificial Sequence
  Synthetic: FXN 3 reverse 9:69041646-69041670; AsCpf1-1
aggtgtccccttgtcacccc

SEQ ID NO: 13072 - DNA, 21 bp, Artificial Sequence
  Synthetic: FXN 3 reverse 9:69041646-69041671; AsCpf1-1
aggtgtccccttgtcaccccc

SEQ ID NO: 13073 - DNA, 22 bp, Artificial Sequence
  Synthetic: FXN 3 reverse 9:69041646-69041672; AsCpf1-1
aggtgtccccttgtcacccccg

SEQ ID NO: 13074 - DNA, 23 bp, Artificial Sequence
  Synthetic: FXN 3 reverse 9:69041646-69041673; AsCpf1-1
aggtgtccccttgtcacccccgg

SEQ ID NO: 13075 - DNA, 24 bp, Artificial Sequence
  Synthetic: FXN 3 reverse 9:69041646-69041674; AsCpf1-1
aggtgtccccttgtcacccccggc

SEQ ID NO: 13076 - DNA, 25 bp, Artificial Sequence
  Synthetic: FXN 3 reverse 9:69041646-69041675; AsCpf1-1
aggtgtccccttgtcacccccggcc

SEQ ID NO: 13077 - DNA, 18 bp, Artificial Sequence
  Synthetic: FXN 3 reverse 9:69041647-69041669; AsCpf1-1
caggtgtccccttgtcac

SEQ ID NO: 13078 - DNA, 19 bp, Artificial Sequence
  Synthetic: FXN 3 reverse 9:69041647-69041670; AsCpf1-1
caggtgtccccttgtcacc

SEQ ID NO: 13079 - DNA, 20 bp, Artificial Sequence
  Synthetic: FXN 3 reverse 9:69041647-69041671; AsCpf1-1
caggtgtccccttgtcaccc

SEQ ID NO: 13080 - DNA, 21 bp, Artificial Sequence
  Synthetic: FXN 3 reverse 9:69041647-69041672; AsCpf1-1
caggtgtccccttgtcacccc

SEQ ID NO: 13081 - DNA, 22 bp, Artificial Sequence
  Synthetic: FXN 3 reverse 9:69041647-69041673; AsCpf1-1
caggtgtccccttgtcaccccc

SEQ ID NO: 13082 - DNA, 23 bp, Artificial Sequence
  Synthetic: FXN 3 reverse 9:69041647-69041674; AsCpf1-1
caggtgtccccttgtcacccccg

SEQ ID NO: 13083 - DNA, 24 bp, Artificial Sequence
  Synthetic: FXN 3 reverse 9:69041647-69041675; AsCpf1-1
caggtgtccccttgtcacccccgg

SEQ ID NO: 13084 - DNA, 25 bp, Artificial Sequence
  Synthetic: FXN 3 reverse 9:69041647-69041676; AsCpf1-1
caggtgtccccttgtcacccccggc

SEQ ID NO: 13085 - DNA, 18 bp, Artificial Sequence
  Synthetic: FXN 3 reverse 9:69041651-69041673; AsCpf1-1
ttcccaggtgtccccttg

SEQ ID NO: 13086 - DNA, 19 bp, Artificial Sequence
  Synthetic: FXN 3 reverse 9:69041651-69041674; AsCpf1-1
ttcccaggtgtccccttgt

SEQ ID NO: 13087 - DNA, 20 bp, Artificial Sequence
  Synthetic: FXN 3 reverse 9:69041651-69041675; AsCpf1-1
ttcccaggtgtccccttgtc

SEQ ID NO: 13088 - DNA, 21 bp, Artificial Sequence
  Synthetic: FXN 3 reverse 9:69041651-69041676; AsCpf1-1
ttcccaggtgtccccttgtca

SEQ ID NO: 13089 - DNA, 22 bp, Artificial Sequence
  Synthetic: FXN 3 reverse 9:69041651-69041677; AsCpf1-1
ttcccaggtgtccccttgtcac

SEQ ID NO: 13090 - DNA, 23 bp, Artificial Sequence
  Synthetic: FXN 3 reverse 9:69041651-69041678; AsCpf1-1
ttcccaggtgtccccttgtcacc

SEQ ID NO: 13091 - DNA, 24 bp, Artificial Sequence
  Synthetic: FXN 3 reverse 9:69041651-69041679; AsCpf1-1
ttcccaggtgtccccttgtcaccc

SEQ ID NO: 13092 - DNA, 25 bp, Artificial Sequence
  Synthetic: FXN 3 reverse 9:69041651-69041680; AsCpf1-1
ttcccaggtgtccccttgtcacccc

SEQ ID NO: 13093 - DNA, 18 bp, Artificial Sequence
  Synthetic: FXN 3 forward 9:69041688-69041710; AsCpf1-1
tgctggccatccaggcca

SEQ ID NO: 13094 - DNA, 19 bp, Artificial Sequence
  Synthetic: FXN 3 forward 9:69041688-69041711; AsCpf1-1
tgctggccatccaggccag

SEQ ID NO: 13095 - DNA, 20 bp, Artificial Sequence
  Synthetic: FXN 3 forward 9:69041688-69041712; AsCpf1-1
tgctggccatccaggccagt

SEQ ID NO: 13096 - DNA, 21 bp, Artificial Sequence
  Synthetic: FXN 3 forward 9:69041688-69041713; AsCpf1-1
tgctggccatccaggccagtc

SEQ ID NO: 13097 - DNA, 22 bp, Artificial Sequence
  Synthetic: FXN 3 forward 9:69041688-69041714; AsCpf1-1
tgctggccatccaggccagtcc

SEQ ID NO: 13098 - DNA, 23 bp, Artificial Sequence
  Synthetic: FXN 3 forward 9:69041688-69041715; AsCpf1-1
tgctggccatccaggccagtcct

SEQ ID NO: 13099 - DNA, 24 bp, Artificial Sequence
  Synthetic: FXN 3 forward 9:69041688-69041716; AsCpf1-1
tgctggccatccaggccagtcctt

SEQ ID NO: 13100 - DNA, 25 bp, Artificial Sequence
  Synthetic: FXN 3 forward 9:69041688-69041717; AsCpf1-1
tgctggccatccaggccagtcctta

SEQ ID NO: 13101 - DNA, 18 bp, Artificial Sequence
  Synthetic: FXN 3 forward 9:69041701-69041723; AsCpf1-1
ggccagtccttaccaggg

SEQ ID NO: 13102 - DNA, 19 bp, Artificial Sequence
  Synthetic: FXN 3 forward 9:69041701-69041724; AsCpf1-1
ggccagtccttaccagggg

SEQ ID NO: 13103 - DNA, 20 bp, Artificial Sequence
  Synthetic: FXN 3 forward 9:69041701-69041725; AsCpf1-1
ggccagtccttaccaggggg

SEQ ID NO: 13104 - DNA, 21 bp, Artificial Sequence
  Synthetic: FXN 3 forward 9:69041701-69041726; AsCpf1-1
ggccagtccttaccagggggt

SEQ ID NO: 13105 - DNA, 22 bp, Artificial Sequence
  Synthetic: FXN 3 forward 9:69041701-69041727; AsCpf1-1
ggccagtccttaccagggggta

SEQ ID NO: 13106 - DNA, 23 bp, Artificial Sequence
  Synthetic: FXN 3 forward 9:69041701-69041728; AsCpf1-1
ggccagtccttaccagggggtag

SEQ ID NO: 13107 - DNA, 24 bp, Artificial Sequence
  Synthetic: FXN 3 forward 9:69041701-69041729; AsCpf1-1
ggccagtccttaccagggggtagg

SEQ ID NO: 13108 - DNA, 25 bp, Artificial Sequence
  Synthetic: FXN 3 forward 9:69041701-69041730; AsCpf1-1
ggccagtccttaccagggggtaggc

SEQ ID NO: 13109 - DNA, 18 bp, Artificial Sequence
  Synthetic: FXN 3 forward 9:69041748-69041770; AsCpf1-1
tgaccactgggcctgaga

SEQ ID NO: 13110 - DNA, 19 bp, Artificial Sequence
  Synthetic: FXN 3 forward 9:69041748-69041771; AsCpf1-1
tgaccactgggcctgagac

SEQ ID NO: 13111 - DNA, 20 bp, Artificial Sequence
  Synthetic: FXN 3 forward 9:69041748-69041772; AsCpf1-1
tgaccactgggcctgagact

SEQ ID NO: 13112 - DNA, 21 bp, Artificial Sequence
  Synthetic: FXN 3 forward 9:69041748-69041773; AsCpf1-1
tgaccactgggcctgagactt

SEQ ID NO: 13113 - DNA, 22 bp, Artificial Sequence
  Synthetic: FXN 3 forward 9:69041748-69041774; AsCpf1-1
tgaccactgggcctgagacttc

SEQ ID NO: 13114 - DNA, 23 bp, Artificial Sequence
  Synthetic: FXN 3 forward 9:69041748-69041775; AsCpf1-1
tgaccactgggcctgagacttca

SEQ ID NO: 13115 - DNA, 24 bp, Artificial Sequence
  Synthetic: FXN 3 forward 9:69041748-69041776; AsCpf1-1
tgaccactgggcctgagacttcag

SEQ ID NO: 13116 - DNA, 25 bp, Artificial Sequence
  Synthetic: FXN 3 forward 9:69041748-69041777; AsCpf1-1
tgaccactgggcctgagacttcagg

SEQ ID NO: 13117 - DNA, 18 bp, Artificial Sequence
  Synthetic: FXN 3 forward 9:69041771-69041793; AsCpf1-1
ggcccagaaactatctaa

SEQ ID NO: 13118 - DNA, 19 bp, Artificial Sequence
  Synthetic: FXN 3 forward 9:69041771-69041794; AsCpf1-1
ggcccagaaactatctaat

SEQ ID NO: 13119 - DNA, 20 bp, Artificial Sequence
  Synthetic: FXN 3 forward 9:69041771-69041795; AsCpf1-1
ggcccagaaactatctaata

SEQ ID NO: 13120 - DNA, 21 bp, Artificial Sequence
  Synthetic: FXN 3 forward 9:69041771-69041796; AsCpf1-1
ggcccagaaactatctaatat

SEQ ID NO: 13121 - DNA, 22 bp, Artificial Sequence
  Synthetic: FXN 3 forward 9:69041771-69041797; AsCpf1-1
ggcccagaaactatctaatatt

SEQ ID NO: 13122 - DNA, 23 bp, Artificial Sequence
  Synthetic: FXN 3 forward 9:69041771-69041798; AsCpf1-1
ggcccagaaactatctaatattt

SEQ ID NO: 13123 - DNA, 24 bp, Artificial Sequence
  Synthetic: FXN 3 forward 9:69041771-69041799; AsCpf1-1
ggcccagaaactatctaatatttc

SEQ ID NO: 13124 - DNA, 25 bp, Artificial Sequence
  Synthetic: FXN 3 forward 9:69041771-69041800; AsCpf1-1
ggcccagaaactatctaatatttcc

SEQ ID NO: 13125 - DNA, 18 bp, Artificial Sequence
  Synthetic: FXN 3 forward 9:69041796-69041818; AsCpf1-1
tcaaatgcatcccatgag

SEQ ID NO: 13126 - DNA, 19 bp, Artificial Sequence
  Synthetic: FXN 3 forward 9:69041796-69041819; AsCpf1-1
tcaaatgcatcccatgagc

SEQ ID NO: 13127 - DNA, 20 bp, Artificial Sequence
  Synthetic: FXN 3 forward 9:69041796-69041820; AsCpf1-1
tcaaatgcatcccatgagca

SEQ ID NO: 13128 - DNA, 21 bp, Artificial Sequence
  Synthetic: FXN 3 forward 9:69041796-69041821; AsCpf1-1
tcaaatgcatcccatgagcag

SEQ ID NO: 13129 - DNA, 22 bp, Artificial Sequence
  Synthetic: FXN 3 forward 9:69041796-69041822; AsCpf1-1
tcaaatgcatcccatgagcagg

SEQ ID NO: 13130 - DNA, 23 bp, Artificial Sequence
  Synthetic: FXN 3 forward 9:69041796-69041823; AsCpf1-1
tcaaatgcatcccatgagcaggc

SEQ ID NO: 13131 - DNA, 24 bp, Artificial Sequence
  Synthetic: FXN 3 forward 9:69041796-69041824; AsCpf1-1
tcaaatgcatcccatgagcaggca

SEQ ID NO: 13132 - DNA, 25 bp, Artificial Sequence
  Synthetic: FXN 3 forward 9:69041796-69041825; AsCpf1-1
tcaaatgcatcccatgagcaggcac

SEQ ID NO: 13133 - DNA, 18 bp, Artificial Sequence
  Synthetic: FXN 3 forward 9:69041809-69041831; AsCpf1-1
atgagcaggcactgtgtg

SEQ ID NO: 13134 - DNA, 19 bp, Artificial Sequence
  Synthetic: FXN 3 forward 9:69041809-69041832; AsCpf1-1
atgagcaggcactgtgtga

SEQ ID NO: 13135 - DNA, 20 bp, Artificial Sequence
  Synthetic: FXN 3 forward 9:69041809-69041833; AsCpf1-1
atgagcaggcactgtgtgag

SEQ ID NO: 13136 - DNA, 21 bp, Artificial Sequence
  Synthetic: FXN 3 forward 9:69041809-69041834; AsCpf1-1
atgagcaggcactgtgtgagt

SEQ ID NO: 13137 - DNA, 22 bp, Artificial Sequence
  Synthetic: FXN 3 forward 9:69041809-69041835; AsCpf1-1
atgagcaggcactgtgtgagtg

SEQ ID NO: 13138 - DNA, 23 bp, Artificial Sequence
  Synthetic: FXN 3 forward 9:69041809-69041836; AsCpf1-1
atgagcaggcactgtgtgagtga

SEQ ID NO: 13139 - DNA, 24 bp, Artificial Sequence
  Synthetic: FXN 3 forward 9:69041809-69041837; AsCpf1-1
atgagcaggcactgtgtgagtgag

SEQ ID NO: 13140 - DNA, 25 bp, Artificial Sequence
  Synthetic: FXN 3 forward 9:69041809-69041838; AsCpf1-1
atgagcaggcactgtgtgagtgagc

SEQ ID NO: 13141 - DNA, 18 bp, Artificial Sequence
  Synthetic: FXN 3 reverse 9:69041822-69041844; AsCpf1-1
gatgtgtgtgctcactca

SEQ ID NO: 13142 - DNA, 19 bp, Artificial Sequence
  Synthetic: FXN 3 reverse 9:69041822-69041845; AsCpf1-1
gatgtgtgtgctcactcac

SEQ ID NO: 13143 - DNA, 20 bp, Artificial Sequence
  Synthetic: FXN 3 reverse 9:69041822-69041846; AsCpf1-1
gatgtgtgtgctcactcaca

SEQ ID NO: 13144 - DNA, 21 bp, Artificial Sequence
  Synthetic: FXN 3 reverse 9:69041822-69041847; AsCpf1-1
gatgtgtgtgctcactcacac

SEQ ID NO: 13145 - DNA, 22 bp, Artificial Sequence
  Synthetic: FXN 3 reverse 9:69041822-69041848; AsCpf1-1
gatgtgtgtgctcactcacaca

SEQ ID NO: 13146 - DNA, 23 bp, Artificial Sequence
  Synthetic: FXN 3 reverse 9:69041822-69041849; AsCpf1-1
gatgtgtgtgctcactcacacag

SEQ ID NO: 13147 - DNA, 24 bp, Artificial Sequence
  Synthetic: FXN 3 reverse 9:69041822-69041850; AsCpf1-1
gatgtgtgtgctcactcacacagt

SEQ ID NO: 13148 - DNA, 25 bp, Artificial Sequence
  Synthetic: FXN 3 reverse 9:69041822-69041851; AsCpf1-1
gatgtgtgtgctcactcacacagtg

SEQ ID NO: 13149 - DNA, 18 bp, Artificial Sequence
  Synthetic: FXN 3 reverse 9:69041881-69041903; AsCpf1-1
ggtcacccgtgagccctt

SEQ ID NO: 13150 - DNA, 19 bp, Artificial Sequence
  Synthetic: FXN 3 reverse 9:69041881-69041904; AsCpf1-1
ggtcacccgtgagcccttg

SEQ ID NO: 13151 - DNA, 20 bp, Artificial Sequence
  Synthetic: FXN 3 reverse 9:69041881-69041905; AsCpf1-1
ggtcacccgtgagcccttgg

SEQ ID NO: 13152 - DNA, 21 bp, Artificial Sequence
  Synthetic: FXN 3 reverse 9:69041881-69041906; AsCpf1-1
ggtcacccgtgagcccttgga

SEQ ID NO: 13153 - DNA, 22 bp, Artificial Sequence
  Synthetic: FXN 3 reverse 9:69041881-69041907; AsCpf1-1
ggtcacccgtgagcccttggac

SEQ ID NO: 13154 - DNA, 23 bp, Artificial Sequence
  Synthetic: FXN 3 reverse 9:69041881-69041908; AsCpf1-1
ggtcacccgtgagcccttggacc

SEQ ID NO: 13155 - DNA, 24 bp, Artificial Sequence
  Synthetic: FXN 3 reverse 9:69041881-69041909; AsCpf1-1
ggtcacccgtgagcccttggacca

SEQ ID NO: 13156 - DNA, 25 bp, Artificial Sequence
  Synthetic: FXN 3 reverse 9:69041881-69041910; AsCpf1-1
ggtcacccgtgagcccttggaccac

SEQ ID NO: 13157 - DNA, 18 bp, Artificial Sequence
  Synthetic: FXN 3 forward 9:69041885-69041907; AsCpf1-1
agggctcacgggtgacct

SEQ ID NO: 13158 - DNA, 19 bp, Artificial Sequence
  Synthetic: FXN 3 forward 9:69041885-69041908; AsCpf1-1
agggctcacgggtgacctg

SEQ ID NO: 13159 - DNA, 20 bp, Artificial Sequence
  Synthetic: FXN 3 forward 9:69041885-69041909; AsCpf1-1
agggctcacgggtgacctgg

SEQ ID NO: 13160 - DNA, 21 bp, Artificial Sequence
  Synthetic: FXN 3 forward 9:69041885-69041910; AsCpf1-1
agggctcacgggtgacctgga

SEQ ID NO: 13161 - DNA, 22 bp, Artificial Sequence
  Synthetic: FXN 3 forward 9:69041885-69041911; AsCpf1-1
agggctcacgggtgacctggag

SEQ ID NO: 13162 - DNA, 23 bp, Artificial Sequence
  Synthetic: FXN 3 forward 9:69041885-69041912; AsCpf1-1
agggctcacgggtgacctggagt

SEQ ID NO: 13163 - DNA, 24 bp, Artificial Sequence
  Synthetic: FXN 3 forward 9:69041885-69041913; AsCpf1-1
agggctcacgggtgacctggagtt

SEQ ID NO: 13164 - DNA, 25 bp, Artificial Sequence
  Synthetic: FXN 3 forward 9:69041885-69041914; AsCpf1-1
agggctcacgggtgacctggagtta

SEQ ID NO: 13165 - DNA, 18 bp, Artificial Sequence
  Synthetic: FXN 3 reverse 9:69041891-69041913; AsCpf1-1
tctaactccaggtcaccc

SEQ ID NO: 13166 - DNA, 19 bp, Artificial Sequence
  Synthetic: FXN 3 reverse 9:69041891-69041914; AsCpf1-1
tctaactccaggtcacccg

SEQ ID NO: 13167 - DNA, 20 bp, Artificial Sequence
  Synthetic: FXN 3 reverse 9:69041891-69041915; AsCpf1-1
tctaactccaggtcacccgt

SEQ ID NO: 13168 - DNA, 21 bp, Artificial Sequence
  Synthetic: FXN 3 reverse 9:69041891-69041916; AsCpf1-1
tctaactccaggtcacccgtg

SEQ ID NO: 13169 - DNA, 22 bp, Artificial Sequence
  Synthetic: FXN 3 reverse 9:69041891-69041917; AsCpf1-1
tctaactccaggtcacccgtga

SEQ ID NO: 13170 - DNA, 23 bp, Artificial Sequence
  Synthetic: FXN 3 reverse 9:69041891-69041918; AsCpf1-1
tctaactccaggtcacccgtgag

SEQ ID NO: 13171 - DNA, 24 bp, Artificial Sequence
  Synthetic: FXN 3 reverse 9:69041891-69041919; AsCpf1-1
tctaactccaggtcacccgtgagc

SEQ ID NO: 13172 - DNA, 25 bp, Artificial Sequence
  Synthetic: FXN 3 reverse 9:69041891-69041920; AsCpf1-1
tctaactccaggtcacccgtgagcc

SEQ ID NO: 13173 - DNA, 18 bp, Artificial Sequence
  Synthetic: FXN 3 reverse 9:69041975-69041997; AsCpf1-1
aaagtgctgggattacag

SEQ ID NO: 13174 - DNA, 19 bp, Artificial Sequence
  Synthetic: FXN 3 reverse 9:69041975-69041998; AsCpf1-1
aaagtgctgggattacagg

SEQ ID NO: 13175 - DNA, 20 bp, Artificial Sequence
  Synthetic: FXN 3 reverse 9:69041975-69041999; AsCpf1-1
aaagtgctgggattacaggc

SEQ ID NO: 13176 - DNA, 21 bp, Artificial Sequence
  Synthetic: FXN 3 reverse 9:69041975-69042000; AsCpf1-1
aaagtgctgggattacaggcg

SEQ ID NO: 13177 - DNA, 22 bp, Artificial Sequence
  Synthetic: FXN 3 reverse 9:69041975-69042001; AsCpf1-1
aaagtgctgggattacaggcgt

SEQ ID NO: 13178 - DNA, 23 bp, Artificial Sequence
  Synthetic: FXN 3 reverse 9:69041975-69042002; AsCpf1-1
aaagtgctgggattacaggcgta

SEQ ID NO: 13179 - DNA, 24 bp, Artificial Sequence
  Synthetic: FXN 3 reverse 9:69041975-69042003; AsCpf1-1
aaagtgctgggattacaggcgtaa

SEQ ID NO: 13180 - DNA, 25 bp, Artificial Sequence
  Synthetic: FXN 3 reverse 9:69041975-69042004; AsCpf1-1
aaagtgctgggattacaggcgtaag

SEQ ID NO: 13181 - DNA, 18 bp, Artificial Sequence
  Synthetic: FXN 3 forward 9:69041988-69042010; AsCpf1-1
agcactttgggaggccaa

SEQ ID NO: 13182 - DNA, 19 bp, Artificial Sequence
  Synthetic: FXN 3 forward 9:69041988-69042011; AsCpf1-1
agcactttgggaggccaag

SEQ ID NO: 13183 - DNA, 20 bp, Artificial Sequence
  Synthetic: FXN 3 forward 9:69041988-69042012; AsCpf1-1
agcactttgggaggccaagg

SEQ ID NO: 13184 - DNA, 21 bp, Artificial Sequence
  Synthetic: FXN 3 forward 9:69041988-69042013; AsCpf1-1
agcactttgggaggccaaggt

SEQ ID NO: 13185 - DNA, 22 bp, Artificial Sequence
  Synthetic: FXN 3 forward 9:69041988-69042014; AsCpf1-1
agcactttgggaggccaaggtg

SEQ ID NO: 13186 - DNA, 23 bp, Artificial Sequence
  Synthetic: FXN 3 forward 9:69041988-69042015; AsCpf1-1
agcactttgggaggccaaggtgg

SEQ ID NO: 13187 - DNA, 24 bp, Artificial Sequence
  Synthetic: FXN 3 forward 9:69041988-69042016; AsCpf1-1
agcactttgggaggccaaggtggg

SEQ ID NO: 13188 - DNA, 25 bp, Artificial Sequence
  Synthetic: FXN 3 forward 9:69041988-69042017; AsCpf1-1
agcactttgggaggccaaggtgggt

SEQ ID NO: 13189 - DNA, 18 bp, Artificial Sequence
  Synthetic: FXN 3 reverse 9:69041991-69042013; AsCpf1-1
cccaccttggcctcccaa

SEQ ID NO: 13190 - DNA, 19 bp, Artificial Sequence
  Synthetic: FXN 3 reverse 9:69041991-69042014; AsCpf1-1
cccaccttggcctcccaaa

SEQ ID NO: 13191 - DNA, 20 bp, Artificial Sequence
  Synthetic: FXN 3 reverse 9:69041991-69042015; AsCpf1-1
cccaccttggcctcccaaag

SEQ ID NO: 13192 - DNA, 21 bp, Artificial Sequence
  Synthetic: FXN 3 reverse 9:69041991-69042016; AsCpf1-1
cccaccttggcctcccaaagt

SEQ ID NO: 13193 - DNA, 22 bp, Artificial Sequence
  Synthetic: FXN 3 reverse 9:69041991-69042017; AsCpf1-1
cccaccttggcctcccaaagtg

SEQ ID NO: 13194 - DNA, 23 bp, Artificial Sequence
  Synthetic: FXN 3 reverse 9:69041991-69042018; AsCpf1-1
cccaccttggcctcccaaagtgc

SEQ ID NO: 13195 - DNA, 24 bp, Artificial Sequence
  Synthetic: FXN 3 reverse 9:69041991-69042019; AsCpf1-1
cccaccttggcctcccaaagtgct

SEQ ID NO: 13196 - DNA, 25 bp, Artificial Sequence
  Synthetic: FXN 3 reverse 9:69041991-69042020; AsCpf1-1
cccaccttggcctcccaaagtgctg

SEQ ID NO: 13197 - DNA, 18 bp, Artificial Sequence
  Synthetic: FXN 3 reverse 9:69042033-69042055; AsCpf1-1
gcatgttggtcaggctgg

SEQ ID NO: 13198 - DNA, 19 bp, Artificial Sequence
  Synthetic: FXN 3 reverse 9:69042033-69042056; AsCpf1-1
gcatgttggtcaggctggt

SEQ ID NO: 13199 - DNA, 20 bp, Artificial Sequence
  Synthetic: FXN 3 reverse 9:69042033-69042057; AsCpf1-1
gcatgttggtcaggctggtc

SEQ ID NO: 13200 - DNA, 21 bp, Artificial Sequence
  Synthetic: FXN 3 reverse 9:69042033-69042058; AsCpf1-1
gcatgttggtcaggctggtct

SEQ ID NO: 13201 - DNA, 22 bp, Artificial Sequence
  Synthetic: FXN 3 reverse 9:69042033-69042059; AsCpf1-1
gcatgttggtcaggctggtctc

SEQ ID NO: 13202 - DNA, 23 bp, Artificial Sequence
  Synthetic: FXN 3 reverse 9:69042033-69042060; AsCpf1-1
gcatgttggtcaggctggtctca

SEQ ID NO: 13203 - DNA, 24 bp, Artificial Sequence
  Synthetic: FXN 3 reverse 9:69042033-69042061; AsCpf1-1
gcatgttggtcaggctggtctcac

SEQ ID NO: 13204 - DNA, 25 bp, Artificial Sequence
  Synthetic: FXN 3 reverse 9:69042033-69042062; AsCpf1-1
gcatgttggtcaggctggtctcact

SEQ ID NO: 13205 - DNA, 18 bp, Artificial Sequence
  Synthetic: FXN 3 reverse 9:69042074-69042096; AsCpf1-1
tgcccagctaatttttgt

SEQ ID NO: 13206 - DNA, 19 bp, Artificial Sequence
  Synthetic: FXN 3 reverse 9:69042074-69042097; AsCpf1-1
tgcccagctaatttttgtg

SEQ ID NO: 13207 - DNA, 20 bp, Artificial Sequence
  Synthetic: FXN 3 reverse 9:69042074-69042098; AsCpf1-1
tgcccagctaatttttgtgt

SEQ ID NO: 13208 - DNA, 21 bp, Artificial Sequence
  Synthetic: FXN 3 reverse 9:69042074-69042099; AsCpf1-1
tgcccagctaatttttgtgtt

SEQ ID NO: 13209 - DNA, 22 bp, Artificial Sequence
  Synthetic: FXN 3 reverse 9:69042074-69042100; AsCpf1-1
tgcccagctaatttttgtgttt

SEQ ID NO: 13210 - DNA, 23 bp, Artificial Sequence
  Synthetic: FXN 3 reverse 9:69042074-69042101; AsCpf1-1
tgcccagctaatttttgtgtttt

SEQ ID NO: 13211 - DNA, 24 bp, Artificial Sequence
  Synthetic: FXN 3 reverse 9:69042074-69042102; AsCpf1-1
tgcccagctaatttttgtgttttt

SEQ ID NO: 13212 - DNA, 25 bp, Artificial Sequence
  Synthetic: FXN 3 reverse 9:69042074-69042103; AsCpf1-1
tgcccagctaatttttgtgttttta

SEQ ID NO: 13213 - DNA, 18 bp, Artificial Sequence
  Synthetic: FXN 3 forward 9:69042118-69042140; AsCpf1-1
agctactcaggaggctga

SEQ ID NO: 13214 - DNA, 19 bp, Artificial Sequence
  Synthetic: FXN 3 forward 9:69042118-69042141; AsCpf1-1
agctactcaggaggctgag

SEQ ID NO: 13215 - DNA, 20 bp, Artificial Sequence
  Synthetic: FXN 3 forward 9:69042118-69042142; AsCpf1-1
agctactcaggaggctgagg

SEQ ID NO: 13216 - DNA, 21 bp, Artificial Sequence
  Synthetic: FXN 3 forward 9:69042118-69042143; AsCpf1-1
agctactcaggaggctgaggc

SEQ ID NO: 13217 - DNA, 22 bp, Artificial Sequence
  Synthetic: FXN 3 forward 9:69042118-69042144; AsCpf1-1
agctactcaggaggctgaggca

SEQ ID NO: 13218 - DNA, 23 bp, Artificial Sequence
  Synthetic: FXN 3 forward 9:69042118-69042145; AsCpf1-1
agctactcaggaggctgaggcag

SEQ ID NO: 13219 - DNA, 24 bp, Artificial Sequence
  Synthetic: FXN 3 forward 9:69042118-69042146; AsCpf1-1
agctactcaggaggctgaggcagg

SEQ ID NO: 13220 - DNA, 25 bp, Artificial Sequence
  Synthetic: FXN 3 forward 9:69042118-69042147; AsCpf1-1
agctactcaggaggctgaggcagga

SEQ ID NO: 13221 - DNA, 18 bp, Artificial Sequence
  Synthetic: FXN 3 reverse 9:69042130-69042152; AsCpf1-1
agtgattctcctgcctca

SEQ ID NO: 13222 - DNA, 19 bp, Artificial Sequence
  Synthetic: FXN 3 reverse 9:69042130-69042153; AsCpf1-1
agtgattctcctgcctcag

SEQ ID NO: 13223 - DNA, 20 bp, Artificial Sequence
  Synthetic: FXN 3 reverse 9:69042130-69042154; AsCpf1-1
agtgattctcctgcctcagc

SEQ ID NO: 13224 - DNA, 21 bp, Artificial Sequence
  Synthetic: FXN 3 reverse 9:69042130-69042155; AsCpf1-1
agtgattctcctgcctcagcc

SEQ ID NO: 13225 - DNA, 22 bp, Artificial Sequence
  Synthetic: FXN 3 reverse 9:69042130-69042156; AsCpf1-1
agtgattctcctgcctcagcct

SEQ ID NO: 13226 - DNA, 23 bp, Artificial Sequence
  Synthetic: FXN 3 reverse 9:69042130-69042157; AsCpf1-1
agtgattctcctgcctcagcctc

SEQ ID NO: 13227 - DNA, 24 bp, Artificial Sequence
  Synthetic: FXN 3 reverse 9:69042130-69042158; AsCpf1-1
agtgattctcctgcctcagcctcc

SEQ ID NO: 13228 - DNA, 25 bp, Artificial Sequence
  Synthetic: FXN 3 reverse 9:69042130-69042159; AsCpf1-1
agtgattctcctgcctcagcctcct

SEQ ID NO: 13229 - DNA, 18 bp, Artificial Sequence
  Synthetic: FXN 3 reverse 9:69042137-69042159; AsCpf1-1
gggttcaagtgattctcc

SEQ ID NO: 13230 - DNA, 19 bp, Artificial Sequence
  Synthetic: FXN 3 reverse 9:69042137-69042160; AsCpf1-1
gggttcaagtgattctcct

SEQ ID NO: 13231 - DNA, 20 bp, Artificial Sequence
  Synthetic: FXN 3 reverse 9:69042137-69042161; AsCpf1-1
gggttcaagtgattctcctg

SEQ ID NO: 13232 - DNA, 21 bp, Artificial Sequence
  Synthetic: FXN 3 reverse 9:69042137-69042162; AsCpf1-1
gggttcaagtgattctcctgc

SEQ ID NO: 13233 - DNA, 22 bp, Artificial Sequence
  Synthetic: FXN 3 reverse 9:69042137-69042163; AsCpf1-1
gggttcaagtgattctcctgcc

SEQ ID NO: 13234 - DNA, 23 bp, Artificial Sequence
  Synthetic: FXN 3 reverse 9:69042137-69042164; AsCpf1-1
gggttcaagtgattctcctgcct

SEQ ID NO: 13235 - DNA, 24 bp, Artificial Sequence
  Synthetic: FXN 3 reverse 9:69042137-69042165; AsCpf1-1
gggttcaagtgattctcctgcctc

SEQ ID NO: 13236 - DNA, 25 bp, Artificial Sequence
  Synthetic: FXN 3 reverse 9:69042137-69042166; AsCpf1-1
gggttcaagtgattctcctgcctca

SEQ ID NO: 13237 - DNA, 18 bp, Artificial Sequence
  Synthetic: FXN 3 reverse 9:69042143-69042165; AsCpf1-1
cctcccgggttcaagtga

SEQ ID NO: 13238 - DNA, 19 bp, Artificial Sequence
  Synthetic: FXN 3 reverse 9:69042143-69042166; AsCpf1-1
cctcccgggttcaagtgat

SEQ ID NO: 13239 - DNA, 20 bp, Artificial Sequence
  Synthetic: FXN 3 reverse 9:69042143-69042167; AsCpf1-1
cctcccgggttcaagtgatt

SEQ ID NO: 13240 - DNA, 21 bp, Artificial Sequence
  Synthetic: FXN 3 reverse 9:69042143-69042168; AsCpf1-1
cctcccgggttcaagtgattc

SEQ ID NO: 13241 - DNA, 22 bp, Artificial Sequence
  Synthetic: FXN 3 reverse 9:69042143-69042169; AsCpf1-1
cctcccgggttcaagtgattct

SEQ ID NO: 13242 - DNA, 23 bp, Artificial Sequence
  Synthetic: FXN 3 reverse 9:69042143-69042170; AsCpf1-1
cctcccgggttcaagtgattctc

SEQ ID NO: 13243 - DNA, 24 bp, Artificial Sequence
  Synthetic: FXN 3 reverse 9:69042143-69042171; AsCpf1-1
cctcccgggttcaagtgattctcc

SEQ ID NO: 13244 - DNA, 25 bp, Artificial Sequence
  Synthetic: FXN 3 reverse 9:69042143-69042172; AsCpf1-1
cctcccgggttcaagtgattctcct

SEQ ID NO: 13245 - DNA, 18 bp, Artificial Sequence
  Synthetic: FXN 3 forward 9:69042203-69042225; AsCpf1-1
agcctgggcaacagagca

SEQ ID NO: 13246 - DNA, 19 bp, Artificial Sequence
  Synthetic: FXN 3 forward 9:69042203-69042226; AsCpf1-1
agcctgggcaacagagcaa

SEQ ID NO: 13247 - DNA, 20 bp, Artificial Sequence
  Synthetic: FXN 3 forward 9:69042203-69042227; AsCpf1-1
agcctgggcaacagagcaag

SEQ ID NO: 13248 - DNA, 21 bp, Artificial Sequence
  Synthetic: FXN 3 forward 9:69042203-69042228; AsCpf1-1
agcctgggcaacagagcaaga

SEQ ID NO: 13249 - DNA, 22 bp, Artificial Sequence
  Synthetic: FXN 3 forward 9:69042203-69042229; AsCpf1-1
agcctgggcaacagagcaagac

SEQ ID NO: 13250 - DNA, 23 bp, Artificial Sequence
  Synthetic: FXN 3 forward 9:69042203-69042230; AsCpf1-1
agcctgggcaacagagcaagact

SEQ ID NO: 13251 - DNA, 24 bp, Artificial Sequence
  Synthetic: FXN 3 forward 9:69042203-69042231; AsCpf1-1
agcctgggcaacagagcaagactc

SEQ ID NO: 13252 - DNA, 25 bp, Artificial Sequence
  Synthetic: FXN 3 forward 9:69042203-69042232; AsCpf1-1
agcctgggcaacagagcaagactcc

SEQ ID NO: 13253 - DNA, 18 bp, Artificial Sequence
  Synthetic: FXN 3 forward 9:69042204-69042226; AsCpf1-1
gcctgggcaacagagcaa

SEQ ID NO: 13254 - DNA, 19 bp, Artificial Sequence
  Synthetic: FXN 3 forward 9:69042204-69042227; AsCpf1-1
gcctgggcaacagagcaag

SEQ ID NO: 13255 - DNA, 20 bp, Artificial Sequence
  Synthetic: FXN 3 forward 9:69042204-69042228; AsCpf1-1
gcctgggcaacagagcaaga

SEQ ID NO: 13256 - DNA, 21 bp, Artificial Sequence
  Synthetic: FXN 3 forward 9:69042204-69042229; AsCpf1-1
gcctgggcaacagagcaagac

SEQ ID NO: 13257 - DNA, 22 bp, Artificial Sequence
  Synthetic: FXN 3 forward 9:69042204-69042230; AsCpf1-1
gcctgggcaacagagcaagact

SEQ ID NO: 13258 - DNA, 23 bp, Artificial Sequence
  Synthetic: FXN 3 forward 9:69042204-69042231; AsCpf1-1
gcctgggcaacagagcaagactc

SEQ ID NO: 13259 - DNA, 24 bp, Artificial Sequence
  Synthetic: FXN 3 forward 9:69042204-69042232; AsCpf1-1
gcctgggcaacagagcaagactcc

SEQ ID NO: 13260 - DNA, 25 bp, Artificial Sequence
  Synthetic: FXN 3 forward 9:69042204-69042233; AsCpf1-1
gcctgggcaacagagcaagactccg

SEQ ID NO: 13261 - DNA, 18 bp, Artificial Sequence
  Synthetic: FXN 3 forward 9:69042229-69042251; AsCpf1-1
tctcagaaaaaaaaaaaa

SEQ ID NO: 13262 - DNA, 19 bp, Artificial Sequence
  Synthetic: FXN 3 forward 9:69042229-69042252; AsCpf1-1
tctcagaaaaaaaaaaaaa

SEQ ID NO: 13263 - DNA, 20 bp, Artificial Sequence
  Synthetic: FXN 3 forward 9:69042229-69042253; AsCpf1-1
tctcagaaaaaaaaaaaaaa

SEQ ID NO: 13264 - DNA, 21 bp, Artificial Sequence
  Synthetic: FXN 3 forward 9:69042229-69042254; AsCpf1-1
tctcagaaaaaaaaaaaaaaa

SEQ ID NO: 13265 - DNA, 22 bp, Artificial Sequence
  Synthetic: FXN 3 forward 9:69042229-69042255; AsCpf1-1
tctcagaaaaaaaaaaaaaaag

SEQ ID NO: 13266 - DNA, 23 bp, Artificial Sequence
  Synthetic: FXN 3 forward 9:69042229-69042256; AsCpf1-1
tctcagaaaaaaaaaaaaaaagg

SEQ ID NO: 13267 - DNA, 24 bp, Artificial Sequence
  Synthetic: FXN 3 forward 9:69042229-69042257; AsCpf1-1
tctcagaaaaaaaaaaaaaaagga

SEQ ID NO: 13268 - DNA, 25 bp, Artificial Sequence
  Synthetic: FXN 3 forward 9:69042229-69042258; AsCpf1-1
tctcagaaaaaaaaaaaaaaaggaa

SEQ ID NO: 13269 - DNA, 18 bp, Artificial Sequence
  Synthetic: FXN 3 reverse 9:69042229-69042251; AsCpf1-1
tttttttttttttttctg

SEQ ID NO: 13270 - DNA, 19 bp, Artificial Sequence
  Synthetic: FXN 3 reverse 9:69042229-69042252; AsCpf1-1
tttttttttttttttctga

SEQ ID NO: 13271 - DNA, 20 bp, Artificial Sequence
  Synthetic: FXN 3 reverse 9:69042229-69042253; AsCpf1-1
tttttttttttttttctgag

SEQ ID NO: 13272 - DNA, 21 bp, Artificial Sequence
  Synthetic: FXN 3 reverse 9:69042229-69042254; AsCpf1-1
tttttttttttttttctgaga

SEQ ID NO: 13273 - DNA, 22 bp, Artificial Sequence
  Synthetic: FXN 3 reverse 9:69042229-69042255; AsCpf1-1
tttttttttttttttctgagac

SEQ ID NO: 13274 - DNA, 23 bp, Artificial Sequence
  Synthetic: FXN 3 reverse 9:69042229-69042256; AsCpf1-1
tttttttttttttttctgagacg

SEQ ID NO: 13275 - DNA, 24 bp, Artificial Sequence
  Synthetic: FXN 3 reverse 9:69042229-69042257; AsCpf1-1
tttttttttttttttctgagacgg

SEQ ID NO: 13276 - DNA, 25 bp, Artificial Sequence
  Synthetic: FXN 3 reverse 9:69042229-69042258; AsCpf1-1
tttttttttttttttctgagacgga

SEQ ID NO: 13277 - DNA, 18 bp, Artificial Sequence
  Synthetic: FXN 3 forward 9:69042283-69042305; AsCpf1-1
agctttgcctccctcaag

SEQ ID NO: 13278 - DNA, 19 bp, Artificial Sequence
  Synthetic: FXN 3 forward 9:69042283-69042306; AsCpf1-1
agctttgcctccctcaagc

SEQ ID NO: 13279 - DNA, 20 bp, Artificial Sequence
  Synthetic: FXN 3 forward 9:69042283-69042307; AsCpf1-1
agctttgcctccctcaagca

SEQ ID NO: 13280 - DNA, 21 bp, Artificial Sequence
  Synthetic: FXN 3 forward 9:69042283-69042308; AsCpf1-1
agctttgcctccctcaagcag

SEQ ID NO: 13281 - DNA, 22 bp, Artificial Sequence
  Synthetic: FXN 3 forward 9:69042283-69042309; AsCpf1-1
agctttgcctccctcaagcaga

SEQ ID NO: 13282 - DNA, 23 bp, Artificial Sequence
  Synthetic: FXN 3 forward 9:69042283-69042310; AsCpf1-1
agctttgcctccctcaagcagaa

SEQ ID NO: 13283 - DNA, 24 bp, Artificial Sequence
  Synthetic: FXN 3 forward 9:69042283-69042311; AsCpf1-1
agctttgcctccctcaagcagaac

SEQ ID NO: 13284 - DNA, 25 bp, Artificial Sequence
  Synthetic: FXN 3 forward 9:69042283-69042312; AsCpf1-1
agctttgcctccctcaagcagaaca

SEQ ID NO: 13285 - DNA, 18 bp, Artificial Sequence
  Synthetic: FXN 3 reverse 9:69042290-69042312; AsCpf1-1
ttctgttctgcttgaggg

SEQ ID NO: 13286 - DNA, 19 bp, Artificial Sequence
  Synthetic: FXN 3 reverse 9:69042290-69042313; AsCpf1-1
ttctgttctgcttgaggga

SEQ ID NO: 13287 - DNA, 20 bp, Artificial Sequence
  Synthetic: FXN 3 reverse 9:69042290-69042314; AsCpf1-1
ttctgttctgcttgagggag

SEQ ID NO: 13288 - DNA, 21 bp, Artificial Sequence
  Synthetic: FXN 3 reverse 9:69042290-69042315; AsCpf1-1
ttctgttctgcttgagggagg

SEQ ID NO: 13289 - DNA, 22 bp, Artificial Sequence
  Synthetic: FXN 3 reverse 9:69042290-69042316; AsCpf1-1
ttctgttctgcttgagggaggc

SEQ ID NO: 13290 - DNA, 23 bp, Artificial Sequence
  Synthetic: FXN 3 reverse 9:69042290-69042317; AsCpf1-1
ttctgttctgcttgagggaggca

SEQ ID NO: 13291 - DNA, 24 bp, Artificial Sequence
  Synthetic: FXN 3 reverse 9:69042290-69042318; AsCpf1-1
ttctgttctgcttgagggaggcaa

SEQ ID NO: 13292 - DNA, 25 bp, Artificial Sequence
  Synthetic: FXN 3 reverse 9:69042290-69042319; AsCpf1-1
ttctgttctgcttgagggaggcaaa

SEQ ID NO: 13293 - DNA, 18 bp, Artificial Sequence
  Synthetic: FXN 3 forward 9:69042296-69042318; AsCpf1-1
tcaagcagaacagaatgg

SEQ ID NO: 13294 - DNA, 19 bp, Artificial Sequence
  Synthetic: FXN 3 forward 9:69042296-69042319; AsCpf1-1
tcaagcagaacagaatgga

SEQ ID NO: 13295 - DNA, 20 bp, Artificial Sequence
  Synthetic: FXN 3 forward 9:69042296-69042320; AsCpf1-1
tcaagcagaacagaatggag

SEQ ID NO: 13296 - DNA, 21 bp, Artificial Sequence
  Synthetic: FXN 3 forward 9:69042296-69042321; AsCpf1-1
tcaagcagaacagaatggagc

SEQ ID NO: 13297 - DNA, 22 bp, Artificial Sequence
  Synthetic: FXN 3 forward 9:69042296-69042322; AsCpf1-1
tcaagcagaacagaatggagcc

SEQ ID NO: 13298 - DNA, 23 bp, Artificial Sequence
  Synthetic: FXN 3 forward 9:69042296-69042323; AsCpf1-1
tcaagcagaacagaatggagcct

SEQ ID NO: 13299 - DNA, 24 bp, Artificial Sequence
  Synthetic: FXN 3 forward 9:69042296-69042324; AsCpf1-1
tcaagcagaacagaatggagcctc

SEQ ID NO: 13300 - DNA, 25 bp, Artificial Sequence
  Synthetic: FXN 3 forward 9:69042296-69042325; AsCpf1-1
tcaagcagaacagaatggagcctcc

SEQ ID NO: 13301 - DNA, 18 bp, Artificial Sequence
  Synthetic: FXN 3 reverse 9:69042312-69042334; AsCpf1-1
cctctgcctaagggaggc

SEQ ID NO: 13302 - DNA, 19 bp, Artificial Sequence
  Synthetic: FXN 3 reverse 9:69042312-69042335; AsCpf1-1
cctctgcctaagggaggct

SEQ ID NO: 13303 - DNA, 20 bp, Artificial Sequence
  Synthetic: FXN 3 reverse 9:69042312-69042336; AsCpf1-1
cctctgcctaagggaggctc

SEQ ID NO: 13304 - DNA, 21 bp, Artificial Sequence
  Synthetic: FXN 3 reverse 9:69042312-69042337; AsCpf1-1
cctctgcctaagggaggctcc

SEQ ID NO: 13305 - DNA, 22 bp, Artificial Sequence
  Synthetic: FXN 3 reverse 9:69042312-69042338; AsCpf1-1
cctctgcctaagggaggctcca

SEQ ID NO: 13306 - DNA, 23 bp, Artificial Sequence
  Synthetic: FXN 3 reverse 9:69042312-69042339; AsCpf1-1
cctctgcctaagggaggctccat

SEQ ID NO: 13307 - DNA, 24 bp, Artificial Sequence
  Synthetic: FXN 3 reverse 9:69042312-69042340; AsCpf1-1
cctctgcctaagggaggctccatt

SEQ ID NO: 13308 - DNA, 25 bp, Artificial Sequence
  Synthetic: FXN 3 reverse 9:69042312-69042341; AsCpf1-1
cctctgcctaagggaggctccattc

SEQ ID NO: 13309 - DNA, 18 bp, Artificial Sequence
  Synthetic: FXN 3 reverse 9:69042313-69042335; AsCpf1-1
gcctctgcctaagggagg

SEQ ID NO: 13310 - DNA, 19 bp, Artificial Sequence
  Synthetic: FXN 3 reverse 9:69042313-69042336; AsCpf1-1
gcctctgcctaagggaggc

SEQ ID NO: 13311 - DNA, 20 bp, Artificial Sequence
  Synthetic: FXN 3 reverse 9:69042313-69042337; AsCpf1-1
gcctctgcctaagggaggct

SEQ ID NO: 13312 - DNA, 21 bp, Artificial Sequence
  Synthetic: FXN 3 reverse 9:69042313-69042338; AsCpf1-1
gcctctgcctaagggaggctc

SEQ ID NO: 13313 - DNA, 22 bp, Artificial Sequence
  Synthetic: FXN 3 reverse 9:69042313-69042339; AsCpf1-1
gcctctgcctaagggaggctcc

SEQ ID NO: 13314 - DNA, 23 bp, Artificial Sequence
  Synthetic: FXN 3 reverse 9:69042313-69042340; AsCpf1-1
gcctctgcctaagggaggctcca

SEQ ID NO: 13315 - DNA, 24 bp, Artificial Sequence
  Synthetic: FXN 3 reverse 9:69042313-69042341; AsCpf1-1
gcctctgcctaagggaggctccat

SEQ ID NO: 13316 - DNA, 25 bp, Artificial Sequence
  Synthetic: FXN 3 reverse 9:69042313-69042342; AsCpf1-1
gcctctgcctaagggaggctccatt

SEQ ID NO: 13317 - DNA, 18 bp, Artificial Sequence
  Synthetic: FXN 3 forward 9:69042322-69042344; AsCpf1-1
ttaggcagaggcggaagt

SEQ ID NO: 13318 - DNA, 19 bp, Artificial Sequence
  Synthetic: FXN 3 forward 9:69042322-69042345; AsCpf1-1
ttaggcagaggcggaagtt

SEQ ID NO: 13319 - DNA, 20 bp, Artificial Sequence
  Synthetic: FXN 3 forward 9:69042322-69042346; AsCpf1-1
ttaggcagaggcggaagttt

SEQ ID NO: 13320 - DNA, 21 bp, Artificial Sequence
  Synthetic: FXN 3 forward 9:69042322-69042347; AsCpf1-1
ttaggcagaggcggaagtttg

SEQ ID NO: 13321 - DNA, 22 bp, Artificial Sequence
  Synthetic: FXN 3 forward 9:69042322-69042348; AsCpf1-1
ttaggcagaggcggaagtttgc

SEQ ID NO: 13322 - DNA, 23 bp, Artificial Sequence
  Synthetic: FXN 3 forward 9:69042322-69042349; AsCpf1-1
ttaggcagaggcggaagtttgcc

SEQ ID NO: 13323 - DNA, 24 bp, Artificial Sequence
  Synthetic: FXN 3 forward 9:69042322-69042350; AsCpf1-1
ttaggcagaggcggaagtttgcct

SEQ ID NO: 13324 - DNA, 25 bp, Artificial Sequence
  Synthetic: FXN 3 forward 9:69042322-69042351; AsCpf1-1
ttaggcagaggcggaagtttgcctc

SEQ ID NO: 13325 - DNA, 18 bp, Artificial Sequence
  Synthetic: FXN 3 reverse 9:69042358-69042380; AsCpf1-1
ggctctgaacaaaagaat

SEQ ID NO: 13326 - DNA, 19 bp, Artificial Sequence
  Synthetic: FXN 3 reverse 9:69042358-69042381; AsCpf1-1
ggctctgaacaaaagaatg

SEQ ID NO: 13327 - DNA, 20 bp, Artificial Sequence
  Synthetic: FXN 3 reverse 9:69042358-69042382; AsCpf1-1
ggctctgaacaaaagaatgg

SEQ ID NO: 13328 - DNA, 21 bp, Artificial Sequence
  Synthetic: FXN 3 reverse 9:69042358-69042383; AsCpf1-1
ggctctgaacaaaagaatgga

SEQ ID NO: 13329 - DNA, 22 bp, Artificial Sequence
  Synthetic: FXN 3 reverse 9:69042358-69042384; AsCpf1-1
ggctctgaacaaaagaatggag

SEQ ID NO: 13330 - DNA, 23 bp, Artificial Sequence
  Synthetic: FXN 3 reverse 9:69042358-69042385; AsCpf1-1
ggctctgaacaaaagaatggaga

SEQ ID NO: 13331 - DNA, 24 bp, Artificial Sequence
  Synthetic: FXN 3 reverse 9:69042358-69042386; AsCpf1-1
ggctctgaacaaaagaatggagaa

SEQ ID NO: 13332 - DNA, 25 bp, Artificial Sequence
  Synthetic: FXN 3 reverse 9:69042358-69042387; AsCpf1-1
ggctctgaacaaaagaatggagaac

SEQ ID NO: 13333 - DNA, 18 bp, Artificial Sequence
  Synthetic: FXN 3 forward 9:69042362-69042384; AsCpf1-1
ttcttttgttcagagcct

SEQ ID NO: 13334 - DNA, 19 bp, Artificial Sequence
  Synthetic: FXN 3 forward 9:69042362-69042385; AsCpf1-1
ttcttttgttcagagcctg

SEQ ID NO: 13335 - DNA, 20 bp, Artificial Sequence
  Synthetic: FXN 3 forward 9:69042362-69042386; AsCpf1-1
ttcttttgttcagagcctga

SEQ ID NO: 13336 - DNA, 21 bp, Artificial Sequence
  Synthetic: FXN 3 forward 9:69042362-69042387; AsCpf1-1
ttcttttgttcagagcctgaa

SEQ ID NO: 13337 - DNA, 22 bp, Artificial Sequence
  Synthetic: FXN 3 forward 9:69042362-69042388; AsCpf1-1
ttcttttgttcagagcctgaat

SEQ ID NO: 13338 - DNA, 23 bp, Artificial Sequence
  Synthetic: FXN 3 forward 9:69042362-69042389; AsCpf1-1
ttcttttgttcagagcctgaata

SEQ ID NO: 13339 - DNA, 24 bp, Artificial Sequence
  Synthetic: FXN 3 forward 9:69042362-69042390; AsCpf1-1
ttcttttgttcagagcctgaatac

SEQ ID NO: 13340 - DNA, 25 bp, Artificial Sequence
  Synthetic: FXN 3 forward 9:69042362-69042391; AsCpf1-1
ttcttttgttcagagcctgaatacc

SEQ ID NO: 13341 - DNA, 18 bp, Artificial Sequence
  Synthetic: FXN 3 forward 9:69042374-69042396; AsCpf1-1
gagcctgaataccctcag

SEQ ID NO: 13342 - DNA, 19 bp, Artificial Sequence
  Synthetic: FXN 3 forward 9:69042374-69042397; AsCpf1-1
gagcctgaataccctcagg

SEQ ID NO: 13343 - DNA, 20 bp, Artificial Sequence
  Synthetic: FXN 3 forward 9:69042374-69042398; AsCpf1-1
gagcctgaataccctcaggc

SEQ ID NO: 13344 - DNA, 21 bp, Artificial Sequence
  Synthetic: FXN 3 forward 9:69042374-69042399; AsCpf1-1
gagcctgaataccctcaggct

SEQ ID NO: 13345 - DNA, 22 bp, Artificial Sequence
  Synthetic: FXN 3 forward 9:69042374-69042400; AsCpf1-1
gagcctgaataccctcaggctc

SEQ ID NO: 13346 - DNA, 23 bp, Artificial Sequence
  Synthetic: FXN 3 forward 9:69042374-69042401; AsCpf1-1
gagcctgaataccctcaggctct

SEQ ID NO: 13347 - DNA, 24 bp, Artificial Sequence
  Synthetic: FXN 3 forward 9:69042374-69042402; AsCpf1-1
gagcctgaataccctcaggctctg

SEQ ID NO: 13348 - DNA, 25 bp, Artificial Sequence
  Synthetic: FXN 3 forward 9:69042374-69042403; AsCpf1-1
gagcctgaataccctcaggctctgt

SEQ ID NO: 13349 - DNA, 18 bp, Artificial Sequence
  Synthetic: FXN 3 forward 9:69042468-69042490; AsCpf1-1
ttccttcagaggagtaaa

SEQ ID NO: 13350 - DNA, 19 bp, Artificial Sequence
  Synthetic: FXN 3 forward 9:69042468-69042491; AsCpf1-1
ttccttcagaggagtaaac

SEQ ID NO: 13351 - DNA, 20 bp, Artificial Sequence
  Synthetic: FXN 3 forward 9:69042468-69042492; AsCpf1-1
ttccttcagaggagtaaact

SEQ ID NO: 13352 - DNA, 21 bp, Artificial Sequence
  Synthetic: FXN 3 forward 9:69042468-69042493; AsCpf1-1
ttccttcagaggagtaaactg

SEQ ID NO: 13353 - DNA, 22 bp, Artificial Sequence
  Synthetic: FXN 3 forward 9:69042468-69042494; AsCpf1-1
ttccttcagaggagtaaactga

SEQ ID NO: 13354 - DNA, 23 bp, Artificial Sequence
  Synthetic: FXN 3 forward 9:69042468-69042495; AsCpf1-1
ttccttcagaggagtaaactgag

SEQ ID NO: 13355 - DNA, 24 bp, Artificial Sequence
  Synthetic: FXN 3 forward 9:69042468-69042496; AsCpf1-1
ttccttcagaggagtaaactgagg

SEQ ID NO: 13356 - DNA, 25 bp, Artificial Sequence
  Synthetic: FXN 3 forward 9:69042468-69042497; AsCpf1-1
ttccttcagaggagtaaactgaggt

SEQ ID NO: 13357 - DNA, 18 bp, Artificial Sequence
  Synthetic: FXN 3 forward 9:69042472-69042494; AsCpf1-1
ttcagaggagtaaactga

SEQ ID NO: 13358 - DNA, 19 bp, Artificial Sequence
  Synthetic: FXN 3 forward 9:69042472-69042495; AsCpf1-1
ttcagaggagtaaactgag

SEQ ID NO: 13359 - DNA, 20 bp, Artificial Sequence
  Synthetic: FXN 3 forward 9:69042472-69042496; AsCpf1-1
ttcagaggagtaaactgagg

SEQ ID NO: 13360 - DNA, 21 bp, Artificial Sequence
  Synthetic: FXN 3 forward 9:69042472-69042497; AsCpf1-1
ttcagaggagtaaactgaggt

SEQ ID NO: 13361 - DNA, 22 bp, Artificial Sequence
  Synthetic: FXN 3 forward 9:69042472-69042498; AsCpf1-1
ttcagaggagtaaactgaggtt

SEQ ID NO: 13362 - DNA, 23 bp, Artificial Sequence
  Synthetic: FXN 3 forward 9:69042472-69042499; AsCpf1-1
ttcagaggagtaaactgaggttc

SEQ ID NO: 13363 - DNA, 24 bp, Artificial Sequence
  Synthetic: FXN 3 forward 9:69042472-69042500; AsCpf1-1
ttcagaggagtaaactgaggttcc

SEQ ID NO: 13364 - DNA, 25 bp, Artificial Sequence
  Synthetic: FXN 3 forward 9:69042472-69042501; AsCpf1-1
ttcagaggagtaaactgaggttcca

SEQ ID NO: 13365 - DNA, 18 bp, Artificial Sequence
  Synthetic: FXN 3 forward 9:69042476-69042498; AsCpf1-1
gaggagtaaactgaggtt

SEQ ID NO: 13366 - DNA, 19 bp, Artificial Sequence
  Synthetic: FXN 3 forward 9:69042476-69042499; AsCpf1-1
gaggagtaaactgaggttc

SEQ ID NO: 13367 - DNA, 20 bp, Artificial Sequence
  Synthetic: FXN 3 forward 9:69042476-69042500; AsCpf1-1
gaggagtaaactgaggttcc

SEQ ID NO: 13368 - DNA, 21 bp, Artificial Sequence
  Synthetic: FXN 3 forward 9:69042476-69042501; AsCpf1-1
gaggagtaaactgaggttcca

SEQ ID NO: 13369 - DNA, 22 bp, Artificial Sequence
  Synthetic: FXN 3 forward 9:69042476-69042502; AsCpf1-1
gaggagtaaactgaggttccaa

SEQ ID NO: 13370 - DNA, 23 bp, Artificial Sequence
  Synthetic: FXN 3 forward 9:69042476-69042503; AsCpf1-1
gaggagtaaactgaggttccaaa

SEQ ID NO: 13371 - DNA, 24 bp, Artificial Sequence
  Synthetic: FXN 3 forward 9:69042476-69042504; AsCpf1-1
gaggagtaaactgaggttccaaaa

SEQ ID NO: 13372 - DNA, 25 bp, Artificial Sequence
  Synthetic: FXN 3 forward 9:69042476-69042505; AsCpf1-1
gaggagtaaactgaggttccaaaag

SEQ ID NO: 13373 - DNA, 18 bp, Artificial Sequence
  Synthetic: FXN 3 forward 9:69042496-69042518; AsCpf1-1
aaaaggtttagcagttgc

SEQ ID NO: 13374 - DNA, 19 bp, Artificial Sequence
  Synthetic: FXN 3 forward 9:69042496-69042519; AsCpf1-1
aaaaggtttagcagttgcc

SEQ ID NO: 13375 - DNA, 20 bp, Artificial Sequence
  Synthetic: FXN 3 forward 9:69042496-69042520; AsCpf1-1
aaaaggtttagcagttgccc

SEQ ID NO: 13376 - DNA, 21 bp, Artificial Sequence
  Synthetic: FXN 3 forward 9:69042496-69042521; AsCpf1-1
aaaaggtttagcagttgcccg

SEQ ID NO: 13377 - DNA, 22 bp, Artificial Sequence
  Synthetic: FXN 3 forward 9:69042496-69042522; AsCpf1-1
aaaaggtttagcagttgcccga

SEQ ID NO: 13378 - DNA, 23 bp, Artificial Sequence
  Synthetic: FXN 3 forward 9:69042496-69042523; AsCpf1-1
aaaaggtttagcagttgcccgag

SEQ ID NO: 13379 - DNA, 24 bp, Artificial Sequence
  Synthetic: FXN 3 forward 9:69042496-69042524; AsCpf1-1
aaaaggtttagcagttgcccgagg

SEQ ID NO: 13380 - DNA, 25 bp, Artificial Sequence
  Synthetic: FXN 3 forward 9:69042496-69042525; AsCpf1-1
aaaaggtttagcagttgcccgagga

SEQ ID NO: 13381 - DNA, 18 bp, Artificial Sequence
  Synthetic: FXN 3 forward 9:69042497-69042519; AsCpf1-1
aaaggtttagcagttgcc

SEQ ID NO: 13382 - DNA, 19 bp, Artificial Sequence
  Synthetic: FXN 3 forward 9:69042497-69042520; AsCpf1-1
aaaggtttagcagttgccc

SEQ ID NO: 13383 - DNA, 20 bp, Artificial Sequence
  Synthetic: FXN 3 forward 9:69042497-69042521; AsCpf1-1
aaaggtttagcagttgcccg

SEQ ID NO: 13384 - DNA, 21 bp, Artificial Sequence
  Synthetic: FXN 3 forward 9:69042497-69042522; AsCpf1-1
aaaggtttagcagttgcccga

SEQ ID NO: 13385 - DNA, 22 bp, Artificial Sequence
  Synthetic: FXN 3 forward 9:69042497-69042523; AsCpf1-1
aaaggtttagcagttgcccgag

SEQ ID NO: 13386 - DNA, 23 bp, Artificial Sequence
  Synthetic: FXN 3 forward 9:69042497-69042524; AsCpf1-1
aaaggtttagcagttgcccgagg

SEQ ID NO: 13387 - DNA, 24 bp, Artificial Sequence
  Synthetic: FXN 3 forward 9:69042497-69042525; AsCpf1-1
aaaggtttagcagttgcccgagga

SEQ ID NO: 13388 - DNA, 25 bp, Artificial Sequence
  Synthetic: FXN 3 forward 9:69042497-69042526; AsCpf1-1
aaaggtttagcagttgcccgaggaa

SEQ ID NO: 13389 - DNA, 18 bp, Artificial Sequence
  Synthetic: FXN 3 reverse 9:69042497-69042519; AsCpf1-1
tcgggcaactgctaaacc

SEQ ID NO: 13390 - DNA, 19 bp, Artificial Sequence
  Synthetic: FXN 3 reverse 9:69042497-69042520; AsCpf1-1
tcgggcaactgctaaacct

SEQ ID NO: 13391 - DNA, 20 bp, Artificial Sequence
  Synthetic: FXN 3 reverse 9:69042497-69042521; AsCpf1-1
tcgggcaactgctaaacctt

SEQ ID NO: 13392 - DNA, 21 bp, Artificial Sequence
  Synthetic: FXN 3 reverse 9:69042497-69042522; AsCpf1-1
tcgggcaactgctaaaccttt

SEQ ID NO: 13393 - DNA, 22 bp, Artificial Sequence
  Synthetic: FXN 3 reverse 9:69042497-69042523; AsCpf1-1
tcgggcaactgctaaacctttt

SEQ ID NO: 13394 - DNA, 23 bp, Artificial Sequence
  Synthetic: FXN 3 reverse 9:69042497-69042524; AsCpf1-1
tcgggcaactgctaaaccttttg

SEQ ID NO: 13395 - DNA, 24 bp, Artificial Sequence
  Synthetic: FXN 3 reverse 9:69042497-69042525; AsCpf1-1
tcgggcaactgctaaaccttttgg

SEQ ID NO: 13396 - DNA, 25 bp, Artificial Sequence
  Synthetic: FXN 3 reverse 9:69042497-69042526; AsCpf1-1
tcgggcaactgctaaaccttttgga

SEQ ID NO: 13397 - DNA, 18 bp, Artificial Sequence
  Synthetic: FXN 3 reverse 9:69042578-69042600; AsCpf1-1
gctgtttttaatcataaa

SEQ ID NO: 13398 - DNA, 19 bp, Artificial Sequence
  Synthetic: FXN 3 reverse 9:69042578-69042601; AsCpf1-1
gctgtttttaatcataaaa

SEQ ID NO: 13399 - DNA, 20 bp, Artificial Sequence
  Synthetic: FXN 3 reverse 9:69042578-69042602; AsCpf1-1
gctgtttttaatcataaaaa

SEQ ID NO: 13400 - DNA, 21 bp, Artificial Sequence
  Synthetic: FXN 3 reverse 9:69042578-69042603; AsCpf1-1
gctgtttttaatcataaaaaa

SEQ ID NO: 13401 - DNA, 22 bp, Artificial Sequence
  Synthetic: FXN 3 reverse 9:69042578-69042604; AsCpf1-1
gctgtttttaatcataaaaaag

SEQ ID NO: 13402 - DNA, 23 bp, Artificial Sequence
  Synthetic: FXN 3 reverse 9:69042578-69042605; AsCpf1-1
gctgtttttaatcataaaaaaga

SEQ ID NO: 13403 - DNA, 24 bp, Artificial Sequence
  Synthetic: FXN 3 reverse 9:69042578-69042606; AsCpf1-1
gctgtttttaatcataaaaaagaa

SEQ ID NO: 13404 - DNA, 25 bp, Artificial Sequence
  Synthetic: FXN 3 reverse 9:69042578-69042607; AsCpf1-1
gctgtttttaatcataaaaaagaac

SEQ ID NO: 13405 - DNA, 18 bp, Artificial Sequence
  Synthetic: FXN 3 reverse 9:69042604-69042626; AsCpf1-1
aaggcacaagtagaagtc

SEQ ID NO: 13406 - DNA, 19 bp, Artificial Sequence
  Synthetic: FXN 3 reverse 9:69042604-69042627; AsCpf1-1
aaggcacaagtagaagtct

SEQ ID NO: 13407 - DNA, 20 bp, Artificial Sequence
  Synthetic: FXN 3 reverse 9:69042604-69042628; AsCpf1-1
aaggcacaagtagaagtctt

SEQ ID NO: 13408 - DNA, 21 bp, Artificial Sequence
  Synthetic: FXN 3 reverse 9:69042604-69042629; AsCpf1-1
aaggcacaagtagaagtcttt

SEQ ID NO: 13409 - DNA, 22 bp, Artificial Sequence
  Synthetic: FXN 3 reverse 9:69042604-69042630; AsCpf1-1
aaggcacaagtagaagtctttc

SEQ ID NO: 13410 - DNA, 23 bp, Artificial Sequence
  Synthetic: FXN 3 reverse 9:69042604-69042631; AsCpf1-1
aaggcacaagtagaagtctttct

SEQ ID NO: 13411 - DNA, 24 bp, Artificial Sequence
  Synthetic: FXN 3 reverse 9:69042604-69042632; AsCpf1-1
aaggcacaagtagaagtctttctt

SEQ ID NO: 13412 - DNA, 25 bp, Artificial Sequence
  Synthetic: FXN 3 reverse 9:69042604-69042633; AsCpf1-1
aaggcacaagtagaagtctttcttc

SEQ ID NO: 13413 - DNA, 18 bp, Artificial Sequence
  Synthetic: FXN 3 forward 9:69042652-69042674; AsCpf1-1
caccagtaacaaccatca

SEQ ID NO: 13414 - DNA, 19 bp, Artificial Sequence
  Synthetic: FXN 3 forward 9:69042652-69042675; AsCpf1-1
caccagtaacaaccatcaa

SEQ ID NO: 13415 - DNA, 20 bp, Artificial Sequence
  Synthetic: FXN 3 forward 9:69042652-69042676; AsCpf1-1
caccagtaacaaccatcaaa

SEQ ID NO: 13416 - DNA, 21 bp, Artificial Sequence
  Synthetic: FXN 3 forward 9:69042652-69042677; AsCpf1-1
caccagtaacaaccatcaaat

SEQ ID NO: 13417 - DNA, 22 bp, Artificial Sequence
  Synthetic: FXN 3 forward 9:69042652-69042678; AsCpf1-1
caccagtaacaaccatcaaatc

SEQ ID NO: 13418 - DNA, 23 bp, Artificial Sequence
  Synthetic: FXN 3 forward 9:69042652-69042679; AsCpf1-1
caccagtaacaaccatcaaatct

SEQ ID NO: 13419 - DNA, 24 bp, Artificial Sequence
  Synthetic: FXN 3 forward 9:69042652-69042680; AsCpf1-1
caccagtaacaaccatcaaatctc

SEQ ID NO: 13420 - DNA, 25 bp, Artificial Sequence
  Synthetic: FXN 3 forward 9:69042652-69042681; AsCpf1-1
caccagtaacaaccatcaaatctct

SEQ ID NO: 13421 - DNA, 18 bp, Artificial Sequence
  Synthetic: FXN 3 forward 9:69042653-69042675; AsCpf1-1
accagtaacaaccatcaa

SEQ ID NO: 13422 - DNA, 19 bp, Artificial Sequence
  Synthetic: FXN 3 forward 9:69042653-69042676; AsCpf1-1
accagtaacaaccatcaaa

SEQ ID NO: 13423 - DNA, 20 bp, Artificial Sequence
  Synthetic: FXN 3 forward 9:69042653-69042677; AsCpf1-1
accagtaacaaccatcaaat

SEQ ID NO: 13424 - DNA, 21 bp, Artificial Sequence
  Synthetic: FXN 3 forward 9:69042653-69042678; AsCpf1-1
accagtaacaaccatcaaatc

SEQ ID NO: 13425 - DNA, 22 bp, Artificial Sequence
  Synthetic: FXN 3 forward 9:69042653-69042679; AsCpf1-1
accagtaacaaccatcaaatct

SEQ ID NO: 13426 - DNA, 23 bp, Artificial Sequence
  Synthetic: FXN 3 forward 9:69042653-69042680; AsCpf1-1
accagtaacaaccatcaaatctc

SEQ ID NO: 13427 - DNA, 24 bp, Artificial Sequence
  Synthetic: FXN 3 forward 9:69042653-69042681; AsCpf1-1
accagtaacaaccatcaaatctct

SEQ ID NO: 13428 - DNA, 25 bp, Artificial Sequence
  Synthetic: FXN 3 forward 9:69042653-69042682; AsCpf1-1
accagtaacaaccatcaaatctcta

SEQ ID NO: 13429 - DNA, 18 bp, Artificial Sequence
  Synthetic: FXN 3 reverse 9:69042698-69042720; AsCpf1-1
caatagctgtttttgttt

SEQ ID NO: 13430 - DNA, 19 bp, Artificial Sequence
  Synthetic: FXN 3 reverse 9:69042698-69042721; AsCpf1-1
caatagctgtttttgtttg

SEQ ID NO: 13431 - DNA, 20 bp, Artificial Sequence
  Synthetic: FXN 3 reverse 9:69042698-69042722; AsCpf1-1
caatagctgtttttgtttgt

SEQ ID NO: 13432 - DNA, 21 bp, Artificial Sequence
  Synthetic: FXN 3 reverse 9:69042698-69042723; AsCpf1-1
caatagctgtttttgtttgtg

SEQ ID NO: 13433 - DNA, 22 bp, Artificial Sequence
  Synthetic: FXN 3 reverse 9:69042698-69042724; AsCpf1-1
caatagctgtttttgtttgtgt

SEQ ID NO: 13434 - DNA, 23 bp, Artificial Sequence
  Synthetic: FXN 3 reverse 9:69042698-69042725; AsCpf1-1
caatagctgtttttgtttgtgtg

SEQ ID NO: 13435 - DNA, 24 bp, Artificial Sequence
  Synthetic: FXN 3 reverse 9:69042698-69042726; AsCpf1-1
caatagctgtttttgtttgtgtgt

SEQ ID NO: 13436 - DNA, 25 bp, Artificial Sequence
  Synthetic: FXN 3 reverse 9:69042698-69042727; AsCpf1-1
caatagctgtttttgtttgtgtgtg

SEQ ID NO: 13437 - DNA, 18 bp, Artificial Sequence
  Synthetic: FXN 3 reverse 9:69042746-69042768; AsCpf1-1
ggatcctggcccctcaaa

SEQ ID NO: 13438 - DNA, 19 bp, Artificial Sequence
  Synthetic: FXN 3 reverse 9:69042746-69042769; AsCpf1-1
ggatcctggcccctcaaac

SEQ ID NO: 13439 - DNA, 20 bp, Artificial Sequence
  Synthetic: FXN 3 reverse 9:69042746-69042770; AsCpf1-1
ggatcctggcccctcaaacc

SEQ ID NO: 13440 - DNA, 21 bp, Artificial Sequence
  Synthetic: FXN 3 reverse 9:69042746-69042771; AsCpf1-1
ggatcctggcccctcaaacct

SEQ ID NO: 13441 - DNA, 22 bp, Artificial Sequence
  Synthetic: FXN 3 reverse 9:69042746-69042772; AsCpf1-1
ggatcctggcccctcaaacctt

SEQ ID NO: 13442 - DNA, 23 bp, Artificial Sequence
  Synthetic: FXN 3 reverse 9:69042746-69042773; AsCpf1-1
ggatcctggcccctcaaacctta

SEQ ID NO: 13443 - DNA, 24 bp, Artificial Sequence
  Synthetic: FXN 3 reverse 9:69042746-69042774; AsCpf1-1
ggatcctggcccctcaaaccttag

SEQ ID NO: 13444 - DNA, 25 bp, Artificial Sequence
  Synthetic: FXN 3 reverse 9:69042746-69042775; AsCpf1-1
ggatcctggcccctcaaaccttagt

SEQ ID NO: 13445 - DNA, 18 bp, Artificial Sequence
  Synthetic: FXN 3 reverse 9:69042754-69042776; AsCpf1-1
tctctccaggatcctggc

SEQ ID NO: 13446 - DNA, 19 bp, Artificial Sequence
  Synthetic: FXN 3 reverse 9:69042754-69042777; AsCpf1-1
tctctccaggatcctggcc

SEQ ID NO: 13447 - DNA, 20 bp, Artificial Sequence
  Synthetic: FXN 3 reverse 9:69042754-69042778; AsCpf1-1
tctctccaggatcctggccc

SEQ ID NO: 13448 - DNA, 21 bp, Artificial Sequence
  Synthetic: FXN 3 reverse 9:69042754-69042779; AsCpf1-1
tctctccaggatcctggcccc

SEQ ID NO: 13449 - DNA, 22 bp, Artificial Sequence
  Synthetic: FXN 3 reverse 9:69042754-69042780; AsCpf1-1
tctctccaggatcctggcccct

SEQ ID NO: 13450 - DNA, 23 bp, Artificial Sequence
  Synthetic: FXN 3 reverse 9:69042754-69042781; AsCpf1-1
tctctccaggatcctggcccctc

SEQ ID NO: 13451 - DNA, 24 bp, Artificial Sequence
  Synthetic: FXN 3 reverse 9:69042754-69042782; AsCpf1-1
tctctccaggatcctggcccctca

SEQ ID NO: 13452 - DNA, 25 bp, Artificial Sequence
  Synthetic: FXN 3 reverse 9:69042754-69042783; AsCpf1-1
tctctccaggatcctggcccctcaa

SEQ ID NO: 13453 - DNA, 18 bp, Artificial Sequence
  Synthetic: FXN 3 reverse 9:69042755-69042777; AsCpf1-1
atctctccaggatcctgg

SEQ ID NO: 13454 - DNA, 19 bp, Artificial Sequence
  Synthetic: FXN 3 reverse 9:69042755-69042778; AsCpf1-1
atctctccaggatcctggc

SEQ ID NO: 13455 - DNA, 20 bp, Artificial Sequence
  Synthetic: FXN 3 reverse 9:69042755-69042779; AsCpf1-1
atctctccaggatcctggcc

SEQ ID NO: 13456 - DNA, 21 bp, Artificial Sequence
  Synthetic: FXN 3 reverse 9:69042755-69042780; AsCpf1-1
atctctccaggatcctggccc

SEQ ID NO: 13457 - DNA, 22 bp, Artificial Sequence
  Synthetic: FXN 3 reverse 9:69042755-69042781; AsCpf1-1
atctctccaggatcctggcccc

SEQ ID NO: 13458 - DNA, 23 bp, Artificial Sequence
  Synthetic: FXN 3 reverse 9:69042755-69042782; AsCpf1-1
atctctccaggatcctggcccct

SEQ ID NO: 13459 - DNA, 24 bp, Artificial Sequence
  Synthetic: FXN 3 reverse 9:69042755-69042783; AsCpf1-1
atctctccaggatcctggcccctc

SEQ ID NO: 13460 - DNA, 25 bp, Artificial Sequence
  Synthetic: FXN 3 reverse 9:69042755-69042784; AsCpf1-1
atctctccaggatcctggcccctca

SEQ ID NO: 13461 - DNA, 18 bp, Artificial Sequence
  Synthetic: FXN 3 forward 9:69042786-69042808; AsCpf1-1
ctgaggtgagccccacat

SEQ ID NO: 13462 - DNA, 19 bp, Artificial Sequence
  Synthetic: FXN 3 forward 9:69042786-69042809; AsCpf1-1
ctgaggtgagccccacatt

SEQ ID NO: 13463 - DNA, 20 bp, Artificial Sequence
  Synthetic: FXN 3 forward 9:69042786-69042810; AsCpf1-1
ctgaggtgagccccacattc

SEQ ID NO: 13464 - DNA, 21 bp, Artificial Sequence
  Synthetic: FXN 3 forward 9:69042786-69042811; AsCpf1-1
ctgaggtgagccccacattct

SEQ ID NO: 13465 - DNA, 22 bp, Artificial Sequence
  Synthetic: FXN 3 forward 9:69042786-69042812; AsCpf1-1
ctgaggtgagccccacattctc

SEQ ID NO: 13466 - DNA, 23 bp, Artificial Sequence
  Synthetic: FXN 3 forward 9:69042786-69042813; AsCpf1-1
ctgaggtgagccccacattctca

SEQ ID NO: 13467 - DNA, 24 bp, Artificial Sequence
  Synthetic: FXN 3 forward 9:69042786-69042814; AsCpf1-1
ctgaggtgagccccacattctcag

SEQ ID NO: 13468 - DNA, 25 bp, Artificial Sequence
  Synthetic: FXN 3 forward 9:69042786-69042815; AsCpf1-1
ctgaggtgagccccacattctcaga

SEQ ID NO: 13469 - DNA, 18 bp, Artificial Sequence
  Synthetic: FXN 3 forward 9:69042787-69042809; AsCpf1-1
tgaggtgagccccacatt

SEQ ID NO: 13470 - DNA, 19 bp, Artificial Sequence
  Synthetic: FXN 3 forward 9:69042787-69042810; AsCpf1-1
tgaggtgagccccacattc

SEQ ID NO: 13471 - DNA, 20 bp, Artificial Sequence
  Synthetic: FXN 3 forward 9:69042787-69042811; AsCpf1-1
tgaggtgagccccacattct

SEQ ID NO: 13472 - DNA, 21 bp, Artificial Sequence
  Synthetic: FXN 3 forward 9:69042787-69042812; AsCpf1-1
tgaggtgagccccacattctc

SEQ ID NO: 13473 - DNA, 22 bp, Artificial Sequence
  Synthetic: FXN 3 forward 9:69042787-69042813; AsCpf1-1
tgaggtgagccccacattctca

SEQ ID NO: 13474 - DNA, 23 bp, Artificial Sequence
  Synthetic: FXN 3 forward 9:69042787-69042814; AsCpf1-1
tgaggtgagccccacattctcag

SEQ ID NO: 13475 - DNA, 24 bp, Artificial Sequence
  Synthetic: FXN 3 forward 9:69042787-69042815; AsCpf1-1
tgaggtgagccccacattctcaga

SEQ ID NO: 13476 - DNA, 25 bp, Artificial Sequence
  Synthetic: FXN 3 forward 9:69042787-69042816; AsCpf1-1
tgaggtgagccccacattctcagac

SEQ ID NO: 13477 - DNA, 18 bp, Artificial Sequence
  Synthetic: FXN 3 reverse 9:69042800-69042822; AsCpf1-1
aggaaaagtgtctgagaa

SEQ ID NO: 13478 - DNA, 19 bp, Artificial Sequence
  Synthetic: FXN 3 reverse 9:69042800-69042823; AsCpf1-1
aggaaaagtgtctgagaat

SEQ ID NO: 13479 - DNA, 20 bp, Artificial Sequence
  Synthetic: FXN 3 reverse 9:69042800-69042824; AsCpf1-1
aggaaaagtgtctgagaatg

SEQ ID NO: 13480 - DNA, 21 bp, Artificial Sequence
  Synthetic: FXN 3 reverse 9:69042800-69042825; AsCpf1-1
aggaaaagtgtctgagaatgt

SEQ ID NO: 13481 - DNA, 22 bp, Artificial Sequence
  Synthetic: FXN 3 reverse 9:69042800-69042826; AsCpf1-1
aggaaaagtgtctgagaatgtg

SEQ ID NO: 13482 - DNA, 23 bp, Artificial Sequence
  Synthetic: FXN 3 reverse 9:69042800-69042827; AsCpf1-1
aggaaaagtgtctgagaatgtgg

SEQ ID NO: 13483 - DNA, 24 bp, Artificial Sequence
  Synthetic: FXN 3 reverse 9:69042800-69042828; AsCpf1-1
aggaaaagtgtctgagaatgtggg

SEQ ID NO: 13484 - DNA, 25 bp, Artificial Sequence
  Synthetic: FXN 3 reverse 9:69042800-69042829; AsCpf1-1
aggaaaagtgtctgagaatgtgggg

SEQ ID NO: 13485 - DNA, 18 bp, Artificial Sequence
  Synthetic: FXN 3 forward 9:69042820-69042842; AsCpf1-1
ttggatgttttgagcact

SEQ ID NO: 13486 - DNA, 19 bp, Artificial Sequence
  Synthetic: FXN 3 forward 9:69042820-69042843; AsCpf1-1
ttggatgttttgagcactg

SEQ ID NO: 13487 - DNA, 20 bp, Artificial Sequence
  Synthetic: FXN 3 forward 9:69042820-69042844; AsCpf1-1
ttggatgttttgagcactgc

SEQ ID NO: 13488 - DNA, 21 bp, Artificial Sequence
  Synthetic: FXN 3 forward 9:69042820-69042845; AsCpf1-1
ttggatgttttgagcactgct

SEQ ID NO: 13489 - DNA, 22 bp, Artificial Sequence
  Synthetic: FXN 3 forward 9:69042820-69042846; AsCpf1-1
ttggatgttttgagcactgctt

SEQ ID NO: 13490 - DNA, 23 bp, Artificial Sequence
  Synthetic: FXN 3 forward 9:69042820-69042847; AsCpf1-1
ttggatgttttgagcactgcttt

SEQ ID NO: 13491 - DNA, 24 bp, Artificial Sequence
  Synthetic: FXN 3 forward 9:69042820-69042848; AsCpf1-1
ttggatgttttgagcactgcttta

SEQ ID NO: 13492 - DNA, 25 bp, Artificial Sequence
  Synthetic: FXN 3 forward 9:69042820-69042849; AsCpf1-1
ttggatgttttgagcactgctttaa

SEQ ID NO: 13493 - DNA, 18 bp, Artificial Sequence
  Synthetic: FXN 3 reverse 9:69042829-69042851; AsCpf1-1
aggaattaaagcagtgct

SEQ ID NO: 13494 - DNA, 19 bp, Artificial Sequence
  Synthetic: FXN 3 reverse 9:69042829-69042852; AsCpf1-1
aggaattaaagcagtgctc

SEQ ID NO: 13495 - DNA, 20 bp, Artificial Sequence
  Synthetic: FXN 3 reverse 9:69042829-69042853; AsCpf1-1
aggaattaaagcagtgctca

SEQ ID NO: 13496 - DNA, 21 bp, Artificial Sequence
  Synthetic: FXN 3 reverse 9:69042829-69042854; AsCpf1-1
aggaattaaagcagtgctcaa

SEQ ID NO: 13497 - DNA, 22 bp, Artificial Sequence
  Synthetic: FXN 3 reverse 9:69042829-69042855; AsCpf1-1
aggaattaaagcagtgctcaaa

SEQ ID NO: 13498 - DNA, 23 bp, Artificial Sequence
  Synthetic: FXN 3 reverse 9:69042829-69042856; AsCpf1-1
aggaattaaagcagtgctcaaaa

SEQ ID NO: 13499 - DNA, 24 bp, Artificial Sequence
  Synthetic: FXN 3 reverse 9:69042829-69042857; AsCpf1-1
aggaattaaagcagtgctcaaaac

SEQ ID NO: 13500 - DNA, 25 bp, Artificial Sequence
  Synthetic: FXN 3 reverse 9:69042829-69042858; AsCpf1-1
aggaattaaagcagtgctcaaaaca

SEQ ID NO: 13501 - DNA, 18 bp, Artificial Sequence
  Synthetic: FXN 3 reverse 9:69042830-69042852; AsCpf1-1
caggaattaaagcagtgc

SEQ ID NO: 13502 - DNA, 19 bp, Artificial Sequence
  Synthetic: FXN 3 reverse 9:69042830-69042853; AsCpf1-1
caggaattaaagcagtgct

SEQ ID NO: 13503 - DNA, 20 bp, Artificial Sequence
  Synthetic: FXN 3 reverse 9:69042830-69042854; AsCpf1-1
caggaattaaagcagtgctc

SEQ ID NO: 13504 - DNA, 21 bp, Artificial Sequence
  Synthetic: FXN 3 reverse 9:69042830-69042855; AsCpf1-1
caggaattaaagcagtgctca

SEQ ID NO: 13505 - DNA, 22 bp, Artificial Sequence
  Synthetic: FXN 3 reverse 9:69042830-69042856; AsCpf1-1
caggaattaaagcagtgctcaa

SEQ ID NO: 13506 - DNA, 23 bp, Artificial Sequence
  Synthetic: FXN 3 reverse 9:69042830-69042857; AsCpf1-1
caggaattaaagcagtgctcaaa

SEQ ID NO: 13507 - DNA, 24 bp, Artificial Sequence
  Synthetic: FXN 3 reverse 9:69042830-69042858; AsCpf1-1
caggaattaaagcagtgctcaaaa

SEQ ID NO: 13508 - DNA, 25 bp, Artificial Sequence
  Synthetic: FXN 3 reverse 9:69042830-69042859; AsCpf1-1
caggaattaaagcagtgctcaaaac

SEQ ID NO: 13509 - DNA, 18 bp, Artificial Sequence
  Synthetic: FXN 3 forward 9:69042849-69042871; AsCpf1-1
tgggaaaacaattccttc

SEQ ID NO: 13510 - DNA, 19 bp, Artificial Sequence
  Synthetic: FXN 3 forward 9:69042849-69042872; AsCpf1-1
tgggaaaacaattccttcc

SEQ ID NO: 13511 - DNA, 20 bp, Artificial Sequence
  Synthetic: FXN 3 forward 9:69042849-69042873; AsCpf1-1
tgggaaaacaattccttcca

SEQ ID NO: 13512 - DNA, 21 bp, Artificial Sequence
  Synthetic: FXN 3 forward 9:69042849-69042874; AsCpf1-1
tgggaaaacaattccttccac

SEQ ID NO: 13513 - DNA, 22 bp, Artificial Sequence
  Synthetic: FXN 3 forward 9:69042849-69042875; AsCpf1-1
tgggaaaacaattccttccact

SEQ ID NO: 13514 - DNA, 23 bp, Artificial Sequence
  Synthetic: FXN 3 forward 9:69042849-69042876; AsCpf1-1
tgggaaaacaattccttccactg

SEQ ID NO: 13515 - DNA, 24 bp, Artificial Sequence
  Synthetic: FXN 3 forward 9:69042849-69042877; AsCpf1-1
tgggaaaacaattccttccactgt

SEQ ID NO: 13516 - DNA, 25 bp, Artificial Sequence
  Synthetic: FXN 3 forward 9:69042849-69042878; AsCpf1-1
tgggaaaacaattccttccactgtg

SEQ ID NO: 13517 - DNA, 18 bp, Artificial Sequence
  Synthetic: FXN 3 forward 9:69042864-69042886; AsCpf1-1
ttccactgtgcacagact

SEQ ID NO: 13518 - DNA, 19 bp, Artificial Sequence
  Synthetic: FXN 3 forward 9:69042864-69042887; AsCpf1-1
ttccactgtgcacagactc

SEQ ID NO: 13519 - DNA, 20 bp, Artificial Sequence
  Synthetic: FXN 3 forward 9:69042864-69042888; AsCpf1-1
ttccactgtgcacagactct

SEQ ID NO: 13520 - DNA, 21 bp, Artificial Sequence
  Synthetic: FXN 3 forward 9:69042864-69042889; AsCpf1-1
ttccactgtgcacagactctg

SEQ ID NO: 13521 - DNA, 22 bp, Artificial Sequence
  Synthetic: FXN 3 forward 9:69042864-69042890; AsCpf1-1
ttccactgtgcacagactctgg

SEQ ID NO: 13522 - DNA, 23 bp, Artificial Sequence
  Synthetic: FXN 3 forward 9:69042864-69042891; AsCpf1-1
ttccactgtgcacagactctggg

SEQ ID NO: 13523 - DNA, 24 bp, Artificial Sequence
  Synthetic: FXN 3 forward 9:69042864-69042892; AsCpf1-1
ttccactgtgcacagactctgggg

SEQ ID NO: 13524 - DNA, 25 bp, Artificial Sequence
  Synthetic: FXN 3 forward 9:69042864-69042893; AsCpf1-1
ttccactgtgcacagactctggggc

SEQ ID NO: 13525 - DNA, 18 bp, Artificial Sequence
  Synthetic: FXN 3 forward 9:69042868-69042890; AsCpf1-1
actgtgcacagactctgg

SEQ ID NO: 13526 - DNA, 19 bp, Artificial Sequence
  Synthetic: FXN 3 forward 9:69042868-69042891; AsCpf1-1
actgtgcacagactctggg

SEQ ID NO: 13527 - DNA, 20 bp, Artificial Sequence
  Synthetic: FXN 3 forward 9:69042868-69042892; AsCpf1-1
actgtgcacagactctgggg

SEQ ID NO: 13528 - DNA, 21 bp, Artificial Sequence
  Synthetic: FXN 3 forward 9:69042868-69042893; AsCpf1-1
actgtgcacagactctggggc

SEQ ID NO: 13529 - DNA, 22 bp, Artificial Sequence
  Synthetic: FXN 3 forward 9:69042868-69042894; AsCpf1-1
actgtgcacagactctggggcc

SEQ ID NO: 13530 - DNA, 23 bp, Artificial Sequence
  Synthetic: FXN 3 forward 9:69042868-69042895; AsCpf1-1
actgtgcacagactctggggcca

SEQ ID NO: 13531 - DNA, 24 bp, Artificial Sequence
  Synthetic: FXN 3 forward 9:69042868-69042896; AsCpf1-1
actgtgcacagactctggggccag

SEQ ID NO: 13532 - DNA, 25 bp, Artificial Sequence
  Synthetic: FXN 3 forward 9:69042868-69042897; AsCpf1-1
actgtgcacagactctggggccaga

SEQ ID NO: 13533 - DNA, 18 bp, Artificial Sequence
  Synthetic: FXN 3 forward 9:69042869-69042891; AsCpf1-1
ctgtgcacagactctggg

SEQ ID NO: 13534 - DNA, 19 bp, Artificial Sequence
  Synthetic: FXN 3 forward 9:69042869-69042892; AsCpf1-1
ctgtgcacagactctgggg

SEQ ID NO: 13535 - DNA, 20 bp, Artificial Sequence
  Synthetic: FXN 3 forward 9:69042869-69042893; AsCpf1-1
ctgtgcacagactctggggc

SEQ ID NO: 13536 - DNA, 21 bp, Artificial Sequence
  Synthetic: FXN 3 forward 9:69042869-69042894; AsCpf1-1
ctgtgcacagactctggggcc

SEQ ID NO: 13537 - DNA, 22 bp, Artificial Sequence
  Synthetic: FXN 3 forward 9:69042869-69042895; AsCpf1-1
ctgtgcacagactctggggcca

SEQ ID NO: 13538 - DNA, 23 bp, Artificial Sequence
  Synthetic: FXN 3 forward 9:69042869-69042896; AsCpf1-1
ctgtgcacagactctggggccag

SEQ ID NO: 13539 - DNA, 24 bp, Artificial Sequence
  Synthetic: FXN 3 forward 9:69042869-69042897; AsCpf1-1
ctgtgcacagactctggggccaga

SEQ ID NO: 13540 - DNA, 25 bp, Artificial Sequence
  Synthetic: FXN 3 forward 9:69042869-69042898; AsCpf1-1
ctgtgcacagactctggggccagac

SEQ ID NO: 13541 - DNA, 18 bp, Artificial Sequence
  Synthetic: FXN 3 forward 9:69042906-69042928; AsCpf1-1
atcccagctctgccactt

SEQ ID NO: 13542 - DNA, 19 bp, Artificial Sequence
  Synthetic: FXN 3 forward 9:69042906-69042929; AsCpf1-1
atcccagctctgccactta

SEQ ID NO: 13543 - DNA, 20 bp, Artificial Sequence
  Synthetic: FXN 3 forward 9:69042906-69042930; AsCpf1-1
atcccagctctgccacttaa

SEQ ID NO: 13544 - DNA, 21 bp, Artificial Sequence
  Synthetic: FXN 3 forward 9:69042906-69042931; AsCpf1-1
atcccagctctgccacttaat

SEQ ID NO: 13545 - DNA, 22 bp, Artificial Sequence
  Synthetic: FXN 3 forward 9:69042906-69042932; AsCpf1-1
atcccagctctgccacttaatg

SEQ ID NO: 13546 - DNA, 23 bp, Artificial Sequence
  Synthetic: FXN 3 forward 9:69042906-69042933; AsCpf1-1
atcccagctctgccacttaatgt

SEQ ID NO: 13547 - DNA, 24 bp, Artificial Sequence
  Synthetic: FXN 3 forward 9:69042906-69042934; AsCpf1-1
atcccagctctgccacttaatgtc

SEQ ID NO: 13548 - DNA, 25 bp, Artificial Sequence
  Synthetic: FXN 3 forward 9:69042906-69042935; AsCpf1-1
atcccagctctgccacttaatgtct

SEQ ID NO: 13549 - DNA, 18 bp, Artificial Sequence
  Synthetic: FXN 3 forward 9:69042911-69042933; AsCpf1-1
agctctgccacttaatgt

SEQ ID NO: 13550 - DNA, 19 bp, Artificial Sequence
  Synthetic: FXN 3 forward 9:69042911-69042934; AsCpf1-1
agctctgccacttaatgtc

SEQ ID NO: 13551 - DNA, 20 bp, Artificial Sequence
  Synthetic: FXN 3 forward 9:69042911-69042935; AsCpf1-1
agctctgccacttaatgtct

SEQ ID NO: 13552 - DNA, 21 bp, Artificial Sequence
  Synthetic: FXN 3 forward 9:69042911-69042936; AsCpf1-1
agctctgccacttaatgtctg

SEQ ID NO: 13553 - DNA, 22 bp, Artificial Sequence
  Synthetic: FXN 3 forward 9:69042911-69042937; AsCpf1-1
agctctgccacttaatgtctgt

SEQ ID NO: 13554 - DNA, 23 bp, Artificial Sequence
  Synthetic: FXN 3 forward 9:69042911-69042938; AsCpf1-1
agctctgccacttaatgtctgtg

SEQ ID NO: 13555 - DNA, 24 bp, Artificial Sequence
  Synthetic: FXN 3 forward 9:69042911-69042939; AsCpf1-1
agctctgccacttaatgtctgtgt

SEQ ID NO: 13556 - DNA, 25 bp, Artificial Sequence
  Synthetic: FXN 3 forward 9:69042911-69042940; AsCpf1-1
agctctgccacttaatgtctgtgta

SEQ ID NO: 13557 - DNA, 18 bp, Artificial Sequence
  Synthetic: FXN 3 forward 9:69042974-69042996; AsCpf1-1
tcatctgtaaaacacaac

SEQ ID NO: 13558 - DNA, 19 bp, Artificial Sequence
  Synthetic: FXN 3 forward 9:69042974-69042997; AsCpf1-1
tcatctgtaaaacacaact

SEQ ID NO: 13559 - DNA, 20 bp, Artificial Sequence
  Synthetic: FXN 3 forward 9:69042974-69042998; AsCpf1-1
tcatctgtaaaacacaacta

SEQ ID NO: 13560 - DNA, 21 bp, Artificial Sequence
  Synthetic: FXN 3 forward 9:69042974-69042999; AsCpf1-1
tcatctgtaaaacacaactat

SEQ ID NO: 13561 - DNA, 22 bp, Artificial Sequence
  Synthetic: FXN 3 forward 9:69042974-69043000; AsCpf1-1
tcatctgtaaaacacaactata

SEQ ID NO: 13562 - DNA, 23 bp, Artificial Sequence
  Synthetic: FXN 3 forward 9:69042974-69043001; AsCpf1-1
tcatctgtaaaacacaactatag

SEQ ID NO: 13563 - DNA, 24 bp, Artificial Sequence
  Synthetic: FXN 3 forward 9:69042974-69043002; AsCpf1-1
tcatctgtaaaacacaactatagt

SEQ ID NO: 13564 - DNA, 25 bp, Artificial Sequence
  Synthetic: FXN 3 forward 9:69042974-69043003; AsCpf1-1
tcatctgtaaaacacaactatagtt

SEQ ID NO: 13565 - DNA, 18 bp, Artificial Sequence
  Synthetic: FXN 3 forward 9:69043011-69043033; AsCpf1-1
ttaagagtctgtacttgt

SEQ ID NO: 13566 - DNA, 19 bp, Artificial Sequence
  Synthetic: FXN 3 forward 9:69043011-69043034; AsCpf1-1
ttaagagtctgtacttgtt

SEQ ID NO: 13567 - DNA, 20 bp, Artificial Sequence
  Synthetic: FXN 3 forward 9:69043011-69043035; AsCpf1-1
ttaagagtctgtacttgtta

SEQ ID NO: 13568 - DNA, 21 bp, Artificial Sequence
  Synthetic: FXN 3 forward 9:69043011-69043036; AsCpf1-1
ttaagagtctgtacttgttaa

SEQ ID NO: 13569 - DNA, 22 bp, Artificial Sequence
  Synthetic: FXN 3 forward 9:69043011-69043037; AsCpf1-1
ttaagagtctgtacttgttaat

SEQ ID NO: 13570 - DNA, 23 bp, Artificial Sequence
  Synthetic: FXN 3 forward 9:69043011-69043038; AsCpf1-1
ttaagagtctgtacttgttaatt

SEQ ID NO: 13571 - DNA, 24 bp, Artificial Sequence
  Synthetic: FXN 3 forward 9:69043011-69043039; AsCpf1-1
ttaagagtctgtacttgttaattt

SEQ ID NO: 13572 - DNA, 25 bp, Artificial Sequence
  Synthetic: FXN 3 forward 9:69043011-69043040; AsCpf1-1
ttaagagtctgtacttgttaatttg

SEQ ID NO: 13573 - DNA, 18 bp, Artificial Sequence
  Synthetic: FXN 3 forward 9:69043096-69043118; AsCpf1-1
aagatgtgtgcagagcgg

SEQ ID NO: 13574 - DNA, 19 bp, Artificial Sequence
  Synthetic: FXN 3 forward 9:69043096-69043119; AsCpf1-1
aagatgtgtgcagagcggc

SEQ ID NO: 13575 - DNA, 20 bp, Artificial Sequence
  Synthetic: FXN 3 forward 9:69043096-69043120; AsCpf1-1
aagatgtgtgcagagcggca

SEQ ID NO: 13576 - DNA, 21 bp, Artificial Sequence
  Synthetic: FXN 3 forward 9:69043096-69043121; AsCpf1-1
aagatgtgtgcagagcggcaa

SEQ ID NO: 13577 - DNA, 22 bp, Artificial Sequence
  Synthetic: FXN 3 forward 9:69043096-69043122; AsCpf1-1
aagatgtgtgcagagcggcaaa

SEQ ID NO: 13578 - DNA, 23 bp, Artificial Sequence
  Synthetic: FXN 3 forward 9:69043096-69043123; AsCpf1-1
aagatgtgtgcagagcggcaaaa

SEQ ID NO: 13579 - DNA, 24 bp, Artificial Sequence
  Synthetic: FXN 3 forward 9:69043096-69043124; AsCpf1-1
aagatgtgtgcagagcggcaaaaa

SEQ ID NO: 13580 - DNA, 25 bp, Artificial Sequence
  Synthetic: FXN 3 forward 9:69043096-69043125; AsCpf1-1
aagatgtgtgcagagcggcaaaaaa

SEQ ID NO: 13581 - DNA, 18 bp, Artificial Sequence
  Synthetic: FXN 3 forward 9:69043136-69043158; AsCpf1-1
ggctcatgttcccagcca

SEQ ID NO: 13582 - DNA, 19 bp, Artificial Sequence
  Synthetic: FXN 3 forward 9:69043136-69043159; AsCpf1-1
ggctcatgttcccagccaa

SEQ ID NO: 13583 - DNA, 20 bp, Artificial Sequence
  Synthetic: FXN 3 forward 9:69043136-69043160; AsCpf1-1
ggctcatgttcccagccaag

SEQ ID NO: 13584 - DNA, 21 bp, Artificial Sequence
  Synthetic: FXN 3 forward 9:69043136-69043161; AsCpf1-1
ggctcatgttcccagccaagg

SEQ ID NO: 13585 - DNA, 22 bp, Artificial Sequence
  Synthetic: FXN 3 forward 9:69043136-69043162; AsCpf1-1
ggctcatgttcccagccaaggt

SEQ ID NO: 13586 - DNA, 23 bp, Artificial Sequence
  Synthetic: FXN 3 forward 9:69043136-69043163; AsCpf1-1
ggctcatgttcccagccaaggtc

SEQ ID NO: 13587 - DNA, 24 bp, Artificial Sequence
  Synthetic: FXN 3 forward 9:69043136-69043164; AsCpf1-1
ggctcatgttcccagccaaggtcc

SEQ ID NO: 13588 - DNA, 25 bp, Artificial Sequence
  Synthetic: FXN 3 forward 9:69043136-69043165; AsCpf1-1
ggctcatgttcccagccaaggtcca

SEQ ID NO: 13589 - DNA, 18 bp, Artificial Sequence
  Synthetic: FXN 3 forward 9:69043148-69043170; AsCpf1-1
cagccaaggtccaacaaa

SEQ ID NO: 13590 - DNA, 19 bp, Artificial Sequence
  Synthetic: FXN 3 forward 9:69043148-69043171; AsCpf1-1
cagccaaggtccaacaaag

SEQ ID NO: 13591 - DNA, 20 bp, Artificial Sequence
  Synthetic: FXN 3 forward 9:69043148-69043172; AsCpf1-1
cagccaaggtccaacaaagt

SEQ ID NO: 13592 - DNA, 21 bp, Artificial Sequence
  Synthetic: FXN 3 forward 9:69043148-69043173; AsCpf1-1
cagccaaggtccaacaaagtg

SEQ ID NO: 13593 - DNA, 22 bp, Artificial Sequence
  Synthetic: FXN 3 forward 9:69043148-69043174; AsCpf1-1
cagccaaggtccaacaaagtgc

SEQ ID NO: 13594 - DNA, 23 bp, Artificial Sequence
  Synthetic: FXN 3 forward 9:69043148-69043175; AsCpf1-1
cagccaaggtccaacaaagtgct

SEQ ID NO: 13595 - DNA, 24 bp, Artificial Sequence
  Synthetic: FXN 3 forward 9:69043148-69043176; AsCpf1-1
cagccaaggtccaacaaagtgctg

SEQ ID NO: 13596 - DNA, 25 bp, Artificial Sequence
  Synthetic: FXN 3 forward 9:69043148-69043177; AsCpf1-1
cagccaaggtccaacaaagtgctgc

SEQ ID NO: 13597 - DNA, 18 bp, Artificial Sequence
  Synthetic: FXN 3 forward 9:69043149-69043171; AsCpf1-1
agccaaggtccaacaaag

SEQ ID NO: 13598 - DNA, 19 bp, Artificial Sequence
  Synthetic: FXN 3 forward 9:69043149-69043172; AsCpf1-1
agccaaggtccaacaaagt

SEQ ID NO: 13599 - DNA, 20 bp, Artificial Sequence
  Synthetic: FXN 3 forward 9:69043149-69043173; AsCpf1-1
agccaaggtccaacaaagtg

SEQ ID NO: 13600 - DNA, 21 bp, Artificial Sequence
  Synthetic: FXN 3 forward 9:69043149-69043174; AsCpf1-1
agccaaggtccaacaaagtgc

SEQ ID NO: 13601 - DNA, 22 bp, Artificial Sequence
  Synthetic: FXN 3 forward 9:69043149-69043175; AsCpf1-1
agccaaggtccaacaaagtgct

SEQ ID NO: 13602 - DNA, 23 bp, Artificial Sequence
  Synthetic: FXN 3 forward 9:69043149-69043176; AsCpf1-1
agccaaggtccaacaaagtgctg

SEQ ID NO: 13603 - DNA, 24 bp, Artificial Sequence
  Synthetic: FXN 3 forward 9:69043149-69043177; AsCpf1-1
agccaaggtccaacaaagtgctgc

SEQ ID NO: 13604 - DNA, 25 bp, Artificial Sequence
  Synthetic: FXN 3 forward 9:69043149-69043178; AsCpf1-1
agccaaggtccaacaaagtgctgcc

SEQ ID NO: 13605 - DNA, 18 bp, Artificial Sequence
  Synthetic: FXN 3 forward 9:69043161-69043183; AsCpf1-1
acaaagtgctgccctgcc

SEQ ID NO: 13606 - DNA, 19 bp, Artificial Sequence
  Synthetic: FXN 3 forward 9:69043161-69043184; AsCpf1-1
acaaagtgctgccctgcct

SEQ ID NO: 13607 - DNA, 20 bp, Artificial Sequence
  Synthetic: FXN 3 forward 9:69043161-69043185; AsCpf1-1
acaaagtgctgccctgcctt

SEQ ID NO: 13608 - DNA, 21 bp, Artificial Sequence
  Synthetic: FXN 3 forward 9:69043161-69043186; AsCpf1-1
acaaagtgctgccctgccttc

SEQ ID NO: 13609 - DNA, 22 bp, Artificial Sequence
  Synthetic: FXN 3 forward 9:69043161-69043187; AsCpf1-1
acaaagtgctgccctgccttct

SEQ ID NO: 13610 - DNA, 23 bp, Artificial Sequence
  Synthetic: FXN 3 forward 9:69043161-69043188; AsCpf1-1
acaaagtgctgccctgccttctt

SEQ ID NO: 13611 - DNA, 24 bp, Artificial Sequence
  Synthetic: FXN 3 forward 9:69043161-69043189; AsCpf1-1
acaaagtgctgccctgccttctta

SEQ ID NO: 13612 - DNA, 25 bp, Artificial Sequence
  Synthetic: FXN 3 forward 9:69043161-69043190; AsCpf1-1
acaaagtgctgccctgccttcttat

SEQ ID NO: 13613 - DNA, 18 bp, Artificial Sequence
  Synthetic: FXN 3 forward 9:69043190-69043212; AsCpf1-1
gctgtcatagtgtaaact

SEQ ID NO: 13614 - DNA, 19 bp, Artificial Sequence
  Synthetic: FXN 3 forward 9:69043190-69043213; AsCpf1-1
gctgtcatagtgtaaactg

SEQ ID NO: 13615 - DNA, 20 bp, Artificial Sequence
  Synthetic: FXN 3 forward 9:69043190-69043214; AsCpf1-1
gctgtcatagtgtaaactgt

SEQ ID NO: 13616 - DNA, 21 bp, Artificial Sequence
  Synthetic: FXN 3 forward 9:69043190-69043215; AsCpf1-1
gctgtcatagtgtaaactgtg

SEQ ID NO: 13617 - DNA, 22 bp, Artificial Sequence
  Synthetic: FXN 3 forward 9:69043190-69043216; AsCpf1-1
gctgtcatagtgtaaactgtgt

SEQ ID NO: 13618 - DNA, 23 bp, Artificial Sequence
  Synthetic: FXN 3 forward 9:69043190-69043217; AsCpf1-1
gctgtcatagtgtaaactgtgtc

SEQ ID NO: 13619 - DNA, 24 bp, Artificial Sequence
  Synthetic: FXN 3 forward 9:69043190-69043218; AsCpf1-1
gctgtcatagtgtaaactgtgtcc

SEQ ID NO: 13620 - DNA, 25 bp, Artificial Sequence
  Synthetic: FXN 3 forward 9:69043190-69043219; AsCpf1-1
gctgtcatagtgtaaactgtgtcct

SEQ ID NO: 13621 - DNA, 18 bp, Artificial Sequence
  Synthetic: FXN 3 forward 9:69043220-69043242; AsCpf1-1
cagtctgattagtgccat

SEQ ID NO: 13622 - DNA, 19 bp, Artificial Sequence
  Synthetic: FXN 3 forward 9:69043220-69043243; AsCpf1-1
cagtctgattagtgccatg

SEQ ID NO: 13623 - DNA, 20 bp, Artificial Sequence
  Synthetic: FXN 3 forward 9:69043220-69043244; AsCpf1-1
cagtctgattagtgccatgt

SEQ ID NO: 13624 - DNA, 21 bp, Artificial Sequence
  Synthetic: FXN 3 forward 9:69043220-69043245; AsCpf1-1
cagtctgattagtgccatgtt

SEQ ID NO: 13625 - DNA, 22 bp, Artificial Sequence
  Synthetic: FXN 3 forward 9:69043220-69043246; AsCpf1-1
cagtctgattagtgccatgttt

SEQ ID NO: 13626 - DNA, 23 bp, Artificial Sequence
  Synthetic: FXN 3 forward 9:69043220-69043247; AsCpf1-1
cagtctgattagtgccatgtttt

SEQ ID NO: 13627 - DNA, 24 bp, Artificial Sequence
  Synthetic: FXN 3 forward 9:69043220-69043248; AsCpf1-1
cagtctgattagtgccatgttttt

SEQ ID NO: 13628 - DNA, 25 bp, Artificial Sequence
  Synthetic: FXN 3 forward 9:69043220-69043249; AsCpf1-1
cagtctgattagtgccatgtttttc

SEQ ID NO: 13629 - DNA, 18 bp, Artificial Sequence
  Synthetic: FXN 3 forward 9:69043246-69043268; AsCpf1-1
gatttttatgcttttttc

SEQ ID NO: 13630 - DNA, 19 bp, Artificial Sequence
  Synthetic: FXN 3 forward 9:69043246-69043269; AsCpf1-1
gatttttatgcttttttct

SEQ ID NO: 13631 - DNA, 20 bp, Artificial Sequence
  Synthetic: FXN 3 forward 9:69043246-69043270; AsCpf1-1
gatttttatgcttttttctt

SEQ ID NO: 13632 - DNA, 21 bp, Artificial Sequence
  Synthetic: FXN 3 forward 9:69043246-69043271; AsCpf1-1
gatttttatgcttttttcttg

SEQ ID NO: 13633 - DNA, 22 bp, Artificial Sequence
  Synthetic: FXN 3 forward 9:69043246-69043272; AsCpf1-1
gatttttatgcttttttcttgg

SEQ ID NO: 13634 - DNA, 23 bp, Artificial Sequence
  Synthetic: FXN 3 forward 9:69043246-69043273; AsCpf1-1
gatttttatgcttttttcttggt

SEQ ID NO: 13635 - DNA, 24 bp, Artificial Sequence
  Synthetic: FXN 3 forward 9:69043246-69043274; AsCpf1-1
gatttttatgcttttttcttggtt

SEQ ID NO: 13636 - DNA, 25 bp, Artificial Sequence
  Synthetic: FXN 3 forward 9:69043246-69043275; AsCpf1-1
gatttttatgcttttttcttggtta

SEQ ID NO: 13637 - DNA, 18 bp, Artificial Sequence
  Synthetic: FXN 3 forward 9:69043294-69043316; AsCpf1-1
agtgtagtgcaaagttta

SEQ ID NO: 13638 - DNA, 19 bp, Artificial Sequence
  Synthetic: FXN 3 forward 9:69043294-69043317; AsCpf1-1
agtgtagtgcaaagtttag

SEQ ID NO: 13639 - DNA, 20 bp, Artificial Sequence
  Synthetic: FXN 3 forward 9:69043294-69043318; AsCpf1-1
agtgtagtgcaaagtttagc

SEQ ID NO: 13640 - DNA, 21 bp, Artificial Sequence
  Synthetic: FXN 3 forward 9:69043294-69043319; AsCpf1-1
agtgtagtgcaaagtttagca

SEQ ID NO: 13641 - DNA, 22 bp, Artificial Sequence
  Synthetic: FXN 3 forward 9:69043294-69043320; AsCpf1-1
agtgtagtgcaaagtttagcac

SEQ ID NO: 13642 - DNA, 23 bp, Artificial Sequence
  Synthetic: FXN 3 forward 9:69043294-69043321; AsCpf1-1
agtgtagtgcaaagtttagcacg

SEQ ID NO: 13643 - DNA, 24 bp, Artificial Sequence
  Synthetic: FXN 3 forward 9:69043294-69043322; AsCpf1-1
agtgtagtgcaaagtttagcacga

SEQ ID NO: 13644 - DNA, 25 bp, Artificial Sequence
  Synthetic: FXN 3 forward 9:69043294-69043323; AsCpf1-1
agtgtagtgcaaagtttagcacgag

SEQ ID NO: 13645 - DNA, 18 bp, Artificial Sequence
  Synthetic: FXN 3 forward 9:69043335-69043357; AsCpf1-1
ttacagagaaaatgcatg

SEQ ID NO: 13646 - DNA, 19 bp, Artificial Sequence
  Synthetic: FXN 3 forward 9:69043335-69043358; AsCpf1-1
ttacagagaaaatgcatgt

SEQ ID NO: 13647 - DNA, 20 bp, Artificial Sequence
  Synthetic: FXN 3 forward 9:69043335-69043359; AsCpf1-1
ttacagagaaaatgcatgtg

SEQ ID NO: 13648 - DNA, 21 bp, Artificial Sequence
  Synthetic: FXN 3 forward 9:69043335-69043360; AsCpf1-1
ttacagagaaaatgcatgtgt

SEQ ID NO: 13649 - DNA, 22 bp, Artificial Sequence
  Synthetic: FXN 3 forward 9:69043335-69043361; AsCpf1-1
ttacagagaaaatgcatgtgtt

SEQ ID NO: 13650 - DNA, 23 bp, Artificial Sequence
  Synthetic: FXN 3 forward 9:69043335-69043362; AsCpf1-1
ttacagagaaaatgcatgtgtta

SEQ ID NO: 13651 - DNA, 24 bp, Artificial Sequence
  Synthetic: FXN 3 forward 9:69043335-69043363; AsCpf1-1
ttacagagaaaatgcatgtgttag

SEQ ID NO: 13652 - DNA, 25 bp, Artificial Sequence
  Synthetic: FXN 3 forward 9:69043335-69043364; AsCpf1-1
ttacagagaaaatgcatgtgttaga

SEQ ID NO: 13653 - DNA, 18 bp, Artificial Sequence
  Synthetic: FXN 3 reverse 9:69043440-69043462; AsCpf1-1
gcagcctgggcaacagag

SEQ ID NO: 13654 - DNA, 19 bp, Artificial Sequence
  Synthetic: FXN 3 reverse 9:69043440-69043463; AsCpf1-1
gcagcctgggcaacagagg

SEQ ID NO: 13655 - DNA, 20 bp, Artificial Sequence
  Synthetic: FXN 3 reverse 9:69043440-69043464; AsCpf1-1
gcagcctgggcaacagaggg

SEQ ID NO: 13656 - DNA, 21 bp, Artificial Sequence
  Synthetic: FXN 3 reverse 9:69043440-69043465; AsCpf1-1
gcagcctgggcaacagaggga

SEQ ID NO: 13657 - DNA, 22 bp, Artificial Sequence
  Synthetic: FXN 3 reverse 9:69043440-69043466; AsCpf1-1
gcagcctgggcaacagagggag

SEQ ID NO: 13658 - DNA, 23 bp, Artificial Sequence
  Synthetic: FXN 3 reverse 9:69043440-69043467; AsCpf1-1
gcagcctgggcaacagagggaga

SEQ ID NO: 13659 - DNA, 24 bp, Artificial Sequence
  Synthetic: FXN 3 reverse 9:69043440-69043468; AsCpf1-1
gcagcctgggcaacagagggagac

SEQ ID NO: 13660 - DNA, 25 bp, Artificial Sequence
  Synthetic: FXN 3 reverse 9:69043440-69043469; AsCpf1-1
gcagcctgggcaacagagggagacc

SEQ ID NO: 13661 - DNA, 18 bp, Artificial Sequence
  Synthetic: FXN 3 forward 9:69043444-69043466; AsCpf1-1
tctgttgcccaggctgct

SEQ ID NO: 13662 - DNA, 19 bp, Artificial Sequence
  Synthetic: FXN 3 forward 9:69043444-69043467; AsCpf1-1
tctgttgcccaggctgctg

SEQ ID NO: 13663 - DNA, 20 bp, Artificial Sequence
  Synthetic: FXN 3 forward 9:69043444-69043468; AsCpf1-1
tctgttgcccaggctgctgg

SEQ ID NO: 13664 - DNA, 21 bp, Artificial Sequence
  Synthetic: FXN 3 forward 9:69043444-69043469; AsCpf1-1
tctgttgcccaggctgctgga

SEQ ID NO: 13665 - DNA, 22 bp, Artificial Sequence
  Synthetic: FXN 3 forward 9:69043444-69043470; AsCpf1-1
tctgttgcccaggctgctggag

SEQ ID NO: 13666 - DNA, 23 bp, Artificial Sequence
  Synthetic: FXN 3 forward 9:69043444-69043471; AsCpf1-1
tctgttgcccaggctgctggagt

SEQ ID NO: 13667 - DNA, 24 bp, Artificial Sequence
  Synthetic: FXN 3 forward 9:69043444-69043472; AsCpf1-1
tctgttgcccaggctgctggagtg

SEQ ID NO: 13668 - DNA, 25 bp, Artificial Sequence
  Synthetic: FXN 3 forward 9:69043444-69043473; AsCpf1-1
tctgttgcccaggctgctggagtgc

SEQ ID NO: 13669 - DNA, 18 bp, Artificial Sequence
  Synthetic: FXN 3 forward 9:69043526-69043548; AsCpf1-1
acctcggcctcctgagta

SEQ ID NO: 13670 - DNA, 19 bp, Artificial Sequence
  Synthetic: FXN 3 forward 9:69043526-69043549; AsCpf1-1
acctcggcctcctgagtag

SEQ ID NO: 13671 - DNA, 20 bp, Artificial Sequence
  Synthetic: FXN 3 forward 9:69043526-69043550; AsCpf1-1
acctcggcctcctgagtagc

SEQ ID NO: 13672 - DNA, 21 bp, Artificial Sequence
  Synthetic: FXN 3 forward 9:69043526-69043551; AsCpf1-1
acctcggcctcctgagtagct

SEQ ID NO: 13673 - DNA, 22 bp, Artificial Sequence
  Synthetic: FXN 3 forward 9:69043526-69043552; AsCpf1-1
acctcggcctcctgagtagctg

SEQ ID NO: 13674 - DNA, 23 bp, Artificial Sequence
  Synthetic: FXN 3 forward 9:69043526-69043553; AsCpf1-1
acctcggcctcctgagtagctgg

SEQ ID NO: 13675 - DNA, 24 bp, Artificial Sequence
  Synthetic: FXN 3 forward 9:69043526-69043554; AsCpf1-1
acctcggcctcctgagtagctggg

SEQ ID NO: 13676 - DNA, 25 bp, Artificial Sequence
  Synthetic: FXN 3 forward 9:69043526-69043555; AsCpf1-1
acctcggcctcctgagtagctggga

SEQ ID NO: 13677 - DNA, 18 bp, Artificial Sequence
  Synthetic: FXN 3 reverse 9:69043526-69043548; AsCpf1-1
agctactcaggaggccga

SEQ ID NO: 13678 - DNA, 19 bp, Artificial Sequence
  Synthetic: FXN 3 reverse 9:69043526-69043549; AsCpf1-1
agctactcaggaggccgag

SEQ ID NO: 13679 - DNA, 20 bp, Artificial Sequence
  Synthetic: FXN 3 reverse 9:69043526-69043550; AsCpf1-1
agctactcaggaggccgagg

SEQ ID NO: 13680 - DNA, 21 bp, Artificial Sequence
  Synthetic: FXN 3 reverse 9:69043526-69043551; AsCpf1-1
agctactcaggaggccgaggt

SEQ ID NO: 13681 - DNA, 22 bp, Artificial Sequence
  Synthetic: FXN 3 reverse 9:69043526-69043552; AsCpf1-1
agctactcaggaggccgaggtg

SEQ ID NO: 13682 - DNA, 23 bp, Artificial Sequence
  Synthetic: FXN 3 reverse 9:69043526-69043553; AsCpf1-1
agctactcaggaggccgaggtgg

SEQ ID NO: 13683 - DNA, 24 bp, Artificial Sequence
  Synthetic: FXN 3 reverse 9:69043526-69043554; AsCpf1-1
agctactcaggaggccgaggtggg

SEQ ID NO: 13684 - DNA, 25 bp, Artificial Sequence
  Synthetic: FXN 3 reverse 9:69043526-69043555; AsCpf1-1
agctactcaggaggccgaggtggga

SEQ ID NO: 13685 - DNA, 18 bp, Artificial Sequence
  Synthetic: FXN 3 reverse 9:69043581-69043603; AsCpf1-1
cctaaaaaaatatcaaaa

SEQ ID NO: 13686 - DNA, 19 bp, Artificial Sequence
  Synthetic: FXN 3 reverse 9:69043581-69043604; AsCpf1-1
cctaaaaaaatatcaaaaa

SEQ ID NO: 13687 - DNA, 20 bp, Artificial Sequence
  Synthetic: FXN 3 reverse 9:69043581-69043605; AsCpf1-1
cctaaaaaaatatcaaaaac

SEQ ID NO: 13688 - DNA, 21 bp, Artificial Sequence
  Synthetic: FXN 3 reverse 9:69043581-69043606; AsCpf1-1
cctaaaaaaatatcaaaaaca

SEQ ID NO: 13689 - DNA, 22 bp, Artificial Sequence
  Synthetic: FXN 3 reverse 9:69043581-69043607; AsCpf1-1
cctaaaaaaatatcaaaaacat

SEQ ID NO: 13690 - DNA, 23 bp, Artificial Sequence
  Synthetic: FXN 3 reverse 9:69043581-69043608; AsCpf1-1
cctaaaaaaatatcaaaaacatt

SEQ ID NO: 13691 - DNA, 24 bp, Artificial Sequence
  Synthetic: FXN 3 reverse 9:69043581-69043609; AsCpf1-1
cctaaaaaaatatcaaaaacatta

SEQ ID NO: 13692 - DNA, 25 bp, Artificial Sequence
  Synthetic: FXN 3 reverse 9:69043581-69043610; AsCpf1-1
cctaaaaaaatatcaaaaacattat

SEQ ID NO: 13693 - DNA, 18 bp, Artificial Sequence
  Synthetic: FXN 3 reverse 9:69043582-69043604; AsCpf1-1
acctaaaaaaatatcaaa

SEQ ID NO: 13694 - DNA, 19 bp, Artificial Sequence
  Synthetic: FXN 3 reverse 9:69043582-69043605; AsCpf1-1
acctaaaaaaatatcaaaa

SEQ ID NO: 13695 - DNA, 20 bp, Artificial Sequence
  Synthetic: FXN 3 reverse 9:69043582-69043606; AsCpf1-1
acctaaaaaaatatcaaaaa

SEQ ID NO: 13696 - DNA, 21 bp, Artificial Sequence
  Synthetic: FXN 3 reverse 9:69043582-69043607; AsCpf1-1
acctaaaaaaatatcaaaaac

SEQ ID NO: 13697 - DNA, 22 bp, Artificial Sequence
  Synthetic: FXN 3 reverse 9:69043582-69043608; AsCpf1-1
acctaaaaaaatatcaaaaaca

SEQ ID NO: 13698 - DNA, 23 bp, Artificial Sequence
  Synthetic: FXN 3 reverse 9:69043582-69043609; AsCpf1-1
acctaaaaaaatatcaaaaacat

SEQ ID NO: 13699 - DNA, 24 bp, Artificial Sequence
  Synthetic: FXN 3 reverse 9:69043582-69043610; AsCpf1-1
acctaaaaaaatatcaaaaacatt

SEQ ID NO: 13700 - DNA, 25 bp, Artificial Sequence
  Synthetic: FXN 3 reverse 9:69043582-69043611; AsCpf1-1
acctaaaaaaatatcaaaaacatta

SEQ ID NO: 13701 - DNA, 18 bp, Artificial Sequence
  Synthetic: FXN 3 reverse 9:69043605-69043627; AsCpf1-1
gcctgggtgatgagcaaa

SEQ ID NO: 13702 - DNA, 19 bp, Artificial Sequence
  Synthetic: FXN 3 reverse 9:69043605-69043628; AsCpf1-1
gcctgggtgatgagcaaaa

SEQ ID NO: 13703 - DNA, 20 bp, Artificial Sequence
  Synthetic: FXN 3 reverse 9:69043605-69043629; AsCpf1-1
gcctgggtgatgagcaaaat

SEQ ID NO: 13704 - DNA, 21 bp, Artificial Sequence
  Synthetic: FXN 3 reverse 9:69043605-69043630; AsCpf1-1
gcctgggtgatgagcaaaatt

SEQ ID NO: 13705 - DNA, 22 bp, Artificial Sequence
  Synthetic: FXN 3 reverse 9:69043605-69043631; AsCpf1-1
gcctgggtgatgagcaaaattc

SEQ ID NO: 13706 - DNA, 23 bp, Artificial Sequence
  Synthetic: FXN 3 reverse 9:69043605-69043632; AsCpf1-1
gcctgggtgatgagcaaaattcc

SEQ ID NO: 13707 - DNA, 24 bp, Artificial Sequence
  Synthetic: FXN 3 reverse 9:69043605-69043633; AsCpf1-1
gcctgggtgatgagcaaaattcca

SEQ ID NO: 13708 - DNA, 25 bp, Artificial Sequence
  Synthetic: FXN 3 reverse 9:69043605-69043634; AsCpf1-1
gcctgggtgatgagcaaaattccac

SEQ ID NO: 13709 - DNA, 18 bp, Artificial Sequence
  Synthetic: FXN 3 reverse 9:69043650-69043672; AsCpf1-1
ggaggtggaggttgcagt

SEQ ID NO: 13710 - DNA, 19 bp, Artificial Sequence
  Synthetic: FXN 3 reverse 9:69043650-69043673; AsCpf1-1
ggaggtggaggttgcagtg

SEQ ID NO: 13711 - DNA, 20 bp, Artificial Sequence
  Synthetic: FXN 3 reverse 9:69043650-69043674; AsCpf1-1
ggaggtggaggttgcagtga

SEQ ID NO: 13712 - DNA, 21 bp, Artificial Sequence
  Synthetic: FXN 3 reverse 9:69043650-69043675; AsCpf1-1
ggaggtggaggttgcagtgag

SEQ ID NO: 13713 - DNA, 22 bp, Artificial Sequence
  Synthetic: FXN 3 reverse 9:69043650-69043676; AsCpf1-1
ggaggtggaggttgcagtgagc

SEQ ID NO: 13714 - DNA, 23 bp, Artificial Sequence
  Synthetic: FXN 3 reverse 9:69043650-69043677; AsCpf1-1
ggaggtggaggttgcagtgagcc

SEQ ID NO: 13715 - DNA, 24 bp, Artificial Sequence
  Synthetic: FXN 3 reverse 9:69043650-69043678; AsCpf1-1
ggaggtggaggttgcagtgagcca

SEQ ID NO: 13716 - DNA, 25 bp, Artificial Sequence
  Synthetic: FXN 3 reverse 9:69043650-69043679; AsCpf1-1
ggaggtggaggttgcagtgagccag

SEQ ID NO: 13717 - DNA, 18 bp, Artificial Sequence
  Synthetic: FXN 3 forward 9:69043666-69043688; AsCpf1-1
cctcccggattcaagcaa

SEQ ID NO: 13718 - DNA, 19 bp, Artificial Sequence
  Synthetic: FXN 3 forward 9:69043666-69043689; AsCpf1-1
cctcccggattcaagcaat

SEQ ID NO: 13719 - DNA, 20 bp, Artificial Sequence
  Synthetic: FXN 3 forward 9:69043666-69043690; AsCpf1-1
cctcccggattcaagcaatt

SEQ ID NO: 13720 - DNA, 21 bp, Artificial Sequence
  Synthetic: FXN 3 forward 9:69043666-69043691; AsCpf1-1
cctcccggattcaagcaattc

SEQ ID NO: 13721 - DNA, 22 bp, Artificial Sequence
  Synthetic: FXN 3 forward 9:69043666-69043692; AsCpf1-1
cctcccggattcaagcaattct

SEQ ID NO: 13722 - DNA, 23 bp, Artificial Sequence
  Synthetic: FXN 3 forward 9:69043666-69043693; AsCpf1-1
cctcccggattcaagcaattctt

SEQ ID NO: 13723 - DNA, 24 bp, Artificial Sequence
  Synthetic: FXN 3 forward 9:69043666-69043694; AsCpf1-1
cctcccggattcaagcaattcttc

SEQ ID NO: 13724 - DNA, 25 bp, Artificial Sequence
  Synthetic: FXN 3 forward 9:69043666-69043695; AsCpf1-1
cctcccggattcaagcaattcttct

SEQ ID NO: 13725 - DNA, 18 bp, Artificial Sequence
  Synthetic: FXN 3 forward 9:69043672-69043694; AsCpf1-1
ggattcaagcaattcttc

SEQ ID NO: 13726 - DNA, 19 bp, Artificial Sequence
  Synthetic: FXN 3 forward 9:69043672-69043695; AsCpf1-1
ggattcaagcaattcttct

SEQ ID NO: 13727 - DNA, 20 bp, Artificial Sequence
  Synthetic: FXN 3 forward 9:69043672-69043696; AsCpf1-1
ggattcaagcaattcttctg

SEQ ID NO: 13728 - DNA, 21 bp, Artificial Sequence
  Synthetic: FXN 3 forward 9:69043672-69043697; AsCpf1-1
ggattcaagcaattcttctgc

SEQ ID NO: 13729 - DNA, 22 bp, Artificial Sequence
  Synthetic: FXN 3 forward 9:69043672-69043698; AsCpf1-1
ggattcaagcaattcttctgcc

SEQ ID NO: 13730 - DNA, 23 bp, Artificial Sequence
  Synthetic: FXN 3 forward 9:69043672-69043699; AsCpf1-1
ggattcaagcaattcttctgcct

SEQ ID NO: 13731 - DNA, 24 bp, Artificial Sequence
  Synthetic: FXN 3 forward 9:69043672-69043700; AsCpf1-1
ggattcaagcaattcttctgcctc

SEQ ID NO: 13732 - DNA, 25 bp, Artificial Sequence
  Synthetic: FXN 3 forward 9:69043672-69043701; AsCpf1-1
ggattcaagcaattcttctgcctca

SEQ ID NO: 13733 - DNA, 18 bp, Artificial Sequence
  Synthetic: FXN 3 forward 9:69043679-69043701; AsCpf1-1
agcaattcttctgcctca

SEQ ID NO: 13734 - DNA, 19 bp, Artificial Sequence
  Synthetic: FXN 3 forward 9:69043679-69043702; AsCpf1-1
agcaattcttctgcctcag

SEQ ID NO: 13735 - DNA, 20 bp, Artificial Sequence
  Synthetic: FXN 3 forward 9:69043679-69043703; AsCpf1-1
agcaattcttctgcctcagc

SEQ ID NO: 13736 - DNA, 21 bp, Artificial Sequence
  Synthetic: FXN 3 forward 9:69043679-69043704; AsCpf1-1
agcaattcttctgcctcagcc

SEQ ID NO: 13737 - DNA, 22 bp, Artificial Sequence
  Synthetic: FXN 3 forward 9:69043679-69043705; AsCpf1-1
agcaattcttctgcctcagcct

SEQ ID NO: 13738 - DNA, 23 bp, Artificial Sequence
  Synthetic: FXN 3 forward 9:69043679-69043706; AsCpf1-1
agcaattcttctgcctcagcctc

SEQ ID NO: 13739 - DNA, 24 bp, Artificial Sequence
  Synthetic: FXN 3 forward 9:69043679-69043707; AsCpf1-1
agcaattcttctgcctcagcctcc

SEQ ID NO: 13740 - DNA, 25 bp, Artificial Sequence
  Synthetic: FXN 3 forward 9:69043679-69043708; AsCpf1-1
agcaattcttctgcctcagcctcct

SEQ ID NO: 13741 - DNA, 18 bp, Artificial Sequence
  Synthetic: FXN 3 forward 9:69043777-69043799; AsCpf1-1
ccatgttggccaggctag

SEQ ID NO: 13742 - DNA, 19 bp, Artificial Sequence
  Synthetic: FXN 3 forward 9:69043777-69043800; AsCpf1-1
ccatgttggccaggctagt

SEQ ID NO: 13743 - DNA, 20 bp, Artificial Sequence
  Synthetic: FXN 3 forward 9:69043777-69043801; AsCpf1-1
ccatgttggccaggctagtc

SEQ ID NO: 13744 - DNA, 21 bp, Artificial Sequence
  Synthetic: FXN 3 forward 9:69043777-69043802; AsCpf1-1
ccatgttggccaggctagtct

SEQ ID NO: 13745 - DNA, 22 bp, Artificial Sequence
  Synthetic: FXN 3 forward 9:69043777-69043803; AsCpf1-1
ccatgttggccaggctagtctt

SEQ ID NO: 13746 - DNA, 23 bp, Artificial Sequence
  Synthetic: FXN 3 forward 9:69043777-69043804; AsCpf1-1
ccatgttggccaggctagtcttg

SEQ ID NO: 13747 - DNA, 24 bp, Artificial Sequence
  Synthetic: FXN 3 forward 9:69043777-69043805; AsCpf1-1
ccatgttggccaggctagtcttga

SEQ ID NO: 13748 - DNA, 25 bp, Artificial Sequence
  Synthetic: FXN 3 forward 9:69043777-69043806; AsCpf1-1
ccatgttggccaggctagtcttgaa

SEQ ID NO: 13749 - DNA, 18 bp, Artificial Sequence
  Synthetic: FXN 3 reverse 9:69043777-69043799; AsCpf1-1
agactagcctggccaaca

SEQ ID NO: 13750 - DNA, 19 bp, Artificial Sequence
  Synthetic: FXN 3 reverse 9:69043777-69043800; AsCpf1-1
agactagcctggccaacat

SEQ ID NO: 13751 - DNA, 20 bp, Artificial Sequence
  Synthetic: FXN 3 reverse 9:69043777-69043801; AsCpf1-1
agactagcctggccaacatg

SEQ ID NO: 13752 - DNA, 21 bp, Artificial Sequence
  Synthetic: FXN 3 reverse 9:69043777-69043802; AsCpf1-1
agactagcctggccaacatgg

SEQ ID NO: 13753 - DNA, 22 bp, Artificial Sequence
  Synthetic: FXN 3 reverse 9:69043777-69043803; AsCpf1-1
agactagcctggccaacatggt

SEQ ID NO: 13754 - DNA, 23 bp, Artificial Sequence
  Synthetic: FXN 3 reverse 9:69043777-69043804; AsCpf1-1
agactagcctggccaacatggtg

SEQ ID NO: 13755 - DNA, 24 bp, Artificial Sequence
  Synthetic: FXN 3 reverse 9:69043777-69043805; AsCpf1-1
agactagcctggccaacatggtga

SEQ ID NO: 13756 - DNA, 25 bp, Artificial Sequence
  Synthetic: FXN 3 reverse 9:69043777-69043806; AsCpf1-1
agactagcctggccaacatggtgaa

SEQ ID NO: 13757 - DNA, 18 bp, Artificial Sequence
  Synthetic: FXN 3 forward 9:69043823-69043845; AsCpf1-1
cccgcctccgcctcccaa

SEQ ID NO: 13758 - DNA, 19 bp, Artificial Sequence
  Synthetic: FXN 3 forward 9:69043823-69043846; AsCpf1-1
cccgcctccgcctcccaaa

SEQ ID NO: 13759 - DNA, 20 bp, Artificial Sequence
  Synthetic: FXN 3 forward 9:69043823-69043847; AsCpf1-1
cccgcctccgcctcccaaac

SEQ ID NO: 13760 - DNA, 21 bp, Artificial Sequence
  Synthetic: FXN 3 forward 9:69043823-69043848; AsCpf1-1
cccgcctccgcctcccaaact

SEQ ID NO: 13761 - DNA, 22 bp, Artificial Sequence
  Synthetic: FXN 3 forward 9:69043823-69043849; AsCpf1-1
cccgcctccgcctcccaaactg

SEQ ID NO: 13762 - DNA, 23 bp, Artificial Sequence
  Synthetic: FXN 3 forward 9:69043823-69043850; AsCpf1-1
cccgcctccgcctcccaaactgc

SEQ ID NO: 13763 - DNA, 24 bp, Artificial Sequence
  Synthetic: FXN 3 forward 9:69043823-69043851; AsCpf1-1
cccgcctccgcctcccaaactgca

SEQ ID NO: 13764 - DNA, 25 bp, Artificial Sequence
  Synthetic: FXN 3 forward 9:69043823-69043852; AsCpf1-1
cccgcctccgcctcccaaactgcag

SEQ ID NO: 13765 - DNA, 18 bp, Artificial Sequence
  Synthetic: FXN 3 forward 9:69043833-69043855; AsCpf1-1
cctcccaaactgcagaga

SEQ ID NO: 13766 - DNA, 19 bp, Artificial Sequence
  Synthetic: FXN 3 forward 9:69043833-69043856; AsCpf1-1
cctcccaaactgcagagat

SEQ ID NO: 13767 - DNA, 20 bp, Artificial Sequence
  Synthetic: FXN 3 forward 9:69043833-69043857; AsCpf1-1
cctcccaaactgcagagatt

SEQ ID NO: 13768 - DNA, 21 bp, Artificial Sequence
  Synthetic: FXN 3 forward 9:69043833-69043858; AsCpf1-1
cctcccaaactgcagagatta

SEQ ID NO: 13769 - DNA, 22 bp, Artificial Sequence
  Synthetic: FXN 3 forward 9:69043833-69043859; AsCpf1-1
cctcccaaactgcagagattat

SEQ ID NO: 13770 - DNA, 23 bp, Artificial Sequence
  Synthetic: FXN 3 forward 9:69043833-69043860; AsCpf1-1
cctcccaaactgcagagattata

SEQ ID NO: 13771 - DNA, 24 bp, Artificial Sequence
  Synthetic: FXN 3 forward 9:69043833-69043861; AsCpf1-1
cctcccaaactgcagagattatag

SEQ ID NO: 13772 - DNA, 25 bp, Artificial Sequence
  Synthetic: FXN 3 forward 9:69043833-69043862; AsCpf1-1
cctcccaaactgcagagattatagg

SEQ ID NO: 13773 - DNA, 18 bp, Artificial Sequence
  Synthetic: FXN 3 forward 9:69043839-69043861; AsCpf1-1
aaactgcagagattatag

SEQ ID NO: 13774 - DNA, 19 bp, Artificial Sequence
  Synthetic: FXN 3 forward 9:69043839-69043862; AsCpf1-1
aaactgcagagattatagg

SEQ ID NO: 13775 - DNA, 20 bp, Artificial Sequence
  Synthetic: FXN 3 forward 9:69043839-69043863; AsCpf1-1
aaactgcagagattataggc

SEQ ID NO: 13776 - DNA, 21 bp, Artificial Sequence
  Synthetic: FXN 3 forward 9:69043839-69043864; AsCpf1-1
aaactgcagagattataggca

SEQ ID NO: 13777 - DNA, 22 bp, Artificial Sequence
  Synthetic: FXN 3 forward 9:69043839-69043865; AsCpf1-1
aaactgcagagattataggcac

SEQ ID NO: 13778 - DNA, 23 bp, Artificial Sequence
  Synthetic: FXN 3 forward 9:69043839-69043866; AsCpf1-1
aaactgcagagattataggcacg

SEQ ID NO: 13779 - DNA, 24 bp, Artificial Sequence
  Synthetic: FXN 3 forward 9:69043839-69043867; AsCpf1-1
aaactgcagagattataggcacga

SEQ ID NO: 13780 - DNA, 25 bp, Artificial Sequence
  Synthetic: FXN 3 forward 9:69043839-69043868; AsCpf1-1
aaactgcagagattataggcacgaa

SEQ ID NO: 13781 - DNA, 18 bp, Artificial Sequence
  Synthetic: FXN 3 reverse 9:69043839-69043861; AsCpf1-1
tgcctataatctctgcag

SEQ ID NO: 13782 - DNA, 19 bp, Artificial Sequence
  Synthetic: FXN 3 reverse 9:69043839-69043862; AsCpf1-1
tgcctataatctctgcagt

SEQ ID NO: 13783 - DNA, 20 bp, Artificial Sequence
  Synthetic: FXN 3 reverse 9:69043839-69043863; AsCpf1-1
tgcctataatctctgcagtt

SEQ ID NO: 13784 - DNA, 21 bp, Artificial Sequence
  Synthetic: FXN 3 reverse 9:69043839-69043864; AsCpf1-1
tgcctataatctctgcagttt

SEQ ID NO: 13785 - DNA, 22 bp, Artificial Sequence
  Synthetic: FXN 3 reverse 9:69043839-69043865; AsCpf1-1
tgcctataatctctgcagtttg

SEQ ID NO: 13786 - DNA, 23 bp, Artificial Sequence
  Synthetic: FXN 3 reverse 9:69043839-69043866; AsCpf1-1
tgcctataatctctgcagtttgg

SEQ ID NO: 13787 - DNA, 24 bp, Artificial Sequence
  Synthetic: FXN 3 reverse 9:69043839-69043867; AsCpf1-1
tgcctataatctctgcagtttggg

SEQ ID NO: 13788 - DNA, 25 bp, Artificial Sequence
  Synthetic: FXN 3 reverse 9:69043839-69043868; AsCpf1-1
tgcctataatctctgcagtttggga

SEQ ID NO: 13789 - DNA, 18 bp, Artificial Sequence
  Synthetic: FXN 3 reverse 9:69043880-69043902; AsCpf1-1
acttgaaaaataaaaaac

SEQ ID NO: 13790 - DNA, 19 bp, Artificial Sequence
  Synthetic: FXN 3 reverse 9:69043880-69043903; AsCpf1-1
acttgaaaaataaaaaaca

SEQ ID NO: 13791 - DNA, 20 bp, Artificial Sequence
  Synthetic: FXN 3 reverse 9:69043880-69043904; AsCpf1-1
acttgaaaaataaaaaacat

SEQ ID NO: 13792 - DNA, 21 bp, Artificial Sequence
  Synthetic: FXN 3 reverse 9:69043880-69043905; AsCpf1-1
acttgaaaaataaaaaacatg

SEQ ID NO: 13793 - DNA, 22 bp, Artificial Sequence
  Synthetic: FXN 3 reverse 9:69043880-69043906; AsCpf1-1
acttgaaaaataaaaaacatga

SEQ ID NO: 13794 - DNA, 23 bp, Artificial Sequence
  Synthetic: FXN 3 reverse 9:69043880-69043907; AsCpf1-1
acttgaaaaataaaaaacatgag

SEQ ID NO: 13795 - DNA, 24 bp, Artificial Sequence
  Synthetic: FXN 3 reverse 9:69043880-69043908; AsCpf1-1
acttgaaaaataaaaaacatgagg

SEQ ID NO: 13796 - DNA, 25 bp, Artificial Sequence
  Synthetic: FXN 3 reverse 9:69043880-69043909; AsCpf1-1
acttgaaaaataaaaaacatgaggc

SEQ ID NO: 13797 - DNA, 18 bp, Artificial Sequence
  Synthetic: FXN 3 forward 9:69043898-69043920; AsCpf1-1
agttgaaatgaggtctct

SEQ ID NO: 13798 - DNA, 19 bp, Artificial Sequence
  Synthetic: FXN 3 forward 9:69043898-69043921; AsCpf1-1
agttgaaatgaggtctctc

SEQ ID NO: 13799 - DNA, 20 bp, Artificial Sequence
  Synthetic: FXN 3 forward 9:69043898-69043922; AsCpf1-1
agttgaaatgaggtctctct

SEQ ID NO: 13800 - DNA, 21 bp, Artificial Sequence
  Synthetic: FXN 3 forward 9:69043898-69043923; AsCpf1-1
agttgaaatgaggtctctcta

SEQ ID NO: 13801 - DNA, 22 bp, Artificial Sequence
  Synthetic: FXN 3 forward 9:69043898-69043924; AsCpf1-1
agttgaaatgaggtctctctat

SEQ ID NO: 13802 - DNA, 23 bp, Artificial Sequence
  Synthetic: FXN 3 forward 9:69043898-69043925; AsCpf1-1
agttgaaatgaggtctctctatg

SEQ ID NO: 13803 - DNA, 24 bp, Artificial Sequence
  Synthetic: FXN 3 forward 9:69043898-69043926; AsCpf1-1
agttgaaatgaggtctctctatgt

SEQ ID NO: 13804 - DNA, 25 bp, Artificial Sequence
  Synthetic: FXN 3 forward 9:69043898-69043927; AsCpf1-1
agttgaaatgaggtctctctatgtt

SEQ ID NO: 13805 - DNA, 18 bp, Artificial Sequence
  Synthetic: FXN 3 forward 9:69043965-69043987; AsCpf1-1
accttggcctcccaaagt

SEQ ID NO: 13806 - DNA, 19 bp, Artificial Sequence
  Synthetic: FXN 3 forward 9:69043965-69043988; AsCpf1-1
accttggcctcccaaagtg

SEQ ID NO: 13807 - DNA, 20 bp, Artificial Sequence
  Synthetic: FXN 3 forward 9:69043965-69043989; AsCpf1-1
accttggcctcccaaagtgc

SEQ ID NO: 13808 - DNA, 21 bp, Artificial Sequence
  Synthetic: FXN 3 forward 9:69043965-69043990; AsCpf1-1
accttggcctcccaaagtgcg

SEQ ID NO: 13809 - DNA, 22 bp, Artificial Sequence
  Synthetic: FXN 3 forward 9:69043965-69043991; AsCpf1-1
accttggcctcccaaagtgcgg

SEQ ID NO: 13810 - DNA, 23 bp, Artificial Sequence
  Synthetic: FXN 3 forward 9:69043965-69043992; AsCpf1-1
accttggcctcccaaagtgcggg

SEQ ID NO: 13811 - DNA, 24 bp, Artificial Sequence
  Synthetic: FXN 3 forward 9:69043965-69043993; AsCpf1-1
accttggcctcccaaagtgcgggg

SEQ ID NO: 13812 - DNA, 25 bp, Artificial Sequence
  Synthetic: FXN 3 forward 9:69043965-69043994; AsCpf1-1
accttggcctcccaaagtgcgggga

SEQ ID NO: 13813 - DNA, 18 bp, Artificial Sequence
  Synthetic: FXN 3 reverse 9:69043965-69043987; AsCpf1-1
cgcactttgggaggccaa

SEQ ID NO: 13814 - DNA, 19 bp, Artificial Sequence
  Synthetic: FXN 3 reverse 9:69043965-69043988; AsCpf1-1
cgcactttgggaggccaag

SEQ ID NO: 13815 - DNA, 20 bp, Artificial Sequence
  Synthetic: FXN 3 reverse 9:69043965-69043989; AsCpf1-1
cgcactttgggaggccaagg

SEQ ID NO: 13816 - DNA, 21 bp, Artificial Sequence
  Synthetic: FXN 3 reverse 9:69043965-69043990; AsCpf1-1
cgcactttgggaggccaaggt

SEQ ID NO: 13817 - DNA, 22 bp, Artificial Sequence
  Synthetic: FXN 3 reverse 9:69043965-69043991; AsCpf1-1
cgcactttgggaggccaaggtg

SEQ ID NO: 13818 - DNA, 23 bp, Artificial Sequence
  Synthetic: FXN 3 reverse 9:69043965-69043992; AsCpf1-1
cgcactttgggaggccaaggtgg

SEQ ID NO: 13819 - DNA, 24 bp, Artificial Sequence
  Synthetic: FXN 3 reverse 9:69043965-69043993; AsCpf1-1
cgcactttgggaggccaaggtggg

SEQ ID NO: 13820 - DNA, 25 bp, Artificial Sequence
  Synthetic: FXN 3 reverse 9:69043965-69043994; AsCpf1-1
cgcactttgggaggccaaggtggga

SEQ ID NO: 13821 - DNA, 18 bp, Artificial Sequence
  Synthetic: FXN 3 forward 9:69043978-69044000; AsCpf1-1
aaagtgcggggattacag

SEQ ID NO: 13822 - DNA, 19 bp, Artificial Sequence
  Synthetic: FXN 3 forward 9:69043978-69044001; AsCpf1-1
aaagtgcggggattacagg

SEQ ID NO: 13823 - DNA, 20 bp, Artificial Sequence
  Synthetic: FXN 3 forward 9:69043978-69044002; AsCpf1-1
aaagtgcggggattacaggt

SEQ ID NO: 13824 - DNA, 21 bp, Artificial Sequence
  Synthetic: FXN 3 forward 9:69043978-69044003; AsCpf1-1
aaagtgcggggattacaggtg

SEQ ID NO: 13825 - DNA, 22 bp, Artificial Sequence
  Synthetic: FXN 3 forward 9:69043978-69044004; AsCpf1-1
aaagtgcggggattacaggtgt

SEQ ID NO: 13826 - DNA, 23 bp, Artificial Sequence
  Synthetic: FXN 3 forward 9:69043978-69044005; AsCpf1-1
aaagtgcggggattacaggtgtg

SEQ ID NO: 13827 - DNA, 24 bp, Artificial Sequence
  Synthetic: FXN 3 forward 9:69043978-69044006; AsCpf1-1
aaagtgcggggattacaggtgtga

SEQ ID NO: 13828 - DNA, 25 bp, Artificial Sequence
  Synthetic: FXN 3 forward 9:69043978-69044007; AsCpf1-1
aaagtgcggggattacaggtgtgag

SEQ ID NO: 13829 - DNA, 18 bp, Artificial Sequence
  Synthetic: FXN 3 reverse 9:69044011-69044033; AsCpf1-1
ttaacactgatcttggct

SEQ ID NO: 13830 - DNA, 19 bp, Artificial Sequence
  Synthetic: FXN 3 reverse 9:69044011-69044034; AsCpf1-1
ttaacactgatcttggctg

SEQ ID NO: 13831 - DNA, 20 bp, Artificial Sequence
  Synthetic: FXN 3 reverse 9:69044011-69044035; AsCpf1-1
ttaacactgatcttggctgg

SEQ ID NO: 13832 - DNA, 21 bp, Artificial Sequence
  Synthetic: FXN 3 reverse 9:69044011-69044036; AsCpf1-1
ttaacactgatcttggctggg

SEQ ID NO: 13833 - DNA, 22 bp, Artificial Sequence
  Synthetic: FXN 3 reverse 9:69044011-69044037; AsCpf1-1
ttaacactgatcttggctgggc

SEQ ID NO: 13834 - DNA, 23 bp, Artificial Sequence
  Synthetic: FXN 3 reverse 9:69044011-69044038; AsCpf1-1
ttaacactgatcttggctgggca

SEQ ID NO: 13835 - DNA, 24 bp, Artificial Sequence
  Synthetic: FXN 3 reverse 9:69044011-69044039; AsCpf1-1
ttaacactgatcttggctgggcat

SEQ ID NO: 13836 - DNA, 25 bp, Artificial Sequence
  Synthetic: FXN 3 reverse 9:69044011-69044040; AsCpf1-1
ttaacactgatcttggctgggcatg

SEQ ID NO: 13837 - DNA, 18 bp, Artificial Sequence
  Synthetic: FXN 3 reverse 9:69044228-69044250; AsCpf1-1
ttacaatcctgtgaggga

SEQ ID NO: 13838 - DNA, 19 bp, Artificial Sequence
  Synthetic: FXN 3 reverse 9:69044228-69044251; AsCpf1-1
ttacaatcctgtgagggac

SEQ ID NO: 13839 - DNA, 20 bp, Artificial Sequence
  Synthetic: FXN 3 reverse 9:69044228-69044252; AsCpf1-1
ttacaatcctgtgagggacg

SEQ ID NO: 13840 - DNA, 21 bp, Artificial Sequence
  Synthetic: FXN 3 reverse 9:69044228-69044253; AsCpf1-1
ttacaatcctgtgagggacgt

SEQ ID NO: 13841 - DNA, 22 bp, Artificial Sequence
  Synthetic: FXN 3 reverse 9:69044228-69044254; AsCpf1-1
ttacaatcctgtgagggacgta

SEQ ID NO: 13842 - DNA, 23 bp, Artificial Sequence
  Synthetic: FXN 3 reverse 9:69044228-69044255; AsCpf1-1
ttacaatcctgtgagggacgtac

SEQ ID NO: 13843 - DNA, 24 bp, Artificial Sequence
  Synthetic: FXN 3 reverse 9:69044228-69044256; AsCpf1-1
ttacaatcctgtgagggacgtact

SEQ ID NO: 13844 - DNA, 25 bp, Artificial Sequence
  Synthetic: FXN 3 reverse 9:69044228-69044257; AsCpf1-1
ttacaatcctgtgagggacgtactc

SEQ ID NO: 13845 - DNA, 18 bp, Artificial Sequence
  Synthetic: FXN 3 forward 9:69044235-69044257; AsCpf1-1
tcacaggattgtaatgaa

SEQ ID NO: 13846 - DNA, 19 bp, Artificial Sequence
  Synthetic: FXN 3 forward 9:69044235-69044258; AsCpf1-1
tcacaggattgtaatgaag

SEQ ID NO: 13847 - DNA, 20 bp, Artificial Sequence
  Synthetic: FXN 3 forward 9:69044235-69044259; AsCpf1-1
tcacaggattgtaatgaaga

SEQ ID NO: 13848 - DNA, 21 bp, Artificial Sequence
  Synthetic: FXN 3 forward 9:69044235-69044260; AsCpf1-1
tcacaggattgtaatgaagac

SEQ ID NO: 13849 - DNA, 22 bp, Artificial Sequence
  Synthetic: FXN 3 forward 9:69044235-69044261; AsCpf1-1
tcacaggattgtaatgaagact

SEQ ID NO: 13850 - DNA, 23 bp, Artificial Sequence
  Synthetic: FXN 3 forward 9:69044235-69044262; AsCpf1-1
tcacaggattgtaatgaagactg

SEQ ID NO: 13851 - DNA, 24 bp, Artificial Sequence
  Synthetic: FXN 3 forward 9:69044235-69044263; AsCpf1-1
tcacaggattgtaatgaagactga

SEQ ID NO: 13852 - DNA, 25 bp, Artificial Sequence
  Synthetic: FXN 3 forward 9:69044235-69044264; AsCpf1-1
tcacaggattgtaatgaagactgag

SEQ ID NO: 13853 - DNA, 18 bp, Artificial Sequence
  Synthetic: FXN 3 forward 9:69044264-69044286; AsCpf1-1
tttacataaaggctgaga

SEQ ID NO: 13854 - DNA, 19 bp, Artificial Sequence
  Synthetic: FXN 3 forward 9:69044264-69044287; AsCpf1-1
tttacataaaggctgagag

SEQ ID NO: 13855 - DNA, 20 bp, Artificial Sequence
  Synthetic: FXN 3 forward 9:69044264-69044288; AsCpf1-1
tttacataaaggctgagagc

SEQ ID NO: 13856 - DNA, 21 bp, Artificial Sequence
  Synthetic: FXN 3 forward 9:69044264-69044289; AsCpf1-1
tttacataaaggctgagagca

SEQ ID NO: 13857 - DNA, 22 bp, Artificial Sequence
  Synthetic: FXN 3 forward 9:69044264-69044290; AsCpf1-1
tttacataaaggctgagagcag

SEQ ID NO: 13858 - DNA, 23 bp, Artificial Sequence
  Synthetic: FXN 3 forward 9:69044264-69044291; AsCpf1-1
tttacataaaggctgagagcagt

SEQ ID NO: 13859 - DNA, 24 bp, Artificial Sequence
  Synthetic: FXN 3 forward 9:69044264-69044292; AsCpf1-1
tttacataaaggctgagagcagtg

SEQ ID NO: 13860 - DNA, 25 bp, Artificial Sequence
  Synthetic: FXN 3 forward 9:69044264-69044293; AsCpf1-1
tttacataaaggctgagagcagtgt

SEQ ID NO: 13861 - DNA, 18 bp, Artificial Sequence
  Synthetic: FXN 3 reverse 9:69044276-69044298; AsCpf1-1
tctgcttgacactgctct

SEQ ID NO: 13862 - DNA, 19 bp, Artificial Sequence
  Synthetic: FXN 3 reverse 9:69044276-69044299; AsCpf1-1
tctgcttgacactgctctc

SEQ ID NO: 13863 - DNA, 20 bp, Artificial Sequence
  Synthetic: FXN 3 reverse 9:69044276-69044300; AsCpf1-1
tctgcttgacactgctctca

SEQ ID NO: 13864 - DNA, 21 bp, Artificial Sequence
  Synthetic: FXN 3 reverse 9:69044276-69044301; AsCpf1-1
tctgcttgacactgctctcag

SEQ ID NO: 13865 - DNA, 22 bp, Artificial Sequence
  Synthetic: FXN 3 reverse 9:69044276-69044302; AsCpf1-1
tctgcttgacactgctctcagc

SEQ ID NO: 13866 - DNA, 23 bp, Artificial Sequence
  Synthetic: FXN 3 reverse 9:69044276-69044303; AsCpf1-1
tctgcttgacactgctctcagcc

SEQ ID NO: 13867 - DNA, 24 bp, Artificial Sequence
  Synthetic: FXN 3 reverse 9:69044276-69044304; AsCpf1-1
tctgcttgacactgctctcagcct

SEQ ID NO: 13868 - DNA, 25 bp, Artificial Sequence
  Synthetic: FXN 3 reverse 9:69044276-69044305; AsCpf1-1
tctgcttgacactgctctcagcctt

SEQ ID NO: 13869 - DNA, 18 bp, Artificial Sequence
  Synthetic: FXN 3 forward 9:69044364-69044386; AsCpf1-1
gagacatgtgtttctaag

SEQ ID NO: 13870 - DNA, 19 bp, Artificial Sequence
  Synthetic: FXN 3 forward 9:69044364-69044387; AsCpf1-1
gagacatgtgtttctaagg

SEQ ID NO: 13871 - DNA, 20 bp, Artificial Sequence
  Synthetic: FXN 3 forward 9:69044364-69044388; AsCpf1-1
gagacatgtgtttctaaggt

SEQ ID NO: 13872 - DNA, 21 bp, Artificial Sequence
  Synthetic: FXN 3 forward 9:69044364-69044389; AsCpf1-1
gagacatgtgtttctaaggtc

SEQ ID NO: 13873 - DNA, 22 bp, Artificial Sequence
  Synthetic: FXN 3 forward 9:69044364-69044390; AsCpf1-1
gagacatgtgtttctaaggtct

SEQ ID NO: 13874 - DNA, 23 bp, Artificial Sequence
  Synthetic: FXN 3 forward 9:69044364-69044391; AsCpf1-1
gagacatgtgtttctaaggtctg

SEQ ID NO: 13875 - DNA, 24 bp, Artificial Sequence
  Synthetic: FXN 3 forward 9:69044364-69044392; AsCpf1-1
gagacatgtgtttctaaggtctgc

SEQ ID NO: 13876 - DNA, 25 bp, Artificial Sequence
  Synthetic: FXN 3 forward 9:69044364-69044393; AsCpf1-1
gagacatgtgtttctaaggtctgca

SEQ ID NO: 13877 - DNA, 18 bp, Artificial Sequence
  Synthetic: FXN 3 forward 9:69044406-69044428; AsCpf1-1
catccactgtcccccagc

SEQ ID NO: 13878 - DNA, 19 bp, Artificial Sequence
  Synthetic: FXN 3 forward 9:69044406-69044429; AsCpf1-1
catccactgtcccccagcc

SEQ ID NO: 13879 - DNA, 20 bp, Artificial Sequence
  Synthetic: FXN 3 forward 9:69044406-69044430; AsCpf1-1
catccactgtcccccagccc

SEQ ID NO: 13880 - DNA, 21 bp, Artificial Sequence
  Synthetic: FXN 3 forward 9:69044406-69044431; AsCpf1-1
catccactgtcccccagcccg

SEQ ID NO: 13881 - DNA, 22 bp, Artificial Sequence
  Synthetic: FXN 3 forward 9:69044406-69044432; AsCpf1-1
catccactgtcccccagcccgt

SEQ ID NO: 13882 - DNA, 23 bp, Artificial Sequence
  Synthetic: FXN 3 forward 9:69044406-69044433; AsCpf1-1
catccactgtcccccagcccgtt

SEQ ID NO: 13883 - DNA, 24 bp, Artificial Sequence
  Synthetic: FXN 3 forward 9:69044406-69044434; AsCpf1-1
catccactgtcccccagcccgttt

SEQ ID NO: 13884 - DNA, 25 bp, Artificial Sequence
  Synthetic: FXN 3 forward 9:69044406-69044435; AsCpf1-1
catccactgtcccccagcccgtttc

SEQ ID NO: 13885 - DNA, 18 bp, Artificial Sequence
  Synthetic: FXN 3 forward 9:69044412-69044434; AsCpf1-1
ctgtcccccagcccgttt

SEQ ID NO: 13886 - DNA, 19 bp, Artificial Sequence
  Synthetic: FXN 3 forward 9:69044412-69044435; AsCpf1-1
ctgtcccccagcccgtttc

SEQ ID NO: 13887 - DNA, 20 bp, Artificial Sequence
  Synthetic: FXN 3 forward 9:69044412-69044436; AsCpf1-1
ctgtcccccagcccgtttcc

SEQ ID NO: 13888 - DNA, 21 bp, Artificial Sequence
  Synthetic: FXN 3 forward 9:69044412-69044437; AsCpf1-1
ctgtcccccagcccgtttcct

SEQ ID NO: 13889 - DNA, 22 bp, Artificial Sequence
  Synthetic: FXN 3 forward 9:69044412-69044438; AsCpf1-1
ctgtcccccagcccgtttcctc

SEQ ID NO: 13890 - DNA, 23 bp, Artificial Sequence
  Synthetic: FXN 3 forward 9:69044412-69044439; AsCpf1-1
ctgtcccccagcccgtttcctcc

SEQ ID NO: 13891 - DNA, 24 bp, Artificial Sequence
  Synthetic: FXN 3 forward 9:69044412-69044440; AsCpf1-1
ctgtcccccagcccgtttcctcct

SEQ ID NO: 13892 - DNA, 25 bp, Artificial Sequence
  Synthetic: FXN 3 forward 9:69044412-69044441; AsCpf1-1
ctgtcccccagcccgtttcctcctc

SEQ ID NO: 13893 - DNA, 18 bp, Artificial Sequence
  Synthetic: FXN 3 forward 9:69044419-69044441; AsCpf1-1
ccagcccgtttcctcctc

SEQ ID NO: 13894 - DNA, 19 bp, Artificial Sequence
  Synthetic: FXN 3 forward 9:69044419-69044442; AsCpf1-1
ccagcccgtttcctcctcc

SEQ ID NO: 13895 - DNA, 20 bp, Artificial Sequence
  Synthetic: FXN 3 forward 9:69044419-69044443; AsCpf1-1
ccagcccgtttcctcctcca

SEQ ID NO: 13896 - DNA, 21 bp, Artificial Sequence
  Synthetic: FXN 3 forward 9:69044419-69044444; AsCpf1-1
ccagcccgtttcctcctccac

SEQ ID NO: 13897 - DNA, 22 bp, Artificial Sequence
  Synthetic: FXN 3 forward 9:69044419-69044445; AsCpf1-1
ccagcccgtttcctcctccact

SEQ ID NO: 13898 - DNA, 23 bp, Artificial Sequence
  Synthetic: FXN 3 forward 9:69044419-69044446; AsCpf1-1
ccagcccgtttcctcctccactt

SEQ ID NO: 13899 - DNA, 24 bp, Artificial Sequence
  Synthetic: FXN 3 forward 9:69044419-69044447; AsCpf1-1
ccagcccgtttcctcctccactta

SEQ ID NO: 13900 - DNA, 25 bp, Artificial Sequence
  Synthetic: FXN 3 forward 9:69044419-69044448; AsCpf1-1
ccagcccgtttcctcctccacttac

SEQ ID NO: 13901 - DNA, 18 bp, Artificial Sequence
  Synthetic: FXN 3 forward 9:69044432-69044454; AsCpf1-1
tcctccacttacttccca

SEQ ID NO: 13902 - DNA, 19 bp, Artificial Sequence
  Synthetic: FXN 3 forward 9:69044432-69044455; AsCpf1-1
tcctccacttacttcccag

SEQ ID NO: 13903 - DNA, 20 bp, Artificial Sequence
  Synthetic: FXN 3 forward 9:69044432-69044456; AsCpf1-1
tcctccacttacttcccagc

SEQ ID NO: 13904 - DNA, 21 bp, Artificial Sequence
  Synthetic: FXN 3 forward 9:69044432-69044457; AsCpf1-1
tcctccacttacttcccagcc

SEQ ID NO: 13905 - DNA, 22 bp, Artificial Sequence
  Synthetic: FXN 3 forward 9:69044432-69044458; AsCpf1-1
tcctccacttacttcccagccc

SEQ ID NO: 13906 - DNA, 23 bp, Artificial Sequence
  Synthetic: FXN 3 forward 9:69044432-69044459; AsCpf1-1
tcctccacttacttcccagccct

SEQ ID NO: 13907 - DNA, 24 bp, Artificial Sequence
  Synthetic: FXN 3 forward 9:69044432-69044460; AsCpf1-1
tcctccacttacttcccagccctg

SEQ ID NO: 13908 - DNA, 25 bp, Artificial Sequence
  Synthetic: FXN 3 forward 9:69044432-69044461; AsCpf1-1
tcctccacttacttcccagccctgt

SEQ ID NO: 13909 - DNA, 18 bp, Artificial Sequence
  Synthetic: FXN 3 forward 9:69044439-69044461; AsCpf1-1
cttacttcccagccctgt

SEQ ID NO: 13910 - DNA, 19 bp, Artificial Sequence
  Synthetic: FXN 3 forward 9:69044439-69044462; AsCpf1-1
cttacttcccagccctgtg

SEQ ID NO: 13911 - DNA, 20 bp, Artificial Sequence
  Synthetic: FXN 3 forward 9:69044439-69044463; AsCpf1-1
cttacttcccagccctgtgc

SEQ ID NO: 13912 - DNA, 21 bp, Artificial Sequence
  Synthetic: FXN 3 forward 9:69044439-69044464; AsCpf1-1
cttacttcccagccctgtgcc

SEQ ID NO: 13913 - DNA, 22 bp, Artificial Sequence
  Synthetic: FXN 3 forward 9:69044439-69044465; AsCpf1-1
cttacttcccagccctgtgcct

SEQ ID NO: 13914 - DNA, 23 bp, Artificial Sequence
  Synthetic: FXN 3 forward 9:69044439-69044466; AsCpf1-1
cttacttcccagccctgtgcctt

SEQ ID NO: 13915 - DNA, 24 bp, Artificial Sequence
  Synthetic: FXN 3 forward 9:69044439-69044467; AsCpf1-1
cttacttcccagccctgtgccttc

SEQ ID NO: 13916 - DNA, 25 bp, Artificial Sequence
  Synthetic: FXN 3 forward 9:69044439-69044468; AsCpf1-1
cttacttcccagccctgtgccttct

SEQ ID NO: 13917 - DNA, 18 bp, Artificial Sequence
  Synthetic: FXN 3 forward 9:69044448-69044470; AsCpf1-1
cagccctgtgccttctgc

SEQ ID NO: 13918 - DNA, 19 bp, Artificial Sequence
  Synthetic: FXN 3 forward 9:69044448-69044471; AsCpf1-1
cagccctgtgccttctgcc

SEQ ID NO: 13919 - DNA, 20 bp, Artificial Sequence
  Synthetic: FXN 3 forward 9:69044448-69044472; AsCpf1-1
cagccctgtgccttctgcct

SEQ ID NO: 13920 - DNA, 21 bp, Artificial Sequence
  Synthetic: FXN 3 forward 9:69044448-69044473; AsCpf1-1
cagccctgtgccttctgcctt

SEQ ID NO: 13921 - DNA, 22 bp, Artificial Sequence
  Synthetic: FXN 3 forward 9:69044448-69044474; AsCpf1-1
cagccctgtgccttctgccttc

SEQ ID NO: 13922 - DNA, 23 bp, Artificial Sequence
  Synthetic: FXN 3 forward 9:69044448-69044475; AsCpf1-1
cagccctgtgccttctgccttct

SEQ ID NO: 13923 - DNA, 24 bp, Artificial Sequence
  Synthetic: FXN 3 forward 9:69044448-69044476; AsCpf1-1
cagccctgtgccttctgccttctc

SEQ ID NO: 13924 - DNA, 25 bp, Artificial Sequence
  Synthetic: FXN 3 forward 9:69044448-69044477; AsCpf1-1
cagccctgtgccttctgccttctct

SEQ ID NO: 13925 - DNA, 18 bp, Artificial Sequence
  Synthetic: FXN 3 forward 9:69044449-69044471; AsCpf1-1
agccctgtgccttctgcc

SEQ ID NO: 13926 - DNA, 19 bp, Artificial Sequence
  Synthetic: FXN 3 forward 9:69044449-69044472; AsCpf1-1
agccctgtgccttctgcct

SEQ ID NO: 13927 - DNA, 20 bp, Artificial Sequence
  Synthetic: FXN 3 forward 9:69044449-69044473; AsCpf1-1
agccctgtgccttctgcctt

SEQ ID NO: 13928 - DNA, 21 bp, Artificial Sequence
  Synthetic: FXN 3 forward 9:69044449-69044474; AsCpf1-1
agccctgtgccttctgccttc

SEQ ID NO: 13929 - DNA, 22 bp, Artificial Sequence
  Synthetic: FXN 3 forward 9:69044449-69044475; AsCpf1-1
agccctgtgccttctgccttct

SEQ ID NO: 13930 - DNA, 23 bp, Artificial Sequence
  Synthetic: FXN 3 forward 9:69044449-69044476; AsCpf1-1
agccctgtgccttctgccttctc

SEQ ID NO: 13931 - DNA, 24 bp, Artificial Sequence
  Synthetic: FXN 3 forward 9:69044449-69044477; AsCpf1-1
agccctgtgccttctgccttctct

SEQ ID NO: 13932 - DNA, 25 bp, Artificial Sequence
  Synthetic: FXN 3 forward 9:69044449-69044478; AsCpf1-1
agccctgtgccttctgccttctctt

SEQ ID NO: 13933 - DNA, 18 bp, Artificial Sequence
  Synthetic: FXN 3 reverse 9:69044538-69044560; AsCpf1-1
aaggtcactggttgccat

SEQ ID NO: 13934 - DNA, 19 bp, Artificial Sequence
  Synthetic: FXN 3 reverse 9:69044538-69044561; AsCpf1-1
aaggtcactggttgccatg

SEQ ID NO: 13935 - DNA, 20 bp, Artificial Sequence
  Synthetic: FXN 3 reverse 9:69044538-69044562; AsCpf1-1
aaggtcactggttgccatgg

SEQ ID NO: 13936 - DNA, 21 bp, Artificial Sequence
  Synthetic: FXN 3 reverse 9:69044538-69044563; AsCpf1-1
aaggtcactggttgccatgga

SEQ ID NO: 13937 - DNA, 22 bp, Artificial Sequence
  Synthetic: FXN 3 reverse 9:69044538-69044564; AsCpf1-1
aaggtcactggttgccatggag

SEQ ID NO: 13938 - DNA, 23 bp, Artificial Sequence
  Synthetic: FXN 3 reverse 9:69044538-69044565; AsCpf1-1
aaggtcactggttgccatggaga

SEQ ID NO: 13939 - DNA, 24 bp, Artificial Sequence
  Synthetic: FXN 3 reverse 9:69044538-69044566; AsCpf1-1
aaggtcactggttgccatggagag

SEQ ID NO: 13940 - DNA, 25 bp, Artificial Sequence
  Synthetic: FXN 3 reverse 9:69044538-69044567; AsCpf1-1
aaggtcactggttgccatggagaga

SEQ ID NO: 13941 - DNA, 18 bp, Artificial Sequence
  Synthetic: FXN 3 forward 9:69044542-69044564; AsCpf1-1
tggcaaccagtgaccttt

SEQ ID NO: 13942 - DNA, 19 bp, Artificial Sequence
  Synthetic: FXN 3 forward 9:69044542-69044565; AsCpf1-1
tggcaaccagtgacctttg

SEQ ID NO: 13943 - DNA, 20 bp, Artificial Sequence
  Synthetic: FXN 3 forward 9:69044542-69044566; AsCpf1-1
tggcaaccagtgacctttgg

SEQ ID NO: 13944 - DNA, 21 bp, Artificial Sequence
  Synthetic: FXN 3 forward 9:69044542-69044567; AsCpf1-1
tggcaaccagtgacctttgga

SEQ ID NO: 13945 - DNA, 22 bp, Artificial Sequence
  Synthetic: FXN 3 forward 9:69044542-69044568; AsCpf1-1
tggcaaccagtgacctttggag

SEQ ID NO: 13946 - DNA, 23 bp, Artificial Sequence
  Synthetic: FXN 3 forward 9:69044542-69044569; AsCpf1-1
tggcaaccagtgacctttggaga

SEQ ID NO: 13947 - DNA, 24 bp, Artificial Sequence
  Synthetic: FXN 3 forward 9:69044542-69044570; AsCpf1-1
tggcaaccagtgacctttggagaa

SEQ ID NO: 13948 - DNA, 25 bp, Artificial Sequence
  Synthetic: FXN 3 forward 9:69044542-69044571; AsCpf1-1
tggcaaccagtgacctttggagaat

SEQ ID NO: 13949 - DNA, 18 bp, Artificial Sequence
  Synthetic: FXN 3 forward 9:69044601-69044623; AsCpf1-1
gtgccttcccaggatgac

SEQ ID NO: 13950 - DNA, 19 bp, Artificial Sequence
  Synthetic: FXN 3 forward 9:69044601-69044624; AsCpf1-1
gtgccttcccaggatgacg

SEQ ID NO: 13951 - DNA, 20 bp, Artificial Sequence
  Synthetic: FXN 3 forward 9:69044601-69044625; AsCpf1-1
gtgccttcccaggatgacgt

SEQ ID NO: 13952 - DNA, 21 bp, Artificial Sequence
  Synthetic: FXN 3 forward 9:69044601-69044626; AsCpf1-1
gtgccttcccaggatgacgtc

SEQ ID NO: 13953 - DNA, 22 bp, Artificial Sequence
  Synthetic: FXN 3 forward 9:69044601-69044627; AsCpf1-1
gtgccttcccaggatgacgtcc

SEQ ID NO: 13954 - DNA, 23 bp, Artificial Sequence
  Synthetic: FXN 3 forward 9:69044601-69044628; AsCpf1-1
gtgccttcccaggatgacgtcca

SEQ ID NO: 13955 - DNA, 24 bp, Artificial Sequence
  Synthetic: FXN 3 forward 9:69044601-69044629; AsCpf1-1
gtgccttcccaggatgacgtccag

SEQ ID NO: 13956 - DNA, 25 bp, Artificial Sequence
  Synthetic: FXN 3 forward 9:69044601-69044630; AsCpf1-1
gtgccttcccaggatgacgtccagc

SEQ ID NO: 13957 - DNA, 18 bp, Artificial Sequence
  Synthetic: FXN 3 forward 9:69044610-69044632; AsCpf1-1
caggatgacgtccagctg

SEQ ID NO: 13958 - DNA, 19 bp, Artificial Sequence
  Synthetic: FXN 3 forward 9:69044610-69044633; AsCpf1-1
caggatgacgtccagctga

SEQ ID NO: 13959 - DNA, 20 bp, Artificial Sequence
  Synthetic: FXN 3 forward 9:69044610-69044634; AsCpf1-1
caggatgacgtccagctgag

SEQ ID NO: 13960 - DNA, 21 bp, Artificial Sequence
  Synthetic: FXN 3 forward 9:69044610-69044635; AsCpf1-1
caggatgacgtccagctgagg

SEQ ID NO: 13961 - DNA, 22 bp, Artificial Sequence
  Synthetic: FXN 3 forward 9:69044610-69044636; AsCpf1-1
caggatgacgtccagctgaggt

SEQ ID NO: 13962 - DNA, 23 bp, Artificial Sequence
  Synthetic: FXN 3 forward 9:69044610-69044637; AsCpf1-1
caggatgacgtccagctgaggtc

SEQ ID NO: 13963 - DNA, 24 bp, Artificial Sequence
  Synthetic: FXN 3 forward 9:69044610-69044638; AsCpf1-1
caggatgacgtccagctgaggtcc

SEQ ID NO: 13964 - DNA, 25 bp, Artificial Sequence
  Synthetic: FXN 3 forward 9:69044610-69044639; AsCpf1-1
caggatgacgtccagctgaggtcct

SEQ ID NO: 13965 - DNA, 18 bp, Artificial Sequence
  Synthetic: FXN 3 forward 9:69044611-69044633; AsCpf1-1
aggatgacgtccagctga

SEQ ID NO: 13966 - DNA, 19 bp, Artificial Sequence
  Synthetic: FXN 3 forward 9:69044611-69044634; AsCpf1-1
aggatgacgtccagctgag

SEQ ID NO: 13967 - DNA, 20 bp, Artificial Sequence
  Synthetic: FXN 3 forward 9:69044611-69044635; AsCpf1-1
aggatgacgtccagctgagg

SEQ ID NO: 13968 - DNA, 21 bp, Artificial Sequence
  Synthetic: FXN 3 forward 9:69044611-69044636; AsCpf1-1
aggatgacgtccagctgaggt

SEQ ID NO: 13969 - DNA, 22 bp, Artificial Sequence
  Synthetic: FXN 3 forward 9:69044611-69044637; AsCpf1-1
aggatgacgtccagctgaggtc

SEQ ID NO: 13970 - DNA, 23 bp, Artificial Sequence
  Synthetic: FXN 3 forward 9:69044611-69044638; AsCpf1-1
aggatgacgtccagctgaggtcc

SEQ ID NO: 13971 - DNA, 24 bp, Artificial Sequence
  Synthetic: FXN 3 forward 9:69044611-69044639; AsCpf1-1
aggatgacgtccagctgaggtcct

SEQ ID NO: 13972 - DNA, 25 bp, Artificial Sequence
  Synthetic: FXN 3 forward 9:69044611-69044640; AsCpf1-1
aggatgacgtccagctgaggtcctt

SEQ ID NO: 13973 - DNA, 18 bp, Artificial Sequence
  Synthetic: FXN 3 forward 9:69044624-69044646; AsCpf1-1
gctgaggtccttggcaag

SEQ ID NO: 13974 - DNA, 19 bp, Artificial Sequence
  Synthetic: FXN 3 forward 9:69044624-69044647; AsCpf1-1
gctgaggtccttggcaaga

SEQ ID NO: 13975 - DNA, 20 bp, Artificial Sequence
  Synthetic: FXN 3 forward 9:69044624-69044648; AsCpf1-1
gctgaggtccttggcaagac

SEQ ID NO: 13976 - DNA, 21 bp, Artificial Sequence
  Synthetic: FXN 3 forward 9:69044624-69044649; AsCpf1-1
gctgaggtccttggcaagacc

SEQ ID NO: 13977 - DNA, 22 bp, Artificial Sequence
  Synthetic: FXN 3 forward 9:69044624-69044650; AsCpf1-1
gctgaggtccttggcaagaccc

SEQ ID NO: 13978 - DNA, 23 bp, Artificial Sequence
  Synthetic: FXN 3 forward 9:69044624-69044651; AsCpf1-1
gctgaggtccttggcaagaccca

SEQ ID NO: 13979 - DNA, 24 bp, Artificial Sequence
  Synthetic: FXN 3 forward 9:69044624-69044652; AsCpf1-1
gctgaggtccttggcaagacccag

SEQ ID NO: 13980 - DNA, 25 bp, Artificial Sequence
  Synthetic: FXN 3 forward 9:69044624-69044653; AsCpf1-1
gctgaggtccttggcaagacccagg

SEQ ID NO: 13981 - DNA, 18 bp, Artificial Sequence
  Synthetic: FXN 3 forward 9:69044668-69044690; AsCpf1-1
tcacctcccctgtcacct

SEQ ID NO: 13982 - DNA, 19 bp, Artificial Sequence
  Synthetic: FXN 3 forward 9:69044668-69044691; AsCpf1-1
tcacctcccctgtcacctc

SEQ ID NO: 13983 - DNA, 20 bp, Artificial Sequence
  Synthetic: FXN 3 forward 9:69044668-69044692; AsCpf1-1
tcacctcccctgtcacctcc

SEQ ID NO: 13984 - DNA, 21 bp, Artificial Sequence
  Synthetic: FXN 3 forward 9:69044668-69044693; AsCpf1-1
tcacctcccctgtcacctccc

SEQ ID NO: 13985 - DNA, 22 bp, Artificial Sequence
  Synthetic: FXN 3 forward 9:69044668-69044694; AsCpf1-1
tcacctcccctgtcacctcccc

SEQ ID NO: 13986 - DNA, 23 bp, Artificial Sequence
  Synthetic: FXN 3 forward 9:69044668-69044695; AsCpf1-1
tcacctcccctgtcacctcccct

SEQ ID NO: 13987 - DNA, 24 bp, Artificial Sequence
  Synthetic: FXN 3 forward 9:69044668-69044696; AsCpf1-1
tcacctcccctgtcacctcccctg

SEQ ID NO: 13988 - DNA, 25 bp, Artificial Sequence
  Synthetic: FXN 3 forward 9:69044668-69044697; AsCpf1-1
tcacctcccctgtcacctcccctgc

SEQ ID NO: 13989 - DNA, 18 bp, Artificial Sequence
  Synthetic: FXN 3 forward 9:69044677-69044699; AsCpf1-1
ctgtcacctcccctgcat

SEQ ID NO: 13990 - DNA, 19 bp, Artificial Sequence
  Synthetic: FXN 3 forward 9:69044677-69044700; AsCpf1-1
ctgtcacctcccctgcatc

SEQ ID NO: 13991 - DNA, 20 bp, Artificial Sequence
  Synthetic: FXN 3 forward 9:69044677-69044701; AsCpf1-1
ctgtcacctcccctgcatct

SEQ ID NO: 13992 - DNA, 21 bp, Artificial Sequence
  Synthetic: FXN 3 forward 9:69044677-69044702; AsCpf1-1
ctgtcacctcccctgcatctc

SEQ ID NO: 13993 - DNA, 22 bp, Artificial Sequence
  Synthetic: FXN 3 forward 9:69044677-69044703; AsCpf1-1
ctgtcacctcccctgcatctcc

SEQ ID NO: 13994 - DNA, 23 bp, Artificial Sequence
  Synthetic: FXN 3 forward 9:69044677-69044704; AsCpf1-1
ctgtcacctcccctgcatctccc

SEQ ID NO: 13995 - DNA, 24 bp, Artificial Sequence
  Synthetic: FXN 3 forward 9:69044677-69044705; AsCpf1-1
ctgtcacctcccctgcatctccct

SEQ ID NO: 13996 - DNA, 25 bp, Artificial Sequence
  Synthetic: FXN 3 forward 9:69044677-69044706; AsCpf1-1
ctgtcacctcccctgcatctcccta

SEQ ID NO: 13997 - DNA, 18 bp, Artificial Sequence
  Synthetic: FXN 3 forward 9:69044689-69044711; AsCpf1-1
ctgcatctccctactcca

SEQ ID NO: 13998 - DNA, 19 bp, Artificial Sequence
  Synthetic: FXN 3 forward 9:69044689-69044712; AsCpf1-1
ctgcatctccctactccag

SEQ ID NO: 13999 - DNA, 20 bp, Artificial Sequence
  Synthetic: FXN 3 forward 9:69044689-69044713; AsCpf1-1
ctgcatctccctactccagc

SEQ ID NO: 14000 - DNA, 21 bp, Artificial Sequence
  Synthetic: FXN 3 forward 9:69044689-69044714; AsCpf1-1
ctgcatctccctactccagct

SEQ ID NO: 14001 - DNA, 22 bp, Artificial Sequence
  Synthetic: FXN 3 forward 9:69044689-69044715; AsCpf1-1
ctgcatctccctactccagctg

SEQ ID NO: 14002 - DNA, 23 bp, Artificial Sequence
  Synthetic: FXN 3 forward 9:69044689-69044716; AsCpf1-1
ctgcatctccctactccagctgc

SEQ ID NO: 14003 - DNA, 24 bp, Artificial Sequence
  Synthetic: FXN 3 forward 9:69044689-69044717; AsCpf1-1
ctgcatctccctactccagctgca

SEQ ID NO: 14004 - DNA, 25 bp, Artificial Sequence
  Synthetic: FXN 3 forward 9:69044689-69044718; AsCpf1-1
ctgcatctccctactccagctgcac

SEQ ID NO: 14005 - DNA, 18 bp, Artificial Sequence
  Synthetic: FXN 3 forward 9:69044700-69044722; AsCpf1-1
tactccagctgcaccact

SEQ ID NO: 14006 - DNA, 19 bp, Artificial Sequence
  Synthetic: FXN 3 forward 9:69044700-69044723; AsCpf1-1
tactccagctgcaccactc

SEQ ID NO: 14007 - DNA, 20 bp, Artificial Sequence
  Synthetic: FXN 3 forward 9:69044700-69044724; AsCpf1-1
tactccagctgcaccactct

SEQ ID NO: 14008 - DNA, 21 bp, Artificial Sequence
  Synthetic: FXN 3 forward 9:69044700-69044725; AsCpf1-1
tactccagctgcaccactctt

SEQ ID NO: 14009 - DNA, 22 bp, Artificial Sequence
  Synthetic: FXN 3 forward 9:69044700-69044726; AsCpf1-1
tactccagctgcaccactcttg

SEQ ID NO: 14010 - DNA, 23 bp, Artificial Sequence
  Synthetic: FXN 3 forward 9:69044700-69044727; AsCpf1-1
tactccagctgcaccactcttgt

SEQ ID NO: 14011 - DNA, 24 bp, Artificial Sequence
  Synthetic: FXN 3 forward 9:69044700-69044728; AsCpf1-1
tactccagctgcaccactcttgtg

SEQ ID NO: 14012 - DNA, 25 bp, Artificial Sequence
  Synthetic: FXN 3 forward 9:69044700-69044729; AsCpf1-1
tactccagctgcaccactcttgtgc

SEQ ID NO: 14013 - DNA, 18 bp, Artificial Sequence
  Synthetic: FXN 3 forward 9:69044707-69044729; AsCpf1-1
gctgcaccactcttgtgc

SEQ ID NO: 14014 - DNA, 19 bp, Artificial Sequence
  Synthetic: FXN 3 forward 9:69044707-69044730; AsCpf1-1
gctgcaccactcttgtgcc

SEQ ID NO: 14015 - DNA, 20 bp, Artificial Sequence
  Synthetic: FXN 3 forward 9:69044707-69044731; AsCpf1-1
gctgcaccactcttgtgccc

SEQ ID NO: 14016 - DNA, 21 bp, Artificial Sequence
  Synthetic: FXN 3 forward 9:69044707-69044732; AsCpf1-1
gctgcaccactcttgtgcccc

SEQ ID NO: 14017 - DNA, 22 bp, Artificial Sequence
  Synthetic: FXN 3 forward 9:69044707-69044733; AsCpf1-1
gctgcaccactcttgtgcccca

SEQ ID NO: 14018 - DNA, 23 bp, Artificial Sequence
  Synthetic: FXN 3 forward 9:69044707-69044734; AsCpf1-1
gctgcaccactcttgtgccccag

SEQ ID NO: 14019 - DNA, 24 bp, Artificial Sequence
  Synthetic: FXN 3 forward 9:69044707-69044735; AsCpf1-1
gctgcaccactcttgtgccccagt

SEQ ID NO: 14020 - DNA, 25 bp, Artificial Sequence
  Synthetic: FXN 3 forward 9:69044707-69044736; AsCpf1-1
gctgcaccactcttgtgccccagtg

SEQ ID NO: 14021 - DNA, 18 bp, Artificial Sequence
  Synthetic: FXN 3 forward 9:69044752-69044774; AsCpf1-1
ttcatctccccagctggt

SEQ ID NO: 14022 - DNA, 19 bp, Artificial Sequence
  Synthetic: FXN 3 forward 9:69044752-69044775; AsCpf1-1
ttcatctccccagctggtc

SEQ ID NO: 14023 - DNA, 20 bp, Artificial Sequence
  Synthetic: FXN 3 forward 9:69044752-69044776; AsCpf1-1
ttcatctccccagctggtca

SEQ ID NO: 14024 - DNA, 21 bp, Artificial Sequence
  Synthetic: FXN 3 forward 9:69044752-69044777; AsCpf1-1
ttcatctccccagctggtcag

SEQ ID NO: 14025 - DNA, 22 bp, Artificial Sequence
  Synthetic: FXN 3 forward 9:69044752-69044778; AsCpf1-1
ttcatctccccagctggtcagc

SEQ ID NO: 14026 - DNA, 23 bp, Artificial Sequence
  Synthetic: FXN 3 forward 9:69044752-69044779; AsCpf1-1
ttcatctccccagctggtcagca

SEQ ID NO: 14027 - DNA, 24 bp, Artificial Sequence
  Synthetic: FXN 3 forward 9:69044752-69044780; AsCpf1-1
ttcatctccccagctggtcagcag

SEQ ID NO: 14028 - DNA, 25 bp, Artificial Sequence
  Synthetic: FXN 3 forward 9:69044752-69044781; AsCpf1-1
ttcatctccccagctggtcagcaga

SEQ ID NO: 14029 - DNA, 18 bp, Artificial Sequence
  Synthetic: FXN 3 forward 9:69044756-69044778; AsCpf1-1
tctccccagctggtcagc

SEQ ID NO: 14030 - DNA, 19 bp, Artificial Sequence
  Synthetic: FXN 3 forward 9:69044756-69044779; AsCpf1-1
tctccccagctggtcagca

SEQ ID NO: 14031 - DNA, 20 bp, Artificial Sequence
  Synthetic: FXN 3 forward 9:69044756-69044780; AsCpf1-1
tctccccagctggtcagcag

SEQ ID NO: 14032 - DNA, 21 bp, Artificial Sequence
  Synthetic: FXN 3 forward 9:69044756-69044781; AsCpf1-1
tctccccagctggtcagcaga

SEQ ID NO: 14033 - DNA, 22 bp, Artificial Sequence
  Synthetic: FXN 3 forward 9:69044756-69044782; AsCpf1-1
tctccccagctggtcagcagag

SEQ ID NO: 14034 - DNA, 23 bp, Artificial Sequence
  Synthetic: FXN 3 forward 9:69044756-69044783; AsCpf1-1
tctccccagctggtcagcagagc

SEQ ID NO: 14035 - DNA, 24 bp, Artificial Sequence
  Synthetic: FXN 3 forward 9:69044756-69044784; AsCpf1-1
tctccccagctggtcagcagagct

SEQ ID NO: 14036 - DNA, 25 bp, Artificial Sequence
  Synthetic: FXN 3 forward 9:69044756-69044785; AsCpf1-1
tctccccagctggtcagcagagctg

SEQ ID NO: 14037 - DNA, 18 bp, Artificial Sequence
  Synthetic: FXN 3 forward 9:69044762-69044784; AsCpf1-1
cagctggtcagcagagct

SEQ ID NO: 14038 - DNA, 19 bp, Artificial Sequence
  Synthetic: FXN 3 forward 9:69044762-69044785; AsCpf1-1
cagctggtcagcagagctg

SEQ ID NO: 14039 - DNA, 20 bp, Artificial Sequence
  Synthetic: FXN 3 forward 9:69044762-69044786; AsCpf1-1
cagctggtcagcagagctgg

SEQ ID NO: 14040 - DNA, 21 bp, Artificial Sequence
  Synthetic: FXN 3 forward 9:69044762-69044787; AsCpf1-1
cagctggtcagcagagctggt

SEQ ID NO: 14041 - DNA, 22 bp, Artificial Sequence
  Synthetic: FXN 3 forward 9:69044762-69044788; AsCpf1-1
cagctggtcagcagagctggtg

SEQ ID NO: 14042 - DNA, 23 bp, Artificial Sequence
  Synthetic: FXN 3 forward 9:69044762-69044789; AsCpf1-1
cagctggtcagcagagctggtgg

SEQ ID NO: 14043 - DNA, 24 bp, Artificial Sequence
  Synthetic: FXN 3 forward 9:69044762-69044790; AsCpf1-1
cagctggtcagcagagctggtggt

SEQ ID NO: 14044 - DNA, 25 bp, Artificial Sequence
  Synthetic: FXN 3 forward 9:69044762-69044791; AsCpf1-1
cagctggtcagcagagctggtggta

SEQ ID NO: 14045 - DNA, 18 bp, Artificial Sequence
  Synthetic: FXN 3 reverse 9:69044787-69044809; AsCpf1-1
ggtgacagggtctgagtt

SEQ ID NO: 14046 - DNA, 19 bp, Artificial Sequence
  Synthetic: FXN 3 reverse 9:69044787-69044810; AsCpf1-1
ggtgacagggtctgagttg

SEQ ID NO: 14047 - DNA, 20 bp, Artificial Sequence
  Synthetic: FXN 3 reverse 9:69044787-69044811; AsCpf1-1
ggtgacagggtctgagttga

SEQ ID NO: 14048 - DNA, 21 bp, Artificial Sequence
  Synthetic: FXN 3 reverse 9:69044787-69044812; AsCpf1-1
ggtgacagggtctgagttgat

SEQ ID NO: 14049 - DNA, 22 bp, Artificial Sequence
  Synthetic: FXN 3 reverse 9:69044787-69044813; AsCpf1-1
ggtgacagggtctgagttgatt

SEQ ID NO: 14050 - DNA, 23 bp, Artificial Sequence
  Synthetic: FXN 3 reverse 9:69044787-69044814; AsCpf1-1
ggtgacagggtctgagttgatta

SEQ ID NO: 14051 - DNA, 24 bp, Artificial Sequence
  Synthetic: FXN 3 reverse 9:69044787-69044815; AsCpf1-1
ggtgacagggtctgagttgattac

SEQ ID NO: 14052 - DNA, 25 bp, Artificial Sequence
  Synthetic: FXN 3 reverse 9:69044787-69044816; AsCpf1-1
ggtgacagggtctgagttgattacc

SEQ ID NO: 14053 - DNA, 18 bp, Artificial Sequence
  Synthetic: FXN 3 reverse 9:69044804-69044826; AsCpf1-1
taactgctggacatccag

SEQ ID NO: 14054 - DNA, 19 bp, Artificial Sequence
  Synthetic: FXN 3 reverse 9:69044804-69044827; AsCpf1-1
taactgctggacatccagg

SEQ ID NO: 14055 - DNA, 20 bp, Artificial Sequence
  Synthetic: FXN 3 reverse 9:69044804-69044828; AsCpf1-1
taactgctggacatccaggt

SEQ ID NO: 14056 - DNA, 21 bp, Artificial Sequence
  Synthetic: FXN 3 reverse 9:69044804-69044829; AsCpf1-1
taactgctggacatccaggtg

SEQ ID NO: 14057 - DNA, 22 bp, Artificial Sequence
  Synthetic: FXN 3 reverse 9:69044804-69044830; AsCpf1-1
taactgctggacatccaggtga

SEQ ID NO: 14058 - DNA, 23 bp, Artificial Sequence
  Synthetic: FXN 3 reverse 9:69044804-69044831; AsCpf1-1
taactgctggacatccaggtgac

SEQ ID NO: 14059 - DNA, 24 bp, Artificial Sequence
  Synthetic: FXN 3 reverse 9:69044804-69044832; AsCpf1-1
taactgctggacatccaggtgaca

SEQ ID NO: 14060 - DNA, 25 bp, Artificial Sequence
  Synthetic: FXN 3 reverse 9:69044804-69044833; AsCpf1-1
taactgctggacatccaggtgacag

SEQ ID NO: 14061 - DNA, 18 bp, Artificial Sequence
  Synthetic: FXN 3 forward 9:69044818-69044840; AsCpf1-1
gcagttagggactaaaaa

SEQ ID NO: 14062 - DNA, 19 bp, Artificial Sequence
  Synthetic: FXN 3 forward 9:69044818-69044841; AsCpf1-1
gcagttagggactaaaaaa

SEQ ID NO: 14063 - DNA, 20 bp, Artificial Sequence
  Synthetic: FXN 3 forward 9:69044818-69044842; AsCpf1-1
gcagttagggactaaaaaaa

SEQ ID NO: 14064 - DNA, 21 bp, Artificial Sequence
  Synthetic: FXN 3 forward 9:69044818-69044843; AsCpf1-1
gcagttagggactaaaaaaaa

SEQ ID NO: 14065 - DNA, 22 bp, Artificial Sequence
  Synthetic: FXN 3 forward 9:69044818-69044844; AsCpf1-1
gcagttagggactaaaaaaaat

SEQ ID NO: 14066 - DNA, 23 bp, Artificial Sequence
  Synthetic: FXN 3 forward 9:69044818-69044845; AsCpf1-1
gcagttagggactaaaaaaaatc

SEQ ID NO: 14067 - DNA, 24 bp, Artificial Sequence
  Synthetic: FXN 3 forward 9:69044818-69044846; AsCpf1-1
gcagttagggactaaaaaaaatca

SEQ ID NO: 14068 - DNA, 25 bp, Artificial Sequence
  Synthetic: FXN 3 forward 9:69044818-69044847; AsCpf1-1
gcagttagggactaaaaaaaatcaa

SEQ ID NO: 14069 - DNA, 18 bp, Artificial Sequence
  Synthetic: FXN 3 reverse 9:69044897-69044919; AsCpf1-1
gaagatttggctctgact

SEQ ID NO: 14070 - DNA, 19 bp, Artificial Sequence
  Synthetic: FXN 3 reverse 9:69044897-69044920; AsCpf1-1
gaagatttggctctgactg

SEQ ID NO: 14071 - DNA, 20 bp, Artificial Sequence
  Synthetic: FXN 3 reverse 9:69044897-69044921; AsCpf1-1
gaagatttggctctgactgc

SEQ ID NO: 14072 - DNA, 21 bp, Artificial Sequence
  Synthetic: FXN 3 reverse 9:69044897-69044922; AsCpf1-1
gaagatttggctctgactgct

SEQ ID NO: 14073 - DNA, 22 bp, Artificial Sequence
  Synthetic: FXN 3 reverse 9:69044897-69044923; AsCpf1-1
gaagatttggctctgactgctg

SEQ ID NO: 14074 - DNA, 23 bp, Artificial Sequence
  Synthetic: FXN 3 reverse 9:69044897-69044924; AsCpf1-1
gaagatttggctctgactgctga

SEQ ID NO: 14075 - DNA, 24 bp, Artificial Sequence
  Synthetic: FXN 3 reverse 9:69044897-69044925; AsCpf1-1
gaagatttggctctgactgctgac

SEQ ID NO: 14076 - DNA, 25 bp, Artificial Sequence
  Synthetic: FXN 3 reverse 9:69044897-69044926; AsCpf1-1
gaagatttggctctgactgctgact

SEQ ID NO: 14077 - DNA, 18 bp, Artificial Sequence
  Synthetic: FXN 3 forward 9:69044927-69044949; AsCpf1-1
gcaggattctgcctcttg

SEQ ID NO: 14078 - DNA, 19 bp, Artificial Sequence
  Synthetic: FXN 3 forward 9:69044927-69044950; AsCpf1-1
gcaggattctgcctcttgc

SEQ ID NO: 14079 - DNA, 20 bp, Artificial Sequence
  Synthetic: FXN 3 forward 9:69044927-69044951; AsCpf1-1
gcaggattctgcctcttgct

SEQ ID NO: 14080 - DNA, 21 bp, Artificial Sequence
  Synthetic: FXN 3 forward 9:69044927-69044952; AsCpf1-1
gcaggattctgcctcttgcta

SEQ ID NO: 14081 - DNA, 22 bp, Artificial Sequence
  Synthetic: FXN 3 forward 9:69044927-69044953; AsCpf1-1
gcaggattctgcctcttgctat

SEQ ID NO: 14082 - DNA, 23 bp, Artificial Sequence
  Synthetic: FXN 3 forward 9:69044927-69044954; AsCpf1-1
gcaggattctgcctcttgctatt

SEQ ID NO: 14083 - DNA, 24 bp, Artificial Sequence
  Synthetic: FXN 3 forward 9:69044927-69044955; AsCpf1-1
gcaggattctgcctcttgctattt

SEQ ID NO: 14084 - DNA, 25 bp, Artificial Sequence
  Synthetic: FXN 3 forward 9:69044927-69044956; AsCpf1-1
gcaggattctgcctcttgctatttc

SEQ ID NO: 14085 - DNA, 18 bp, Artificial Sequence
  Synthetic: FXN 3 forward 9:69044953-69044975; AsCpf1-1
tgttgcctctcttagtga

SEQ ID NO: 14086 - DNA, 19 bp, Artificial Sequence
  Synthetic: FXN 3 forward 9:69044953-69044976; AsCpf1-1
tgttgcctctcttagtgac

SEQ ID NO: 14087 - DNA, 20 bp, Artificial Sequence
  Synthetic: FXN 3 forward 9:69044953-69044977; AsCpf1-1
tgttgcctctcttagtgacc

SEQ ID NO: 14088 - DNA, 21 bp, Artificial Sequence
  Synthetic: FXN 3 forward 9:69044953-69044978; AsCpf1-1
tgttgcctctcttagtgacct

SEQ ID NO: 14089 - DNA, 22 bp, Artificial Sequence
  Synthetic: FXN 3 forward 9:69044953-69044979; AsCpf1-1
tgttgcctctcttagtgacctt

SEQ ID NO: 14090 - DNA, 23 bp, Artificial Sequence
  Synthetic: FXN 3 forward 9:69044953-69044980; AsCpf1-1
tgttgcctctcttagtgaccttt

SEQ ID NO: 14091 - DNA, 24 bp, Artificial Sequence
  Synthetic: FXN 3 forward 9:69044953-69044981; AsCpf1-1
tgttgcctctcttagtgacctttt

SEQ ID NO: 14092 - DNA, 25 bp, Artificial Sequence
  Synthetic: FXN 3 forward 9:69044953-69044982; AsCpf1-1
tgttgcctctcttagtgacctttta

SEQ ID NO: 14093 - DNA, 18 bp, Artificial Sequence
  Synthetic: FXN 3 reverse 9:69044966-69044988; AsCpf1-1
caatgctcttaaaaggtc

SEQ ID NO: 14094 - DNA, 19 bp, Artificial Sequence
  Synthetic: FXN 3 reverse 9:69044966-69044989; AsCpf1-1
caatgctcttaaaaggtca

SEQ ID NO: 14095 - DNA, 20 bp, Artificial Sequence
  Synthetic: FXN 3 reverse 9:69044966-69044990; AsCpf1-1
caatgctcttaaaaggtcac

SEQ ID NO: 14096 - DNA, 21 bp, Artificial Sequence
  Synthetic: FXN 3 reverse 9:69044966-69044991; AsCpf1-1
caatgctcttaaaaggtcact

SEQ ID NO: 14097 - DNA, 22 bp, Artificial Sequence
  Synthetic: FXN 3 reverse 9:69044966-69044992; AsCpf1-1
caatgctcttaaaaggtcacta

SEQ ID NO: 14098 - DNA, 23 bp, Artificial Sequence
  Synthetic: FXN 3 reverse 9:69044966-69044993; AsCpf1-1
caatgctcttaaaaggtcactaa

SEQ ID NO: 14099 - DNA, 24 bp, Artificial Sequence
  Synthetic: FXN 3 reverse 9:69044966-69044994; AsCpf1-1
caatgctcttaaaaggtcactaag

SEQ ID NO: 14100 - DNA, 25 bp, Artificial Sequence
  Synthetic: FXN 3 reverse 9:69044966-69044995; AsCpf1-1
caatgctcttaaaaggtcactaaga

SEQ ID NO: 14101 - DNA, 18 bp, Artificial Sequence
  Synthetic: FXN 3 forward 9:69044999-69045021; AsCpf1-1
agcctcctgctaaccacc

SEQ ID NO: 14102 - DNA, 19 bp, Artificial Sequence
  Synthetic: FXN 3 forward 9:69044999-69045022; AsCpf1-1
agcctcctgctaaccaccc

SEQ ID NO: 14103 - DNA, 20 bp, Artificial Sequence
  Synthetic: FXN 3 forward 9:69044999-69045023; AsCpf1-1
agcctcctgctaaccaccct

SEQ ID NO: 14104 - DNA, 21 bp, Artificial Sequence
  Synthetic: FXN 3 forward 9:69044999-69045024; AsCpf1-1
agcctcctgctaaccaccctg

SEQ ID NO: 14105 - DNA, 22 bp, Artificial Sequence
  Synthetic: FXN 3 forward 9:69044999-69045025; AsCpf1-1
agcctcctgctaaccaccctgt

SEQ ID NO: 14106 - DNA, 23 bp, Artificial Sequence
  Synthetic: FXN 3 forward 9:69044999-69045026; AsCpf1-1
agcctcctgctaaccaccctgta

SEQ ID NO: 14107 - DNA, 24 bp, Artificial Sequence
  Synthetic: FXN 3 forward 9:69044999-69045027; AsCpf1-1
agcctcctgctaaccaccctgtaa

SEQ ID NO: 14108 - DNA, 25 bp, Artificial Sequence
  Synthetic: FXN 3 forward 9:69044999-69045028; AsCpf1-1
agcctcctgctaaccaccctgtaac

SEQ ID NO: 14109 - DNA, 18 bp, Artificial Sequence
  Synthetic: FXN 3 reverse 9:69045004-69045026; AsCpf1-1
ggttacagggtggttagc

SEQ ID NO: 14110 - DNA, 19 bp, Artificial Sequence
  Synthetic: FXN 3 reverse 9:69045004-69045027; AsCpf1-1
ggttacagggtggttagca

SEQ ID NO: 14111 - DNA, 20 bp, Artificial Sequence
  Synthetic: FXN 3 reverse 9:69045004-69045028; AsCpf1-1
ggttacagggtggttagcag

SEQ ID NO: 14112 - DNA, 21 bp, Artificial Sequence
  Synthetic: FXN 3 reverse 9:69045004-69045029; AsCpf1-1
ggttacagggtggttagcagg

SEQ ID NO: 14113 - DNA, 22 bp, Artificial Sequence
  Synthetic: FXN 3 reverse 9:69045004-69045030; AsCpf1-1
ggttacagggtggttagcagga

SEQ ID NO: 14114 - DNA, 23 bp, Artificial Sequence
  Synthetic: FXN 3 reverse 9:69045004-69045031; AsCpf1-1
ggttacagggtggttagcaggag

SEQ ID NO: 14115 - DNA, 24 bp, Artificial Sequence
  Synthetic: FXN 3 reverse 9:69045004-69045032; AsCpf1-1
ggttacagggtggttagcaggagg

SEQ ID NO: 14116 - DNA, 25 bp, Artificial Sequence
  Synthetic: FXN 3 reverse 9:69045004-69045033; AsCpf1-1
ggttacagggtggttagcaggaggc

SEQ ID NO: 14117 - DNA, 18 bp, Artificial Sequence
  Synthetic: FXN 3 reverse 9:69045049-69045071; AsCpf1-1
tcacatcaggaagttcta

SEQ ID NO: 14118 - DNA, 19 bp, Artificial Sequence
  Synthetic: FXN 3 reverse 9:69045049-69045072; AsCpf1-1
tcacatcaggaagttctac

SEQ ID NO: 14119 - DNA, 20 bp, Artificial Sequence
  Synthetic: FXN 3 reverse 9:69045049-69045073; AsCpf1-1
tcacatcaggaagttctact

SEQ ID NO: 14120 - DNA, 21 bp, Artificial Sequence
  Synthetic: FXN 3 reverse 9:69045049-69045074; AsCpf1-1
tcacatcaggaagttctactg

SEQ ID NO: 14121 - DNA, 22 bp, Artificial Sequence
  Synthetic: FXN 3 reverse 9:69045049-69045075; AsCpf1-1
tcacatcaggaagttctactgg

SEQ ID NO: 14122 - DNA, 23 bp, Artificial Sequence
  Synthetic: FXN 3 reverse 9:69045049-69045076; AsCpf1-1
tcacatcaggaagttctactggg

SEQ ID NO: 14123 - DNA, 24 bp, Artificial Sequence
  Synthetic: FXN 3 reverse 9:69045049-69045077; AsCpf1-1
tcacatcaggaagttctactgggc

SEQ ID NO: 14124 - DNA, 25 bp, Artificial Sequence
  Synthetic: FXN 3 reverse 9:69045049-69045078; AsCpf1-1
tcacatcaggaagttctactgggca

SEQ ID NO: 14125 - DNA, 18 bp, Artificial Sequence
  Synthetic: FXN 3 reverse 9:69045050-69045072; AsCpf1-1
atcacatcaggaagttct

SEQ ID NO: 14126 - DNA, 19 bp, Artificial Sequence
  Synthetic: FXN 3 reverse 9:69045050-69045073; AsCpf1-1
atcacatcaggaagttcta

SEQ ID NO: 14127 - DNA, 20 bp, Artificial Sequence
  Synthetic: FXN 3 reverse 9:69045050-69045074; AsCpf1-1
atcacatcaggaagttctac

SEQ ID NO: 14128 - DNA, 21 bp, Artificial Sequence
  Synthetic: FXN 3 reverse 9:69045050-69045075; AsCpf1-1
atcacatcaggaagttctact

SEQ ID NO: 14129 - DNA, 22 bp, Artificial Sequence
  Synthetic: FXN 3 reverse 9:69045050-69045076; AsCpf1-1
atcacatcaggaagttctactg

SEQ ID NO: 14130 - DNA, 23 bp, Artificial Sequence
  Synthetic: FXN 3 reverse 9:69045050-69045077; AsCpf1-1
atcacatcaggaagttctactgg

SEQ ID NO: 14131 - DNA, 24 bp, Artificial Sequence
  Synthetic: FXN 3 reverse 9:69045050-69045078; AsCpf1-1
atcacatcaggaagttctactggg

SEQ ID NO: 14132 - DNA, 25 bp, Artificial Sequence
  Synthetic: FXN 3 reverse 9:69045050-69045079; AsCpf1-1
atcacatcaggaagttctactgggc

SEQ ID NO: 14133 - DNA, 18 bp, Artificial Sequence
  Synthetic: FXN 3 forward 9:69045062-69045084; AsCpf1-1
tgatgtgatggaaatgct

SEQ ID NO: 14134 - DNA, 19 bp, Artificial Sequence
  Synthetic: FXN 3 forward 9:69045062-69045085; AsCpf1-1
tgatgtgatggaaatgctg

SEQ ID NO: 14135 - DNA, 20 bp, Artificial Sequence
  Synthetic: FXN 3 forward 9:69045062-69045086; AsCpf1-1
tgatgtgatggaaatgctgt

SEQ ID NO: 14136 - DNA, 21 bp, Artificial Sequence
  Synthetic: FXN 3 forward 9:69045062-69045087; AsCpf1-1
tgatgtgatggaaatgctgtg

SEQ ID NO: 14137 - DNA, 22 bp, Artificial Sequence
  Synthetic: FXN 3 forward 9:69045062-69045088; AsCpf1-1
tgatgtgatggaaatgctgtgt

SEQ ID NO: 14138 - DNA, 23 bp, Artificial Sequence
  Synthetic: FXN 3 forward 9:69045062-69045089; AsCpf1-1
tgatgtgatggaaatgctgtgtc

SEQ ID NO: 14139 - DNA, 24 bp, Artificial Sequence
  Synthetic: FXN 3 forward 9:69045062-69045090; AsCpf1-1
tgatgtgatggaaatgctgtgtct

SEQ ID NO: 14140 - DNA, 25 bp, Artificial Sequence
  Synthetic: FXN 3 forward 9:69045062-69045091; AsCpf1-1
tgatgtgatggaaatgctgtgtctg

SEQ ID NO: 14141 - DNA, 18 bp, Artificial Sequence
  Synthetic: FXN 3 reverse 9:69045097-69045119; AsCpf1-1
agaatcctgtggccacat

SEQ ID NO: 14142 - DNA, 19 bp, Artificial Sequence
  Synthetic: FXN 3 reverse 9:69045097-69045120; AsCpf1-1
agaatcctgtggccacatg

SEQ ID NO: 14143 - DNA, 20 bp, Artificial Sequence
  Synthetic: FXN 3 reverse 9:69045097-69045121; AsCpf1-1
agaatcctgtggccacatgt

SEQ ID NO: 14144 - DNA, 21 bp, Artificial Sequence
  Synthetic: FXN 3 reverse 9:69045097-69045122; AsCpf1-1
agaatcctgtggccacatgtg

SEQ ID NO: 14145 - DNA, 22 bp, Artificial Sequence
  Synthetic: FXN 3 reverse 9:69045097-69045123; AsCpf1-1
agaatcctgtggccacatgtgg

SEQ ID NO: 14146 - DNA, 23 bp, Artificial Sequence
  Synthetic: FXN 3 reverse 9:69045097-69045124; AsCpf1-1
agaatcctgtggccacatgtggc

SEQ ID NO: 14147 - DNA, 24 bp, Artificial Sequence
  Synthetic: FXN 3 reverse 9:69045097-69045125; AsCpf1-1
agaatcctgtggccacatgtggct

SEQ ID NO: 14148 - DNA, 25 bp, Artificial Sequence
  Synthetic: FXN 3 reverse 9:69045097-69045126; AsCpf1-1
agaatcctgtggccacatgtggcta

SEQ ID NO: 14149 - DNA, 18 bp, Artificial Sequence
  Synthetic: FXN 3 reverse 9:69045190-69045212; AsCpf1-1
ataggctagccaacaagc

SEQ ID NO: 14150 - DNA, 19 bp, Artificial Sequence
  Synthetic: FXN 3 reverse 9:69045190-69045213; AsCpf1-1
ataggctagccaacaagcc

SEQ ID NO: 14151 - DNA, 20 bp, Artificial Sequence
  Synthetic: FXN 3 reverse 9:69045190-69045214; AsCpf1-1
ataggctagccaacaagcca

SEQ ID NO: 14152 - DNA, 21 bp, Artificial Sequence
  Synthetic: FXN 3 reverse 9:69045190-69045215; AsCpf1-1
ataggctagccaacaagccac

SEQ ID NO: 14153 - DNA, 22 bp, Artificial Sequence
  Synthetic: FXN 3 reverse 9:69045190-69045216; AsCpf1-1
ataggctagccaacaagccaca

SEQ ID NO: 14154 - DNA, 23 bp, Artificial Sequence
  Synthetic: FXN 3 reverse 9:69045190-69045217; AsCpf1-1
ataggctagccaacaagccacac

SEQ ID NO: 14155 - DNA, 24 bp, Artificial Sequence
  Synthetic: FXN 3 reverse 9:69045190-69045218; AsCpf1-1
ataggctagccaacaagccacacg

SEQ ID NO: 14156 - DNA, 25 bp, Artificial Sequence
  Synthetic: FXN 3 reverse 9:69045190-69045219; AsCpf1-1
ataggctagccaacaagccacacgt

SEQ ID NO: 14157 - DNA, 18 bp, Artificial Sequence
  Synthetic: FXN 3 reverse 9:69045191-69045213; AsCpf1-1
aataggctagccaacaag

SEQ ID NO: 14158 - DNA, 19 bp, Artificial Sequence
  Synthetic: FXN 3 reverse 9:69045191-69045214; AsCpf1-1
aataggctagccaacaagc

SEQ ID NO: 14159 - DNA, 20 bp, Artificial Sequence
  Synthetic: FXN 3 reverse 9:69045191-69045215; AsCpf1-1
aataggctagccaacaagcc

SEQ ID NO: 14160 - DNA, 21 bp, Artificial Sequence
  Synthetic: FXN 3 reverse 9:69045191-69045216; AsCpf1-1
aataggctagccaacaagcca

SEQ ID NO: 14161 - DNA, 22 bp, Artificial Sequence
  Synthetic: FXN 3 reverse 9:69045191-69045217; AsCpf1-1
aataggctagccaacaagccac

SEQ ID NO: 14162 - DNA, 23 bp, Artificial Sequence
  Synthetic: FXN 3 reverse 9:69045191-69045218; AsCpf1-1
aataggctagccaacaagccaca

SEQ ID NO: 14163 - DNA, 24 bp, Artificial Sequence
  Synthetic: FXN 3 reverse 9:69045191-69045219; AsCpf1-1
aataggctagccaacaagccacac

SEQ ID NO: 14164 - DNA, 25 bp, Artificial Sequence
  Synthetic: FXN 3 reverse 9:69045191-69045220; AsCpf1-1
aataggctagccaacaagccacacg

SEQ ID NO: 14165 - DNA, 18 bp, Artificial Sequence
  Synthetic: FXN 3 reverse 9:69045217-69045239; AsCpf1-1
tgtgtctctctaagcccg

SEQ ID NO: 14166 - DNA, 19 bp, Artificial Sequence
  Synthetic: FXN 3 reverse 9:69045217-69045240; AsCpf1-1
tgtgtctctctaagcccgt

SEQ ID NO: 14167 - DNA, 20 bp, Artificial Sequence
  Synthetic: FXN 3 reverse 9:69045217-69045241; AsCpf1-1
tgtgtctctctaagcccgtg

SEQ ID NO: 14168 - DNA, 21 bp, Artificial Sequence
  Synthetic: FXN 3 reverse 9:69045217-69045242; AsCpf1-1
tgtgtctctctaagcccgtgt

SEQ ID NO: 14169 - DNA, 22 bp, Artificial Sequence
  Synthetic: FXN 3 reverse 9:69045217-69045243; AsCpf1-1
tgtgtctctctaagcccgtgtt

SEQ ID NO: 14170 - DNA, 23 bp, Artificial Sequence
  Synthetic: FXN 3 reverse 9:69045217-69045244; AsCpf1-1
tgtgtctctctaagcccgtgttt

SEQ ID NO: 14171 - DNA, 24 bp, Artificial Sequence
  Synthetic: FXN 3 reverse 9:69045217-69045245; AsCpf1-1
tgtgtctctctaagcccgtgtttt

SEQ ID NO: 14172 - DNA, 25 bp, Artificial Sequence
  Synthetic: FXN 3 reverse 9:69045217-69045246; AsCpf1-1
tgtgtctctctaagcccgtgttttc

SEQ ID NO: 14173 - DNA, 18 bp, Artificial Sequence
  Synthetic: FXN 3 forward 9:69045299-69045321; AsCpf1-1
taaaatactttaatatag

SEQ ID NO: 14174 - DNA, 19 bp, Artificial Sequence
  Synthetic: FXN 3 forward 9:69045299-69045322; AsCpf1-1
taaaatactttaatatagg

SEQ ID NO: 14175 - DNA, 20 bp, Artificial Sequence
  Synthetic: FXN 3 forward 9:69045299-69045323; AsCpf1-1
taaaatactttaatataggg

SEQ ID NO: 14176 - DNA, 21 bp, Artificial Sequence
  Synthetic: FXN 3 forward 9:69045299-69045324; AsCpf1-1
taaaatactttaatatagggc

SEQ ID NO: 14177 - DNA, 22 bp, Artificial Sequence
  Synthetic: FXN 3 forward 9:69045299-69045325; AsCpf1-1
taaaatactttaatatagggct

SEQ ID NO: 14178 - DNA, 23 bp, Artificial Sequence
  Synthetic: FXN 3 forward 9:69045299-69045326; AsCpf1-1
taaaatactttaatatagggctg

SEQ ID NO: 14179 - DNA, 24 bp, Artificial Sequence
  Synthetic: FXN 3 forward 9:69045299-69045327; AsCpf1-1
taaaatactttaatatagggctgg

SEQ ID NO: 14180 - DNA, 25 bp, Artificial Sequence
  Synthetic: FXN 3 forward 9:69045299-69045328; AsCpf1-1
taaaatactttaatatagggctggg

SEQ ID NO: 14181 - DNA, 18 bp, Artificial Sequence
  Synthetic: FXN 3 reverse 9:69045328-69045350; AsCpf1-1
aaaatgctggatgtgagc

SEQ ID NO: 14182 - DNA, 19 bp, Artificial Sequence
  Synthetic: FXN 3 reverse 9:69045328-69045351; AsCpf1-1
aaaatgctggatgtgagcc

SEQ ID NO: 14183 - DNA, 20 bp, Artificial Sequence
  Synthetic: FXN 3 reverse 9:69045328-69045352; AsCpf1-1
aaaatgctggatgtgagcca

SEQ ID NO: 14184 - DNA, 21 bp, Artificial Sequence
  Synthetic: FXN 3 reverse 9:69045328-69045353; AsCpf1-1
aaaatgctggatgtgagccac

SEQ ID NO: 14185 - DNA, 22 bp, Artificial Sequence
  Synthetic: FXN 3 reverse 9:69045328-69045354; AsCpf1-1
aaaatgctggatgtgagccacc

SEQ ID NO: 14186 - DNA, 23 bp, Artificial Sequence
  Synthetic: FXN 3 reverse 9:69045328-69045355; AsCpf1-1
aaaatgctggatgtgagccaccg

SEQ ID NO: 14187 - DNA, 24 bp, Artificial Sequence
  Synthetic: FXN 3 reverse 9:69045328-69045356; AsCpf1-1
aaaatgctggatgtgagccaccgc

SEQ ID NO: 14188 - DNA, 25 bp, Artificial Sequence
  Synthetic: FXN 3 reverse 9:69045328-69045357; AsCpf1-1
aaaatgctggatgtgagccaccgca

SEQ ID NO: 14189 - DNA, 18 bp, Artificial Sequence
  Synthetic: FXN 3 reverse 9:69045329-69045351; AsCpf1-1
caaaatgctggatgtgag

SEQ ID NO: 14190 - DNA, 19 bp, Artificial Sequence
  Synthetic: FXN 3 reverse 9:69045329-69045352; AsCpf1-1
caaaatgctggatgtgagc

SEQ ID NO: 14191 - DNA, 20 bp, Artificial Sequence
  Synthetic: FXN 3 reverse 9:69045329-69045353; AsCpf1-1
caaaatgctggatgtgagcc

SEQ ID NO: 14192 - DNA, 21 bp, Artificial Sequence
  Synthetic: FXN 3 reverse 9:69045329-69045354; AsCpf1-1
caaaatgctggatgtgagcca

SEQ ID NO: 14193 - DNA, 22 bp, Artificial Sequence
  Synthetic: FXN 3 reverse 9:69045329-69045355; AsCpf1-1
caaaatgctggatgtgagccac

SEQ ID NO: 14194 - DNA, 23 bp, Artificial Sequence
  Synthetic: FXN 3 reverse 9:69045329-69045356; AsCpf1-1
caaaatgctggatgtgagccacc

SEQ ID NO: 14195 - DNA, 24 bp, Artificial Sequence
  Synthetic: FXN 3 reverse 9:69045329-69045357; AsCpf1-1
caaaatgctggatgtgagccaccg

SEQ ID NO: 14196 - DNA, 25 bp, Artificial Sequence
  Synthetic: FXN 3 reverse 9:69045329-69045358; AsCpf1-1
caaaatgctggatgtgagccaccgc

SEQ ID NO: 14197 - DNA, 18 bp, Artificial Sequence
  Synthetic: FXN 3 forward 9:69045342-69045364; AsCpf1-1
gcattttgggaagctgag

SEQ ID NO: 14198 - DNA, 19 bp, Artificial Sequence
  Synthetic: FXN 3 forward 9:69045342-69045365; AsCpf1-1
gcattttgggaagctgagg

SEQ ID NO: 14199 - DNA, 20 bp, Artificial Sequence
  Synthetic: FXN 3 forward 9:69045342-69045366; AsCpf1-1
gcattttgggaagctgagga

SEQ ID NO: 14200 - DNA, 21 bp, Artificial Sequence
  Synthetic: FXN 3 forward 9:69045342-69045367; AsCpf1-1
gcattttgggaagctgaggag

SEQ ID NO: 14201 - DNA, 22 bp, Artificial Sequence
  Synthetic: FXN 3 forward 9:69045342-69045368; AsCpf1-1
gcattttgggaagctgaggagg

SEQ ID NO: 14202 - DNA, 23 bp, Artificial Sequence
  Synthetic: FXN 3 forward 9:69045342-69045369; AsCpf1-1
gcattttgggaagctgaggaggg

SEQ ID NO: 14203 - DNA, 24 bp, Artificial Sequence
  Synthetic: FXN 3 forward 9:69045342-69045370; AsCpf1-1
gcattttgggaagctgaggagggc

SEQ ID NO: 14204 - DNA, 25 bp, Artificial Sequence
  Synthetic: FXN 3 forward 9:69045342-69045371; AsCpf1-1
gcattttgggaagctgaggagggca

SEQ ID NO: 14205 - DNA, 18 bp, Artificial Sequence
  Synthetic: FXN 3 forward 9:69045390-69045412; AsCpf1-1
agaccagcctggccaaca

SEQ ID NO: 14206 - DNA, 19 bp, Artificial Sequence
  Synthetic: FXN 3 forward 9:69045390-69045413; AsCpf1-1
agaccagcctggccaacat

SEQ ID NO: 14207 - DNA, 20 bp, Artificial Sequence
  Synthetic: FXN 3 forward 9:69045390-69045414; AsCpf1-1
agaccagcctggccaacatg

SEQ ID NO: 14208 - DNA, 21 bp, Artificial Sequence
  Synthetic: FXN 3 forward 9:69045390-69045415; AsCpf1-1
agaccagcctggccaacatgg

SEQ ID NO: 14209 - DNA, 22 bp, Artificial Sequence
  Synthetic: FXN 3 forward 9:69045390-69045416; AsCpf1-1
agaccagcctggccaacatggt

SEQ ID NO: 14210 - DNA, 23 bp, Artificial Sequence
  Synthetic: FXN 3 forward 9:69045390-69045417; AsCpf1-1
agaccagcctggccaacatggtg

SEQ ID NO: 14211 - DNA, 24 bp, Artificial Sequence
  Synthetic: FXN 3 forward 9:69045390-69045418; AsCpf1-1
agaccagcctggccaacatggtga

SEQ ID NO: 14212 - DNA, 25 bp, Artificial Sequence
  Synthetic: FXN 3 forward 9:69045390-69045419; AsCpf1-1
agaccagcctggccaacatggtgaa

SEQ ID NO: 14213 - DNA, 18 bp, Artificial Sequence
  Synthetic: FXN 3 reverse 9:69045390-69045412; AsCpf1-1
ccatgttggccaggctgg

SEQ ID NO: 14214 - DNA, 19 bp, Artificial Sequence
  Synthetic: FXN 3 reverse 9:69045390-69045413; AsCpf1-1
ccatgttggccaggctggt

SEQ ID NO: 14215 - DNA, 20 bp, Artificial Sequence
  Synthetic: FXN 3 reverse 9:69045390-69045414; AsCpf1-1
ccatgttggccaggctggtc

SEQ ID NO: 14216 - DNA, 21 bp, Artificial Sequence
  Synthetic: FXN 3 reverse 9:69045390-69045415; AsCpf1-1
ccatgttggccaggctggtct

SEQ ID NO: 14217 - DNA, 22 bp, Artificial Sequence
  Synthetic: FXN 3 reverse 9:69045390-69045416; AsCpf1-1
ccatgttggccaggctggtctt

SEQ ID NO: 14218 - DNA, 23 bp, Artificial Sequence
  Synthetic: FXN 3 reverse 9:69045390-69045417; AsCpf1-1
ccatgttggccaggctggtcttg

SEQ ID NO: 14219 - DNA, 24 bp, Artificial Sequence
  Synthetic: FXN 3 reverse 9:69045390-69045418; AsCpf1-1
ccatgttggccaggctggtcttga

SEQ ID NO: 14220 - DNA, 25 bp, Artificial Sequence
  Synthetic: FXN 3 reverse 9:69045390-69045419; AsCpf1-1
ccatgttggccaggctggtcttgaa

SEQ ID NO: 14221 - DNA, 18 bp, Artificial Sequence
  Synthetic: FXN 3 reverse 9:69045460-69045482; AsCpf1-1
gcgtagctgggattacag

SEQ ID NO: 14222 - DNA, 19 bp, Artificial Sequence
  Synthetic: FXN 3 reverse 9:69045460-69045483; AsCpf1-1
gcgtagctgggattacagg

SEQ ID NO: 14223 - DNA, 20 bp, Artificial Sequence
  Synthetic: FXN 3 reverse 9:69045460-69045484; AsCpf1-1
gcgtagctgggattacaggc

SEQ ID NO: 14224 - DNA, 21 bp, Artificial Sequence
  Synthetic: FXN 3 reverse 9:69045460-69045485; AsCpf1-1
gcgtagctgggattacaggca

SEQ ID NO: 14225 - DNA, 22 bp, Artificial Sequence
  Synthetic: FXN 3 reverse 9:69045460-69045486; AsCpf1-1
gcgtagctgggattacaggcac

SEQ ID NO: 14226 - DNA, 23 bp, Artificial Sequence
  Synthetic: FXN 3 reverse 9:69045460-69045487; AsCpf1-1
gcgtagctgggattacaggcacc

SEQ ID NO: 14227 - DNA, 24 bp, Artificial Sequence
  Synthetic: FXN 3 reverse 9:69045460-69045488; AsCpf1-1
gcgtagctgggattacaggcaccc

SEQ ID NO: 14228 - DNA, 25 bp, Artificial Sequence
  Synthetic: FXN 3 reverse 9:69045460-69045489; AsCpf1-1
gcgtagctgggattacaggcacccg

SEQ ID NO: 14229 - DNA, 18 bp, Artificial Sequence
  Synthetic: FXN 3 forward 9:69045473-69045495; AsCpf1-1
agctacgcgggaggctga

SEQ ID NO: 14230 - DNA, 19 bp, Artificial Sequence
  Synthetic: FXN 3 forward 9:69045473-69045496; AsCpf1-1
agctacgcgggaggctgag

SEQ ID NO: 14231 - DNA, 20 bp, Artificial Sequence
  Synthetic: FXN 3 forward 9:69045473-69045497; AsCpf1-1
agctacgcgggaggctgagg

SEQ ID NO: 14232 - DNA, 21 bp, Artificial Sequence
  Synthetic: FXN 3 forward 9:69045473-69045498; AsCpf1-1
agctacgcgggaggctgaggc

SEQ ID NO: 14233 - DNA, 22 bp, Artificial Sequence
  Synthetic: FXN 3 forward 9:69045473-69045499; AsCpf1-1
agctacgcgggaggctgaggca

SEQ ID NO: 14234 - DNA, 23 bp, Artificial Sequence
  Synthetic: FXN 3 forward 9:69045473-69045500; AsCpf1-1
agctacgcgggaggctgaggcac

SEQ ID NO: 14235 - DNA, 24 bp, Artificial Sequence
  Synthetic: FXN 3 forward 9:69045473-69045501; AsCpf1-1
agctacgcgggaggctgaggcacg

SEQ ID NO: 14236 - DNA, 25 bp, Artificial Sequence
  Synthetic: FXN 3 forward 9:69045473-69045502; AsCpf1-1
agctacgcgggaggctgaggcacga

SEQ ID NO: 14237 - DNA, 18 bp, Artificial Sequence
  Synthetic: FXN 3 reverse 9:69045485-69045507; AsCpf1-1
agtgattctcgtgcctca

SEQ ID NO: 14238 - DNA, 19 bp, Artificial Sequence
  Synthetic: FXN 3 reverse 9:69045485-69045508; AsCpf1-1
agtgattctcgtgcctcag

SEQ ID NO: 14239 - DNA, 20 bp, Artificial Sequence
  Synthetic: FXN 3 reverse 9:69045485-69045509; AsCpf1-1
agtgattctcgtgcctcagc

SEQ ID NO: 14240 - DNA, 21 bp, Artificial Sequence
  Synthetic: FXN 3 reverse 9:69045485-69045510; AsCpf1-1
agtgattctcgtgcctcagcc

SEQ ID NO: 14241 - DNA, 22 bp, Artificial Sequence
  Synthetic: FXN 3 reverse 9:69045485-69045511; AsCpf1-1
agtgattctcgtgcctcagcct

SEQ ID NO: 14242 - DNA, 23 bp, Artificial Sequence
  Synthetic: FXN 3 reverse 9:69045485-69045512; AsCpf1-1
agtgattctcgtgcctcagcctc

SEQ ID NO: 14243 - DNA, 24 bp, Artificial Sequence
  Synthetic: FXN 3 reverse 9:69045485-69045513; AsCpf1-1
agtgattctcgtgcctcagcctcc

SEQ ID NO: 14244 - DNA, 25 bp, Artificial Sequence
  Synthetic: FXN 3 reverse 9:69045485-69045514; AsCpf1-1
agtgattctcgtgcctcagcctccc

SEQ ID NO: 14245 - DNA, 18 bp, Artificial Sequence
  Synthetic: FXN 3 reverse 9:69045492-69045514; AsCpf1-1
gggttcgagtgattctcg

SEQ ID NO: 14246 - DNA, 19 bp, Artificial Sequence
  Synthetic: FXN 3 reverse 9:69045492-69045515; AsCpf1-1
gggttcgagtgattctcgt

SEQ ID NO: 14247 - DNA, 20 bp, Artificial Sequence
  Synthetic: FXN 3 reverse 9:69045492-69045516; AsCpf1-1
gggttcgagtgattctcgtg

SEQ ID NO: 14248 - DNA, 21 bp, Artificial Sequence
  Synthetic: FXN 3 reverse 9:69045492-69045517; AsCpf1-1
gggttcgagtgattctcgtgc

SEQ ID NO: 14249 - DNA, 22 bp, Artificial Sequence
  Synthetic: FXN 3 reverse 9:69045492-69045518; AsCpf1-1
gggttcgagtgattctcgtgcc

SEQ ID NO: 14250 - DNA, 23 bp, Artificial Sequence
  Synthetic: FXN 3 reverse 9:69045492-69045519; AsCpf1-1
gggttcgagtgattctcgtgcct

SEQ ID NO: 14251 - DNA, 24 bp, Artificial Sequence
  Synthetic: FXN 3 reverse 9:69045492-69045520; AsCpf1-1
gggttcgagtgattctcgtgcctc

SEQ ID NO: 14252 - DNA, 25 bp, Artificial Sequence
  Synthetic: FXN 3 reverse 9:69045492-69045521; AsCpf1-1
gggttcgagtgattctcgtgcctca

SEQ ID NO: 14253 - DNA, 18 bp, Artificial Sequence
  Synthetic: FXN 3 forward 9:69045559-69045581; AsCpf1-1
gcctgggcgacagagcga

SEQ ID NO: 14254 - DNA, 19 bp, Artificial Sequence
  Synthetic: FXN 3 forward 9:69045559-69045582; AsCpf1-1
gcctgggcgacagagcgag

SEQ ID NO: 14255 - DNA, 20 bp, Artificial Sequence
  Synthetic: FXN 3 forward 9:69045559-69045583; AsCpf1-1
gcctgggcgacagagcgaga

SEQ ID NO: 14256 - DNA, 21 bp, Artificial Sequence
  Synthetic: FXN 3 forward 9:69045559-69045584; AsCpf1-1
gcctgggcgacagagcgagac

SEQ ID NO: 14257 - DNA, 22 bp, Artificial Sequence
  Synthetic: FXN 3 forward 9:69045559-69045585; AsCpf1-1
gcctgggcgacagagcgagact

SEQ ID NO: 14258 - DNA, 23 bp, Artificial Sequence
  Synthetic: FXN 3 forward 9:69045559-69045586; AsCpf1-1
gcctgggcgacagagcgagactt

SEQ ID NO: 14259 - DNA, 24 bp, Artificial Sequence
  Synthetic: FXN 3 forward 9:69045559-69045587; AsCpf1-1
gcctgggcgacagagcgagacttc

SEQ ID NO: 14260 - DNA, 25 bp, Artificial Sequence
  Synthetic: FXN 3 forward 9:69045559-69045588; AsCpf1-1
gcctgggcgacagagcgagacttca

SEQ ID NO: 14261 - DNA, 18 bp, Artificial Sequence
  Synthetic: FXN 3 forward 9:69045584-69045606; AsCpf1-1
tctcaaaaacaaaaaaca

SEQ ID NO: 14262 - DNA, 19 bp, Artificial Sequence
  Synthetic: FXN 3 forward 9:69045584-69045607; AsCpf1-1
tctcaaaaacaaaaaacaa

SEQ ID NO: 14263 - DNA, 20 bp, Artificial Sequence
  Synthetic: FXN 3 forward 9:69045584-69045608; AsCpf1-1
tctcaaaaacaaaaaacaaa

SEQ ID NO: 14264 - DNA, 21 bp, Artificial Sequence
  Synthetic: FXN 3 forward 9:69045584-69045609; AsCpf1-1
tctcaaaaacaaaaaacaaaa

SEQ ID NO: 14265 - DNA, 22 bp, Artificial Sequence
  Synthetic: FXN 3 forward 9:69045584-69045610; AsCpf1-1
tctcaaaaacaaaaaacaaaaa

SEQ ID NO: 14266 - DNA, 23 bp, Artificial Sequence
  Synthetic: FXN 3 forward 9:69045584-69045611; AsCpf1-1
tctcaaaaacaaaaaacaaaaac

SEQ ID NO: 14267 - DNA, 24 bp, Artificial Sequence
  Synthetic: FXN 3 forward 9:69045584-69045612; AsCpf1-1
tctcaaaaacaaaaaacaaaaacc

SEQ ID NO: 14268 - DNA, 25 bp, Artificial Sequence
  Synthetic: FXN 3 forward 9:69045584-69045613; AsCpf1-1
tctcaaaaacaaaaaacaaaaacca

SEQ ID NO: 14269 - DNA, 18 bp, Artificial Sequence
  Synthetic: FXN 3 forward 9:69045624-69045646; AsCpf1-1
gcatgattatttaaccaa

SEQ ID NO: 14270 - DNA, 19 bp, Artificial Sequence
  Synthetic: FXN 3 forward 9:69045624-69045647; AsCpf1-1
gcatgattatttaaccaaa

SEQ ID NO: 14271 - DNA, 20 bp, Artificial Sequence
  Synthetic: FXN 3 forward 9:69045624-69045648; AsCpf1-1
gcatgattatttaaccaaaa

SEQ ID NO: 14272 - DNA, 21 bp, Artificial Sequence
  Synthetic: FXN 3 forward 9:69045624-69045649; AsCpf1-1
gcatgattatttaaccaaaat

SEQ ID NO: 14273 - DNA, 22 bp, Artificial Sequence
  Synthetic: FXN 3 forward 9:69045624-69045650; AsCpf1-1
gcatgattatttaaccaaaatg

SEQ ID NO: 14274 - DNA, 23 bp, Artificial Sequence
  Synthetic: FXN 3 forward 9:69045624-69045651; AsCpf1-1
gcatgattatttaaccaaaatgc

SEQ ID NO: 14275 - DNA, 24 bp, Artificial Sequence
  Synthetic: FXN 3 forward 9:69045624-69045652; AsCpf1-1
gcatgattatttaaccaaaatgca

SEQ ID NO: 14276 - DNA, 25 bp, Artificial Sequence
  Synthetic: FXN 3 forward 9:69045624-69045653; AsCpf1-1
gcatgattatttaaccaaaatgcag

SEQ ID NO: 14277 - DNA, 18 bp, Artificial Sequence
  Synthetic: FXN 3 reverse 9:69045641-69045663; AsCpf1-1
gtgaacaactaacctgca

SEQ ID NO: 14278 - DNA, 19 bp, Artificial Sequence
  Synthetic: FXN 3 reverse 9:69045641-69045664; AsCpf1-1
gtgaacaactaacctgcat

SEQ ID NO: 14279 - DNA, 20 bp, Artificial Sequence
  Synthetic: FXN 3 reverse 9:69045641-69045665; AsCpf1-1
gtgaacaactaacctgcatt

SEQ ID NO: 14280 - DNA, 21 bp, Artificial Sequence
  Synthetic: FXN 3 reverse 9:69045641-69045666; AsCpf1-1
gtgaacaactaacctgcattt

SEQ ID NO: 14281 - DNA, 22 bp, Artificial Sequence
  Synthetic: FXN 3 reverse 9:69045641-69045667; AsCpf1-1
gtgaacaactaacctgcatttt

SEQ ID NO: 14282 - DNA, 23 bp, Artificial Sequence
  Synthetic: FXN 3 reverse 9:69045641-69045668; AsCpf1-1
gtgaacaactaacctgcattttg

SEQ ID NO: 14283 - DNA, 24 bp, Artificial Sequence
  Synthetic: FXN 3 reverse 9:69045641-69045669; AsCpf1-1
gtgaacaactaacctgcattttgg

SEQ ID NO: 14284 - DNA, 25 bp, Artificial Sequence
  Synthetic: FXN 3 reverse 9:69045641-69045670; AsCpf1-1
gtgaacaactaacctgcattttggt

SEQ ID NO: 14285 - DNA, 18 bp, Artificial Sequence
  Synthetic: FXN 3 forward 9:69045661-69045683; AsCpf1-1
ccggatgcagagtccaat

SEQ ID NO: 14286 - DNA, 19 bp, Artificial Sequence
  Synthetic: FXN 3 forward 9:69045661-69045684; AsCpf1-1
ccggatgcagagtccaatt

SEQ ID NO: 14287 - DNA, 20 bp, Artificial Sequence
  Synthetic: FXN 3 forward 9:69045661-69045685; AsCpf1-1
ccggatgcagagtccaatta

SEQ ID NO: 14288 - DNA, 21 bp, Artificial Sequence
  Synthetic: FXN 3 forward 9:69045661-69045686; AsCpf1-1
ccggatgcagagtccaattaa

SEQ ID NO: 14289 - DNA, 22 bp, Artificial Sequence
  Synthetic: FXN 3 forward 9:69045661-69045687; AsCpf1-1
ccggatgcagagtccaattaac

SEQ ID NO: 14290 - DNA, 23 bp, Artificial Sequence
  Synthetic: FXN 3 forward 9:69045661-69045688; AsCpf1-1
ccggatgcagagtccaattaaca

SEQ ID NO: 14291 - DNA, 24 bp, Artificial Sequence
  Synthetic: FXN 3 forward 9:69045661-69045689; AsCpf1-1
ccggatgcagagtccaattaacaa

SEQ ID NO: 14292 - DNA, 25 bp, Artificial Sequence
  Synthetic: FXN 3 forward 9:69045661-69045690; AsCpf1-1
ccggatgcagagtccaattaacaag

SEQ ID NO: 14293 - DNA, 18 bp, Artificial Sequence
  Synthetic: FXN 3 forward 9:69045677-69045699; AsCpf1-1
attaacaagagcaaggcc

SEQ ID NO: 14294 - DNA, 19 bp, Artificial Sequence
  Synthetic: FXN 3 forward 9:69045677-69045700; AsCpf1-1
attaacaagagcaaggcct

SEQ ID NO: 14295 - DNA, 20 bp, Artificial Sequence
  Synthetic: FXN 3 forward 9:69045677-69045701; AsCpf1-1
attaacaagagcaaggcctg

SEQ ID NO: 14296 - DNA, 21 bp, Artificial Sequence
  Synthetic: FXN 3 forward 9:69045677-69045702; AsCpf1-1
attaacaagagcaaggcctgg

SEQ ID NO: 14297 - DNA, 22 bp, Artificial Sequence
  Synthetic: FXN 3 forward 9:69045677-69045703; AsCpf1-1
attaacaagagcaaggcctggt

SEQ ID NO: 14298 - DNA, 23 bp, Artificial Sequence
  Synthetic: FXN 3 forward 9:69045677-69045704; AsCpf1-1
attaacaagagcaaggcctggta

SEQ ID NO: 14299 - DNA, 24 bp, Artificial Sequence
  Synthetic: FXN 3 forward 9:69045677-69045705; AsCpf1-1
attaacaagagcaaggcctggtac

SEQ ID NO: 14300 - DNA, 25 bp, Artificial Sequence
  Synthetic: FXN 3 forward 9:69045677-69045706; AsCpf1-1
attaacaagagcaaggcctggtacc

SEQ ID NO: 14301 - DNA, 18 bp, Artificial Sequence
  Synthetic: FXN 3 reverse 9:69045689-69045711; AsCpf1-1
ctttttttggtaccaggc

SEQ ID NO: 14302 - DNA, 19 bp, Artificial Sequence
  Synthetic: FXN 3 reverse 9:69045689-69045712; AsCpf1-1
ctttttttggtaccaggcc

SEQ ID NO: 14303 - DNA, 20 bp, Artificial Sequence
  Synthetic: FXN 3 reverse 9:69045689-69045713; AsCpf1-1
ctttttttggtaccaggcct

SEQ ID NO: 14304 - DNA, 21 bp, Artificial Sequence
  Synthetic: FXN 3 reverse 9:69045689-69045714; AsCpf1-1
ctttttttggtaccaggcctt

SEQ ID NO: 14305 - DNA, 22 bp, Artificial Sequence
  Synthetic: FXN 3 reverse 9:69045689-69045715; AsCpf1-1
ctttttttggtaccaggccttg

SEQ ID NO: 14306 - DNA, 23 bp, Artificial Sequence
  Synthetic: FXN 3 reverse 9:69045689-69045716; AsCpf1-1
ctttttttggtaccaggccttgc

SEQ ID NO: 14307 - DNA, 24 bp, Artificial Sequence
  Synthetic: FXN 3 reverse 9:69045689-69045717; AsCpf1-1
ctttttttggtaccaggccttgct

SEQ ID NO: 14308 - DNA, 25 bp, Artificial Sequence
  Synthetic: FXN 3 reverse 9:69045689-69045718; AsCpf1-1
ctttttttggtaccaggccttgctc

SEQ ID NO: 14309 - DNA, 18 bp, Artificial Sequence
  Synthetic: FXN 3 reverse 9:69045700-69045722; AsCpf1-1
gagtaaattcactttttt

SEQ ID NO: 14310 - DNA, 19 bp, Artificial Sequence
  Synthetic: FXN 3 reverse 9:69045700-69045723; AsCpf1-1
gagtaaattcacttttttt

SEQ ID NO: 14311 - DNA, 20 bp, Artificial Sequence
  Synthetic: FXN 3 reverse 9:69045700-69045724; AsCpf1-1
gagtaaattcactttttttg

SEQ ID NO: 14312 - DNA, 21 bp, Artificial Sequence
  Synthetic: FXN 3 reverse 9:69045700-69045725; AsCpf1-1
gagtaaattcactttttttgg

SEQ ID NO: 14313 - DNA, 22 bp, Artificial Sequence
  Synthetic: FXN 3 reverse 9:69045700-69045726; AsCpf1-1
gagtaaattcactttttttggt

SEQ ID NO: 14314 - DNA, 23 bp, Artificial Sequence
  Synthetic: FXN 3 reverse 9:69045700-69045727; AsCpf1-1
gagtaaattcactttttttggta

SEQ ID NO: 14315 - DNA, 24 bp, Artificial Sequence
  Synthetic: FXN 3 reverse 9:69045700-69045728; AsCpf1-1
gagtaaattcactttttttggtac

SEQ ID NO: 14316 - DNA, 25 bp, Artificial Sequence
  Synthetic: FXN 3 reverse 9:69045700-69045729; AsCpf1-1
gagtaaattcactttttttggtacc

SEQ ID NO: 14317 - DNA, 18 bp, Artificial Sequence
  Synthetic: FXN 3 forward 9:69045723-69045745; AsCpf1-1
aaactagcttgggtgagg

SEQ ID NO: 14318 - DNA, 19 bp, Artificial Sequence
  Synthetic: FXN 3 forward 9:69045723-69045746; AsCpf1-1
aaactagcttgggtgaggg

SEQ ID NO: 14319 - DNA, 20 bp, Artificial Sequence
  Synthetic: FXN 3 forward 9:69045723-69045747; AsCpf1-1
aaactagcttgggtgagggg

SEQ ID NO: 14320 - DNA, 21 bp, Artificial Sequence
  Synthetic: FXN 3 forward 9:69045723-69045748; AsCpf1-1
aaactagcttgggtgaggggt

SEQ ID NO: 14321 - DNA, 22 bp, Artificial Sequence
  Synthetic: FXN 3 forward 9:69045723-69045749; AsCpf1-1
aaactagcttgggtgaggggta

SEQ ID NO: 14322 - DNA, 23 bp, Artificial Sequence
  Synthetic: FXN 3 forward 9:69045723-69045750; AsCpf1-1
aaactagcttgggtgaggggtac

SEQ ID NO: 14323 - DNA, 24 bp, Artificial Sequence
  Synthetic: FXN 3 forward 9:69045723-69045751; AsCpf1-1
aaactagcttgggtgaggggtaca

SEQ ID NO: 14324 - DNA, 25 bp, Artificial Sequence
  Synthetic: FXN 3 forward 9:69045723-69045752; AsCpf1-1
aaactagcttgggtgaggggtacaa

SEQ ID NO: 14325 - DNA, 18 bp, Artificial Sequence
  Synthetic: FXN 3 reverse 9:69045763-69045785; AsCpf1-1
aggggaagcagcactttt

SEQ ID NO: 14326 - DNA, 19 bp, Artificial Sequence
  Synthetic: FXN 3 reverse 9:69045763-69045786; AsCpf1-1
aggggaagcagcactttta

SEQ ID NO: 14327 - DNA, 20 bp, Artificial Sequence
  Synthetic: FXN 3 reverse 9:69045763-69045787; AsCpf1-1
aggggaagcagcacttttaa

SEQ ID NO: 14328 - DNA, 21 bp, Artificial Sequence
  Synthetic: FXN 3 reverse 9:69045763-69045788; AsCpf1-1
aggggaagcagcacttttaaa

SEQ ID NO: 14329 - DNA, 22 bp, Artificial Sequence
  Synthetic: FXN 3 reverse 9:69045763-69045789; AsCpf1-1
aggggaagcagcacttttaaag

SEQ ID NO: 14330 - DNA, 23 bp, Artificial Sequence
  Synthetic: FXN 3 reverse 9:69045763-69045790; AsCpf1-1
aggggaagcagcacttttaaaga

SEQ ID NO: 14331 - DNA, 24 bp, Artificial Sequence
  Synthetic: FXN 3 reverse 9:69045763-69045791; AsCpf1-1
aggggaagcagcacttttaaagaa

SEQ ID NO: 14332 - DNA, 25 bp, Artificial Sequence
  Synthetic: FXN 3 reverse 9:69045763-69045792; AsCpf1-1
aggggaagcagcacttttaaagaaa

SEQ ID NO: 14333 - DNA, 18 bp, Artificial Sequence
  Synthetic: FXN 3 reverse 9:69045764-69045786; AsCpf1-1
aaggggaagcagcacttt

SEQ ID NO: 14334 - DNA, 19 bp, Artificial Sequence
  Synthetic: FXN 3 reverse 9:69045764-69045787; AsCpf1-1
aaggggaagcagcactttt

SEQ ID NO: 14335 - DNA, 20 bp, Artificial Sequence
  Synthetic: FXN 3 reverse 9:69045764-69045788; AsCpf1-1
aaggggaagcagcactttta

SEQ ID NO: 14336 - DNA, 21 bp, Artificial Sequence
  Synthetic: FXN 3 reverse 9:69045764-69045789; AsCpf1-1
aaggggaagcagcacttttaa

SEQ ID NO: 14337 - DNA, 22 bp, Artificial Sequence
  Synthetic: FXN 3 reverse 9:69045764-69045790; AsCpf1-1
aaggggaagcagcacttttaaa

SEQ ID NO: 14338 - DNA, 23 bp, Artificial Sequence
  Synthetic: FXN 3 reverse 9:69045764-69045791; AsCpf1-1
aaggggaagcagcacttttaaag

SEQ ID NO: 14339 - DNA, 24 bp, Artificial Sequence
  Synthetic: FXN 3 reverse 9:69045764-69045792; AsCpf1-1
aaggggaagcagcacttttaaaga

SEQ ID NO: 14340 - DNA, 25 bp, Artificial Sequence
  Synthetic: FXN 3 reverse 9:69045764-69045793; AsCpf1-1
aaggggaagcagcacttttaaagaa

SEQ ID NO: 14341 - DNA, 18 bp, Artificial Sequence
  Synthetic: FXN 3 reverse 9:69045776-69045798; AsCpf1-1
ctttctacttccaagggg

SEQ ID NO: 14342 - DNA, 19 bp, Artificial Sequence
  Synthetic: FXN 3 reverse 9:69045776-69045799; AsCpf1-1
ctttctacttccaagggga

SEQ ID NO: 14343 - DNA, 20 bp, Artificial Sequence
  Synthetic: FXN 3 reverse 9:69045776-69045800; AsCpf1-1
ctttctacttccaaggggaa

SEQ ID NO: 14344 - DNA, 21 bp, Artificial Sequence
  Synthetic: FXN 3 reverse 9:69045776-69045801; AsCpf1-1
ctttctacttccaaggggaag

SEQ ID NO: 14345 - DNA, 22 bp, Artificial Sequence
  Synthetic: FXN 3 reverse 9:69045776-69045802; AsCpf1-1
ctttctacttccaaggggaagc

SEQ ID NO: 14346 - DNA, 23 bp, Artificial Sequence
  Synthetic: FXN 3 reverse 9:69045776-69045803; AsCpf1-1
ctttctacttccaaggggaagca

SEQ ID NO: 14347 - DNA, 24 bp, Artificial Sequence
  Synthetic: FXN 3 reverse 9:69045776-69045804; AsCpf1-1
ctttctacttccaaggggaagcag

SEQ ID NO: 14348 - DNA, 25 bp, Artificial Sequence
  Synthetic: FXN 3 reverse 9:69045776-69045805; AsCpf1-1
ctttctacttccaaggggaagcagc

SEQ ID NO: 14349 - DNA, 18 bp, Artificial Sequence
  Synthetic: FXN 3 forward 9:69045781-69045803; AsCpf1-1
ccttggaagtagaaagtg

SEQ ID NO: 14350 - DNA, 19 bp, Artificial Sequence
  Synthetic: FXN 3 forward 9:69045781-69045804; AsCpf1-1
ccttggaagtagaaagtgg

SEQ ID NO: 14351 - DNA, 20 bp, Artificial Sequence
  Synthetic: FXN 3 forward 9:69045781-69045805; AsCpf1-1
ccttggaagtagaaagtgga

SEQ ID NO: 14352 - DNA, 21 bp, Artificial Sequence
  Synthetic: FXN 3 forward 9:69045781-69045806; AsCpf1-1
ccttggaagtagaaagtggac

SEQ ID NO: 14353 - DNA, 22 bp, Artificial Sequence
  Synthetic: FXN 3 forward 9:69045781-69045807; AsCpf1-1
ccttggaagtagaaagtggaca

SEQ ID NO: 14354 - DNA, 23 bp, Artificial Sequence
  Synthetic: FXN 3 forward 9:69045781-69045808; AsCpf1-1
ccttggaagtagaaagtggacac

SEQ ID NO: 14355 - DNA, 24 bp, Artificial Sequence
  Synthetic: FXN 3 forward 9:69045781-69045809; AsCpf1-1
ccttggaagtagaaagtggacact

SEQ ID NO: 14356 - DNA, 25 bp, Artificial Sequence
  Synthetic: FXN 3 forward 9:69045781-69045810; AsCpf1-1
ccttggaagtagaaagtggacactt

SEQ ID NO: 14357 - DNA, 18 bp, Artificial Sequence
  Synthetic: FXN 3 forward 9:69045782-69045804; AsCpf1-1
cttggaagtagaaagtgg

SEQ ID NO: 14358 - DNA, 19 bp, Artificial Sequence
  Synthetic: FXN 3 forward 9:69045782-69045805; AsCpf1-1
cttggaagtagaaagtgga

SEQ ID NO: 14359 - DNA, 20 bp, Artificial Sequence
  Synthetic: FXN 3 forward 9:69045782-69045806; AsCpf1-1
cttggaagtagaaagtggac

SEQ ID NO: 14360 - DNA, 21 bp, Artificial Sequence
  Synthetic: FXN 3 forward 9:69045782-69045807; AsCpf1-1
cttggaagtagaaagtggaca

SEQ ID NO: 14361 - DNA, 22 bp, Artificial Sequence
  Synthetic: FXN 3 forward 9:69045782-69045808; AsCpf1-1
cttggaagtagaaagtggacac

SEQ ID NO: 14362 - DNA, 23 bp, Artificial Sequence
  Synthetic: FXN 3 forward 9:69045782-69045809; AsCpf1-1
cttggaagtagaaagtggacact

SEQ ID NO: 14363 - DNA, 24 bp, Artificial Sequence
  Synthetic: FXN 3 forward 9:69045782-69045810; AsCpf1-1
cttggaagtagaaagtggacactt

SEQ ID NO: 14364 - DNA, 25 bp, Artificial Sequence
  Synthetic: FXN 3 forward 9:69045782-69045811; AsCpf1-1
cttggaagtagaaagtggacacttt

SEQ ID NO: 14365 - DNA, 18 bp, Artificial Sequence
  Synthetic: FXN 3 reverse 9:69045799-69045821; AsCpf1-1
cccttaccttataaaagt

SEQ ID NO: 14366 - DNA, 19 bp, Artificial Sequence
  Synthetic: FXN 3 reverse 9:69045799-69045822; AsCpf1-1
cccttaccttataaaagtg

SEQ ID NO: 14367 - DNA, 20 bp, Artificial Sequence
  Synthetic: FXN 3 reverse 9:69045799-69045823; AsCpf1-1
cccttaccttataaaagtgt

SEQ ID NO: 14368 - DNA, 21 bp, Artificial Sequence
  Synthetic: FXN 3 reverse 9:69045799-69045824; AsCpf1-1
cccttaccttataaaagtgtc

SEQ ID NO: 14369 - DNA, 22 bp, Artificial Sequence
  Synthetic: FXN 3 reverse 9:69045799-69045825; AsCpf1-1
cccttaccttataaaagtgtcc

SEQ ID NO: 14370 - DNA, 23 bp, Artificial Sequence
  Synthetic: FXN 3 reverse 9:69045799-69045826; AsCpf1-1
cccttaccttataaaagtgtcca

SEQ ID NO: 14371 - DNA, 24 bp, Artificial Sequence
  Synthetic: FXN 3 reverse 9:69045799-69045827; AsCpf1-1
cccttaccttataaaagtgtccac

SEQ ID NO: 14372 - DNA, 25 bp, Artificial Sequence
  Synthetic: FXN 3 reverse 9:69045799-69045828; AsCpf1-1
cccttaccttataaaagtgtccact

SEQ ID NO: 14373 - DNA, 18 bp, Artificial Sequence
  Synthetic: FXN 3 reverse 9:69045800-69045822; AsCpf1-1
ccccttaccttataaaag

SEQ ID NO: 14374 - DNA, 19 bp, Artificial Sequence
  Synthetic: FXN 3 reverse 9:69045800-69045823; AsCpf1-1
ccccttaccttataaaagt

SEQ ID NO: 14375 - DNA, 20 bp, Artificial Sequence
  Synthetic: FXN 3 reverse 9:69045800-69045824; AsCpf1-1
ccccttaccttataaaagtg

SEQ ID NO: 14376 - DNA, 21 bp, Artificial Sequence
  Synthetic: FXN 3 reverse 9:69045800-69045825; AsCpf1-1
ccccttaccttataaaagtgt

SEQ ID NO: 14377 - DNA, 22 bp, Artificial Sequence
  Synthetic: FXN 3 reverse 9:69045800-69045826; AsCpf1-1
ccccttaccttataaaagtgtc

SEQ ID NO: 14378 - DNA, 23 bp, Artificial Sequence
  Synthetic: FXN 3 reverse 9:69045800-69045827; AsCpf1-1
ccccttaccttataaaagtgtcc

SEQ ID NO: 14379 - DNA, 24 bp, Artificial Sequence
  Synthetic: FXN 3 reverse 9:69045800-69045828; AsCpf1-1
ccccttaccttataaaagtgtcca

SEQ ID NO: 14380 - DNA, 25 bp, Artificial Sequence
  Synthetic: FXN 3 reverse 9:69045800-69045829; AsCpf1-1
ccccttaccttataaaagtgtccac

SEQ ID NO: 14381 - DNA, 18 bp, Artificial Sequence
  Synthetic: FXN 3 forward 9:69045852-69045874; AsCpf1-1
tctgctagttccgtgcat

SEQ ID NO: 14382 - DNA, 19 bp, Artificial Sequence
  Synthetic: FXN 3 forward 9:69045852-69045875; AsCpf1-1
tctgctagttccgtgcata

SEQ ID NO: 14383 - DNA, 20 bp, Artificial Sequence
  Synthetic: FXN 3 forward 9:69045852-69045876; AsCpf1-1
tctgctagttccgtgcatac

SEQ ID NO: 14384 - DNA, 21 bp, Artificial Sequence
  Synthetic: FXN 3 forward 9:69045852-69045877; AsCpf1-1
tctgctagttccgtgcatact

SEQ ID NO: 14385 - DNA, 22 bp, Artificial Sequence
  Synthetic: FXN 3 forward 9:69045852-69045878; AsCpf1-1
tctgctagttccgtgcatactc

SEQ ID NO: 14386 - DNA, 23 bp, Artificial Sequence
  Synthetic: FXN 3 forward 9:69045852-69045879; AsCpf1-1
tctgctagttccgtgcatactct

SEQ ID NO: 14387 - DNA, 24 bp, Artificial Sequence
  Synthetic: FXN 3 forward 9:69045852-69045880; AsCpf1-1
tctgctagttccgtgcatactcta

SEQ ID NO: 14388 - DNA, 25 bp, Artificial Sequence
  Synthetic: FXN 3 forward 9:69045852-69045881; AsCpf1-1
tctgctagttccgtgcatactctac

SEQ ID NO: 14389 - DNA, 18 bp, Artificial Sequence
  Synthetic: FXN 3 forward 9:69045864-69045886; AsCpf1-1
gtgcatactctacaggac

SEQ ID NO: 14390 - DNA, 19 bp, Artificial Sequence
  Synthetic: FXN 3 forward 9:69045864-69045887; AsCpf1-1
gtgcatactctacaggaca

SEQ ID NO: 14391 - DNA, 20 bp, Artificial Sequence
  Synthetic: FXN 3 forward 9:69045864-69045888; AsCpf1-1
gtgcatactctacaggacag

SEQ ID NO: 14392 - DNA, 21 bp, Artificial Sequence
  Synthetic: FXN 3 forward 9:69045864-69045889; AsCpf1-1
gtgcatactctacaggacagt

SEQ ID NO: 14393 - DNA, 22 bp, Artificial Sequence
  Synthetic: FXN 3 forward 9:69045864-69045890; AsCpf1-1
gtgcatactctacaggacagtt

SEQ ID NO: 14394 - DNA, 23 bp, Artificial Sequence
  Synthetic: FXN 3 forward 9:69045864-69045891; AsCpf1-1
gtgcatactctacaggacagttg

SEQ ID NO: 14395 - DNA, 24 bp, Artificial Sequence
  Synthetic: FXN 3 forward 9:69045864-69045892; AsCpf1-1
gtgcatactctacaggacagttga

SEQ ID NO: 14396 - DNA, 25 bp, Artificial Sequence
  Synthetic: FXN 3 forward 9:69045864-69045893; AsCpf1-1
gtgcatactctacaggacagttgac

SEQ ID NO: 14397 - DNA, 18 bp, Artificial Sequence
  Synthetic: FXN 3 forward 9:69045865-69045887; AsCpf1-1
tgcatactctacaggaca

SEQ ID NO: 14398 - DNA, 19 bp, Artificial Sequence
  Synthetic: FXN 3 forward 9:69045865-69045888; AsCpf1-1
tgcatactctacaggacag

SEQ ID NO: 14399 - DNA, 20 bp, Artificial Sequence
  Synthetic: FXN 3 forward 9:69045865-69045889; AsCpf1-1
tgcatactctacaggacagt

SEQ ID NO: 14400 - DNA, 21 bp, Artificial Sequence
  Synthetic: FXN 3 forward 9:69045865-69045890; AsCpf1-1
tgcatactctacaggacagtt

SEQ ID NO: 14401 - DNA, 22 bp, Artificial Sequence
  Synthetic: FXN 3 forward 9:69045865-69045891; AsCpf1-1
tgcatactctacaggacagttg

SEQ ID NO: 14402 - DNA, 23 bp, Artificial Sequence
  Synthetic: FXN 3 forward 9:69045865-69045892; AsCpf1-1
tgcatactctacaggacagttga

SEQ ID NO: 14403 - DNA, 24 bp, Artificial Sequence
  Synthetic: FXN 3 forward 9:69045865-69045893; AsCpf1-1
tgcatactctacaggacagttgac

SEQ ID NO: 14404 - DNA, 25 bp, Artificial Sequence
  Synthetic: FXN 3 forward 9:69045865-69045894; AsCpf1-1
tgcatactctacaggacagttgact

SEQ ID NO: 14405 - DNA, 18 bp, Artificial Sequence
  Synthetic: FXN 3 forward 9:69045901-69045923; AsCpf1-1
tggttagtaataagctgt

SEQ ID NO: 14406 - DNA, 19 bp, Artificial Sequence
  Synthetic: FXN 3 forward 9:69045901-69045924; AsCpf1-1
tggttagtaataagctgta

SEQ ID NO: 14407 - DNA, 20 bp, Artificial Sequence
  Synthetic: FXN 3 forward 9:69045901-69045925; AsCpf1-1
tggttagtaataagctgtag

SEQ ID NO: 14408 - DNA, 21 bp, Artificial Sequence
  Synthetic: FXN 3 forward 9:69045901-69045926; AsCpf1-1
tggttagtaataagctgtagc

SEQ ID NO: 14409 - DNA, 22 bp, Artificial Sequence
  Synthetic: FXN 3 forward 9:69045901-69045927; AsCpf1-1
tggttagtaataagctgtagca

SEQ ID NO: 14410 - DNA, 23 bp, Artificial Sequence
  Synthetic: FXN 3 forward 9:69045901-69045928; AsCpf1-1
tggttagtaataagctgtagcag

SEQ ID NO: 14411 - DNA, 24 bp, Artificial Sequence
  Synthetic: FXN 3 forward 9:69045901-69045929; AsCpf1-1
tggttagtaataagctgtagcagt

SEQ ID NO: 14412 - DNA, 25 bp, Artificial Sequence
  Synthetic: FXN 3 forward 9:69045901-69045930; AsCpf1-1
tggttagtaataagctgtagcagtg

SEQ ID NO: 14413 - DNA, 18 bp, Artificial Sequence
  Synthetic: FXN 3 reverse 9:69045939-69045961; AsCpf1-1
ctgggagggcatactgaa

SEQ ID NO: 14414 - DNA, 19 bp, Artificial Sequence
  Synthetic: FXN 3 reverse 9:69045939-69045962; AsCpf1-1
ctgggagggcatactgaaa

SEQ ID NO: 14415 - DNA, 20 bp, Artificial Sequence
  Synthetic: FXN 3 reverse 9:69045939-69045963; AsCpf1-1
ctgggagggcatactgaaag

SEQ ID NO: 14416 - DNA, 21 bp, Artificial Sequence
  Synthetic: FXN 3 reverse 9:69045939-69045964; AsCpf1-1
ctgggagggcatactgaaagc

SEQ ID NO: 14417 - DNA, 22 bp, Artificial Sequence
  Synthetic: FXN 3 reverse 9:69045939-69045965; AsCpf1-1
ctgggagggcatactgaaagca

SEQ ID NO: 14418 - DNA, 23 bp, Artificial Sequence
  Synthetic: FXN 3 reverse 9:69045939-69045966; AsCpf1-1
ctgggagggcatactgaaagcat

SEQ ID NO: 14419 - DNA, 24 bp, Artificial Sequence
  Synthetic: FXN 3 reverse 9:69045939-69045967; AsCpf1-1
ctgggagggcatactgaaagcatg

SEQ ID NO: 14420 - DNA, 25 bp, Artificial Sequence
  Synthetic: FXN 3 reverse 9:69045939-69045968; AsCpf1-1
ctgggagggcatactgaaagcatgc

SEQ ID NO: 14421 - DNA, 18 bp, Artificial Sequence
  Synthetic: FXN 3 reverse 9:69045943-69045965; AsCpf1-1
ttcactgggagggcatac

SEQ ID NO: 14422 - DNA, 19 bp, Artificial Sequence
  Synthetic: FXN 3 reverse 9:69045943-69045966; AsCpf1-1
ttcactgggagggcatact

SEQ ID NO: 14423 - DNA, 20 bp, Artificial Sequence
  Synthetic: FXN 3 reverse 9:69045943-69045967; AsCpf1-1
ttcactgggagggcatactg

SEQ ID NO: 14424 - DNA, 21 bp, Artificial Sequence
  Synthetic: FXN 3 reverse 9:69045943-69045968; AsCpf1-1
ttcactgggagggcatactga

SEQ ID NO: 14425 - DNA, 22 bp, Artificial Sequence
  Synthetic: FXN 3 reverse 9:69045943-69045969; AsCpf1-1
ttcactgggagggcatactgaa

SEQ ID NO: 14426 - DNA, 23 bp, Artificial Sequence
  Synthetic: FXN 3 reverse 9:69045943-69045970; AsCpf1-1
ttcactgggagggcatactgaaa

SEQ ID NO: 14427 - DNA, 24 bp, Artificial Sequence
  Synthetic: FXN 3 reverse 9:69045943-69045971; AsCpf1-1
ttcactgggagggcatactgaaag

SEQ ID NO: 14428 - DNA, 25 bp, Artificial Sequence
  Synthetic: FXN 3 reverse 9:69045943-69045972; AsCpf1-1
ttcactgggagggcatactgaaagc

SEQ ID NO: 14429 - DNA, 18 bp, Artificial Sequence
  Synthetic: FXN 3 forward 9:69045946-69045968; AsCpf1-1
gtatgccctcccagtgaa

SEQ ID NO: 14430 - DNA, 19 bp, Artificial Sequence
  Synthetic: FXN 3 forward 9:69045946-69045969; AsCpf1-1
gtatgccctcccagtgaat

SEQ ID NO: 14431 - DNA, 20 bp, Artificial Sequence
  Synthetic: FXN 3 forward 9:69045946-69045970; AsCpf1-1
gtatgccctcccagtgaatg

SEQ ID NO: 14432 - DNA, 21 bp, Artificial Sequence
  Synthetic: FXN 3 forward 9:69045946-69045971; AsCpf1-1
gtatgccctcccagtgaatga

SEQ ID NO: 14433 - DNA, 22 bp, Artificial Sequence
  Synthetic: FXN 3 forward 9:69045946-69045972; AsCpf1-1
gtatgccctcccagtgaatgaa

SEQ ID NO: 14434 - DNA, 23 bp, Artificial Sequence
  Synthetic: FXN 3 forward 9:69045946-69045973; AsCpf1-1
gtatgccctcccagtgaatgaaa

SEQ ID NO: 14435 - DNA, 24 bp, Artificial Sequence
  Synthetic: FXN 3 forward 9:69045946-69045974; AsCpf1-1
gtatgccctcccagtgaatgaaag

SEQ ID NO: 14436 - DNA, 25 bp, Artificial Sequence
  Synthetic: FXN 3 forward 9:69045946-69045975; AsCpf1-1
gtatgccctcccagtgaatgaaagt

SEQ ID NO: 14437 - DNA, 18 bp, Artificial Sequence
  Synthetic: FXN 3 forward 9:69045958-69045980; AsCpf1-1
agtgaatgaaagtcctga

SEQ ID NO: 14438 - DNA, 19 bp, Artificial Sequence
  Synthetic: FXN 3 forward 9:69045958-69045981; AsCpf1-1
agtgaatgaaagtcctgag

SEQ ID NO: 14439 - DNA, 20 bp, Artificial Sequence
  Synthetic: FXN 3 forward 9:69045958-69045982; AsCpf1-1
agtgaatgaaagtcctgagg

SEQ ID NO: 14440 - DNA, 21 bp, Artificial Sequence
  Synthetic: FXN 3 forward 9:69045958-69045983; AsCpf1-1
agtgaatgaaagtcctgaggc

SEQ ID NO: 14441 - DNA, 22 bp, Artificial Sequence
  Synthetic: FXN 3 forward 9:69045958-69045984; AsCpf1-1
agtgaatgaaagtcctgaggca

SEQ ID NO: 14442 - DNA, 23 bp, Artificial Sequence
  Synthetic: FXN 3 forward 9:69045958-69045985; AsCpf1-1
agtgaatgaaagtcctgaggcaa

SEQ ID NO: 14443 - DNA, 24 bp, Artificial Sequence
  Synthetic: FXN 3 forward 9:69045958-69045986; AsCpf1-1
agtgaatgaaagtcctgaggcaac

SEQ ID NO: 14444 - DNA, 25 bp, Artificial Sequence
  Synthetic: FXN 3 forward 9:69045958-69045987; AsCpf1-1
agtgaatgaaagtcctgaggcaacc

SEQ ID NO: 14445 - DNA, 18 bp, Artificial Sequence
  Synthetic: FXN 3 reverse 9:69045970-69045992; AsCpf1-1
cccttgggggttgcctca

SEQ ID NO: 14446 - DNA, 19 bp, Artificial Sequence
  Synthetic: FXN 3 reverse 9:69045970-69045993; AsCpf1-1
cccttgggggttgcctcag

SEQ ID NO: 14447 - DNA, 20 bp, Artificial Sequence
  Synthetic: FXN 3 reverse 9:69045970-69045994; AsCpf1-1
cccttgggggttgcctcagg

SEQ ID NO: 14448 - DNA, 21 bp, Artificial Sequence
  Synthetic: FXN 3 reverse 9:69045970-69045995; AsCpf1-1
cccttgggggttgcctcagga

SEQ ID NO: 14449 - DNA, 22 bp, Artificial Sequence
  Synthetic: FXN 3 reverse 9:69045970-69045996; AsCpf1-1
cccttgggggttgcctcaggac

SEQ ID NO: 14450 - DNA, 23 bp, Artificial Sequence
  Synthetic: FXN 3 reverse 9:69045970-69045997; AsCpf1-1
cccttgggggttgcctcaggact

SEQ ID NO: 14451 - DNA, 24 bp, Artificial Sequence
  Synthetic: FXN 3 reverse 9:69045970-69045998; AsCpf1-1
cccttgggggttgcctcaggactt

SEQ ID NO: 14452 - DNA, 25 bp, Artificial Sequence
  Synthetic: FXN 3 reverse 9:69045970-69045999; AsCpf1-1
cccttgggggttgcctcaggacttt

SEQ ID NO: 14453 - DNA, 18 bp, Artificial Sequence
  Synthetic: FXN 3 reverse 9:69045971-69045993; AsCpf1-1
acccttgggggttgcctc

SEQ ID NO: 14454 - DNA, 19 bp, Artificial Sequence
  Synthetic: FXN 3 reverse 9:69045971-69045994; AsCpf1-1
acccttgggggttgcctca

SEQ ID NO: 14455 - DNA, 20 bp, Artificial Sequence
  Synthetic: FXN 3 reverse 9:69045971-69045995; AsCpf1-1
acccttgggggttgcctcag

SEQ ID NO: 14456 - DNA, 21 bp, Artificial Sequence
  Synthetic: FXN 3 reverse 9:69045971-69045996; AsCpf1-1
acccttgggggttgcctcagg

SEQ ID NO: 14457 - DNA, 22 bp, Artificial Sequence
  Synthetic: FXN 3 reverse 9:69045971-69045997; AsCpf1-1
acccttgggggttgcctcagga

SEQ ID NO: 14458 - DNA, 23 bp, Artificial Sequence
  Synthetic: FXN 3 reverse 9:69045971-69045998; AsCpf1-1
acccttgggggttgcctcaggac

SEQ ID NO: 14459 - DNA, 24 bp, Artificial Sequence
  Synthetic: FXN 3 reverse 9:69045971-69045999; AsCpf1-1
acccttgggggttgcctcaggact

SEQ ID NO: 14460 - DNA, 25 bp, Artificial Sequence
  Synthetic: FXN 3 reverse 9:69045971-69046000; AsCpf1-1
acccttgggggttgcctcaggactt

SEQ ID NO: 14461 - DNA, 18 bp, Artificial Sequence
  Synthetic: FXN 3 reverse 9:69045994-69046016; AsCpf1-1
gtgggtggtggcctggca

SEQ ID NO: 14462 - DNA, 19 bp, Artificial Sequence
  Synthetic: FXN 3 reverse 9:69045994-69046017; AsCpf1-1
gtgggtggtggcctggcac

SEQ ID NO: 14463 - DNA, 20 bp, Artificial Sequence
  Synthetic: FXN 3 reverse 9:69045994-69046018; AsCpf1-1
gtgggtggtggcctggcact

SEQ ID NO: 14464 - DNA, 21 bp, Artificial Sequence
  Synthetic: FXN 3 reverse 9:69045994-69046019; AsCpf1-1
gtgggtggtggcctggcactt

SEQ ID NO: 14465 - DNA, 22 bp, Artificial Sequence
  Synthetic: FXN 3 reverse 9:69045994-69046020; AsCpf1-1
gtgggtggtggcctggcacttc

SEQ ID NO: 14466 - DNA, 23 bp, Artificial Sequence
  Synthetic: FXN 3 reverse 9:69045994-69046021; AsCpf1-1
gtgggtggtggcctggcacttcc

SEQ ID NO: 14467 - DNA, 24 bp, Artificial Sequence
  Synthetic: FXN 3 reverse 9:69045994-69046022; AsCpf1-1
gtgggtggtggcctggcacttcca

SEQ ID NO: 14468 - DNA, 25 bp, Artificial Sequence
  Synthetic: FXN 3 reverse 9:69045994-69046023; AsCpf1-1
gtgggtggtggcctggcacttccac

SEQ ID NO: 14469 - DNA, 18 bp, Artificial Sequence
  Synthetic: FXN 3 reverse 9:69046000-69046022; AsCpf1-1
cctccagtgggtggtggc

SEQ ID NO: 14470 - DNA, 19 bp, Artificial Sequence
  Synthetic: FXN 3 reverse 9:69046000-69046023; AsCpf1-1
cctccagtgggtggtggcc

SEQ ID NO: 14471 - DNA, 20 bp, Artificial Sequence
  Synthetic: FXN 3 reverse 9:69046000-69046024; AsCpf1-1
cctccagtgggtggtggcct

SEQ ID NO: 14472 - DNA, 21 bp, Artificial Sequence
  Synthetic: FXN 3 reverse 9:69046000-69046025; AsCpf1-1
cctccagtgggtggtggcctg

SEQ ID NO: 14473 - DNA, 22 bp, Artificial Sequence
  Synthetic: FXN 3 reverse 9:69046000-69046026; AsCpf1-1
cctccagtgggtggtggcctgg

SEQ ID NO: 14474 - DNA, 23 bp, Artificial Sequence
  Synthetic: FXN 3 reverse 9:69046000-69046027; AsCpf1-1
cctccagtgggtggtggcctggc

SEQ ID NO: 14475 - DNA, 24 bp, Artificial Sequence
  Synthetic: FXN 3 reverse 9:69046000-69046028; AsCpf1-1
cctccagtgggtggtggcctggca

SEQ ID NO: 14476 - DNA, 25 bp, Artificial Sequence
  Synthetic: FXN 3 reverse 9:69046000-69046029; AsCpf1-1
cctccagtgggtggtggcctggcac

SEQ ID NO: 14477 - DNA, 18 bp, Artificial Sequence
  Synthetic: FXN 3 forward 9:69046031-69046053; AsCpf1-1
gtgatgggtttgctttgg

SEQ ID NO: 14478 - DNA, 19 bp, Artificial Sequence
  Synthetic: FXN 3 forward 9:69046031-69046054; AsCpf1-1
gtgatgggtttgctttggt

SEQ ID NO: 14479 - DNA, 20 bp, Artificial Sequence
  Synthetic: FXN 3 forward 9:69046031-69046055; AsCpf1-1
gtgatgggtttgctttggtc

SEQ ID NO: 14480 - DNA, 21 bp, Artificial Sequence
  Synthetic: FXN 3 forward 9:69046031-69046056; AsCpf1-1
gtgatgggtttgctttggtct

SEQ ID NO: 14481 - DNA, 22 bp, Artificial Sequence
  Synthetic: FXN 3 forward 9:69046031-69046057; AsCpf1-1
gtgatgggtttgctttggtctg

SEQ ID NO: 14482 - DNA, 23 bp, Artificial Sequence
  Synthetic: FXN 3 forward 9:69046031-69046058; AsCpf1-1
gtgatgggtttgctttggtctgc

SEQ ID NO: 14483 - DNA, 24 bp, Artificial Sequence
  Synthetic: FXN 3 forward 9:69046031-69046059; AsCpf1-1
gtgatgggtttgctttggtctgcg

SEQ ID NO: 14484 - DNA, 25 bp, Artificial Sequence
  Synthetic: FXN 3 forward 9:69046031-69046060; AsCpf1-1
gtgatgggtttgctttggtctgcga

SEQ ID NO: 14485 - DNA, 18 bp, Artificial Sequence
  Synthetic: FXN 3 forward 9:69046032-69046054; AsCpf1-1
tgatgggtttgctttggt

SEQ ID NO: 14486 - DNA, 19 bp, Artificial Sequence
  Synthetic: FXN 3 forward 9:69046032-69046055; AsCpf1-1
tgatgggtttgctttggtc

SEQ ID NO: 14487 - DNA, 20 bp, Artificial Sequence
  Synthetic: FXN 3 forward 9:69046032-69046056; AsCpf1-1
tgatgggtttgctttggtct

SEQ ID NO: 14488 - DNA, 21 bp, Artificial Sequence
  Synthetic: FXN 3 forward 9:69046032-69046057; AsCpf1-1
tgatgggtttgctttggtctg

SEQ ID NO: 14489 - DNA, 22 bp, Artificial Sequence
  Synthetic: FXN 3 forward 9:69046032-69046058; AsCpf1-1
tgatgggtttgctttggtctgc

SEQ ID NO: 14490 - DNA, 23 bp, Artificial Sequence
  Synthetic: FXN 3 forward 9:69046032-69046059; AsCpf1-1
tgatgggtttgctttggtctgcg

SEQ ID NO: 14491 - DNA, 24 bp, Artificial Sequence
  Synthetic: FXN 3 forward 9:69046032-69046060; AsCpf1-1
tgatgggtttgctttggtctgcga

SEQ ID NO: 14492 - DNA, 25 bp, Artificial Sequence
  Synthetic: FXN 3 forward 9:69046032-69046061; AsCpf1-1
tgatgggtttgctttggtctgcgaa

SEQ ID NO: 14493 - DNA, 18 bp, Artificial Sequence
  Synthetic: FXN 3 reverse 9:69046032-69046054; AsCpf1-1
cagaccaaagcaaaccca

SEQ ID NO: 14494 - DNA, 19 bp, Artificial Sequence
  Synthetic: FXN 3 reverse 9:69046032-69046055; AsCpf1-1
cagaccaaagcaaacccat

SEQ ID NO: 14495 - DNA, 20 bp, Artificial Sequence
  Synthetic: FXN 3 reverse 9:69046032-69046056; AsCpf1-1
cagaccaaagcaaacccatc

SEQ ID NO: 14496 - DNA, 21 bp, Artificial Sequence
  Synthetic: FXN 3 reverse 9:69046032-69046057; AsCpf1-1
cagaccaaagcaaacccatca

SEQ ID NO: 14497 - DNA, 22 bp, Artificial Sequence
  Synthetic: FXN 3 reverse 9:69046032-69046058; AsCpf1-1
cagaccaaagcaaacccatcac

SEQ ID NO: 14498 - DNA, 23 bp, Artificial Sequence
  Synthetic: FXN 3 reverse 9:69046032-69046059; AsCpf1-1
cagaccaaagcaaacccatcacg

SEQ ID NO: 14499 - DNA, 24 bp, Artificial Sequence
  Synthetic: FXN 3 reverse 9:69046032-69046060; AsCpf1-1
cagaccaaagcaaacccatcacgg

SEQ ID NO: 14500 - DNA, 25 bp, Artificial Sequence
  Synthetic: FXN 3 reverse 9:69046032-69046061; AsCpf1-1
cagaccaaagcaaacccatcacgga

SEQ ID NO: 14501 - DNA, 18 bp, Artificial Sequence
  Synthetic: FXN 3 reverse 9:69046048-69046070; AsCpf1-1
catgacagtagattcgca

SEQ ID NO: 14502 - DNA, 19 bp, Artificial Sequence
  Synthetic: FXN 3 reverse 9:69046048-69046071; AsCpf1-1
catgacagtagattcgcag

SEQ ID NO: 14503 - DNA, 20 bp, Artificial Sequence
  Synthetic: FXN 3 reverse 9:69046048-69046072; AsCpf1-1
catgacagtagattcgcaga

SEQ ID NO: 14504 - DNA, 21 bp, Artificial Sequence
  Synthetic: FXN 3 reverse 9:69046048-69046073; AsCpf1-1
catgacagtagattcgcagac

SEQ ID NO: 14505 - DNA, 22 bp, Artificial Sequence
  Synthetic: FXN 3 reverse 9:69046048-69046074; AsCpf1-1
catgacagtagattcgcagacc

SEQ ID NO: 14506 - DNA, 23 bp, Artificial Sequence
  Synthetic: FXN 3 reverse 9:69046048-69046075; AsCpf1-1
catgacagtagattcgcagacca

SEQ ID NO: 14507 - DNA, 24 bp, Artificial Sequence
  Synthetic: FXN 3 reverse 9:69046048-69046076; AsCpf1-1
catgacagtagattcgcagaccaa

SEQ ID NO: 14508 - DNA, 25 bp, Artificial Sequence
  Synthetic: FXN 3 reverse 9:69046048-69046077; AsCpf1-1
catgacagtagattcgcagaccaaa

SEQ ID NO: 14509 - DNA, 18 bp, Artificial Sequence
  Synthetic: FXN 3 reverse 9:69046065-69046087; AsCpf1-1
gagcacagatctctccac

SEQ ID NO: 14510 - DNA, 19 bp, Artificial Sequence
  Synthetic: FXN 3 reverse 9:69046065-69046088; AsCpf1-1
gagcacagatctctccaca

SEQ ID NO: 14511 - DNA, 20 bp, Artificial Sequence
  Synthetic: FXN 3 reverse 9:69046065-69046089; AsCpf1-1
gagcacagatctctccacat

SEQ ID NO: 14512 - DNA, 21 bp, Artificial Sequence
  Synthetic: FXN 3 reverse 9:69046065-69046090; AsCpf1-1
gagcacagatctctccacatg

SEQ ID NO: 14513 - DNA, 22 bp, Artificial Sequence
  Synthetic: FXN 3 reverse 9:69046065-69046091; AsCpf1-1
gagcacagatctctccacatga

SEQ ID NO: 14514 - DNA, 23 bp, Artificial Sequence
  Synthetic: FXN 3 reverse 9:69046065-69046092; AsCpf1-1
gagcacagatctctccacatgac

SEQ ID NO: 14515 - DNA, 24 bp, Artificial Sequence
  Synthetic: FXN 3 reverse 9:69046065-69046093; AsCpf1-1
gagcacagatctctccacatgaca

SEQ ID NO: 14516 - DNA, 25 bp, Artificial Sequence
  Synthetic: FXN 3 reverse 9:69046065-69046094; AsCpf1-1
gagcacagatctctccacatgacag

SEQ ID NO: 14517 - DNA, 18 bp, Artificial Sequence
  Synthetic: FXN 3 reverse 9:69046066-69046088; AsCpf1-1
agagcacagatctctcca

SEQ ID NO: 14518 - DNA, 19 bp, Artificial Sequence
  Synthetic: FXN 3 reverse 9:69046066-69046089; AsCpf1-1
agagcacagatctctccac

SEQ ID NO: 14519 - DNA, 20 bp, Artificial Sequence
  Synthetic: FXN 3 reverse 9:69046066-69046090; AsCpf1-1
agagcacagatctctccaca

SEQ ID NO: 14520 - DNA, 21 bp, Artificial Sequence
  Synthetic: FXN 3 reverse 9:69046066-69046091; AsCpf1-1
agagcacagatctctccacat

SEQ ID NO: 14521 - DNA, 22 bp, Artificial Sequence
  Synthetic: FXN 3 reverse 9:69046066-69046092; AsCpf1-1
agagcacagatctctccacatg

SEQ ID NO: 14522 - DNA, 23 bp, Artificial Sequence
  Synthetic: FXN 3 reverse 9:69046066-69046093; AsCpf1-1
agagcacagatctctccacatga

SEQ ID NO: 14523 - DNA, 24 bp, Artificial Sequence
  Synthetic: FXN 3 reverse 9:69046066-69046094; AsCpf1-1
agagcacagatctctccacatgac

SEQ ID NO: 14524 - DNA, 25 bp, Artificial Sequence
  Synthetic: FXN 3 reverse 9:69046066-69046095; AsCpf1-1
agagcacagatctctccacatgaca

SEQ ID NO: 14525 - DNA, 18 bp, Artificial Sequence
  Synthetic: FXN 3 reverse 9:69046096-69046118; AsCpf1-1
gggcaagcttttctaact

SEQ ID NO: 14526 - DNA, 19 bp, Artificial Sequence
  Synthetic: FXN 3 reverse 9:69046096-69046119; AsCpf1-1
gggcaagcttttctaactg

SEQ ID NO: 14527 - DNA, 20 bp, Artificial Sequence
  Synthetic: FXN 3 reverse 9:69046096-69046120; AsCpf1-1
gggcaagcttttctaactgt

SEQ ID NO: 14528 - DNA, 21 bp, Artificial Sequence
  Synthetic: FXN 3 reverse 9:69046096-69046121; AsCpf1-1
gggcaagcttttctaactgta

SEQ ID NO: 14529 - DNA, 22 bp, Artificial Sequence
  Synthetic: FXN 3 reverse 9:69046096-69046122; AsCpf1-1
gggcaagcttttctaactgtat

SEQ ID NO: 14530 - DNA, 23 bp, Artificial Sequence
  Synthetic: FXN 3 reverse 9:69046096-69046123; AsCpf1-1
gggcaagcttttctaactgtatg

SEQ ID NO: 14531 - DNA, 24 bp, Artificial Sequence
  Synthetic: FXN 3 reverse 9:69046096-69046124; AsCpf1-1
gggcaagcttttctaactgtatgc

SEQ ID NO: 14532 - DNA, 25 bp, Artificial Sequence
  Synthetic: FXN 3 reverse 9:69046096-69046125; AsCpf1-1
gggcaagcttttctaactgtatgct

SEQ ID NO: 14533 - DNA, 18 bp, Artificial Sequence
  Synthetic: FXN 3 reverse 9:69046100-69046122; AsCpf1-1
ttcagggcaagcttttct

SEQ ID NO: 14534 - DNA, 19 bp, Artificial Sequence
  Synthetic: FXN 3 reverse 9:69046100-69046123; AsCpf1-1
ttcagggcaagcttttcta

SEQ ID NO: 14535 - DNA, 20 bp, Artificial Sequence
  Synthetic: FXN 3 reverse 9:69046100-69046124; AsCpf1-1
ttcagggcaagcttttctaa

SEQ ID NO: 14536 - DNA, 21 bp, Artificial Sequence
  Synthetic: FXN 3 reverse 9:69046100-69046125; AsCpf1-1
ttcagggcaagcttttctaac

SEQ ID NO: 14537 - DNA, 22 bp, Artificial Sequence
  Synthetic: FXN 3 reverse 9:69046100-69046126; AsCpf1-1
ttcagggcaagcttttctaact

SEQ ID NO: 14538 - DNA, 23 bp, Artificial Sequence
  Synthetic: FXN 3 reverse 9:69046100-69046127; AsCpf1-1
ttcagggcaagcttttctaactg

SEQ ID NO: 14539 - DNA, 24 bp, Artificial Sequence
  Synthetic: FXN 3 reverse 9:69046100-69046128; AsCpf1-1
ttcagggcaagcttttctaactgt

SEQ ID NO: 14540 - DNA, 25 bp, Artificial Sequence
  Synthetic: FXN 3 reverse 9:69046100-69046129; AsCpf1-1
ttcagggcaagcttttctaactgta

SEQ ID NO: 14541 - DNA, 18 bp, Artificial Sequence
  Synthetic: FXN 3 reverse 9:69046101-69046123; AsCpf1-1
cttcagggcaagcttttc

SEQ ID NO: 14542 - DNA, 19 bp, Artificial Sequence
  Synthetic: FXN 3 reverse 9:69046101-69046124; AsCpf1-1
cttcagggcaagcttttct

SEQ ID NO: 14543 - DNA, 20 bp, Artificial Sequence
  Synthetic: FXN 3 reverse 9:69046101-69046125; AsCpf1-1
cttcagggcaagcttttcta

SEQ ID NO: 14544 - DNA, 21 bp, Artificial Sequence
  Synthetic: FXN 3 reverse 9:69046101-69046126; AsCpf1-1
cttcagggcaagcttttctaa

SEQ ID NO: 14545 - DNA, 22 bp, Artificial Sequence
  Synthetic: FXN 3 reverse 9:69046101-69046127; AsCpf1-1
cttcagggcaagcttttctaac

SEQ ID NO: 14546 - DNA, 23 bp, Artificial Sequence
  Synthetic: FXN 3 reverse 9:69046101-69046128; AsCpf1-1
cttcagggcaagcttttctaact

SEQ ID NO: 14547 - DNA, 24 bp, Artificial Sequence
  Synthetic: FXN 3 reverse 9:69046101-69046129; AsCpf1-1
cttcagggcaagcttttctaactg

SEQ ID NO: 14548 - DNA, 25 bp, Artificial Sequence
  Synthetic: FXN 3 reverse 9:69046101-69046130; AsCpf1-1
cttcagggcaagcttttctaactgt

SEQ ID NO: 14549 - DNA, 18 bp, Artificial Sequence
  Synthetic: FXN 3 reverse 9:69046112-69046134; AsCpf1-1
ccatacattcccttcagg

SEQ ID NO: 14550 - DNA, 19 bp, Artificial Sequence
  Synthetic: FXN 3 reverse 9:69046112-69046135; AsCpf1-1
ccatacattcccttcaggg

SEQ ID NO: 14551 - DNA, 20 bp, Artificial Sequence
  Synthetic: FXN 3 reverse 9:69046112-69046136; AsCpf1-1
ccatacattcccttcagggc

SEQ ID NO: 14552 - DNA, 21 bp, Artificial Sequence
  Synthetic: FXN 3 reverse 9:69046112-69046137; AsCpf1-1
ccatacattcccttcagggca

SEQ ID NO: 14553 - DNA, 22 bp, Artificial Sequence
  Synthetic: FXN 3 reverse 9:69046112-69046138; AsCpf1-1
ccatacattcccttcagggcaa

SEQ ID NO: 14554 - DNA, 23 bp, Artificial Sequence
  Synthetic: FXN 3 reverse 9:69046112-69046139; AsCpf1-1
ccatacattcccttcagggcaag

SEQ ID NO: 14555 - DNA, 24 bp, Artificial Sequence
  Synthetic: FXN 3 reverse 9:69046112-69046140; AsCpf1-1
ccatacattcccttcagggcaagc

SEQ ID NO: 14556 - DNA, 25 bp, Artificial Sequence
  Synthetic: FXN 3 reverse 9:69046112-69046141; AsCpf1-1
ccatacattcccttcagggcaagct

SEQ ID NO: 14557 - DNA, 18 bp, Artificial Sequence
  Synthetic: FXN 3 reverse 9:69046117-69046139; AsCpf1-1
cttcaccatacattccct

SEQ ID NO: 14558 - DNA, 19 bp, Artificial Sequence
  Synthetic: FXN 3 reverse 9:69046117-69046140; AsCpf1-1
cttcaccatacattccctt

SEQ ID NO: 14559 - DNA, 20 bp, Artificial Sequence
  Synthetic: FXN 3 reverse 9:69046117-69046141; AsCpf1-1
cttcaccatacattcccttc

SEQ ID NO: 14560 - DNA, 21 bp, Artificial Sequence
  Synthetic: FXN 3 reverse 9:69046117-69046142; AsCpf1-1
cttcaccatacattcccttca

SEQ ID NO: 14561 - DNA, 22 bp, Artificial Sequence
  Synthetic: FXN 3 reverse 9:69046117-69046143; AsCpf1-1
cttcaccatacattcccttcag

SEQ ID NO: 14562 - DNA, 23 bp, Artificial Sequence
  Synthetic: FXN 3 reverse 9:69046117-69046144; AsCpf1-1
cttcaccatacattcccttcagg

SEQ ID NO: 14563 - DNA, 24 bp, Artificial Sequence
  Synthetic: FXN 3 reverse 9:69046117-69046145; AsCpf1-1
cttcaccatacattcccttcaggg

SEQ ID NO: 14564 - DNA, 25 bp, Artificial Sequence
  Synthetic: FXN 3 reverse 9:69046117-69046146; AsCpf1-1
cttcaccatacattcccttcagggc

SEQ ID NO: 14565 - DNA, 18 bp, Artificial Sequence
  Synthetic: FXN 3 reverse 9:69046123-69046145; AsCpf1-1
cctccccttcaccataca

SEQ ID NO: 14566 - DNA, 19 bp, Artificial Sequence
  Synthetic: FXN 3 reverse 9:69046123-69046146; AsCpf1-1
cctccccttcaccatacat

SEQ ID NO: 14567 - DNA, 20 bp, Artificial Sequence
  Synthetic: FXN 3 reverse 9:69046123-69046147; AsCpf1-1
cctccccttcaccatacatt

SEQ ID NO: 14568 - DNA, 21 bp, Artificial Sequence
  Synthetic: FXN 3 reverse 9:69046123-69046148; AsCpf1-1
cctccccttcaccatacattc

SEQ ID NO: 14569 - DNA, 22 bp, Artificial Sequence
  Synthetic: FXN 3 reverse 9:69046123-69046149; AsCpf1-1
cctccccttcaccatacattcc

SEQ ID NO: 14570 - DNA, 23 bp, Artificial Sequence
  Synthetic: FXN 3 reverse 9:69046123-69046150; AsCpf1-1
cctccccttcaccatacattccc

SEQ ID NO: 14571 - DNA, 24 bp, Artificial Sequence
  Synthetic: FXN 3 reverse 9:69046123-69046151; AsCpf1-1
cctccccttcaccatacattccct

SEQ ID NO: 14572 - DNA, 25 bp, Artificial Sequence
  Synthetic: FXN 3 reverse 9:69046123-69046152; AsCpf1-1
cctccccttcaccatacattccctt

SEQ ID NO: 14573 - DNA, 18 bp, Artificial Sequence
  Synthetic: FXN 3 reverse 9:69046145-69046167; AsCpf1-1
gaaatgcaaatataacct

SEQ ID NO: 14574 - DNA, 19 bp, Artificial Sequence
  Synthetic: FXN 3 reverse 9:69046145-69046168; AsCpf1-1
gaaatgcaaatataacctt

SEQ ID NO: 14575 - DNA, 20 bp, Artificial Sequence
  Synthetic: FXN 3 reverse 9:69046145-69046169; AsCpf1-1
gaaatgcaaatataaccttt

SEQ ID NO: 14576 - DNA, 21 bp, Artificial Sequence
  Synthetic: FXN 3 reverse 9:69046145-69046170; AsCpf1-1
gaaatgcaaatataacctttc

SEQ ID NO: 14577 - DNA, 22 bp, Artificial Sequence
  Synthetic: FXN 3 reverse 9:69046145-69046171; AsCpf1-1
gaaatgcaaatataacctttca

SEQ ID NO: 14578 - DNA, 23 bp, Artificial Sequence
  Synthetic: FXN 3 reverse 9:69046145-69046172; AsCpf1-1
gaaatgcaaatataacctttcac

SEQ ID NO: 14579 - DNA, 24 bp, Artificial Sequence
  Synthetic: FXN 3 reverse 9:69046145-69046173; AsCpf1-1
gaaatgcaaatataacctttcacc

SEQ ID NO: 14580 - DNA, 25 bp, Artificial Sequence
  Synthetic: FXN 3 reverse 9:69046145-69046174; AsCpf1-1
gaaatgcaaatataacctttcacct

SEQ ID NO: 14581 - DNA, 18 bp, Artificial Sequence
  Synthetic: FXN 3 reverse 9:69046159-69046181; AsCpf1-1
tacttagcccttcagaaa

SEQ ID NO: 14582 - DNA, 19 bp, Artificial Sequence
  Synthetic: FXN 3 reverse 9:69046159-69046182; AsCpf1-1
tacttagcccttcagaaat

SEQ ID NO: 14583 - DNA, 20 bp, Artificial Sequence
  Synthetic: FXN 3 reverse 9:69046159-69046183; AsCpf1-1
tacttagcccttcagaaatg

SEQ ID NO: 14584 - DNA, 21 bp, Artificial Sequence
  Synthetic: FXN 3 reverse 9:69046159-69046184; AsCpf1-1
tacttagcccttcagaaatgc

SEQ ID NO: 14585 - DNA, 22 bp, Artificial Sequence
  Synthetic: FXN 3 reverse 9:69046159-69046185; AsCpf1-1
tacttagcccttcagaaatgca

SEQ ID NO: 14586 - DNA, 23 bp, Artificial Sequence
  Synthetic: FXN 3 reverse 9:69046159-69046186; AsCpf1-1
tacttagcccttcagaaatgcaa

SEQ ID NO: 14587 - DNA, 24 bp, Artificial Sequence
  Synthetic: FXN 3 reverse 9:69046159-69046187; AsCpf1-1
tacttagcccttcagaaatgcaaa

SEQ ID NO: 14588 - DNA, 25 bp, Artificial Sequence
  Synthetic: FXN 3 reverse 9:69046159-69046188; AsCpf1-1
tacttagcccttcagaaatgcaaat

SEQ ID NO: 14589 - DNA, 18 bp, Artificial Sequence
  Synthetic: FXN 3 reverse 9:69046166-69046188; AsCpf1-1
ggtttcctacttagccct

SEQ ID NO: 14590 - DNA, 19 bp, Artificial Sequence
  Synthetic: FXN 3 reverse 9:69046166-69046189; AsCpf1-1
ggtttcctacttagccctt

SEQ ID NO: 14591 - DNA, 20 bp, Artificial Sequence
  Synthetic: FXN 3 reverse 9:69046166-69046190; AsCpf1-1
ggtttcctacttagcccttc

SEQ ID NO: 14592 - DNA, 21 bp, Artificial Sequence
  Synthetic: FXN 3 reverse 9:69046166-69046191; AsCpf1-1
ggtttcctacttagcccttca

SEQ ID NO: 14593 - DNA, 22 bp, Artificial Sequence
  Synthetic: FXN 3 reverse 9:69046166-69046192; AsCpf1-1
ggtttcctacttagcccttcag

SEQ ID NO: 14594 - DNA, 23 bp, Artificial Sequence
  Synthetic: FXN 3 reverse 9:69046166-69046193; AsCpf1-1
ggtttcctacttagcccttcaga

SEQ ID NO: 14595 - DNA, 24 bp, Artificial Sequence
  Synthetic: FXN 3 reverse 9:69046166-69046194; AsCpf1-1
ggtttcctacttagcccttcagaa

SEQ ID NO: 14596 - DNA, 25 bp, Artificial Sequence
  Synthetic: FXN 3 reverse 9:69046166-69046195; AsCpf1-1
ggtttcctacttagcccttcagaaa

SEQ ID NO: 14597 - DNA, 18 bp, Artificial Sequence
  Synthetic: FXN 3 reverse 9:69046167-69046189; AsCpf1-1
cggtttcctacttagccc

SEQ ID NO: 14598 - DNA, 19 bp, Artificial Sequence
  Synthetic: FXN 3 reverse 9:69046167-69046190; AsCpf1-1
cggtttcctacttagccct

SEQ ID NO: 14599 - DNA, 20 bp, Artificial Sequence
  Synthetic: FXN 3 reverse 9:69046167-69046191; AsCpf1-1
cggtttcctacttagccctt

SEQ ID NO: 14600 - DNA, 21 bp, Artificial Sequence
  Synthetic: FXN 3 reverse 9:69046167-69046192; AsCpf1-1
cggtttcctacttagcccttc

SEQ ID NO: 14601 - DNA, 22 bp, Artificial Sequence
  Synthetic: FXN 3 reverse 9:69046167-69046193; AsCpf1-1
cggtttcctacttagcccttca

SEQ ID NO: 14602 - DNA, 23 bp, Artificial Sequence
  Synthetic: FXN 3 reverse 9:69046167-69046194; AsCpf1-1
cggtttcctacttagcccttcag

SEQ ID NO: 14603 - DNA, 24 bp, Artificial Sequence
  Synthetic: FXN 3 reverse 9:69046167-69046195; AsCpf1-1
cggtttcctacttagcccttcaga

SEQ ID NO: 14604 - DNA, 25 bp, Artificial Sequence
  Synthetic: FXN 3 reverse 9:69046167-69046196; AsCpf1-1
cggtttcctacttagcccttcagaa

SEQ ID NO: 14605 - DNA, 18 bp, Artificial Sequence
  Synthetic: FXN 3 reverse 9:69046175-69046197; AsCpf1-1
ctggttcccggtttccta

SEQ ID NO: 14606 - DNA, 19 bp, Artificial Sequence
  Synthetic: FXN 3 reverse 9:69046175-69046198; AsCpf1-1
ctggttcccggtttcctac

SEQ ID NO: 14607 - DNA, 20 bp, Artificial Sequence
  Synthetic: FXN 3 reverse 9:69046175-69046199; AsCpf1-1
ctggttcccggtttcctact

SEQ ID NO: 14608 - DNA, 21 bp, Artificial Sequence
  Synthetic: FXN 3 reverse 9:69046175-69046200; AsCpf1-1
ctggttcccggtttcctactt

SEQ ID NO: 14609 - DNA, 22 bp, Artificial Sequence
  Synthetic: FXN 3 reverse 9:69046175-69046201; AsCpf1-1
ctggttcccggtttcctactta

SEQ ID NO: 14610 - DNA, 23 bp, Artificial Sequence
  Synthetic: FXN 3 reverse 9:69046175-69046202; AsCpf1-1
ctggttcccggtttcctacttag

SEQ ID NO: 14611 - DNA, 24 bp, Artificial Sequence
  Synthetic: FXN 3 reverse 9:69046175-69046203; AsCpf1-1
ctggttcccggtttcctacttagc

SEQ ID NO: 14612 - DNA, 25 bp, Artificial Sequence
  Synthetic: FXN 3 reverse 9:69046175-69046204; AsCpf1-1
ctggttcccggtttcctacttagcc

SEQ ID NO: 14613 - DNA, 18 bp, Artificial Sequence
  Synthetic: FXN 3 reverse 9:69046246-69046268; AsCpf1-1
ttttttctaagaaaaagg

SEQ ID NO: 14614 - DNA, 19 bp, Artificial Sequence
  Synthetic: FXN 3 reverse 9:69046246-69046269; AsCpf1-1
ttttttctaagaaaaaggg

SEQ ID NO: 14615 - DNA, 20 bp, Artificial Sequence
  Synthetic: FXN 3 reverse 9:69046246-69046270; AsCpf1-1
ttttttctaagaaaaaggga

SEQ ID NO: 14616 - DNA, 21 bp, Artificial Sequence
  Synthetic: FXN 3 reverse 9:69046246-69046271; AsCpf1-1
ttttttctaagaaaaagggaa

SEQ ID NO: 14617 - DNA, 22 bp, Artificial Sequence
  Synthetic: FXN 3 reverse 9:69046246-69046272; AsCpf1-1
ttttttctaagaaaaagggaat

SEQ ID NO: 14618 - DNA, 23 bp, Artificial Sequence
  Synthetic: FXN 3 reverse 9:69046246-69046273; AsCpf1-1
ttttttctaagaaaaagggaata

SEQ ID NO: 14619 - DNA, 24 bp, Artificial Sequence
  Synthetic: FXN 3 reverse 9:69046246-69046274; AsCpf1-1
ttttttctaagaaaaagggaatat

SEQ ID NO: 14620 - DNA, 25 bp, Artificial Sequence
  Synthetic: FXN 3 reverse 9:69046246-69046275; AsCpf1-1
ttttttctaagaaaaagggaatatg

SEQ ID NO: 14621 - DNA, 18 bp, Artificial Sequence
  Synthetic: FXN 3 forward 9:69046250-69046272; AsCpf1-1
ctttttcttagaaaaaat

SEQ ID NO: 14622 - DNA, 19 bp, Artificial Sequence
  Synthetic: FXN 3 forward 9:69046250-69046273; AsCpf1-1
ctttttcttagaaaaaatg

SEQ ID NO: 14623 - DNA, 20 bp, Artificial Sequence
  Synthetic: FXN 3 forward 9:69046250-69046274; AsCpf1-1
ctttttcttagaaaaaatgg

SEQ ID NO: 14624 - DNA, 21 bp, Artificial Sequence
  Synthetic: FXN 3 forward 9:69046250-69046275; AsCpf1-1
ctttttcttagaaaaaatgga

SEQ ID NO: 14625 - DNA, 22 bp, Artificial Sequence
  Synthetic: FXN 3 forward 9:69046250-69046276; AsCpf1-1
ctttttcttagaaaaaatggag

SEQ ID NO: 14626 - DNA, 23 bp, Artificial Sequence
  Synthetic: FXN 3 forward 9:69046250-69046277; AsCpf1-1
ctttttcttagaaaaaatggagc

SEQ ID NO: 14627 - DNA, 24 bp, Artificial Sequence
  Synthetic: FXN 3 forward 9:69046250-69046278; AsCpf1-1
ctttttcttagaaaaaatggagca

SEQ ID NO: 14628 - DNA, 25 bp, Artificial Sequence
  Synthetic: FXN 3 forward 9:69046250-69046279; AsCpf1-1
ctttttcttagaaaaaatggagcac

SEQ ID NO: 14629 - DNA, 18 bp, Artificial Sequence
  Synthetic: FXN 3 forward 9:69046251-69046273; AsCpf1-1
tttttcttagaaaaaatg

SEQ ID NO: 14630 - DNA, 19 bp, Artificial Sequence
  Synthetic: FXN 3 forward 9:69046251-69046274; AsCpf1-1
tttttcttagaaaaaatgg

SEQ ID NO: 14631 - DNA, 20 bp, Artificial Sequence
  Synthetic: FXN 3 forward 9:69046251-69046275; AsCpf1-1
tttttcttagaaaaaatgga

SEQ ID NO: 14632 - DNA, 21 bp, Artificial Sequence
  Synthetic: FXN 3 forward 9:69046251-69046276; AsCpf1-1
tttttcttagaaaaaatggag

SEQ ID NO: 14633 - DNA, 22 bp, Artificial Sequence
  Synthetic: FXN 3 forward 9:69046251-69046277; AsCpf1-1
tttttcttagaaaaaatggagc

SEQ ID NO: 14634 - DNA, 23 bp, Artificial Sequence
  Synthetic: FXN 3 forward 9:69046251-69046278; AsCpf1-1
tttttcttagaaaaaatggagca

SEQ ID NO: 14635 - DNA, 24 bp, Artificial Sequence
  Synthetic: FXN 3 forward 9:69046251-69046279; AsCpf1-1
tttttcttagaaaaaatggagcac

SEQ ID NO: 14636 - DNA, 25 bp, Artificial Sequence
  Synthetic: FXN 3 forward 9:69046251-69046280; AsCpf1-1
tttttcttagaaaaaatggagcact

SEQ ID NO: 14637 - DNA, 18 bp, Artificial Sequence
  Synthetic: FXN 3 reverse 9:69046269-69046291; AsCpf1-1
agtgcctgtaaccgagtg

SEQ ID NO: 14638 - DNA, 19 bp, Artificial Sequence
  Synthetic: FXN 3 reverse 9:69046269-69046292; AsCpf1-1
agtgcctgtaaccgagtgc

SEQ ID NO: 14639 - DNA, 20 bp, Artificial Sequence
  Synthetic: FXN 3 reverse 9:69046269-69046293; AsCpf1-1
agtgcctgtaaccgagtgct

SEQ ID NO: 14640 - DNA, 21 bp, Artificial Sequence
  Synthetic: FXN 3 reverse 9:69046269-69046294; AsCpf1-1
agtgcctgtaaccgagtgctc

SEQ ID NO: 14641 - DNA, 22 bp, Artificial Sequence
  Synthetic: FXN 3 reverse 9:69046269-69046295; AsCpf1-1
agtgcctgtaaccgagtgctcc

SEQ ID NO: 14642 - DNA, 23 bp, Artificial Sequence
  Synthetic: FXN 3 reverse 9:69046269-69046296; AsCpf1-1
agtgcctgtaaccgagtgctcca

SEQ ID NO: 14643 - DNA, 24 bp, Artificial Sequence
  Synthetic: FXN 3 reverse 9:69046269-69046297; AsCpf1-1
agtgcctgtaaccgagtgctccat

SEQ ID NO: 14644 - DNA, 25 bp, Artificial Sequence
  Synthetic: FXN 3 reverse 9:69046269-69046298; AsCpf1-1
agtgcctgtaaccgagtgctccatt

SEQ ID NO: 14645 - DNA, 18 bp, Artificial Sequence
  Synthetic: FXN 3 reverse 9:69046321-69046343; AsCpf1-1
gtgaattataacccatta

SEQ ID NO: 14646 - DNA, 19 bp, Artificial Sequence
  Synthetic: FXN 3 reverse 9:69046321-69046344; AsCpf1-1
gtgaattataacccattaa

SEQ ID NO: 14647 - DNA, 20 bp, Artificial Sequence
  Synthetic: FXN 3 reverse 9:69046321-69046345; AsCpf1-1
gtgaattataacccattaat

SEQ ID NO: 14648 - DNA, 21 bp, Artificial Sequence
  Synthetic: FXN 3 reverse 9:69046321-69046346; AsCpf1-1
gtgaattataacccattaatg

SEQ ID NO: 14649 - DNA, 22 bp, Artificial Sequence
  Synthetic: FXN 3 reverse 9:69046321-69046347; AsCpf1-1
gtgaattataacccattaatgc

SEQ ID NO: 14650 - DNA, 23 bp, Artificial Sequence
  Synthetic: FXN 3 reverse 9:69046321-69046348; AsCpf1-1
gtgaattataacccattaatgca

SEQ ID NO: 14651 - DNA, 24 bp, Artificial Sequence
  Synthetic: FXN 3 reverse 9:69046321-69046349; AsCpf1-1
gtgaattataacccattaatgcat

SEQ ID NO: 14652 - DNA, 25 bp, Artificial Sequence
  Synthetic: FXN 3 reverse 9:69046321-69046350; AsCpf1-1
gtgaattataacccattaatgcata

SEQ ID NO: 14653 - DNA, 18 bp, Artificial Sequence
  Synthetic: FXN 3 forward 9:69046341-69046363; AsCpf1-1
ctgaaaaatagtaacgta

SEQ ID NO: 14654 - DNA, 19 bp, Artificial Sequence
  Synthetic: FXN 3 forward 9:69046341-69046364; AsCpf1-1
ctgaaaaatagtaacgtac

SEQ ID NO: 14655 - DNA, 20 bp, Artificial Sequence
  Synthetic: FXN 3 forward 9:69046341-69046365; AsCpf1-1
ctgaaaaatagtaacgtact

SEQ ID NO: 14656 - DNA, 21 bp, Artificial Sequence
  Synthetic: FXN 3 forward 9:69046341-69046366; AsCpf1-1
ctgaaaaatagtaacgtactt

SEQ ID NO: 14657 - DNA, 22 bp, Artificial Sequence
  Synthetic: FXN 3 forward 9:69046341-69046367; AsCpf1-1
ctgaaaaatagtaacgtacttc

SEQ ID NO: 14658 - DNA, 23 bp, Artificial Sequence
  Synthetic: FXN 3 forward 9:69046341-69046368; AsCpf1-1
ctgaaaaatagtaacgtacttct

SEQ ID NO: 14659 - DNA, 24 bp, Artificial Sequence
  Synthetic: FXN 3 forward 9:69046341-69046369; AsCpf1-1
ctgaaaaatagtaacgtacttctt

SEQ ID NO: 14660 - DNA, 25 bp, Artificial Sequence
  Synthetic: FXN 3 forward 9:69046341-69046370; AsCpf1-1
ctgaaaaatagtaacgtacttctta

SEQ ID NO: 14661 - DNA, 18 bp, Artificial Sequence
  Synthetic: FXN 3 reverse 9:69046363-69046385; AsCpf1-1
aactctgaaagccaaagt

SEQ ID NO: 14662 - DNA, 19 bp, Artificial Sequence
  Synthetic: FXN 3 reverse 9:69046363-69046386; AsCpf1-1
aactctgaaagccaaagtt

SEQ ID NO: 14663 - DNA, 20 bp, Artificial Sequence
  Synthetic: FXN 3 reverse 9:69046363-69046387; AsCpf1-1
aactctgaaagccaaagtta

SEQ ID NO: 14664 - DNA, 21 bp, Artificial Sequence
  Synthetic: FXN 3 reverse 9:69046363-69046388; AsCpf1-1
aactctgaaagccaaagttaa

SEQ ID NO: 14665 - DNA, 22 bp, Artificial Sequence
  Synthetic: FXN 3 reverse 9:69046363-69046389; AsCpf1-1
aactctgaaagccaaagttaag

SEQ ID NO: 14666 - DNA, 23 bp, Artificial Sequence
  Synthetic: FXN 3 reverse 9:69046363-69046390; AsCpf1-1
aactctgaaagccaaagttaaga

SEQ ID NO: 14667 - DNA, 24 bp, Artificial Sequence
  Synthetic: FXN 3 reverse 9:69046363-69046391; AsCpf1-1
aactctgaaagccaaagttaagaa

SEQ ID NO: 14668 - DNA, 25 bp, Artificial Sequence
  Synthetic: FXN 3 reverse 9:69046363-69046392; AsCpf1-1
aactctgaaagccaaagttaagaag

SEQ ID NO: 14669 - DNA, 18 bp, Artificial Sequence
  Synthetic: FXN 3 forward 9:69037601-69037623; AsCpf1-2
tgagctgccacgtattgg

SEQ ID NO: 14670 - DNA, 19 bp, Artificial Sequence
  Synthetic: FXN 3 forward 9:69037601-69037624; AsCpf1-2
tgagctgccacgtattggg

SEQ ID NO: 14671 - DNA, 20 bp, Artificial Sequence
  Synthetic: FXN 3 forward 9:69037601-69037625; AsCpf1-2
tgagctgccacgtattgggc

SEQ ID NO: 14672 - DNA, 21 bp, Artificial Sequence
  Synthetic: FXN 3 forward 9:69037601-69037626; AsCpf1-2
tgagctgccacgtattgggct

SEQ ID NO: 14673 - DNA, 22 bp, Artificial Sequence
  Synthetic: FXN 3 forward 9:69037601-69037627; AsCpf1-2
tgagctgccacgtattgggctt

SEQ ID NO: 14674 - DNA, 23 bp, Artificial Sequence
  Synthetic: FXN 3 forward 9:69037601-69037628; AsCpf1-2
tgagctgccacgtattgggcttc

SEQ ID NO: 14675 - DNA, 24 bp, Artificial Sequence
  Synthetic: FXN 3 forward 9:69037601-69037629; AsCpf1-2
tgagctgccacgtattgggcttcc

SEQ ID NO: 14676 - DNA, 25 bp, Artificial Sequence
  Synthetic: FXN 3 forward 9:69037601-69037630; AsCpf1-2
tgagctgccacgtattgggcttcca

SEQ ID NO: 14677 - DNA, 18 bp, Artificial Sequence
  Synthetic: FXN 3 forward 9:69037810-69037832; AsCpf1-2
ggctaattttgtattttt

SEQ ID NO: 14678 - DNA, 19 bp, Artificial Sequence
  Synthetic: FXN 3 forward 9:69037810-69037833; AsCpf1-2
ggctaattttgtattttta

SEQ ID NO: 14679 - DNA, 20 bp, Artificial Sequence
  Synthetic: FXN 3 forward 9:69037810-69037834; AsCpf1-2
ggctaattttgtatttttag

SEQ ID NO: 14680 - DNA, 21 bp, Artificial Sequence
  Synthetic: FXN 3 forward 9:69037810-69037835; AsCpf1-2
ggctaattttgtatttttagt

SEQ ID NO: 14681 - DNA, 22 bp, Artificial Sequence
  Synthetic: FXN 3 forward 9:69037810-69037836; AsCpf1-2
ggctaattttgtatttttagta

SEQ ID NO: 14682 - DNA, 23 bp, Artificial Sequence
  Synthetic: FXN 3 forward 9:69037810-69037837; AsCpf1-2
ggctaattttgtatttttagtag

SEQ ID NO: 14683 - DNA, 24 bp, Artificial Sequence
  Synthetic: FXN 3 forward 9:69037810-69037838; AsCpf1-2
ggctaattttgtatttttagtaga

SEQ ID NO: 14684 - DNA, 25 bp, Artificial Sequence
  Synthetic: FXN 3 forward 9:69037810-69037839; AsCpf1-2
ggctaattttgtatttttagtagag

SEQ ID NO: 14685 - DNA, 18 bp, Artificial Sequence
  Synthetic: FXN 3 reverse 9:69038066-69038088; AsCpf1-2
cagaaacccagtgtccac

SEQ ID NO: 14686 - DNA, 19 bp, Artificial Sequence
  Synthetic: FXN 3 reverse 9:69038066-69038089; AsCpf1-2
cagaaacccagtgtccacc

SEQ ID NO: 14687 - DNA, 20 bp, Artificial Sequence
  Synthetic: FXN 3 reverse 9:69038066-69038090; AsCpf1-2
cagaaacccagtgtccacct

SEQ ID NO: 14688 - DNA, 21 bp, Artificial Sequence
  Synthetic: FXN 3 reverse 9:69038066-69038091; AsCpf1-2
cagaaacccagtgtccacctc

SEQ ID NO: 14689 - DNA, 22 bp, Artificial Sequence
  Synthetic: FXN 3 reverse 9:69038066-69038092; AsCpf1-2
cagaaacccagtgtccacctcc

SEQ ID NO: 14690 - DNA, 23 bp, Artificial Sequence
  Synthetic: FXN 3 reverse 9:69038066-69038093; AsCpf1-2
cagaaacccagtgtccacctcct

SEQ ID NO: 14691 - DNA, 24 bp, Artificial Sequence
  Synthetic: FXN 3 reverse 9:69038066-69038094; AsCpf1-2
cagaaacccagtgtccacctcctg

SEQ ID NO: 14692 - DNA, 25 bp, Artificial Sequence
  Synthetic: FXN 3 reverse 9:69038066-69038095; AsCpf1-2
cagaaacccagtgtccacctcctgg

SEQ ID NO: 14693 - DNA, 18 bp, Artificial Sequence
  Synthetic: FXN 3 reverse 9:69038112-69038134; AsCpf1-2
gaaaaaaagaggcccagc

SEQ ID NO: 14694 - DNA, 19 bp, Artificial Sequence
  Synthetic: FXN 3 reverse 9:69038112-69038135; AsCpf1-2
gaaaaaaagaggcccagct

SEQ ID NO: 14695 - DNA, 20 bp, Artificial Sequence
  Synthetic: FXN 3 reverse 9:69038112-69038136; AsCpf1-2
gaaaaaaagaggcccagctg

SEQ ID NO: 14696 - DNA, 21 bp, Artificial Sequence
  Synthetic: FXN 3 reverse 9:69038112-69038137; AsCpf1-2
gaaaaaaagaggcccagctgg

SEQ ID NO: 14697 - DNA, 22 bp, Artificial Sequence
  Synthetic: FXN 3 reverse 9:69038112-69038138; AsCpf1-2
gaaaaaaagaggcccagctggt

SEQ ID NO: 14698 - DNA, 23 bp, Artificial Sequence
  Synthetic: FXN 3 reverse 9:69038112-69038139; AsCpf1-2
gaaaaaaagaggcccagctggtg

SEQ ID NO: 14699 - DNA, 24 bp, Artificial Sequence
  Synthetic: FXN 3 reverse 9:69038112-69038140; AsCpf1-2
gaaaaaaagaggcccagctggtga

SEQ ID NO: 14700 - DNA, 25 bp, Artificial Sequence
  Synthetic: FXN 3 reverse 9:69038112-69038141; AsCpf1-2
gaaaaaaagaggcccagctggtgac

SEQ ID NO: 14701 - DNA, 18 bp, Artificial Sequence
  Synthetic: FXN 3 forward 9:69038137-69038159; AsCpf1-2
ctgaattaatcacatttg

SEQ ID NO: 14702 - DNA, 19 bp, Artificial Sequence
  Synthetic: FXN 3 forward 9:69038137-69038160; AsCpf1-2
ctgaattaatcacatttgt

SEQ ID NO: 14703 - DNA, 20 bp, Artificial Sequence
  Synthetic: FXN 3 forward 9:69038137-69038161; AsCpf1-2
ctgaattaatcacatttgtt

SEQ ID NO: 14704 - DNA, 21 bp, Artificial Sequence
  Synthetic: FXN 3 forward 9:69038137-69038162; AsCpf1-2
ctgaattaatcacatttgttt

SEQ ID NO: 14705 - DNA, 22 bp, Artificial Sequence
  Synthetic: FXN 3 forward 9:69038137-69038163; AsCpf1-2
ctgaattaatcacatttgttta

SEQ ID NO: 14706 - DNA, 23 bp, Artificial Sequence
  Synthetic: FXN 3 forward 9:69038137-69038164; AsCpf1-2
ctgaattaatcacatttgtttaa

SEQ ID NO: 14707 - DNA, 24 bp, Artificial Sequence
  Synthetic: FXN 3 forward 9:69038137-69038165; AsCpf1-2
ctgaattaatcacatttgtttaac

SEQ ID NO: 14708 - DNA, 25 bp, Artificial Sequence
  Synthetic: FXN 3 forward 9:69038137-69038166; AsCpf1-2
ctgaattaatcacatttgtttaacc

SEQ ID NO: 14709 - DNA, 18 bp, Artificial Sequence
  Synthetic: FXN 3 reverse 9:69038150-69038172; AsCpf1-2
gaacagacaggttaaaca

SEQ ID NO: 14710 - DNA, 19 bp, Artificial Sequence
  Synthetic: FXN 3 reverse 9:69038150-69038173; AsCpf1-2
gaacagacaggttaaacaa

SEQ ID NO: 14711 - DNA, 20 bp, Artificial Sequence
  Synthetic: FXN 3 reverse 9:69038150-69038174; AsCpf1-2
gaacagacaggttaaacaaa

SEQ ID NO: 14712 - DNA, 21 bp, Artificial Sequence
  Synthetic: FXN 3 reverse 9:69038150-69038175; AsCpf1-2
gaacagacaggttaaacaaat

SEQ ID NO: 14713 - DNA, 22 bp, Artificial Sequence
  Synthetic: FXN 3 reverse 9:69038150-69038176; AsCpf1-2
gaacagacaggttaaacaaatg

SEQ ID NO: 14714 - DNA, 23 bp, Artificial Sequence
  Synthetic: FXN 3 reverse 9:69038150-69038177; AsCpf1-2
gaacagacaggttaaacaaatgt

SEQ ID NO: 14715 - DNA, 24 bp, Artificial Sequence
  Synthetic: FXN 3 reverse 9:69038150-69038178; AsCpf1-2
gaacagacaggttaaacaaatgtg

SEQ ID NO: 14716 - DNA, 25 bp, Artificial Sequence
  Synthetic: FXN 3 reverse 9:69038150-69038179; AsCpf1-2
gaacagacaggttaaacaaatgtga

SEQ ID NO: 14717 - DNA, 18 bp, Artificial Sequence
  Synthetic: FXN 3 reverse 9:69038393-69038415; AsCpf1-2
tgtgtggctcccattctg

SEQ ID NO: 14718 - DNA, 19 bp, Artificial Sequence
  Synthetic: FXN 3 reverse 9:69038393-69038416; AsCpf1-2
tgtgtggctcccattctgt

SEQ ID NO: 14719 - DNA, 20 bp, Artificial Sequence
  Synthetic: FXN 3 reverse 9:69038393-69038417; AsCpf1-2
tgtgtggctcccattctgtt

SEQ ID NO: 14720 - DNA, 21 bp, Artificial Sequence
  Synthetic: FXN 3 reverse 9:69038393-69038418; AsCpf1-2
tgtgtggctcccattctgttt

SEQ ID NO: 14721 - DNA, 22 bp, Artificial Sequence
  Synthetic: FXN 3 reverse 9:69038393-69038419; AsCpf1-2
tgtgtggctcccattctgtttc

SEQ ID NO: 14722 - DNA, 23 bp, Artificial Sequence
  Synthetic: FXN 3 reverse 9:69038393-69038420; AsCpf1-2
tgtgtggctcccattctgtttct

SEQ ID NO: 14723 - DNA, 24 bp, Artificial Sequence
  Synthetic: FXN 3 reverse 9:69038393-69038421; AsCpf1-2
tgtgtggctcccattctgtttctg

SEQ ID NO: 14724 - DNA, 25 bp, Artificial Sequence
  Synthetic: FXN 3 reverse 9:69038393-69038422; AsCpf1-2
tgtgtggctcccattctgtttctgt

SEQ ID NO: 14725 - DNA, 18 bp, Artificial Sequence
  Synthetic: FXN 3 reverse 9:69038443-69038465; AsCpf1-2
ttgttgaaaatgattttt

SEQ ID NO: 14726 - DNA, 19 bp, Artificial Sequence
  Synthetic: FXN 3 reverse 9:69038443-69038466; AsCpf1-2
ttgttgaaaatgatttttt

SEQ ID NO: 14727 - DNA, 20 bp, Artificial Sequence
  Synthetic: FXN 3 reverse 9:69038443-69038467; AsCpf1-2
ttgttgaaaatgattttttt

SEQ ID NO: 14728 - DNA, 21 bp, Artificial Sequence
  Synthetic: FXN 3 reverse 9:69038443-69038468; AsCpf1-2
ttgttgaaaatgatttttttt

SEQ ID NO: 14729 - DNA, 22 bp, Artificial Sequence
  Synthetic: FXN 3 reverse 9:69038443-69038469; AsCpf1-2
ttgttgaaaatgattttttttt

SEQ ID NO: 14730 - DNA, 23 bp, Artificial Sequence
  Synthetic: FXN 3 reverse 9:69038443-69038470; AsCpf1-2
ttgttgaaaatgatttttttttc

SEQ ID NO: 14731 - DNA, 24 bp, Artificial Sequence
  Synthetic: FXN 3 reverse 9:69038443-69038471; AsCpf1-2
ttgttgaaaatgatttttttttct

SEQ ID NO: 14732 - DNA, 25 bp, Artificial Sequence
  Synthetic: FXN 3 reverse 9:69038443-69038472; AsCpf1-2
ttgttgaaaatgatttttttttctt

SEQ ID NO: 14733 - DNA, 18 bp, Artificial Sequence
  Synthetic: FXN 3 reverse 9:69038463-69038485; AsCpf1-2
tactaggttgaataaata

SEQ ID NO: 14734 - DNA, 19 bp, Artificial Sequence
  Synthetic: FXN 3 reverse 9:69038463-69038486; AsCpf1-2
tactaggttgaataaatat

SEQ ID NO: 14735 - DNA, 20 bp, Artificial Sequence
  Synthetic: FXN 3 reverse 9:69038463-69038487; AsCpf1-2
tactaggttgaataaatata

SEQ ID NO: 14736 - DNA, 21 bp, Artificial Sequence
  Synthetic: FXN 3 reverse 9:69038463-69038488; AsCpf1-2
tactaggttgaataaatatat

SEQ ID NO: 14737 - DNA, 22 bp, Artificial Sequence
  Synthetic: FXN 3 reverse 9:69038463-69038489; AsCpf1-2
tactaggttgaataaatatatt

SEQ ID NO: 14738 - DNA, 23 bp, Artificial Sequence
  Synthetic: FXN 3 reverse 9:69038463-69038490; AsCpf1-2
tactaggttgaataaatatattg

SEQ ID NO: 14739 - DNA, 24 bp, Artificial Sequence
  Synthetic: FXN 3 reverse 9:69038463-69038491; AsCpf1-2
tactaggttgaataaatatattgt

SEQ ID NO: 14740 - DNA, 25 bp, Artificial Sequence
  Synthetic: FXN 3 reverse 9:69038463-69038492; AsCpf1-2
tactaggttgaataaatatattgtt

SEQ ID NO: 14741 - DNA, 18 bp, Artificial Sequence
  Synthetic: FXN 3 forward 9:69038468-69038490; AsCpf1-2
tttattcaacctagtaca

SEQ ID NO: 14742 - DNA, 19 bp, Artificial Sequence
  Synthetic: FXN 3 forward 9:69038468-69038491; AsCpf1-2
tttattcaacctagtacat

SEQ ID NO: 14743 - DNA, 20 bp, Artificial Sequence
  Synthetic: FXN 3 forward 9:69038468-69038492; AsCpf1-2
tttattcaacctagtacata

SEQ ID NO: 14744 - DNA, 21 bp, Artificial Sequence
  Synthetic: FXN 3 forward 9:69038468-69038493; AsCpf1-2
tttattcaacctagtacatac

SEQ ID NO: 14745 - DNA, 22 bp, Artificial Sequence
  Synthetic: FXN 3 forward 9:69038468-69038494; AsCpf1-2
tttattcaacctagtacataca

SEQ ID NO: 14746 - DNA, 23 bp, Artificial Sequence
  Synthetic: FXN 3 forward 9:69038468-69038495; AsCpf1-2
tttattcaacctagtacatacaa

SEQ ID NO: 14747 - DNA, 24 bp, Artificial Sequence
  Synthetic: FXN 3 forward 9:69038468-69038496; AsCpf1-2
tttattcaacctagtacatacaaa

SEQ ID NO: 14748 - DNA, 25 bp, Artificial Sequence
  Synthetic: FXN 3 forward 9:69038468-69038497; AsCpf1-2
tttattcaacctagtacatacaaaa

SEQ ID NO: 14749 - DNA, 18 bp, Artificial Sequence
  Synthetic: FXN 3 forward 9:69038500-69038522; AsCpf1-2
attccaacatgtaatcag

SEQ ID NO: 14750 - DNA, 19 bp, Artificial Sequence
  Synthetic: FXN 3 forward 9:69038500-69038523; AsCpf1-2
attccaacatgtaatcagt

SEQ ID NO: 14751 - DNA, 20 bp, Artificial Sequence
  Synthetic: FXN 3 forward 9:69038500-69038524; AsCpf1-2
attccaacatgtaatcagta

SEQ ID NO: 14752 - DNA, 21 bp, Artificial Sequence
  Synthetic: FXN 3 forward 9:69038500-69038525; AsCpf1-2
attccaacatgtaatcagtat

SEQ ID NO: 14753 - DNA, 22 bp, Artificial Sequence
  Synthetic: FXN 3 forward 9:69038500-69038526; AsCpf1-2
attccaacatgtaatcagtatt

SEQ ID NO: 14754 - DNA, 23 bp, Artificial Sequence
  Synthetic: FXN 3 forward 9:69038500-69038527; AsCpf1-2
attccaacatgtaatcagtattt

SEQ ID NO: 14755 - DNA, 24 bp, Artificial Sequence
  Synthetic: FXN 3 forward 9:69038500-69038528; AsCpf1-2
attccaacatgtaatcagtatttt

SEQ ID NO: 14756 - DNA, 25 bp, Artificial Sequence
  Synthetic: FXN 3 forward 9:69038500-69038529; AsCpf1-2
attccaacatgtaatcagtatttta

SEQ ID NO: 14757 - DNA, 18 bp, Artificial Sequence
  Synthetic: FXN 3 reverse 9:69038763-69038785; AsCpf1-2
tcacagaatcccccaaaa

SEQ ID NO: 14758 - DNA, 19 bp, Artificial Sequence
  Synthetic: FXN 3 reverse 9:69038763-69038786; AsCpf1-2
tcacagaatcccccaaaat

SEQ ID NO: 14759 - DNA, 20 bp, Artificial Sequence
  Synthetic: FXN 3 reverse 9:69038763-69038787; AsCpf1-2
tcacagaatcccccaaaatc

SEQ ID NO: 14760 - DNA, 21 bp, Artificial Sequence
  Synthetic: FXN 3 reverse 9:69038763-69038788; AsCpf1-2
tcacagaatcccccaaaatct

SEQ ID NO: 14761 - DNA, 22 bp, Artificial Sequence
  Synthetic: FXN 3 reverse 9:69038763-69038789; AsCpf1-2
tcacagaatcccccaaaatctt

SEQ ID NO: 14762 - DNA, 23 bp, Artificial Sequence
  Synthetic: FXN 3 reverse 9:69038763-69038790; AsCpf1-2
tcacagaatcccccaaaatcttg

SEQ ID NO: 14763 - DNA, 24 bp, Artificial Sequence
  Synthetic: FXN 3 reverse 9:69038763-69038791; AsCpf1-2
tcacagaatcccccaaaatcttgg

SEQ ID NO: 14764 - DNA, 25 bp, Artificial Sequence
  Synthetic: FXN 3 reverse 9:69038763-69038792; AsCpf1-2
tcacagaatcccccaaaatcttggc

SEQ ID NO: 14765 - DNA, 18 bp, Artificial Sequence
  Synthetic: FXN 3 reverse 9:69038786-69038808; AsCpf1-2
ttattactgatttttttt

SEQ ID NO: 14766 - DNA, 19 bp, Artificial Sequence
  Synthetic: FXN 3 reverse 9:69038786-69038809; AsCpf1-2
ttattactgattttttttg

SEQ ID NO: 14767 - DNA, 20 bp, Artificial Sequence
  Synthetic: FXN 3 reverse 9:69038786-69038810; AsCpf1-2
ttattactgattttttttgt

SEQ ID NO: 14768 - DNA, 21 bp, Artificial Sequence
  Synthetic: FXN 3 reverse 9:69038786-69038811; AsCpf1-2
ttattactgattttttttgta

SEQ ID NO: 14769 - DNA, 22 bp, Artificial Sequence
  Synthetic: FXN 3 reverse 9:69038786-69038812; AsCpf1-2
ttattactgattttttttgtat

SEQ ID NO: 14770 - DNA, 23 bp, Artificial Sequence
  Synthetic: FXN 3 reverse 9:69038786-69038813; AsCpf1-2
ttattactgattttttttgtatg

SEQ ID NO: 14771 - DNA, 24 bp, Artificial Sequence
  Synthetic: FXN 3 reverse 9:69038786-69038814; AsCpf1-2
ttattactgattttttttgtatgt

SEQ ID NO: 14772 - DNA, 25 bp, Artificial Sequence
  Synthetic: FXN 3 reverse 9:69038786-69038815; AsCpf1-2
ttattactgattttttttgtatgtc

SEQ ID NO: 14773 - DNA, 18 bp, Artificial Sequence
  Synthetic: FXN 3 reverse 9:69038795-69038817; AsCpf1-2
caagatatcttattactg

SEQ ID NO: 14774 - DNA, 19 bp, Artificial Sequence
  Synthetic: FXN 3 reverse 9:69038795-69038818; AsCpf1-2
caagatatcttattactga

SEQ ID NO: 14775 - DNA, 20 bp, Artificial Sequence
  Synthetic: FXN 3 reverse 9:69038795-69038819; AsCpf1-2
caagatatcttattactgat

SEQ ID NO: 14776 - DNA, 21 bp, Artificial Sequence
  Synthetic: FXN 3 reverse 9:69038795-69038820; AsCpf1-2
caagatatcttattactgatt

SEQ ID NO: 14777 - DNA, 22 bp, Artificial Sequence
  Synthetic: FXN 3 reverse 9:69038795-69038821; AsCpf1-2
caagatatcttattactgattt

SEQ ID NO: 14778 - DNA, 23 bp, Artificial Sequence
  Synthetic: FXN 3 reverse 9:69038795-69038822; AsCpf1-2
caagatatcttattactgatttt

SEQ ID NO: 14779 - DNA, 24 bp, Artificial Sequence
  Synthetic: FXN 3 reverse 9:69038795-69038823; AsCpf1-2
caagatatcttattactgattttt

SEQ ID NO: 14780 - DNA, 25 bp, Artificial Sequence
  Synthetic: FXN 3 reverse 9:69038795-69038824; AsCpf1-2
caagatatcttattactgatttttt

SEQ ID NO: 14781 - DNA, 18 bp, Artificial Sequence
  Synthetic: FXN 3 reverse 9:69038812-69038834; AsCpf1-2
agtacgaaaagagtatgc

SEQ ID NO: 14782 - DNA, 19 bp, Artificial Sequence
  Synthetic: FXN 3 reverse 9:69038812-69038835; AsCpf1-2
agtacgaaaagagtatgca

SEQ ID NO: 14783 - DNA, 20 bp, Artificial Sequence
  Synthetic: FXN 3 reverse 9:69038812-69038836; AsCpf1-2
agtacgaaaagagtatgcaa

SEQ ID NO: 14784 - DNA, 21 bp, Artificial Sequence
  Synthetic: FXN 3 reverse 9:69038812-69038837; AsCpf1-2
agtacgaaaagagtatgcaag

SEQ ID NO: 14785 - DNA, 22 bp, Artificial Sequence
  Synthetic: FXN 3 reverse 9:69038812-69038838; AsCpf1-2
agtacgaaaagagtatgcaaga

SEQ ID NO: 14786 - DNA, 23 bp, Artificial Sequence
  Synthetic: FXN 3 reverse 9:69038812-69038839; AsCpf1-2
agtacgaaaagagtatgcaagat

SEQ ID NO: 14787 - DNA, 24 bp, Artificial Sequence
  Synthetic: FXN 3 reverse 9:69038812-69038840; AsCpf1-2
agtacgaaaagagtatgcaagata

SEQ ID NO: 14788 - DNA, 25 bp, Artificial Sequence
  Synthetic: FXN 3 reverse 9:69038812-69038841; AsCpf1-2
agtacgaaaagagtatgcaagatat

SEQ ID NO: 14789 - DNA, 18 bp, Artificial Sequence
  Synthetic: FXN 3 forward 9:69038813-69038835; AsCpf1-2
ttgcatactcttttcgta

SEQ ID NO: 14790 - DNA, 19 bp, Artificial Sequence
  Synthetic: FXN 3 forward 9:69038813-69038836; AsCpf1-2
ttgcatactcttttcgtac

SEQ ID NO: 14791 - DNA, 20 bp, Artificial Sequence
  Synthetic: FXN 3 forward 9:69038813-69038837; AsCpf1-2
ttgcatactcttttcgtact

SEQ ID NO: 14792 - DNA, 21 bp, Artificial Sequence
  Synthetic: FXN 3 forward 9:69038813-69038838; AsCpf1-2
ttgcatactcttttcgtactc

SEQ ID NO: 14793 - DNA, 22 bp, Artificial Sequence
  Synthetic: FXN 3 forward 9:69038813-69038839; AsCpf1-2
ttgcatactcttttcgtactca

SEQ ID NO: 14794 - DNA, 23 bp, Artificial Sequence
  Synthetic: FXN 3 forward 9:69038813-69038840; AsCpf1-2
ttgcatactcttttcgtactcat

SEQ ID NO: 14795 - DNA, 24 bp, Artificial Sequence
  Synthetic: FXN 3 forward 9:69038813-69038841; AsCpf1-2
ttgcatactcttttcgtactcata

SEQ ID NO: 14796 - DNA, 25 bp, Artificial Sequence
  Synthetic: FXN 3 forward 9:69038813-69038842; AsCpf1-2
ttgcatactcttttcgtactcatat

SEQ ID NO: 14797 - DNA, 18 bp, Artificial Sequence
  Synthetic: FXN 3 reverse 9:69038814-69038836; AsCpf1-2
tgagtacgaaaagagtat

SEQ ID NO: 14798 - DNA, 19 bp, Artificial Sequence
  Synthetic: FXN 3 reverse 9:69038814-69038837; AsCpf1-2
tgagtacgaaaagagtatg

SEQ ID NO: 14799 - DNA, 20 bp, Artificial Sequence
  Synthetic: FXN 3 reverse 9:69038814-69038838; AsCpf1-2
tgagtacgaaaagagtatgc

SEQ ID NO: 14800 - DNA, 21 bp, Artificial Sequence
  Synthetic: FXN 3 reverse 9:69038814-69038839; AsCpf1-2
tgagtacgaaaagagtatgca

SEQ ID NO: 14801 - DNA, 22 bp, Artificial Sequence
  Synthetic: FXN 3 reverse 9:69038814-69038840; AsCpf1-2
tgagtacgaaaagagtatgcaa

SEQ ID NO: 14802 - DNA, 23 bp, Artificial Sequence
  Synthetic: FXN 3 reverse 9:69038814-69038841; AsCpf1-2
tgagtacgaaaagagtatgcaag

SEQ ID NO: 14803 - DNA, 24 bp, Artificial Sequence
  Synthetic: FXN 3 reverse 9:69038814-69038842; AsCpf1-2
tgagtacgaaaagagtatgcaaga

SEQ ID NO: 14804 - DNA, 25 bp, Artificial Sequence
  Synthetic: FXN 3 reverse 9:69038814-69038843; AsCpf1-2
tgagtacgaaaagagtatgcaagat

SEQ ID NO: 14805 - DNA, 18 bp, Artificial Sequence
  Synthetic: FXN 3 reverse 9:69038825-69038847; AsCpf1-2
ctggaagtatatgagtac

SEQ ID NO: 14806 - DNA, 19 bp, Artificial Sequence
  Synthetic: FXN 3 reverse 9:69038825-69038848; AsCpf1-2
ctggaagtatatgagtacg

SEQ ID NO: 14807 - DNA, 20 bp, Artificial Sequence
  Synthetic: FXN 3 reverse 9:69038825-69038849; AsCpf1-2
ctggaagtatatgagtacga

SEQ ID NO: 14808 - DNA, 21 bp, Artificial Sequence
  Synthetic: FXN 3 reverse 9:69038825-69038850; AsCpf1-2
ctggaagtatatgagtacgaa

SEQ ID NO: 14809 - DNA, 22 bp, Artificial Sequence
  Synthetic: FXN 3 reverse 9:69038825-69038851; AsCpf1-2
ctggaagtatatgagtacgaaa

SEQ ID NO: 14810 - DNA, 23 bp, Artificial Sequence
  Synthetic: FXN 3 reverse 9:69038825-69038852; AsCpf1-2
ctggaagtatatgagtacgaaaa

SEQ ID NO: 14811 - DNA, 24 bp, Artificial Sequence
  Synthetic: FXN 3 reverse 9:69038825-69038853; AsCpf1-2
ctggaagtatatgagtacgaaaag

SEQ ID NO: 14812 - DNA, 25 bp, Artificial Sequence
  Synthetic: FXN 3 reverse 9:69038825-69038854; AsCpf1-2
ctggaagtatatgagtacgaaaaga

SEQ ID NO: 14813 - DNA, 18 bp, Artificial Sequence
  Synthetic: FXN 3 forward 9:69038839-69038861; AsCpf1-2
cttccagcatatctcaat

SEQ ID NO: 14814 - DNA, 19 bp, Artificial Sequence
  Synthetic: FXN 3 forward 9:69038839-69038862; AsCpf1-2
cttccagcatatctcaatt

SEQ ID NO: 14815 - DNA, 20 bp, Artificial Sequence
  Synthetic: FXN 3 forward 9:69038839-69038863; AsCpf1-2
cttccagcatatctcaattc

SEQ ID NO: 14816 - DNA, 21 bp, Artificial Sequence
  Synthetic: FXN 3 forward 9:69038839-69038864; AsCpf1-2
cttccagcatatctcaattca

SEQ ID NO: 14817 - DNA, 22 bp, Artificial Sequence
  Synthetic: FXN 3 forward 9:69038839-69038865; AsCpf1-2
cttccagcatatctcaattcac

SEQ ID NO: 14818 - DNA, 23 bp, Artificial Sequence
  Synthetic: FXN 3 forward 9:69038839-69038866; AsCpf1-2
cttccagcatatctcaattcaca

SEQ ID NO: 14819 - DNA, 24 bp, Artificial Sequence
  Synthetic: FXN 3 forward 9:69038839-69038867; AsCpf1-2
cttccagcatatctcaattcacaa

SEQ ID NO: 14820 - DNA, 25 bp, Artificial Sequence
  Synthetic: FXN 3 forward 9:69038839-69038868; AsCpf1-2
cttccagcatatctcaattcacaat

SEQ ID NO: 14821 - DNA, 18 bp, Artificial Sequence
  Synthetic: FXN 3 forward 9:69038852-69038874; AsCpf1-2
tcaattcacaatttctaa

SEQ ID NO: 14822 - DNA, 19 bp, Artificial Sequence
  Synthetic: FXN 3 forward 9:69038852-69038875; AsCpf1-2
tcaattcacaatttctaag

SEQ ID NO: 14823 - DNA, 20 bp, Artificial Sequence
  Synthetic: FXN 3 forward 9:69038852-69038876; AsCpf1-2
tcaattcacaatttctaagt

SEQ ID NO: 14824 - DNA, 21 bp, Artificial Sequence
  Synthetic: FXN 3 forward 9:69038852-69038877; AsCpf1-2
tcaattcacaatttctaagta

SEQ ID NO: 14825 - DNA, 22 bp, Artificial Sequence
  Synthetic: FXN 3 forward 9:69038852-69038878; AsCpf1-2
tcaattcacaatttctaagtaa

SEQ ID NO: 14826 - DNA, 23 bp, Artificial Sequence
  Synthetic: FXN 3 forward 9:69038852-69038879; AsCpf1-2
tcaattcacaatttctaagtaaa

SEQ ID NO: 14827 - DNA, 24 bp, Artificial Sequence
  Synthetic: FXN 3 forward 9:69038852-69038880; AsCpf1-2
tcaattcacaatttctaagtaaat

SEQ ID NO: 14828 - DNA, 25 bp, Artificial Sequence
  Synthetic: FXN 3 forward 9:69038852-69038881; AsCpf1-2
tcaattcacaatttctaagtaaatg

SEQ ID NO: 14829 - DNA, 18 bp, Artificial Sequence
  Synthetic: FXN 3 reverse 9:69038875-69038897; AsCpf1-2
aaagtaaatacagataga

SEQ ID NO: 14830 - DNA, 19 bp, Artificial Sequence
  Synthetic: FXN 3 reverse 9:69038875-69038898; AsCpf1-2
aaagtaaatacagatagag

SEQ ID NO: 14831 - DNA, 20 bp, Artificial Sequence
  Synthetic: FXN 3 reverse 9:69038875-69038899; AsCpf1-2
aaagtaaatacagatagagc

SEQ ID NO: 14832 - DNA, 21 bp, Artificial Sequence
  Synthetic: FXN 3 reverse 9:69038875-69038900; AsCpf1-2
aaagtaaatacagatagagca

SEQ ID NO: 14833 - DNA, 22 bp, Artificial Sequence
  Synthetic: FXN 3 reverse 9:69038875-69038901; AsCpf1-2
aaagtaaatacagatagagcat

SEQ ID NO: 14834 - DNA, 23 bp, Artificial Sequence
  Synthetic: FXN 3 reverse 9:69038875-69038902; AsCpf1-2
aaagtaaatacagatagagcatt

SEQ ID NO: 14835 - DNA, 24 bp, Artificial Sequence
  Synthetic: FXN 3 reverse 9:69038875-69038903; AsCpf1-2
aaagtaaatacagatagagcattt

SEQ ID NO: 14836 - DNA, 25 bp, Artificial Sequence
  Synthetic: FXN 3 reverse 9:69038875-69038904; AsCpf1-2
aaagtaaatacagatagagcattta

SEQ ID NO: 14837 - DNA, 18 bp, Artificial Sequence
  Synthetic: FXN 3 forward 9:69038884-69038906; AsCpf1-2
tgtatttacttttataaa

SEQ ID NO: 14838 - DNA, 19 bp, Artificial Sequence
  Synthetic: FXN 3 forward 9:69038884-69038907; AsCpf1-2
tgtatttacttttataaaa

SEQ ID NO: 14839 - DNA, 20 bp, Artificial Sequence
  Synthetic: FXN 3 forward 9:69038884-69038908; AsCpf1-2
tgtatttacttttataaaat

SEQ ID NO: 14840 - DNA, 21 bp, Artificial Sequence
  Synthetic: FXN 3 forward 9:69038884-69038909; AsCpf1-2
tgtatttacttttataaaatt

SEQ ID NO: 14841 - DNA, 22 bp, Artificial Sequence
  Synthetic: FXN 3 forward 9:69038884-69038910; AsCpf1-2
tgtatttacttttataaaattc

SEQ ID NO: 14842 - DNA, 23 bp, Artificial Sequence
  Synthetic: FXN 3 forward 9:69038884-69038911; AsCpf1-2
tgtatttacttttataaaattca

SEQ ID NO: 14843 - DNA, 24 bp, Artificial Sequence
  Synthetic: FXN 3 forward 9:69038884-69038912; AsCpf1-2
tgtatttacttttataaaattcac

SEQ ID NO: 14844 - DNA, 25 bp, Artificial Sequence
  Synthetic: FXN 3 forward 9:69038884-69038913; AsCpf1-2
tgtatttacttttataaaattcaca

SEQ ID NO: 14845 - DNA, 18 bp, Artificial Sequence
  Synthetic: FXN 3 forward 9:69038900-69038922; AsCpf1-2
aaattcacaattaaaaat

SEQ ID NO: 14846 - DNA, 19 bp, Artificial Sequence
  Synthetic: FXN 3 forward 9:69038900-69038923; AsCpf1-2
aaattcacaattaaaaatg

SEQ ID NO: 14847 - DNA, 20 bp, Artificial Sequence
  Synthetic: FXN 3 forward 9:69038900-69038924; AsCpf1-2
aaattcacaattaaaaatga

SEQ ID NO: 14848 - DNA, 21 bp, Artificial Sequence
  Synthetic: FXN 3 forward 9:69038900-69038925; AsCpf1-2
aaattcacaattaaaaatgaa

SEQ ID NO: 14849 - DNA, 22 bp, Artificial Sequence
  Synthetic: FXN 3 forward 9:69038900-69038926; AsCpf1-2
aaattcacaattaaaaatgaag

SEQ ID NO: 14850 - DNA, 23 bp, Artificial Sequence
  Synthetic: FXN 3 forward 9:69038900-69038927; AsCpf1-2
aaattcacaattaaaaatgaagg

SEQ ID NO: 14851 - DNA, 24 bp, Artificial Sequence
  Synthetic: FXN 3 forward 9:69038900-69038928; AsCpf1-2
aaattcacaattaaaaatgaaggt

SEQ ID NO: 14852 - DNA, 25 bp, Artificial Sequence
  Synthetic: FXN 3 forward 9:69038900-69038929; AsCpf1-2
aaattcacaattaaaaatgaaggtt

SEQ ID NO: 14853 - DNA, 18 bp, Artificial Sequence
  Synthetic: FXN 3 reverse 9:69038906-69038928; AsCpf1-2
tgaaccttcatttttaat

SEQ ID NO: 14854 - DNA, 19 bp, Artificial Sequence
  Synthetic: FXN 3 reverse 9:69038906-69038929; AsCpf1-2
tgaaccttcatttttaatt

SEQ ID NO: 14855 - DNA, 20 bp, Artificial Sequence
  Synthetic: FXN 3 reverse 9:69038906-69038930; AsCpf1-2
tgaaccttcatttttaattg

SEQ ID NO: 14856 - DNA, 21 bp, Artificial Sequence
  Synthetic: FXN 3 reverse 9:69038906-69038931; AsCpf1-2
tgaaccttcatttttaattgt

SEQ ID NO: 14857 - DNA, 22 bp, Artificial Sequence
  Synthetic: FXN 3 reverse 9:69038906-69038932; AsCpf1-2
tgaaccttcatttttaattgtg

SEQ ID NO: 14858 - DNA, 23 bp, Artificial Sequence
  Synthetic: FXN 3 reverse 9:69038906-69038933; AsCpf1-2
tgaaccttcatttttaattgtga

SEQ ID NO: 14859 - DNA, 24 bp, Artificial Sequence
  Synthetic: FXN 3 reverse 9:69038906-69038934; AsCpf1-2
tgaaccttcatttttaattgtgaa

SEQ ID NO: 14860 - DNA, 25 bp, Artificial Sequence
  Synthetic: FXN 3 reverse 9:69038906-69038935; AsCpf1-2
tgaaccttcatttttaattgtgaat

SEQ ID NO: 14861 - DNA, 18 bp, Artificial Sequence
  Synthetic: FXN 3 reverse 9:69039135-69039157; AsCpf1-2
ctgcctcagcctcctgag

SEQ ID NO: 14862 - DNA, 19 bp, Artificial Sequence
  Synthetic: FXN 3 reverse 9:69039135-69039158; AsCpf1-2
ctgcctcagcctcctgagt

SEQ ID NO: 14863 - DNA, 20 bp, Artificial Sequence
  Synthetic: FXN 3 reverse 9:69039135-69039159; AsCpf1-2
ctgcctcagcctcctgagta

SEQ ID NO: 14864 - DNA, 21 bp, Artificial Sequence
  Synthetic: FXN 3 reverse 9:69039135-69039160; AsCpf1-2
ctgcctcagcctcctgagtag

SEQ ID NO: 14865 - DNA, 22 bp, Artificial Sequence
  Synthetic: FXN 3 reverse 9:69039135-69039161; AsCpf1-2
ctgcctcagcctcctgagtagc

SEQ ID NO: 14866 - DNA, 23 bp, Artificial Sequence
  Synthetic: FXN 3 reverse 9:69039135-69039162; AsCpf1-2
ctgcctcagcctcctgagtagct

SEQ ID NO: 14867 - DNA, 24 bp, Artificial Sequence
  Synthetic: FXN 3 reverse 9:69039135-69039163; AsCpf1-2
ctgcctcagcctcctgagtagctg

SEQ ID NO: 14868 - DNA, 25 bp, Artificial Sequence
  Synthetic: FXN 3 reverse 9:69039135-69039164; AsCpf1-2
ctgcctcagcctcctgagtagctgg

SEQ ID NO: 14869 - DNA, 18 bp, Artificial Sequence
  Synthetic: FXN 3 forward 9:69039295-69039317; AsCpf1-2
acctcaaataattaaaat

SEQ ID NO: 14870 - DNA, 19 bp, Artificial Sequence
  Synthetic: FXN 3 forward 9:69039295-69039318; AsCpf1-2
acctcaaataattaaaatt

SEQ ID NO: 14871 - DNA, 20 bp, Artificial Sequence
  Synthetic: FXN 3 forward 9:69039295-69039319; AsCpf1-2
acctcaaataattaaaatta

SEQ ID NO: 14872 - DNA, 21 bp, Artificial Sequence
  Synthetic: FXN 3 forward 9:69039295-69039320; AsCpf1-2
acctcaaataattaaaattaa

SEQ ID NO: 14873 - DNA, 22 bp, Artificial Sequence
  Synthetic: FXN 3 forward 9:69039295-69039321; AsCpf1-2
acctcaaataattaaaattaaa

SEQ ID NO: 14874 - DNA, 23 bp, Artificial Sequence
  Synthetic: FXN 3 forward 9:69039295-69039322; AsCpf1-2
acctcaaataattaaaattaaat

SEQ ID NO: 14875 - DNA, 24 bp, Artificial Sequence
  Synthetic: FXN 3 forward 9:69039295-69039323; AsCpf1-2
acctcaaataattaaaattaaatg

SEQ ID NO: 14876 - DNA, 25 bp, Artificial Sequence
  Synthetic: FXN 3 forward 9:69039295-69039324; AsCpf1-2
acctcaaataattaaaattaaatga

SEQ ID NO: 14877 - DNA, 18 bp, Artificial Sequence
  Synthetic: FXN 3 reverse 9:69039384-69039406; AsCpf1-2
ctgtcccatgtggtggtc

SEQ ID NO: 14878 - DNA, 19 bp, Artificial Sequence
  Synthetic: FXN 3 reverse 9:69039384-69039407; AsCpf1-2
ctgtcccatgtggtggtca

SEQ ID NO: 14879 - DNA, 20 bp, Artificial Sequence
  Synthetic: FXN 3 reverse 9:69039384-69039408; AsCpf1-2
ctgtcccatgtggtggtcac

SEQ ID NO: 14880 - DNA, 21 bp, Artificial Sequence
  Synthetic: FXN 3 reverse 9:69039384-69039409; AsCpf1-2
ctgtcccatgtggtggtcacc

SEQ ID NO: 14881 - DNA, 22 bp, Artificial Sequence
  Synthetic: FXN 3 reverse 9:69039384-69039410; AsCpf1-2
ctgtcccatgtggtggtcacca

SEQ ID NO: 14882 - DNA, 23 bp, Artificial Sequence
  Synthetic: FXN 3 reverse 9:69039384-69039411; AsCpf1-2
ctgtcccatgtggtggtcaccag

SEQ ID NO: 14883 - DNA, 24 bp, Artificial Sequence
  Synthetic: FXN 3 reverse 9:69039384-69039412; AsCpf1-2
ctgtcccatgtggtggtcaccagc

SEQ ID NO: 14884 - DNA, 25 bp, Artificial Sequence
  Synthetic: FXN 3 reverse 9:69039384-69039413; AsCpf1-2
ctgtcccatgtggtggtcaccagcc

SEQ ID NO: 14885 - DNA, 18 bp, Artificial Sequence
  Synthetic: FXN 3 forward 9:69039562-69039584; AsCpf1-2
ttttttgatggagggatg

SEQ ID NO: 14886 - DNA, 19 bp, Artificial Sequence
  Synthetic: FXN 3 forward 9:69039562-69039585; AsCpf1-2
ttttttgatggagggatgt

SEQ ID NO: 14887 - DNA, 20 bp, Artificial Sequence
  Synthetic: FXN 3 forward 9:69039562-69039586; AsCpf1-2
ttttttgatggagggatgtg

SEQ ID NO: 14888 - DNA, 21 bp, Artificial Sequence
  Synthetic: FXN 3 forward 9:69039562-69039587; AsCpf1-2
ttttttgatggagggatgtga

SEQ ID NO: 14889 - DNA, 22 bp, Artificial Sequence
  Synthetic: FXN 3 forward 9:69039562-69039588; AsCpf1-2
ttttttgatggagggatgtgac

SEQ ID NO: 14890 - DNA, 23 bp, Artificial Sequence
  Synthetic: FXN 3 forward 9:69039562-69039589; AsCpf1-2
ttttttgatggagggatgtgaca

SEQ ID NO: 14891 - DNA, 24 bp, Artificial Sequence
  Synthetic: FXN 3 forward 9:69039562-69039590; AsCpf1-2
ttttttgatggagggatgtgacag

SEQ ID NO: 14892 - DNA, 25 bp, Artificial Sequence
  Synthetic: FXN 3 forward 9:69039562-69039591; AsCpf1-2
ttttttgatggagggatgtgacagg

SEQ ID NO: 14893 - DNA, 18 bp, Artificial Sequence
  Synthetic: FXN 3 reverse 9:69039618-69039640; AsCpf1-2
tcctcctcgaagctgtct

SEQ ID NO: 14894 - DNA, 19 bp, Artificial Sequence
  Synthetic: FXN 3 reverse 9:69039618-69039641; AsCpf1-2
tcctcctcgaagctgtctc

SEQ ID NO: 14895 - DNA, 20 bp, Artificial Sequence
  Synthetic: FXN 3 reverse 9:69039618-69039642; AsCpf1-2
tcctcctcgaagctgtctcc

SEQ ID NO: 14896 - DNA, 21 bp, Artificial Sequence
  Synthetic: FXN 3 reverse 9:69039618-69039643; AsCpf1-2
tcctcctcgaagctgtctcca

SEQ ID NO: 14897 - DNA, 22 bp, Artificial Sequence
  Synthetic: FXN 3 reverse 9:69039618-69039644; AsCpf1-2
tcctcctcgaagctgtctccag

SEQ ID NO: 14898 - DNA, 23 bp, Artificial Sequence
  Synthetic: FXN 3 reverse 9:69039618-69039645; AsCpf1-2
tcctcctcgaagctgtctccagt

SEQ ID NO: 14899 - DNA, 24 bp, Artificial Sequence
  Synthetic: FXN 3 reverse 9:69039618-69039646; AsCpf1-2
tcctcctcgaagctgtctccagta

SEQ ID NO: 14900 - DNA, 25 bp, Artificial Sequence
  Synthetic: FXN 3 reverse 9:69039618-69039647; AsCpf1-2
tcctcctcgaagctgtctccagtat

SEQ ID NO: 14901 - DNA, 18 bp, Artificial Sequence
  Synthetic: FXN 3 reverse 9:69039715-69039737; AsCpf1-2
tccttctcgaagctgtct

SEQ ID NO: 14902 - DNA, 19 bp, Artificial Sequence
  Synthetic: FXN 3 reverse 9:69039715-69039738; AsCpf1-2
tccttctcgaagctgtctc

SEQ ID NO: 14903 - DNA, 20 bp, Artificial Sequence
  Synthetic: FXN 3 reverse 9:69039715-69039739; AsCpf1-2
tccttctcgaagctgtctcc

SEQ ID NO: 14904 - DNA, 21 bp, Artificial Sequence
  Synthetic: FXN 3 reverse 9:69039715-69039740; AsCpf1-2
tccttctcgaagctgtctccg

SEQ ID NO: 14905 - DNA, 22 bp, Artificial Sequence
  Synthetic: FXN 3 reverse 9:69039715-69039741; AsCpf1-2
tccttctcgaagctgtctccgg

SEQ ID NO: 14906 - DNA, 23 bp, Artificial Sequence
  Synthetic: FXN 3 reverse 9:69039715-69039742; AsCpf1-2
tccttctcgaagctgtctccggt

SEQ ID NO: 14907 - DNA, 24 bp, Artificial Sequence
  Synthetic: FXN 3 reverse 9:69039715-69039743; AsCpf1-2
tccttctcgaagctgtctccggta

SEQ ID NO: 14908 - DNA, 25 bp, Artificial Sequence
  Synthetic: FXN 3 reverse 9:69039715-69039744; AsCpf1-2
tccttctcgaagctgtctccggtat

SEQ ID NO: 14909 - DNA, 18 bp, Artificial Sequence
  Synthetic: FXN 3 reverse 9:69039780-69039802; AsCpf1-2
aattgcccagtttcaggt

SEQ ID NO: 14910 - DNA, 19 bp, Artificial Sequence
  Synthetic: FXN 3 reverse 9:69039780-69039803; AsCpf1-2
aattgcccagtttcaggta

SEQ ID NO: 14911 - DNA, 20 bp, Artificial Sequence
  Synthetic: FXN 3 reverse 9:69039780-69039804; AsCpf1-2
aattgcccagtttcaggtat

SEQ ID NO: 14912 - DNA, 21 bp, Artificial Sequence
  Synthetic: FXN 3 reverse 9:69039780-69039805; AsCpf1-2
aattgcccagtttcaggtatt

SEQ ID NO: 14913 - DNA, 22 bp, Artificial Sequence
  Synthetic: FXN 3 reverse 9:69039780-69039806; AsCpf1-2
aattgcccagtttcaggtattc

SEQ ID NO: 14914 - DNA, 23 bp, Artificial Sequence
  Synthetic: FXN 3 reverse 9:69039780-69039807; AsCpf1-2
aattgcccagtttcaggtattct

SEQ ID NO: 14915 - DNA, 24 bp, Artificial Sequence
  Synthetic: FXN 3 reverse 9:69039780-69039808; AsCpf1-2
aattgcccagtttcaggtattctg

SEQ ID NO: 14916 - DNA, 25 bp, Artificial Sequence
  Synthetic: FXN 3 reverse 9:69039780-69039809; AsCpf1-2
aattgcccagtttcaggtattctgt

SEQ ID NO: 14917 - DNA, 18 bp, Artificial Sequence
  Synthetic: FXN 3 forward 9:69039805-69039827; AsCpf1-2
tggtaaaaaattttcttc

SEQ ID NO: 14918 - DNA, 19 bp, Artificial Sequence
  Synthetic: FXN 3 forward 9:69039805-69039828; AsCpf1-2
tggtaaaaaattttcttct

SEQ ID NO: 14919 - DNA, 20 bp, Artificial Sequence
  Synthetic: FXN 3 forward 9:69039805-69039829; AsCpf1-2
tggtaaaaaattttcttctt

SEQ ID NO: 14920 - DNA, 21 bp, Artificial Sequence
  Synthetic: FXN 3 forward 9:69039805-69039830; AsCpf1-2
tggtaaaaaattttcttctta

SEQ ID NO: 14921 - DNA, 22 bp, Artificial Sequence
  Synthetic: FXN 3 forward 9:69039805-69039831; AsCpf1-2
tggtaaaaaattttcttcttac

SEQ ID NO: 14922 - DNA, 23 bp, Artificial Sequence
  Synthetic: FXN 3 forward 9:69039805-69039832; AsCpf1-2
tggtaaaaaattttcttcttact

SEQ ID NO: 14923 - DNA, 24 bp, Artificial Sequence
  Synthetic: FXN 3 forward 9:69039805-69039833; AsCpf1-2
tggtaaaaaattttcttcttactg

SEQ ID NO: 14924 - DNA, 25 bp, Artificial Sequence
  Synthetic: FXN 3 forward 9:69039805-69039834; AsCpf1-2
tggtaaaaaattttcttcttactgc

SEQ ID NO: 14925 - DNA, 18 bp, Artificial Sequence
  Synthetic: FXN 3 forward 9:69039807-69039829; AsCpf1-2
gtaaaaaattttcttctt

SEQ ID NO: 14926 - DNA, 19 bp, Artificial Sequence
  Synthetic: FXN 3 forward 9:69039807-69039830; AsCpf1-2
gtaaaaaattttcttctta

SEQ ID NO: 14927 - DNA, 20 bp, Artificial Sequence
  Synthetic: FXN 3 forward 9:69039807-69039831; AsCpf1-2
gtaaaaaattttcttcttac

SEQ ID NO: 14928 - DNA, 21 bp, Artificial Sequence
  Synthetic: FXN 3 forward 9:69039807-69039832; AsCpf1-2
gtaaaaaattttcttcttact

SEQ ID NO: 14929 - DNA, 22 bp, Artificial Sequence
  Synthetic: FXN 3 forward 9:69039807-69039833; AsCpf1-2
gtaaaaaattttcttcttactg

SEQ ID NO: 14930 - DNA, 23 bp, Artificial Sequence
  Synthetic: FXN 3 forward 9:69039807-69039834; AsCpf1-2
gtaaaaaattttcttcttactgc

SEQ ID NO: 14931 - DNA, 24 bp, Artificial Sequence
  Synthetic: FXN 3 forward 9:69039807-69039835; AsCpf1-2
gtaaaaaattttcttcttactgct

SEQ ID NO: 14932 - DNA, 25 bp, Artificial Sequence
  Synthetic: FXN 3 forward 9:69039807-69039836; AsCpf1-2
gtaaaaaattttcttcttactgctc

SEQ ID NO: 14933 - DNA, 18 bp, Artificial Sequence
  Synthetic: FXN 3 reverse 9:69039888-69039910; AsCpf1-2
acgcccggtgccgcctca

SEQ ID NO: 14934 - DNA, 19 bp, Artificial Sequence
  Synthetic: FXN 3 reverse 9:69039888-69039911; AsCpf1-2
acgcccggtgccgcctcaa

SEQ ID NO: 14935 - DNA, 20 bp, Artificial Sequence
  Synthetic: FXN 3 reverse 9:69039888-69039912; AsCpf1-2
acgcccggtgccgcctcaat

SEQ ID NO: 14936 - DNA, 21 bp, Artificial Sequence
  Synthetic: FXN 3 reverse 9:69039888-69039913; AsCpf1-2
acgcccggtgccgcctcaata

SEQ ID NO: 14937 - DNA, 22 bp, Artificial Sequence
  Synthetic: FXN 3 reverse 9:69039888-69039914; AsCpf1-2
acgcccggtgccgcctcaatac

SEQ ID NO: 14938 - DNA, 23 bp, Artificial Sequence
  Synthetic: FXN 3 reverse 9:69039888-69039915; AsCpf1-2
acgcccggtgccgcctcaatact

SEQ ID NO: 14939 - DNA, 24 bp, Artificial Sequence
  Synthetic: FXN 3 reverse 9:69039888-69039916; AsCpf1-2
acgcccggtgccgcctcaatactc

SEQ ID NO: 14940 - DNA, 25 bp, Artificial Sequence
  Synthetic: FXN 3 reverse 9:69039888-69039917; AsCpf1-2
acgcccggtgccgcctcaatactct

SEQ ID NO: 14941 - DNA, 18 bp, Artificial Sequence
  Synthetic: FXN 3 forward 9:69039915-69039937; AsCpf1-2
gtaaggggctgagtgtgc

SEQ ID NO: 14942 - DNA, 19 bp, Artificial Sequence
  Synthetic: FXN 3 forward 9:69039915-69039938; AsCpf1-2
gtaaggggctgagtgtgct

SEQ ID NO: 14943 - DNA, 20 bp, Artificial Sequence
  Synthetic: FXN 3 forward 9:69039915-69039939; AsCpf1-2
gtaaggggctgagtgtgcta

SEQ ID NO: 14944 - DNA, 21 bp, Artificial Sequence
  Synthetic: FXN 3 forward 9:69039915-69039940; AsCpf1-2
gtaaggggctgagtgtgctac

SEQ ID NO: 14945 - DNA, 22 bp, Artificial Sequence
  Synthetic: FXN 3 forward 9:69039915-69039941; AsCpf1-2
gtaaggggctgagtgtgctacc

SEQ ID NO: 14946 - DNA, 23 bp, Artificial Sequence
  Synthetic: FXN 3 forward 9:69039915-69039942; AsCpf1-2
gtaaggggctgagtgtgctacct

SEQ ID NO: 14947 - DNA, 24 bp, Artificial Sequence
  Synthetic: FXN 3 forward 9:69039915-69039943; AsCpf1-2
gtaaggggctgagtgtgctacctc

SEQ ID NO: 14948 - DNA, 25 bp, Artificial Sequence
  Synthetic: FXN 3 forward 9:69039915-69039944; AsCpf1-2
gtaaggggctgagtgtgctacctca

SEQ ID NO: 14949 - DNA, 18 bp, Artificial Sequence
  Synthetic: FXN 3 reverse 9:69039937-69039959; AsCpf1-2
agaaaagaaaaagacacc

SEQ ID NO: 14950 - DNA, 19 bp, Artificial Sequence
  Synthetic: FXN 3 reverse 9:69039937-69039960; AsCpf1-2
agaaaagaaaaagacacct

SEQ ID NO: 14951 - DNA, 20 bp, Artificial Sequence
  Synthetic: FXN 3 reverse 9:69039937-69039961; AsCpf1-2
agaaaagaaaaagacacctg

SEQ ID NO: 14952 - DNA, 21 bp, Artificial Sequence
  Synthetic: FXN 3 reverse 9:69039937-69039962; AsCpf1-2
agaaaagaaaaagacacctga

SEQ ID NO: 14953 - DNA, 22 bp, Artificial Sequence
  Synthetic: FXN 3 reverse 9:69039937-69039963; AsCpf1-2
agaaaagaaaaagacacctgag

SEQ ID NO: 14954 - DNA, 23 bp, Artificial Sequence
  Synthetic: FXN 3 reverse 9:69039937-69039964; AsCpf1-2
agaaaagaaaaagacacctgagg

SEQ ID NO: 14955 - DNA, 24 bp, Artificial Sequence
  Synthetic: FXN 3 reverse 9:69039937-69039965; AsCpf1-2
agaaaagaaaaagacacctgaggt

SEQ ID NO: 14956 - DNA, 25 bp, Artificial Sequence
  Synthetic: FXN 3 reverse 9:69039937-69039966; AsCpf1-2
agaaaagaaaaagacacctgaggta

SEQ ID NO: 14957 - DNA, 18 bp, Artificial Sequence
  Synthetic: FXN 3 forward 9:69039962-69039984; AsCpf1-2
aagcctaactagtttcac

SEQ ID NO: 14958 - DNA, 19 bp, Artificial Sequence
  Synthetic: FXN 3 forward 9:69039962-69039985; AsCpf1-2
aagcctaactagtttcact

SEQ ID NO: 14959 - DNA, 20 bp, Artificial Sequence
  Synthetic: FXN 3 forward 9:69039962-69039986; AsCpf1-2
aagcctaactagtttcactc

SEQ ID NO: 14960 - DNA, 21 bp, Artificial Sequence
  Synthetic: FXN 3 forward 9:69039962-69039987; AsCpf1-2
aagcctaactagtttcactcc

SEQ ID NO: 14961 - DNA, 22 bp, Artificial Sequence
  Synthetic: FXN 3 forward 9:69039962-69039988; AsCpf1-2
aagcctaactagtttcactccc

SEQ ID NO: 14962 - DNA, 23 bp, Artificial Sequence
  Synthetic: FXN 3 forward 9:69039962-69039989; AsCpf1-2
aagcctaactagtttcactccca

SEQ ID NO: 14963 - DNA, 24 bp, Artificial Sequence
  Synthetic: FXN 3 forward 9:69039962-69039990; AsCpf1-2
aagcctaactagtttcactcccat

SEQ ID NO: 14964 - DNA, 25 bp, Artificial Sequence
  Synthetic: FXN 3 forward 9:69039962-69039991; AsCpf1-2
aagcctaactagtttcactcccatg

SEQ ID NO: 14965 - DNA, 18 bp, Artificial Sequence
  Synthetic: FXN 3 reverse 9:69039965-69039987; AsCpf1-2
atgggagtgaaactagtt

SEQ ID NO: 14966 - DNA, 19 bp, Artificial Sequence
  Synthetic: FXN 3 reverse 9:69039965-69039988; AsCpf1-2
atgggagtgaaactagtta

SEQ ID NO: 14967 - DNA, 20 bp, Artificial Sequence
  Synthetic: FXN 3 reverse 9:69039965-69039989; AsCpf1-2
atgggagtgaaactagttag

SEQ ID NO: 14968 - DNA, 21 bp, Artificial Sequence
  Synthetic: FXN 3 reverse 9:69039965-69039990; AsCpf1-2
atgggagtgaaactagttagg

SEQ ID NO: 14969 - DNA, 22 bp, Artificial Sequence
  Synthetic: FXN 3 reverse 9:69039965-69039991; AsCpf1-2
atgggagtgaaactagttaggc

SEQ ID NO: 14970 - DNA, 23 bp, Artificial Sequence
  Synthetic: FXN 3 reverse 9:69039965-69039992; AsCpf1-2
atgggagtgaaactagttaggct

SEQ ID NO: 14971 - DNA, 24 bp, Artificial Sequence
  Synthetic: FXN 3 reverse 9:69039965-69039993; AsCpf1-2
atgggagtgaaactagttaggctt

SEQ ID NO: 14972 - DNA, 25 bp, Artificial Sequence
  Synthetic: FXN 3 reverse 9:69039965-69039994; AsCpf1-2
atgggagtgaaactagttaggcttt

SEQ ID NO: 14973 - DNA, 18 bp, Artificial Sequence
  Synthetic: FXN 3 forward 9:69040005-69040027; AsCpf1-2
aatggattaatccattat

SEQ ID NO: 14974 - DNA, 19 bp, Artificial Sequence
  Synthetic: FXN 3 forward 9:69040005-69040028; AsCpf1-2
aatggattaatccattatt

SEQ ID NO: 14975 - DNA, 20 bp, Artificial Sequence
  Synthetic: FXN 3 forward 9:69040005-69040029; AsCpf1-2
aatggattaatccattattg

SEQ ID NO: 14976 - DNA, 21 bp, Artificial Sequence
  Synthetic: FXN 3 forward 9:69040005-69040030; AsCpf1-2
aatggattaatccattattga

SEQ ID NO: 14977 - DNA, 22 bp, Artificial Sequence
  Synthetic: FXN 3 forward 9:69040005-69040031; AsCpf1-2
aatggattaatccattattgag

SEQ ID NO: 14978 - DNA, 23 bp, Artificial Sequence
  Synthetic: FXN 3 forward 9:69040005-69040032; AsCpf1-2
aatggattaatccattattgagg

SEQ ID NO: 14979 - DNA, 24 bp, Artificial Sequence
  Synthetic: FXN 3 forward 9:69040005-69040033; AsCpf1-2
aatggattaatccattattgaggg

SEQ ID NO: 14980 - DNA, 25 bp, Artificial Sequence
  Synthetic: FXN 3 forward 9:69040005-69040034; AsCpf1-2
aatggattaatccattattgaggga

SEQ ID NO: 14981 - DNA, 18 bp, Artificial Sequence
  Synthetic: FXN 3 reverse 9:69040113-69040135; AsCpf1-2
gtttgaatgtttgtcacc

SEQ ID NO: 14982 - DNA, 19 bp, Artificial Sequence
  Synthetic: FXN 3 reverse 9:69040113-69040136; AsCpf1-2
gtttgaatgtttgtcacct

SEQ ID NO: 14983 - DNA, 20 bp, Artificial Sequence
  Synthetic: FXN 3 reverse 9:69040113-69040137; AsCpf1-2
gtttgaatgtttgtcacctc

SEQ ID NO: 14984 - DNA, 21 bp, Artificial Sequence
  Synthetic: FXN 3 reverse 9:69040113-69040138; AsCpf1-2
gtttgaatgtttgtcacctcc

SEQ ID NO: 14985 - DNA, 22 bp, Artificial Sequence
  Synthetic: FXN 3 reverse 9:69040113-69040139; AsCpf1-2
gtttgaatgtttgtcacctccg

SEQ ID NO: 14986 - DNA, 23 bp, Artificial Sequence
  Synthetic: FXN 3 reverse 9:69040113-69040140; AsCpf1-2
gtttgaatgtttgtcacctccga

SEQ ID NO: 14987 - DNA, 24 bp, Artificial Sequence
  Synthetic: FXN 3 reverse 9:69040113-69040141; AsCpf1-2
gtttgaatgtttgtcacctccgaa

SEQ ID NO: 14988 - DNA, 25 bp, Artificial Sequence
  Synthetic: FXN 3 reverse 9:69040113-69040142; AsCpf1-2
gtttgaatgtttgtcacctccgaaa

SEQ ID NO: 14989 - DNA, 18 bp, Artificial Sequence
  Synthetic: FXN 3 forward 9:69040259-69040281; AsCpf1-2
accttttggctttaggcc

SEQ ID NO: 14990 - DNA, 19 bp, Artificial Sequence
  Synthetic: FXN 3 forward 9:69040259-69040282; AsCpf1-2
accttttggctttaggcct

SEQ ID NO: 14991 - DNA, 20 bp, Artificial Sequence
  Synthetic: FXN 3 forward 9:69040259-69040283; AsCpf1-2
accttttggctttaggccta

SEQ ID NO: 14992 - DNA, 21 bp, Artificial Sequence
  Synthetic: FXN 3 forward 9:69040259-69040284; AsCpf1-2
accttttggctttaggcctaa

SEQ ID NO: 14993 - DNA, 22 bp, Artificial Sequence
  Synthetic: FXN 3 forward 9:69040259-69040285; AsCpf1-2
accttttggctttaggcctaac

SEQ ID NO: 14994 - DNA, 23 bp, Artificial Sequence
  Synthetic: FXN 3 forward 9:69040259-69040286; AsCpf1-2
accttttggctttaggcctaaca

SEQ ID NO: 14995 - DNA, 24 bp, Artificial Sequence
  Synthetic: FXN 3 forward 9:69040259-69040287; AsCpf1-2
accttttggctttaggcctaacaa

SEQ ID NO: 14996 - DNA, 25 bp, Artificial Sequence
  Synthetic: FXN 3 forward 9:69040259-69040288; AsCpf1-2
accttttggctttaggcctaacaag

SEQ ID NO: 14997 - DNA, 18 bp, Artificial Sequence
  Synthetic: FXN 3 reverse 9:69040268-69040290; AsCpf1-2
acctgcttgttaggccta

SEQ ID NO: 14998 - DNA, 19 bp, Artificial Sequence
  Synthetic: FXN 3 reverse 9:69040268-69040291; AsCpf1-2
acctgcttgttaggcctaa

SEQ ID NO: 14999 - DNA, 20 bp, Artificial Sequence
  Synthetic: FXN 3 reverse 9:69040268-69040292; AsCpf1-2
acctgcttgttaggcctaaa

SEQ ID NO: 15000 - DNA, 21 bp, Artificial Sequence
  Synthetic: FXN 3 reverse 9:69040268-69040293; AsCpf1-2
acctgcttgttaggcctaaag

SEQ ID NO: 15001 - DNA, 22 bp, Artificial Sequence
  Synthetic: FXN 3 reverse 9:69040268-69040294; AsCpf1-2
acctgcttgttaggcctaaagc

SEQ ID NO: 15002 - DNA, 23 bp, Artificial Sequence
  Synthetic: FXN 3 reverse 9:69040268-69040295; AsCpf1-2
acctgcttgttaggcctaaagcc

SEQ ID NO: 15003 - DNA, 24 bp, Artificial Sequence
  Synthetic: FXN 3 reverse 9:69040268-69040296; AsCpf1-2
acctgcttgttaggcctaaagcca

SEQ ID NO: 15004 - DNA, 25 bp, Artificial Sequence
  Synthetic: FXN 3 reverse 9:69040268-69040297; AsCpf1-2
acctgcttgttaggcctaaagccaa

SEQ ID NO: 15005 - DNA, 18 bp, Artificial Sequence
  Synthetic: FXN 3 forward 9:69040293-69040315; AsCpf1-2
ccctcactcactttcaaa

SEQ ID NO: 15006 - DNA, 19 bp, Artificial Sequence
  Synthetic: FXN 3 forward 9:69040293-69040316; AsCpf1-2
ccctcactcactttcaaat

SEQ ID NO: 15007 - DNA, 20 bp, Artificial Sequence
  Synthetic: FXN 3 forward 9:69040293-69040317; AsCpf1-2
ccctcactcactttcaaatc

SEQ ID NO: 15008 - DNA, 21 bp, Artificial Sequence
  Synthetic: FXN 3 forward 9:69040293-69040318; AsCpf1-2
ccctcactcactttcaaatca

SEQ ID NO: 15009 - DNA, 22 bp, Artificial Sequence
  Synthetic: FXN 3 forward 9:69040293-69040319; AsCpf1-2
ccctcactcactttcaaatcat

SEQ ID NO: 15010 - DNA, 23 bp, Artificial Sequence
  Synthetic: FXN 3 forward 9:69040293-69040320; AsCpf1-2
ccctcactcactttcaaatcatt

SEQ ID NO: 15011 - DNA, 24 bp, Artificial Sequence
  Synthetic: FXN 3 forward 9:69040293-69040321; AsCpf1-2
ccctcactcactttcaaatcattt

SEQ ID NO: 15012 - DNA, 25 bp, Artificial Sequence
  Synthetic: FXN 3 forward 9:69040293-69040322; AsCpf1-2
ccctcactcactttcaaatcatttt

SEQ ID NO: 15013 - DNA, 18 bp, Artificial Sequence
  Synthetic: FXN 3 reverse 9:69040330-69040352; AsCpf1-2
tgtaaacttgtgtaaatt

SEQ ID NO: 15014 - DNA, 19 bp, Artificial Sequence
  Synthetic: FXN 3 reverse 9:69040330-69040353; AsCpf1-2
tgtaaacttgtgtaaattg

SEQ ID NO: 15015 - DNA, 20 bp, Artificial Sequence
  Synthetic: FXN 3 reverse 9:69040330-69040354; AsCpf1-2
tgtaaacttgtgtaaattgt

SEQ ID NO: 15016 - DNA, 21 bp, Artificial Sequence
  Synthetic: FXN 3 reverse 9:69040330-69040355; AsCpf1-2
tgtaaacttgtgtaaattgtc

SEQ ID NO: 15017 - DNA, 22 bp, Artificial Sequence
  Synthetic: FXN 3 reverse 9:69040330-69040356; AsCpf1-2
tgtaaacttgtgtaaattgtct

SEQ ID NO: 15018 - DNA, 23 bp, Artificial Sequence
  Synthetic: FXN 3 reverse 9:69040330-69040357; AsCpf1-2
tgtaaacttgtgtaaattgtctg

SEQ ID NO: 15019 - DNA, 24 bp, Artificial Sequence
  Synthetic: FXN 3 reverse 9:69040330-69040358; AsCpf1-2
tgtaaacttgtgtaaattgtctgc

SEQ ID NO: 15020 - DNA, 25 bp, Artificial Sequence
  Synthetic: FXN 3 reverse 9:69040330-69040359; AsCpf1-2
tgtaaacttgtgtaaattgtctgca

SEQ ID NO: 15021 - DNA, 18 bp, Artificial Sequence
  Synthetic: FXN 3 reverse 9:69040340-69040362; AsCpf1-2
cttttctatgtgtaaact

SEQ ID NO: 15022 - DNA, 19 bp, Artificial Sequence
  Synthetic: FXN 3 reverse 9:69040340-69040363; AsCpf1-2
cttttctatgtgtaaactt

SEQ ID NO: 15023 - DNA, 20 bp, Artificial Sequence
  Synthetic: FXN 3 reverse 9:69040340-69040364; AsCpf1-2
cttttctatgtgtaaacttg

SEQ ID NO: 15024 - DNA, 21 bp, Artificial Sequence
  Synthetic: FXN 3 reverse 9:69040340-69040365; AsCpf1-2
cttttctatgtgtaaacttgt

SEQ ID NO: 15025 - DNA, 22 bp, Artificial Sequence
  Synthetic: FXN 3 reverse 9:69040340-69040366; AsCpf1-2
cttttctatgtgtaaacttgtg

SEQ ID NO: 15026 - DNA, 23 bp, Artificial Sequence
  Synthetic: FXN 3 reverse 9:69040340-69040367; AsCpf1-2
cttttctatgtgtaaacttgtgt

SEQ ID NO: 15027 - DNA, 24 bp, Artificial Sequence
  Synthetic: FXN 3 reverse 9:69040340-69040368; AsCpf1-2
cttttctatgtgtaaacttgtgta

SEQ ID NO: 15028 - DNA, 25 bp, Artificial Sequence
  Synthetic: FXN 3 reverse 9:69040340-69040369; AsCpf1-2
cttttctatgtgtaaacttgtgtaa

SEQ ID NO: 15029 - DNA, 18 bp, Artificial Sequence
  Synthetic: FXN 3 reverse 9:69040354-69040376; AsCpf1-2
aatatttacatatccttt

SEQ ID NO: 15030 - DNA, 19 bp, Artificial Sequence
  Synthetic: FXN 3 reverse 9:69040354-69040377; AsCpf1-2
aatatttacatatcctttt

SEQ ID NO: 15031 - DNA, 20 bp, Artificial Sequence
  Synthetic: FXN 3 reverse 9:69040354-69040378; AsCpf1-2
aatatttacatatccttttc

SEQ ID NO: 15032 - DNA, 21 bp, Artificial Sequence
  Synthetic: FXN 3 reverse 9:69040354-69040379; AsCpf1-2
aatatttacatatccttttct

SEQ ID NO: 15033 - DNA, 22 bp, Artificial Sequence
  Synthetic: FXN 3 reverse 9:69040354-69040380; AsCpf1-2
aatatttacatatccttttcta

SEQ ID NO: 15034 - DNA, 23 bp, Artificial Sequence
  Synthetic: FXN 3 reverse 9:69040354-69040381; AsCpf1-2
aatatttacatatccttttctat

SEQ ID NO: 15035 - DNA, 24 bp, Artificial Sequence
  Synthetic: FXN 3 reverse 9:69040354-69040382; AsCpf1-2
aatatttacatatccttttctatg

SEQ ID NO: 15036 - DNA, 25 bp, Artificial Sequence
  Synthetic: FXN 3 reverse 9:69040354-69040383; AsCpf1-2
aatatttacatatccttttctatgt

SEQ ID NO: 15037 - DNA, 18 bp, Artificial Sequence
  Synthetic: FXN 3 forward 9:69040367-69040389; AsCpf1-2
taaatatttatacgctgc

SEQ ID NO: 15038 - DNA, 19 bp, Artificial Sequence
  Synthetic: FXN 3 forward 9:69040367-69040390; AsCpf1-2
taaatatttatacgctgcc

SEQ ID NO: 15039 - DNA, 20 bp, Artificial Sequence
  Synthetic: FXN 3 forward 9:69040367-69040391; AsCpf1-2
taaatatttatacgctgccg

SEQ ID NO: 15040 - DNA, 21 bp, Artificial Sequence
  Synthetic: FXN 3 forward 9:69040367-69040392; AsCpf1-2
taaatatttatacgctgccgg

SEQ ID NO: 15041 - DNA, 22 bp, Artificial Sequence
  Synthetic: FXN 3 forward 9:69040367-69040393; AsCpf1-2
taaatatttatacgctgccggg

SEQ ID NO: 15042 - DNA, 23 bp, Artificial Sequence
  Synthetic: FXN 3 forward 9:69040367-69040394; AsCpf1-2
taaatatttatacgctgccgggc

SEQ ID NO: 15043 - DNA, 24 bp, Artificial Sequence
  Synthetic: FXN 3 forward 9:69040367-69040395; AsCpf1-2
taaatatttatacgctgccgggcg

SEQ ID NO: 15044 - DNA, 25 bp, Artificial Sequence
  Synthetic: FXN 3 forward 9:69040367-69040396; AsCpf1-2
taaatatttatacgctgccgggcgc

SEQ ID NO: 15045 - DNA, 18 bp, Artificial Sequence
  Synthetic: FXN 3 forward 9:69040379-69040401; AsCpf1-2
cgctgccgggcgcggtgg

SEQ ID NO: 15046 - DNA, 19 bp, Artificial Sequence
  Synthetic: FXN 3 forward 9:69040379-69040402; AsCpf1-2
cgctgccgggcgcggtggc

SEQ ID NO: 15047 - DNA, 20 bp, Artificial Sequence
  Synthetic: FXN 3 forward 9:69040379-69040403; AsCpf1-2
cgctgccgggcgcggtggct

SEQ ID NO: 15048 - DNA, 21 bp, Artificial Sequence
  Synthetic: FXN 3 forward 9:69040379-69040404; AsCpf1-2
cgctgccgggcgcggtggctc

SEQ ID NO: 15049 - DNA, 22 bp, Artificial Sequence
  Synthetic: FXN 3 forward 9:69040379-69040405; AsCpf1-2
cgctgccgggcgcggtggctca

SEQ ID NO: 15050 - DNA, 23 bp, Artificial Sequence
  Synthetic: FXN 3 forward 9:69040379-69040406; AsCpf1-2
cgctgccgggcgcggtggctcac

SEQ ID NO: 15051 - DNA, 24 bp, Artificial Sequence
  Synthetic: FXN 3 forward 9:69040379-69040407; AsCpf1-2
cgctgccgggcgcggtggctcacg

SEQ ID NO: 15052 - DNA, 25 bp, Artificial Sequence
  Synthetic: FXN 3 forward 9:69040379-69040408; AsCpf1-2
cgctgccgggcgcggtggctcacgc

SEQ ID NO: 15053 - DNA, 18 bp, Artificial Sequence
  Synthetic: FXN 3 reverse 9:69040673-69040695; AsCpf1-2
aatatttatttatttatt

SEQ ID NO: 15054 - DNA, 19 bp, Artificial Sequence
  Synthetic: FXN 3 reverse 9:69040673-69040696; AsCpf1-2
aatatttatttatttattt

SEQ ID NO: 15055 - DNA, 20 bp, Artificial Sequence
  Synthetic: FXN 3 reverse 9:69040673-69040697; AsCpf1-2
aatatttatttatttattta

SEQ ID NO: 15056 - DNA, 21 bp, Artificial Sequence
  Synthetic: FXN 3 reverse 9:69040673-69040698; AsCpf1-2
aatatttatttatttatttat

SEQ ID NO: 15057 - DNA, 22 bp, Artificial Sequence
  Synthetic: FXN 3 reverse 9:69040673-69040699; AsCpf1-2
aatatttatttatttatttatt

SEQ ID NO: 15058 - DNA, 23 bp, Artificial Sequence
  Synthetic: FXN 3 reverse 9:69040673-69040700; AsCpf1-2
aatatttatttatttatttattt

SEQ ID NO: 15059 - DNA, 24 bp, Artificial Sequence
  Synthetic: FXN 3 reverse 9:69040673-69040701; AsCpf1-2
aatatttatttatttatttatttt

SEQ ID NO: 15060 - DNA, 25 bp, Artificial Sequence
  Synthetic: FXN 3 reverse 9:69040673-69040702; AsCpf1-2
aatatttatttatttatttattttt

SEQ ID NO: 15061 - DNA, 18 bp, Artificial Sequence
  Synthetic: FXN 3 reverse 9:69040682-69040704; AsCpf1-2
agcagtataaatatttat

SEQ ID NO: 15062 - DNA, 19 bp, Artificial Sequence
  Synthetic: FXN 3 reverse 9:69040682-69040705; AsCpf1-2
agcagtataaatatttatt

SEQ ID NO: 15063 - DNA, 20 bp, Artificial Sequence
  Synthetic: FXN 3 reverse 9:69040682-69040706; AsCpf1-2
agcagtataaatatttattt

SEQ ID NO: 15064 - DNA, 21 bp, Artificial Sequence
  Synthetic: FXN 3 reverse 9:69040682-69040707; AsCpf1-2
agcagtataaatatttattta

SEQ ID NO: 15065 - DNA, 22 bp, Artificial Sequence
  Synthetic: FXN 3 reverse 9:69040682-69040708; AsCpf1-2
agcagtataaatatttatttat

SEQ ID NO: 15066 - DNA, 23 bp, Artificial Sequence
  Synthetic: FXN 3 reverse 9:69040682-69040709; AsCpf1-2
agcagtataaatatttatttatt

SEQ ID NO: 15067 - DNA, 24 bp, Artificial Sequence
  Synthetic: FXN 3 reverse 9:69040682-69040710; AsCpf1-2
agcagtataaatatttatttattt

SEQ ID NO: 15068 - DNA, 25 bp, Artificial Sequence
  Synthetic: FXN 3 reverse 9:69040682-69040711; AsCpf1-2
agcagtataaatatttatttattta

SEQ ID NO: 15069 - DNA, 18 bp, Artificial Sequence
  Synthetic: FXN 3 forward 9:69040698-69040720; AsCpf1-2
ctgcttataaactaataa

SEQ ID NO: 15070 - DNA, 19 bp, Artificial Sequence
  Synthetic: FXN 3 forward 9:69040698-69040721; AsCpf1-2
ctgcttataaactaataat

SEQ ID NO: 15071 - DNA, 20 bp, Artificial Sequence
  Synthetic: FXN 3 forward 9:69040698-69040722; AsCpf1-2
ctgcttataaactaataata

SEQ ID NO: 15072 - DNA, 21 bp, Artificial Sequence
  Synthetic: FXN 3 forward 9:69040698-69040723; AsCpf1-2
ctgcttataaactaataataa

SEQ ID NO: 15073 - DNA, 22 bp, Artificial Sequence
  Synthetic: FXN 3 forward 9:69040698-69040724; AsCpf1-2
ctgcttataaactaataataaa

SEQ ID NO: 15074 - DNA, 23 bp, Artificial Sequence
  Synthetic: FXN 3 forward 9:69040698-69040725; AsCpf1-2
ctgcttataaactaataataaat

SEQ ID NO: 15075 - DNA, 24 bp, Artificial Sequence
  Synthetic: FXN 3 forward 9:69040698-69040726; AsCpf1-2
ctgcttataaactaataataaatg

SEQ ID NO: 15076 - DNA, 25 bp, Artificial Sequence
  Synthetic: FXN 3 forward 9:69040698-69040727; AsCpf1-2
ctgcttataaactaataataaatgc

SEQ ID NO: 15077 - DNA, 18 bp, Artificial Sequence
  Synthetic: FXN 3 forward 9:69040707-69040729; AsCpf1-2
aactaataataaatgcta

SEQ ID NO: 15078 - DNA, 19 bp, Artificial Sequence
  Synthetic: FXN 3 forward 9:69040707-69040730; AsCpf1-2
aactaataataaatgctat

SEQ ID NO: 15079 - DNA, 20 bp, Artificial Sequence
  Synthetic: FXN 3 forward 9:69040707-69040731; AsCpf1-2
aactaataataaatgctatg

SEQ ID NO: 15080 - DNA, 21 bp, Artificial Sequence
  Synthetic: FXN 3 forward 9:69040707-69040732; AsCpf1-2
aactaataataaatgctatgg

SEQ ID NO: 15081 - DNA, 22 bp, Artificial Sequence
  Synthetic: FXN 3 forward 9:69040707-69040733; AsCpf1-2
aactaataataaatgctatggt

SEQ ID NO: 15082 - DNA, 23 bp, Artificial Sequence
  Synthetic: FXN 3 forward 9:69040707-69040734; AsCpf1-2
aactaataataaatgctatggtc

SEQ ID NO: 15083 - DNA, 24 bp, Artificial Sequence
  Synthetic: FXN 3 forward 9:69040707-69040735; AsCpf1-2
aactaataataaatgctatggtct

SEQ ID NO: 15084 - DNA, 25 bp, Artificial Sequence
  Synthetic: FXN 3 forward 9:69040707-69040736; AsCpf1-2
aactaataataaatgctatggtctg

SEQ ID NO: 15085 - DNA, 18 bp, Artificial Sequence
  Synthetic: FXN 3 forward 9:69040727-69040749; AsCpf1-2
gtctgcatgtttgtgtca

SEQ ID NO: 15086 - DNA, 19 bp, Artificial Sequence
  Synthetic: FXN 3 forward 9:69040727-69040750; AsCpf1-2
gtctgcatgtttgtgtcac

SEQ ID NO: 15087 - DNA, 20 bp, Artificial Sequence
  Synthetic: FXN 3 forward 9:69040727-69040751; AsCpf1-2
gtctgcatgtttgtgtcacc

SEQ ID NO: 15088 - DNA, 21 bp, Artificial Sequence
  Synthetic: FXN 3 forward 9:69040727-69040752; AsCpf1-2
gtctgcatgtttgtgtcaccc

SEQ ID NO: 15089 - DNA, 22 bp, Artificial Sequence
  Synthetic: FXN 3 forward 9:69040727-69040753; AsCpf1-2
gtctgcatgtttgtgtcacccc

SEQ ID NO: 15090 - DNA, 23 bp, Artificial Sequence
  Synthetic: FXN 3 forward 9:69040727-69040754; AsCpf1-2
gtctgcatgtttgtgtcacccca

SEQ ID NO: 15091 - DNA, 24 bp, Artificial Sequence
  Synthetic: FXN 3 forward 9:69040727-69040755; AsCpf1-2
gtctgcatgtttgtgtcaccccac

SEQ ID NO: 15092 - DNA, 25 bp, Artificial Sequence
  Synthetic: FXN 3 forward 9:69040727-69040756; AsCpf1-2
gtctgcatgtttgtgtcaccccacc

SEQ ID NO: 15093 - DNA, 18 bp, Artificial Sequence
  Synthetic: FXN 3 reverse 9:69040734-69040756; AsCpf1-2
aatggtggggtgacacaa

SEQ ID NO: 15094 - DNA, 19 bp, Artificial Sequence
  Synthetic: FXN 3 reverse 9:69040734-69040757; AsCpf1-2
aatggtggggtgacacaaa

SEQ ID NO: 15095 - DNA, 20 bp, Artificial Sequence
  Synthetic: FXN 3 reverse 9:69040734-69040758; AsCpf1-2
aatggtggggtgacacaaac

SEQ ID NO: 15096 - DNA, 21 bp, Artificial Sequence
  Synthetic: FXN 3 reverse 9:69040734-69040759; AsCpf1-2
aatggtggggtgacacaaaca

SEQ ID NO: 15097 - DNA, 22 bp, Artificial Sequence
  Synthetic: FXN 3 reverse 9:69040734-69040760; AsCpf1-2
aatggtggggtgacacaaacat

SEQ ID NO: 15098 - DNA, 23 bp, Artificial Sequence
  Synthetic: FXN 3 reverse 9:69040734-69040761; AsCpf1-2
aatggtggggtgacacaaacatg

SEQ ID NO: 15099 - DNA, 24 bp, Artificial Sequence
  Synthetic: FXN 3 reverse 9:69040734-69040762; AsCpf1-2
aatggtggggtgacacaaacatgc

SEQ ID NO: 15100 - DNA, 25 bp, Artificial Sequence
  Synthetic: FXN 3 reverse 9:69040734-69040763; AsCpf1-2
aatggtggggtgacacaaacatgca

SEQ ID NO: 15101 - DNA, 18 bp, Artificial Sequence
  Synthetic: FXN 3 forward 9:69040761-69040783; AsCpf1-2
ttaaaacctaatcaccaa

SEQ ID NO: 15102 - DNA, 19 bp, Artificial Sequence
  Synthetic: FXN 3 forward 9:69040761-69040784; AsCpf1-2
ttaaaacctaatcaccaaa

SEQ ID NO: 15103 - DNA, 20 bp, Artificial Sequence
  Synthetic: FXN 3 forward 9:69040761-69040785; AsCpf1-2
ttaaaacctaatcaccaaag

SEQ ID NO: 15104 - DNA, 21 bp, Artificial Sequence
  Synthetic: FXN 3 forward 9:69040761-69040786; AsCpf1-2
ttaaaacctaatcaccaaagt

SEQ ID NO: 15105 - DNA, 22 bp, Artificial Sequence
  Synthetic: FXN 3 forward 9:69040761-69040787; AsCpf1-2
ttaaaacctaatcaccaaagtg

SEQ ID NO: 15106 - DNA, 23 bp, Artificial Sequence
  Synthetic: FXN 3 forward 9:69040761-69040788; AsCpf1-2
ttaaaacctaatcaccaaagtga

SEQ ID NO: 15107 - DNA, 24 bp, Artificial Sequence
  Synthetic: FXN 3 forward 9:69040761-69040789; AsCpf1-2
ttaaaacctaatcaccaaagtgat

SEQ ID NO: 15108 - DNA, 25 bp, Artificial Sequence
  Synthetic: FXN 3 forward 9:69040761-69040790; AsCpf1-2
ttaaaacctaatcaccaaagtgata

SEQ ID NO: 15109 - DNA, 18 bp, Artificial Sequence
  Synthetic: FXN 3 reverse 9:69040761-69040783; AsCpf1-2
actttggtgattaggttt

SEQ ID NO: 15110 - DNA, 19 bp, Artificial Sequence
  Synthetic: FXN 3 reverse 9:69040761-69040784; AsCpf1-2
actttggtgattaggtttt

SEQ ID NO: 15111 - DNA, 20 bp, Artificial Sequence
  Synthetic: FXN 3 reverse 9:69040761-69040785; AsCpf1-2
actttggtgattaggtttta

SEQ ID NO: 15112 - DNA, 21 bp, Artificial Sequence
  Synthetic: FXN 3 reverse 9:69040761-69040786; AsCpf1-2
actttggtgattaggttttaa

SEQ ID NO: 15113 - DNA, 22 bp, Artificial Sequence
  Synthetic: FXN 3 reverse 9:69040761-69040787; AsCpf1-2
actttggtgattaggttttaac

SEQ ID NO: 15114 - DNA, 23 bp, Artificial Sequence
  Synthetic: FXN 3 reverse 9:69040761-69040788; AsCpf1-2
actttggtgattaggttttaaca

SEQ ID NO: 15115 - DNA, 24 bp, Artificial Sequence
  Synthetic: FXN 3 reverse 9:69040761-69040789; AsCpf1-2
actttggtgattaggttttaacat

SEQ ID NO: 15116 - DNA, 25 bp, Artificial Sequence
  Synthetic: FXN 3 reverse 9:69040761-69040790; AsCpf1-2
actttggtgattaggttttaacata

SEQ ID NO: 15117 - DNA, 18 bp, Artificial Sequence
  Synthetic: FXN 3 reverse 9:69040812-69040834; AsCpf1-2
ggctccaccctcatacct

SEQ ID NO: 15118 - DNA, 19 bp, Artificial Sequence
  Synthetic: FXN 3 reverse 9:69040812-69040835; AsCpf1-2
ggctccaccctcatacctc

SEQ ID NO: 15119 - DNA, 20 bp, Artificial Sequence
  Synthetic: FXN 3 reverse 9:69040812-69040836; AsCpf1-2
ggctccaccctcatacctca

SEQ ID NO: 15120 - DNA, 21 bp, Artificial Sequence
  Synthetic: FXN 3 reverse 9:69040812-69040837; AsCpf1-2
ggctccaccctcatacctcat

SEQ ID NO: 15121 - DNA, 22 bp, Artificial Sequence
  Synthetic: FXN 3 reverse 9:69040812-69040838; AsCpf1-2
ggctccaccctcatacctcatc

SEQ ID NO: 15122 - DNA, 23 bp, Artificial Sequence
  Synthetic: FXN 3 reverse 9:69040812-69040839; AsCpf1-2
ggctccaccctcatacctcatca

SEQ ID NO: 15123 - DNA, 24 bp, Artificial Sequence
  Synthetic: FXN 3 reverse 9:69040812-69040840; AsCpf1-2
ggctccaccctcatacctcatcac

SEQ ID NO: 15124 - DNA, 25 bp, Artificial Sequence
  Synthetic: FXN 3 reverse 9:69040812-69040841; AsCpf1-2
ggctccaccctcatacctcatcacc

SEQ ID NO: 15125 - DNA, 18 bp, Artificial Sequence
  Synthetic: FXN 3 forward 9:69040822-69040844; AsCpf1-2
agggtggagcccatatga

SEQ ID NO: 15126 - DNA, 19 bp, Artificial Sequence
  Synthetic: FXN 3 forward 9:69040822-69040845; AsCpf1-2
agggtggagcccatatgat

SEQ ID NO: 15127 - DNA, 20 bp, Artificial Sequence
  Synthetic: FXN 3 forward 9:69040822-69040846; AsCpf1-2
agggtggagcccatatgatt

SEQ ID NO: 15128 - DNA, 21 bp, Artificial Sequence
  Synthetic: FXN 3 forward 9:69040822-69040847; AsCpf1-2
agggtggagcccatatgattg

SEQ ID NO: 15129 - DNA, 22 bp, Artificial Sequence
  Synthetic: FXN 3 forward 9:69040822-69040848; AsCpf1-2
agggtggagcccatatgattgg

SEQ ID NO: 15130 - DNA, 23 bp, Artificial Sequence
  Synthetic: FXN 3 forward 9:69040822-69040849; AsCpf1-2
agggtggagcccatatgattggg

SEQ ID NO: 15131 - DNA, 24 bp, Artificial Sequence
  Synthetic: FXN 3 forward 9:69040822-69040850; AsCpf1-2
agggtggagcccatatgattggga

SEQ ID NO: 15132 - DNA, 25 bp, Artificial Sequence
  Synthetic: FXN 3 forward 9:69040822-69040851; AsCpf1-2
agggtggagcccatatgattgggat

SEQ ID NO: 15133 - DNA, 18 bp, Artificial Sequence
  Synthetic: FXN 3 forward 9:69040839-69040861; AsCpf1-2
attgggattagtgccctt

SEQ ID NO: 15134 - DNA, 19 bp, Artificial Sequence
  Synthetic: FXN 3 forward 9:69040839-69040862; AsCpf1-2
attgggattagtgcccttc

SEQ ID NO: 15135 - DNA, 20 bp, Artificial Sequence
  Synthetic: FXN 3 forward 9:69040839-69040863; AsCpf1-2
attgggattagtgcccttct

SEQ ID NO: 15136 - DNA, 21 bp, Artificial Sequence
  Synthetic: FXN 3 forward 9:69040839-69040864; AsCpf1-2
attgggattagtgcccttcta

SEQ ID NO: 15137 - DNA, 22 bp, Artificial Sequence
  Synthetic: FXN 3 forward 9:69040839-69040865; AsCpf1-2
attgggattagtgcccttctaa

SEQ ID NO: 15138 - DNA, 23 bp, Artificial Sequence
  Synthetic: FXN 3 forward 9:69040839-69040866; AsCpf1-2
attgggattagtgcccttctaaa

SEQ ID NO: 15139 - DNA, 24 bp, Artificial Sequence
  Synthetic: FXN 3 forward 9:69040839-69040867; AsCpf1-2
attgggattagtgcccttctaaaa

SEQ ID NO: 15140 - DNA, 25 bp, Artificial Sequence
  Synthetic: FXN 3 forward 9:69040839-69040868; AsCpf1-2
attgggattagtgcccttctaaaat

SEQ ID NO: 15141 - DNA, 18 bp, Artificial Sequence
  Synthetic: FXN 3 forward 9:69040900-69040922; AsCpf1-2
aaccaggaaactggccct

SEQ ID NO: 15142 - DNA, 19 bp, Artificial Sequence
  Synthetic: FXN 3 forward 9:69040900-69040923; AsCpf1-2
aaccaggaaactggccctc

SEQ ID NO: 15143 - DNA, 20 bp, Artificial Sequence
  Synthetic: FXN 3 forward 9:69040900-69040924; AsCpf1-2
aaccaggaaactggccctca

SEQ ID NO: 15144 - DNA, 21 bp, Artificial Sequence
  Synthetic: FXN 3 forward 9:69040900-69040925; AsCpf1-2
aaccaggaaactggccctcac

SEQ ID NO: 15145 - DNA, 22 bp, Artificial Sequence
  Synthetic: FXN 3 forward 9:69040900-69040926; AsCpf1-2
aaccaggaaactggccctcacc

SEQ ID NO: 15146 - DNA, 23 bp, Artificial Sequence
  Synthetic: FXN 3 forward 9:69040900-69040927; AsCpf1-2
aaccaggaaactggccctcacca

SEQ ID NO: 15147 - DNA, 24 bp, Artificial Sequence
  Synthetic: FXN 3 forward 9:69040900-69040928; AsCpf1-2
aaccaggaaactggccctcaccag

SEQ ID NO: 15148 - DNA, 25 bp, Artificial Sequence
  Synthetic: FXN 3 forward 9:69040900-69040929; AsCpf1-2
aaccaggaaactggccctcaccaga

SEQ ID NO: 15149 - DNA, 18 bp, Artificial Sequence
  Synthetic: FXN 3 reverse 9:69040976-69040998; AsCpf1-2
aacaatagaaatgtgttt

SEQ ID NO: 15150 - DNA, 19 bp, Artificial Sequence
  Synthetic: FXN 3 reverse 9:69040976-69040999; AsCpf1-2
aacaatagaaatgtgtttc

SEQ ID NO: 15151 - DNA, 20 bp, Artificial Sequence
  Synthetic: FXN 3 reverse 9:69040976-69041000; AsCpf1-2
aacaatagaaatgtgtttct

SEQ ID NO: 15152 - DNA, 21 bp, Artificial Sequence
  Synthetic: FXN 3 reverse 9:69040976-69041001; AsCpf1-2
aacaatagaaatgtgtttctt

SEQ ID NO: 15153 - DNA, 22 bp, Artificial Sequence
  Synthetic: FXN 3 reverse 9:69040976-69041002; AsCpf1-2
aacaatagaaatgtgtttctta

SEQ ID NO: 15154 - DNA, 23 bp, Artificial Sequence
  Synthetic: FXN 3 reverse 9:69040976-69041003; AsCpf1-2
aacaatagaaatgtgtttcttag

SEQ ID NO: 15155 - DNA, 24 bp, Artificial Sequence
  Synthetic: FXN 3 reverse 9:69040976-69041004; AsCpf1-2
aacaatagaaatgtgtttcttaga

SEQ ID NO: 15156 - DNA, 25 bp, Artificial Sequence
  Synthetic: FXN 3 reverse 9:69040976-69041005; AsCpf1-2
aacaatagaaatgtgtttcttagag

SEQ ID NO: 15157 - DNA, 18 bp, Artificial Sequence
  Synthetic: FXN 3 forward 9:69041001-69041023; AsCpf1-2
agccacccagtggctggt

SEQ ID NO: 15158 - DNA, 19 bp, Artificial Sequence
  Synthetic: FXN 3 forward 9:69041001-69041024; AsCpf1-2
agccacccagtggctggta

SEQ ID NO: 15159 - DNA, 20 bp, Artificial Sequence
  Synthetic: FXN 3 forward 9:69041001-69041025; AsCpf1-2
agccacccagtggctggtat

SEQ ID NO: 15160 - DNA, 21 bp, Artificial Sequence
  Synthetic: FXN 3 forward 9:69041001-69041026; AsCpf1-2
agccacccagtggctggtatt

SEQ ID NO: 15161 - DNA, 22 bp, Artificial Sequence
  Synthetic: FXN 3 forward 9:69041001-69041027; AsCpf1-2
agccacccagtggctggtattt

SEQ ID NO: 15162 - DNA, 23 bp, Artificial Sequence
  Synthetic: FXN 3 forward 9:69041001-69041028; AsCpf1-2
agccacccagtggctggtatttt

SEQ ID NO: 15163 - DNA, 24 bp, Artificial Sequence
  Synthetic: FXN 3 forward 9:69041001-69041029; AsCpf1-2
agccacccagtggctggtattttg

SEQ ID NO: 15164 - DNA, 25 bp, Artificial Sequence
  Synthetic: FXN 3 forward 9:69041001-69041030; AsCpf1-2
agccacccagtggctggtattttgt

SEQ ID NO: 15165 - DNA, 18 bp, Artificial Sequence
  Synthetic: FXN 3 reverse 9:69041005-69041027; AsCpf1-2
acaaaataccagccactg

SEQ ID NO: 15166 - DNA, 19 bp, Artificial Sequence
  Synthetic: FXN 3 reverse 9:69041005-69041028; AsCpf1-2
acaaaataccagccactgg

SEQ ID NO: 15167 - DNA, 20 bp, Artificial Sequence
  Synthetic: FXN 3 reverse 9:69041005-69041029; AsCpf1-2
acaaaataccagccactggg

SEQ ID NO: 15168 - DNA, 21 bp, Artificial Sequence
  Synthetic: FXN 3 reverse 9:69041005-69041030; AsCpf1-2
acaaaataccagccactgggt

SEQ ID NO: 15169 - DNA, 22 bp, Artificial Sequence
  Synthetic: FXN 3 reverse 9:69041005-69041031; AsCpf1-2
acaaaataccagccactgggtg

SEQ ID NO: 15170 - DNA, 23 bp, Artificial Sequence
  Synthetic: FXN 3 reverse 9:69041005-69041032; AsCpf1-2
acaaaataccagccactgggtgg

SEQ ID NO: 15171 - DNA, 24 bp, Artificial Sequence
  Synthetic: FXN 3 reverse 9:69041005-69041033; AsCpf1-2
acaaaataccagccactgggtggc

SEQ ID NO: 15172 - DNA, 25 bp, Artificial Sequence
  Synthetic: FXN 3 reverse 9:69041005-69041034; AsCpf1-2
acaaaataccagccactgggtggct

SEQ ID NO: 15173 - DNA, 18 bp, Artificial Sequence
  Synthetic: FXN 3 forward 9:69041030-69041052; AsCpf1-2
acatcccagactaagaca

SEQ ID NO: 15174 - DNA, 19 bp, Artificial Sequence
  Synthetic: FXN 3 forward 9:69041030-69041053; AsCpf1-2
acatcccagactaagacaa

SEQ ID NO: 15175 - DNA, 20 bp, Artificial Sequence
  Synthetic: FXN 3 forward 9:69041030-69041054; AsCpf1-2
acatcccagactaagacaaa

SEQ ID NO: 15176 - DNA, 21 bp, Artificial Sequence
  Synthetic: FXN 3 forward 9:69041030-69041055; AsCpf1-2
acatcccagactaagacaaat

SEQ ID NO: 15177 - DNA, 22 bp, Artificial Sequence
  Synthetic: FXN 3 forward 9:69041030-69041056; AsCpf1-2
acatcccagactaagacaaata

SEQ ID NO: 15178 - DNA, 23 bp, Artificial Sequence
  Synthetic: FXN 3 forward 9:69041030-69041057; AsCpf1-2
acatcccagactaagacaaataa

SEQ ID NO: 15179 - DNA, 24 bp, Artificial Sequence
  Synthetic: FXN 3 forward 9:69041030-69041058; AsCpf1-2
acatcccagactaagacaaataac

SEQ ID NO: 15180 - DNA, 25 bp, Artificial Sequence
  Synthetic: FXN 3 forward 9:69041030-69041059; AsCpf1-2
acatcccagactaagacaaataaca

SEQ ID NO: 15181 - DNA, 18 bp, Artificial Sequence
  Synthetic: FXN 3 reverse 9:69041064-69041086; AsCpf1-2
tcttaacctggtgtcagg

SEQ ID NO: 15182 - DNA, 19 bp, Artificial Sequence
  Synthetic: FXN 3 reverse 9:69041064-69041087; AsCpf1-2
tcttaacctggtgtcaggg

SEQ ID NO: 15183 - DNA, 20 bp, Artificial Sequence
  Synthetic: FXN 3 reverse 9:69041064-69041088; AsCpf1-2
tcttaacctggtgtcaggga

SEQ ID NO: 15184 - DNA, 21 bp, Artificial Sequence
  Synthetic: FXN 3 reverse 9:69041064-69041089; AsCpf1-2
tcttaacctggtgtcagggat

SEQ ID NO: 15185 - DNA, 22 bp, Artificial Sequence
  Synthetic: FXN 3 reverse 9:69041064-69041090; AsCpf1-2
tcttaacctggtgtcagggata

SEQ ID NO: 15186 - DNA, 23 bp, Artificial Sequence
  Synthetic: FXN 3 reverse 9:69041064-69041091; AsCpf1-2
tcttaacctggtgtcagggatac

SEQ ID NO: 15187 - DNA, 24 bp, Artificial Sequence
  Synthetic: FXN 3 reverse 9:69041064-69041092; AsCpf1-2
tcttaacctggtgtcagggataca

SEQ ID NO: 15188 - DNA, 25 bp, Artificial Sequence
  Synthetic: FXN 3 reverse 9:69041064-69041093; AsCpf1-2
tcttaacctggtgtcagggatacaa

SEQ ID NO: 15189 - DNA, 18 bp, Artificial Sequence
  Synthetic: FXN 3 forward 9:69041067-69041089; AsCpf1-2
cctgacaccaggttaaga

SEQ ID NO: 15190 - DNA, 19 bp, Artificial Sequence
  Synthetic: FXN 3 forward 9:69041067-69041090; AsCpf1-2
cctgacaccaggttaagag

SEQ ID NO: 15191 - DNA, 20 bp, Artificial Sequence
  Synthetic: FXN 3 forward 9:69041067-69041091; AsCpf1-2
cctgacaccaggttaagaga

SEQ ID NO: 15192 - DNA, 21 bp, Artificial Sequence
  Synthetic: FXN 3 forward 9:69041067-69041092; AsCpf1-2
cctgacaccaggttaagagat

SEQ ID NO: 15193 - DNA, 22 bp, Artificial Sequence
  Synthetic: FXN 3 forward 9:69041067-69041093; AsCpf1-2
cctgacaccaggttaagagata

SEQ ID NO: 15194 - DNA, 23 bp, Artificial Sequence
  Synthetic: FXN 3 forward 9:69041067-69041094; AsCpf1-2
cctgacaccaggttaagagatag

SEQ ID NO: 15195 - DNA, 24 bp, Artificial Sequence
  Synthetic: FXN 3 forward 9:69041067-69041095; AsCpf1-2
cctgacaccaggttaagagataga

SEQ ID NO: 15196 - DNA, 25 bp, Artificial Sequence
  Synthetic: FXN 3 forward 9:69041067-69041096; AsCpf1-2
cctgacaccaggttaagagatagaa

SEQ ID NO: 15197 - DNA, 18 bp, Artificial Sequence
  Synthetic: FXN 3 forward 9:69041218-69041240; AsCpf1-2
tcccccaatccatgtatt

SEQ ID NO: 15198 - DNA, 19 bp, Artificial Sequence
  Synthetic: FXN 3 forward 9:69041218-69041241; AsCpf1-2
tcccccaatccatgtattg

SEQ ID NO: 15199 - DNA, 20 bp, Artificial Sequence
  Synthetic: FXN 3 forward 9:69041218-69041242; AsCpf1-2
tcccccaatccatgtattgc

SEQ ID NO: 15200 - DNA, 21 bp, Artificial Sequence
  Synthetic: FXN 3 forward 9:69041218-69041243; AsCpf1-2
tcccccaatccatgtattgct

SEQ ID NO: 15201 - DNA, 22 bp, Artificial Sequence
  Synthetic: FXN 3 forward 9:69041218-69041244; AsCpf1-2
tcccccaatccatgtattgctt

SEQ ID NO: 15202 - DNA, 23 bp, Artificial Sequence
  Synthetic: FXN 3 forward 9:69041218-69041245; AsCpf1-2
tcccccaatccatgtattgctta

SEQ ID NO: 15203 - DNA, 24 bp, Artificial Sequence
  Synthetic: FXN 3 forward 9:69041218-69041246; AsCpf1-2
tcccccaatccatgtattgcttat

SEQ ID NO: 15204 - DNA, 25 bp, Artificial Sequence
  Synthetic: FXN 3 forward 9:69041218-69041247; AsCpf1-2
tcccccaatccatgtattgcttata

SEQ ID NO: 15205 - DNA, 18 bp, Artificial Sequence
  Synthetic: FXN 3 reverse 9:69041218-69041240; AsCpf1-2
agcaatacatggattggg

SEQ ID NO: 15206 - DNA, 19 bp, Artificial Sequence
  Synthetic: FXN 3 reverse 9:69041218-69041241; AsCpf1-2
agcaatacatggattgggg

SEQ ID NO: 15207 - DNA, 20 bp, Artificial Sequence
  Synthetic: FXN 3 reverse 9:69041218-69041242; AsCpf1-2
agcaatacatggattggggg

SEQ ID NO: 15208 - DNA, 21 bp, Artificial Sequence
  Synthetic: FXN 3 reverse 9:69041218-69041243; AsCpf1-2
agcaatacatggattggggga

SEQ ID NO: 15209 - DNA, 22 bp, Artificial Sequence
  Synthetic: FXN 3 reverse 9:69041218-69041244; AsCpf1-2
agcaatacatggattgggggag

SEQ ID NO: 15210 - DNA, 23 bp, Artificial Sequence
  Synthetic: FXN 3 reverse 9:69041218-69041245; AsCpf1-2
agcaatacatggattgggggaga

SEQ ID NO: 15211 - DNA, 24 bp, Artificial Sequence
  Synthetic: FXN 3 reverse 9:69041218-69041246; AsCpf1-2
agcaatacatggattgggggagat

SEQ ID NO: 15212 - DNA, 25 bp, Artificial Sequence
  Synthetic: FXN 3 reverse 9:69041218-69041247; AsCpf1-2
agcaatacatggattgggggagata

SEQ ID NO: 15213 - DNA, 18 bp, Artificial Sequence
  Synthetic: FXN 3 reverse 9:69041220-69041242; AsCpf1-2
taagcaatacatggattg

SEQ ID NO: 15214 - DNA, 19 bp, Artificial Sequence
  Synthetic: FXN 3 reverse 9:69041220-69041243; AsCpf1-2
taagcaatacatggattgg

SEQ ID NO: 15215 - DNA, 20 bp, Artificial Sequence
  Synthetic: FXN 3 reverse 9:69041220-69041244; AsCpf1-2
taagcaatacatggattggg

SEQ ID NO: 15216 - DNA, 21 bp, Artificial Sequence
  Synthetic: FXN 3 reverse 9:69041220-69041245; AsCpf1-2
taagcaatacatggattgggg

SEQ ID NO: 15217 - DNA, 22 bp, Artificial Sequence
  Synthetic: FXN 3 reverse 9:69041220-69041246; AsCpf1-2
taagcaatacatggattggggg

SEQ ID NO: 15218 - DNA, 23 bp, Artificial Sequence
  Synthetic: FXN 3 reverse 9:69041220-69041247; AsCpf1-2
taagcaatacatggattggggga

SEQ ID NO: 15219 - DNA, 24 bp, Artificial Sequence
  Synthetic: FXN 3 reverse 9:69041220-69041248; AsCpf1-2
taagcaatacatggattgggggag

SEQ ID NO: 15220 - DNA, 25 bp, Artificial Sequence
  Synthetic: FXN 3 reverse 9:69041220-69041249; AsCpf1-2
taagcaatacatggattgggggaga

SEQ ID NO: 15221 - DNA, 18 bp, Artificial Sequence
  Synthetic: FXN 3 forward 9:69041243-69041265; AsCpf1-2
tacaaggtattctgctgt

SEQ ID NO: 15222 - DNA, 19 bp, Artificial Sequence
  Synthetic: FXN 3 forward 9:69041243-69041266; AsCpf1-2
tacaaggtattctgctgta

SEQ ID NO: 15223 - DNA, 20 bp, Artificial Sequence
  Synthetic: FXN 3 forward 9:69041243-69041267; AsCpf1-2
tacaaggtattctgctgtat

SEQ ID NO: 15224 - DNA, 21 bp, Artificial Sequence
  Synthetic: FXN 3 forward 9:69041243-69041268; AsCpf1-2
tacaaggtattctgctgtatc

SEQ ID NO: 15225 - DNA, 22 bp, Artificial Sequence
  Synthetic: FXN 3 forward 9:69041243-69041269; AsCpf1-2
tacaaggtattctgctgtatct

SEQ ID NO: 15226 - DNA, 23 bp, Artificial Sequence
  Synthetic: FXN 3 forward 9:69041243-69041270; AsCpf1-2
tacaaggtattctgctgtatctg

SEQ ID NO: 15227 - DNA, 24 bp, Artificial Sequence
  Synthetic: FXN 3 forward 9:69041243-69041271; AsCpf1-2
tacaaggtattctgctgtatctgt

SEQ ID NO: 15228 - DNA, 25 bp, Artificial Sequence
  Synthetic: FXN 3 forward 9:69041243-69041272; AsCpf1-2
tacaaggtattctgctgtatctgtt

SEQ ID NO: 15229 - DNA, 18 bp, Artificial Sequence
  Synthetic: FXN 3 forward 9:69041245-69041267; AsCpf1-2
caaggtattctgctgtat

SEQ ID NO: 15230 - DNA, 19 bp, Artificial Sequence
  Synthetic: FXN 3 forward 9:69041245-69041268; AsCpf1-2
caaggtattctgctgtatc

SEQ ID NO: 15231 - DNA, 20 bp, Artificial Sequence
  Synthetic: FXN 3 forward 9:69041245-69041269; AsCpf1-2
caaggtattctgctgtatct

SEQ ID NO: 15232 - DNA, 21 bp, Artificial Sequence
  Synthetic: FXN 3 forward 9:69041245-69041270; AsCpf1-2
caaggtattctgctgtatctg

SEQ ID NO: 15233 - DNA, 22 bp, Artificial Sequence
  Synthetic: FXN 3 forward 9:69041245-69041271; AsCpf1-2
caaggtattctgctgtatctgt

SEQ ID NO: 15234 - DNA, 23 bp, Artificial Sequence
  Synthetic: FXN 3 forward 9:69041245-69041272; AsCpf1-2
caaggtattctgctgtatctgtt

SEQ ID NO: 15235 - DNA, 24 bp, Artificial Sequence
  Synthetic: FXN 3 forward 9:69041245-69041273; AsCpf1-2
caaggtattctgctgtatctgttc

SEQ ID NO: 15236 - DNA, 25 bp, Artificial Sequence
  Synthetic: FXN 3 forward 9:69041245-69041274; AsCpf1-2
caaggtattctgctgtatctgttct

SEQ ID NO: 15237 - DNA, 18 bp, Artificial Sequence
  Synthetic: FXN 3 forward 9:69041264-69041286; AsCpf1-2
tgttctgctatggcttgc

SEQ ID NO: 15238 - DNA, 19 bp, Artificial Sequence
  Synthetic: FXN 3 forward 9:69041264-69041287; AsCpf1-2
tgttctgctatggcttgcc

SEQ ID NO: 15239 - DNA, 20 bp, Artificial Sequence
  Synthetic: FXN 3 forward 9:69041264-69041288; AsCpf1-2
tgttctgctatggcttgccc

SEQ ID NO: 15240 - DNA, 21 bp, Artificial Sequence
  Synthetic: FXN 3 forward 9:69041264-69041289; AsCpf1-2
tgttctgctatggcttgcccc

SEQ ID NO: 15241 - DNA, 22 bp, Artificial Sequence
  Synthetic: FXN 3 forward 9:69041264-69041290; AsCpf1-2
tgttctgctatggcttgcccct

SEQ ID NO: 15242 - DNA, 23 bp, Artificial Sequence
  Synthetic: FXN 3 forward 9:69041264-69041291; AsCpf1-2
tgttctgctatggcttgcccctt

SEQ ID NO: 15243 - DNA, 24 bp, Artificial Sequence
  Synthetic: FXN 3 forward 9:69041264-69041292; AsCpf1-2
tgttctgctatggcttgccccttt

SEQ ID NO: 15244 - DNA, 25 bp, Artificial Sequence
  Synthetic: FXN 3 forward 9:69041264-69041293; AsCpf1-2
tgttctgctatggcttgcccctttt

SEQ ID NO: 15245 - DNA, 18 bp, Artificial Sequence
  Synthetic: FXN 3 forward 9:69041276-69041298; AsCpf1-2
gcttgccccttttgttca

SEQ ID NO: 15246 - DNA, 19 bp, Artificial Sequence
  Synthetic: FXN 3 forward 9:69041276-69041299; AsCpf1-2
gcttgccccttttgttcaa

SEQ ID NO: 15247 - DNA, 20 bp, Artificial Sequence
  Synthetic: FXN 3 forward 9:69041276-69041300; AsCpf1-2
gcttgccccttttgttcaac

SEQ ID NO: 15248 - DNA, 21 bp, Artificial Sequence
  Synthetic: FXN 3 forward 9:69041276-69041301; AsCpf1-2
gcttgccccttttgttcaaca

SEQ ID NO: 15249 - DNA, 22 bp, Artificial Sequence
  Synthetic: FXN 3 forward 9:69041276-69041302; AsCpf1-2
gcttgccccttttgttcaacac

SEQ ID NO: 15250 - DNA, 23 bp, Artificial Sequence
  Synthetic: FXN 3 forward 9:69041276-69041303; AsCpf1-2
gcttgccccttttgttcaacact

SEQ ID NO: 15251 - DNA, 24 bp, Artificial Sequence
  Synthetic: FXN 3 forward 9:69041276-69041304; AsCpf1-2
gcttgccccttttgttcaacactg

SEQ ID NO: 15252 - DNA, 25 bp, Artificial Sequence
  Synthetic: FXN 3 forward 9:69041276-69041305; AsCpf1-2
gcttgccccttttgttcaacactgt

SEQ ID NO: 15253 - DNA, 18 bp, Artificial Sequence
  Synthetic: FXN 3 reverse 9:69041337-69041359; AsCpf1-2
cagcagtgagaacaaata

SEQ ID NO: 15254 - DNA, 19 bp, Artificial Sequence
  Synthetic: FXN 3 reverse 9:69041337-69041360; AsCpf1-2
cagcagtgagaacaaataa

SEQ ID NO: 15255 - DNA, 20 bp, Artificial Sequence
  Synthetic: FXN 3 reverse 9:69041337-69041361; AsCpf1-2
cagcagtgagaacaaataaa

SEQ ID NO: 15256 - DNA, 21 bp, Artificial Sequence
  Synthetic: FXN 3 reverse 9:69041337-69041362; AsCpf1-2
cagcagtgagaacaaataaag

SEQ ID NO: 15257 - DNA, 22 bp, Artificial Sequence
  Synthetic: FXN 3 reverse 9:69041337-69041363; AsCpf1-2
cagcagtgagaacaaataaagg

SEQ ID NO: 15258 - DNA, 23 bp, Artificial Sequence
  Synthetic: FXN 3 reverse 9:69041337-69041364; AsCpf1-2
cagcagtgagaacaaataaagga

SEQ ID NO: 15259 - DNA, 24 bp, Artificial Sequence
  Synthetic: FXN 3 reverse 9:69041337-69041365; AsCpf1-2
cagcagtgagaacaaataaaggac

SEQ ID NO: 15260 - DNA, 25 bp, Artificial Sequence
  Synthetic: FXN 3 reverse 9:69041337-69041366; AsCpf1-2
cagcagtgagaacaaataaaggaca

SEQ ID NO: 15261 - DNA, 18 bp, Artificial Sequence
  Synthetic: FXN 3 reverse 9:69041358-69041380; AsCpf1-2
tttacccaaccagatact

SEQ ID NO: 15262 - DNA, 19 bp, Artificial Sequence
  Synthetic: FXN 3 reverse 9:69041358-69041381; AsCpf1-2
tttacccaaccagatacta

SEQ ID NO: 15263 - DNA, 20 bp, Artificial Sequence
  Synthetic: FXN 3 reverse 9:69041358-69041382; AsCpf1-2
tttacccaaccagatactat

SEQ ID NO: 15264 - DNA, 21 bp, Artificial Sequence
  Synthetic: FXN 3 reverse 9:69041358-69041383; AsCpf1-2
tttacccaaccagatactatc

SEQ ID NO: 15265 - DNA, 22 bp, Artificial Sequence
  Synthetic: FXN 3 reverse 9:69041358-69041384; AsCpf1-2
tttacccaaccagatactatcc

SEQ ID NO: 15266 - DNA, 23 bp, Artificial Sequence
  Synthetic: FXN 3 reverse 9:69041358-69041385; AsCpf1-2
tttacccaaccagatactatcca

SEQ ID NO: 15267 - DNA, 24 bp, Artificial Sequence
  Synthetic: FXN 3 reverse 9:69041358-69041386; AsCpf1-2
tttacccaaccagatactatccag

SEQ ID NO: 15268 - DNA, 25 bp, Artificial Sequence
  Synthetic: FXN 3 reverse 9:69041358-69041387; AsCpf1-2
tttacccaaccagatactatccagc

SEQ ID NO: 15269 - DNA, 18 bp, Artificial Sequence
  Synthetic: FXN 3 forward 9:69041367-69041389; AsCpf1-2
tggttgggtaaatatatc

SEQ ID NO: 15270 - DNA, 19 bp, Artificial Sequence
  Synthetic: FXN 3 forward 9:69041367-69041390; AsCpf1-2
tggttgggtaaatatatca

SEQ ID NO: 15271 - DNA, 20 bp, Artificial Sequence
  Synthetic: FXN 3 forward 9:69041367-69041391; AsCpf1-2
tggttgggtaaatatatcac

SEQ ID NO: 15272 - DNA, 21 bp, Artificial Sequence
  Synthetic: FXN 3 forward 9:69041367-69041392; AsCpf1-2
tggttgggtaaatatatcaca

SEQ ID NO: 15273 - DNA, 22 bp, Artificial Sequence
  Synthetic: FXN 3 forward 9:69041367-69041393; AsCpf1-2
tggttgggtaaatatatcacac

SEQ ID NO: 15274 - DNA, 23 bp, Artificial Sequence
  Synthetic: FXN 3 forward 9:69041367-69041394; AsCpf1-2
tggttgggtaaatatatcacact

SEQ ID NO: 15275 - DNA, 24 bp, Artificial Sequence
  Synthetic: FXN 3 forward 9:69041367-69041395; AsCpf1-2
tggttgggtaaatatatcacactg

SEQ ID NO: 15276 - DNA, 25 bp, Artificial Sequence
  Synthetic: FXN 3 forward 9:69041367-69041396; AsCpf1-2
tggttgggtaaatatatcacactgt

SEQ ID NO: 15277 - DNA, 18 bp, Artificial Sequence
  Synthetic: FXN 3 forward 9:69041383-69041405; AsCpf1-2
tcacactgtaaatcacac

SEQ ID NO: 15278 - DNA, 19 bp, Artificial Sequence
  Synthetic: FXN 3 forward 9:69041383-69041406; AsCpf1-2
tcacactgtaaatcacact

SEQ ID NO: 15279 - DNA, 20 bp, Artificial Sequence
  Synthetic: FXN 3 forward 9:69041383-69041407; AsCpf1-2
tcacactgtaaatcacacta

SEQ ID NO: 15280 - DNA, 21 bp, Artificial Sequence
  Synthetic: FXN 3 forward 9:69041383-69041408; AsCpf1-2
tcacactgtaaatcacactat

SEQ ID NO: 15281 - DNA, 22 bp, Artificial Sequence
  Synthetic: FXN 3 forward 9:69041383-69041409; AsCpf1-2
tcacactgtaaatcacactatc

SEQ ID NO: 15282 - DNA, 23 bp, Artificial Sequence
  Synthetic: FXN 3 forward 9:69041383-69041410; AsCpf1-2
tcacactgtaaatcacactatcc

SEQ ID NO: 15283 - DNA, 24 bp, Artificial Sequence
  Synthetic: FXN 3 forward 9:69041383-69041411; AsCpf1-2
tcacactgtaaatcacactatcca

SEQ ID NO: 15284 - DNA, 25 bp, Artificial Sequence
  Synthetic: FXN 3 forward 9:69041383-69041412; AsCpf1-2
tcacactgtaaatcacactatccag

SEQ ID NO: 15285 - DNA, 18 bp, Artificial Sequence
  Synthetic: FXN 3 forward 9:69041385-69041407; AsCpf1-2
acactgtaaatcacacta

SEQ ID NO: 15286 - DNA, 19 bp, Artificial Sequence
  Synthetic: FXN 3 forward 9:69041385-69041408; AsCpf1-2
acactgtaaatcacactat

SEQ ID NO: 15287 - DNA, 20 bp, Artificial Sequence
  Synthetic: FXN 3 forward 9:69041385-69041409; AsCpf1-2
acactgtaaatcacactatc

SEQ ID NO: 15288 - DNA, 21 bp, Artificial Sequence
  Synthetic: FXN 3 forward 9:69041385-69041410; AsCpf1-2
acactgtaaatcacactatcc

SEQ ID NO: 15289 - DNA, 22 bp, Artificial Sequence
  Synthetic: FXN 3 forward 9:69041385-69041411; AsCpf1-2
acactgtaaatcacactatcca

SEQ ID NO: 15290 - DNA, 23 bp, Artificial Sequence
  Synthetic: FXN 3 forward 9:69041385-69041412; AsCpf1-2
acactgtaaatcacactatccag

SEQ ID NO: 15291 - DNA, 24 bp, Artificial Sequence
  Synthetic: FXN 3 forward 9:69041385-69041413; AsCpf1-2
acactgtaaatcacactatccagg

SEQ ID NO: 15292 - DNA, 25 bp, Artificial Sequence
  Synthetic: FXN 3 forward 9:69041385-69041414; AsCpf1-2
acactgtaaatcacactatccaggt

SEQ ID NO: 15293 - DNA, 18 bp, Artificial Sequence
  Synthetic: FXN 3 forward 9:69041405-69041427; AsCpf1-2
caggttcctttaggtgac

SEQ ID NO: 15294 - DNA, 19 bp, Artificial Sequence
  Synthetic: FXN 3 forward 9:69041405-69041428; AsCpf1-2
caggttcctttaggtgaca

SEQ ID NO: 15295 - DNA, 20 bp, Artificial Sequence
  Synthetic: FXN 3 forward 9:69041405-69041429; AsCpf1-2
caggttcctttaggtgacat

SEQ ID NO: 15296 - DNA, 21 bp, Artificial Sequence
  Synthetic: FXN 3 forward 9:69041405-69041430; AsCpf1-2
caggttcctttaggtgacatt

SEQ ID NO: 15297 - DNA, 22 bp, Artificial Sequence
  Synthetic: FXN 3 forward 9:69041405-69041431; AsCpf1-2
caggttcctttaggtgacattt

SEQ ID NO: 15298 - DNA, 23 bp, Artificial Sequence
  Synthetic: FXN 3 forward 9:69041405-69041432; AsCpf1-2
caggttcctttaggtgacatttg

SEQ ID NO: 15299 - DNA, 24 bp, Artificial Sequence
  Synthetic: FXN 3 forward 9:69041405-69041433; AsCpf1-2
caggttcctttaggtgacatttgg

SEQ ID NO: 15300 - DNA, 25 bp, Artificial Sequence
  Synthetic: FXN 3 forward 9:69041405-69041434; AsCpf1-2
caggttcctttaggtgacatttggt

SEQ ID NO: 15301 - DNA, 18 bp, Artificial Sequence
  Synthetic: FXN 3 forward 9:69041605-69041627; AsCpf1-2
ggtcctgattcactcttc

SEQ ID NO: 15302 - DNA, 19 bp, Artificial Sequence
  Synthetic: FXN 3 forward 9:69041605-69041628; AsCpf1-2
ggtcctgattcactcttca

SEQ ID NO: 15303 - DNA, 20 bp, Artificial Sequence
  Synthetic: FXN 3 forward 9:69041605-69041629; AsCpf1-2
ggtcctgattcactcttcaa

SEQ ID NO: 15304 - DNA, 21 bp, Artificial Sequence
  Synthetic: FXN 3 forward 9:69041605-69041630; AsCpf1-2
ggtcctgattcactcttcaag

SEQ ID NO: 15305 - DNA, 22 bp, Artificial Sequence
  Synthetic: FXN 3 forward 9:69041605-69041631; AsCpf1-2
ggtcctgattcactcttcaagt

SEQ ID NO: 15306 - DNA, 23 bp, Artificial Sequence
  Synthetic: FXN 3 forward 9:69041605-69041632; AsCpf1-2
ggtcctgattcactcttcaagtg

(The sequence listing continues in the following parts.)

What is claimed is:

1. A composition comprising:
i) a guide RNA comprising a spacer sequence, or a nucleic acid encoding the guide RNA, comprising:
a. a spacer sequence selected from SEQ ID NOs: 4018, 4010, 4002, 4042, 4034, 4026, 3954, 3946, 3994, 3914, 3978, 3906, 3898, 3938, 3922, 3858, 3850, 3882, 3826, 3818, 3842, 3794, 3786, 3762, 3810, 3746, 3778, 3738, 3770, 3722, 3754, 3690, 3666, 3658, 3634, 3586, 3546, 3530, 3642, 3514, 3506, 3490, 3618, 3610, 3602, 3578, 3442, 3522, 3410, 3378, 3434, 3370, 3426, 3418, 3394, 3386, 3330, 3354, 3346, 3314, 3930, 3890, 3834, 3802, 3706, 3698, 3682, 3674, 3570, 3554, 3538, 3498, 3482, 3458, 3474, 3450, 2667, 2666, 2650, 2642, 2626, 2618, 2706, 2690, 2682, 2610, 2674, 2658, 2602, 2594, 2634, 2554, 2546, 2586, 2538, 2578, 2570, 2522, 2498, 2490, 2466, 2458, 2450, 2514, 2506, 2418, 2482, 2474, 2394, 2442, 2434, 2370, 2378, 2354, 2346, 2338, 2314, 2298, 2282, 2274, 2266, 2330, 2258, 2322, 2242, 2234, 2290, 2250, 2218, 2226, 2210, 2194, 2146, 2138, 2122, 2106, 2098, 2090, 2130, 2114, 2034, 2026, 2058, 2050, 2042, 1914, 1786, 1778, 1770, 1842, 1738, 1706, 1690, 1746, 1714, 1650, 1642, 1610, 1586, 1562, 1546, 1578, 1538, 1378, 1370, 1922, 1898, 1906, 1794, 1762, 1698, 1674, 1722, 1362, 1450, 2202, 2178, 2170, 2162, 2018, 2010, 1890, 1962, 1946, 1850, 1818, 1658, 1634, 1602, 1554, 1434, 1426, 1338, 1346, 1978, 1994, 1986, 1970, 1938, 1930, 1810, 1834, 1826, 1802, 1626, 1594, 1514, 1498, 1490, 1482, 1474, 1458, 1442, 1418, 1410, 1402, 1394, and 1386; or
b. a spacer sequence selected from SEQ ID NOs: 3330, 3914, 3418, 3746, 3778, 3394, 4026, 3690, 3794, 3386, 3938, 3682, 3818, 3658, 3722, 3802, 3858, 3514, 3770, 3370, 3354, 4010, 2202, 1706, 2210, 2170, 1778, 2258, 2114, 2178, 1642, 1738, 1746, 2322, 1770, 1538, 2514, 2458, 2194, 2594, 2162, and 2618; or
c. a spacer sequence selected from SEQ ID NOs: 3746, 3778, 3394, 3386, 3938, 3818, 3722, 3858, 3370, 1706, 2210, 2114, 1538, and 2594; or
d. a spacer sequence selected from SEQ ID NOs: 3330, 3746, 3778, 3394, 4026, 3386, 3938, 3818, 3722, 3802, 3858, 3514, 3770, 3370, 2202, 1706, 2210, 1778, 2114, 1738, 1746, 2322, 1538, 2514, 2458, 2194, and 2594; or
e. a spacer sequence selected from SEQ ID NOs: 3330, 3914, 3418, 3746, 3778, 3394, 4026, 3690, 3794, 3386, 3938, 3682, 3818, 3658, and 3722; or
f. a spacer sequence selected from SEQ ID NOs: 2202, 1706, 2210, 2170, 1778, 2258, 2114, 2178, 1642, 1738, 1746, and 2322; or
g. a spacer sequence selected from SEQ ID NOs: 3778, 4026, 3794, 4010, 3906, 3746, 1778, 1746, 1770, 1586, 1914, and 2210; or
h. a spacer sequence selected from SEQ ID NOs: 3378, 3354, 3346, 3330, 3314, 2658, 2690, 2546, 2554, 2498, and 2506; or
i. a spacer sequence selected from SEQ ID NOs: 3330, 3314, 2658, 2690, 2554, and 2498; or
j. a spacer sequence selected from SEQ ID NOs: 3314, 2690, 2554, and 2498; or
k. a spacer sequence selected from SEQ ID NOs: 3914, 3514, 1778, 2458, 3858, 3418, 1706, and 2258; or
l. SEQ ID NO: 3914; or
m. SEQ ID NO: 3418; or
n. SEQ ID NO: 3938; or
o. a spacer sequence selected from SEQ ID NOs: 3916, 3420, and 3940; or
p. a spacer sequence comprising at least 17, 18, 19, or 20 contiguous nucleotides of any one of the spacer sequences of a) through o); or
q. a spacer sequence that is at least 99%, 98%, 97%, 96%, 95%, 94%, 93%, 92%, 91%, or 90% identical to any one of the spacer sequences of a) through p); or
ii) a pair of guide RNAs comprising a first and second spacer sequence, or one or more nucleic acids encoding the pair of guide RNAs, comprising:
a. a first and second spacer sequence selected from SEQ ID NOs: 2202 and 3418; 2202 and 3370; 2202 and 3514; 2202 and 3658; 2178 and 3418; 2178 and 3370; 2178 and 3514; 2178 and 3658; 2170 and 3418; 2170 and 3370; 2170 and 3514; 2170 and 3658; 2162 and 3418; 2162 and 3370; 2162 and 3514; 2162 and 3658; 2202 and 4010; 2202 and 4026; 2202 and 3914; 2202 and 3938; 2202 and 3858; 2202 and 3818; 2202 and 3794; 2202 and 3802; 2202 and 3746; 2202 and 3778; 2202 and 3770; 2202 and 3722; 2202 and 3690; 2202 and 3682; 2202 and 3330; 2202 and 3354; 2202 and 3394; 2202 and 3386; 2178 and 4010; 2178 and 4026; 2178 and 3914; 2178 and 3938; 2178 and 3858; 2178 and 3818; 2178 and 3794; 2178 and 3802; 2178 and 3746; 2178 and 3778; 2178 and 3770; 2178 and 3722; 2178 and 3690; 2178 and 3682; 2178 and 3330; 2178 and 3354; 2178 and 3394; 2178 and 3386; 2170 and 4010; 2170 and 4026; 2170 and 3914; 2170 and 3938; 2170 and 3858; 2170 and 3818; 2170 and 3794; 2170 and 3802; 2170 and 3746; 2170 and 3778; 2170 and 3770; 2170 and 3722; 2170 and 3690; 2170 and 3682; 2170 and 3330; 2170 and 3354; 2170 and 3394; 2170 and 3386; 2162 and 4010; 2162 and 4026; 2162 and 3914; 2162 and 3938; 2162 and 3858; 2162 and 3818; 2162 and 3794; 2162 and 3802; 2162 and 3746; 2162 and 3778; 2162 and 3770; 2162 and 3722; 2162 and 3690; 2162 and 3682; 2162 and 3330; 2162 and 3354; 2162 and 3394; 2162 and 3386; 1706 and 3418; 1706 and 3370; 1706 and 3514; 1706 and 3658; 1706 and 4010; 1706 and 4026; 1706 and 3914; 1706 and 3938; 1706 and 3858; 1706 and 3818; 1706 and 3794; 1706 and 3802; 1706 and 3746; 1706 and 3778; 1706 and 3770; 1706 and 3722; 1706 and 3690; 1706 and 3682; 1706 and 3330; 1706 and 3354; 1706 and 3394; 1706 and 3386; 2210 and 3418; 2210 and 3370; 2210 and 3514; 2210 and 3658; 2210 and 4010; 2210 and 4026; 2210 and 3914; 2210 and 3938; 2210 and 3858; 2210 and 3818; 2210 and 3794; 2210 and 3802; 2210 and 3746; 2210 and 3778; 2210 and 3770; 2210 and 3722; 2210 and 3690; 2210 and 3682; 2210 and 3330; 2210 and 3354; 2210 and 3394; 2210 and 3386; 1778 and 3418; 1778 and 3370; 1778 and 3514; 1778 and 3658; 1778 and 4010; 1778 and 4026; 1778 and 3914; 1778 and 3938; 1778 and 3858; 1778 and 3818; 1778 and 3794; 1778 and 3802; 1778 and 3746; 1778 and 3778; 1778 and 3770; 1778 and 3722; 1778 and 3690; 1778 and 3682; 1778 and 3330; 1778 and 3354; 1778 and 3394; 1778 and 3386; 2258 and 3418; 2258 and 3370; 2258 and 3514; 2258 and 3658; 2258 and 4010; 2258 and 4026; 2258 and 3914; 2258 and 3938; 2258 and 3858; 2258 and 3818; 2258 and 3794; 2258 and 3802; 2258 and 3746; 2258 and 3778; 2258 and 3770; 2258 and 3722; 2258 and 3690; 2258 and 3682; 2258 and 3330; 2258 and 3354; 2258 and 3394; 2258 and 3386; 2114 and 3418; 2114 and 3370; 2114 and 3514; 2114 and 3658; 2114 and 4010; 2114 and 4026; 2114 and 3914; 2114 and 3938; 2114 and 3858; 2114 and 3818; 2114 and 3794; 2114 and 3802; 2114 and 3746; 2114 and 3778; 2114 and 3770; 2114 and 3722; 2114 and 3690; 2114 and 3682; 2114 and 3330; 2114 and 3354; 2114 and 3394; 2114 and 3386; 1642 and 3418; 1642 and 3370; 1642 and 3514; 1642 and 3658; 1642 and 4010; 1642 and 4026; 1642 and 3914; 1642 and 3938; 1642 and 3858; 1642 and 3818; 1642 and 3794; 1642 and 3802; 1642 and 3746; 1642 and 3778; 1642 and 3770; 1642 and 3722; 1642 and 3690; 1642 and 3682; 1642 and 3330; 1642 and 3354; 1642 and 3394; 1642 and 3386; 1738 and 3418; 1738 and 3370; 1738 and 3514; 1738 and 3658; 1738 and 4010; 1738 and 4026; 1738 and 3914; 1738 and 3938; 1738 and 3858; 1738 and 3818; 1738 and 3794; 1738 and 3802; 1738 and 3746; 1738 and 3778; 1738 and 3770; 1738 and 3722; 1738 and 3690; 1738 and 3682; 1738 and 3330; 1738 and 3354; 1738 and 3394; 1738 and 3386; 2258 and 3418; 2258 and 3370; 2258 and 3514; 2258 and 3658; 2258 and 4010; 2258 and 4026; 2258 and 3914; 2258 and 3938; 2258 and 3858; 2258 and 3818; 2258 and 3794; 2258 and 3802; 2258 and 3746; 2258 and 3778; 2258 and 3770; 2258 and 3722; 2258 and 3690; 2258 and 3682; 2258 and 3330; 2258 and 3354; 2258 and 3394; 2258 and 3386; 2114 and 3418; 2114 and 3370; 2114 and 3514; 2114 and 3658; 2114 and 4010; 2114 and 4026; 2114 and 3914; 2114 and 3938; 2114 and 3858; 2114 and 3818; 2114 and 3794; 2114 and 3802; 2114 and 3746; 2114 and 3778; 2114 and 3770; 2114 and 3722; 2114 and 3690; 2114 and 3682; 2114 and 3330; 2114 and 3354; 2114 and 3394; 1706 and 3386; 1642 and 3418; 1642 and 3370; 1642 and 3514; 1642 and 3658; 1642 and 4010; 1642 and 4026; 1642 and 3914; 1642 and 3938; 1642 and 3858; 1642 and 3818; 1642 and 3794; 1642 and 3802; 1642 and 3746; 1642 and 3778; 1642 and 3770; 1642 and 3722; 1642 and 3690; 1642 and 3682; 1642 and 3330; 1642 and 3354; 1642 and 3394; 1642 and 3386; 1738 and 3418; 1738 and 3370; 1738 and 3514; 1738 and 3658; 1738 and 4010; 1738 and 4026; 1738 and 3914; 1738 and 3938; 1738 and 3858; 1738 and 3818; 1738 and 3794; 1738 and 3802; 1738 and 3746; 1738 and 3778; 1738 and 3770; 1738 and 3722; 1738 and 3690; 1738 and 3682; 1738 and 3330; 1738 and 3354; 1738 and 3394; 1738 and 3386; 1746 and 3418; 1746 and 3370; 1746 and 3514; 1746 and 3658; 1746 and 4010; 1746 and 4026; 1746 and 3914; 1746 and 3938; 1746 and 3858; 1746 and 3818; 1746 and 3794; 1746 and 3802; 1746 and 3746; 1746 and 3778; 1746 and 3770; 1746 and 3722; 1746 and 3690; 1746 and 3682; 1746 and 3330; 1746 and 3354; 1746 and 3394; 1746 and 3386; 2322 and 3418; 2322 and 3370; 2322 and 3514; 2322 and 3658; 2322 and 4010; 2322 and 4026; 2322 and 3914; 2322 and 3938; 2322 and 3858; 2322 and 3818; 2322 and 3794; 2322 and 3802; 2322 and 3746; 2322 and 3778; 2322 and 3770; 2322 and 3722; 2322 and 3690; 2322 and 3682; 2322 and 3330; 2322 and 3354; 2322 and 3394; 2322 and 3386; 1770 and 3418; 1770 and 3370; 1770 and 3514; 1770 and 3658; 1770 and 4010; 1770 and 4026; 1770 and 3914; 1770 and 3938; 1770 and 3858; 1770 and 3818; 1770 and 3794; 1770 and 3802; 1770 and 3746; 1770 and 3778; 1770 and 3770; 1770 and 3722; 1770 and 3690; 1770 and 3682; 1770 and 3330; 1770 and 3354; 1770 and 3394; 1770 and 3386; 1538 and 3418; 1538 and 3370; 1538 and 3514; 1538 and 3658; 1538 and 4010; 1538 and 4026; 1538 and 3914; 1538 and 3938; 1538 and 3858; 1538 and 3818; 1538 and 3794; 1538 and 3802; 1538 and 3746; 1538 and 3778; 1538 and 3770; 1538 and 3722; 1538 and 3690; 1538 and 3682; 1538 and 3330; 1538 and 3354; 1538 and 3394; 1538 and 3386; 2514 and 3418; 2514 and 3370; 2514 and 3514; 2514 and 3658; 2514 and 4010; 2514 and 4026; 2514 and 3914; 2514 and 3938; 2514 and 3858; 2514 and 3818; 2514 and 3794; 2514 and 3802; 2514 and 3746; 2514 and 3778; 2514 and 3770; 2514 and 3722; 2514 and 3690; 2514 and 3682; 2514 and 3330; 2514 and 3354; 2514 and 3394; 2514 and 3386; 2458 and 3418; 2458 and 3370; 2458 and 3514; 2458 and 3658; 2458 and 4010; 2458 and 4026; 2458 and 3914; 2458 and 3938; 2458 and 3858; 2458 and 3818; 2458 and 3794; 2458 and 3802; 2458 and 3746; 2458 and 3778; 2458 and 3770; 2458 and 3722; 2458 and 3690; 2458 and 3682; 2458 and 3330; 2458 and 3354; 2458 and 3394; 2458 and 3386; 2194 and 3418; 2194 and 3370; 2194 and 3514; 2194 and 3658; 2194 and 4010; 2194 and 4026; 2194 and 3914; 2194 and 3938; 2194 and 3858; 2194 and 3818; 2194 and 3794; 2194 and 3802; 2194 and 3746; 2194 and 3778; 2194 and 3770; 2194 and 3722; 2194 and 3690; 2194 and 3682; 2194 and 3330; 2194 and 3354; 2194 and 3394; 2194 and 3386; 2594 and 3418; 2594 and 3370; 2594 and 3514; 2594 and 3658; 2594 and 4010; 2594 and 4026; 2594 and 3914; 2594 and 3938; 2594 and 3858; 2594 and 3818; 2594 and 3794; 2594 and 3802; 2594 and 3746; 2594 and 3778; 2594 and 3770; 2594 and 3722; 2594 and 3690; 2594 and 3682; 2594 and 3330; 2594 and 3354; 2594 and 3394; 2594 and 3386; 2618 and 3418; 2618 and 3370; 2618 and 3514; 2618 and 3658; 2618 and 4010; 2618 and 4026; 2618 and 3914; 2618 and 3938; 2618 and 3858; 2618 and 3818; 2618 and 3794; 2618 and 3802; 2618 and 3746; 2618 and 3778; 2618 and 3770; 2618 and 3722; 2618 and 3690; 2618 and 3682; 2618 and 3330; 2618 and 3354; 2618 and 3394; and 2618 and 3386; or
b. a first and second spacer sequence selected from SEQ ID NOs: 2202 and 3418; 2202 and 3370; 2202 and 3514; 2202 and 3658; 2178 and 3418; 2178 and 3370; 2178 and 3514; 2178 and 3658; 2170 and 3418; 2170 and 3370; 2170 and 3514; 2170 and 3658; 2162 and 3418; 2162 and 3370; 2162 and 3514; 2162 and 3658; 2202 and 4010; 2202 and 4026; 2202 and 3914; 2202 and 3938; 2202 and 3858; 2202 and 3818; 2202 and 3794; 2202 and 3802; 2202 and 3746; 2202 and 3778; 2202 and 3770; 2202 and 3722; 2202 and 3690; 2202 and 3682; 2202 and 3330; 2202 and 3354; 2202 and 3394; 2202 and 3386; 2178 and 4010; 2178 and 4026; 2178 and 3914; 2178 and 3938; 2178 and 3858; 2178 and 3818; 2178 and 3794; 2178 and 3802; 2178 and 3746; 2178 and 3778; 2178 and 3770; 2178 and 3722; 2178 and 3690; 2178 and 3682; 2178 and 3330; 2178 and 3354; 2178 and 3394; 2178 and 3386; 2170 and 4010; 2170 and 4026; 2170 and 3914; 2170 and 3938; 2170 and 3858; 2170 and 3818; 2170 and 3794; 2170 and 3802; 2170 and 3746; 2170 and 3778; 2170 and 3770; 2170 and 3722; 2170 and 3690; 2170 and 3682; 2170 and 3330; 2170 and 3354; 2170 and 3394; 2170 and 3386; 2162 and 4010; 2162 and 4026; 2162 and 3914; 2162 and 3938; 2162 and 3858; 2162 and 3818; 2162 and 3794; 2162 and 3802; 2162 and 3746; 2162 and 3778; 2162 and 3770; 2162 and 3722; 2162 and 3690; 2162 and 3682; 2162 and 3330; 2162 and 3354; 2162 and 3394; and 2162 and 3386; or
c. a first and second spacer sequence selected from SEQ ID NOs: 2202 and 3418; 2202 and 3370; 2202 and 3514; 2202 and 3658; 2178 and 3418; 2178 and 3370; 2178 and 3514; 2178 and 3658; 2170 and 3418; 2170 and 3370; 2170 and 3514; 2170 and 3658; 2162 and 3418; 2162 and 3370; 2162 and 3514; and 2162 and 3658; or
d. a first and second spacer sequence selected from SEQ ID NOs: 3778 and 2514; 3778 and 2258; 3778 and 2210; 3386 and 2514; 3386 and 2258; 3386 and 2210; 3354 and 2514; 3354 and 2258; and 3354 and 2210; or
e. a first and second spacer sequence selected from SEQ ID NOs: 3778 and 2258; 3778 and 2210; 3386 and 2258; 3386 and 2210; and 3354 and 2514; or
f. a first and second spacer sequence selected from SEQ ID NOs: 3346 and 2554; 3346 and 2498; 3330 and 2554; 3330 and 2498; 3330 and 2506; and 3330 and 2546; or
g. SEQ ID NOs: 1153 and 1129; or
h. a first and second spacer sequence selected from SEQ ID NOs: 3346 and 2554; 3346 and 2498; 3330 and 2554; 3330 and 2498; 3354 and 2546; 3354 and 2506; 3378 and 2546; and 3378 and 2506; or
i. a first and second spacer sequence selected from SEQ ID NOs: 3346 and 2554; 3346 and 2498; 3330 and 2554; and 3330 and 2498; or
j. a first and second spacer sequence comprising at least 17, 18, 19, or 20 contiguous nucleotides of any of the first and second spacer sequences of a) through i); or
k. a first and second spacer sequence that is at least 99%, 98%, 97%, 96%, 95%, 94%, 93%, 92%, 91%, or 90% identical to any of the first and second spacer sequences of a) through j).

2. A composition comprising:
a pair of guide RNAs comprising a pair of spacer sequences, or one or more nucleic acids encoding the pair of guide RNAs, wherein the pair of spacer sequences comprise:
a. a first spacer sequence selected from SEQ ID NOs: 2856, 2864, 2880, 2896, 2904, 2912, 2936, 2944, 2960, 2992, 3016, 3024, 3064, 3096, 3112, 3128, 3136, 3144, 3160, 3168, 3192, 3200, 3208, 3216, 3224, 3232, 3240, 3248, 3256, 3264, 3314, 3330, 3346, 3354, 3370, 3378, 3386, 3394, 3410, 3418, 3426, 3434, 3442, 3450, 3458, 3474, 3482, 3490, 3498, 3506, 3514, 3522, 3530, 3538, 3546, 3554, 3570, 3578, 3586, 3602, 3610, 3618, 3634, 3642, 3658, 3674, 3682, 3690, 3698, 3706, 3722, 3746, 3762, 3770, 3778, 3794, 3802, 3818, 3826, 3834, 3850, 3858, 3890, 3898, 3906, 3914, 3922, 3930, 3938, 3946, 3994, 4010, 4018, 4026, 4034, 4042, 4208, and 4506, and a second spacer sequence selected from SEQ ID NOs: 560, 584, 608, 616, 656, 672, 688, 696, 712, 744, 752, 760, 840, 864, 960, 976, 984, 1008, 1056, 1128, 1136, 1152, 1224, 1240, 1272, 1338, 1346, 1370, 1378, 1386, 1394, 1402, 1410, 1418, 1426, 1434, 1442, 1458, 1474, 1482, 1490, 1498, 1514, 1538, 1546, 1554, 1562, 1578, 1586, 1594, 1602, 1610, 1626, 1634, 1642, 1650, 1658, 1690, 1706, 1714, 1738, 1746, 1770, 1778, 1786, 1802, 1810, 1818, 1826, 1834, 1842, 1850, 1890, 1914, 1930, 1938, 1946, 1962, 1970, 1978, 1986, 1994, 2010, 2018, 2026, 2042, 2050, 2058, 2090, 2114, 2130, 2162, 2170, 2178, 2202, 2210, 2226, 2242, 2258, 2266, 2274, 2282, 2298, 2314, 2322, 2330, 2338, 2346, 2354, 2370, 2378, 2394, 2418, 2434, 2442, 2458, 2466, 2474, 2498, 2506, 2514, 2522, 2546, 2554, 2570, 2586, 2658, 4989, 4990, 4991, and 4992; or
b. a first spacer sequence selected from SEQ ID NOs: 3778, 4026, 3794, 4010, 3906 and 3746, and a second spacer sequence selected from SEQ ID NOs: 1778, 1746, 1770, 1586, 1914, and 2210; or
c. a first and second spacer sequence selected from SEQ ID NOs: 3778 and 1778; 3778 and 1746; 3778 and 1770; 3778 and 1586; 3778 and 1914; 3778 and 2210; 4026 and 1778; 4026 and 1746; 4026 and 1770; 4026 and 1586; 4026 and 1914; 4026 and 2210; 3794 and 1778; 3794 and 1746; 3794 and 1770; 3794 and 1586; 3794 and 1586; 3794 and 1914; 3794 and 2210; 4010 and 1778; 4010 and 1770; 4010 and 1746; 4010 and 1586; 4010 and 1914; 4010 and 2210; 3906 and 1778; 3906 and 1778; 3906 and 1746; 3906 and 1770; 3906 and 1586; 3906 and 1914; 3906 and 2210; 3746 and 1778; 3746 and 1746; 3746 and 1770; 3746 and 1586; 3746 and 1914; and 3746 and 2210; or
d. a first spacer sequence selected from SEQ ID NOs: 3256, 2896, 3136, and 3224, and a second spacer sequence selected from SEQ ID NOs: 4989, 560, 672, 976, 760, 984, and 616; or
e. a first and second spacer sequence selected from SEQ ID NOs: 3256 and 4989; 3256 and 984; 3256 and 616; 2896 and 4989; 2896 and 672; 2896 and 760; 3136 and 4989;
3136 and 560; 3224 and 4989; 3224 and 976; and 3224 and 760; or
f. a first and second spacer sequence comprising at least 17, 18, 19, or 20 contiguous nucleotides of any of the first and second spacer sequences of a) through e); or
g. a first and second spacer sequence that is at least 99%, 98%, 97%, 96%, 95%, 94%, 93%, 92%, 91%, or 90% identical to any of the first and second spacer sequences of a) through f).

3. A composition comprising:
i) a guide RNA comprising a spacer sequence, or a nucleic acid encoding the guide RNA, comprising:
a. a spacer sequence selected from SEQ ID NOs: 5262, 5782, 5830, 5926, 5950, 5998, 6022, 5310, and 5334; or
b. a spacer sequence selected from SEQ ID NOs: 5830, 6022, 5262, and 5310; or
c. a spacer sequence selected from SEQ ID NOs: 5262, 5334, and 5830; or
d. SEQ ID NO: 5262; or
e. a spacer sequence selected from SEQ ID NOs: 5264, 5336, 5832, 6024, and 5312; or
f. a spacer sequence comprising at least 17, 18, 19, or 20 contiguous nucleotides of any one of the spacer sequences of a) through e); or
g. a spacer sequence that is at least 99%, 98%, 97%, 96%, 95%, 94%, 93%, 92%, 91%, or 90% identical to any one of the spacer sequences of a) through f); or
ii) a pair of guide RNAs comprising a first and second spacer sequence, or one or more nucleic acids encoding the pair of guide RNAs, comprising:
a. a first and second spacer sequence selected from SEQ ID NOs: 5782 and 5262; 5830 and 5262; 5926 and 5262; 5950 and 5262; and 5998 and 5262; or
b. a first and second spacer sequence selected from SEQ ID NOs: 5830 and 5262; and 6022 and 5310; or
c. SEQ ID NOs: 5334 and 5830; or
d. a first and second spacer sequence comprising at least 17, 18, 19, or 20 contiguous nucleotides of any of the first and second spacer sequences of a) through c); or
e. a first and second spacer sequence that is at least 99%, 98%, 97%, 96%, 95%, 94%, 93%, 92%, 91%, or 90% identical to any of the first and second spacer sequences of a) through d).

4. A composition comprising:
i) a guide RNA comprising a spacer sequence, or a nucleic acid encoding the guide RNA, comprising:
a. a spacer sequence selected from SEQ ID NOs: 28130, 34442, 45906, 26562, 52666, 51322, 46599, 52898, 26546, 7447, 47047, 49986, 51762, 51754, 52290, 52298, 51474, 52306, 50682, 51706, 52098, 50714, 51498, 52498, 50978, 51746, 52106, 51506, 50674, 52082, 52506, 50538, 52066, 52386, 52090, 52266, 52474, 52258, 52434, 50706, 51490, 52458, 51466, 52354, 51914, 51362, 51058, 50170, 51954, 52250, 51930, 51682, 52594, 52610, 51162, 49162, 50898, 49226, 51658, 52554, 52634, 51394, 49034, 52546, 52522, 52618, 52530, 28322, 26530, 26578, 26602, 26634, 26626, 26698, 26746, 26754, 26786, 26882, 27722, 27730, 27738, 27770, 27754, 27762, 27802, 27850, 27842, 27922, 27946, 27986, 28114, 28122, 28146, 28186, 28194, 28338, 28346, 28322, 28378, 28370, 28458, 28506, 28634, 28642, 28650, 34442, and 45906; or
b. a spacer sequence selected from SEQ ID NOs: 51706, 51058, 51754, 52090, 52594, 52098, 52298, 52106, 51682, 52066, 52354, 52458, 52290, 52498, 51658, 51930, 51162, 52506, 51762, 51746, 52386, 52258, 52530, 52634, 27850, 28634, 26882, 28650, 28370, 28194, 26626, 26634, 26786, 26754, 27770, 26578, 28130, 27738, 28338, 28642, 26602, 27754, 27730, and 28122; or
c. a spacer sequence selected from SEQ ID NOs: 47047, 7447, 7463, 46967, 46768, 7680, and 47032; or
d. a spacer sequence selected from SEQ ID NOs: 47045, 7445, 7461, 46766, 7678, and 47030; or
e. a spacer sequence comprising at least 17, 18, 19, or 20 contiguous nucleotides of any one of the spacer sequences of a) through d); or
f. a spacer sequence that is at least 99%, 98%, 97%, 96%, 95%, 94%, 93%, 92%, 91%, or 90% identical to any one of the spacer sequences of a) through e); or
ii) a pair of guide RNAs comprising a first and second spacer sequence, or one or more nucleic acids encoding the pair of guide RNAs, comprising:
a. a first and second spacer sequence selected from SEQ ID NOs: 47047 and 7447; 7463 and 46967; 46768 and 7680; and 47032 and 7447; or
b. SEQ ID NOs: 47047 and 7447; or
c. SEQ ID NOs: 52898 and 26546; or
d. a first and second spacer sequence comprising at least 17, 18, 19, or 20 contiguous nucleotides of any of the first and second spacer sequences of a) through c); or
e. a first and second spacer sequence that is at least 99%, 98%, 97%, 96%, 95%, 94%, 93%, 92%, 91%, or 90% identical to any of the first and second spacer sequences of a) through d).

5. The composition of any one of the preceding claims, further comprising an RNA-targeted endonuclease, or a nucleic acid encoding the RNA-targeted endonuclease.

6. The composition of any one of the preceding claims, wherein the RNA-targeted endonuclease is a Cas nuclease.

7. The composition of claim 6, wherein the Cas nuclease is Cas9.

8. The composition of claim 7, wherein the Cas9 nuclease is from Streptococcus pyogenes.

9. The composition of claim 7, wherein the Cas9 nuclease is from Staphylococcus aureus.

10. The composition of claim 6, wherein the Cas nuclease is a Cpf1 nuclease.

11. The composition of any one of the preceding claims, further comprising a DNA-PK inhibitor.

12. The composition of any of the preceding claims, wherein the guide RNA is an sgRNA.

13. The composition of claim 12, wherein the sgRNA is modified.

14. The composition of claim 13, wherein the modification alters one or more 2′ positions and/or phosphodiester linkages.

15. The composition of any one of claims 13-14, wherein the modification alters one or more, or all, of the first three nucleotides of the sgRNA.

16. The composition of any one of claims 13-15, wherein the modification alters one or more, or all, of the last three nucleotides of the sgRNA.

17. The composition of any one of claims 13-16, wherein the modification includes one or more of a phosphorothioate modification, a 2′-OME modification, a 2′-O-MOE modification, a 2′-F modification, a 2′-O-methine-4′ bridge modification, a 3′-thiophosphonoacetate modification, or a 2′-deoxy modification.

18. The composition of any one of the preceding claims, wherein the composition further comprises a pharmaceutically acceptable excipient.

19. The composition of any one of the preceding claims, wherein the guide RNA is associated with a lipid nanoparticle (LNP) or a viral vector.

20. The composition of claim 19, wherein the viral vector is an adeno-associated virus vector, a lentiviral vector, an integrase-deficient lentiviral vector, an adenoviral vector, a vaccinia viral vector, an alphaviral vector, or a herpes simplex viral vector.

21. The composition of claim 19, wherein the viral vector is an adeno-associated virus (AAV) vector.

22. The composition of claim 21, wherein the AAV vector is an AAV1, AAV2, AAV3, AAV4, AAV5, AAV6, AAV7, AAV8, AAVrh10, AAVrh74, or AAV9 vector, wherein the number following AAV indicates the AAV serotype.

23. The composition of claim 22, wherein the AAV vector is an AAV serotype 9 vector.

24. The composition of claim 22, wherein the AAV vector is an AAVrh10 vector.

25. The composition of claim 22, wherein the AAV vector is an AAVrh74 vector.

26. The composition of any one of claims 19-25, wherein the viral vector comprises a tissue-specific promoter.

27. The composition of any one of claims 19-26, comprising a viral vector, wherein the viral vector comprises a muscle-specific promoter, optionally wherein the muscle-specific promoter is a muscle creatine kinase promoter, a desmin promoter, an MHCK7 promoter, an SPc5-12 promoter, or a CK8e promoter.

28. The composition of any one of claims 19-25, wherein the viral vector comprises a neuron-specific promoter, optionally wherein the neuron-specific promoter is an enolase promoter.

29. A method of treating a disease or disorder characterized by a trinucleotide repeat (TNR) in DNA, the method comprising delivering to a cell that comprises a TNR i) a guide RNA or a pair of guide RNAs comprising a spacer sequence or a pair of spacer sequences that directs an RNA-targeted endonuclease to or near the TNR, or a nucleic acid encoding the guide RNA or pair of guide RNAs;
ii) an RNA-targeted endonuclease or a nucleic acid encoding the RNA-targeted endonuclease; and iii) a DNA-PK inhibitor.

30. A method of excising a self-complementary region in DNA comprising delivering to a cell that comprises the self-complementary region i) a guide RNA or a pair of guide RNAs comprising a spacer sequence or a pair of spacer sequences that directs an RNA-targeted endonuclease to or near the self-complementary region, or a nucleic acid encoding the guide RNA or pair of guide RNAs; ii) an RNA-targeted endonuclease or a nucleic acid encoding the RNA-targeted endonuclease; and iii) a DNA-PK inhibitor, wherein the self-complementary region is excised.

31. A method of excising a trinucleotide repeat (TNR) in DNA comprising delivering to a cell that comprises the TNR i) a guide RNA or a pair of guide RNAs comprising a spacer sequence or a pair of spacer sequences that directs an RNA-targeted endonuclease to or near the TNR, or a nucleic acid encoding the guide RNA or pair of guide RNAs; ii) an RNA-targeted endonuclease or a nucleic acid encoding the RNA-targeted endonuclease; and iii) a DNA-PK inhibitor, wherein at least one TNR is excised.

32. The method of claim 30, wherein the self-complementary region comprises a palindromic sequence, a direct repeat, an inverted repeat, a GC-rich sequence, or an AT-rich sequence, optionally wherein the GC-richness or AT-richness is at least 70%, 75%, 80%, 85%, 90%, or 95% over a length of at least 10 nucleotides which are optionally interrupted by a loop-forming sequence.

33. The method of any one of claims 29-32, comprising a pair of guide RNAs comprising a pair of spacer sequences that deliver the RNA-targeted endonuclease to or near a TNR or self-complementary region, or one or more nucleic acids encoding the pair of guide RNAs, are delivered to the cell.

34. The method of any one of claims 29-33, wherein the target is (i) in the TNR or self-complementary region or (ii) within 10, 15, 20, 25, 30, 40, or 50 nucleotides of the TNR or self-complementary region.

35. The method of any one of claims 29-34 for the preparation of a medicament for treating a human subject having DM1, HD, FA, FXS, FXTAS, FXPOI, FXES, XSBMA, SCA1, SCA2, SCA3, SCA6, SCA7, SCA8, SCA12, SCA17, or DRPLA.

36. The method of any one of claim 29, or 31-35, wherein the TNR is a CTG in the 3′ untranslated region (UTR) of the DMPK gene.

37. The method of claim 36, comprising excising at least a portion of the 3′ UTR of the DMPK gene, wherein the excision results in treatment of myotonic dystrophy type 1 (DM1).

38. The method of any one of the claim 29, or 31-35, wherein the TNR is within the FMR1 gene.

39. The method of claim 38, wherein the excision results in treatment of Fragile X syndrome.

40. The method of any one of claim 29, or 31-35, wherein the TNR is within the FXN gene.

41. The method of claim 40, wherein the excision results in treatment of Friedrich's Ataxis (FA).

42. The method of any one of claim 29, or 31-35, wherein the TNR is within the huntingtin, frataxin (FXN), Fragile X Mental Retardation 1 (FMR1), Fragile X Mental Retardation 2 (FMR2), androgen receptor (AR), aristaless related homeobox (ARX), Ataxin 1 (ATXN1), Ataxin 2 (ATXN2), Ataxin 3 (ATXN3), Calcium voltage-gated channel subunit alphal A (CACNA1A), Ataxin 7 (ATXN7), ATXN8 opposite strand lncRNA (ATXN8OS), Serine/threonine-protein phosphatase 2A 55 kDa regulatory subunit B beta isoform (PPP2R2B), TATA binding protein (TBP), or Atrophin-1 (ATN1) gene, or the TNR is adjacent to the 5′ UTR of FMR2.

43. The method of claim 42, wherein the excision in huntingtin (HTT) results in treatment of Huntington's disease (HD); the excision in FXN results in treatment of Friedrich's ataxia (FA); the excision in FMR1 results in treatment of Fragile X syndrome (FXS), Fragile X associated primary ovarian insufficiency (FXPOI), or fragile X-associated tremor/ataxia syndrome (FXTAS); the excision in FMR2 or adjacent to the 5′ UTR of FMR2 results in treatment of fragile XE syndrome (FXES); the excision in AR results in treatment of X-linked spinal and bulbar muscular atrophy (XSBMA); the excision in ATXN1 results in treatment of spinocerebellar ataxia type 1 (SCA1), the excision in ATXN2 results in treatment of spinocerebellar ataxia type 2 (SCA2), the excision in ATXN3 results in treatment of spinocerebellar ataxia type 3 (SCA3), the excision in CACNA1A results in treatment of spinocerebellar ataxia type 6 (SCA6), the excision in ATXN7 results in treatment of spinocerebellar ataxia type 7 (SCA7), the excision in ATXN8OS results in treatment of spinocerebellar ataxia type 8 (SCA8), the excision in PPP2R2B results in treatment of spinocerebellar ataxia type 12 (SCA12), the excision in TBP results in treatment of spinocerebellar ataxia type 17 (SCA17), or the excision in ATN1 results in treatment of Dentatorubropallidoluysian atrophy (DRPLA).

44. The method of any one of claim 29, or 31-43, wherein at least 1, 2, 3, 4, 5, 6, 7, 8, 9, 10, 15, 20, 25, 30, 40, 50, 60, 70, 80, 90, 100, 150, 200, 300, 400, 500, 600, 700, 800, 900, 1000, 1500, 2000, 3000, 4000, 5000, 6000, 7000, 8000, 9000, or 10,000 TNRs are excised.

45. The method of any one of claim 29, or 31-43, wherein 1-5, 5-10, 10-20, 20-30, 40-60, 60-80, 80-100, 100-150, 150-200, 200-300, 300-500, 500-700, 700-1000, 1000-1500, 1500-2000, 2000-3000, 3000-4000, 4000-5000, 5000-6000, 6000-7000, 7000-8000, 8000-9000, or 9000-10,000 TNRs are excised.

46. The method of any one of claim 29, or 31-35, wherein the TNRs are within the DMPK gene, and wherein excision of the TNRs ameliorates one or more phenotypes associated with an expanded-repeat DMPK gene, said amelioration optionally comprising one or more of increasing myotonic dystrophy protein kinase activity; increasing phosphorylation of phospholemman, dihydropyridine receptor, myogenin, L-type calcium channel beta subunit, and/or myosin phosphatase targeting subunit; increasing inhibition of myosin phosphatase; and/or ameliorating muscle loss, muscle weakness, hypersomnia, one or more executive function deficiencies, insulin resistance, cataract formation, balding, or male infertility or low fertility.

47. The method of any one of claim 29, or 31-35, wherein the TNRs are within the HTT gene, and wherein excision of the TNRs ameliorates one or more phenotypes associated with an expanded-repeat HTT gene, said amelioration optionally comprising ameliorating one or more of striatal neuron loss, involuntary movements, irritability, depression, small involuntary movements, poor coordination, difficulty learning new information or making decisions, difficulty walking, speaking, and/or swallowing, and/or a decline in thinking and/or reasoning abilities.

48. The method of any one of claim 29, or 31-35, wherein the TNRs are within the FMR1 gene, and wherein excision of the TNRs ameliorates one or more phenotypes associated with an expanded-repeat FMR1 gene, said amelioration optionally comprising ameliorating one or more of aberrant FMR1 transcript or Fragile X Mental Retardation Protein levels, translational dysregulation of mRNAs normally associated with FMRP, lowered levels of phospho-cofilin (CFL1), increased levels of phospho-cofilin phosphatase PPP2CA, diminished mRNA transport to neuronal synapses, increased expression of HSP27, HSP70, and/or CRYAB, abnormal cellular distribution of lamin A/C isoforms, early-onset menopause such as menopause before age 40 years, defects in ovarian development or function, elevated level of serum gonadotropins (e.g., FSH), progressive intention tremor, parkinsonism, cognitive decline, generalized brain atrophy, impotence, and/or developmental delay.

49. The method of any one of claim 29, or 31-35, wherein the TNRs are within the FMR2 gene or adjacent to the 5′ UTR of FMR2, and wherein excision of the TNRs ameliorates one or more phenotypes associated with expanded-repeats in or adjacent to the FMR2 gene, said amelioration optionally comprising ameliorating one or more of aberrant FMR2 expression, developmental delays, poor eye contact, repetitive use of language, and hand-flapping.

50. The method of any one of claim 29, or 31-35, wherein the TNRs are within the AR gene, and wherein excision of the TNRs ameliorates one or more phenotypes associated with an expanded-repeat AR gene, said amelioration optionally comprising ameliorating one or more of aberrant AR expression; production of a C-terminally truncated fragment of the androgen receptor protein; proteolysis of androgen receptor protein by caspase-3 and/or through the ubiquitin-proteasome pathway; formation of nuclear inclusions comprising CREB-binding protein; aberrant phosphorylation of p44/42, p38, and/or SAPK/JNK; muscle weakness; muscle wasting; difficulty walking, swallowing, and/or speaking; gynecomastia; and/or male infertility.

51. The method of any one of claim 29, or 31-35, wherein the TNRs are within the ATXN1 gene, and wherein excision of the TNRs ameliorates one or more phenotypes associated with an expanded-repeat ATXN1 gene, said amelioration optionally comprising ameliorating one or more of formation of aggregates comprising ATXN1; Purkinje cell death; ataxia; muscle stiffness; rapid, involuntary eye movements; limb numbness, tingling, or pain; and/or muscle twitches.

52. The method of any one of claim 29, or 31-35, wherein the TNRs are within the ATXN2 gene, and wherein excision of the TNRs ameliorates one or more phenotypes associated with an expanded-repeat ATXN2 gene, said amelioration optionally comprising ameliorating one or more of aberrant ATXN2 production; Purkinje cell death; ataxia; difficulty speaking or swallowing; loss of sensation and weakness in the limbs; dementia; muscle wasting; uncontrolled muscle tensing; and/or involuntary jerking movements.

53. The method of any one of claim 29, or 31-35, wherein the TNRs are within the ATXN3 gene, and wherein excision of the TNRs ameliorates one or more phenotypes associated with an expanded-repeat ATXN3 gene, said amelioration optionally comprising ameliorating one or more of aberrant ATXN3 levels; aberrant beclin-1 levels; inhibition of autophagy; impaired regulation of superoxide dismutase 2; ataxia; difficulty swallowing; loss of sensation and weakness in the limbs; dementia; muscle stiffness; uncontrolled muscle tensing; tremors; restless leg symptoms; and/or muscle cramps.

54. The method of any one of claim 29, or 31-35, wherein the TNRs are within the CACNA1A gene, and wherein excision of the TNRs ameliorates one or more phenotypes associated with an expanded-repeat CACNA1A gene, said amelioration optionally comprising ameliorating one or more of aberrant CaV2.1 voltage-gated calcium channels in CACNA1A-expressing cells; ataxia; difficulty speaking; involuntary eye movements; double vision; loss of arm coordination; tremors; and/or uncontrolled muscle tensing.

55. The method of any one of claim 29, or 31-35, wherein the TNRs are within the ATXN7 gene, and wherein excision of the TNRs ameliorates one or more phenotypes associated with an expanded-repeat ATXN7 gene, said amelioration optionally comprising ameliorating one or more of aberrant histone acetylation; aberrant histone deubiquitination; impairment of transactivation by CRX; formation of nuclear inclusions comprising ATXN7; ataxia; incoordination of gait; poor coordination of hands, speech and/or eye movements; retinal degeneration; and/or pigmentary macular dystrophy.

56. The method of any one of claim 29, or 31-35, wherein the TNRs are within the ATXN8OS gene, and wherein excision of the TNRs ameliorates one or more phenotypes associated with an expanded-repeat ATXN8OS gene, said amelioration optionally comprising ameliorating one or more of formation of ribonuclear inclusions comprising ATXN8OS mRNA; aberrant KLHL1 protein expression; ataxia; difficulty speaking and/or walking; and/or involuntary eye movements.

57. The method of any one of claim 29, or 31-35, wherein the TNRs are within the PPP2R2B gene, and wherein excision of the TNRs ameliorates one or more phenotypes associated with an expanded-repeat PPP2R2B gene, said amelioration optionally comprising ameliorating one or more of aberrant PPP2R2B expression; aberrant phosphatase 2 activity; ataxia; cerebellar degeneration; difficulty walking; and/or poor coordination of hands, speech and/or eye movements.

58. The method of any one of claim 29, or 31-35, wherein the TNRs are within the TBP gene, and wherein excision of the TNRs ameliorates one or more phenotypes associated with an expanded-repeat TBP gene, said amelioration optionally comprising ameliorating one or more of aberrant transcription initiation; aberrant TBP protein accumulation (e.g., in cerebellar neurons); aberrant cerebellar neuron cell death; ataxia; difficulty walking; muscle weakness; and/or loss of cognitive abilities.

59. The method of any one of claim 29, or 31-35, wherein the TNRs are within the ATN1 gene, and wherein excision of the TNRs ameliorates one or more phenotypes associated with an expanded-repeat ATN1 gene, said amelioration optionally comprising ameliorating one or more of aberrant transcriptional regulation; aberrant ATN1 protein accumulation (e.g., in neurons); aberrant neuron cell death; involuntary movements; and/or loss of cognitive abilities.

60. A pharmaceutical composition comprising the composition of any one of claims 1-28.

61. A method of treating a disease or disorder characterized by a trinucleotide repeat (TNR) in the 3′ UTR of the DMPK gene, the method comprising administering the composition of any one of claim 1-2, or 5-28, or the pharmaceutical formulation of claim 60.

62. A method of excising a trinucleotide repeat (TNR) in the 3′ UTR of the DMPK gene, the method comprising administering the composition of any one of claim 1-2, or 5-28, or the pharmaceutical formulation of claim 60.

63. The method of claim 61 or 62, wherein only one gRNA is administered and a CTG repeat in the 3′ UTR of the DMPK gene is excised.

64. The method of claim 63, wherein the gRNA comprises a spacer sequence comprising:
a. a spacer sequence selected from SEQ ID NOs: 3746, 3778, 3394, 3386, 3938, 3818, 3722, 3858, 3370, 1706, 2210, 2114, 1538, and 2594; or
b. a spacer sequence selected from SEQ ID NOs: 3330, 3746, 3778, 3394, 4026, 3386, 3938, 3818, 3722, 3802, 3858, 3514, 3770, 3370, 2202, 1706, 2210, 1778, 2114, 1738, 1746, 2322, 1538, 2514, 2458, 2194, and 2594; or
c. a spacer sequence selected from SEQ ID NOs: 3330, 3314, 2658, 2690, 2554, and 2498; or
d. a spacer sequence selected from SEQ ID NOs: 3314, 2690, 2554, and 2498; or
e. a spacer sequence selected from SEQ ID NOs: 3914, 3514, 1778, 2458, 3858, 3418, 1706, and 2258; or
f. SEQ ID NO: 3914; or
g. SEQ ID NO: 3418; or
h. SEQ ID NO: 3938; or
i. a spacer sequence selected from SEQ ID NOs: 3916, 3420, and 3940.

65. A method of treating a disease or disorder characterized by a trinucleotide repeat (TNR) in the 5′ UTR of the FMR1 gene, the method comprising administering the composition of any one of claim 3, or 5-28, or the pharmaceutical formulation of claim 60.

66. A method of excising a trinucleotide repeat (TNR) in the 5′ UTR of the FMR1 gene, the method comprising administering the composition of any one of claim 3, or 5-28, or the pharmaceutical formulation of claim 60.

67. The method of claim 65 or claim 66, wherein only one gRNA is administered and a TNR in the 5′ UTR of the FMR1 gene is excised.

68. The method of claim 67, wherein the gRNA comprises a spacer sequence comprising:
a. a spacer sequence selected from SEQ ID NOs: 5830, 6022, 5262, and 5310; or
b. a spacer sequence selected from SEQ ID NOs: 5262, 5334, and 5830; or
c. SEQ ID NO: 5262
d. a spacer sequence selected from SEQ ID NOs: 5264, 5336, 5832, 6024, and 5312.

69. A method of treating a disease or disorder characterized by a trinucleotide repeat (TNR) in an intron of the FXN gene, the method comprising administering the composition of any one of claims 4-28, or the pharmaceutical formulation of claim 60.

70. A method of excising a trinucleotide repeat (TNR) in the 5′ UTR of the FXN gene, the method comprising administering the composition of any one of claims 4-28, or the pharmaceutical formulation of claim 60.

71. The method of claim 69 or claim 70, wherein only one gRNA is administered and a TNR in the 5′ UTR of the FXN gene is excised.

72. The method of claim 71, wherein the gRNA comprises a spacer sequence comprising
a. a spacer sequence selected from SEQ ID NOs: 47047, 7447, 7463, 46967, 46768, 7680, and 47032; or
b. a spacer sequence selected from SEQ ID NOs: 47045, 7445, 7461, 46766, 7678, and 47030.

73. The method of any one of claim 29-59 or 61-72, further comprising administering a DNA-PK inhibitor.

74. The method of claim 73, wherein the DNA-PK inhibitor is Compound 6.

75. The method of claim 73, wherein the DNA-PK inhibitor is Compound 3.

76. A method of excising a trinucleotide repeat (TNR) in the 3′ UTR of the DMPK gene, the method comprising administering a pair of guide RNAs comprising a pair of spacer sequences, wherein the first spacer sequence directs a RNA-guided DNA nuclease to any nucleotide within a first stretch of sequence, wherein the first stretch:
a. starts 1 nucleotide from the DMPK-U29 cut site with spCas9 and continues through the repeat; or
b. starts 1 nucleotide from the DMPK-U30 cut site with spCas9 and continues through 1 nucleotide before the DMPK-U56 cut site; or
c. starts 1 nucleotide from the DMPK-U30 cut site with spCas9 and continues through 1 nucleotide before the DMPK-U52 cut site; or
d. is SEQ ID NO: 53413; or
e. is SEQ ID NO: 53414; or
f. is SEQ ID NO: 53415.

77. A method of excising a trinucleotide repeat (TNR) in the 3′ UTR of the DMPK gene, the method comprising administering a pair of guide RNAs comprising a pair of spacer sequences, wherein a second spacer sequence directs a RNA-guided DNA nuclease to any nucleotide within a second stretch of sequence, wherein the second stretch:
a. starts 1 nucleotide in from the DMPK-D15 cut site with spCas9 and continues until 1 nucleotide before the DMPK-D51 cut site; or
b. starts 1 nucleotide from the DMPK-D35 cut site with spCas9 and continues until 1 nucleotide before the DMPK-D51 cut site; or
c. is SEQ ID NO: 53416; or
d. is SEQ ID NO: 53417.

78. A method of excising a trinucleotide repeat (TNR) in the 3′ UTR of the DMPK gene, the method comprising administering a pair of guide RNAs comprising a pair of spacer sequences, wherein:
i. the first spacer sequence directs a RNA-guided DNA nuclease to any nucleotide within a first stretch of sequence, wherein the first stretch:
a. starts 1 nucleotide from the DMPK-U29 cut site with spCas9 and continues through the repeat; or
b. starts 1 nucleotide from the DMPK-U30 cut site with spCas9 and continues through 1 nucleotide before the DMPK-U56 cut site; or
c. starts 1 nucleotide from the DMPK-U30 cut site with spCas9 and continues through 1 nucleotide before the DMPK-U52 cut site; or
d. is SEQ ID NO: 53413; or
e. is SEQ ID NO: 53414; or
f. is SEQ ID NO: 53415; and
ii. a second spacer sequence directs a RNA-guided DNA nuclease to any nucleotide within a second stretch of sequence, wherein the second stretch:
a. starts 1 nucleotide in from the DMPK-D15 cut site with spCas9 and continues until 1 nucleotide before the DMPK-D51 cut site; or
b. starts 1 nucleotide from the DMPK-D35 cut site with spCas9 and continues until 1 nucleotide before the DMPK-D51 cut site; or
c. is SEQ ID NO: 53416; or
d. is SEQ ID NO: 53417.

79. The method of claims 76-78, further comprising administering a DNA-PK inhibitor.

80. The method of claim 79, wherein the DNA-PK inhibitor is Compound 6.

81. The method of claim 79, wherein the DNA-PK inhibitor is Compound 3.

82. The method of any one of claims 76-81, further comprising administering an RNA-targeted endonuclease, or a nucleic acid encoding the RNA-targeted endonuclease.

83. The method of claim 82, wherein the RNA-targeted endonuclease is a Cas nuclease.

84. The method of claim 83, wherein the Cas nuclease is Cas9.

85. The method of claim 84, wherein the Cas9 nuclease is from Streptococcus pyogenes.

86. The method of claim 84, wherein the Cas9 nuclease is from Staphylococcus aureus.

87. The method of claim 83, wherein the Cas nuclease is a Cpf1 nuclease.

88. The method of any one of claims 76-87, wherein:
a. the U29 cut site is: chr19: between nucleotides 45,770,383 and 45,770,384, which corresponds to * in the following sequence: ttcacaaccgctccgag*cgtggg;
b. the U30 cut site is: chr19: between 45,770,385 and 45,770,386, which corresponds to * in the following sequence: gctgggcggagacccac*gctcgg;
c. the D15 cut site is: chr19: between 45,770,154 and 45,770,155, which corresponds to * in the following sequence: ggctgaggccctgacgt*ggatgg; and
d. the D35 cut site is: chr19: between 45,770,078 and 45,770,079, which corresponds to * in the following sequence: cacgcacccccacctat*cgttgg.

89. A method of screening for a guide RNA that is capable of excising a TNR or self-complementary region, the method comprising:
a. contacting:
i. a cell with a guide RNA, an RNA-targeted endonuclease, and a DNA-PK inhibitor;
ii. the same type of cell as used in i) with the guide RNA, the RNA-targeted endonuclease but without a DNA-PK inhibitor;
b. comparing the excision of the TNR or self-complementary region from the cell contacted in steps a) i) as compared to the cell contacted in step a) ii); and
c. selecting a guide RNA wherein the excision is improved in the presence of the DNA-PK inhibitor as compared to without the DNA-PK inhibitor.

90. A method of screening for a pair of guide RNAs that is capable of excising a TNR or self-complementary region, the method comprising:
a. contacting:
i. a cell with a pair of guide RNAs, an RNA-targeted endonuclease, and a DNA-PK inhibitor;
ii. the same type of cell as used in i) with the guide RNA, the RNA-targeted endonuclease but without a DNA-PK inhibitor;
b. comparing the excision of the TNR or self-complementary region from the cell contacted in steps a) i) as compared to the cell contacted in step a) ii); and
c. selecting a pair of guide RNAs wherein the excision is improved in the presence of the DNA-PK inhibitor as compared to without the DNA-PK inhibitor.

91. The method of claim 89 or claim 90, wherein the DNA-PK inhibitor is Compound 6.

92. The method of claim 89 or claim 90, wherein the DNA-PK inhibitor is Compound 3.

93. The method of any one of claims 89-92, wherein the guide RNA or pair of guide RNAs directs the RNA-targeted endonuclease to the 3′ UTR of the DMPK gene.

94. The method of any one of claims 89-92, wherein the guide RNA or pair of guide RNAs directs the RNA-targeted endonuclease to the 5′ UTR of the FMR1 gene.

95. The method of any one of claims 89-92, wherein the guide RNA or pair of guide RNAs directs the RNA-targeted endonuclease to the 5′ UTR of the FXN gene.
